United States Patent Application Publication US 2011/0177960 A1 - sequence listing, part 2

SEQ ID NO: 3465 - DNA, 1142 bp, Streptococcus pneumoniae
  misc_feature (1)..(1142): tiling:Spneumo1:WAN024G5A; Cluster includes WAN02440O spr1 034|glxK|15903078|NP_358628.1|1016588..1017715|+|1128 bp|G lycerate kinase|S.pneumoniae|R6|NC_003098.1|ORF|110
ctgtttagaatgagggaaaatatgaagattgtaattgcaccggattcgtttaaggaaagcttgacagctcaacaggtagctgaagcaataaaaagaggcttccaacaatcgatagcagatgtagaatgtctcctctgccctgttggtgatgggggagaaggtactgtagatgctatccgacattctcttgacctaaaagaaaaatggatccaagtgacagacccttytggacaaaaagaagccatgcgctattttcaaaaaggggaactggcactatttgaagtagctgacttggttggtcttggaaaaattccgctagagaaacgaaatccacttcaaatccaaacttgtggtattggagagttgattctycatctcatytctaaagggattaaagatatttatatcggtgttggtggcacggccagtaatgatggaggactggggattgctgctggtttaggttatcaattttatgatagggatggaaatgtcttgcctgcttccggtcaatccttattaaacttagcttctgtttcaacagaaaatygctataaaattcctgaaggtgttcaaattcatattttagcagatgtcgtgagtcccttatgtggtyatcaaggtgcgacttacacttttggcaatcaaaaaggtctacatccgactatgtttgcagtcgtagatcaggcgatccaagatttttatgaaaaattctcacctgcaacattagaaattaaaggagcaggagcaggtggaggccttgctggtggtttgtgtgcctttgctcaggcaagtatcgtgtctggaattgatacctgcttggacttaatcaactttgataagaaagtttcagatgctgacttggttgttgttggagaaggaagacttgayagtcaaagctttgctgggaaagcgcctataggtgttgcaaaaagaacccctgttggagttcctgttattgctatttgcggtagtcttgctgaagatttacctcccctaccatttgaaaatatccaagctgtcttttctattttggagaaaagtgaacctttagaagatagtttgaaaaatgccagtytctatctggagcgcacggctgccaatattgggcacttattaaatatgtgcaagatttarctaat

SEQ ID NO: 3466 - DNA, 822 bp, Streptococcus pneumoniae
  misc_feature (1)..(822): tiling:Spneumo1:WAN024G58; Cluster includes WAN0244WK |||| ||798 bp|Incyte orf contig SPN2C0216 1360-563|S.pneumoniae |23F|WAN0244WK|ORF|001
ctgtttagaatgagggaaaatatgaagattgtaattgcaccggattcgtttaaggaaagcttgacagctcaacaggtagctgaagcaataaaaagaggcttccaacaatcgatagcagatgtagaatgtctcctctgccctgttggtgatgggggagaaggtactgtagatgctatccgacattctcttgacctaaaagaaaaatggatccaagtgacagacccwtttggacaaaaagaagccatgcgctattttcaaaaaggggaactggcactatttgaagtagctgacttggttggtcttggaaaaattccgctagagaaacgaaatccacttcaaatccaaacttgtggtattggagagttgattctccatctcatttctaaagggattaaagatatttatatcggtgttggtggcacggccagtaatgatggaggactggggattgctgctggtttgtgtgcctttgctcaggcaagtatcgtgtctggaattgatacctgcttggacttaatcaactttgataagaaagtttcagatgctgacttggttgttgttggagaaggaagacttgatagtcaaagctttgctgggaaagcgcctataggtgttgcaaaaagaacccctgttggagttcctgttattgctatttgcggtagtcttgctgaagatttacctcccctaccatttgaaaatatccaagctgtcttttctattttggagaaaagtgaacctttagaagatagtttgaaaaatgccagtctctatctggagcgcacggctgccaatattgggcacttattaaatatgtgcaagatt

SEQ ID NO: 3467 - DNA, 133 bp, Streptococcus pneumoniae
  misc_feature (1)..(133): tiling:Spneumo1:WAN0249RD; Cluster includes WAN024EKZ R6.I G_695.2.2||||677729..677861|+|133 bp|Between spr0671 (metK ) (+ strand) and spr0672 (pyrDA) (+ strand)|S.pneumoniae|R 6|NC_003098.1|IG|110
ctgtttccatagcatgacttctgtactagactttcttttccgaataaatagatagaaccacagaatctagtaaacctagaattaaaattatggtataatattagcaataaaagaaatctggaggattagaatc

SEQ ID NO: 3468 - DNA, 141 bp, Streptococcus pneumoniae
  misc_feature (1)..(141): tiling:Spneumo1:WAN024CHG; Cluster includes WAN023SNE NC_0 03098.1_63||||46296..46436|+|141 bp|Glimmer 2.02 orf predi ction|S.pneumoniae|R6|NC_003098.1|ORF|110
ctgtttgcaacggaaaaccttcgtctctcaactaaaaggactcaggctgaaaaggtcccccagaccttttcactctgtagagaactaggtgaactaacagatgtttacgaaattgtctgggaaaagttgcagggtttaaaa

SEQ ID NO: 3469 - DNA, 1125 bp, Streptococcus pneumoniae
  misc_feature (1)..(1125): tiling:Spneumo1:WAN024G2N; Cluster includes WAN0243Z0 spr1 095|metY-truncation|15903138|NP_358688.1|1092272..1093387| -|1116 bp|O-acetylhomoserine sulfhydrylase, truncation|S.p neumoniae|R6|NC_003098.1|ORF|211
ctgtttgccttgaggaaaccagggaacatttatactcgtatsaccaatcctacaacagctgcccttgaaggtggtgttgaagcgctagcaacagcatcaggtatgactgcagtgacttatacgattttggcgmttgcccatgctggtgascatgtagtggctgcttcgactatttacggtggaaccttcaatcttttgaaaraaccccttcctcgttatggtatcacaacaacctttktcgatrttgataatttggaggaagtagaagcagctatcaaagacaataccaagcttgtcttgattgamaccttgggtaaccccttgattaatattccagacctggawaaactggcagagattkctcataaacatcaaatcccacttgtgtcagacaatacttttgcaayaccttatttgatkaacgtcttctctcatggcgttgacattgccattcactctgygactaagtttatcggtgggcatggtacaactattggaggaataattgtcgatagtggtcgttttgactggayggcttcagggaaattccctcaatttgttgacgagrgtycaagctgccacaatttgagmtatactcrtgatgtgggtgcagyagcctttattatagctgttcgagttcaattgcttcgtgatacaggtgcagccttgtcaccattcaatgctttcctcttgctacaaagacttgaaaccyyttcacttcgtgtggaacgccatgtacaaaatgctgagacaattgttgattttcttgtcaaccatcctaaggtagaaaaggtaaattatccaaaacttgcagatagtccttatyatgccttggctgagaaatacttgccmaaaggtgtcggttcaatctttaccttccacgtcaaaggygrcgaggargaagcacgcaaggtcattgataatttagaaatcttttctgaccttgcaaacgcrgcagatgctaaatcgcttgttgtccatccagcaacaaycactcacggtcaattgtcagaaaaagacctagaagcagcaggtgtcacaccaaayyaaatccacttgtctatcggtcttgaaaatgtagaagatttgattgaagacttacgcttggccttggaaaamatttaa

SEQ ID NO: 3470 - DNA, 75 bp, Streptococcus pneumoniae
  misc_feature (1)..(75): tiling:Spneumo1:WAN024CTG; Cluster includes WAN023RZH cont ig_1617_3||||1645..1719|-|75 bp|Glimmer 2.02 orf predictio n|S.pneumoniae|670|WAN01UDBF|ORF|000
ctgtttgctacaagcacgactgcccacgaccgctaccttcgggaatttcaggaggtcaagatttcccttgtaaaa

SEQ ID NO: 3471 - DNA, 120 bp, Streptococcus pneumoniae
  misc_feature (1)..(120): tiling:Spneumo1:WAN024GAM; Cluster includes WAN0242M7 SP08 74||15900757|NP_345361.1|822272..822379|-|108 bp|hypotheti cal protein|S.pneumoniae|TIGR4|NC_003028.1|ORF|111
ctgtttgtgactccctttttagcaaaagaatgcaaaggaataccaaakataaaaataaaaaacgttgatttaacaacgttttaccaaggaatgcaaaagaatgcaaaggaactaactaat

SEQ ID NO: 3472 - DNA, 177 bp, Streptococcus pneumoniae
  misc_feature (1)..(177): tiling:Spneumo1:WAN024DOE; Cluster includes WAN023SJB NC_0 03098.1_1680||||1310892..1311068|+|177 bp|Glimmer 2.02 orf prediction|S.pneumoniae|R6|NC_003098.1|ORF|101
ctgttttcaagcctgatgaattttatgagcatatttcttgactttttccaaattttgtttgtgaaaattctaactttatggtattataataacatgaaaatgaaatgtaagggcttcaatttagatgattatttgatattacaacttattttctataagagaaaggagttggtagct

SEQ ID NO: 3473 - DNA, 626 bp, Streptococcus pneumoniae
  misc_feature (1)..(626): tiling:Spneumo1:WAN024CY5; Cluster includes WAN0243AB spr1 986||15904027|NP_359577.1|1978504..1979091|+|588 bp|Hypoth etical protein|S.pneumoniae|R6|NC_003098.1|ORF|111
ctgttttctgtatgtctagmatttccccgtcgcttgtttgtttttgctgatgatagcttatcggcaaactctaaagttgtatctggtgaggctcagtttgagaatgrctcatcagtgcggttcggagatacgcaagtaaatattttaagcgatgaagttcttgaggttrtcaatccagatggaagtgtagacactattgaacgacgtgctgacggcgtctatatcaatggggcattttatatggcttatcaaaagaatgaaatcgacctaaatatatcttttagatcatacgatcctaatgtttggaattacgtcaacacaatacatgggaataaacaagctaacacattcgctaacttcatgactggtgctggaatcagttatatgattggtaggataggtgctttattggggggkccatggggtgcaataattggtggagcatattttggtatacaagcttatcagtcttacttggattcacaaagcccatatccatactacataacaagtacttatatccatgttgctcaaagaaaatggaagtttatcactgaatactatagaaactcaaactatactgggtatgtaaaaaccgtaacaacctaygtgaatttctaactaat

SEQ ID NO: 3474 - DNA, 152 bp, Streptococcus pneumoniae
  misc_feature (1)..(152): tiling:Spneumo1:WAN024AQI; Cluster includes WAN024EPU-rc R 6.IG_330||||310515..310666|-|152 bp|Between spr0309 (- str and) and spr0310 (dexB) (+ strand)|S.pneumoniae|R6|NC_0030 98.1|IG-rc|110
ctkyttacctcattattttcataatctatagtctatgatagcactttttaaaattttgtgcaagcgtttgcytaatctttttrattycttttttarctccrtagtttcctaacttccaattttttattataatagagkycagaggtaaaaaa

SEQ ID NO: 3475 - DNA, 118 bp, Streptococcus pneumoniae
  misc_feature (1)..(118): tiling:Spneumo1:WAN024F7A; Cluster includes WAN0244Z6 |||| ||114 bp|Incyte orf contig SPN2C0364 3676-3789|S.pneumonia e|23F|WAN0244Z6|ORF|000
ctmwmttcaaaccacgtcagcttccatctrcaacctcaaaacastgttttgagcarcctgcggctagcttcctagtttgtgcwctttgattttcattgagtataaaaagaatccgctt

SEQ ID NO: 3476 - DNA, 62 bp, Streptococcus pneumoniae
  misc_feature (1)..(62): tiling:Spneumo1:WAN0249VB; Cluster includes WAN024E9S R6.I G_1584.2.2.2||||1519354..1519415|+|62 bp|Between spr1537 ( - strand) and spr1538 (axe1) (- strand)|S.pneumoniae|R6|NC _003098.1|IG|110
cttaatcccctgatactatgcgtgtttgtaatttttaagattttgtgcttagagtcgactcc

SEQ ID NO: 3477 - DNA, 349 bp, Streptococcus pneumoniae
  misc_feature (1)..(349): tiling:Spneumo1:WAN0249KJ; Cluster includes WAN024E6U R6.I G_1882||||1735558..1735906|+|349 bp|Between spr1767 (cylM) (+ strand) and spr1768 (+ strand)|S.pneumoniae|R6|NC_0030 98.1|IG|110
cttaatttatagttttgtttctaaaatagaggtgtccactcattaagcaatataaaaataccaagattgactagtttaatatgtaattctataaaatatttttaatagtgtagcttttcgttgagataataatataataaagaaaagttctattctaattgctaaacggcttgaggtatatgctactgttatagaaatgattttaaactaaaatcaaaattactccaaaaatagtattgattttggtttaatacaaaacatatgtaataatgtgagtcaacaaaagtctgtttttgtaccatactatcttgaaaaatctactaaattcaaattgagaggatgaattaaa

SEQ ID NO: 3478 - DNA, 196 bp, Streptococcus pneumoniae
  misc_feature (1)..(196): tiling:Spneumo1:WAN024AAF; Cluster includes WAN024EHF-rc R 6.IG_993.2||||937942..938135|-|194 bp|Between spr0954 (+ s trand) and spr0955 (+ strand)|S.pneumoniae|R6|NC_003098.1| IG-rc|110
cttaccattctttcaacattatacttgtctgacaatgtraggctrccwyacawtgtcagtacrmttyyymaasamctsaktytctycttgtwmggtctttgcgagctcagatattgtgtccacaatatcccaaaaatcatatcgccagcctatcaaaacctaccagttttgacagctaacgataagataacttagt

SEQ ID NO: 3479 - DNA, 104 bp, Streptococcus pneumoniae
  misc_feature (1)..(104): tiling:Spneumo1:WAN024ANV; Cluster includes WAN024EOC-rc R 6.IG_453.2||||430088..430191|-|104 bp|Between spr0429 (+ s trand) and spr0430 (+ strand)|S.pneumoniae|R6|NC_003098.1| IG-rc|110
cttactctcttcattcgcttcttagacttctattttatcataaatcaagcccttcttgcagtctctyctcttaaaatcttagcgccaaaaagattcctatccta

SEQ ID NO: 3480 - DNA, 95 bp, Streptococcus pneumoniae
  misc_feature (1)..(95): tiling:Spneumo1:WAN024AIU; Cluster includes WAN024ELS R6.I G_639||||626365..626459|+|95 bp|Between spr0615 (+ strand) and spr0616 (+ strand)|S.pneumoniae|R6|NC_003098.1|IG|110
cttacttgtcagagtaagccttaaagatggttgattgtgggtgtagcatgaaaaaagaatgctacaccctatttttattataaggaggagtaagg

SEQ ID NO: 3481 - DNA, 110 bp, Streptococcus pneumoniae
  misc_feature (1)..(110): tiling:Spneumo1:WAN0249YG; Cluster includes WAN024EBQ-rc R 6.IG_1429||||1369085..1369184|-|100 bp|Between spr1385 (- strand) and spr1386 (- strand)|S.pneumoniae|R6|NC_003098.1 |IG-rc|110
cttagcgtgatttcttgtttctgagyacattgtttgactttccttagtattcggtataaactatatgtaaccggtaacacatatcggaataaactaaaggagacaatcat

SEQ ID NO: 3482 - DNA, 423 bp, Streptococcus pneumoniae
  misc_feature (1)..(423): tiling:Spneumo1:WAN0249UF; Cluster includes WAN02471Z R6.I G_177.1||||164957..165154|+|198 bp|Between spr0156 (+ stra nd) and spr0157 (- strand)|S.pneumoniae|R6|NC_003098.1|IG| 320
cttatagtgartatagcgacaaatgagaagccaactacggtagcactctaaacatcacgtctatcaaacaagctaatgacggagtttatgcaacctatgaagggcaattgacacctttccaatattgataaattgataaccagcctgtcttcatctagtcatgctggtttttaagttcattttaaatccttacctattctccctaactgtgctatacttaatttatactcaatgaaaatcaaagagcaaactagrargctagycgcasgytgytcaaarcacwgytttgaggttgcagataragytgacgyggtttgaagagattytckaakagtatawarywcttvtwwgagdtkskwsmrgttkttcaactgttttttgagtataaacagtctttaagaacgtaaaaaagcataagttcag

SEQ ID NO: 3483 - DNA, 232 bp, Streptococcus pneumoniae
  misc_feature (1)..(232): tiling:Spneumo1:WAN0249GH; Cluster includes WAN024E4M R6.I G_2142||||1917704..1917935|+|232 bp|Between spr1935 (ilvD) (- strand) and spr1936 (tktC) (- strand)|S.pneumoniae|R6| NC_003098.1|IG|110
cttatccctcccatttcagtttttactattatagcacaatttwmrsryrawgaacagaataaaattcttgaattttcagaaaattctatacrcatgtgaaatatttaaaattaaaaacaacaaagcggattagtgcactttctgatgaccagaatatgctttttaatccgctttctttaaataacgtactgtaatttttacagaaattctttcaaataagtgtatttaacat

SEQ ID NO: 3484 - DNA, 467 bp, Streptococcus pneumoniae
  misc_feature (1)..(467): tiling:Spneumo1:WAN024GFQ; Cluster includes WAN0244DK spr0 570||15902614|NP_358164.1|581084..581530|+|447 bp|Hypothet ical protein|S.pneumoniae|R6|NC_003098.1|ORF|121
cttatgaattgtaggtggaaacggtcaagcgtttgagaaagtatccmaarattgagattgtttcccatttgatyaatggtttgcctggtgaaacccatgagatgatggttgaaaatgtccgccgttgtgtcacgrataacgatattcaagggattaaactgcatttgctccatcttatgacaaatactcgtatgcaacgagattaccatgagggrcgtttacaattgatgagtcaggacgaatatgtcagggtcatctgtgaccaactggaaatyattcccaaacatatcgtcatccatcgaatyacaggagatgcrcctagggatatgctgmttggkcytatgtggagcctcaataaatgggaagyyctcaacagcattgagatggagatgmgacgtcgtggaagtgttcaaggatgcaaggctgtaaaacaggagtttgaaaatgaaaagaccactykaactaat

SEQ ID NO: 3485 - DNA, 175 bp, Streptococcus pneumoniae
  misc_feature (1)..(175): tiling:Spneumo1:WAN024D9U; Cluster includes WAN0243XZ spr1 132||15903175|NP_358725.1|1136391..1136564|-|174 bp|Hypoth etical protein|S.pneumoniae|R6|NC_003098.1|ORF|121
cttatgactgatgtacgtggtactagctgttttgttatcaagtttggaaaagcaggtgaacaattggctgccaagctttgggaagaaggtaaaatggtctacgcctcatmtgcttcaatgayaaaacgattgaaactcgctatgagcaaggtgtaatrrtgtctatggtcgataa

SEQ ID NO: 3486 - DNA, 266 bp, Streptococcus pneumoniae
  misc_feature (1)..(266): tiling:Spneumo1:WAN0249I5; Cluster includes WAN02471M R6.I G_207||||195285..195550|+|266 bp|Between spr0186 (+ strand ) and spr0187 (rpsJ) (+ strand)|S.pneumoniae|R6|NC_003098. 1|IG|110
cttatgtatagaagaaatatagaagaaaatccctaattttagaaagaaaaagtaggaaaacagtttcatcccaaaaaaacgaaaaaacagcaacaaatcccttgcaatcgcaggggctttgtgttattctattatggtgctgtaaattacagccttakttttgatgcaagaggttgcgacacgctcggttgcattgccacgcaacaccgcgtcggttttcttgtggagctagcctattatcttaaatagacgaaaaggagaaaaag

SEQ ID NO: 3487 - DNA, 95 bp, Streptococcus pneumoniae
  misc_feature (1)..(95): tiling:Spneumo1:WAN024AMU; Cluster includes WAN024ENV-rc R 6.IG_468.2.1||||450465..450558|-|94 bp|Between spr0444 (gl nA) (+ strand) and spr0445 (hsdS) (+ strand)|S.pneumoniae| R6|NC_003098.1|IG-rc|110
cttatgtgcttcaagtatataaaaaggcgtaaaaatacgcctatagataatggggttgaaataggtttattgttgatgagattgtagataattca

SEQ ID NO: 3488 - DNA, 1859 bp, Streptococcus pneumoniae
  misc_feature (1)..(1859): tiling:Spneumo1:WAN024CNB-3; Cluster includes WAN02436S SP 0071||15900016|NP_344620.1|73761..79331|+|5571 bp|immunogl obulin A1 protease|S.pneumoniae|TIGR4|NC_003028.1|ORF|010
cttcaacgttggatactattgtcgcattaggaaatagtggactagataacctgagagcttcaaatactgtaggtttatatgcgaataaacttgcatcggtaaaaggagaagattcagtctttgacttcgtagaagcgtatagaaaactgttcttaccaaacaaaacaaataacgagtggtttaaagaaaatacaaaggcatatatagtcgaaatgaagtctgatattgcagaagtacgagaaaaacaagaatcaccaacagccgatagaaaatattcattaggagtttacgatagaatatcagcaccaagttgggggcataagagtatgttattaccactactaactttacctgaagaatctgtgtatatttcatcgaatatgtctacacttgcattcggttcgtatgaaagatatcgtgatagtgtggatggagttattctttcaggagatgctttacgaacttatgtaagaaatagagttgatatagcagcgaaaaggcatagagaccattatgatatttggtacaatcttcttgacagtgcttcaaaagaaaaacttttccgttctgtgatagtttatgatggattcaatgtaaaagatgagacaggaagaacttattgggcaaggttaacggataaaaacatcggctctattaaagaattcttcggacctgttgggaaatggtatgagtataatagtagtgcaggagcgtatgcgaatggaagtttaacgcactttgtgttagatagattattagatgcttatggaacgtcggtttatactcatgaaatggttcataattctgattctgcaatctactttgaaggaaatggtagacgtgaaggattgggagcggagttatacgcacttggtttactgcaatctgtagatagtgtaaattctcatattttagctttaaatacgttatataaagcagaaaaagatgatttgaatagattgcatacatataatccggtggaacgtttcgattcggatgaggcgcttcaaagttatatgcatggatcatatgatgtaatgtatacacttgatgcgatggaagcaaaagcgatattagctcaaaataatgatgttaagaaaaaatggtttagaaaaatagaaaattattacgttcgtgatactagacataataaagatacacatgcaggaaataaagtccgtccattaacagatgaagaagtagctaacttaacatcgttaaactcattaatcgacaacgacatcataaatagacgtagctatgatgatartagagaatataaacgaaatggctactatactataagtatgttctctcctgtatacgcagcgctaagcaattcgaaaggtgctcctggagatattatgtttagaaaaatagcttatgaattacttgcggaaaaaggttatcacaaaggattcctaccttatgtttctaatcagtacggagcagaagcatttgccagcggaagcaaaacattctcatcatggcatggaagagatgttgctttagtgacagatgatttagtatttaagaaagtattcaatggtgagtactcatcatgggctgatttcaaaaaagcaatgtttaaacaacgtatagataaacaagataatctgaaaccaataacaattcaatacgaattaggtaatcctaatagtacaaaagaagtaactataacaacggctgcacaaatgcaacaattaattaatgaagcggctgcgaaagatattactaatatagatcgtgcaacgagtcataccccagcaagttgggtgcatttattaaaacaaaaaatctataatgcatatcttcgcactacagatgactttagaaattctatatataaactaactaat

SEQ ID NO: 3489 - DNA, 306 bp, Streptococcus pneumoniae
  misc_feature (1)..(306): tiling:Spneumo1:WAN024COV; Cluster includes WAN0240T5 |cps 3C||AAC97120.1|||165 bp|Cps3C|S.pneumoniae||U66846|ORF|000
cttccgtatgccgcgttcctgcaagaccccatcggctggctctttgatagagtagctgcccaaaaaattatcagtattactcgtgctgatgtggcacactggaggagcaagaccgccgatatcaccgcttcgccaaataataaacgcaatacactaattggttttttggcakkkkkkattggaactagtgtyatagttcttcttcttgaacttttggacactcatgtgaaacgtccggaagatatcgaagatacactgcagatgacacttttgggagttgtaccaaacttgggtaagttgaaatag

SEQ ID NO: 3490 - DNA, 228 bp, Streptococcus pneumoniae
  misc_feature (1)..(228): tiling:Spneumo1:WAN024BDP; Cluster includes WAN01UC6G |||| ||192 bp|Incyte orf contig SPN2C0457 4494-4303|S.pneumonia e|23F|WAN01UC6G|ORF|001
cttcgaaaatctcttcaaaccacgtcagcgtcgccttgccgtatatttgagctgacttcgtcagttctatctgcaacctcaaaacagtgttttgagctgacttcgtcagtcttatctactacctcaaaacggtgttttgagcaacctgtggctagtttcctagtttgctatttgattttcattgagtacaaagagcttggcaacaggctctttttgtattgcgtttat

SEQ ID NO: 3491 - DNA, 76 bp, Streptococcus pneumoniae
  misc_feature (1)..(76): tiling:Spneumo1:WAN024A6K; Cluster includes WAN024EFD-rc R 6.IG_1156||||1118456..1118531|-|76 bp|Between spr1118 (uvr B) (- strand) and spr1119 (- strand)|S.pneumoniae|R6|NC_00 3098.1|IG-rc|110
cttcggtccgtccttttcttcgtgaaaatactataagtatgctaaaataggaatagcacatggagagaggattctt

SEQ ID NO: 3492 - DNA, 130 bp, Streptococcus pneumoniae
  misc_feature (1)..(130): tiling:Spneumo1:WAN024APM; Cluster includes WAN024EPB-rc R 6.IG_392.1||||368748..368876|-|129 bp|Between spr0368 (mut S2) (+ strand) and spr0369 (dagA) (+ strand)|S.pneumoniae| R6|NC_003098.1|IG-rc|110
cttctattaaacttcattcggtgttggtatttaattgattctaattttacaaaaaatgttggcttttgtcaatgtgtttattagtaaaaattagttcaacagtttttactttataaagtccagaatactg

SEQ ID NO: 3493 - DNA, 65 bp, Streptococcus pneumoniae
  misc_feature (1)..(65): tiling:Spneumo1:WAN0249UN; Cluster includes WAN024E9C R6.I G_1627||||1563486..1563550|+|65 bp|Between spr1581 (priA) (- strand) and spr1582 (- strand)|S.pneumoniae|R6|NC_00309 8.1|IG|110
cttctcacctcctccttgtcagtacattcttgcaatagaaaaaataagattgagtccccccaacc

SEQ ID NO: 3494 - DNA, 105 bp, Streptococcus pneumoniae
  misc_feature (1)..(105): tiling:Spneumo1:WAN0249KV; Cluster includes WAN024E6Z R6.I G_1877.1.1||||1730322..1730426|+|105 bp|Between spr1762 (- strand) and spr1763 (plcR) (- strand)|S.pneumoniae|R6|NC_ 003098.1|IG|110
cttctctctcccttcctaccaatcattatactaggagaaaagagagaactgtttctaatcttctcaaatgtctctttaagacgctaaacaaacactagagactaa

SEQ ID NO: 3495 - DNA, 190 bp, Streptococcus pneumoniae
  misc_feature (1)..(190): tiling:Spneumo1:WAN024A9J; Cluster includes WAN024EGZ-rc R 6.IG_1033||||978952..979141|-|190 bp|Between spr0994 (IS13 81) (+ strand) and spr0995 (pcrA) (+ strand)|S.pneumoniae| R6|NC_003098.1|IG-rc|110
cttctcttccttactcttgaagtcaatatttctattatatcagaaatcagggaaaatagaaactttacggggagtagcaaaatatagtggattgaaactagaatactacactgtgggtttctaaaacactcgacttttcacccaattttttcataaactagctcaatacctcaatagacttcctgcaaaa

SEQ ID NO: 3496 - DNA, 1770 bp, Streptococcus pneumoniae
  misc_feature (1)..(1770): tiling:Spneumo1:WAN024CWN-3; Cluster includes WAN0244KA sp r0328||15902372|NP_357922.1|327393..332696|+|5304 bp|Conse rved hypothetical protein|S.pneumoniae|R6|NC_003098.1|ORF| 111
cttctttacaacwggakcggacgtmtcaaatgttactctkacwttragtcgygaagctggtgatsaagcaacttactttgatgaaattcgtacctttgaaaacaattcaagcatgtacggagamaascatgatacaggtaaaggcaccttcaarcaagactttgaaaatgttgctcagggtatcttcccattygtagtgggtggtgtcgaaggtgtygaagayaaccgcactcacttgtctgaaaarcayratccatatacacaacgtggttggaayggtaagaaagtygatgatgttatcgawggaaattggtcactcaagacmaatggactrgtkagccgtcgtaacttggtttaccaaacyatyccrcaaaacttccgytttgaagcwggtaagacctaccgtgtaacctttgaatacgaagcaggwtcagacaatacctatgcttttgtagtcggtaagggagaattccagtcaggtcgtcgtggyactcaagcaagcaacttrgaaatgcatgaattgccaaatacttggacagattcyaagaaagccaagaaggcaaccttcctygtgacaggtgcagaaacaggvgatacttgggtaggtatctactcaactggaaatgcaagtaatactcgtggtgattctggtggaaatgccaacttccgtggttataacgacttcatgatggataatcttcaaatcgaagaaattaccctaacaggtaagatgttgacagaaaatgctctgaagaactacttgccaacggttgccatgactaactacaccaaagagtctatggatgctttgaaagaggcggtctttaacctcagtcaggccgatgatgatatcagtgtggaagaagcgcgtgcagagattgccaagattgaagcyttgaagaatgctttggttcagaagaaracggctttggtagcagatgactttgmaagtcttrsagckccwgctcarscwsrwgaaggtcttgmraatgcctttgatggmaayktrtctagtytatggcatacatcwtggrryggwggagatgtaggcaagcctgcaacyatggtcttgaaagaascaactgaaatcacwggacttcgytatrttccrcgtggatcaggttcaaatggtaacttgcgwgatgtgaaacttgttgtgacagatgagtctggcaaggagcatacctttrctgcaactgattggccarataacaayaarccaaaagayattgaytttggtaagacaatyaaggytaagaaaattgtccttacwggtacyaagacwtacggagatggtggmgataaataccaatctgcagcggaactyatctttactcgtccacaggtagcagaaacacctcttgacttgtcaggctatgaagcagctttggytaaggctcagaaattaacagacaaagacaatcaagaggaagtagctagcgttcaggcaagcatgaaatatgcgacggataaccatctcttgacggaaagaatggtggaatactttgcagattatctcaaccaattaaaagattctgctacgaaaycagatgctccaaytgtagagaaacctgagtttaaacttagmtctktagcttccgwdcaaggtaagacgccagattataagcaagaaatagmtagaccagaaacacctgaacaaatcttgccagcaacaggtgagagtcaatytgacacagccctcwtcctagcargtgttagyctagccctatctgctctctttgtagtaaaaacgaagaaagactarctaat

SEQ ID NO: 3497 - DNA, 154 bp, Streptococcus pneumoniae
  misc_feature (1)..(154): tiling:Spneumo1:WAN024ANP; Cluster includes WAN024EOB R6.I G_455||||432690..432842|+|153 bp|Between spr0431 (+ strand ) and spr0432 (cspR) (+ strand)|S.pneumoniae|R6|NC_003098. 1|IG|110
cttgaaaaaattgaaaaaatyaagtcrtttctattgacaatgattctgaaagtgttakactaagaaagtagtttcgctgatttacttcaaacctgttgtgaggtaagttaacgatgccttaaccacgctgtttgctgagcttgactccgggcag

SEQ ID NO: 3498 - DNA, 129 bp, Streptococcus pneumoniae
  misc_feature (1)..(129): tiling:Spneumo1:WAN024BDI; Cluster includes WAN023YSG AL44 9927.1_213||||169955..170071|+|117 bp|Glimmer 2.02 orf pre diction|S.pneumoniae||AL449927.1|ORF|001
cttgccgtatatktgttactgacttcgtcagttctatccacaacctcaaaacastgttttgagcaacctgcrgctagtttcctagtttgctctttgattttcattgagtattattcatcaattatagca

SEQ ID NO: 3499 - DNA, 325 bp, Streptococcus pneumoniae
  misc_feature (1)..(325): tiling:Spneumo1:WAN024FGO; Cluster includes WAN023ZQN |||C AA79872.1|||325 bp|internal region of the penicillin-bindi ng protein 2B gene|S.pneumoniae||Z21808|ORF|000
cttgggaacggtaaccaatgtctttgttccaggttcggttgycaaggcggcgaccatcagctcaggttgggaaaatggagtcttgtcaggaaaccagaccttgacagaccagtccattgtcttccaaggttcagctcccatcaattcttggtatactcaggcctacggttcattccctatcacagcggtggaagccttggagtattcttcgaatgcctacatggtccaaacggctttgggcattatggggcagacctaccaacccaatatgtttgtcggcaccagcaatctagagtctgctatggggaaattcggttcaaccttt

SEQ ID NO: 3500 - DNA, 95 bp, Streptococcus pneumoniae
  misc_feature (1)..(95): tiling:Spneumo1:WAN0249IC; Cluster includes WAN024E5L-rc R 6.IG_2026.2||||1838521..1838615|-|95 bp|Between spr1867 (n agA) (- strand) and spr1868 (- strand)|S.pneumoniae|R6|NC_ 003098.1|IG-rc|110
cttgtattaaaaaagagaagagttggagaaatccagctcttttaaaatatctccaaaaaataggtctataccatttacaaataaaaaagaaaggt

SEQ ID NO: 3501 - DNA, 53 bp, Streptococcus pneumoniae
  misc_feature (1)..(53): tiling:Spneumo1:WAN024A3A; Cluster includes WAN024EDA-rc R 6.IG_1321.2||||1273755..1273807|-|53 bp|Between spr1277 (- strand) and spr1278 (- strand)|S.pneumoniae|R6|NC_003098. 1|IG-rc|110
cttgttactcttttctcaatccagctaaaatgtgatataatagtactaattta

SEQ ID NO: 3502 - DNA, 65 bp, Streptococcus pneumoniae
  misc_feature (1)..(65): tiling:Spneumo1:WAN024APO; Cluster includes WAN024EPC-rc R 6.IG_391.2||||366346..366410|-|65 bp|Between spr0367 (+ st rand) and spr0368 (mutS2) (+ strand)|S.pneumoniae|R6|NC_00 3098.1|IG-rc|110
ctttatttccttgtctttgaatgtctaggtgtggtagctttttacattctgatagattcgagtca

SEQ ID NO: 3503 - DNA, 104 bp, Streptococcus pneumoniae
  misc_feature (1)..(104): tiling:Spneumo1:WAN0249J3; Cluster includes WAN024E5Z R6.I G_1985||||1801034..1801137|+|104 bp|Between spr1825 (gapA) (- strand) and spr1826 (- strand)|S.pneumoniae|R6|NC_0030 98.1|IG|110
ctttcaacaaacctattatacaactatttgagttgaattgcaagtatggccattgtttttctatgtkagtttctttttaagactgtaaaycaaggaatccctta

SEQ ID NO: 3504 - DNA, 406 bp, Streptococcus pneumoniae
  misc_feature (1)..(406): tiling:Spneumo1:WAN024A3H; Cluster includes WAN024EDD R6.I G_1318.2.2.2||||1270207..1270612|+|406 bp|Between spr1274 (- strand) and spr1275 (- strand)|S.pneumoniae|R6|NC_00309 8.1|IG|120
ctttcatcattccttatacaactatgcagtataaatagaatagttttctcatcagaatgagactattttaatattagataatttgatagaaaaaaacatraataaaattggttgaatttaattccctaactcgatagargattctattttaaatttaacaacagctaggattacactataaaaagyacattaccacctgttcgrctggagaatctagtcgattagctccctcttagttacaagcttaaagcgattttttaactaayactaaaccagattaaagaaggaactagaacatctgtcttgtactaatcaatatgctattttaaarttkcaaataaacttggaatgctaattattatatttacaataaatagttgacttcgatagaaacagaaaatagaat

SEQ ID NO: 3505 - DNA, 167 bp, Streptococcus pneumoniae
  misc_feature (1)..(167): tiling:Spneumo1:WAN024AO4; Cluster includes WAN024EOG-rc R 6.IG_446||||421670..421836|-|167 bp|Between spr0422 (+ str and) and spr0423 (+ strand)|S.pneumoniae|R6|NC_003098.1|IG -rc|110
ctttcttcctcctcaatcttgatccatcttttacacatcattattaaaatgacttcgctacgatataaatagaaagttgaccctaaatatcttaaaaatccttaaatttcataatatttaggatcaatcttctctgaataccttagttcattttctatacttatgat

SEQ ID NO: 3506 - DNA, 75 bp, Streptococcus pneumoniae
  misc_feature (1)..(75): tiling:Spneumo1:WAN024AC7; Cluster includes WAN024EIA-rc R 6.IG_940.2||||889835..889897|-|63 bp|Between spr0904 (+ st rand) and spr0905 (yfnA) (+ strand)|S.pneumoniae|R6|NC_003 098.1|IG-rc|110
ctttgactccaaaataaactgataattctattttaccataaatataggagatatgtgaatatttataaaatgttt

SEQ ID NO: 3507 - DNA, 290 bp, Streptococcus pneumoniae
  misc_feature (1)..(290): tiling:Spneumo1:WAN0249XW; Cluster includes WAN024750-rc R 6.IG_161||||150363..150652|-|290 bp|Between spr0140 (mutR) (+ strand) and spr0141 (+ strand)|S.pneumoniae|R6|NC_0030 98.1|IG-rc|110
cttttacactccttcaattatcttcatttgtaaaccacttctgcgacctaggatttgcttcaagtgctttacaagtacagtataacacgaamattggcttattttaraaaatcgcatatttgatattttttcttatagaaatttcwkatttgcgattttgrtrratttgattayttcyctggtataataaagttaytactaayraggaggrakataatagatgaagaaaagaaaaatccaactgatactcctacttatttcggagtgggttattgtcattccatttttaa

SEQ ID NO: 3508 - DNA, 86 bp, Streptococcus pneumoniae
  misc_feature (1)..(86): tiling:Spneumo1:WAN024AM2; Cluster includes WAN024ENJ-rc R 6.IG_500.1||||479505..479590|-|86 bp|Between spr0476 (+ st rand) and spr0477 (+ strand)|S.pneumoniae|R6|NC_003098.1|I G-rc|110
cttttcatattcttactatcagtatagcacgtttgccaacttatgtaaagcaaaagcacttgtacagcctaattttaggytatctc

SEQ ID NO: 3509 - DNA, 150 bp, Streptococcus pneumoniae
  misc_feature (1)..(150): tiling:Spneumo1:WAN024A3T; Cluster includes WAN024EDH R6.I G_1316||||1267058..1267180|+|123 bp|Between spr1272 (nagB) (- strand) and spr1273 (queA) (+ strand)|S.pneumoniae|R6| NC_003098.1|IG|110
cttttcatcctccatttytgtctatatttattatatggtatagaccaatttttgtcaagtgaaaacgatttaatttctaaaaaaagagcgtccaaacttgaaacgtgttataatggataggattagaacttagaaagaatgaacaaatat

SEQ ID NO: 3510 - DNA, 271 bp, Streptococcus pneumoniae
  misc_feature (1)..(271): tiling:Spneumo1:WAN024AQX; Cluster includes WAN024EQ3-rc R 6.IG_311||||292630..292899|-|270 bp|Between spr0290 (gno) (- strand) and spr0291 (+ strand)|S.pneumoniae|R6|NC_00309 8.1|IG-rc|110
cttttctcctttcttgtttaggtttaccggtttactttatattccccattgtaatcctttatttttatcttgtcaatagtttttttaaaaaaatattagcgctttcattatctttttaaycaktttaatagacagaaatttcaaaatmttccrtttttwtaggaaaayaaayctttttataaataaaaatatttatttattgacaaaaccggtttactagaatataatttggttatagagaagtcttaacaaatttgaaaggaagtatcaa

SEQ ID NO: 3511 - DNA, 84 bp, Streptococcus pneumoniae
  misc_feature (1)..(84): tiling:Spneumo1:WAN0249KW; Cluster includes WAN024E72-rc R 6.IG_1873||||1727556..1727639|-|84 bp|Between spr1758 (cin A) (- strand) and spr1759 (lytR) (- strand)|S.pneumoniae|R 6|NC_003098.1|IG-rc|110
cttttgatacaaataaaaaaatcaatcgtaggaaaattcctgcgattttttcaaaaaaatacgaatagataggtaggaggaaac

SEQ ID NO: 3512 - DNA, 50 bp, Streptococcus pneumoniae
  misc_feature (1)..(50): tiling:Spneumo1:WAN024ACJ; Cluster includes WAN024EID-rc R 6.IG_938.1||||888031..888080|-|50 bp|Between spr0902 (+ st rand) and spr0903 (ccdA) (+ strand)|S.pneumoniae|R6|NC_003 098.1|IG-rc|110
cttttgtgaacgaaaatgtcttttaggtctgacatttcataaatcatgtt

SEQ ID NO: 3513 - DNA, 132 bp, Streptococcus pneumoniae
  misc_feature (1)..(132): tiling:Spneumo1:WAN024A2J; Cluster includes WAN024ECT R6.I G_1344||||1294169..1294300|+|132 bp|Between spr1300 (guaA) (- strand) and spr1301 (+ strand)|S.pneumoniae|R6|NC_0030 98.1|IG|110
ctttttcctttctcaaaagaaatatcttttctcaatattctatcacaaataagggcgaattaccaactaaacaaggcgaagtttgactttttctagtttattggggtrcaatagagaaaagatagaaatgaa

SEQ ID NO: 3514 - DNA, 266 bp, Streptococcus pneumoniae
  misc_feature (1)..(266): tiling:Spneumo1:WAN0249I4; Cluster includes WAN02471M-rc R 6.IG_207||||195285..195550|-|266 bp|Between spr0186 (+ str and) and spr0187 (rpsJ) (+ strand)|S.pneumoniae|R6|NC_0030 98.1|IG-rc|110
ctttttctccttttcgtctatttaagataataggctagctccacaagaaaaccgacgcggtgttgcgtggcaatgcaaccgagcgtgtcgcaacctcttgcatcaaaamtaaggctgtaatttacagcaccataatagaataacacaaagcccctgcgattgcaagggatttgttgctgttttttcgtttttttgggatgaaactgttttcctactttttctttctaaaattagggattttcttctatatttcttctatacataag

SEQ ID NO: 3515 - DNA, 86 bp, Streptococcus pneumoniae
  misc_feature (1)..(86): tiling:Spneumo1:WAN0249XU; Cluster includes WAN024EBD R6.I G_1479||||1419253..1419321|+|69 bp|Between spr1435 (apt) ( - strand) and spr1436 (- strand)|S.pneumoniae|R6|NC_003098 .1|IG|110
ctttttctttctttcaaagttttttactctctattatagcatattttttaagaaagaaaaaaggaaaagttaacttcaataattat

SEQ ID NO: 3516 - DNA, 134 bp, Streptococcus pneumoniae
  misc_feature (1)..(134): tiling:Spneumo1:WAN024A29; Cluster includes WAN024ECO R6.I G_1362||||1306541..1306668|+|128 bp|Between spr1318 (- str and) and spr1319 (+ strand)|S.pneumoniae|R6|NC_003098.1|IG |110
cttttttcctcatttctgactagtttctcccatcatagcataatttaagtatttctacaagcagttaaaacttgactttgtgtttttgttattttataatctagttatcaaaactatataaaaaggagttaaaa

SEQ ID NO: 3517 - DNA, 189 bp, Streptococcus pneumoniae
  misc_feature (1)..(189): tiling:Spneumo1:WAN024ARI; Cluster includes WAN024EQE-rc R 6.IG_296||||274310..274498|-|189 bp|Between spr0275 (+ str and) and spr0276 (bglA) (+ strand)|S.pneumoniae|R6|NC_0030 98.1|IG-rc|110
cttttttcctcctgactttgatactcttattataaaccttaaaccaaaagatraaaacgcattctttttccttattgttaaggaaagaagtaatttttaatggaaatagaacaatatcttcttgtattctcgtaatgatatctttacgattttcaatactttcaaactacaaaaactctcacaataatt

SEQ ID NO: 3518 - DNA, 1591 bp, Streptococcus pneumoniae
  misc_feature (1)..(1591): tiling:Spneumo1:WAN024FYQ-3; Cluster includes WAN0243XE sp r1153|carB|15903196|NP_358746.1|1154749..1157925|-|3177 bp |Carbamoylphosphate synthase (ammonia), heavy subunit|S.pn eumoniae|R6|NC_003098.1|ORF|221
cygaaacgccatatttctattcaacctatggttgggaaaatgaatctatcaratctgataaagaatctgtacttgtyctaggttcaggtccaatccgtatcggtcaaggggttgagtttgactacgcaaccgttcactctgttaaggctatccaggcagctggttatgaagctatyatcatgaactcaaacccagagaccgtttcaacagacttctctgtatcagataagctttactttgagccattgacattcgaagatgttatgaacgtcattgacttggaacaaccaaagggagttatcgttcagttcggtggtcaaacagccatcaaccttgcrgagccattggcaaaagcaggtgtgaccatccttggtacacaggttgctgacctagaycgtgccgaagaccgtgacctcttcgagcaagctctcaaagaattggatattccacagccaccaggacaaacggctaccaatgaagaagaagcagctcttgcagctcgyaagattggcttcccagttcttgtccgcccatcttatgtacttggtggacgtgccatggaaatcgttgaaaacgaagaagaccttcgttcttacatgcgaactgctgttaaggctagtccagaccayccagttcttgtcgactcttayatcgttgggcaagagtgcgaagttgatgccatttcagatggtaaaaatgtactcattcctggtatyatggagcatatcgaacgtgctggtgtccactcaggtgactcaatggctgtttacccaccacaaaccttgtcgcaaaaggttcaggagaccatcgcagactacaccaaacgcttagcaatcggtcttcactgycttggaatgatgaacatccagtttgttatcaaggatgaaaaagtctacgttattgaggtcaatccacgtgccagccgtachgttccattcctatctaaggtaaccaatattyctatggctcaagtagcgaccaarctcattcttggtcaaagtttatcagaacttggctaccaaaatggactttaccctgaaagcacccgtgttcatatcaaggcacctgtcttctcctttaccaaactagctaaggtagacagcttgctcggtcctgaaatgaagtcaacaggtgaagttatgggttctgatgctactttggaaaaagctctctataaagcctttgaagcttcttatctacacttgccaacttttggtaatgtcgtctttaccatcgctgatgatgccaaagaagaagccttgaacttggctcgtcgtttccaaaacattggttatggaatccttgcgacagargggacagcagccttctttgctagtcatggcttgcaagcccaacctgttggtaagattggtgatgaygataaggatatcccaagttttgtacgcaaaggaagaattcaagctatcattaacacagtaggaacaaaacgaactgctgacgaagatggtgagcaaattcgtcgttcagccattgaacacggggtgcccctcttcacagcgctagatacagctaatgccatgcttaaggtacttgaaagtcgtagctttgttacagaagcgatttaactaat

SEQ ID NO: 3519 - DNA, 762 bp, Streptococcus pneumoniae
  misc_feature (1)..(762): tiling:Spneumo1:WAN024FJK; Cluster includes WAN023HUA |||| ||678 bp|Incyte orf contig SPN2C0524 117-794|S.pneumoniae| 23F|WAN023HUA|ORF|001
gaaaaaattgctgactatattttagttagagatagtgaaatagttcatgaaacgtcttcagaaattgttagtaaagtaaaagttggagagggaactcttaatcgattttgcaaaaagattggatactctggttttcaggaactaaaattaaaaatgacgaaagatatattagagttagaatctcaaaaaatgagtagtgacacatttattgatgaaataaaaaataattatttatctattgtggaaagtacaagaaaattaattgatggtagacaaatagaattagctataaaattaataagagaagcaaaccagattttaatgattggtgtgggttctagtggaaatgcggctagagaatttgagagtagtttgttaagaattggaataataagtaagacggtaattgatacccattttcaactcatgcatactgcgttattgaaagataatgatttgataatagcgtttagtttatctggttccacaaaagaagttgaggaaactttattaaacgcaaaaagaaaaaatgttaaaattatttcaataacaaattattcgtccagaaatatagcaaaattatctgactgcgttcttttgacatcaaaaaaagaatcttatttagagggtggtagtttaatggctaaggcttctcaactattcataattgatgtaatatgcactagactctctttaataaattatgaagatactatatgtaaaaaagaagagattgcttctttgctgtcaaataaagtggaa

SEQ ID NO: 3520 - DNA, 561 bp, Streptococcus pneumoniae
  misc_feature (1)..(561): tiling:Spneumo1:WAN0249TW; Cluster includes WAN024E3Y R6.I G_2189.2||||1974172..1974481|+|310 bp|Between spr1982 (dlt A) (- strand) and spr1983 (- strand)|S.pneumoniae|R6|NC_00 3098.1|IG|120
gaaaaaccattcatttctgtaatttttcgctaaaataagagtgattcttactagcttatttttctaccattgtaccactttatatagtatcttttcaattgtttaccgtatgtttccaatagatttcagcttattttaaggattatacagtttttctatgtatattttcaaatagagtgatcctgcttcaaaactccatttcaggagacaatgaagtaaatcttcccataataaaacacacaatatcaagttttttcaayacctgatactatgcgcttttctgatttttaaagactkwttrmycastctctttttcattataattcagttacaatttaatcttatttgagaaagtgggtgatgctattctctaataagactatgatattaatttttgatagtacttccagaaattatagatcccctttcatccccaatttctattttcaagtgtccgtattatatagcgtattcgaaattcactatatcttgttaggatttgggtagaatcattgataacagactgttgcaaatctaattagctgtatgatttatatttat

SEQ ID NO: 3521 - DNA, 231 bp, Streptococcus pneumoniae
  misc_feature (1)..(231): tiling:Spneumo1:WAN0249TX; Cluster includes WAN0247T1 R6.I G_54||||34462..34651|+|190 bp|Between spr0033 (+ strand) a nd spr0034 (- strand)|S.pneumoniae|R6|NC_003098.1|IG|210
gaaaaaggtagctgatgggctaccttttgtgttatactcaatgaaaatcaaagagcacactagcaaactagraarytagcyrcrgrctgctcaaaacayygttttkaggttgyagatagaactgacgaagtcagtaacatmtatacgrcaaggcgamgytgacgyggtttgaagagattttcgaagagtrtaatactagactaaaatcaaaaagcattatacaatagtaat

SEQ ID NO: 3522 - DNA, 258 bp, Streptococcus pneumoniae
  misc_feature (1)..(258): tiling:Spneumo1:WAN0249S7; Cluster includes WAN024ENW R6.I G_468.1.2||||450073..450330|+|258 bp|Between spr0444 (glnA ) (+ strand) and spr0445 (hsdS) (+ strand)|S.pneumoniae|R6 |NC_003098.1|IG|110
gaaaacaagttacttcaaatcgaaatctacaagtttactaacttttgcaagcttcaaaattacacatctgtaaatattttttcgaaagatatatttgaarccatagtaaattgagactagaatagtacactacatctgctaaaaatttctagaaactaatttaactttcctaatcgatttgtttacatcttatttcaatctactatattatctcaataaatgatgatggcgactgttttgtttgtgcttgtcgatttt

SEQ ID NO: 3523 - DNA, 55 bp, Streptococcus pneumoniae
  misc_feature (1)..(55): tiling:Spneumo1:WAN024ABJ; Cluster includes WAN024EHY-rc R 6.IG_957||||906356..906410|-|55 bp|Between spr0918 (asd) ( + strand) and spr0919 (dapA) (+ strand)|S.pneumoniae|R6|NC _003098.1|IG-rc|110
gaaaacacctctctatttcaaagaaggagttcatctgaactcctaaacgatatga

SEQ ID NO: 3524 - DNA, 163 bp, Streptococcus pneumoniae
  misc_feature (1)..(163): tiling:Spneumo1:WAN024A8H; Cluster includes WAN024EGF R6.I G_1074||||1018159..1018321|+|163 bp|Between spr1035 (- str and) and spr1036 (eno) (+ strand)|S.pneumoniae|R6|NC_00309 8.1|IG|110
gaaaacagtatatcataaaagttagaataaaacagacaaaagaaagcgattactttataaagttaaggaaaagttgcacaaagataacgttttttcttgaaaaaggaggggttttaaggtattatagaggtgtaaaaaatttaactcataaggagagtaaaaa

SEQ ID NO: 3525 - DNA, 166 bp, Streptococcus pneumoniae
  misc_feature (1)..(166): tiling:Spneumo1:WAN0249MK; Cluster includes WAN024E85-rc R 6.IG_1722||||1646181..1646346|-|166 bp|Between spr1673 (+ strand) and spr1674 (- strand)|S.pneumoniae|R6|NC_003098.1 |IG-rc|110
gaaaagatgtttgaaagtgctgttttgagatttcgattaaaacagatatagttgataatcaaggatttatagtatgaaaaagaggatcggcgggtcctcttttgttgttgaaaagataaaaaactcagtaacctagaaataagacaactgaagctttactctatat

SEQ ID NO: 3526 - DNA, 101 bp, Streptococcus pneumoniae
  misc_feature (1)..(101): tiling:Spneumo1:WAN024ACY; Cluster includes WAN024EIM R6.I G_913||||867833..867933|+|101 bp|Between spr0877 (secG) (+ strand) and spr0878 (rnr) (+ strand)|S.pneumoniae|R6|NC_0 03098.1|IG|110
gaaaataatgggcaggactaggtctttgcctctttttatttttaaaggatgtttgagaaggttttacagtaaaagaaaattaaaaaatctagaaagaaaat

SEQ ID NO: 3527 - DNA, 187 bp, Streptococcus pneumoniae
  misc_feature (1)..(187): tiling:Spneumo1:WAN024ASL; Cluster includes WAN0246M0 R6.I G_239||||212223..212408|+|186 bp|Between spr0218 (+ strand ) and spr0219 (gpmB) (+ strand)|S.pneumoniae|R6|NC_003098. 1|IG|110
gaaaataggagaaattttaagttctatttaagattagaygtgtatactataatcattaaataaagacctcctaatattatttgaaacagataacactgaattagtttgaatttgattttcatctaatatctttatttaatgaactcctaaactttttcataataatctccttcaaaagtcgcctgta

SEQ ID NO: 3528 - DNA, 147 bp, Streptococcus pneumoniae
  misc_feature (1)..(147): tiling:Spneumo1:WAN024A78; Cluster includes WAN024EFM-rc R 6.IG_1134||||1093532..1093678|-|147 bp|Between spr1096 (- strand) and spr1097 (nirC) (- strand)|S.pneumoniae|R6|NC_0 03098.1|IG-rc|110
gaaaatgagcacgattgagtcgtgcttttttcattttcaaaataaggtaatagctatttcttatatcaaaatatagaaaactgatatttgtaaactataactcaaggtgctacaatatccttaataaaataatatggaggtcacctt

SEQ ID NO: 3529 - DNA, 233 bp, Streptococcus pneumoniae
  misc_feature (1)..(233): tiling:Spneumo1:WAN0249S4; Cluster includes WAN024EPE-rc R 6.IG_387||||363642..363874|-|233 bp|Between spr0363 (recD) (- strand) and spr0364 (spi) (- strand)|S.pneumoniae|R6|N C_003098.1|IG-rc|110
gaaacctaagaggcmgagaatcaccaatctcagcctcttcttctatcgtgagaagtgattgtttattgacaaatactcaatgaaaatcaaagaacaaactaggaagctagccgtaggctgcttaaaacagtgttttgaggttgcagatggaagctgacgtggtttgaagatattttcgaagagtataaaataaaaacaatcccaactctcacctattcatacaaaggaatttt

SEQ ID NO: 3530 - DNA, 58 bp, Streptococcus pneumoniae
  misc_feature (1)..(58): tiling:Spneumo1:WAN024ADU; Cluster includes WAN0247I0 R6.I G_116.2||||103853..103910|+|58 bp|Between spr0095 (sdaB) ( - strand) and spr0096 (+ strand)|S.pneumoniae|R6|NC_003098 .1|IG|110
gaaacggtaatatttaaagggtatgatagaactatagaaagaaggagaattttcgaat

SEQ ID NO: 3531 - DNA, 99 bp, Streptococcus pneumoniae
  misc_feature (1)..(99): tiling:Spneumo1:WAN0249HQ; Cluster includes WAN024E58-rc R 6.IG_2091||||1861388..1861477|-|90 bp|Between spr1884 (gua A) (- strand) and spr1885 (- strand)|S.pneumoniae|R6|NC_00 3098.1|IG-rc|110
gaaagaagttgtcctatgtgggcagctttttcttgtccataaaaaatgtttatcacagccttaaaaaaaacatattagacgaaagtcattttgagtgat

SEQ ID NO: 3532 - DNA, 71 bp, Streptococcus pneumoniae
  misc_feature (1)..(71): tiling:Spneumo1:WAN0249JQ; Cluster includes WAN024E6H-rc R 6.IG_1921||||1775430..1775500|-|71 bp|Between spr1803 (plc R) (- strand) and spr1804 (- strand)|S.pneumoniae|R6|NC_00 3098.1|IG-rc|110
gaaagatgtrrccgttacaattttttaagtttcacagtatttttcgaagcaggtagaagaggaggcgtctg

SEQ ID NO: 3533 - DNA, 773 bp, Streptococcus pneumoniae
  misc_feature (1)..(773): tiling:Spneumo1:WAN024DGG; Cluster includes WAN0244CY spr0 592||15902636|NP_358186.1|606081..606836|+|756 bp|Conserve d hypothetical protein|S.pneumoniae|R6|NC_003098.1|ORF|111
gaaaggataagtatgcctactattctcattaccggagctagcggtggtctagctcaagaaatggtcaaactcctgcccaatgaccaactcatcttgcttggtagaaataaggaaaaattagcccaactctacggaaattattcccatgcagaattgattgaaattgatattaccgacgattcagccctagaagctytggtaactgatctttatctccgctatggcaagattgatgtcttgattaacaacgctggttacgggatttttgagggatttgaccarattgctgataaagayattcaccagatgtttgaggtcaatacctttgccctgatgaatctgtctcgtcaccttgcggctcgtatgaaggaaagcagcamaggkcatatcatcaacatcgtcagcatggcaggtctaatagctactggcaagtctagtctttactcagcgaccaagtttgcggctattggtttttcaaatgctctgcgactcgaacttatsccctatkgagyctatgtgacamcagtcaatccaggwccawtccgwacaggatttttygacmargcygacccagatggaacttatcttaaatcggttgaycgcttcctsytagarscagatgcagtggctaaaaagattgtcaagattataggmaaaaayaaacgagaactcaatctcccgattttgttgaacctagcycataagttttatacyctctttccyaagctagctgataagttggcaggggaaacttttaattataagtaactaat

SEQ ID NO: 3534 - DNA, 66 bp, Streptococcus pneumoniae
  misc_feature (1)..(66): tiling:Spneumo1:WAN0249KY; Cluster includes WAN024E75-rc R 6.IG_1869||||1723026..1723090|-|65 bp|Between spr1754 (lyt A) (- strand) and spr1755 (- strand)|S.pneumoniae|R6|NC_00 3098.1|IG-rc|110
gaaataaaggagtttctggttctggattgtaaaaaatgagttgttttaattgataaggagtagaat

SEQ ID NO: 3535 - DNA, 77 bp, Streptococcus pneumoniae
  misc_feature (1)..(77): tiling:Spneumo1:WAN0249NG; Cluster includes WAN024E8J-rc R 6.IG_1693.2||||1617013..1617089|-|77 bp|Between spr1644 (- strand) and spr1645 (- strand)|S.pneumoniae|R6|NC_003098. 1|IG-rc|110
gaaataagagttawtttttatgtccaagtctctctattatttctaaatttawggaagaaataaagagaggcttttgg

SEQ ID NO: 3536 - DNA, 87 bp, Streptococcus pneumoniae
  misc_feature (1)..(87): tiling:Spneumo1:WAN024AFH; Cluster includes WAN024EJV-rc R 6.IG_800.1||||764970..765056|-|87 bp|Between spr0770 (+ st rand) and spr0771 (+ strand)|S.pneumoniae|R6|NC_003098.1|I G-rc|110
gaaatagagcaaaaattctataaatatacttttctagtataacaaaaaaaagcctaaaaggctttgattttgtctggaagctgaggg

SEQ ID NO: 3537 - DNA, 360 bp, Streptococcus pneumoniae
  misc_feature (1)..(360): tiling:Spneumo1:WAN024GKS; Cluster includes WAN023M0N 3137 48_844||||448275..448499|+|225 bp|EGAD orf prediction|S.pn eumoniae|R6|NC_003098.1|ORF|110
gaaatatggctgtttttcctatcggctatgatcagagatagaccaatctatcggcgcgtacgaacagaaaatctgccaataatgagtagaacaagcccgatcgtaaagacggaaatcaacgcatgtattcattacatgamatrgatcgwctrmttgmmtcaaatgattatatctmwgamggwtataatatcgctgccattaagaaaaaatatgctgaacgtgaagcgaaatccaagaaagcggttagtcagactgaagtacgtcgtgcacttcacaatgaactcctccaacaggggcgttttgcttcagtacagtcaccttttggtcgcggttaggcaaccgcaagtagtcatagattaa

SEQ ID NO: 3538 - DNA, 78 bp, Streptococcus pneumoniae
  misc_feature (1)..(78): tiling:Spneumo1:WAN0249J9; Cluster includes WAN02471O R6.I G_201||||189263..189339|+|77 bp|Between spr0180 (cls) (+ s trand) and spr0181 (orf47) (+ strand)|S.pneumoniae|R6|NC_0 03098.1|IG|110
gaaatctagracttaggatacaaaccagacctatttttcttgtcttttacgaatagaaagaaagaggaggggaattca

SEQ ID NO: 3539 - DNA, 210 bp, Streptococcus pneumoniae
  misc_feature (1)..(210): tiling:Spneumo1:WAN024ESE; Cluster includes WAN0243HO spr1 720||15903762|NP_359312.1|1700709..1700915|-|207 bp|Hypoth etical protein|S.pneumoniae|R6|NC_003098.1|ORF|121
gaaatgaaattamaaaaattattaaargatgacacawaagtttttgaaaaatctacattcaaatttgtagaaggatataaaatatacctgacagaatctaaagaatctggaattaaacaaatggacaatgtcataaaatattttgagtttattgaatctaaaagtattgctttatattttcaaaaacgattaaatgagctgatagattaa

SEQ ID NO: 3540 - DNA, 1038 bp, Streptococcus pneumoniae
  misc_feature (1)..(1038): tiling:Spneumo1:WAN024GGB; Cluster includes WAN023RRO cont ig_1596_1||||351..1550|-|1200 bp|Glimmer 2.02 orf predicti on|S.pneumoniae|670|WAN01UDEG|ORF|001
gaaatgaatcaaacagtagaatatatcaaagaactgacagccatcgcatcgccaacgggcttyactcgtgaaatttcgaattatttagtcaagactctagaaggttttggttaccagccagttcgcacagctaagggtggtgtcaatgtgaccatcaaaggtcaaaatgatgagcaacatcgctatgtgactgcycatgtggatacgctgggtgctattgttcgtgctgtcaaaccagatggtcgtcttaaattggaccgtatcggtggttttccttggaacatgattgaaggtgaaaactgtaccgttcatgtggctagcacaggtcaaaaggtatcaggaaccatcctcatccaccaaacttcttgccatgtctacaaggatgcaggaactgcagarcgcacgcaggacaatatggaagtgcgtttggatgtaaaagtaagcaatgaaaaagaaactcgtgctcttgggattgaggtcggtgattttatcagcttcgatmcacgaactgtygtgacwgakacwggttttatcaagtctcgycayttggatgayaaggtcagcgcassrrttttgctcaayctkcttcgtrtttataagraagagrrgattgaattgccagtaacaactcattttgctttttcagtyttygaagargtrggmcayggtgcwaaytcyaayattccwrvwsaggtagtagaatatctggctgtrgatatgggagctatgggmgatgaccarcagacrgatgagtayacagtrtctatctgtgtmaaggaygcttcmggtccytatcactatgacttccgtcaacacttrgtwgyyttggckaargagcaagatattccatttaagctcgacatytatccattttacggwtcggaygcttcrgcagckatgtcwgcaggwgcagargtmaagcatgcwctycttggagctggtattgagtcmagtcactcttaygarcgmacmcacatygattcagtartrgcgactgagcgtatggtygatgcttatcttaagagygmrkyggtawca

SEQ ID NO: 3541 - DNA, 53 bp, Streptococcus pneumoniae
  misc_feature (1)..(53): tiling:Spneumo1:WAN024AJL; Cluster includes WAN024EM6-rc R 6.IG_616||||606837..606889|-|53 bp|Between spr0592 (+ stra nd) and spr0593 (cpsY) (- strand)|S.pneumoniae|R6|NC_00309 8.1|IG-rc|110
gaaatgataagaaccaatatgtaggctagcaacaacctgcacattggttcttt

SEQ ID NO: 3542 - DNA, 133 bp, Streptococcus pneumoniae
  misc_feature (1)..(133): tiling:Spneumo1:WAN024A54; Cluster includes WAN024EEF-rc R 6.IG_1225.1.1||||1180819..1180941|-|123 bp|Between spr1181 (gdhA) (+ strand) and spr1182 (- strand)|S.pneumoniae|R6| NC_003098.1|IG-rc|110
gaaattggtttgaattccgcaatyaatttgttcagtttttatttyatttcattttatttarttagatttyccaaytktytaaytcaagctaaaaatccccaatcgtagtgattgaggattragyaaataaatc

SEQ ID NO: 3543 - DNA, 142 bp, Streptococcus pneumoniae
  misc_feature (1)..(142): tiling:Spneumo1:WAN024AC5; Cluster includes WAN024EI9-rc R 6.IG_941||||891302..891425|-|124 bp|Between spr0905 (yfnA) (+ strand) and spr0906 (lmb) (+ strand)|S.pneumoniae|R6|N C_003098.1|IG-rc|110
gaacaactccttaaccatttaattaactagtaaatattctactcctgaaaatttaatctgtcaagatatttttagaaaaaatttgaaatttctttcacatataaaaatctrctgagtgtcaacaactcaatagactttcact

SEQ ID NO: 3544 - DNA, 907 bp, Streptococcus pneumoniae
  misc_feature (1)..(907): tiling:Spneumo1:WAN0249TU; Cluster includes WAN024E5T R6.I G_1996||||1810790..1811696|+|907 bp|Between spr1836 (ptcA) (+ strand) and spr1837 (adhE) (- strand)|S.pneumoniae|R6| NC_003098.1|IG|120
gaacactgtcrttcccatctgtctttattaatgacgrctacattgtaggaacctccaaaagttggacaaaatgattgaaaggattggatcctgcattacacaagatccaatccttttcttttactctagtttttataatrtrttgaatctagaatagtccactgyartttctaaaaaattgctggaaatagatgttaagctccaatttatttgtttatatcttatttcagtttactatactagcttattattctagtgaaaaattgaatgagccactatttatttaatatgtatgatgagggaatgactcaaaaacttcttgtcgatataagaatatctgagatagtattttaaaacgaaaggattataaaagctcatttccttcgcacttattttatagagatctatcattatactctttagaaatcaaaaagcaacacaccttgtcatcgttttctcgtttgctctttgattttaattgggccttagtaaatactactcttaaattaaactatagtgaattgaaataagatgtgaacaactctatcagraaagtaaaattaatttctataaatgttttagcaattgtttcgtactattttagattcagtctactatactatattttttatatatyaaaatgaaataagaacaggacaaatcgatcaggacagtcaaatcgaattctaacaatgttttagaagcagawrtgtactattcyagtttcaatctattatatattttgtttctattctagtttttcaaaaagggcaaaaaggcctcaatatcataaaaaggcatcctatcaggtgttcaaaaaccttgataggatgccttttatcatagaaaaaktactggatctttccctcaaattgagtttttgtcttgcttctagactgataaacaa

SEQ ID NO: 3545 - DNA, 152 bp, Streptococcus pneumoniae
  misc_feature (1)..(152): tiling:Spneumo1:WAN0249Y9; Cluster includes WAN024EBN-rc R 6.IG_1440||||1375614..1375765|-|152 bp|Between spr1396 (rp sF) (- strand) and spr1397 (asnS) (- strand)|S.pneumoniae| R6|NC_003098.1|IG-rc|110
gaacaggaaaacgcccatgtggcgttttttcgaattctagtgtttttacttgcgtaaaaaaattttttctagtataatagtttattgtgagcgaacctcacttaccccttgcaaagtcttggggtcattagaccaaaaggaggaacatatca

SEQ ID NO: 3546 - DNA, 83 bp, Streptococcus pneumoniae
  misc_feature (1)..(83): tiling:Spneumo1:WAN024ASR; Cluster includes WAN024801 R6.I G_3||||2917..2999|+|83 bp|Between spr0003 (+ strand) and s pr0004 (+ strand)|S.pneumoniae|R6|NC_003098.1|IG|110
gaacccttagttagagggttagcactttatccctttttgtgttataatattagggattgaaatgaaaacggagaatgagaaat

SEQ ID NO: 3547 - DNA, 309 bp, Streptococcus pneumoniae
  misc_feature (1)..(309): tiling:Spneumo1:WAN0249R7; Cluster includes WAN02471Y-rc R 6.IG_178||||166512..166820|-|309 bp|Between spr0157 (- str and) and spr0158 (- strand)|S.pneumoniae|R6|NC_003098.1|IG -rc|110
gaacctcataataagcaaatccgagaaagaaacttctcggtttttctttatcctgctgcaccttactatagtgaaatgaaataagaacaggataaatcgatcaggacagtcaaatcgatttctaacaatgttttagaagcaaaggtgtactattctagtttcaatctgctatatcataacagttatttcagattttctttgtaaattttctatcttttttcaaaatattcttgcatttttccaaaattttttgtagaatatagattacatatacagattattctgaaaattcaaaaaggagtatttatc

SEQ ID NO: 3548 - DNA, 93 bp, Streptococcus pneumoniae
  misc_feature (1)..(93): tiling:Spneumo1:WAN0249E4; Cluster includes WAN024E3D-rc R 6.IG_2228||||2014022..2014114|-|93 bp|Between spr2021 (- s trand) and spr2022 (mreD) (- strand)|S.pneumoniae|R6|NC_00 3098.1|IG-rc|110
gaacgacatataaatgtaacaaaggcgtaatatttattaggcctttttttggtatactagtattgtctttaaaagaaggagtatctacgtaat

SEQ ID NO: 3549 - DNA, 312 bp, Streptococcus pneumoniae
  misc_feature (1)..(312): tiling:Spneumo1:WAN024A5T; Cluster includes WAN024EEV-rc R 6.IG_1194||||1157926..1158237|-|312 bp|Between spr1153 (ca rB) (- strand) and spr1154 (carA) (- strand)|S.pneumoniae| R6|NC_003098.1|IG-rc|110
gaacgagtaaaagctcgtcggagaatttatgtaactgaacacggacggaaagctcagaatgtagagaaaccaacttggattgtcaatccttccttgatttcctaaaattcaatcgctttctattcgtcctttgtatcttatttaatgtcgccctgagaggcgacgaatagaaaggagaagggtgctccgtatttgctgaactgaatacgggctacggacggtgctaaaaagatagttattcctagaactgacagttcttcgtcataactcctattttagctttgtccgcttgacacccttaatatcttatat

SEQ ID NO: 3550 - DNA, 52 bp, Streptococcus pneumoniae
  misc_feature (1)..(52): tiling:Spneumo1:WAN024AD8; Cluster includes WAN0247H1 R6.I G_117.1||||104415..104466|+|52 bp|Between spr0096 (+ stran d) and spr0097 (- strand)|S.pneumoniae|R6|NC_003098.1|IG|3 10
gaactaacgaacaaataatatgtaaagagtcgaggaaatccctcggcttttt

SEQ ID NO: 3551 - DNA, 115 bp, Streptococcus pneumoniae
  misc_feature (1)..(115): tiling:Spneumo1:WAN0249KC; Cluster includes WAN024E6R-rc R 6.IG_1889.1.2.1||||1743275..1743389|-|115 bp|Between spr17 74 (+ strand) and spr1775 (ndk) (- strand)|S.pneumoniae|R6 |NC_003098.1|IG-rc|110
gaacttcaataatttctttttgtgttaaatcattatttaactaaatctttggaggcaatacgttttcaaagctacttttttaccataggttttgagccttcaacacagattacta

SEQ ID NO: 3552 - DNA, 74 bp, Streptococcus pneumoniae
  misc_feature (1)..(74): tiling:Spneumo1:WAN0249JX; Cluster includes WAN024E6K R6.I G_1908||||1762518..1762591|+|74 bp|Between spr1790 (+ stra nd) and spr1791 (pflC) (- strand)|S.pneumoniae|R6|NC_00309 8.1|IG|110
gaagaaaaaggcttagctgatttgctaagtctttttgcaagtcaaaagcccgatgtttccatcaggcttctttt

SEQ ID NO: 3553 - DNA, 238 bp, Streptococcus pneumoniae
  misc_feature (1)..(238): tiling:Spneumo1:WAN024AMH; Cluster includes WAN024ENQ R6.I G_479.2.1||||464240..464477|+|238 bp|Between spr0455 (dnaK ) (+ strand) and spr0456 (dnaJ) (+ strand)|S.pneumoniae|R6 |NC_003098.1|IG|110
gaagagacaaaaatatataaatatttctgtacttataggatatttaaaatcaaaataaagttaatttacttatttgcagaggttgcaacccagcctctgtttttcgataaaaagggacggaatctcatttgtttgggttttgtctcatcaatagaaaggaacaaagagtgttcgtaactgaacacgggtttcagaatttcttactaaatataaaagaaaggaattgamcccgayctaa

SEQ ID NO: 3554 - DNA, 76 bp, Streptococcus pneumoniae
  misc_feature (1)..(76): tiling:Spneumo1:WAN024ALJ; Cluster includes WAN024EN9 R6.I G_532||||507143..507218|+|76 bp|Between spr0508 (+ strand) and spr0509 (pheT) (+ strand)|S.pneumoniae|R6|NC_003098.1 |IG|110
gaagaggattcttctattgaaatgataggaaaggaaaagaacyagwgtgrcaaykgtcattctggagaactaaatt

SEQ ID NO: 3555 - DNA, 90 bp, Streptococcus pneumoniae
  misc_feature (1)..(90): tiling:Spneumo1:WAN0249W8; Cluster includes WAN024EAA-rc R 6.IG_1559||||1490245..1490334|-|90 bp|Between spr1512 (- s trand) and spr1513 (mutT) (- strand)|S.pneumoniae|R6|NC_00 3098.1|IG-rc|110
gaagatgattatcgtatttctaaatccatttttaacaactagcatggtataataatatgcaggaaaattttgaattatgaggaagactag

SEQ ID NO: 3556 - DNA, 116 bp, Streptococcus pneumoniae
  misc_feature (1)..(116): tiling:Spneumo1:WAN0249WK; Cluster includes WAN024EAG-rc R 6.IG_1544.2||||1475870..1475985|-|116 bp|Between spr1497 ( - strand) and spr1498 (- strand)|S.pneumoniae|R6|NC_003098 .1|IG-rc|110
gaagatgttataaggcagtaatttgaaactkccttttaataaggatttragaatatargcagtttycaactagttgaaaaarcgttataatgataataggaagtaatactcaatga

SEQ ID NO: 3557 - DNA, 64 bp, Streptococcus pneumoniae
  misc_feature (1)..(64): tiling:Spneumo1:WAN0249N4; Cluster includes WAN024E8D-rc R 6.IG_1704.1||||1628357..1628420|-|64 bp|Between spr1655 (- strand) and spr1656 (- strand)|S.pneumoniae|R6|NC_003098. 1|IG-rc|110
gaaggaaatccttcaaattacagatttctttcaccgccttttccattttgtggtataatgaaaa

SEQ ID NO: 3558 - DNA, 178 bp, Streptococcus pneumoniae
  misc_feature (1)..(178): tiling:Spneumo1:WAN024ADE; Cluster includes WAN024EIS R6.I G_893||||852841..853018|+|178 bp|Between spr0857 (celB) (+ strand) and spr0858 (+ strand)|S.pneumoniae|R6|NC_003098. 1|IG|110
gaaggataaatgttgtagattagtgaaataaactaaaaatttgttgcataataatgataaaaatggtataatraaaacgtattcaatattgaggatataaaatcattaaaaatcagcaaaagttgttttattagttagtttataatctattggtcttcttcagtccagtgtatctgct

SEQ ID NO: 3559 - DNA, 214 bp, Streptococcus pneumoniae
  misc_feature (1)..(214): tiling:Spneumo1:WAN024AHV; Cluster includes WAN024EL7 R6.I G_688||||668257..668469|+|213 bp|Between spr0664 (+ strand ) and spr0665 (prfB) (+ strand)|S.pneumoniae|R6|NC_003098. 1|IG|110
gaagggaagcccaaaggcttcttttttcatgaaaaggggattagagcaaaagatggaaagaaatgataaaatatgctataatgaaataatgtaaaaaaggagtatttatggacatttcagtaattcgtcagaaaattgacgcaaatcgtgaaaaattagcttctttcagggggtctctttgacctcgaagggctagaggaagagattgccatct

SEQ ID NO: 3560 - DNA, 130 bp, Streptococcus pneumoniae
  misc_feature (1)..(130): tiling:Spneumo1:WAN0249Q4; Cluster includes WAN024EB4 R6.I G_1492.2||||1431922..1432047|+|126 bp|Between spr1445 (pep Q) (+ strand) and spr1446 (- strand)|S.pneumoniae|R6|NC_00 3098.1|IG|110
gaagtcatctatcaaaagatgttagaaaaagttcaatttcactagaaaatgaggaaaatctycccacaataaaacgcatagtatcaggtrttgaatgtactgmccccaaacagttagacaattaatttat

SEQ ID NO: 3561 - DNA, 112 bp, Streptococcus pneumoniae
  misc_feature (1)..(112): tiling:Spneumo1:WAN024AEI; Cluster includes WAN024EJE R6.I G_837.2||||804958..805059|+|102 bp|Between spr0801 (- stra nd) and spr0802 (+ strand)|S.pneumoniae|R6|NC_003098.1|IG| 110
gaagtctaatgctaaaatcttatcagtgagaagatttcttaaagtttattctttgtagtttcatctgtattagtacataatttaacttagagaaaataggaggactaatcga

SEQ ID NO: 3562 - DNA, 590 bp, Streptococcus pneumoniae
  misc_feature (1)..(590): tiling:Spneumo1:WAN024EW3-3; Cluster includes WAN0243C1 sp r1924|aspS|15903965|NP_359515.1|1906865..1908628|-|1764 bp |Aspartyl-tRNA synthetase (aspartate-tRNA ligase)|S.pneumo niae|R6|NC_003098.1|ORF|221
gaagtggctaatgcaacactgggtgcccttcgtggacgtattgctaaagagcttggcttgattgataatgataagttcaacttcctttgggtggttgactggccgatgtttgaatggtctgaagaagaaggccgctacatgagcgcccaccatccwttcacacttccacaggaagagactgctcaygaattagaaggtgatttggctaaggttcgtgccattgcttacgatatcgtcttgaacggttatgagcttggtggtggtagccttcgtatcaaccaaaaagaccttcaagaacgcatgttcaaggctcttggtttctcarctgaagaagcyaatgaccagtttggtttccttcttgaagccatggactatggtttcccaccacacggtggtttggctatcgggcttgaccgttttgtcatgttgcttgctggagaagaaaatatccgtgaagtcattgcctttcctaagaacaacaaggcaactgacccaatgacacaagctccatcaacagtcgctctcaaacaactagaggaactcagcttacaagtagaagaagatgaaacaarcaaaacgaattaactaat

SEQ ID NO: 3563 - DNA, 55 bp, Streptococcus pneumoniae
  misc_feature (1)..(55): tiling:Spneumo1:WAN024AJ5; Cluster includes WAN024ELX-rc R 6.IG_633.1||||622223..622277|-|55 bp|Between spr0609 (+ st rand) and spr0610 (+ strand)|S.pneumoniae|R6|NC_003098.1|I G-rc|110
gaatattaatcgttgtggtctttccagaaccagatggtyctaaaaatccaaaaat

SEQ ID NO: 3564 - DNA, 56 bp, Streptococcus pneumoniae
  misc_feature (1)..(56): tiling:Spneumo1:WAN024AHE; Cluster includes WAN024EKX R6.I G_702||||684452..684507|+|56 bp|Between spr0678 (+ strand) and spr0679 (ppiA) (- strand)|S.pneumoniae|R6|NC_003098.1 |IG|110
gaatgagagtaaaagaaatacagtaccgaatgtggatactgtattttttttggttt

SEQ ID NO: 3565 - DNA, 58 bp, Streptococcus pneumoniae
  misc_feature (1)..(58): tiling:Spneumo1:WAN0249E7; Cluster includes WAN024E3E R6.I G_2227.2.1||||2012704..2012761|+|58 bp|Between spr2020 (rp sB) (- strand) and spr2021 (- strand)|S.pneumoniae|R6|NC_0 03098.1|IG|110
gaatgagtattatcgttcacacgacaattttcattytaccatacttttccaatatttt

SEQ ID NO: 3566 - DNA, 88 bp, Streptococcus pneumoniae
  misc_feature (1)..(88): tiling:Spneumo1:WAN0249Z2; Cluster includes WAN024EC2-rc R 6.IG_1399||||1338290..1338377|-|88 bp|Between spr1355 (gln P) (- strand) and spr1356 (- strand)|S.pneumoniae|R6|NC_00 3098.1|IG-rc|110
gaatgtttaaacatatagaactgtagtttatctcttttgatagctacggtttttatttgtatatggtagaatctttttacaaaaatac

SEQ ID NO: 3567 - DNA, 61 bp, Streptococcus pneumoniae
  misc_feature (1)..(61): tiling:Spneumo1:WAN0249IN; Cluster includes WAN024E5Q R6.I G_2009||||1825744..1825804|+|61 bp|Between spr1849 (- stra nd) and spr1850 (- strand)|S.pneumoniae|R6|NC_003098.1|IG| 110
gaattacacagcggactgttcactcttggactgtatgatttatgatgttttacaaattatc

SEQ ID NO: 3568 - DNA, 210 bp, Streptococcus pneumoniae
  misc_feature (1)..(210): tiling:Spneumo1:WAN024A5P; Cluster includes WAN024EET R6.I G_1197||||1160831..1161040|+|210 bp|Between spr1156 (pyrR) (- strand) and spr1157 (nth) (- strand)|S.pneumoniae|R6|N C_003098.1|IG|110
gacaaacctccaaaaagaaaagtctccttaaacaaggagacttgaaatttatagccaagcgagccctactgcacacagtatagacttcacccttctactttatcgcgctccttgcctgcctcacgggacaggtttaaaggaatatttagttatcatttactatagcacaaagcatgcttaaaatcaagcaaaaagtttcaatgtagcatc

SEQ ID NO: 3569 - DNA, 194 bp, Streptococcus pneumoniae
  misc_feature (1)..(194): tiling:Spneumo1:WAN024A5E; Cluster includes WAN024EEM-rc R 6.IG_1206||||1168550..1168743|-|194 bp|Between spr1165 (py rP) (+ strand) and spr1166 (ffh) (- strand)|S.pneumoniae|R 6|NC_003098.1|IG-rc|110
gacaagagattgatgcaaatctcatttgatgagaaaataaagtaaaaatttctatgataaaacgtacagtatcaaggttttagaatatctgatattatacgttttttgattttaataattttgttaagacacttttattatggtatacgaaaaatccactcagctgtctgagtggattaggtgtatttagactc

SEQ ID NO: 3570 - DNA, 906 bp, Streptococcus pneumoniae
  misc_feature (1)..(906): tiling:Spneumo1:WAN024F3B; Cluster includes WAN0244FJ-3 sp r0499||15902543|NP_358093.1|497816..498883|+|1068 bp|Hypot hetical protein|S.pneumoniae|R6|NC_003098.1|ORF|111
gacaagagtcagtttgttatggaacgctctcagttcgaggagatgttccaacttcaaagtagtcgcttgacgacgcaagaaaaattacaattgtttacctcygtgtttgctggmcgttatgatgtttatgctaagaattttatcaatgaacaagggaaaattcagtattttccttcctatgattatggttggaagcagttgccacctgaaaaacggagtttccagacattgacgaactccgttttgaaatctcattttcgtggggaggcagctatcggtatctttcctatgcacttagatgatagctgttattttttggtactggatttggatgaaggagattggaaagaagctggtttaaccattcgaagaatagcmagggaacgccagatggaagcccatttagagatttctcgttcgggtyacggactccatatttggttcttctttgaggaagcgattcygagtcgaraggctcgcytgtttggaaagaaactrwtagaaytggcwatgcaggaaagtatgcaactgtcctttgattcttttgatsgcatgtttccaaatcaggatgtycttcctaarggkggatttgrwaatttrattkccytkccttttcaaggagaagcttaycatcaagggcgaacggtctttgtggatgaacaktttcagccttatgaagaycaatggaggtatctacaagaaattcagargatttcaactgctaaagtggcactgttaatccaagaggagttaggcaagcaagaattggayaaggagttgaagrtcgtyttatccaatatgatccaacttgaaaaatcgtctgtgacayccaagrcactktttttctwgamwaatatggcttccttttctaatcccgaattttatagtagattgaaactagaatag

SEQ ID NO: 3571 - DNA, 53 bp, Streptococcus pneumoniae
  misc_feature (1)..(53): tiling:Spneumo1:WAN024AFG; Cluster includes WAN024EJU R6.I G_804||||768844..768896|+|53 bp|Between spr0774 (nifU) (+ strand) and spr0775 (+ strand)|S.pneumoniae|R6|NC_003098.1 |IG|110
gacaagtttcttttgtcttatgaattattagaaatgaagaaagaaaggatayt

SEQ ID NO: 3572 - DNA, 178 bp, Streptococcus pneumoniae
  misc_feature (1)..(178): tiling:Spneumo1:WAN0249DP; Cluster includes WAN024E36 R6.I G_2246||||2032279..2032456|+|178 bp|Between spr2039 (- str and) and spr2040 (+ strand)|S.pneumoniae|R6|NC_003098.1|IG |110
gacaataataaaggttggttttttttaaattgctttccattctttaaacttagtttctccttttttaaacatattgtctaaaattttgatataatagattatacattaaaaaatctaaattacaagataaaaaatctatttttagacatatagtctaatttgtttacaaggaggaaat

SEQ ID NO: 3573 - DNA, 115 bp, Streptococcus pneumoniae
  misc_feature (1)..(115): tiling:Spneumo1:WAN024AP3; Cluster includes WAN024EOZ R6.I G_421||||394661..394775|+|115 bp|Between spr0397 (+ strand ) and spr0398 (rpmB) (+ strand)|S.pneumoniae|R6|NC_003098. 1|IG|110
gacacaaataaaaaatcttccaattcccttgcaaaaaacaagaaartgtgataacatagtacggtatgtggtgctagcacatccgctatattagatctaataggaggaaaacaca

SEQ ID NO: 3574 - DNA, 244 bp, Streptococcus pneumoniae
  misc_feature (1)..(244): tiling:Spneumo1:WAN024ADN; Cluster includes WAN024EIX-rc R 6.IG_879||||841561..841804|-|244 bp|Between spr0843 (+ str and) and spr0844 (gidA) (+ strand)|S.pneumoniae|R6|NC_0030 98.1|IG-rc|110
gacactaatacctctttgggagtatgaagttaagattcacattgaaaaagccaatcagacttacgagctttcgagtttcttggctcaggmtkaaaaasyccacwggrctktttsacwcccacaaatctttctattttttcttctactagtataacaaaaaaagggaagaaggcaaacttccctgtttagtcattttcttgatgtaaagagatagtgagtattccagttaagaatcaattatatg

SEQ ID NO: 3575 - DNA, 80 bp, Streptococcus pneumoniae
  misc_feature (1)..(80): tiling:Spneumo1:WAN024AQN; Cluster includes WAN024EPW R6.I G_328.1||||308158..308237|+|80 bp|Between spr0307 (clpL) ( + strand) and spr0308 (luxS) (- strand)|S.pneumoniae|R6|NC _003098.1|IG|110
gacagaattttgaggataaaaaagaaggagccagctgaaaaaaactggttcctttttaggtacgacaggcatgtcgtata

SEQ ID NO: 3576 - DNA, 102 bp, Streptococcus pneumoniae
  misc_feature (1)..(102): tiling:Spneumo1:WAN0249NB; Cluster includes WAN02471W R6.I G_181.2||||170244..170345|+|102 bp|Between spr0160 (hexB) (+ strand) and spr0161 (ribE) (- strand)|S.pneumoniae|R6|N C_003098.1|IG|110
gaccactctgcgactggtttcctagtttgctctatgattttcacagagyattaaattgcgattttgccaagtttctttattcgtctaaaagtagagtctgtt

SEQ ID NO: 3577 - DNA, 51 bp, Streptococcus pneumoniae
  misc_feature (1)..(51): tiling:Spneumo1:WAN0249OM; Cluster includes WAN024E98-rc R 6.IG_1638||||1571246..1571296|-|51 bp|Between spr1592 (- s trand) and spr1593 (- strand)|S.pneumoniae|R6|NC_003098.1| IG-rc|110
gaccgaaactccaaataactgtttttatagagaaataaaggggactagcct

SEQ ID NO: 3578 - DNA, 53 bp, Streptococcus pneumoniae
  misc_feature (1)..(53): tiling:Spneumo1:WAN0249VM; Cluster includes WAN024E9Y-rc R 6.IG_1582.1.2||||1514142..1514194|-|53 bp|Between spr1535 (- strand) and spr1536 (nanA) (- strand)|S.pneumoniae|R6|N C_003098.1|IG-rc|110
gacctccttgtgaagattgaggagatactkaatgaaaatcaaagaagaaacta

SEQ ID NO: 3579 - DNA, 1010 bp, Streptococcus pneumoniae
  misc_feature (1)..(1010): tiling:Spneumo1:WAN024DPN; Cluster includes WAN0243CH spr1 908||15903949|NP_359499.1|1885060..1886193|-|1134 bp|Conse rved hypothetical protein|S.pneumoniae|R6|NC_003098.1|ORF| 440
gaccttcttcttcaagggcgagacgataattctctaaatgaagtggccaatcaatggattgccacttttttcytttcgtgttacaataagggtatgaatcagtatcagaaaaagattgttaacggaaaaatttattcgctcctatccggcttaatatggggaatctgtggaattttaggagagtacttctttactcattatcaggtgtcttcgggctggattacctctatgcgtttgacactggcagggagtcttgtactcatttggtctgcaatacaattaaaatcgcaagtgctagatatttggcgagacaagaaaaattacctgccctttttagcctatgctattttggggattttttcagttcagtattttttctatctctgtgtagaatactcaaatgctacgacagcaactattttacagtttattagccctgtctttatcctcttttacaatcgcttggtttatcaaaaacgagcgtcaaaaagcgctgttttctatgttttggttgccatgctgggtgtttgcttgatggcgacaaagggagayctctctcagttatccatgacgccgctagctcttataacaggtttgctgagtgccatgggtgttatgtttaatgttatcttgccccaaccttttgctaagcgttatggttttgttcctacggttgggtgggggatgattttggcaggtttgtttagcaatgtcctctcgccggtttatcagctttcctttactcttgatatttggagtatcttgatttgcctcattatcgctttctttggaacggcttttgcttttttcatttccatgaaggctgtgtccttggtttctcctttggtggttgccgttatcagtgccagtgaacctctctcttctgctctcttgagtgttttgttcttaggattagtagtggattggtccctccttctagctatagccttgattattttacccatgatatttttgtctatagaagaagcgaaagaaagtagataactaat

SEQ ID NO: 3580 - DNA, 128 bp, Streptococcus pneumoniae
  misc_feature (1)..(128): tiling:Spneumo1:WAN0249ZX; Cluster includes WAN024ECJ R6.I G_1373.2||||1317614..1317740|+|127 bp|Between spr1329 (gly Q) (- strand) and spr1330 (- strand)|S.pneumoniae|R6|NC_00 3098.1|IG|120
gacgagttagtactgcgtctagctcaggcacyctagtgctgagcgtrgrgcagyccgactgtaaggaggtytctgccactgaygcagtgaaatgttaatttcttagacattgtttactcctttagttt

SEQ ID NO: 3581 - DNA, 174 bp, Streptococcus pneumoniae
  misc_feature (1)..(174): tiling:Spneumo1:WAN024BFC; Cluster includes WAN02413R |||C AB04756.1|||174 bp||S.pneumoniae||Z82001|ORF|001
gacgatttatwskrstywatactcttcgaaaatctcttcaawccrcgtcagcttccatctrcaacctcaaaacagtgttttgagcagcctgcagctagyttcctagtttgctctttgattttcattgagtatmwaamyaakaacaccttgcttggcgcagggtgtttcgcgtga

SEQ ID NO: 3582 - DNA, 63 bp, Streptococcus pneumoniae
  misc_feature (1)..(63): tiling:Spneumo1:WAN024A6E; Cluster includes WAN024EFA-rc R 6.IG_1168||||1131618..1131680|-|63 bp|Between () (- strand ) and spr1128 (guaC) (- strand)|S.pneumoniae|R6|NC_003098. 1|IG-rc|110
gacggggtctttgaccaaaaaacttgttattagagcaaatttctgttataataaaacaagttt

SEQ ID NO: 3583 - DNA, 146 bp, Streptococcus pneumoniae
  misc_feature (1)..(146): tiling:Spneumo1:WAN0249JJ; Cluster includes WAN02471P R6.I G_200||||187585..187729|+|145 bp|Between spr0179 (+ strand ) and spr0180 (cls) (+ strand)|S.pneumoniae|R6|NC_003098.1 |IG|110
gactatgcaagtagaaagggctggatttttcagcctttttacttttacctagaaaataatyataaatacttgccttctaccgaatacctgcgttatactagtatcaattacttgtttttagcattcaaactatcaaggaggggata

SEQ ID NO: 3584 - DNA, 73 bp, Streptococcus pneumoniae
  misc_feature (1)..(73): tiling:Spneumo1:WAN024F9S; Cluster includes WAN023HZN tRNA -Lys|tRNA-Lys|||1692042..1692114|-|73 bp|tRNA-Lys|S.pneumo niae|R6|NC_003098.1|RNA|220
gactcgttagctcagttggtagagcaattgacttttaatcaatgggtcactggttcgagcccagtacgggtca

SEQ ID NO: 3585 - DNA, 182 bp, Streptococcus pneumoniae
  misc_feature (1)..(182): tiling:Spneumo1:WAN0249DH; Cluster includes WAN024E33 R6.I G_2260||||2036224..2036393|+|170 bp|Between spr2044 (- str and) and spr2045 (sphtra) (+ strand)|S.pneumoniae|R6|NC_00 3098.1|IG|110
gactctattctaacatattctctattttttcacatcttattcacaaaataaaaaatagatttcaattaagaaaatcacaatttcaaaagagttatccacagtttgtgtaaaacttttgtgtttaagttataattaagctagtcagtttatactttcagtaattcaaacatatggaggcaaat

SEQ ID NO: 3586 - DNA, 2493 bp, Streptococcus pneumoniae
  misc_feature (1)..(2493): tiling:Spneumo1:WAN024GLC-3; Cluster includes WAN0244H6 sp r0440||15902484|NP_358034.1|441113..446092|+|4980 bp|Hypot hetical protein|S.pneumoniae|R6|NC_003098.1|ORF|221
gactgaaggtggagaaggtattgaaggtatgttgaacggtaccattactagcttgtcagataaatggtcttcagctcagttgagtggtagtgtggatattcgtttgaccaagycacgtaccgttgttagatgggtcatggatcatgcaggrgctggtggtgagtctgttaacgatggcttgatgaacacyaaagactttgacctttattataaagatgcagatggtgagtggaagctagctaaggaagtccgtggyaacaaagcacacgtgacagatatcactcttgataaaccaatcactgctcargactggcgcttgaatgttgtcacttctgacaatggaactccatggaaggctattcgtatctataactggaaaatgtatgaaaagcttgatactgagagtgtcaatattccgatggccaaggctgcagcccgttctctaggcaataacaaggtacaagttggctttkcagatgtaccggctggagcaactattacygtttatgataatccaaattctcaaactccgctygcaaccttgaagagcgaagttggaggagacctagcaagtgcaccattggatttgacaaatcaatctggtcttctttattatcgtacccagttgccaggcaaggaaattagtaatgtcctagcagtttccgttccaaaagatgacagaagaatcaagtcagtcagcctagaaacaggacctaagaaaacaagctacgccgaaggggaggatttggaccttagaggtggtgttcttcgagttcagtatgaaggaggaactgaggacgaactcattcgcctaactcacgcaggtgtatcagtatcaggttttgatacgcatcataagggagaacagaatcttactctccaatatttgggacaaccrgtaaatgctaatttgtcagtgactgtcactggcmaagaygaagcaagtccgaaaactattttgggaattgaagtaagtcaggaaccgaaaaaagattacctagttggtgatagcttagacttgtctgaaggacgctttgcagtggcttatagcaatgacaccatggaagaacattcctttactgatgagggagttgaaatttctggttacgatgctcaaaagactggtcgtcaaaccttgacgcttcrttaccaaggycatgaagtyarctttgatgttttggtatctccaaaagcagcattgaacgatgagtacctcaaacaaaaattagcagaagttgaagctgctaagaacaaggtggtctataactttgcttcaycagaagtaaaagaagccttcttgaaagcaattgaagcggccgaacaagtgttgaaagaccatgaaactagcacccaagatcaagtcaatgaccgacttaataaattgacagaagctcataaagctctgaatggtcaagagaaatttacggaagaaaagacagagcttgatcgcttaacaggtgaggytcaagaactcttggctgccaaaccaaaccatccttcaggttctgccctagctccgcttcttgagaaaaacaaggccttggttgaaaaagtagatttgagtccagaagagcttrcaacagcgaaacagagtctaaaagatctggttgctttattgaaagaagacaagycagcagtcttttctgatagtaaaacaggtgttgaagtacacttctcaaataaagagaagactgtcatcaagggtttgaaagtagagcgtgttcaagcaagtgctgaagagaagaaatactttgctggagaagatgctcatgtctttgaaatagaaggtttggatgaaaaaggtcaagatgttgatctctcttaygcttctattgtgaaaatcccaattgaaaaagataagaaagttaagaaagtatttttcttacctgaaggcaaagrggcagtagaattggcttttgaacaaacggatagtcatgttatctttacagcaccwcactttactcattatgcctttgtttatgaatctgctgaaaaaccacaacctgctaaaccagcaccacaaaacamagtccttccaaaacctacttatcaaccgrcttctgatcaacaaaaggctcctaaattggaagttcaagaggaaaaggttgcctttcatcgtcaagagcatgaaaatactgagatgctagttggggaacaacgagtcatcatacagggacgagatggactgttaagacatgtctttgaagttgatgaaaasggtcagcgtcgtcttcgttcaacagaagtcatccaagaagcgattccagaaattgttgaaattggaacaaaagtaaaaacagtaccagcagtagtagctacacaggaaaaaccagctcaaaatacagcagttaaatcagaagaagcaagcaaacaattgccaaatacaggaacagctgatgctaatgaagccctaatagcaggcttagccagccttggkcttgctagtttagccttgaccttgagacggaaaagagaagataaagattaactaat

SEQ ID NO: 3587 - DNA, 154 bp, Streptococcus pneumoniae
  misc_feature (1)..(154): tiling:Spneumo1:WAN024ABT; Cluster includes WAN024EI5-rc R 6.IG_949||||901952..902105|-|154 bp|Between spr0913 (pepT) (- strand) and spr0914 (hemH) (+ strand)|S.pneumoniae|R6| NC_003098.1|IG-rc|110
gactgcttccttgtgatgtttttatcaagtttattttatcattaattcatcgataagtaaacgctarcatagggacattctcaatcttctgtcttttgtttttctcttctttctatgatacaatggaaaaaataaattcaaaaggagttttttt

SEQ ID NO: 3588 - DNA, 72 bp, Streptococcus pneumoniae
  misc_feature (1)..(72): tiling:Spneumo1:WAN024A4M; Cluster includes WAN024EDV-rc R 6.IG_1280.2||||1234730..1234800|-|71 bp|Between spr1236 (- strand) and spr1237 (- strand)|S.pneumoniae|R6|NC_003098. 1|IG-rc|110
gactggttggtcgcttgcttgataaattcaattcgacaaacgcttttatagtttgttagaatgtagttgtaa

SEQ ID NO: 3589 - DNA, 216 bp, Streptococcus pneumoniae
  misc_feature (1)..(216): tiling:Spneumo1:WAN0249HO; Cluster includes WAN02471L-rc R 6.IG_208||||195860..196075|-|216 bp|Between spr0187 (rpsJ) (+ strand) and spr0188 (rplC) (+ strand)|S.pneumoniae|R6| NC_003098.1|IG-rc|110
gagaaaatagttccttttctatattttttattcaaaaagtttttaacgagcgttttttatgctcaagtctaagatacaaagggcgtcaaactcaacgtgaaaataggaaactgacgcagtgtctagcagacactaggaagtttatctttttcacaccgagtttagcccgtgttcaattagattgaaacaccagcctctgctcttttatattttaga

SEQ ID NO: 3590 - DNA, 152 bp, Streptococcus pneumoniae
  misc_feature (1)..(152): tiling:Spneumo1:WAN0249VG; Cluster includes WAN024E9V-rc R 6.IG_1582.2.2.2||||1514792..1514943|-|152 bp|Between spr15 35 (- strand) and spr1536 (nanA) (- strand)|S.pneumoniae|R 6|NC_003098.1|IG-rc|110
gagaagaattctaaacatttgawwyygtaaaaatagaaggagatagcaggttttcaagcctgctatctttttttgatgacattcaggctgatacgaaatcataagaggtctgaaactactttcagagtagtctgttctataaaatatagtag

SEQ ID NO: 3591 - DNA, 265 bp, Streptococcus pneumoniae
  misc_feature (1)..(265): tiling:Spneumo1:WAN0249PK; Cluster includes WAN024EMU R6.I G_560.2||||535215..535288|+|74 bp|Between spr0536 (- stran d) and spr0537 (recJ) (+ strand)|S.pneumoniae|R6|NC_003098 .1|IG|110
gagagatctctattgtgttatattttataacacggttctacaataaaagaatgttcttgtcaaatcatatctgaaaaaattcactatagtgaaataagaacaggaaaaatcgatcgggacagtcaaatcgatttctaacaatattttagaagtagaggtgtactattctagtttcaatatactataaaatgttataaaaaagcaatctggatagagaaaacgtctaaatcatgttataatgaagcaatagaattcttagaaagag

SEQ ID NO: 3592 - DNA, 82 bp, Streptococcus pneumoniae
  misc_feature (1)..(82): tiling:Spneumo1:WAN0249LG; Cluster includes WAN024E7C-rc R 6.IG_1853.2||||1713844..1713925|-|82 bp|Between spr1738 (- strand) and spr1739 (ply) (- strand)|S.pneumoniae|R6|NC_0 03098.1|IG-rc|110
gagaggagaatgcttgcgacaaaaagaggcgatgatctctctgcggatatctgaaagtttatctcttgcctagcgatttcca

SEQ ID NO: 3593 - DNA, 260 bp, Streptococcus pneumoniae
  misc_feature (1)..(260): tiling:Spneumo1:WAN0249TH; Cluster includes WAN024EDQ-rc R 6.IG_1286||||1242527..1242786|-|260 bp|Between spr1242 (- strand) and spr1243 (potD) (- strand)|S.pneumoniae|R6|NC_0 03098.1|IG-rc|120
gagataaacgtaagaagacgaatcagtcaagctggttcgtttttaaggaatagaagtcagtttttagagccctatctttttctattctagttgtttatttgtttatttgcttatttgcttgcctagtwktatactmwkcswawacwmttcaaaccacgtcagcgtygccttrccgtactcaagtacagcttgmrgctagcttcctagtttgctttttgatttttattgagtattaaccttacagaaagcggcaacaaata

SEQ ID NO: 3594 - DNA, 66 bp, Streptococcus pneumoniae
  misc_feature (1)..(66): tiling:Spneumo1:WAN0249JU; Cluster includes WAN024E6J-rc R 6.IG_1910||||1764763..1764828|-|66 bp|Between spr1792 (lys A) (- strand) and spr1793 (purR) (- strand)|S.pneumoniae|R 6|NC_003098.1|IG-rc|110
gagatagaactaaaggttggaacgattgtcccagcctttctttgcaaacagaatagaaggaagctt

SEQ ID NO: 3595 - DNA, 86 bp, Streptococcus pneumoniae
  misc_feature (1)..(86): tiling:Spneumo1:WAN024AM3; Cluster includes WAN024ENJ R6.I G_500.1||||479505..479590|+|86 bp|Between spr0476 (+ stran d) and spr0477 (+ strand)|S.pneumoniae|R6|NC_003098.1|IG|1 10
gagatarcctaaaattaggctgtacaagtgcttttgctttacataagttggcaaacgtgctatactgatagtaagaatatgaaaag

SEQ ID NO: 3596 - DNA, 1109 bp, Streptococcus pneumoniae
  misc_feature (1)..(1109): tiling:Spneumo1:WAN024CAD; Cluster includes WAN0244OU spr0 164|ribD|15902208|NP_357758.1|172659..173759|-|1101 bp|Rib oflavin biosynthese; a deaminase|S.pneumoniae|R6|NC_003098 .1|ORF|111
gagatgagcgattcaaaatatatgaaattagcaataaaaytggcacaaaaaggggctggttacgtcaaycccaatcctatggtyggcgcarttattgtaaaagataatcacatyatcggacaaggttatcatgagttttttggtggcycacatgctgagagaaatgctcttaaaaactgtagaraatcccctgtcggagcgacgctttatgtaacacttgaaccctgttgtcacttcgggaaaacacctccytgtatagatgctataatcgatagtggtattacaagagtagtcattggaagcctagactgtaatcctattgtatctggaaaaggagtaaagatacttgaggaaaataatcttcaagttactgttggaattttagaaaatgagtgtcttaacttaataaaaagttttagaaagtatattacccagcatgtaccctatgtttttatgaaatatgcaatgtcaatggatggaaaaatagccactaaaacaaatcaatccaaatggattactgaagaagaagcaagaaagcaygtgcatcagttacgacacyatgttagtgcaattatggtgggagtcaatactgttattcaagacgatcctttgctgacatgtagattggaggaarggraaaatcctatycgtatcatatgcgatacacatttacgaactcctcttacctctaaaatcgtaaaaacagcaaatgatattaaaacttacattgccacttcctctgaagacaaaaataaaatgaagctatatcaaaatcatggctgtgaaatactttccataaagaaaaaaggcaatcatatagacttatcgagtttaatgcaacatctaggaaacatgcagattgatagcctagttctagargggggcagtctaatgaattggagtgctttggaacaacaaattgttgatgagctgaaaatatatattgcaccaaaartttttggaggyagtgccaagtttcctgtcggaggtgaaggyatttctttgccaaatgacgctattagattgaaaccttatgcwttttctcaaataggaaatgactatctcatagaaagtgaagtgatttatccatgttcacaggaataactaat

SEQ ID NO: 3597 - DNA, 2079 bp, Streptococcus pneumoniae
  misc_feature (1)..(2079): tiling:Spneumo1:WAN024CEL-3; Cluster includes WAN023RVP co ntig_1609_55||||39772..45984|-|6213 bp|Glimmer 2.02 orf pr ediction|S.pneumoniae|670|WAN01UDCD|ORF|002
gagattaaaacacattctgaaaataagtayacygttaaagaagcagarcaatcaataagtggtctwgagaaacaattggaagaactscaacgctttaatcgtgatagttttattgattttgaraacttaggaattgattttctctttgtggatgaagcacatcactttaaaaatatwcgtccaattactggacttggraatgtagcaggkattaccaatacaacstctaagaagaaygtggatatggaratgaaggttcgacagattcaggaagaacatgattttaaraatattgtytttgcgacaggaacacctgtttcmaattcwattagtgagytrtatactatgatgaactayattcaaccrgatatcttaaaacgctatcaagttgattattttgactcttgggtaggtgcttttggagaaattcaaaactctatggaattagctcctacaggggataagtaccarcctaagaaacgatttaaaaagtttgtcaatctacctgagttgatgaaaatctataaagaaacagcmgacattcaaacacaagatatgttggatttacctgtwccagaagcycatattatccctattgagagtgagttaactgaaaaccagaaactctatytagaagaattrgttatgagrtcagatryggtcaaatgtggaacagttgatccragycaggataacatgttaaaratwacrggtgaggcacgraaaytagctattgatatgcgtttattggactctagytatagtctagcagayaatcataaactgcttcaggtagtggataatgttgaaagaatttatcgtgagggaatggraaataaggctactcagatgattttytcagatattggcacacctaagaaaaargataatggctttgatgtttattctgaratwaaggctttattagtkgatagaggaatccctagtawrgaaattgcctttgtacatgatgccaatagtgatgaaaagaagaatagyttgtctcgaaaggtyaatgcaggagaggtkcggrttctycttgcctcaactgaaaaaggaggaacaggtttaaatgttcagagcaagatgaaagcagttcaycayctggatgtrccrtggagrccwrgkkacakycwrcwmcgyaawggmsgtattatccgacagggaaatgaaaayaaggaagtggatatttaccactayattaccaaaggttcrtttgataattatctatgggcaactcaggagaacaaactccgttatattaagcagattatgacttctaaggagccgattcgtgctgcrgaagayattgatgarcagacyatgacagcttctgattttaaggcactagcaacaggtaatccttatctcaaatataagatggaactagagaatgatctaactctattagaaaatcaaagacgcgcctttcaacgcagcaaggatcactatcgtcatacaatctcytactgtgaagaaaatatgcccattcttgagaaacgattaagcaagtatgaaggcgayattcaacagtctgaaatrtcgaaagaccarkcattttctatgasgrtaggtaarcaakyktttgakcaacgagctgaagcaggkgaatccctacaccgtcttatycgtcataatcaakctgacagcaaagaatttcgwaccctagcaagytatcgaggatttgacattaaaatgcttagtctwscaacraatcarcctcttcctgaaaccttctctgttaarattgtaggagaraaycartattctgtcagtttrgatttrtattctcctttggggacaattcaaaggcttcagcatacgatwgaycacattaaagakgaccaagtgaaaactcagaacttattggatgaattaaaggataaatggamtactgctaargtwgaaattgagaaaaattttccaaaggaagaggattatcaaactaaaaaggccgaatacgatgtactcgcgccattgattgaaacagaaacggatttagataytattgatcaggccttamgacaattccacgaaaaaggaaaagaaaagcaagaacaactttcttttgaattagat

SEQ ID NO: 3598 - DNA, 110 bp, Streptococcus pneumoniae
  misc_feature (1)..(110): tiling:Spneumo1:WAN0249Z6; Cluster includes WAN024EC5-rc R 6.IG_1395||||1335367..1335476|-|110 bp|Between spr1351 (pg m) (+ strand) and spr1352 (bta) (+ strand)|S.pneumoniae|R6 |NC_003098.1|IG-rc|110
gagattacctcgctttcattgataagtctagtatgccataaagtttctaaaattgcttagatttgatacgaaaaaagatgaggttggttggtctcatcttttataggtct

SEQ ID NO: 3599 - DNA, 59 bp, Streptococcus pneumoniae
  misc_feature (1)..(59): tiling:Spneumo1:WAN024A24; Cluster includes WAN024ECM-rc R 6.IG_1368||||1311992..1312050|-|59 bp|Between spr1324 (apb E) (+ strand) and spr1325 (+ strand)|S.pneumoniae|R6|NC_00 3098.1|IG-rc|110
gagatttcctttctctttttacataatacaattttaaaattccattgaaacagttgtct

SEQ ID NO: 3600 - DNA, 200 bp, Streptococcus pneumoniae
  misc_feature (1)..(200): tiling:Spneumo1:WAN024ASM; Cluster includes WAN0247V1 R6.I G_39||||23922..24121|+|200 bp|Between spr0021 (purA) (+ st rand) and spr0022 (+ strand)|S.pneumoniae|R6|NC_003098.1|I G|110
gagatttttaagatttgtttaagataggtcgggtatactatagacggttacaagaagacctcctaacttgttgtaacaaatatcctaaacttttctttttcataataatctccctatagagtcaccgcattcggtggctttttttgtgttgggattcatgatataataataaaatcgataagtaggaaaagagaaaagag

SEQ ID NO: 3601 - DNA, 203 bp, Streptococcus pneumoniae
  misc_feature (1)..(203): tiling:Spneumo1:WAN024ANN; Cluster includes WAN024EOA-rc R 6.IG_456.1||||433386..433588|-|203 bp|Between spr0432 (csp R) (+ strand) and spr0433 (+ strand)|S.pneumoniae|R6|NC_00 3098.1|IG-rc|110
gagatttttcttttagactaggcgacaagctgtaggcataacttctggttaggcaaagcttgtcaacaaagtataaaaggaaaagatcatttcctagttaaagtcaccgccggtcgggaatywcaccctgccctgaagactcttttatcataacaaaaaacgcttgcaagcgcaagcattttgttcattttcattttcatttt

SEQ ID NO: 3602 - DNA, 1630 bp, Streptococcus pneumoniae
  misc_feature (1)..(1630): tiling:Spneumo1:WAN024G2J-3; Cluster includes WAN0243YU sp r1101|spnII-interrupted-C|15903144|NP_358694.1|1099497..11 02751|-|3255 bp|Uncharacterized restriction enzyme, interr upted-C|S.pneumoniae|R6|NC_003098.1|ORF|220
gagcctatgtatttgactttgcgccggaaagaaccttgattctctttgatgagtttgccaacaacttatygcttgtaactgcagctggtagaggaacttcagctacacgcgaagaaaatattagagaattattaaacttctttccaattattgccgaagaccgtgctggtaagatggttgaaattgatgcaaaggcagttctaaccactcctcgccagataaaagctagagaagttcttaaacgaggttttatgtccaatctcttatttgataatattagtggtattttccaagcaagtcaaacagttttagatattttaaatgagctgccagttgaaaaggaagggaaggtacaagatagttctgatttattagatttttcagatgttacagtcgatgatgagggaaatgcagtagtagaccatgaaattgtagttaatcagcaaatgcgactttttggtgaaaaagtttatggacttggtgaatctgttgctgagttagtcacaaaagatgaggaacgaactcaaaaacagctggtcaatgacttgagtaagaccgtttcttcagtgattgtagaggaattgaaagcagattattctctaaaaacaagggaaactgagcaaattaagaaacaaattacagcaacacttgagaatgaaattcgaaaaaatgatatcgaaagaaaaatttctgaagctcatatcaagcaagagttgcaacagcagctcaaagaagcaaatgataaagcgcaaaaagataagattcaagaagatttggaaaaacgtttagaagaaaataaactcattcataaagaaaaactagaacaaacactcaaaaaagaagtggaaaaaatgcctgagaaatttatcgaacaggttgagataaaacgtgtggaacagttgaaacaatcagctcaagatgaaattcgtgaccatttacgagggtttgcaagaacaattccaagttttattatggcttacggtgatcaaactctaacacttgataattttgatgcctttgttcctgaacatgttttttatgaagtaacagggattacgattgatcagtttagatatttgcgagatggtgggcaggattttgcagggcatctctttgataaagcaacatttgacgaagctattcaagaatttcttcgcaagaaaaaggagttggcggattattttaaagatcaaaaagaagacatttttgactatattccaccgcagaagaccaaccaaattttcactcctaaacgagtggtgaaaaggatggtagatgatttggaaaaggaaaatccagggatttttgatgatccatctaagacttttattgatttatatatgaagtcaggcctctatattgcagaacttgtgaagcggttatataatagcaatggcttgaaagaggcctttccaaatcctgaagaacgcttaaaacatattttggaaaagcaagtttatggatttgctccgtctgagattatctataacatttccactaattttatatttggyaatctttctaaagatatcagtaggaagaattttgttttagcagataccattccagcggctaaagaagggagcattcaaaagttggttgattcctattttgaaaataattaactaat

SEQ ID NO: 3603 - DNA, 92 bp, Streptococcus pneumoniae
  misc_feature (1)..(92): tiling:Spneumo1:WAN024A96; Cluster includes WAN024EGR R6.I G_1056||||996640..996731|+|92 bp|Between spr1017 (mreA) (+ strand) and spr1018 (- strand)|S.pneumoniae|R6|NC_003098. 1|IG|110
gagcttgagtaaataaaayaaaaaagaggttgtctgtaacccaaaagatagatgatttagtctaacttttgaggtcacgacattacctcttt

SEQ ID NO: 3604 - DNA, 76 bp, Streptococcus pneumoniae
  misc_feature (1)..(76): tiling:Spneumo1:WAN0249GY; Cluster includes WAN024E4V-rc R 6.IG_2121||||1894043..1894118|-|76 bp|Between spr1914 (- s trand) and spr1915 (+ strand)|S.pneumoniae|R6|NC_003098.1| IG-rc|110
gagcttttctcctttttatttgyatctgcttacattttatcatatactgttattatagtcaaaaaaatatgctatt

SEQ ID NO: 3605 - DNA, 80 bp, Streptococcus pneumoniae
  misc_feature (1)..(80): tiling:Spneumo1:WAN024ANE; Cluster includes WAN024EO6-rc R 6.IG_462.1||||438631..438710|-|80 bp|Between spr0438 (pyrG ) (+ strand) and spr0439 (- strand)|S.pneumoniae|R6|NC_003 098.1|IG-rc|110
gaggacycctacctcagatatactgcaatatcatcgtatgcaaaaaacctctgagatttttctcaaaggttctgattttg

SEQ ID NO: 3606 - DNA, 68 bp, Streptococcus pneumoniae
  misc_feature (1)..(68): tiling:Spneumo1:WAN0249WU; Cluster includes WAN024EAR-rc R 6.IG_1523||||1457138..1457205|-|68 bp|Between spr1476 (- s trand) and spr1477 (- strand)|S.pneumoniae|R6|NC_003098.1| IG-rc|110
gagggataaatgccctctttttttctttggataattatgataaaatgtagctattaaaggagtaagaa

SEQ ID NO: 3607 - DNA, 157 bp, Streptococcus pneumoniae
  misc_feature (1)..(157): tiling:Spneumo1:WAN024ALC; Cluster includes WAN024B80-rc T IGR4.IG_995||||999262..999418|-|157 bp|Between SP1063 (+ s trand) and SP1064 (+ strand)|S.pneumoniae|TIGR4|NC_003028. 1|IG-rc|020
gaggtacctcctgtatgatatgttgtagtggcggagaaaccacttctatcttatcattttaggaggttctttttgttaccacgctaaaagctctatggaaccactagcatagctagtggttttcgggagacaacaaaaaagttggatgacccaactt

SEQ ID NO: 3608 - DNA, 318 bp, Streptococcus pneumoniae
  misc_feature (1)..(318): tiling:Spneumo1:WAN0249HM; Cluster includes WAN024EQM-rc R 6.IG_270.2||||248571..248888|-|318 bp|Between spr0249 (rps G) (+ strand) and spr0250 (fusA) (+ strand)|S.pneumoniae|R 6|NC_003098.1|IG-rc|110
gaggtttgtttctcctatttatttttgatttctattctattataacacgattttaataaaaacggataggcaggacctacccgttctcaatgttttcatgctattgttggtttcaacttacgagatggtaagctgagttatagctaatactaatcgatttagctaatttgaacccgggctaaagttagttagccgatrtgagctggaacgggatgctgcgygaaaaagataaaactccttgtattcrtcgaatactgcgtcagtttcctattttyaccttgcatccttaccgtkcctagcatcatgatttagttgagc

SEQ ID NO: 3609 - DNA, 129 bp, Streptococcus pneumoniae
  misc_feature (1)..(129): tiling:Spneumo1:WAN024A5G; Cluster includes WAN024EEN-rc R 6.IG_1205.2.1||||1167078..1167206|-|129 bp|Between spr1164 (gidB) (+ strand) and spr1165 (pyrP) (+ strand)|S.pneumon iae|R6|NC_003098.1|IG-rc|110
gagtaagacttctytaaaatytagaytttaaagagtttyaaatatttytgcgtcttcgtcacctcacgggatgacattaaaaacctttgcttaggatagtatagcagaaaaaaatgattttgtaaatca

SEQ ID NO: 3610 - DNA, 93 bp, Streptococcus pneumoniae
  misc_feature (1)..(93): tiling:Spneumo1:WAN024AGA; Cluster includes WAN024EK8 R6.I G_761.2.1||||736133..736215|+|83 bp|Between spr0737 (+ str and) and spr0738 (deoD) (+ strand)|S.pneumoniae|R6|NC_0030 98.1|IG|110
gagtagaaaacttttctaaaaayaaaaacgaaaggatgggtaaactgtattcgctgaactgaatacgggcgactctcctctaaatcaaaatta

SEQ ID NO: 3611 - DNA, 194 bp, Streptococcus pneumoniae
  misc_feature (1)..(194): tiling:Spneumo1:WAN024A5F; Cluster includes WAN024EEM R6.I G_1206||||1168550..1168743|+|194 bp|Between spr1165 (pyrP) (+ strand) and spr1166 (ffh) (- strand)|S.pneumoniae|R6|N C_003098.1|IG|110
gagtctaaatacacctaatccactcagacagctgagtggatttttcgtataccataataaaagtgtcttaacaaaattattaaaatcaaaaaacgtataatatcagatattctaaaaccttgatactgtacgttttatcatagaaatttttactttattttctcatcaaatgagatttgcatcaatctcttgtc

SEQ ID NO: 3612 - DNA, 178 bp, Streptococcus pneumoniae
  misc_feature (1)..(178): tiling:Spneumo1:WAN0249KA; Cluster includes WAN024E6Q-rc R 6.IG_1889.2||||1743609..1743786|-|178 bp|Between spr1774 ( + strand) and spr1775 (ndk) (- strand)|S.pneumoniae|R6|NC_ 003098.1|IG-rc|110
gagtggattggctcaatcaattggttaaaagctcatttgaatagaaagtatagtcaattagtttaagacatgacgcatgatatcaaactttttagtttttgatatggtgcgttttttgattaagtgactattagtttgtctcgctccgttaggtgcgagacaaaaaaaacacccgcta

SEQ ID NO: 3613 - DNA, 93 bp, Streptococcus pneumoniae
  misc_feature (1)..(93): tiling:Spneumo1:WAN024ANJ; Cluster includes WAN024EO8 R6.I G_461.1||||436634..436726|+|93 bp|Between spr0437 (rpoE) ( + strand) and spr0438 (pyrG) (+ strand)|S.pneumoniae|R6|NC _003098.1|IG|110
gagttagctattgacaattatcctatttttaggtatcatattgtttgggcacctcttttagaggtcggggctccctagttcttagggagctat

SEQ ID NO: 3614 - DNA, 68 bp, Streptococcus pneumoniae
  misc_feature (1)..(68): tiling:Spneumo1:WAN024AKN; Cluster includes WAN024EMQ R6.I G_568.1||||546259..546326|+|68 bp|Between spr0544 (+ stran d) and spr0545 (- strand)|S.pneumoniae|R6|NC_003098.1|IG|1 10
gagtttcctaaaatagccaatgcaaactaaaaaagcgattkgctggtccaatcgcttttagtatatct

SEQ ID NO: 3615 - DNA, 141 bp, Streptococcus pneumoniae
  misc_feature (1)..(141): tiling:Spneumo1:WAN024AGE; Cluster includes WAN024EKA R6.I G_753||||729282..729422|+|141 bp|Between spr0729 (folD) (+ strand) and spr0730 (+ strand)|S.pneumoniae|R6|NC_003098. 1|IG|110
gakaarmattykmtkarkaragtgtattttctatagctatatctaaaatgryagaaatgaatattaaattttagawataagwttayaaaaggaggtytgcgyctcctttttrttgtataatrraagtgagrkgawwaragg

SEQ ID NO: 3616 - DNA, 199 bp, Streptococcus pneumoniae
  misc_feature (1)..(199): tiling:Spneumo1:WAN0249RZ; Cluster includes WAN024EC3-rc R 6.IG_1396.2||||1335904..1336102|-|199 bp|Between spr1352 ( bta) (+ strand) and spr1353 (glnH) (- strand)|S.pneumoniae |R6|NC_003098.1|IG-rc|110
gataaaatagtggctgaaactgcgttttgattagcaaaacgtagttttttttgtaatctaggaaaacgataatagcgattgaatatggataattgaatatggaatagcccactgtgatttctaaaacattgttaaaaattgatttgacttccaaaattaaaatgttctgtaatgaaatactgatgtaactgttttagga

SEQ ID NO: 3617 - DNA, 95 bp, Streptococcus pneumoniae
  misc_feature (1)..(95): tiling:Spneumo1:WAN024ALU; Cluster includes WAN024ENG-rc R 6.IG_511||||488830..488924|-|95 bp|Between spr0487 (+ stra nd) and spr0488 (+ strand)|S.pneumoniae|R6|NC_003098.1|IG- rc|110
gataaaatcctttcaataaaaaatccctgctctgacaaggatttaacataaacattctatcaagattttagtgaaaaatcaagaatctttctcgt

SEQ ID NO: 3618 - DNA, 4452 bp, Streptococcus pneumoniae
  misc_feature (1)..(4452): tiling:Spneumo1:WAN024DD9; Cluster includes WAN0242RJ-3 SP 0664|zmpB|15900565|NP_345169.1|634854..640499|+|5646 bp|zi nc metalloprotease ZmpB, putative|S.pneumoniae|TIGR4|NC_00 3028.1|ORF|010
gataaagctagttcagtttctcctactgattattctacagcaagttacaatgctcttggacctgttttagaaactgcaaaaggtgtctatgcttcagagcctgtaaaacagcctgaggtaaatagcgagacaaataaacttaaaacggctattgacgctctaaacgttgataaaactgaattaaacaatacgattgcagatgcaaaaacaaaggtaaaagaacattacagtgatagaagttggcaaaacctccaaactgaagttacaaaggctgaaaaagttgcagctaatacagatgctaaacaaagtgaagttaacgaagctgttgaaaaattaactgcaactattgaaaaattggttgaattatctgaaaagccaatattaacattgactagtaccgataagaaaatattggaacgtgaagctgttgctaagtatactctagaaaatcaaaacaaaacaaaaatcaaatcaatcacagctgaaytgaaaaaaggagaarmagttrttaryactgtagwscttayagrygayrakgtaacwamwgaaactataasckctgcatttaagaayctagagtactacaaagaatacaccctatctacaactatgrtttacgayagaggtracggtgawgwaacwgaaactctagawaatcaammwatycaaytagatcttaaaaaagttgagcttaaaaatattaaacgtacagatttaatcaaatacgaaaatggaaaagaaactaatgaatcactrataacaactrttcctgatgataagmgsaattattatttaaaaataacttcaaakaatcaraaaactacattactagctgttaaaaatatagaagaaactacggttaacggaacacctgtatataaagttacagcaatcgcagacaatttagtctctagaactgctgataataaatttgaagaagaatacgttcactatattgaaaaacctaaagtccacgaagataatgtatattataayttcaaagaattagtggargctattcaaaacgatccttcaaaagaatatcgtctgggacaatcaatgagcgctagaaatgttgttcctaatggaaaatcatatatcactaaagaattyacaggaaaacttttaagttctgaaggaaaacaatttgctatyactgarttggaacatccattatttaatgtgataacaaacgcaacgataaataatgtgaattttgaaaatgtagagatagaacgttctggtcaagataatattgcatcattagccaatactatgaaaggttcttcagttattacaaatgtcaaaattacaggcacactttcaggtcgtaataatgttgctggatttgtaaataatatgaatgatggaactcgtattgaaaatgttgctttctttggcaaactacactctacaagtggaaatggctctcatacagggggaattgcaggtacaaactatagaggaattgttagaaaagcatatgttgatgctactattacaggaaacaaaacacgcgccagcttgttagttcctaaagtagattatggattaactctagaccatcttattggtacaaaagctctcctaactgagtcggttgtaaaaggtaaaatagatgtttcaaatccagtagaagttggagcaatagcaagtaagacttggcctgtaggtacggtaagtaattctgtcagctatgctaagattatccgtggagaggagttattcggctctaacgacgttgatgattctgattatgctagtgctcatataaaagatttatatgcggtagagggatattcgtcaggtaatagatcatttaggaaatctaaaacatttactaaattaactaaagaacaagctgatgctaaagttactactttcaatattactgctgataaattagaaagtgatctatctcctcttgcaaaacttaatgaagaaaaagcctattctagtattcaagattataacgctgaatataaccaagcctataaaaatcttgaaaaattaataccattctacaataaagattatattgtatatcaaggtaataaattaaataaagaacaccatctaaatactaaagaagttctttctgttaccgcgatgaacaacaatgagtttatcacaaacctagatgaagctaataaaattattgttcactatgcggacggtacaaaagattactttaacttgtcttctagcagtgaaggtttaagtaatgtaaaagaatatactataactgacttaggaattaaatatacacctaatatcgttcaaaaagataacactactcttgttaatgatataaaatctattttagaatcagtagagcttcagtctcaaacgatgtatcagcatctaaatcgattaggtgactatagagttaatgcaatcaaagatttatatttagaagaaagcttcacagatgttaaagaaaacttaacaaacctaatcacaaaattagttcaaaacgaagaacatcaactaaatgattctccagctgctcgtcaaatgattcgtgataaagtcgagaaaaacaaagcagctttattactaggtttaacttacctaaatcgttactatggagttaaatttggtgatgttaatattaaagaattaatgctattcaaaccagatttctatggtgaaaaagttagcgtattagacagattaattgaaatcggttctaaagagaacaacattaaaggttcacgtacattcgacgcattcggtcaagtattggctaaatatactaaatcaggtaatttagatgcatttttaaattataatagacaattgttcacaaatatagacaatatgaacgattggtttattgatgctacagaagaccatgtctacatcgcagaacgcgcttctgaggtcgaagaaattaaaaattctaaacatcgtgcattcgataatttaaaacgaagtcaccttagaaatactatactcccactactgaatattgataaagcacatctttatttaatttcaaattataatgcaattgcctttggtagtgcagagcgattaggtaaaaaatcattagaagatattaaagatatcgttaacaaagctgcagatggttatagaaactattatgatttctggtatcgtctagcgtctgataacgttaaacaacgactactaagagatgctgttattcctatttgggaaggttataacgctcctgktggatgggttgaaaaatatggccgctataataccgacaaagtatatactcctcttagagaattctttggtcctakgrataagtattataattataatggaacaggagcttatgctgctatatatcctaactctgatgatattagaactgatgtaaaatatgttcatttagaaatggttggtgaatacggtatttcagtttacacacatgaaacaacacacgtcaacgaccgtgcgatttacttaggtggctttggacaccgtgaaggtactgatgctgaagcatatgctcagggtatgctacaaactcctgttactggtagtggatttgatgagtttggttctttaggtattaatatggtatttaaacgcaaaaatgatgggaatcagtggtatattacagatccaaaaactctaaaaacacgagaagatattaatagatatatgamkrrytataatgacactttaactcttcttgatgaaattgaggctgaatctgtgatttctcaacaaaataaagatttaaatagtgcatggttcaaaaaaatagatagagaataccgtgataacaataaattaaatcaatgggataaaattcgaaatctaagtcaagaagagaaaaatgaattaaatattcaatctgttaatgatttagttgatcaacaattaatgactaatcgcaatccaggtaatggtatctataaacccgaagcaattagctataacgatcaatcaccttatgtaggtgttagaatgatgaccggtatctacggaggtaatactagtaaaggtgctcctggagctgtttcattcaaacataatgcttttagattatggggttactacggatacgaaaatgggttcttaggttatgcttcaaataaatataaacaacaatctaaaacagatggtgagtctgttctaagtgatgaatatattatcaagaaaatatctaacaatacatttaatactattgaagaatttaaaaaagcttacttcaaagaagttaaagataaagcaacgaaaggattaacaacattcgaagtaaatggttcttccgtttcatcatacgatgatttactgacattgtttaaagaagctgttaaaaaagatgccgaaactcttaaacaagaagcaaacggtaataaaacagtatctatgaataatacagttaaattaaaagaagctgtttataagaaacttcttcaacaaacaratagctttaaaacttcaatctttaaactaactaat

SEQ ID NO: 3619 - DNA, 309 bp, Streptococcus pneumoniae
  misc_feature (1)..(309): tiling:Spneumo1:WAN0249QY; Cluster includes WAN02471Y R6.I G_178||||166512..166820|+|309 bp|Between spr0157 (- strand ) and spr0158 (- strand)|S.pneumoniae|R6|NC_003098.1|IG|11 0
gataaatactcctttttgaattttcagaataatctgtatatgtaatctatattctacaaaaaattttggaaaaatgcaagaatattttgaaaaaagatagaaaatttacaaagaaaatctgaaataactgttatgatatagcagattgaaactagaatagtacacctttgcttctaaaacattgttagaaatcgatttgactgtcctgatcgatttatcctgttcttatttcatttcactatagtaaggtgcagcaggataaagaaaaaccgagaagtttctttctcggatttgcttattatgaggttc

SEQ ID NO: 3620 - DNA, 111 bp, Streptococcus pneumoniae
  misc_feature (1)..(111): tiling:Spneumo1:WAN0249RB; Cluster includes WAN024E9W R6.I G_1582.2.2.1||||1514643..1514753|+|111 bp|Between spr1535 (- strand) and spr1536 (nanA) (- strand)|S.pneumoniae|R6|N C_003098.1|IG|110
gataagaaaacaagaaagtcaattttaggagaagacaaggttaatagtcryataatatattgaatctataacagtacaccttgactgctaaaatwwttctataaattaatt

SEQ ID NO: 3621 - DNA, 66 bp, Streptococcus pneumoniae
  misc_feature (1)..(66): tiling:Spneumo1:WAN024AJO; Cluster includes WAN024EM7 R6.I G_608.1||||601111..601176|+|66 bp|Between spr0584 (glcK) ( + strand) and spr0585 (thyA) (+ strand)|S.pneumoniae|R6|NC _003098.1|IG|110
gataatgagagaggaaaatgctaacctagagttagtaatgttcctcttttattttttatgctatac

SEQ ID NO: 3622 - DNA, 218 bp, Streptococcus pneumoniae
  misc_feature (1)..(218): tiling:Spneumo1:WAN0249SJ; Cluster includes WAN024EF7 R6.I G_1173.2||||1136808..1137025|+|218 bp|Between spr1132 (- s trand) and spr1133 (- strand)|S.pneumoniae|R6|NC_003098.1| IG|110
gataatgtaaccaactttagtagggcaaacgatacatccgccctcaccttttaaaatgtcgtagccttcttgtgaatgtgttttgtcataattttataatgtgttgaatccagaatagtccactgtagtttctaaaaaattgctggaaatggatgttaagcaccaattcatttgtttacatcttatttcagtttactatatttccttttctatttttt

SEQ ID NO: 3623 - DNA, 61 bp, Streptococcus pneumoniae
  misc_feature (1)..(61): tiling:Spneumo1:WAN0249IM; Cluster includes WAN024E5Q-rc R 6.IG_2009||||1825744..1825804|-|61 bp|Between spr1849 (- s trand) and spr1850 (- strand)|S.pneumoniae|R6|NC_003098.1| IG-rc|110
gataatttgtaaaacatcataaatcatacagtccaagagtgaacagtccgctgtgtaattc

SEQ ID NO: 3624 - DNA, 102 bp, Streptococcus pneumoniae
  misc_feature (1)..(102): tiling:Spneumo1:WAN0249OP; Cluster includes WAN024E99 R6.I G_1634||||1569054..1569155|+|102 bp|Between spr1588 (- str and) and spr1589 (- strand)|S.pneumoniae|R6|NC_003098.1|IG |110
gatactaagagctccatggtaaacaccactagccctttacctttctatcaatttttctaaaataagcaaagaaacccagttgactacaactgagttcatctt

SEQ ID NO: 3625 - DNA, 84 bp, Streptococcus pneumoniae
  misc_feature (1)..(84): tiling:Spneumo1:WAN024A6Q; Cluster includes WAN024EFG-rc R 6.IG_1146.1||||1109539..1109622|-|84 bp|Between spr1108 (m utY) (- strand) and spr1109 (fhs) (- strand)|S.pneumoniae| R6|NC_003098.1|IG-rc|110
gatagaaaagttatatactatctattgaaaatattataaatcagatacaaagacaggtgaaaccttctgtgttatactagagat

SEQ ID NO: 3626 - DNA, 163 bp, Streptococcus pneumoniae
  misc_feature (1)..(163): tiling:Spneumo1:WAN024A6A; Cluster includes WAN024EF8-rc R 6.IG_1171||||1136080..1136239|-|160 bp|Between spr1130 (- strand) and spr1131 (- strand)|S.pneumoniae|R6|NC_003098.1 |IG-rc|110
gatagagaagaagtctagtgttatgagatattaaagctcctaacactgggcttttgtttagaatttcttttctttttctataggatatggtattctatgtagaaaatatatgttaataagtaatgccaatatttaaacatcattagtaaaaggagttagattg

SEQ ID NO: 3627 - DNA, 59 bp, Streptococcus pneumoniae
  misc_feature (1)..(59): tiling:Spneumo1:WAN024AP8; Cluster includes WAN024EP4-rc R 6.IG_401||||378049..378107|-|59 bp|Between spr0377 (fabH) (+ strand) and spr0378 (acp) (+ strand)|S.pneumoniae|R6|NC _003098.1|IG-rc|110
gataggactcctttaaaataaatagtttttttataacaatgtgttcaccacatgattac

SEQ ID NO: 3628 - DNA, 783 bp, Streptococcus pneumoniae
  misc_feature (1)..(783): tiling:Spneumo1:WAN024C9L; Cluster includes WAN023QZT cont ig_1397_2||||1457..1726|-|270 bp|Glimmer 2.02 orf predicti on|S.pneumoniae|670|WAN01UDY8|ORF|001
gatagtaaaaatttgaakaaaaaatggttwtttgyagattattatgatacaacaattattttacttgctttaatctctgttattctggtattacttggatttgctgagatgattgatttggacaatccgccttatagtattattgatttagtaatctggggtgtttttgtaattgattatagttggcgcttttttaykactaaaagaaaatggcgctttattcttgaaaatatttttgatttattggctattctccctttaaatgctattttyacagtktttcgattagggcgtatctttcgtttarctaaactaacaaaattactgaaactgactcgtttacttagaataattggacttacaggtaaattagaaagaaaaattagtagattcttayggacaaatggcctgatttatatcttgtatgttaatatctttattgttctagtagggagttcgattttatccgttgttgaagaaaaatccttctcagatagtctttggtgggctcttgtgacagtaactactgttggwtatggkgatattgttccwgyttccmtttttgggaaatggctagcarktttactgatgcttgtcggtattggaacaatagggrtgytaacaagtgcyttgacgaacttytttgtaaaggataatccagatgaacagataaaacttgataaactcmaagaygaattatckagycaragaatattamtagagaaacaatctraaaaratmgaagaactacataaaatgatacaagatttgattgaaaaaaca

SEQ ID NO: 3629 - DNA, 271 bp, Streptococcus pneumoniae
  misc_feature (1)..(271): tiling:Spneumo1:WAN024ADZ; Cluster includes WAN024EJ4-rc R 6.IG_860||||827276..827546|-|271 bp|Between spr0824 (- str and) and spr0825 (+ strand)|S.pneumoniae|R6|NC_003098.1|IG -rc|110
gatatatttcctccattattcttcagattagttgagtaatctgmtactcatacctacttacaaaaaaactattatattaagttggttttttaatttgtctagttgcaacattgacaaacatagtatagcatatctttgcgaaatatcctcttcaaatcatgaattgtcatcaaaacatcttaaactataaaatcaattagtctcaagctttctatcaatttcttctccaaaatatgctataataatagcaaaagataaagaaggaagacct

SEQ ID NO: 3630 - DNA, 63 bp, Streptococcus pneumoniae
  misc_feature (1)..(63): tiling:Spneumo1:WAN024A88; Cluster includes WAN024EG8 R6.I G_1086||||1042211..1042273|+|63 bp|Between spr1047 (lplA) (- strand) and spr1048 (acoL) (- strand)|S.pneumoniae|R6|N C_003098.1|IG|110
gatatccctttactttatatgatagaaactggaaataaccttccagtctaatctatcttcgtt

SEQ ID NO: 3631 - DNA, 65 bp, Streptococcus pneumoniae
  misc_feature (1)..(65): tiling:Spneumo1:WAN024AI2; Cluster includes WAN024ELA R6.I G_679.2||||661371..661435|+|65 bp|Between spr0655 (upp) (+ strand) and spr0656 (clpP) (+ strand)|S.pneumoniae|R6|NC_ 003098.1|IG|110
gatattataatagtcttatcttcagtcatttgaccaacaaaattaaaactcaaaaggagaaatga

SEQ ID NO: 3632 - DNA, 96 bp, Streptococcus pneumoniae
  misc_feature (1)..(96): tiling:Spneumo1:WAN0249V4; Cluster includes WAN024720-rc R 6.IG_172.2||||160167..160262|-|96 bp|Between spr0151 (- st rand) and spr0152 (+ strand)|S.pneumoniae|R6|NC_003098.1|I G-rc|110
gatattcccctaaaaataactatgaaaccattatatcatatttcaagcgttttcaaaaacttctagtatccatttacaatcccaccaaaccatgrt

SEQ ID NO: 3633 - DNA, 74 bp, Streptococcus pneumoniae
  misc_feature (1)..(74): tiling:Spneumo1:WAN024ARY; Cluster includes WAN0247V0-rc R 6.IG_45.1||||25737..25810|-|74 bp|Between spr0024 (+ stran d) and spr0025 (radA) (+ strand)|S.pneumoniae|R6|NC_003098 .1|IG-rc|110
gatatttaggggaattatacccacaattttgacatacaaatgtcgcttttttctttgcgatgacaaacctcttt

SEQ ID NO: 3634 - DNA, 1461 bp, Streptococcus pneumoniae
  misc_feature (1)..(1461): tiling:Spneumo1:WAN024FGQ; Cluster includes WAN02401K |PBP 2B||CAA80231.1|||1422 bp|penicillin-binding protein 2b|S. pneumoniae||Z22230|ORF|000
  misc_feature (678)..(678): n is a, c, g, or t
  misc_feature (804)..(804): n is a, c, g, or t
  misc_feature (1359)..(1359): n is a, c, g, or t
gatcctctaaatgattctcaggtggctgttattgcctctatttcaaaggagatgcctggcattagtatttctacttcttgggatmgaaagdttttggaaacttccctttcttctatagtwgggagtgtatccagtgaaaaagctggtctcccagcggaagaagcrgawrmctatcttaaaaaaggctattctctaaatgaycgtgtwggmacctcytatttrgaaaagcaataygargaraccttrcaaggdaarcgctcggtraargaaatccatctrgayaartayggyaayatggaaagygtsgawamwatygargawggtasyaarggraayaatatyaarctgacyattgatttrkyyttccaagatagygtggatgmyttrctgaaaagttatttcaattchgagytrgrraatggwggrgccaagtattctgarggygtstatgcagtygcyytkaayccmaaaacaggtgckgtbttrtcyatgtcaggratyaaacatgacytgaaaacvgrmgagttracdycdgattccttgggaacgrtaaccratgtctttrtyccrggttckgttgtmaargcdgcracyatyagytcwggytgggaaaatggwgtsytrtcdggdaaycaracyttgacagaycarycvattrtyttycaaggttcascyccnatyaattcytggtaymcwsvhbyhtmbvddycrwwbcckathacdgcdgtbsargcyytrgagtattcwtchaatgcytatatggtycaaacrgcyytrggymttatgggdywracytaycaaccnaatatgtttgtykkhacyarcaabytagartcygctatgggkaaaytkcgttcracmtttgsbgaatatggyttggrdbctgcgachggvattgacctwccagatgartchactggwtttrtwcchaaagastatarytttgcyaattwcattacyaatgcctttgsscagtttgataactayacsccvatgcarttrgctcagtatgtrgcaactattgcaaatratggtgttcgtgtggctcctcgyattgtkgaaggcatttatgghaataatgataagggaggmytrggygrcytgattcagcaactgcaaccgacagagatgaataaggtcaatatatccgactcygatatgagyrtcttgcaycaaggtttttatcaggttgcycatggdrctagygrmttgacmachgghcgtgcmttttcaaatgghgcmkydgtwtcyattagyggdaaaacdggtacwgcygaaagytatgtkgmvgrwggtcarsaagcwamcaayacyaatgcdgtggcctatgcmccatcwgataatccycaaatcgctgtngcwgtkgtcttycckcataayaccaayctdacaaatggtgtmggrccttcyattgcgcgygayattatcaayctstatmammaayaycatccratgaaytag

SEQ ID NO: 3635 - DNA, 58 bp, Streptococcus pneumoniae
  misc_feature (1)..(58): tiling:Spneumo1:WAN024AKP; Cluster includes WAN024EMR R6.I G_565.1||||542777..542834|+|58 bp|Between spr0541 (murN) ( + strand) and spr0542 (+ strand)|S.pneumoniae|R6|NC_003098 .1|IG|110
gatgaaaaagtcagtatttagatttcttttagcttcttttagtaaaataattcttatt

SEQ ID NO: 3636 - DNA, 144 bp, Streptococcus pneumoniae
  misc_feature (1)..(144): tiling:Spneumo1:WAN0249JP; Cluster includes WAN024E6F R6.I G_1925||||1778203..1778346|+|144 bp|Between spr1807 (rpmH) (- strand) and spr1808 (aspC) (- strand)|S.pneumoniae|R6| NC_003098.1|IG|110
gatgaatacctcctcatagattttgtattcgtttagccggctataaagtgatcagttactaaacatactttactattctatctgattctttcacttttgtcaatagcyctaggcaaatgtttccagctttttcgaatgcaagcc

SEQ ID NO: 3637 - DNA, 669 bp, Streptococcus pneumoniae
  misc_feature (1)..(669): tiling:Spneumo1:WAN024FWZ; Cluster includes WAN024184 |ant ||AAO34536.1|||669 bp|aminoglycoside adenylyltransferase|S .pneumoniae||AY167643|ORF|000
gatgaatttcaagactatgacgtggtctatatcgtggatgatttagataatctgacgagtgacctttcttggctagatcagtttggcaaacgcctgattgaacagcatgtccagcttgaccatcgtcgtctctacctcatgctctttgaagatggcaatcgtatcgatttgactctttgtcctaaagaacacattcaagaatgggtggacagtgaagcaggattcactgttttagaagataagaagggcttgtttgagtcctattctcccagtccaaagcgtttctggrtacatccagctactgagacagattttaaaaattcctgyaatgaattttggtgggtgtcrkcytacgtggtyaaaggratytgtcgsaawcarstcatctacgcgryygaccatctytacggyatttgtcagcaagaattsytsaawmttttrgcttggcargtrgcaagtgmtagsrgrwaagtagacgtcggcaagaattataagcatctttttaactatttacctgctgagcaaaagaaggaattctcagatttgcttgatttttcaagtatagataaaatcactcagtctttattgactacgatgcaacttttccatagagaagctcaaagacttgctcaaaagctgggctttgactacgataaagaagtggctgag

SEQ ID NO: 3638 - DNA, 1984 bp, Streptococcus pneumoniae
  misc_feature (1)..(1984): tiling:Spneumo1:WAN024ATP; Cluster includes WAN024165 |pbp 2x||AAN32863.1|||1983 bp|penicillin-binding protein 2X|S.p neumoniae||AF446238|ORF|000
gatgcaacctcctataatgtctatgcggtcattgatgagaactataagtcagcaacgggtaagattctttacgtagaaaaaacacaatttaacaaggttgcagaggtctttcataagtatctggacatggaagaatcctatgtaagagagcaactctcgcaacctaatctcaagcaagtttcctttggttcgaagggcaatggaattacctatgccaatatgatgtctatcaaaaaagagttggaaactgcagaggtcaaggggattgattttacaaccagtcccaatcgtagttacccaaacggacaatttgcttctagttttatcggactagctcagctccatgaaaatgaagatggcagcaagagcttgctgggaacctctggaatggagagttcyttraayagwattcttgcagggacagacggcattattacctatgaaaaggatcgtctgggaaatattgtccccggaacggaacaagtttcccaacaaacggtagatggcaaggatgtttatacgactatttccagcmccctycagtccttcatggagacccagatgaatgcctttcaagaaaaagtaaaaggcaagtatatgacggctaccttggtyagtgctaaaacaggggaaattcttgcaacracgcarmgrccraccttcgatgctgatactaaggaaggrctkacyaaggactttgtttggcgtgatatcctctatcaaagtaactatgagccagggtcaaccatgaaggtcatgacgctygctgctgctattgataataacactttcccaggaggagaagtyttcaatagtagtgaattaaaaatagcggatgygacrattcgagattgggatgttaatgatggtttgacgactggtrggatgatgactttcttacaaggtttcgctcwctccagtaatgttggaatgagtctacttgaacaaaaaatgggagatgctacttggttggattatctaaaccgctttaartttggggtsccrackcgytttggyytgacwgatgartaykcwggtcaaytkccwgcwgataatattgtyaatattgctcatragykcatttggtcargggatttcagtracmcaracrcaaatgmttcgtgcctttacagctattgctaatgatggwgttatgctggagccwaaatttatwagtgcyatttatgatccaaatgatcaaactgctcggaaatctcaaaaagaarttgtgggaaatcctgtttctaaagatgcagctagtctaactcggactaacatgattttggtagggacggatccggtttatggaaccatgtataaccacagcacaggyaagccaactgtaactgttcctgggcaaaatgtagccctcaagtctggtacggctcagattgctgacgagaaaaatggtggttatctagtcgggttaaccaactatattttctcggctgtatcgatgaatcckgctgaaaatcctgattttatcttgtatgtaacggtwcarcarcctgarcattattcaggtatccagttgggagaatttgccaccccaatcttggagcgggcttcagctatgaaagaatctctcaatcttcaatctccagccaaraatttagataaagttacgacagaatcttcttatgcaatgcctagcatcaaggatatttcacctggtgagttggcggaagccttacgccgaaatattgtgcaaccaatcgttgtaggtactggaacaaagattaaagagacttctgtagaagaagggaccaatcttgcaccaaaccaacaagttctccttttatcggataaggtagaagaaattccagacatgtatggctggaaaaaagagactgcygaracctttgctaaatggttggatattgarctggaatttgaaggktcaggttcyrwygttcagaagcaagatgttcggactaatacagctatcaaaaacattaaaaaaattaaattaactttaggagac

SEQ ID NO: 3639 - DNA, 210 bp, Streptococcus pneumoniae
  misc_feature (1)..(210): tiling:Spneumo1:WAN024A5O; Cluster includes WAN024EET-rc R 6.IG_1197||||1160831..1161040|-|210 bp|Between spr1156 (py rR) (- strand) and spr1157 (nth) (- strand)|S.pneumoniae|R 6|NC_003098.1|IG-rc|110
gatgctacattgaaactttttgcttgattttaagcatgctttgtgctatagtaaatgataactaaatattcctttaaacctgtcccgtgaggcaggcaaggagcgcgataaagtagaagggtgaagtctatactgtgtgcagtagggctcgcttggctataaatttcaagtctccttgtttaaggagacttttctttttggaggtttgtc

SEQ ID NO: 3640 - DNA, 63 bp, Streptococcus pneumoniae
  misc_feature (1)..(63): tiling:Spneumo1:WAN024A3F; Cluster includes WAN024EDC R6.I G_1319.1||||1271165..1271227|+|63 bp|Between spr1275 (- st rand) and spr1276 (nadE) (- strand)|S.pneumoniae|R6|NC_003 098.1|IG|110
gatgctacctcacttccttatttctatrctcgtagtaaaaagrctcaactcagtaacagctag

SEQ ID NO: 3641 - DNA, 1461 bp, Streptococcus pneumoniae
  misc_feature (1)..(1461): tiling:Spneumo1:WAN024FGN; Cluster includes WAN0240KD |pbp 2b||CAB64485.1|||1440 bp|penicillin binding protein 2b|S.p neumoniae||AJ243059|ORF|000
gatgctctgacagatacccagrtkgctstwattgcctctryttcraarsarwtrcctggyrtyagtatttcwacttcwtgggatmgaaargttytrgaracttccctttcttctatagtwggragtgtwtcyagtgaaaaagctggyctcccagcggaagaagcagatgcttatcttaaaaaaggttaytctctaaatgaccgtgttgggacctcttayctagaaaagcaatacgaggaaaccttgcaaggyaaacgctcrgtgaargaaattcatctagayaagtacggtaatatggaaagtgtcgaaaatatcgargmtggtaccaaaggraataatattaaactgaccattgatttggccttccaagatagcgtggatgctttgctgaaaagttatttcaattcmgagytrggaaatggtggrgccaagtattctgarggtgtstatgcagtcgcccttaacccaaaaacaggtgctgttttgtctatgtcaggamtyaaacatgacytgaaaacrggrgagttgacgccggattccttgggaacggtaaccaatgtctttgtcccaggttcggttgtcaargcwgcgaccatcagctctggttgggaaaatggagtcttrtcaggaaaycagaccttgmcagaccagtccattgtcttccaaggttcagctccmatyaattcttggtaymctgccttttctrkgccaaygcckattacggsagttcargctctrgagtattcatcwaatgcytatatggtccaracagccytaggtcttatggggcaracctaycaaccmaatatgtttgtcggcaccagcaatctagagtctgctatggrgaaaytgcgttcaacctttggwgaatatggcttggggkctgcgactgggattgacctaccagatgaatctactggatttrttcccaaagactatarctttgcyaattwcatyacyaatgcctttgggcagtttgataactatacsccmatgcarttggctcagtatgtagcaactattgcaaatgatggtgttcgtgtggctcctcgtattgttgaaggyatttatggcaataatgataagggaggactgggtgacttgattcagcaactgcaaccgacwgagatgaataaggtcaatatatccgactccgatatgagyrtcttgcaccaaggtttttatcaggttgcycatggractagtggrttgacmactggccgtgccttttcaaatggkgccttggtatccattagcggaaaaacgggtacagccgaaagttatgtggcagatggwcagcaagcaacyaatacyaatgcggtggcctatgcmccatcwgataatccycaaatcgctgtkgcagtggtctttcctcataataccaatctaacaaatggygtaggaccttccattgcgcgtgacattatcaatctrtatcaaaaataccatccaatgaaytag

SEQ ID NO: 3642 - DNA, 52 bp, Streptococcus pneumoniae
  misc_feature (1)..(52): tiling:Spneumo1:WAN0249JA; Cluster includes WAN024E64-rc R 6.IG_1982||||1796677..1796728|-|52 bp|Between spr1822 (rpm G) (- strand) and spr1823 (pbp2a) (- strand)|S.pneumoniae| R6|NC_003098.1|IG-rc|110
gatgcttgtcaaagcctagctttcttgttataatggataagatggaggcgtt

SEQ ID NO: 3643 - DNA, 389 bp, Streptococcus pneumoniae
  misc_feature (1)..(389): tiling:Spneumo1:WAN0249U9; Cluster includes WAN0247K1 R6.I G_100||||86736..87043|+|308 bp|Between A (transposase) (+ strand) and spr0080 (+ strand)|S.pneumoniae|R6|NC_003098.1 |IG|220
gatgggatayctccgttgtgttatttaagtttattttaaaacaatgtaagcgtttttaaaacmtacaattctattctatagtgtattgaatctataacagtacacyttgrctgctaaaatatttctataaattaatttgactttcctgatagagatgttcacatcttatttcaaactactataaaagttctataatctctttataagatttgcccatcagacaaaatagaacgatttgaaggcgtttatgatatttagctgtacgagagtcttttaaaagtgttttgatggtttggatttcttctttagttgatttcatatcactgttatataatactttttgattttagtctagtattagtaagcagactcaaaccttagaaaatctt

SEQ ID NO: 3644 - DNA, 384 bp, Streptococcus pneumoniae
  misc_feature (1)..(384): tiling:Spneumo1:WAN024EYR; Cluster includes WAN023P7M-3 pn e53_2||||293..862|+|570 bp|Type 25F capsule operon, Glimme r 2.02 orf prediction|S.pneumoniae||WAN01UCCQ|ORF|000
gatggtttgcttgaaaatgacaatcacggaaacctagttccatctttgccagaggactggtctgtttcgagcgacggtctgacttatacttacaaattgagaaaagatgccaaatggttcacagctgacggtgaagagtactccccagtcaaggcccaggattttgtgacaggtatcaagtacgtagtggataataaatcacaggctattgacttgattcaaaactcgatcaaaggtttgaatgattatattacaggagcggattctgacttttctaaggttgggatgaaggccattgacaaccagactgttgagtatactttggtacgcccagaaccttactggaactcaaaaacaaccaacagtattcttttcccggtaaac

SEQ ID NO: 3645 - DNA, 404 bp, Streptococcus pneumoniae
  misc_feature (1)..(404): tiling:Spneumo1:WAN024C3V; Cluster includes WAN023I0B |||| 336620..337023|+|404 bp||S.pneumoniae|R6|NC_003098.1|RNA|1 00
gatgtgcaatttttggataatcgcgtgaggagaattgcttctcatgaggaaagtccatgctagcacaggctgtgatgcctgtagtgtttgtgctaggcgaaaccataagcctagggacgagaaatcgttacggcagttgaaatggctaagtccttggataggccagagtaggcttgaaagtgccacagtgacggagtctttctggaaacagagagagtggaacgcggtaaacccctcaagctagcaacccaaattttggtcggggcatggagtacgcggaaacgaacgtagtattctgactgctatcagctagagctgttagtggtagacagatgattatcgaaggaagtggtcctagtcacttctggaacaaaacatggcttatagaamatwrcwwataggtt

SEQ ID NO: 3646 - DNA, 290 bp, Streptococcus pneumoniae
  misc_feature (1)..(290): tiling:Spneumo1:WAN0249OC; Cluster includes WAN024E92-rc R 6.IG_1657||||1587055..1587344|-|290 bp|Between spr1611 (- strand) and spr1612 (- strand)|S.pneumoniae|R6|NC_003098.1 |IG-rc|110
gattaagcgtggtatcgtggtaatagtcaataaaaaagcacgtccacttgtgctagttactcgcctattgattttatagatttattagccctttcgmgggctttttatattgatttttatgagaaatgaagaaatcagacttttaagaaaatcaytgataccaagggtttaaatgaggtaatatggtataattaggacataaaataattttgtggtaagatggtagtatctattttagcatatttccgagcaatcggggcgattaaagagtcgcatagaaagaggacaaa

SEQ ID NO: 3647 - DNA, 234 bp, Streptococcus pneumoniae
  misc_feature (1)..(234): tiling:Spneumo1:WAN0249PN; Cluster includes WAN024EPS-rc R 6.IG_334||||313463..313694|-|232 bp|Between A (transposase ) (- strand) and spr0314 (cps2A) (+ strand)|S.pneumoniae|R 6|NC_003098.1|IG-rc|110
gattaayacctatacattgaacatywtacgrttatatcacttttttacggtaatgtctacacctttatttytactatctgcatctttaagtatcttagtagacttcccgcgaamcaaaaatatagtaaaatgaaataagaacakracaaatygwtcaggacagtcaaatcgwtttctaacaatrttttagaagcagakgtgtactattctagtttcaatmtaatatagtacaca

SEQ ID NO: 3648 - DNA, 133 bp, Streptococcus pneumoniae
  misc_feature (1)..(133): tiling:Spneumo1:WAN0249RH; Cluster includes WAN024EKZ-rc R 6.IG_695.2.2||||677729..677861|-|133 bp|Between spr0671 (m etK) (+ strand) and spr0672 (pyrDA) (+ strand)|S.pneumonia e|R6|NC_003098.1|IG-rc|110
gattctaatcctccagatttcttttattgctaatattataccataattttaattctaggtttactagattctgtggttctatctatttattcggaaaagaaagtctagtacagaagtcatgctatggaaacag

SEQ ID NO: 3649 - DNA, 57 bp, Streptococcus pneumoniae
  misc_feature (1)..(57): tiling:Spneumo1:WAN0249DE; Cluster includes WAN024E32-rc R 6.IG_2261||||2037588..2037644|-|57 bp|Between spr2045 (sph tra) (+ strand) and spr2046 (spo0J) (+ strand)|S.pneumonia e|R6|NC_003098.1|IG-rc|110
gattctacactaacacatcttttctcttatgtaaagctttctttacatagatgtcaa

SEQ ID NO: 3650 - DNA, 153 bp, Streptococcus pneumoniae
  misc_feature (1)..(153): tiling:Spneumo1:WAN0249W2; Cluster includes WAN024730-rc R 6.IG_167||||155301..155453|-|153 bp|Between spr0146 (+ str and) and spr0147 (+ strand)|S.pneumoniae|R6|NC_003098.1|IG -rc|110
gattctttctccttaaaaataataccgtactagtatctcacaatttgtttgatttcacaaattgttattagatagtcagatatatagtttaaaactatatccctaaaaactgagaaaccacccaccttactcagaatggatgatttcaagaaa

SEQ ID NO: 3651 - DNA, 52 bp, Streptococcus pneumoniae
  misc_feature (1)..(52): tiling:Spneumo1:WAN0249ZP; Cluster includes WAN024ECC R6.I G_1386.2.2.2||||1326912..1326963|+|52 bp|Between C (transp osase) (- strand) and spr1343 (tufA) (- strand)|S.pneumoni ae|R6|NC_003098.1|IG|110
gattcttttagtgtctaacttaaataattgttcttctgggaactaaatcgaa

SEQ ID NO: 3652 - DNA, 346 bp, Streptococcus pneumoniae
  misc_feature (1)..(346): tiling:Spneumo1:WAN024A3M; Cluster includes WAN024781-rc R 6.IG_142||||130216..130561|-|346 bp|Between spr0121 (pspA) (+ strand) and spr0122 (trmU) (+ strand)|S.pneumoniae|R6| NC_003098.1|IG-rc|110
gattgaaggtcgcttgagcagtattcattataacacgcttggttagagaagacaaggaagagcttaaaaattgttttttaaaacttatagtcaatatacagattatgtgaatgatgtgagtataccttcttcttatcttcattcaaataactataataaataaaacaacccattttctctaatctatttttcaagttagagaaaakgagtcgtttttttaatgacatttcctgaaatcataagataggtacctaaagaatacgaacataaatctattcaatcgaaccttatctttgtttcaaaattaaaatgtcaaatgttcttaacatgmtttaatttaatcggc

SEQ ID NO: 3653 - DNA, 96 bp, Streptococcus pneumoniae
  misc_feature (1)..(96): tiling:Spneumo1:WAN0249GT; Cluster includes WAN024E4S R6.I G_2122.2.1.2||||1895536..1895622|+|87 bp|Between spr1915 ( + strand) and spr1916 (malP) (- strand)|S.pneumoniae|R6|NC _003098.1|IG|110
gattgacccaaatcyacakcatttaaaaaagcgaatttcaatcgaaactcgcttttttacaaaatgtattagtataaatttgtatcttatactcaa

SEQ ID NO: 3654 - DNA, 317 bp, Streptococcus pneumoniae
  misc_feature (1)..(317): tiling:Spneumo1:WAN0249S8; Cluster includes WAN024EB3-rc R 6.IG_1498.1||||1435492..1435544|-|53 bp|Between spr1451 (t ruA) (- strand) and spr1452 (+ strand)|S.pneumoniae|R6|NC_ 003098.1|IG-rc|110
gattgattcctaagtttttcttttgatactcaatgaaaatcaaagagcaaactatagttgattgagtttggaatagtacgctgtagctgctaaaatatttctagaaattaatttgactttcctaatagagttgttcatatcttatttcaatctactatagaaagctagccgcaggttgctcaaaatagtgtgttgaggttgcagatggaaactgacgtggtttgaagagattttcgaagagtatgagatttttatacccatacaatatttgttttaggtccttgtttacagactaatttcttgataaaatagaggyt

SEQ ID NO: 3655 - DNA, 55 bp, Streptococcus pneumoniae
  misc_feature (1)..(55): tiling:Spneumo1:WAN0249EI; Cluster includes WAN024E3I-rc R 6.IG_2220||||2007255..2007309|-|55 bp|Between spr2013 (com FA) (- strand) and spr2014 (+ strand)|S.pneumoniae|R6|NC_0 03098.1|IG-rc|110
gatttaattgtactaaaaaatcatctaaagtgctagtttttacgaataaagaagt

SEQ ID NO: 3656 - DNA, 158 bp, Streptococcus pneumoniae
  misc_feature (1)..(158): tiling:Spneumo1:WAN0249DZ; Cluster includes WAN024E3B R6.I G_2237||||2021871..2022028|+|158 bp|Between spr2030 (- str and) and spr2031 (+ strand)|S.pneumoniae|R6|NC_003098.1|IG |110
gatttacctccttatatacagacttctattatatcacgaaaacctgaaattttcttgttccctgtaacacttttgaaataaaaatcgcttacatttctcgctgtctctctcactatttttaggaaaatatggtataataccaaagattgaggtgaatt

SEQ ID NO: 3657 - DNA, 133 bp, Streptococcus pneumoniae
  misc_feature (1)..(133): tiling:Spneumo1:WAN024A55; Cluster includes WAN024EEF R6.I G_1225.1.1||||1180819..1180941|+|123 bp|Between spr1181 (g dhA) (+ strand) and spr1182 (- strand)|S.pneumoniae|R6|NC_ 003098.1|IG|110
gatttatttrctyaatcctcaatcactacgattggggatttttagcttgarttaramarttggraaatctmattaawtaaaatgaaatgaaataaaaactgaacaaattrattgcggaattcaaaccaatttc

SEQ ID NO: 3658 - DNA, 134 bp, Streptococcus pneumoniae
  misc_feature (1)..(134): tiling:Spneumo1:WAN024AOL; Cluster includes WAN024EOR R6.I G_433.2||||406216..406349|+|134 bp|Between spr0409 (glnH) (- strand) and spr0410 (+ strand)|S.pneumoniae|R6|NC_00309 8.1|IG|110
gatttctcctattctgatctattaaaaaataactgtctcctattttatcgaaaaatgcgtaatttttcaacataagtaagyctttacttacgaaaaaatgctataatgataagaaagataaaaagggggcttag

SEQ ID NO: 3659 - DNA, 148 bp, Streptococcus pneumoniae
  misc_feature (1)..(148): tiling:Spneumo1:WAN024A33; Cluster includes WAN024ED6 R6.I G_1326.1||||1277577..1277650|+|74 bp|Between spr1282 (- st rand) and spr1283 (+ strand)|S.pneumoniae|R6|NC_003098.1|I G|220
gatttctcctatttgcaatataaaagtttgacatttttccttctcattttatagtaaataaaggataaaatcaasyctagacggattgttttgacaattctaaycttttagactttgcataataactrttaaacagtcgaaaattahc

SEQ ID NO: 3660 - DNA, 494 bp, Streptococcus pneumoniae
  misc_feature (1)..(494): tiling:Spneumo1:WAN0249UL; Cluster includes WAN024ELE R6.I G_669||||652684..653115|+|432 bp|Between spr0645 (- strand ) and spr0646 (+ strand)|S.pneumoniae|R6|NC_003098.1|IG|35 0
gatttgagacggtaggaatcattgaacataacctagccaacatcaatcacaatcatttmtcsttkytyrattacastaaaytatagtgyrttgaatctataacagtrcrcmtygrctgctaaaatatttctataaatyartttkmctttcctgatagagttgttcacatcttatttcaaactactataaaagttctataatctctttataagatttgcccatcagacgaaatataatggattgaaactagaatagtacacctctgcttctaaaacattgttagaaatcgatttgactgtcctgatcaatttgtcctgttcttgtttcattttactatagaacgatttgaaggcgtttatgatatttagctgtacgagagtctttaaaaagtgttttgatggtttggatttcttctttagttgatttcatatcactattatataatgctttttgattttagtwtagtattatcgtagaaaatggactcggtgcta

SEQ ID NO: 3661 - DNA, 150 bp, Streptococcus pneumoniae
  misc_feature (1)..(150): tiling:Spneumo1:WAN0249EA; Cluster includes WAN02471F-rc R 6.IG_230||||206920..207069|-|150 bp|Between spr0209 (secY) (+ strand) and spr0210 (adk) (+ strand)|S.pneumoniae|R6|N C_003098.1|IG-rc|110
gatttgatctccttattttrtttttaaatagaagcaaaaagtyttttcaccccgatttaaaaacaaaatagaagaggggagatccaactcttacaaatgtcagagtttaaacctccactccctcagtatttactgattcagtaaatactt

SEQ ID NO: 3662 - DNA, 93 bp, Streptococcus pneumoniae
  misc_feature (1)..(93): tiling:Spneumo1:WAN024AHI; Cluster includes WAN024EL2 R6.I G_695.1||||677310..677402|+|93 bp|Between spr0671 (metK) ( + strand) and spr0672 (pyrDA) (+ strand)|S.pneumoniae|R6|N C_003098.1|IG|110
gattttaagaggggaacgtcctctcttttttatagtttttaactatactgggatactgttctgaaaatccattttgcgaaagtagagatttac

SEQ ID NO: 3663 - DNA, 135 bp, Streptococcus pneumoniae
  misc_feature (1)..(135): tiling:Spneumo1:WAN024AN3; Cluster includes WAN024ENZ R6.I G_465||||447379..447513|+|135 bp|Between spr0441 (pgk) (+ strand) and spr0442 (+ strand)|S.pneumoniae|R6|NC_003098.1 |IG|110
gattttataaayaaatcaaagaagagagggatgaragttcctcttttcttttgcttaaaataaaaacgcttcctctcaactattactcataaaaatcaccgatttatgataaaatggaaatagaaagttgagatt

SEQ ID NO: 3664 - DNA, 68 bp, Streptococcus pneumoniae
  misc_feature (1)..(68): tiling:Spneumo1:WAN024AKS; Cluster includes WAN024EMT-rc R 6.IG_562||||539360..539427|-|68 bp|Between spr0538 (+ stra nd) and spr0539 (estA) (+ strand)|S.pneumoniae|R6|NC_00309 8.1|IG-rc|110
gattttctccttctatttttctataagaaaaagccgaaactcgactttctctctgtttatttcaacga

SEQ ID NO: 3665 - DNA, 456 bp, Streptococcus pneumoniae
  misc_feature (1)..(456): tiling:Spneumo1:WAN024ACO; Cluster includes WAN0247H0 R6.I G_118||||104786..105241|+|456 bp|Between spr0097 (- strand ) and spr0098 (+ strand)|S.pneumoniae|R6|NC_003098.1|IG|22 0
gattttctcggattattgacaaataaacggayattctgatagacgattgccctagcggcttagtgtaaactttacaaatttggcttgtaatttttttataaaattcacttyagwtacttgacagttattatattttcgctyatgcttattatatagataaaaggaygggatargagtttaaaaatttgaaagcgctatccatattgtttattgggctgattcttgagtaatagttagagtgtgattaatactactctggttgttcaaagacctgatacagaagagaactattcttctagttaagagtaagttcgttgtttaaaaatgaaatgaaatagaaggaaggtgagtccaatggactacgatacttgttgacaaattactatagctgtttctacggaatagctctcgataataggagaaataaatcatgagaaaattggtgttgcatcttta

SEQ ID NO: 3666 - DNA, 223 bp, Streptococcus pneumoniae
  misc_feature (1)..(223): tiling:Spneumo1:WAN024ALZ; Cluster includes WAN024ENI R6.I G_505||||484706..484928|+|223 bp|Between spr0481 (infB) (+ strand) and spr0482 (rbfA) (+ strand)|S.pneumoniae|R6|NC_ 003098.1|IG|110
gattttttgctcctttcttaggtggtgagggacgcaagcaaaccgatggtttcattgcttatttttgagcctagggtctcaaaaatcccctgtgatgggactgataaatcagttccatcactttcaccacggcgaaagaagcagatgacttcaaattgaacttcgtttcaatttaaactgaaaatcaagaagtttaaaatagctaggtctgctggcctagctt

SEQ ID NO: 3667 - DNA, 127 bp, Streptococcus pneumoniae
  misc_feature (1)..(127): tiling:Spneumo1:WAN024AK9; Cluster includes WAN024EMG R6.I G_585.1.1||||568853..568974|+|122 bp|Between spr0561 (prtA ) (+ strand) and spr0562 (+ strand)|S.pneumoniae|R6|NC_003 098.1|IG|110
gayaaaagctatagaaaaaaatggtttatgtactgagattagatagtgaggtgatgacatagttttgtgaaaayagccatttataactcaattatttagtttacttyactttactagtgatactatt

SEQ ID NO: 3668 - DNA, 60 bp, Streptococcus pneumoniae
  misc_feature (1)..(60): tiling:Spneumo1:WAN0249HY; Cluster includes WAN024E5G-rc R 6.IG_2036||||1847738..1847797|-|60 bp|Between transporter (MATE) (- strand) and spr1878 (thrC) (- strand)|S.pneumoni ae|R6|NC_003098.1|IG-rc|110
gayagagggagyaaactcggttgggaaaccaactgagtttcttttcatcaggaggagaga

SEQ ID NO: 3669 - DNA, 113 bp, Streptococcus pneumoniae
  misc_feature (1)..(113): tiling:Spneumo1:WAN0249ZS; Cluster includes WAN024ECH-rc R 6.IG_1376||||1319617..1319729|-|113 bp|Between spr1332 (- strand) and spr1333 (pgdA) (- strand)|S.pneumoniae|R6|NC_0 03098.1|IG-rc|110
gcaagaaaaaataggtctgttagatatttgacagacttattttttacagaatatagtactacttaaaaaatgttttatgctataattgatgaataaaatagaaggagaagcat

SEQ ID NO: 3670 - DNA, 831 bp, Streptococcus pneumoniae
  misc_feature (1)..(831): tiling:Spneumo1:WAN024G3B; Cluster includes WAN0240XK-M |p rtA||AAD48399.1|||6435 bp|cell wall-associated serine prot einase precursor PrtA variable region|S.pneumoniae||AF1271 43|ORF|000
gcaagcaactttaccaaaatccataggattaaatttgctaatcaagctgatgaaaaagggatgatttcctattatctagtagatcctgatcaggattcatctaaataccaaaagcttggcgaaattcctgaatctaaatttaagaatttaaaaaatgttaaagatgatwgcctaaacaaagagacagctgaggtggaaaataaccttttagtagataatcagtctatcgaaggaaaatctctctttaatattcataaaactatttcaacaattagagactttgaaaataaagacctaaagaaactcattaaaaagaaatataagcaagaagacgactttgtaaatggtggaacaagaayrgwrgaryrygattataaatacgatgataaaggaaatataatagcctacgatgatgggactgatctagaatatgaaactgagaaacttgacgaaatcaaatcaaaaatttatggtgttctaagtccgtctaaagatggacactttgaaattcttggaaagataagtaatgtttctaaaaatgccaaggtatattatgggaataactataaatctatagaaatcaaagcgaccaagtatgatttccactcaaaaacgatgacatttgatctatacgctaatattaatgatattgtggatggattagcttttgcaggagatatgagattatttgttaaagataatgatcagaaaaaagctgaaattaaaattagaatgcctgaaaaaattaaggaaactaaatcagaatatccctatgtatcaagttatgggaatgtcatagaattaggggaaggagatctttcaaaaaacaaa

SEQ ID NO: 3671 - DNA, 191 bp, Streptococcus pneumoniae
  misc_feature (1)..(191): tiling:Spneumo1:WAN0249KO; Cluster includes WAN024E6X-rc R 6.IG_1878||||1731568..1731758|-|191 bp|Between spr1763 (pl cR) (- strand) and spr1764 (+ strand)|S.pneumoniae|R6|NC_0 03098.1|IG-rc|110
gcaatgaaacccctttctttttccttgtttttattctaacagatatattttatttagtcaagtatttttatgtaatttttaacttttttttttgtttattaccataaagaattatttattcctttaacttgctattttgaactaaaaactttataatgaaattaagcaaataggaaggtttattatcttta

SEQ ID NO: 3672 - DNA, 74 bp, Streptococcus pneumoniae
  misc_feature (1)..(74): tiling:Spneumo1:WAN024F9N; Cluster includes WAN023HZS tRNA -Arg|tRNA-Arg|||1691594..1691667|-|74 bp|tRNA-Arg|S.pneumo niae|R6|NC_003098.1|RNA|220
gcacccttagctcaactggatagagtacctgactacgaatcaggcggttagaggttcgactcctctagggtgca

SEQ ID NO: 3673 - DNA, 118 bp, Streptococcus pneumoniae
  misc_feature (1)..(118): tiling:Spneumo1:WAN024AP7; Cluster includes WAN024EP3 R6.I G_402||||378333..378450|+|118 bp|Between spr0378 (acp) (+ strand) and spr0379 (fabK) (+ strand)|S.pneumoniae|R6|NC_0 03098.1|IG|110
gcagaatattagtagaaggagtagggagaaacccactccctcttgtttaggtaatagtttgactgtcaaattatggtgaaatcgaactattacgtaagcaaggaaggttggaggcact

SEQ ID NO: 3674 - DNA, 242 bp, Streptococcus pneumoniae
  misc_feature (1)..(242): tiling:Spneumo1:WAN0249VF; Cluster includes WAN024E9U-rc R 6.IG_1583||||1518052..1518293|-|242 bp|Between spr1536 (na nA) (- strand) and spr1537 (- strand)|S.pneumoniae|R6|NC_0 03098.1|IG-rc|110
gcaggaagtatggtgtaaatagcatargctgatgtccatcatttgcttataaagagatattttagtttaattgcagcggtgtcctggtagataaactagattggcaggagtctgattggagaaaggagaggggaaawttggcaccaatttgagatagtttgtttagttcatttttgtcatttaaatgaactgtagtaaaagaaagttaataaaagacaaactaagtgcattttctggartaa

SEQ ID NO: 3675 - DNA, 104 bp, Streptococcus pneumoniae
  misc_feature (1)..(104): tiling:Spneumo1:WAN0249S5; Cluster includes WAN024EKH-rc R 6.IG_743.2.1.2||||721725..721808|-|84 bp|Between E (transp osase) (- strand) and spr0720 (- strand)|S.pneumoniae|R6|N C_003098.1|IG-rc|110
gcagtacatttcaatacctgmtaytatgcgtttttatcattttgaaatctactgctaatcaatgaagaagcaaagatcaaactaggcagctagttacaagttac

SEQ ID NO: 3676 - DNA, 450 bp, Streptococcus pneumoniae
  misc_feature (1)..(450): tiling:Spneumo1:WAN0249GB; Cluster includes WAN024E4K R6.I G_2151.1||||1925304..1925741|+|438 bp|Between spr1944 (rpm G) (+ strand) and spr1945 (pcpA) (- strand)|S.pneumoniae|R 6|NC_003098.1|IG|110
gcattcaatacgaatcaatacagaagaaaaacgcttgatcagcgttttttctttttgttaatttcactayattgyaagrgaaatcattcgaatgactacatttttcactaccttttttgaaataagaatacggattcggacrattaaaagyaagagraactcaaatgtaagttggggttccttttttgtatatttttcaaataacgcctctacactatttgtagcaaattcaccaactacagttgyatcttagttaaaataagttagaatatgtaagtgagtaccagatataccaagacatcgtcaccatctaaggtatattcaaaatacaaaagttgaccaactagatttctgaatatccttatatatccattcttaaaattggtttaaatagcgtagtcttttaaactagttttgagaatccaaaaaatcttcctacatatgtaagaa

SEQ ID NO: 3677 - DNA, 652 bp, Streptococcus pneumoniae
  misc_feature (1)..(652): tiling:Spneumo1:WAN024CAK-M; Cluster includes WAN0244OY sp r0160|hexB|15902204|NP_357754.1|168072..170021|+|1950 bp|D NA mismatch repair protein|S.pneumoniae|R6|NC_003098.1|ORF |111
gccaagaagatgattgaaattgaraaytctgacctagatttcgaaatttcaggttttgtgtcyttrcctgagttgactcgggctaaccgcaattatatcagyctyttcatcaatggycgttatatyaagaayttcctrctcaatcgtgctattttrgatggttwyggaagyaagctyatggtwggmcgttttccactggcwgtcattcacatccatatcgacccytatctagcggatgtcaatgtrcatccaacyaagcaagaggtgcgratttcyaaggaaaaagaactgatgrcbctggtytcagaagctattgcmaayagtctcaaggarcaaaccttgatwccagatgccttggaaaatcttgccaaatcgaccgtgcgcaatcgtgagaaggtggagcaracyattctcccactcaaagaaaatacgytctactatgagaaaactgagccgtcaagacctagtcaaactgaagtagctgattatcaggtagaattgactgatgaagggcaggatttgaccctgtttgccaaggaaaccttggaycgattgaccaagccagcaaaactgcattttgcagagagaaagcctgctaactacgaccagctagaccatccagagttagatcttgctagcatcgataaggctt

SEQ ID NO: 3678 - DNA, 367 bp, Streptococcus pneumoniae
  misc_feature (1)..(367): tiling:Spneumo1:WAN024FKJ-M; Cluster includes WAN0243R6 sp r1377|metB|15903420|NP_358970.1|1360403..1361497|-|1095 bp |Cystathionine gamma-synthase|S.pneumoniae|R6|NC_003098.1| ORF|111
gccaatacagaagaagagttgattgccgagttagaaaaggatgtggatgttctctatatcgaaaccccaaccaatcccttgatgttggaatttgatatcgaaaaactagcaaaattggctcatgctaagggtgccaaagtggtggtggacaataccttctatagccctatctaccaacgtccgattgaagatggagcagatatcgttctccattcagcaaccaagtatctagcaggccacaatgatgtcttggctggagtggttgtgaccaatagtttagaactatacgagaagcttttttacaatctyaatacaacaggggcagtcttgtctccatttgacagctaccagttgcttcgtggtctca

SEQ ID NO: 3679 - DNA, 83 bp, Streptococcus pneumoniae
  misc_feature (1)..(83): tiling:Spneumo1:WAN024AHB; Cluster includes WAN024EKW-rc R 6.IG_703||||685312..685394|-|83 bp|Between spr0679 (ppiA) (- strand) and spr0680 (- strand)|S.pneumoniae|R6|NC_00309 8.1|IG-rc|110
gccagttctgtaaactactaatatttgaaatccacttccttttagggtrcaatggttataaatgaatttttgagaggatcaga

SEQ ID NO: 3680 - DNA, 66 bp, Streptococcus pneumoniae
  misc_feature (1)..(66): tiling:Spneumo1:WAN024A4Y; Cluster includes WAN024EE2-rc R 6.IG_1258.2||||1210010..1210075|-|66 bp|Between spr1214 (t rzA) (- strand) and spr1215 (- strand)|S.pneumoniae|R6|NC_ 003098.1|IG-rc|110
gccattctcttttgaaagtttatggacgaaaaaagttgccttcgagtgacttttttgttacaatag

SEQ ID NO: 3681 - DNA, 118 bp, Streptococcus pneumoniae
  misc_feature (1)..(118): tiling:Spneumo1:WAN0249V8; Cluster includes WAN024E9R-rc R 6.IG_1585.1.1||||1520397..1520514|-|118 bp|Between spr1538 (axe1) (- strand) and spr1539 (recG) (- strand)|S.pneumon iae|R6|NC_003098.1|IG-rc|110
gcccatcatcctaaaagtaaagaatctaaattcactttctatttayccttctttcttgcattgattacatagatatgctacagttgtggtaacgattacaaaataaaaggagcatgct

SEQ ID NO: 3682 - DNA, 346 bp, Streptococcus pneumoniae
  misc_feature (1)..(346): tiling:Spneumo1:WAN024A3N; Cluster includes WAN024781 R6.I G_142||||130216..130561|+|346 bp|Between spr0121 (pspA) (+ strand) and spr0122 (trmU) (+ strand)|S.pneumoniae|R6|NC_ 003098.1|IG|110
gccgattaaattaaakcatgttaagaacatttgacattttaattttgaaacaaagataaggttcgattgaatagatttatgttcgtattctttaggtacctatcttatgatttcaggaaatgtcattaaaaaaacgactcmttttctctaacttgaaaaatagattagagaaaatgggttgttttatttattatagttatttgaatgaagataagaagaaggtatactcacatcattcacataatctgtatattgactataagttttaaaaaacaatttttaagctcttccttgtcttctctaaccaagcgtgttataatgaatactgctcaagcgaccttcaatc

SEQ ID NO: 3683 - DNA, 84 bp, Streptococcus pneumoniae
  misc_feature (1)..(84): tiling:Spneumo1:WAN024F9F; Cluster includes WAN023HZ0 tRNA -Leu|tRNA-Leu|||1850742..1850825|-|84 bp|tRNA-Leu|S.pneumo niae|R6|NC_003098.1|RNA|110
gccggcgtggcggaattggcagacgcgctggactcaaaatccagtgtccgcaaggacgtgccggttcgaccccggccgccggta

SEQ ID NO: 3684 - DNA, 73 bp, Streptococcus pneumoniae
  misc_feature (1)..(73): tiling:Spneumo1:WAN024F9K; Cluster includes WAN023HZP tRNA -Thr|tRNA-Thr|||1691864..1691936|-|73 bp|tRNA-Thr|S.pneumo niae|R6|NC_003098.1|RNA|220
gccggcttagctcagttggtagagcatctgatttgtaatcagagggtcgcgtgttcaagtcatgtagccggca

SEQ ID NO: 3685 - DNA, 86 bp, Streptococcus pneumoniae
  misc_feature (1)..(86): tiling:Spneumo1:WAN024F9M; Cluster includes WAN023HZR tRNA -Leu|tRNA-Leu|||1691677..1691762|-|86 bp|tRNA-Leu|S.pneumo niae|R6|NC_003098.1|RNA|220
gccggggtggcggaactggcagacgcacaggacttaaaatcctgcgattggtaacgatcgtaccggttcgattccggtcctcggca

SEQ ID NO: 3686 - DNA, 73 bp, Streptococcus pneumoniae
  misc_feature (1)..(73): tiling:Spneumo1:WAN024FA3; Cluster includes WAN023I02 tRNA -Lys|tRNA-Lys|||1590539..1590611|+|73 bp|tRNA-Lys|S.pneumo niae|R6|NC_003098.1|RNA|110
gcctccttagctcagctggcagagcagcggactcttaatccgtgggtcacaggttcgatccctgtagggggca

SEQ ID NO: 3687 - DNA, 1422 bp, Streptococcus pneumoniae
  misc_feature (1)..(1422): tiling:Spneumo1:WAN024FGM; Cluster includes WAN02401I |PBP 2B||CAA80194.1|||1422 bp|penicillin-binding protein 2b|S. pneumoniae||Z22184|ORF|000
gcctctaagaatttacctggtatcagtatttcaacttcgtgggatcgaaaggttctagagacttctctttcgtctatagtaggaagtgtatccagtgaaaaagctggtctaccagctgaagaagcagatgattatatcaaaaagggttattctctaaacgatcgtgttgggacttcttatctagaaaaacaatatgaagaaaccttgcaaggaaaacgctcggttaaggaaatccatctagacaagtatggcaacatggaaagtgtcgaaaatatcgaagatggtaccaaagggaataatattaaactgactattgatttggcctttcaagatagcgtagacaatctgcttaagagttacttcaattccgarctrggaaatggwggagccaagtattcwgaaggwgtstatgcagtcgcyytkaacccmaaaacaggtgckgttttgtctatgtcaggrctmaaacatgacytgaaaacgggagakttracwcctgattccttgggaacagtaaccaatgtctttgtcccrggttckgttgtcaaggckgcraccatcagytcyggttgggaraatggagtcttgtcagggaaccagaccttgacrgaycaaccgattgtyttccaaggytcrgctccrattaattcttggtatactcargcttaygrttcattcccgattacagckgtggaagccttggagtattcttctaatrcctatatggttcaaacrgctttgggcatyatgggtcaracctatcaaccyaatatgtttgttskaacyarcaatttrgaatccgctatggggaaacttcgtkcgacatttgcggaatatggtcttggagcctcaacaggcattgaccttccagatgagtcaactggttttataccaaaagagtataatttggctaattacattaccaatgcatttggtcagtttgataactacaccccaatgcaattggcccagtacgttggaactattgccaacaacggtgttcggattgcacctcacattgttgaggggatttatggaaacaatgaacaaggtggtttagggaacttaatccaatctgttgaaaccaaggaaatgaataaaattaatatttctgagtctgatgtttccatcctgcaacaaggattttatcaggtttcagatggtggaagtgctttgacaaccggtcgtgccttttcaaatggcgcagcagtatccattagtggaaaaacaggtactgccgaaagttatgttagaggtggtcaaaaagctaacaatactaatgctgtggcctatgcaccatcagataatcctcaaatcgctgtagctgttgtcttccctcataacaccaaccttacaaatggtgtcggaccttccattgcgcgcgatattatcaacctctatcaacaacatcatccaatgaattag

SEQ ID NO: 3688 - DNA, 72 bp, Streptococcus pneumoniae
  misc_feature (1)..(72): tiling:Spneumo1:WAN024F9L; Cluster includes WAN023HZQ tRNA -Gly|tRNA-Gly|||1691770..1691841|-|72 bp|tRNA-Gly|S.pneumo niae|R6|NC_003098.1|RNA|220
gcgaacgtagttcagtggtagaacaccaccttgccaaggtgggggtcgcgggttcgaatcccgtcgttcgct

SEQ ID NO: 3689 - DNA, 96 bp, Streptococcus pneumoniae
  misc_feature (1)..(96): tiling:Spneumo1:WAN024AMW; Cluster includes WAN024ENX-rc R 6.IG_468.1.1||||449858..449953|-|96 bp|Between spr0444 (gl nA) (+ strand) and spr0445 (hsdS) (+ strand)|S.pneumoniae| R6|NC_003098.1|IG-rc|110
gcgaccgaaatcgctattttaagggttataggtatttgatggcttagactgctgtgtgactgtttacccacaggcaatctttcttctatattagta

SEQ ID NO: 3690 - DNA, 1712 bp, Streptococcus pneumoniae
  misc_feature (1)..(1712): tiling:Spneumo1:WAN024B8A; Cluster includes WAN0244PX-3 sp r0125||15902169|NP_357719.1|134636..136468|-|1833 bp|Conse rved hypothetical protein|S.pneumoniae|R6|NC_003098.1|ORF| 321
gcgccttcgaaattacggagttctaatatggcctacactcttaaacctgaagaagtyggygtttttgccatcggtggtctaggagaaatcgggaaaaacacttacggaattgaataccaagrcgagattatcatcgtcgatgctgggattaaattcccagaagatgacttgcttggtatcgactatgtcattcctgactactcttacatcgtrgacaatatcgaccgcgtcaaggctgttttaatcacacacggacacgaggaccacattggtgggattccgttcctactcaagcaagcaaatgtccctatytaygctggaccgcttgccttggctttgatccgtgggaaactcgaagaacacggcctcttgcgcaacgccaaactttacgaaatcaaccacaacaccgagttgacctttaaaaayctcaaggcaactttctttagaacgactcactctattccagarcctttgggrattgtcatycatactcctcaagggaaaatcrtctgtacrggkgactttaagttcgactttactccagttggagaacctgcggacttgcaycgtatggcwgcsctwggtgaagawgghgtgctytgyytsctstctgactcgacmaatgckgargtwccaacctttacmaactctgaaaargtygtyggycagtccatyatgaagattatccaaggtatygarggacgtatcatctttgcatccttygcctcaaatatcttccgtctccarcargcaacrgaagctgctgttaagactggrcgcaagattgcggtctttggtcgytctatggaaaaggccattgtcaacggaatcgatcttggctacatcaaagctcctaasggaacctttatygagccaaatgaaatcaaagaytatcctgcaggwgarrttctkatcctctgtacaggtagtcarggtgarcctatggcagccctctctcgtatcgccaacggaacccaccgtcargtacaaytmcaaccaggygataccgttatcttctcttctagtcccatccctggaaacactactagygtcaacaagctgattaacatcatttctgaagctggtgtcgaagttatccacggtaaagtgaacaatatccatacatctggacacggtggycagcaagagcaaaaactcatgctcygcttgattaagccaaaatacttcatgcctgtccacggtgaataccgcatgcaaaaagtccacgctggactagcagtggatactggtgttgwgaaggacaatatctttatcatgagcaatggcgatgtgcttgcccttactgctgactcagctcgtatcgcaggtcatttcaacgcccaagatatctatgtcgatggaaatcgtatcggtgaaattggcgcagctgtcctcaaagatcgtcgcgatctatctgaagacggtgtcgttctrgcagtygcaactgttgacttcaaatcgcagatgattctrtctggyccagayatcctcagccgaggctttgtctacatgagagagtctggmgacttgattcgccaaarccagcgtatcctcttcaatgccattcgtatcgcactgaaaaataaggatgctagcgtgcaatctgtcaatggtgccattgtcaacgctattcgccccttcctctatgaaaataccgaacgtgaaccgatcatcatcccgatgatcctcacaccagatgaagaataactaat

SEQ ID NO: 3691 - DNA, 76 bp, Streptococcus pneumoniae
  misc_feature (1)..(76): tiling:Spneumo1:WAN024ACS; Cluster includes WAN024EIH R6.I G_930||||883336..883411|+|76 bp|Between spr0894 (pfs) (+ s trand) and spr0895 (+ strand)|S.pneumoniae|R6|NC_003098.1| IG|110
gcggaaatttgacagtttttctagcttatgataagatttaagtaaagaaaagctagaaaacgtttcagaggatatt

SEQ ID NO: 3692 - DNA, 86 bp, Streptococcus pneumoniae
  misc_feature (1)..(86): tiling:Spneumo1:WAN024FA4; Cluster includes WAN023I03 tRNA -Leu|tRNA-Leu|||1421994..1422079|-|86 bp|tRNA-Leu|S.pneumo niae|R6|NC_003098.1|RNA|110
gcggggatggcggaattggcagacgygcaggactaaggatcctgtgaccgctttaggtcgtgagggttcaagtccctctctccgca

SEQ ID NO: 3693 - DNA, 71 bp, Streptococcus pneumoniae
  misc_feature (1)..(71): tiling:Spneumo1:WAN024F9Y; Cluster includes WAN023HZZ tRNA -Gly|tRNA-Gly|||1690986..1691056|-|71 bp|tRNA-Gly|S.pneumo niae|R6|NC_003098.1|RNA|220
gcgggtgtagtttagtggtaaaactacagccttccaagctgttgtcgcgagttcgattctcgtcacccgct

SEQ ID NO: 3694 - DNA, 73 bp, Streptococcus pneumoniae
  misc_feature (1)..(73): tiling:Spneumo1:WAN024DZG; Cluster includes WAN023HYY tRNA -His|tRNA-His|||1850917..1850989|-|73 bp|tRNA-His|S.pneumo niae|R6|NC_003098.1|RNA|110
gcgggtgtggtgaagtggttaacacaccagattgtggctctggcatgcgtgggttcgatccccatcactcgcc

SEQ ID NO: 3695 - DNA, 82 bp, Streptococcus pneumoniae
  misc_feature (1)..(82): tiling:Spneumo1:WAN024F9J; Cluster includes WAN023HZO tRNA -Leu|tRNA-Leu|||1691955..1692036|-|82 bp|tRNA-Leu|S.pneumo niae|R6|NC_003098.1|RNA|220
gcgggtttggcggaattggcagacgcaccagatttaggatctggcgcttaacggcgtgggggttcaagtcccttaacccgca

SEQ ID NO: 3696 - DNA, 86 bp, Streptococcus pneumoniae
  misc_feature (1)..(86): tiling:Spneumo1:WAN0249J7; Cluster includes WAN024E63 R6.I G_1983||||1798925..1799010|+|86 bp|Between spr1823 (pbp2a) (- strand) and spr1824 (rluD) (+ strand)|S.pneumoniae|R6| NC_003098.1|IG|110
gcgtttattttatcatcttcatcataggaagacaagaatttagctatttcctatccaaatagggctttttttgttacaatatctgt

SEQ ID NO: 3697 - DNA, 441 bp, Streptococcus pneumoniae
  misc_feature (1)..(441): tiling:Spneumo1:WAN024B35; Cluster includes WAN0240KP |ddl ||CAB64500.1|||441 bp|D-alanine--D-alanine ligase|S.pneumo niae||AJ387987|ORF|000
gctaaaatcgctgaagtggaagaaaaattgacttatccagtcttcactaagccgtcaaacatggggtctagtgtcggtatttctaagtctgaaaatcaagaagaacttcgtcaggctttggaacttgcctttcaatatgacagtcgtatcttggtagagcaaggggtaaatgcccgtgaaattgaggttggcctcttgggcaactatgatgtcaagagtacacttcctggagaagtagtcaaggatgttgccttttatgactacgatgccaagtatattgacaacaagattaccatggacattcctgccaagatcagtgatgatgtggtagctgtcatgcgtcaaaatgcagaaacggcctttcgtgctattggtggcctcggtctctctcgttgcgatttcttctatacagataagggagagattttcctaaacgagctt

SEQ ID NO: 3698 - DNA, 441 bp, Streptococcus pneumoniae
  misc_feature (1)..(441): tiling:Spneumo1:WAN024B38; Cluster includes WAN0240KH |ddl ||CAB64492.1|||441 bp|D-alanine--D-alanine ligase|S.pneumo niae||AJ387979|ORF|000
gctaaaatcgctgaagtggaagaaaaattgacttatccagtcttcactaagccgtcaaacatgggttctagtgtcggtatttctaagtctgaaaatcaagaagaacttcgtcaggctttggaacttgccttccratatgacagccgwgtyttggtagagcaaggrgtaaatgcccgtgaaatcgaggttggtctmytgggcaactacgatgtcaaaagcacccttccaggagaagtagtcaaggatgttgccttttatgactaygaygccaagtatatygayaacaagattacyatggayattccrgccaaratcagtgatgatgtrgtagctgtcatgcgtcraaatgcagaaacrgccttccgtgcyattggwggmcttggtctctctcgttgygatttcttctatacagayaagggagagattttcctcaacgagctc

SEQ ID NO: 3699 - DNA, 441 bp, Streptococcus pneumoniae
  misc_feature (1)..(441): tiling:Spneumo1:WAN024B39; Cluster includes WAN0240KO |ddl ||CAB64499.1|||441 bp|D-alanine--D-alanine ligase|S.pneumo niae||AJ387986|ORF|000
gctaaaatcgctgaagtkgaagaaaaattgrcttatccagtcttcacyaarccrtcaaacatgggttcwagtgtcggtatttcyaartctgaaaaycaagargaactccgtcaagcwttgaaacttgccttccaatatgacagccgtgtcttggttgagcaaggggtgaatgcccgtgaaatcgaggttggactcttgggaaattacratgtcaagagcacscttccaggagaagtagtcaaggatgttgccttttatgactacgatgccaagtatattgataacaagattactatggatattcctgccaaaatcagtgatgatgtggtrgctgtcatgcgtcaaaatgcagaaacagccttccgtgccattggtggcctyggtctmtctcgttgcgatttcttctatacagataaggragagattttyctmaacgagcts

SEQ ID NO: 3700 - DNA, 441 bp, Streptococcus pneumoniae
  misc_feature (1)..(441): tiling:Spneumo1:WAN024B37; Cluster includes WAN02412H |ddl A||CAD19597.1|||441 bp|D-alanine D-alanine ligase|S.pneumo niae||AJ422249|ORF|000
gctaaaatcgctgaagttgaagaaaaattgacttatccagtcttcacaaaaccatcaaacatggggtcaagtgtcggtatttctaagtctgaaaatcaagaggaacttcgtcaagccttgaaacttgccttccaatatgacagccgtgtcttggtagagcaaggggtgaatgctcgtgaaattgaagttggtctactgggcaactacgatgtcaagagtacgctaccaggagaagtagtcaaggatgttgccttttatgactacgatgccaagtatattgacaacaagattaccatggatatcccagctaaaatcagtgatgatgtggtagttgtcatgcgtcaaaatgcagaaaccgcctttcgtgccattggtggactcggtctctctcgttgtgatttcttctatacagacaagggagaaatcttcctaaatgaactc

SEQ ID NO: 3701 - DNA, 441 bp, Streptococcus pneumoniae
  misc_feature (1)..(441): tiling:Spneumo1:WAN024B36; Cluster includes WAN02412I |ddl A||CAD19598.1|||441 bp|D-alanine D-alanine ligase|S.pneumo niae||AJ422250|ORF|000
gctaaaatygctgaagtggaagaaaaattgrcttatccagtcttcacyaarccgtcaaacatggggtctagtgtcggtatttctaartctgaaaatcaagaagarctycgtcargctttggaacttgcctttcaatatgacagccgtgtyttggtagagcaaggagtaaatgcccgtgaaattgaggttggcctcttgggtaactacgatgtcaagagcacgctacctggagaagttgtcaaggacgttgccttttatgactacgatgccaagtatattgayaacaagattactatggatattcctgccaaaatcagtgatgatgwggtagctgtcatgcgtcaaaatgcagaaackgccttccgtgccattggtggcctcggtctmtctcgttgcgatttcttctatacagataagggagagattttyctmaacgagcty

SEQ ID NO: 3702 - DNA, 106 bp, Streptococcus pneumoniae
  misc_feature (1)..(106): tiling:Spneumo1:WAN024AEG; Cluster includes WAN024EJD R6.I G_839.1||||806092..806197|+|106 bp|Between spr0803 (+ stra nd) and spr0804 (- strand)|S.pneumoniae|R6|NC_003098.1|IG| 110
gctacttgtattgctggraatggtataagatgaaaatctacaagtcactaattttcatataacaaaaaaacgaacaggctctttttctgttattcagaagagaact

SEQ ID NO: 3703 - DNA, 170 bp, Streptococcus pneumoniae
  misc_feature (1)..(170): tiling:Spneumo1:WAN0249RX; Cluster includes WAN024EPG-rc R 6.IG_383||||359146..359315|-|170 bp|Between spr0359 (mtlD) (+ strand) and spr0360 (+ strand)|S.pneumoniae|R6|NC_0030 98.1|IG-rc|110
gctagaaagattaccgcagataactcaaacagtgttttgagrttgcagataagactgacggagtcagctcaaagcactgctttgaggttgtagatagaactgacgaagtcagtaacatatgcctaagacaaagcgatgctaacctgatttgaagagattttcgaaaaaga

SEQ ID NO: 3704 - DNA, 1773 bp, Streptococcus pneumoniae
  misc_feature (1)..(1773): tiling:Spneumo1:WAN024D2Z-3; Cluster includes WAN0243Y5 sp r1126|smc|15903169|NP_358719.1|1127135..1130674|-|3540 bp| chromosome condensation and segregation SMC protein|S.pneu moniae|R6|NC_003098.1|ORF|221
gctatcgctgtaagcccaggtttccttgggatggcagatgagttrgtkactttygatactagactggaagccattttcaagaacttgctagctacgacggctatctttgataccgtaraacatgcgcgtgmagcwgctcgmcaagttcgttatcaggttcgyatggtgacattggatgggacagarytdcgyacrggtggttcytatgcrggtggwgccaatcgycaraayaacagyatyttyatcaagccagaactggagcaattacaaaaagaaattgctgmagawgaagcaagcttggrttcagaagargygrctttgaagaccttgcaagaysagatggcyrsattgacmgarwsattagaagcyatyaaatctcaaggagagcaggcacgtattcaggagcaaggcttgtycctcgcttatcagcaaactagtcagcaagttgaagarctrgaaactctttggaaactccaagaagaggaaatagatcgtctttcygagggagattggcaagcggataaggaaaamtgycaagagmgycttgctrcwatckccagtgamaagcaaaatctggaagctgagattgaagarattaagtctaayaaaaaygccatccaagaacgctatcaaaayttgcaggaagagstrgcgcaagctcgyttgcttaagacaraactgcaagggcaaaaacgttatgaartwgctgatattgarcgyttaggcaaggaattggayaatcttratwtygaacaagargaaatycagcgcmtkctycaagaaaarrttgayaatcttgagaargttgatacrgawttgctcartcarcaggcsgaagaakccaaaactcaraaaacraayctccaacaaggtttgattcgcaarcagtttgagttggatgatatwgarggkcarctggatgatattgcyagtcayttggatcargctcgccagcagaatgargagtggattcgcaagcaaacwcgtgctgaagcyaagaaagaaaaggtyagcgarcgcttgcgccatctacaaartcaattaacagaccagtaccagatyagctayacwgaagcwytagaaaargcrcatgarttggaaaayctcaatctggcagagcaagargtkmaggatttagagaaggctatwcgctcaytgggwcctgtcaaywtrgamgctattgamcrgtacgaagaagttyacaaccgtctggayttyctaaatagycarcgwgatgatattttgtcwgcgaaaaayctgctccttgaraccattacaragatgaatgatgaggtyaaggaacgctttaaatcaacctttgargyyattcgtgagtcctttaaagtgaccttyaagcagatgtttggyggaggtcaggcwgacytsatwttgactgarggmgacytkytracagctggkgtkgaratttctgtycaaccwccaggyaagaaaatccagtckcttaayctcatgagtggtggtgaaaaagcyctatcggctcttgccttgctyttctccattattcgtgtcaagacyattccwtttgtyatcttggatgaggtggaagctgcgytggatgaagcyaatgttaaacgttttggggattacctcaaccgctttgacaaggacagccagttyatcgtygtaacccaccgtaagggaaccatggcagcggcygattcyatctatggagtgaccatgcaagaatcrggtgtytcaaarattgtttcrgttaagttaaaagatttagaaagtattgaaggaykaactaat

SEQ ID NO: 3705 - DNA, 318 bp, Streptococcus pneumoniae
  misc_feature (1)..(318): tiling:Spneumo1:WAN0249HP; Cluster includes WAN024EQM R6.I G_270.2||||248571..248888|+|318 bp|Between spr0249 (rpsG) (+ strand) and spr0250 (fusA) (+ strand)|S.pneumoniae|R6|N C_003098.1|IG|110
gctcaactaaatcatgatgctaggmacggtaaggatgcaaggtraaaataggaaactgacgcagtattcgaygaatacaaggagttttatctttttcrcgcagcatcccgttccagctcayatcggctaactaactttagcccgggttcaaattagctaaatcgattagtattagctataactcagcttaccatctcgtaagttgaaaccaacaatagcatgaaaacattgagaacgggtaggtcctgcctatccgtttttattaaaatcgtgttataatagaatagaaatcaaaaataaataggagaaacaaacctc

SEQ ID NO: 3706 - DNA, 72 bp, Streptococcus pneumoniae
  misc_feature (1)..(72): tiling:Spneumo1:WAN024FA5; Cluster includes WAN023I04 tRNA -Arg|tRNA-Arg|||1173377..1173448|-|72 bp|tRNA-Arg|S.pneumo niae|R6|NC_003098.1|RNA|110
gctcccttagttcaatggatataacaactccctcctaaggagtagttgcaggttcgattcctgcagggggca

SEQ ID NO: 3707 - DNA, 179 bp, Streptococcus pneumoniae
  misc_feature (1)..(179): tiling:Spneumo1:WAN024DGQ; Cluster includes WAN0244DU spr0 560||15902604|NP_358154.1|561441..561686|+|246 bp|Hypothet ical protein|S.pneumoniae|R6|NC_003098.1|ORF|111
gctcgtaaaaaagttggttatctgcaggtcaaaacagtggcagaagsttctaataaagattatgatcgaacaaatgacttttatcgaggtcttggctttaaaaagttagagatttttyctcarctatggaatccgcaaaatccttgtcagattttgattaaaaagcttgaataactaat

SEQ ID NO: 3708 - DNA, 85 bp, Streptococcus pneumoniae
  misc_feature (1)..(85): tiling:Spneumo1:WAN0249YW; Cluster includes WAN024EBY-rc R 6.IG_1404||||1343802..1343886|-|85 bp|Between spr1360 (atp D) (- strand) and spr1361 (atpG) (- strand)|S.pneumoniae|R 6|NC_003098.1|IG-rc|110
gctctagtccagctcgtatgaaaatgaacttaggacctagttgagctaggaaccgacagtatcttatatagaataggagaaggag

SEQ ID NO: 3709 - DNA, 73 bp, Streptococcus pneumoniae
  misc_feature (1)..(73): tiling:Spneumo1:WAN024FA7; Cluster includes WAN023I06 tRNA -Thr|tRNA-Thr|||904864..904936|+|73 bp|tRNA-Thr|S.pneumoni ae|R6|NC_003098.1|RNA|110
gctgatttagctcagttggcagagcgcatccatggtaaggatgaggtcgccggttcaatcccggcaattagca

SEQ ID NO: 3710 - DNA, 54 bp, Streptococcus pneumoniae
  misc_feature (1)..(54): tiling:Spneumo1:WAN024A8O; Cluster includes WAN024EGI R6.I G_1065.2||||1008137..1008186|+|50 bp|Between spr1026 (+ st rand) and spr1027 (- strand)|S.pneumoniae|R6|NC_003098.1|I G|110
gctgtccccaaccaaattgttcagtttttttattttactatagatgatactcat

SEQ ID NO: 3711 - DNA, 233 bp, Streptococcus pneumoniae
  misc_feature (1)..(233): tiling:Spneumo1:WAN024BGK; Cluster includes WAN023SKH NC_0 03098.1_1228||||955977..956108|+|132 bp|Glimmer 2.02 orf p rediction|S.pneumoniae|R6|NC_003098.1|ORF|100
gctgtgttaaaaacagcttatcaacgcaacgtaaacgcgcaaaaggtggacgaaaaaccaaattaagcctagacgatctcctcatggtaactattcaatacatgcgagaatagcgcacttatgaacaaattgcggctgattttggcattcacgaaagcaacttaatccgtcggagccaatgggttgaagtaactcttgttcaaaatggttttacgatttcaaattctgcccta

SEQ ID NO: 3712 - DNA, 306 bp, Streptococcus pneumoniae
  misc_feature (1)..(306): tiling:Spneumo1:WAN0249TB; Cluster includes WAN024E73-rc R 6.IG_1871||||1724772..1725077|-|306 bp|Between spr1756 (di nF) (- strand) and spr1757 (recA) (- strand)|S.pneumoniae| R6|NC_003098.1|IG-rc|120
gctgttaaagcagtggagaaatccgctactttttcgatttttgattcaagtttttagattatatatagtagcttgaaataagatatgaacaactttattaggaaagtcaaattaatttctagaaatgttttagcagctacagcgtactattccaaactcaaccaactataatagatcgaaactagaatagtacacatctacttctaaaacattgttaaaaatcgatttgactgtccttatttcattccgctatatataagtttgctgtttcttgtcgctcctctggaaagctgatataatagcttt

SEQ ID NO: 3713 - DNA, 148 bp, Streptococcus pneumoniae
  misc_feature (1)..(148): tiling:Spneumo1:WAN0249VV; Cluster includes WAN024EA4 R6.I G_1573.2||||1503084..1503231|+|148 bp|Between spr1526 (- s trand) and spr1527 (- strand)|S.pneumoniae|R6|NC_003098.1| IG|110
gcttatgtaagaacttcattttaatttcgtgacagtttcttacattttaaacaaaagcccccttttcttacactatctgtgtagagggaaaagggggtatacactcttaggttctttaaaaaactactttttatagaataactaagga

SEQ ID NO: 3714 - DNA, 1569 bp, Streptococcus pneumoniae
  misc_feature (1)..(1569): tiling:Spneumo1:WAN024DLR-5; Cluster includes WAN0244MJ sp r0247|pulA|15902291|NP_357841.1|243374..247144|-|3771 bp|A lkaline amylopullulanase|S.pneumoniae|R6|NC_003098.1|ORF|2 00
gcttggttagaccaagattacaaggttttctcttacgagccacagcctgcaggaactgttcgcgtcaactactaccgcacagatggcaactatgacaagaaatctctctggtactggggagatgtraaaaatccaagtagcgckcaatggcctgacggaacagactttacggctacaggcaaatatggccgctatatcgacattcctcttaatgaagccgcaagagaatttggatttttattactagatgagagcaaacaaggagacgacgtgaaaatccgtaaagaaaattataagttcacagatttgaaaaatcatagccaaattttcctaaaagacgatgatgaatcgatttacacaaatccatactatgtccatgatatccgtatgacaggagcccaacacgtaggcacttctagcattgaaagtagcttttcaacacttgtcggtgctaaaaaagaagatatcctcaaacactccaacatcactaatcacctaggaaacaaggtaactattaccgatgttgcaatcgatgaagctggtaagaaagtgacctacagcggagatttctctgacacaaaacatccttatactgttagctacaattccgaccaattcactaccaaaacaagctggcrcctgaaagatgagacatacagctatgatggcaaactgggagctgacctaaaagaagaaggaaaacaagttgatttgaccctttggtcaccaagtgctgataaggtttctgttgttgtctacgacaagaatgaccctgacaaagtagttggaactgtcgctctcgaaaaaggggaaagaggaacttggaaacaaactctagacagcacaaacaaactcggaatcacagatttcactggctactattatcaataccaaatcgagcgtcaaggtaaaactgttcttgcactcgatccttacgctaaatctcttgctgcttggaatagcgacgatgccaarattgacgatgcccataaagtggctaaagccgcctttgtagatccagctaaactcggacctcaagacttgacttatggtaagattcacaatttcaagactcgtgaagacgccgttatctacgaagctcatgtgcgtgacttcacttcagatcctgccattgcaaaagacttgaccaaaccatttgggacttttgaagccttcattgaaaaactagactatctcaaagacttgggtgtaacccatatccagctccttccagtcttgtcttactactttgtcaatgaattgaaaaaccatgaacgcttgtctgactaygcttcaagcaacagcaactacaactggggatatgaccctcaaaactacttctccttgactggtatgtactcaagcgatcctaagaatccagaaaaacgaatcgcagaatttaaaaacctcatcaacgaaatccacaaacgtggtatgggagctatcctagatgtcgtttataaccacacagccaaagtcgatatctttgaagacctagagccaaactactaccactttatggatgccgatggcacacctcgaactagctttggtggtggacgcttgggr

SEQ ID NO: 3715 - DNA, 1585 bp, Streptococcus pneumoniae
  misc_feature (1)..(1585): tiling:Spneumo1:WAN024DLS-5; Cluster includes WAN02431M SP 0268||15900202|NP_344806.1|242845..246687|-|3843 bp|alkali ne amylopullulanase, putative|S.pneumoniae|TIGR4|NC_003028 .1|ORF|011
gcttggttagaccaagattacaaggttttctcttacgagccacagcctgcaggaactgttcgcgtcaactactaccgcacagatggcaactatgacaagaaatctctctggtactggggagatgtraaaaatccaagtagcgctcaatggcctgacggaacagactttacggctacaggcaaatatggccgctatatcgacattcctcttaatgaagccgcaagagaatttggatttttattactagatgagagcaaacaaggagacgacgtgaaaatccgtaaagaaaattataagttcacagatttgaaaaatcatagccaaattttcctaaaagacgatgatgaatcgatttacacaaatccatactatgtccatgatatccgtatgacaggagcccaacacgtaggcacttctagcattgaaagtagcttttcaacacttgtcggtgctaaaaaagaagatatcctcaaacactccaacatcactaatcacctaggaaacaaggtaactattaccgatgttgcaatcgatgaagctggtaagaaagtgacctacagcggagatttctctgacacaaaacatccttatactgttagctacaattccgaccaattcactaccaaaacaagctggcgcctgaaagatgagacatacagctatgatggcaaactgggagctgacctaaaagaagaaggaaaacaagttgatttgaccctttggtcaccaagtgctgataaggtttctgttgttgtctacgacaagaatgaccctgacaaagtagttggaactgtcgctctygaaaaaggggaaagaggaacttggaaacaaactctagacagcacaaacaaactcggaatcacagatttcactggctactattatcaataccaaatcgagcgtcaaggtaaaactgttcttgcactcgatccttacgctaaatctcttgctgcttggaatagcgacgatkccaarattgacgatgcccataaagtggctaaagccgcctttgtagatccagctaaactcggacctcaagacttgacttatggtaagattcacaatttcaagactcgtgaagacgccgttatctacgaagctcatgtgcgtgayttcacttcagatcctgccattgcaaaagacttgaccaaaccatttgggacttttgaagccttcattgaaaaactagactatctcaaagacttgggtgtaacccatatccagctccttccagtcttgtcttactactttgtcaatgaattgaaaaaccatgaacrcttgtctgactaygcttcaagcaacagcaactacaactggggatatgaccctcaaaactacttctccttgactggtatgtactcaagcgatcctaagaatccagaaaaacgaatcgcagaatttaaaaacctcatcaacgaaatccacaaacgtggtatgggagctatcctagatgtcgtttataaccacacagccaaagtcgatmtctttgaagayytrgarccaaactactaccactttatggatgccgatggcacacctcgaactagctttggtggtggacgcttggggacaacccaccatatga

SEQ ID NO: 3716 - DNA, 51 bp, Streptococcus pneumoniae
  misc_feature (1)..(51): tiling:Spneumo1:WAN024ABQ; Cluster includes WAN024EI3 R6.I G_952||||904133..904182|+|50 bp|Between spr0916 (mesH) (- strand) and spr0917 (ccl) (+ strand)|S.pneumoniae|R6|NC_00 3098.1|IG|110
gctttaagtatagcataaagcaggctattgtgctatactagtaaggttgaa

SEQ ID NO: 3717 - DNA, 148 bp, Streptococcus pneumoniae
  misc_feature (1)..(148): tiling:Spneumo1:WAN024A32; Cluster includes WAN024ED6-rc R 6.IG_1326.1||||1277577..1277650|-|74 bp|Between spr1282 (- strand) and spr1283 (+ strand)|S.pneumoniae|R6|NC_003098. 1|IG-rc|220
gdtaattttcgactgtttaayagttattatgcaaagtctaaaagrttagaattgtcaaaacaatccgtctagrsttgattttatcctttatttactataaaatgagaaggaaaaatgtcaaacttttatattgcaaataggagaaatc

SEQ ID NO: 3718 - DNA, 79 bp, Streptococcus pneumoniae
  misc_feature (1)..(79): tiling:Spneumo1:WAN0249EK; Cluster includes WAN024E3J-rc R 6.IG_2218||||2005218..2005296|-|79 bp|Between spr2011 (- s trand) and spr2012 (comFC) (- strand)|S.pneumoniae|R6|NC_0 03098.1|IG-rc|110
ggaaaaaatttgcaaaaatagaatgaaagcgttataataaaatcataaaaacaaaaatgtttagaaagaaggtactcat

SEQ ID NO: 3719 - DNA, 65 bp, Streptococcus pneumoniae
  misc_feature (1)..(65): tiling:Spneumo1:WAN0249N7; Cluster includes WAN024E8E R6.I G_1701.2.2||||1626073..1626137|+|65 bp|Between spr1652 (- strand) and spr1653 (+ strand)|S.pneumoniae|R6|NC_003098.1 |IG|110
ggaaactcacgtctttcaaaaaatagggtgaattgaaaactagaacaagacactagattttctaa

SEQ ID NO: 3720 - DNA, 120 bp, Streptococcus pneumoniae
  misc_feature (1)..(120): tiling:Spneumo1:WAN024ASN; Cluster includes WAN024EQS R6.I G_260.1||||233680..233799|+|120 bp|Between spr0239 (+ stra nd) and spr0240 (uppS) (+ strand)|S.pneumoniae|R6|NC_00309 8.1|IG|110
ggaaactttaagctagggagtgtacactaagttcataagttaagaagaccttaacttaaactcctaaaactttttcataataatctccctataaaaataaagtcgcccaatcaggcggct

SEQ ID NO: 3721 - DNA, 88 bp, Streptococcus pneumoniae
  misc_feature (1)..(88): tiling:Spneumo1:WAN024GAJ; Cluster includes WAN023I07 tRNA -Ser|tRNA-Ser|||774137..774224|-|88 bp|tRNA-Ser|S.pneumoni ae|R6|NC_003098.1|RNA|110
ggaagattactcaagaggcttaagaggccgtgttggaaacgcggtaggcgtgtaatagcgtgcgtgggttcgaatcccatgtcttccg

SEQ ID NO: 3722 - DNA, 230 bp, Streptococcus pneumoniae
  misc_feature (1)..(230): tiling:Spneumo1:WAN024ABZ; Cluster includes WAN024EI7 R6.I G_944.1||||898260..898489|+|230 bp|Between spr0908 (phtE) (+ strand) and spr0909 (+ strand)|S.pneumoniae|R6|NC_00309 8.1|IG|110
ggaatagcagtagaaaaagtctgaatcaaaaatgaagttctctcaaaagttagaaataaaactctgactttgggagaatttcattttattattaatatataaaatttcttgacatacaacttaaaaagaggtggaatatttactarttaattaaytggttaattaatttatttaatcatttaataatgaagacatcatataaataattatagaaatgaggtaattatgaa

SEQ ID NO: 3723 - DNA, 595 bp, Streptococcus pneumoniae
  misc_feature (1)..(595): tiling:Spneumo1:WAN024AAZ; Cluster includes WAN024EHP-rc R 6.IG_979.1||||925120..925714|-|595 bp|Between spr0940 (+ s trand) and spr0941 (+ strand)|S.pneumoniae|R6|NC_003098.1| IG-rc|110
ggaatctcacytccgcctctattccggatgagccggcttcaaccttagaagtatcattaycctcattttcttcatagcggatagggtatccctccctatattcaaactcttacttatcgctcactttctttttgcttagcagaactttttttgccgaattattcagccgaaagatcttgacggataggttattacgctccaaaaataattaacgtcttgtcttggtctattcaattgttaaggttcaaaatttatcgagagttattaatctttttaaaatttgaccatcagaaaatatttatcttgatgtaacaaaattctataaattaccctcttatacttaacagtgaaaagaagtctttcttggtaaccaattttgaaatagaatttgcttatataaaaaggtcmaattcccactgcataartagcagtgaaaattagaccctcttggtaactgtcatctaaaagtcttctagcatttctttaattttctaatcgcctttaaagtgtcatatttatatttttttatctctggcatactttgatacctttttagacttaaagtctttaatagtgcctttccacctctttttat

SEQ ID NO: 3724 - DNA, 89 bp, Streptococcus pneumoniae
  misc_feature (1)..(89): tiling:Spneumo1:WAN024A7X; Cluster includes WAN024EG4-rc R 6.IG_1096.2||||1053347..1053435|-|89 bp|Between spr1057 (- strand) and spr1058 (- strand)|S.pneumoniae|R6|NC_003098. 1|IG-rc|110
ggaattttactataactctttttatagrtaagctattgattatctcaactataaaatgttaagtaaatgatttcaaaatcagaaaggga

SEQ ID NO: 3725 - DNA, 77 bp, Streptococcus pneumoniae
  misc_feature (1)..(77): tiling:Spneumo1:WAN024AQS; Cluster includes WAN024EPZ-rc R 6.IG_322.1.2||||300849..300925|-|77 bp|Between spr0301 (yo rfE) (- strand) and spr0302 (yllC) (+ strand)|S.pneumoniae |R6|NC_003098.1|IG-rc|110
ggacaaggagactactatttcttcaaaaaatatgtcaaaaatacttgacactttatgtttaaaagactataatatag

SEQ ID NO: 3726 - DNA, 74 bp, Streptococcus pneumoniae
  misc_feature (1)..(74): tiling:Spneumo1:WAN024F9Q; Cluster includes WAN023HZV tRNA -Met|tRNA-Met|||1691339..1691412|-|74 bp|tRNA-Met|S.pneumo niae|R6|NC_003098.1|RNA|110
ggacctttagctcagctggttagagctctcggctcataaccgagtggtcgtaggttcaagtcctacaaggtcca

SEQ ID NO: 3727 - DNA, 433 bp, Streptococcus pneumoniae
  misc_feature (1)..(433): tiling:Spneumo1:WAN024APF; Cluster includes WAN0247S1 R6.I G_61.2.1||||39839..40184|+|346 bp|Between spr0040 (thmA) ( + strand) and spr0041 (IS1167) (- strand)|S.pneumoniae|R6| NC_003098.1|IG|210
ggagaagaaaacagaaaaatctgttaaaaaataatcaaaactataaatgatgaatctgaatcaaaattattttgcgcatgtaaagaggagtcttatagtaacgagtcaaaaaaggagtaactatgaatcgtaatttagaacggtgttatctattctgactaggaatagatcataccagaggtagcttagaaatagcagagacattagaaattgaagtaataaataggatgtcgtaagtgttactatcaatgatttatttgtttcaagcttgcctagggtgacagtaaaaaatcawtttcctttcaatagcatatttttagtgggcaggactcttgttctgmcyatttttttatccaaaaagtgcagttgggagggagataggctcatttgggaaggaagtccagtttttgtttagtgattggggtaagatagt

SEQ ID NO: 3728 - DNA, 88 bp, Streptococcus pneumoniae
  misc_feature (1)..(88): tiling:Spneumo1:WAN024FA2; Cluster includes WAN023I01 tRNA -Ser|tRNA-Ser|||1690783..1690870|-|88 bp|tRNA-Ser|S.pneumo niae|R6|NC_003098.1|RNA|110
ggagaattactcaagaggctgaagaggacggtttgctaaatcgttaggtcgggtaactggcgcaagggttcgaatcccttattctccg

SEQ ID NO: 3729 - DNA, 140 bp, Streptococcus pneumoniae
  misc_feature (1)..(140): tiling:Spneumo1:WAN024AKV; Cluster includes WAN024EMX R6.I G_553||||529312..529451|+|140 bp|Between spr0529 (vncS) (+ strand) and spr0530 (fba) (+ strand)|S.pneumoniae|R6|NC_0 03098.1|IG|110
ggagagaaagggtttacatagatggagttagaagaaaatcaatcgaaactgcgggaaaaactagatttttttggcaaaaagtgataaaatgaacaatgtaaatgggatgacccataaaaatatacaggaggcctgataaa

SEQ ID NO: 3730 - DNA, 133 bp, Streptococcus pneumoniae
  misc_feature (1)..(133): tiling:Spneumo1:WAN024A86; Cluster includes WAN024EG7 R6.I G_1088||||1045151..1045283|+|133 bp|Between spr1049 (acoC) (- strand) and spr1050 (acoB) (- strand)|S.pneumoniae|R6| NC_003098.1|IG|110
ggagatttatcttttttccgatcttttagcccgtgctctaatctaagatattaatgacgaagagctctgcacctaaaagatacaaagtttctcgtcagctttattttatttacataacttatmttatgtaacy

SEQ ID NO: 3731 - DNA, 110 bp, Streptococcus pneumoniae
  misc_feature (1)..(110): tiling:Spneumo1:WAN024AQU; Cluster includes WAN024EQ2-rc R 6.IG_319.1||||299915..300024|-|110 bp|Between spr0298 (reg R) (+ strand) and spr0299 (- strand)|S.pneumoniae|R6|NC_00 3098.1|IG-rc|110
ggagcttgctcccataatttctcatttcataggcaaataatcccacctagcttgttctaggtgggattattttatttcttaacagagattgcaagtcattttccttcatt

SEQ ID NO: 3732 - DNA, 90 bp, Streptococcus pneumoniae
  misc_feature (1)..(90): tiling:Spneumo1:WAN024GAL; Cluster includes WAN023HZW tRNA -Ser|tRNA-Ser|||1691239..1691328|-|90 bp|tRNA-Ser|S.pneumo niae|R6|NC_003098.1|RNA|220
ggaggattacccaagtccggctgaagggaacggtcttgaaaaccgtcaggcgtgtaaaagcgtgcgtgggttcgaatcccacatcctcct

SEQ ID NO: 3733 - DNA, 308 bp, Streptococcus pneumoniae
  misc_feature (1)..(308): tiling:Spneumo1:WAN0249GR; Cluster includes WAN024E4R-rc R 6.IG_2124.1||||1899538..1899845|-|308 bp|Between spr1917 ( malM) (- strand) and spr1918 (malX) (+ strand)|S.pneumonia e|R6|NC_003098.1|IG-rc|110
ggaggggctacctycctrkttctaatcymtatctattttctatrgacgtttgtgctttgttrcatataaattcaagctccctaaggaggttttgtactttgtakactgtctcgtgagagtcaaacyttaggattagatagttttaagttatctttgctaaaatgagttagtctccttaaaaataatcaaaaaagttttttaaaaacgcttgcaattatgcttgaaaaggagtatacttataagtaacgcaaacgtttgcgtctgmaaaatacgcaacgttccattattttaacacacgaggtgctatt

SEQ ID NO: 3734 - DNA, 62 bp, Streptococcus pneumoniae
  misc_feature (1)..(62): tiling:Spneumo1:WAN0249VA; Cluster includes WAN024E9S-rc R 6.IG_1584.2.2.2||||1519354..1519415|-|62 bp|Between spr153 7 (- strand) and spr1538 (axe1) (- strand)|S.pneumoniae|R6 |NC_003098.1|IG-rc|110
ggagtcgactctaagcacaaaatcttaaaaattacaaacacgcatagtatcaggggattaag

SEQ ID NO: 3735 - DNA, 81 bp, Streptococcus pneumoniae
  misc_feature (1)..(81): tiling:Spneumo1:WAN024DZH; Cluster includes WAN023I0A tRNA -Tyr|tRNA-Tyr|||759414..759494|+|81 bp|tRNA-Tyr|S.pneumoni ae|R6|NC_003098.1|RNA|220
ggarrgrtagcgaagaggctaaacgcggcggactgtaaatccgctccttcgggttcgggggttcgaatccctcycyytcca

SEQ ID NO: 3736 - DNA, 2079 bp, Streptococcus pneumoniae
  misc_feature (1)..(2079): tiling:Spneumo1:WAN024CEL-M; Cluster includes WAN023RVP co ntig_1609_55||||39772..45984|-|6213 bp|Glimmer 2.02 orf pr ediction|S.pneumoniae|670|WAN01UDCD|ORF|002
ggataagcgtgtctggatcaatccttattttgatgggaaatacaayacacaagttttgggtsaatatgaggtacgyaattttaatggaggaacyctcaatgttaagggggwatcagaaacattmdctactgayatmatgraagcattagagaatgtrgargcacctaaacmaattgacaattytttgaaagmacctgtttttatccaagaaraagtggatmattckmtcccaagtcrtatwcgtgagracttagcgctctattcttttggatatgagrgaaatcaaatttattaycgagatacrcatggcattcggaraagttcaaaagtagacgaaattagttattatgtagaygaraagggagaktttaaagcttgggacagttcyttgtctgaacataaaatagaycgattcgtgcaacttcatttgacwgatgaggaagcactagatgtwtacaagtcagaagaagcgagtaaaagrgggaaatataagggmytgttcaaaaaaackgtcttttatgaaagycccttatcggataaggatattagtcgcattaagggmatggttgatttgagagagacctatcaakccttaattgaaattcaacgycatcmagattatagtcggacagattttcaggtrttacttagtaaactcaatcrtractatgaycgbtttgtaagycaatttggatacttgaatgyctcagtcaatcgraacttatttgatagtgacgataagtattctttrctdgcaagtttagaagatgaatacattgattctaaagatcagaaagtaaaatataaaaaatctttagcctttgagaaagcattggttaggccrgagagagtgattrcaagagtwtcaacggctytagatgccktaaactcyagtttatcrgatggtagaggggttgatwtagactwtatggtatcmatttayccygaacatagccaagcwgctattttagatgagttrggwgaycagrtyttaatrgatccagaaagctatttaagaggrgaaagaaawtatctttctaagaaccagtttttrtcaggagayattctcaacaagatagaagtagttcaactattagtrgaggaaaacaaccaagaatrtgaytggwmycatgckttagatttgttagartctgttcgccctccamggattcatctggcagatattgagtttaaaatagggtcacgttggattcctcaatccgtttatggtaaatttgcctttgaatgttttaccaaycgtgaatttgaattrtcttcgcctgatgttgaacargtcattgaagygaatcctgtcgatggscaggttcatttaargacaycatttgcttatcgctatccaagtgccaaagayagtagtcttggagtyagtggstcacgttatgatacaggaagaaagatttttgagaatttacttaattcgaaccaaccgackattacyatgactgttacggaaggrgaaaagaaaaagaccatcacagatttggaaaaaacctctgttctaagagcaaaagarcagcatttacaagarctctttcaagamtttgtctcacggtatccagaagtycarcaagtcattgargaaagytayaatcgtctttataaycgaacggttagtcgagagtatgacggtagccatytagtcattgatggcttrgcacaaaacatcagtcttcgtcctcaycaagaraatgccattcaaagaatygtagaagaaaaaagagccytrttagctcatgaggtaggttcaggaaagaccttgaccatgcttggtgctggstttaaattaaaggagttgggsatggttcataagccmttrtatgtggtgccctctagtttgtctgctcartttggccaagaaatcatgaaatttttccctactaaaaargtctttgtgaccactaagaaagattttgtgaagkcragaagaaaacartttgtrtcrcgtattattacaggagattacgatgcyattgtcattggggattctcaatttgaaaaaatccctgtcagtaaggaaagacagatgaaytatatmgaggataaactcaatgaactacg

SEQ ID NO: 3737 - DNA, 104 bp, Streptococcus pneumoniae
  misc_feature (1)..(104): tiling:Spneumo1:WAN0249ZC; Cluster includes WAN024EC8-rc R 6.IG_1390||||1331854..1331957|-|104 bp|Between spr1346 (- strand) and spr1347 (- strand)|S.pneumoniae|R6|NC_003098.1 |IG-rc|110
ggataatcagctagaagtagaaacagataaatacacatatactgccgctagaaatggtagtaaggaagttggtattcaagagtcagatatagcagcaactctaa

SEQ ID NO: 3738 - DNA, 110 bp, Streptococcus pneumoniae
  misc_feature (1)..(110): tiling:Spneumo1:WAN0249OG; Cluster includes WAN024E94-rc R 6.IG_1650||||1580518..1580627|-|110 bp|Between spr1604 (aq pZ) (- strand) and spr1605 (- strand)|S.pneumoniae|R6|NC_0 03098.1|IG-rc|110
ggattagctaatagttctatgattttcaaaaaatttccaatcaattttcttgaaaccctttcctacttttgatagactagtatctagtttttgaaaaaaggagaaagaaa

SEQ ID NO: 3739 - DNA, 70 bp, Streptococcus pneumoniae
  misc_feature (1)..(70): tiling:Spneumo1:WAN0249HB; Cluster includes WAN024E4Z R6.I G_2116.1||||1888502..1888571|+|70 bp|Between spr1909 (pbp1 b) (- strand) and spr1910 (tyrS) (+ strand)|S.pneumoniae|R 6|NC_003098.1|IG|110
ggatttcctcactttatctattataccacaaaagggaaattttcaataaaatagccactttcttccctat

SEQ ID NO: 3740 - DNA, 193 bp, Streptococcus pneumoniae
  misc_feature (1)..(193): tiling:Spneumo1:WAN0249Y5; Cluster includes WAN024EBH R6.I G_1454.2||||1396553..1396745|+|193 bp|Between spr1410 (pac L) (- strand) and spr1411 (+ strand)|S.pneumoniae|R6|NC_00 3098.1|IG|110
ggccggaaagcatacttttcagcataaaattcggaatgacgacactatcacaggtttctgccagctactcccttgagtagtaccattataccaaattttggggagttttcaaagagtaaaaactgccttatttgaatttttccttgaaaaccagtataatggtagaatgctatgtgactagaaaggaagttga

SEQ ID NO: 3741 - DNA, 89 bp, Streptococcus pneumoniae
  misc_feature (1)..(89): tiling:Spneumo1:WAN024AHS; Cluster includes WAN024EL5 R6.I G_691.1.2||||671232..671320|+|89 bp|Between spr0667 (ftsX) (+ strand) and spr0668 (ptsG) (+ strand)|S.pneumoniae|R6| NC_003098.1|IG|110
ggcgcactagaaattttttagaaaaaagtgtaatttttttataaaagcctttacaaaaaaaattaaagtggtataattaaatcatagaa

SEQ ID NO: 3742 - DNA, 71 bp, Streptococcus pneumoniae
  misc_feature (1)..(71): tiling:Spneumo1:WAN024CHU; Cluster includes WAN023HZF tRNA -Cys|tRNA-Cys|||1752048..1752118|+|71 bp|tRNA-Cys|S.pneumo niae|R6|NC_003098.1|RNA|110
ggcggtatagccaagtggtaaggcacggctctgcaaaagcttgatcgtcggttcaaatccgtctaccgcct

SEQ ID NO: 3743 - DNA, 74 bp, Streptococcus pneumoniae
  misc_feature (1)..(74): tiling:Spneumo1:WAN024F9P; Cluster includes WAN023HZU tRNA -Met|tRNA-Met|||1691426..1691499|-|74 bp|tRNA-Met|S.pneumo niae|R6|NC_003098.1|RNA|110
ggcggtgtagctcagctggctagagcgtccggttcatacccgggaggtcgggggttcgatccccttcgccgcta

SEQ ID NO: 3744 - DNA, 208 bp, Streptococcus pneumoniae
  misc_feature (1)..(208): tiling:Spneumo1:WAN024A7M; Cluster includes WAN024EFU-rc R 6.IG_1107||||1068444..1068651|-|208 bp|Between spr1069 (la cG) (- strand) and spr1070 (lacE) (- strand)|S.pneumoniae| R6|NC_003098.1|IG-rc|110
ggctagagactctgaaatagtctccyatcgttacggaaatcgctatggcgaatttcctattattaattcgtcggtaaaaagatatcgtttttacctcctcatgtcacaattcggtgacttggtacaagaagtgagatggagaaggatggctcactgactcctctcctctcacttttactttatttaaatcaagaaataggtgaaaaaa

SEQ ID NO: 3745 - DNA, 73 bp, Streptococcus pneumoniae
  misc_feature (1)..(73): tiling:Spneumo1:WAN024F9T; Cluster includes WAN023HZY tRNA -Phe|tRNA-Phe|||1691076..1691148|-|73 bp|tRNA-Phe|S.pneumo niae|R6|NC_003098.1|RNA|220
ggctcggtagctcagttggtagagcaatggattgaagctccatgtgtcggcggttcgattccgtctcgcgcca

SEQ ID NO: 3746 - DNA, 134 bp, Streptococcus pneumoniae
  misc_feature (1)..(134): tiling:Spneumo1:WAN0249QZ; Cluster includes WAN024EQT-rc R 6.IG_258.2.2||||231995..232127|-|133 bp|Between spr0237 (+ strand) and spr0238 (ruvB) (+ strand)|S.pneumoniae|R6|NC_ 003098.1|IG-rc|110
ggctctattatatcaaaaaamacaagccacaaacaaaaaagccacctgattgggtgactcctaagtttagcacttatgtggtataatattatacgrcactkctacaccgcctacgaaaggaggtgagatagccc

SEQ ID NO: 3747 - DNA, 144 bp, Streptococcus pneumoniae
  misc_feature (1)..(144): tiling:Spneumo1:WAN0249JO; Cluster includes WAN024E6F-rc R 6.IG_1925||||1778203..1778346|-|144 bp|Between spr1807 (rp mH) (- strand) and spr1808 (aspC) (- strand)|S.pneumoniae| R6|NC_003098.1|IG-rc|110
ggcttgcattcgaaaaagctggaaacatttgcctagrgctattgacaaaagtgaaagaatcagatagaatagtaaagtatgtttagtaactgatcactttatagccggctaaacgaatacaaaatctatgaggaggtattcatc

SEQ ID NO: 3748 - DNA, 275 bp, Streptococcus pneumoniae
  misc_feature (1)..(275): tiling:Spneumo1:WAN024AMB; Cluster includes WAN024ENN R6.I G_485||||469144..469418|+|275 bp|Between spr0461 (blpT) (- strand) and spr0462 (blpS) (+ strand)|S.pneumoniae|R6|NC_ 003098.1|IG|110
gggaatgcctcctttaatctgggtgccagtcttacttctggcaactgtgttttgatactgttagtttatcacttttaattctttttttttattcaaatctttaattgtcattgaaatgtcttgaattgcgctgagtgaattttatgataaaatagttgtaagctcatcatgatgttgtrgaaaataatccttttaggagttttcaaagactgtttaggattgggtgkgcttgggctagaccttttctgttattcttttcttaggaggagaatcca

SEQ ID NO: 3749 - DNA, 1020 bp, Streptococcus pneumoniae
  misc_feature (1)..(1020): tiling:Spneumo1:WAN024CHS-3; Cluster includes WAN0243HA sp r1734|ABC-NBD-truncation|15903776|NP_359326.1|1709860..171 0891|-|1032 bp|BC transporter ATP-binding protein - unknow n substrate, trunc...|S.pneumoniae|R6|NC_003098.1|ORF|423
gggagcactcttcatcgttcttccccgaactatggtctctgctaagcggattaatcaagttttagatttgcattcttctatccaaaaccctgttcaagtgcagctgactgatgaaaacttcaaaggtcaggtcgagtttaaggatgtgaccttccgctatgcggsaaattcggaggcagttattgaacatgttagctttaaagcagaaactggtcaaacagtggcctttattgggtcaacaggttctggtaaatcaactctggtcaatctgattccacgtttctacgacgtgtcagcaggagaaattctggtggacggtgtcaatgttcaagactatgacttctctgcgacagctcatgctggtcaaaaggttgccattgttgggccgactgggrctggtaagacamccattgtcaatcttttgatgaaattctatgagattgataagggaagtattcrcattgatggtgtggataccaaggctatgacgcgttcagaagtgcatgatgccttttcaatggtcttgcaggatacctggctctttgaaggaactattcgagacaatctcatctataatcaaatagggattagtgatgaacgaatgatggaagctagtaaggctgtgggaattcaccactttattatgaccttgccagatggctatgataccatcttggatgacaccgtgaccttgtctgtargacaaaaacaactattgactattgctygtgcccttcttaaggatgcaycgcttttgattttggatgaggcgacttcttctgttgacacacggacagaggaattgatccaaaaagccatggaccgtttgatggaakgacgcacatcctttgtcattgcccaccgcttgtcaaccatccgaaatgcagacttgatcttggtcatgaaagatggaaatatcatcgagcaaggcaactatgaggaactgatggcgcaaggtggcttctacgctgacttgtacaatagtcaatttacagaagatgaagcagaagaataactaat

SEQ ID NO: 3750 - DNA, 73 bp, Streptococcus pneumoniae
  misc_feature (1)..(73): tiling:Spneumo1:WAN024F9H; Cluster includes WAN023HZL tRNA -Val|tRNA-Val|||1692214..1692286|-|73 bp|tRNA-Val|S.pneumo niae|R6|NC_003098.1|RNA|330
gggagtttagctcagctgggagagcatctgccttacaagcagagggtcagcggttcgatcccgttaactccca

SEQ ID NO: 3751 - DNA, 130 bp, Streptococcus pneumoniae
  misc_feature (1)..(130): tiling:Spneumo1:WAN024AIN; Cluster includes WAN024ELP-rc R 6.IG_649||||632723..632849|-|127 bp|Between spr0625 (+ str and) and spr0626 (lysS) (+ strand)|S.pneumoniae|R6|NC_0030 98.1|IG-rc|110
gggatcctcctagttttactcaaaattgaatacgatgagtcattttttgcgayactcccattttatcataaataagcaagaaattcacggataatctttaaaaactaaaaagaacctgacgctaaaatca

SEQ ID NO: 3752 - DNA, 74 bp, Streptococcus pneumoniae
  misc_feature (1)..(74): tiling:Spneumo1:WAN024F9Z; Cluster includes WAN023I00 tRNA -Ile|tRNA-Ile|||1690877..1690950|-|74 bp|tRNA-Ile|S.pneumo niae|R6|NC_003098.1|RNA|220
gggcgcgtagctcaggtggttagagcgcacgcctgataagcgtgaggtcggtggttcgagtccactcgtgccca

SEQ ID NO: 3753 - DNA, 134 bp, Streptococcus pneumoniae
  misc_feature (1)..(134): tiling:Spneumo1:WAN0249SL; Cluster includes WAN024EQT R6.I G_258.2.2||||231995..232127|+|133 bp|Between spr0237 (+ st rand) and spr0238 (ruvB) (+ strand)|S.pneumoniae|R6|NC_003 098.1|IG|110
gggctatctcacctcctttcgtaggcggtgtagmagtgycgtataatattataccacataagtgctaaacttaggagtcacccaatcaggtggcttttttgtttgtggcttgktttttttgatataatagagcc

SEQ ID NO: 3754 - DNA, 73 bp, Streptococcus pneumoniae
  misc_feature (1)..(73): tiling:Spneumo1:WAN024FAE; Cluster includes WAN023I0G tRNA -Ala|tRNA-Ala|||16748..16820|+|73 bp|tRNA-Ala|S.pneumoniae |R6|NC_003098.1|RNA|440
ggggccttagctcagctgggagagcgcctgctttgcacgcaggaggtcagcggttcgatcccgctaggctcca

SEQ ID NO: 3755 - DNA, 75 bp, Streptococcus pneumoniae
  misc_feature (1)..(75): tiling:Spneumo1:WAN0249G2; Cluster includes WAN024E4G-rc R 6.IG_2158||||1935388..1935462|-|75 bp|Between spr1951 (- s trand) and spr1952 (- strand)|S.pneumoniae|R6|NC_003098.1| IG-rc|110
ggggctcgctttagctcaaccgattcttatcagaatcacaagtttacatttaaaacgttaaaatttaaatttaga

SEQ ID NO: 3756 - DNA, 69 bp, Streptococcus pneumoniae
  misc_feature (1)..(69): tiling:Spneumo1:WAN024AQ9; Cluster includes WAN024EPM R6.I G_356||||337024..337077|+|54 bp|Between () (+ strand) and spr0333 (+ strand)|S.pneumoniae|R6|NC_003098.1|IG|110
ggggctgagaaattttctcaacctcattttttaaagtggacatatagaaaggtcttgcaagactgtaac

SEQ ID NO: 3757 - DNA, 709 bp, Streptococcus pneumoniae
  misc_feature (1)..(709): tiling:Spneumo1:WAN024GAK; Cluster includes WAN023I08 |||| 773607..773951|+|345 bp||S.pneumoniae|R6|NC_003098.1|RNA|2 10
ggggtcgttacggattcgacaggcattatgaggcatattttgcgactcgtgtggcgacgtaaacgctcagttaaatataactgcaaaaaataacacttcttacgctctagctgcctaaaaaccagcaggcgtgacccgatttggattgctcgtgttcaatgacaggtcttattattagcgagatacgattaagccttgtctagcggcttgataagagattgatagactcgcagtttctagacttgagttatgtgtcgaggggctgttaaaataatacataacctatggttgtagacaaatatgttggcaggtgtttggacgtgggttcgactcccaccggctccattattcctttgcattcttttgcattccttggtaaaacgttgttaaatcaacgttttttatttttatctttggtattcctttgcattcttttgctaaaaagggagtcacaaacagaccctattttaaaaaaaggatagaaaaaaggatacaacatttgtcgcatcctaaaaataatcttttttcgacggaagacatgggattcgaacccacgcacgctattacacgcctaccgcgtttccaacacggcctcttaagcctcttgagtaatcttccaatacttactcaaatagtctaccataaaggctcttatcttgcaataaaaattctagaaataagaaaaatgatagattttgaaagaaaatga

SEQ ID NO: 3758 - DNA, 260 bp, Streptococcus pneumoniae
  misc_feature (1)..(260): tiling:Spneumo1:WAN024ADI; Cluster includes WAN024EIU R6.I G_887.2||||847782..848040|+|259 bp|Between spr0851 (+ stra nd) and spr0852 (- strand)|S.pneumoniae|R6|NC_003098.1|IG| 110
gggtaaaattttatatataaaaagaagctgggactaaagagctcagcttcctttggtttatataattgtcattacaagacgaagtggttgggcgaaactctgttgactttattcaatttagagtttcttatgcacaattgagtctggaacgaaagtctccagttgcaaagtatacagtacaataaaccaacgatgtaatagctgatgacacaaagcacagtgggtaggacttgcgaagtcacccttttcttttcaaaatt

SEQ ID NO: 3759 - DNA, 94 bp, Streptococcus pneumoniae
  misc_feature (1)..(94): tiling:Spneumo1:WAN024AQL; Cluster includes WAN024EPV R6.I G_329||||308936..309029|+|94 bp|Between spr0308 (luxS) (- strand) and spr0309 (- strand)|S.pneumoniae|R6|NC_003098.1 |IG|110
ggtaaatcctttcagttttcttctctcattatatcataaaggttgctcctgagacagagagaaaacctctccgaggctggagaggttgaaatct

SEQ ID NO: 3760 - DNA, 88 bp, Streptococcus pneumoniae
  misc_feature (1)..(88): tiling:Spneumo1:WAN0249ED; Cluster includes WAN0247W0 R6.I G_38.1||||22405..22492|+|88 bp|Between spr0020 (+ strand) and spr0021 (purA) (+ strand)|S.pneumoniae|R6|NC_003098.1| IG|110
ggtaattttagtaaatttccgaactaatttactcttttatggaaagatgatagtaaatagctagtaatttttctaaatcattttttaa

SEQ ID NO: 3761 - DNA, 95 bp, Streptococcus pneumoniae
  misc_feature (1)..(95): tiling:Spneumo1:WAN0249WM; Cluster includes WAN024EAH-rc R 6.IG_1542||||1472230..1472324|-|95 bp|Between spr1495 (tpx ) (+ strand) and spr1496 (- strand)|S.pneumoniae|R6|NC_003 098.1|IG-rc|110
ggtagttatttttagctgattgaacttctatttactaatattcaaaaatcctccgtttcaaagagcagggaactctttgtgacagaggatttttt

SEQ ID NO: 3762 - DNA, 594 bp, Streptococcus pneumoniae
  misc_feature (1)..(594): tiling:Spneumo1:WAN024DYA; Cluster includes WAN0240SI |gal U||CAC11046.1|||594 bp|UTP-glucose-1-phosphate uridylyltra nsferase|S.pneumoniae||AJ286776|ORF|000
ggtattgaagatattctggttgtcactggtaaatcaaaacgttctattgaggaccactttgaytcaaactttgarytkgartayaatctyaargaaaaaggsaaaacagatctgttaaaattagtagatgaagcaactggyatgcgccttcatttcatccgccaaactcaccctcgtggtcttggagaygctgtcttacaagccaaagcttttgtrgggaatgarcccttcgttgttatgctgggygaygaccttatggacatcacagaygagaaygccgttcctttgacaaaacaactgatgaatgattacgarmrgacacacgcatcaaccattgctgtcatgccygtmccwcaygaagaygtttcakcatatggagttatcgctcctcaaggtgargggattaayggtctytayagygtygaaactttcgttgaaaaaccagctcccgaagatgcaccaagtgatttagcaattatcggtcgttatctkctcacaccagaaattttygasatyctcgaaaagcaagctcctggygckggaaatgaaatccagcttaccgacgctattgatacycttaataaaacacaacgt

SEQ ID NO: 3763 - DNA, 2472 bp, Streptococcus pneumoniae
  misc_feature (1)..(2472): tiling:Spneumo1:WAN024GLB-3; Cluster includes WAN0240WR |E ndo D||BAB62042.1|||4941 bp|Endo-beta-N-acetylglucosaminid ase D|S.pneumoniae||AB055806|ORF|110
ggtattgaaggtatgttgaacggtaccattactagcttgtcagataaatggtcttcagctcagttgagtggtagtgtggatattcgtttgaccaagccacgtaccgttgttagatgggtcatggatcatgcaggggctggtggtgagtctgttaacgatggcttgatgaacaccaaagactttgacctttattataaagatgcagatggtgagtggaagctagctaaggaagtccgtggcaacaaagcacacgtgacagatatcactcttgataaaccaatcactgctcaagactggcgcttgaatgttgtcacttctgacaatggaactccatggaaggctattcgtatctataactggaaaatgtatgaaaagcttgatactgagagtgtcaatattccgatggccaaggctgcagcccgttctctaggcaataacaaggtacaagttggctttgcagatgtacaggctggagcaactattaccgtttatgataatccaaattctcaaactccgctcgcaaccttgaagagcgaagttggaggagacctagcaagtgcaccattggatttgacaaatcaatctggtcttctttattatcgtacccagttgccaggcaaggaaattagtaatgtcctagcagtttccgttccaaaagatgacagaagaatcaagtcagtcagcctagaaacaggacctaagaaaacaagctacgccgaaggggaggatttggaccttagaggtggtgttcttcgagttcagtatgaaggaggaactgaggacgaactcattcgcctaactcacgcaggtgtatcagtatcaggttttgatacgcatcataagggagaacagaatcttactctccaatatttgggacaaccagtaaatgctaatttgtcagtgactgtcactggccaagacgaagcaagtccgaaaactattttgggaattgaagtaagtcagaaaccgaaaaaagattacctagttggtgatagcttagacttgtctgaaggacgctttgcagtggcttatagcaatgacaccatggaagaacattcctttactgatgagggagttgaaatttctggttacgatgctcaaaagactggtcgtcaaaccttgacgcttcrttaccaaggycatgaagtyarctttgatgttttggtatctccaaaagcagcattgaacgatgagtacctcaaacaaaaattagcagaagttgaagctgctaagaacaaggtggtctataactttgcttcaccagaagtaaaagaagctttcttgaaagcaattgaagcggccgaacaagtgttgaaagaccatgaaaytagcacccaagatcaagtcaatgaccgacttaataaattgacagargctcataaagctctgaatggtcaagagaaatttaaggaagaaaagacagarcttgatcgyttaacaggtgaggttcaagaactcttggmtgccaaaccaaaccatccttcaggttctgccctagctccgcttcttgagaaaaacaaggycttggttgaaaaagtagatttgagtccagaagagcttrcaacagcgraacagagtctaaaagatctggttgctttattgaaagaagacaagccagcagtcttttctgatagtaaaacaggtgttgaagtacacttctcaaataaagagaagactgtcatcaagggtttgaaagtagagcgtgttcaagcaagtgctgaagagaagaaatactttgctggagaagatgctcatgtctttgaaatagaaggtttggatgaaaaaggtcaagatgttgatctctcttacgcttctattgtgaaaatcccaattgaaaaagataagaaagttaagaaagtatttttcttacctgaaggcaaagaggcagtagaattggcttttgaacaaacggatagtcatgttatctttacagcaccwcactttactcattatgcctttgtttatgaatctgctgaaaaaccacaacctgctaaaccagcaccacaaaacamagtccttccaaaacctacttatcaaccgrcttctgatcaacaaaaggctcctaaattggaagttcaagaggaaaaggttgcctttcatcgtcaagagcatgaaaatrctgagatgctagttggggaacaacgagtcatcatacagggacgagatggactgttaagacatgtctttgaagttgatgaaaacggtcagcgtcgtcttcgttcaacagaagtcatccaagaagcgattccagaaattgttgaaattggaacaaaagtaaaaacagtaccagcagtagtagctacacaggaaaaaccagctcaaaatacagcagttaaatcagaagaagcaagcaaacaattgccaaatacaggaacagctgatgctaatgaagccctaatagcaggcttagccagccttggtcttgctagtttagccttgaccttgagacggaaaagagaagataaagattaa

SEQ ID NO: 3764 - DNA, 61 bp, Streptococcus pneumoniae
  misc_feature (1)..(61): tiling:Spneumo1:WAN0249JF; Cluster includes WAN024E6C R6.I G_1931.2||||1784701..1784761|+|61 bp|Between spr1813 (ccpA ) (- strand) and spr1814 (rr11) (- strand)|S.pneumoniae|R6 |NC_003098.1|IG|110
ggtattgttccattcactaccgtcaattttagcacatagtcttcatgaaaatattatatca

SEQ ID NO: 3765 - DNA, 73 bp, Streptococcus pneumoniae
  misc_feature (1)..(73): tiling:Spneumo1:WAN024F9I; Cluster includes WAN023HZM tRNA -Asp|tRNA-Asp|||1692139..1692211|-|73 bp|tRNA-Asp|S.pneumo niae|R6|NC_003098.1|RNA|220
ggtcccgtagtgtagcggttatcacgtcgccctgtcacggcgaagatcgcgggttcgattcccgtcgggaccg

SEQ ID NO: 3766 - DNA, 74 bp, Streptococcus pneumoniae
  misc_feature (1)..(74): tiling:Spneumo1:WAN024F9E; Cluster includes WAN023HYI tRNA -Arg|tRNA-Arg|||2035627..2035700|-|74 bp|tRNA-Arg|S.pneumo niae|R6|NC_003098.1|RNA|110
ggtctcatagctcagctggatagagcattcgccttctaagcgaacggtcgcaggttcgaatcctgctgggatca

SEQ ID NO: 3767 - DNA, 454 bp, Streptococcus pneumoniae
  misc_feature (1)..(454): tiling:Spneumo1:WAN0249R8; Cluster includes WAN024EQX-rc R 6.IG_255||||226815..227268|-|454 bp|Between spr0234 (gldA) (+ strand) and spr0235 (leuS) (+ strand)|S.pneumoniae|R6| NC_003098.1|IG-rc|110
ggtctctctccaattttgtgatgttactattataccatttttgagggaatttgaaatgtgtttaaagraaaaactgtatactgtatctcattaattttgatgactatgaattgctctatctcccactttttatcccattgttatgcagtaaatcaaggagtaagtcaagamgcttatctcgtatagcacaaaatacttattttagaccgaagataaaactggaatgctaattaatgtattcacaataaatagccgacaacctatgtcgctttttgatttatgaagaacrtatagtagactgaatctgaaatagtacgaaacaattgctaaaacatttatagaaattaattttactttcccaatcgatttgttctcatcctatttcaatcttctatagaattcaatacrgrgatcaataaaagactaccatttggaaaacagtagtccttattgt

SEQ ID NO: 3768 - DNA, 486 bp, Streptococcus pneumoniae
  misc_feature (1)..(486): tiling:Spneumo1:WAN024AU4; Cluster includes WAN024133 |xpt ||CAD19630.1|||486 bp|xanthine phosphoribosyltransferase|S .pneumoniae||AJ422282|ORF|000
ggtgacaacatcctcaaggtggattcctttttaacccaccaagttgactttagcttgatgcgagagattggtaaggtttttgcggaaaaattcgctgctgctggcattaccaaggtygtraccattgaagcgtcaggtattgcyccagccrtttttacagctgaagccttaaacgttcccatgattttcgctaaaaaagctaaaaacatcactatgaaygaaggtatcttaactgcmgaagtytactcctttaccaagcaagtgaccagcacygtttctatcgctggaaaattcctctcaccwgaggacaaggtcttgattatcgacgatttccttgctaatggccaagctgctaaaggcttgattcaaatcatcgaacaagctggagcmacagtcgaagctatcggtattgtrattgaaaaatcyttccaagatggccgtgatttgcttgaaaaagcaggctacccygtyctatcactygctcgt

SEQ ID NO: 3769 - DNA, 370 bp, Streptococcus pneumoniae
  misc_feature (1)..(370): tiling:Spneumo1:WAN0249YQ; Cluster includes WAN024EBW-rc R 6.IG_1411.2||||1349453..1349822|-|370 bp|Between spr1367 ( IS1239) (- strand) and spr1368 (- strand)|S.pneumoniae|R6| NC_003098.1|IG-rc|110
ggtgagtatggaggtataatacaaagagaggctcgcacataagtatggaggtggactgatgtatatgagtaactatcgataaataccagttataacctagaaattgtgtctttctagacgatattgaggacaatataatcgtagccccaaaattaggaatcaagacttatcaggttaagaaaagaagtgatgttgttgatattttaaacaatttatttaaactaaaaactctctatctattaatccgagattcccctctcggattttgtgttgctttcattaaatttacaggtaagacttgctagcttcagtaaatatacacaagtttttcagaatagagtgaaatccaaaagaaaatggaaataatgaa

SEQ ID NO: 3770 - DNA, 486 bp, Streptococcus pneumoniae
  misc_feature (1)..(486): tiling:Spneumo1:WAN024AU3; Cluster includes WAN02412Y |xpt ||CAD19625.1|||486 bp|xanthine phosphoribosyltransferase|S .pneumoniae||AJ422277|ORF|000
ggtgatagcatcctcaaggtggattcctttttaacccaccaagttgactttagcctaatgagagaaatcggtaaggtttttgcggaaaaatttgcttctgctggcattactaaggttgtgaccattgaagcgtcaggtattgccccagccatttttacagcggaatccttaaacgttcccatgattttcgccaaaaaagctaagaacatcactatgaacgaaggaatcttaactgccgaagtttactcctttaccaagcaagtgaccagcaccgtttctatcgctggaaaattcctctcaccagaggacaaggtcttgattattgacgattttcttgctaacggccaagctgctaaaggcttaattcaaatcatcgaacaggctggagccacagtcgaagctatcggtatcatgattgaaaaatctttccaagatggccgtgatttgcttgaaaaagcaggctaccctgttctatcactcgctcgt

SEQ ID NO: 3771 - DNA, 486 bp, Streptococcus pneumoniae
  misc_feature (1)..(486): tiling:Spneumo1:WAN024AU5; Cluster includes WAN024136 |xpt ||CAD19633.1|||486 bp|xanthine phosphoribosyltransferase|S .pneumoniae||AJ422285|ORF|000
ggtgayarcatcctcaargtrgattcctttttaacccaccaagttgactttagcytratgmgagaratyggtaaggtttttgcrgaaaaattygctkctgctggyattacyaargtygtrachattgaagcgtcrggyatygcyccagcyrttyttacagctgaagccttaaacgttcccatgattttcgcyaaaaaagctaaraayatyactatgaaygaaggmatcttaactgcysaagtytactcctttaccaagcargtracyagcaccgtttctrtcgctggaaaattcctctcaccagaggacaaggtyttgattatcgacgayttccttgctaayggccaagctgcyaaaggcttrattcaaatyatygaacargcyggwgccwcagtcsaagctrtcggtatygtgattgaaaaatcyttccaagatgghcgtgatytgcttgaaaaagcaggmtaycctgtyytatcactcgctcgt

SEQ ID NO: 3772 - DNA, 74 bp, Streptococcus pneumoniae
  misc_feature (1)..(74): tiling:Spneumo1:WAN024ABV; Cluster includes WAN0247Y1 R6.I G_19||||16675..16747|+|73 bp|Between RNA (ribosomal) (+ st rand) and () (+ strand)|S.pneumoniae|R6|NC_003098.1|IG|440
ggtgcggctggatcacctcctttctaaggataaggaactgcgcattggtcttgtttagtcttgagaggtcttgt

SEQ ID NO: 3773 - DNA, 51 bp, Streptococcus pneumoniae
  misc_feature (1)..(51): tiling:Spneumo1:WAN0249RU; Cluster includes WAN024E7V-rc R 6.IG_1736.2||||1659927..1659977|-|51 bp|Between spr1687 (f atB) (+ strand) and spr1688 (- strand)|S.pneumoniae|R6|NC_ 003098.1|IG-rc|110
ggtggggtaaatagatttcaaaatgataaaaacgcatcctatcaggtttga

SEQ ID NO: 3774 - DNA, 2902 bp, Streptococcus pneumoniae
  misc_feature (1)..(2902): tiling:Spneumo1:WAN024FAD; Cluster includes WAN023I0F 23S rRNA|23S rRNA|||16945..19846|+|2902 bp|23S rRNA|S.pneumoni ae|R6|NC_003098.1|RNA|440
ggttaagttaataagggcgcacggtggatgccttggcactaggagccgacgaaggacgtgacaaacgacgatatgccttgggtagctgtaagtaagcgatgatccagggatttccgaatgggggaacccaacaggtaatacctgttacccacatctgttaaggatgtgaggaggaagacgcagtgaactgaaacatctaagtagctgcaggaagagaaagcaaaagcgattgccttagtagcggcgagcgaaacggcagragggcaaaccgaagagtttactcttcggggttgtaggactgcaatgtggactcaaagattatagaagaatgatttgggaagatcagccaaagagagtaatagcctcgtatttaaaatagtctttgtacttagcagtatcctgagtacggcgggacacgtgaaatcccgtcggaatctgggaggaccatctcccaaccctaaatactccctagtgaccgatagtgaaccagtaccgtgagggaaaggtgaaaagcaccccgggaggggagtgaaatagaacctgaaaccgtgtgcctacaacaagttcgagcccgttaatgggtgagagcgtgccttttgtagaatgaaccggcgagttacgttatgatgcgaggttaagttgaagagacggagccgtagggaaaccgagtctgaatagggcrccttagtatcatgacgtagacccgaaaccatgtgacctacccatgagcaggttgaaggtgcggtaagacgcactggaggaccgaaccagggcacgttgaaaagtgcttggatgacttgtgggtagcggagaaattccaaacgaacttggagatagctggttctctccgaaatagctttagggctagcgtcgacattagagattcttggaggtagagcactgtttgggtgaggggtccatcccggattaccaatctcagataaactccgaatgccaatgaattatggtcggcagtcagactgcgagtgctaagatccgtagtcgaaagggaaacagcccagaccaccagctaaggtcccaaaataattgttaagtggaaaaggatgtggggttgcacagacaactaggatgttagcttagaagcagctattcattcaaagagtgcgtaatagctcactagtcgagtgaccctgcgccgaaaatgtaccggggctaaaacaatttaccgaagctgtggatacctttataggtatggtaggagagcgttctatgtgtgatgaaggtataccgtgaggagtgctggaacgcatagaagtgagaatgccggtatgagtagcgaaagacaggtgagaatcctgtccaccgtaagactaaggtttccaggggaaggctcgtccgccctgggttagtcgggacctaaggagagaccgaaaggtgtatccgatggacaacaggttgatattcctgtactagagtatgtagtgatggagggacgcagtaggctaactaaagcagacgattggaagagtctgtctaagcagtgaggtgtgaattgagtcaaatgcttaattctataacattgagctgtgatggggagcgaagtttagtagcgaagttagtgacgtcacactgccaagaaaagcttctagcgtttaamcatactctacccgtaccgcaaaccgacacaggtagtcgaggcgagtagcctcaggtgagcgagagaactctcgttaaggaactcggcaaaatgaccccgtaacttcgggagaaggggtgctgacttwaagtcagccgcagtgaataggcccaagcaactgtttatcaaaaacacagctctctgctaaatcgtaagatgatgtatagggggtgacgcctgcccggtgctggaaggttaagaggagtgcttagcgtaagcgaaggtatgaattgaagccccagtaaacggcggccgtaactataacggtcctaaggtagcgaaattccttgtcgggtaagttccgacccgcacgaaaggcgtaatgatttgggcactgtctcaacgagagactcggtgaaattttagtacctgtgaagatgcaggttacccgcgacaggacggaaagaccccatggagctttactgcagtttgatattgagtgtctgtaccacatgtacaggataggtaggagtctaagagatcgggacgccagtttcgaaggagacgctgttgggatactacccttgtgttatggccactctaacccagataggtgatccctatcggagacagtgtctgacgggcagtttgactggggcggtcgcctcctaaaaggtaacggaggcgcccaaaggttccctcagaatggttggaaatcattcgcagagtgtaaaggtataagggagcttgactgcgagagctacaactcgagcagggacgaaagtcgggcttagtgatccggtggttccgtatggaagggccatcgctcaacggataaaagctaccctggggataacaggcttatctcccccaagagttcacatcgacggggaggtttggcacctcgatgtcggctcgtcgcatcctggggctgtagtcggtcccaagggttgggctgttcgcccattaaagcggcacgcgagctgggttcagaacgtcgtgagacagttcggtccctatccgtcgcgggcgtaggaaatttgagaggatctgctcctagtacgagaggaccagagtggacttaccgctggtgtaccagttgtcttgccaaaggcatcgctgggtagctatgtagggaagggataaacgctgaaagcatctaagtgtgaaacccacctcaagatgagatttcccatgattatatatcagtaagagccctgagagatgatcaggtagataggttagaagtggaagtgtggcgacacatgtagcggactaatactaatagctcgaggacttatccaa

SEQ ID NO: 3775 - DNA, 68 bp, Streptococcus pneumoniae
  misc_feature (1)..(68): tiling:Spneumo1:WAN024AO3; Cluster includes WAN024EOF R6.I G_448||||423604..423671|+|68 bp|Between spr0424 (lacG) (+ strand) and spr0425 (+ strand)|S.pneumoniae|R6|NC_003098.1 |IG|110
ggttagcgatttgactgatgtttaatatgttttaaatatgaggttgaattttttataggaggagtttt

SEQ ID NO: 3776 - DNA, 789 bp, Streptococcus pneumoniae
  misc_feature (1)..(789): tiling:Spneumo1:WAN024G3C; Cluster includes WAN0242S1-M SP 0641||15900547|NP_345151.1|603894..610316|+|6423 bp|serine protease, subtilase family variable region|S.pneumoniae|T IGR4|NC_003028.1|ORF|011
ggttctagcaatttcacaaagattcatagaattaaatttgctaatcaggctgatgaaaaggggatgatttcctattatctagtagatcctgatcaagattcatctaaatatcaaaagcttggcgagattgcagaatctaaatttaaaaatttaggaaatggaaaagagggtagtctaaaaaaagatacaactggggtagaacatcatcatcaagaaaatgaagagtctattaaagaaaaatctagttttactattgatagaaatatttcaacaattagagactttgaaaataaagacttaaagaaactcattaaaaagaaatttagagaagttgatgattttacaagtgaaactggtaagagaatrgaggaatacgattataaatacgatgataarggaaatatwatwgcytaygaygatggkastgmyytasaatatgaaactgaraaacttgacgaaatmaaatcaaaaatttatggygttctaagyccrtctaaagatggacactttgaaattcttggaaagataagyaatgtttctaaaaatgccaaggtatattatggraatarctataaatckatagaaatcaaagcgacyaagtatgaytymcaytcaaaaacgatgacatttgatytatacgctaatattaatgatattgtggatggattagcttttgcwggagatatgmgrttwtttgttaaagatratratcagaaaaaagctgaaaytaaaattagaatgcctgaaaaaawtaaggaaactaaakcagaatatccctatgtatcaagt

SEQ ID NO: 3777 - DNA, 92 bp, Streptococcus pneumoniae
  misc_feature (1)..(92): tiling:Spneumo1:WAN024A8U; Cluster includes WAN024EGL R6.I G_1062||||1003394..1003485|+|92 bp|Between spr1023 (+ stra nd) and spr1024 (ligA) (+ strand)|S.pneumoniae|R6|NC_00309 8.1|IG|110
ggttgcttgagtttcaaaaataatttcaaactaagtgttttttccgcccttctcgtttgtgaggagggcttgttttatggtaaaatggtctt

SEQ ID NO: 3778 - DNA, 65 bp, Streptococcus pneumoniae
  misc_feature (1)..(65): tiling:Spneumo1:WAN0249UM; Cluster includes WAN024E9C-rc R 6.IG_1627||||1563486..1563550|-|65 bp|Between spr1581 (pri A) (- strand) and spr1582 (- strand)|S.pneumoniae|R6|NC_00 3098.1|IG-rc|110
ggttggggggactcaatcttattttttctattgcaagaatgtactgacaaggaggaggtgagaag

SEQ ID NO: 3779 - DNA, 130 bp, Streptococcus pneumoniae
  misc_feature (1)..(130): tiling:Spneumo1:WAN0249XF; Cluster includes WAN024EB2 R6.I G_1502||||1438166..1438295|+|130 bp|Between spr1455 (phnA) (- strand) and spr1456 (cmk) (- strand)|S.pneumoniae|R6|N C_003098.1|IG|110
ggtttctccttatcatcattcactattctttgaaaatcaaaatttctcgaacagcaactattataccctaaaatcagcattttgacaaatttagaaaaaaaccgatatcaatctatcggcttttctacat

SEQ ID NO: 3780 - DNA, 162 bp, Streptococcus pneumoniae
  misc_feature (1)..(162): tiling:Spneumo1:WAN024DTK; Cluster includes WAN02437Z-3 SP 0026||15899973|NP_344577.1|28094..28717|+|624 bp|hypotheti cal protein|S.pneumoniae|TIGR4|NC_003028.1|ORF|111
ggtttwgscwwgrraaskswcttmttgtttaactctccttttgtggagttggaaacagagttgcctttagcgattccagtggttacggctattgctctctatggttwttatcatgcttattgctttgttgagaaacacaatgagttgatgaccctarctaat

SEQ ID NO: 3781 - DNA, 441 bp, Streptococcus pneumoniae
  misc_feature (1)..(441): tiling:Spneumo1:WAN024B34; Cluster includes WAN0240KL |ddl ||CAB64496.1|||441 bp|D-alanine--D-alanine ligase|S.pneumo niae||AJ387983|ORF|000
gmtaaaatcgctgaagtggaagaaaaattgacttatccagtcttcactaagccgtcaaacatgggktctagtgtcggtatttctaagtctgaaaatcaagaagaacttcgtcaggctttggaacttgccttycaatatgayagycgtgtcttggtagarcaaggrgtraatgcccgtgaaatcgaggttggtctactrggcaactaygatgtcaaaagcacsctaccaggagaagtrgtcaaggatgttgccttttatgactacgatgccaagtatattgataacaagattacyatggatattccwgccaaaatcrgtgatgatgtggtrgctgtcatgcgtcaaaatgcagaaacrgccttccgtgccattggtggyytwggtctatctcgttgcgatttcttctatacagataagggagagattttyctcaacgagctc

SEQ ID NO: 3782 - DNA, 106 bp, Streptococcus pneumoniae
  misc_feature (1)..(106): tiling:Spneumo1:WAN0249UP; Cluster includes WAN024E9D R6.I G_1617||||1553670..1553775|+|106 bp|Between spr1571 (mvaS) (- strand) and spr1572 (- strand)|S.pneumoniae|R6|NC_0030 98.1|IG|110
gtaaaaaatcgttctatactattttatcacaaatggcagtaaaagagagaaaaaagacttgattcaccaaatcaagcctcttattggtcatcattttaaagaatga

SEQ ID NO: 3783 - DNA, 415 bp, Streptococcus pneumoniae
  misc_feature (1)..(415): tiling:Spneumo1:WAN024BGZ; Cluster includes WAN024461 spr0 841|IS1381|15902885|NP_358435.1|840507..840896|-|390 bp|Tr anposase (orf2)|S.pneumoniae|R6|NC_003098.1|ORF|990
gtaaaaagaaatkyyacgctatgrarvctcarrcgattgtcacaagtcaagggagaattrtttctttggatatcrctgtgaactatwgycrygatatgaagttgttcaaaatgagtyryagaaatatcrracaagctggwaaaatcttgdytgacagtgrttatcaaggrcyyatgaagatatrtcytcaagyacaaaytycacgtaaatccagyraaytcaarmmrctaayarytgaaratmarryytrtaaycatgcrctatcyamggadakaagcaagrtygagaayatytttgccaragtaraaacgtttaaaatrwtttcaacaayytrtcraartcatcgtaaacrmttygraytacgaatgaatttgaktgytgryattatcaatcatgaactaggattctavctaat

SEQ ID NO: 3784 - DNA, 96 bp, Streptococcus pneumoniae
  misc_feature (1)..(96): tiling:Spneumo1:WAN024AHU; Cluster includes WAN024EL6 R6.I G_691.1.1||||671089..671184|+|96 bp|Between spr0667 (ftsX) (+ strand) and spr0668 (ptsG) (+ strand)|S.pneumoniae|R6| NC_003098.1|IG|110
gtaaaatagctgcttttatgaggagattgtaaaatctccttttttgctacaagagtttttgaaaagagatgcgcagaagaaaagagcttccaaaga

SEQ ID NO: 3785 - DNA, 50 bp, Streptococcus pneumoniae
  misc_feature (1)..(50): tiling:Spneumo1:WAN0249IK; Cluster includes WAN024E5P-rc R 6.IG_2010||||1826429..1826478|-|50 bp|Between spr1850 (- s trand) and spr1851 (- strand)|S.pneumoniae|R6|NC_003098.1| IG-rc|110
gtaaaatcaggtttatcctgattttttgctagttagaggaggttaaactg

SEQ ID NO: 3786 - DNA, 417 bp, Streptococcus pneumoniae
  misc_feature (1)..(417): tiling:Spneumo1:WAN0249UW; Cluster includes WAN024E9H-rc R 6.IG_1610||||1544117..1544530|-|414 bp|Between spr1563 (+ strand) and spr1564 (+ strand)|S.pneumoniae|R6|NC_003098.1 |IG-rc|110
gtaaactcctcatagatagtatatttctactataccatattttrgaggagaamgggggaatgagtcttttttgataaggaatagaaagtaaatagcccttcgagacttagaataggtctgtcaactaaaggttatatgcattctaggtttcgaataatcgcaattccataaatttaaaagcattctaagtttcgaatagcttatctgagataattttgaggcattcgcgctttcgaatagtcattttccctaaagtttagatgtattctgaagctagaaagactaaaatmtaaaagtagtaagagtctctctctgatggacgtaatttatggctagtatgaatcctttgaattgttagttaattttaatattaatcagttctgaaataattactaaatatagttagatrgtgaatta

SEQ ID NO: 3787 - DNA, 93 bp, Streptococcus pneumoniae
  misc_feature (1)..(93): tiling:Spneumo1:WAN024AHH; Cluster includes WAN024EL2-rc R 6.IG_695.1||||677310..677402|-|93 bp|Between spr0671 (metK ) (+ strand) and spr0672 (pyrDA) (+ strand)|S.pneumoniae|R 6|NC_003098.1|IG-rc|110
gtaaatctctactttcgcaaaatggattttcagaacagtatcccagtatagttaaaaactataaaaaagagaggacgttcccctcttaaaatc

SEQ ID NO: 3788 - DNA, 264 bp, Streptococcus pneumoniae
  misc_feature (1)..(264): tiling:Spneumo1:WAN024ACC; Cluster includes WAN024EIB-rc R 6.IG_940.1||||889537..889800|-|264 bp|Between spr0904 (+ s trand) and spr0905 (yfnA) (+ strand)|S.pneumoniae|R6|NC_00 3098.1|IG-rc|110
gtaacttccatctctctcccaaaactggaagttactctaagacgactctgttttagggctatttgtcgtgcactttttctgagtcttttcgcttttgaacccttatatatcaagaaaaagaaaaccagtggaagttagtctaagacggatttccactgatgtcacgcgtttttctcatactaaaagctaggttgtgggaaactggaagttagttttagaagttaccaaaatctgactacatcttgtaatcagattttatcgatt

SEQ ID NO: 3789 - DNA, 104 bp, Streptococcus pneumoniae
  misc_feature (1)..(104): tiling:Spneumo1:WAN0249SH; Cluster includes WAN024EKH R6.I G_743.2.1.2||||721725..721808|+|84 bp|Between E (transposa se) (- strand) and spr0720 (- strand)|S.pneumoniae|R6|NC_0 03098.1|IG|110
gtaacttgtaactagctgcctagtttgatctttgcttcttcattgattagcagtagatttcaaaatgataaaaacgcatartakcaggtattgaaatgtactgc

SEQ ID NO: 3790 - DNA, 95 bp, Streptococcus pneumoniae
  misc_feature (1)..(95): tiling:Spneumo1:WAN0249ZU; Cluster includes WAN024ECI-rc R 6.IG_1375.1||||1318520..1318614|-|95 bp|Between spr1331 (- strand) and spr1332 (- strand)|S.pneumoniae|R6|NC_003098. 1|IG-rc|110
gtaataaattagggtggaaccgcgtttctgacgcccctaggttaaatcaacctaggattgtcagatgtggttcttttgcttattcagtctattgt

SEQ ID NO: 3791 - DNA, 59 bp, Streptococcus pneumoniae
  misc_feature (1)..(59): tiling:Spneumo1:WAN024AP9; Cluster includes WAN024EP4 R6.I G_401||||378049..378107|+|59 bp|Between spr0377 (fabH) (+ strand) and spr0378 (acp) (+ strand)|S.pneumoniae|R6|NC_00 3098.1|IG|110
gtaatcatgtggtgaacacattgttataaaaaaactatttattttaaaggagtcctatc

SEQ ID NO: 3792 - DNA, 308 bp, Streptococcus pneumoniae
  misc_feature (1)..(308): tiling:Spneumo1:WAN0249MN; Cluster includes WAN02471V R6.I G_185.2||||173855..174162|+|308 bp|Between spr0164 (ribD) (- strand) and spr0165 (ruvA) (+ strand)|S.pneumoniae|R6|N C_003098.1|IG|110
gtaatcatttcagagcacgcaaaaagcacaaatatacttttatcttctttcatccagactatactgtcggctttggaatttcaccaaatcatgcctttcggctcgtgggctataccaccggtagggaattkcaccctgccctgaagatagttattcaattacagatgattatagtacttaattttgaatatgtcaacagataaatacmgattgtttttgatatactgtatttgtgataatcgattctcgctcctcggataaagaaaatatgatatactagataaacgaaataagagagaaggaayact

SEQ ID NO: 3793 - DNA, 518 bp, Streptococcus pneumoniae
  misc_feature (1)..(518): tiling:Spneumo1:WAN024AAA; Cluster includes WAN0247F0 R6.I G_125.2.1.1||||113219..113375|+|157 bp|Between spr0104 (- strand) and spr0105 (+ strand)|S.pneumoniae|R6|NC_003098.1 |IG|210
gtaattttgaaatgagcttaataagaggtaykatgtaggtagaaaataaagataggagaaaaagtatgaataaaaaaatattttgtattctagtatgtattatatyattgattagtctrgctataatctttccatggggctggycgatataatgtaagggagyttgagttgttagtggaggataaaatgttaagagtaatagtagttattcaatctttagtaataatactgcttgctgttgctttattattatctcggaaaaactttgattcgttaaatgttgttcttataatgatgatcgtatcacaattgttgttattagtatatttgataaaatcagggaatcagtgattagctgttatttgaattaagtaaactgttaagcttcaagcagtaactggttttaaatatttaaaataagataaaggaaggaagtctaatttaggtaactaaacaaagcctgcgatcacttgttaggaaaccatcctaascatgcttaataaaaaaggagaaaataa

SEQ ID NO: 3794 - DNA, 124 bp, Streptococcus pneumoniae
  misc_feature (1)..(124): tiling:Spneumo1:WAN0249VS; Cluster includes WAN024EA3-rc R 6.IG_1574||||1504561..1504684|-|124 bp|Between spr1527 (- strand) and spr1528 (- strand)|S.pneumoniae|R6|NC_003098.1 |IG-rc|110
gtacttactgacttaataaaaaacagaggagagtgatggatgagtaggatgaaatgaaatcgcatacaagaaataaagaactcattatccaagttggatacgcttattacataggagaatacaa

SEQ ID NO: 3795 - DNA, 220 bp, Streptococcus pneumoniae
  misc_feature (1)..(220): tiling:Spneumo1:WAN024AHX; Cluster includes WAN024EL8-rc R 6.IG_687.1.1||||667187..667406|-|220 bp|Between spr0663 (l ivF) (+ strand) and spr0664 (+ strand)|S.pneumoniae|R6|NC_ 003098.1|IG-rc|110
gtagatgcakatttgtttgcaatctcwatcyaccgactaaaaaggtccccmggactatattgatgattacttcgtaatctccatctgccgrctaaaacaatccwctggatttgwtgattgcttcgcaatctttatctgcaacctaaactagtctcccagactataatgatgattacttcgtaatcttcatctgccgactaaaacaatccactggattgtt

SEQ ID NO: 3796 - DNA, 136 bp, Streptococcus pneumoniae
  misc_feature (1)..(136): tiling:Spneumo1:WAN0249MC; Cluster includes WAN024E7X-rc R 6.IG_1732.2.2||||1655887..1656022|-|136 bp|Between spr1683 (+ strand) and spr1684 (fatD) (+ strand)|S.pneumoniae|R6| NC_003098.1|IG-rc|110
gtagatttggtatcgaaagatayctgcggatataaatgtaacattatttttctaatctgtcaataaaatttctgacaatttaataaatacaacaaggagagagcaacaagactttctcctttgttatcctattcta

SEQ ID NO: 3797 - DNA, 156 bp, Streptococcus pneumoniae
  misc_feature (1)..(156): tiling:Spneumo1:WAN0249F9; Cluster includes WAN024E3X R6.I G_2190.1||||1975661..1975816|+|156 bp|Between spr1983 (- s trand) and H (transposase) (- strand)|S.pneumoniae|R6|NC_0 03098.1|IG|110
gtagcgctccccctttagttacaaactttggaattaaatttgatttttaatattttagcataaaatagcagaaaacaaaagtgaggttttttacatgaaaaaacaaaaactattgcctttattattcctaattttaggaggaattatgattatcgt

SEQ ID NO: 3798 - DNA, 144 bp, Streptococcus pneumoniae
  misc_feature (1)..(144): tiling:Spneumo1:WAN0249IE; Cluster includes WAN024E5M-rc R 6.IG_2024||||1835947..1836090|-|144 bp|Between spr1865 (- strand) and spr1866 (adh) (- strand)|S.pneumoniae|R6|NC_00 3098.1|IG-rc|110
gtagtaaaaatatttttgtacataagtaaatagaaattcagtcatccatcagatggctggattttttatcaaaaaattaagaaatgagcatatttctttccttgtctggcggaattggttataatatacggtacaaaggaatga

SEQ ID NO: 3799 - DNA, 436 bp, Streptococcus pneumoniae
  misc_feature (1)..(436): tiling:Spneumo1:WAN0249GV; Cluster includes WAN024E4T-rc R 6.IG_2122.2.1.1||||1895020..1895455|-|436 bp|Between spr19 15 (+ strand) and spr1916 (malP) (- strand)|S.pneumoniae|R 6|NC_003098.1|IG-rc|110
gtagttggttacctcatatctmttrtattcgcttacataaagtattataatataattgtaggaaagaaggtgtttttatgatatacacacttaaattggtgttgtttattacctttcttgtaataagcttgttacctgataagatttttggaaaaaataaaaaaatttggaaaatagtttttgcaatattgacggcagtggcagcattgtcatttatgtactaagttattttaagaatgtagggaaataaaccctacattctttttagttttttctgttttctaaattctatttatccaagcgmttcaacatttcttgcttcttcgcttcaagttctgcacgcttttcttcgatttcggcatgttttttctcgagttcagaacaacttgcaccattgctaaattcttttcgccatcaggagatagggtgagtcgac

SEQ ID NO: 3800 - DNA, 66 bp, Streptococcus pneumoniae
  misc_feature (1)..(66): tiling:Spneumo1:WAN024AJN; Cluster includes WAN024EM7-rc R 6.IG_608.1||||601111..601176|-|66 bp|Between spr0584 (glcK ) (+ strand) and spr0585 (thyA) (+ strand)|S.pneumoniae|R6 |NC_003098.1|IG-rc|110
gtatagcataaaaaataaaagaggaacattactaactctaggttagcattttcctctctcattatc

SEQ ID NO: 3801 - DNA, 1763 bp, Streptococcus pneumoniae
  misc_feature (1)..(1763): tiling:Spneumo1:WAN024G3D; Cluster includes WAN0244DT-3 sp r0561|prtA|15902605|NP_358155.1|562418..568852|+|6435 bp|C ell wall-associated serine proteinase precursor PrtA conse rved C-term|S.pneumoniae|R6|NC_003098.1|ORF|111
gtatcaagttatgggaatgtmatmgaattaggrgaaggagatctttcaaaraacaaaccagacaatttaactaaaatggaatctggtaaaatctattctgattcagaaaaacaacaatatctgttaaaggataayatcattctaagaaaaggctatgcactaaaagtgactacctataatcctggaaaaacggatatgttagaaggaaatggagtctatagcaaggaagatatagcaaaaatacaaaaggccaatcctaatctaagagycctttcagaaacaacaatttatgctgatagtagaaatgttgaagatggaagaagtacccaakctgtattaatgtcggctttggacggctttaacattataaggtatcaagtgtttacatttaaaatgaacgataaaggggaagctatcgataaagacggaaatcttgtgacagattcttctaaacttgtattatttggtaaggatgataaagaatacactggagaggataagtycaatgtagaagctataaaagaagatggctccatgttatttattgataccaaaccagtaaacctttcaatggataagaactactttaatccatctaaatctaataaaatttatgtacgaaatccagaattttatttaagaggtaagatttctgataagggtggttttaactgggaattgagagttaatgaatcggttgtagataattatttaatytacggagatttacacattgataacactagagattttaatattaagctgaatgttaaagacggtgacatcatggactggggaatgaaagactataaagcaaacggatttccagataaggtaacagatatggatggaaatgtttatyttcaaactggctatagcratttgaatgctaaagcagttggagtccactatcagtttttatatgataatgttaaaccygaagtaaacattgatcctaagggaaatactagtatcgaatatgctgatggaaaatctgtagtctttaacatcaatgataaaagaaataatggattcgatggtgagattcaagaacmacatatttatrtaaatggaaaagaatatacatcatttratgatattaaacaaataayagacaagacactaaacattaagattgttgtaaaagattttgcaagaaatacaaccgtaaaagaattcattttaaataaagatacgggagaggtaagtgaattaaaacctcataggrtaactgtgaccattcaaaatggaaaagaaatgagttcaacgatagtgtcggaagaagattttattttacctgtttataagggtgaattagaaaaaggataccaatttgatggttgggaaatttctggtttcgaaggtaaaaaagacgctggctatgttattaatctatcaaaagatacctttataaaacctgtattcaagaaaatagaggagaaaaaggaggaagaraataaacctacttttgatgtatcgaaaaagaaagataacccacaagtaaaycatagtcaattaaatgaaagtcacagaaaagaggatttacaaagagaagakcattcacaaaaatctgattcaactaaggatgttacagctacagttcttgataaaaacaatatcagtagtaaatcaactactaacaatcctaataagytrmcwaawactggaacagcaagcggagcccagacactattagctgccggaataatgtttatagtaggaatttttcttggattgaagaaaaaaaatcaagattaactaat

SEQ ID NO: 3802 - DNA, 87 bp, Streptococcus pneumoniae
  misc_feature (1)..(87): tiling:Spneumo1:WAN024AFV; Cluster includes WAN024EK3-rc R 6.IG_780.2.1.2||||752077..752163|-|87 bp|Between spr0756 ( parE) (+ strand) and spr0757 (parC) (+ strand)|S.pneumonia e|R6|NC_003098.1|IG-rc|110
gtatctagggcgtgttcaactcctttcaaagaatgtagagtaggtttttatgcagtaaaagatattttacgggaattcstcccgtgt

SEQ ID NO: 3803 - DNA, 182 bp, Streptococcus pneumoniae
  misc_feature (1)..(182): tiling:Spneumo1:WAN0249VY; Cluster includes WAN024EA7-rc R 6.IG_1568||||1499160..1499341|-|182 bp|Between spr1521 (- strand) and spr1522 (- strand)|S.pneumoniae|R6|NC_003098.1 |IG-rc|110
gtatgagtaaggggwgcwattatttctgaaactactttcaaaggctccaaacgctattctataagcgagaaactaaaatctaagtgtctataagatattgaaagccttttcggtaaagtgtatactaaagaagtaaagaaaaatctgctttagcagaaaataaaaataataggagaaaatct

SEQ ID NO: 3804 - DNA, 100 bp, Streptococcus pneumoniae
  misc_feature (1)..(100): tiling:Spneumo1:WAN024A9C; Cluster includes WAN024EGV R6.I G_1049.2.1||||992602..992701|+|100 bp|Between spr1010 (- s trand) and spr1011 (+ strand)|S.pneumoniae|R6|NC_003098.1| IG|110
gtattgattttattataccatttttttaagacatagtcttttattggtgagagttatttatgtcaaggagtgattagaaataaattaaaataatgatttt

SEQ ID NO: 3805 - DNA, 250 bp, Streptococcus pneumoniae
  misc_feature (1)..(250): tiling:Spneumo1:WAN0249TN; Cluster includes WAN024E7Z R6.I G_1729.2.1.2||||1652817..1653066|+|250 bp|Between spr1680 (- strand) and spr1681 (- strand)|S.pneumoniae|R6|NC_00309 8.1|IG|120
gtatttatagcatttcgaawctggaataggacrccatgactgctaaaagatttctataaattmatttawtttcctcaatcaatttgttcatatcttatttcattccrctataatttcaccttaccctatctttttcgtagcacccttcaaacagcctatcccctaccgtttgacgattcctcacttcgctccacttccattacagaagtttcttcactactatgggctcggctgacttctcatgattcct

SEQ ID NO: 3806 - DNA, 137 bp, Streptococcus pneumoniae
  misc_feature (1)..(137): tiling:Spneumo1:WAN0249FU; Cluster includes WAN024E4D-rc R 6.IG_2161.2||||1941341..1941477|-|137 bp|Between spr1954 ( - strand) and spr1955 (+ strand)|S.pneumoniae|R6|NC_003098 .1|IG-rc|110
gtattttcctccttaaaaattttgacttggcaccattttgggtaccgcttacatgtatrttataacgcaattcctaggtaatgtcaatggctataatttctcggaaaataatataaattatgatrtttagcacaayt

SEQ ID NO: 3807 - DNA, 581 bp, Streptococcus pneumoniae
  misc_feature (1)..(581): tiling:Spneumo1:WAN0249U2; Cluster includes WAN024EQF-rc R 6.IG_293||||273258..273608|-|351 bp|Between spr0272 (rpsI) (+ strand) and B (transposase) (+ strand)|S.pneumoniae|R6 |NC_003098.1|IG-rc|220
gtattttctccataaktaagtatactagtagtatagcatagacttgtatatttttcaagaaaattatagtttttcggaaagatgttataggagtttttcaaagtgataaaaagacttagacctacaaacaaaacagaataaggaaaataataaaaatctcacccactaaacttctgttaatactacataactgaagagctatataaggagctatgagatacaaaacacatwrtatartagattgaaactagaatagtacayctskacttctaaaacattgttagaattcgatttgactatcctcgatttgtcctattcttakktmaywttaskryaaawwtarggtaaacttttywaraaagyamgaaaaaagcacccatarggtaaacyyttgagtgctttgaaacrttgatataatcgtattgattaacgttttgaggcaactgaccwtgtcaggttgcagccacatttgtaagcgactaaagtcgcaacaactgtgtcaattgcaccaatttagtaagaaagtataaaaaaagaacaccccgaaaggtgctctgtataagtatagtaattctttcgaa

SEQ ID NO: 3808 - DNA, 88 bp, Streptococcus pneumoniae
  misc_feature (1)..(88): tiling:Spneumo1:WAN0249Z3; Cluster includes WAN024EC2 R6.I G_1399||||1338290..1338377|+|88 bp|Between spr1355 (glnP) (- strand) and spr1356 (- strand)|S.pneumoniae|R6|NC_00309 8.1|IG|110
gtatttttgtaaaaagattctaccatatacaaataaaaaccgtagctatcaaaagagataaactacagttctatatgtttaaacattc

SEQ ID NO: 3809 - DNA, 2129 bp, Streptococcus pneumoniae
  misc_feature (1)..(2129): tiling:Spneumo1:WAN024CLA; Cluster includes WAN023S6G cont ig_480_1||||11..856|+|846 bp|Glimmer 2.02 orf prediction|S .pneumoniae|670|WAN01UCZE|ORF|000
gtcaaatcgctagctatcgtcaatctgtagatggtaagttcacggatatttcaagtcagataactacttataagcaagatgtgggcggtcaaatcagtggtctatcaaatagacttacaagcagtgagcaaggaaccactactcagatttcaaatatttcaaatcggataaacagtaataagcaaggcacagataatcagatttcaaatttaaagactcaggtcgctacaaacaaggataatgctgaacgacaaatgggtagaatatctgatcaagtttctgcaaacaaagcgaatgctgatagtcaatttgcgaatgtgaccaatcaactagcgcgaaaagtagagactactgacttccagcgtgttaaggaaaccagtaaactttacgagcggattttgggcaatactgaaaatggaattgcggataaggttgctcgcatggctctgacyaatcaactatttcaggttgaggttgggaaatatagtgtaagcggccctaacctcattaagaatagtgattttaaaaatgctacgaatgaatggggctcaactcaaaatttaggaagattggttaagcatagcttttatcacaacgggcagaaagaccttatgcgtttaagtaatgcaactaaaaacgaaaactttttgtatagtcaccgttttawtcttgaacgaaatactgactatgtactgaattttagaggatttaacaacagtgctctmgcaagctatgatgtttatattttgggacgaagagcaggygagagcgatggattcacaatcgttaagaaagttgttagcagcaagaaactatctacctctagatgcgaagatgtctcagtaacttttaattccggagaaatggataatgcttacattcgttttgataacaatggytcatcatcaggaacagctgatttgtatattacagaagttgacttgtacaaaggttataaacctagaacatggcaaccacatccagaagatgyrgtcgcagatgcgaataagaagcttgaagcmacgcaaacaaaaatgactcwactarctggctcatgggcagttcaaaacatcaactcggctggagatatcatctctskaayyaatcttggcgccaatggacataaccgctttgttgggaaattgacccacatcactggagagaccctgattgacagagcagtcatcaagtctgccatggttgataagytgaaaacgggcaattttgaagctggttcggtcacgactacgatattagacgctgaagcggtaactgctgagaagttgaaagttgacaatgcgcttattaraaaattaactgcaamtgatgcttttattgaccractgatatctaaacgtatcttctctattaaggttgagtccgtcatttctagytcaaccttcctagaagcctatcaaggycgaattggtggattcacacttggtcaatttgaccagggtggcggtcgctggatttcaggtgtcaatcagttctctgttggtatggggaatggtgccgggcatggagtccggacagccttctgggcgaactggggaaataattggaactatgccggacctaaagcatggaacgtcaatactgatgggaaaatgtactgtaggaatgaagtcggtttttatgatcaagtggatttttcgaattcatcgagagcaaacttctatgggaatactactttttctcgttctcctgtgttttcaaatggtatcgaacttggaagtaaagatgtkcttggtgatggttggaatcccaaaggcggaaggaatgcggttgtttggtggaatcaggtcggtagcggtagcgtgaagtattggatggaacaaaaatcagacagacgcttaaaagagaacatcacagatacagctgtgaaagccttggacaaaatcaacagattaagaatggttgcatttgatttcatcgaaaataagaaacatgaggagattggtctaayagctcaagaggctgaaaccatcgttccaaaaattgtctcacgagatcctgagaatccagatggctatctgcatatygactataccgctttagttccttacttaatcaaggctattcaagaattaaatcaaaaaatagaaaaaatggagaaaacaatagca

SEQ ID NO: 3810 - DNA, 240 bp, Streptococcus pneumoniae
  misc_feature (1)..(240): tiling:Spneumo1:WAN024A7K; Cluster includes WAN024EFT R6.I G_1110||||1071533..1071765|+|233 bp|Between spr1072 (lacT) (- strand) and spr1073 (lacD) (- strand)|S.pneumoniae|R6| NC_003098.1|IG|110
gtcaacctccttttatatcttaaaggtatatragtacaaaaaatgaccacaaatgaactagaaaatcagctgatttctaattcacctgtgatcatgcctaatattacttagtaacactcaccttgtattaacttgtgatttaagtatagcacaagtmrgttrttttgtaaacctttacatacaactttttttaaaayttwwytatgwtctmawrttcmtcaaactaggaggactytsttt

SEQ ID NO: 3811 - DNA, 405 bp, Streptococcus pneumoniae
  misc_feature (1)..(405): tiling:Spneumo1:WAN0249T7; Cluster includes WAN024EBC R6.I G_1480.1.2||||1420176..1420282|+|107 bp|Between spr1436 (- strand) and spr1437 (msmK) (- strand)|S.pneumoniae|R6|NC_ 003098.1|IG|210
gtcaccataactatagcataaatttattattacctctctagttcgaattcaattgctcacgtagtttacgcatatagcttcacttgtagatggtacccacaaataatactcaatggaaatcaaagagcaaactaggaaactagccgtaagctgctcaaagtacatctttgaggttgcagataaaactgacgaaatcagtaatcatacgtacggcaaggcgacgttgacgtggtttgaagagattttcgaagagtattaaagagcatcacaatatagatgcataatatgacttcyctagcaaaaaggagagaagcattttgtttctctccctagatyaactgatatctctccactacaattgataaagagatatcttttcttgtagtgctttgaattttatttatt

SEQ ID NO: 3812 - DNA, 222 bp, Streptococcus pneumoniae
  misc_feature (1)..(222): tiling:Spneumo1:WAN024AAV; Cluster includes WAN024EHN-rc R 6.IG_981||||927736..927957|-|222 bp|Between spr0942 (ccrB) (+ strand) and spr0943 (+ strand)|S.pneumoniae|R6|NC_0030 98.1|IG-rc|110
gtcacctgaccaattcaggctctctgtatcatctcatcatatttcctacttactttacgagtcytatacccagaacacaccttatcgaccttcggtctcacctcgtcgcattggctgaacatctacttttacttygctgatgcttcaactcgtacaagcagtgataccgcctcagcgtgatgcgtcagtgggactcaaaaagtttggggaaccttttgagga

SEQ ID NO: 3813 - DNA, 72 bp, Streptococcus pneumoniae
  misc_feature (1)..(72): tiling:Spneumo1:WAN024A49; Cluster includes WAN024EDO R6.I G_1291.1||||1247578..1247649|+|72 bp|Between spr1247 (murB ) (- strand) and spr1248 (- strand)|S.pneumoniae|R6|NC_003 098.1|IG|110
gtcactcttccttttacaaaattcattccattataccatttttagagacatttgacgaccataaaaatacct

SEQ ID NO: 3814 - DNA, 144 bp, Streptococcus pneumoniae
  misc_feature (1)..(144): tiling:Spneumo1:WAN024FS4; Cluster includes WAN023ZP5 |cps 6aE||AAL68420.1|||144 bp|UDP-glucosyl transferase|S.pneumo niae||AF246898|ORF|000
gtcagcggacgaagcgagatcaagaatttcgatgaagttgtcaaattagatgwggcctatattaatggttggacaatctggaaagatattgaaattttattgaaaacggttaaagttgtatttatgagagatggarcgaaatag

SEQ ID NO: 3815 - DNA, 61 bp, Streptococcus pneumoniae
  misc_feature (1)..(61): tiling:Spneumo1:WAN0249II; Cluster includes WAN024E5O-rc R 6.IG_2015||||1830998..1831057|-|60 bp|Between spr1855 (- s trand) and spr1856 (- strand)|S.pneumoniae|R6|NC_003098.1| IG-rc|110
gtcagggagtgatttttctataaggatggaaaaaagaagggaaatttggtaagataggaat

SEQ ID NO: 3816 - DNA, 180 bp, Streptococcus pneumoniae
  misc_feature (1)..(180): tiling:Spneumo1:WAN024AIV; Cluster includes WAN024ELT R6.I G_638||||625781..625959|+|179 bp|Between spr0614 (pyrE) (+ strand) and spr0615 (+ strand)|S.pneumoniae|R6|NC_003098. 1|IG|110
gtcagtaagataaagagagacgaggctaccgagyctcttttaccattttrtttaaaatatgacaatattttaaayaaaataattgacaacgctttcttttgttgatataatgaaaatrtaatatgtatcaaattgatcaatcaactatcttrtttatcacttcttargaggacgatgtca

SEQ ID NO: 3817 - DNA, 246 bp, Streptococcus pneumoniae
  misc_feature (1)..(246): tiling:Spneumo1:WAN024EX2; Cluster includes WAN023KSF 3130 34_2956||||1573840..1574175|+|336 bp|EGAD orf prediction|S .pneumoniae|R6|NC_003098.1|ORF|110
gtcattgacctcatccctactcttgtccatctgctcaatgacaggatagtaggcattgctgatgatttccagactggcaaagagaaacttataaatcgaaagcgtgtcatggttctccagataacgagtcatctgttcaatgacataggcgttcttggtattactaatggtaatcaggcgacgatgctcgacaataaaggtcatgggaaaagtctcatagtaggccttgtccttttttacgtctar

SEQ ID NO: 3818 - DNA, 106 bp, Streptococcus pneumoniae
  misc_feature (1)..(106): tiling:Spneumo1:WAN0249WO; Cluster includes WAN024731-rc R 6.IG_166||||154367..154469|-|103 bp|Between spr0145 (+ str and) and spr0146 (+ strand)|S.pneumoniae|R6|NC_003098.1|IG -rc|110
gtcatttcctccaaaatagaataccttataatcttaacagaaaaagagcatttacgccattatatgatatctatctctgtgataagttttttttatgggtaattta

SEQ ID NO: 3819 - DNA, 2000 bp, Streptococcus pneumoniae
  misc_feature (1)..(2000): tiling:Spneumo1:WAN024C5J; Cluster includes WAN023ZUI |pbp 2x||CAB65442.1|||1998 bp|penicillin binding protein 2x|S.p neumoniae||AJ238581|ORF|000
gtcccgattgctgargaygcracmtcytataatgtctatgckgtyattgayraraamtayaartcagcaacgggtaarattctttaygtagaarawrcwcartttaayaaggtwgcagaggtcttycataagtatytggayatggamgarkcytatgtwaragarcaaytstckcaacckaatctsamkcaagtttccttyggtkcraarggmaatggrattacctatgccaatatgatgkctatyaaraargawytrraagactgctagwrktsaagggrattgatttyacaacyagtccyaatmgwagytayccaaayggacaatttgcttcyagttttatyggwytagctcarctccatgaaaatgaagatggmagcaagagyttgctgggaacytctggratggagagttccttgaayagtattcttgcagggamagacggyattattacytatgaaaaggatcgtctgggwaatattgtcccyggaacrgaacaagtttcccaacaaackgtagatggcaaggatgtttatacgactatttccagcacccttcagtccttcatggagacccagatgaatgcctttcaagaaaaagtaaaaggcaagtatatgacrgcwaccttggttagtgctaaaacaggggaaattcttgcaacracgcarmgrccraccttygatgcagatactaargaaggrmtsactaaggaytttgtttggcgtgatattctttatcaaagtaattatgaaccaggatcaaccatgaaggtcatgacgttagcttcttctattgasaacaataccttcccaagtggagaatatttcaatagtagtgaatttaaaatagcggatgtgacgattcgagattgggatgttaatggtggtttgacgactggtaggatgatgactttcttacaaggtttcgctctctccagtaatgttggaatgagtctacttgaacaaaaaatgggagatgctacttggttggattatctaaaccgctttaaatttggggtcccaactcgctttggcttgacagatgaatacgctggtcaacttccagctgataatattgtcaatattgctcaaagctcatttgggcaagggatttcagtaacacaaacacaaatgcttcgtgcctttacagccattgccaatgatggcgtcatgctagagcctaaatttattacggccttgtatgatccaaatgatcaaaccgttcgtagatctcaaaaagaaattgtagggaatccagtttcgaaagatgcagctagcctaactcgtactcacatggtcttggtaggaacggatcctagatatggaactatgtataatcatggtacaggaaagccaatcataacagttcctggacaaaatgtagcagttaaatctggtactgctgaaattgcagatgaaaaaaatgggggatacttagttggtgcaacgaattacatattttcagttgtatcaatgwatsssgcggaaaatcctgatttcattttatatgtgactattcaacagcctgagcattattcagttgtccatttgggagagtttgccaatcctatcttggaacgagcttcagctatgaaagagtctctgaatcttcaatctcctgctaagaatttagagcaagtaacggcagaatcttcgtatgcaatgcctagcatcaaggatatttcacctggtgatttggcggaagcattacgccgaaatattgtgcaaccaattgttattggtacgggaacaaaaattaaagagtcttctgtagaagaagggaaaaatcttgtacctaaccagcaagttcttcttttatctgataaggtagaagaaattccagacatgtatggctggaaaaaagagactgctgaggcctttgctaagtggttggatattgaattggaatttgaaggttcaggttctatcgttcagcaacaagatgttcgcgctaataccactataaagaacattaaaaatattaaattaactttaggagac

SEQ ID NO: 3820 - DNA, 1998 bp, Streptococcus pneumoniae
  misc_feature (1)..(1998): tiling:Spneumo1:WAN024ATN; Cluster includes WAN023ZV2 |pbp 2x||CAA67013.1|||1998 bp|penicillin-binding protein|S.pneu moniae||X98367|ORF|000
gtcccrattgctgaggatgcaacctcctataatgtctatgcggtyattgatgagaactataagtcagcaacgggtaagattctttacgtagaaaaaacacaatttaacaaggttgcagaggtctttcataagtatctggmcatggaagaatcctatgtaagagagcaactctcgcaacctaatctcaagcaagtttcctttggagcaaagggaaatgggattacctatgccaatatgatgkctatcaaaaaagaattggaarctgcagaggtcaaggggattgattttacaaccagtcccaatcgtagttacccaaayggacaatttgcttctagttttatcggyctagctcagctccatgaaaatgaagatggaagcaagagyttgctgggaacctctggaatggagagttccttgaacagtattcttgcwgggacagacggtattattacctatgaaaaagaycgtstrggwaatatygtmccwggwacagaacwrgtwtcscaacaaackgtrgayggcaaggatgtttatacaacattgtctagcccrctccaatctttcatggaaactcagatggatgcctttctasaaaaagtaaaaggtaagtatatgaccgcgacmttggtcagtgcaaagacmggtgaaatmctcgctacyacccaacgacctacctttaatgcagatactaargawggwatcacyrargactttgtttggcgtgatattctttatcaargtaactatgaaccaggatcagccatgaaggtcatgaygytmgctkctkctattgayaayaayacyttcccaggtggagaatacttcaatagcagcgaatyaaaaatagcggatgtgacgaytcgagattgggaygttaatgawggtttgacyrsyggtrgkatgatgacwttytywcaaggkttygctcwctcmagtaatgttggratgakwctrcttgarsaraaaatgggwgatmctacktggttggattatctaaaccgctttaaatttggrgttccaactcgytttggtttgacagatgaataygcwggycaacttccagctgayaatattgtyartattgctcaragytcatttggrcaagggatttcagtaactcagacgcaaatgattcgtgcctttacagccattgccaatgatggcgtcatgctggagcctaaatttattacggccttgtatgatccaaatgatcaaaccgttcgtaaatctcaaaaagaaattgtaggaaatccagtttcgaaagatgcagctagycwaacycgkactmamatgrtyttggtaggracggatccrgtttatggaaccatgtataaccacagcacaggcaagccaaytgtaactgttcctggkcaaaatgtagccctcaagtctggtacagccsaaatcgctgacgagaaaaatggaggctacttggttggtyctaccaactacattttctcggttgtagctatgaaccctgctgaaaatcctgattttatcttgtatgtaacggttcaacagcctgaacattattcaggtatccaattgggagaatttgccaacccaatcttggagcgggcttcagctatgaaagaatctctcaatcttcaatctcctgctaagaatttagatcaagtgacgacagaatcttcttatgcaatgcctagcatcaaggatatttcacctggtgagttggcggagaccttacgccgaaatattgtgcaacccatcgttgtaggtactggaacaaagattaaagagacttctgtagaagaaggaaaaaatcttgcaccaaaccaacaagttctccttttatcggataaggtagaagaaattccagacatgtatggctggaaaaaagagactgctgagacctttgctaaatggttggatattgaactggaatttgaaggttcaggttccatcgttcagaagcaagatgttcggactaatacagctatcaaaaacattaaaaaaattaaattaactttaggagac

SEQ ID NO: 3821 - DNA, 1998 bp, Streptococcus pneumoniae
  misc_feature (1)..(1998): tiling:Spneumo1:WAN024C5M; Cluster includes WAN02415X |pbp 2x||AAN32855.1|||1983 bp|penicillin-binding protein 2X|S.p neumoniae||AF446230|ORF|000
gtcccrattgctgaggatgcracmtcytataatgtctatgcggtyattgatgagaactataagtcagcaacgggtaagattctytacgtagaaaaaacacaatttaacaaggttgcagaggtctttcataagtatctggacatggaagaatcctatgtaagagagcaactctcgcaacctaatctcaagcaagtttcctttggwkcraagggcaatgggattacctatgccaatatgatgkctatcaaaaaagagttggaaactgcagaggtcaaggggattgattttacaaccagtcccaatcgtagttacccaaacggacaatttgcttctagttttatyggwctagctcagctccatgaaaatgaagatggcagcaagagyttgytgggaacctctggratggagagttccttgaacagtattcttgcagggamagayggyattattacctatgaaaaggatcgtctgggwaatattgtmccwggwacwgarcaagtttcccaacaracggtrgatggyaaggatgtttayacracyatttccagcmccctccagtcctttatggaaacccagatggatgcttttcragagaaggtaaaaggaaagtacatgacagcgactttggtyagtgctaaaacrggggaaattctkgcaacgacgcarmgaccracctttgatgcmgatacwaargaaggmmttacmraggactttgtttggcgtgatatcctttaycaaagtaactatgagccaggktcmrcyatgaargtgatgaygttrgctkctkctattgatartaataccttyccargwggagaakwcttcaatagyagtgarttaaaaatwgcrgaygykackatycgagattggraygtyaatgawggwttgactrstggyrgratgatgacyttytywcaaggtttygcwyactcmagtaaygttggratgasyctmcttgarcaaaaratgggagatgckacytggctygattatcthaaycghtttaartttggggtkycrackcgttttggtytgacwgatgartatkcaggycaaytkccwgcwgayaatattgtyaatatygctcagagtkcatttggwcargggatttcwgtaackcagacscaratgmtwcgtgcytttacagccattgccaaygatggsgtyatgytrgarccwaaatttatyaskgccytktatgatccaaatratcaaaccgttcgtaratctcaaaaagaaatygtaggraatccmgtttcgaaagatgcrgctrgccaaactcgkactcacatggtcttggtaggaacggatcctagatatggaactatgtataatcatagtacaggaaaagcaactgtcaatgttccaggtcaaaatgtagccctcaagtcyggtacagccgaaatcgctgacgagaaaaatggaggctacttggttggttctaccaacwacattttctcrgttgtrgctatgaaccctgcygraaatcctgattttatcttgtatgtaacggttcaacagcctgaacattattcaggtatccarttgggagaatttgccaacccaatcttggagcgggcttcagctatgaaagaatctctcaatcttcaatctccwgcyaaraatttagatmaagtkacgacagaatcttcttatgcaatgcctagcatcaaggatatttcacctggtgagttggcggargccttacgccgaaatattgtgcaaccmatcgttgtaggtactggaacaaagattaaagagacttctgtagaagaaggrammaatcttgcaccaaaccaacaagttctccttttatcggataaggtrgaagaaattccagacatgtatggctggaaaaaagagactgccgagrcctttgctaaatggttggatatygarctggaatttgaaggttcaggttccrtcgttcagaagcargatgttcggactaatacagctatcaaaaacattaaaaaaattaaattaactttaggagac

SEQ ID NO: 3822 - DNA, 436 bp, Streptococcus pneumoniae
  misc_feature (1)..(436): tiling:Spneumo1:WAN0249GU; Cluster includes WAN024E4T R6.I G_2122.2.1.1||||1895020..1895455|+|436 bp|Between spr1915 (+ strand) and spr1916 (malP) (- strand)|S.pneumoniae|R6|N C_003098.1|IG|110
gtcgactcaccctatctcctgatggcgaaaagaatttagcaatggtgcaagttgttctgaactcgagaaaaaacatgccgaaatcgaagaaaagcgtgcagaacttgaagcgaagaagcaagaaatgttgaakcgcttggataaatagaatttagaaaacagaaaaaactaaaaagaatgtagggtttatttccctacattcttaaaataacttagtacataaatgacaatgctgccactgccgtcaatattgcaaaaactattttccaaatttttttattttttccaaaaatcttatcaggtaacaagcttattacaagaaaggtaataaacaacaccaatttaagtgtgtatatcataaaaacaccttctttcctacaattatattataatactttatgtaagcgaatayaakagatatgaggtaaccaactac

SEQ ID NO: 3823 - DNA, 81 bp, Streptococcus pneumoniae
  misc_feature (1)..(81): tiling:Spneumo1:WAN0249XR; Cluster includes WAN024EB9 R6.I G_1484||||1422080..1422160|+|81 bp|Between () (- strand) a nd spr1438 (entB) (- strand)|S.pneumoniae|R6|NC_003098.1|I G|110
gtcgattactttactagtatatcaacttttgggatgcttgtcaacactttttttcaaattttttcattttcaccaaccagg

SEQ ID NO: 3824 - DNA, 117 bp, Streptococcus pneumoniae
  misc_feature (1)..(117): tiling:Spneumo1:WAN024AIB; Cluster includes WAN024ELF R6.I G_667||||651679..651794|+|116 bp|Between spr0643 (+ strand ) and C (transposase) (- strand)|S.pneumoniae|R6|NC_003098 .1|IG|110
gtcgcgtagtcatttgacgttaaccttagctatttttaaaatagaaattgagaatatgaactattgaaagatcggagcaatccggtctttttatataaagaaattgcatataatact

SEQ ID NO: 3825 - DNA, 105 bp, Streptococcus pneumoniae
  misc_feature (1)..(105): tiling:Spneumo1:WAN0249OQ; Cluster includes WAN024E9A-rc R 6.IG_1630.2||||1566345..1566449|-|105 bp|Between spr1584 ( - strand) and spr1585 (- strand)|S.pneumoniae|R6|NC_003098 .1|IG-rc|110
gtctaytgwaargtaggctttttctcaagtctctactaaactactatttctaaacaacaagtttattttkgyaaatgtgttccaaattccycaaaacatattcta

SEQ ID NO: 3826 - DNA, 77 bp, Streptococcus pneumoniae
  misc_feature (1)..(77): tiling:Spneumo1:WAN0249JZ; Cluster includes WAN024E6L R6.I G_1907||||1761514..1761590|+|77 bp|Between spr1789 (acyP) (+ strand) and spr1790 (+ strand)|S.pneumoniae|R6|NC_00309 8.1|IG|110
gtctccagaactattgtatattttgtaaaaaaacagtagaatagaaaggtataatttttaaagaaggaataaaaaca

SEQ ID NO: 3827 - DNA, 103 bp, Streptococcus pneumoniae
  misc_feature (1)..(103): tiling:Spneumo1:WAN024AJD; Cluster includes WAN024EM2-rc R 6.IG_626||||615268..615370|-|103 bp|Between spr0602 (+ str and) and spr0603 (murD) (+ strand)|S.pneumoniae|R6|NC_0030 98.1|IG-rc|110
gtctcgaactccatttctactcctactattttaccatttttatggaaataaaaaagccacaaagtgtgtttgtgactctttcttctaactgaatcttaccata

SEQ ID NO: 3828 - DNA, 69 bp, Streptococcus pneumoniae
  misc_feature (1)..(69): tiling:Spneumo1:WAN024AQA; Cluster includes WAN024EPN-rc R 6.IG_352||||336209..336265|-|57 bp|Between spr0331 (+ stra nd) and spr0332 (+ strand)|S.pneumoniae|R6|NC_003098.1|IG- rc|110
gtctctctccattctcgcttgctagtattattatataaaaaaaggcaaacaaaaatcaaggtcaaagct

SEQ ID NO: 3829 - DNA, 64 bp, Streptococcus pneumoniae
  misc_feature (1)..(64): tiling:Spneumo1:WAN0249ZB; Cluster includes WAN024EC7 R6.I G_1392.1||||1332449..1332512|+|64 bp|Between spr1348 (- st rand) and B (transposase) (- strand)|S.pneumoniae|R6|NC_00 3098.1|IG|110
gtcttcattctgaacgatttcggctacacggtgaatggtttgattgtataccgtcttctcttaa

SEQ ID NO: 3830 - DNA, 49 bp, Streptococcus pneumoniae
  misc_feature (1)..(49): tiling:Spneumo1:WAN024AFO; Cluster includes WAN024EJX R6.I G_787||||759365..759413|+|49 bp|Between spr0763 (+ strand) and () (+ strand)|S.pneumoniae|R6|NC_003098.1|IG|110
gtcttgtttttttgaaattttcatgatataatagtccatgttgattgta

SEQ ID NO: 3831 - DNA, 884 bp, Streptococcus pneumoniae
  misc_feature (1)..(884): tiling:Spneumo1:WAN024FSJ; Cluster includes WAN0243UI spr1 257|pstS|15903300|NP_358850.1|1255628..1256506|-|879 bp|AB C transporter substrate-binding protein - phosphate transp ort|S.pneumoniae|R6|NC_003098.1|ORF|211
gtgaaaaaaagaaaaaagcttgctctgtctcttatcgctttttggctgacggcttgtttagtaggctgtgctagctggattgatcgtggagaatccataacggctgttggctcaactgccttgcaacccttggttgaagtagcggcagatgaatttggcacgatycatgttggaaaaacggtcaatgtccaagggggaggttctggtacaggcttgtcccaggttcagtctggggcagttgatataggaaactcagatgtatttgctgaggaaaaagacggaattgatgcttctgctcttgttgaccacaaggtcgcggtagctggcttggctctgattgtcaataaggaggttgatgttgataacctaacgacagagcawcttcgtcaaatcttcataggtgaggtaaccaattggaaagagkttggtggtaaggacttacccatctctgttatcaatcgggcagccggctctggytctcgtgctacctttgatactgtcattatggaaggtcagtctgccatgcaaagtcaggagcaggattcaaatggagcggtaaaatcaatcgtatcaaaaagtccaggagctatctcttwwttatcycttacctatatagatgattcggtcaaaagcatgaagttgaatggctatgacttaagtccagaaaatataagtagcaataattggcccttgtggtcttatgagcatatgtatacattggggcagcccaatgagttggctgcagaatttctcaattttgttctctcggatgagacccaagaagggattgtcaaaggattgaagtatattccgattaaggaaatgaaggttgaaaaagatgctgccggaactgtgacagtgttggaagggagacaataactaat

SEQ ID NO: 3832 - DNA, 495 bp, Streptococcus pneumoniae
  misc_feature (1)..(495): tiling:Spneumo1:WAN024EYG; Cluster includes WAN0243QJ spr1 400||15903443|NP_358993.1|1378670..1379158|-|489 bp|Conser ved hypothetical protein|S.pneumoniae|R6|NC_003098.1|ORF|2 11
gtgaaaaaaagacaaaacaaagcaaaaaataatctactgtggcagtatggtctagggatgacgattttgtttgtggttatcagtgsttcctttctgtatatggtttctcttagcatgaaaccctatcaaacagctaaaagtgaaggagaaaaattagctcagcagtatgcaggattagagmaggyygatcaggttgatttatacaatggcttggaatcttattacagcgttcttggtcgtaayaaacagcaagaagcrcttgctgtyctgattggwaaagatgaycataagatttacgtttatcagctaaatcagggtrtttcacaagaaaaagyagaaacggtttctaaggaaaagggagctggcgarattgacaagatwayctttggycgttatcaagayaagccaatctgggwagtyaagtcaggatctgatttttatctagtagattttgaaacaggagcattggtcaayaaggagggcctaykaactaat

SEQ ID NO: 3833 - DNA, 1245 bp, Streptococcus pneumoniae
  misc_feature (1)..(1245): tiling:Spneumo1:WAN024FW3; Cluster includes WAN023PV6 pne1 0_15||||11978..13222|+|1245 bp|Type 7C capsule operon, Gli mmer 2.02 orf prediction|S.pneumoniae||WAN01UCKC|ORF|000
gtgaaaaaaagtagtrygwwamawagtagtacgttacatataggrcttattctttttttgattgtactgagtaaaaacttctttaatttagtaccaaatatagcactgttttctgattttaatcttatgattattataatcatcatgacagttgttaatattaaatactataatcgctcaaccaaatatcagtatcgttggtatattattttcacattgatatttgtgttgtatagtgcaattaatgagaaactattatatggscaaccatttctattaggtttacttcctcaaagacaattttttttatgtttaatgacttatttccctttaagaaagtatttccaagaacaaaatattagtttaaaaaaactttatgttggtattatgaatttgggatctatttcatcgttaatttacattttacaaaagatagtaatattatatgggggaacacaatttgttaacgtaatrtatagttttgccggatattttagcgggtatagattgtatgtaggtagttctttaattattttagcaacattaatttctaccgcttattttttagaaacattaaaactcaagtatctgtgycaccttatattaggttggtttactcaaatttggataacgcaaggtcgaatagagatgattgttttgctaatttcaacgatagtttgcataatagtycaaggaagattaactagaaagaaaataatttattggttgctgacaattttgggactgtggatgattactctaacacctatttttgaaaatattgttggagctattttaaaagtagatggagcaggtagaggaagtgattcattgactattcgagcaattggacgacagttatattgggawcaattgaatgagacaacttcaaaacttctttttggaacaggataycctaattataattatgctttagcctttcaacgtacaggtttttcaagcaatatttttttaacagacaatggttttatgacayatatatatatatwtggtattgtgggttcctcaattatgggattattatttttaaaatatcttaaaaattcaataaagtatgctagacaatctgcagatatgattccgttgatgtatattatttctttactaattgtagcctataatattattctttggtattggaatgcggacggtacttttatattagtaatcatgatttgcgcattggagcatggagaacaattattacatcagaggaatggagtg

SEQ ID NO: 3834 - DNA, 1421 bp, Streptococcus pneumoniae
  misc_feature (1)..(1421): tiling:Spneumo1:WAN024G3R; Cluster includes WAN0243ZQ spr1 069|lacG|15903112|NP_358662.1|1067037..1068443|-|1407 bp|P hospho-beta-D-galactosidase|S.pneumoniae|R6|NC_003098.1|OR F|111
gtgaaaaaaatgacaaaaacacttccaaaagactttattttyggtggcgcaacagctgcytatcaagcagaaggtgctacacatactgatggwaaaggaccagtwgcktgggataaatatcttgargataactactggtacactgcmgaaccagcyagtgatttttacaatcgatatccagttgayctcaagctagcagaagagtatggtgtcaatggyattcgaatttctattgcytggtcacgtattttcccgactggttayggycaagtaaatgytaaaggtgttgagttttatcataatttatttgcagagtgtcacaaacgtcatgttgagccytttgtaactcttcatcactttgacacgccagaagctctccactcaaatggagacttcttaaaccgtgaaaatatcgaacattttgtagactacgctgcyttctgttttgaagaatttccagaagtaaactattggacaaccttyaatgaaattggaccaatcggtgatggtcaatatttrgtkggkaaattccctccaggwatycagtacgaccttgccaaagtcttycaatcrcaccacaatatgatggtgtctcatgcaygygckgtaaarytrtayaaagakaaaggmtataaaggggaaattggtgttgttcacgccctgccwactaaatatcctctagatcmtgaaaatccagcagatgttcgtgcagcwgagttggaagatatyatycacaayaaattyatyttrgaygcaacytatctrggtcrctaytcwgmwraracymtggmaggkgtmrassmtatcttrkywgycaatggtggtagyttggatcttcgtgaagaagattttacarcattagaagctgcaaaagacttgaatgatttcctaggaatcaactactatatgagtgactggatggaagcctttgatggagaaactgaaattatccataatggtaaaggtraaaaaggaagctctaartaycaaatcaaaggtrttggtcgtcgtgtagctcctgactatgtaycacgcacggattgggattggattatctaccctcaaggtttgtatgaccaaatcatgcgygtgaagaaagattatcctaactayaagaaratytacatcactgaaaatggtctyggmtataaagatgagttcgtygataacactgtttacgatgatggwcgtattgattacgtgaarcaacacttggagrtyttrtctgatgcgattgcagatggagctaatgtaaaaggttacttcatttggtcattaatggatgtcttctcatggtcaaacggttatgagaaacgttatggtctcttctacgtagattttgaaactcaagaacgttatcctaagaaatcagctcactggtacaagaaagtagcggaaactcagattatagactarctaat

SEQ ID NO: 3835 - DNA, 1528 bp, Streptococcus pneumoniae
  misc_feature (1)..(1528): tiling:Spneumo1:WAN024DVC; Cluster includes WAN0243AM spr1 975|adcA|15904016|NP_359566.1|1966098..1967603|-|1506 bp|A BC transporter substrate-binding protein - Zinc (Zn2+) tra nsport|S.pneumoniae|R6|NC_003098.1|ORF|330
gtgaaaaaaattagcttattactagccagtctatgtgccttgtttttagtggcttgttccaatcaaaaacaggyagatggtaaactcaatatcgtgacaaccttttaccctgtctatgartttaccaagcaagtygcaggagatacggctaatgtagaactcctaatcggtgctgggacagaacctcatgaatacgaaccatctgccaaggcagttgccaaaatccaagatgcagataccttcgtttatgaaaatgaaaacatggaaacatgggtacctaaattgctagataccttggataagaaaaaagtgaaaaccatcaaggcgacaggcgatatgttgctcttgccaggtggcgaggaagaagagggagaccatgaccatggagaagaaggtcatcaccatgagtttgayccccatgtttggttatcaccagttcgtgccattaaactagtagagcacatycgygacassttgtcagcagattatcctgataaaaaagagacctttgagaagaatgcagctgcctatatcgraaaattgcaakccttggataaggcttacgcagaaggyttgtctcaagcaaaasaaaagagctttgtgactcaacacgcagcctttaactatcttgccttggactatggactcwaacaagtcgcaatctcaggmctttctccagatgcagagccatcagctgctcgcttggcagaattgacagagtatgtcaagaaaaataaaatcgcctatatctattttgaagaaaatgcctcacaagcccttgctaacacactttcaaaagaagcaggtgtcaaaactgatgtcctcaatcctttagaaagtctgacagaagaggacaccaaggmtggagaaaactacatttccgtgatggagaaaaacctcaaggctttgaaacaaacaacagaccaagaagkcccagcaatygaacctgaaaaggcagaggataccaagacagtccaaaatggttacttcgaggatgcagctgtcaaggaccgcaccttgagtgactatgcaggtaactggcaatcagtttaycctttccttgaagacggcacgtttgaccaagtctttgactacaaggctaagttgactggtaagatgacccaggctgagtacaaggcttactatacaaaaggctatcakacagatgtgactaagattaacattactgataatactatggaatttgttcaasgtggacaaagcaagaaatayacttacaagtatgtcggtaagaaaattttgacttacaagaaaggcaatygtggcgtgcgtttcctctttgaagccacagatgctgacgctggacaattcaartatgttcagtttagtgaccacaatrtygccccagttaaggcagaacatttccatatyttytttggaggyacaagccaagaarcyytmtttgaagaaatggayaaytggccaacctactacccagataacctatckgsccaagaaatcgcycaagaaatgttggcgcatykatgaswaatcgactagttcataa

SEQ ID NO: 3836 - DNA, 1056 bp, Streptococcus pneumoniae
  misc_feature (1)..(1056): tiling:Spneumo1:WAN024FLZ; Cluster includes WAN023P0P pne6 2_17||||14454..15509|+|1056 bp|Type 33C capsule operon, Gl immer 2.02 orf prediction|S.pneumoniae||WAN01UCG7|ORF|000
gtgaaaaagataaaagaatatgatattttaaaaattatggctattattttagttgtgttaagtcatagtgcgtattataaaatatcgagcaattatggtggaatggattatcaacaatatttaaatagtcattcagcatttactctatataagatacttggtaaatttatggaaattatctattattttcatatgccattatttatggctatatcgggtgtatttttctctattcaaataaaaaaagatcgatggaataagattgagaaattattaactagtaagtttaaaagattaatattgccattttttgtttttactttattatatagtttgccattaaaatatatatcaaactactacaatggtgtttcrttttggagagctataactggtcaattcttgttattaggaaattctcacttatggtatttgtatgcattatttattatctttataattagtttttattgtttaagaagagatacttctatatttgtatacttgtccttatatattatacatgtactgagtttcttgattcatataacgttagtaagtgcaccattgcagtttcttttttggttttccatgggatttttgttcgaatctaaaagaaggaagtataatatttttttggaaaatcacaaatggattagccttttattctttgtgttatttatatttttggtggttttaaattttctatttaaaagcgattttaaagtattgagtcgattttttgttgacttattagctattttaggatcacttatttgttacaatatttcgtactttttaagtaataaaactaaaattttagatagtaaactacttaatctcattttgattaatggtttagggatatatattttttctgatactttaaactattttatattaagtatttcttattttgtaagtgatagatttatgtttacttcatttggtataattattatatttttaattagatttgttttcactttatttttgggattagtctttacattgctatttaaaaaagtatttccaaaatattcttggytagttaac

SEQ ID NO: 3837 - DNA, 129 bp, Streptococcus pneumoniae
  misc_feature (1)..(129): tiling:Spneumo1:WAN024DRH; Cluster includes WAN02432T SP02 23||15900159|NP_344763.1|199909..200031|-|123 bp|hypotheti cal protein|S.pneumoniae|TIGR4|NC_003028.1|ORF|121
gtgaaaaagataaactttcctagaaactttagtttcttcgtcaagtttcctatttttacttggagttttgacrcycttgatatcttaaattaccaagatgcttttgttacaccaggaattykaactaat

SEQ ID NO: 3838 - DNA, 100 bp, Streptococcus pneumoniae
  misc_feature (1)..(100): tiling:Spneumo1:WAN0249Y2; Cluster includes WAN024EBG-rc R 6.IG_1458.1||||1401905..1402004|-|100 bp|Between spr1414 ( dapB) (- strand) and spr1415 (- strand)|S.pneumoniae|R6|NC _003098.1|IG-rc|110
gtgaaaaagatagttcttccaagaagtagacacttcttgattggaattcctattttcactttgtgttcttacggactttgtatcttagacaggagtagag

SEQ ID NO: 3839 - DNA, 713 bp, Streptococcus pneumoniae
  misc_feature (1)..(713): tiling:Spneumo1:WAN024FQ7; Cluster includes WAN0243TA spr1 301||15903344|NP_358894.1|1294301..1295008|+|708 bp|Conser ved hypothetical protein|S.pneumoniae|R6|NC_003098.1|ORF|1 11
gtgaaaaatatgctacctgcttatatraaaatccatgatcagataaaaaaggatattgacgagyaccgttgggctattggtgagaggcttcccagtgaaagagatttagctgagcagtttgcggtcagtcgcatgaccctccgccaagccgtatctctattagtcgaagaaggcgtcttagagcgccgtgtmggaagcggcacctttgtttccagtactcgagtacaagaaaagatgcgagggacawccagttttactgaaattgtcaaatcccaaggtaaagkwccctctagccagctcatktcctaswaaraawccattcccaatgagcaagaagttgccaagctaggaatttttccracggacaatattatccgaatggagcgggtccgctatgccgaccaagttccccwagtttatgaagttgcttctattcctgaaaaattcattaaggactttaaaaaagaagaaatcaccagtcatttcttccaaaccttgcaaaaacatggctatcgtatcggyaaatcycaacagaccatctatgctcgccttgctaaagaraagattgcccactatttggaagttgaaaaaggacatgctattcttggattgacmcagrtttcctacctagaagatggtactgcttttgaatacgtaaaaagtcaatatgtaggcgaacgctttgaattttatcttgaaaataattarctaat

SEQ ID NO: 3840 - DNA, 336 bp, Streptococcus pneumoniae
  misc_feature (1)..(336): tiling:Spneumo1:WAN024C9G; Cluster includes WAN023QZG cont ig_1394_5||||4365..4700|-|336 bp|Glimmer 2.02 orf predicti on|S.pneumoniae|670|WAN01UDYH|ORF|000
gtgaaaaattacggagaagcttttcgatattttagaaaattaaacggatattctttagagtatgctgcagctgattttatatcaaaatctcaactttctagatttgaaaggggagaaaatgaaatttctctttcaacattttttgaattattatcaaatatcaatgtttcgatagagaatttttgtaatcacttagaatattataaaagatcggagcgtgatgattttttggttaatttatctccaaatttttatagtttgaatattaaaggattggaggtaataaaaaataagcaacaaaaactttttgagaagagtgggaaaaaactcataaaa

SEQ ID NO: 3841 - DNA, 633 bp, Streptococcus pneumoniae
  misc_feature (1)..(633): tiling:Spneumo1:WAN024BHX; Cluster includes WAN023PQ1 pne1 9_8||||4772..5404|+|633 bp|Type 10C capsule operon, Glimme r 2.02 orf prediction|S.pneumoniae||WAN01UCJ7|ORF|000
gtgaaaagaaatagcattatctatattagcttaaaacgagttatggatgttcttattggcttgtttggaacaatattcacagtcttgccctgttctctaataatttatattatttataaaacaaaaggttataaagggagtatattttttacacaatacagagtggggttgggagrgaaaaaatttaaaattattaaatttagatcaatggttgaaaatgctgaagaagttttgaccgcaaataaagcactctatgaaaaatatataaataacagttataaattacctccaaatgaggatcctcgtcttaccaacatcggagattttataagaaaaacgagtattgatgaaattcctcaatttataaacttgttgtttggagatatgagtcttattggacctagaccgattttggagaatgagttaaaggagtactctaaggaagaacagccagttttactatctgtacgaccaggtattacaggggtgtggcaagtttctggtaggagcgaggtatattatcctgaacgctgtgaaatggagctgtattaccctcggaaccaatcctttttattagatgtcaaaatcttctttttgacaataaaaaaagttctgtctggagaaggggctcat

SEQ ID NO: 3842 - DNA, 252 bp, Streptococcus pneumoniae
  misc_feature (1)..(252): tiling:Spneumo1:WAN024DWD; Cluster includes WAN023KE1 3144 28_3609||||1938429..1938680|-|252 bp|EGAD orf prediction|S .pneumoniae|R6|NC_003098.1|ORF|110
gtgaaaagctttctgacggagcgtcttgataagaagggcagtgtagtcagggtaatcgctgtarcggaagagataaggaatgtggaaactaggctggttggaaatggctatttgtccaaaaggagcagtagccatctcgctcatttcgtgaatttcgtaaccatagcctgttgtttcaaagaggggagcatcttgacaggctttcaaaagatagttgctaaaggtttcttttccacccatcagttggattaa

SEQ ID NO: 3843 - DNA, 1440 bp, Streptococcus pneumoniae
  misc_feature (1)..(1440): tiling:Spneumo1:WAN024FLP; Cluster includes WAN023OVZ pne6 9_16||||11434..12873|+|1440 bp|Type 31(1) capsule operon, Glimmer 2.02 orf prediction|S.pneumoniae||WAN01UCDA|ORF|00 0
gtgaaaaggaaatccattgcccgaaattatttacttaatttgataaaaacgaccttgtctattctatttcccctgatatcatacccatatgtgtcgcgtattttatctgtggatgggctgggtgcaatcaatttttcarcctcgtttgttaattatttcgtactaattgcaatctttggaattaatgtctacgctgttagagaaggtgcyaaatatcgagatgataaaaagttacttgggaagtttgtaacggagatgytacttgttagtatttgcayggcaatgatttcattctctttattaactrtttccttactmytacctgctctatcagaatatagaagtcttattctaattttttcaattaccattmtatttaatgttgtgggratggagtggttttttcaattgatggaagactatcaatatataacacttcgtgcaattatatttcaaattytatctttgmtatytttattcatatttgtcaaarayaggaatgayatytatgtgtacgctctaattacagttgcrgcwaatgcaggttctcaaatrctgaatttatttagrcttagaaaagaagttgaaatatttagatataaagactataatattagamattattttaaaccgatgtttctgatatttttaaccttattrtctatgaatatrtatagatatttagatgttacttttctgggcttctttaaaaatgatcraagtgtgggctactatagyttagctacaaaaataacaartgytataatttcratgktatcttctgttacagttattttgacacctcgtctagcataycattataagmarraggagtttgataaattctataaaattgcttatagytcctttgatttkattttattacttgctataccagttgttataggkgtattkagttttagttctattttagtrgattttttgggwggragtrcttttrtttcttctgtgytaacrgtggagatattaagtttaacaattctattctctaatttgaatgctttattaattacacctattttaacrgttatgaatcrtgagaaagcggttttaaaaatttttattatmgcattgattttcaatgttattrcaaacatgttmcttattccagtaatggattttaatggttcagctttggttacagttttgacagaaggaatyatttgcatattatctttaattagtataaaaartgtrtttratgttaraagrytatttaagaatctttttcaatatctrgtagctagtatmtttataattgttrtcaagattgttatttctcagtacgtttcatcaaattatattatttttatttcaactgctttactaagcgcaattttatatttcyttactttgatattattgagaaatgagttagtayyacaattaataatagaagtyagaaagaaaatatataga

SEQ ID NO: 3844 - DNA, 809 bp, Streptococcus pneumoniae
  misc_feature (1)..(809): tiling:Spneumo1:WAN024ETS; Cluster includes WAN0244BX spr0 629|thiM|15902673|NP_358223.1|637592..638395|+|804 bp|Hydr oxyethylthiazole kinase|S.pneumoniae|R6|NC_003098.1|ORF|11 1
gtgaaaaggaaggatttcaatatgacaagtttaaaattattaaaaraaaaagcaccattggtcatttgtataaccaatgatgtagtaaaaaatttcacagcaaatggattagtagcactgggcgcctcaccagccatgagtgagtttccagcagatttagaggatttgttaaagtatgctggtggtttattaataaacataggaacattgacagatgaaaattggaaattataccaagctgctctgaaaattgcrgagaaatataatgtcccagyagttttagatcctgtagcctgtggagcaggagaatatagaaaaaaagtagcagatgatytaatcaacaattayaaactagcwgcgattagrggraatgctggmgagattgcctctttagtaggaatagatgtggcatctaaaggagtagatagtgcgggmgtagataatattgacgarattgctctagcagcaaatgagaagttcaatattccaatagtagtaacaggtgaagtggatgcyattgckgtwaatggagaagtggtaaygattcataatggtagtgcyatgatgccraaagtyattggracwggatgyttattaggrgcwgtrgtagcaagytttatcggactrgaaaaaggtcaagaattraaatcattaraaacagcartgttrgtttacaatatcgctggagaaatrgcagaaaaacgtccaaatggacatcttcctgggacatttaaagttgaatttataaatgccttatacgagattacagatgaagatgtaaaggaattcaaaagagtgaagtaactaat

SEQ ID NO: 3845 - DNA, 75 bp, Streptococcus pneumoniae
  misc_feature (1)..(75): tiling:Spneumo1:WAN024DNS; Cluster includes WAN023SII NC_0 03098.1_1955||||1526288..1526362|-|75 bp|Glimmer 2.02 orf prediction|S.pneumoniae|R6|NC_003098.1|ORF|110
gtgaaaagtaaatttttactgggtatccgtttgctttataaggagatgagttatggtatttacagcaaaaagctc

SEQ ID NO: 3846 - DNA, 1407 bp, Streptococcus pneumoniae
  misc_feature (1)..(1407): tiling:Spneumo1:WAN024FN5; Cluster includes WAN023P73 pne5 3_22||||12120..13526|+|1407 bp|Type 25F capsule operon, Gl immer 2.02 orf prediction|S.pneumoniae||WAN01UCCQ|ORF|000
gtgaaaatacaaattgataaaatatactatctatttttttggctggtagtttcctttggatatttttttatgatgccaacctttacagaagatttagaaggcgttgtcagtgctagtttagtacaattgttattatttattataggatatgtatatgtatcttatttaaatcgttcttttatctcactgtatagtatctttatgattgtrttttacctttttcaaaatggacaggtattgttatattcacttggagtagagtatgattacttttatgttttaagatatgatgaaaccatcgtactacaatcagttattttttcaacacaatgtcttattgcagcctttatggctggagtcttttctacgaagaaagaggtatcaaaacccctttattcttatatggatcaattagaacgagaaaaactgattactrctggaaagttattttggggtgcgtttgcgatttttgctttaccctttatgatgatgaagyttgttatcaccagtacatctgggtattttgcgatgatacgtttcgttggaagcctacctacaataacagtgttatttgaaaaaatgttcattgcttcaagtgtttttttgrttgtttatttaaaatctgaggaaacttggagcaagtttttaaaagttgttatcttaggttggagtataatggctgctttaacaggagatagaaccgtaggtttagcagggattgttacgttagctttaattcaaacattaattggtaatcgtaaaaaaaagattaagttttctcagtatgccttgttagttggggcagctgttgtagtgatgtatttaatgtcctttgcttttcaatttaggatgcaacaagattctaaagtttcaggactacaaactgcggtagtagaaatgataggaactctagggtttagttttttcccactcgtattaacgattagaattgttccaacttctattaacttttttagaggaaaatcatatattgcagccatcattacaggactaattccatctaattttgattttttacatttaacaaakacattatcagaatggaatgcatatccaacggaattattagatacaatctatcattatggtttcggattagattattctttaattgcggaagcctatattaattttggttcttatggatggatagcgatttttttcctttgttctctaatagcttattttgtaagagatgtggattttaaaagraaggacaacttattctcacaatatgctagcttgattttgctgtattcatggtttacccttccaagaagaaaatcttattttatttttaataattttttttggtatgtattattttttggactagcactcatacttgtctctcgttctattaaacaacgaaaggaatttaaaaaa

SEQ ID NO: 3847 - DNA, 749 bp, Streptococcus pneumoniae
  misc_feature (1)..(749): tiling:Spneumo1:WAN024G8Z; Cluster includes WAN02445X spr0 845|pyrH|15902889|NP_358439.1|843217..843960|+|744 bp|UMP kinase|S.pneumoniae|R6|NC_003098.1|ORF|221
gtgaaaatggcgaatcccaagtataaacgtattttaatcaagttatcaggtgaagcccttgccggtgaacgtggcgtagggattgatatccaaacagttcaaacaatcgcaaaagagattcaagaagttcatagcttaggtatcgaaattgcscttgttatyggtggaggaaatctytggcgtggagamcctgcagcagaagcaggtatggaccgtgttcaggcagattacacwggaatgcttgggactgttatgaatgctcttgtgatggcagattcattgcaacaagttggggttgatacgcgtgtacaaacagctattgcyatgcaacaagtggcagagccttatgtccgtggacgtgcccttcgtcaccttgaaaaaggccgtatcgttatctttggtgctggaattggttcaccwtayttctcgacagatacaacagcggcccttcgtgcagctgaaatcgaagcagatgccatcctcatggctaaaaatggygtcgatggtgtktacaatgccgatcctaagaargayaagacagcygttaagtttgaagaattgacccaccgtgaygttatcaayaaaggtcttcgtatcatggactcaacagcytcaaccctctcaatggacaacgacattgacttggttgtmttcaacatgaaccaaycaggcaacatcaaacgtgtygtatttggtgaaaatatcggaacaacagtttcaaataatatcgaagaaaaggaataactaat

SEQ ID NO: 3848 - DNA, 2114 bp, Streptococcus pneumoniae
  misc_feature (1)..(2114): tiling:Spneumo1:WAN024D2N; Cluster includes WAN0243GA spr1 770|clyB|15903812|NP_359362.1|1737518..1739626|+|2109 bp|A BC transporter ATP-binding/membrane-spanning - hemolysin s ecretion protein|S.pneumoniae|R6|NC_003098.1|ORF|111
gtgaaaattccaatgatatatcaaatggaaaattcagaatgtggattagcatgctgtgccatgatattgaactattttaaatatgagatttctttaaatgaactacgtgaaatctacccatcatccagatctggatattctctcctatctataagtaaagttttaggagattttaatataagttctcatgcttttaaagcttcggtaagagatttaaaaccgctcagtttcccactcatttgcttctgggagagttctcattttattattcttgaaaaaattagtaaaaacaagttttatattttagatcctgcaaaaggcaggcagagaatgtcaataagtgaatttgaaaggcattattcaaatatcattttaacatttaaaaagttagatagctttatgtctcgtaaagataataagaagtcgcctgttttaaagtatttttttaagtataggaataagctagggattttattttttgtaacagcattattgtatgtaatacaatcattagtacctatagctaatagatacataattgacacgaatttcaaggacgattcgtattcgtctagaatgttatttactatattatttatatttactgtttcattctcactaatgtatttattaagacagatatatgttgcatccttaaaatatataatggataaagagattagctatgattttatgaaacatttgatatatttaccttacagtttttatgaaaaacgtactttaggggatatactttttagagctaactctattgtttatataagagaaatactatcaaataattttatagcagctatacttgatttgttaatgattgtggtttatgctgtggttttatttagcttttctaagtacatggtaatctttttaatatcactaagtctagctctatctattgtaatgtatccaatcataaaaatctcaaaaaatttaattgataraaatataaaagaaaaggttaatgttcaaaatattacttccgaagtaatttctaaaaatagtgatattaagctaactggagaagaggaattttggattaacaaatgggataattttaatacaaaacagctcatcataggtcgaaaacttgatatacatttatcaattgttagtagtataacgaatgttttacaaattattctccctgttttgacccttattgtaggtgtaaatataaaaacattcgaacaattgacgttaggacaaattgtagcaataagtacagtctcaccatactttatttctcctataatttctttaagtgataactatatacaattaatgttattaaagggatattttttaagaatagaggatgtgtttaatactaaatccgaattaattccagaaagagtcagtcaagatataaaatttgataaaaaaatagaattaaaagatatttggtataaatatggattatttgatgattatgttttgaaaggaataaatgttactattaaaaaaggagaaactgttgctattgttggagaatcaggttcaggtaagagtacattagctaaaattttattaggtttattagaacctaatattggttcaatagaagttgatggagtagaaaaagaagaaattggtcaaacattgtatagaaagatttttggagcagtgttacaaaattcaaccctaagttatggtaccttaagagagaatttgacatttggacactttgtttcagatgaagaattaatgacaaatctaaattcaattggtcttagcaatgtagttaaatctttacctcttggattagagacaatcatcgctgaagaaggtaataacttttctggagggcagcagcaaatgatacttttagctcgttgtcttttgtcgaaaccttcggtagttgttttggacgaagcaacaagtagtttagataatttatctcaacaaattacaacttcttacttaagtgaaatcggtaccactaagattttaattgcccatcgactagatactatcaagtctgcagataagatcttagtaatgcataatggtgaaattgtagagattgggacccatagagaacttcttgaactaggaggcatttataagcaattgtattcaaataattarctaat

SEQ ID NO: 3849 - DNA, 231 bp, Streptococcus pneumoniae
  misc_feature (1)..(231): tiling:Spneumo1:WAN024C6C; Cluster includes WAN023M5Z 3153 51_549||||281565..281795|-|231 bp|EGAD orf prediction|S.pn eumoniae|R6|NC_003098.1|ORF|110
gtgaaacaaactacttttaaactattaactaagataggattgataaataatttcaaactcttactagcaatcatacgatattcaagctcrcgtgcttttttccttcctgcttatttcttagaactgaagaacccggatcggtatataaattatccggatcaacatagtcataagaytcataacagttgcgcttcattaagtcatccccagagcaagagcttcatctcgtaa

SEQ ID NO: 3850 - DNA, 318 bp, Streptococcus pneumoniae
  misc_feature (1)..(318): tiling:Spneumo1:WAN024B59; Cluster includes WAN023LIC 3148 56_1846b||||991277..991594|+|318 bp|EGAD orf prediction|S. pneumoniae|R6|NC_003098.1|ORF|200
gtgaaacagtctgggagactgtttcagcctgagcctagaaatttgaaagcgaagctgtttagccaagccatagtaagggctaaacatatccatagtaatgattttgacgcgacatcggacggctctatcgtagcgaagaaagtgatttcgaatgatagcttgtgttcttccctcaagaacagtgatgatattgagmttgtyaaaatcttgcgcaataaagctcatctccatctcccgattgaaacagtcactmcccggactgtttcaacgtcccargacataatctyaggaagacwmgaaaaatyatgyttaaagtga

SEQ ID NO: 3851 - DNA, 2175 bp, Streptococcus pneumoniae
  misc_feature (1)..(2175): tiling:Spneumo1:WAN024CF9; Cluster includes WAN023RW8 cont ig_1609_35||||22599..24773|-|2175 bp|Glimmer 2.02 orf pred iction|S.pneumoniae|670|WAN01UDCD|ORF|001
gtgaaaccatcaatagtaaacagaataaaatcaaactggacgctgaaacgtctaggtaaagtggcaatgacagtggctttcacacttgtgattgccatttttcttttagccatgctgggaacggtggttcaagctgcgggcttggtagatgatacggtcaatgtggcaaatgaatacagccgatacccacttgaaaactatcaactggatttttatgtggataatagctggggctggcttccgtggaactggtcggacgggattggaaaacaggtcatgtatggactatatgccattaccaattttatttggacaatcagtttgtatgtttccaatgcgacaggttacttagtacaggaagcctattccttagacttcatttccgctacagcagattccattggtaagaatatgcagaccttagctggtgtgagtgcaaacgrattttcaacagagggtttctatgttggattcctcttactcttgattttggttcttggggtttatgttgcctatacgggactgataaagagagaaaccacaaaggcaattcatgccattatgaattttgtgctggtgtttatcctatcggcttcctttattgcctacgctcccgactacattaaaaaaatcaatgacttttcatcagacatcagtaatgccagtttatcacttggcacgaagattgtcatgccccattccgatagtcaaggcaaggacagcgtggacttaatcagagatagcctgttttccatacaggttcagcaaccgtggctactgcttcaatacaacagttcagacattgaaagtatcggtattgaccgtgtggaaagcctgctctccaccagcccagattccaacaatggcgaagacagaraaaaaattgttgcggaagaaattgaagacagaagcaataccaatctaaccattacaaagaccattaaccgtttaggtacagtcttcttcctatttgtcttcaatattgggatttccatatttgtattcctattaacaggaatcatgattttctcgcaggtactttttatcatctatgctatgtttctgcctgtgagctttattttaagcatgattccatcatttgatggtatgtcaaaacgagccataacaaagctctttaataccattttgacacgagctggaatcacattgattattacgacagcatttagtatttcaaccatgctctataccttatcggctggttatccgttctttttgattgcttttctacagattgtgacctttgcaggaatctacttcaagctgggcgatttaatgagtatgttttctctacagagtaacgattctcaaagtgtgggaagtcgtgtgatgagaaaacctcgtatgcttatgcacgctcacatgcaccgtctacagcggaaacttggacgttccatgactactctaggggctgggtctgccattgttacaggtaaaaaaggacagtcgggttcggggagttctgcaaggacacaagcagatcactcccgaccagacggaaaggaaaaatcaacacttggaaaacgtatcggtcaaaccatcggtacagtagctgataccaaagacagaatggtagacactgctagtggtttgaaagaacaggttaaagatttgccgaccaatgcaagatatgcagtatatcaaggaaaatccaaagtaaaagagaatgtccgtgatttaaccagtagtatttctcaaaccaaagcggacagagccagtggacgcaaggaacagcaggaacaaaggcgaaaaaccattgcgaagcgtcgctctgaaatgraacaggtcaaacagaaaaaacagcctgcttcttctgttcatgaaagaccgactacaagacaagaacaatatcatgatgaacagacctcaaaacagtctaatattcagacttcatataaggaatctcaacaagccaaacaagagcgtccagcagttaagtccgatttttcaagtccaaaagtggaacgccaaggcaataccgttcaagaaaaaaccgttcaaaagccagcaacttcaaccactacagcagatagaacttcacaacgtccaatcacaaaagaacgtccgtctactgttcaaagagtaccactacaaaatacaagaagtagaccaccaatcaaaaccgccaccattaagaaagtcggtaagaaacca

SEQ ID NO: 3852 - DNA, 249 bp, Streptococcus pneumoniae
  misc_feature (1)..(249): tiling:Spneumo1:WAN024CVQ; Cluster includes WAN023K2J 8283 7_448||||252142..252390|+|249 bp|EGAD orf prediction|S.pne umoniae|TIGR4|WAN01UC25|ORF|010
gtgaaacggatatttttaaatagattactgctggtcatattgccaaggatagctccacaagacatgatgatggagagcagggcgaggagttgcccaatgctcagttgtgctagtgtctgttggatgaagcggagggcaatcagccgaggggacacatccaagatggcaatcatactggtcgtcagaaacagtagtatgacggtatcttttaacctcaggagcacagccagcgactgtttaagatgttga

SEQ ID NO: 3853 - DNA, 140 bp, Streptococcus pneumoniae
  misc_feature (1)..(140): tiling:Spneumo1:WAN024D2C; Cluster includes WAN0243F9 spr1 807|rpmH|15903849|NP_359399.1|1778068..1778202|-|135 bp|50 S Ribosomal protein L34|S.pneumoniae|R6|NC_003098.1|ORF|12 1
gtgaaacgtacttatcaaccaagtaaacttcgtcgtgcgcgcaaacacggattccgtaaccgtatgtcaactaaaaatggtcgtcgcgtattggcagctcgtcgtcgtaaaggacgcaaagttttggctgcataactaat

SEQ ID NO: 3854 - DNA, 138 bp, Streptococcus pneumoniae
  misc_feature (1)..(138): tiling:Spneumo1:WAN024DNA; Cluster includes WAN0241RG SP20 43||15901864|NP_346468.1|1947743..1947874|-|132 bp|hypothe tical protein|S.pneumoniae|TIGR4|NC_003028.1|ORF|121
gtgaaactaaaaaaatattcaatacaaggagttgggaaagttatttttccagcttctttttctgatgaaattgtccaaaaccttgctatgattggcttttttgaaaaatatggtataatagtagtaattctaactaat

SEQ ID NO: 3855 - DNA, 758 bp, Streptococcus pneumoniae
  misc_feature (1)..(758): tiling:Spneumo1:WAN024FBP; Cluster includes WAN0243IM spr1 686|fecE|15903728|NP_359278.1|1657940..1658692|+|753 bp|AB C transporter ATP-binding protein - ferric iron transport| S.pneumoniae|R6|NC_003098.1|ORF|111
gtgaaactggaaaacattgacaaatccattcaaaaacaggatattttgcaaggcatttcgcttgaagtcagtcctcaaaaactgacagcctttattggtccaaatggtgctggaaaatcgactctcctctccatcatgagcagrctaaccaagaaagatcrgggagttctcagtatcaaaggacgtgaaatcgagagctggaattcgcaagaactggcccaagaactaaccatcctaaaacagaaaatcaattaccaagccaaattgactgttgaagaactggtcagttttggacgttttccctacagccgaggtcgacttagatcagaagactgggaaaaaatccgagaaactctgaaytatttrgaactgaccaacttaaaagaccgctacatcaatagcctgtcaggggggcaactccagcgcgtctttatcgctatggtactggcccaggatacggactttatcttgctggacgaaccactcaayaatctcgatatcaagcaaagcgtcagcatgatgcarattcttcgacgactggtggaggaactcggcaagaccattatcatcgtcctccacgatatcaacatrgccagtcagtaygcagatgaaattgtcgccttcaaggacggycaggtctttagcaagggaagmaccgatcaaatcatgcaggctgacctgctcagycaactttatgagattcccatcacgctagctgatatcaatgacaaaaagatctgtatctatagctarctaat

SEQ ID NO: 3856 - DNA, 353 bp, Streptococcus pneumoniae
  misc_feature (1)..(353): tiling:Spneumo1:WAN024D8C; Cluster includes WAN0243SG spr1 331||15903374|NP_358924.1|1318112..1318519|-|408 bp|Hypoth etical protein|S.pneumoniae|R6|NC_003098.1|ORF|111
gtgaaagaaaggagagccgtggacaacctttatcttgtaaaagacgatagtcaactagctrcatttcgtgattttgtagtaagaaatactgaaaagttgaaagattatcaatcttttttaaagaatgaacttgcagtctgtgatttaccgcaagcygttatttggtcarrttttaatgctgctacacagattattagggaaagygctgttccarcctatacaaataatagacgartggttatgrcgcctgatttagctgtwtggaaagarttgtatttgtatcarttgatggactacgagtgttctsagcaaactcaagcaatagaaagycactatcattctttatctgaaaa

SEQ ID NO: 3857 - DNA, 192 bp, Streptococcus pneumoniae
  misc_feature (1)..(192): tiling:Spneumo1:WAN024DOG; Cluster includes WAN02426Z SP14 55||15901305|NP_345909.1|1372513..1372704|-|192 bp|hypothe tical protein|S.pneumoniae|TIGR4|NC_003028.1|ORF|021
gtgaaagaaatacttatctgtgatataataaaaagaaaaggcttgcataagaaagtagggagaacgaagatacaaagaagacaaaatcgaaatcagggtggtttagcttttcgttttatgaagggcttggtaaactttttaggagttatcgcaagtggagcaataagggatttgtggcgatactcttgctag

SEQ ID NO: 3858 - DNA, 117 bp, Streptococcus pneumoniae
  misc_feature (1)..(117): tiling:Spneumo1:WAN024CGD; Cluster includes WAN02437B SP00 52||15899997|NP_344601.1|56259..56375|+|117 bp|hypothetica l protein|S.pneumoniae|TIGR4|NC_003028.1|ORF|120
gtgaaagaacgattggatgataatccaatcgttcagggaaattggaagaccttgggtttccaatttaggcatgagacacctttggtggctgctgccgtccctcacaagctaaggtga

SEQ ID NO: 3859 - DNA, 297 bp, Streptococcus pneumoniae
  misc_feature (1)..(297): tiling:Spneumo1:WAN024EXY; Cluster includes WAN023KX5 3131 87_2756a||||1466203..1466499|-|297 bp|EGAD orf prediction| S.pneumoniae|R6|NC_003098.1|ORF|110
gtgaaagacaaaggtgtgttctgcaggttttgtgaccacatctgccatatcatcgtggcgagggagaccggagagattatcgacaggagtgtagagccagctggcttcgctctctgcgatatagacaggaggattgccaaacgtctcgcraaccaagtccagactcatgatatggtcataatgggcgtgggtcaagagaatagcacagatcggtttgttgatcttctcgattgtctgacgaatggcttcccaatgactaccaggatcgacgacgatgaggtgcttttcgccttctag

SEQ ID NO: 3860 - DNA, 282 bp, Streptococcus pneumoniae
  misc_feature (1)..(282): tiling:Spneumo1:WAN024C7E; Cluster includes WAN023M7C 3143 84_473||||242293..242574|-|282 bp|EGAD orf prediction|S.pn eumoniae|R6|NC_003098.1|ORF|110
gtgaaagagccccttccagccataatctccgatcgtccatttgacaaagcatcgatagtggcatactgttggaacaaacgaatcggrtccatgcttgacagaatgctgactgcactggtcaaacggattttcttggtattgactgccccagcggccagracaatctctggggctgatactgcaaaatccgcccgatggtgctcrccaatcccatatacrtccaaaccaaccttgtcagccagctcaatctctgccaccaactggcgaatgcgttcagcatga

SEQ ID NO: 3861 - DNA, 647 bp, Streptococcus pneumoniae
  misc_feature (1)..(647): tiling:Spneumo1:WAN024G66; Cluster includes WAN02441O spr0 998||15903042|NP_358592.1|982860..983501|-|642 bp|Conserve d hypothetical protein|S.pneumoniae|R6|NC_003098.1|ORF|221
gtgaaagataaacagtttgctattccaaaagctacagcaaaaagactctctctctactatcgaatttttaagagatttcatgcagaaaagattgaacgtgccaactctaagcaaattgcagaggcyatyggkattgattcagcgaccgtacgtcgtgatttttcctattttggtgaacttggtcgkcgtggttttggctatgatgtcaaaaaaytaatgacattttttgccgatttgctcaatgacaactctattaccaatgtcatgctggttggtattggaaatatgggccatgcccttctccactaccgcttccacgaacgtaacaagatgaagattatcatggcctttgacctagaygaccatcctgaagtcggtacccaaactcctgacgggattcccatttacggratttctcagatcaaggataaaatcaaggatrctgatgtgaagactgctatcctaactgttcccagcgtcaagtcacaagaggttgctaatctcttggttgatgctggtgtgaaaggaattctcagtttttcaccagtccatctgcatttaccaaaagacgtggtcgttcagtatgtcgatttgacaagtgaactccaaaccctcctctacttcatgcgaaaagaggattarctaat

SEQ ID NO: 3862 - DNA, 381 bp, Streptococcus pneumoniae
  misc_feature (1)..(381): tiling:Spneumo1:WAN024DG9; Cluster includes WAN0244CI-3 sp r0608||15902652|NP_358202.1|620916..621929|+|1014 bp|Hypot hetical protein|S.pneumoniae|R6|NC_003098.1|ORF|110
gtgaaagataacaatattagagcgaaaacatttattcgttcagtttgtttttgcttattatcaggaggagtagcttttttatctgctattgggcagttcactgttatagraacacaattaatagtattgttcttgggtattatttttgctatatattatgcttactacaataaaaatattcaaacatcattggaaaatatagtatggcttttttcatcgtttgagattttatttttgcttgttaattttagaacatttattcagttaccagtggatatttttattkgtatgataatatttttaatgctgtggatatttattatgttaggtatagtgtgtcttagttattatataactttattatttrgcaaggaggcttag

SEQ ID NO: 3863 - DNA, 695 bp, Streptococcus pneumoniae
  misc_feature (1)..(695): tiling:Spneumo1:WAN024CPY; Cluster includes WAN0243XM spr1 145|licC|15903188|NP_358738.1|1146838..1147527|-|690 bp|Ho mologous to LicC, which regulates expression of LPS epitop es in H. influenzae|S.pneumoniae|R6|NC_003098.1|ORF|321
gtgaaagccatyatcttagcagcgggattgggaactcgcttgcgtcctatgactgaaaatacccctaaagccttggttcaggttaatcaaaaacctttgattgartaccaaattgagtttctcaaagaaaaaggaatcaatgacatcatcatcatygttggttatcttaaagaacaattcgattayttraaagaraaatacggtgttcgyctcgttttcaatgataaatacgctgactacaataacttttactctctctatcttgtaaaagaagaattggccaacagctatgttattgatgcwgayaaytatctctttaaaaatatgttccgcaatgatttgacwcgttcgacttattttagtgtttatcgtgaagattgtaccaacgaatggttcttggtytatggagatgactacaaggttcaagacattattgttgatagcaaggcaggtcgcatccttagtggtgtatccttctgggatgctccaactgcagaaaagattgtcagctttatcgayaaggcttatgyaagtggygaatttgttgatctctaytgggacaatatggttaaggataatatcaaagagctagatgtctatgttgaagaattagaaggcaatagcatttatgagatcgatagtgtccaagactatcgtaaattagaagaaattcttaaaaacgaaaattaactaat

SEQ ID NO: 3864 - DNA, 404 bp, Streptococcus pneumoniae
  misc_feature (1)..(404): tiling:Spneumo1:WAN024AZZ; Cluster includes WAN02439H spr2 016|transposase G|15904057|NP_359607.1|2009347..2009616|-| 270 bp|Transposase, uncharacterized, truncation|S.pneumoni ae|R6|NC_003098.1|ORF|110
gtgaaagctcctattcctaaagcccctttagcgcataactttggctcagcttctattatcgctcacaccatccatcagaagtttaatctgaaggtacccaattatcgccaagaagaagattgggctaggatgggtttaccaatcacacgtaaggaaatykytaatyggcatatcaagrcgagtcaatactatttggagcccctttataacctcttgcgagagagactattgackcagyccttacttcatgcggatgaaacttcttatagggtgctagagagtgatagtcagctgacttactattggacttttttgtctgggaaagctgagaaacaagggattacgctttaccatcatgtyctaatcgatttgttcatatcttatttcaatccattataactaat

SEQ ID NO: 3865 - DNA, 246 bp, Streptococcus pneumoniae
  misc_feature (1)..(246): tiling:Spneumo1:WAN024FST; Cluster includes WAN023L6Q 3131 89_2327a||||1249198..1249443|-|246 bp|EGAD orf prediction| S.pneumoniae|R6|NC_003098.1|ORF|110
gtgaaagtcaaggctcagttgacggatagaaggcaggcgactacccgtcggaaatcgtycagactcgataccatttttcagataggaaacgacctctttgtacttgctttgtttcttcattccagacctcccttgattttgttacattgtacccttttttttccttcttggcaatgtctagagcgtttctctcgttcacatctaggggcaaatgtggtatacttaggagtaagatttatagaataa

SEQ ID NO: 3866 - DNA, 1248 bp, Streptococcus pneumoniae
  misc_feature (1)..(1248): tiling:Spneumo1:WAN024CKE; Cluster includes WAN0242ZB SP03 56||15900285|NP_344889.1|330527..331768|+|1242 bp|polysacc haride transporter, putative|S.pneumoniae|TIGR4|NC_003028. 1|ORF|010
gtgaaagttgatagaatttcatttataaaaaatacaagttctctctatattctgaatattgttaaattactatttcctttattaacactcccgtatttgacaagggtgctttcgctagacgcgtatggaatggttatttatgttaaagcgttaatagcttatgttcaactggtgattgattttggtttcatgatatcagctacaaaaaatattgtaaatgcttgtactactccctcaaagattggaaggatagttggagatactctagttgaaaaaatatttttatctatcatttcgattctaatttacaccatattgatgtggcaaatcccaataatgagagagaatattcttttttcagttttttatttgttagctacagtgaccaatatttttatctttgactttttatttcgtggaattgaaaagatgcatgcagttgcaattccttatattatttctaaaactatcattacaattttgacatttattgtagtaaaagatgattcttctattttatggattcctatattggaaggaattgggaatttagttgctgcagtagtttcttatagattccttcattattatggaattaaattatcattttcttatctgtctgtttgggttaaagatttaaaggaatcctctatttattttttatccaattttgcaactactatttttggcgtctttacgacagtcatttcgggtttttatttacaaagtcaagagatagccttttgggggatagcaatgcaactgctttcagcagcaaaatcattgtataatcctatagcgaatagtttatatccgcatatgatacgtactaaagatatacaatcggttaagagtattaatcggattatgtttattcctattatctttggagttttgatagttttattcttttcaaatcaaattctttctataattggtggtgaaaaatataccgtttcagcagattttcttaagtacttattacccgcttttgttgctagtttttattctatgatttacggatggcctgtcttaggagctattgataaagtgaaagaaactacaatgacaactatattagcttcgattgtccaaactttgggattaggaatatttatcttgtctgataattttagtttagtaacattagctatttgttcaagtatgtctgaggtggtgttatggattagccgttatctaatttattttaagaaccgttcattatttgttaggagtaagctaactaat

SEQ ID NO: 3867 - DNA, 228 bp, Streptococcus pneumoniae
  misc_feature (1)..(228): tiling:Spneumo1:WAN024GCD; Cluster includes WAN023LR1 3146 88_1337||||708630..708857|-|228 bp|EGAD orf prediction|S.p neumoniae|R6|NC_003098.1|ORF|110
gtgaaagttgtattaaaaaagctagttggaacttctgcaagctccggcttaatcccatcatctctccgagctaagttcagcaagcttgtcgttaaaaaacgcatatttcggacttcttccaaactcgatgcaatgctttcgctcacatccataatggtagcttctggcttacgaaaaagggtctctaagcgattttgcaaaactgcgagtggagttcgtaactcatga

SEQ ID NO: 3868 - DNA, 1281 bp, Streptococcus pneumoniae
  misc_feature (1)..(1281): tiling:Spneumo1:WAN024FYX; Cluster includes WAN0240UK |wzy ||AAK20717.1|||1179 bp|Wzy|S.pneumoniae||AF316642|ORF|000
gtgaaaktkaaatttaaatttaatccaatcgcgatactgtatatattgctagtatacttagagttrgctacagataggcaacatctgtatcctgtaacgtacatgacaaaatattatattggtattttaatyaytgtgttgtttgttttrttattagtaggccgtgggaagcttatttttgttaataaaaaattattatatcttgctaagatattagctataccaacaattgttcttttcctgtactcagtcttactagacgtaatgaacccarttgaatttratggatattttagtagrttatcaagtacgactatttttggtttgttagctatctttcaagctatagttgtttttcaattttttggacaaaaagtagtagattacacttttacagctatctccctcagctacttaaccagtatyattgttgcctttaggcagggaggacttagtcaatttatcttgatrctaacagatgatagtttcaatggttcggtactagaaatgcatgaagttgcacctattacagcyctctttattctgtactatttgtacaaatattttataaaagaaaatagtttttcttcagtatttyrtaatatcttaatagctctcattattctttttttaagccttaaacgaatcgttyttttgagtgtattaattatcataccagtatttttgrtaatttattggtatgataaaaaagtaagyaaactagggaaagaacgaaaaattttaagtttattaaatakcttttccttaatatttataacaggaatattcytttatgtttatagtgtaaaatctgrttttatatatacatttattcaagaacataatattaattcgatggctagaacagatttatggaagggarttgaatcaacctatartttcgcccctatatttatggggagagggatagggtttgtaacaaaatggatggataataattggatgactttgaatatcaatggtcttacagrrwcaayggggmtccataatgatattttgaagtactacattgagataggatttgtaggattatttatttatttttacactcttctttatagaaatgctaaacgtatatttgtaaaaattggtcataaagaatcattyatatattttgtattgataatgtttcagatgctgatatggtttacagataatatttcaayttaccataattttttatggatyctaaatctactrctcttttctttaactaatwcggatrcagaattggaaamtytagawwttaaaaatttttaa

SEQ ID NO: 3869 - DNA, 1050 bp, Streptococcus pneumoniae
  misc_feature (1)..(1050): tiling:Spneumo1:WAN024FPZ; Cluster includes WAN023PPP pne1 9_21||||15316..16365|+|1050 bp|Type 10C capsule operon, Gl immer 2.02 orf prediction|S.pneumoniae||WAN01UCJ7|ORF|000
gtgaaatattatctgaaggattcatttctgaataatgaatacgaaaagaatgcaggaaataaggcacgaaatgacgtggaagctattctaatctcagaggggtataagggattggaactcaaggttgagaattggtataagatgaatttctttaaagctcagcaacacaaatatcgggcaaccaagtctgtgtttgatcagttgggatctggagatgaattgctgattcagttcccgattatccaccatacatttttcatttcgcaactcatcaagcaggctcaaaaaagaggagttaaattctatctgttgatccatgatgttgaaaccgtgcgtcatgtaggaaattcagcagtgaaacttcgtcataaagtgagarattacttccaagagaaggcagctcttacatcagtggatggcattatcgttcataatgatatcatgaaaaatgccttgacaatccaaggcataccatcagataaaatggttagcttggagatttttgactatctgattcctaactttgaggaaaaaaatgctccccaaaaagagggagcgattatcgtcgccggaaatctaattccaacaaaatcaggctatctttataatttgccagaacagccagcttacaacttgtatggagcgggttacgatgaaagtcgtgcattgaaaaacacgacctactttggttcctttatgccagatgacctcccagttgctcttcaaggtagttttggtttggtgtgggatggggatagttcagaaacttgccaaggttctttcggaaattacctacgtattaacaattcgcacaaggcttctctttatttggcttcgggctttcctctggtggtttggaaagagtctgcccttgcgcattttgtgctagataagcagtgtggtatagcggttgcttctctatatgacctccaaaaggcactagacgatttgacagatcaagattacatggaactgtcggctaatgccagacaagtaggagtagcgattcgaagtggagattatctgaaatcggccatttctaaattgaag

SEQ ID NO: 3870 - DNA, 1796 bp, Streptococcus pneumoniae
  misc_feature (1)..(1796): tiling:Spneumo1:WAN024G6N; Cluster includes WAN0243VO spr1 215|ABC-N/P|15903258|NP_358808.1|1210076..1211866|-|1791 b p|ABC transporter ATP-binding/membrane-spanning protein - unknown substrate|S.pneumoniae|R6|NC_003098.1|ORF|221
gtgaaatcaatgcatcccaacatggaaaggaggactagaatgaaacgacaaactgtaaaccagacgctcaaacgtttagycgtagatttagcaagccatcctttcytccttttcctagcctttctaggaactattgcycaagttggcttatcaatttacctacctattctgattgggcaggtcattgaccaagtcctagtggctggttcatcaccagttttttggcagatttttctccagatgctcttggtggtaataggaaatactctggtacaatgggccaatcctctcctctataatcgtctaatcttctcttataccagagatttacgggagcgaatcatccataagctccatcgtttaccgattgcctttgtagataggcaaggtagtggagagatggttagtcgtgtaaccacggacatcgaacagttggcagctggcttgaccatgatttttaaccaatttttcattggtgttttgatgattttggtyagtattctagccatgctccaaattcatctcctcatgactctcttagtcttgctgttgacgccactgtccatggtgatttcacgctttattgccaagaratcctatcatctcttccagaagcaaacagagacgaggggaattcagactcagttgattgaagaatcgcttagycagcagactataatccagtccttcaatgctcaaacagaatttatccaaagattgcgtgaggctcatgacaactactcaggctattctcagtcagccatcttttattcttcaacggtcaatccttcgactcgctttgtaaatgcactcatttatgccctttyagctggagtaggagcttatcgtatcatgatgggttcarccttgaccgtcggtcgtttagtgacttttttgaactatgttcagcaatacaccaagccctttaaygatatttcttcagtgctagctgagttgcaaagtgctctggcttgcgtagagcgtatctatggagtcttagatagccctgaagtggctgaaacaggtaaggaagtcttgacgaccagtgaccaagttaagggagctatttcctttaaacatgtctcttttggctaccatcctgaaaaaattttgattaaggacttgtctatcgatattccagctggtagtaagrtagccatcgttggtccgacaggtgctggaaaatcaactcttatcaatctccttatgcgtttttatcccattagctcgggagatatcttgctggatgggcaatccatttatgattatacacgagyatcattgagacagcagtttggyatggtgcttcaagaaacctggctcacacaagggaccattcatgataatattgcctttggcaatcytgaagccagtcgagagcaagtaattgctgctgccaaagcagctaatgcagactttttcatycaacagttkccacagggatacgataccaagttggaaaatgctggagaatctctctctgtcggccaagctcagctcttgaccatagcccgagtctttctggctattccaaagattcttatcttagacgaggcaacttcttccattgatacacggacagaagtgctggtacaggatgcctttgcaaaactcatgaagggccgcacaagyttcatcattgctcaccgtttgtcaaccattcaggatgcggatttaattcttgtcttagtagatggtgatattgttgaatatggtaaccatcaagaactcatggatagaaagggtaagtattaccaaatgcaaaaagctgcggcttttagttctgaataactaat

SEQ ID NO: 3871 - DNA, 932 bp, Streptococcus pneumoniae
  misc_feature (1)..(932): tiling:Spneumo1:WAN024ETP; Cluster includes WAN0243FQ spr1 790||15903832|NP_359382.1|1761591..1762517|+|927 bp|Conser ved hypothetical protein|S.pneumoniae|R6|NC_003098.1|ORF|1 11
gtgaaatctattaaacgttttgcaytctcrgctatgggagyggctatgttgcttgtcttgactggytgtgtcaatgtcgataaaaccacaggtcagccaacaggatttatttggaatacsatcggagcscctatggctgaagcyatcaagtacttcgctactgataaaggtctaggctttggtgtcgctatcatyatcgtaaccattatcgtrcgcttgattatcttrccacttggtatctaccaatcatggaaggcaacgcttcactctgaaaagatgaacgcyctcaagcaygtccttgagccacaccaaacrcgtctcaaagaagcractactcaagaagaaaaactcgaagcccaacaagcyctctttgcygctcaaaaagagcacggyatcagcatgtttggyggtgtaggatgtttccctmtcctccttcaaatgcctttcttctctgctatctactttgctgcccaacatactgaaggggttgctcaagcaagctacctaggcattcctctaggttctccaagtatgattttggttgcctgtgctggtgtcctttactatcttcaatcgctcctttcacttcacggagtagaagatgaaatgcaaagagaacaaatcaagaaaatgatttacatgagcccactcatgatcgtcgtcttctccctcttctcaccagctagtgtcacactttactgggttgtcggtggtttcatgatgattctccarcartttatcgtcaactatatcgttcgtccaaaacttcgcaaaaaagtccrtgaagaactrgcmaagaacccaycaaaagcaagtgctttctcwamaccaagtggacgaaaagacgttacccctgaacaaccaactgctatyacaagcaagaaaaaacacaaaaatcgcaacgctggaaaacaacgttcgagataactaat

SEQ ID NO: 3872 - DNA, 131 bp, Streptococcus pneumoniae
  misc_feature (1)..(131): tiling:Spneumo1:WAN024AFU; Cluster includes WAN024EK2 R6.I G_781||||754722..754850|+|129 bp|Between spr0757 (parC) (+ strand) and spr0758 (ilvE) (+ strand)|S.pneumoniae|R6|NC_ 003098.1|IG|110
gtgaaatgaagaatcagttctaagagttggtttttattggagraattttctgaaaattacaaaatatacttgctattttagaaaaatagtgtagaatataagaaataggtttttagaataaggagtggaat

SEQ ID NO: 3873 - DNA, 2300 bp, Streptococcus pneumoniae
  misc_feature (1)..(2300): tiling:Spneumo1:WAN024DVU; Cluster includes WAN0243AV spr1 966||15904007|NP_359557.1|1956579..1958873|-|2295 bp|Conse rved hypothetical protein|S.pneumoniae|R6|NC_003098.1|ORF| 222
gtgaaattatggtataagaaagctgcckcaaattggaatgaagccttgccgattgggaacggtcatttaggtggtatgatttatggttcagctacaaaagaatgtattcaactaaacgatgagactatttggtatagaggaaagtcagatagaaataatccagactcactattgcatcttaaaaaaattcgggaatatcttttagatggagaaattcagaaagccgaagaattgataaagttaacartgtttgctaccccaagagatcaaagccactatgaattacttggggaactttrcattgagcatatagatattcagtcttgtgctctttcattgtatgaaagagagctagatttagatacagctatttctaatgttgtgtttgagcctaatagttgtaatttacaaataaaaagagaatattttacgagttttaataagaatattttatgttgccgtatagtgtcatcagttcaaaacacattaaatttaaacattaatttgggtagaaataaacggtttaatgacgaagtatctaaactggattcaagtacaattttaatgtcggcctctgctggaggtagaaaaggtgttcagtttaaagtagtatgtcattctaargttacggatggtgaagtaagtgtattgggagagacaatagttattcggaatgctacagaggtatttctttatctcaaatcaatgacggattattggggaaatatagatatttcttctcttcagggagaatttagtagtattgattactttacagaaaaagatgaacatgtaaaaaaatatcaggagcaatttaatagagttgattttaaactagactatagtaaagrttgtcttagcattccaacgaatctacttcttgaaaacactaaaaagtatagtaactacttgactaacttgttatttcattatggaagatatctgttaatatcgtctagtcaaccgaatggtttacctgccaatcttcaaggaatatggtgtgatgaattaaatccaatttggggttctaaatatacgattaatattaatactcaaatgaattattggatggtaggtccatgtgatttaccagaagtagaatatccattatttgatatgctcgaaagaatgagagaaccgggaagactaaccgctaagaaaatgtatggagctagaggttttacagcacatcataatacggatggttttggcgatacggctccccaatctcatgccatgggggctgcaatttgggtattaactattccatggttatgtactcatatttgggaacactatttatatttccaagatgagcgtattcttacggaacattttgaaatgataaaagaagcatttcttttctttgaagattatttatttgaggtggatggctacttgatgacaggtccaagtgtctcaccggaaaataaatatcgcttaaaaaatggtattgaaggaaatgcttgtctatcatctacaattgataatcaaattctaagatatttttgtgattcatgcattggcattgcaaaacaattaggagacaattcggattttattagtcgtgtgaaggagttaaaaaagaaaytacctaraacaaaaataggtagtaatgggcaaatmcaagaatggytagargattatgaagaagtagagcctggkcatagacacatttcacctctatttgggctttatccttataatgagattgatattcataaaactccggaattagcagaagcagctaaaatcactatcaataggagattatcaaacgctaaytttttatcttcacaggakagggagcaagcgattaataattggttagtaagtggtttgcatgctagtacacaaacaggttggagtgctgcatggctgattcatttttttgcgagactatatcaaggtgaacctgcttataaccagattaatggtttgttaaataatgcgactcttggcaatttatttcttgaccatccaccatttcaaattgatggtaatttaggtttggtgagtggaatttgtgaattattagtacagagccatcataattggttatcactaattccagctttaccttctgcttggtcagaaggagaagtgaaaggtttcagagtaagaggaggatataaggtatcgtttgcttggaaaaatggggatataacattcctaaaattggaaggaggaaacaaagatcaaaaagtaagagtaagaatatatggcaaaaatactgatgtacaaaatattgaattggtatttaattcagaaaaaattattgagttaaatttttarctaat

SEQ ID NO: 3874 - DNA, 1580 bp, Streptococcus pneumoniae
  misc_feature (1)..(1580): tiling:Spneumo1:WAN024FIN; Cluster includes WAN0243PF spr1 440||15903483|NP_359033.1|1423788..1425362|-|1575 bp|Conse rved hypothetical protein|S.pneumoniae|R6|NC_003098.1|ORF| 221
gtgaaatttaatgaattaaacttgtctgctgatttgctrgcagaaattgaaaaagctggttttgtagaagctagtcctatccaagaacaaactattcctttggcccttgaaggcaaggatgttatcggtcaagctcagactggtacaggaaaaactgcagcctttggcttgcctacccttgaaaaaatccgtayagaagaagcgactatycaagcyttggtcatcgctccaactcgtgaactagctgtccaaagtcaagaagaactcttccgctttggtcgtagtaagggagtcaaagtccgttcagtatatggcggatcaagcattgaaaaacaaattaaggctcttaaatctggtgcccatatygtggtgggaactccaggtcgcctcttggacttgattaaacgcaaggccttgaaattacaaracattgaaacccttatccttgacgaagcggatgaaatgcttaacatgggcttccttgaagacatcgaagccattatttcccgtgtacctgagaaccgtcaaactttgcttttctcagcaactatgccagatgccatcaaacgtatcggtgttcagtttatgaaagcccctgaacatgtcarrattgcggctaaggaattgacaacagaattggttgaccagtactatatccgtgttaaggaacaagaaaaatttgacaccatgactcgtctcatggatgtggcacaaccagaactcgctattgtatttggtcgtaccaaacgccgtgtggatgaattgactcgtggtttgaaaattcgtggcttccgtgcagaaggaattcatggcgacctagaccaaaacaaacgtcttcgtgtccttcgtgactttaaaaatggcaatcttgatgttttggttgcgacagacgttgcagcgcgtggtttggatatttcaggtgtgacccatgtctacaactacgatattccacaagatcctgagagttatgttcaccgtatcggtcgtacaggtcgtgctggtaagtcaggtcaatctattacttttgttkctccaaacgaaatgggttaccttcaaatcattgaaaacttgactaagaaacgcatgaaaggtctcaaacctgcaagtgtagaagaatccttccaatcaaaaaaacaggtrgctctcaagaaaatcgaacgtgattttgcagatgaaaccattcgtgccaactttgagaaatttggtaaggatgctcgcaaattggctgctgagtttactccagaagaattggcaatgtatatcttgagtctgacagtccaagayccagatagccttccagaagtggagattgcacgtgaaaaaccactaccgtttaaaccatcaggtaatggtttcggtggtaaagctaagggaggtcgtggaggccgtcgtggggacgaccgtcgagagcgtgatcgycgtggcaatggtcgccgtgatgagttcaaaaaaggaagtcgtggcaacgatcgttttgataaggaaaaacgttaccgtaaggataataaaaaaccacgcaatactttaagcgaaaagcaaacaggctttgttattcgtaacaarggygataaataactaat

SEQ ID NO: 3875 - DNA, 585 bp, Streptococcus pneumoniae
  misc_feature (1)..(585): tiling:Spneumo1:WAN024B5R; Cluster includes WAN023LZT 3143 54_876a||||464920..465285|-|366 bp|EGAD orf prediction|S.p neumoniae|R6|NC_003098.1|ORF|220
gtgaacagttggaatatctactgtatcaccaagagccgcttggacaaagttgaggttgagattgtagaagatagtcgttccttcacgttcaaacttgtcgctagcttccacagaaactactacatacaagtcaccataaggtccaccgttaaagcctgcttcaccttgaccagcgaggcgaatttgttgacctgtttccacaccagcagggattttcacatgtacgctatgagcttgtttctcatgacctgttccatgacaggttgtacatggatatttgatttcttttcctcgaccgtgacagacatcacaggttacttggcgacgcatcataccaagaggagtctgcgtatcgacgttaatgacaccagcgccatgacagcgtccacaagtgactggacttgtccctggcttagcaccagakccattacatgtacgacagccagcttcacgatgatacttaacttccttctcagttccgaagatagcttcttcaaaggtcaaattgacacgatactggagatcatctccttggcgaggagcgtttggattgcgcgaagaaccgcctccgccgaagaaacttga

SEQ ID NO: 3876 - DNA, 701 bp, Streptococcus pneumoniae
  misc_feature (1)..(701): tiling:Spneumo1:WAN024DVX; Cluster includes WAN023KDR 3140 68_3628b||||1950702..1951337|+|636 bp|EGAD orf prediction| S.pneumoniae|R6|NC_003098.1|ORF|220
gtgaacataaccaagaccagcattattaaagctcataccaccaaggaagatggcattgaccataccttcacgcgcttcaatatcatgtccrtttkctacagcacgaggaagatattccttgataagctcaatagcaccaatagacagtttcttggttacatcataagcaccaggtgttaccaaagcttcaacagcrtgagtcagagcatccataccagtagcagcagtcaggcctttaggtttggaaagcatgagttcmgggtcattaacagaratcaagagcaaggctattcttgtcaaccattaccatcttaaccttgcgttcttcatcagtaatcacatagttaatrgtratttctgcwgaagttcctgccgttgtattgatagccacaactggcaagccttttttagcagacttatgaagcccttcataatcctgtggttttccaccatttgtagccatgatagaaatacaactagctgcatcctgtggagaacccccgccaagactgatgataaartcacakccatgttcttgcaaagcagctaccccatctgtgacattyttacaagtagggtttggctctacatcgctaaagatgacatattcgattccttctgtatccagtggttttaaagtcttaggtaaaatatcactgccttcgatgtacttatctgtcaccaaaagtgcctttttatag

SEQ ID NO: 3877 - DNA, 306 bp, Streptococcus pneumoniae
  misc_feature (1)..(306): tiling:Spneumo1:WAN024CG8; Cluster includes WAN023MDZ 3153 83_125||||59136..59441|-|306 bp|EGAD orf prediction|S.pneu moniae|R6|NC_003098.1|ORF|220
gtgaacccacttgcgctcttcaccaagagtctcagaaaccgcacgcgtgaaagccaccacatcgtggcgcgtctcctgctcaatttccaaaatacggtcgatgtcaaagtccgccttcttgcgaatcaaagccacatcttccttagggatttcccccaactcagcccatgcctcgtcagagaggatttccacctcaagccaagcacggtatttattttcttcactccaaatattcgccatctcagggcgagagtaacggttgatcatgtgttaatttttcctttcttcttaagctgttgggaataa

SEQ ID NO: 3878 - DNA, 141 bp, Streptococcus pneumoniae
  misc_feature (1)..(141): tiling:Spneumo1:WAN024AZ5; Cluster includes WAN023Q7T cont ig_1255_7||||2690..2815|-|126 bp|Glimmer 2.02 orf predicti on|S.pneumoniae|670|WAN01UEGK|ORF|001
gtgaacgctaagaggttggggcgaaagcccctyacacctctattttatcaaatgraaagaggaaawgcaatggttagtgcaatagctatttttataattgcrrtcaatgtatatatttatctaaaaaataaaaaggacaaa

SEQ ID NO: 3879 - DNA, 912 bp, Streptococcus pneumoniae
  misc_feature (1)..(912): tiling:Spneumo1:WAN024AY6; Cluster includes WAN0240YB |cps 6bL||AAL68438.1|||138 bp|Cps6bL|S.pneumoniae||AF298581|ORF |000
gtgaacgtaaagtactcatcaacaaagaaaggtaccccttttatgaaaggtattattytwgcaggtggttcgggracwcghttrtatcctttgactcgvgyygcatcaaaacaactkatgccggtttatgataarccsatgatttactayccactttcaacattgatgytggctggrattagggatattttgattatttccactccacaggatttacatcgattycaagagcttcttcaagacggatctgagtttgggmtcaaactttcttatgcagagcaaccaagtccagatggtttggcacaagcctttatcatyggggaagagtttatttctgatgatagcgttgcgctratcttaggtgayaatatctaycayggttctggrctttccaakatgctacaaaaggcagcgagtaaggagtcgggagcaactgtttttggctaccaygtcaaggatccagagcgctttggtgtggttgagtttgatcaggatatgaaggctatttctattgaagaaaagccagagyamcctcgttcaaactatgcagtkacaggwctctatttctatgataatgatgtagtagagattgccaaragtatyaamccaagtcctcgtggtgaaytggaaattacagaygthaacaargcttayytrgawcgtggwgryttrtcygttgagstyatgggacgtggytttgcttggytggatactggmactcatgaaagtttactagaggcytcrcagtacatcgaaacagtscaacggatgcaaaatgttcaggtagcaaacttrgaagaaattgcytaycgyatgggytatatcagtmrwgarsawgtrywkrmmttrgcscarccrytkaagaaaaatgaatacggrcagtayctgctccgtttgattggagaagyatag

SEQ ID NO: 3880 - DNA, 912 bp, Streptococcus pneumoniae
  misc_feature (1)..(912): tiling:Spneumo1:WAN024AY5; Cluster includes WAN0240TG |rml A||AAK20691.1|||870 bp|RmlA|S.pneumoniae||AF316640|ORF|001
gtgaacgtaaagtactcatcaacaaagaaaggtaccccttttatgaaaggtattattytwgcaggtggttcgggracwcgmttrtatcctttgactcgsgctgcatcaaaacaacttatgccggtttatgataaaccsatgatttactayccactttcaacattratgttggctgggattagggatattttgatwatctcaactcctcaagatttgcctcgttttaaagagcttcttcaagayggwtctgagtttggkattaaactttcttatgcwgagcaaccaagtccagatggtttggcacaagcctttatcattggggaagagtttatyggtgaygatagygttgcyttgatyttrggkgacaatatctaycayggycctggtytgagcamaatgcttcaaaaagcagccaagaaagagaaaggtgcgactgtttttggctaccatgtcaaggatccagaacgctttggtgttgtagaatttgatgaaaatatgaatgctatctccatcgaagaaaagccagaataccctcgttcaaaytatgcagtgacaggactctatttctatgataatgatgtagtagagattgccaaaagtattaaaccaagtcctcgtggtgaattggaaattacagatgtcaacaaggcttacttggatcgtggtgatttgtctgttgagctcatgggacgtggttttgcttggttggatactggcactcatgaaagtttactagaggcttcgcagtacatcgaaacagtccaacggatgcaaaatgttcaggtagcaaacttrgaagaaattgcttaccgtakgggctatatcagtcgmgaagatgtrttggccttagcccaaycacttaagaaaaatgaatacggacagtatctrctccgtttgrttggagaagcatag

SEQ ID NO: 3881 - DNA, 102 bp, Streptococcus pneumoniae
  misc_feature (1)..(102): tiling:Spneumo1:WAN024CNS; Cluster includes WAN0246SL 5613 45-61-7||||||102 bp|DNA Streptococcus pneumoniae phage Dp- 1 open reading frame 257|S.pneumoniae||WAN0246SL|ORF|000
gtgaacgtgctggatttagcaaacaagctactgagatggcattcttccgtgagtctatgcgacttggtgaaaaagaccgtcaaaacttgcaaatgctattga

SEQ ID NO: 3882 - DNA, 228 bp, Streptococcus pneumoniae
  misc_feature (1)..(228): tiling:Spneumo1:WAN024CBA; Cluster includes WAN023MAF 3143 06_300||||155438..155665|-|228 bp|EGAD orf prediction|S.pn eumoniae|R6|NC_003098.1|ORF|110
gtgaactctgtaaattccaaggtaattccgtcttttttaaccaattcttggattttgtcccaacgtttttcttcagaaccgctacggttaacagttgcgattttgatagttgttgcattgtctgctttcttttctgagtttccgcaagctgcaagagccaaacctgcgactgtagcaagggctgctagaccaagccattttttgattttcatgattctttctccttaa

SEQ ID NO: 3883 - DNA, 1002 bp, Streptococcus pneumoniae
  misc_feature (1)..(1002): tiling:Spneumo1:WAN024FTP; Cluster includes WAN0240C6 |cap 33fJ||CAA07403.1|||972 bp|glycosyl transferase|S.pneumonia e||AJ006986|ORF|000
gtgaactgtagcataaagagagggaatggtatgatttcagttattgttccagtatacaatgtcgcggattatctgcgctttgcgttggatagtcttttggaacagacgtataaagattttgaggttattctagtaaatgatggatccactgataattctggggaaatatgtgatgaatatgggaaactgtatgataatattcatgttttccataagaagaatggcggactttcggatgctagaaattttggtttggagaagagtcgaggagagtttataacttttcttgattcagatgattattttgaaccgtatgcattagaattgttaattactattcaaaaaaaatatgatgtagatatygtatcaactaaagggggaataacctattctcatgatatttatagcaaaaaactgatggctgaggactacctaactgtaaaaatattgacaaataaagaatttttggcagctgtatattataacgatgaaatgacggtatctgcttggggaaaattgtataaaagagatttatttaaaacgatttttccaaaaggaaagatctacgaggatttgtatgttgttgcagagcgtttgttgaatattaaaacagttgctcataccgatttgcctatatatcattattatcagagacagggaagtattgttaattcaacattttcggatagacagtatgatttttttgatgcgattgatcataatgaagccataataaaaaaattctattgtggagataaggaattgytagcagccttaaatgctaaaagagtaattggctcctttattttgagtaatagcgcattttataatagtaaaaacgatattactaaaataataagaataattaaaccgtattattgggaagtaataaaaaataaaaaaattccaatgaaaaggaaagttcaatgtgttttgtttctgctttccccaaattactactataaaataaaagataagatgttacagagaggcaggatatag

SEQ ID NO: 3884 - DNA, 573 bp, Streptococcus pneumoniae
  misc_feature (1)..(573): tiling:Spneumo1:WAN024GMT; Cluster includes WAN023M21 3143 60_770a||||399709..400281|-|573 bp|EGAD orf prediction|S.p neumoniae|R6|NC_003098.1|ORF|110
gtgaagaacttcaaagtaagccaattctggagcgtaacctgcttctgtcaagacttcgaaacctgcttcgataagggcagtcaaaccaccacaaagtacagcttgttcaccaaacaaatcttcttcagtttcttctttgtaagttgtttcaagaagacctacacgagccgctccaacacctttacaccagtccatagcaatgtttttagcatttcctgttgcatcttggtatactgcataaagagctggaacaccaaatccttcttcgtaagtacgacgtaccaagtgtcctggtcctttaggagcacacatgaagacatctacatccgcaggaactttgataaattcaaagtggatgttgaaaccatgggcaaatccaactgcgtttccagcttccaagtttggagcgatttctgcttcgtacaattcttgttgaatttcgtctggcgccaagatcatgataacatcagccaacttagtagcttctgctactgtgtaagtatcaaatccatcttcttttgctttatcaaaagatttacctggacgtacaccgataataacgtcacgacctga

SEQ ID NO: 3885 - DNA, 1118 bp, Streptococcus pneumoniae
  misc_feature (1)..(1118): tiling:Spneumo1:WAN024FHX; Cluster includes WAN0243OU spr1 461||15903504|NP_359054.1|1442047..1443159|-|1113 bp|Conse rved hypothetical protein|S.pneumoniae|R6|NC_003098.1|ORF| 211
gtgaagacaatgaaaaaagttgycattattggagcaggaattgtgggagcaacagctgcctactacctctcgagagaaagtgacctagaggtgaccgtttttgaccatgagcaaggtcaagccaccaaggccgcagcaggaattatcagtccttggttttccaaacgccgtaataaagcctggtacaagatggcgcgcttgggggctgayttttatgtggatttattagctgatttagagaaatcaggacaaraaatcgacttttaccagcgttcgggagtctttctcttgaaaaaggatgaatccaakttggaagaactytatcaactggcyctccagcgcagagaagaatctcccytgataggscarttagccattctgraycaagchtcagctaatgaattattccctggyttgcagggattygacmrcytgctctatgcttctggtggagcgagagtagatggccaactyttrgtractcgtytgctrgaagycagtcatgtcaagytggtcaaagaaaaagtgactctgacacysttakcatcaggctaccagattggygaagaggwgtttgakcaggttattttggcracgggagcttggttgggggacatgttagarcctttaggttatgaagtggatgtccgtcctcaaaaaggacaactacgrgattatcagcttgcccaagacatggaagattaccctgttgtcatgccagaaggggagtgggatttgattccytttgcaggtgggaaattrtccttrggcgctacccaygaaaatgacatgggatttgatttgacggtagatgaamccttgctccaacaaatggaggaggcsrccttgmctcaytaycyrrttttrgctrragykacttcaarrkctgagcgtgtkggaatccgtgcctayaccagtgatttctctccyttctttgggcaggtgccwgrmttrrcwggtgtctatgyagccagtggactaggttcatcaggcctcacaactggtcctatyattggttaccatytagcycaactgatccaagacaaggagttgaycttggaccctswaaaytacccaattgaaaactatgtcaaacgagtaaaaagcgaataactaat

SEQ ID NO: 3886 - DNA, 228 bp, Streptococcus pneumoniae
  misc_feature (1)..(228): tiling:Spneumo1:WAN024BDW; Cluster includes WAN023MCL 3153 74_185a||||90459..90686|-|228 bp|EGAD orf prediction|S.pne umoniae|R6|NC_003098.1|ORF|110
gtgaagagtcttcaagtgttctttgaaacgaggcacttcgtaacggtttacaactttagtagtatcgccttcaaggtcgataacgaatggaagaccgtttgctactgggtagtcaaarttatcagatgggatgaaaactttaccaatagcaaatggtactacgtctggagctttttctttgatttgtttcaagactggctcaagagtttcgtaagaagtaacacctga

SEQ ID NO: 3887 - DNA, 255 bp, Streptococcus pneumoniae
  misc_feature (1)..(255): tiling:Spneumo1:WAN024DWE; Cluster includes WAN023KE3 3144 29_3608a||||1937100..1937354|-|255 bp|EGAD orf prediction| S.pneumoniae|R6|NC_003098.1|ORF|110
gtgaagatagagggagagggctttgccttgcttttgmttcaaacgaatagaagcaccatagcaagtcggtgtgagctgggtttcaatctgataacgcagagaaaagagcttcaaatagtgaggctggaagcaagctttatctatatcataagaagactggcggtgaaagaggctgtctccccccagttgactggtgacaggtgtcagaaggagccaagagtagtccccaatccaaggactgggctggtgagttaa

SEQ ID NO: 3888 - DNA, 998 bp, Streptococcus pneumoniae
  misc_feature (1)..(998): tiling:Spneumo1:WAN024CUK; Cluster includes WAN02445C spr0 866|pyrD|15902910|NP_358460.1|857937..858929|+|993 bp|Dihy droorotate dehydrogenase|S.pneumoniae|R6|NC_003098.1|ORF|1 11
gtgaagatggtcctgttttccgcacaggaacagttgtattataaggagaaaattatgactacaaatcgattacaagtktctctacctggtttggatttgaaaaatccgattattccagcatcaggctgttttggctttggacaagagtatgccaagtactatgatttaraccttttaggttctattatgatcaaggcgacaacccttgaaccacgttttgggaayccaactccaagagtrgcagagacgcctgctggtatgctcaatgcaattggcttgcaaaatcctggtttagaggttgttttggctgaaaagctaccttggctggaaagagaatatccaaatcttcctattattgccaatgtagctggtttttcaaaacaagagtatgcagctgtttctcatgggatttccaaggcaactaatgtaaaagctatcgagctcaatatttcttgtcccaatgttgaccactgtaatcatggacttttgattggtcaagatccagatttggcttatgatgtggtgaaagcagctgtggaagcctcagaagtgccagtttatgtcaaattaaccccgagtgtgaccgatatcgttactgtcgcaaaagctgcagaagatgcgggagcaagtggcttgaccatgatcaatactctggttggaatgcgctttgacctcaaaacyagaaaaccaatcttggccaatggaacaggtggaatgtcwggtccagcagtctttccagtagccctcaaactcatccgccaagtwgcccaaacaacagacctgcctatcattggaatgggrggagtggattcgrctgaagctgccctagaaatgtatctggctggggcatctgctatcggagttggaacagctaactttaccaatccttatgcctgycctgacatcatcgaaaatttaccaaaagtcatggataaatacggtattagcagtctggaagaactccgtcaggaagtaaaagagtctctsaggtaactaat

SEQ ID NO: 3889 - DNA, 383 bp, Streptococcus pneumoniae
  misc_feature (1)..(383): tiling:Spneumo1:WAN024BIZ; Cluster includes WAN0243WZ spr1 168||15903211|NP_358761.1|1170750..1171127|-|378 bp|Hypoth etical protein|S.pneumoniae|R6|NC_003098.1|ORF|221
gtgaagattcggatgcgaaatacrattcagtttgatgagcagttggaagtgattgaccagctttatgatgtggaagtgcatgaaaaargagattatagctacctgcttttctataatgaggaaaaggaaaaagtagtgattaaatttcatggtcaagaacttrtgatgagycgattttcyaatcccaagaccattatgcgctttctaaaggatagygatagtttagcctatattcyyacacctatgggyatgcaggagtttayyatccaaacgarycrttatcaagtkgatrggcaaaagattgaactagattatcaactacaaaatcaagagggacatccytttgccagctatcaattggaaattacttggggctarctaat

SEQ ID NO: 3890 - DNA, 528 bp, Streptococcus pneumoniae
  misc_feature (1)..(528): tiling:Spneumo1:WAN024ET3; Cluster includes WAN023KLD 3152 14_3296b||||1764205..1764732|+|528 bp|EGAD orf prediction| S.pneumoniae|R6|NC_003098.1|ORF|110
gtgaagcccaaaagtcttggctcctttttccttcaagatagcaaaggcttcaaagagctggtccttggtcatgccaaacttagcctccccaggattgtccataatgtctgtccccagttcaaaaacgcctccaggattataacgacaagagatgatttctggaatgcctgctactctctccagatgttcaatatcttcaaaggcatccaagttaatggtcgcacccaattcacgtgcataggcgtattccttgtctggcgtgttgttggaagagaacataatctcagaacccagaaagtccagtttatggctcatcaaaagctctacataactagagcagtccacaccacaaccttcttcttggagaattttcaaaatagctggagttggagtagccttaactgcaaaatattccttaaagcccttgttccacgaaaaagcttggttgacrgctcttgccttctcacgaatccccttctcatcatacaagtgaaagggagtcgggaactcggcaacaatcgcttctaa

SEQ ID NO: 3891 - DNA, 425 bp, Streptococcus pneumoniae
  misc_feature (1)..(425): tiling:Spneumo1:WAN024ESB; Cluster includes WAN0243F7 spr1 809||15903851|NP_359401.1|1779717..1780025|-|309 bp|Hypoth etical protein|S.pneumoniae|R6|NC_003098.1|ORF|211
gtgaaggaagggagaatgatgaaaaactcttttcaaaaatcaaatttcctttattatggaattatcctagtttcagtcttggtagaagtgatcatgatctgkcaattagagagtctggtaccgcttctttatccarrttttattggatttttagtytttcatgtactctaccatctaatcttatttctagytgcaaamcgaagtgggcgttgggattacttgatgatatgggggcttttcctcatgtttaatcttctttatgactcctttctaggcttgctttttctaggtttatcttttggtatgtgatgtgtctttgcaaaatacctgctatctctacgttcttaacctcgcctttagcaaggtttttcttctatacgaaactagtaacacatttcagtaaacttgtcgcattctctttctag

SEQ ID NO: 3892 - DNA, 237 bp, Streptococcus pneumoniae
  misc_feature (1)..(237): tiling:Spneumo1:WAN024EWY; Cluster includes WAN023KSB 3138 72_2959b||||1574481..1574717|+|237 bp|EGAD orf prediction| S.pneumoniae|R6|NC_003098.1|ORF|110
gtgaaggacttgctcctcgctacgaagctgtgtcgtacgaattcccacactgacaaccttacccgatacagtaatcggtccatttgtcagaacgacctcatctcccacatccagttgacgttcaaagaggatgaaaaagccattgatgacatcagacagaaagccttgggctcccataccaatcgctaccccagcaataccagctccagccagcaaactagaaactggcaaacctaa

SEQ ID NO: 3893 - DNA, 1011 bp, Streptococcus pneumoniae
  misc_feature (1)..(1011): tiling:Spneumo1:WAN024FTN; Cluster includes WAN023PVX pne0 8_17||||11373..12383|+|1011 bp|Type 7A capsule operon, Gli mmer 2.02 orf prediction|S.pneumoniae||WAN01UCKE|ORF|000
gtgaaggatgatatgattatacaaaatatattgctaacaattgtaataccagtatataatgttgaaaaatatttgaaacgttgtattgatagcgtcatttctcaggaatgggataaatatgaagttattctagtaaatgatggcagtacagatgcttcacccaatatttgtgaagagtatgcccagaagtatcattttatttctgttattcataaggaaaatggtggactatcagagactcgtaatacaggtctttctcatgcgaatggaaaatacgtattttttcttgattctgatgattggattacaaaagatatgtttcgaaatttaagtaaaatgattatggaacaaaattatgatattttgcaattcggaatgcaaatgtttcattctgaaagagaagagttgaaaaatgtacaatgcaaagaaaaaaactttaattcttcagatgcatttaaaaacatgttaagtgttgaagggattacaagttttgctacagacaaaatatataaaagagaattgtttgagaagaacggaatagagtttcctataggatatttttacgaagatttaggaacggtttataaattaattttatctgctaaaaaaatttatttaacaacacaagtgtattattgttattttattgggaatgatgcggctattaccaaacagtggtctgaaaaaaaawttagtgatgtgtataaatttcataaaaaaatttttaatgtttcatctcttatggtttcagatgacatcttcctgtctaaatcctattataataatggtctggtttatcttttaatgaaattgtatgaagaaaatcaggaagacactcaactttttaggttgatacttgcagaactggatgcaaacatagttcctataaaatatttgcgaaattatcctaattttttgaaatatgtattttatcgcattcgattattgaaattaattgtaatattgaaattaactttaacaaaaataaaaaaatggaatcaaaaaaaacat

SEQ ID NO: 3894 - DNA, 1123 bp, Streptococcus pneumoniae
  misc_feature (1)..(1123): tiling:Spneumo1:WAN024FQL; Cluster includes WAN023OT5 pne7 3_12||||9527..10648|+|1122 bp|Type 34(2) capsule operon, G limmer 2.02 orf prediction|S.pneumoniae||WAN01UCF4|ORF|000
gtgaagggtaggatagaaattgrkraaaaaaatmkstwtwgtgaaatggattttgratgattctggyggyggtgagcgagttgctrtatcyttggcaaacgaacttacaaaaaagtatgaagtycatttrattggaattacaacaaagcaatcggayytrttctttaaaatcaattcycaagtaaratactccaatttttttgaccatmgagtacgcttgtctaagaatmttctaaaaatytcaaaaatgttaaraaawtatttyrtagataatgaratagakgttgsytttggratagggatatctgctaatgtatttttatctttggcaggaataggaactcaaactaaagtagttttgtgtgatcataccaattcgattacggataatagagaattttmtcagaaattccaaagatatgttgggacaaagttggcagacaagattatcactctcactcaagaagaccgtgaaaattatataaaaaaatacggtgttcctgaggaaagaatttgctacatctataattggaaagaggctgctctttcagatgtatcttataataaaaaatcaactaaaattgtgactgttggccgttttgattatcaaaaaggctatgattatctcattcaagtcgcgaaaaaagtgttagagaaaagggctgactggacttgggaaatctacggttccggcaatcaagatgaagtagakaaaatcagagatttaatcaacgaaaatgatttacaggataggttagtcataaaaggactcgaaaaaaatcaagatttgatttatggagataaagggatttatgtcatgacttctcgctatgaaggtctacctttagtcctgctggaagcacaacaatayaatcttcctatagctagctttagttgtccgacaggaccgaacgaaattgttgaagatggagttaatggctatctggttgagtgttatgatgtagaagcgatgtctaatagattattagaactaatgaatgataaggagctaagaaatcgtttttcatctcatgcaaaagataacattraaaaatttaataaagaccgaattatacatcagtggatagatttgatagaagaagtatctgggggggraaatgtc

SEQ ID NO: 3895 - DNA, 384 bp, Streptococcus pneumoniae
  misc_feature (1)..(384): tiling:Spneumo1:WAN024CG7; Cluster includes WAN023MDX 3153 82_127a||||59448..59684|-|237 bp|EGAD orf prediction|S.pne umoniae|R6|NC_003098.1|ORF|200
gtgaaggtcacgaggaaggacttgtgtagagatttcttgagcacggataccaagcttgttgcagacatactcctctacaaatggtgggatattggcaaagttcccaaccgcaccagaaatcttaccagcttctacaccagcagccgcatgctcgaaacgctcgatattgcgtttcatttcgctataccaagttgccaatttaagaccaaaagttgtcggctcagcgtgcacaccatgagtacgccccatcatgatggtgaacttgtgctccttggccttgtcagcgatgatattagtgaagttttcaaggtcacgacggatgatgtcgttggcctgcttgtagaggtaaccataagcagtatccaccacgtcggtagaagttaa

SEQ ID NO: 3896 - DNA, 162 bp, Streptococcus pneumoniae
  misc_feature (1)..(162): tiling:Spneumo1:WAN0249YK; Cluster includes WAN024EBT-rc R 6.IG_1421||||1361498..1361654|-|157 bp|Between spr1377 (me tB) (- strand) and spr1378 (- strand)|S.pneumoniae|R6|NC_0 03098.1|IG-rc|110
gtgaaggtgtcttttgagattcaccattttatagtctattaaagggagcaggaaaaactccctttttatatagtttgaaactataactagctcttgaaaasaagaaaaygagwkgatrcaaaataagtggtacaatagttactatagatttggaggwattgt

SEQ ID NO: 3897 - DNA, 228 bp, Streptococcus pneumoniae
  misc_feature (1)..(228): tiling:Spneumo1:WAN024GKR; Cluster includes WAN023M0P 3142 64_842a||||448187..448414|-|228 bp|EGAD orf prediction|S.p neumoniae|R6|NC_003098.1|ORF|110
gtgaagtgcacgacgtacttcagtctgactaaccgctttcttggatttcgcttcacgttcagcatattttttcttaatggcagcgatattataaccttcagagatataatctttgatttcaagcagacgatccatgtcattcaaggaatacatgcgacgatttccttcgtttcgatcgggcttgatcaactcttgatcttcataataacgaatctgacgcgccgatag

SEQ ID NO: 3898 - DNA, 270 bp, Streptococcus pneumoniae
  misc_feature (1)..(270): tiling:Spneumo1:WAN024GDR; Cluster includes WAN023LT0 3144 67_1224||||650843..651112|-|270 bp|EGAD orf prediction|S.p neumoniae|R6|NC_003098.1|ORF|110
gtgaagttttggatccaattcaagtacttctactggaagtggacggtgttgagtgatgcgagcatcgatgacaacagttttaccttctttgttcaatttaacagcttctgcaacaactgcatcgatgtcttcgatacggtcaactgtgaatccaacagctccttgagcttccgcaattttagcgtagtcagcgtttgtgaagtctacaccaaacaagtgtttgtttgtatcttcgtatttgttcttgatgaagccgtactcagcatttga

SEQ ID NO: 3899 - DNA, 102 bp, Streptococcus pneumoniae
  misc_feature (1)..(102): tiling:Spneumo1:WAN024CNM; Cluster includes WAN0246SD 5613 45-69-5||||||102 bp|DNA Streptococcus pneumoniae phage Dp- 1 open reading frame 265|S.pneumoniae||WAN0246SD|ORF|000
gtgaataaagtcaagcgtttttgtataaaaagttcatttttttttaaaaaaaataagagcgaaaagctcttatctaaaatagtcgacgttgacgatttttaa

SEQ ID NO: 3900 - DNA, 2078 bp, Streptococcus pneumoniae
  misc_feature (1)..(2078): tiling:Spneumo1:WAN024DXQ; Cluster includes WAN0243CE spr1 911|ctpC|15903952|NP_359502.1|1889977..1892049|-|2073 bp|P -type ATPase - metal/cation transport|S.pneumoniae|R6|NC_0 03098.1|ORF|211
gtgaataatatgtcttttaaagtgctacatagaggataccaacatatccgactatcatcttctttttcacttaccttggatattcaagactatcttcgttccttggcgagagatgaaaaggggattgagtctatccagttttacatggatcaacagcactttactctacgcataaaagaaggcttttctgtattagataatgcagaagcctttttaaaaagaattgataaagggaaagtttctgagttgatgactcttcccattcgtagagaagagagtgcttattctattgtttcaggtgcagcggttaagcgtgtactttttcgtagttttgtgccgtatcctattcgctatatatggacttgttatcaggctttgggttatattagagaagcctatcaaacactagcgcgtaaggaactaacgatggaartcttggactgttcggctattttattgtcyttgtttatgaaccaatccaagacagctagcaatatcatgtttatgcttgatttggggaatcatttagatcagtggtccttgaaaaaaactgcaacagatttagaacagagtcttcttgcaaaagagagcgatgtattcctagtacagggcgatacggttgttagtatcaagagttccgatgttcaaataggagatgtcttgatyttatctcaaggaaatgaaattctgtttgatggacaagtagtttcaggtttaggtatggtcaacgaaagttccttgacaggagagagttttccagttgaaaaaagagagtctgatttggtttgtgcaaatacagtattagaaactggagagttacgcattcgtgtaacagataatcagatgaacagccgtattttacagctgattgagttgatgaagaaatctgaagaaaacaagaaaacgaaacaacgctatttcatcaagatggcggataaagtcgtcaaatataatttcttggggkctgggctgacttacctattgacaggttctttttctaaggctatttctttcctattggtcgatttctcctgcgctttgaaaatctctactcctgtagcttatttgacagttatcaaggargggttgaaccgtgaaatggtgattaaggatggagatgttctggagaaatatctggaagttgatactttcttgtttgataagacaggaacaatcacaactagttatcctatagttgaaaaggtgttaccttttggagactatagtgaggaagayattctcagaatcagtgcctgtcttgaggaacacatttatcatcctattgctaatgccatcgtcaagcaagctgagatagagggaattgaacatgaggaaatgcatgggaaactccaatatatcgcaagcaaggggatcaaatctcatatagatggccaaccagttcttattgggaattatgtcttgatgcaggatgagcagattcatatcagttcagaacaaaatgctttaattgaagagtacaagagtcactacaatctcttattcttggcttatcaaaatgaattgattggaatgttctgcattcatactcctttgagaaaagaagcaaaaacagccttggataaacttaaggcacaggggaaaaaattgattctggcaacaggrgacaccttgrttaggacaraggaattagtcaaagatttgccctttgatcaggtctatacagacttgaaacctgatgggaaatttgagttagtagagaaactgcagaaagcaggtcacactattttgatggttggagatggattgaatgactcagcggctytaactctatcagatatcggtgtggtgatgaatgagagtgcagatatttctaagcagatgagtgatatcttattgttagataatcgtttggatttcttccaagagttggattcgttatcatcatctttgcaaacactcatcaagaaaaatattcargataccgttgtcgtaaatagtagtttgattggcttyggcttatttaattggytcagtccttcaaatctctctatcttacataatctaacaaccttgcgcattgtcytgcgtagcytgtctattaaaaatagatarctaat

SEQ ID NO: 3901 - DNA, 428 bp, Streptococcus pneumoniae
  misc_feature (1)..(428): tiling:Spneumo1:WAN024GC6; Cluster includes WAN02449D spr0 721||15902765|NP_358315.1|722359..722781|-|423 bp|Conserve d hypothetical protein|S.pneumoniae|R6|NC_003098.1|ORF|221
gtgaatacagactatattgctcgctatggcgtatatgcagttatccctaatcctgaacaaaaacaaattgttcttgttcaagaaccaaatggtgcttggttcctaccatgtggaraaattgaagcaggtgaaaatcatcaggaagccctaaagcrtgagttgattgaagagcttggtttcacagcagaaattggtacctattacggacaagctgacgaatatttctattctcgtcatcgtgatrcctactactacaatcctgcctacctctatgaagcaactyctttcaaagaagtacaaaagccactagaaaactttaatcatattgcctggttccctattgacgaggctatcmaaaaccttaaacgtggtagccataaatgggccattgaatcttggaaaaaacagcataagattgrctaactaat

SEQ ID NO: 3902 - DNA, 102 bp, Streptococcus pneumoniae
  misc_feature (1)..(102): tiling:Spneumo1:WAN024CNN; Cluster includes WAN0246SE 5613 45-68-4||||||102 bp|DNA Streptococcus pneumoniae phage Dp- 1 open reading frame 264|S.pneumoniae||WAN0246SE|ORF|000
gtgaatagtacaaggcggtctaatacgctcaggatttctgctgtagggatagccgcatcatcttcaaactcaattgagtcaagctgtgaaacgtcttcataa

SEQ ID NO: 3903 - DNA, 102 bp, Streptococcus pneumoniae
  misc_feature (1)..(102): tiling:Spneumo1:WAN024CNI; Cluster includes WAN0246S9 5613 45-73-1||||||102 bp|DNA Streptococcus pneumoniae phage Dp- 1 open reading frame 269|S.pneumoniae||WAN0246S9|ORF|000
gtgaatagtatcgagtccatcagtttctacgtcaatagaacctattccgtcttcaatcattttgtctacatactgctcgagttttgcttcctcagtgattaa

SEQ ID NO: 3904 - DNA, 237 bp, Streptococcus pneumoniae
  misc_feature (1)..(237): tiling:Spneumo1:WAN024EWK; Cluster includes WAN023KQ9 3130 37_3058b||||1630891..1631148|+|258 bp|EGAD orf prediction| S.pneumoniae|R6|NC_003098.1|ORF|110
gtgaatatccgtcagtgtttcctcattttcaaaagcaaagctgtcaatggcatactccaaacgcccattttcaataccatccagaggaaactcmgggtcttgtacaggagattcctgagacaaaagattttcaatccgctggtaagaaaccttccctcgctgagtagtattaaagaggaarccgatggccakaagaggccagaccagcatatccaaatagctgataaaggtgactag

SEQ ID NO: 3905 - DNA, 359 bp, Streptococcus pneumoniae
  misc_feature (1)..(359): tiling:Spneumo1:WAN024FC5; Cluster includes WAN0243J1 spr1 671||15903713|NP_359263.1|1644024..1644377|-|354 bp|Conser ved hypothetical protein|S.pneumoniae|R6|NC_003098.1|ORF|2 21
gtgaatattaaatctgccagtgatttgttgggaatttcagcggatacgattcggtattatgaacgggttggtcttgtgccaccgattactcgtactgctactgggattcgtgattttcaagatcaggatatcgaagcgctggaatttattaagtgttttcgttcggcgggtgtctctgtagatagtttagttgactatatgtcgctctaccaaaagggagatgaaacgagagaggagaggcttggtattttagaagaggaaaagcaaaaattagaggagcgcttgtctcagctacagacagctttaaatcgtttaaatctcaaaattaaactttataaggaaggaaaattttaactaat

SEQ ID NO: 3906 - DNA, 2559 bp, Streptococcus pneumoniae
  misc_feature (1)..(2559): tiling:Spneumo1:WAN024CPA; Cluster includes WAN0242IW SP10 03||15900876|NP_345480.1|944261..946780|+|2520 bp|conserve d hypothetical protein|S.pneumoniae|TIGR4|NC_003028.1|ORF| 011
gtgaatcaaatatacttaagaaaagaggaaagaatgaaaatyaataaaaaatatctagcaggttcagtggcagtccttgccctaagtgtttgttcctatgaacttggtcgtcaccaagctggtcaggttaagaaagagtctaatcgagttkcttatatagatggtgatcaggctggtcaaaaggcagaaaayttgacaccagatgaagtcagtaagagrgaggggatcaacgccgaacaaatygtyatcaagattacggatcaaggttatgtgacctctcatggagaccattatcattactataatggcaaggtyccttatgatgccatcatcagtgaagarctyctcatgaaagatccgaattatcagttgaaggattcagacattgtcaatgaaatcaagggtggytatgtbatyaaggtarayggwaaatactatgtttaccttaargatgcrgcycatgcggayaatattcggacaaaagaagagattaaacgtcagaagcaggaacrcagtcataatcayrrskswrgwkctaacgatmawgcwgtwgytgcagccagagcccarggacgctayacmacrgatgatggttatatcttyaatgcwtctgatatcattgargayackggtgatgcytatatcgttcctcayggcraycaytwccaytayattcctaagartgakttatcwgcyagygarttagctgctgcmsaagcctattggaatgggaagcagggatctcgtccttcttcaagttctagtyataatgcaaatccagctcaaccaagattgtcagagaaccacaatctgactgtcactccaacttatcatcaaaatcaaggggaaaacatktcaagccttttacgtgaattgtatgctaaacccttatcagaacgccatgtrgaatctgatggycttattttcgacccagcgcaaatcacaagtcgaaccgccarwggtgtwgctgtmcckcayggwraccattaycactttatyccttatkmacaamtgtcwsmwttggaaraamgaattgstcgtattattccccttcgttatcgttcaaaccattgggtaccagattcaagaccagaacaaccaagtccacaaycgactccrgaacctagtccaagtcygmaacctgcaccaaatcctcaaccagctccaagcaatccaattgatgagaaattggtcaaagaagctgttcgaaaagtaggcgatggttatgtctttgagragaatggagttyctcgttatatcccagccaaggatcttwcagcagaaacagcagcaggcattgatagcaaactggccaagcaggaaagtttatckcataagctaggagctaagaaaactgacctcccatctagtgatmgagaattttacaataagrcttatgacttactagcaagaattcaccaagatttacttgataataaaggtcgacaagttgattttgaggctttggataacctgttggaacgactcaaggatgtcycaagtgataaagtcaagttagtggatgatattcttgccttcttagctccgattcgtcatccagaacgtttaggaaaaccaaatgcgcaaattacctacactgatgatgagattcaagtagccaagttggcaggcaagtacacaacagaagacggttatatctttgatcctcgtgatataaccagtgatgagggggatgcctatgtaactccacatatgacccatagccactggattaaaaaagatagtttgtctgaagctgaragagcggcagcccaggcttatgctaaagagaaaggtttgacccctccttcgacagaccatcaggattcaggaaatactgaggcaaaaggagcagaagctatctacaaccgcgtgaaagcagctaagaaggtgccacttgatcgtatgccttacaatcttcaatatactgtagaagtcaaaaacggtagtttaatcatacctcattatgaccattaccataacatcaaatttgagtggtttgacgaaggcctttatgaggcacctaaggggtatactcttgaggatcttttggcgactgtcaagtactatgtcgaacatccaaacgaacgtccgcattcagataatggttttggtaacgctagcgaccatgttcgtaaaaataaggyagaccaagacagtaaacctgatgaagataaggracatgatgaagtaagtgagccaactcaccctgaatctgatgaaaaagagaatcacgctggtttaaatccttcagcagataatctttataaaccaagcactgatacggaagagacagaggaagaagctgaagatacyacagatgagrctgaaattcctcaagtagagmattctgttattaacgctaagatagcagakgcggaggccttgctagaaaaagtaacagatyctagtattagacaaaatgctatggagacattgactggtctaaaaagtagtcttcttctcggaacgaaagataataacactatttcagcagaagtagatagtctcttggctttgttaaaaraaagtcaaccggctcckatacagctarctaat

SEQ ID NO: 3907 - DNA, 2517 bp, Streptococcus pneumoniae
  misc_feature (1)..(2517): tiling:Spneumo1:WAN024CPE; Cluster includes WAN0242ED SP11 74||15901039|NP_345643.1|1108255..1110714|-|2460 bp|conser ved domain protein|S.pneumoniae|TIGR4|NC_003028.1|ORF|120
gtgaatcaaatatacttaagaaaagaggaaagaatgaaaatyaataaaaaatatstagcaggttcagtggcagtycttgccctaagtgtttgttcctatgarcttggdcgtyaccaagctggtcaggwtaagaaagagtctaatcgagttkcttatatagatggtgatcaggctggtcaaaaggcagaaaayttgacaccagatgaagtcagtaagagggaggggatcaacgccgaacaaatygtyatcaagattacggatcaaggttatgtgacctctcatggagaccattatcattactataatggcaaggtyccttatgatgccatcatcagtgaagarctyctcatgaaagatccgaattatcagttgaaggattcagacattgtcaatgaaatcaagggtggytatgtbatyaaggtarayggwaaatactatgtttaccttaargatgcrgcycatgcggayaatattcggacaaaagaagagattaaacgtcagaagcaggaacrcagtcataatcayrrskswrgwkcagatmawgcwgtwgytgcagccagagcccaaggacgytayacmacrgatgatggktatatcttyaatgcwtctgatatcatygargayackggygatgcytatatcgttcctcayggcraycaytwccaytayattcctaagartgakttrtcwgcyagygarttagctgctgcmsaagcctattggaatgggaagcagggatctcgtccttcttcaagttctagtyataatgcaaatccagctcaaccaagattgtcagagaaccacaatctgactgtcactccaacttatcatcaaaatcaaggggraaacatttcaagccttttacgtgaattgtatgctaaacccttatcagaacgccatgtggratctgmtrrcctwattttcgacccagcgcaaatcacaagtcgaaccgccagaggtgtagctgtccctcatggtaaccattaccactttatcccttatgaacaaatgtctgaattggaaraacgaattgctcgtattattccccttcgttatcgttcaaaccattgggtaccagattcaagaccagaasaaccaagtccacaaycgactccrraacctagtccaagtccgcaacctgcaccaaatcctcaaccagctccaagcaatccaattgatgrgaaattggtcaaagaagctgttcgaaaagtaggcgatggttatgtctttgaggagaatggagtttctcgttatatcccagccaaggatctttcagcagaaacagcagcaggcattgatagcaaactggccaagcaggaaagtttatctcataagctaggarctaagaaaactgacctcccatctagtgatcgagaattttacaataaggcttatgacttactagcaagaattcaccaagatttacttgataataaaggtcgacaagttgattttgaggctttggataacctgttggaacgactcaaggatgtcycaagtgataaagtcaagttagtggawgatattcttgccttcttagctccgattcgtcatccagaacgtttaggaaaaccaaatgcgcaaattacctacactgatgatgagattcaagtagccaagttggcaggcaagtacacarcagaagacggttatatctttgatcctcgtgatataaccagtgatgagggggatgcctatgtaactccacatatgacccatagccactggattaaaaaagatagtttgtctgaagctgaragagcggcagcccaggcttatgctraagagaaaggtttgacccctccttcgacagaccatcaggattcaggaaatactgaggcaaaaggagcagaagctatctacaaccgmgtgaaagcagctaagaaggtgccacttgatcgyatgccttacaatcttcaatatactgtagaagtcaaaaacggtagtttaatcatacctcattatgaccattaccataacatcaaatttgagtggtttgacgaaggcctttatgaggcacctaaggggtatactcttgaggatcttttggcgactgtcaagtactatgtcgaacatccaaacgaacgtccgcattcagataatggttttggtaacgctagcgaccatgttcaaagaaacaaaaatggtcaagctgataccaatcaaacggaaaaaccaarcgaggagaaacctcagacagaaaaacctgaggaagaaacccctcgagaagagaaaccgcaaagcgagaaaccagagtctccaaaaccaacagasgaaccagaagaatcaccagaggaatcagaagaacctcaggtcgagactgaaaaggttgaagaaaaactgagagaggctgaagatttacttggaaaaatccaggatcyaaytatcaagtccaatgccaaagagactctcacaggattaaaaaataatttactatttggcacccaggacaacaatactattatggcagaagctgaaaaactattggctttattaaaggagagtaagctaactaat

SEQ ID NO: 3908 - DNA, 1947 bp, Streptococcus pneumoniae
  misc_feature (1)..(1947): tiling:Spneumo1:WAN024FW8; Cluster includes WAN0243VZ spr1 204|ptrB|15903247|NP_358797.1|1200052..1201992|-|1941 bp|P rotease II (oligopeptidase B)|S.pneumoniae|R6|NC_003098.1| ORF|221
gtgaatcagagtaatgaaatatttttaaatacaatacaggaaaaaacacactataagaggtctatctcttcatcatttcaggaattaaaaaaatggaattctttgatatttaggagagggcgatattggtaccaatttgataattggagtatacccaatactggtgtaataaaggaatggtatgtcgaagataatgactggattcctaaggttagttcttccagtttagacaattcaaattcacttaaaattgtctttgatgtggaaaaatatactttgccagatgatagtatcttacaggatgttaggatttcatctgatgagagttatatagttttggttgtatcctcactgcgtassactaatttaattggaataaaaaaatatactatggaagagttatttatcattgaagatatttcagtagaaagttcgttctatttgggtaaattcggtgttatgtatactygctccaaagagtacgggaggccaagtaagttattctataaatcttttgatagctttacagaagaggaactgtttgaagaaaacgaatgctcttttcgattaaaaatagtccacattgatagcaataattgttttgtaaagtcagtagactttcagaaaggcaggatttttctatacagtttcgaccggacgggttttgttagacactcttacacagaaacggtagccccaacacctagagatatcgctctatttagtacagaaaaagcacagtactttcttgggmtctcttcaactgaagaaaagaaagatcaactaattctaagggaaacttcttcgggagacagagtttctattactataccatatcaagatagggctagaagagttcactgtataggacgttatatccttttagactgttcaaacgcagcgaattccgtcttttatcttgctacatttaaaaataatagtttgagggagttgagtgttaataagataacatttgatgaaaagacaacactttatgaaaattcattttctgatcgtgttcttctgtttttagagaggagaactttttacgaaaaaatacttagttttgatttaatagaaaatacattaaaaactgaatttgaaagacccatcataaaatcgaataatactaaatatttttctaaggtgatttggactaaaaaagayagttatgatgtaagcataccgatttctttattttggaaaagtgaagatacggatgagctcccaagaagaaaaaaatgtattctaagtgtctatggggcttatggtaagaatgataattctgatttagatgaaattatgttatctataatagatgcaggttttatttatgctatagttcatgtaagaggtggaggctatttgggtggtgaatggtatcgctcaggaaaggcgttaaacaaatggaattctatcagagattttattgagggagtaaattatttaagggaaaatgatgtaattgacagtaagcgattaggtttaataacttctagtgcaggtggaataattgctggtgcggtgttgaacgaggaaaaaaatttattgcaaagcattctcttattttcgccatttataaatccttatgatacacttcagaatccaaatgatcctctttctaagaccgaaatagcagagtggggagatattagagmccctgaagtaaaggcttatataaagtcatattcgcctatgcaaaatattgaaaaggcacgagactcaaatactgttatagttaatattttgggtgagaaagacccatatattaataataacgaagtgatagagtggtcaaagaaattaaattctattggagttaaaagtttgttgtatttaaacaaagcagctgrtcatggaggttttactccatcagatgttctcttaatgattgatactttaaattatttctttgaagaagtgggaaggaataacttaykaactaat

SEQ ID NO: 3909 - DNA, 977 bp, Streptococcus pneumoniae
  misc_feature (1)..(977): tiling:Spneumo1:WAN024FGF; Cluster includes WAN0243N1 spr1 526|ABC-MSP|15903569|NP_359119.1|1502114..1503010|-|897 bp |ABC transporter membrane-spanning permease - sugar transp ort|S.pneumoniae|R6|NC_003098.1|ORF|421
gtgaatcataaaaaatttcattttgattttaaaacagttcaagaaagtcaaaaaattattctatttgaaagagaggtgccgactgtgaaagtcaataaaatccgtatgcgggaaacagtgatttcctaygctttcctagcaccagtrttrttcttctttgtcatctttgtrttggctccratgrtkatgggcttyattacaagtttctttaactactcwatgactarmtttgartttgtrggcttrgataactatatccgtatgtttaaagatcctgtctttacaaaatctytgattaacacagttattttggttattggatctgtrccagtkgttgttctattctcactctttgkagcrtcwcagacctaycatcaaaatgyyatygcyagatcmttctaycgtttcgtmttcttccttccwgttgtwacrggtagtgttgccgtracagttgtwtggaaatggatttatgacccrctatcagggattctaaactttgtccttaagtcmagccacatcatcagccaaaacatttcttggttgggagataaaaactgggcattgatggcgattatgattattctcttgaccacttcagttggtcagcccatcatcctttatatcgctgccatggggaatattgacaattcactggttgaagcggcgcgtgttgatggtgcaactgagtttcaagttttytggaagattaaatggccaagccttcttccaacaactctttatattgcaatcatcacaacaattaactcattccagtgtttygccttgattcagcttttgacatctggtggtccaractactcaacaagtaccttgatgtactacctttacgaaaaagccttccaattgacagaatacggctatgccaacacaattggtgtcttcttggcartcatgattgctatcgtaagctttgttcaatttaaagtacttggaaacgacgtagaatactaactaat

SEQ ID NO: 3910 - DNA, 228 bp, Streptococcus pneumoniae
  misc_feature (1)..(228): tiling:Spneumo1:WAN024GGQ; Cluster includes WAN023LWT 3142 48_1027||||536024..536251|-|228 bp|EGAD orf prediction|S.p neumoniae|R6|NC_003098.1|ORF|110
gtgaatcataagggcaatctcatgcgcttcctcatcatcaaatccagtcaacaaatcaatggcaggattgggatcatccaagcgacccaaggcattcaaacgaggagcaatctggaaaccaaccgtttcttctgttacttcgttggcagcaatcccagccatgtccagcatttcttgcagaccaatgcgctgggtatgacccaacatttccagaccatattgaactaa

SEQ ID NO: 3911 - DNA, 234 bp, Streptococcus pneumoniae
  misc_feature (1)..(234): tiling:Spneumo1:WAN024GG6; Cluster includes WAN023LW3 3145 24_1062||||554928..555161|-|234 bp|EGAD orf prediction|S.p neumoniae|R6|NC_003098.1|ORF|110
gtgaatcccatagaacgagcagtaccttcgatcatacgcattgcagactctacgtttgctgcgttcaaatctggcatcttagtttctgcaatttcttgtacttgtgcacgagtaactgtagcaactttagttttattaggtgtacctgatcctttttcaacacctgcagcttttttcaaaagaacagcagctggtggtgttttcgtaacgaaagtaaatgatttatcttcgtaa

SEQ ID NO: 3912 - DNA, 884 bp, Streptococcus pneumoniae
  misc_feature (1)..(884): tiling:Spneumo1:WAN024DFJ; Cluster includes WAN0244B2 spr0 660|livH|15902704|NP_358254.1|663874..664752|+|879 bp|ABC transporter membrane-spanning permease - branched chain am ino acid transport|S.pneumoniae|R6|NC_003098.1|ORF|111
gtgaatcttatgctccaacaactcgtaaatggtttgattctaggtagtgtttacgcgctgttagccctaggatataccatggtttacggaattatcaagctcatcaacttcgcccatggtgatatttatatgatgggagcctttatcggttatttcttgatcaattctttccaaatgaatttctttgtagcgcttattgtagctatgctagygacagctattcttggtgtcgtgattgagtttcttgcttaccgacctttgcgccactctactcgtattgctgttttgattacggctattggggtttctttcctattggagtatggaatggtctatctggttggtgccaatacccgtgccttccctcaagcgattcaaacagttcgatatgatttgggaccaattagcttaacaaatgtgcagttaatgattttggsyatttccttgattttgatgattttgttacaagtcattgtccaaaagactaagatggggaaagccatgcgtgcagtatcagtagatagcgacgcggcrcaattgatggggatcaatgtaaaccgtacgattagctttaccttcgctttgggttctgctcttgcgggtgcggctggtgttctgattgctctttattataactctcttgagcctttgatgggggttactccaggtcttaaatctttcgttgccgcagtacttggtggtatcggaattattcctggtgcggctcttggtggctttgtgattggtctattggaaacctttgcgacwgcctttgggatgtcagatttccgtgatgccattgtttatggaatcttgttgttgatcttgattgtccgcccagctggtatccttggtaaraatgtgaaararaaggtgtaactaat

SEQ ID NO: 3913 - DNA, 981 bp, Streptococcus pneumoniae
  misc_feature (1)..(981): tiling:Spneumo1:WAN024DHK; Cluster includes WAN0244FR spr0 491||15902535|NP_358085.1|490727..491689|+|963 bp|Hypothet ical protein|S.pneumoniae|R6|NC_003098.1|ORF|101
gtgaatgggaggaataagatgagcgatgtaaaagaggaagtaagctctctatctgagaagcagttacgccaaattgatgttgagtatgctgaattaaatgatagtgatattatcgagcgattagcttatttagaaattaacaacaatgaaaaacgtattgtcatctctgatattgaaccaaccaaggaaataatgtcagtctcggaccaaatttttgagattcaaaagaattttcaaaaaatcaagaatatgttcgaattgtttatttcagatgtctcggattttttaagtattaaaaataaacttgagtcaaaggaattagaaattgaagaggcagatgtaaatcgtttcatgattcatttattatccagtggaaaattgtttgtcgattttaacgaaaaccaaattaaacaaaaatattccaaagatagtgaggagtttgattgtatacatggttttgcaagctatcagtatgataycaattttrcttatcgattttgccattctttgagaaattattcgcaacatactgacttaccaataaatgaggtaaaagctgttagcccagatgatgagactgttataatagatttctatattgatttagattatcttttaaattccaactttaaatggaaaaaattgaaaggggagttgataaaactaaaccaagaaacatctaagattgacgctatagctctagtgaaagaatactttaatgctcttacagagctctatggtaattataataagttgtttttaaagttaaaccataatacattagtagatattaaatcaaagttggaatcattaaaattgaaacactctaggtattatatttcaaagataagcaagtatgatcttaaatataatcctggaaattatactatgtcaccacttgcagcatttgctgaaattgaagagatttatattgaactttcaaaaattggtttggttaaaattgtcaataaaagtaattaa

SEQ ID NO: 3914 - DNA, 352 bp, Streptococcus pneumoniae
  misc_feature (1)..(352): tiling:Spneumo1:WAN024ALL; Cluster includes WAN024ENA-rc R 6.IG_530.1.2||||505280..505457|-|178 bp|Between spr0506 (b glH) (+ strand) and spr0507 (pheS) (+ strand)|S.pneumoniae |R6|NC_003098.1|IG-rc|110
gtgaattcacccagctttcatatagagagcttgcagtcacggctctcctccctgatatacttcccttgggctactagtctttcagattyctattcaattacyacttagtttatcagatttttaccattcttgcaagacctatcttacttctgcttgttagcttattcttatctaamtttatataaacaatttatctaaattaactatttataatttttgtaacaaaattaaattaattgacactcccctataaaataaagaagtttagaatttaatgtcttccaaacttctttattccatatttaatgaaatgccaccttaaccgtgataatagctagtcatcaataaaaaa

SEQ ID NO: 3915 - DNA, 1449 bp, Streptococcus pneumoniae
  misc_feature (1)..(1449): tiling:Spneumo1:WAN024FR7; Cluster includes WAN023PVU pne0 8_20||||14361..15809|+|1449 bp|Type 7A capsule operon, Gli mmer 2.02 orf prediction|S.pneumoniae||WAN01UCKE|ORF|000
gtgaatttactaatttttaaagatgttttaatatcaatgattataaaactagataaacaaaaatgttattttattatgttacttttattgatgtgcgtagtacagttgactgcaagtgtttcaatgggagtaataagtatagctctaacagtattaccaatattgtggaatttaaataatccatccaaattattattttcacagattctttatttgtttcagttccaattctatgtaagttatttatcatttccgttaggaatttcctttatctgtgatattattaatttatttttgttattcaatatttttaaagattccaaactattacagtgggaattacggaatattaatttaaaaacaattatttttgtttgggtcttgttttttttgataggtattttttcaaattttttgtatgatttaaatattgcgcttattgtatggtccctccgtaattatataagatttatcatttttttcatttcttgttgtttgtatattgataaatacagtataaatctaggtgaatacttaataaagctattctattggtttaatatattttttacctcgttccaatattttgtgcttttaaaatcaggagattttcttggaggaatttttggaaacgaattgggaatttctaatacctacttgcatattcttttaattctcatcttgatattatctgttgttaattatgtatcagataattcgagtttagttattttaacaagttatatcgtttcaactctatacgtagctgctttgtcagagttaaagattatttttgtggaattacctattattattattttgactttactatttaaaagattaggaataaaaatactgcttaaaataatatctatcacttgcatagtggtggtcgctttggcaatctcaattcctattttatatgaattattccctatatttgacaatttttttaaattagaaaaattatttggctattcaacaggaaactattcaactagttctgattttggtcggttaagttcaattgttcaaataatctcaactattttttatggagatgtttggcagactttatttggtattggtttaggagaggcggaaatttcaaaaattccgatatttagtggttccttttattataattacgaatacacccattactatctgttcactttatcatatgtttttattgagaatggatttataggattgttcctattcatgtttatgccaatttaccttgctttaaagatgatttttgagcgagggacatctaaatatgatcttcttctgatagtattatctatttctttatttatgctcttgttgtataataatacaatgaggtcagagatatattatctttatttatttgttctttcatggggagttgcaatcaatagaggaaatgggggatgttatgaaaacaataaaaaattatgctta

SEQ ID NO: 3916 - DNA, 318 bp, Streptococcus pneumoniae
  misc_feature (1)..(318): tiling:Spneumo1:WAN024DIX; Cluster includes WAN0244J8 spr0 366||15902410|NP_357960.1|365451..365762|+|312 bp|Hypothet ical protein|S.pneumoniae|R6|NC_003098.1|ORF|111
gtgaattttatggcaaatctaaatcgattcaaatttacattcgggaaaaaatcgttaaccttgacaagcgaacatgayaacctttttatggaggaaatcgctaaggttgcgacagaaaaataccaagcaattaaagaacaaatgcctagcgcagatgatgaaacaatcgctcttttgttggcagtcaactgtttatcaactcagctcagccgtgagattgaatttgacgataaggagcaagagctmgaagaactccgtcacaagcttgtgacttgtaagcaagaacagagcaagattgaggattccttaykaactaat

SEQ ID NO: 3917 - DNA, 2454 bp, Streptococcus pneumoniae
  misc_feature (1)..(2454): tiling:Spneumo1:WAN024CF8; Cluster includes WAN023RW7 cont ig_1609_37||||24779..27232|-|2454 bp|Glimmer 2.02 orf pred iction|S.pneumoniae|670|WAN01UDCD|ORF|001
gtgaattttatggcatatccaattaaatacattgaaaacaatctcgtctggaataaagacggggaatgttatgcttactatgagcttgttccttacaattactcatttctaagtccagaacagaaaatacaagtgcatgattctttcagacagcttatcgcacaaaatcgtgatggcaaaattcatgctttacaaatcagtacagaatccagcatacgttctgcacaagagcgttccaaaaatgaagtcactggcaagctcaaagcggttgcctatgacaaaatcgaccaacagacagacgctttaatatccatgattggcgaaaatcaagtgaactaccgtttctttatcggctttaagttgcttctcaacgatcaggagttttctatgaaaagtcttaccgttgaagcaaaaaatgctttgtctgattttgtctatgatgtgaaccataagctgatgggcgattttgttagtatgagtaatgatgaaatcctgcgttttcagaagatggaaaagctcttagaaaataaaatctctcgtcgtttcaaaatccgcaggttagataaggacgacttcggctatctgattgaacacctttacggacagacaggcactgcctatgaagagtatgagtaccatctatcaaagaaaaagctggataatgaaacgctgattaaatactatgacttgattaagcctactcgctgtttggtggaagaaaaacagcgatatttgaaaatccagcaggaagatgaaaccgtctatgtagcttactttaccattaacagcattgtcggagaactggacttcccgtcctctgaaatcttctactaccagcaacagcaatttacattcccgattgatacgtcaatgaatgtggaaattgtagcgaatcgtaaagccctatctactgtccgcaataaaaagaaagaactgaaagacttggataaccacgcttggcaaagtgataatgaaaccagctccaatgtggcggaagctctggaaagtgtgaatgagctggaaaccaatttagaccaaagcaaggaatctatgtacaagctgtcttatgtggtaagggtatcagcaaatgatcttgacgaactcaaacgtcgttgtaatgaagtgaaagatttttatgacgatttaagcgtaaaactggtacgaccatttggggatatgctcggcttacatgaagaatttttacctgccagcaagcgttatatgaatgattatattcaatacgtgacctctgatttcctcgctggtttaggttttggtgctactcaaatgctgggggaaaatgaggggatttatgttggctacagcttagatactggacgcaatgtctatctgaaacctgctcttgccagtcaaggggttaagggttcagtaaccaatgcgttagcgtcggcttttgttggttcgctgggtggtggtaaatcctttgcgaataaccttatcgtctattatgcggtgctttatggggcacaagcagtgattgtagacccaaaagcagaacgtggcagatggaaagaaaccttgccagagatttcccatgaaatcaatatcgtcactctgacttctgatgagaaaaacaaaggcttacttgacccttatgtgattatgaaaaatcccaaagattctgaatcactggctattgatattctgacattccttacggggatttcctctcgtgatggggaacgcttcccaatccttagaaaagccattcgtgcagtaaccaatagtgaagtacgagggttgatgaaagtgattgaggaattacgggttgagaatacgccactaagtaccagtatagccgaccatatcgaaagttttacagactatgactttgcacatttattattcagtaatggttatgtggagcagtctatcagcttagaaaaacaactgaacattatacaggttgcggacttggtacttcccgacaaggaaacttcctttgaggaatataccactatggagcttttatccgttgctatgctgattgtcattagtacctttgctttagactttatccatacagaccgaagcattttcaagattgtagatttagacgaagcatggagctttttacaggtagcacaaggaaaaacactatctatgaagctggttcgggctggtcgtgctatgaacgctggrgtatatttcgtgacccaaaatacagacgacctcttagatgaaaaactgaaaaataacctcggcttaaaatttgcatttcgttccactgaccttaacgagattaaaaagaccttagccttttttggtgtagacccagaggacgaaaacaatcagaagcgattgcgtgatttggaaaacgggcaatgccttatcagtgatttatatggtcgtgtcggtgtgatacagttccaccctgtatttgaagaactgctccatgcctttgataccagaccacctgtgcgaaaagaggtg

SEQ ID NO: 3918 - DNA, 544 bp, Streptococcus pneumoniae
  misc_feature (1)..(544): tiling:Spneumo1:WAN024CST; Cluster includes WAN023L71 3138 17_2312||||1240884..1241192|+|309 bp|EGAD orf prediction|S .pneumoniae|R6|NC_003098.1|ORF|220
gtgacaaaacgatgttccagatttcaatataacggtcgttttcaatatcttctgcaagcaggcgaagaccgatattttctgggtcaaaggcttccccacggtcaaagaagatttctgtatctggtccagaaggtcccgcaccgatttcccagaagttgtcctcaattggaatcaagtgacttggatccactcccacttcaatccagcggttgtaagaatctttatcgtctggatagtaggtcatgtaaagtttttcagcagggaaatcaaaccattcagggcttgtcaaaagctcataagcccaagtgatagcttcgtcacggaagtaatccccgatagagaagttccccagcatttcaaacatggtatggtgacgcgcrgtcttccctacgttttcgatgtcgttggtacggatagccttttgggcattggtaatacgtggattttcagggataatggtcccgtcaaagtatttcttaagggttgctaccccagagttgatccacaaaagagttgggtcatttacaggaaccaaacttactga

SEQ ID NO: 3919 - DNA, 1049 bp, Streptococcus pneumoniae
  misc_feature (1)..(1049): tiling:Spneumo1:WAN024FZB; Cluster includes WAN0243XP spr1 142||15903185|NP_358735.1|1143961..1145004|-|1044 bp|Conse rved hypothetical protein|S.pneumoniae|R6|NC_003098.1|ORF| 422
gtgacaaataataaactgtattcgttgatagaatttagaaataaaatatatgaagaattagaactttccagaagtgatttagcgattttactatgtgccatgcttatcgcctctatcggattaaatatggattcgactcccgtgattattggagccatgttaatctctcytttgatgacacctattctgggagtggggctctctctagctatatttgattttaaattgttaagaaaatcttttaaaatattagctattcaaattcttgccagtytaatagcttcaacactttatttttatctttctcccattkygtatgctagttcggarattgttgctagaacctctccgactatttgggatgttctcattgctttkgtaggagggatagcaggtatyattggtgctaggwaaaaagagaccaataatattgttcctggtgttgctattgcaaccgccttgatgcctcctctttgtacagtaggttatgctattgcttctgctaatctaaaatttatcataggctcctcttacctattyctcatcaattgtagctttattgtcattgcgacttatataggtgttaggttgatgatggttaagaaacattattttaaagataatgaagaagactctaaaatgcgtaggattttgcttctagttgctgttttgctgatgattccgagtttcatctctgcaacgactttagtgagagaaacgttgaaaaaagagtcccttaagaaatttatatcagagcagtttcaggggyataatattttgaaaaaaacctattctaaaaagactcataccctaaagctaaccatttcaggaaattatttgacagaagaagaactcgatatgatttcaagtamkarmggtgactatggtttaagtgatgtttctgttcaagtttcacaattgtctgattcagaacaacttagtaaggaagarctggtggagyatttcttccagtatatcaaggataaggaagcaaaagaaaaggaraaagcyaataartttkatacagagtctgaggagcaataactaat

SEQ ID NO: 3920 - DNA, 572 bp, Streptococcus pneumoniae
  misc_feature (1)..(572): tiling:Spneumo1:WAN024CUS; Cluster includes WAN0244SO spr0 026||15902070|NP_357620.1|27115..27681|+|567 bp|Conserved hypothetical protein|S.pneumoniae|R6|NC_003098.1|ORF|111
gtgacaaattctcttaaaaatgataagataggagaaatatttgactatcaaattttcaaggagggaatcgtgtcgtattttgaacagtttatgcaagcyaatcaggcttatgttgccctacatgggcagttaaatctgccacttaaaccyaaaacmagagtagcyattgtgacctgtatggacycwcgtytgcacgttgcgcaagctctrggyttggcacttggggatgctcatatyttgcggaatgcaggtggtcgagtgactgargayatgattcgttckctagttatttcccagcaacaaatggggacaagagarattgtggtattgcaycatacagactgtggtgctcagacctttgaaaatgaaccttttcaggagtatttraargargaattrggtgtmgatgtgtcagaccaggayttcttgcccttccaagatatagaagagagtgtacgcgaggatatgcaactgcttatcgagtctcccctaataccagacgatgtcattatctctggtgcyatttacaatgttgatacaggaagtatgacagtcgtagaattataactaat

SEQ ID NO: 3921 - DNA, 258 bp, Streptococcus pneumoniae
  misc_feature (1)..(258): tiling:Spneumo1:WAN024G5M; Cluster includes WAN023LI2 3146 35_1872a||||1011381..1011638|-|258 bp|EGAD orf prediction| S.pneumoniae|R6|NC_003098.1|ORF|110
gtgacaaatttggtacgtatagagattgcgcaagcctgcgaattgattgtaacgatctccccacatcttatgcatcatactcttcttgccatgaaccacttcatcgtgcgagaatggcaagagataattctccttgaaaacatacataaagctgaaagtcaccaggttaaagtcatatttacgataratcggatcttcttcgtagaaacggaggatatcattcatccagcccatgttccatttgtagtcaaatcctag

SEQ ID NO: 3922 - DNA, 591 bp, Streptococcus pneumoniae
  misc_feature (1)..(591): tiling:Spneumo1:WAN024GFD; Cluster includes WAN0244DA spr0 580||15902624|NP_358174.1|590841..591425|+|585 bp|Conserve d hypothetical protein|S.pneumoniae|R6|NC_003098.1|ORF|221
gtgacaacagaggtaacagagatgaacgagacacagattcaaagagaaacacgtcaggtagtggaagatgttttakaaaagaccaatttgaarcagggggccctttttgttttaggtctatcttctagtgaggtgctaggtggtcakattgggaaagaatccagtcaagagattggtgagctgatagtggagactatcttggrtattctargtagtagaggtatccatttagcagttcaaggttgtgagcatgtcaatcgggctctcgttgttgaacgtcaggtggcagagcagtttgrtctggaaattgtcagtgtccatcctactcttcatgcaggaggttcggggcagttggcagcctttaagtttatgcaggatccagttgaggttgaatttatcaaggctcatgctggattggatatcggagacactgcaattggcatgcatgtcaagcatgttcaggttccgattcgccctattttgagagagattggtcatgcccatgtaacggcactgrctagtcgtccaaaattaatcggaggtgcgcgtgcgcactatccgcaagaygctattagraagwyyykaactaat

SEQ ID NO: 3923 - DNA, 282 bp, Streptococcus pneumoniae
  misc_feature (1)..(282): tiling:Spneumo1:WAN024G8S; Cluster includes WAN02445Q spr0 852|ald-truncation|15902896|NP_358446.1|848041..848316|-|2 76 bp|Alanine dehydrogenase, truncation|S.pneumoniae|R6|NC _003098.1|ORF|111
gtgacaacgcacgatgaacccgtctatgaaaaacacggtgttctccactatrccgttgccaatatccctggtgcggttgcycgcacttcaaccatcgccctaaccaatgtcactcttccttatatcgaagctttggctggcaaaggattcgcacaagcaatctctgaagatgaaggcttgcgtcaaggtgtgacyacttatcaaggttacttgactarcctaccagttgctcaaggacttaatcgtgactacactgatatcaatgatttagtactaactaat

SEQ ID NO: 3924 - DNA, 234 bp, Streptococcus pneumoniae
  misc_feature (1)..(234): tiling:Spneumo1:WAN024GE9; Cluster includes WAN023LTH 3132 77_1191||||629784..630017|+|234 bp|EGAD orf prediction|S.p neumoniae|R6|NC_003098.1|ORF|110
gtgacaattaaggttttaccttcaagttgtttgacgtctgtaatgagaccagtcttaggtgatacgacacccagagaaactttcatatatggaagggcaaaatcaacttgtttcttacgttcgtcagttactgtaaagttagcaagagtaatatctaccttgtttgaaatcaagtattccgcacggttgkcagcatcgactgaaatgtatttaaccttgacaccaaggtcttga

SEQ ID NO: 3925 - DNA, 228 bp, Streptococcus pneumoniae
  misc_feature (1)..(228): tiling:Spneumo1:WAN024DTO; Cluster includes WAN023KB6 3140 78_3759||||2036768..2036995|-|228 bp|EGAD orf prediction|S .pneumoniae|R6|NC_003098.1|ORF|110
gtgacagtatttgcatattcagaacctaacgggctaccgatggcaatagcagtttctcctacagttaacttactagaatcaccaaactcagctactgttgtcactttttctgaagagattttgacgacagcaatatcagagaaagtgtcagctccgacaatttctccaggtactttagtcccatctgacaatcgaatatctactttgctggcgccattwataacgtga

SEQ ID NO: 3926 - DNA, 194 bp, Streptococcus pneumoniae
  misc_feature (1)..(194): tiling:Spneumo1:WAN024DCX; Cluster includes WAN02445K spr0 858||15902902|NP_358452.1|853019..853207|+|189 bp|Hypothet ical protein|S.pneumoniae|R6|NC_003098.1|ORF|120
gtgacagycactaaaagttacaagtatgattggaatacggtttkggaatatagtaycaactatcacgaccatcagtatgcttggattccgkmatggtctcgttatkacagctattctgagtataaagttggcggaggctggaactacgctcgttatgaggtcataaactaytayasyggaggytattaactaat

SEQ ID NO: 3927 - DNA, 1209 bp, Streptococcus pneumoniae
  misc_feature (1)..(1209): tiling:Spneumo1:WAN024FOZ; Cluster includes WAN023PM1 pne2 8_12||||7453..8661|+|1209 bp|Type 15F capsule operon, Glim mer 2.02 orf prediction|S.pneumoniae||WAN01UCCC|ORF|000
gtgacatcaagtatgactaagtacataaatagctgtatcaagttgttattcatatattcgttatttagtgaattgctatactcatattattctgtatctctattatttacgatacctgacttattattgttggcagcagcagtaattgyttttgtagattcttattctgcagggaaaataagagttaaaaatcctcacattagtttaatgctcttttttatattgctgatatttctattaattagttttacttggggtactcttaatatatatggatttgttatgagaggaagatatatactgggagcatttctagtttattttatgacaaatagctatctagatgatagaaccttttcatcattgataaacattgcttattttatgcagatattgaacctattattagttttacatcaaaatatagtattacatttgcaccctgacttcactaatgggatttttggttttactrattatgcaaatggaatccaaggattttattgcttagccttaagtgttttatctactgtatattatctgtatggtaaatggggaacaatgaagtcattaatattgattgctatttcgtgtataatttgtgcattagcagaaataaagattttttttgtcatttttatattttctattattctaatttttatatttcaaaagtcagaaacagtaaaaaaaatacgaataattagtacagctgctggaatatctcttmtttttttaattgcctataaactcattgagatagttttacctgataatttgtatactttttttaatgttacaaaggcattatcatatgagaataggacagagtttgcgggacgaacaaatactatttccttcctatgggacaacttattttatyatgattatattagtgctatatttgggaaaggactaggttcatactctgttaattatatttatgaacttggtaaaatgcttgcagatggtggttttatttcagtgattttgctttattcatttttgttgtcattattcatacggggaactattactagaggaaaaaataagcaaagtgaaagactaattgtatccatcatagcttttgtggtgatgattagcattattgtttggaatagtacgttcwctagaycaacttatcttgtatttttctttctagcaataggtaatgcagcgtataagtctactaaattaataagaagggat

SEQ ID NO: 3928 - DNA, 389 bp, Streptococcus pneumoniae
  misc_feature (1)..(389): tiling:Spneumo1:WAN024G4I; Cluster includes WAN023LG8 3139 88_1935b||||1046526..1047071|+|546 bp|EGAD orf prediction| S.pneumoniae|R6|NC_003098.1|ORF|110
gtgaccaagccagcgataagttacactttcaatcaagactggaccattgccactgcgaacatggtcyacagctttctgaaatccttcatagacatcgatgacattgttaccgtcttcgatgaacattccaggaattccataagcggcgctacgttgatggatatgttctatattggtcattttcttgatatccgcagagataccgtaaccgttgttaatgcaatagaaaatgactggcaggttccagatagaagccatgttcactgcttcgtggaaaacaccttcattggtcgcaccatctccaaagaagcaracaacgattttaccggtattttgcatttgctgactgagggctgcaccgacagcgatccccataccaccacctacga

SEQ ID NO: 3929 - DNA, 267 bp, Streptococcus pneumoniae
  misc_feature (1)..(267): tiling:Spneumo1:WAN024GFH; Cluster includes WAN023LUZ 3140 58_1114a||||589520..589786|-|267 bp|EGAD orf prediction|S. pneumoniae|R6|NC_003098.1|ORF|110
gtgaccaggagtataaccctgacctgtmtcgatgtagggtttcatagcctccattttgctagacgaactataaactgtgtgttgaggatggtagacaaattcatggttttcattgataatgaaggcaaagccctgctgccccaactggagttgattgagataggcttccagagtttcataagaaatatccaaacgaagcacaccaagattggctccctttgcatcaacaagttcttgagtgacagaaatgacccactgactatctga

SEQ ID NO: 3930 - DNA, 468 bp, Streptococcus pneumoniae
  misc_feature (1)..(468): tiling:Spneumo1:WAN024DXR; Cluster includes WAN023KG1 3140 89_3525a||||1888820..1889194|-|375 bp|EGAD orf prediction| S.pneumoniae|R6|NC_003098.1|ORF|220
gtgaccagtcttgtccgccttacgacgaagcaattcggtaccagctgtcatatttccccactggtcagaaccaccgatttgaagagtgacattatggtcttggttaaggacgaagaagtcatacccttgcatgatttggtaagcgaactcagtgtaagaaattcctgtttcgatccgttttttaacagattccttactcatcatgtagttgaccgtgaagtattttccaatatcacggaggaagtcaatgaagctgatgctgccaaaccagtcgtagttgttgaccatgacagccttgttttcgccattttcaaagtcaagaaaacgagaaagttgtccttggatagacttgacccagccatctactgtgtcttttgtttggagactacgttcagcatctttgaaggacggatctccgatgagacctgtagcaccgccaacgagcgcataaggtttgtgacctgctag

SEQ ID NO: 3931 - DNA, 102 bp, Streptococcus pneumoniae
  misc_feature (1)..(102): tiling:Spneumo1:WAN024CQ5; Cluster includes WAN0246SI 5613 45-64-0||||||102 bp|DNA Streptococcus pneumoniae phage Dp- 1 open reading frame 260|S.pneumoniae||WAN0246SI|ORF|000
gtgaccctacttcctcaatcggcggtactggaggcaagcaagctcaagtcacttccatttcaggaaacttcaacttccttccagcggctgaatattatttag

SEQ ID NO: 3932 - DNA, 426 bp, Streptococcus pneumoniae
  misc_feature (1)..(426): tiling:Spneumo1:WAN024DZZ; Cluster includes WAN023KIP 3155 16_3423||||1836908..1837135|+|228 bp|EGAD orf prediction|S .pneumoniae|R6|NC_003098.1|ORF|220
gtgaccgaaaatccagcccccttcgtcttcacagtgagcataaattccttttttacagtagtagcatttaccacaggcacagacgcaagaaatcaagaccttgtcaccttttttgaagttggaaactccttccccaacttcttcaacaatcccaatcccttcgtggccaagaatggtaccactttggcaagtaggaacatcccctttgataatatggaggtctgttccacaaatagtggtttttacaatacgcacaatagcgtctgttggcttgcgaataactggtttgtctacatcaacaaaagaagcaagtcctggtttaacataagtataggctttcataaagcactcctccgtttttttatttgtaatatttatagttcaattgtaagcctttttctttgtttcttcaagctttttttgtga

SEQ ID NO: 3933 - DNA, 243 bp, Streptococcus pneumoniae
  misc_feature (1)..(243): tiling:Spneumo1:WAN024D5T; Cluster includes WAN023KHP 3130 75_3465||||1858279..1858521|+|243 bp|EGAD orf prediction|S .pneumoniae|R6|NC_003098.1|ORF|110
gtgaccraactctggagcttcccaaccaagwgcttcataraccatragctgttttggtgtrttagcaatatggtcrtctccacggataacatgagagatttgcatatcrtggtcatcgatrrcaacggcaaagttgtaagttgggtaaccgtctttcttttggataayccagtcaccaccgatattgccaccttcaaattcgatatcgcctttgaccatatcatgccacttgtagatacctga

SEQ ID NO: 3934 - DNA, 231 bp, Streptococcus pneumoniae
  misc_feature (1)..(231): tiling:Spneumo1:WAN024D4M; Cluster includes WAN023M0M 3142 63_845||||448637..448867|-|231 bp|EGAD orf prediction|S.pn eumoniae|R6|NC_003098.1|ORF|110
gtgacgaagagctcgtttcaaattaccacgagggtcacccgcaaatggttcaccttctgttgtatagacatcacagatcagacctgcaacacttccattttcatctccccaagggaagactgtccatgtatccaagtccgggtacaagtacatatccgactcattgatacgtacaaaaccttcaatagaagatccatcaaacataaccttgttcgacaagaccttatctaa

SEQ ID NO: 3935 - DNA, 261 bp, Streptococcus pneumoniae
  misc_feature (1)..(261): tiling:Spneumo1:WAN024GLF; Cluster includes WAN023M17 3143 57_824||||437947..438207|-|261 bp|EGAD orf prediction|S.pn eumoniae|R6|NC_003098.1|ORF|110
gtgacgagcaaactcgatacatgtcaactgcattcccaagcagactcccaacattggaacatcattttcacgcgcatagcggatggcttggattttcccttctgtaccacgttgaccaaaaccacctggtacgatgatcccgtccgcatcagacaagagttctgctacattctctgctgtcacatcattggcattgacccaattgattttaacttctrcatcattgacatagccagagtgtttcaaggcttcgaccactga

SEQ ID NO: 3936 - DNA, 273 bp, Streptococcus pneumoniae
  misc_feature (1)..(273): tiling:Spneumo1:WAN024GCO; Cluster includes WAN023LRR 3146 92_1287||||681654..681926|-|273 bp|EGAD orf prediction|S.p neumoniae|R6|NC_003098.1|ORF|110
gtgacgagcaccgatagccattcctttatcatcattgatagtacraamgaaattcaagacattgttgtaattatcaaagggctcaccgattcccatgacaacgatatggctgaygcgttcatcctgaccacgctcakcaaagtatttctgaaccagcatgatttgcgctacgatttcaccgttattgaggtcacgttgcttcttaatcaaaycagaggcacagaaggtacaaccgatattacagycgacctgagtggtcacacagacagataa

SEQ ID NO: 3937 - DNA, 672 bp, Streptococcus pneumoniae
  misc_feature (1)..(672): tiling:Spneumo1:WAN024ESK; Cluster includes WAN0243FA spr1 806||15903848|NP_359398.1|1777140..1777805|-|666 bp|Hypoth etical protein|S.pneumoniae|R6|NC_003098.1|ORF|231
gtgacgattctaggaaaagatacagttcaacaatctgcgaaaggtgaatctgtaactcaagaagctacaccagagtataagcyagaaamtacacyaggtgkagataagggaggcaatactggaagmtcagatgctaatgcgaatgmaggcggtggtagccaggcrggtggaycagytcacacaggttcacaaaactcagctcaatcacaagcttctaagcaattagctactgaaaaagaatcagctaaaaatgccattgaaaaagcagccaagracaagcaggatgaaatcaaaggcgcaccgctttctgataaagaaaaagcagaacttttagcaagagtggaagcagaaaaacaagcagctctcaaagagattgaaaatrcgaaaactatggaagatgtgaaggaagcagaaacgattggagtgcaagccattgccayggttrcagttcytaagagacyagtggctcctaatgctrctmmtaagacaacaagtgcaccgcaagcaactgcaggaacaatgcaagatgttacctaccagtcacctgctggcaaacaattacctaacacaggttcagcatcaagtgcagcacttgctagtcttggtctagtggyggcaacmagtggttttgctttgctaggaagaaagactagacgtagaaaatrrmwmakc

SEQ ID NO: 3938 - DNA, 105 bp, Streptococcus pneumoniae
  misc_feature (1)..(105): tiling:Spneumo1:WAN024CO5; Cluster includes WAN0246SV 5613 45-51-5||||||105 bp|DNA Streptococcus pneumoniae phage Dp- 1 open reading frame 247|S.pneumoniae||WAN0246SV|ORF|000
gtgacgcagactactggaaacaaatggcgcaattctattatgaccaatataagcaagaacagcttgaaactgatgaaaagtcgaacgctggttcgacaatcttaa

SEQ ID NO: 3939 - DNA, 291 bp, Streptococcus pneumoniae
  misc_feature (1)..(291): tiling:Spneumo1:WAN024FA8; Cluster includes WAN023KNP 3144 31_3179||||1699912..1700202|-|291 bp|EGAD orf prediction|S .pneumoniae|R6|NC_003098.1|ORF|110
gtgacgctcgtactcttcaacgtccaagagacgtttttccccatctgtaaaaattttaacatccaaatcgtaatcaatatacttcagtgcttcttcatccagatagtaggggctagccatattgcaatagtaagaagttccattatcacgaatcatggcaatgatattaaaccaatatttcttgtgaaagtaaacaatagccggttctcgagtgacccaacgacgaccatcactttcggtaacaagtgtatgatcgttgacaccaataatggcgttttctgttgtttttag

SEQ ID NO: 3940 - DNA, 747 bp, Streptococcus pneumoniae
  misc_feature (1)..(747): tiling:Spneumo1:WAN024FPX; Cluster includes WAN0243T7 spr1 304|cppA|15903347|NP_358897.1|1296891..1297631|-|741 bp|C3 -degrading proteinase|S.pneumoniae|R6|NC_003098.1|ORF|211
gtgacggaggaatttatgaatgtaaatcagattgtacggattattcctactttaaaagctaataatagaaaattaaatgaaacattttatattgaaacccttggaatgaaggccytgttagaagaatcggcctttctgtcactaggtgaccaaacgggtcttgaaaagctggttttagaagaagctcccagtatgcgtactcgtaaggtagagggaagaaaaaaactagctagattgattgtcaaggtggaaaatcccttagaaattgaaggaatcttatctaaaacagattcgattcatcgattatataaaggtcaaaatggctacgcttttgaaattttctcaccagaakatgatttgattttgattcatgcggaagatgacakagcaagtctagtagaagtaggagaaaagcctgaatttcaaacagatttggcatcaatttctttaagtaaatttgagatttctatggaattacatctcccaactgatatcgaaagtttcttggaatcatctgaaattggggcatcccttgattttattccagctcaggggcaggatttgactgtggacaatacggttacctgggacttatctatgctcaagttcttggtcaatgaattagacatagcaagtcttcgccagaagtttgagtctactgaatattttattcctaagtctgaaaaattcttccttkgtaaagatagaaataatgttgaattgtggtttgaagaagtaykaactaat

SEQ ID NO: 3941 - DNA, 279 bp, Streptococcus pneumoniae
  misc_feature (1)..(279): tiling:Spneumo1:WAN024EYJ; Cluster includes WAN023L0V 3149 14_2588||||1376726..1377004|+|279 bp|EGAD orf prediction|S .pneumoniae|R6|NC_003098.1|ORF|110
gtgacggttatccatcaaaaagtctgttccgtgttcttttggtgtgattgggtagtcttgagattcaccgatcacttcgatgtctgtgatgtccaactcatagccaaatttagaacgttcgtcctctttgacaatacctgtcacataaacagacgtttcttggctcaagcgtttgataacatcaaacttctcaagtcccacttcttcaccaaatttttcgacaaagtttggtttaaaagccacaccttgaaagaaggctgttccatcacgcaattgtaa

SEQ ID NO: 3942 - DNA, 914 bp, Streptococcus pneumoniae
  misc_feature (1)..(914): tiling:Spneumo1:WAN024FY2; Cluster includes WAN0243X5 spr1 162|htpX|15903205|NP_358755.1|1164646..1165554|-|909 bp|He at shock protein|S.pneumoniae|R6|NC_003098.1|ORF|211
gtgactaagatgttgtttgatcaaattgcaagcaataaacgaaaaacctggattttgttgctggtatttttcctactcttagctcttgttggttatgcggttggttatctctttataagatctggacttggtggtttggttatygcactgattatcggctttatctacgctttgtctatgatttttcaatcgacagagattgtcatgtccatgaatggagcgcgtgaggtggatgagcaaacggcaccagacctctaccatgtagtggaagatatggctctggtcgctcagattcctatgccccgtgttttcatcattgatgatccagccttaaatgcctttgcgacaggttctaatcctcaaaatgcggctgttgctgcgacttcaggtctactagctatcatgaatcgtgaagaactagaagctgttatgggacatgaagtcagtcatattcgtaattatgatatccgtatttcgactattgcagttgcccttgytagtgctatcaccatgctttctrgtatggcaggtcgtatgatgtggtggggtggagcaggtcgcagacgaagtgatgatgaccgagatggaaatggtcttgaaatcattatgctagtggtttccctactagctattgtactggcacctctcgctgcaaccttggttcagctcgctatttctcgtcagagggaatttctggcagatgcatctagtgtygagctgactcgcaatccccagggaatgattaatgccctagataagttggacaatagcaaacckatgagtcgccacgtcgatgatgctagcagtgcyctttatatcaatgatccyaagaaaggtggggggttccaaaaactcttttatacccacccacctatctcagaacggattgaacgtttaaaacakatgtaactaat

SEQ ID NO: 3943 - DNA, 1194 bp, Streptococcus pneumoniae
  misc_feature (1)..(1194): tiling:Spneumo1:WAN024FT3; Cluster includes WAN02407U |cps 23fG||AAC69530.1|||1194 bp|Cps23fG|S.pneumoniae||AF057294| ORF|001
gtgactataaaaattaataatttgttttttgtttgtctatccttttttgggatagttttaagtagttcacaagtgatagtgaacttgggattgtctagtattattcagtacatttcttattttatgttgatgttgtgtgtatttttaacattaattaagaatactctcaacgtgtttgcaaatagaatcatatattttttgattatttcatttttgtttattattgggattaatttacaaaatcttccattatcaagaaagatttatttatcattctctatgttaattatttctagcttatccaccttaccgataaagctaataaataatctcagtgatttaagaaggatatcatattacttattgcacagcatatttttatctgtatttttaggtttggtttttaaaatatctttagtaacagttgctgtagagggaattggcttttcatatggttttaatggaggtttgactcataaaaatttttatgcaattacaattttagtttcctatattctactatatgtcagcagaaaatatgacgctaaacatcarattgatagttttgtattatggttrgatctttttttacttttaatatctaatacgcgaacagtttatataatactagttgttttttggattattattaatagaaattttataaataatattaaaaaagagcataractggtagtgacagcaacgacaatagtcatctctttactggcgttaacattttttttcaaacatataattaataatagtgaatcatatagccatcgagtgttaggtgttgtgaatttttttaaatattatgaatcagataggtttcatttgttttttggggatgctgaattagcctttggaaatacgacgaagggttatggacayaatattagaagtgtgttaggttgggatggaacggtagagatgcctttactcagtgtaatgattaaaaatggttatgttgggttagttggttacattatagtgctgtttaagtttatatcttcaataatctcagttaaaaatagcacaaaaaaaaatattggattatcaatctttattccgttacttctatctgcaacagttgaaaattatatcgtcaacattagctttgtattcatgcctgtctgcttttgtattttatgttcaattaaaaatataaaattagtaaataacagaaagtaa

SEQ ID NO: 3944 - DNA, 695 bp, Streptococcus pneumoniae
  misc_feature (1)..(695): tiling:Spneumo1:WAN024B5O; Cluster includes WAN024497 spr0 727|glnP|15902771|NP_358321.1|726847..727536|+|690 bp|ABC transporter membrane-spanning permease - glutamine transpo rt|S.pneumoniae|R6|NC_003098.1|ORF|111
gtgactatgaatttttcttttttacctaagtatttaccttattttaactatggggctgttgtgacgattcttatttctatctgtgttatctttttgggaactattttgggtgttgtcttggcttttgggcaacgttcaaagtttaaaccgcttgtttggttggccaacttgtacgtttggattttccgtgggacaccgatgatggttcaaattatgattgcctttgctcttatgcatatcaatgctccgactattcagattggaattttaggtgttgatttttcgcgtctgattccagggattttgattatctctatgaatagtggtgcttatgtttcggagaytgttcgtgccggaatcaatgcggttccaaaaggtcagctagargcggcttattcgctagggattcgtcytaaaaatgcgatgcgttatgtgattttgccacawgcastcaaaaatatcttgccagcattggggaacgaatttatcaccattatcaaggacagctccctcttatcagctattggggtcatggagttgtggaatggggctacaacagtttctacaacaacctatctacctttaacaccacttttatttgcagcattttactacttgattatgacctctattctgacagtagccttgaaagcttttgaaaaacatatgggacaaggagataagaaataactaat

SEQ ID NO: 3945 - DNA, 600 bp, Streptococcus pneumoniae
  misc_feature (1)..(600): tiling:Spneumo1:WAN024B4Q; Cluster includes WAN0243PT spr1 426||15903469|NP_359019.1|1410831..1411424|-|594 bp|Conser ved hypothetical protein|S.pneumoniae|R6|NC_003098.1|ORF|2 10
gtgactatggaacttaayacacacaatgctgaaatcttgctcagtgcagctaataagtcccaytatccgcaggatgaactgccagagattgccctagcagggcgttcaaatgttggtaaatccagctttatcaacactatgttgaaccgtaagaatctcgcycgtacatcaggaaaacctggtaaaacccagctcctgaacttttttaacattgatgacaagatgcgctttgtggatgtgcctggttatggctatgcycgtgtttctaaaaaggaacgtgaaaagtgggggtgcatgattgaggagtacttaacgactcgggaaaatctccgtgcggttgtcagtctagttgaccttcgtcatgacccgtcagcagatgatgtgcagatgtacgaatttctcaagtattatgagattccagtcatcattgtggcgaccaaggcggacaagattcctcgtggtaaatggaacaagcatgaatcagcaatcaaaaagaaattaaactttgacccragtgacgatttcatcctcttttcatctgtcagyaaggcagggatggatgaggcttgggatgcaatcttagaaaaattgykaactaat

SEQ ID NO: 3946 - DNA, 313 bp, Streptococcus pneumoniae
  misc_feature (1)..(313): tiling:Spneumo1:WAN024CRH; Cluster includes WAN023L21 3151 64_2545||||1356100..1356336|+|237 bp|EGAD orf prediction|S .pneumoniae|R6|NC_003098.1|ORF|220
gtgactctgtgccgtccaatacttgtgacaccagatgtttcttttgttcttggagttcctgaattttttcttcaatggttcccttggtcaccaagcgatagacctcaaccgtttcttcctgacccatccgatgggcacggccaatggcttgcgcttccaccgcaggattccaccaaaggtcaaccaagatcactgtatctgcacctgtcaggttcagaccgaccccaccagccttgagggaaatcagaaaggcatctctttctccttgrttaaaggccttggtcatgtcttgtctttccttggctggggttga

SEQ ID NO: 3947 - DNA, 114 bp, Streptococcus pneumoniae
  misc_feature (1)..(114): tiling:Spneumo1:WAN024F7F; Cluster includes WAN023YQG AL44 9927.1_291||||227834..227947|-|114 bp|Glimmer 2.02 orf pre diction|S.pneumoniae||AL449927.1|ORF|001
gtgactgaaaaagtaagaactgtttcactttcaaaatcggttttgtttgaagggagaaatagaattggttgctcaaagcacagctttgaggttgcagataaagctgacgtggtt

SEQ ID NO: 3948 - DNA, 225 bp, Streptococcus pneumoniae
  misc_feature (1)..(225): tiling:Spneumo1:WAN024GHF; Cluster includes WAN023LXI 3142 51_989a||||518414..518638|-|225 bp|EGAD orf prediction|S.p neumoniae|R6|NC_003098.1|ORF|110
gtgactggcatctttagcctgctcgagtttattgacataatactctcgtttttcttcgacttcgtgaatgacaggctcatctttcttaccatgaagacggacaatcttggccggaataccgacaaccgtcacgtcactaggtacatctgctacgacaactgctgcagcaccgaccttggcattttcaccaatttccacaggcccgataacttgggcatgggctga

SEQ ID NO: 3949 - DNA, 225 bp, Streptococcus pneumoniae
  misc_feature (1)..(225): tiling:Spneumo1:WAN024ERP; Cluster includes WAN023KK1 3152 18_3362||||1801291..1801515|+|225 bp|EGAD orf prediction|S .pneumoniae|R6|NC_003098.1|ORF|110
gtgacttacaatcgcattcgccaaacttcccaccccttgtgcaaccaaaaatgccagcagcaaggcgatgcctacaatccagatagcctcgtaaataaaaattcctttgacaycacgattctgataaccaactgctttcatgacacctatttccttggaacgttgcatgatattgatgtaaataatgataccaatcataaccgctgctaccacaatagcttgtga

SEQ ID NO: 3950 - DNA, 615 bp, Streptococcus pneumoniae
  misc_feature (1)..(615): tiling:Spneumo1:WAN024DPO; Cluster includes WAN02445J spr0 859||15902903|NP_358453.1|853218..853715|+|498 bp|Hypothet ical protein|S.pneumoniae|R6|NC_003098.1|ORF|211
gtgagaaaaggagggctggatatgttrmakcttactcatgtkaccttaaaaacgcgacaagtcatcttgcaagatgyggatttyacctttaaaaagggtaggdtttatggycttcttgctatcaatggctckggaaagacgacmctrttccgwgcyatkagcaakttrmttcccmtwagtagtggamayatcgcagyycctccttctttrttttattatgagagyrttgaatggctggatggaaacttaagtgggatggactaccttcgtctyatmaaaaacatctggaagtcagryctraacttgagrgatgaaatcgcctaytgggaaatgkctgactatatcagtcttcccatycgcaagtattccttaggsatgaagcaacgcttggtgattgcyatgtatttyctcagtcaggcmaaatgctggctcatggatgagattacaaatggcttagaygagtattatcgacagaagttttttgataggctagcayaaatcgatagacaagaacagctggttcttttaagttcccactataaggaagagttggttgatrtctgcgatagagtagtaaccattcatcaggggcagatagaagaggttctarctaat

SEQ ID NO: 3951 - DNA, 309 bp, Streptococcus pneumoniae
  misc_feature (1)..(309): tiling:Spneumo1:WAN024B4R; Cluster includes WAN023L2R 3151 62_2512||||1337182..1337490|+|309 bp|EGAD orf prediction|S .pneumoniae|R6|NC_003098.1|ORF|110
gtgagaaaggataggcctctgcgtgtcctcctagtcctaactgttccaagagtccactcgccttcttctcagcctcttcctgcttcattcccatggtcttcacaggcgataaagtcaaattttccagaactgatagatgaggaaatagttgaaaatcttggaagacaaatcccagtagattgcgcttctgcaattcatccagctctaaaggttgtccattataaaagatttgccctgaatcaatggtttcaagacctgcaagcatacgtaaaagagttgtcttacctccaccagaaggtccaacgatag

SEQ ID NO: 3952 - DNA, 525 bp, Streptococcus pneumoniae
  misc_feature (1)..(525): tiling:Spneumo1:WAN024DYJ; Cluster includes WAN0243CO spr1 901||15903942|NP_359492.1|1879066..1879584|-|519 bp|Hypoth etical protein|S.pneumoniae|R6|NC_003098.1|ORF|231
gtgagaagaaatctgatagatagtttgattcagtatatgcttataatagaggtaaacaactcaggaagttcttgtaggttgcgagagtttggcraaaaaattaaaagattacgtttggctaaaaaaatcagtcgttcagaattttgtggtgatgagtctgaattaagtatccgtcaattaattagaattgaaaatggagaatccagaccaayactaacaaagttaaaatatatygctgaacgtttggrggttgargattacaagttgatgccaagttatatagagttggataaggaatacctagaattgaagtatttcttgatgaggaytcctacatacgaagatgaaactatcgcccaaaagaaagagagtgtttttgataagatttttgaagagtattatgataggytacctgaggaagaaagatttatcatcccaaattattcatatctrgcactarcgaactacacagttcaaaaattaccagaaaagctagttgaaatactgtccttctggykaactaat

SEQ ID NO: 3953 - DNA, 1567 bp, Streptococcus pneumoniae
  misc_feature (1)..(1567): tiling:Spneumo1:WAN024CS8-5; Cluster includes WAN02447B sp r0795|dnaE|15902839|NP_358389.1|795966..799094|+|3129 bp|D NA-polymerase III alpha-chain|S.pneumoniae|R6|NC_003098.1| ORF|112
gtgagaaggatagaggagaagtgtaaattgatcgcacaactagatacaaaaacagtctatagttttatggaaagcgtcatttcgatcgaaaagtatgtgagagcagctaaagaatacggctacactcatttggctatgatggatattgacaatctttatggcgctttcgactttctagagattacaaaaaaatacggcattcatcctttgctagggcttgaaatgayagtgtttgtagatgatcaggragtraatttgcgctttttagctctatctagtgtgggctatcagcagttgatgaagctttcgacagccaagatgcagggggwgaaaacttggtcagtcctgtcccagtacctggaggatatcgcggtcattgtgccktattttgatagagttgagtcgttagaactaggctgtgattactatataggggtttatccagaaacactagcaagcgaatttcatcatcctatcttacctctttatcgggtcaacgcttttgaaagcagggatagagaagttcttcaagttttaacagcgattaaagaaaatctaccgctcagagaagttcccttgcgttcgagacaagatgtctttatatcagcaagttytttagagaaactattccaagagygttttccgcaagctttggacaatttagaaaagcttatttcaggcatttcttacgacttggataytagtctgaaactgcctcgttttaatccagctagaccagcagtagaggagttgagagagcgtgctgaactggggyttgttcagaaggggttgactagtaaagaatatcaagatagactagaccaagaattgtctgttattcatgatatgggctttgatgattatttcttggttgtttgggatttgttgcgttttggacratcgaatggctattatatgggaatgggaaggggttctgcagtaggcagtttggtttcttatgccttagacatcacggggattgacccagtagagaaaaatctgatttttgaacgctttcttaatcgtgaacgctataccatgccwgatattgatattgatatcccagatatttatcgtccagattttatcagatatgttggtaataaatatggtagtaaacatgcggcacaaatcgttactttttcaacctttggagccaagcaagctctwcgagatgtyttgaaacgctttggtgtkccwgagtatgaattatctgcaattactaagaaaatcagttttcgtgacaatcttaagtcggcctatgagggmaatctccagtttcgtcagcaaatcaatagtaagttagaataccaaaaagcttttgagattgcttgcaagatagagggctatccaagrcaaacctctgtccatgcggctggtgttgtaattagtgaccaagatttaaccaactayattcctctaaagtatggtgatgaaattccactgactcagtatgatgctcatggagttgaggctagcggacttttgaagatggactttctgggactacgaaatttgacctttgtycagaagatgcaagagttgcttgctgaaayagaaggtattc

SEQ ID NO: 3954 - DNA, 180 bp, Streptococcus pneumoniae
  misc_feature (1)..(180): tiling:Spneumo1:WAN024FB9; Cluster includes WAN023KOR 3138 84_3130||||1665861..1666106|+|246 bp|EGAD orf prediction|S .pneumoniae|R6|NC_003098.1|ORF|110
gtgagaagtctggaactttcatcccagacttttccttatttattttttctttttattgttagcaagggctgccttttgttggcggatgatttggtggtaaacttgttgtaccttagcttcgcttggtttttgaccatttgcactcaaaagagtacgaactgcttcagcattcaaacgtgg

SEQ ID NO: 3955 - DNA, 377 bp, Streptococcus pneumoniae
  misc_feature (1)..(377): tiling:Spneumo1:WAN024FJY; Cluster includes WAN0243QL spr1 398||15903441|NP_358991.1|1377128..1377499|-|372 bp|Conser ved hypothetical protein|S.pneumoniae|R6|NC_003098.1|ORF|2 11
gtgagaatgattgatcattttgagattaaggtaaaggatttacaaatttcagaaggattttataggagttttctcgctcctttggactataaawtgrcttttaagacwagttctctaattagttttctatccccgaacagccctcatcctggtggtgatttttggctgactcagggaacacaagatcctgttcattttgcttttttagcagaaaataaggaagaagttcaggcttgttatgaggctggcwtagaggcaggtgggcgagacaatggggytcctggttatcgaagtgagcatccgatttaytatgctgcttttatgattgacctggatgggaacaatatagaggtggtttgccataaagaataactaat

SEQ ID NO: 3956 - DNA, 259 bp, Streptococcus pneumoniae
  misc_feature (1)..(259): tiling:Spneumo1:WAN024CH5; Cluster includes WAN023MEE 3143 18_103||||51569..51811|-|243 bp|EGAD orf prediction|S.pneu moniae|R6|NC_003098.1|ORF|110
gtgagacgtgaggcatatgcatttttatttgtcatttrttttttccttttctttaatggagaatctgtcgcctacttgtaaaaactggtcttttcttccaaacttctacgatagtcttcttcgtagtcataragaggcgttgggtagtcaccgtcaaagtaagcgacacagagaccaccgttcggcgcatctgtttcgataccaatcgactcaatcaagccatcaattgaaagataagtcakactgtccgcaccaatga

SEQ ID NO: 3957 - DNA, 372 bp, Streptococcus pneumoniae
  misc_feature (1)..(372): tiling:Spneumo1:WAN024F5I; Cluster includes WAN023KWJ 3151 87_2780b||||1482082..1482453|+|372 bp|EGAD orf prediction| S.pneumoniae|R6|NC_003098.1|ORF|110
gtgagagatttcttcttgggcaagaaggaggttaccaagtttttcaataacagttggaactaccttttcatagaattgaccttcaaattcaggaccagcattcttcatcatgataccacgttcatcaacagtcactgcgacttcaagattattagcaataccaacattgtaatcgtcctcaccaaaaccaggggctgtatggacaatacctgtaccagagtcagtcgtaacgtggtcaccaagaattaccaactcttctacagctgtatcccatgggtgttctgttacgatgtggttgagttcttggccacggtaagtttccaaaacttgaacatcagcccagccaaatttctcagacaagctagtcaataa

SEQ ID NO: 3958 - DNA, 111 bp, Streptococcus pneumoniae
  misc_feature (1)..(111): tiling:Spneumo1:WAN024COT; Cluster includes WAN0246T5 5613 45-41-3||||||111 bp|DNA Streptococcus pneumoniae phage Dp- 1 open reading frame 237|S.pneumoniae||WAN0246T5|ORF|000
gtgagagtccaggtaaggaatcttgacatattctcagccgtagttctaaatccaaatagaactcgcttggtgtcaactgcatttgctaaagcgattggttcattcccttga

SEQ ID NO: 3959 - DNA, 81 bp, Streptococcus pneumoniae
  misc_feature (1)..(81): tiling:Spneumo1:WAN024A62; Cluster includes WAN024EF3-rc R 6.IG_1183.1||||1145005..1145085|-|81 bp|Between spr1142 (- strand) and spr1143 (- strand)|S.pneumoniae|R6|NC_003098. 1|IG-rc|110
gtgagattggcatatcagactactaaagtattgagtttgttaggattttagcgactagttagctgggaaaggaagatattt

SEQ ID NO: 3960 - DNA, 274 bp, Streptococcus pneumoniae
  misc_feature (1)..(274): tiling:Spneumo1:WAN024G3N; Cluster includes WAN023LF4 3151 23_1976||||1068838..1069080|+|243 bp|EGAD orf prediction|S .pneumoniae|R6|NC_003098.1|ORF|220
gtgagcaccatagccgcctgctgctgctttcacagggacattgtattctgctgctgccttattcaaagcatttgcaaggagaccacttgttcctccacctgcacagagaacgaggacatttgtttcttcagtgatggtattttgtgctgcatcgacacccgctttttcaagaatagcatccgcttttgcagtgttgaagtttgcagcaactttttctttcaattcatcattagacttacctgaacgttcttcttcaagaatttgttcatcatag

SEQ ID NO: 3961 - DNA, 282 bp, Streptococcus pneumoniae
  misc_feature (1)..(282): tiling:Spneumo1:WAN024EZB; Cluster includes WAN023LL1 3145 02_1662||||881074..881355|-|282 bp|EGAD orf prediction|S.p neumoniae|R6|NC_003098.1|ORF|110
gtgagcataaggaccgactrtcacaccgtctgcaacactactttcctcaatcatagaattggtaatgaccgctcctgctccgatagtgctgtccactacataagtaccgtttgtcaaaacagtctcagcaccaattttcgtttgccctttcaagrtaacattggcttcgatttgaacttccgragcaatctcaacatcaatatcgatataagttgcttctggattgacaaagctaacaccgttgaccatgtgtttatgattgatgcgacgacgcataactga

SEQ ID NO: 3962 - DNA, 396 bp, Streptococcus pneumoniae
  misc_feature (1)..(396): tiling:Spneumo1:WAN024CWM; Cluster includes WAN023M4L 3154 26_631a||||328203..328466|-|264 bp|EGAD orf prediction|S.p neumoniae|R6|NC_003098.1|ORF|220
gtgagcatcatcgcgaagcttcatcaagtactctgctgttgtctcattgattttcttataagtgacttcaggggtgattcggtggttattgataaagacttggttgaactgttgmacctgtcctggcaaagtatgyccrttcaagctgtattccttgacacgagggaaggcttggtcaatcactgctttgagraccttagactgaatcgtgtcataagtcaccttgctatcatcaacttcaggacctgtttctttttcagcaggggtatcctctgtttttaccccctcttggttatccgttttaacgctaacaactgttcgctcatcgtcataagagcccgccttgagaagaatcttcttctcatttttaagatggtcattgaccgcagctggtag

SEQ ID NO: 3963 - DNA, 477 bp, Streptococcus pneumoniae
  misc_feature (1)..(477): tiling:Spneumo1:WAN024FEI; Cluster includes WAN023KSN 3154 83_2939b||||1564814..1565218|+|405 bp|EGAD orf prediction| S.pneumoniae|R6|NC_003098.1|ORF|220
gtgagccaagattgtgactttgtcgtccttgatttttcctggattgaccatgatacgaatttcacgtcctgcttgaagggcaaagctagtttgcactccttcaaagccgttagcaatttcttccaaatcatggagacgcttgatgtagctttcaagagactcactacgagcacctggacgggctgcgctcaaggcatctgctgcagcgacgataactgctatcacgctctcagcttcaacatctccgtggtgactagcaatcgtattcaccacaactgggggttccttgtacttacgggccaattccataccgatttcaacgtggctaccttcaacctcatggtcaatggctttcccgatatcgtgaaggaatccagcacgacgggcaagagccgcattttcaccaagttcgctcgccatgataccagccaacttagcaacctcaatcgaatggcgcaaaacattttgtccatatga

SEQ ID NO: 3964 - DNA, 387 bp, Streptococcus pneumoniae
  misc_feature (1)..(387): tiling:Spneumo1:WAN024CTU; Cluster includes WAN023LVD 3140 61_1091a||||575621..575872|-|252 bp|EGAD orf prediction|S. pneumoniae|R6|NC_003098.1|ORF|110
gtgagctcgaaccgacaatttgacagtttggtcttctttgagactgtcagctttttccacttgcaagctcaagtgagcaatttttggcgcttcttcaaggaattgaattgcataggtttgaagagggccaccatctttaggctgaataaagatgctcgcacgcatgccgtttgctgcgcttgcttgaagaactgtmacakcwgcattttyagcacttgctgtgacttctggcaaytkrgcwccataagmwagagtgcggtattgcattggtttttgactagtaagacctgttactgcctcaccaccaaccgttacagttggtactgcaggtgccgcaggattgccttcttctaccacaagggttgcatgaattggttgaccttctaa

SEQ ID NO: 3965 - DNA, 328 bp, Streptococcus pneumoniae
  misc_feature (1)..(328): tiling:Spneumo1:WAN024FIG; Cluster includes WAN023KYQ 3139 74_2678a||||1426946..1427179|-|234 bp|EGAD orf prediction| S.pneumoniae|R6|NC_003098.1|ORF|320
gtgagcttcagcatcaaagatatcgacgccagtaccagcaacagtcgtatagtttttaccgttgaggcgaccagtgatcgtgtttttrgtagcaatgacttcttcaaaagacaagtcyttytcagcagcaacyagcaargttttagttgggatacaaccratgttgatacaagttccaccgtacatagcyttgctrcgttcaacgagggcaacttttttgccagctgaagccaatttaccwgctagtgttttaccagctttaccaaatccaataacaattaaatcgtatgttaacatttatcttcctcctattcgaattwcattctag

SEQ ID NO: 3966 - DNA, 249 bp, Streptococcus pneumoniae
  misc_feature (1)..(249): tiling:Spneumo1:WAN024CE3; Cluster includes WAN023MD7 3144 07_152a||||70768..71016|-|249 bp|EGAD orf prediction|S.pne umoniae|R6|NC_003098.1|ORF|110
gtgagcttgaagagccaatttaccatctgytgcacaagtaatcgtcacttgataaagctcatccaccaaggatttggccaaatcaacagtcgccamactttcaggcgarttcccactacgagcaaaagacacaaggacagttgccacatcttttttcaaataggttgctggattggcaacgatatctgttgtcgcaatagcattgaaattccatttgcgttcgtcatagacttccttaaartaaggtag

SEQ ID NO: 3967 - DNA, 273 bp, Streptococcus pneumoniae
  misc_feature (1)..(273): tiling:Spneumo1:WAN024FDW; Cluster includes WAN023KRY 3149 39_2976b||||1581689..1581961|+|273 bp|EGAD orf prediction| S.pneumoniae|R6|NC_003098.1|ORF|110
gtgagcttggcgcatccaagtcagagttgcatcatcgtcaatttcaatagcatctccccagaaatccgtcaaaacttccttcataatgctgttgagcttgcttgctccaaaggtctccccttcttcaatcaatgtatacaccttacgctggaaggcggcttccaagaggtgggtgataaagttatggaagtaggtgtctgtcaagcgatgagccagagcgaagcgtttttgacgtgggtcattagactggttctccaagtaatcactgagtag

SEQ ID NO: 3968 - DNA, 825 bp, Streptococcus pneumoniae
  misc_feature (1)..(825): tiling:Spneumo1:WAN024FEE-5; Cluster includes WAN0243CG sp r1909|pbp1b|15903950|NP_359500.1|1886036..1888501|-|2466 b p|Penicillin-binding protein 1b|S.pneumoniae|R6|NC_003098. 1|ORF|111
gtgaggaaatccatgcaaaatcaattaaatgaattaaaacgaaaaatgctggaatttttccagcaaaaacaaaaaaataaaaaatcagctagacctggcaagaaaggttcaagtaccaaaaaatctaaaaccttagataagtcagycattttcccagctattttactgagtataaaagccttatttaayttactctttgtactcggttttctaggaggaatgttgggarytgggattgctttgggrtacggagtggccttatttgacaaggttcgggtgyctcagacagaagaattggtgaatcaggtcaaggacatctcttctatttcagagattacctattcggacgggacggtgattgcttccatagagagtgatttgttgcgcayttctatctcatctgagcaaatttcggaaaatctgaagaaggctatcattgcgacagaagatgaacactttaaagaacataagggtgtastacccaaggcggtgattcgtgcgaccttggggaaatttgtaggtttggsttcctctagtgggggktcaaccttgacycagcaactaattaaacagcaggtkgttggggatgcgccgaccttggctcgtaaggcggcagagattgtggatgctcttgcyttggaacgcgccatgamtaaagatgagattttaacgacctatctcaatgtggytccctttggccgaaataataagggacagaatattgcaggggctcggcaagcagctgagggaattttcggtgtagatgccagtcagttgactgttcctcaagcagcatttttagcaggacttccacagagtccyatt

SEQ ID NO: 3969 - DNA, 1130 bp, Streptococcus pneumoniae
  misc_feature (1)..(1130): tiling:Spneumo1:WAN024DBB; Cluster includes WAN024425 spr0 981|cpoA|15903025|NP_358575.1|966767..967891|+|1125 bp|Gly cosyltransferase|S.pneumoniae|R6|NC_003098.1|ORF|111
gtgaggaaatttcccctcttttcctctagtctctcctttcttttgctgattttattcaaagaaaatgatataatagtagttatggagaaaaagaaattacgcatcaatatgttgagttcaagtgagaaagtagcaggacagggagtttcaggtgcttaccgtgaattagttcgtcttcttcaccgtgctgccaaggaccaattgattgttacagaaaatcttccaatcgaggcagatgtgactcactttcatacgattgattttccctattatttatcaaccttccaaaagaaacgctcagggagaaagattggctatgtgcatttcttgccagctacacttgarggaagtttgaaaattccatttttcttaaagggaattgtgaaacgctatgtattttctttttacaaccggatggagcacttggttgtggtcaatcctatgtttattgaggatttggtagcagctggtattccacgtgaaaaagtgacctatattcctaactttgtcaacaaggaaaaatggcatcctctaccacaagaagaggtagtyagactgcgcacagatcttggtcttagtgacaatcagtttatcgtagtaggtgctgggcaagttcagaaacgtaaagggattgatgactttatccgtctggctgaggaattgcctcagattacctttatctgggctggtggcttctcttttggtggtatgacagatggttatgaacactataagamaattatggaaaatccccctaaaaatttgatttttccaggcattgtatcgccagagcggatgcgcgaattgtatgctctagcggatcttttcttgttgcctagytacaatgagctctttcctatgactattttagaagctgcgagttgtgaggctcctattatgttgcgtgatttagatctctataaggtrattttggagggaaattatcgggcgacagcgggtagagaagagatgaaagaggctattttggaatatcaagcaaatcctgctgycttaaaagatctcmaagaaaaggcyaagaatatttccagagagtattctgaagagcatctgttacaaatctggttggacttttatgagaaacaagccgctttagggagaaagtaactaat

SEQ ID NO: 3970 - DNA, 228 bp, Streptococcus pneumoniae
  misc_feature (1)..(228): tiling:Spneumo1:WAN024CTT; Cluster includes WAN023LVJ 3140 63_1087||||574196..574423|-|228 bp|EGAD orf prediction|S.p neumoniae|R6|NC_003098.1|ORF|110
gtgaggaagaaggtgtaccatcggtttcttcttaacagaaacccattggctttggtagagatagaagtcatgttttggaatgccggctgtatctacgataccaaagtaagagctcttaacrggagtttgattttggttgtgccatggtgtaggttcaccaatatagtccgtacctgtccagataaactgtccagcatagccagcgttgtcacggtcaaaagtccatga

SEQ ID NO: 3971 - DNA, 1250 bp, Streptococcus pneumoniae
  misc_feature (1)..(1250): tiling:Spneumo1:WAN024FLT; Cluster includes WAN0243RR spr1 356||15903399|NP_358949.1|1338378..1339622|-|1245 bp|Conse rved hypothetical protein|S.pneumoniae|R6|NC_003098.1|ORF| 211
gtgaggaagtcaagagtgaacaatagtcaacagatgttacaggctttggaggagcaagatttaactaaggctgagcattatttcgccaaagctttagaaaatgattcaagtratcttctgtatgarttggcaacttatcttgaagggattggtttctatcctcaggccaaggaaatttacctgaaaattgtagaggattttccagaggttcatcttaatctagctgcaattgctagcgaggatggtcaaatagaagaagcctttacctatcttgaggaaatccaagctgacagtgactggtatgtctcgtctttggytytgaaggcagacctttaccagctggaaggtttgacagatgtggcacgtgagaaattattggaggccttgacctactcagaggattctctcttgatattgggtttggcagagttggatagtgagttggaaaattaccaagcggctattcaagcctatgcccagttagataatcgctcgatttatgagcaaacgggcatttccacctatcaacgaattggctttgcctatgctcagttagggaaatttgaaacggctactgagtttttagaaaaagccctggagttagaatacgatgacttaacagcttttgagttggccagtctttattttgatcaagaagaatatcaaaaagccaccctctactttaagcagcttgataccatttctcctgactttgaaggctatgagtatgggtacagtcaggctttacataaggaacatcaagttcaagaagccctgcgtatcgctaagcaaggattagagaaaaatccctttgaaactcgcctcttgctagctgcttcacaattttcttatgaattrcatgatgctagtggtgcagaaaattatctccttactgcaaaagaagacgctgaggatacagaagaaatcttgcttcgtttagccactatttatctggagcaggagcgttatgaggatattctagamttgcagagtgaggagccagaaaatcttttgaccaagtggatgattgctcgttcttatcaagaaatggacgatttggatactgcttatgagyattatcaagagttgwcaggagatttgaaggacaatccagaatttctggaacactatatctatctcttgcgtgaattgggacattttgaagaagcaaaagtccatgctcacactwacttaaaactggttccagatgatgtgcaaatgcaagaactgtttgagagattgtaactaat

SEQ ID NO: 3972 - DNA, 806 bp, Streptococcus pneumoniae
  misc_feature (1)..(806): tiling:Spneumo1:WAN024EXS; Cluster includes WAN0243NM spr1 505|divIVA|15903548|NP_359098.1|1483605..1484405|-|801 bp| Cell-division initiation protein (septum placement)|S.pneu moniae|R6|NC_003098.1|ORF|211
gtgaggaatagaatgccaattacatcattagaaataaaggacaagacttttggaactcgattcagaggttttgatccagaagaagtcgatgaatttttagatattgtggttcgtgattacgaagatcttgtgcgtgcgaatcatgataaaaatttgcgtattaagagtttagaagagcgtttgtcttactttgatgaaataaaagattcattgagccagtctgtattgattgctcaggatacagctgagagagtgaaacaggcggcgcatgaacgttcaaacaatatcattcatcaagcagagcaagatgcgcaacgcttgttggaagaagctaaatataaggcaaacgagattcttcgtcaagcaactgataatgctaagaaagtcgctgttgaaacagaagaattgaagaacaagagccgtgtcttccaccaacgtctcaaatctacaattgagagtcagttggctattgttgaatcttcagattgggaagatattctccgtccaacagctacttatcttcaaacyagtgatgaagcctttaaagaagtggttagcgaagtacttggagaaccgattccagctccaattgaagaagaaccaattgatatgacacgtcagttctctcaagcagaaatggmagaattacaagctcgtattgaggtagccgataaagaattgtctgaatttgaagctcagattaaacaggaagtggaarctccaactcctgtagtgagtcctcaagttgaagaagagcctctgctcatccagttggcccaatgtatgaagaaccagaagtarctaat

SEQ ID NO: 3973 - DNA, 701 bp, Streptococcus pneumoniae
  misc_feature (1)..(701): tiling:Spneumo1:WAN024DB5; Cluster includes WAN02441Q spr0 996|radC|15903040|NP_358590.1|981461..982156|+|696 bp|DNA repair protein|S.pneumoniae|R6|NC_003098.1|ORF|111
gtgaggaggatttttatgtacagtatttcattccaagaagattcactattaccaagagaaaggctggccaaggaaggagttgaagcgcttagtaaccaagagttgctagctattttactcaggacaggaacacgtcaagytagcgtttttgaaattgcccaaaaagtcttgaacaatctttcaagcctaacggatttgaaaaaaatgaccctgcaggaattgcagagtttgtctggtattgggcgtgttaaggccatagaattacaagctatgattgaactggggcatcgtattcacaaacacgagactcttgaaatggaaagtattctcagcagtcaaaagttggccaagaagatgcagcaggaattaggggataaaaaacaagagcacctggtggcactctatctcaatactcaaaatcaaatcatccatcagcagaccatttttatcggktctgtaactcgtagtatcgctgaaccgcgagagattcttcactatgcaatcaagcatatggcgacttctcttrtcttggtccacaatcatccttcaggagcggtagcgcctagccaaaatgatgatcatgtcactaaacttgttaaagaagcctgcgaaytgatgggrattgttctcttggaccatttgattgtctctcattctaattactttagttatcgtgaaaagacagatttaatctaactaat

SEQ ID NO: 3974 - DNA, 1281 bp, Streptococcus pneumoniae
  misc_feature (1)..(1281): tiling:Spneumo1:WAN024GKL; Cluster includes WAN0244H1 spr0 445|hsdS|15902489|NP_358039.1|450637..451917|+|1281 bp|typ e I restriction enzyme|S.pneumoniae|R6|NC_003098.1|ORF|210
gtgaggataaaatcaatttattggaattttgggcaaaataagccagagaaatcctttaggtatatagatacgtctagtattgatagaaaaaagaacataatcaactacaaaaatctacaatatctttcacctgaacaagcgccttcccgtgctagaaaattagtttcgcagaatagtgtcttattttcaacagttagaccatatctaaaaaatattgctgtagttagagaacttaaagagtatttgatagctagtacagcatttattgttttggatactttacttaacgaaacatatttgaaatattatttattatcagataattttatcaatcgtgttaataataaatctactggaacaagttatcctgcaatcaatgattataattttaatctattattaattgctctccccccactatccgaacaacaacgaatagtagaagcaatcgaatcagctttagaaaaagtagatgaatatgctgaaagttataatagactagaacagctagataaagaatttccagataaactaaaaaaatctattcttcaatatgctatgcaaggaaaattagttgaacaagacccaaatgatgaatcagtcgaagttttacttgaaaaaatacgagcagaaaaacaaaaactmtttgaagaaggcaagattaaaaagaaagatttggacatttctattgtttcccaaggagatgataactcttattatgggaacaaagacgaaacaacctcttatcctatatatgaaatcccagaagcatggagatatattaaatttgctagcctagttaacttcagaataggaaaaactcctccacgcagtgaagctactttttggggaactgaaataccttgggtatctatatcagatatgcctatatctggttatgtaactaatacgagagaatctatttctaaattagcattaaaatcaaagaaaatagacatttcacctaaaggaactttattaatgagttttaaattatctattggaaaagttgccatattggatattcctgccactcataatgaagccattatatcgatattcccctatgctaataaagaaaatattatcagagattacttaatgatatttttgccacttatctctactttaggtgattcaaaagatgctatcaaagggaaaacattaaatagtaccagtatctccgaattattaatccctatttctaatcatgaagagatgaaaagaatcattttcaaagttgatttactttttcaaaaagtttctcaactttttgagtaa

SEQ ID NO: 3975 - DNA, 924 bp, Streptococcus pneumoniae
  misc_feature (1)..(924): tiling:Spneumo1:WAN024FR4; Cluster includes WAN023PV7 pne1 0_14||||11065..11988|+|924 bp|Type 7C capsule operon, Glim mer 2.02 orf prediction|S.pneumoniae||WAN01UCKC|ORF|000
gtgaggcakataagaatgaatttggaagatttagtattaataattttaaattataatagtgctaaagatacactacgttgtttagaaattctacgttcttttaatatgaattttaaaatcattgtagtggataataattctacggacaattcaatagaactactcaagaatatagaggatcctcaaactacttttttaatttctgatgagaatagaggatatggagcaggtaataatattgggattcactttgcagaaaataatttttcttcaaatatcataggtattattaatccagatatagtcattcccaatcaggaagtgataatttcaatgtataatgttttgaaaaatagtgactttgctatggttggtgggtcagtaatcgataatgagggaaattatagactattaaattcatcatggratttaccttcttttaagagygttgtacttgaaagatttttaatatataatcgacataaagttccatattgtttaaatatgtataatgatgaaacagcgattgtagattgtgtagcaggttgcttttttatgataaaagctgatgtaatgaaggaaatcggttattttgatgaaaatgtttttttatataatgaagagaacattcttggaatgaaactgagagaaaaggrcttccaatcaattatattaaccaaacagttttactatcatttgcatgattttgaaaaggataaggtagaattatccttgagtaaaaaatgtaaacgagattgggtgaaatttcagtcacgtaagtattttaccgaaaaatattattcaaaatttttaggttttcttcttttttttgttgaaatatttaatttgtttcaaattatgataggacacttaaaaaataatattataaagaagaatctgaaaggaaactctagtgaaaaaaag

SEQ ID NO: 3976 - DNA, 321 bp, Streptococcus pneumoniae
  misc_feature (1)..(321): tiling:Spneumo1:WAN024C3W; Cluster includes WAN023M43 3145 54_653||||342966..343286|-|321 bp|EGAD orf prediction|S.pn eumoniae|R6|NC_003098.1|ORF|110
gtgaggcataaaccgccatggacaaggtatcctcctcataaaggcgccaaggactctctgcaggaactaccttacaggtcacctccacytccaaaagaggcagggaaatggcaggataaccgtaaacgaccgcatgttcccctattaaaattatcttactatgtgcctgaccgacaccaactttttttgtcattttttccttttactagacgaaaaaacgtcttatttttcatacaagtattaattctttcctatctattttattatattttcacaaaaaaagcgattgtttccattcrcaatcgcttctttcattattga

SEQ ID NO: 3977 - DNA, 524 bp, Streptococcus pneumoniae
  misc_feature (1)..(524): tiling:Spneumo1:WAN024GJF; Cluster includes WAN0244G5 spr0 477||15902521|NP_358071.1|479630..480109|+|480 bp|Conserve d hypothetical protein|S.pneumoniae|R6|NC_003098.1|ORF|111
gtgaggcggggaatatcttcgcctcttgcttatgaggaggtggacgcaatcgcaacaatcgtagaattagtcagagaagttgtagaacctgtcatagaagctccttttgaactcgtggatatcgagtatggaaagattggcagtgacatgattctcagtatttttgtagataaacccgaaggaattacctykaackamwcggcagacttgacagaaattatcagtcctgtcctagacaccatcaagccagatcccttcccagaacaatatttcctagaaattaccagtccaggyttggaacgycctttgaaaaccaaggatgccgtcgctggagcggttggaaaatacatccatgtcggrctctaccaagccatcgataagcaaaaggtctttgaaggaacyttgttggccttcgaagaggacgagttgactatggaatatatggacaagacgcgtaagaaaaccgtccraattccatacagtttagtatcaaaagcacgtttagcagttaaattatarctaat

SEQ ID NO: 3978 - DNA, 1538 bp, Streptococcus pneumoniae
  misc_feature (1)..(1538): tiling:Spneumo1:WAN024FWM; Cluster includes WAN0243MZ spr1 528|PTS-EII|15903571|NP_359121.1|1504685..1506217|-|1533 b p|Phosphotransferase system sugar-specific EII component|S .pneumoniae|R6|NC_003098.1|ORF|311
gtgagggggagttttatgtttaaagttttacaaaaagttggaaaagcttttatgttacctatagctatacttcctgcagcaggtctacttttggggattggtggtgcactttcaaacccaaccacgatagcaacttatccaatactagacaatagtatttttcaatcratattccaagtaatgagctctgcaggagaggttgtattcagtaatttgtcactacttctctgtgtgggattatgtattggcttagcgaaacgagataaaggaaccgctgcgttagcaggagtaactggttacttagttatgactgcaacgatcaaagctttrgtaaaactttttatggcagaaggatctgcaattgatactggagttattggagcattagytgtcggaatagttgccgtatatttgcacaaccgatataacaatattcaattaccttccgctttaggattctttggaggttcacgcttcgttcctattgttacatcgttctcttctatcttgattggctttgtcttctttgttatttggccacctttccaacaacttcttgtttctacaggtggatatatttctcaggcgggtccaattggaacttttctatatggatttttaatgagactttctggagcagtaggcttacatcatataatttaccctatgttttggtatactgaacttggtggtgttgaaactrttgcaggacaaacagtggttggagctcaaaaaatattttttgctcaattagccgatyyggcccattctggattatttacagaaggaacaaggttttttgcaggtcgtttctcaacaatgatgttcggtttaccggctgcctgtttagcgatgtaccatagtgttcctaaaaatcgtcgtaaaaaatacgcgggtttgttttttggagttgctttaacatcttttattaccggtattacagaaccaattgaatttatgtttctattcgtcagtccggttctatatgttgttcacgcattccttgatggtgttagcttctttattgcagacgtcttaaatatttcaataggaaacacattttcaggaggtgtaatcgatttcacwttatttggaattttgcaggggaacgctaagacgaattgggttcttcagattccawttggacttatttggagtgttttgtattatattatttttagatggttcattactcaattcaaygttctaacrccaggrcgaggagaagaagtagattctaaagaaatttctgaatccgcagattcaacttcaaatactgcagattatttaaaacaggatagcctacaaattatcagagcsttgggtggatcaaataatatagaagatgtagatgcttgtgtgacacgtttacgtgtagctgtaaaagaagttaatcaagttgataaagcacttttaaaacaaattggtgcagttgatgtcttagaagtgaagggtggcattcaagcaatctatggagcaaaagcaatcttatataaaaatagtattaatgaaattttaggtgtagatgattaactaat

SEQ ID NO: 3979 - DNA, 133 bp, Streptococcus pneumoniae
  misc_feature (1)..(133): tiling:Spneumo1:WAN024COF; Cluster includes WAN0246SY 5613 45-48-0||||||108 bp|DNA Streptococcus pneumoniae phage Dp- 1 open reading frame 244|S.pneumoniae||WAN0246SY|ORF|000
gtgaggtacaaaatgttgaccgtcgccgtcaatgaaaattttagcatcgagttctttcgaagttttcgaaataatttccttcacctgtttgatagttggttcatctagaccttttaacaagtcttctaattga

SEQ ID NO: 3980 - DNA, 270 bp, Streptococcus pneumoniae
  misc_feature (1)..(270): tiling:Spneumo1:WAN024C7Q; Cluster includes WAN023M7X 3143 88_447a||||229216..229485|-|270 bp|EGAD orf prediction|S.p neumoniae|R6|NC_003098.1|ORF|110
gtgaggtgcaaatggtgcaatcaattgaataaagcctttggcatagtcaacataaagcttatcttccttgttagcagcattgacaaagaccataagttgggcaatagctgtgttgaatttgagagactcaatttgytcwgtracagctttgactgtttcgttgtaarccttgtcaagagcaccattgttttccgcaaggatttctttacttgtaatcaaacggtaaactcggtcaaggaacttacggcttccttccaaaccttcttctga

SEQ ID NO: 3981 - DNA, 945 bp, Streptococcus pneumoniae
  misc_feature (1)..(945): tiling:Spneumo1:WAN024FTB; Cluster includes WAN0240EF |cps 2F||AAD10175.1|||918 bp|Cps2F|S.pneumoniae||AF026471|ORF|0 00
gtgagtaacaagcaaattgcgattatgatggcaacttataatggagctaaatacattggagaacagatagactctattcttaggcaaacttatcaagattggaaattatttatccatgacgattgttcaaatgatgctacttttcaaatccttcagcaataccaagaaaaataccctaaaaaaattaaggttatcacagattcctctgttataggggggagctcagagaaaaattttgcagctattcaaaaatgggtgacgaataatcatgatttttcttattttatgtttgcagatcaagatgatttttggtttccaaataagattgagcgctcactttataaaatgaaagaatcagaaaaggatgatttacctattttagttcatactgatttagaagttgttgatgataatttaaatataattaacgattctttcttcgaatatcgtgccttagatgtagatgtgacagaattgaatcgtatacttatacaaaataacattacgggttgtacaatgttatggaatagaagtttaaacaatctgttagatttgaatagtaatgcagtagctatgcatgattggtggataagtttagttgctgctagctttgggaaaattgtttgccttaaagaaccaacaattaaatatcgtcaacacggtgggaatgttgtgggggcgacacaagtcaatactttaggttttattatcaagaggttgttaggaaattctcatgtcaaggaaactttgaagctatcatttgaacaagcagaatcatttttaaaagtttatcagaattctctaagtaatgaggagacagatattattcgtgaatttatcagcattccacataagcataaattggcgagaataagcactgttataaaaggaggctatctaaagcaaagtgtggtgcaagtaatcggtgagttaatgtttatttag

SEQ ID NO: 3982 - DNA, 954 bp, Streptococcus pneumoniae
  misc_feature (1)..(954): tiling:Spneumo1:WAN024FV7; Cluster includes WAN023OV7 pne7 0_18||||16242..17195|+|954 bp|Type 32F1 capsule operon, Gl immer 2.02 orf prediction|S.pneumoniae||WAN01UCC2|ORF|000
gtgagtattttttcaacattgattaaaaaaaagggcgcagagatttttaaagacttaattcagtcaagagtgctttttagaacgatagctattttacctctggttggtttttcaaaaaaatcattagagatagtccgtctaaataatagtaatgtagttctttcaaaattgagaaggaagtataagcagactattaaaaacttggatagagagaaacagtattcacttagctataatcagcgacataaagatgcatcaaataagatatggatttgctggtttcaaggcttagatactgcccctcatgtggttcaggagtgtatcgcttcggtaaaaaaacacctagcagacagagaagtggttgttttaacagatgaaaattaccatcagtatgtgacttttccagactatatcaaagaaaaagcaacccagggttttatttcaaaagcgcactttgcagatttattgcgcttggaattactgaccgagtatggtggtacgtggattgatgggacgatattttgttcgagttcagatattcctgcctatatgttagattctgatttatttctatttcaaaatttaaaaccaggtcttgatggacaggcattggcaatttctaattggttcattactgctagctactctaaccatcctcttttaaatatgacgaaagatttgctttatgattattggaagaatcataatggagtggttgattattttatttttcatcacttctttcagttatcaatcgaagaatttcctgaatactggagtaaggtagttcctttcaataattcaactcctcatattttgcagttacgcttatttgaagagtttgacgaagtgatgtatggttatattctcgaacagacaccattccataagctaacatataaatttgaagaagaaaagtcgagaataccgaatacttactataaacacttattt

SEQ ID NO: 3983 - DNA, 1173 bp, Streptococcus pneumoniae
  misc_feature (1)..(1173): tiling:Spneumo1:WAN024FOF; Cluster includes WAN023PIS pne3 3_17||||10465..11637|+|1173 bp|Type 16A capsule operon, Gl immer 2.02 orf prediction|S.pneumoniae||WAN01UCI4|ORF|000
gtgagtctatcaagagttaaaactgatgtaaaattgaatgagtttctttttggattagctttttatccttggctaatagcatggctgtttacttcgaccttttataaggattttatacatccttatggaataataaaaacttgggagtatgtgggattattttttctattatttaaatttatgttaggtaaatctaagataaaatcgataatcattactccaattatacttcttataggttttattgtaagttatgataatggtaacgcctcctttgtagcatatactttgactcttatatattcttcaagggatattaattttcgtaatttggtaaggaatacaatgttctgccagattggagttgtaggaactgttatagtaagctctttacttggtattattcctaacgagctagccttaacatattcagraggtgtgatccgctcacggtatggactaggttttcactacacatcatttactccgaattatttcctgagtatattgctggaatatgtgtatttaaaaggtgaaaaatattggacaataaaagagctttttatttgtgtactattaaatatagttatttataaatacacagatacccgtcttacttttattatggtatttatccttcttttgatatcgttttcgagaagatttgtatcaatcaatatgaattttaaatttctaaaatatttacttactcttatttatccaattatggcgtatatgacttattggctgacagcaaaatttgatagtagaaatagtttattatctttaataaataacttattgagtcaaaggttgagattcggtcaagaaggtttaaggagataccctctaagattatttggaactcatattcaatgggatgcttcggcgaattcttatctttatgtagattcgtcgtacattaatatacttataagctatggaacaataatttttttccttacgttaataagctattcaattataatgaaaaaagttataattaatcaaaataaaactttattgattgtgttaattttttggtcagtaagagcttgtattgacccacaattatttttattgtggttcaatccatttttgtttttaattgcgagaacgtttttagatgaaagagaggaaattggagatgatatcacttatatgtgtatcgaa

SEQ ID NO: 3984 - DNA, 275 bp, Streptococcus pneumoniae
  misc_feature (1)..(275): tiling:Spneumo1:WAN024GEU; Cluster includes WAN0244CW spr0 594||15902638|NP_358188.1|607862..608131|+|270 bp|Conserve d hypothetical protein|S.pneumoniae|R6|NC_003098.1|ORF|111
gtgagtctcttcttgaaaaaaacacaaaattttgctagaatgagtcttatgaaaacattctatgatgtgcagcaattcctcaaacgatttggtattattgtttacatgggaaaacgcttatatgatattgaactgatgaagttggaactatctcggatttacgatgcagggttgatggataaattagactatctagaggcagaagcagttcttcgcagagagcacaaggtagaattggattatattgagaaaaatggagaaaagaactaactaat

SEQ ID NO: 3985 - DNA, 252 bp, Streptococcus pneumoniae
  misc_feature (1)..(252): tiling:Spneumo1:WAN024DZA; Cluster includes WAN023KHJ 3139 11_3469b||||1859541..1859792|+|252 bp|EGAD orf prediction| S.pneumoniae|R6|NC_003098.1|ORF|110
gtgagtgcaagtcagttgagaagttggctgaagttgggtagatacctttttggtcttttccttctgattcaccagccaattgtttccaccattctgagaagtattgaagtgatggctcatagtttaccaagatctcagttgcatagcctttacgataaaggatgttacgaacagctgcgtattggtaagcttcgttttcagagattttgtctgaagtgtagtctttgcgagctgcattcgcaccttccataa

SEQ ID NO: 3986 - DNA, 186 bp, Streptococcus pneumoniae
  misc_feature (1)..(186): tiling:Spneumo1:WAN024D9D; Cluster includes WAN0243W3 spr1 200||15903243|NP_358793.1|1195742..1195921|-|180 bp|Hypoth etical protein|S.pneumoniae|R6|NC_003098.1|ORF|110
gtgagtgggataaaagtttcatttagtttattcagtacaaatttaacgggtcaagatttatatactrgtggtgtttttggggctgagagaagtatcttgattttatgtgtggtttttatacttacagttgttctgctccaaagagcttgtagagaagaattagctcataaaggagatykaactaat

SEQ ID NO: 3987 - DNA, 424 bp, Streptococcus pneumoniae
  misc_feature (1)..(424): tiling:Spneumo1:WAN024C6E; Cluster includes WAN023M64 3143 75_533a||||272212..272547|-|336 bp|EGAD orf prediction|S.p neumoniae|R6|NC_003098.1|ORF|220
gtgagtgtagtagattttatcagttgcttttttaccagtcaatttaactttttcagcattgataacaatcacgaagtcacctgtatcagtgtgtggtgtaaatgttggtttgttttttccgcgaagtacgctagcaactactgcagaaagacgtccaagtggtacatcagttgcgtcaactacgtaccatttacgttcaacttggcctggtttagccataaatgttgttttgttcatgatttctcctatatatagttcgatttttgtttacggtgatgggtgttccttcccatcgaaaagtatttggaaggttccggggcctttcaaatggggtaaacaataccgcctactatcataccaaatttyacccctaaaagtcaatagatatgaaaaatatttttcggtaacttctcaaagtaactga

SEQ ID NO: 3988 - DNA, 141 bp, Streptococcus pneumoniae
  misc_feature (1)..(141): tiling:Spneumo1:WAN024DN4; Cluster includes WAN0241PE SP21 24||15901938|NP_346542.1|2036063..2036197|-|135 bp|hypothe tical protein|S.pneumoniae|TIGR4|NC_003028.1|ORF|120
gtgataaatatcctctattttctcataattctgacaatttggcaagtttttgatgaattttctgaaaaatatgataaaatgaagaaaatacggaatcaaggggaagtctatggagcagattggaaaagtcttctarctaat

SEQ ID NO: 3989 - DNA, 315 bp, Streptococcus pneumoniae
  misc_feature (1)..(315): tiling:Spneumo1:WAN024GJY; Cluster includes WAN023M00 3145 40_869||||462513..462827|-|315 bp|EGAD orf prediction|S.pn eumoniae|R6|NC_003098.1|ORF|110
gtgataaatggcaagctgatttgtgttgaagttacaccagaaaggtctttcttcgctttttcagccgcatctttcaaacgttgcattgccatcttgtcagtagacaagtcgataccgttttctttcttgaattctgctaccaagtggtcaatgattttttggtcaaagtcgtcaccaccaagtttgttgtcccctgcagttgacaatacgtcgaagacaccgtcacccaattcaaggatagagacgtcgaatgtaccaccaccaaggtcaaataccaagattttttcttctttgtcagtcttgtccaaaccataa

SEQ ID NO: 3990 - DNA, 312 bp, Streptococcus pneumoniae
  misc_feature (1)..(312): tiling:Spneumo1:WAN024F5B; Cluster includes WAN023KNK 3138 89_3186b||||1703127..1703438|+|312 bp|EGAD orf prediction| S.pneumoniae|R6|NC_003098.1|ORF|110
gtgataactgttccgcctgttaagatggcgatatcttcaagcatggctttgcgacggtcaccaaaaccaggtgccttgactgctactacgttgaaggttccacgaatcttgttcaaaacaagagttggaagagcctcgccatccacatcatccgcaataatcaagagtggacgattgctttggagaatgctttccaaaagtggcaagatttcttggatattggaaattttcttgtctgtaatcaaaatgtacggattttcaaggtcagccaccattttttcgctatcwgtcaccatgtactgtgaaaggtaa

SEQ ID NO: 3991 - DNA, 246 bp, Streptococcus pneumoniae
  misc_feature (1)..(246): tiling:Spneumo1:WAN024C8T; Cluster includes WAN023M8V 3143 01_391||||202715..202960|-|246 bp|EGAD orf prediction|S.pn eumoniae|R6|NC_003098.1|ORF|110
gtgataactttctcaccatttggtccgtatttaagaaatacacggatgacgccttgtttgtcatcttcaatgatttcaacgttttttacaaaaccttcgcgtttaaggatttcagcaatcccttttttgatgtttgatgcaggtacttcaagtacttcgtgtttagcttggttagcattacgaatacgagttaggaagtctgcgattgggtcagtcataaccattttgtttttctcctcttactag

SEQ ID NO: 3992 - DNA, 138 bp, Streptococcus pneumoniae
  misc_feature (1)..(138): tiling:Spneumo1:WAN024GEH; Cluster includes WAN0242QR SP06 92||15900593|NP_345197.1|663182..663313|+|132 bp|hypotheti cal protein|S.pneumoniae|TIGR4|NC_003028.1|ORF|010
gtgataatcatgcaagataactttttatttgaggaaattgaagaaatttcagtaccagttaatgatttttcagctggacttgcaacaggtatcggatttggtttagcaatccttgctcttgctggttgtykaactaat

SEQ ID NO: 3993 - DNA, 154 bp, Streptococcus pneumoniae
  misc_feature (1)..(154): tiling:Spneumo1:WAN024DSX; Cluster includes WAN02433K SP01 96||15900132|NP_344736.1|183072..183167|+|96 bp|hypothetic al protein|S.pneumoniae|TIGR4|NC_003028.1|ORF|021
gtgatacagtctgggagactgtatcagcccaactcccagaaatggggaagagttggaacgtccagtgaacatttttacyccaactcyyagaaatggggaagagttggaacgtccagtggatgtttttagcccatattcacattcactarctaat

SEQ ID NO: 3994 - DNA, 261 bp, Streptococcus pneumoniae
  misc_feature (1)..(261): tiling:Spneumo1:WAN024GLZ; Cluster includes WAN023M1N 3137 42_796||||418062..418322|+|261 bp|EGAD orf prediction|S.pn eumoniae|R6|NC_003098.1|ORF|110
gtgatagaaatagtttttctacgtcttccagatccggaaaactcgctaaattcatcaccagtttcgtatatgagggactgttcgcttagctcttttatgatgttagtcgttgttgctggagtaagtcctgtttcattaacaatatctgtacgggatgttgctggatttcgatatagaaactccagtatagtggctctattttgtaaaaaggctgattgttttgtaatcatttgtttcctcctttggtttattttatattaa

SEQ ID NO: 3995 - DNA, 255 bp, Streptococcus pneumoniae
  misc_feature (1)..(255): tiling:Spneumo1:WAN024G4Z; Cluster includes WAN023LHD 3146 33_1897a||||1023285..1023539|-|255 bp|EGAD orf prediction| S.pneumoniae|R6|NC_003098.1|ORF|110
gtgataggcaaccagactagacaaaagactgtgataggaccccatatcctccttagacagtcctttgtgattcatcctcttctctctccgcctaaatccaaaatggatcaactcttgaagataggcagattccttactttcactttcgttaaaaaggcttggagccgacaagaacaactgcttacgagcagaattgaccaaggaaagcatagtgtagcgatttttcttgagattttcactgctggcaatcagtaa

SEQ ID NO: 3996 - DNA, 309 bp, Streptococcus pneumoniae
  misc_feature (1)..(309): tiling:Spneumo1:WAN024EVU; Cluster includes WAN023KEG 3148 21_3595b||||1931834..1932142|+|309 bp|EGAD orf prediction| S.pneumoniae|R6|NC_003098.1|ORF|110
gtgataggtgcaggcctggataactggtgcgaccgtgtattcttcgtaggcatcgacaaagtcttcaacagccttcttgacaccttggataaaatctggattttgactgatagagccacccagactgatgacayctggatcgatcagatactggatattgagcaagccttgcgccagattgcggttcatgcgctcaatggcttcttgacaaagrryattaccagctgcggcctcttggtaaatcttgcgaccgtcccaatcagtatgaccagatttttcaatcacgtatcgtaccatattcccagttga

SEQ ID NO: 3997 - DNA, 525 bp, Streptococcus pneumoniae
  misc_feature (1)..(525): tiling:Spneumo1:WAN024FCR; Cluster includes WAN023KQD 3138 78_3056b||||1628535..1628981|+|447 bp|EGAD orf prediction| S.pneumoniae|R6|NC_003098.1|ORF|110
gtgataggttcctcccagagtcaagagttcctcatgggttccactctcgataatgcgtcccttatccaagacatagatgcagttggcrtcttgaatagtagaaaggcggtgagcgatagcaatagttgttcggccctgtctcatcttcgccagagaagcttgaaccaarctttctgtttcagagtcaatattggctgtcgcttcatccaaaatcaggattttaggctggctggcgactgttctagcaaaggcaagaagctggcgytgcccagtagagaagctcgaaccacgctcggaaacaggggagtcgtacccctgaggaagttcttgaataaaggaatctgcatccacaaaggctgccgcagcctgaacctgctcatcactgrtttcttggtacatggcgatattggacttaatagttccatgatagaggaagggttcctgyaagaccaaaccgatgttttttctcagctcttcttgactgaaatccctgatatccacatcatccaagagaactctccctga

SEQ ID NO: 3998 - DNA, 246 bp, Streptococcus pneumoniae
  misc_feature (1)..(246): tiling:Spneumo1:WAN024GKW; Cluster includes WAN0244GC spr0 470||15902514|NP_358064.1|475926..476159|+|234 bp|Hypothet ical protein|S.pneumoniae|R6|NC_003098.1|ORF|100
gtgatatactatatgratacaaaaatgatgtcacaattttctgttatggataatgaaatgcttgttcgtacagaggatggggatgtctctgatatttatagagggtacgctaatcagagaagtccattcgcttcttacccttctatattaaaaaattcaggtccttttccagtaagtgggtactgcctgcgtggttatcatgaccgtggttatataggagcaggttttcatttatgtggaatatag

SEQ ID NO: 3999 - DNA, 1709 bp, Streptococcus pneumoniae
  misc_feature (1)..(1709): tiling:Spneumo1:WAN024CB4; Cluster includes WAN0244P5 spr0 153|hk07|15902197|NP_357747.1|161830..162525|+|696 bp|Hist idine kinase|S.pneumoniae|R6|NC_003098.1|ORF|111
gtgatatgttggaacctgtctatgaaatcatccatgaaaaattggcgacaaaatagaatgaagcasttttggytacatacgcttctaagaacctatagttcagtgatgatcattatcattgcgagttttgcaatcttactctcttacgctgactgggattcacgtgaaaaggaagcccagagagtagcccagcgtgtaactgctagaacagtgagtgaaattgaatattaccatagagagtcaacccagatagctcaggctttagttgaaaaycaagctcgtatygagggaatctataaatactttagycttagcatgccagactatttttactggcaattagagcggaaagcttcgccttatatatcagtctctctgtatgaaaatgttgatgacctctatgttcgaaatgattttgtaactggrgtggccattgcttttcaagattacaaggaagtctatgtttctactaaagacaaacgtagkkkagaaaaaatcagggctgaggatttcaaaccagcaggaaatagttttgccattccrgtgtcagatccagtgtcagatcaagayttaggagtgatttacatctccttggatcctgctgttttataccatgccattgataatactagaggtcatactccgatggcagtaacagtgacckmaccttttgatacggagatttttcatatkggtgagacagttgataaggagagtgaaaattggctagttggcttaacttctcatggwtatcaggttcaggtggcagttccyaaaaactttgttttacaaggaacrgtgacyagctctgctttgattgtgggyttgagccttctctttattgtcattctttatctgactttgaggcagacytttgctaattaycaaaagcaggtagtggatttrgtrgawtccatycaagyyattgcycaaggmsaararggkcktcgsattgayaykyyygaraargatcaggaattrctcctaatcgcggagacgaccaatgatatgttggatcgattggaaaagaatatccatgatatttaccagttagarctyagtcaaaaagatgccaatatgcgrgccttgcaggcgcaaatcaaycctcayttyatgtataatacgctggagttcttgcgyatgtaygcagtyatgcagagtcaagatgagttggcagatatcatttatgaattcagtagtctcttgcgtaacaatatttccgacgaaagagagaccctcctcaaacaggaattagaattttgccgtaaatacagctatctctgcatggttcgctatcccaagtccattgcctatggtttcaagatagatccagagttagagaatatgaagattcccaagtttaccttgcaaccgctggtagaaaactatttcgcgcatggtgttgaccacaggcggacagataatgtgattagcatcaaggctcttaaacaggatggttttgtggraattttggtggtcgataatggtagaggaatgtcggctgaaaagttggcaaatatccgagaaaaattaagtcagaratattttgaacaccaagccagctacagtgatcaaaggcagtctatcgggattgtcaatgtacacgagcgttttgtgctctattttggagaccgctatgccattackatagagtctgcagagcaagccggtgttcagtatcgtattacaattcaagatgagtarctaat

SEQ ID NO: 4000 - DNA, 905 bp, Streptococcus pneumoniae
  misc_feature (1)..(905): tiling:Spneumo1:WAN024ERN; Cluster includes WAN0243EN spr1 829|nadC|15903871|NP_359421.1|1803124..1804023|-|900 bp|Pr obable nicotinate-nucleotide pyrophosphorylase|S.pneumonia e|R6|NC_003098.1|ORF|211
gtgatattaaaaatagaggacytagtgatgtcaatcatttcaactgatttaaccccttttcaaatagatgatacattgaaagcagccttgcgagaagatgttcattccgaagattacagtaccaatgccatttttgatcatcatggccaagccaaggtgtcgctttttgccaaggaagctggtgttttagcgggrctaaccgtttttcaaagggtttttaccctatttgatgccgaggtgaccttccagaatcctcatcaatttaaggatggggatcgtttgactagtggcgatttggttttagaaatcataggctcggtgagaagtctcttaacatgtgaacgcgttgccttgaattttttacaacatttatcagggattgcttcgaygacagctgcttatgtagaagccttaggcgatgattgcattaaggtatttgatactcgaaaaactactcctaatttacgtctttttgagaaatatgccgtgagagttggcggtggctataatcatcgctttaatttatcagatgctatcmtgctaaaagacaatcacattgcggcagtaggtagtgttcaaaaggcaattgctcaagcgcgtgcctatgccccttttgtgaaaatggtcgaggtggaagtggaaagccttgctgctgccgaagaagctgcggcggcgggtgctgatattatcatgttggataatatgtcattggaacagattgaacaggccattaccctaattgcaggacgttctcggattgaatgttctggaaatattgatatgaccactattagccgttttcgtggtttagcgattgattacgtctccagtggtagtttaacccatagtgctaagagtcttgatttttccatgaagggkttaacctaccttgatgtctaactaat

SEQ ID NO: 4001 - DNA, 270 bp, Streptococcus pneumoniae
  misc_feature (1)..(270): tiling:Spneumo1:WAN024CCO; Cluster includes WAN023MBY 3147 65_211||||102759..103028|+|270 bp|EGAD orf prediction|S.pn eumoniae|R6|NC_003098.1|ORF|110
gtgatccaatttggcagcatctccacctgtcaggccactacgagatttattttcattgaggccaagttggacagaggctttcataacttccagattgcgttccatgagaaggaagacttcttcacgttcgcgaccggtcaattcaaactctgttgtaatcatgagttctgcgacatttccttgaaagtccagatctgcttgctcgaccaattctttgatagaataaaacatgcttcctcctatttaaagaaattgacattgtggagatga

SEQ ID NO: 4002 - DNA, 345 bp, Streptococcus pneumoniae
  misc_feature (1)..(345): tiling:Spneumo1:WAN024GK9; Cluster includes WAN023L3V 3138 30_2457b||||1310124..1310468|+|345 bp|EGAD orf prediction| S.pneumoniae|R6|NC_003098.1|ORF|110
gtgatcttccaagttcttcgccatcatttgtgtgaagtctttgtcatagtaaccgttcaagacagtatcaacgatatcaacaaggacaacttcttttccaagacgttcaaaggcttcagcaagttcaacaccgatgtaaccaccaccaacaacggcgatacggtcgaggtgttggctcttgtcagaaagtttattgataacttcttcagcattttggtacaatttcacgaattgtacgttttcaagagttgctttaaattcgcggtttcctttaacaatttcaacaccttcgattggtggcaagattggtgtagarcctgtagcgaaaatcaatttttcgtatga

SEQ ID NO: 4003 - DNA, 1655 bp, Streptococcus pneumoniae
  misc_feature (1)..(1655): tiling:Spneumo1:WAN024G53-5; Cluster includes WAN02440J sp r1039|rexB|15903083|NP_358633.1|1021482..1024757|+|3276 bp |Second subunit of major exonuclease|S.pneumoniae|R6|NC_00 3098.1|ORF|111
gtgatgaaaaattccaacgaggctgagatgaaattactttatactgatattcgracttctttgacagaaattctaacaagagaggcagaagagctagttgcagctggcaagcgggtcttctacattgcccccaactctctttcttttgaaaaggaacgcgccgtgctggaatrcttgtcccagcaggcttctttttckattaccgtcacgcgctttgctcaaatggctcgytatctggtcytgaatgatttaccagytaaaactactcttgatgatatcggtcttgggttggccttttacaaatgccttgccgaactcgatcccaaggacttgcgtgtttatggcgctattaagcaggatcctcaattgatccagcagttaattgagctttaycatgagatgaccaaatcycagatgagttttttggacttggagaatttaacagatgaggataagaggrcggatttactcttgatttttgagaaagtaacagcctatcttaatcaaggtcagttagcccaggraagtcagttgtcccatttgattgaggctattgagaatgacaaggtaagtagtgattttaatcaaatcrccttggtcattgacggctttactcgtttttctgctgaggaagagcgggttgtggacttacttcacggcaaaggtgttgagattgttatcggggcttatgctagtaagaaagcctataccagtccttttagcgagggcaatctctaccaagccagcgtaaaatttctccatcatctggcttctaaataccaaacgcctgctcaggactgttctcaaactcatgagaagatggatagttttgacaaggcytctcgtttgttggagtcttcttatgacttttcagaactcgctttggatgtcgatgagaaagaccgtgaaaatttacaaatctggtcttgtttgacgcaaaaggaggagttggagctagtagcccgtagyattcgtcagaaattacatgagaactcagacctgagctacaagcattttcgtattctcttgggggatgtagcttcttaccagttatctctcaaaaccatttttgaccagtatcagattcctttttatcttggtagaagcgaagycatggctcatcatcccttgactcagtttgtcgagtctattttagctttaaaacgttaccgttttcgtcaggaggatttgattaatcttcttagaactgatttgtatactgacctcagtcagtctgatattgatgcttttgagcaatatatccgctatcttggtatcaatggcttgccagcctttcagcaaaycttcaccaaatcccaccatggaaaatttaatcttgagcgtttgaatgtcctccgcctgagaattttarcacctcttgaaaccctctttgccagccgaaaacaaaaggctgaaaamctcctacaaaaatggagtgtctttctaaaagaaggagctgtgacyaagcagttacaagatttgacaaccactttggaagctgtagaacaggaaagacaarccgaagtttggaaggctttctgccatgttttagaacaatttgcgactgtttttgctggttcacaggttagtctggaagacttcctagccttgctccattctggaatgagtttgtcccaataccgtaccattccagc

SEQ ID NO: 4004 - DNA, 203 bp, Streptococcus pneumoniae
  misc_feature (1)..(203): tiling:Spneumo1:WAN024DBS; Cluster includes WAN024436 spr0 944||15902988|NP_358538.1|928882..929079|+|198 bp|Hypothet ical protein|S.pneumoniae|R6|NC_003098.1|ORF|120
gtgatgaaaatggcaaccgataaaaatagaataatgattagcttggatgataaaaatctagagaaacttgaaaatttagtagaagatgytagagatagaaggggaatgcgactaacaaagtcccaggttattgaattactcctaaataccgttgattatttcgatgatattatgggggctatttactcaaaaaaataactaat

SEQ ID NO: 4005 - DNA, 329 bp, Streptococcus pneumoniae
  misc_feature (1)..(329): tiling:Spneumo1:WAN024DF5; Cluster includes WAN0244A1 spr0 697||15902741|NP_358291.1|698792..699115|+|324 bp|Conserve d hypothetical protein|S.pneumoniae|R6|NC_003098.1|ORF|111
gtgatgaaagaaactcagctattaaaaggtgttcttgaaggttgtgtcttggatatgattggtcaaaaagagcggtatggttatgagttggttcagactttgcgagaggctggatttgatactatcgttccaggaactatttatcctttgttgcaaaagttagaaaaaaatcaatggataagaggcgacatgcgcccgtcgccagatggtccagatmggaagtatttttcattaatgaaagaaggagaagagcgtgtctcagtcttttggcaacaatgggacgatttgagtcaaaaagtagaagggattaagaatgggggttaactaat

SEQ ID NO: 4006 - DNA, 708 bp, Streptococcus pneumoniae
  misc_feature (1)..(708): tiling:Spneumo1:WAN024C6K; Cluster includes WAN023R5Q cont ig_1518_2||||314..1021|+|708 bp|Glimmer 2.02 orf predictio n|S.pneumoniae|670|WAN01UDOB|ORF|001
gtgatgaaagagaaaaatatrtggaaagaattattgaatcgtgcaggttggctgttaatctttttkctrgcgacaattttatatcagattcctwtagsrgttactgctattttaacyttaarwgmagtaccrctgttrcagtcaggrctgatagttgckggyatttcwattgtrgttttrgcrctatttattwttggagctcgtaaaacgcaattagcwagttttaatttttctttttttagagctaaggatttggcacgmttgggmttragttatttagtyattatckgktcaartatacttggttctatcttgttrcaactgtcaaatgagacgacaacagskaaycagtctcagattaacgayatggttcaraatagttctytgatttccagtttcttcttgttggccttgcttgctccaatttgtgaggaaatcttgtgccgtgggattgttcctaaaaagattttcmgaggaaaagagaacttgggatttgtrgtyggtacgattgtktttgctttattgcatcaaccaagtaatttaccttctttattgatttatggaggtatgtcratcgttctrtcttggacrgcttacaagacmcaacgtttggaaatgtctatcttrcttcacatgattgtkaatggggtwgcyttctgtttrttggcwcttrtggtgatcatgagwcggacattagggatttctgtt

SEQ ID NO: 4007 - DNA, 1218 bp, Streptococcus pneumoniae
  misc_feature (1)..(1218): tiling:Spneumo1:WAN024FMN; Cluster includes WAN023OSQ pne7 4_10||||6889..8106|+|1218 bp|Type 35F2 capsule operon, Gli mmer 2.02 orf prediction|S.pneumoniae||WAN01UCCV|ORF|000
gtgatgaaagtagtaataaaaagaaagtctttgccagagattttagctcttagtgcactaactatatttttagttgtgtcaattttaratgtgactttttatgttcagtatcttccaaaagttgtttataagatactgatagctatttcgcttattctgctagttataaaagagttgtacaaaagaaagtttgattatagaactatcataagtctatttgctacagttttgatgtatctccttatagggagggtgagtactcttaactctaatattgcaataggaattattttcatttatgctttacgcgatattccttttaaaagcgtggcaaaaacttctttagcagtaagtgtactcatattactgtttgttataactrgcgcaaaattgggagttattataaattatttagagatttctgggactcgagtccgtagttatttaggatttaggtacgcactattcccatctatcttgatgatgaacatagtcgctattgtattttatttaaagcaaaataaaatacaatattggcaatggttattgttatctttatctgcttattggctgtatgatgaaacggattctcgattaacattttatagttcctgtatattgttgatatgcagtttattaataagatggatcccagaactattctctaagttcggatatatatttaaagcttttaaactcacctttattataaatgcagttgttagtttttgggtctcctttacctatctcaatttgagtcattcttatatcaataatctttttttaaaattagactatatattaggtggtcgtatatacttgrtgaataaatcgttgaatttgtatggttttggattattcggacgaccagttgaatggaatggaaatggtctgaccattgaaggagttagaaactatcagacctatctgtatgttgataatttgtatgttcaaattttacaaaaatttggtttactcgctctaggaataatgctcctagtcctaactttaaccttgtttaaagtgattaagagacgcgaatgggttctgtcttttattttgatattgatgagttttcattccatgattgatgatttgaatttgtaccttcattacaatattttttggatattattaggtagtttaatctaccccgattatcaattttctgatgaaagtgatgaagagttaggggaaaattcttttgaagaaattata

SEQ ID NO: 4008 - DNA, 1235 bp, Streptococcus pneumoniae
  misc_feature (1)..(1235): tiling:Spneumo1:WAN024DLC; Cluster includes WAN0244PE spr0 144||15902188|NP_357738.1|152331..153560|+|1230 bp|Conserv ed hypothetical protein|S.pneumoniae|R6|NC_003098.1|ORF|11 1
gtgatgaaagtatttcttcaaaatagagattttaggcaattaactatcaaccagtggatttcaacgcttggggatacgattttttatctggccttyctgaattatgtggcagatgcrtcttttgcmcctttgrcgattttactyatyacgatttcagaaaccctkccccaarttytacaaatctttctgggagttttggcrgattttcaacatcatcgtgtcttgaaatacacagtcattagttttrcaaaatttttgctttactctatmgtktcyytatcrctttcagggcagtcyttytccttgttrytagtarcmtttatttgtmtgmttaacctcttgtctgacacrttgagttayttttcaggmgccatgctcactccgattttcattagaattattgggcaagaycatctggcagaagctattggmtttaaacagtcaactgttagtttagtgaaaacaatcagtaatatyctaggaggagtcttaytaggyattctatccatccagtttatttccttrctgaacgctcttacctttttaatcgcatttttaggtatcctcttcataaaaactgacctcttgaaagtagaaaaaacgattarctatcaagaaggactctctgtaaaatccttttgccagcatttgctccaatcatcraaattgatatggaatatgaataaggtgctcttggttttgtttattatctctactagtcaagcagtgataaatgttacrgttcctrtytcyactctatttttraggaaycarccctttttgaatttacaaacwggtcaatctcttgccttgytakccacwytwgaaytrtcagccctgattgtcggaagccttgtaagtggctatctgcaacataccatttccataaaaacagctctctatgcctcacttgtcatccagttgcttcttctagtaggatttgccacagttcgttttgactggattctcatctttagtaccttggatgcctttttcgcaggtgttctctctcctagattgcaagaactcgtytttaaacaaatacctgakgagtcaatgggagcagttcaatcytctatcrgtgccawtacggttgttttacctagcttatttacaatakctttggtaaccattgctactagctttggaactctggcagttagctttgttttattgctatttsttctagttgcctttgttatgcttctgaatattcgtgaaagtatttarctaat

SEQ ID NO: 4009 - DNA, 207 bp, Streptococcus pneumoniae
  misc_feature (1)..(207): tiling:Spneumo1:WAN024DXA; Cluster includes WAN0243BX spr1 928||15903969|NP_359519.1|1910618..1910818|-|201 bp|Hypoth etical protein|S.pneumoniae|R6|NC_003098.1|ORF|121
gtgatgaacaagtataaagtgatttattatgtagtggtcatagctttattagtcagygtatttctactgattgggatggacctaagctggtttaatcyctatcaaagcgaccaatttgtttgggtctactttgctctcatcccagtmaytsaatggattgaaaagaaatccaaaaatctagcaagtgaaaaaggagaaykaactaat

SEQ ID NO: 4010 - DNA, 1331 bp, Streptococcus pneumoniae
  misc_feature (1)..(1331): tiling:Spneumo1:WAN024GLX; Cluster includes WAN0244HP spr0 421|PTS-EII|15902465|NP_358015.1|418456..419781|+|1326 bp| Phosphotransferase system sugar-specific EII component|S.p neumoniae|R6|NC_003098.1|ORF|110
gtgatgaacaatattttagcgtttttagaaacaaaagtcgctccgtttggtgaaaaagttggcaaccaacggcatttgaaagctattcgtgaaggatttatgatggcaatgcctttgattttagtcggctctttatttcttattctaatcagttggcctcaagaggcttttacaaattggctgaatagtgttggattgctaagtatcttgacaactatgaatcagtcaacagtagcgattatctccttggtcgcttgtttcggtattgcctacaggttgtcggaaggatatggtacagatggtccgtcggcagggatcatagccttatccagttttgtattgatggcacctcgtttttcgagtatggtttatgataaaaatggggagcaggtcaagcagttatttggcggcgcaataccattttctagcctgaatgcatcttctttgtttatggcgattactattggattggttacagcagagatttatcgtatgtttatccagcgcggaattacgataaaaatgccaagtggtgtcccaratgtrgtaagtaaatcattttcagctcttttayctggytttactacttttgttttgtgggctytggtcttaaaaggtcttgaagcggcaggagttgcasgaggtctcaacggactcctaggtgcaattgttggaacaccgcttaagttaattgcaggaacgcttccaggtatgattctatgtgttattgtaaactcattcttttggttctgtggagttaatgggggacaagttttaaatgcttttgtagayccagtttggttacaatttactacagaaaaccaagaagctgtggctgcaggacaaacactccaacacattattacattaccgtttaaagatttatttgtatttattggtggcggtggagcgactattggtcttgcgatttgtctcttcctatttagtaagagtcgtgcgaataaaacattaggtaagctagctattataccgtctatttttaatatcaatacagctattctatttacgtttccaacagttttaaatccgattatgctgattccgtttattgctactcctacaatcaatgccttgattacctatgtatcaatggctgtaggattagtaccctatacaacaggtgtaatccttccgtggacaatgccaccgattataggaggcttccttgcaacaggggctagttggcgaggagctctattacaagttgttttgattttggtttctgtagcaatttattatccattcttcaaaattgcagataaacgcaatcttgaaaaagaaaaagctactgttggagggaaataactaat

SEQ ID NO: 4011 - DNA, 455 bp, Streptococcus pneumoniae
  misc_feature (1)..(455): tiling:Spneumo1:WAN024F9G; Cluster includes WAN0243HD spr1 731||15903773|NP_359323.1|1708372..1708821|-|450 bp|Hypoth etical protein|S.pneumoniae|R6|NC_003098.1|ORF|331
gtgatgaagttacgaattgagattgacggcaatttagaggagactgaaattgtcatcaagacccccactttgacagatgaaattgcagacttgcaacgsctcttgcaagagtcaaaggctccgaggttgactttttacaaggggacaggtgaatattatctagacctgtcagaaattctcttctttgaaacagaagggagcaagatctacgctcataaccagaaggaagcttatgaggttcgcctcaagctctatgagttggagkctatcytkcctcgctattttartcgagtwtccaagtcaacgatcgywaayatycgkcaratytaytcrgtggacaagtccttttcaggaacgggcaccatttccttttatcaracscacaaggaggttcatgtstcacggcattaccaatccctcctaaaagaaaatctaagaaacatgaggtaactaat

SEQ ID NO: 4012 - DNA, 288 bp, Streptococcus pneumoniae
  misc_feature (1)..(288): tiling:Spneumo1:WAN024C5Z; Cluster includes WAN023QA2 cont ig_1258_2||||277..564|+|288 bp|Glimmer 2.02 orf prediction |S.pneumoniae|670|WAN01UEG8|ORF|001
gtgatgacacaaacacttgaagaaggaatgaagaatcaaagtaaatgcataaaaatcccaatggaaatcagaccgtttgatgtgggttatcgaatagtaaataaacacggtcaagcgcttgccttaaaaaacggagcaagtatattcgctttaccttcgctggccgaaaaagcgataaagaaagagtttggaaaaaatgatccagactttgacattgaaaaacattttgttgaagaggtcgctattgtcaatttaagtaaatttcatagttaytttgaggrggtggag

SEQ ID NO: 4013 - DNA, 1005 bp, Streptococcus pneumoniae
  misc_feature (1)..(1005): tiling:Spneumo1:WAN024D6Y; Cluster includes WAN023QQJ cont ig_1343_5||||5579..6583|-|1005 bp|Glimmer 2.02 orf predict ion|S.pneumoniae|670|WAN01UE6I|ORF|000
gtgatgattacatttaaggatattcaaattaagtataatgattttattgccatcgataatctcaatttaacaatcaatgarggagagtttttcacatttttaggaccaagtggttgtgggaaatcaacaactcttcgtgcactagttggatttttggagccttcacaggggcaaatactagttgataatcaagatattacgaatttagatccggaaaaacgcgaaattggtattgtgtttcaaagttatgcattattcccaacaatgactgtttttgataatattgcttttggtctaaaagttaaaaaagtttctcctgaaattattaaagctaaagttcatgaaattgcgaaaaaaattaatatctcagacgagcaactaaaccgaaatatttctgaattatcagggggacaacaacagcgtgtagctttagcacgtgcattagtattagaaccaaaaattytttgtttggatgaaccgttatcaaacctagatgccaaactacgagtttcgttgagaaaagaattgaaacgattgcaaaaagaactaggaatcactactctttatgtcacacatgatcaagaagaagcattaacattatcagataggattgctgtgtttaataatggatttattgagcaagttggcacgccgtatgatatttataatcaatccgmaactcaatttgtctgtgattttattggctcaatcaataaaattagccaagaagttcttaaaaaattacaaggcgagaataaatactttaaagaaactgaaggatacatacgcttagagcgtgttaagttagagaaaacttcacctcaagatttatctataacaggrgtaattagtgatattgagtttaatggtgtacttattaagtataaagtagacttgtcgaatagtgaaagtattcatattatcgaaaagaatgatggactatcacgtcatataatcraagaaaaagtcactatgwacattaatccgcgtgatataatgcaattt

SEQ ID NO: 4014 - DNA, 225 bp, Streptococcus pneumoniae
  misc_feature (1)..(225): tiling:Spneumo1:WAN024GHM; Cluster includes WAN023LXS 3143 41_978||||511885..512109|-|225 bp|EGAD orf prediction|S.pn eumoniae|R6|NC_003098.1|ORF|110
gtgatgcctttttctttgacratgttccagtgtttagcacgcaagtcttttgckgctgcwarragttcttcttctgagatttcttttctaaagtatttttcagttgtaaattttaattcacggaattcgcccaaacgagggaaaccgatgattgtagttgacatgatgtgtcctccaaaatttgttgttgaaactatcttaacagaaaagaaagcgtctgtataa

SEQ ID NO: 4015 - DNA, 174 bp, Streptococcus pneumoniae
  misc_feature (1)..(174): tiling:Spneumo1:WAN024CFZ; Cluster includes WAN023S1C cont ig_1623_4||||1307..1480|+|174 bp|Glimmer 2.02 orf predicti on|S.pneumoniae|670|WAN01UDAF|ORF|001
gtgatggaagatgagcaaaatattttagagacacaattgattttaggtaagcaagttttagaaattgtattggatttgctaaaagacgattcaaaaataggggtagttctacctttaaacataaatgaccgtgaatttacaattactgtagaaaaggaggtcacagatcgtgac

SEQ ID NO: 4016 - DNA, 355 bp, Streptococcus pneumoniae
  misc_feature (1)..(355): tiling:Spneumo1:WAN024FFJ; Cluster includes WAN0243MC spr1 551||15903594|NP_359144.1|1533243..1533596|-|354 bp|Hypoth etical protein|S.pneumoniae|R6|NC_003098.1|ORF|221
gtgatggaayacttgtttaaaatgataatcttattaccctgtttttactttttcagctggattgamarggmwaayagagawagtaarwttttcycaattttttactatttttactggatttacatcaccctctatgctctttttagccttgcttggacagttttttcagttctgtttttcaatatcgtcttgagaaatttgacagatatcaagttatggggtatttggctattattactacttatcgcttttgctagtgrytggttagmctatrtctktttcaaaaaaatgmttsrcttgagrcgggaactagggaartctaaaggygtgmagkmawbkaaskwrtaggaactaa

SEQ ID NO: 4017 - DNA, 249 bp, Streptococcus pneumoniae
  misc_feature (1)..(249): tiling:Spneumo1:WAN024DZF; Cluster includes WAN023KHV 3144 71_3451b||||1850922..1851170|+|249 bp|EGAD orf prediction| S.pneumoniae|R6|NC_003098.1|ORF|110
gtgatggggatcgaacccacgcatgccagagccacaatctggtgtgttaaccacttcaccacacccgccataattctattaacacgggcagtaggaattgaacccacactgaaggttttggagaccttagttctacctttaaactatgcccgtaaaatggaaggggagggattcgaacccccgaacccgaaggagcggatttacagtccgccgcgtttagcctcttcgctacccttccaaaatatataa

SEQ ID NO: 4018 - DNA, 201 bp, Streptococcus pneumoniae
  misc_feature (1)..(201): tiling:Spneumo1:WAN024BEU; Cluster includes WAN023KI4 3145 65_3441||||1844202..1844480|-|279 bp|EGAD orf prediction|S .pneumoniae|R6|NC_003098.1|ORF|101
gtgatrgraagcgattctcgttcgttttttctttgtcatactcttcgaaaatctcttcaaaccacgtcagttttatctgaaacytcaaagctgtgctttgagcaacctgcgactagcttyctagtttrctytttgattttcattgagtatcaatttgaatggaaaatggaaagttatyatcttgtaatgartccaagcaac

SEQ ID NO: 4019 - DNA, 252 bp, Streptococcus pneumoniae
  misc_feature (1)..(252): tiling:Spneumo1:WAN024CWY; Cluster includes WAN023LM1 3140 28_1605a||||849938..850189|-|252 bp|EGAD orf prediction|S. pneumoniae|R6|NC_003098.1|ORF|110
gtgattagatcttgttcaaggggttcttccttttcttccttsttcacttccttttcggwyrmyrartccttggaaacagctgcracttcagcctgcaaattcgtctctttgacaggtgtttgtggagctggttttagcaggaaaaatcctcctacaagcaagcccagaccagtacagatgacgatgattttatactctttgattttctcgataattgcttccatattttctcctctcttagattattcgtaa

SEQ ID NO: 4020 - DNA, 492 bp, Streptococcus pneumoniae
  misc_feature (1)..(492): tiling:Spneumo1:WAN024DXD; Cluster includes WAN023KFJ 3148 14_3549||||1906310..1906573|+|264 bp|EGAD orf prediction|S .pneumoniae|R6|NC_003098.1|ORF|220
gtgattataggttccttctgcatcgtggatcatggttgctccgcggtgcaattttttatggattttttcaattaccttctctggatgatttgtcacaatcatggcctgcatacgcttttgcttagtaaagactgcgtctgtcacacggctagagacaaagatggtaatcatagaataaagagcgtatttccaaccaaaggtcaaacctgctatcagcatgatagttccatttaccaagaaagaaatactaccgacattcttacccgttttcttacgaatagtcaggctgacgatatccgtcccaccactggagatattgtttcgaagagcaaaaccaatccccaaacccataacaacacccccaaaaagggaattgataatgggatcctcygtcaaggttgccacagggacaaactggataaagaaggaactcatagataccgtgataaaggtaaagacggtgaacttatggccaatctgataccaagctaa

SEQ ID NO: 4021 - DNA, 653 bp, Streptococcus pneumoniae
  misc_feature (1)..(653): tiling:Spneumo1:WAN024D5L; Cluster includes WAN0243M4 spr1 559|ABC-NBD|15903602|NP_359152.1|1539214..1539936|+|723 bp |ABC transporter ATP-binding protein - unknown substrate|S .pneumoniae|R6|NC_003098.1|ORF|111
gtgattatattaaaggagtttaagcctatgtcattactagyatttgaaaatgtatccaaatcatatggagcaacaccagcccttgaaaatgtttctcttgacattccagctggaaaaattgtcggccttcttgggccaaacggctcaggaaaaacaaccctgattaaactaattaatggcctcttacaaccagatcaaggacgtgtcctcatcaacgacatggacccaagcccagcaaccaaggccgttgtagcttatttgcctgatacgacctatctcaatgagcaaatgaaggtcaaagaagccctaacctacttcaagaccttctataaagatttcaatcttgaacgcgcccatcatctacttgcagacctgggcattgatgaaaatagtcgtctcaagaaactatcaaaagraaacaaagaaraggttcaactgattttggttatgagccgtgatgctcgtctctatgttttggaygaacccattggtggggtggatccagcagcccgtgcttatatcctcaataccattatcaacaactactcaccaacttctaccgttttgatttctacccacttgatttctgatatcgagccaatcttggatgaaattgtcttcctaaaagacggaaaagtcgtccgtcaaggaaa

SEQ ID NO: 4022 - DNA, 216 bp, Streptococcus pneumoniae
  misc_feature (1)..(216): tiling:Spneumo1:WAN024D6S; Cluster includes WAN0243OM spr1 469||15903512|NP_359062.1|1450858..1451067|+|210 bp|Hypoth etical protein|S.pneumoniae|R6|NC_003098.1|ORF|120
gtgattatcatgcgtagattctattcccatctcccctactatctggtcatattattcttttattggccactttatgagttgttcttactagttgtttctgacccccttacactcaaggractctatataaacaatcttctcttctttacacctctggtaatcttgattrtatcgttactctatagctaccgtttccgtttctcacttykaactaat

SEQ ID NO: 4023 - DNA, 117 bp, Streptococcus pneumoniae
  misc_feature (1)..(117): tiling:Spneumo1:WAN024DQV; Cluster includes WAN0242VT SP04 97||15900411|NP_345015.1|476437..476547|+|111 bp|hypotheti cal protein|S.pneumoniae|TIGR4|NC_003028.1|ORF|120
gtgattatcatggttctagagtttgataaaaaactacagaatataaagcgctttcttgaaaacaacaaaatcaatcttttaggaggagaaaatgaagaatccatttttykaactaat

SEQ ID NO: 4024 - DNA, 90 bp, Streptococcus pneumoniae
  misc_feature (1)..(90): tiling:Spneumo1:WAN024DNC; Cluster includes WAN023SHX NC_0 03098.1_2289||||1777032..1777121|+|90 bp|Glimmer 2.02 orf prediction|S.pneumoniae|R6|NC_003098.1|ORF|100
gtgattatcttgggttctcacttttctcacccatcactaggattgatgacttctcaaaatcccccttataatctaactttaagtagagaa

SEQ ID NO: 4025 - DNA, 374 bp, Streptococcus pneumoniae
  misc_feature (1)..(374): tiling:Spneumo1:WAN024GLH; Cluster includes WAN023LW9 3142 45_1054a||||551639..551941|-|303 bp|EGAD orf prediction|S. pneumoniae|R6|NC_003098.1|ORF|100
gtgattattccatttcaaaaacatcgctttcttgcttgtttggtagaaccaatgagagcaagattccaacaatggctggcaccaaccatgggagagatgccttggcaaaaggaagaacgckaacwagatttgcaagaractcaaccttaaacgagcttcctagtacgyttgcaatggcaataactrtaaccacagcaattgtcaactgcatacctggttttgaaagggcaacaaatttgttgacaatgacaatcataacgatagcaatcgtgattgggtacaagataaccagtactggaattgagtacttgataatcgcatcaagacccaaattggcaatagcaaatccaatcaaggtaaaggctgtcgcataa

SEQ ID NO: 4026 - DNA, 1439 bp, Streptococcus pneumoniae
  misc_feature (1)..(1439): tiling:Spneumo1:WAN024FVD; Cluster includes WAN0243VH spr1 222||15903265|NP_358815.1|1219095..1220528|-|1434 bp|Hypot hetical protein|S.pneumoniae|R6|NC_003098.1|ORF|741
gtgattgatgggaaacgattattatttagtttgaccatagtcagttatgccttgacgctagtaagtggaattgtgtatctgtttaataataataatgttagcttactttctactttattgttcttgttggttagtagcttrattgcttgttggaatgatatcaagtattacttaatccattttattttctatttaaccatttttgtatttctggtatcaagaccgaccattgattattttagggatggtgctttggatacctatcatccaatagcctatcgttttgcctttatagttgtcatgrtttcgattctgggcttgacmacaggaggcrtyctggctcgttacttcatagctaggaagaaaataaaagtagcaaatataggaaattctctaaaagaggtttatatcaagcggttacgctttgtatcactaggagtttttcttctaacytatcctttctatttcattcggttatttgaacggctcttgtatcgtttgcagacttcctactatgcctactatgcaaattttgaaagtaaactgccttattttacctacattttgtctacctttacggtctatgcaatgtgtatgtatctggcaaccaagccaaagaaattgcaggccacagcagtgcttgtctcctttattgcagctaayactattcatttggcaattgggacacgaaatccctttattttaagtattttatttgcttttgtttattactttatgcgggagcaarctgaaaaaggaaaatggattgggtttaaagaaaagttagcgatttttgtaggttctcctattctcatgttagcgatgggagtactcaattatgtacgggataatgtccaagtttcycatacaggtttctgggatatcttayttgactttatctataaacaagggactagttttggtgttctggctcgaggttttctatttaacagtagcctcccttaccgagatttccgtaattttacttttggtcctgttcttgaytattttgcaagggggagtttgggagccattttcggaggaaaagcctttgaacatacaaccaatagtgtggaactagctattgatagtaatagttatgcccacaatctatcctatcttgtcttgaacaaggaatacytgaaagggcatggtatcggaagtagttatatcatggagttgtataccgactatggtatgattggagtctttctgcttagtttcttactcggcgtattatttatagccatgctgcaagtagcctatcgctcaaggacaatcctatttgctttatccctactcatcttgaataatctattctttatgccaagaagcagcttttcagaaagtttcttcaatttatttacaatgcaattctggggaattgttcttgtgattatatttgtagcaaaaatgcttacaaaggaaaactarctaat

SEQ ID NO: 4027 - DNA, 392 bp, Streptococcus pneumoniae
  misc_feature (1)..(392): tiling:Spneumo1:WAN024DHB; Cluster includes WAN0244EY spr0 520||15902564|NP_358114.1|520970..521356|+|387 bp|Conserve d hypothetical protein|S.pneumoniae|R6|NC_003098.1|ORF|111
gtgattgatgtcaatctcattaacgggattgcgctagcctttgagggrgatgcggtgtattctatgtatattcgccgycacctcatcctcaaaggtatgaccaarcccaataaactccaycaagargcracyaagtaygtgtcagccaaggctcaggctcgyctgattgctctcatgttggaggagcagrtcctaacggaaaaagaagaagaaatctacaaacgtggccgcaataccaatagycacacaaaggctaaaaatgcagatgtcgtgacttatcgtatgtccacgggatttgaagcrgttatgggctatctccatatgactgagaatctggaacgtcttgagagtttggtttcatggtgcatccaaaaagtggagggctarctaat

SEQ ID NO: 4028 - DNA, 764 bp, Streptococcus pneumoniae
  misc_feature (1)..(764): tiling:Spneumo1:WAN024FWG; Cluster includes WAN0243W1 spr1 202|ABC-NDB|15903245|NP_358795.1|1197693..1198451|-|759 bp |ABC transporter ATP-binding protein - unknown substrate|S .pneumoniae|R6|NC_003098.1|ORF|211
gtgattggaggcaagaatatggataaagattatatattaaaagtgaaagggctgtatcatcaatttttactaggaaataataaaacgttgcaagtgctgaaaaatgtttctctttctgcttcgagaggagaatttataagtattctaggaattagtggttctggaaagtcaactttattaaaatgtatttctagtttgcttgaaccaacaagtggggaagtaattttaaatggaatcaacccctataaaatcagaaatgcaaaattgtcaagtataagacgtaacgaagtatcttttatatttcaagcatacaatttaataccttccctgccggtaatagaaaatatagcacttcctttgcgattatcacaaaaaaaattaactattaaaaatgtagaaaacttactcaaaagaatgaagtttaatgctggcttaaacgattttgttggaactctgtctggtggagaacaacagaaggttgctatagctagagcggttattgctgatagtgatataatatttgctgatgagccaactggggctttagacagcgtttctcgtgaagtaatttttgaattattgagagagttagtaggggcgggtaagtgtgtaattatggtaacgcacgatatagaattggcctcgaaaactgatcgtgcattaatattgaaagatggaaaaattttcaaagaacttcatagacctagcggggaagagttgtataaaatcttagaggtacaatcaactacggaggaatarctaat

SEQ ID NO: 4029 - DNA, 456 bp, Streptococcus pneumoniae
  misc_feature (1)..(456): tiling:Spneumo1:WAN024GID; Cluster includes WAN0244FT spr0 489||15902533|NP_358083.1|489732..490181|+|450 bp|Hypothet ical protein|S.pneumoniae|R6|NC_003098.1|ORF|111
gtgattggagtcgttgcgagagagaatgccgcagagcagatcaaacagtatcaaaaatttactgtgaatatttctgatgaaacttctatgcttgcgatggagcaggctggttttatcagtcatcaggagaaattggaacgtttgggagtgcattatgaaatttctgaacgaactcagaytyctattttagacgcctgtccacttgttttagattgtmgggtagataggattgttgaggaagacggtatttgccacatctttgccaagattcttgagcgacttgttgccccagaaytcctggatgaaaagggacattttaaaaatcaactgtttgccccaacctatttcatgggagatggatatcagcgcgtttatcgctatctggayaagcgtgtagatatgaagggcagtttcatcaaaaaagcgaggaagaaggatggcaagaacykaactaat

SEQ ID NO: 4030 - DNA, 520 bp, Streptococcus pneumoniae
  misc_feature (1)..(520): tiling:Spneumo1:WAN024CGG-5; Cluster includes WAN0244RX sp r0053|purE|15902097|NP_357647.1|57276..57797|+|522 bp|Phos phoribosylaminoimidazole carboxylase, catalytic subunit|S. pneumoniae|R6|NC_003098.1|ORF|342
gtgattgttgaaaaagaggaaaaaggagaagaaatgaaaccagtaatttccatcatcatgggctcaaaatccgactgggcaaccatgcaaaaaacagcagaagtcctagaccgcttcggtgtagcctacgaaaagaaagttgtttccgcacaccgtacaccagacctcatgttcaaacatgcagaagaagcccgtagtcgtggcatcaagatcatcatcgcaggtgctggtggcgcagcgcatttgccaggcatggtagctgccaaaacaacccttccagtcattggtgtgccagtcaagtctcgtgctcttagtggagtggattcactctattctatcgttcagatgccgggtggggtgcctgttgcgaccatggctatcggtgaagctggagcgactaacgcagctctctttgccctccgtctcctctctgtagaagataagtccattgcggatgcacttgccaactttgctgaagaacaaggaaaaatcgcagaggagtcgtcaaatgagctcatcy

SEQ ID NO: 4031 - DNA, 234 bp, Streptococcus pneumoniae
  misc_feature (1)..(234): tiling:Spneumo1:WAN024FB3; Cluster includes WAN023KOL 3138 85_3137||||1669587..1669820|+|234 bp|EGAD orf prediction|S .pneumoniae|R6|NC_003098.1|ORF|110
gtgattracmcctgcccaaaactgagaggattctgtgatggtcttgccatccaacatcgaccaatggacaccttccaagacattacggaaaccgaggatcaatccwccracwatcaaggctggaataatcggagtaaaratytccgccagagtggtcataacaccttggaccacgttttgattactcttagctgcagacttggctgcttctttggaaacaccctcaatacctga

SEQ ID NO: 4032 - DNA, 362 bp, Streptococcus pneumoniae
  misc_feature (1)..(362): tiling:Spneumo1:WAN024C8R; Cluster includes WAN0244NP spr0 205|rplR|15902249|NP_357799.1|203947..204303|+|357 bp|50S Ribosomal protein L18|S.pneumoniae|R6|NC_003098.1|ORF|111
gtgatttcaaaaccagataaaaacaaactccgccaaaaacgccaccgtcgcgttcgcggaaaactctctggaactgctgatcgcccacgtttgaacgtattccgttctaatacaggcatctacgctcaagtgattgatgacgtagcgggtgtaacgctcgcaagtgcttcaactcttgataaagaagtttcaaaaggaactaaaactgaacaagccgttgctgtcggtaaactcgttgcagaacgtgcaaacgctaaaggtatttcagaagtggtgttcgaccgcggtggatatctatatcacggacgtgtgaaagctttggctgatgcagctcgtgaaaacggattgaaattctaactaat

SEQ ID NO: 4033 - DNA, 237 bp, Streptococcus pneumoniae
  misc_feature (1)..(237): tiling:Spneumo1:WAN024FXL; Cluster includes WAN0242AW SP13 05||15901164|NP_345768.1|1232496..1232600|+|105 bp|hypothe tical protein|S.pneumoniae|TIGR4|NC_003028.1|ORF|120
gtgatttctgaattgctaaacattttcttttcttatagcataccatactttaagattttgtctttgagaaagatatttccaagaaaaacgttcgttttttttatctattttcaaaaaaaaccaaaaactgaattgaaagaatttttagaaaatttctgttttttctttacagtgaaaaaaaattctgctataatgtcttatgtaataaaatatgacaataaaaggagaacgatatga

SEQ ID NO: 4034 - DNA, 1085 bp, Streptococcus pneumoniae
  misc_feature (1)..(1085): tiling:Spneumo1:WAN024CL2; Cluster includes WAN0243ER spr1 825|gapA|15903867|NP_359417.1|1799954..1801033|-|1080 bp|G lyceraldehyde 3-phosphate dehydrogenase (phosphorylating)| S.pneumoniae|R6|NC_003098.1|ORF|341
gtgatttgtagtgattcaagttactcttttcacaataaaaatttcatgattttcataaggaggaaatcactaatggtagttaaagttggtattaacggtttcggwcgtatcggtcgtcttgctttccgtcgtatccaaaacgtagaaggtgttgaagttacacgcatcaacgaccttacagatccagttatgcttgcacacttgttgaaatacgacacaactcaaggtcgtttcgacggtactgttgaagttaaagaaggtggattygaagttaacggtaaattcrtyaaagtttctgctgaacgtgatccagarcaaatcgactgggctactgacggtgtagaaatcgttcttgaagctactggtttctttgctaagaaagaagcagctgaaaaacaccttaaaggtggagctaaaaaagttgttatcactgctcctggtggaaacgacgttaaaacagttgtattcaacactaaccacracgttcttgacggtactgaaacagttatctcaggtgcttcatgtactacaaactgcttggctccaatggctaaagctcttcaagayaactttggtgttgttgaaggattgatgactactatccacgcttacactggtgaccaaatgatccttgacggaccacaccgtggtggtgaccttcgccgtgctcgcgctggtgctgcaaacatcgttcctaactcaactggtgctgcwaaagctatcggtcttgtaatyccagaattgaayggtaaacttgayggatctgcacaacgcgttccaactccaactggatcagttactgaattggtagcagttcttgaaaagaacgttactgttgatgaagtgaacgcagctatgaaagcagcttcaaacgaatcatacggttacacagaagatccaatcgtatcttcagatatcgtaggtatrtcttacggttcattgtttgacgcaactcaaactaaagttcttgacgttgacggtaaacaattggttaaagttgtatcatggtacgacaacgaaatgtcatacactgcacaacttgttcgtactcttgaatacttcgcaaarattgcywaataaytaat

SEQ ID NO: 4035 - DNA, 207 bp, Streptococcus pneumoniae
  misc_feature (1)..(207): tiling:Spneumo1:WAN024E29; Cluster includes WAN0241RB SP20 49||15901869|NP_346473.1|1951676..1951936|-|261 bp|conserv ed hypothetical protein|S.pneumoniae|TIGR4|NC_003028.1|ORF |111
gtgattttactggaagcagtagtcgctctagctatctttgccagcattgcgaccctccttttgggacaaattcaaaaaaataggcaagaggaagcaaaaatcttgcaaaaggaagaagtcttgagggtagctaagatggccytgcagacggggcaaaatcaggtaagcatcaacggagttgagattcaggtattttctagtgaaaaa

SEQ ID NO: 4036 - DNA, 332 bp, Streptococcus pneumoniae
  misc_feature (1)..(332): tiling:Spneumo1:WAN024DWR; Cluster includes WAN0243BD spr1 948||15903989|NP_359539.1|1929248..1929574|-|327 bp|Hypoth etical protein|S.pneumoniae|R6|NC_003098.1|ORF|221
gtgattttatggrgtttygattttgyaaatgatcatgctcaygcatttttcatggataatgttgagtggagtcatgcagattcttactttyktagctttgttagtgacgatgttgaagaacgttacayagaaaatgtctatctggatagcctaagtgtcaaacaaaaatttaagtttattttcgacttcggtgatgaatggcgttttgaatgccaagtrctgagagaaatcgagacagaggacgaagaagyttatctcgtacgttcggttggaacgtygccagaacaatatccagattatgatggttttgactatgaagaatggtaactaat

SEQ ID NO: 4037 - DNA, 368 bp, Streptococcus pneumoniae
  misc_feature (1)..(368): tiling:Spneumo1:WAN024DBC; Cluster includes WAN024426 spr0 980||15903024|NP_358574.1|966371..966733|+|363 bp|Conserve d hypothetical protein|S.pneumoniae|R6|NC_003098.1|ORF|111
gtgattttattgaagactaagagtgaggaaaatatggcttatacagaagakcraattgawarcatcamaacacggattttaacakccttggmagaagtcatcgaccctgagttgggaatcgatattgtcaatcttggtttgatctatgagattcgttttgacggtgacacagggcaaacagagattgacatgactttgacaactatgggttgtcccttagcagaccttttgacagaccagatttatgatgctatgatagaggttccagaastracggatactgaggttaaattagtctggtatccagcctggacagttgaaaaaatgagtcgctatgcccgcattgccctaggcattaagtaactaat

SEQ ID NO: 4038 - DNA, 480 bp, Streptococcus pneumoniae
  misc_feature (1)..(480): tiling:Spneumo1:WAN024FV2; Cluster includes WAN0240H7 |cap 8G||CAB43610.1|||480 bp|glucuronic acid transferase|S.pneu moniae||AJ239004|ORF|000
gtgatttttataactgtagggactcaaaaacacccttttaatcgcttgttaaaaaaaatagatcaacttattgaattagaagtgataaaggaagaggtgtttgctcagattggagcttctgattataaacctaaatacttttcttataattcatttttgagttcaattgatatgaatgagaagrtgagagaagctagtatggtaattayacatggtgggactgctagtattgttaaagctttgaaattaagaaaaaaaattatagcggttccacgattagagcagtttggagaacatgtggataatcaccaattacaaatcatcacagttcttggtgaggaaggttatattttgccatgctttgatatagagcagttaggaactgtttatcaaaaagctcagacttttacaacaaagccatatatttctaatagttatgcacttttagaagatatacgacaatacatagatagtctttga

SEQ ID NO: 4039 - DNA, 264 bp, Streptococcus pneumoniae
  misc_feature (1)..(264): tiling:Spneumo1:WAN024FNR; Cluster includes WAN023L3R 3128 15_2463||||1313072..1313335|-|264 bp|EGAD orf prediction|S .pneumoniae|R6|NC_003098.1|ORF|110
gtgawtgctgcaactttttctacccattctggatcgtcagggtcaacttctgtgatggttgtagcgattggttttccacaatccaagtcttctgattcgattggttttggttttttcaatttcgaaacgactcctacgtatttaacaaagttatctaagcaagtttcaaggaatttaacagtgccttcgttggtgatatttccgttgttatcaaaagcttccttagctttaccaagaaggaattcgttacctggaagcgtgtag

SEQ ID NO: 4040 - DNA, 869 bp, Streptococcus pneumoniae
  misc_feature (1)..(869): tiling:Spneumo1:WAN024DYM; Cluster includes WAN0243CT spr1 896|pstC|15903937|NP_359487.1|1875369..1876232|+|864 bp|AB C transporter membrane-spanning permease - phosphate trans port|S.pneumoniae|R6|NC_003098.1|ORF|221
gtgayaaaacaagccttcaaagaagcagtttttagggcaatttttttcatgagtgcaacagtagctgttgtagctattttgctaatctgtttctttatttttagtaatggcttacctttcatrgctaactacggctttgcccgttttttattaggcagtgattggtcgccaacgaacattccggcaagctatggtattttaccaatgatcgttggttccttattaattaccttaggagcgattgtgattggggtgccaacaggcatcttgacatcggtgtttatggtttattattgtccaaagcccgtctatggcttcttaaaatcagctatcaacttgatggcrgccattccatctattgtttatggttttttcggcctacaattattggtgccttggattagaagctttttaggaaatggcatgagtgtcctaaccgcttcgttactattaggaataatgattttgccaaccattatcagtttgtcagaatctgctatccgaacagttcccaaaacgtattattctggtagcttggctctaggagctagtcatgaacggagtatttttagtgtcatcttgccagctgcgagatctggtattttatcagcagttattttaggmatcggtcgcgcagtaggtgaaaccatggcagttattttggtrgcaggcaaccarccgattattccaagtggactcttttcaggaaccagaaccttaacaaccaatattgttctggaaatggcttacgcatcaggtcagcatagggaagcccttattgcaacctcagcagttctctttttccttattctcttgattaatgcctactttgcctacttgaaaggaaaatcatcttatgagtaactaat

SEQ ID NO: 4041 - DNA, 168 bp, Streptococcus pneumoniae
  misc_feature (1)..(168): tiling:Spneumo1:WAN024GL4; Cluster includes WAN0242UM SP05 41||15900454|NP_345058.1|515808..515957|+|150 bp|bacterioc in BlpO|S.pneumoniae|TIGR4|NC_003028.1|ORF|021
gtgayayactatatgratacaaaaatgatgtcacaatttkcwgttatggataatgaaatgcttgcttgcgttgaaggtggaratattgattggggaagaraaattagttgtgcagcaggggttgcatatggcgcaattgatgggtgtgcaacaacggttykaactaat

SEQ ID NO: 4042 - DNA, 1487 bp, Streptococcus pneumoniae
  misc_feature (1)..(1487): tiling:Spneumo1:WAN024FCE; Cluster includes WAN0243J5 spr1 667|galT|15903709|NP_359259.1|1639091..1640572|-|1482 bp|G alactose-1-phosphate uridylyltransferase|S.pneumoniae|R6|N C_003098.1|ORF|221
gtgaycttagtarataaatttgtaacacatgtcatttctgaaagytcatttgaggaaatggatcgaatctayctgaccaaycgtgttttgkcacgagtgggagaaggtgttttggaagttgagaccaatctggataaattgattgacctcaaggaccagctrgttgargaarccgttcgattagagaygattgaggatagtcagactgcgcgtgaaatccttggtrctgaaytgatggayttggtgactccttrtccragtcaggtcaatcgtgayttytgggmarcytaygycyactctccwgarcaagcgatagaggatttttaycaactcagtcrgaaaaatgaytacatcaaactcaaggccattgctaraaatatcgcttatcgtgttccatctgaytayggagaacttgaaattaccatcaatctctctaagcctgaaaargatccsaaagagattgyggyagccaagttggtgcaagctagtaattatcctcagtgtcarctttgtytagagaatgagggytaccatggtcgdgtyaacyacccagctcgyagcaaycaccgkattatccgttttgaaatggttggtcaggaatggggkttccagtattcgccctatgcttactttaatgagcattgtatctttttagatggccagcatcgtcccatggccattagtcgtcagagttttgaacgtctgttggctatcgtagascagtttccaggatattttgctggatctaatgccgacctgccgattgtggggggctctattctaactcaygatcattatcagggaggccgtcacgtatttcctatggaattggctcccttgcaaaagrccttccgatttgctggttttgagcaggtcaaggctggaattrtcaagtggccmatgtctgtcctacgyttgacttcggattccaaagaggatttgatyaayttrgctgataagattttscaggaatggcgycagtattcagatyctrswgtgcagattttrgcagagacagacrggacaccgcatcacacyatcacaccmatwgcscgyaarcgygatggacagtttgagttggacttggtcttgcgagacaatcagacttcagcagagyatcctgatggyatctatcatccccacaaggatgtccaacatatcaagaaggaaaatatcggcttgattgaggtcatgggcttggcaatcttgccaccacgtctgaaagaagaagtrgagcaagtcgckagctatcttgtaggagaagctgttacagttgccgattatcatcaggagtgggcagaccaactcaaatcccaacatccagacctaacggataaagaaaaagcccttgcaatcgtcaaggactctgtgggtgctatctttgygcgtgtacttgaggatgcaggagtctacaagcagacagaacaaggkcagacagcywwyatgcgctttgtggaacaggtcggaattttactagactarctaat

SEQ ID NO: 4043 - DNA, 87 bp, Streptococcus pneumoniae
  misc_feature (1)..(87): tiling:Spneumo1:WAN024F7T; Cluster includes WAN023S6U NC_0 03028.1_2746||||2085881..2085967|-|87 bp|Glimmer 2.02 orf prediction|S.pneumoniae|TIGR4|NC_003028.1|ORF|010
gtgcaaaaacttgatactatgcgttttattgtgggaaggtttactccattttctcctgaaattgagtttttgtccagcctctgtttt

SEQ ID NO: 4044 - DNA, 225 bp, Streptococcus pneumoniae
  misc_feature (1)..(225): tiling:Spneumo1:WAN024FDZ; Cluster includes WAN023KS1 3133 33_2973||||1580981..1581205|+|225 bp|EGAD orf prediction|S .pneumoniae|R6|NC_003098.1|ORF|110
gtgcaaaagcgtgaacccaaccatactgacttgagaaaccysttgtatccttttcttttgaaagatagtgcaagccttgatttaaaaggacattacgaatttctggagaaggatttcccaaatgatcaaacaaccactggatttcttcctggttataatttggtttttcttctgctatttttcttagtaaatcttgatacatggtcaatacctctacatttctag

SEQ ID NO: 4045 - DNA, 243 bp, Streptococcus pneumoniae
  misc_feature (1)..(243): tiling:Spneumo1:WAN024G8U; Cluster includes WAN023LM3 3146 53_1598||||847539..847781|-|243 bp|EGAD orf prediction|S.p neumoniae|R6|NC_003098.1|ORF|110
gtgcaaagacagggccttagcagacttcttttttacttcgttcacccttgctttttctttttaggtttgggcgttggcagttggttatacatagctaaaatyaggtcttatagaaacatcttattatcaagttcttccactcaaatcatttctttggcacctttgtatggaaactcaaaagaagattggtcaatcttatctaagactgcttgcacgggtttaactaaaaagcgatcgtcataa

SEQ ID NO: 4046 - DNA, 105 bp, Streptococcus pneumoniae
  misc_feature (1)..(105): tiling:Spneumo1:WAN024CO4; Cluster includes WAN0246SU 5613 45-52-6||||||105 bp|DNA Streptococcus pneumoniae phage Dp- 1 open reading frame 248|S.pneumoniae||WAN0246SU|ORF|000
gtgcaaagcctcgttctagcaagaagaacgatgctcagttacttgctcaacggaaaaacaggaagcctgcagttgaggttacttacatttcaggaaacgctctaa

SEQ ID NO: 4047 - DNA, 126 bp, Streptococcus pneumoniae
  misc_feature (1)..(126): tiling:Spneumo1:WAN024EV9; Cluster includes WAN023SH7 NC_0 03098.1_2509||||1948099..1948224|-|126 bp|Glimmer 2.02 orf prediction|S.pneumoniae|R6|NC_003098.1|ORF|110
gtgcaaamactgaaaaaagcratttataaagctcatctcaaagattcagatgactttaraccagaaacatccacaccaaatctttttgaaagctgtttgaagctttgtccttgctttcttagttca

SEQ ID NO: 4048 - DNA, 240 bp, Streptococcus pneumoniae
  misc_feature (1)..(240): tiling:Spneumo1:WAN024F8L; Cluster includes WAN023KTZ 3154 79_2888b||||1542569..1542835|+|267 bp|EGAD orf prediction| S.pneumoniae|R6|NC_003098.1|ORF|110
gtgcaagaccacacggccatctcggatcatcagaatatcgtcacaaagttcctcaacattggtcatgacatggtcagaaaagataatggttgctccgcgctctttttcctgaaaaatgacttgtttgagcaattctgtattaactgggtccaatccactaaaaggctcatccaagataatcaggtctggttcatgaatcagagtaataatgagctgaatcttctgctgatttccttttga

SEQ ID NO: 4049 - DNA, 252 bp, Streptococcus pneumoniae
  misc_feature (1)..(252): tiling:Spneumo1:WAN024FBF; Cluster includes WAN023KOV 3152 06_3124||||1663117..1663368|+|252 bp|EGAD orf prediction|S .pneumoniae|R6|NC_003098.1|ORF|110
gtgcaagacctccgtaatggtgaaatcaggcgaaacaaccgctacgtccgtttttgtcatatgaacgatatccgtatccgccatgatttcttggctcaagtcatgctccatctgataagccataatatctctgagtccaatcgtcccaacaaactgtttttcatctgtcacaacgggaacacgggtataggtcatctgactgagcaagagggtcgcatgatccgcattgtgggtatcaatcaacacagctag

SEQ ID NO: 4050 - DNA, 225 bp, Streptococcus pneumoniae
  misc_feature (1)..(225): tiling:Spneumo1:WAN024CUB; Cluster includes WAN023LT1 3146 98_1222||||648282..648506|-|225 bp|EGAD orf prediction|S.p neumoniae|R6|NC_003098.1|ORF|110
gtgcaaggmctgaaaattttcaacagtttgaaactcaagtccagcttcactcgctcgcttaacgatagcctcagccagtgggtgttgagaagcatcttccaaggaggctgccaayccaaacacttctacttcgtcgccgatgayatctgttaccacaggtttcccttccgtcaaagtcccggtcttatcaaagacaagrgtttgaactttctggatttcctgtaa

SEQ ID NO: 4051 - DNA, 101 bp, Streptococcus pneumoniae
  misc_feature (1)..(101): tiling:Spneumo1:WAN024AEA; Cluster includes WAN024EJB R6.I G_843||||809650..809732|+|83 bp|Between spr0807 (+ strand) and spr0808 (tex) (+ strand)|S.pneumoniae|R6|NC_003098.1| IG|110
gtgcaagttattgcgctgtagcatataaatctatttcctacatattttttaaaygttctacgagttaatttgaaacgtttagcttgtggtataatagattt

SEQ ID NO: 4052 - DNA, 328 bp, Streptococcus pneumoniae
  misc_feature (1)..(328): tiling:Spneumo1:WAN024GGW; Cluster includes WAN023LX3 3127 98_1014||||529748..529981|-|234 bp|EGAD orf prediction|S.p neumoniae|R6|NC_003098.1|ORF|220
gtgcaatacgattgggaatcctggaagagcttctgtcaatttttgcaagtggtcaaggtcaagaccttcccagtttactgggtaaggrccgtggatgttaccgataccagctgccaagaagtcgataccagtttcaaccattgctttagcgtcttcgattggagccaattcacctttaccgatgattccrtcttcttcaccaccgatagtaccaacttcagcttctactgagatacctttagcgtgtgctttttcaacaacttctttagccaatttaaggttttcttcaactggaaggtgtgaaccgtcaaacatgattgaagtataa

SEQ ID NO: 4053 - DNA, 93 bp, Streptococcus pneumoniae
  misc_feature (1)..(93): tiling:Spneumo1:WAN024DWJ; Cluster includes WAN023SHA NC_0 03098.1_2496||||1936745..1936837|+|93 bp|Glimmer 2.02 orf prediction|S.pneumoniae|R6|NC_003098.1|ORF|101
gtgcaattccctctttcaaacaagtttcatgttcagtatatagcttttgagacagaaaatacatacacaaatgatagtcatttttctacaaaa

SEQ ID NO: 4054 - DNA, 345 bp, Streptococcus pneumoniae
  misc_feature (1)..(345): tiling:Spneumo1:WAN024DWM; Cluster includes WAN023KEB 3130 85_3600b||||1934086..1934430|+|345 bp|EGAD orf prediction| S.pneumoniae|R6|NC_003098.1|ORF|110
gtgcaattccttgaaatcacaagtcgccacatcaatcactgtgcagacagtatcgaccttatcatgcaagcctgtgttaatgacagtaaagagatagtcactttgagccttatccgtagcaattttacccttccactcgttgagcaarttacttttaacaaagtttcctacttggttgaccttggcaaaacgcgtttccatctcgcggtgaacttcgtccacgctacagccacagatactatcatgtggcgcattctgcaaaagtgttttccaagcataggtcaactggtccttgtggttgtgtccaccagtgataatagtcaagggttctaccacttgctctag

SEQ ID NO: 4055 - DNA, 237 bp, Streptococcus pneumoniae
  misc_feature (1)..(237): tiling:Spneumo1:WAN024F8P; Cluster includes WAN023LAL 3138 07_2170||||1170447..1170683|+|237 bp|EGAD orf prediction|S .pneumoniae|R6|NC_003098.1|ORF|110
gtgcaatttcatctcataatcttccagaatcttttctgttcgcttgatattgtcatagacagcctgacgactgacaccgaactcctcggcaatttcagcaaggctgtaatcatcagcgtagtagagctcgatataattcatttgcttatctgtcaaaagcgccgcataaaattcaaagagcgcattcatacgattggttttttcgatttccataacttttattataccaaaaattag

SEQ ID NO: 4056 - DNA, 1364 bp, Streptococcus pneumoniae
  misc_feature (1)..(1364): tiling:Spneumo1:WAN024GNO; Cluster includes WAN0244J2 spr0 372|serS|15902416|NP_357966.1|372211..373548|-|1338 bp|Ser yl-tRNA synthetase|S.pneumoniae|R6|NC_003098.1|ORF|121
gtgcacacctgtgaagttggatggaacmgtggccctgccactccaacgttttgtcaggygtgcttttttcataaaggagttcttatgttagatatcaaacgtattcgtacagattttgaagctgtcrcagaaaaattagctacacgtggtgtagatgctgctgtcttgaatgaaatgaaagaaatcgatgctaaacgtcgtaacatcttgrtcaaggttgaaactctcaaagcagaacgtaacacagtttctgctgagattgcccaagctaagcgcaacaaggaaaatacagatgacaagattgctgccatgcaaaatctatctgctgaggttaaagccttggatgctgaattggcagaaatcgatgctaaattgacagaatttacaacgactcttccaaatatcccagctgacagcgttcctgttggggctgayraaracracaatgtggaagttcgccgttggggtactccacgcgagtttgacttcgaacctaaagctcactgggatctcggtgaagaccttggtatccttgactgggaacgcggtggtaaggtaacaggcgctcgcttcctcttctataaaggcctcggtgctcgtttggaacgtgctatctacaactttatgttggatgaacatggaaaagaaggctatactgaagtcatcacaccttacatagtcaaccatgattctatgtttggtactggtcagtatccaaaatttaaggaagatacttttgaactcagcgataccaactttgtcttgattccaactgctgaagttcctctgrcaaactactaccgtgatgaaatcttagacggcaaagatcttccaatctacttcactgcyatgagtccgtcattccgttctgaggctggttctgccggtcgtgatacgcgtggcttgatccgtttgcaccaattccacaaggttgaaatggtcaaatttgccaaaccagaagaatcttacgaagaattggaaaaaatgacagccaacgctgaaaacattcttcaaaaactcaaccttccataccgtgtcgttgctctctctactggagatatgggcttctcagctrcgaagacttacgacttggaagtgtggattccagcacaaaacaattaccgtgaaatctcaagctgttcaaacacagaagatttccaagcccgtcgtgcccaaatccgttaccgtgatgaagcagatggcaaggtgaaactccttcataccttgaacggttctggacttgcagttggacgtacagtggctgcaattcttgaaaattaccaaaatgaagatggttctgtgaccatcccagaagcacttcgtccatacatgggtggagctgaagtcatcaaaccataactaat

SEQ ID NO: 4057 - DNA, 123 bp, Streptococcus pneumoniae
  misc_feature (1)..(123): tiling:Spneumo1:WAN024AVJ; Cluster includes WAN0242T9 SP05 94||15900503|NP_345107.1|564444..564560|+|117 bp|hypotheti cal protein, fusion|S.pneumoniae|TIGR4|NC_003028.1|ORF|010
gtgcagagttatagtggcttgatgctgggaaagtacactgtgactgctaaaacattcctagaagytgctttgatttmcctaatctatttatgyraattttatgttattttactactaactaat

SEQ ID NO: 4058 - DNA, 87 bp, Streptococcus pneumoniae
  misc_feature (1)..(87): tiling:Spneumo1:WAN024DT6; Cluster includes WAN023SMU NC_0 03098.1_209||||166760..166846|+|87 bp|Glimmer 2.02 orf pre diction|S.pneumoniae|R6|NC_003098.1|ORF|110
gtgcagcaggataaagaaaaaccgagaagtttctttctcggatttgcttattatgaggtkcctattttctatgctccaagagttgat

SEQ ID NO: 4059 - DNA, 753 bp, Streptococcus pneumoniae
  misc_feature (1)..(753): tiling:Spneumo1:WAN024C7Z; Cluster includes WAN023QQL cont ig_1343_3||||3170..3922|-|753 bp|Glimmer 2.02 orf predicti on|S.pneumoniae|670|WAN01UE6I|ORF|000
gtgcagctctttatttatcaagcctattccaaggtaaacgaggtaagagataatatgaatctttcatacgaactgagtatttgggaaatacttcttaggtgctttttagcgattcttttcggtggcattgttggctatgagcgaggagtcaaaaaccaagcagcagggattagaacctacttactagtttgtttgggaacttgtgttgtaatgatgacaaatcagttcatcactagtcgttatggtagcggtgatcctagtcgaatgggagcccaagtaattagtggcttgggtttcctaggggcaggaacaatcatggtaactaatcaaaaagttaaaggtttaacaacagcagctggattatggtcttcagcaactattggtttagctataggcattggtttttatgaaggtgctattttagccggagttgtactcatagcagttttaactctatttactcctcttaaagattatttaaactcgaaaactaaaattgctgattactacttggtttttagttctttagaaggttataatcgtttacttatatatttaaatacatcgggtattaagattttagaaattcaaaatggtataggaaatcttgatgaagaacgtcaattaaataaaattaagtcaacaaaagtgtcctgctatttatcattaaaattaaacgaaaactttgaacatttaaaattaatggaagaaatgcataatattgctggtgttatttatgttgaagagattagg

SEQ ID NO: 4060 - DNA, 102 bp, Streptococcus pneumoniae
  misc_feature (1)..(102): tiling:Spneumo1:WAN024CA7; Cluster includes WAN02433W SP01 83||15900120|NP_344724.1|175039..175134|-|96 bp|hypothetic al protein|S.pneumoniae|TIGR4|NC_003028.1|ORF|120
gtgcaggaccaacacgctatcaagaataagaaaacgataaaagcaactgcaggtgcggttgctttttcacttacttttttgagttataytcaaykaactaat

SEQ ID NO: 4061 - DNA, 675 bp, Streptococcus pneumoniae
  misc_feature (1)..(675): tiling:Spneumo1:WAN024BFN; Cluster includes WAN02434W SP01 46||15900084|NP_344688.1|144440..145096|+|657 bp|conserved hypothetical protein|S.pneumoniae|TIGR4|NC_003028.1|ORF|0 21
gtgcaggcagtcatgccaacggctctkggytatgtcagtatcggcctggcctgtggraytatcggtgcgccctatgtgacacctgttgagatgggcttgatgagtctctttgtttatgctgggagtgcccagtttgccatgttggcactgattgtggttcaagctcctgtggcagctattgctatgacggtttttctaatcaayttgcgtctctttttgttgagyttacacgcatcgacttatttccgtcataccagtctttggyacaatatcggtatgtctagtatcttgacagatgagacctatggcgttttgatgggygaattrgcccatacagayaaggtmaatcckatgtggatgcacggraacaatctyaacagctatgtggcttggtttgtgggracagtrgtcggaacggctctrggtgrcctgytrccaaatccagaaatctttggyttrgattttgccctggttgggatgtttatyggkatttttgcttcgcaattycagatkatgcaaagacggattyctgtycgcaatctgctcattatcytagcagttgttgcrgtgtccttctttttrctyttgacagtgrtgtctcagtcactagctgttctgtttgcgaygctacttggttgtagcatggggrtggttttagatggtcagctaactaat

SEQ ID NO: 4062 - DNA, 348 bp, Streptococcus pneumoniae
  misc_feature (1)..(348): tiling:Spneumo1:WAN024FP9; Cluster includes WAN023L4F 3149 01_2427b||||1297757..1298104|+|348 bp|EGAD orf prediction| S.pneumoniae|R6|NC_003098.1|ORF|110
gtgcagtccatcagttgtatattcttttttgagttggcctgcttggtctgtcaaacaatcaaatactggcacaaattccacctgcatataggcagatgcaagctcttgataggcttgattccagttctgaattttttcattcgagcggatatagactgcctgctggtactcctctctctcattgacaggcaaaatggaaagcaatttaatctctgtcaatggataatcgcgagcaacggattgaatgatagcttcgagattattgagagcctcattcacaggaacatcctttccgatatcatttgtcccaatcagaagaaaaattttatctactgctccaccatatag

SEQ ID NO: 4063 - DNA, 485 bp, Streptococcus pneumoniae
  misc_feature (1)..(485): tiling:Spneumo1:WAN024CBE; Cluster includes WAN024353 SP01 38||15900077|NP_344681.1|137031..137498|+|468 bp|hypotheti cal protein|S.pneumoniae|TIGR4|NC_003028.1|ORF|211
gtgcagttcattttgcatagttttggcattcatcctagatatccatataaaatgtctgagattgttgaaatgtctaaaaaaatatcagatytaaacgataaaaaagaatttcacaaaaagaactgtgagttgaggtttcaagatagtgttcttgataacataaatagtgtcccgrgtacaactcatttatttagttgtttaaatattcaaacattagtaaaaattattttatatatttttcgatacaacagttgtatgaaaatatttaattttagagataaagagcttatyttttttaataagattgtaaatgggctgatacaaaatattgaggagaatttagaggatgatattgaaaggatattgaaatatttatatatatgtttatttaacgaaatattcattattaagaataaggtgaatttttttgatgatgtggaatttaatcagacacttagtgagtttttagataaattgtarctaat

SEQ ID NO: 4064 - DNA, 372 bp, Streptococcus pneumoniae
  misc_feature (1)..(372): tiling:Spneumo1:WAN024CJ7; Cluster includes WAN0242F7 SP11 43||15901009|NP_345613.1|1071282..1071647|+|366 bp|conserv ed hypothetical protein|S.pneumoniae|TIGR4|NC_003028.1|ORF |010
gtgcataatatctatttttacaaggataaaaacggcaatgagcctgtttttgattatatgcgagagcttaccagtaaaaaagggaaagatagcagaattaagcttaataaaattaatgattatattgagttgttaagccaacatggaacacgcgcaggcgaaccatatattaagcatttagatgctgaaatttgggagctgagaccacttagagatagaattttatttgttgcttggatggatggtagttttgttttactgcatcattttatgaaaaggacacagaaaacacccaaaagagagattgagcaagctaaacgtgaacttgcagatttaaaagaaagaggtttagacaatgaaaaactaactaat

SEQ ID NO: 4065 - DNA, 258 bp, Streptococcus pneumoniae
  misc_feature (1)..(258): tiling:Spneumo1:WAN024FZ7; Cluster includes WAN023LBB 3148 84_2135||||1149860..1150117|+|258 bp|EGAD orf prediction|S .pneumoniae|R6|NC_003098.1|ORF|110
gtgcatgcccacactgacaaactctgtaatggctgcaaccgtatcttcaatagcatcataagccaccacacgatctttagggagagaaacaaactctctcataaagccatcaaatccactagacaagaaatgggtccctgtcatgtagttttcatagaattcttcatcactctgcataggagactgattgggaatcatgacaactttttgaccaacctcgtaggttccggtcgggtcagaaatgacggttccacatga

SEQ ID NO: 4066 - DNA, 207 bp, Streptococcus pneumoniae
  misc_feature (1)..(207): tiling:Spneumo1:WAN024C9D; Cluster includes WAN023QZD cont ig_1394_8||||6361..6567|-|207 bp|Glimmer 2.02 orf predicti on|S.pneumoniae|670|WAN01UDYH|ORF|000
gtgcatgtttgctgtgccccttgtagtacctatacactagaatatttgaccaagtatgcagatgtgaccatctattttgccaattctaatatccatcccaaggcagaataccataagcgggtctatgtcaccaagaaatttgttagtgattttaatgagcggacaggaaatacggttcagtacctagaagctccmtacgaacccaat

SEQ ID NO: 4067 - DNA, 261 bp, Streptococcus pneumoniae
  misc_feature (1)..(261): tiling:Spneumo1:WAN024F4L; Cluster includes WAN023M5D 3143 72_584||||300925..301185|-|261 bp|EGAD orf prediction|S.pn eumoniae|R6|NC_003098.1|ORF|110
gtgccaagcgtttttgcgcattgtcaatggcattctgatcctggtcaaaggcatagagatggcctttttcacttaatttacttaataaatactcgctatgtcctgctccgcccaaagtcgcatcaacgtagataccwtcaggctttacgtcaagcatatcaatcgtttcgtggagtaagaccgttacatgatgaaattcttttgtcatatcttatctattttaccacaaatccgaccagcttgcacttgtcagacaaatag

SEQ ID NO: 4068 - DNA, 209 bp, Streptococcus pneumoniae
  misc_feature (1)..(209): tiling:Spneumo1:WAN024CY4; Cluster includes WAN0243AA spr1 987||15904028|NP_359578.1|1979178..1979381|-|204 bp|Hypoth etical protein, truncation|S.pneumoniae|R6|NC_003098.1|ORF |121
gtgccgaaatggtcaaatcctgattatgtcaacgaattagacccaaaaatcgttgatatgctagtagaatttcacaagtcacaaggcactttggaaactcccgaggcgcaagcagaaatcgcccaaaaacgtgaagaaatcgagcaaaggagagctgagcttgaggrtaaaaaacaagagcttttgaaccgcttgaacaaatarctaat

SEQ ID NO: 4069 - DNA, 1118 bp, Streptococcus pneumoniae
  misc_feature (1)..(1118): tiling:Spneumo1:WAN024FMG; Cluster includes WAN0243S1 spr1 346||15903389|NP_358939.1|1330741..1331853|-|1113 bp|Hypot hetical protein|S.pneumoniae|R6|NC_003098.1|ORF|221
gtgccgatgaatataattctaatcgccaaacytttragagagaatwcaaatacaaaagcaaatgcccttaataatggttgggctagatctggttctgaagagttcaaaaagttctcccaytttgtaggggtakacaaagggattgtgcgaacgaatgtactgactggtaaaaaactatctgataagattaggaaagaagtggrctctggagatagcaaactaggaaaaggcggctatttctctactggggatgttctattaggaaaagatgttgtttcttataccgtacaagtattttcagagaataatgaaagagtaggagtaaacactcaaagtcaccgtgttcagtataatctcccaattctagctgacttttcagtcatccaagatactgtggaaccatcacgaacygttgttgaaaaaatcattccaaaactaaatattcccgaagaagagaaagggaaaataaccgaagaaatcaagaaaaagaaaaaaacctcagaattggcagaactaatctcagaaaatgtgaaagttcgctatgttgatgaacaagggcgtttgctatcattgaaaaatgatactggaattggagaaaaagaaagtgacggaacctacattaccaataaaaaacaactgattggtaccagctayaatgtcacagataaaaaactcagtagcatgactactactgacggaaaatattatacttttaaagaagcagatacaaattctgcaagtttaactgggaatattgtaagcgaaggtagaacagtgaccttagtttatagagaaagcgaagcgccaaccactgctacagtaacagccaattactataaagaaggtagscaagagaagttggyagagtctgttataaaagctgatttagcgataggttctgagtataccacagaatcaaaaactattgaagggaaaacaacaactgaggacaaagaagaccgagttatcacaaggaaaacaacatacaccttggtagcaactcctgmaaatgcgtaccagaagacggtgcaacagttgactattactaccgtgagaatgttgaggaaacagtggttcccaaaacagcaacctctactgagacgaagactataactaat

SEQ ID NO: 4070 - DNA, 2000 bp, Streptococcus pneumoniae
  misc_feature (1)..(2000): tiling:Spneumo1:WAN024C5K; Cluster includes WAN023ZV0 |pbp 2x||CAA67011.1|||1998 bp|penicillin-binding protein|S.pneu moniae||X98365|ORF|000
gtgcctatcgctgaagatgcracctcttataacgtctatgcygttattgataaaaaatacaagtcagcmacgggtaaaattctttatgtagaggattcgcagtttaataaggtagctgaagtcttccataagtatttggatatggatgaagcttatgtgaaagagcaattagctcaaccaaatctracycargtttcytttggtgcaaargraaatgggattacctatgccaatatgatggctattaaaaaagatttgaaagatgctagtgtggaagggattgactttacaactrgccctaacagaagctatccaaatggacaatttgcttctagctttattggcttagcccaacttcatgaaaatgaggatggtagtaagagtttgttagggacttttggtttggagagttctttaaataccattcttgctgggacagacggtattattacctatgaaaaagaccgtgtaggaaatatcgtaccmggtacagaactggtatcgcaacaaactgtagacggcaaggatgtttatacaacattgtctagcccsstccaatctttcatggaaactcagatggatgcttttctagaaaaagtaaaaggtaagtatatgaccgcgaccttggtcagtgcaaagacaggtgaaatcctcgctactacccaacgacctacctttaatgcagatactaaggatggtatcaccaaagactttgtttggcgtgatattctttatcaaggtaactatgaaccaggatcagccatgaaggtcatgacgttagcttcttctattgataacaataccttcccaggtggagaatacttcaatagcagcgaatcaaaaatagcggatgtgacgaytcgagattgggacgttaatgaaggtttgaccggcggtggtatgatgacattttctcaagggtttgctcactcaagtaatgttgggaygatactgcttgaggagaaaatgggtgatactacgtggttggattatctaaaccgctttaaatttggagttccaactcgttttggtttgacagatgaatatgcaggccaacttccagctgacaatattgttagtattgctcagagttcatttggacaagggatttcagtaactcagacgcaaatgattcgtgcctttacagccattgccaatgatggygtcatgctggagcctaaatttattacggccttgtatgatccaaatgatcaaaccgttcgtaaatctcaaaaagaaattgtaggaaatccagtttcgaaagatgcagctagccaaactcgtactcaaatggtcttggtaggaacggatccagtttatggaaccatgtataaccacagcacaggcaagccaattgtaactgttcctggtcaaaatgtagccctcaagtctggtacagcccaaatcgctgacgagaaaaatggaggmtacttggttggtyctaccaaytayattttctcrgttgctrrctatsaaycctgctgaaaatcctgattttatcttgtatgtaacggttcaacagcctgarcattwttcaggtatccarttgggagaatttgccamcccaatcttggagcgggcttcagctatgaaagaatctctcwatcttcaatctccwgcyaaaaatttagatmaagtkacgacagaatcttcttatgcaatgcctagyatcaaggayatwtcmcctggwgakttrgcagragamcttacgwcgmaatattgtgcaaccmatcgttgtrggwacwggaacaaagattaaagarwcwtctgtagaagaaggrarraatcttkcwccraaccarcaagtyctsmtyttatckgataargyagargaarttccagayatgtatggytggamaaaagagactgctgagacctttgctaartggytsratatwgaactkgaatttgaaggttcrggytcyayygtkcagaagcaagatgttcgkrctaatacagctatcaarracattaaaaaaattamattaacyttaggagac

SEQ ID NO: 4071 - DNA, 1775 bp, Streptococcus pneumoniae
  misc_feature (1)..(1775): tiling:Spneumo1:WAN024G87; Cluster includes WAN02444H spr0 897||15902941|NP_358491.1|884594..886363|+|1770 bp|Hypothe tical protein|S.pneumoniae|R6|NC_003098.1|ORF|221
gtgcctatgaaacctgaaaaacctaaaaaattgggtcttaaacagatttacctcratcttgataaaatcctctttctatttttcttgatttttatgatagtggagtatttgtgggtaccattcaattcatggttggctagcttcttattagatcagacaggttatctttttatttcctataacaatgtcttagccatccttactcattctccattgattagtctagcttttttagccttgattgtaattaaccttctggttgcttattttcaaataggactcctctttattggtgctcgtcatctcctctataatgaaaagcgaaggctaattgagtatatccgyaaggttttccatgaaagttttggatttatgaaaaagctaacttgcgctaaagccttgtttatctttttctatatagctatgctktttccttttatacggaaaatgctgaagatttattatcttaataaaatcgtcattccagagtttatccaagcttatttagaagataratattggatgtggtggctgagcatcctacttctatctcttatctttctctatgtctctgtcagattgatgtttgcccttccgaagattgtatatgatcagctgactgttcgagaagcagtgatgtttagcttggagaaaaccaagaagagagttactttttatgcttggaatttattttacatcttgctcaaagcacatttattattytatcttcctttgatyccttyattattggctcaaactttggtagatgatatcactcagagagagtctctgattcttggtattttgaattttgtcgtgattaaaaatctctattatatggctctgacttattttttggttaaatttgtttcatttttgacaggaaaggagctggatatgcttcctaggagagaaaaagatcacatcgtgcgatggggtgtcatgacttgtgccagtcttttctttgccttagaaggttatatttatctggaggctcccatggttcatctacctcaacttatttctcaccgaggggtttccaatgcaaatgggattcaaaatacagtagagtccttggaaactacagcacaactcaaaccagacttggtggagacggacgtgcaggaaacaaaagatgggcagtttgtcatgatgcatgatgctaacttgaaaaatctagcaggtatcaataaaagtcctcaagacttaaacttggaggagcttaaagggattgatatttttgaaaatggctaccagactaaaatttcaagctttgaagattatctcagtcgagccaacgaacttggtcaaaaattactaattgaaattaaaaccagtaaaaaagatagtccagayatgatgaaccgctttttagcccgttatgctgcaaagctcaagatttatggacatcaaatccagtctttagactaccatgttgtcgaaaaagtaagrcagtatgatgccgaactrccagtttatttcatcatgccctacaattctgtctttcctaaaacaagagcgacaggatatactatggagtactcaaccttggatgaatattttgtaagcaaactatggacaacggatcagaaactttatgtctggactgtcaatgattcagaagctatcagcaaatctcttcacttaggagtagatggagtgattacagatgatttggaaaaagttcagcgggaaatagaagtagcccaagaagatccagaatatacggatttgctcttgaaaaaagcattggaattctttgaattttarctaat

SEQ ID NO: 4072 - DNA, 90 bp, Streptococcus pneumoniae
  misc_feature (1)..(90): tiling:Spneumo1:WAN024DPQ; Cluster includes WAN023SL2 NC_0 03098.1_1018||||802249..802338|+|90 bp|Glimmer 2.02 orf pr ediction|S.pneumoniae|R6|NC_003098.1|ORF|100
gtgcctgaaaatatgggaactaagggctggtttatcggtttctctagtttagtatttgccttttgcaaagtgatcttaaatgcctttctc

SEQ ID NO: 4073 - DNA, 273 bp, Streptococcus pneumoniae
  misc_feature (1)..(273): tiling:Spneumo1:WAN024BEL; Cluster includes WAN023IHR 8629 4_3031||||1718637..1718903|-|267 bp|EGAD orf prediction|S. pneumoniae|TIGR4|WAN01UC25|ORF|010
gtgcctggcaataagaataatactcttcgaaaatctcttcaaaccacgtcagcttcatccacaacctcaaaacagtgttttgagctgacttcgtcagttctatctacaacctcaaagcagtgctttgagcagcctgcggctagcttcctagtttggtctttgattttcattgagtataagaagtccttttccttaaaggaagaggctttttacttgcttttctgctgcttcctcatttgtcctgaagccttttttgtgttaaaaykaactaat

SEQ ID NO: 4074 - DNA, 249 bp, Streptococcus pneumoniae
  misc_feature (1)..(249): tiling:Spneumo1:WAN024G7F; Cluster includes WAN023LK0 3140 19_1737||||924893..925141|-|249 bp|EGAD orf prediction|S.p neumoniae|R6|NC_003098.1|ORF|110
gtgcctttccacctctttttatctataaagattctcctacatcataattcatttttttatttaaacctttctgtcttagtttgtctttatcttcttcataccattttaagattgtcacatagtggttttgataggtcttaccactgctttccatgtatctggatagtttatttatcattatatctgtgtgtgagtttaatttttcttttagatttttatattcttctttgcttaaccttacatttttga

SEQ ID NO: 4075 - DNA, 135 bp, Streptococcus pneumoniae
  misc_feature (1)..(135): tiling:Spneumo1:WAN024BFA; Cluster includes WAN023SHY NC_0 03098.1_2233||||1730455..1730589|-|135 bp|Glimmer 2.02 orf prediction|S.pneumoniae|R6|NC_003098.1|ORF|110
gtgcgagacaaaacaaccacccgtttgacggattttcatgatttcaaatttatattcttcgwaaatctcttcaaaycacgtcagctctatctgcaatctcaaaacastgttttgagcaacctgtggctagctacc

SEQ ID NO: 4076 - DNA, 150 bp, Streptococcus pneumoniae
  misc_feature (1)..(150): tiling:Spneumo1:WAN024EZE; Cluster includes WAN024452 spr0 876|rpmG|15902920|NP_358470.1|867410..867559|+|150 bp|50S Ribosomal protein L33|S.pneumoniae|R6|NC_003098.1|ORF|110
gtgcgagtaaaaatyaatctcaaatgctcctcttgtgrcagtatcaattacctaaccagtaaaaattcaaaaacccatccagacaagattgaggttttaaagtattgtcccaaggaaagaaaagtaaccctacatcttgaatctaagtag

SEQ ID NO: 4077 - DNA, 261 bp, Streptococcus pneumoniae
  misc_feature (1)..(261): tiling:Spneumo1:WAN024D3U; Cluster includes WAN023MDM 3148 40_135||||63243..63503|+|261 bp|EGAD orf prediction|S.pneu moniae|R6|NC_003098.1|ORF|110
gtgcgattttacaatacgagcgaggtcattggcgtaggcaataaatttttcatagccttttacagggtagccttcgtttggatagtatttatcagcttgaagcacactccaacctttagcatctgtcgcatcattggcatattcatcaagtccgatgttgaagatttcagtctttttcgcgaaataagcagcatacttgtcgataagggcttttgtaaaagcgacagcttgttcgttgtcaagatcgacagtacgggctga

SEQ ID NO: 4078 - DNA, 1445 bp, Streptococcus pneumoniae
  misc_feature (1)..(1445): tiling:Spneumo1:WAN024EZC; Cluster includes WAN02444N spr0 891|gcaD|15902935|NP_358485.1|880306..881745|+|1440 bp|UDP -N-acetylglucosamine pyrophosphorylase|S.pneumoniae|R6|NC_ 003098.1|ORF|111
gtgcggaatgatttgaaatatggtataataaaagggaatttctacagaaaagagaagattatgtcaaattttgccattattttagcagcgggtaaagggactcgcatgaaatctgatttgccaaaagttttgcacaaggttgcgggtatttctatgttggaacatgttttccgtagtgtgggagctatccaacctgaaaagacagtaacagttgtaggacacaaggcagaattggttgaggaggtcttggctgracagacagaatttgtgactcaatctgaacagttgggaactggtcatgcagttatgatgacagarcctatcttagaaggtktgtcaggacacaccttggtcattgcaggagatactcctttaatcactggtgaaagcttgaaaaacttgattgatttccatatcaatcataaaaatgtggccactatcttgactgctgaaacggataatccttttggytatggacgaattgttcgtaatgacaatgctgaggttcttcgtattgttgagcagaaggatgctacagattttgaaaagcaaatcaaggaaatcaacactggaacatacgtctttgacaacgagcgtttgtttgaggctttgaaaaatatcaataccaataacgctcaaggcgaatactatattacagacgtcattggtattttccgtgaaactggtgaaaaagttggcgcttatactttgaaagattttgatgaaagtcttggggtaaatgaccgtgtggcgcttgcgacagctgagtcagttatgcgtcgtcgcatcaatcataaacacatggtcaacggtgttagctttgtcaatccagaagcaacttatatcgatattgatgttgagattgctycggaagttcaaatcgaagccaatgttaycttgaaagggcaaacgaaaattggtgctgagactgttttgacaaacggtacttatgtagtggacagcactatcggagcaggagcggtcattaccaattctatgattgaggaaagtagtgttgcagacggtgtgayagtcggtccttatgctcacattcgtccaaattcaagtctgggtgcccaagttcatattggtaactttgttgaggtgaaaggatcttcaatcsgtgagaataccaaggctggtcatttgacttatatcggaaactgtgaagtgggaagcaacgttaatttcggtgctggaactattacagtcaactatgacggcaaaaacaaatacaagacagtcattggarwcaakgtctttgttggttcaaattcaaccattattgcaccagtagaacttggtgacaattccctcgttggtgctggttcaactattactaaagacgtgccagcagatgctattgctattggtcgcggtcgtcagatcaataaagacgaatatgcaacacgtcttcctcatcatcctaagaaccagtarctaat

SEQ ID NO: 4079 - DNA, 267 bp, Streptococcus pneumoniae
  misc_feature (1)..(267): tiling:Spneumo1:WAN024G9W; Cluster includes WAN023LNS 3133 08_1506||||801472..801738|-|267 bp|EGAD orf prediction|S.p neumoniae|R6|NC_003098.1|ORF|110
gtgcggatacgcattgtgtttgtgcgaacagcttctcctactggcacaccagcaacgataacgatatcatcgcctgactcaacgagacctgcttctaccgctttacgttcagcgatttcgaacatatcgtcagttgaagatggagcatctgtcaacattgggataacaccccagttcaacatcaagccacgttctgtcaattcgtcaaatgtcaatgctaagatgtcagcatttggacggtatttagaaatcaaacgtgcagtatga

SEQ ID NO: 4080 - DNA, 593 bp, Streptococcus pneumoniae
  misc_feature (1)..(593): tiling:Spneumo1:WAN024DCU; Cluster includes WAN02445H spr0 861|infC|15902905|NP_358455.1|855261..855848|+|588 bp|Tran slation initiation factor IF-3|S.pneumoniae|R6|NC_003098.1 |ORF|110
gtgcgggcttgtatatttacragtccgctattgtttttctctaataaaacaaaagaggtgaaaaccatagcaaagcaagacttattcatcaawgatgagattcgtgtacgtgaagttcgcttgattggtcttgarggagaacagctaggyatcaagccactcagtgaagcgcaagctttggctgataacgctaatgttgacctagtattgattcaaccccaagccaaaccgcctgttgcaaaaattatggactacggtaagttcaaatttgagtaccagaagaagcaaaaagaacaacgtaaaaaacaaagcgttgttactgtgaaagaagttcgtctaagtccrrcwaytgacaagggtgactttgatacaaaacttcgtaatgcacgtaagttccttgaaaaaggaaataaagttaaggtatctattcgctttaagggtcgtatgattacccataaagagattggtgcaaaagttttagccgagtttgctgaagcaactcaagatattgccatcatcgaacaacgtgctaaaatggatggacgtcaaatgttcatgcaattggcgccagcgactgacaaaaaataactaat

SEQ ID NO: 4081 - DNA, 228 bp, Streptococcus pneumoniae
  misc_feature (1)..(228): tiling:Spneumo1:WAN024GIK; Cluster includes WAN023LYO 3143 49_929||||486964..487191|-|228 bp|EGAD orf prediction|S.pn eumoniae|R6|NC_003098.1|ORF|110
gtgcgtacaatcttgtccataggagttcctgctagcttagaaccctgtttaagtgatactttacgaccaactgtattgcgcattaagggattggcaaggggtttaaaacccaactccactagaatttccaagacttctggatgcttgtccaccacttctgcaacaggaattgacacatcgatgatattgtccatgacgacctccattgtatsttctaatactcaatga

SEQ ID NO: 4082 - DNA, 225 bp, Streptococcus pneumoniae
  misc_feature (1)..(225): tiling:Spneumo1:WAN024FH3; Cluster includes WAN02421S SP16 57||15901492|NP_346096.1|1558239..1558463|+|225 bp|hypothe tical protein|S.pneumoniae|TIGR4|NC_003028.1|ORF|110
gtgcgtattgattcaatcgcatcgtctgttacaaccggtgtatcgaaagtgattgtttcttttgaactattggatgttgctactgtcttctcatcattacttgttgaagtattctttgaactttatgttccacatgcaactagaagagaaagagataatagagctactcctataccgataaacttttttgttcttttcatgctaaaataccttttattcttctga

SEQ ID NO: 4083 - DNA, 230 bp, Streptococcus pneumoniae
  misc_feature (1)..(230): tiling:Spneumo1:WAN024CLG; Cluster includes WAN0243G0 spr1 780|epuA|15903822|NP_359372.1|1754739..1754945|-|207 bp|Hy pothetical protein|S.pneumoniae|R6|NC_003098.1|ORF|120
gtgctaagattcagcggattgaggcaartgatgaagatgaataagaaatcaagctacgtagtcaagcgtttacttttagtcatcatagtactgattttaggtactctggctctaggaatcggtttaatggtaggttatggaatcttgggcaagggtcaagatccatgggctatcctgtctccagcaaaatggcaggaattgattyataawtttacaggaaattarctaat

SEQ ID NO: 4084 - DNA, 1073 bp, Streptococcus pneumoniae
  misc_feature (1)..(1073): tiling:Spneumo1:WAN024GKC; Cluster includes WAN0244GT spr0 453|hrcA|15902497|NP_358047.1|459960..461027|+|1068 bp|Hea t inducible transcription repressor|S.pneumoniae|R6|NC_003 098.1|ORF|112
gtgctaattgatcagacagagaggagtgatgagatggttacagagcgtcagcaggatattttaaatctgattattgacatctttaccaaaacgcacgaacctgtcggatcaaaagccttgcaagagtctattaactctagcagtgcaaccattcgtaatgacatggcggaactagaaaaacaagggttgcttgagaaggctcatacttcaagyggtcggatgccaagtgttgctggttttcagtactatgtgaaacactcactggattttgaccgrctggctgaaaatgaggtatatgagattgtcaaagcctttgatcaggaattcttcaaattggaggatattctgcaagaggctgctaacttrytaacagacctgagtggctgtacggtagtggcactggatgttgagccgagcaggcaacgtttgacagcctttgatatcgttgttttggggcaacatacagccttggcggtatttaccctagacgagtcgcgaacggttactagtcagtttctgattccaaggaacttcttgcaggaggatttgctgaaactgaagagcatcattcaggaacgtttcctcggtcacaccgttttagatattcactmcaagattcggacggagattccgcagattatccagcgttactttacaacaacggataatgtcatcgatctctttgaacacatctttaaggaaatgttcaacgaaaacattgtgatggcgggcaaggtcmatctcttgaattttgccaatctagcagcctatcagttctttgaccaaccgcaaaaggtggccttggagattcgtgaggggttgcgtgaggatcagatgcaaaatgttsstgttgcagacggtcaagagtcytgtttagctgacctagcggtratyagtagtaagttcctcattccttatcggggagttggaattctagccattaycggtccagttaatctggattaccaacagctaatcaatcaartcaatgtggtcaaccgtgttttgaccatgaagttgacagatttttaccgctacctcagcagtaatcattaygaagtacattaactaat

SEQ ID NO: 4085 - DNA, 107 bp, Streptococcus pneumoniae
  misc_feature (1)..(107): tiling:Spneumo1:WAN0249LY; Cluster includes WAN024E7Q-rc R 6.IG_1762||||1688032..1688138|-|107 bp|Between spr1713 (ag a) (- strand) and spr1714 (msmR) (+ strand)|S.pneumoniae|R 6|NC_003098.1|IG-rc|110
gtgctacctcctacctaacattttaccatattcttgagacatttttctattttggaaagcgatttcaggtgataaaatataatcaataaagtgatgaggtgaagtaa

SEQ ID NO: 4086 - DNA, 117 bp, Streptococcus pneumoniae
  misc_feature (1)..(117): tiling:Spneumo1:WAN024CV7; Cluster includes WAN023S21 cont ig_1627_18||||18505..18612|-|108 bp|Glimmer 2.02 orf predi ction|S.pneumoniae|670|WAN01UD9V|ORF|000
gtgctagcttccacaaaacaaacaggattcccagaaatgccagtaccactagcccacggtacaaccattgagaggttgcaacacgcgatacagattgtccttctttcgctaactaat

SEQ ID NO: 4087 - DNA, 275 bp, Streptococcus pneumoniae
  misc_feature (1)..(275): tiling:Spneumo1:WAN024BIP; Cluster includes WAN0242TG SP05 87||15900496|NP_345100.1|557459..557728|-|270 bp|hypotheti cal protein|S.pneumoniae|TIGR4|NC_003028.1|ORF|110
gtgctaggaagcttatcttttttcctaagaaatgagaccaaaattcaagtcatcaagataccaagccgtcaagcaactcaaaggaarataggaaatcgaacgacggagcgactrctcctagggagatttatctttttccacagagttgtaggcaagttcagttttcaagatacatcattagaaaggtttaatactaaagtatctaaagctttcacgctaatcgctatcgggcgattagctaaatgctttactaactctctcgtcaaataactaat

SEQ ID NO: 4088 - DNA, 371 bp, Streptococcus pneumoniae
  misc_feature (1)..(371): tiling:Spneumo1:WAN024D9N; Cluster includes WAN0243X8 spr1 159||15903202|NP_358752.1|1162334..1162522|+|189 bp|Hypoth etical protein|S.pneumoniae|R6|NC_003098.1|ORF|210
gtgctatactatagggaaagagtacatcagatcaaggaggatgctcacatggaagacaagaaactcattcaactcctatccaagttaaataaaagctaccaaaactgtaaacagggtacggcagatgatattcgactacaagagctgctaaacactactatgcaagagctcaaaaaaacrgaamagttgaacaacagtatcttaattgatcttgagaaattttaccaaccyaccagtcytctgattggactgggtagcctaaaactaaacratcaagcacgcactgcttggcgaaactatgataaawtccattacgakcatgtcaaacacgtactaagtctctatggacctgtttttgrattttarctaat

SEQ ID NO: 4089 - DNA, 996 bp, Streptococcus pneumoniae
  misc_feature (1)..(996): tiling:Spneumo1:WAN024EZU; Cluster includes WAN023PD3 pne4 2_5||||1786..2781|-|996 bp|Type 19C capsule operon, Glimme r 2.02 orf prediction|S.pneumoniae||WAN01UCFI|ORF|003
gtgctatacttgttgttcaccacaaacacaaggaaaggcacagagatgcaagaacattataccccaaaagggaaacatttgacaatagataaccgtcgcttgattgagcggtggaagaatgaaaataagtccaatcgtgaaattgcaggcttgttaggaaaggcgcctcaaacgattcatamtgaagtcaaaagaggtacaactttacaacaagtgagaaaagggctatacaaaarrgtctattctgccgattacgcacaaactgtttaccaattcaatcgaaaacggtcggtgaaaaagttaattttaacaaaggaaatcagagagaagatcttacactatcataagcaaaaattttcgcctgaaatgatggttaacaagaagcaagtgaaagttggtatttcaaccatctactactggtttcataatggtcatttaggattracgaargccgacatgctttatcccagaaaaaggaaaggtgtcaagaagcaagctagtccgaactttaagccggcaggtaaatctatcgaagaacgtcctgacgttattaatcttcgcttggaaaatggtcattatgaaattgataccgtcctactgactaagataaaaaattattgcctgttagtcttaaccgaccggcggagcagacaccaaattataaggttaattccaaataaaactgctgaatctgtcaatcaggcgcttacgttactattaggggagcatcrtattctgtccattactgcagataatggttcggagttcaaacgattgtctgaggtatttcctgaggaacatatctactacgcacatgcttactcttcatgggagagaggttcaaatgaaaatcataatcgattaattcggagatggttacctaaaggaaccaagaaaacgactccgaaagaagtagcttttatcgaaaattggattaacaactaccctaaaaaatgcttggactacaagtcgccaagtgaatttcttttgggtggc

SEQ ID NO: 4090 - DNA, 375 bp, Streptococcus pneumoniae
  misc_feature (1)..(375): tiling:Spneumo1:WAN024F2H; Cluster includes WAN023KM5 3138 98_3267||||1747551..1747925|+|375 bp|EGAD orf prediction|S .pneumoniae|R6|NC_003098.1|ORF|110
gtgctcaagtggtgtatccttaggatcaatcaccacataagccgcaaagtagataacttcctcgagggcacgagggctcatatcaagggtcaagcccatacggcttggaatccccttgaagtaccagatgtgagatacaggagctttcaattcgatatgtcccatacgctcacgacgaactttcgtacgcgttacttcaaccccacagcggtcacaaacaattcctctgtaacgaatgcgtttgtacttaccacaagcacattcccagtcttttgtaggaccaaagatcacttcatcaaagagtccttcacgttctggtttcaaggtacgataattgattgtttcaggttttttgacttctccataagaccatga

SEQ ID NO: 4091 - DNA, 318 bp, Streptococcus pneumoniae
  misc_feature (1)..(318): tiling:Spneumo1:WAN024FIU; Cluster includes WAN023KZ5 3149 19_2660b||||1415087..1415404|+|318 bp|EGAD orf prediction| S.pneumoniae|R6|NC_003098.1|ORF|110
gtgctcactaatatcaatgattttcttagcatgttcggttcccacttgttcttctctattattaaagaaatagcgyttaccatctctgtgaacccagccgacattcaaatctttyttttctttgagctcaccagaggccgcaaagatatagcgagyaccatccataatcacttcgtcagtcgccatggcaccacttccagtcaaatagtagttgccttgccactcattccgagccatatagccccacttcttgaaatagtaccatttgccgcccactttttgccactcttggttagcataagttccatcggattttag

SEQ ID NO: 4092 - DNA, 252 bp, Streptococcus pneumoniae
  misc_feature (1)..(252): tiling:Spneumo1:WAN024GLT; Cluster includes WAN023M1F 3152 78_808||||428047..428298|+|252 bp|EGAD orf prediction|S.pn eumoniae|R6|NC_003098.1|ORF|110
gtgctcagtcagggcgataaagatatcacaatcttggacgctggcttgctcaagaatggcaaaatcggccccgttaccaaggataccaatgatatcaaagcgactgacaatatgattgagaacagcttcgtcttgctcaatcagcaaaacatcatgcttttctgcaaccaaggagcgacagagggcaaaaccaacttttccccctccgacaaggataattttcataataaaacctactttttcatgatgtaa

SEQ ID NO: 4093 - DNA, 225 bp, Streptococcus pneumoniae
  misc_feature (1)..(225): tiling:Spneumo1:WAN024F5N; Cluster includes WAN023L3N 3149 05_2470||||1316948..1317172|+|225 bp|EGAD orf prediction|S .pneumoniae|R6|NC_003098.1|ORF|110
gtgctcatactcaggctggataaagatttctccgtattttacaccatcagcccactcgatatcatagayagagtctacttcttgaatgtaagaagccaagcgctccaaaccataggtaacttccgcagtcacagggccagttgccaatccaccgacttgttggaaataagtgaactgagtgatttccattccgtcaagccaaacttcccaaccaagaccagctga

SEQ ID NO: 4094 - DNA, 143 bp, Streptococcus pneumoniae
  misc_feature (1)..(143): tiling:Spneumo1:WAN024AFZ; Cluster includes WAN024EK5-rc R 6.IG_771||||743947..744089|-|143 bp|Between spr0747 (+ str and) and spr0748 (+ strand)|S.pneumoniae|R6|NC_003098.1|IG -rc|110
gtgctcttcctttcagagtcttattttatttcaataaaacttgctagtttgtctagtagcaagctttactkagacaaaatgactttgtctcaactcttaaaaaagcggcccttggccgcttcctaagaaatgacttccatcca

SEQ ID NO: 4095 - DNA, 1845 bp, Streptococcus pneumoniae
  misc_feature (1)..(1845): tiling:Spneumo1:WAN024CC8; Cluster includes WAN023RII cont ig_1565_3||||3248..4987|+|1740 bp|Glimmer 2.02 orf predict ion|S.pneumoniae|670|WAN01UDIJ|ORF|000
gtgctgaagaattacttggagatattcaacatggtaaagagtgaggagtggtttcctaaaggagatatcattttagaagagactgcattaggagccgtcaaagatgtgactaactgtttagtcattgctggaccaggtgctgggaaaactgaattactagctcaaaagttagactatctattctctacaaataaatgcgtttctccgaaaaaaattctagcattaagtttcaaaacggatgctgcatcaaatttgaaagaaagagttaagaaacgttatggtgatgaatatgcttctcgttttacctcattaacctattcggcttttgaaaagagaattttagaccaatttagagatgttctacctgaggatatacgrccatcaagagattatttgattgaagattggtatactataaaagaactactctctatgaatggaattaatgttaatggatggagaatgtcagatataagaagatatgtcgaaaacatcatacttaacaatggggataatcacaagtttaaaactgacttactaaaaggaacacaagataataagccggtcctcttgtataggcaaataacaaagttgagtactcaaataatagatactaacgaatacatccgtaaagcacttcaaatgacatacgattttgtatttctagatgaatttcaggatactacatatgcccagtatgatttattaaaaacttgttttttaggttcgtcttgtaaattaacagcagttggagatgataagcaagccattatgagatgggcaggtgcaaagcctgatatttttccagactatattcgagactttaatccaaatgaatatcaattgttgatgaatcaccgctctgtacctaagcttgtagaatttcaaaaagaggttcatcagatattaaatagtaatcacagttctattcagacaaataattatccagaatttcaagagggtgaaataacattatttgaatttgaaaatgaaagtttagaagctaagttaattgcaaatgatatagaatyaaaaattcaaggaggtatacgaccatcagaaatttgtatcctagcaaaacaaaaggttggtatttatagtttcgaattgatatctatattaaatagcaaagggattaaagcaagaattgaaaatgaatatcaggatattttaaaagatcctacgtgtaacctattattagatttaatatcatgcagtcaaggaaaacgagatcctttaatttgggaaaatattagtaatttttatggaaatatcaatggaatagatgagttaactgatgaattaattttagcaaaatcctataaggagattgacaatatagttagtgatattacttacctaatttcaaattttattcccaatgaagaaagtatgctaaaattaattgattgtattattgaaaaaatagatgaaaaaagaattatttccaatttttcaacatacaatggaaaaagtgacctagatatcattgtcaagaacttttcaaagttattatacatagaatattctcaaacacaaggtgaatggctagatacagtctctagtttcaagggtgaaaactcaattccaattatgactatccataagagtaaaggattagaatatgaggtagtctattttctaggcttggaggattctgcattctggagttttaataatcagccggaagaagataaaagtgcattctttgtcgcactttcaagagcaaaaagtcacttaatattcacatattgtaaattgagaaataatagtccgcaaaataatagaaatattaatgagatatattcattgctgactcaatccaatttagttgatgttattaat

SEQ ID NO: 4096 - DNA, 258 bp, Streptococcus pneumoniae
  misc_feature (1)..(258): tiling:Spneumo1:WAN024G88; Cluster includes WAN023LLD 3140 25_1644a||||872264..872521|-|258 bp|EGAD orf prediction|S. pneumoniae|R6|NC_003098.1|ORF|110
gtgctgataatagctagtcaagtcttgttcaatctggaaaaatttgcccactattggtcgaatttgtggataccattctttcagtccataagtcaggatattttctcccttttgataggcttctgcttgttctttcatccaaaagagattttgataataaagttgttgccggatatagcgacagatgtccttgtcctcagaaactgtaaaatgagatattttttgtytcttatagggaagacgcaatatttccaataa

SEQ ID NO: 4097 - DNA, 438 bp, Streptococcus pneumoniae
  misc_feature (1)..(438): tiling:Spneumo1:WAN024G4J; Cluster includes WAN023LGC 3154 48_1933b||||1045984..1046295|+|312 bp|EGAD orf prediction| S.pneumoniae|R6|NC_003098.1|ORF|220
gtgctgggcggcagagccaactccgttaccagctgcacaacgaacagtcattggaacctgacctttaccaccaaacatgtaacgtgttttagcagcttggttgacgatattgtccatggcaataacagagaagtccatgaaggtcatatcgacgattggacgaagtcctgtcatggctgctcctgctgctgctccagagatggcagcttcagaaatcggacagtcacggacacgttctggaccaaattcttcaagcattccaacagaagtaccgaagtctcctccgaagacaccgacrtcttctcccatcaagaacacattttcatcgcgacgcatttcctcagacatagcaaggataatggtgtcacggaaggacattgtttttgtttccattttatctctttctccttagtctgygtaaatatcttcaaaggctga

SEQ ID NO: 4098 - DNA, 284 bp, Streptococcus pneumoniae
  misc_feature (1)..(284): tiling:Spneumo1:WAN024DKD; Cluster includes WAN0244MD spr0 253||15902297|NP_357847.1|255823..256101|+|279 bp|Conserve d hypothetical protein|S.pneumoniae|R6|NC_003098.1|ORF|111
gtgcttaagattcgttatcataaacagtttaaaaaagattttaagttggctatgaagcgtggtttgaakgcagaattattagaagaagttttgaakwttctggttcaagaaaaagaacwtcctgcyagawatcgtgatcatymattgacggcatccaagcattttcaaggagttcgtgartgccatayccagccagattggcttttggtttataaagtagayaagkmrgaattgattttaaatttgctgaggacaggyagtcayagtgatttrttttaactaat

SEQ ID NO: 4099 - DNA, 2453 bp, Streptococcus pneumoniae
  misc_feature (1)..(2453): tiling:Spneumo1:WAN024C7V; Cluster includes WAN0244MY spr0 232|pflF|15902276|NP_357826.1|222574..225021|+|2448 bp|For mate acetyltransferase 3|S.pneumoniae|R6|NC_003098.1|ORF|1 11
gtgcttacgatggtaaatacagaagtagcaagaacaacaatcaaracagaatattttggcagccttactgaaaggatgaacaaatatcgagaagatgttttaaataaaaaaccttatattgatgctgagagagcagttctagcaacacgcgcctatgaacgatacaaggaacaacctaatgtcctaaaacgtgcatatatgctgaaagaaattttggaaaatatgwctatctatattgaagaagaatctatgattgcgggaaatcaagcttcttccaataaagatgctcctatttttccggaatatacgctagaatttgttctcaatgagttggatctttttgaaaagcgtgatggagatgttttctatattacagaagaaacaaaagaacaacttagaagtattgctccgttttgggaaaataataatttacgtgctagagctggtgccttattacctgaagaagtgtcwgtttatatggaaacaggattcttcggtatggaaggtaagatgaattctggagatgctcacytagcagttaactatcagaaactkttgcaatttggtttaagaggttttgaagagcsggctcgtaaagcaaaagtagctctagatttaacagatccagcaagtattgataaatatcatttttacgactctatatttatygtaatcgatgctattaaagtatatgcaaagcgctttgttgctcttgctaaaagtttagccgaaaatgcaaatcctaaacgtaagaaagaattacttgagattgcagatatttgctctagagtcccatatgaaccggcaactacttttgcagaagctattcaatcagtttggtttattcaatgtattttacaaattgaatctaatggccactctctttcatatggccgttttgatcaatatatgtatccatatatgaaggctgatttagaaagtggtaaagaaacagaagatagcattgttgaacgtctgacaaatctttggattaagacaattacaatyaataaggttcgcagtcaatcacatacattttcttcagcaggaagtcctttatatcaaaatgttacaattggtggacagactcgagataagaaggatgctgttaacccattatcttatttggtattaaaatcagttgcacaaacccatctaccgcaacctaatctaactgtacgttaccatgcaggtttagatgctcgtttcatgaatgagtgtattgaagtgatgaaacttggttttggtatgcctgcatttaataatgatgagattattattccttcttttattgcaaaaggagtattggaagatgatgcttatgattacagtgcyattggatgtgttgaaacggcagttccagggaaatggggctatcgttgcacaggtatgagttatatgaacttccctaaggttctacttatcacgatgaatgatggaattgatccggcttcgggtaaacggtttgcaccaagctttggtcrttttaaggatatgaagaacttttctgaattagaaaatgcttgggataaaacactaagatatttgacacgaatgagtgttattgttgaaaattctattgatttatcattggaacgagaagttcctgatattctatgttcagcattgactgatgattgtattggtcgtggaaaacaccttaaagaaggtggagcagtatatgatwawatatcrggrttgcragtkggawtyscaaatttgksggattcrttagctgcaattaaaaaattggtgtttgaggaagaacgtataagcccmartcagctttggcatgcaytggaaacagattatgccggagaagaaggtaaggtcattcaagaaatgttgattcatgatgcacctaagtatggtaatgatgatgattatgctgacaaattggttactgctgcttatgacatttatgttgatgaaattgctaaatatcctaatacacgttatggaagwggkccwattggaggaattcgttattcaggaacatcttytatmtcagccaacgtagggcagggacgtggaacattagcaactccagatggacgcaacgcgggtacaccgttakcagagggttgttcaccatcacataatatggatcaacacggscctacatctgttttaaaatctgtttcaaaattaccaacagatgaaatcgtaggtggggttctcttaaatcagaaagtaaatcctcaaacgttagccaaagaagaagataaattaaaactaattgctttgttacgaacattctttaatcgtttacatgggtaccatattcaatacaatgttgtttccagagagacgytgattgacgctcagaaacatcctgaaaaacacagagacttaattgttcgtgttgcaggatactctgcattcttcaatgttctttctaaggcaacycaagatgacattataggacgtactgagcatacwttgtaactaat

SEQ ID NO: 4100 - DNA, 77 bp, Streptococcus pneumoniae
  misc_feature (1)..(77): tiling:Spneumo1:WAN024ACZ; Cluster includes WAN024EIN-rc R 6.IG_904||||862880..862956|-|77 bp|Between spr0868 (flpA) (- strand) and spr0869 (+ strand)|S.pneumoniae|R6|NC_00309 8.1|IG-rc|110
gtgcttctcgtttctctttacttggctttattataccacatttccatgattttattctacctttttgatataatact

SEQ ID NO: 4101 - DNA, 132 bp, Streptococcus pneumoniae
  misc_feature (1)..(132): tiling:Spneumo1:WAN024F7X; Cluster includes WAN023SH0 NC_0 03098.1_2546||||1979474..1979572|+|99 bp|Glimmer 2.02 orf prediction|S.pneumoniae|R6|NC_003098.1|ORF|111
gtgcttgatatgatgcgttttattatgaraagatttacttcattttttgctgaaattgggctcttgcccaagctctatcaamataattgttttctaatactcaatgaaaatcaaagagcaaacctaactaat

SEQ ID NO: 4102 - DNA, 342 bp, Streptococcus pneumoniae
  misc_feature (1)..(342): tiling:Spneumo1:WAN024FHJ; Cluster includes WAN023KX0 3151 84_2759b||||1468375..1468716|+|342 bp|EGAD orf prediction| S.pneumoniae|R6|NC_003098.1|ORF|110
gtgcttggagcgctagcccatagaacattgattctagcatccataaagtctggcgatacaccaaaaggaaggaagtttggttttcctgcaagctcaaactctgctagtttagctgtaaaatccgcaaaagtytccaattcttggaattctttaaggagtggtaagacaggtgtgataccgtcagcttctctcttgtcaaaatcacgaactaggcggtggtatttgacaaagttttccaagatagcatcctcaggcacttcttcacctgctaaccacttgtctgttgtcgccarcatcaggtcttcaatttcctggtctaaatcaacaaaacctcctgtttga

SEQ ID NO: 4103 - DNA, 339 bp, Streptococcus pneumoniae
  misc_feature (1)..(339): tiling:Spneumo1:WAN024FHQ; Cluster includes WAN023KXD 3139 66_2735a||||1456112..1456450|-|339 bp|EGAD orf prediction| S.pneumoniae|R6|NC_003098.1|ORF|110
gtgcttgtcctcaatctgccaactaaaggtatcgtgctgggcgatgccacccagggcagtactctgaacgatgatttggtgagcaggaatttccagcatcataccgataatggaaccttgtggaatgaatatcttgcttctatccattatcctttgataacccgcagtctgtgtcaattcttgatggagaccaggtgcatcaaatgtataaactgctgtgatctgattttgcaaactttgctcaatttggctagcagcatagatagcgagatttcctcccttggaatgcccagcyagaataaccttttgcttaggatgatgggcaaaaaagttctttaa

SEQ ID NO: 4104 - DNA, 93 bp, Streptococcus pneumoniae
  misc_feature (1)..(93): tiling:Spneumo1:WAN024DB2; Cluster includes WAN023RL8 cont ig_1572_3||||1251..1343|+|93 bp|Glimmer 2.02 orf predictio n|S.pneumoniae|670|WAN01UDHL|ORF|000
gtgctttcgctgggaaattacctttctaaaaacaaggagctagaacaatgcttgtcgataacaaaggctaagaaaggtgcaaaaatgactcta

SEQ ID NO: 4105 - DNA, 416 bp, Streptococcus pneumoniae
  misc_feature (1)..(416): tiling:Spneumo1:WAN024FJL; Cluster includes WAN0243QB spr1 408|def|15903451|NP_359001.1|1392416..1392826|-|411 bp|For mylmethionine deformylase|S.pneumoniae|R6|NC_003098.1|ORF| 221
gtggaaaagaaaattgtgaaggatatcttatttttatctcaagtgtctcakccggcaagtcaggaggacctttatcttgccagagatttgcaggatacactcttagcmaatcgtratamytgtgttggtctagctgccaatatkattggggtgcagaagcgcgtgattatctttaatcttggcttggttccygtggtcatgtttaacccagtgcttctgtcctttgaaggatcytatgaggcagaagaaggctgtttgtccttggtaggtgtgagatcaactaagcgttatgaaaccataaggcttgcctatcgtgacagcaagtggcaggaacagaccattaccttgacaggcttcccagctcagatttgccagcatgagctggatcacttggaaggacgaatyatttarctaat

SEQ ID NO: 4106 - DNA, 1074 bp, Streptococcus pneumoniae
  misc_feature (1)..(1074): tiling:Spneumo1:WAN024CW3; Cluster includes WAN0242Z9 SP03 58||15900287|NP_344891.1|332874..333929|+|1056 bp|capsular polysaccharide biosynthesis protein Cps4J|S.pneumoniae|TI GR4|NC_003028.1|ORF|010
gtggaaaataatatgtcacaatttacaggaaaaactctyctaattacaggaggracaggttcatttggkaatgckgtyctyaakcgttttttasaracwgatrtykswgarattcgtathttttcscgwgatgaaaaraaacargatgatatgcgtcatgagtttcaggtaaaagtaccagaagtrrctgggaaaatccgtttttacctyggagatgtgcgtgacttagcttcggtaaaaaatgctatgcatggtgtggattatgtttttcaygctgctgctctkaaacargtaccttcktgtgaatttttccctgtagaagcggtaaaaactaacattttgggaacggagaatgtyctcrctgcrgctatcgaagctgrtgtaaagcaagttatctgtctttctacagataaggcggcttatccygtyaatgctatgggaacrtccaaggctatgatggaaaagattgctgttgctaagtccmggrcggtaaatcctgagcatacaaagatatgtgtgactcgctatgggaatgttctrtgtagccgwggatctgtmgttcctctttggattgagcaaattaagcaaggaaatgctcttacaattactgaacctagcatgacacgttttgtgatgacattrgaagaagcagtagayttrgttttatttgcatttgaagaagggaaatctggmgatatactagttcagaaagcaccagcatgtacgattgaagtkttggctaaggctgtatcagaaatttttgcctcagaacaagatattaagattataggtattagacacggagaaaaaadgtatgaaacactaytaactaaygaagagtgygcaaatgcaattgatttgggtratttttatagagttcctagtgataatcgtaatcttaactatgataagtatttcaaagatggtagtacgaatagaaatttgttgacagaattcaatagtaataataccgatttgatggatgtagagcaagttaaaagaaagttgctagaattagatgaaatacagacagcaattcgtgatatggtagcagaygaagagatgctaactaat

SEQ ID NO: 4107 - DNA, 96 bp, Streptococcus pneumoniae
  misc_feature (1)..(96): tiling:Spneumo1:WAN024C4X; Cluster includes WAN023Q47 cont ig_1227_4||||5025..5120|+|96 bp|Glimmer 2.02 orf predictio n|S.pneumoniae|670|WAN01UEJT|ORF|001
gtggaaaatagaaaaaatccgaagaaggccaaatatcttcggatttttcttttaaaaaaggataagttgatactyaatgtcattaagttagtgatc

SEQ ID NO: 4108 - DNA, 416 bp, Streptococcus pneumoniae
  misc_feature (1)..(416): tiling:Spneumo1:WAN024E2W; Cluster includes WAN0243EE spr1 838||15903880|NP_359430.1|1814648..1815058|-|411 bp|Hypoth etical protein|S.pneumoniae|R6|NC_003098.1|ORF|221
gtggaaaatcttacgaatttttacgaaaagtatcgtgtytatctgactcgtccacgtttagagmttttggcagtagttaccattgttttytgtgctgtactcgtcttttttctaaatattccaggaaaaggtgtcttaaaactcgataatggaacgattgtttatgatggcagtcttgtccgyggtaaaatgaatggycaaggtaccattaccttccaaaatggagaccaatatacaggtggcttcaacaatggagccttcaacggaaaaggtacctttcaatctaaagaaggctggacctacgaaggtgattttgtaaatggtcaggctgaaggaaaagggaaactaacaacagaacaagaagtcgtttatgaaggaacttttaaacaaggcgtttttcaacaaaaataactaat

SEQ ID NO: 4109 - DNA, 462 bp, Streptococcus pneumoniae
  misc_feature (1)..(462): tiling:Spneumo1:WAN024FEX; Cluster includes WAN023KT7 3138 65_2913b||||1552947..1553408|+|462 bp|EGAD orf prediction| S.pneumoniae|R6|NC_003098.1|ORF|110
gtggaaacaaacagccgcaaaatcatccaaagtaagctggtagcgtttttgatattcaagccaagtcgttttcaaactatccaagtattgttgggtagaatagacaccatttacataaggagttgtcgagtaatttggtcgccagaaatccatgatgtcacgggtctgagctacattgtcattattaaaggccatcatgcgtggattttgtgtaatcaacatagctacacttccagcaccttgagttggttctccyggagtttcaataccrtatttggcaatatcactggcaatgaccaagaccttggactccggagaattttccacatgcaatttggcataatggagggcagcwgtcgcyccrtagcaggcttctttaatctcgaaactacgagcaaagggctggatgcccagcaagccatgcacaaagacggccgcagccttactctggtcaattcctga

SEQ ID NO: 4110 - DNA, 363 bp, Streptococcus pneumoniae
  misc_feature (1)..(363): tiling:Spneumo1:WAN024EVW; Cluster includes WAN023KEI 3139 60_3593b||||1930995..1931270|+|276 bp|EGAD orf prediction| S.pneumoniae|R6|NC_003098.1|ORF|110
gtggaaaccatatttgtcagcaatatccagcacgcgctccaagtgttggcacatgaggagactacgatccacaacaccgttcagaatcaggtagcgtcccaaaccaaccaagtgggcttcgtccatcccgatattgaccttgcgagtcttcagtttagacaacgtggcaaacatgccatcaatcargtcataaaccttttcttcgccaatgagaagaatgtcctctacatcacggagctcctgcacttccttgacaccccatttgacaaaggcygacaagtgggccaaggtctggatgcatggtacaaaggtcacgtcaaactgttgggcataggcttcgatttcctgcaactcctctgctga

SEQ ID NO: 4111 - DNA, 291 bp, Streptococcus pneumoniae
  misc_feature (1)..(291): tiling:Spneumo1:WAN024FXW; Cluster includes WAN023LAH 3142 12_2173||||1171595..1171885|-|291 bp|EGAD orf prediction|S .pneumoniae|R6|NC_003098.1|ORF|110
gtggaaataaacctgcatgtacatctggtagcgactgaggacgtagtcttcgatggcgtgcatgccattgcgctgaaaggcgataccattttcgataggacgaatgactcggaggattcgagtcaggtcaaattccccataggatgctcctgtaaaataggagtcgcgcaagagatagtccatgcgatctgcgtcaatctgactagaaatgagctgcacgacctgcttattaggataggtatggtcaatgacactggccaccttttctgggaaatcaggtgccacttgtag

SEQ ID NO: 4112 - DNA, 261 bp, Streptococcus pneumoniae
  misc_feature (1)..(261): tiling:Spneumo1:WAN024GDI; Cluster includes WAN023LSH 3143 23_1244||||659944..660204|-|261 bp|EGAD orf prediction|S.p neumoniae|R6|NC_003098.1|ORF|110
gtggaaataaccttattatcttttaccagaatcgcgcccactttagcacgtttacaagtggaacgattcgcaattagtagagcttgggctgcaaaatactcatcccaggccagtcttttttcagtcatctcttttctcctttttctctattttttaaaaaatggtaaacctaaatctgcaatcttttcagctggtaccttcatgccatccttgatccattttagaaggacagagacgatggctgagctccagaaggaatga

SEQ ID NO: 4113 - DNA, 477 bp, Streptococcus pneumoniae
  misc_feature (1)..(477): tiling:Spneumo1:WAN024G5G; Cluster includes WAN023JZI 8302 0_592a||||333295..333564|-|270 bp|EGAD orf prediction|S.pn eumoniae|TIGR4|WAN01UC25|ORF|020
gtggaaataacgattcaactgttccaatatttttgtcgtgtcagtaacattggtatagttttcaggtttactagaaatactttgcataaaactagtagccgttgcttcatccgtaccaggatctccgttaataccaatacctaccgtaaagacatcatacccatcaggagcaatattcccgttatagtaccatcttgtagggtcaccatgattggtaattttagcagtattagaattaaacggataagccagaatactctctctccaattaagccaaatatatccaccattaattggatcgcctataactgcataaccagccgccttcatttcagaatatttttcaggtttaactgggaaagctgcaggagcacctttttcataaactgtcttatctgtaaacatctggtaactttgcccatctccgcgtacaattgtatgttctccactagttgcttgcgtaataaaatcacttaa

SEQ ID NO: 4114 - DNA, 1526 bp, Streptococcus pneumoniae
  misc_feature (1)..(1526): tiling:Spneumo1:WAN024FIX; Cluster includes WAN0243PO spr1 431|lytC|15903474|NP_359024.1|1414511..1416016|-|1506 bp|1 ,4-beta-N-acetylmuramidase|S.pneumoniae|R6|NC_003098.1|ORF |120
gtggaacagcattcagatgtctgttacattttttataggagasaaagattgaaaayaaaaattggattagcaagtatctgtttactaggcttggcaactagtcatgtcgctgcaaatgraactgaagtagcaaaaacttcgcaggatacaacgacagcttcaagtagttcagagcaaaatcagtcttctaataaaacgcaaacgagcgcagaagtacagactaatgctgctgccyactgggatggggattattatgtaaaggatgatggttctaaagctcaaagtgaatggatttttgacaactactataaggcttggttttatattaattcasatggtcgttactcgcagaatgaatggcatggaaattactacctgaaatcaggtggatatatggcccaaaacgagtggatctatgacagtaattacaagagttggttttatctcaagtcagatggggcttatgctcatcaagaatggcaattgattggaaataagtggtactacttcaagaagtggggttacatggctaaaagccaatggcaaggaagttatttcttgaatggtcaaggagctatgatrcaaaatgaatggctctatgatccagcytattctgcttatttttatctaaaatccgatggaacttatgctaaccaagagtggcaaaaagtgggcggcaaatggtactatttcaagaagtggggctatatggctcggaatgagtggcaaggcaactactatttgactggaagtggtgccatggcgactgacgaagtgattatggatggtrctcgctatatctttgcggcctctggtgagctcaaagaaaaraaagatttgaatgtcggctgggttcacagagatggtaarcgctatttctttaataatagagaagaacaagtgggaaccgaacatgctaagaaartcattgatattagtgagcacaatggtcgtatcaatgattggaaaaaggttattgatgagaacrargtggatggtgtcattgttcgtctaggttatagcggtaaagaagacaaggaattggcgcataacattaaggagttaaaccgtctgggaattccttatggtgtctatctctatacctatgctgaaaatgagaccgatgctgagartgacgctaaacagaccattgaacttataaagaaatacaatatgaacctgtcttaccctatctattatgatgttgagaaytgggaatatgtaaataagagyaagagagctccaagtgatacagrcacttgggttaaaatcatcaacaagtacatggmcacgatgaagcaggcgggttatcaaaatgtrtatgtctatagctatcgtagtttattacagacgcgtttaaaacacccagatattttaaaacatgtaaactgggtagcggcctatacgaatgctttagaatgggaaaaccctyattattcaggaraaaaaggttggcaatatacctcttctgaatacatgaaaggaatccaagggcgcgtagatgtcagcgtktggtattaactaat

SEQ ID NO: 4115 - DNA, 240 bp, Streptococcus pneumoniae
  misc_feature (1)..(240): tiling:Spneumo1:WAN024CFS; Cluster includes WAN023MDI 3144 09_138||||66439..66678|-|240 bp|EGAD orf prediction|S.pneu moniae|R6|NC_003098.1|ORF|110
gtggaacatgtaaagattgatagagccttgttccaaaacctctcgaactgcatctgccaattccttaggatcccgtgtgataatcggttctttccagcgattgaaccaaccatcccagaactccatacacatgagtggccatttcttaccatgttcatcaaagaattcctgcatctgcgaaaagttgtaaggtgccttagaaccaaagtttcctgttacaaagaggtcctcttcaattaa

SEQ ID NO: 4116 - DNA, 432 bp, Streptococcus pneumoniae
  misc_feature (1)..(432): tiling:Spneumo1:WAN024F2G; Cluster includes WAN023KMA 3138 96_3263b||||1745169..1745600|+|432 bp|EGAD orf prediction| S.pneumoniae|R6|NC_003098.1|ORF|110
gtggaaggtacgcattgtaagctgtgtaccaggttccccgatagattgggcagcgattgtaccaactgcttcaccaacttcaaccgcatcaccagtcgccaagttgataccgtaacagtgacggcagacaccgygacgagtgttacatgtaaatacagaacggatagtcacttcttccacaccagcattgacaatttcacgcgccttgtcttctgtaatcaattcatttggaccaataatcactgcaccagtttctggatgtttaacagttttcttagtgtaacgaccgttgagacgctcttcgagagactcgatcatctcttttccttctgcgatagaacggatcaagagaccacggtcagttccacagtcgtcctcacggatgataacgtcttgggcaacgtcgaccaaacgacgagtcaagtaacctga

SEQ ID NO: 4117 - DNA, 537 bp, Streptococcus pneumoniae
  misc_feature (1)..(537): tiling:Spneumo1:WAN024F8Q; Cluster includes WAN023LAQ 3151 36_2167b||||1169455..1169991|+|537 bp|EGAD orf prediction| S.pneumoniae|R6|NC_003098.1|ORF|120
gtggaaggtttcaatgtccgtaatcttttcacctgtaccagtgaacttgattggttttccagtaatgtgacgaacagacagagcagcaccaccacgagtatcgccatcaatcttggtaaggatgaccccagtcacttccaactgagcattaaactcacgcgcaacattggctgcttcctgaccaatcatagcatcaacgacaagcaagatttcatttggttgagccaatgctttcacatcacgaagctcattcatgaggagctcatcaatctgcaaacgacccgcagtatcaatcaagacatagtcgttatgattagtttgggcttgctccaaaccttgacgtacaatctcaacagctggtacttctgttccaagtgcaaagacaggcacatcaatctgttgtcccaaggtcttaagctggtcaatggcagctggacgataaatatccgccgcaaycatcaaaggacgagcattttcttctttcttgagtttgttggccaatttaccagcaaaggttgttttaccagccccttgtaa

SEQ ID NO: 4118 - DNA, 237 bp, Streptococcus pneumoniae
  misc_feature (1)..(237): tiling:Spneumo1:WAN024FIA; Cluster includes WAN023KYF 3141 05_2685||||1430116..1430352|-|237 bp|EGAD orf prediction|S .pneumoniae|R6|NC_003098.1|ORF|110
gtggaagtaggaaccaaagacattcttataatgaaccccttcaccgaccttttcttcgttgtttccatttccatagacaacctgtcccagcggtttttggtcatcagagaggaaggtacgrccttggtgattttcaaatccatagtaggtttcatcgaaatcttcattgtgaatcttgatgtcaccgataaaacggttattggtctggttgagcgtgtagtgtcccatgacccctag

SEQ ID NO: 4119 - DNA, 306 bp, Streptococcus pneumoniae
  misc_feature (1)..(306): tiling:Spneumo1:WAN024BIY; Cluster includes WAN0246QZ 2036 67-64-5_4||||1717..2022|-|306 bp|Glimmer 2.02 orf predicti on from Patent Sequences|S.pneumoniae||WAN02470J|ORF|000
gtggaagtgcatgaaaagggagattatagctatttactctttcataatgaggaaaaggaaaaagtagttattaaatttcatggtcaagaactggtgatgagccgattttctaatcccaagaccattatgcgctttttaaaggatagtgatagtttggcctatattcctacccctatgggcatgcaggaatttatcattcaaacgagccgttatcaagttgataggcaaaagattgagctagcttatcaactacaaaatcaagaggggcatccctttgccagctatcaattggaaattacttggggc

SEQ ID NO: 4120 - DNA, 74 bp, Streptococcus pneumoniae
  misc_feature (1)..(74): tiling:Spneumo1:WAN024AII; Cluster includes WAN024ELL R6.I G_651.2||||636582..636655|+|74 bp|Between spr0627 (lctO) ( + strand) and spr0628 (+ strand)|S.pneumoniae|R6|NC_003098 .1|IG|110
gtggaattacgattttgcttgatatttcttggtgttttattaattactaacaagtaaagagaggagaagtaaat

SEQ ID NO: 4121 - DNA, 1398 bp, Streptococcus pneumoniae
  misc_feature (1)..(1398): tiling:Spneumo1:WAN024CKS; Cluster includes WAN02434B SP01 67||15900105|NP_344709.1|162244..163635|+|1392 bp|hypothet ical protein|S.pneumoniae|TIGR4|NC_003028.1|ORF|010
gtggacaaaaaacttgacatattagataaagttaaggaatatttaggaaataaaactactcaaattctggataatcaatataaagaatttttgaaacttaatgatataaggcgagcgtttggtatttcagaaaaagtattaaacaattcttttaattttacgagtaaagaatttaatgatttaattaataacgaaaattatttattcgaatatgcatgtagaattagagaggaatggagaaaaaaatgctttaatcattcttatcgttttctatgctcacctataattacagatgattttcttaacacgaagacattgagaagtagccaaattgaatataaatatgagcgatatttatcgaaaagttcgataggcgatagagcggttgatggctttgtttccttcaatactttaacagctaatggtatgtctgctattaaactatgtcttgagatattaaactctattttcttcaagaagaagattgatttattatattcaaccggatattatgaaacaagatttttattaaataatcttgctaaatcaggtattagttgctatgaggtaagtaattgtgaattggataaagataaattttataatgtattcatgatggaacccaatcgagccgatttaacattacaaaaaactgatttcaagatagtagaatattttgttaagtataaaaataattcaataaaagtcgttattttagatatttcatatcaaggttctaattttaaattagtagaatttttagagaaatttaaatttgcgaatgtaattatttttgtggtacgatctttgataaaattagatcaaatgggattagaattgacaaatgggggaataatagaagtgtttattcctaatcatttgagaaagttgaaaaattttattgaagaggaattcaataaatttagaaattctcacggagctaatctaagcctctatgaatactgtttgcttgataattctttaactttaaaaaatgattggaactattctgatttagttatgaaatttacgagtaatttttatgctgatataaaagacttgttcatggaaaattctgatattgaaatcatccatgaagagggagtaccttttgtatttttagatttaataggtgaaggtaaaaaagaatatgaaatgttttttcaatggttaaacttcttttacaaacagcttggaatcacattgtatgctagaaatagttttgggtttcggaatctaacagtagagtattttggaattattgggacagaaagatatatatttaagatttgtccaggtgtttataaagggttaagttattatttgatgaaatttttattaaaatctttttcaaatgaatatttaaaaactactgatgaggttaatagaykaactaat

SEQ ID NO: 4122 - DNA, 247 bp, Streptococcus pneumoniae
  misc_feature (1)..(247): tiling:Spneumo1:WAN024B89; Cluster includes WAN023MB1 3131 15_265b||||135116..135352|+|237 bp|EGAD orf prediction|S.p neumoniae|R6|NC_003098.1|ORF|210
gtggactttttgcatgcggtattcaccgtggacaggcatgaagtattttggcttaatcaagcrgagcatgagtttttgctcttgctgrccaccgtgtccagatgtatggatattgttcactttaccgtggataacttcgacaccagcttcagaaatgatgttaatcagcttgttgacrctagtagtgtttccagggatgggactagaagagaagataacggtatcacctggttgtaattgtacttga

SEQ ID NO: 4123 - DNA, 875 bp, Streptococcus pneumoniae
  misc_feature (1)..(875): tiling:Spneumo1:WAN024FZA; Cluster includes WAN0243XK spr1 147|pck|15903190|NP_358740.1|1148407..1149276|-|870 bp|Cho line kinase|S.pneumoniae|R6|NC_003098.1|ORF|211
gtggagaaaatcattaaagaaaaaatttcttccttacttagtcaagaagaggaagtcctcagtgttgaacaactgggtggaatgaccaatcaaaactatttggccaaaacaacaaataagcaatacattgttaaattctttggtaaagggacagaaaagcttatcaatcgacaagatgaaaagtacaatcttgaactactaaaggatttaggcttagatgtaaaaaattatctttttgatattgaagctggyatcaaagtaaatgagtatatcgaatctgcgattacgcttgattcaacgtcaatcaagaccaagttcgacaaaattrctccaatattacaaactattcatacrtctgctaaggaattaagaggagaatttgctccttttgaagaaatcaaaaaatacgaatccttgattgaagaacaaattccttatgccaactatgaatctgttagaaatgyagtcttctccttagagaaaagactggctgacttaggtgttgacagaaaatcttgtcatatcgatttggtgcctgaaaactttatcgaatcacctcaaggacgactttatttgattgactgggaatattcatcaatgaatgatccaatgtgggatttggctgccctctttttagagtctgaattcacttcccaagaggaagaaactttcttatctcactatgagagtgaccaaacaccggtttctcatgaaaagattgctatttataaaattttacaagatactatttggagtctatggactgtmtataaggaagagcaaggtgmagattttggtkactatggtgtgaatcgttaccaaagagctrttaaaggtttggcttcttatggaggwtcagatgaaaagtaactaat

SEQ ID NO: 4124 - DNA, 243 bp, Streptococcus pneumoniae
  misc_feature (1)..(243): tiling:Spneumo1:WAN024G8R; Cluster includes WAN023LM2 3155 89_1602||||848269..848511|+|243 bp|EGAD orf prediction|S.p neumoniae|R6|NC_003098.1|ORF|110
gtggagaacaccgtgtttttcatagacgggttcatcgtgcgttgtcacacggtcagctgtttcgataacgccaccttggtcaacagcaacgtcaacgatacagagcctggacgcatttgtttgaccatctcatctgtcaccaattccggtgcttttgcaccagggatgagaatggctccaatcaccacatcagcatctctcacacttgcttcaatgttgaatgaattagacataagagtttga

SEQ ID NO: 4125 - DNA, 237 bp, Streptococcus pneumoniae
  misc_feature (1)..(237): tiling:Spneumo1:WAN024DYY; Cluster includes WAN023KH3 3148 11_3482||||1865813..1866049|+|237 bp|EGAD orf prediction|S .pneumoniae|R6|NC_003098.1|ORF|110
gtggagaattgtcaaagaagtctccttgatacagctagattaactagtgagtcttggttttatagtttctgttttaactctactaagacattcataacctgcataggtgtcatattatacacatccagtttagctaattctgctaggataggatgctcttctgccctatcaaagagtgaaatctgttcagtgacagcactagtttgtctcatgggaggaggactctctgttccttga

SEQ ID NO: 4126 - DNA, 2258 bp, Streptococcus pneumoniae
  misc_feature (1)..(2258): tiling:Spneumo1:WAN024CUC; Cluster includes WAN0244BL spr0 641|ctpA|15902685|NP_358235.1|646986..649238|+|2253 bp|P-t ype ATPase - probable copper transporter|S.pneumoniae|R6|N C_003098.1|ORF|111
gtggagactatgacagaaattgtgaaagcaarcttagaaaatggcattcaaaaaatccgtatccragctgaaraaggctatcatccagcccatatccagcttcaaaagggaattccagctgagattacctttcatcgtgctactccttcaaactgttataaggaaattctgtttgaagaagaaggtatcttggaascaatcggcgtagatgaggagaaagtcattcgttttacrcctcaagaattagggmgacatgaattttcttgtggcatgaagatgcaaaagggaagctatayagtcgttgagaagactcgaaaatctctatctctcctgcaacgtttttggattactagtatctttactgtgcctcttgtgattctcatgattgggatgttgrcaggtagcattagtcatcaagtcatgcattggggaacctttytagcaacaacgcctattatgttagttgcrggtaagccatatatccagagtgcttgggccagttttaaaaagcacaatgccaacatggataccttggttgcgctgggaactctagtggcttatttctatagcctagttgctctctttgctggtctccctgtttacttcgaaagtgctggatttatcctctttttcgttcttttgggagcagtttttgaggaaaaaatgagraaaaatacgtcccaagctgtggagaaattactggacttgcaagctaaaaccgcagaagtcttgagtgatgatagttatgtccaagttcctttggaacaagtcaaggtasgcgacctgattcsagtgcgtcccggtgaaaagattgctgttgatggtgtcgtagtagaaggtgtctctagtattgacgaatccatggtgacaggtgagagtctgcctgtggacaagacagttggagatactgtcattggctcaaccatcaatcatagtggaacgcttgtctttagagcagaaaaagttggctcagagactgttttggctcagattgtggattttgtgaagaaagctcagacaagtcgtgcgccgattcargacttgacggataagatttcagggatttttgtcccagtagttgtcattttaggaatcatgaccttttgggtttggttcgtcttgctcagggatagtgtggtygtgcttggagctagctttgtgtcctctcttctctacggagtggcggttttgattatcgcctgtccttgtgccttgggacttgcaacaccgacagcccttatggtggggacaggacgtagtgccaagatgggggttctcctcaaaaatggaactgtcttacaggaaatccagaaagttcaaacycttgtctttgataagaccgggactttgacggaagggaaacctgtggtaacagatrtcatcggygacgaagtagaagtgtttrgrttggcagcctccttggaagatgcttctcaacacccactggctgaggctatcgttaagcgagcgagtgaagctggacttgagtttcaaactgttgaaaattttcagdccttgcacgggaaaggtgtttcagggcgaatcaatggaaaacaagttttacttggaaatgctaaaatgctggatggyatggatatttctaatacttatcaagataaactagaagaactagaaaaagaagctaagacagttgtgttyttagctgttgacaatgaaatcaaaggcttgcttgctttgcaagatattcctaaggaaaatgctaagctagccatcagtcagctaaaaaaacgtggtctccgaacagtcatgctgacaggagacaatgctggtgtggcgcgtgctattgcagatcaaatcggaattgaagaggtcattgcaggcgtcttgccagaagaaaaagcccatgaaatycataaactgcaasmgkcwggsaaagtagcctttgttggggacggtatcaatgacgctcctgcccttagtgtagcagatgtgggrattgctatgggwgctggaacagatatcgccatcgagtcagcagatttggtgttgacaaccaataatcttttaggagtggttcgtgcctttgatatgagtaagaaaacctttcatcgaattctactcaatcttttctgggcttttatctacaatgttgtcggaattccgattgcagcaggagtcttttcaggtgttggactggctctcaacccagaattggcaggtctagccatggcctttagttctgtatctgttctgaccagttcccttctgttaaattttagtaaaatagactaactaat

SEQ ID NO: 4127 - DNA, 135 bp, Streptococcus pneumoniae
  misc_feature (1)..(135): tiling:Spneumo1:WAN024FWV; Cluster includes WAN023PTG pne1 3_14||||9401..9535|-|135 bp|Type 9A capsule operon, Glimme r 2.02 orf prediction|S.pneumoniae||WAN01UCJY|ORF|000
gtggagagtagggtaaatatagttgccattgatccaactgtaaaaaaactaggtaaaaaatacgacagtaatacacagattatatatatttttctttttatcatcaatctaatttattctttcctcattcataat

SEQ ID NO: 4128 - DNA, 459 bp, Streptococcus pneumoniae
  misc_feature (1)..(459): tiling:Spneumo1:WAN024CCP; Cluster includes WAN023MBW 3131 11_212b||||103019..103477|+|459 bp|EGAD orf prediction|S.p neumoniae|R6|NC_003098.1|ORF|110
gtggagatgagggatttttcgaatttcttcgatagcctcatcacagttgcgactgtcaacttcgataatcataatggctttttcaccagctttttcacgagtgacattcatctgggcgatattgataccatagcgggaaagcgcctctgtaacaagggcaatcatacctggaatatcttgatgaacgatgatgatagtcggtgtattcatattgagagagacggcaaaaccattgagttcggttacctgaatatttcctccaccgatagaaataccagtcacgctgatggtcttgtgggcatttttaacagtaattttagtggtgttagggtgaggggcattgctgtctttctgaatggtccagacaatcttgataccacgcttgtgggcaatttccagactatttggaatttcaggatcatctgtatccattccyaaaatacctgcaacaagggctag

SEQ ID NO: 4129 - DNA, 1353 bp, Streptococcus pneumoniae
  misc_feature (1)..(1353): tiling:Spneumo1:WAN024G2Z; Cluster includes WAN0243Z6 spr1 089|xseA|15903132|NP_358682.1|1083969..1085315|-|1347 bp|E xodeoxyribonuclease large subunit|S.pneumoniae|R6|NC_00309 8.1|ORF|321
gtggagatggaaaagtatttatcggtaacaactttgaccaagtatctgaaaatgaaattcgataaagacccatacttggaacgggtctatttaactggtcaagtttccaactttcgtaaacgacctactcaccaatatttctccctaaaggatgaccatgcagttattcaagcgaccatctggtctgggatttatcagaaattagggtttgacctggaagaaggaatgaagatcaatgtgattgggcgtgtacaggtytatgaaccaagtggtagctactccatcatcattgaaaaagytgagcctgatggggttggggcgcttgcgattcagtttgaacaacttaagaaaaaattgacagaagaaggcctgtttcaagaacgcttcaagcaagctctrccccaattttctaagagaattggkgtagtaaccagccgtagtggagccgttattcgagatattatcacgaccgtcagcaggcgattcccaggtgttgacatccttctttatcckaccaaggttcaaggtgaaggggctgcggaggaaattgctagaaatattgcgcgtgctaatcaaygggaygatttggatttgctcattattggtcgtggaggtggttctattgaggatctctgggcctttaacgaagaaattgtggtacgagctatttttgaatctcgtttgccagttatctctagtgtggggcatgagacggatgtgaccttggcagattttgtggcagatcgacgcgctgcaacgccaacagcggcggctgaactggcaacacctgtgaccaagttggatgtattarctcatttgcaaaatcaggaaaaacggatggyaacggcagtccgaaatgttctatctaagaaacaagaggctttgaaaaaatgcagtcagtctgttatctttagacaacctgagcgcttgtatgacggttatttgcaacgcttggaccaactgcaactgcgtttgaaacaaagtttgcgaactcggatttctgataacaaacaattagttcaagcaagaactcatcaattagtacaattatcacctgttaccaaaatccaacgctatcaagaccgtttaggacagttggacaagctcttaggtagccaaatggcgttagtttatgacgccaaggttgctgaggycaagcgactttcggaagctttgctcatgttggatactagccgaatcgtggcgcgtggttatgctattgtcaaaaaagaagagtccrttgtagattcggttgagagtttgaagaaaaaagaccaagtaacgcttttgatgcgagatggtcaagtagaattagaggttaaagatgtcaaaacaaaagaaattykaactaat

SEQ ID NO: 4130 - DNA, 367 bp, Streptococcus pneumoniae
  misc_feature (1)..(367): tiling:Spneumo1:WAN024CT8; Cluster includes WAN0240CQ |||A AC98435.1|||366 bp||S.pneumoniae||L29324|ORF|001
gtggagcacmgatatagaacaaatttaaaaaaagtctttytatctgayctagaattagtcaaattgaatgaaaatatctcaaaaagtaactgcttatcattctcagaatatgctagacgaactactactagatcctggtatgaattttatcaccattgatacaaatagttatcaagatttgatttttgaattaaaacgaatcggaaataatattaatcaaatagccagaagcataaattattcgaatttaataacggargttgaattaaatgagttgagaaaaggtatagaagagttaatagtagaagtggagaaagattttcttattcratctgaaaaattgaggaaattttatggtcatcactaa

SEQ ID NO: 4131 - DNA, 312 bp, Streptococcus pneumoniae
  misc_feature (1)..(312): tiling:Spneumo1:WAN024CR4; Cluster includes WAN023M3V 3143 69_671||||351325..351636|-|312 bp|EGAD orf prediction|S.pn eumoniae|R6|NC_003098.1|ORF|111
gtggagcaggtatatattgccagccgacaaccatctctccggataaaggatcaaaataatagtacttcccatctatcactctccagtaggtttcttttagakccccctttttgtagtaggttctaccattttcttggacaaactgccatccttcagaatcatctgcaaatactgtaytkgtcsctarcaaaccgaagaaaaatgtggctagtrcgayttgcatcatttttttmaaaagcttcattttatatatcctccaacatyaaatccactcaccagatgaagcgaagttataaactttaccatcgatag

SEQ ID NO: 4132 - DNA, 78 bp, Streptococcus pneumoniae
  misc_feature (1)..(78): tiling:Spneumo1:WAN024GIZ; Cluster includes WAN023X4P AX56 7782.1_1||||584..661|-|78 bp|Glimmer 2.02 orf prediction|S .pneumoniae||AX567782.1|ORF|000
gtggagccgcttgatttgaacgtttatcctcttgctgacggcgctcatttctacgtttttgctgaccttgctgcttct

SEQ ID NO: 4133 - DNA, 203 bp, Streptococcus pneumoniae
  misc_feature (1)..(203): tiling:Spneumo1:WAN024DC7; Cluster includes WAN02443T spr0 921|xylH|15902965|NP_358515.1|908903..909085|-|183 bp|4-ox alocrotonate tautomerase|S.pneumoniae|R6|NC_003098.1|ORF|1 21
gtggaggaagctattatgccatttgtacgcatcgatttatttgaaggacgcacgctcgagcaaaagaaagctcttgctaaggaagtaacggaagcdrttgtycgyaayactggagcmccycaatctgctgtycatgtcatcatcaacgacatgccagaaggaacttayttcccacaaggggaaatgcgyacyaaataactaat

SEQ ID NO: 4134 - DNA, 764 bp, Streptococcus pneumoniae
  misc_feature (1)..(764): tiling:Spneumo1:WAN024DUY; Cluster includes WAN0243A9 spr1 988|glpF|15904029|NP_359579.1|1979572..1980276|-|705 bp|Gl ycerol uptake facilitator protein|S.pneumoniae|R6|NC_00309 8.1|ORF|311
gtggagggcagcattccttgtcgcccgtcccttctttttaatggagacagaaagatgatgartgaattatttggagaatttytagggactttaatcctgattcttctaggaaatggtgttgttgcaggtgtggttcttccwaaaaccaagagcaayagykcaggttggattgtgattactatgggttgggggattgcagttgcggttgcagtmtttgtatctggmaarctcagyccagctyatttaaayccagctgtgacmrtyggtgtrgcyttaaaaggtgryttgccttgggcttccgttttgccttatatcttagcccagttcgcaggggcyatgctgggtcagattttggtttggttgcaattcaaacckcaytatgaggyagaagaaaatgcaggcaatatcctggcaaccttcagtactggaccagccatcaaggatactgtatcaaacttgattagcgaaatccttggaacytttgttttggtgttgacaatctttgctttgggtctttacgaytttcaggcaggtatcggaacctttgcagtgggaactttgattgtcggtatcggtctatcactaggtgggacaacaggttatgccttgaacccagctcgtgaccttggacctcgtatcatgcacagcatcytkccaattycaaacaagggagacggagactggtcttaygcttggattcctgttgtrggmcctgttatcggwgcagccttggcmgtgcttgtattctcacttttctarctaat

SEQ ID NO: 4135 - DNA, 1428 bp, Streptococcus pneumoniae
  misc_feature (1)..(1428): tiling:Spneumo1:WAN024FYG; Cluster includes WAN023OSM pne7 4_14||||11226..12653|+|1428 bp|Type 35F2 capsule operon, G limmer 2.02 orf prediction|S.pneumoniae||WAN01UCCV|ORF|000
gtggagtgtgcttgtatgaaagtacttaaaaactacgcttacaatctttcatatcagttactaatcataatcttaccgattattaccactccctacgttactaggatttttagttcggataatctagggacttatggttattttaactcaattgtaacctattttcttttgctggctactttaggaataggaaattatggaacaaaagagatttcaggtaataggaaagctatccatcagaatttttggggtatttatagtatacaactgggagcatctctattctccactttcctttatgttattgtctgtctaattttaccagctatgcaaaatactgtagcctatattttaggcttaagtttgttttctaaaggtttagatatttcttggttatttcaaggtttagaggattttcggaaaattacagtaagaaatataactgtgaaagtcattgggrkaacctcgattttcttatttgtaaaatcagctagcgacctctacctttatgtttttcttttaacgatatttgagttattagggcaacttagtatgtgggtaccagctcgggaatttattgggaaaccgcactttgactggttgtatgctaaacaacatttgaagccagttatcttattatttttaccacaggtcgctatatcgctttatgtgactttagatagtactatgcttggttctctagcctcaataagagatgttggaatttatgatcaatctctgaaacttgtcaaaatattattaacattagtaacttcattaggaagtgtcatgttgcctagagtttcaaatcttttatcctcaggggatcataaagcagtcaacaaaatgcatgagatatcatttttaatttataatttggttattttccccattatggcaggaatgctaattgtaaatgatgactttgtaacctttttcctcgggcaagattttcaagaggcacgttatgcgatagcaattatgatttttagaatgttctttattggttggaccaatattatggggattcaaattttgatacctcataataaaaataaagaatttatgctgtcaacaataattcctgctattgttagtgtaggcttaaatcttctcttgcttccaaagctgggctatataggagcagcaattgtttctgtcttaacagaggcgctagtatgggctattcaattgtactatactcgtacatacttaaaagatgttccgattattagaactatgataaaaattattctagcctcagctatcatgtatagcgttttgctagtttctaagacatacatacatttttccccaactataaatgttttggtatttgtggtgttaggtggaatcatttatcttttttcagttttatctctaaaagtgatagatgtgatagaattaaaacaagtaattaggaaaaat

SEQ ID NO: 4136 - DNA, 96 bp, Streptococcus pneumoniae
  misc_feature (1)..(96): tiling:Spneumo1:WAN024AAE; Cluster includes WAN024EHB R6.I G_1011.2.1.1.1||||955827..955879|+|53 bp|Between spr0972 ( + strand) and spr0973 (ftsW) (+ strand)|S.pneumoniae|R6|NC _003098.1|IG|110
gtggagtgtgtaagcttgttgctaaaagcgtaaaaaccttggaacgaaaggaataatagactttctgcgaaacaaaaatataatacaataaaacta

SEQ ID NO: 4137 - DNA, 282 bp, Streptococcus pneumoniae
  misc_feature (1)..(282): tiling:Spneumo1:WAN024DTY; Cluster includes WAN023KBC 3148 28_3741||||2021330..2021611|+|282 bp|EGAD orf prediction|S .pneumoniae|R6|NC_003098.1|ORF|110
gtggagtttcagctaaaatacgatttcgtaaatcactatattccaattgaagacgttcatcatgaaaaaacaatttatccaattctttatgtgcaaaataaaaagaatcatccatatcagctgctaaacttgctagcaattgttttttctcaatttcaaataaggccggatcaaacccattatcaactactrcgggtgaaaaaagagtttcttttacaagttccaaaatctgagaggttagcacgtttttcctacttaaaaactcatcacgaacataggtaa

SEQ ID NO: 4138 - DNA, 198 bp, Streptococcus pneumoniae
  misc_feature (1)..(198): tiling:Spneumo1:WAN024CIR; Cluster includes WAN02428D SP14 01||15901255|NP_345859.1|1324085..1324276|+|192 bp|hypothe tical protein|S.pneumoniae|TIGR4|NC_003028.1|ORF|010
gtggataaaatctcttgtctatcccttcccccattgtcacccattatagtcatttcgtgtctctttttcccctttttaatgcaagggaaattactctccttagatgataatccaaaagctagaaaggtatctcaaacctctctactctcccwgactagtttacaactaaaaggaaaagattctattttaykaactaat

SEQ ID NO: 4139 - DNA, 108 bp, Streptococcus pneumoniae
  misc_feature (1)..(108): tiling:Spneumo1:WAN024F7Q; Cluster includes WAN023SED NC_0 03028.1_648||||501495..501593|-|99 bp|Glimmer 2.02 orf pre diction|S.pneumoniae|TIGR4|NC_003028.1|ORF|010
gtggatagaactgacgaagtcagtaaccatacccatgacaagccgacgctgacgtggtttgaagaaatttttgaagagtatcattcaccatttcacaacctaactaat

SEQ ID NO: 4140 - DNA, 117 bp, Streptococcus pneumoniae
  misc_feature (1)..(117): tiling:Spneumo1:WAN024BE3; Cluster includes WAN023Z0X AL44 9926.1_74||||62819..62935|-|117 bp|Glimmer 2.02 orf predic tion|S.pneumoniae||AL449926.1|ORF|001
gtggatagaactgacgaagtcagtaaccatacctacggcaaggtgaaactgacgtggtttgaagagattttcgaagagtmttacctcatcaaatttgtaaatatcatgagccttctc

SEQ ID NO: 4141 - DNA, 188 bp, Streptococcus pneumoniae
  misc_feature (1)..(188): tiling:Spneumo1:WAN024F57; Cluster includes WAN02437W SP00 30||15899976|NP_344580.1|30563..30889|-|327 bp|competence- induced protein Ccs16|S.pneumoniae|TIGR4|NC_003028.1|ORF|1 20
gtggatagtaattatttctcagatgacctggcttttcatagctttagtatgcgcgaagacacaacaggtgaggtattggcgattaccaacaatggacaggaaaaccatctggttaagatggcattcttggaattaaaaaatacagagaaaccagcaaagacaaggttcgcaagccatggttggagttt

SEQ ID NO: 4142 - DNA, 207 bp, Streptococcus pneumoniae
  misc_feature (1)..(207): tiling:Spneumo1:WAN024CD7; Cluster includes WAN023PXD pne0 6_12||||7311..7505|+|195 bp|Type 6A capsule operon, Glimme r 2.02 orf prediction|S.pneumoniae||WAN01UCKJ|ORF|000
gtggatagtattaatgrcaaaaaagaaagaattttattgaaarttcaagaaraattgaaattattaaaagagtttataaaaatatgttctaaaaataaaattaagtattttgctcttggaggyagtctattaggagctgtaagacacaaaggtttcattccttgggatgatatggatctaagctttccaaagagttcaatctatgtt

SEQ ID NO: 4143 - DNA, 1443 bp, Streptococcus pneumoniae
  misc_feature (1)..(1443): tiling:Spneumo1:WAN024CQM; Cluster includes WAN0242A6 SP13 36||15901190|NP_345794.1|1258310..1259533|-|1224 bp|type I I DNA modification methyltransferase Spn5252IP|S.pneumonia e|TIGR4|NC_003028.1|ORF|021
  misc_feature (1155)..(1155): n is a, c, g, or t
gtggatattagttttgctcattttcatttcaagtggtgtgacactttggatattgatagtcgatcagaaaggggtaatcawgawdwgrkwtwtwttgatttatttkcwggkatmggwggytttmgrmtdggaatggaarstswhggrcaygagtgywtkggattttgtgagattgataaatttgctagrraatcttataartccatttttcaaacggaaggagaaathgaatttcatgacatacgagatgtttcagatgacgaatttaaaaaacttagagggaaagtcgatrtcatctgtggrggattyccttgtcaagcattttcaatcgcaggaagacgattgggatttgaagataytagaggmactttrttcttygaaattgctcgrgcggccaaacaaatccaaccacgttttctttttcttgaaaatgttaaaggyytactcaatcacgataagggacggacgttcaccacaatmcttaccacrcttgatgarttggggtttgatgttgartggcagrtgcttaacagtaaggattttggcgttcccmaaaacagagagagggtgtttattatcggacattctagaaagaraggtaycmgactcbkatttcctttcagacgagaaggtcaagcaactaacyctgagactttraaaryaytaggraatttgaatccatcaaraagtggmatgagyggtaaagtytattattcagarggkytwgcgccaacmttagttcgtggdaaaggagaaggatttaarrttgcgattccttgtatgacaccagayagattagamaaragacaaaatggkagacghttyaaggawaaycaagagccratgtttactttraatactcaggatckyyatggyattgtygttgttggagatttaccractagctttaaggarachggtmghgtmtatggaagtgakggsttatctccaacactractacgatgcaaggwggagataaaatycccaaaatactratyccagaaccaatycawtttctwaaartmmgrgargcaackaaaaaaggrtaygctcaagcagaratwggrgattcaatcaatttrgaaagaccaagttctcagyatcgkcgtggtagagttggaaaaggtatasckaatacgttracaactagtggncaaatgggagtagtagtkgctagytatgaaggagaagataarcaagtttaycawgtagcyggtrtwttaatwratggacaattttaccgtytgagratacgacgaatcacycctaaagagtgttttcgmttgcakggstttcctgatydrrctwwtgaagctgctagaaragtctctagtaatagtcagctctataaacaagctggtaatagtgtaaccgttcctgtgattgcygcaatcgcaaagaaattaaaagaartagaggaaaaagatgaaagcwytaaataa

SEQ ID NO: 4144 - DNA, 246 bp, Streptococcus pneumoniae
  misc_feature (1)..(246): tiling:Spneumo1:WAN024B4T; Cluster includes WAN023L6V 3138 18_2320||||1245603..1245848|+|246 bp|EGAD orf prediction|S .pneumoniae|R6|NC_003098.1|ORF|110
gtggatcatccattcatttccaagttcgtcataggcgataatttcataatgmacyccacggaaragctgggtatcgaccttaacttggagcttgccttcttcaggaagggtaatgcgcaagtcctctggacgaataacgacctcaacaggttcatttggcttcatcccaccatcaaccgcttcaaagcgtttgccgttaaattcgaccaagtagtcctcaatcatggtacctggcaagatgtttga

SEQ ID NO: 4145 - DNA, 171 bp, Streptococcus pneumoniae
  misc_feature (1)..(171): tiling:Spneumo1:WAN024BEK; Cluster includes WAN023SL1 NC_0 03098.1_1035||||812698..812859|-|162 bp|Glimmer 2.02 orf p rediction|S.pneumoniae|R6|NC_003098.1|ORF|110
gtggatgaagctggcgaaatattattaatactattcaaaaatcaaagtgcaaactatrtcaacttcacattgccgactaaattacagcctgyggctggcttcctagtttgcactttgatttttattgagtataaaagtaaaaaagctttaaatcaagcagttctaactaat

SEQ ID NO: 4146 - DNA, 105 bp, Streptococcus pneumoniae
  misc_feature (1)..(105): tiling:Spneumo1:WAN024CO3; Cluster includes WAN0246ST 5613 45-53-7||||||105 bp|DNA Streptococcus pneumoniae phage Dp- 1 open reading frame 249|S.pneumoniae||WAN0246ST|ORF|000
gtggatgcgactatcattgcaactggtgtgactcagcctttacctggaacggtactactgagccggaatatatcacaggcaaagaagctgctagtcgaatcttga

SEQ ID NO: 4147 - DNA, 144 bp, Streptococcus pneumoniae
  misc_feature (1)..(144): tiling:Spneumo1:WAN024CMR; Cluster includes WAN023SFZ NC_0 03028.1_222||||164991..165125|+|135 bp|Glimmer 2.02 orf pr ediction|S.pneumoniae|TIGR4|NC_003028.1|ORF|010
gtggatggacgtgtaataacctcttctttcgaggagtattttactaaaaaactagccttggagcgttccccagaaacggacttactcattgactcttcaaagatttggggagaagattttgcttcatctgttcctctaactaat

SEQ ID NO: 4148 - DNA, 360 bp, Streptococcus pneumoniae
  misc_feature (1)..(360): tiling:Spneumo1:WAN024F2J; Cluster includes WAN023KM6 3138 97_3266b||||1746612..1746971|+|360 bp|EGAD orf prediction| S.pneumoniae|R6|NC_003098.1|ORF|110
gtggatggccatttggtccccgtcaaagtcagcattgtaggcttcacagacaagtgggtgcaagcgaagagccttaccatcaatcaagactggctcgaaggcttggatacccaaacggtgaagggtcggtgcgcggttcaaaagcactgggtgttctttaatcacttcttcaaggatatcccagatacgctcatctccgcgttccaccaagcgtttagctgctttgacgttttgcacgatatcacgggcaacgatttcacgcatgacaaatggtttaaagagttcaatcgccatttcacgyggcacaccacattggtacatcttaagagttggaccaacggcgataackgaacgtcctga

SEQ ID NO: 4149 - DNA, 2256 bp, Streptococcus pneumoniae
  misc_feature (1)..(2256): tiling:Spneumo1:WAN024GGS; Cluster includes WAN0244EH spr0 537|recJ|15902581|NP_358131.1|535289..537523|+|2235 bp|Sin gle-stranded DNA-specific exonuclease, 5'-3'|S.pneumoniae| R6|NC_003098.1|ORF|111
gtggatgtctttttgataacacctacttatgaatggcagtttgccctgcaggtagaagatgcggattttacaaagatagccaagaaggctggactgggtcctgaggtggctcggttattgtttgagagagggattcagraccaagaaagtctgaagaagtttttagaaccttccttggaggacttacatgatgcttatctgctccatgatatggacaaggcagtggagcggattcgtcaggctattgaagaargggaaaatattctygtttatggagactaygatgcggatkgcatgacttcggcttctattgtgaaggaaagtttggaacaacttggtgctgagtgccgagtttacctgccaaatcgttttaccgatggctatggccctaatgctagtgtttataaatactttatcgagcaagaaggratttccttgattgtgacggtggacaatggggttgctggtcatgaggctattgcattggctcagtctatgggagtagatgtcattgtgacagaccatcattccatgcctgaaaccctgccagatgcttatgctattgtccatcctgaacatccagatgcggattatccttttaaatatttggctggttgtggagttgctttcaagttggcttgtgccctgttagaagaagtgcaagtggaattgcttgatttggtcgctattggaactattgcagatatggtgagtctgacggatgaaaatcgtatcttagttcaatatggtctggaaatgttgggtcatacccagcgcattggtctgcaagaaatgctggacatggctgggattgctgccaacgaagtaacagaagaaacggttggtttccagattgctcctcgtttgaatgccttgggycgcttggatgatcccaatcctgccattgatttgttgactggatttgatgatgaggaagcgcatgagattgcccttatgattcaccagaaaaacgaagagcgcaaggaaatcgttcagtctatctatgaagaagccaagaccatggtggatcctgagaagaaggttcaggtcttggccaaggaaggctggaatcctggggttctaggaatcgtggctggtcgtttattggaagaattgggacagacagtcattgttcttaatatagaagacggtcgtgccaagggcagtgctcgtagtgtggaagcggtcgatatttttgaagctctggatccccatcgagacctcttcatcgcctttggaggtcatgcaggtgcagcgggtatgacgctggaagttgagcaactctcagatttatctcakgttttggaagattatgttcgtgaaaaaggtgcagatgctggtggcaagaataagttaaacctagatgaagagttggatttggaggcacttagcttggaaacggtcaaaagttttgaacgtttagctccttttggaatggataatcagaaacctattttttatatcaagaattttcaggtcgaaagtgctcgtactatgggggcaggtaatgcccatctaaagctgaaaatttccaagggtgaggcgagttttgaagtggtagcctttggtcaaggcagatgggcgacagagttttctcaaaccaagaatctagagttagcggttaaattgtctgtcaaccaatggaatggccaaactgcyctccagttgatgatggtggatgcgcgagtggaaggtgttcaactttttaacattcgtggaaaaaatgcagtcttgccagaaggtgttccagtcttggattttcctggagaactgccaaatcttgcrgctagtgaagctrttgtcgtaaaaaacattccagaggatattactcagctgaagaccatttttcaggaacagcatttctctgctgtctatttcaaaaatgatattgacaagrcytattatctgacaggttatgggactagagatcagtttgcyaaattgtacaagactatttaccagttcccagagtttgatattcgctacaagctgaaagatttggctgcatatcttaatattcaacaaatcttgctggtcaagatgattcaagtatttgaagaactaggctttgtgacgataaaagatggtgtgatgacagtcaataaagaggcgccaaagcgggagataggagaaagtcaaatttaccaaaatctcaaacaaaccgttaaagaccaagaaatgatggcgctgggtacggtgcaagaaatttatgattttttgatggaaaaagagywgaastwakgaaagagttgggaa

SEQ ID NO: 4150 - DNA, 264 bp, Streptococcus pneumoniae
  misc_feature (1)..(264): tiling:Spneumo1:WAN024CR3; Cluster includes WAN023M45 3142 81_652a||||342233..342496|-|264 bp|EGAD orf prediction|S.p neumoniae|R6|NC_003098.1|ORF|110
gtggattgtaagaatcatcgccaaaatttcctagcttatttaaataataccaatkrccstcttcataaatccagcctgtctttacagcataattattatcaaaataataagttctcttttcagcagatagaggatattgttcaccgtatacttttcctgtattttcagacgtttttgcctctagtacttgtttatctgtttgttctagcaaagcaccatcttgtccaaaatagtaccacttctcctgaaggccaatttcattaa

SEQ ID NO: 4151 - DNA, 596 bp, Streptococcus pneumoniae
  misc_feature (1)..(596): tiling:Spneumo1:WAN024EX5; Cluster includes WAN0243L5 spr1 595||15903637|NP_359187.1|1572932..1573522|-|591 bp|Conser ved hypothetical protein|S.pneumoniae|R6|NC_003098.1|ORF|2 11
gtggattgttttatccttgttactaaggaaaattgcgaaaaaaagttaagaaaaggagccagaatggcgattgaaaattatayaccagattttgctgtggaagcagtctatgatctgacagtcccaagcctgcaggcgcagggaatmaaggctgttttggtcgatttggataataccctcattgcttggaacaaccctgatggaacgccagagatgaagcaatggctacatgaccttcgggacgcgggtattggcattatcgtagtgtcaaataacaccaaaaaacgcgttcaacgagcagttgagaaatttgggattgattacgtttactgggccttgaagcccttcacatttggtattgaccgtgcyatgaaggaattccactatgacaaaaaggaagtggtcatggttggygaccarctcatgacagatatacgagcagcccaccgtgcagggattcggtcaattttagtcaaacccttggtccaacatgactcaatcaaaacgcagattaaccgaactcgtgagcgtcgtgttatgagaaaaatcactgaaaagtacggaccgattacatataaaaaaggaatttaactaat

SEQ ID NO: 4152 - DNA, 252 bp, Streptococcus pneumoniae
  misc_feature (1)..(252): tiling:Spneumo1:WAN024DLQ; Cluster includes WAN023M78 3131 25_478||||244427..244678|+|252 bp|EGAD orf prediction|S.pn eumoniae|R6|NC_003098.1|ORF|110
gtggatttcagcatagttctcagccttgcttgggtcttttttgatagactgggcaatgatgtcaaagagggtcaagttatcatgggctgckatgtattggatgacatctccagggctgtcagcttcaaagttagttggttgagcaatgagatttttaaagatggtgttgacatcacgcttgccacctgtgataaaggcaggttgaccttcgtttggataaccagatttgaggttgttacggatgtcatctga

SEQ ID NO: 4153 - DNA, 806 bp, Streptococcus pneumoniae
  misc_feature (1)..(806): tiling:Spneumo1:WAN024CYY; Cluster includes WAN0244AE spr0 684||15902728|NP_358278.1|687578..688018|+|441 bp|Hypothet ical protein|S.pneumoniae|R6|NC_003098.1|ORF|211
gtggatttctttatgaagaggtttgaagtatctacagaaattggtagyctctctgttrcttatcaaaagcaaaagaaagtgctagtttgtytaaayggagcaggtttgctaccaagttatgaaaatttttcacttatacttgaaaaacctcctcctacaattggttatttgacaattgattttccgaacacaggtaggagtccgattyatgaccaagctggaaaaaawctagataatcttgcagatgyggtttatgaagyacttgaagaattaggratttctgaatatatactttgtgyacatagttggagtggaattttagcttgcaaattactcgagaaaccaattaagygtcagactttagtagcaattgaaccgacaactaaaaaagtcatgtttgctgatttttcagaaaatccttatccagaaatggaagagyagatgaggctgattgacgagtgtggtcctgaactttattttaagaacttaactcaagcaacatttagtcctgaaacgaataaaaaaatctgggaattaatgcaagaaaaaggcttagagttggaaaatcaaratccagratttcagatatctggagagattactgaggaagattttgagratktrtcdatasmakmtyrtrtycctrtatttrttttttgtcagmcttatagagaaaaagagtacagagaatcagaatattggacttccaatactaaactcattttaggarggaatcaccattatttacaatggtcagaatcggaaaaaattgcggctattattcgagaattgtyagaataactaat

SEQ ID NO: 4154 - DNA, 752 bp, Streptococcus pneumoniae
  misc_feature (1)..(752): tiling:Spneumo1:WAN024DHO; Cluster includes WAN0244G7 spr0 475||15902519|NP_358069.1|478078..478872|+|795 bp|Conserve d hypothetical protein|S.pneumoniae|R6|NC_003098.1|ORF|110
gtggcaaggcttatatgggtagctatcctgatgggaagcgcatctttgtaaaaatgaacacctctccaatcctacctggtctagctagagaacaaattgctccacaattattatggagtcgtcgtttggcagatgggcgtgatatgtgtgctcaagaatggttgacaggcaagatattgaccccctatgatatgaatcgtaagcaaatcgtcaatattttaacccgtcttcatcgctcacgtccgttgatgacacaattgagtcgtttgggctatgccatggaaacacctgtagatttactacagtcttggcargaaacggctccagatgctttgcgtaaaaatcattttatcagtgaagtgatggctgatttrcgtcagactattccaggatttagagaggaccatgcgaccattgtccatggagatgtacgacatagtaattggattgagacagatagtggcttgatttatttagtagattgggattcggttcgcttgaccgatcgcatgtttgatgtggcccatatgctctgccattatatttcagaacatcagtggaaggaatggttgacctactacggttacaagtacaatcaaacggtattaagtaaattgtattggtatggtcaattgtcttatttgagtcagatttccaagtattatatgaaccaagatttagaaaatgtcaatcgggagattcatggtttgcgtcatttccgagacaagtatggaaagagaagaykaactaat

SEQ ID NO: 4155 - DNA, 108 bp, Streptococcus pneumoniae
  misc_feature (1)..(108): tiling:Spneumo1:WAN024COA; Cluster includes WAN0246SX 5613 45-49-1||||||108 bp|DNA Streptococcus pneumoniae phage Dp- 1 open reading frame 245|S.pneumoniae||WAN0246SX|ORF|000
gtggcaagtgaattctttcttcgaaactttcttgccagcagatgcgtacatgatgtcttcataactgctagtagaagttttaattcgaagtcggtctttcaagaataa

SEQ ID NO: 4156 - DNA, 102 bp, Streptococcus pneumoniae
  misc_feature (1)..(102): tiling:Spneumo1:WAN024DNI; Cluster includes WAN0241XF SP18 20||15901649|NP_346253.1|1731453..1731548|-|96 bp|hypothet ical protein|S.pneumoniae|TIGR4|NC_003028.1|ORF|120
gtggcaccgcgttaccaacgccctcacacggaagtatattctgtgtgtgggcttttttctatccgtcgtttggtttatcttttattagggcctctaactaat

SEQ ID NO: 4157 - DNA, 1130 bp, Streptococcus pneumoniae
  misc_feature (1)..(1130): tiling:Spneumo1:WAN024GBD; Cluster includes WAN02448N spr0 747||15902791|NP_358341.1|742822..743946|+|1125 bp|Conserv ed hypothetical protein|S.pneumoniae|R6|NC_003098.1|ORF|11 1
gtggcacggtccttgtggccaaccaatccatacttgcaacatcgttgcacatcttatttaggaggttcagtaatgaacaagaaacaatggctaggtcttggcctagttgcagtggcagcagttggacttgctgcatgtggtaaccgctcttctcgtaacgcagcttcatcttctgatgtgaagacaaaagcagcaatcgtcactgatactggtggtgttgatgacaaatcattcraccaatcagcttgggaaggtttgcargmytggggtaaagaacacaatctttcaaaagataacggtttcacttacttccaatcaacaagtgaagctgactacgctaacaacttgcaacaagcggctggaagttacaacctaatcttyggtgttggttttgcccttmayaatgcagttraagawgyagcwaaagaacacactgacttgaactatgtcttgattgatgatgtgattaaagaccaaaaraatgttgcgagcgtaactttcgctgataatgagtcaggttaccttgcaggtgtggctgcagcaaaaacaactaagacaaaacaagttggttttgtaggtggtatcgaatctgaagttatctctcgttttgargcaggattcaaggctggtgttgcgtcagtagacccwtctatcaaagtmcaagttgactacgctggttcatttggtgatgcrgctaaaggtaaaacaattgcagccgcacaatacgcagccggtgcagatattgtttaccaagtagctggtggtacaggtgcaggtgtctttgcagaggcaaaatctctcaacgaaagccgtcctgaaaatgaaaaagtttgggttatcggtgttgaycgtgaccaagaagcagaaggtaaatacacttctaaagatggcaaagaatcaaactttgttcttgtatctactttgaaacaagttggtacaactgtaaaagatatttctaacaaggcagaaaraggagaattccctggcggtcaagtgatcgtttactcattgaaggataaaggggttgacttggcagtaacaaacctttcagaagaaggtaaaaaagctgtcgaagatgcaaaagctaaaatccttgatggaagcgtaaaagtycctgaaaaataactaat

SEQ ID NO: 4158 - DNA, 641 bp, Streptococcus pneumoniae
  misc_feature (1)..(641): tiling:Spneumo1:WAN024FPA; Cluster includes WAN0243T6 spr1 305||15903348|NP_358898.1|1297700..1298335|-|636 bp|Hypoth etical protein|S.pneumoniae|R6|NC_003098.1|ORF|221
gtggcagtacagttattagaaaattggctcctaaaggaacaagaaaaaattcaaacyaagtatcgtcacctaaatcacatttctgttgtagaaccaaacattctttttattggggattccattgtcgagtattatcctctacaggagctatttgggacttcaaagacgattgtcaatcgaggaattcgtggctatcagacaggactgttactagagaaccttgatgctcatctatatggtggagcagtagataaaatttttcttctgattgggacaaatgatatcggaaaggatgttcctgtgaatgaggytctcaataatctcgaagctatcattcaatccgttgctcgcgattatccattgacagagattaaattgctttccattttgcctgtcaatgagrgagagragtaccagcaggcagtctatatccgctcgaatgaaaaaattcagaaytggaatcaagcctatcaagagcttgcatctgcctatatgcaggtggaatttgtgccagtatttgattgtttgacagaycaagcaggccaactcaaaaaagaatatacaactgatggactgcacctcagtattgctggttatcaggctttgtcaaaakccttgaaagactatctttactaactaat

SEQ ID NO: 4159 - DNA, 372 bp, Streptococcus pneumoniae
  misc_feature (1)..(372): tiling:Spneumo1:WAN024C62; Cluster includes WAN023M5R 3152 63_561b||||291868..292239|+|372 bp|EGAD orf prediction|S.p neumoniae|R6|NC_003098.1|ORF|110
gtggccattgacaaaattgctggcatcactagcgagaaagacagcagggcccatcaaatcttcaggatttccccaacgtgcagcaggtgtttttgcaatgatgaactggtcaaatgggtggcgagaaccatcttcttgcaaytcacgaagaggtgctgtttgaggagtggcaatataaccyggtccaattccgttacattggatattggctccaccgtattcagacgcaatgttgcgggtcaacattttcaagccccctttagcagcagcataagcgctaactgtttcacgtcccagttcgctcatcatcgaacaaatattgataatctttccatgccctttctttatcatagaaggaataactgcctttga

SEQ ID NO: 4160 - DNA, 312 bp, Streptococcus pneumoniae
  misc_feature (1)..(312): tiling:Spneumo1:WAN024CJG; Cluster includes WAN0242HE SP10 60||15900930|NP_345534.1|995879..996190|+|312 bp|hypotheti cal protein|S.pneumoniae|TIGR4|NC_003028.1|ORF|010
gtggccgatatgaaaaataaatacgatgttaaaagaattattccggatgaattatcagaatcactagatatttttctaaaaaattattctgaaactggattgtcagattataatacttatctcttttatggttttatcttgaagtcctataaattgcctcgagaaaatagatatagcataaaattattggtgaaggaattacaaaatagaggactgaaagttacattgattatcaacatttattatcacgctttaaattgtttggctttaaatgatggtctaaaaatttatggagaagatttcttaatatga

SEQ ID NO: 4161 - DNA, 333 bp, Streptococcus pneumoniae
  misc_feature (1)..(333): tiling:Spneumo1:WAN024FZX; Cluster includes WAN023LCZ 3148 80_2075||||1118069..1118401|+|333 bp|EGAD orf prediction|S .pneumoniae|R6|NC_003098.1|ORF|110
gtggcgaagcttgtcaatctcgtcattgacagaactatccttctcaatataggtatcgctagaagggacataggcctctggctggtaataatcatagtaggatacgaaatactcaactgcattttcagggaaaaattccttaaactccccatagagctgaccagccagagttttattgtgggcaataaccagagttggtttattgactttagaaatgacctgactcatagtataggtcttccctgttccagtcgcccccatcagaatctgagctttttctcccccctcaatgttatccaccaactgctcgatagcttggggttgatctcctga

SEQ ID NO: 4162 - DNA, 693 bp, Streptococcus pneumoniae
  misc_feature (1)..(693): tiling:Spneumo1:WAN024GKU; Cluster includes WAN023YWF AL44 9927.1_59||||47982..48545|-|564 bp|Glimmer 2.02 orf predic tion|S.pneumoniae||AL449927.1|ORF|001
gtggcggacaccagaacgaaatccgatagcaatcttggacgtaagggccaagcggtggcagacaccagaataaaccgactgactaggtggcttacagactctgtaaaccaccttttttgtgaggaaaatatggcaaattctagagattatcgtaatccaaattacaccgaaamaataaaacttcagcgtttttttacwcagttacaaattgcrgcttctttttttaaagaacacttygttggcaaaatyatgtattatgaaacrgaaatwgaaagtgttgaacttcatttttcacctactaatttcatgcacctatgtggtgttgattaccgaaaaggtgcaggcagtttctttgacgattgtttaaatagrcatgtcataattgatgagttgaaaataaaaaaagatggaaccacratgcaaaagttacaagttttaggatccattgrggagttattgggaaagcatgttcatctaactggttcaggacgttatttgtatttggagtttgattatgctytacgtacaagaaaacagatamtagcattaacattgaaagagacmtcwaggaaaattgttcctcaatctttattagatttgaagagaaagacagtatttccaaaaggtcaaaaagtaatttcaatttactcaaaacatttacaaacrtcggaacttttttattatttaaaagat

SEQ ID NO: 4163 - DNA, 99 bp, Streptococcus pneumoniae
  misc_feature (1)..(99): tiling:Spneumo1:WAN024GM9; Cluster includes WAN023S5A cont ig_417_2||||195..293|-|99 bp|Glimmer 2.02 orf prediction|S .pneumoniae|670|WAN01UD5H|ORF|000
gtggcggcagtatcggagccttttaaagagagctaccatagactgaaaaagtatgatataatggaagatagaagaaagacaaactataagaaaagtcaa

SEQ ID NO: 4164 - DNA, 492 bp, Streptococcus pneumoniae
  misc_feature (1)..(492): tiling:Spneumo1:WAN024G23; Cluster includes WAN023LDF 3148 74_2056b||||1110449..1110940|+|492 bp|EGAD orf prediction| S.pneumoniae|R6|NC_003098.1|ORF|110
gtggcgtttcaagttagcaaaacctgcacgaactgcctctacattttcttcagtcagagcgtctttagccacaccaccattcatcttaagggcacgaagggttgcgacaataacaactgcatctggagatgttggcaagtttggtgtcttgatatcaaggaatttctcagcaccaaggtccgcaccaaaaccagcttcagtaacagtgtaatcagccaagtgaagggctgttgtcgtcgccaaaacagagttacagccatgagcratattggcaaatggaccaccgtgtacaaaggcaggtgtaccgtaaattgtctgaaccaagtttggcttaatagcatccttcaaaatcaaagccaaggcaccctcaacctgcaaatcacctacagaaacaggcgtacggtcatagcgataaccaataacgatattcgccaaacgacgtttcaagtcctcgatgtccgttgccaagcaaagaattgccatgatttctga

SEQ ID NO: 4165 - DNA, 357 bp, Streptococcus pneumoniae
  misc_feature (1)..(357): tiling:Spneumo1:WAN024C9P; Cluster includes WAN023M9B 3143 03_365a||||196091..196447|-|357 bp|EGAD orf prediction|S.p neumoniae|R6|NC_003098.1|ORF|220
gtggcgtttgataacaccttggaaacctttacctttagaagtacccgttacgtcaacaacgtctccagctgcgaatgtttcaactgtaatttcagcaccaacttccaagccttcaacgtttttgaattcacgaatgaagcgcttaggagccgtgttagctttcgctacatgtcctttagcaggtttgttgctcaatacttcgcgtttgtcatcgaaaccaacttggatagcgttgtatccgtctgtttcaacagttttaacttgaagaacaacgtttggagttgcttcaataactgttacagggatcaattcgccagcttcagtgaagatttgagtcattcccacttttttccctaa

SEQ ID NO: 4166 - DNA, 273 bp, Streptococcus pneumoniae
  misc_feature (1)..(273): tiling:Spneumo1:WAN024G6D; Cluster includes WAN023LJ8 3144 94_1796a||||965830..966102|-|273 bp|EGAD orf prediction|S. pneumoniae|R6|NC_003098.1|ORF|110
gtggctatcgtcctcttcaccgataggagtttcaagagatactggttcttgggcaatcttcaagatttcacgaaccttatcaggtgtcatatccattcgttcagcaatctgttctggtgtcggatcttgccccaattcttgaaggagattccgctgttcacgaaccaatttattgatagtttcaaccatgtgaactgggatacggatggtacgagcttggtccgcaatagcacgagtgatagcctgacgaatccaccaagttgcataagttga

SEQ ID NO: 4167 - DNA, 96 bp, Streptococcus pneumoniae
  misc_feature (1)..(96): tiling:Spneumo1:WAN024FKV; Cluster includes WAN023YRF AL44 9927.1_254||||198936..199031|+|96 bp|Glimmer 2.02 orf pred iction|S.pneumoniae||AL449927.1|ORF|000
gtggctcactttcagcctcttctctttttgaacggttataaacacgaatcagattccctatttcttgcgatttatgtgattccttattttccaatc

SEQ ID NO: 4168 - DNA, 477 bp, Streptococcus pneumoniae
  misc_feature (1)..(477): tiling:Spneumo1:WAN024DO7; Cluster includes WAN023IMX 8598 7_2796a||||1586628..1587008|-|381 bp|EGAD orf prediction|S .pneumoniae|TIGR4|WAN01UC25|ORF|011
gtgggaaaagaaagacgtraacaarggaacttagagcggaaaaagcgagtcgtcaaaaagcgtaagatccctttagaagaattgaaagcctttgtagaggctcatccagaygcttttttacgggaaattgcggcmcrttttgattgtgctktkccytcmgtatgggcagytttaaagcagattaaggtcatttwaaaaaagaygrcsakytttagggaacaaaagcctgagaaagtttctgagtttcttgatattttggataacctaaaagatttaccagtcctatatattgacgaaacgggaatcraccgctacctctatcgtccttatgcaggggctcctagaggggagaaagtctatgrcaagattagcggacggcgttttgagcggactaatgaggtggagcaaaaactcaatggtagttttctaatcagatatattgattcacaaattagagaaykammkaataattatgca

SEQ ID NO: 4169 - DNA, 396 bp, Streptococcus pneumoniae
  misc_feature (1)..(396): tiling:Spneumo1:WAN024GAN; Cluster includes WAN023LOY 3146 66_1456a||||769632..769922|-|291 bp|EGAD orf prediction|S. pneumoniae|R6|NC_003098.1|ORF|220
gtgggaaacagatttcttagagttcttgttaaaggtgacttgtccacggtagtcaacctttcctccacctttagcgatggatttagacacaatagacgagctggtatgtggagcattgtgaatcatcttagcacccgtgtcttggtgttgccctgcattagcaaaggcgatagagagcatggtaccacgcgctccttctccatcaaggtaaacagatggatatttcatagtcgttttggcacccaagtttccatcaatccactcaacagtggcatccttttgagccttagcacgctttgttaccaagttatagacgttatcagaccagttttggatagttgtataacgcatataagctccgtccaaagcaaaaatttctacaatggcagcgtgtaa

SEQ ID NO: 4170 - DNA, 899 bp, Streptococcus pneumoniae
  misc_feature (1)..(899): tiling:Spneumo1:WAN024G5V; Cluster includes WAN024410 spr1 022|rggD|15903066|NP_358616.1|1001242..1002135|+|894 bp|Tr anscriptional regulator|S.pneumoniae|R6|NC_003098.1|ORF|11 1
gtgggaagaattatcagakcaggtgtaaagatggaacatcttggaaaagtatttcgtgaatttcgaacaagtggaaattattctttaaaggaagcagcaggcgaatcctgctctacctctcagttatctcgctttgagcttggggagtctgacctggcagtctcccgtttctttgagattttggataacattcatgtaacaatcgaaaatttcatggataaggcaaggaattttcayaatcatgaacatgtgtctatgatggcacagattatcccactttactattcaaacgatattgcaggttttcaaaagcttcaaagagaacaacttgaaaagtytaagagttcgacgactyccctttattttgagctgaactggattttgctacaaggtctgatttgtcaaagagatgcgasttatgatatgaagcaggatgatttggrtaaggtagcagattatctcttcaaaacagaagaatggaccatgtatgagttgattcttttcggtaacctctatagtttytacgatgtagactatgtcactcggattggtagagaagttatggagagggaggaattttaccaagagattagtcgccataagagattagtkttgattttggccctcaattgttaccagcattgtttagagcattcttctttttataatgccaactattttgaggcttatacagagaagattattgacaaaggtattaagctttatgagcgtaatgttttccattatttaaaaggttttgccttatatcaaaaaggacagtgtaaagaaggctgtaagcagatgcaaraggccatrcatatttttgatgtgttaggtcttccagagcaagtagcctattatcaggaacactacgaaaaatttgtcaaaagttaactaat

SEQ ID NO: 4171 - DNA, 255 bp, Streptococcus pneumoniae
  misc_feature (1)..(255): tiling:Spneumo1:WAN024G5H; Cluster includes WAN023LI0 3146 34_1874a||||1013193..1013447|-|255 bp|EGAD orf prediction| S.pneumoniae|R6|NC_003098.1|ORF|110
gtgggaagtcaatcaaacgatatttcccaccaaatggcaaacttgctactggacggtggtccgtcaatgtcgacatattgtgaaaaccaactgtatttcctaaaatggcagaatatttatcaatcttcatctgttgctacccccactacttcattatatcctacaacttgtacttcatctgttccatcaatttcgacaccgtcagaaataatcgcaccttcaccaataatggcacgtttaatcttagctccttga

SEQ ID NO: 4172 - DNA, 839 bp, Streptococcus pneumoniae
  misc_feature (1)..(839): tiling:Spneumo1:WAN024C9K; Cluster includes WAN0244O3 spr0 191|rplB|15902235|NP_357785.1|197664..198497|+|834 bp|50S Ribosomal protein L2|S.pneumoniae|R6|NC_003098.1|ORF|111
gtgggaattcgtgtttataaaccaacaacaaacggtcgccgtaatatgacttctttggatttcgctgaaatcacaacaagcactcctgaaaaatcattgcttgttgcattgaagagcaaggctggtcgtaacaacaacggtcgtatcacagttcgtcaccaaggtggtggacacaaacgtttytaccgtttggttgacttcaaacgtaataaagacaacgttgaagcagttgttaaaacaatcgagtacgatccaaaccgttctgcaaacatcgctcttgtacactacactgacggtgtgaaagcatacatcatcgctccaaaaggtcttgaagtaggtcaacgtatcgtttcaggtccagaagcagatatcaaagtcggaaacgctcttccacttgctaacatcccagttggtactttgattcacaacatcgagttgaaaccaggtcgtggtggtgaattggtacgtgctgctggtgcatctgctcaagtattgggttctgaaggtaaataygttcttgttcgtcttcaatcaggtgaagttcgtatgattcttggaacttgccgtgctacagttggtgttgtcggaaacgaacaacatggacttgtaaaccttggtaaagcaggacgtagccgttggaaaggtatccgcccaacagttcgtggttctgtaatgaaccctaacgatcacccacacggtggtggtgaaggtaaagcaccagttggtcgtaaagcaccatctactccatggggcaaacctgctcttggtcttaaaactcgtaacaagaaagcgaaatctgacaaacttatcgttcgtcgtcgcaacgagaaataactaat

SEQ ID NO: 4173 - DNA, 303 bp, Streptococcus pneumoniae
  misc_feature (1)..(303): tiling:Spneumo1:WAN024FI5; Cluster includes WAN023KYA 3149 22_2697b||||1434791..1435093|+|303 bp|EGAD orf prediction| S.pneumoniae|R6|NC_003098.1|ORF|110
gtgggacctgcaagttgcctgtccttcttctccaagatgagatcaatctgctctactggcatgcggttgttaccgattttgagaagagtccccaccatattgcgaatctgtttatacaagaaaccatttcctgaaaaggtaaaggtcaaaaattgtcctgtctcatcgactattaaactagcttctgtgatggtgcgaaccttatcctctacactagtcccagaggctgtaaaaccggtaaaatcatgggttccctctagctttttgattgcaatctgcattcgttccacatcgagtgggtag

SEQ ID NO: 4174 - DNA, 599 bp, Streptococcus pneumoniae
  misc_feature (1)..(599): tiling:Spneumo1:WAN024CUV; Cluster includes WAN0242TX SP05 67||15900479|NP_345083.1|532018..532611|+|594 bp|conserved domain protein|S.pneumoniae|TIGR4|NC_003028.1|ORF|010
gtgggaggtgatttgatgcatcttttcatcattggtgctccagcatcaggaaaaatgaccattggtcaagaattatctcgactgacggatgctaccctattttataaccatcaagccattgattttgcactagaratctatcaggaytatacmgaggaratgtgggaatttgttcgtggaatyacyttttcwttccttggagcaagtgcaagaaatcagcgatcagtaattttaacagaygtaattgatttttcaaatcagtaycagctgatgtatttaaagcaaattcagratttrttggatraytwtcatcaagagattctktttgttgarttggaaacaagtcttgaagagtgcatacgtcgaaatcgaacggagaatcgattaaagcacaaacccttaaaacgacatattgaggtatctgaaagagaaattttagagaccgctgaaacacttcaattaaattcccaayatcaaccgaatgagttgcaccactactttaaaataaataatacgaatttgtctgcagaagaagctgctaagcaaattcaaaataaaataaacaaaatagagaaaggacacacacatgtctaactaat

SEQ ID NO: 4175 - DNA, 150 bp, Streptococcus pneumoniae
  misc_feature (1)..(150): tiling:Spneumo1:WAN024BDH; Cluster includes WAN023RXO cont ig_1611_1||||16..165|+|150 bp|Glimmer 2.02 orf prediction| S.pneumoniae|670|WAN01UDC4|ORF|000
gtgggatttcagaagaatacttttaatactcttcgaaaatctcttcaaaccacgtcagttttatctgcaacctcaaagctgtgctttgagcaacctgcagctagcttcctagtttgctctttgattttcattgartataactcaaaaaag

SEQ ID NO: 4176 - DNA, 231 bp, Streptococcus pneumoniae
  misc_feature (1)..(231): tiling:Spneumo1:WAN024C7T; Cluster includes WAN023M8A 3153 57_437a||||224898..225128|-|231 bp|EGAD orf prediction|S.p neumoniae|R6|NC_003098.1|ORF|110
gtgggatttgaagttaccccagctagcggcaaaatttcagaccactttttaatctcatctaaatttaatgtgtcaagcataaattccataaaaagaacctctttattttacaaagtatgctcagtacgtcctataatgtcatcttgggttgccttagaaagaacattgaagaatgcagagtatcctgcaacacgaacaattaagtctctgtgtttttcaggatgtttctga

SEQ ID NO: 4177 - DNA, 456 bp, Streptococcus pneumoniae
  misc_feature (1)..(456): tiling:Spneumo1:WAN024GHB; Cluster includes WAN023JVB 8329 8_799a||||455469..455810|-|342 bp|EGAD orf prediction|S.pn eumoniae|TIGR4|WAN01UC25|ORF|020
gtgggatttttctacacggaaatagacatccccttgactctcataggcaaagcctttctcgatcaagtcttccacaaaacggatgatgtctgccataaactccactacacgcggatggcgagtcgcaggtttcacgcccaatgccgtcacatcctcacgaaaggcagcgatgtacttatccgcaacctcctgaggcgtgataccttcttccctggcacggttgataatcttatcatccacatctgtaaaattggaaatataggcaaccttatacccacggtactcaaaatagcgacgaatcgtatcaaaagctaccgtcgaacgggcgtttcctacgtggatatagttgtacaccgttggcccacaaacatacatcttgatcttgccgtcctcaatcgggacaaattctcgcaaatcacgagacatggtgtcatagattttaatcataaatcataa

SEQ ID NO: 4178 - DNA, 873 bp, Streptococcus pneumoniae
  misc_feature (1)..(873): tiling:Spneumo1:WAN024CKV; Cluster includes WAN02434F SP01 63||15900101|NP_344705.1|159192..160058|+|867 bp|transcrip tional regulator PlcR, putative|S.pneumoniae|TIGR4|NC_0030 28.1|ORF|010
gtgggcacactattagcaacaagattaaaaaatagacggaaagaattaaaaatgtctcagcgagaactagctgaaggtatctgtaaacaggggcaaatcagtcgattagagagcggagagtttacccctggagcggatttcctgaatgcccttgctaagaagttaaaagtcagtatggattatttttttgatgagcaggttgtagagaaagttgaggagttatcagaatttaagaaattagcacagacatttattacaaatcgcaattatgagtctttgaaatatatatatgaattggagaatgtaaaagctcaccgcctatctttagcagataaaatctacatggaatggataaaatctctgatagatttttatttttacggacagaaagaagatgcgattgtacgattagagggggtattatcacagttaagtgtatctgatttgaactatctccaagtttcaaacaccctattcaatttttattatgatattggagatttaggtcgtttcaataaaattcgtgaaaaactagagtatcaagtaaatcacctcaatttgagtacaatcgaagagttagaactatctattaagtttaactacaacgtttgtcgttatctatggttacagaaaaatattgaagaagctattactaaaattacagctactataaaacaatgtaaggcttacagaacgaattatcttttggctgatttgtacttattgatgggaaatgtaagtgaaaatttttcttctaaaagttcggtgaaagaatattttgagacggcatattttctatacaaacttgaggagaacatgtcaatgactctgaaagttgagcattacattgcagatataacagaactaactaat

SEQ ID NO: 4179 - DNA, 276 bp, Streptococcus pneumoniae
  misc_feature (1)..(276): tiling:Spneumo1:WAN024DWY; Cluster includes WAN023KEU 3148 19_3573||||1916069..1916344|+|276 bp|EGAD orf prediction|S .pneumoniae|R6|NC_003098.1|ORF|110
gtgggcatatttaccgaggacaccacggctgtaaagtggtggcaaggttgtttctgccttgcgtttttcaagttcttcttcggatacggccatrgaaatttctttggtatcttggtcaaccgtaacgatatcgccggtacggagataggcaattggtccaccatcctgagcttcaggagcgatatgtccaacaaccagaccataagtaccaccagagaaacgkccgtccgtcaagagggccaccttatctccctgacctttaccaacaatcattga

SEQ ID NO: 4180 - DNA, 323 bp, Streptococcus pneumoniae
  misc_feature (1)..(323): tiling:Spneumo1:WAN024FKQ; Cluster includes WAN023KTK 3135 30_2900||||1548654..1548884|-|231 bp|EGAD orf prediction|S .pneumoniae|R6|NC_003098.1|ORF|220
gtgggctgcaccaaaaggaaaattctggtaaaagaggatccacttgccatcaaagtaagaaaagccatttgggtcgttgagaagtcctgtttttggctcaacatggtaatgagtatgccatggagattgtgccatattttcctttatatgttgaatttcttcttgcgtccaatcttgataaagtctgtaacgacgctcagttgtccattccattcattcctccaaaaatcttatcacttttaatagtaactgttttcgataaaaaatgcaagccttttatgttaaaaaagaggaaaaactgtcaaasgattatcataaaataa

SEQ ID NO: 4181 - DNA, 279 bp, Streptococcus pneumoniae
  misc_feature (1)..(279): tiling:Spneumo1:WAN024GBO; Cluster includes WAN023LQ4 3145 19_1384||||733426..733704|-|279 bp|EGAD orf prediction|S.p neumoniae|R6|NC_003098.1|ORF|110
gtgggctgccacgataacttcaggaaccgtagacataccaactgcatctgctcccagtgtcttataggaacgaatttctgctggtgtttcataagtcggaccagtaactccgatatagacaccttcatcaagcttgatattaagttttttagccacttcatgggcagtggcacggtattctggtgtgtaggccctagacatatctgggaaacgtgggccaaagtcatccaagttttcacccatcaatggattttgccccgtcatgttgatatggtctga

SEQ ID NO: 4182 - DNA, 836 bp, Streptococcus pneumoniae
  misc_feature (1)..(836): tiling:Spneumo1:WAN024CET; Cluster includes WAN0244RO spr0 062|PTS-EIID|15902106|NP_357656.1|69010..69840|+|831 bp|Ph osphotransferase system sugar-specific EIID component|S.pn eumoniae|R6|NC_003098.1|ORF|111
gtggggaaatcgaagatgacgaattctaattacaaacttacaaaagaagattttaatcaaatcaacaaacgtagsttgtttactttccaattaggttggaactacgaacgtatgcaagcttctggttacctttacatgatcttrcctcagttgcgtaaaatgtatggtgatggaactcctgaattgaaagaaatgatgaaagttcatactcaattcttcaatacttcrccattcttccataccattatcgctggttttgaccttgccatggaagaaaaagatggtgtaggttcaaaagacgcygttaacggtatcaagacaggtttgatgggaccattcgctcctcttggggatacaatctttggttcacttgtacctgctatcatggggtcagtcgcagcaactatggctatcgctggccaaccttgggggatcttcctttggattgcagttgcagtagcgtatgacatcttccgttggaaacagttggaatttgcttacaaagaaggggttaaccttatcaacaacatgcaaagtaccttgacagctttgattgacgctgcatctgtacttggtgtcttcatgatgggtgctcttgtagcaacagtgattaactttgaaatttcttacaagttgccaatcggtgaaaagatgattgatttccaagacatcttgaaccaaatcttcccacgtttgcttccagcaatctttactgcctttatcttctggttgcttggtaaraaaggtatgaactctactaaagctatcggtattattatcgtacttgctttggctctttctgcccttggtcactttgcacttggaatgtaactaat

SEQ ID NO: 4183 - DNA, 228 bp, Streptococcus pneumoniae
  misc_feature (1)..(228): tiling:Spneumo1:WAN024EXT; Cluster includes WAN023KWZ 3139 65_2760a||||1469453..1469680|-|228 bp|EGAD orf prediction| S.pneumoniae|R6|NC_003098.1|ORF|110
gtggggaatcttgctgaggtcgtggtgaacgatgagaaccgtcttcccagcttttttcaaatctctcagcgtattcatgatgatttcctcactgacagagtcaatcccagcaaagggttcatccaagaggatatagtcggcttcctgcaccaaacatctggcaatcaagacccgctggaattgacctccagacagttgactaatttgacgttcagcgtagtcagctag

SEQ ID NO: 4184 - DNA, 1446 bp, Streptococcus pneumoniae
  misc_feature (1)..(1446): tiling:Spneumo1:WAN024DVE; Cluster includes WAN023Q1N cont ig_1216_3||||1437..2882|+|1446 bp|Glimmer 2.02 orf predict ion|S.pneumoniae|670|WAN01UEKW|ORF|000
gtggggattataataaagttaatcaaggacgaagagagaagaaaaatggaagcggttttagcaatagatttaggtgcgacttctggaagagcaatcgttggttacctttctgaaaataaactagtaatggaagaaataaatcgcttttctaatctacctattagagtaaaagggcatttatcttgggatrttgactttctactagctaaaattcttgaaagtatccgcttggctaatactagttacaagattttatctatcggtattgacacatggggagttgattttggactgattgataatgaaggtaagctgttatyacaacctgttcattatcgtgatgaaagaacaaagggaktgttaaaggaaatatctgaaatgactgaattagaaaaactgtattcagagacaggaaatcagattatggagataaataccttgtttcaactctttaaggcacgtcaagaatctcctgactctttctataagaccaataagattcttttaatgccagatttgtttaattatctcttgacaggtaagtttgctacagaaaaaagcattgcttcaacaactcaattatttgatcctaggagtcaaaaytggaatcagaatatcttaaaactatttgaattggattcatctttacttcctgarattgtttcagagggaaatgttcttggaaggataaaaraggagtatggtttaggcgatattcctgttgtgaatgtttgtagtcatgatacagcaagcgcgattgtctcagtacctaagacagaaggtagtttatttatttcatcaggtacttggtctttggttggagtggaacttacttcaccgmttcttactaccgaatccttcagttatggatttacaaatgaagtcggtaaagatggagtgattacatttctgaagaattgtacagggttgtggatcatagaggaactaagacgttcatttgaacgaagagggaaagcctattcttttgatgatattaggacaatggtggagaaagaaaaagaaaatcttcctctgattgatactgaatcaactgaatttgcaacagaatctgatatgcacaagactttgacagaatatctagcttatcatcatgaaactagagagtggacagatggacaactatttaagattgtttatgaaagcctagctgaaacgtataggaaagcgatagagttactagaagaactaactcataaggtttataagaggatatatgtgattggaggaggtgctagagccagttactttaaccaaatgattgctgatagaactggtaaagaggttcttacaggttygactgagggtacagctgtggggaatattgttgtgcagctattgagtcaaggtaaaataaacgaggatacagagttaaaggatattatgacaaatattgctgakacacaatattattatcctcagctatca

SEQ ID NO: 4185 - DNA, 1454 bp, Streptococcus pneumoniae
  misc_feature (1)..(1454): tiling:Spneumo1:WAN024DVF; Cluster includes WAN0243AO spr1 973|fcsK|15904014|NP_359564.1|1962617..1964065|-|1449 bp|F ucose kinase|S.pneumoniae|R6|NC_003098.1|ORF|211
gtggggattataataaagttaatcmaggacgaagagagaagaaaaatggaagcggttttagcaatagatttaggtgcgacttctggaagagcaatcgttggttacctttctgaaaataaactrgtaatggaagaaataaatcgcttttctaatctacctattagagtaaaagggcatttatcttgggatattgactttctactagctaaaattcttgaaagtatccgcttggctaatactagttacaagattttatctatcggtattgacacatggggagttgattttggactgattgataatgaaggtaagctgttattacaacctgttcattatcgtgatgaaagaacaaagggagtgttaaaggaaatatctgaaatgactgaattagaaaaactgtattcagagacaggaaatcagattatggagataaataccttgtttcaactctttaaggcacgtcaagaatctcctgactctttctataagaccaataagattcttttaatgccagatttgtttaattatctcttgacaggtaagtttkctacagaaaaaagcattgcttcaacaactcaattatttgatcctaggagtcaaaattggaatcagaatatcttaaaactatttgaattggattcatctttacttcctgaaattgtttcagagggaaatgttcttggaaggataaaaraggagtatggtttaggcgatattcctgttgtgaatgtttgtagtcatgatacagcaagygcgattgtctcagtacctaagacagaaggtagtttatttatttcatcaggtacttggtctttggttggagtggaacttacttcaccgattcttactaccgaatccttcagttatggatttacaaatgaagtcggtaaagatggagwgattacatttctgaagaattgtacagggttgtggatcatagaggaactaagacgttcatttgaacgaagagggaaagcctattcttttgatgatattaggacaatggtggagaaagaaaaagaaaatcttcctctgattgatactgaatcaactgaatttgcaacagaatctgatatgcacaagactttgacagaatatctagcttatcatcatgaaactagagagtggacagatggacaactatttaagattgtttatgaaagcctagctgaaacgtataggaaagcgatagagttactagaagaactaactcataaggtttataagaggatatatgtgattggaggaggtgctagagccagttactttaaccaaatgattgctgatagaactggtaaagaggttcttacaggttygactgaggstacagctgtggggaatattgttgtgcagctcatagctatgggacaattaaaagggatggaagargctcaccatgttattgaggagtttctacaattagagagttattactcccaaaagaattaactaat

SEQ ID NO: 4186 - DNA, 1328 bp, Streptococcus pneumoniae
  misc_feature (1)..(1328): tiling:Spneumo1:WAN024C84; Cluster includes WAN0244MZ spr0 231|PTS-EIIC|15902275|NP_357825.1|221110..222432|+|1323 bp |Phosphotransferase system sugar-specific EIIC component|S .pneumoniae|R6|NC_003098.1|ORF|111
gtgggtaagaaaaggagatttattatgkcaaagatggatgttcagaaaatcattgcaccgatgatgaagtttgtgaatatgcgtggcattatagctctaaaagatgggatgttrgcaattttgccattgacagtagttggyagtttrttcttgattatgggacaattgccgttcgaaggattaaataagagyattgctagtgtttttggagctaattggacagagccgtttatgcaagtatattcaggaacttttgctattatgggtctaatttcttgtttttcaattgcctattcttatgctaagaatagcggagtagaggctttaccagctggagttctatctgtatctgcattctttattttrctaagatcatcttatatccctaaacaaggtgaggcgattggggacgctattagtaaagtttggyttggaggccaaggaattatcggtgctatcattataggtttggtagtaggaagtatttataccttctttataaagagawaaattgttattaagatgccagaacaagttccacaagctattgccaaacagtttgaagcaatgattccagcatttgkaattttcttayyttctatgattgtatatattttagcgaagtcawtgactaatggcggaacattyatagaaatgatttattctgctattcaagttccrttgcaaggtttractggatcttygyatggwgcwattggaattscattctttatatcatttttgtggtggtttggtgttcatggrcaatcggtagtaaatggagtagtgacagctctgcttttatctaatcttgatgctaataaagctatgttagcctctgstaatctatcattagaaaatggwgcacatattgttactcaacartttttagattcattkttaattctatcaggttcagggattacgtttggtcttgtagttgccatgctttttgyagcaaaatcaaaacaataccaarccttaggaaaagttgcagcttttccagcaatatttaacgtaaatgagccagttgtatttggatttccgattgtcatgaatccagttatgtttgtacctttcattcttgttcctgtacttgcagctgtgatagtatatggagctattgcaacaggtttcatgcagccattctcaggggtaacattgccttggagtacaccagctattytatcaggatttttggtgggtggatggcaaggwgttrtkactcagytrktrrtattrgygatrtctacadtggtttaytttccattctttaarrtacargatcgtttagcttaccaaaatgaaatcaaacaatcttarctaat

SEQ ID NO: 4187 - DNA, 270 bp, Streptococcus pneumoniae
  misc_feature (1)..(270): tiling:Spneumo1:WAN024FY3; Cluster includes WAN023LAZ 3151 35_2149||||1158397..1158666|+|270 bp|EGAD orf prediction|S .pneumoniae|R6|NC_003098.1|ORF|110
gtgggtaataatcaagtgctctggcaaatcctcgcggctgactgcataaccatggttctggctggtgaagtctactcgtcctgttgcgatttcacgtaccgcatggttgaatccacggtggccaaacttcatcttataggtcttagccccgtttgccattgcaaagagttggtgtcccatacaaataccaaagattggaatttttccttgtacaccgcgaatcatgtcgagtgcttgtggaacgtcttctgggttacctggaccatttga

SEQ ID NO: 4188 - DNA, 873 bp, Streptococcus pneumoniae
  misc_feature (1)..(873): tiling:Spneumo1:WAN024CKW; Cluster includes WAN0242HH SP10 57||15900927|NP_345531.1|993951..994817|+|867 bp|transcrip tional regulator PlcR, putative|S.pneumoniae|TIGR4|NC_0030 28.1|ORF|010
gtgggtacactattagcaacaagattaaaaaatagacgaaaagaattaaaaatgtctcagcgagaattagctgagggtatctgtaaacaggggcaaattagtcgattagagagtggagagttcacccctggagcggattttttacatgcccttgctaagaaattaaaagttagtatggactacttttttgatgagcaggttgtagaggaagtcaatgagttatcagagtttaagaagttagcacagacatttatcacaaatcgtaattatgaatctttaaaatatatatatgaattggaaaatgtaaaagcccatcgcttatctctagcagataaattttacatggaatggataaagtctcttatagatttttatttttatggacagaaagaagaggcaattacacgattagagaatatgctacctcagttaaatgtatctgatttgaactaccttcaagtttcaaacactctattcaatttttattatgatattgaagatttagaacgttttaatgagattagagacaagctagagcatcaagtgaatcagcttaatttaaacacaattgaagagttagaactatcaattaagttcaattataacgtttgtcgatacctatggttacagaaaaatattgaagaagctattacgaaaatcacagctacgataaagcaatgtaaggagtacaggacaacttatctattagctgatttgtatttattgatgggaagtgtaagtgaaaatttttcttctaaaagttcagtaaaagaatattttgagactgctcattttctctacaaacttgaggaaaacatgtcaatggctttgaaagtcgaacattattttgcagatataacagaactaactaat

SEQ ID NO: 4189 - DNA, 203 bp, Streptococcus pneumoniae
  misc_feature (1)..(203): tiling:Spneumo1:WAN024DGF; Cluster includes WAN0244CU spr0 596||15902640|NP_358190.1|608630..608827|+|198 bp|Hypothet ical protein|S.pneumoniae|R6|NC_003098.1|ORF|121
gtgggtatcttgtcgattattcttggtttgttatttccaattgtaggcctgattttgggtatcataggattggtcttrgctatttcataccaaaaagagtcacaattagactataaaatagaaaagattcttaatatcttaggaattgtgatttctgtagttaactggattgtagcaatcgccttaatttttcgrtaactaat

SEQ ID NO: 4190 - DNA, 659 bp, Streptococcus pneumoniae
  misc_feature (1)..(659): tiling:Spneumo1:WAN024C97; Cluster includes WAN0244NZ spr0 195|rpsC|15902239|NP_357789.1|199251..199904|+|654 bp|30S Ribosomal protein S3|S.pneumoniae|R6|NC_003098.1|ORF|111
gtgggtcaaaaagtacatccaattggtatgcgtgtcggcatcatccgtgattgggatgccaaatggtatgctgaaaaagaatacgcggattaccttcatgaagatcttgcaatccgtaaattcgttcaaaaagaacttgctgacgcagcagtttcaactattgaaatcgaacgcgcagtaaacaaagttaacgtttcacttcacactgctaaaccaggtatggttatcggtaaaggtggtgctaacgttgatgcactccgtgcaaaacttaacaaattgactggaaaacaagtacacatcaacatcatcgaaatcaaacaacctgatttggatgctcaccttgtaggtgaaggaattgctcgtcaattggagcaacgtgttgctttccgtcgtgcacaaaaacaagcaatccaacgtgcaatgcgtgctggagctaaaggaatcaaaactcaagtatcaggtcgtttgaacggtgcagatatcgcccgtgctgaaggatactctgaaggaactgttccgcttcacacacttcgtgcagatatcgattacgcttgggaagaagcagatactacatacggtaaacttggtgttamagtatggatctaccgtggtgaagttcttccagctcgtaaaaacactaaaggaggtaaataactaat

SEQ ID NO: 4191 - DNA, 643 bp, Streptococcus pneumoniae
  misc_feature (1)..(643): tiling:Spneumo1:WAN024FHA; Cluster includes WAN0243NU spr1 497|ABC-NBD|15903540|NP_359090.1|1475035..1475745|-|711 bp |ABC transporter ATP-binding protein - unknown substrate|S .pneumoniae|R6|NC_003098.1|ORF|211
gtgggtctgatggcttatattgagatgaaacactgttacaagcgttatcaggttggggacacggagattgtggccaatygtgatgtgaattttgagattgaaaagggggarctggttattatccttggtgcttcaggtgcaggcaagtcaacagttcttaaccttcttgggggaatggataccaatgatgaaggggaaatctggattgatggtgttaatattgcggattatagttcccaccagcgcaccaattaccgtagaaatgatgtggggtttgtttttcagttttataatctagtttctaatctgacagctaaggaaaatgtggaactggcttctgaaattgtgacagatgccttgaatyctgatcaggycttgacagatgtaggtctggctcatcgtctmaataactttccagcccagctttctggaggggagcaacagcgagtctccattgcacgcgcggtagccaaaaatcctaaaattctyctttgtgatgaacckactggagccttggattatcagacgggcaagcaggttttgaaaattctccaagayatgtctcgtcaaaagggagcgacggtgatcatcgtgactcataatggagctttggcgcccattgctgatcgcgtgattcaaatgc

SEQ ID NO: 4192 - DNA, 279 bp, Streptococcus pneumoniae
  misc_feature (1)..(279): tiling:Spneumo1:WAN024G8G; Cluster includes WAN023KU9 3149 32_2873||||1535135..1535413|+|279 bp|EGAD orf prediction|S .pneumoniae|R6|NC_003098.1|ORF|110
gtgggtcttataaagcttacgrgctacgtattcgtctgcatcrgtaattccttccttaccrgacacgacaaaracgataacatctgcttcttccatggcaatttctgcctggtgcttgatttgttccatgaaaggagcatcgacatcatcaattcctcctgtatcaatcatgctaaaagaacgattgagccactcacccgttgcataaatacggtcacgtgtcactccttcgacatcttctacaatggagattcgctcaccagcgatccgattaaatag

SEQ ID NO: 4193 - DNA, 546 bp, Streptococcus pneumoniae
  misc_feature (1)..(546): tiling:Spneumo1:WAN024FMU; Cluster includes WAN023P6T pne5 3_32||||18624..19169|+|546 bp|Type 25F capsule operon, Gli mmer 2.02 orf prediction|S.pneumoniae||WAN01UCCQ|ORF|000
gtgggtggactgattagtcatgatttgggtctacaatttcgttctcccactatcaatatgtatatagaagcagcagactttattcagttttgttcacatttagaacgctatttaaaagaagacttatcttttattgaagtaaatcaagatggacattttgtagctctttgtggggatataaaaatttatattgttcattataatagctttgaagagtttgctaaaaaatggtctgaacgtgccaaaagagtagattttgatcaattatatcttatgatgtctgaacgagatggctgtcgttatgaagatattgtgaagtttgatacgttaccctataagaataaagtaatttttacaagtaaaaagatgccagaaattcaatccgctttttatataccaggtattgaaacaaaaaataatcaaaaacataaggtgaaatcagtaacaacttatcttaactcctttacaggaaaacgatatatagatttattcgactttgtagagtttttgaatacaggaaggaaacaattaagtaagtatgaaaag

SEQ ID NO: 4194 - DNA, 282 bp, Streptococcus pneumoniae
  misc_feature (1)..(282): tiling:Spneumo1:WAN024FI4; Cluster includes WAN023KY9 3151 81_2698||||1435099..1435380|+|282 bp|EGAD orf prediction|S .pneumoniae|R6|NC_003098.1|ORF|110
gtgggtggcatagtgacggcgcatcggatttttgggacgtcctctatccacartaaactcataggtcttgctatgyttggcataacggcaatgaaaatcatctgccacaagctcaatcgaaatcacatcaatatcttcaggagactgggtatccaaggcaaaacggagtttctcctcatccatctgataaggcaggtcaaaatgaatsacctgtcccagggcatgaaccccactatctgtcctaccagcaccgtgaacagtaatggyttgccctttatttaa

SEQ ID NO: 4195 - DNA, 136 bp, Streptococcus pneumoniae
  misc_feature (1)..(136): tiling:Spneumo1:WAN024DQ2; Cluster includes WAN0242NO SP08 15||15900704|NP_345308.1|768128..768241|+|114 bp|hypotheti cal protein|S.pneumoniae|TIGR4|NC_003028.1|ORF|121
gtgggtgtagaaactcttgytactatgcgttttrttatkgaaagacttattggactttctctcaaatcgagtttttactcaattttcttacttgattgggattgaaattccaattaatttctctgagctarctaat

SEQ ID NO: 4196 - DNA, 252 bp, Streptococcus pneumoniae
  misc_feature (1)..(252): tiling:Spneumo1:WAN024B88; Cluster includes WAN023MAX 3152 99_267b||||135353..135616|+|264 bp|EGAD orf prediction|S.p neumoniae|R6|NC_003098.1|ORF|110
gtgggttccgttggcgatacgagagagggctgccataggctcaccctgactacctgtacagaggataagaacttctcctgcaggataatctttgatttcatttggctcgataaaggttcccttaggagctttgatgtagccaagatcgattccgttgacaatggccttttccatagaacgaccaaagaccgcaatcttgcgtccagtcttaacagcagcttctgttgcctgctggagacggaagatatttga

SEQ ID NO: 4197 - DNA, 270 bp, Streptococcus pneumoniae
  misc_feature (1)..(270): tiling:Spneumo1:WAN024CTR; Cluster includes WAN023LVL 3131 84_1086a||||573305..573574|-|270 bp|EGAD orf prediction|S. pneumoniae|R6|NC_003098.1|ORF|110
gtgggttgtacggatggagttaactcccatctccttcatttgtttgagacggcgatattctgctttatagttttcttctgctccaagcgccccatggtcgtggtgcaaggatactccatggaatttaatacgttcaccattcaaagagaaaccttcatttggagtccagtgatagtaacggtaaccaaacaaatccttcttagcatcaaccaattgaccgtcacggtaaacacgcgtaatcaattcgtacaaggcaggtttgtcatttaa

SEQ ID NO: 4198 - DNA, 331 bp, Streptococcus pneumoniae
  misc_feature (1)..(331): tiling:Spneumo1:WAN024GIP; Cluster includes WAN0242U4 SP05 60||15900472|NP_345076.1|527795..528028|-|234 bp|hypotheti cal protein|S.pneumoniae|TIGR4|NC_003028.1|ORF|111
gtggrgttcctgctagytytctgcracttggattaccatctagataagtttaaagarccaatccaatatcttaaacactatcttgtaaaacagcaattgractgcaaaagaratgatcatccaaaagaatttcacaatcccaataatcggtttgataaaaakaatrgcaagaagwccmaaaaaatttcattytytmtcctctggcttaatgagccaccgagccgtatccattaactwrtcggcaataaaaagtttccccagaccgacaacggcattatcatctttctttatcgttttcattacttttacaccttrcacggtcaaaaagtaa

SEQ ID NO: 4199 - DNA, 762 bp, Streptococcus pneumoniae
  misc_feature (1)..(762): tiling:Spneumo1:WAN024GFI; Cluster includes WAN0244DC spr0 578|rr09|15902622|NP_358172.1|588303..589058|+|756 bp|Resp onse regulator|S.pneumoniae|R6|NC_003098.1|ORF|111
gtggtaaaggagcagagcatgacctacacaatcttaatcgtagaagatgaatatctggtaagacaaggtttgactaaactggtcaatgtagcagcctacgatatggaaatcatyggtcaggctgaaaatggaaggcaggcttgggaattgatccaaaagcaggtgccagatatcattttaaccgatatcaacatgcctcatctaaatggcatccagttggccagtctggtacgagaaacctatcctcaggttcatttggtctttttaacaggttacgatgattttgattatgccttgtctgctgtcaaactaggtgtggacgactacctgctcaaacccttttctcgtcaggatattgaggaaatgttggggaaaatcaaacaaaaactagacaaggaagagaaagaagagcagttacaagatttattgactaataggtttgaaggaaacatggcccagaaaatccagtctcatctggctgatagccaatttagtttaaagtctttagccagtgacttaggttttagtccgacctatctgagttccttgattaagaaagagttgggcttgccttttcaggattatctggtgagagaacgtgttaaacaagccaagctcttgcttttaactacagatctgaagatttatgagatcgcagagaaggttggttttgaagatatgaactattttacccaacgttttaagcagattgcaggtgtgacacctcgtcagtttaagaagggagaagaccgaykaactaat

SEQ ID NO: 4200 - DNA, 1419 bp, Streptococcus pneumoniae
  misc_feature (1)..(1419): tiling:Spneumo1:WAN024FX4; Cluster includes WAN0243WD spr1 190||15903233|NP_358783.1|1185496..1186914|-|1419 bp|Hypot hetical protein|S.pneumoniae|R6|NC_003098.1|ORF|300
gtggtaaatatgaaattaaataaaaaaatatatttctttgataaaggaatttttaatccttatcgaatgagtaatgtaaaattaaaagttaatcaggcagtaaaggataaagaaattttcttcactgaggaaaaaccatgggaaattcgttttgataacagttatccaaatgttttctttgatgatttagcaggtgtttatcgttgctactattctacatttactgatgatgaggagtctgaaaaatactctttagaggagcgtaaggaacgtcaatatctacctcgtgcgaagcgtattgtttcactttgttatgctgaaagtaaagatggtgttaactgggtgaaaccaaatctaggtattacagaatttcgaggatcaactgaaaataatattatcggacattttttacatggtacatctgtttttctagataaacatgacgcagatgaaaatcgtcgttataaaatgtttacaaagattgattacggtaacggtgttcatttcattgctgtagcattttcaaaagatggtctacactttgatgaatacattaaagtaccaaacttcaatccacgtgcagacactcataaccatatcatatatgatgaagcattaaatcgctatgtgctaattactcgtacttggagagattcattgcgcttgccgtgtgtatctacgagtgctgatttcattaactggactccaattcaagaaattttgaatgtctgtgattatgaaaatcaaatttattctatgcctatttttaaacgtggcgattatatactaggtttagcttcagttttccatgaaggagatcaactgaacaagaattacgatacagtggaccttcaattgacttatagttatcgtcatgttggttggcattatctaaacactgatactccacttattcctcgtggtaaaggtcaatatggtgatggagaatttgactgtggatgcatctattcttctgcaccagttactatcggtgaccgtacttatttctactacatgggaggaaatggacaacatacaaacttccgtgaaacaagcttgtctcgtgcttatattgagaaagatcactttgcatattgggatactaaacgtccagaatatccaggtgttttgtataccaatggatttattttcctcaatgatcaagtttaccttgatgcagatattgcagctggaggctttgtaacaattgaattgttcgagaataatcacactccaatggaaattacagcttcccttgaaaaaatagaagatggtcgctatcaagtgttattcagcgaacctttacctcgaactcaaactcgactgaaaattagctttaaaaatgctaaaatctacgcaatcgaaggaaatttagatattttcagaattgaatcagacaatgctctattgagggggtaa

SEQ ID NO: 4201 - DNA, 441 bp, Streptococcus pneumoniae
  misc_feature (1)..(441): tiling:Spneumo1:WAN024FSF; Cluster includes WAN023L66 3148 96_2346||||1258784..1259056|+|273 bp|EGAD orf prediction|S .pneumoniae|R6|NC_003098.1|ORF|110
gtggtaacaatcccctttgaccacatcataaatcagaccaaactgtccctgaccattttcaaaataagccatcataacagcaaaatcttcctgctgggctacaaaattattggtaccatcaatgggatcaatgacccaaaccttgccctcttgaaccgaggctcgcagacaaccttcttcagcacaaatcttatcctcaggataacgggacaaaatctcaccaaccaagagttcctgaacttctttgtccagtctggtcaccaaatctgttgragaggacttggtttcaacacgcaagtcttcctgcatatggtcaagaatgtactgacctgctttcttaacaagctctttagcaaattcaaatttactttccaagagaaatctttccttcccctttttctttggcagcctgaactgctcggtaaagtgaatagccactaa

SEQ ID NO: 4202 - DNA, 84 bp, Streptococcus pneumoniae
  misc_feature (1)..(84): tiling:Spneumo1:WAN024CBH; Cluster includes WAN023RYZ cont ig_1613_2||||382..465|+|84 bp|Glimmer 2.02 orf prediction| S.pneumoniae|670|WAN01UDBR|ORF|001
gtggtaacagtctatgccctgctccttacacatgttcattctgtgaaaccttgcattgtccataatgataagggatggtgtatc

SEQ ID NO: 4203 - DNA, 318 bp, Streptococcus pneumoniae
  misc_feature (1)..(318): tiling:Spneumo1:WAN024D5E; Cluster includes WAN023LC2 3138 02_2111b||||1138722..1139039|+|318 bp|EGAD orf prediction| S.pneumoniae|R6|NC_003098.1|ORF|110
gtggtaagaaacactgcgtcccatctcacctgcattctctttttgaacaaaggtattagcgtttatatagrcaatagcagaagccttcaacacatcaaaatcaagccctgctgcattaaagatggtttctgtatctctgttttcaacagtgaccaaaacccgatcctgggyatcgattccatctgttaccgcatygatagtgtaggacaccaaacgaacagattggttaaagaacttatcgatagcrttaaagattgcttcaacggaaccttgccctgtcgcattaaattcgactttctcaccatccatattggctag

SEQ ID NO: 4204 - DNA, 1251 bp, Streptococcus pneumoniae
  misc_feature (1)..(1251): tiling:Spneumo1:WAN024CKJ; Cluster includes WAN023POR pne2 4_9||||5690..6940|+|1251 bp|Type 12B capsule operon, Glimm er 2.02 orf prediction|S.pneumoniae||WAN01UCJ2|ORF|000
gtggtaagaaagagttggaktgatgcaatgaaaattctatttgtttgtcaacattataagccagaaccttttagrttgtcagatatttgtgaggatctagttcaaagagggcaygaggtggctgttttgacagggattcctaactatccygagggggaaatatatgctgattatcgtaagagaaaaaaaagaagagagactataaatggtgttgctatttttcgttcatacaccattgctaggaggcaaaatactttataccgtatattgaattattttagttttgctctttcttctacgataggtgttatatttgggcgttataaagcgaaagatggctcagattttgattgtgtctttgtyaatcaactatctccagttatgatggcttgggctggtatagcttataagaacaagtacaataaacctatgtttttgtattgcatggatgtttggccggatagtttaattgtaggtggggtgaaggaaaatggattgatttacaagatatttgaatttgtttcaaaaaaagtatatcaagccagcgattatatatttgttactagtctatcttttaaagattattttgtaaaaaaatttaatattcctctccacaaaattacttacttaccacaatatgcagaggatttatttgtaccaaatgaattaaaaacgaacaaaaatactattgacttaacttttgctggaaatattggaaaagctcagaatttagagactattttgaaagcagccagtgcaatagaacagattcccgatttagcaaagagagttcattttcattttgttggagatggtacggaactattaaayatgcaaaaattagcatgtgaactagaattagagaacacttcattttatggtagacgtccattagaagagatgccggatttttatacaaaatcagatgcgatgctagtttctttaataggcgactctataatttctcgcaccttaccaggyaaggtacaatcttatatggcggcaggaaaaccaattataggagcgatttcaggagatactcagagagttgtaaaagaagcaaaatgtggyttcataagtccggaagggaatgttgatcagttagtgagaaatattcgtaagttctgtttgctttctgtagaggaaagagagaaactaggaaggcaagctcgttgttrttatgaagaacagttttcgaaagagtggtttatgacatacttagaaaatcatttaaaagaggggtttctatca

SEQ ID NO: 4205 - DNA, 999 bp, Streptococcus pneumoniae
  misc_feature (1)..(999): tiling:Spneumo1:WAN024DEQ; Cluster includes WAN02448Z spr0 735||15902779|NP_358329.1|734318..735061|+|744 bp|Hypothet ical protein|S.pneumoniae|R6|NC_003098.1|ORF|243
gtggtaataggtgtgctagattctaaggaggaattgaaagagtcagaaaatgatgctccaaaactagaaactcctcttagagaggagccaagactagctcctcaaacgcttccggaagcaagtgaagttcttgaaaacaaaagggaagagtcaaaagtagagataacakarcyarytcaagcggatgatatccgcaaggttgttggggaattagccaaggatataagtattactaagttgtatatgacaggtcattctcttggakgytacctagctcagattgcagmggttgaagmttaccaaaaatatcctgatttttataaccatgtattgaggaaagtgacaactttcagtgctcctaaagtsattacttccagaactgtttggratgctaagaatggtttctgggatgttggtttggaaagtcgtaaattagctgttagtggaaaaattaagcattatgtggttgataatgacaatgttgtgactcccttgattcataatratcgtgatattgttacatttacaggtaattcacgctttaaacaccgttctcgtggctattttgaaagtccaatgaatgatattcctaactttaatattggtaaacaagctaycttggataaacatggttatcgtgatccgaaattggataaagygcgattctttaagaaacaggctctrcctcratcttctagtcaaccaagcgctgaaccaatggaaaatattgcctyaggaaaayaggttactcaaagttcgacagytttcggaggagatgctagaagagctgtggatggcaaagtcgatggtaactatggtcacaattctgtcactcatacaaacttycaatctaagccttggtggcaagtagatttggctaaagaagaaaccattcgccaaatcaatatttacaaccgaacagacactgcccaggatagattggcaaactttgatgtcattcttttagacrgttctggtaaagaaattgagykaactaat

SEQ ID NO: 4206 - DNA, 240 bp, Streptococcus pneumoniae
  misc_feature (1)..(240): tiling:Spneumo1:WAN024CTW; Cluster includes WAN023LVF 3143 35_1090a||||574915..575154|-|240 bp|EGAD orf prediction|S. pneumoniae|R6|NC_003098.1|ORF|110
gtggtaggcatttcaggtgcctctccaataatggtctgtacttttggcacytctgtccccaaaacagtcttytcttgtccttctttcttaccagtaaagacagtgacttggttcgatttcaagagatcagagtgggcagtmagggtgaatttccctgcttgttcagttgatttgacaatggcaacacctttaccattaaatgctttacgaatccaagaaccatctgcttgcgccttatag

SEQ ID NO: 4207 - DNA, 312 bp, Streptococcus pneumoniae
  misc_feature (1)..(312): tiling:Spneumo1:WAN024FBT; Cluster includes WAN0243IR spr1 681||15903723|NP_359273.1|1653131..1653436|-|306 bp|Hypoth etical protein|S.pneumoniae|R6|NC_003098.1|ORF|211
gtggtagggatggyagaaccaaacctagaaagccttataaaagatctttacaatcatgctcgacatgatttgagtgaagatttagttgctgctctcctagagactrctaaaaaactgcctactacaaatgagcaattgcaggcagttcgtctctcargcctggtcaatcgtgaattgctcctaaatcccaaacatccagcacctgagttgctcaacttggctcgctttrtcaaaagagaagaagccaagtacagaggaactgcgacttctgcrcttatgtatgaggaactytttaaaatgcttykaactaat

SEQ ID NO: 4208 - DNA, 206 bp, Streptococcus pneumoniae
  misc_feature (1)..(206): tiling:Spneumo1:WAN024DCK; Cluster includes WAN02444E spr0 900||15902944|NP_358494.1|887384..887584|+|201 bp|Hypothet ical protein|S.pneumoniae|R6|NC_003098.1|ORF|111
gtggtagyaagcgcttcggctagctcaacgagcmcacaagctcaagagcaagttgacaagtctgaacttcgtgccttgagtcaagagttagaycaacrcttgaaagctttggcaacagtatctgatccgaaaatcgatgcaaccaaggctgtcctcctagatgctcaaaaagctccggaagatagtgccttgacagagtaactaat

SEQ ID NO: 4209 - DNA, 240 bp, Streptococcus pneumoniae
  misc_feature (1)..(240): tiling:Spneumo1:WAN024F4P; Cluster includes WAN023M70 3153 55_488||||250668..250907|-|240 bp|EGAD orf prediction|S.pn eumoniae|R6|NC_003098.1|ORF|110
gtggtcaaataccatcatgaatgtaccacgtccttgagatgcagaacgaagaactgttgcgtaaccgaacatttcagcaagtggaacgtaagcacgaacgatttggctgttaccgtgtgcttccataccatctacacgtccacgacgagcagttacgtgacccataacatcaccaaggttttcttctggaacagtgattgttacaagcatcattggttcaaggatagctggttgtgctga

SEQ ID NO: 4210 - DNA, 594 bp, Streptococcus pneumoniae
  misc_feature (1)..(594): tiling:Spneumo1:WAN024GJ8; Cluster includes WAN023LYZ 3127 99_917a||||482654..482941|-|288 bp|EGAD orf prediction|S.p neumoniae|R6|NC_003098.1|ORF|121
gtggtcaacgtgtcccatgatagtaacaactggtggacgctcaaccaattcatcttcattgagataaccatcttcgacaaagaaacgttcgatgtcagcattatccacttcaaccttttgtttggcttcgataccgtaatccaccatgaggagttcaattgtttccccatccaaggattggttttgtgtggccatgacacccatcatgaaaagtttcttaacaatttcagctggttcacgtttgatacgttttgcgatttccgcaacggtcataccatctgtatattcaaattctgttggcaattcatggaatttacgctccgtaacaggttttggagtctgattacggttgttcttgttattgccttttttgttctttttgttgttattccagttactattcttttgatttctcacttgattttgactacttcgattcttttgttgttttctaggaccatcttcttcatgatcataatcgtcacgatttttgtctggtcgagcttgttttttacgacgtgtatccactgcaggttcttttttctcagggacgacttcaaccactgcttgaacttgctgtgcttgttcagctaa

SEQ ID NO: 4211 - DNA, 102 bp, Streptococcus pneumoniae
  misc_feature (1)..(102): tiling:Spneumo1:WAN024CND; Cluster includes WAN0246S6 5613 45-76-4||||||102 bp|DNA Streptococcus pneumoniae phage Dp- 1 open reading frame 272|S.pneumoniae||WAN0246S6|ORF|000
gtggtcaagtctgtcaatgaatgtacctgcgattttcttgacgtgataaaagtcaacaaccatcccttgactcgaaccgtggtcataagttccgcctgctaa

SEQ ID NO: 4212 - DNA, 306 bp, Streptococcus pneumoniae
  misc_feature (1)..(306): tiling:Spneumo1:WAN024EZ8; Cluster includes WAN023LKB 3140 21_1713a||||910826..911131|-|306 bp|EGAD orf prediction|S. pneumoniae|R6|NC_003098.1|ORF|110
gtggtcagcracrcgkgcacggatratyttcatrgccttctcrcggttcttctgctgggtacgttcttcctgcatctcaaccttgatattggttggcaagtgaacgatacgaacggcagtcgcaaccttattgacgttctgtccaccagcaccagaggcgtgatagatgtcgacacgaaggtcttttggatcaatgtcgtattcaacctcttcaacttctggcataacaagaactgtcgctgtcgaagtatgaacacggccttggctttctgtcacaggaacacgttgcacacggtgggcacctga

SEQ ID NO: 4213 - DNA, 84 bp, Streptococcus pneumoniae
  misc_feature (1)..(84): tiling:Spneumo1:WAN024DH5; Cluster includes WAN023Q0D cont ig_1207_26||||18765..18848|+|84 bp|Glimmer 2.02 orf predic tion|S.pneumoniae|670|WAN01UEM7|ORF|000
gtggtcagttrcttacagacaaaaggccagcaagagactataatagaaaatagagtaggtatttattctaagaaaaataaaaaa

SEQ ID NO: 4214 - DNA, 710 bp, Streptococcus pneumoniae
  misc_feature (1)..(710): tiling:Spneumo1:WAN024GAU; Cluster includes WAN02448B spr0 759|ABC-SBP-internal deletion|15902803|NP_358353.1|755929. .756633|+|705 bp|BC transporter substrate-binding protein - oligopeptid tran...|S.pneumoniae|R6|NC_003098.1|ORF|121
gtggtcctgagcacgtyagctattttagtggcttgtggaaaaactgataaagaagcagatgcaccgacaacattttcttatgtctatgcagtagatccagcatcattgggctacagtatarcgactcgaacatcgasgacagacgttattggaaatgttattgatggtttgatggaaaatgataaatacggcaatgttgctccttctcaaaaagactatgatttgaayagtacaggatgggctccaagctatcaagatccagcgtctyacttgaatattatrgatccaaaatctggttctgccatgaaacaccttggyattacgaaaggaaaagataaggatgttgtagctaaacctggtttggataaatataagaaattgttagaagatgctgtttctgagaycactgacctagagaaragatatgaaaaatatgccaaagctcaagcttggtcgacagatagttcattattgatgccaacagcttcatctggtggttytccarttgtaagtaacgtagtaccattctcaaaaccatactcacaagttggtattaagggggawccatatatctttaaaggaatgaaattgcaaaaagatattgttacaacaaaagaatataacgaggtttttaaaaaatggcaaaaagaaaaattggaatccaatagcaaataccaaaaagaactagaaaaayacattaaataactaat

SEQ ID NO: 4215 - DNA, 306 bp, Streptococcus pneumoniae
  misc_feature (1)..(306): tiling:Spneumo1:WAN024CSE; Cluster includes WAN023LOI 3145 14_1477a||||782173..782478|-|306 bp|EGAD orf prediction|S. pneumoniae|R6|NC_003098.1|ORF|110
gtggtcgctacgcttgctagaaatcttaaaggtcataccttccttgtagatgtcccgcataatctcttggacagaagacttcaaaacttctacagatttttcaaccttataaacaggagaaaagttttgaattccaaaaacttgtttgagagattctgcaactgctgtgtaatcagctccattgaggtaagcgtgggcacggtcgcgatctgctgttaccttaacttggstatagatagacaaaacgtccgaaatattattacgaagtttattgatgaaacgcatacggtttttacccttggttga

SEQ ID NO: 4216 - DNA, 231 bp, Streptococcus pneumoniae
  misc_feature (1)..(231): tiling:Spneumo1:WAN024CSR; Cluster includes WAN023L72 3151 45_2311||||1240657..1240887|+|231 bp|EGAD orf prediction|S .pneumoniae|R6|NC_003098.1|ORF|110
gtggtctgcgataaccttgaagctcatgttgtcgccatcttggtcataaaccttaccagacaatttctcgacttcacggataatcggcatgaagaggtccgtttcaaagttggtcttagccccttggataacggccaccaaacgctccaaaccagcgcccgtatcaatgttcttatgtggcaattccttgtattcgctacgaggaacagcagggtctgcgttaaattgtga

SEQ ID NO: 4217 - DNA, 246 bp, Streptococcus pneumoniae
  misc_feature (1)..(246): tiling:Spneumo1:WAN024ESF; Cluster includes WAN023KKO 3152 16_3324||||1778434..1778679|+|246 bp|EGAD orf prediction|S .pneumoniae|R6|NC_003098.1|ORF|110
gtggtctggttcctgccagttaaagcctcgaccatgaaccaagagaaccttttcctgcttcaagaaatcaaggacaaactgctcatcatcatcgatacggtacatattgcggtcgatttttgggaagatatagagccccgccttgggtttaacggcagacaaacctggaatatcttgaatggcattatagatgaaatttctttgctcgtagattcgtccaccaggaagaagcaattcatcgactga

SEQ ID NO: 4218 - DNA, 561 bp, Streptococcus pneumoniae
  misc_feature (1)..(561): tiling:Spneumo1:WAN024CVF; Cluster includes WAN023JZE 8302 7_596a||||336888..337274|-|387 bp|EGAD orf prediction|S.pn eumoniae|TIGR4|WAN01UC25|ORF|020
gtggtcttgatccacctttatcagcttcacctttgttgtcattgtatctgtttttttcgctacaatgaccaaaggctctaccgtttgatctgtcatttcaaaaagaaattcagctggataagaaaccgcatccgtctggataatagagcgaacatagtaaagaccatttggaatatgagatacttcaatctgattctcaaggaaggtcatctcaaacgaagtctttttgaaagaagaaagtttattctcatcccacgaatgcaagtctcttacaatttgcacccgatcatcataggaatacgaatcatccaacttccatacttgcaaccgatgaccatcacgagatggcaattgactaaccacctcctgatagttctccaattgcaagaccaacgtgtgatcttcttgcgcttggactgcatgtgcaccccatacaagagaaaaacacagagccataacaaagaagatacgactaatcattttctgcattttctgcattgtcatcaatggctcctttctctcttacttaagcaagttgatcctcatctttgttgtttttaa

SEQ ID NO: 4219 - DNA, 258 bp, Streptococcus pneumoniae
  misc_feature (1)..(258): tiling:Spneumo1:WAN024BDJ; Cluster includes WAN023KZV 3149 17_2625b||||1399814..1400071|+|258 bp|EGAD orf prediction| S.pneumoniae|R6|NC_003098.1|ORF|110
gtggtcttgccagtcccattgacaccgattaaaccaattctgtctaagtcatggataataaaggaaatatccctaaaaacggtcttgtcaccaacggatttacttagtttttcaacgataaaatcactcattttttctccctcaggtaagcatggatggcttcacgattattctccaattctccatcgacaatggcaaactcaatctctgttaaaatctctcccaagtctgggcctggctgatagccatattccttga

SEQ ID NO: 4220 - DNA, 1089 bp, Streptococcus pneumoniae
  misc_feature (1)..(1089): tiling:Spneumo1:WAN024CKF; Cluster includes WAN0242ZC SP03 55||15900284|NP_344888.1|329455..330537|+|1083 bp|hypothet ical protein|S.pneumoniae|TIGR4|NC_003028.1|ORF|010
gtggtgaaaaaaattatgttacatggtgcaacggattatggttcaagtaattacggtgattatctttacggtgagattgtctatgatttattagaatctaaaggatatgaagyttctttttataatccatcagatttctttcaaatgtacttgaaagaatatcgccaaaaacaaagttttactaaaaaacaagcagatgctattttgtatatcccgggaggatattttggggaagggcataatgcacgttttcgtgataatttaatccaatttaaacgatttttacctttgggaatttgggcttcatattttaaaaagcctataggagtattaggtattggtgcagggcctaataacgattctttgatgaattatggtataaagagaattattaatcatgctcaatttattacagttcgtgatcgagaatcatttgattctttgaagcatttgtcgccttcggctccagtgcatgaaacctttgatttaattatttcaagtaaattaagagaagaaaaaacagagcagctgtgtcaattgaaaagagaagctaaagataagaagataattcttgttcactataatcattccaaaaaagctcttgaaaaatttgcggaatcaattagtctttttctagaaaacaatcctaactattatgttgtagtaacttcggattccattctaccttatgaagatgcttattatcaggaatttagaaaattagttagaactgaggattgttttcaattcaagtatcattctcctgcagaaatgacatcattgttgaaaatggtagatgtggttttaacttgtaaattacatgttggggtagtggcaacatgttttaataaatctgtgattgccattgcatgccatccagaaaaaacagcacgttattatggagcaattggagagttacaacgttgtgaatctttatttgattcaagtgttaatagtattgtaaagaaacttgaaacttttcatctaaaaccgataacaataccttcagaattggtgttgaaagcgagaagtagtttggactatttagatctttttttggaaggactagttcgtgaaagtykaactaat

SEQ ID NO: 4221 - DNA, 378 bp, Streptococcus pneumoniae
  misc_feature (1)..(378): tiling:Spneumo1:WAN024G67; Cluster includes WAN023LIT 3156 02_1824b||||982339..982716|+|378 bp|EGAD orf prediction|S. pneumoniae|R6|NC_003098.1|ORF|110
gtggtggaaggagttgatatgagagatttctccatagatttcttggagaacggtatctgkttctgttaccaagcgttgagttgtgtactcaacagaagaatcctgccaatggtcttcgatatcttggtacaaagttccacccatggcaacgttaaagagttgggtaccacggcagacagagaaaatgggctttttctgtttaatagcttccttgatgagggccagttcgaagatatctctttgaaggtgatartcatcrctatcaatggttttgggttcgccataraattttggatcgacattttgcccacctgtcaagatgagcttgtcaatcaaactgatatagtggcaggccatttcttgatcaccaatcggtag

SEQ ID NO: 4222 - DNA, 257 bp, Streptococcus pneumoniae
  misc_feature (1)..(257): tiling:Spneumo1:WAN024DPB; Cluster includes WAN02441N spr0 999||15903043|NP_358593.1|983584..983835|-|252 bp|Hypothet ical protein|S.pneumoniae|R6|NC_003098.1|ORF|111
gtggtgtctttacaaaatcggaaagatagagccaaaatgtttgaactgacctataaggactgctatcatgtagagcgtactctcaagtatgaggatcatgaggctctcatgttgactttgtcaggatgtgtaaccttaccagatacactttatgtgacttctctgacttttaggggcmaaaaagtttatcagggkctggtcggagacctctaccgttttctatctcatgcagattttttacatcaaaactaactaat

SEQ ID NO: 4223 - DNA, 99 bp, Streptococcus pneumoniae
  misc_feature (1)..(99): tiling:Spneumo1:WAN024F7R; Cluster includes WAN024345 SP01 74||15900111|NP_344715.1|167836..167928|-|93 bp|hypothetic al protein|S.pneumoniae|TIGR4|NC_003028.1|ORF|120
gtggtmaaacacaacttcgatgttacagacaaaactggcaaaattagctcaaaacactgttttgagattactgataaaactgacgtsgttctaactaat

SEQ ID NO: 4224 - DNA, 411 bp, Streptococcus pneumoniae
  misc_feature (1)..(411): tiling:Spneumo1:WAN024CKY; Cluster includes WAN023KK6 3126 48_3359b||||1800561..1800812|+|252 bp|EGAD orf prediction| S.pneumoniae|R6|NC_003098.1|ORF|220
gtggttagtgttgaatacaactgttttaacgtcgtttccaccaggagcagtgataacaacttttttagctccacctttaaggtgtttttcagctgcttctttcttagcaaagaaaccagtagcttcaagaacgatttctacaccgtcagtagcccagtcgatttgttctggatcacgttcagcagaaactttgatgaatttaccgttaacttcaaatccaccttctttaacttcaacagtaccgtcgaaacgaccttgagttgtgtcgtatttcaacaagtgtgcaagcataactggatctgtaaggtcgttgatgcgtgtaacttcaacaccttctacgttttggatacgacggaaagcaagacgaccgatacgtccgaaaccgttaataccaactttaactaccattag

SEQ ID NO: 4225 - DNA, 237 bp, Streptococcus pneumoniae
  misc_feature (1)..(237): tiling:Spneumo1:WAN024DWX; Cluster includes WAN023KET 3148 20_3574||||1917179..1917415|+|237 bp|EGAD orf prediction|S .pneumoniae|R6|NC_003098.1|ORF|110
gtggttccattttccgataccttcaaagacagaaaccaagtcgatatctttaccatcaagatttcccggtgcaatagttccaccataggcgaaaatagctgggatatccatattagcaatagcaatcatagatccaggcatgttcttgtcacagccaccgatagcgacgaaggcatccacgttgtgaccactcatagccgcctcgatggagtccgcgatgatgtcacgagatgttag

SEQ ID NO: 4226 - DNA, 614 bp, Streptococcus pneumoniae
  misc_feature (1)..(614): tiling:Spneumo1:WAN024FMF; Cluster includes WAN0243S2 spr1 345||15903388|NP_358938.1|1330175..1330783|-|609 bp|Hypoth etical protein|S.pneumoniae|R6|NC_003098.1|ORF|110
gtggttcccaaaacagcaacctctactgagacgaagactataacgcgtatcattcattacgttgataaagttacgaaccaaaatgtaaaagaagatgttgttcaacctgtaaccttaagccgtacaaaaactgagaacaaggtcacgggagttgtaacctacggtgaatggacaacaggaaactgggacgaggttatatctggtaagattgacaagtacaaagatccagatattccaacagttgaatcacaagaagttacgtcagactctagtgataaagaaataacggtaaggtatgaccgtttatcaacaccagaaaaaccaatcccacaaccaaatccagagcatccaagtgttccgacaccaaacccagaactaccaaatcaagagactccaacaccagataaaccaactccagaaccaggtactccaaaaactgaaactccagtgaatccagacccagaagttccgacttatgagacaggtaagagagaggaattgccaaacacaggtacagaagctaatgctaccttggctagtgctggtatcatgaccttgttagctggtctaggattaggatttttcaagaaaaaagaagatgaaaaataactaat

SEQ ID NO: 4227 - DNA, 529 bp, Streptococcus pneumoniae
  misc_feature (1)..(529): tiling:Spneumo1:WAN024FME; Cluster includes WAN023QKN cont ig_1310_6||||3520..4038|-|519 bp|Glimmer 2.02 orf predicti on|S.pneumoniae|670|WAN01UEAA|ORF|001
gtggttcccaaaacagcaacctctactgagacgaagactataacgcgtatcattcattacgttgataaagttacgaaccaaaatgtaaaagaagatgttgttcaacctgtaaccttaagccgtacaaaaactgagaacaaggtcacgggagttgtaacctacggtgaatggacaacaggaaactgggacgaggttgtatctggtaagattgacaagtacaaagatccagatattccaacagttgaatcacaagaagttacgtcagactctagtgataaagaaataacggtaaggtatgaccgtttatcaacaccagataaaccaactccagacccaggtactccaaaaactgaaactccagtgaatccagacccagaagttccgacttatgagacaggtaagagagaggaattgccaaacacaggtacagaagctaatgctaccttggctagtgctggtatcatgaccttgttagctrgtctaggattaggattcttcaagaaaaaagaagatgaaaaataatagattt

SEQ ID NO: 4228 - DNA, 768 bp, Streptococcus pneumoniae
  misc_feature (1)..(768): tiling:Spneumo1:WAN024GNF; Cluster includes WAN023ZC8 AL44 9924.1_97||||70805..71572|-|768 bp|Glimmer 2.02 orf predic tion|S.pneumoniae||AL449924.1|ORF|001
gtggttgagattatttattttctaatcattataatagctagtggattgggttctatatcaggcatgggtggtggaattataattaagccacttatggatagttttggrtaccattcggtcagtgatattgctttttattctagtttctctgtttttataatggcgattatttcaacaaycaaaagattttcacaaagtaaagagataaaatggagattgatttttacggtatccttttcttctgttttaggaggrtttctaggtcatcttatttttcaagttttgttatctcaattatcagtacggctagtatccattgttcaaatgattttactatttgtgatgctacttgtatcatttgttttaacagattttaaaaaaacttatcaatttgataagataggattctatatgatttgtggtcttctattgggcttratttctagttttttagggattggtggwggtccgctcaatgtatctttattgatggtgtttttttctatttcgataaaagaagcaacgatgtattctcttgcaattattttcttttcccagytgtctcatttggctacaattgttgtggttacaggtttaaatcagtatcatttagcacctgttccagttatttttcttgcttctatatgcggaggggtattggggacggttgtatcaaaagtcttacctgaaaattgggtaagatactgttttaaagggatgttattctttgtcatgggaatgactttatataatttatttcatattttg

SEQ ID NO: 4229 - DNA, 261 bp, Streptococcus pneumoniae
  misc_feature (1)..(261): tiling:Spneumo1:WAN024G35; Cluster includes WAN023LEL 3151 26_2004b||||1081003..1081263|+|261 bp|EGAD orf prediction| S.pneumoniae|R6|NC_003098.1|ORF|110
gtggttgaggagtttatctcgctcttgattgagagccaagtcttctccagcctgcaagtttgctgcctcaatctctgccatttgaaattccaacatttcgatacgtgccttgtgttcctgttggtttttcttgacttccagaacctgcttgcgcattttccgataggcatcaaaactcgtttgataggtttctttcaagtcccaaaaagcggcatcaccaaattcatccaacatctggatatgcagttggggacgcattaa

SEQ ID NO: 4230 - DNA, 1842 bp, Streptococcus pneumoniae
  misc_feature (1)..(1842): tiling:Spneumo1:WAN024F2M-5; Cluster includes WAN0243G4 sp r1776|rpoC|15903818|NP_359368.1|1744311..1747988|-|3678 bp |DNA-dependent RNA polymerase|S.pneumoniae|R6|NC_003098.1| ORF|551
gtggttgatgtaaatcgttttaaaagtatgcaaatcaccctagcttctccaagtaaagtccgttcatggtcttatggagaagtcaaaaaacctgaaacaatcaattaycgtaccttgaaaccagaacgtgaaggactctttgatgaagtgatctttggtcctacaaaagactgggaatgtgcttgtggtaagtacaaacgcattcgttacagaggaattgtttgtgaccgctgtggggttgaagtaacgcgtacgaaagttcgtcgtgagcgtatgggacatatcgaattgaaagctcctgtatctcacatctggtacttcaaggggattccaagccgtatgggcttgacccttgatatgagccctcgtgccctcgaggaagttatctactttgcggcttatgtggtgattgatcctaaggatacaccacttgagcacaagtctatcatgacagagcgcgaataccgagagcgcttgcgygaatatggttatggttcatttgttgcyaagatgggtgcggaagccatccaagaccttttgaagcaagtagatcttgaaaaagaaattgctgaactcaaagaagaattgaaaacwgctactggacaaaarcgtgtcaaagccatccgtcgtttggatgttttggatgccttttacaagtctggaaacaaacctgaatggatgattcttaacatccttccggttatcccaccagatcttcgtccaatgttgcagttggatggtggccgttttgcctcatctgacttgaatgacctttaccgccgtgttatcaaccgtaacaaccgtttggctcgtttgcttgagttaaatgcaccaggtatcatcgttcaaaatgagaagcgtatgcttcaagaagcagttgacgctttgattgacaatggtcgtcgtggtcgtccaatcacaggaccaggtagccgtccattgaaatcattgagccacatgcttaaaggtaaacaaggacgcttccgtcaaaacttgctcggtaaacgtgttgacttctcaggacgttcmgttatcgccgttggtccaactcttaagatgtaccaatgtggtgtgccrcgtgaaatggcgattgaactctttaaaccatttgtyatgcgtgaaatcgttgcccgtgatatcgtgcaaaacgtcaaagcagctaaacgcttggtggaacgcggagatgagcgtatctgggatatccttgaagaagtgattaaagaacacccagtgcttttgaaccgcgcaccgacccttcaccgtttgggtatccaagccttcgagccagtcttrattgatggtaaggctcttcgcttgcacccacttgtctgtgaagcctacaatgctgactttgacggggaccaaatggccatccacgtaccactttcagaagaagcacaagcagaagctcgtatcctcatgctagctgctgagcacatcttgaacccgaaagatgggaaaccggtagttactccatctcaggacatggttttgggtaactactacttgaccatggaagaagctggtcgcgaaggtgaaggaatggtcttcaaagaccgtgacgaagcggttatggcttaccgcaatggttatgttcacctccactcacgtgttggtatcgcaacagacagcctcaacaagccttggacagaagagcaaagacataaggtcttgcttacaacagttggtaaaattctcttcaacgatatcatgccagaggggctaccatacttgcaagaaccaaacaatgccaacttgacagaaggtgttccagctaaatacttcttgccacttggtggagmtatcaaggaagctatcagcaatcttgagctcaaccctcca

SEQ ID NO: 4231 - DNA, 246 bp, Streptococcus pneumoniae
  misc_feature (1)..(246): tiling:Spneumo1:WAN024FWJ; Cluster includes WAN023KVG 3138 53_2826||||1506093..1506338|+|246 bp|EGAD orf prediction|S .pneumoniae|R6|NC_003098.1|ORF|110
gtggttgggtttgaaagtgcaccaccaatccccaaaagtagacctgctgcaggaagtatagctataggtaacataaaagcttttccaactttttgtaaaactttaaacataaaactccccctcacatcttatttaagactagcaacgaagcgttctgtaatctcttttggtctagtaatggcgccaccaacaacgatgcctcgcactccatattcaaggatttgtttggcttgttctggtgtatga

SEQ ID NO: 4232 - DNA, 114 bp, Streptococcus pneumoniae
  misc_feature (1)..(114): tiling:Spneumo1:WAN024CMK; Cluster includes WAN02430C SP03 16||15900248|NP_344852.1|291699..291806|-|108 bp|hypotheti cal protein|S.pneumoniae|TIGR4|NC_003028.1|ORF|020
gtggtttatctcagagctataagcccaaatcatcagccagcgcctaaagacgctggctttcacgttgttcaagccttattgctcttgactcgtcacttgcctcttctaactaat

SEQ ID NO: 4233 - DNA, 228 bp, Streptococcus pneumoniae
  misc_feature (1)..(228): tiling:Spneumo1:WAN024GGG; Cluster includes WAN023LWH 3145 25_1041||||545196..545423|-|228 bp|EGAD orf prediction|S.p neumoniae|R6|NC_003098.1|ORF|110
gtggtttccttccgtttggtaatctactctttcttctgctacttgagrcaaggcttctccctgcgggttcaactttctttgcacagcctctgcaacgactctaggtaccccaacttcgacaatctcatccacactggcttccttgattttggtcaaagacttgaaatgcytcatragattytgcttgcgtttaggtcccagaccrtcaatcccatccaattgagatga

SEQ ID NO: 4234 - DNA, 228 bp, Streptococcus pneumoniae
  misc_feature (1)..(228): tiling:Spneumo1:WAN024FZO; Cluster includes WAN023LCO 3141 48_2084||||1123201..1123428|-|228 bp|EGAD orf prediction|S .pneumoniae|R6|NC_003098.1|ORF|110
gtggttttggaccatgtcacggagggcaccggattggtcatagtagccaccacgttcttctacacccaagcgctccgcaaaggtaatttgaacattgtcgataaaatccttgttccaaacgttttcaaaaatcaagtttgcaaagcgaactgcaaagatgctttggatcatttccttaccaagataatggtcgatacggaaaatttgttcttcgtcaaatgttgctag

SEQ ID NO: 4235 - DNA, 135 bp, Streptococcus pneumoniae
  misc_feature (1)..(135): tiling:Spneumo1:WAN024BDD; Cluster includes WAN023SDW NC_0 03028.1_790||||596643..596777|-|135 bp|Glimmer 2.02 orf pr ediction|S.pneumoniae|TIGR4|NC_003028.1|ORF|010
gtggttttggcggtaattagagatttttacctcccacaagtatgtttttcacatacccatccattatacactatttatctggaattgcaagagaaaagtttactttttgtactcaatgaaaatcaaagagcaaac

SEQ ID NO: 4236 - DNA, 492 bp, Streptococcus pneumoniae
  misc_feature (1)..(492): tiling:Spneumo1:WAN024DIP; Cluster includes WAN0244ID spr0 397||15902441|NP_357991.1|394175..394660|+|486 bp|Conserve d hypothetical protein|S.pneumoniae|R6|NC_003098.1|ORF|111
gtgraagaagagaaaaaagcgattgtcttaggtgcagataatgcttatatggataaagttgaaayaacaataaaatctctttgtgttcatcattataatcttaagttttatgtttttaatgatgaccttccgcgagaatggttccaattgatggaaaaaagactagagactttgaatagtgagattgtgaatgttcwraytrayagtagtattctgaaaggttatcgtctcccctttgagggactttcatatgcggctttttttaggtattttattccaaagtatgtaagcgagtctcgtgtactgtatttggattcagatattgttgtaagaaaatcgatagatgagctgtgggatttggacttgacggctatacccttagctgcagttagagatgatttttatacacataattttaattctggtgttctgttaatcaacratggcatgtggagagcagaaaatgtcacgcaagacctgattctaactaat

SEQ ID NO: 4237 - DNA, 243 bp, Streptococcus pneumoniae
  misc_feature (1)..(243): tiling:Spneumo1:WAN024DYW; Cluster includes WAN023KGX 3145 61_3488||||1869885..1870127|-|243 bp|EGAD orf prediction|S .pneumoniae|R6|NC_003098.1|ORF|110
gtgrgtaatgtcgtcactccartcgtagcccatctcttgcaagacagctttgagytgtttaaagtgggcagattgytcttgaccaacgacrtagatagatttagcaaattggtattcrtttttacggtagagggctgcagccaagtcacgtgtgatatagagagttgcaccatcagacttcttgatgagggctggatgttcaattccatatttctcaagattcacaacttgggcaccttctga

SEQ ID NO: 4238 - DNA, 228 bp, Streptococcus pneumoniae
  misc_feature (1)..(228): tiling:Spneumo1:WAN024B5V; Cluster includes WAN023M5K 3154 29_572||||296796..297023|-|228 bp|EGAD orf prediction|S.pn eumoniae|R6|NC_003098.1|ORF|110
gtgsgacaagatataatcacgacattgrtttccatcgactctttcaaaaaattgtcttctttcttctttcattatctattaccagaaaaagaactacttaaaaagcagttcttttgtctttcccattacactttccttttctacatrgatgaccacaccttttgcaatctgcaaggagaccaagtcatcttggatagaaatgatttttccatgaattccagacaataa

SEQ ID NO: 4239 - DNA, 223 bp, Streptococcus pneumoniae
  misc_feature (1)..(223): tiling:Spneumo1:WAN0249NZ; Cluster includes WAN024E8T R6.I G_1670.2||||1596566..1596788|+|223 bp|Between spr1621 (scr R) (- strand) and spr1622 (- strand)|S.pneumoniae|R6|NC_00 3098.1|IG|110
gtgtaaacatctacataaaacaggaaaagccttggtttcatggcttttttcrtatcttctayaaaaaaagcaagagttttagakggctataaatctagatgtacattttkcttaaatgattgaaggtcttttcttaacaaaaacacccymaaaattagactttttctgtctaacttttgaggtacagttcaaacgcgaaatagcgtttttttgttatttttgg

SEQ ID NO: 4240 - DNA, 76 bp, Streptococcus pneumoniae
  misc_feature (1)..(76): tiling:Spneumo1:WAN024A9S; Cluster includes WAN024E3U-rc R 6.IG_2192.1.2.2||||1977782..1977853|-|72 bp|Between H (tra nsposase) (- strand) and spr1986 (+ strand)|S.pneumoniae|R 6|NC_003098.1|IG-rc|120
gtgtaaatcacgagagtaattgaattcggactaaggtttgtgtgaaaaagataaatctttctagagtctaaagact

SEQ ID NO: 4241 - DNA, 710 bp, Streptococcus pneumoniae
  misc_feature (1)..(710): tiling:Spneumo1:WAN024DA8; Cluster includes WAN0243YL spr1 110|dfp C-terminus|15903153|NP_358703.1|1111752..1112456|+ |705 bp|Similar to C-terminal region of the Dfp protein|S. pneumoniae|R6|NC_003098.1|ORF|111
gtgtacaatagtgctatgaaaattttagttacatcgggcggtaccagtgaagctatcgatagcgtccgctctatcactaaccattctacaggtcacttggggaaaattatcacagagactttgctttctgcagggyatgaagtttgtttaattacgacaaaacgagctctgaagccagagcctcatcctaacctaagtattcgagaarttaccaataccaaggaccttctaatagaaatgcaagaacgtgttcaggattatcaggtcttgatccactcaatggctgtttctgactacactcctgtttatatgacagggcttgaggaagttcaggctagctccaatctaaaagaatttttaagcaagcaraatcatcaggccaagatttcttcaactgatgaggttcaggttttgttccttaaaaagacacccaaaatcatatccctagtcaaggaatggaatccyactattcatctgattggtttcaaactgctgrttgatgttaccgaagatcatctggttgacattgcacgaaaaagtcttatcaagaatcaagcagatttaatcatcgcgaatgacctgactcaaatttcagcagrtcagcaccgagctatatttgttgagaaaaatcagcttcaaacagtccagactaaagaagaaattgcagaactcctccttgaaaaaattcaagcctatcattcttarctaat

SEQ ID NO: 4242 - DNA, 327 bp, Streptococcus pneumoniae
  misc_feature (1)..(327): tiling:Spneumo1:WAN024G4O; Cluster includes WAN023LGJ 3148 62_1927b||||1042451..1042777|+|327 bp|EGAD orf prediction| S.pneumoniae|R6|NC_003098.1|ORF|110
gtgtacaccaaggatttctccgtatttcttatcagcgataacttttacgaaaccttgagctgcgtcagatgcaatagcacgaccgttagcagcaaagttaaacttaccgatggcaacatcgtatttctcacgggcttgttcttctgtcaaacctactgctgctacttcagggagagtgtagatggctgcaggagtcaaattcaatttggcaactgcatgatttcctttaagggcattttcagcggaaacttcacccatgcggaaagctgcgtgagccaacatcttagtaccgttgatgtcacctggtgcataaatgcctggaactga

SEQ ID NO: 4243 - DNA, 231 bp, Streptococcus pneumoniae
  misc_feature (1)..(231): tiling:Spneumo1:WAN024F43; Cluster includes WAN023KMN 3138 94_3241||||1729608..1729838|+|231 bp|EGAD orf prediction|S .pneumoniae|R6|NC_003098.1|ORF|110
gtgtacatactcttattataccaaaaacttttcttttgtgtctattttcctactaaacttatcatcataacatccataaaaaacaggctttctctaaaagaaaatgagcgtaacaatgaccaatacaagatctcggaaaatatgaccataaaaggaaacttccttcttaaccgaatttgggacaagataggctgcaaaaaacaagcccagtccaatataaatcagaagtga

SEQ ID NO: 4244 - DNA, 225 bp, Streptococcus pneumoniae
  misc_feature (1)..(225): tiling:Spneumo1:WAN024G4C; Cluster includes WAN023LFZ 3139 91_1943||||1050558..1050782|+|225 bp|EGAD orf prediction|S .pneumoniae|R6|NC_003098.1|ORF|110
gtgtaccagtctaaatctggtgtaaattcaggaaaagtgatgacaccttttagaactggcttggctttgagccctgtttcttcaaggatttcacgyrccgcgcattcctggggcgtctctcctctctctagcttaccacccacaccaatccatttcccttcatggacatcattgggtttcttattacgatggagcatgagcagttctttcccattatcaatgtar

SEQ ID NO: 4245 - DNA, 75 bp, Streptococcus pneumoniae
  misc_feature (1)..(75): tiling:Spneumo1:WAN024EVC; Cluster includes WAN023SI9 NC_0 03098.1_2078||||1611098..1611187|-|90 bp|Glimmer 2.02 orf prediction|S.pneumoniae|R6|NC_003098.1|ORF|110
gtgtaccgagatgaacatctcttcatcaatgtctctggtcgtggaggcaaggacctagctgcgattgcagactac

SEQ ID NO: 4246 - DNA, 501 bp, Streptococcus pneumoniae
  misc_feature (1)..(501): tiling:Spneumo1:WAN024F82; Cluster includes WAN0243JM spr1 650||15903692|NP_359242.1|1622231..1622725|-|495 bp|Hypoth etical protein|S.pneumoniae|R6|NC_003098.1|ORF|221
gtgtactattctagtttcaatatactatattatcgcttaccaacatttgcttttatatttgctaaactttcagaaaaaaagttggagtatatgatgctaggtgactgcgtcatgttagtaaacgaaatggaaataackgatcatagagtagataacttatttgaaaaagggaaaaatgagataaaagatycaattggtacaaatagtgttttaaataaaaaaattattttacaaaaaatcagaaaattatctaatcaaccgagtgggtactggataggttcgttggatgagagatttttagaccatgctattattaatcaaatagatgttactagtgaacaaattgttttaatgagcgatggcttttatgaattctatcaaaataatcaaaataaaacttttgaagagttaattaagatgagatttaattcttctgctattgatccaatctatggaaagaargatgatgcaagtattstagtyattgatgttykaactaat

SEQ ID NO: 4247 - DNA, 294 bp, Streptococcus pneumoniae
  misc_feature (1)..(294): tiling:Spneumo1:WAN024GII; Cluster includes WAN023LYM 3143 48_932a||||488176..488469|-|294 bp|EGAD orf prediction|S.p neumoniae|R6|NC_003098.1|ORF|110
gtgtactgcagcataggtgatgtggacaaacttrcctcgcgactcagacttgaaccacatttcatacttgtcyttgstyccctcacgaagycccttcatgatagyyttgaccttgtccaartacttaggcggatgrcagagttcgacattgcgcccgacttgggacggcgtycgtttgaaaatcatctcatcagctggcgtattgtcattgtaatactggaaaatatcttctttattgacaaaggtaatctccatagggagatgattgaggatgagattggcctgctcgactga

SEQ ID NO: 4248 - DNA, 318 bp, Streptococcus pneumoniae
  misc_feature (1)..(318): tiling:Spneumo1:WAN024BFZ; Cluster includes WAN0244JJ spr0 355|IS861-truncation|15902399|NP_357949.1|353339..353614|- |276 bp|Degenerate transposase (orf1)|S.pneumoniae|R6|NC_0 03098.1|ORF|744
gtgtasvtgaactrcmccccaaaagttagacagaaaaaatctaacttttggrgtgtttttattatgaaaytaasttatgatgataaagtycagwtctatgaacttagaaaacaaggatatakcttagagaagctttcaaataaatttgrgataaryaattctaatmttagrtayatgattaaattgattgatcrttamggaatagagttcrkcaaaaaaggraaaaatcgttactattctcctgatttaaaacaagaaatgakthatmmmrwmtsattcatacctctctcaactagatgtaacttacaaaacccctga

SEQ ID NO: 4249 - DNA, 299 bp, Streptococcus pneumoniae
  misc_feature (1)..(299): tiling:Spneumo1:WAN024FEF; Cluster includes WAN0243LE spr1 586||15903628|NP_359178.1|1566708..1567001|-|294 bp|Conser ved hypothetical protein|S.pneumoniae|R6|NC_003098.1|ORF|2 20
gtgtataatagtggaaaagagctaaaacgaggtatggttatggaagcagtcctttactcaacattccgaaatcatttaaaggactacatgaagaaggtaaatgatgaatttgagcctttgacggtggtcaataaaaatccagatgaggacattgtagtyctttcaaagagygartgggayagtatycargaaaccctgagaatygcycaaaataaggarytwtcwgayaaggttttrcgaggaatggctcaagtycgtgctggaagyactcaggtccatgtkattgaggagtractaat

SEQ ID NO: 4250 - DNA, 1622 bp, Streptococcus pneumoniae
  misc_feature (1)..(1622): tiling:Spneumo1:WAN024B6D; Cluster includes WAN0244PL spr0 137|ABC-NP|15902181|NP_357731.1|144765..146381|+|1617 bp|B C transporter ATP-binding/membrane spanning permease - pos sible multidrug re...|S.pneumoniae|R6|NC_003098.1|ORF|111
gtgtatactattataaaatcaaatataaaaaaatttagtttattaacgatatttattgttgctggtcaattattgctaatttatgcagcaactattaatgctctggtgttgaatgaattaattgcgatgaatttagagcggtttttgaaattgtcaatctaccaaatgattgtctggtgtgggataatattccttgactgggtagtgaaaaattatcaggttgaagtgatccaagagtttaatctagagattcgaaatagagttgccacagacatctctaactctacctatcaagaatttcatagtaaatcatcaggaacatatctttcgtggctaaataatgaygttcagactttaaatgatcaggcktttaaacaactttttttagtaataaaaggaatttctggtactatatttgcagttgtgactcttaatcactatcattggtcattgactgtagccaccttgttttcattaatgattatgctacttgtaccaaaaatctttgcatcgaaaatgcgagaagttagtctaaatttaactaaccaaaatgaagcttttttaaaatctagtgagactatattgaatggatttgatgtgttagcrtccttgaatcttttatatgtattgcctaagaaaattaaagaagcaggaattttattaaagatggttatacaaagaaagacaactgtagaaacgttagcaggcgctattagcttctttctcaatattttttttcagatatctctcgtttttttaacaggctatcttgcaataaaaggaatagtgaaaattggtactattgaagcaataggagcactaacaggtgttatttttacagcgctaggtgaattaggaggtcaattatcctctattattggtacgaagcctatttttttaaaattgtattcaattaatccaattgagtcaaataaaatgaatgatatcgaaccaaawgaggtgaatagagattttccgttatatgaagcaaaaaatatttgctataagtatggagataaagaaatattaaaaaacttaaatttttgttttcaacgtaatgaaaagtatttaattttaggtgaaagtggaagcgggaaatctacattattaaaattattgaatggctttttgagagattatagtggagaattgcgattctgcggggatgatataaaaaaaacctcctatttaaatatggtttcgaatgttctatatgtagatcaaaaagcttatttgtttgaaggtacgattagagataatattttattggaagaaaattatactgatgaagaaatactacagtctttagagcaagttggtttgagtgtaaaagattttcctaataacattttagattattatgttggtgatgatgggagattactgtcaggagggcagaaacaaaaaattactttagctagaggsctaattagaaataagaaaatagtattaattgacgagggaacttctgctatcgataggagaacttcgttagcgattgaacgtaagatattagatagagaggatttgactgtcattattgttacccatgctccgcatccggaacttaaacaatattttactaagatatatcaatttccaaaggattttatttaactaat

SEQ ID NO: 4251 - DNA, 1020 bp, Streptococcus pneumoniae
  misc_feature (1)..(1020): tiling:Spneumo1:WAN024CLD; Cluster includes WAN023S6H cont ig_482_1||||63..338|+|276 bp|Glimmer 2.02 orf prediction|S .pneumoniae|670|WAN01UCYQ|ORF|000
gtgtatctcgtaaatgctgaagtcggagaatatttagatgttcttgcgccccagctggaagacggaagtttggcaacaagctcaaaagaagctcctgaagatatagaaggtcagatttcaacagtagaatcgacctttaaacaacgagccaactcgctcgacgctggtgtgagaagyttgactgaagggcttagaaccaaagtggatatcagckcactcaaygtgactgctgaaaatatccggcaatctgtgaagagkcttgagacagayacgcagaacaagctaaatcagaagttgagtcaggctgaatttgaggtgcgagcyggctctatccgtcaggaaatcctgaatgcaaccaaggataaagccagcaagtcagaactcacgcagacagctgaggagctskctagtmrgatwgcgagtgtrcaggcatccggwsgaaatswaytcttgaaytcactattcaagcaggatatttcaaaaacaggaatttggacaacgagtacatatacggctactatcgatagcgaaagtaagtatcttggacacamsgctcttaaaatyataggtctgaatccatctggycgtgatggaggtaatcccaaggttacttatccagctctgggtcaattcgggaaagtaattcccggaagtacgactaatcaagatgtaaccattagtttttatgctaaggcaaataaaaatggaataatgctaagatctcgattagggaatatcggatataaaactggaaatgtgacattgtcgacagaaattaarcgatatgttgtccatattccaaaaggttggacaaacgaatccaagcrgaccacaaatgaatggttgttcaatttcaaccaggaaggaaccgtttggatttggatrccgaagtttgaaataagcgatgtagatacttcttattcagaagctcctgaagatatagaaggtcagatttcaacagttgaatccaactttaaacagcgtgctgattcactcgaagctggtgtaagccgtctgact

SEQ ID NO: 4252 - DNA, 220 bp, Streptococcus pneumoniae
  misc_feature (1)..(220): tiling:Spneumo1:WAN024DTL; Cluster includes WAN0244SN-5 sp r0027||15902071|NP_357621.1|27706..28365|+|660 bp|Hypothet ical protein|S.pneumoniae|R6|NC_003098.1|ORF|121
gtgtatgaagaaaagcartattttatttatttttattttattgctatgtattggtttacagtatgaaaccatctactatacggacggttcgaggtcaggtgcggaatatggactaatgggagtttctatctttctagctctcttttacatgattccggctctttattttctcttccgtattgggaaaaatgggaattgccaaagaaggtttykaactaat

SEQ ID NO: 4253 - DNA, 1949 bp, Streptococcus pneumoniae
  misc_feature (1)..(1949): tiling:Spneumo1:WAN024GB6; Cluster includes WAN02448E spr0 756|parE|15902800|NP_358350.1|749887..751830|+|1944 bp|Top oisomerase IV subunit B|S.pneumoniae|R6|NC_003098.1|ORF|11 1
gtgtcaaaaaaggaaatcaatattaacaattataatgatgatgcyattcaggtgctagaagggttggatgcggtycgaaaacgtccrgggatgtatatyggatcgacygatggygctggtctycaycacytagtytgggaaatcgtygataatgcwgtcgatgaagccttgtctggrtttggtgaycgtattgatgtracyatcaataaagayggyagtytaacggttcaagaccatggwcgtgggatgccgacrggtatgcacgctatgggaatyccaackgttgargtwatctttaccattctycaygccggagggaaattyggtcaaggtggytataagacatcmggtggacttcacggrgtgggttcttcygttgttaackyycwttctarytggytrgargttgaaatyacccgtgatggygcartytacaagcaacgtttygaaaatggtggmaaacctgtcaygacyttgaagaaartyggtacagcacymaagtctaaracaggyaccaargttacyttyatgccwgaygcsrstatmttttctacgacagatttcaagtacaataccatttcagarcgyctyaatgartcagcctttctcttgaaaaatgtgaccttgtcyttracggacaagcgaacaratgarkckrttgagttycactatgaraatggrgtacargaytttgtttcttatytmaacgaagayaaggaaaycttgacgccwgtyctytactttgaaggkgargayaatggttttcaagtrgaagtagcyctycagtacaatgayggattytcagataacatyytrtcytttgtcaataacgttcgyaccaaggacggkggaacgcaygagacaggaytcaartctgcyatyacyaaggtcatgaatgactatgcrcgtaaracaggtcttctcaaggaaaaagataaaaaccttgaaggktcagactatcgtgagggrctagcggycgttctttctatcttagttcctgaagaacayytscagtttgaaggacagaccaaggayaaactaggaagyccmctagctcgcccrgttgtggatggmatwgtggckgataagttgaccttyttcctyatggaaaatggggaattagcttctaacctyatccgcaaggctatcaaggcccgtgatgctcgtgaagcagcacgtaaggcgcgtgatgagagccgaaatgggaagaaaaayaagaaagayaagggcttgytgtctgggaaattgaccccagcccartctaagaatccwgctaagaatgaactctatctagttgagggrgaytctgccggwggttctgccaaacaaggycgtgaycgcaagttccaggctattctacctcttcgtggtaaggttrtcaatacagcyaargccaagatggcggatatyctcaaaaatgargaratyaayacyatgatttataccattggtgckggtgtkggrgcwgacttctctattgaagatgccaactatgayaagatcattatcatgaccgatgcggatacmgayggtgcccayatccagaccttgctcttgacatttttctaccgttacatgcgtccgytagtygaggyaggycatgtctatattgccctcccacctctttayaagatgtccaaaggtaaaggmaagaaagaagargtggcctacgcttggacggacggagaactagaagaactcckbaaacagttyggtaaaggmgctaccctccaacgatayaaaggwcttggtgagatgaatgcggaccagctctgggaaacaaccatgaacccagaaacwcgtaccctyatccgtgtcacmaytramgayytrgckcgcgccgaacgccgygtcaatgttctcatgggagayaaggtmgaaccacgccgtaartggattgargayaatgtcaagtttacgctagaagaarcgacagtgttttaactaat

SEQ ID NO: 4254 - DNA, 1673 bp, Streptococcus pneumoniae
  misc_feature (1)..(1673): tiling:Spneumo1:WAN024GN2; Cluster includes WAN0244IA spr0 400||15902444|NP_357994.1|395489..397156|+|1668 bp|Conserv ed hypothetical protein|S.pneumoniae|R6|NC_003098.1|ORF|11 1
gtgtcaaaaattactactagcttatttcaagaaatggtgcaggctgcatcaactcgcttgaataagcaagctgaatatgtcaattcattaaacgtctttccagttccagatggagatactgggacaaatatgggaatgaccattgaaaatggtgctaaagaagttgcagacaagccagcttctacagttggagaagtagcgagcattcttgccaaagggcttttgatgggtgcgcgtgggaactcaggagtgattacrtctcagcttttccgtggattttcccaagctatcaaggataaagacgagttaacaggtcaagacttggctctggccttccaatcaggtgtggaagttgcctataaggcagtgatgaaacctgttgaaggaacgattttracagtttctcgtggagctgctatcggtgctaagaaaaaagctgagcaaacagatgayrctgttgaagtcatgcgcgcagccttggaaggtgctaaaacagctctagctaaaacaccagacatgcttccagtattgaaagaagttggcgttgtggactcaggtggtcaaggattggtcttcatctacgaaggtttcctttcagcccttactggcgaatatattgcatctgaggactttgtagcgactcctgcyaacatgagtgagatgatcaatgtagagcatcataagtctgtagctggtcacgtagcgactgaggacatcacgtttggttactgtactgaaatcatggtagctcttaagcaaggtccaacytatgctaaagattttgactacgatgaattccgtaactacttggatgagcttggrgattctctcctygttgttaacgatgatgaaattgtcaaagtccatgttcatacagaagatccaggacttgttatgcaagaaggtctcaaatatggtagcttggtcaaggtaaaagttgacaatatgcgtaaycaacacgaagcacaggttgagaaagaagctactcaagttatcaagtcggctgaagaaaaagagtatgctttgattgctgtggtggctggtaaaggtctagcagatatcttctgttctcaaggcgtggattatgttatcgaaggcggtcaaaccatgaacccttcaacagaagactttatcaaggctgttgaacaggtyaatgcccgtaacatcatcttcttgccaaacaacaagaacatyttcatggcagctcaatctgcggcagaagttttggagcaaccagcrgtagtggtagaggctcgcactcttcctcaaggtatgacaagtcttcttgcctttgatccaagcaagtccattgaagaaaaycaagagcgtatgacagctgctcttagmgatgtygttagcggaagcgtcacaacagccgtgcgtgatacaacgatcgatggcttagaaatccatgaaaacgataatytaggtatggtggatggaaaaattcttgtgtcaaaccctgatatgcaccaaacattgactgaaaccttgaaacatatgttggatgaagacagtgaaatcgtaaccttctatgtmggtgaagacggaagcgaagaacttgccaatgaaatcgctcaagaaatcgtagaagaattcgaagacgttgaagtcgagattcaccaaggtcaacaacctgtttacccatacctatttagtgtggaataactaat

SEQ ID NO: 4255 - DNA, 1557 bp, Streptococcus pneumoniae
  misc_feature (1)..(1557): tiling:Spneumo1:WAN024DV3; Cluster includes WAN0243AF spr1 982|dltA|15904023|NP_359573.1|1972466..1973932|-|1467 bp|D -alanine-D-alanyl carrier protein ligase|S.pneumoniae|R6|N C_003098.1|ORF|321
gtgtcaaataaaccaatagcagatatgattgaaaccattgagcattttgctcagacacagcctagctatcctgtctataatgttttggggcaggaacacacttatggcgatttaaaggctgattcggatagtttggctgcagtcattgaccaactaggcttgcctgagaagtctcctgtggttgtttttggtggccaagaatatgaaatgttggcaacctttgtagcgctgactaagtcaggtcatgcctacattccaattgatagccattcggccttggagcgagtttcagctattttagaagtagcagagccaagcttgattattgccatttcagcctttcccttggagcaggtttctacaccaatgataaatctagctcaggttcaagaagcctttgcccaagggaayaactatgaaatcacgcatccagtcaagggagatgataattactacattatctttacttctggtacgactggtaagcctaagggagtgcagatttcacatgataatctcctcagctttacaaactggatgattacggataaggaatttgcgacaccgagtcgtccgcaaatgctggcacagccaccttattcttttgacttgtctgtcatgtattgggcaccgaccttggcacttggtggtacgcttttcactcttccttcagtcatcactcaggactttaagcaactctttgcggctatcttttcattgccaatcgctatctggacatcaacaccatcctttgcagatatggccatgttgtctgaatacttcaacagtgagaaaatgyctggaatcacgcatttctactttgatggtgaagaattgacggtcaaaacagctcaaaaactgcgcgagcgtttcccaaatgcccgtatcatcaatgcttacggcccaacagaagcgacagtagctctgtcagcagttgccgtgacagacgagatgttagcgactctcaaacgcytaccaatcggctataccaaggctgattctccaacctttatcattgacgaggaaggaaataaactgccaaatggygarcagggagaaatcattgtttctgggccagctgtttcaaaaggttatatgaamaatcctgaaaaaacagcagaagccttctttgagtttgaarrtctgccagcctatcacacaggcgatgtgggaaccatgacagatgagggcttgcttctctacggcggacgcatggacttccagattaagtttaacggttaccgcattgagttagaagatgtctctcaaaacctcaacaagtctcgctttatcgaatctgctgtcgcagtaccgcgctataacaaggaccacaaggtacaaaatctattggcttatgtcatcttaaaagacggtgttcgtgagcagtttgagcgagatatcgatattaccaaggccatcaaggaagacctgacagacatcatgatgtcctayatgatgccatctaaattcctttaccgagacagtttgccactaactccaaatggaaagattgacatcaaaggattgattaacgaggtgaataagagaykaactaat

SEQ ID NO: 4256 - DNA, 286 bp, Streptococcus pneumoniae
  misc_feature (1)..(286): tiling:Spneumo1:WAN024EW8; Cluster includes WAN023KKT 3139 03_3318||||1776741..1777004|+|264 bp|EGAD orf prediction|S .pneumoniae|R6|NC_003098.1|ORF|110
gtgtcacacccatctcagcagccaaggcaatttcttctgcctcacgacctgcaaattcttctacattcaagtgtgtatgtgtatcaaaaatcatctcttctaacctcgttttctatccttctattataccaaaaaagaggaggggcacctaatttttcggtttcccctcctctcttcaatagagagctattctgctatcttttctatccgatattgcccatctcctattccacagttagagacagaagagattggctacattgatagaatattcctattcagctaa

SEQ ID NO: 4257 - DNA, 518 bp, Streptococcus pneumoniae
  misc_feature (1)..(518): tiling:Spneumo1:WAN024CUG; Cluster includes WAN02448X spr0 737||15902781|NP_358331.1|735335..735847|+|513 bp|Conserve d hypothetical protein, truncation|S.pneumoniae|R6|NC_0030 98.1|ORF|111
gtgtcagcacaaattacgattaaccataaaaaagcgcgctatgttcggattgagctagaaggctataatgccctcagtcttgcagaagttgaagttttcygctttatagctacgaatgstgaaacggcgayacaagtttctaagycagttcaaccaatcagtcagactcctgtgaargataaaacattgayaattcaacacagtggagcttacattgcccgctactccataacttgggaagaagttmcagtagataaagatggaaaccaagttgttcgtagtcattcttgggaaggaarcggtcgcaaccagactgcaggttttgtcctcaacctcccaatcaaagaaaatatgagaaatctgcgagttaagattgagaaaaagacrggyctactatggaatagatggcaaacaatctatgaaaacagaccaattttagctcaaccycaccgtaaaattacccattggggtacgayattgaattccaaggtgagtgacgatgatgtcttgtaactaat

SEQ ID NO: 4258 - DNA, 1130 bp, Streptococcus pneumoniae
  misc_feature (1)..(1130): tiling:Spneumo1:WAN024EXJ; Cluster includes WAN0243MN spr1 540|alr|15903583|NP_359133.1|1522746..1523870|-|1125 bp|Al anine racemase|S.pneumoniae|R6|NC_003098.1|ORF|211
gtgtcattttggaggaaaatcatgaaagctagtccacatagaccaaccaaggctctgattcatctgggagctattcgacaaaatattcagcaaatgggggctcatatccctcaaggaacgctcaagttggctgtggtyaaggccaatgcttatggtcatggagctgttgccgttgccaaggcaattcaagatgatgttgatggcttttgcgtttccaatatcgatgaagccattgaactcagacaagctggactcagcaagccaatcctcattttaggagtttctgaaatcgaagctgttgctctagctaaagaatatgacttcaccttgacagtggctggactggagtggattcaagcactcttagataaggaagtggacctaactggattgacagtccacctcaagattgattcagggatgggacggattggttttagagaggcaagtgaggttgagcaggctcaagatttgctccaacaacacggtgtttgtgttgaaggaatctttacccactttgctactgctgatgaggaatcagatgactattttaatgcccagttagaacggtttaaaactattttagctagtatgaaggaagttccagagctggttcatgctagcaattctgcaacgactctttggcatgtagagactattttcaatgcggttcgtatgggagatgccatgtatggyctcaatccaagtggagcggtcttggatttgccttatgatttgataccggccttgaccttggagtctgctctggttcatgtcaagacagttccagctggagcttgcatgggctatggagcaacttatcaagcggatagcgagcaagtcatcgcgaccgtgccaatcgggtatgcagatggatggacaagagacatgcaaaatttctctgtcttggtagatggccaagcttgcccaattgtcggcagggtttcgatggaccaaatcactattcgattgcctaagcyttayccrctmggaaccaaggtaaccttgattggctccaatggggataaggaaatcactgcaactcaggtagcgacctaccgcgtaaccattaactatgaggwggtttgcctcctcagcgaccgtattccgagagaatattattarctaat

SEQ ID NO: 4259 - DNA, 258 bp, Streptococcus pneumoniae
  misc_feature (1)..(258): tiling:Spneumo1:WAN024F38; Cluster includes WAN023KML 3144 66_3248a||||1735942..1736199|-|258 bp|EGAD orf prediction| S.pneumoniae|R6|NC_003098.1|ORF|110
gtgtccacagatacgttttgtaaatatacaggagaagagataattataatatcagactctaataactctttttttataacacctccatcatcagcattactttgcctatcaattcctttcttaaacaactcttctgaatcagaattagatatttctagctctgaattgaaaggtgtcctgaaagatatatcaacattatttctactagaaatgatacttgaaagtctcttagtatactctaaagtcttagagttatga

SEQ ID NO: 4260 - DNA, 237 bp, Streptococcus pneumoniae
  misc_feature (1)..(237): tiling:Spneumo1:WAN024FB6; Cluster includes WAN023KOP 3147 85_3133||||1666865..1667101|+|237 bp|EGAD orf prediction|S .pneumoniae|R6|NC_003098.1|ORF|110
gtgtcccacgtgacaggtgaatgctggctgctagcatggtggctccttccttgcggaagttttgaatatcgacaaaacggttcaaggcacgtggttgatcgtgattrttccaaaagagggcactccaaccgtctttatcactcatttccttaccccaactatggtaaagactcttcaactcttcaaaatcaaagggagccaaggtccacttttgtccatccttatagtccaccttga

SEQ ID NO: 4261 - DNA, 599 bp, Streptococcus pneumoniae
  misc_feature (1)..(599): tiling:Spneumo1:WAN024GDZ; Cluster includes WAN0244BV spr0 631||15902675|NP_358225.1|639551..640144|+|594 bp|Conserve d hypothetical protein|S.pneumoniae|R6|NC_003098.1|ORF|111
gtgtcccacttttctttaaaaaaggagttttttatgttgaaaaaatggcagttaaaagatgttatcttgcttgctttcttgtctatcttttttggtggggttttcgttggttcaggatatgtgtataatattytcagtctactcttaacacctcttggtttgcaggcctttgccaatgaaatcctcttcggtctctggtgtatggctgcgcccattgctgccatctttgttccgagagtcggaagtgcaacgattggagaagtgctagctgcgcttgctgaagtcctttatggtagccaatttggtctaggagctcttttgtctggcttdgttcaaggtttgggaagtgaatttggttttatcgtaactaagaatcgctatgaaagttggctctctctaactgctaatagtattgggattacgcttgttagctttgtctatgaatacattaagttaggttactacgccttttcccttccgtttgtcctttccttrcttgtggtacgttttatttctgtttatttcttctgtaccatcttggttcgtgccattgtcaaactctatcatcagtttgcaactggaggaaaagcatarctaat

SEQ ID NO: 4262 - DNA, 318 bp, Streptococcus pneumoniae
  misc_feature (1)..(318): tiling:Spneumo1:WAN024CYR; Cluster includes WAN023KP0 3154 95_3116b||||1660346..1660630|+|285 bp|EGAD orf prediction| S.pneumoniae|R6|NC_003098.1|ORF|220
gtgtccgaaacgagtccgagacaacttatctacttggagaccaacagcttcaaacatctttttaacctgatggttacgcccttcatggatggtcaactgcaccacagagcgatttttgactgggtccactttgagaatttcataaacagctggcttggttttcttaccatcaatctcaagaccacgggtcaaggggcgragattgtccttattggccacacctttaacacgcgcgacataaaccttgtcaatctcattacgagggtgaatcatctcgtctgtaaagtccccatcattggtcaaaatcaagacwcctga

SEQ ID NO: 4263 - DNA, 267 bp, Streptococcus pneumoniae
  misc_feature (1)..(267): tiling:Spneumo1:WAN024FZY; Cluster includes WAN023LD2 3148 79_2073||||1117721..1117948|+|228 bp|EGAD orf prediction|S .pneumoniae|R6|NC_003098.1|ORF|120
gtgtcgctgggaaaatcgctaaatgatccacttctcccaayacctgacctgtcagagcctcaacytcacgratacggtcaatttcgtctccaaaaaattctactcgaaaggcatgttcatctcgggaagctgggaaaatctctaccacatccccacgaacgcgaaatcttccgcgttggaaatcaatatcattacgttcaaactgaatatcgaccaagtcattcaagagtttatcacgagaaatctctagaccaggacggagactaa

SEQ ID NO: 4264 - DNA, 309 bp, Streptococcus pneumoniae
  misc_feature (1)..(309): tiling:Spneumo1:WAN024G8M; Cluster includes WAN023LLS 3150 27_1623b||||861977..862285|+|309 bp|EGAD orf prediction|S. pneumoniae|R6|NC_003098.1|ORF|110
gtgtcggtttttctgaagttcattttcaacacgacgaatcagttcactggcctgytgtttgacgcggtcgcgctcagccttatycttatagtaggtgtccaacaaatcagaaagatttgcaaaaggctctcccrcctgatttgcaaaaggaactggactgaaggaagtctcagtcaagcatggcttggtttcttgattgaaaaaatttcggaaagcggaaagtttttcactaaccagtatcctttccaattcatttgccgtatcgcgtcccagaccttgaaagaggctttgaagattttttgctgttag

SEQ ID NO: 4265 - DNA, 1470 bp, Streptococcus pneumoniae
  misc_feature (1)..(1470): tiling:Spneumo1:WAN024ERH; Cluster includes WAN023IUE 8558 6_2503a||||1414270..1415712|-|1443 bp|EGAD orf prediction| S.pneumoniae|TIGR4|WAN01UC25|ORF|010
gtgtctagaaaacaagaacaaatggaaacgttgttgctccttttgcgagatagtaaggattatatatctgctaaagtattgggagaaaaattaaattgctctgataaaacggtttatcgccttgtcaagggaatcaacaaagattgtccggtagaagcattcattttatctgaaaaaggcagaggtttcaaattaaatccaagaagttccctcgtggacgttgatgggaattttacagaggcttttgatcctgaagtaaggcgtgaaaaattactagaacgtctcttgttgactgctcctaagccacattctatttatgatttaggagaggaattctacgtaagcgagtcagtagtactaaaagatcgtcagatattacaagagagtctagcaatttatgggttagatttaaaaatgagacaacgaaagctttttattgatggggatgaggctcaaattcgttcagccattctaaatctactgccaatgtttaatcagttggatttagagcaaattacacagaataaggttcagcctcttgacggagaacttgctcacttttgtttgggattactgattacacttgagagagaattgggggtaaacattccctatccatataatataaatattttctctcacctgtatatttttatcagtaggaatcgtcgtagtactagtattcatgttgtagcaccttcaaaacctactattgttgatgagaaaatttacagtgtctgtcaaaaaattattcaagaaattgaacaatattttaggatgaaggttgatgcagttgagattgactatctttatcaatacgttgtatcttcgagattgcaaaaaccattttcttccgggaagcttcctttttctcagcgagttttagatgtcactcattactattttagccgtatgtgtatggacaatagagagattgaaacgacagatcctgactttgttgacttggcgagtcatatcagtcccttactgaggagattagataatagagtacagattaagaatagtcttttatcacaaattcttttaacctatcctaatctggttaaagagttaacaactatttctaaagaagtgagtctagtatttggttttgcttccttgagtctggacgagattggttttctagtcttatattttgcacggtttcaagaaaagcgagcacgtcctctaaaaacagtagtgatgtgtacatcaggtgtcggaacttcagagcttttacgagcacgattagaaaagcaattttctgaattggatattattgatgtagttgcttatcatcaattagatgagctgataaatctatatccagatttagatttcattgtgacgacggtagctttgcaggaaccagcaagtgtcccgtttgtcctagttagtgtttttctaaccgagggtgataaacaacgtcttcaagcaaaaattcaggagataaactatgaactaactaat

SEQ ID NO: 4266 - DNA, 246 bp, Streptococcus pneumoniae
  misc_feature (1)..(246): tiling:Spneumo1:WAN024GEM; Cluster includes WAN023LTT 3143 30_1164||||613504..613749|-|246 bp|EGAD orf prediction|S.p neumoniae|R6|NC_003098.1|ORF|110
gtgtctctccctgttcattttttccttgtggattggcaaaatggagcagattatcctttacataaagagcttgttcttcttcgattgcttccttggcaaaggcataccacttgctctgattttctgtatcttttcctctatcacctaagccaaargaaatytgrtaatagtctgctctrtcctgccatgcttgttttgaaatttcaagttctttcaatcgttggtaagacgtcaaacctgtcttaa

SEQ ID NO: 4267 - DNA, 1611 bp, Streptococcus pneumoniae
  misc_feature (1)..(1611): tiling:Spneumo1:WAN024CK3; Cluster includes WAN0242TV SP05 70||15900481|NP_345085.1|535551..537155|+|1605 bp|conserve d domain protein|S.pneumoniae|TIGR4|NC_003028.1|ORF|010
gtgtctgaatattggtttagtacaaatgttgatcaaatagatgaagtggatgggaaacaatgtttaatctattcatattataacattaaagcttctagaaatgtagaagttcttaaaggccgttctggaacaaaaaaaggattagattattgggaaccatatgctcctcaaaaacaatatgagatggaaagattacccaaaaataaatatattggaagttcttcgacagacagatgggatggcattgaaaaaaatgttgtcttttgtgattgtaaagaatatgtttctgcttttgatttatttttctatcactataattttaaaaaaatttctactcaacgtagtaaacaagattttataagattacgatctaagccagttgctgatattttaaagaataatacaagtagctatacgcgttataaaaaggaaatggttatagataatgttaaagttgatgataaagtttgtgaaattattagtgaaataatggatgaatcttatacagacattcaaattttaacacataagttgtattcaaaaggtgatgatataaaagcttccaaaactatttggatgaaaaaatctggaaaagaatattccgaggcttttgcaggaacaggtgaggctagaattattttgttagtaaatgatatagtaaatgcgcaatcaaattcattaatattaatagatgaacctgaaatctcacttcatccgagtgcaatctataaatttaaagagtttttacttcaagagtgtttaaataaaaaacatcaaattattatcactacacattctacacaacttataaaagattttcctagagaagccgtgaaacttttagtgaaaaacggagaaaaggtagatgttattgaaaatattgattatcaggatgcattttttgaattaggtgatgtgtatcattctaggaagatgatttatgttgaagatagactagctaaatatattctagagtttgttatcactcattcaggtagtgagaatcttaaacagaatttagtagtgagatatattcctggtggagcaaatcaaataatttgtaataatattttaaactcatcgtatttagattccgataaccattatttttggcttgatggagatcaaaacactaatgttagtgaatcaaataatttaatgaactatcttgaaaatggtgttgttatatcagataaaattcctgaatcagataataaaaatcttgatgatattataaaattgataacgggatgtccaattaaatttaatgtttcaggtaataaagggcaaaaaaataatattgaattaattgcgaaacaaagaagctttatagattattgggctaaatacstwwctwatcttcctttcccaaccccagagttttttttagctaatttgtgtaacagcgtagatagggaaggttatgatttttctaaagatggcaacggaaaagaatattttagaaaaaaaactcaagtagcgttaggaatagagaatataacttctgaagatattttccaggagcaaagaagagctgtttcaaaaatacagccagaatcatcaatgtttcagtgtattaaagaaaaattagaggcattgttcctaactaat

SEQ ID NO: 4268 - DNA, 246 bp, Streptococcus pneumoniae
  misc_feature (1)..(246): tiling:Spneumo1:WAN024DWN; Cluster includes WAN023KEE 3140 64_3598||||1933017..1933262|+|246 bp|EGAD orf prediction|S .pneumoniae|R6|NC_003098.1|ORF|110
gtgtctgcaaggctttggcacgacgataggctgagaagcgttcttgggcttggtggcattcaagtgcaaactcgacttcaaactcccgcaagcattgtgcttctggcgttgggaagtagccccagtcacctagctcacctgatgcacgcaaaatggtcacggcaatggtgttatccccaaggatttcgtattcattcaatcccttgttggatacagtcacccctttttcatcgtcatacagactga

SEQ ID NO: 4269 - DNA, 108 bp, Streptococcus pneumoniae
  misc_feature (1)..(108): tiling:Spneumo1:WAN024COO; Cluster includes WAN0246T0 5613 45-46-8||||||108 bp|DNA Streptococcus pneumoniae phage Dp- 1 open reading frame 242|S.pneumoniae||WAN0246T0|ORF|000
gtgtctgtaacccatgctcttacggtagcggagccattaaagttcatcatacccaatttgccgccgttttcgttgatagcttggtttttacctacgagctcagcgtga

SEQ ID NO: 4270 - DNA, 231 bp, Streptococcus pneumoniae
  misc_feature (1)..(231): tiling:Spneumo1:WAN024GOF; Cluster includes WAN023LPF 3140 42_1426||||753473..753703|-|231 bp|EGAD orf prediction|S.p neumoniae|R6|NC_003098.1|ORF|110
gtgtcttctaaagaactcaaacgaggagttgcaaakttcttcttgacctcacgaagttctttcttcatgagattgtacatagtcctttcatcaccgataatagccgccagcatagcaatcttctcacgaagctctgcttcttcttcctgcaagacaaccacatcggtattggtcaaacggtacagttgcaaagttacgatagcctcagcctgttcttccgtaaaatcatag

SEQ ID NO: 4271 - DNA, 246 bp, Streptococcus pneumoniae
  misc_feature (1)..(246): tiling:Spneumo1:WAN024GCU; Cluster includes WAN023LRT 3146 93_1283||||680244..680489|-|246 bp|EGAD orf prediction|S.p neumoniae|R6|NC_003098.1|ORF|110
gtgtcttggtttgctgttgaagtcacttcaagtttcccttctttgttgacaaccaaccatgcccaacctgaaccaaaacgagttgttgctgctgcagtgaaggctgcttggaattcttcaaatgaaccaaatgttgcatcgattgctgctgccagttctgctgaaggagctgttttctcgggagtcatcaattcccagaaaagagcgtggttcaagtgtccgccaccattgttgataagtgcttga

SEQ ID NO: 4272 - DNA, 108 bp, Streptococcus pneumoniae
  misc_feature (1)..(108): tiling:Spneumo1:WAN024COP; Cluster includes WAN0246T1 5613 45-45-7||||||108 bp|DNA Streptococcus pneumoniae phage Dp- 1 open reading frame 241|S.pneumoniae||WAN0246T1|ORF|000
gtgtctttccttaatatggagatagttttcattctatttaagcaggatatcgaaaaggttaccaattttagatttcataggcttaccatctacgatataatctgctaa

SEQ ID NO: 4273 - DNA, 90 bp, Streptococcus pneumoniae
  misc_feature (1)..(90): tiling:Spneumo1:WAN024DZD; Cluster includes WAN023YYT AL44 9926.1_161||||118590..118679|+|90 bp|Glimmer 2.02 orf pred iction|S.pneumoniae||AL449926.1|ORF|001
gtgtcttttttgatagttatattttattctttttttgatttgattgcaaaaatctgctacgcacaaaaaattgcaaaaaagcttgccaaa

SEQ ID NO: 4274 - DNA, 125 bp, Streptococcus pneumoniae
  misc_feature (1)..(125): tiling:Spneumo1:WAN024GL2; Cluster includes WAN0242UL SP05 42||15900455|NP_345059.1|515939..516058|+|120 bp|hypotheti cal protein|S.pneumoniae|TIGR4|NC_003028.1|ORF|021
gtgtgcaacaacggtttgacatttctattgggaccatttgctataggaataggtgtaactggtgctgcaggtggagctatacttggaggtgtagcctatgcagcaayatgttggtggtaaytaat

SEQ ID NO: 4275 - DNA, 445 bp, Streptococcus pneumoniae
  misc_feature (1)..(445): tiling:Spneumo1:WAN024E2B; Cluster includes WAN0243DU spr1 858||15903900|NP_359450.1|1831789..1832202|-|414 bp|Hypoth etical protein|S.pneumoniae|R6|NC_003098.1|ORF|221
gtgtggaaaaagaaraaagttaaggcaggtgttctcctctacgcagtcaccatagcagccatctttagtcttttgttgcaattttatttgaaccgacaartcgcccactatcaagactatgctttraataaagaaaaattggttgcttttgcyatggctaaacgaaccaargataargyygagcaagaaagtggggaacagktttttaatctaggtcaggtaagctatcaaaacaagaaaacwrgcttrgtgacgaskgttcgtacgkmtaagagycaatatgagtttctgtttccttcagtcaaaatcaaagaagagaaaagagataaaaaggaagaggtagcgaccgattcaagcgaaaaagyggagaagaaaaaatcagaagagaagcctgaaaagaaagagaattcmtaryyaattcaactataatgcgttgaatccagaa

SEQ ID NO: 4276 - DNA, 303 bp, Streptococcus pneumoniae
  misc_feature (1)..(303): tiling:Spneumo1:WAN024BE5; Cluster includes WAN023M6F 3152 60_516||||264259..264561|+|303 bp|EGAD orf prediction|S.pn eumoniae|R6|NC_003098.1|ORF|110
gtgtggcaaacgccacagtattcaacttctacaagtgcttccccagtttcaagtggacggagtactttttcttcaatagcaacaccagtgctttctggatttacaacaacagctttcatagctatcctccttgatattgaccgagaacagggacaacgggactggattgattttttgtcaacagagtcgagtgtgacgagctctcttgtatttatatgtgaagtatatcacaaaagaaagccttttccaaggttttggagacaaaaagtagaacaatcgattaactggttgatgagactgtga

SEQ ID NO: 4277 - DNA, 548 bp, Streptococcus pneumoniae
  misc_feature (1)..(548): tiling:Spneumo1:WAN024DI8; Cluster includes WAN0244HE spr0 432|cspR|15902476|NP_358026.1|432843..433385|+|543 bp|rRNA methylase|S.pneumoniae|R6|NC_003098.1|ORF|111
gtgtggctatttttttgcaatggtraaaggaagcaagtcatgacaaatcacattgtattatttgaaccwcaaattccacaaaatacrggcaatatcgcgcgtacttgcgctgcgaccaattctcccctccacatcatcaagcctatgggctttcctatygatgaccgcaagatgaagcgrgctggwttggattaytgggataagctagagatttatttttacgagagtttrgargatttcatrtctcagatgaagggmaaactctatctgatttcgaaattcgcggaaaaartctattctgakgtggatttatckactracgargaycattattttctmtttggacgtgaagacaagggcttrcckgargaytttatgcgagaacatcctgakaargctctccgtattccyatgaatgatgaacatgtccgcagtctcaatgtgtctaataccgtctgcatgattgtctatgaggctcttcgccagcagaactttgcaggtcttgagctygtycatacctatgaagtggataaattgaaataactaat

SEQ ID NO: 4278 - DNA, 228 bp, Streptococcus pneumoniae
  misc_feature (1)..(228): tiling:Spneumo1:WAN024CDQ; Cluster includes WAN023MCQ 3153 75_180a||||88323..88550|-|228 bp|EGAD orf prediction|S.pne umoniae|R6|NC_003098.1|ORF|110
gtgtgggatttgatagaagagaccgaagtctgcgcggaagatatttccgactgcaaggatggtcaatacagttacaagcggagtcaactgaggaatggttacgttgcgaatacgttgccacttgctagctccgtccactgtcgctgcttcgtagtaggttggatcaattcccatgatcgtcgcatagtacatgacactgctatatccaaagcctttccaaatacctag

SEQ ID NO: 4279 - DNA, 300 bp, Streptococcus pneumoniae
  misc_feature (1)..(300): tiling:Spneumo1:WAN024FHI; Cluster includes WAN023KWU 3139 64_2765a||||1470803..1471102|-|300 bp|EGAD orf prediction| S.pneumoniae|R6|NC_003098.1|ORF|110
gtgtgggtcttcttttcctttttcattttgaccttcaaggtagataacatcaacgccgtcgctgactgcgaagtagtctttgttttcagttttcttggcattttctaccaattttgtaaaccaagcattgccacctgtttcaaggttgataccgttatagaaaatcaaatyagcctcagaagttttcttaacgtcttcaggaagtggttcgtattcgtgtgggtcttgcccaatcggaacgatactatgaaggtcaattttgtcaccagcaatatttttagtaatatcagcgatgattga

SEQ ID NO: 4280 - DNA, 264 bp, Streptococcus pneumoniae
  misc_feature (1)..(264): tiling:Spneumo1:WAN024GHC; Cluster includes WAN023LXG 3145 29_992a||||520083..520346|-|264 bp|EGAD orf prediction|S.p neumoniae|R6|NC_003098.1|ORF|110
gtgtggtgtggaaactctaggtcagctccaccaccgtggatatcaatggtatcacctaaaatctctgtcgacatgactgaacactcaatatgccaacccggacgtccaggtccccaaggactatcccaagaaatctcacctggtttggaagatttccatagagcaaartctacaggattttccttacgagccgtttcttcatcggtacgacctgaagcacctagctccaaatcttccaaggttttattagccaatttagcatag

SEQ ID NO: 4281 - DNA, 222 bp, Streptococcus pneumoniae
  misc_feature (1)..(222): tiling:Spneumo1:WAN024DX7; Cluster includes WAN0243BW spr1 929||15903970|NP_359520.1|1910815..1911030|-|216 bp|Conser ved hypothetical protein|S.pneumoniae|R6|NC_003098.1|ORF|1 10
gtgtgtaacrtgcaactwaaaaatcgtctaaaagagcttmgagctcgcgatggtctcaatcaaaccgacctagccaaactggcaggggtttccagacagaccattagcctactagaacgggatgagtacaccccatccattatcattgccctgaaaatatctcaaattttcaacgaaacagtcgaatcggtatttcgtttggaggaggacgagykaactaat

SEQ ID NO: 4282 - DNA, 288 bp, Streptococcus pneumoniae
  misc_feature (1)..(288): tiling:Spneumo1:WAN024G8O; Cluster includes WAN023LLZ 3128 56_1613||||856285..856572|-|288 bp|EGAD orf prediction|S.p neumoniae|R6|NC_003098.1|ORF|110
gtgtgtagcatttttgaagccatatctttctcctttattttwaaaaagactggacaatcctgttccagtctcatcagttgttatttaccaagttttgctttagctgcatctgcaagagctgtgaaagctactgcatcgttaacagccaagtcagcaagcattttacggttaacttcratctcagccaatttcaaaccatgcatcaattgtgagtatgaaagtccgttcatacgagctgccgcattgatacgagtaatccacaatttgcggaagtcacgttttttctga

SEQ ID NO: 4283 - DNA, 120 bp, Streptococcus pneumoniae
  misc_feature (1)..(120): tiling:Spneumo1:WAN024C3U; Cluster includes WAN023ZL7 AL44 9923.1_15||||10546..10665|-|120 bp|Glimmer 2.02 orf predic tion|S.pneumoniae||AL449923.1|ORF|000
gtgtgtagtagaaaaagagcagtcttatctgaaatttttattctttcaaaagagacctgtttcttttttgcatgtcaaatccgttctagctggtatttgaaaaatcaaactaatattcaa

SEQ ID NO: 4284 - DNA, 228 bp, Streptococcus pneumoniae
  misc_feature (1)..(228): tiling:Spneumo1:WAN024CVS; Cluster includes WAN023K2E 8284 4_453||||253873..254100|+|228 bp|EGAD orf prediction|S.pne umoniae|TIGR4|WAN01UC25|ORF|011
gtgtgtgtcgttctaattgtcactgccttcttgatgatagagagtattttagaatccagttctggggggtacaatttatttagaggaaacagtagtccagctattccgtgttggaatgataaattacttacgaaatttccaaattctgttgaagaagtgatccttccttcagaatttacagttttatctagtaaaaatygtagaacactattacattctgttttgtaa

SEQ ID NO: 4285 - DNA, 747 bp, Streptococcus pneumoniae
  misc_feature (1)..(747): tiling:Spneumo1:WAN024GAI; Cluster includes WAN02447S spr0 778|fruR|15902822|NP_358372.1|774386..775126|+|741 bp|Tran scriptional repressor of the fructose operon|S.pneumoniae| R6|NC_003098.1|ORF|111
gtgttaaaaacagarcgkaarcaactrattttagaggagttaaatcaacatcatgtagtttctctagaaaaattagttagtttgctagaaacgtcagaatcaacggttcgaagagacttggatgagttggaagcggaaaacaagcttcgtcgtgtgcatggtggagcagaactccccyactccttacaggaagaagaaaccattcaagaaaaatckgtcaaaaaccttcaagaaaagaarttgctggctcagaaagcagcctctctcattaaagaaaaagatgtyatctttatcgatgctggaacaacaactgcttttttgattcatgaattggtcaataagaatgttacagttgtgaccaactccattcaccatgcygctcagttggttgaaaagcagawtccaactgtcatggttggaggaaacgtcaagacggcgacagatgctagtatcgggggcgttgctcttaaccagattaaccaattgcactttgaccgtgcctttatcggaatraatggtgttgacgatggctattatacgactcctgatatggaggarggagctgtgaaaagagctattttggagaatgccaagcagacctacgtcttggtggattcgtcaaamattggacaaacttgctttgccaaggtagcmccactcaaacgcgctatcgttatcactagtcaagggcatgagctcttgcaggttattaaggagaaaacggaggtaatagaagtaykaactaat

SEQ ID NO: 4286 - DNA, 97 bp, Streptococcus pneumoniae
  misc_feature (1)..(97): tiling:Spneumo1:WAN024A5Z; Cluster includes WAN024EEZ R6.I G_1184.2||||1145797..1145893|+|97 bp|Between spr1143 (- st rand) and spr1144 (smf) (- strand)|S.pneumoniae|R6|NC_0030 98.1|IG|110
gtgttaaaaacttgctaatatgcgttttattatggaaatgttgggttcattttctcttaaaattgattttttcttagaattctagcttaggtcattt

SEQ ID NO: 4287 - DNA, 407 bp, Streptococcus pneumoniae
  misc_feature (1)..(407): tiling:Spneumo1:WAN024GJC-M; Cluster includes WAN0243S4 sp r1343|tufA|15903386|NP_358936.1|1326964..1328160|-|1197 bp |Translation elongation factor TU|S.pneumoniae|R6|NC_00309 8.1|ORF|331
gtgttaaacaccttatcgtcttcatgaacaaagttgacttggttgacgacgaagaattgcttgaattggttgaaatggaaatccgtgacctattgtcagaatacgacttcccaggtgacgatcttccagttatccaaggttcagcacttaaagctcttgaaggtgactctaaatacgaagacatcgttatggaattgatgaacacagttgatgagtatatyccagaaccagaacgtgacactgacaaaccattgcttcttccagtcgaggacgtattctcaatcactggacgtggtacagttgcttcaggacgtatcgaccgtggtatcgttaaagtcaacgacgaaatcgaaatygttggtatcaaagaagaaactcraaaagcagttgttactggtgttgaaatg

SEQ ID NO: 4288 - DNA, 276 bp, Streptococcus pneumoniae
  misc_feature (1)..(276): tiling:Spneumo1:WAN024CAP; Cluster includes WAN023MA7 3152 46_315b||||165799..166074|+|276 bp|EGAD orf prediction|S.p neumoniae|R6|NC_003098.1|ORF|110
gtgttaaagtcaaacagagcgtcttctgtgttaaagttgacggtctttctcttttcagctgaccaaagtgaattgatggctgaaatttcaataggagccggcatccatcctaggagggagacgatgaagggcagagctgccatttgccaaggtgtcttctcgacaaaatcagaactgtattctggatgcttgaccgcygcwatgataactgcmagaacagtcgcaatggttaaggcagacataatccatttgaccatgccgtctaaaagtttgtag

SEQ ID NO: 4289 - DNA, 1455 bp, Streptococcus pneumoniae
  misc_feature (1)..(1455): tiling:Spneumo1:WAN024CDF; Cluster includes WAN0240FI |cps 19aA||AAC78663.1|||1446 bp|putative regulatory protein Cps 19aA|S.pneumoniae||AF094575|ORF|000
gtgttaatcatgagtagacgttttaaraaatcasgttcacagaaagtgaagcgaagtgttaatatmgttttgytgactatttatttattgttagtttgttttttattgttcttaatctttamgtacaatatccttgcttttagatatyttaayctagtggyamctgcsttwgtyctactagttgccttrrtagggctactctygattatctataaaaaagctgaaaagtttacyatttttctgttggtgytctctatycttgtcagctcwgtgtcgctctttgcagtacagcagtttgtkggactgaccaatcgtttaaatgcgacttctaattactcagaatattcrmtcagtgtygctgttttagcagatagtgakatygaraatgttacgcaactgaygagtgtgacagcaccgactgggactgataatgaaaayattcaaaaactactagctgatatcaaatcaagtcagaataycgatttgacggtyaatcaragttcgtcttacttgkcagcttayargagtttgattgcaggagagactaaggccattgtcttaaatagtgtctttgaaaatatcatygaatcggagyatccagatyacgcatcgaagataaaaaagatttataccaagggattcaytaaaaaagtagaagctcctaagacgtctaagratcagtctttcaatatctatgttagtggaattgayacytatggtccdattagttcggtgtcgcgttcakatgtcaatatcytgatgactgtcaatcgagataccaagaaaattctcttgaccacaacgccacgtgatgcttatgtaccaatcgcagatggtggraataatcaaaaagataaattgacycatgcgggcatytatggagttgattcgtccatycacacyttagaaaatctctatggagtggatatcmattactatgtscgwttgaacttcacttckttyttgaarttgatygatttgttgggkggggtagatgtttataatgaycargawttyacakctctrcwhrkraarwwcmmtwtycyagttggwaatgtccayttagattcwgarsaggcwctsgswtttgttcgtgagcgctaytcyctagcrgatggtgatcrtgaccgygggcgcaatcaacaaaaggtgattgyggcyatccttcaaaaattaacttcgascgaagyrctgaaaaattatagyabratcattgatagcttgcaarattctatccaaacaaacatgccmcttgagacyatgataaacttggtcaatgctcagttagaaagtggtggaacgtacaaagtraattcgcaagacttgaagggtakgggacggacggatcttccttcctatgcgatgccagatagtaacctctatrtgatggaaattaacgacagtagccttgcatctgtcaaaackgctattcaggayrtgttggagggsagatga

SEQ ID NO: 4290 - DNA, 1461 bp, Streptococcus pneumoniae
  misc_feature (1)..(1461): tiling:Spneumo1:WAN024AWE; Cluster includes WAN0244KO spr0 314|cps2A|15902358|NP_357908.1|313695..314657|+|963 bp|The type 2 capsule locus of Streptococcus pneumoniae|S.pneumo niae|R6|NC_003098.1|ORF|111
  misc_feature (1191)..(1191): n is a, c, g, or t
  misc_feature (1208)..(1208): n is a, c, g, or t
gtgttaatcwtgagtrgacgttttaaraaatcavgttcacagaragtgaagcgaartrttartaymgttttrytrrctatttatttattrttarttkgttttttattrttcttaatctttaagtayratatcyttgyttttagatatcttaayytmgygryaactgyvttwktyytactagtwrccttdvtagggytrctyyygrttatctayaaaaargcwgaararttyacbattttyctrttgsbrytytctayycttgycagctcwgygtcgctytttrcagtmcagcagtttgttggactgaccaatcgtttaaatgygrcttckarttactcagaatattcrmtcdgtgtcgytsttttagyagatagtrakwtyrrraatgttacgcaactgaygagtgtgrcagcaccgactgrgactrataaygaamayattcaraaaytaytarctgatatyaartyaagtcagaatayyratttgayrrtyraycagagttcgtcttacttggywryttayargartytgattgcaggdgasacyaaggccattgtcytaartagtgtctttgaaaayatcatygagtyagagtatycarrctaygmatcgaagataaaraagatttatacyaagggattyactaaaaaagtagrrgctcytaaraygtctaarartcagtctttyaatatctatgttagtggrattgacacctatgghccwattrgytcrgtgtcgcgatcagatgtcaayatcytratgactgtcaatmgdgatacsaagaraatyctctkgamhrcaacdycdcgwgatkcmtatgtwycwathgcwgatrgtggaaataatmaaaargataaattracycaygcdggyatwtatggrgttgattcrtccattcayaccytrgaraayctytatgrdrtrgatatyaattayyatgtkckwttgaayttyacytcdttyttgaaawtgatygayttrttggrwggrrtwgatgtyyataatgaycaagrdtttwcwdmymyacatrgraagttcywttwyccdghaggsaatgyycayytdgaytcwgarcargcthtmrgttttgtwcgtgrrcgctactcmytadcmgatggmkayygtgaycgyggkcgcmaycarcaaaagrtbattgtrgcdatymttmaraarttaacktywacmgarghnytkraavaytatrgyankatymtyvawrghttgcavrattcymtycaaacaaayrtrccrhttgagacyatgatrrrwttdgtbaatrcycagttrgaragyrrdggdavktayaaagkraattykcaagayttraaaggkacagrtcgraykrdwcttccttcytatgcrrtrccwgayaktaayctctatrtghtggaartwraygaymgyagyytwrctstagyyaaarcwgcyatwsagrayrtgwtgrarggbagaydaactaat

SEQ ID NO: 4291 - DNA, 78 bp, Streptococcus pneumoniae
  misc_feature (1)..(78): tiling:Spneumo1:WAN024GM8; Cluster includes WAN023S7J NC_0 03028.1_2610||||1982905..1982982|-|78 bp|Glimmer 2.02 orf prediction|S.pneumoniae|TIGR4|NC_003028.1|ORF|010
gtgttaatttcagaaattacatcactttttgttcgtcaaatggcagctctttttttaggatataaaacagggttcgga

SEQ ID NO: 4292 - DNA, 2045 bp, Streptococcus pneumoniae
  misc_feature (1)..(2045): tiling:Spneumo1:WAN024C5B; Cluster includes WAN0244A2 spr0 696|metS|15902740|NP_358290.1|696425..698464|+|2040 bp|Met hionyl-tRNA synthetase|S.pneumoniae|R6|NC_003098.1|ORF|331
gtgttagaaaaacaggtttcatttgcctggaaaggaaaaattatgtctgaaaaaaatttttatattacaacgccgatttactatccatctgggaaacttcatatcggttctgcctacacaactatcgcatgtgatgtcctagcacgttacaaacgcctgatgggctacgatgtattttatctgacaggtcttgatgaacatggtcagaaaatccagcagaaagcggaagaagctggtattacacctcaagcctatgttgatggaatggcggttggagttaaagaactctggcaattactagatatctcatacgataaatttatccgtacaactgatgactaccatgaaaaagttgtcgcacargtctttgaacgcttacttgctcaagatgatatytacttgggtgaatactctggttggtattcagtatcagacgaagaattctttacagaaagccagctggcagaagttttccgtgatgaagctggaaatgtgactggtggtattgctccatcaggtcatgaggttgaatgggtttctgaagaatcatacttycttcgccttagcaaataccaagaccgtttggtcgaatttttcaaagctcatcctgaatttatcacgccagatggtcgccttaatgaaatgctacgcaacttcatcgagccaggyttggaagatttggcggtatctcgtacaacctttacatggggagtgcctgtcccatcaaatccaaaacacgttgtctacgtttggattgatgcccttcttaactatgcgacagctcttggctacgctcaagacgaacatggtaactttgacaagttctggaatggaacagtcttccatatggtaggaaaagatatccttcgcttccactctatctactggccaatccttcttatgatgttggatgttaaattacctgatcgtttgattgcccatggttggtttgtcatgaaagacggaaaaatgtctaagtcaaaagggaatgtcgtttaccctgaaatgttggtagagcgttatggactagatccacttcgttactacctcatgcgtaaccttccagttggttcagacggaacctttactcctgaagactatgtcggccgtatcaactatgaattggctaatgaccttgggaacctccttaaccgtacggtttccatgattaataagtastttsatggacawatccctgcctatgtagaaggtgtgactgaatwtgatcatgttcttgctgaggttgcagwacaatcaatcgcagacttccatacacacatggaagcagttgactatccacgtgcgcttgaagcagtctggactctgatctctcgtaccaataaatacatcgatgagacygcaccatgggtcttggccaaggatgaagctcttcgtgaccaattggcaagtgtcatgagccacttggcagccagcattcgtgtagttgctcacttgattgaaccatttatgatggaaactagtcgtgcagttttgactcaacttggtttggaagaagtttctagtcttgaaaacttgagtttggctgacttcccagcagatgtgactgtagttgccaaaggaacacctatctttccacgtctaaatatggaagaagaaatcgcctatatcaaggaacaaatggaaggcaataaaccagcagtcgaaaaagaatggaatccggacgaagttgagctcaaactaaacaaggatgaaatcaagtttgaagactttgacaaggttgaaatcygtgtcgcagaagtcaaagaagtgtctaaagtagaaggttcagataagttgcttcaattccgcttggatgctggtgatggagaagatcgtcagattctttcaggaattgcaaaatactatccaaatgaacaagaattggtcggcaagaaagttcaaatcrttgctaacctcaaaccacgtaaaatgatgaaaaaatatgtcagccagggtatgattctctcagctgaacatgatggcaaattaacccttctcacagttgatccagctgtaccaaatggaagtgtgattgggtaactaat

SEQ ID NO: 4293 - DNA, 926 bp, Streptococcus pneumoniae
  misc_feature (1)..(926): tiling:Spneumo1:WAN024GBW; Cluster includes WAN024495 spr0 729|folD|15902773|NP_358323.1|728361..729281|+|921 bp|old bifunctional protein; includes: methylenetetrahydrofolate dehydrogenase, met...|S.pneumoniae|R6|NC_003098.1|ORF|111
gtgttagagggcactwgcagtttttggtataatggaagatatttgaaagaaaagagaagtgatatgacacagattattgatgggaaagctttagcggccaaattgcaggggcagttggctgaaaagactgcaaaattaaaggargaaacagstctagtgcctggtttggtagtgattttggttggggayaatccagccagccaagtctacgttcgcaacaaggagaggtcagcycttgcggctggttyccgtagcgaagtagtrcgrgttccagagacyattactcaagaggaattgttagacctgattgctaaatayaatcaggatccagcttggcatgggattttggtycagttgccattaccaaaacayatygatgaagaggcggttytattrgcyattgacccagaaaaggatgtggatggtttccatccyctaaayatgggrcgyctttggtctggwcatccagtcatgattcchtcracacckgcaggaattatggaaatgttycatgaatatgggattgamttrgaaggtaaaaatgcrgtygtmatcggtcgwtchaatatygtyggaaaaccyatggcycagcttcttttggchaaraatgcracagtracyttgrcycactcacghacycataatcttkcyaaggtggctgcwaaagcagatattctkgtdgtygcaatcggycgygccaagtttgtgactgctgactttgtcaaaccaggtgcggtwgtcattgacgttgggatgaaycghgatgaaaatggkaagctctgtggrgatgtkgattatgaggcrgttgcmccacttgctagcyayatyacgccagtccctggaggtgtcggycctatgaccattacyatgctgatggagcaaacytatcargcagcacttmggacattggatagaaaataactaat

SEQ ID NO: 4294 - DNA, 246 bp, Streptococcus pneumoniae
  misc_feature (1)..(246): tiling:Spneumo1:WAN024CWE; Cluster includes WAN023MGB 3153 87_7a||||7527..7772|-|246 bp|EGAD orf prediction|S.pneumon iae|R6|NC_003098.1|ORF|110
gtgttagcgttagcattaccgtttcgtttagcaatagcttcctctaataactgcgaatacaattcaaaaccaacagaatcaatgaaaccagactgggattttcctaaaagatttcctgctccacgaatcgaaagatctcgcattgcaatcttaaagccagagcccaattctgtaaatcctttaatcgcttctaatctcttttcagagacttcactgattgatttttctggacgatacatgagataa

SEQ ID NO: 4295 - DNA, 972 bp, Streptococcus pneumoniae
  misc_feature (1)..(972): tiling:Spneumo1:WAN024EZQ; Cluster includes WAN02446R spr0 815|IS1239-truncation|15902859|NP_358409.1|817081..818001| -|921 bp|Degenerate transposase|S.pneumoniae|R6|NC_003098. 1|ORF|101
gtgttatacttgttgttcaaccacaaacacaagaaaggcacagagatgcaagacaattatactacaaaagccaaacatttgacaatcgatagccgtcgcttaatcgaaagatggaaaaaagaaggaaaatcaaatagagaaattgcctctctacttggaaaagctcctcaaactatccacactgaaatcaagcgtaggacagtccgaaaatgtcttggaaaagggcgcttcaaagaggtttattctgccgactatgctcaacagtcttatgaaaataatcgcaagcactcggtcaagaaatcaagcttgaccaaggaactaaaggaaaagattctccactatcataaccaaaaattttcgcctgataagaaacaggctagcaccaactttaaacctgctggtcaatccatcgaacagcggtctgaagctatcaatcttcgcttggagaatgggtattatgagattgatacggttctacttacgagagcgaaaaactactgcttgcttgtcttgacggatcgaaagagtagacatcagatcatccgattgattccaaataaaagtgctgaggtggtcaatcaggctctaaaactcatcttaaaacaacacaagattctttccatcacggcagataatggaacggaattcaatcgcttgtttgatgtattttctgaggagcacatctattatgcgcacccctatgcctcttgggaaaggggaactaatgagaatcacaacaggctcattcgtagatggttacctaagggaaccaagaaaatgactcccaaagaagtcgcattcatcgaaaagtggattaacaactatcctaaaaaatgcttggactacaagtcacccagagaagacttctggatggctaacttgaacttgaaatttagcdwhasaaayaawtyaykaaatygmttcmaattttgcaggtcgtttaaatatcctgcgcgcaggtgttcttggtgc

SEQ ID NO: 4296 - DNA, 1052 bp, Streptococcus pneumoniae
  misc_feature (1)..(1052): tiling:Spneumo1:WAN024EZV; Cluster includes WAN0244F7 spr0 511|IS1239-truncation|15902555|NP_358105.1|510846..511148| +|303 bp|Degenerate transposase|S.pneumoniae|R6|NC_003098. 1|ORF|463
gtgttatacttgttgttcaaccacaaacacaagaaaggcacagagatgcaaracmattatactacaaaagsyraacatttgacaatcgatagccgtcgcttaatcgaamgatggaaaaaagaaggraaatcaaatagagaarttgcctctctrcttggaaaagytcctcaaactatccayactgaaatcaagyrtrggacagtccgamaatgtcttggaaaagggcgcttcaaagagrtttattctgccgactaygctcaacagtcttawgaaaayaatcgcaagcrctcggtcaagaratcaagcktgacyaagraactaaaggaaaarattctccactatcataaccaaaaattttygcctgaaatgatggtkatggctaaaggggttaacgtgggaatttcaaccatttactattggattcatcrtggaaaattgggrttaagcaarcaggawytgcyttaycctagaaaaggaaaakcgcttaagaaacwrrcyaryaycaactttaaacctgytggtcaatcyatcgmacagcggyytgaagctatcaatyttcgcttggagaatgggcattatgagattgatacrgttctacttacgagakcgaaaaactactgcttgmttgtcttgacggatcgaaaragtagacatcagatcatccgattgattccaaataaaagtgctgakgtggtcaatcaggctctaaaactcatcttaaaacaacacaagattctttccatcacggcagataatggaacggaattcaatcgcttgtytratrtattttctgaggagcacathtattatgcrcayccctatgcctcttgggaaaggggaactaatgagaatcayaacaggytcattcgtagayrgtwacctaakggaaccaakaaaatgactcccaaagaagtcgcattcatcgaaaagtggatyaacaactatcctaaaaaatrcttggactacaagtcacccagagaagacttctkgatggctaacttgaacttgaaatttagcrwmakrgaaayaawtyaykaaaykswwmcwaatag

SEQ ID NO: 4297 - DNA, 122 bp, Streptococcus pneumoniae
  misc_feature (1)..(122): tiling:Spneumo1:WAN024A9A; Cluster includes WAN024EGU R6.I G_1050.1||||993604..993725|+|122 bp|Between spr1011 (+ str and) and spr1012 (rplU) (+ strand)|S.pneumoniae|R6|NC_0030 98.1|IG|110
gtgttattacttgtaagaaaataggagatatgctatacttgaagagttgactatgcacgatcctgtgcaaccgcacgaacatcgttgcttgattattcaagtttaagtggttcgtcccacga

SEQ ID NO: 4298 - DNA, 228 bp, Streptococcus pneumoniae
  misc_feature (1)..(228): tiling:Spneumo1:WAN024DUI; Cluster includes WAN023KC5 3133 29_3697||||1997351..1997578|+|228 bp|EGAD orf prediction|S .pneumoniae|R6|NC_003098.1|ORF|110
gtgttcaacaatagctgcaacggcagtgattcctgctcctttttccaatttcttagccatgtagtcttggaaatacactgcaaatggtgcctttccgttgataaccaagtcagaagaactttcttctggtggcaatttcaaatcaacatccactccagcttctttgaaataacctttttccttggcaacataaagccctgtgtggttggtatttggtgtccagtctag

SEQ ID NO: 4299 - DNA, 327 bp, Streptococcus pneumoniae
  misc_feature (1)..(327): tiling:Spneumo1:WAN024G3V; Cluster includes WAN023LFD 3139 98_1967a||||1063904..1064230|-|327 bp|EGAD orf prediction| S.pneumoniae|R6|NC_003098.1|ORF|110
gtgttcagtcgcagcagcgtaaacatcgatgactttacgcatatccatatcgtaggcagaagtgtagtaaggaatggtttctgtagacaagccagcagcagggtartagattttaccaattttcttctcttggcgttcttcgatacgttgcgtaatcgggtggatagaagcagaaacgtcgttgatatagctgatagaaccatttggcgctacagcaaggcgattttggtggtaaagaccatcttcttgaaccttgtcgcgaagttcagcccaatcagcaacaccagggataaagacatttttgaagagttctttaacacggtctga

SEQ ID NO: 4300 - DNA, 249 bp, Streptococcus pneumoniae
  misc_feature (1)..(249): tiling:Spneumo1:WAN024CHY; Cluster includes WAN023MFM 3144 18_57||||32392..32640|-|249 bp|EGAD orf prediction|S.pneum oniae|R6|NC_003098.1|ORF|110
gtgttccaagaatttctcacgttcaggaatggcctttttaacacccttaccgtagaaagtttcatcatcaaccaagtaagtctgaccataaagactagcgatggtcgcaatttcattgtcctccacagtcgaaaggaggtatttagccaaacggatgtcaaaagcaggcgcctgcaaatcyacaccaaaacgttgcaaaagaactttaaccttcttaaagtcataaactctcagagatgttttttctaa

SEQ ID NO: 4301 - DNA, 342 bp, Streptococcus pneumoniae
  misc_feature (1)..(342): tiling:Spneumo1:WAN024FJC; Cluster includes WAN023KZO 3141 08_2636a||||1406833..1407174|-|342 bp|EGAD orf prediction| S.pneumoniae|R6|NC_003098.1|ORF|110
gtgttccaaggcacggaaattatctctgcggtgaacaagggtagttggtgcgattttttcaaaagccaaagcccaatccacagccgagtctcccccaccaagaatcgtcactttcttaccagcgtattgctgaatgttagaaacgtggtagtggatattttcatagycctcaaccccttcaagttccagcggacgtggtttgaaggcaccgccacccatagcgatgataactgttttagtcaggtgacttcctttrgaagttgtgatggcaaattcttcttcttgtttgtcaatctcaagaaccgtttcattgagatgaataggggtatcaaatccatttag

SEQ ID NO: 4302 - DNA, 3084 bp, Streptococcus pneumoniae
  misc_feature (1)..(3084): tiling:Spneumo1:WAN024C4D; Cluster includes WAN023Q1F cont ig_1216_11||||11438..14521|+|3084 bp|Glimmer 2.02 orf pred iction|S.pneumoniae|670|WAN01UEKW|ORF|000
gtgttccagaatatcttacaaaattatttgttattgargaagttgtatgtaaatawtgaggaaataaaaatggaaartaaaaaaatagcaaaacagattttaatagctacggctgttttaacaagttttttaggaagtaatttggtttatgcagatgtagttcaaagtaattctaataacagagctagtactgaaactgctagagtaacagggaataacttagaaaaacttattactaaagataaagaaattgataaagagatgacatatctttcagatatggattggtcttctgcaactcatggtgatatagataaaacaaaaacagtacaaaaagatgctccatttacaacaggaaataaaggagagcatactaagatttcattgctcacttctgatgataaagttaaatattttgataaaggaataggaacagtcgcagattctccatcagtaatcagctatgatatcagcggtcaagggtttgaaaaatttgaaacttatataggaattgatcaaagtgctaatagttctagatcagaccatgcagtagtggatagaatagaaatagaaattgatggaaaggttgtctattytagtagtgtaactaatccagaaggattcagatataatacccaggcacaatttattagtgtgacaattccacaaaacgctaaaaaaatatccttaaaatcattcgcaggagaacatacatggggtgatgaggttgtatttgctgatgctaaacttattaaaactgttagtactcaaactataactccagatcttcttaataaaggaattaatggaggagtatatctttctgatttagaatgggttgatgctactcatggtgatgacgataaatcaaaaacagttcagaaagataaaccgtttacacctggtaataacgggtctaataataaaataaaattactaattgacggtaaggaagtcgaatttaataagggattgggaactgtagcaagtaacccgtctagtataaaatatgatgtttcgggtgctaatgttacaagatttatttcctatgtcggaattgataggagtgcaaatcatttaaattcagattacgcagatattcaaaaatttgaagttgttgcggatggtaaagtcatttactcatcagattcaaaatatccaaaaggaattaagtatgatayatcggcatttctggttgatgttgaaattcccaaagatacacagacaatagaacttaaatcatattcagggaaayatacatgggctgacgaattggttttaggtggagccttgtttatggcaaatggtaaatttaagaatcctaatgattggtcagaagttgataaacgtcgtgaaattaataatgaacatccgttacttatgatgcctttatatgctaacggagaagagtttaaccaagggaaatatactttttggggaggagatacattaacaggtaagtgggagaatataccagatgacttaaaaccatatactgttatacagttacatccagatgatcttcctaaaagagatggagctgctagagatttttatgarcatatgytagaagaagcagcgaaatatgtaaatcctaagactggaaaaaatgaacctattccagttattctaacggtttacactgctggtaatatgccttattatacttcggcacattggttaagtaccagctggattgataaaatgtatcaaaaatatccaaatttgcatggtattttcagtactgagaattattggatttgggcaaatgatattraaaataaggcggcagattacttaaaagtatcagctaaaaatggaggatattttatatgggctgaacaaaataatggttctgcaatagaaaaagcatttggaaaaaacggtaagatagcatttcagaaatctgttgataagtactggaagaaccttattttcatgttcaaaaatacacctgctgctgagggaaatgattcaactacagaaagttatatgaagggactttggctttcaaatcatacttatcaatggggtggtttgatggatacttggaagtggtatgagacaggtaaatggaaactgtttgcaagtggtaatatcggaaaaagtcaaggagatagacaatggttgactgaaccagagtctatgctaggagaagaagctttaggggtttaccttaatggaggtgtagtttataattttgaacacccagcttatacctatggtgtaaataataaagaaagcttactctttagcgaagtaataaaagaattttttagatatgtaatagcgcatccagcaccatccaaagaaaaggtacttgaggatacaaaagtattcatacatggagactattcaaataaaggaaatggtaagttctttgtaaacgtaaatactgatagagaacaaactccattatacatgactggtcgttataatgttattccagctattccaggtgttttaaaaacagataaattgaaagagtctgtttctggtagccgtattcagattaaggaaatcacttctccagaatttagctctactcaggctagaaaagaatacttaaataagctgtatcctatgaattatgaaggagatatctttgctcagaaattagataatagatggtttgtctataattataaggtaaatgagaatgttaaacagactgggaaattaaaatttaattctttagaaatggatgttgaatttgaacctcatacctatggtatttttgagagaataagtaatggattgaaagtgaatttaaataattttagaacaaataaagattcactatggtctaatgctcaagatgcaaatcaggcaaagaaactaccacaattgaccaagaaaggtgcgattaagtggattgaagaacattatatcaaagatactcagtttggagagaaaagggttacaaagatagtattaagaggtatagataaacttcctactattcattcattatcaggaacaaataattcctatgatcagccatctctcaattttgatcagaaaaatcatatggttactattaccattaacagtaacggaaatcttgaattcgaacttcatttt

SEQ ID NO: 4303 - DNA, 144 bp, Streptococcus pneumoniae
  misc_feature (1)..(144): tiling:Spneumo1:WAN024F7W; Cluster includes WAN023SEL NC_0 03028.1_616||||470433..470567|-|135 bp|Glimmer 2.02 orf pr ediction|S.pneumoniae|TIGR4|NC_003028.1|ORF|010
gtgttcctgacttygtcagtcytatctacaacctcaaaacagtgttttgagcagcctacggctagtttcctagyttgctctttgattttcattgagtataaaatacaagaagataacttcttgaaaaaacaaaaactaactaat

SEQ ID NO: 4304 - DNA, 345 bp, Streptococcus pneumoniae
  misc_feature (1)..(345): tiling:Spneumo1:WAN024F2A; Cluster includes WAN023LSL 3150 01_1240b||||657005..657349|+|345 bp|EGAD orf prediction|S. pneumoniae|R6|NC_003098.1|ORF|110
gtgttctgtcttgtaaaaaaggacgacataacgataatccttgtcgtcataccagtttttgataccacagagttggggtttggaaatgatcagaccagtttcttctttcacttcacgaatgacagcatcgacaaaggattcgccacgttcaacatgaccaccaggaaaagtaatgccagrccagtcgggaytaactcggtcttggaccaggaycttatctccgtttttaatcatacacatgttaacaaattcgactgcctctcttctgttcattcttcacaacctttaatctttaatcataatgcagacttcccgccacccagccggtacagagggcagaagtga

SEQ ID NO: 4305 - DNA, 267 bp, Streptococcus pneumoniae
  misc_feature (1)..(267): tiling:Spneumo1:WAN024FHU; Cluster includes WAN023KXP 3139 70_2727||||1452098..1452364|-|267 bp|EGAD orf prediction|S .pneumoniae|R6|NC_003098.1|ORF|110
gtgttcttcaatcaattccaacttgtaagggtcatttttgaagatttcacgtgcctcgtctttagtcacttcttcacgaatagatgggaagttttctttgacgattttttgcatttcttcttcgatacgaggaaggtcttcgttagagatttgaccagctgtgtkgtcagtatcgtagtagaaaccatcttcgatggctggaccaactcccaagtgaatgtctgggaaaagacgacgagctgcttgggcgaacaagtgagytgctga

SEQ ID NO: 4306 - DNA, 948 bp, Streptococcus pneumoniae
  misc_feature (1)..(948): tiling:Spneumo1:WAN024AY4; Cluster includes WAN0240FW |cps 19CL||AAD19926.1|||263 bp|glucose-1-phosphate thymidylyl t ransferase|S.pneumoniae||AF105116|ORF|000
gtgttcttgattaaaataaagaacacaacactttttattcagtgttgtgtattgggtgaaacgaaaggaacgattgtacttatgaaaggtattattctmgcrggtggttcgggracwcgyttrtatcctttgactcgmgcygcatcaaarcaactkatgccggtttatgataaaccsatgatttactayccactttcaacwttratgttggctgggattagggatattttgatwatctcaactcctcaagatttgcctcgttttaaagagctycttcaagaygghtcygagtttggkatymarytktcttatgcwgagcaaccragtccagatggtttggmwcmagcctttatyattggkgaagartttattkstgatgatagcgttgckctaatcttaggygayaatatctaycayggwyctggsctttcyaagatgytacaaaaggcagcrrgtaaggagtcgggagcaactgtttttggctaccatgtcaaggatccagagcgctttggtgtggttgagtttgatcaggatatgaaggctatttctattgaagaaaagccagagcaacctcgttcaaactatgcagttacaggtctctatttctatgataatgatgtagtagagattgccaagagtattaaaccaagtcctcgtggtgaactggaaattacagatgtaaacaargcttacctagatcgtggtgatttgtctgttgagcttatgggacgtggctttgcttggctggatactggaactcatgaaagtttactagaggcttcacagtacatcgaaacagtscaacggatgcaaaatgttcaggtagcaaacttagaagaaattgcytaycgyatgggytatatcagtcgwgaagatgtattgrccttagcycaaccacttaagaaaaatgaatacggacagtatctgctccgtttgattggagaagca

SEQ ID NO: 4307 - DNA, 102 bp, Streptococcus pneumoniae
  misc_feature (1)..(102): tiling:Spneumo1:WAN024DRB; Cluster includes WAN02431L SP02 69||15900203|NP_344807.1|246874..246969|+|96 bp|hypothetic al protein|S.pneumoniae|TIGR4|NC_003028.1|ORF|120
gtgttcycagctatttttattcagaaattgatctctaacattaccaataaaaaagaaaaatatcttgacaagcaagggaaaattttgttacaactaactaat

SEQ ID NO: 4308 - DNA, 282 bp, Streptococcus pneumoniae
  misc_feature (1)..(282): tiling:Spneumo1:WAN024CTJ; Cluster includes WAN023LC9 3156 24_2100b||||1132269..1132547|+|279 bp|EGAD orf prediction| S.pneumoniae|R6|NC_003098.1|ORF|220
gtgttgaatcatagaaatcacgctatccgcatgaccatgagcaatatcaatagtgatatactcaggagyatcagccttgagctggctaacaaaatcatactcataatccttaacaccgacagakatrgaagcaatgagcccttgatygtgcattcgtttaataaaaggaatgcgtcctgcctcatcaaaacggtgcataatgtagaagtaaccacctttagccagttgctctgctacattttcatccaaaatcgtctgcatattcgctggcacaacaggtag

SEQ ID NO: 4309 - DNA, 260 bp, Streptococcus pneumoniae
  misc_feature (1)..(260): tiling:Spneumo1:WAN024FM2; Cluster includes WAN0243S0 spr1 347||15903390|NP_358940.1|1331958..1332212|-|255 bp|Hypoth etical protein|S.pneumoniae|R6|NC_003098.1|ORF|220
gtgttgaatgttgaccaggatttcatgagcatatctaagtctaataaaagtgrttcagactggaagaaaactttcacagtgaggayaaccaataggytagcaaatgacttgaataatgtcttgaaacaggytgataaagatactcctaataccccaacttggctaaactcagctgcttctaaagctaaagatgatgacagagyatataaactactgaagactcttataccaggagaaaattacctatcatgttaactaat

SEQ ID NO: 4310 - DNA, 328 bp, Streptococcus pneumoniae
  misc_feature (1)..(328): tiling:Spneumo1:WAN024GDC; Cluster includes WAN0244B4 spr0 658||15902702|NP_358252.1|662219..662449|-|231 bp|Hypothet ical protein|S.pneumoniae|R6|NC_003098.1|ORF|210
gtgttgactgctccagacttcacttctccacaggctgcaagaagtgctacacttgcaagcgccacaaacgatagggcaaattttttcttcatcttttttgtctccttatttcttaaatagtctgttaagaatataccgaattatcagaaaattgtcaatgttttccttgaactttttcgatgatarcgttttcctatcgataaagattgcccacaaagggtgtttccaactcttggatatgacaaaccctaacttttttaataaatttttccttgctcaagcgtccgaccaattgctccacttcttgagttggaacatagagttgtaa

SEQ ID NO: 4311 - DNA, 279 bp, Streptococcus pneumoniae
  misc_feature (1)..(279): tiling:Spneumo1:WAN024GER; Cluster includes WAN023LU1 3149 93_1151b||||607505..607783|+|279 bp|EGAD orf prediction|S. pneumoniae|R6|NC_003098.1|ORF|110
gtgttgagacgaaacgctaaagagttcgcggtgggcgacaggatttttatagcgttcctccagaagctgggtctgctcgacaacctgacgggcataagagagaaactccatsccatcacgggtcaaggtgattcccttgggattgcggataaagatctcaatgcccatttcattttccaaatctcgcactgcattggagagacttggctgagtgataaagagttgcttggctgcctcattcatggagccagtttcgacgattttgataatataatgtaa

SEQ ID NO: 4312 - DNA, 315 bp, Streptococcus pneumoniae
  misc_feature (1)..(315): tiling:Spneumo1:WAN024DXG; Cluster includes WAN023KFP 3132 88_3541a||||1901927..1902211|-|285 bp|EGAD orf prediction| S.pneumoniae|R6|NC_003098.1|ORF|220
gtgttgatagcaccgacactatcgttaaacatgtttgagaatgtcaagatagtgatgaaggctgggacagcccaaggaagaaggaaaataacaccaaagatacgttttcctttgataaatggttggttggcaatgatagctgtgaagataccaattacgatttgtaaagtagaagctgccaaagcccaaatgatagtccaagaaagaacagaaccaaaggcagaacggaaggtactcaagctccaaatgtttgtaaagttggtcaaaccaacccagtccaacaacttgtttggtggcaagtgttggaagtcgtag

SEQ ID NO: 4313 - DNA, 285 bp, Streptococcus pneumoniae
  misc_feature (1)..(285): tiling:Spneumo1:WAN024GK2; Cluster includes WAN023LZZ 3145 39_870a||||462930..463214|-|285 bp|EGAD orf prediction|S.p neumoniae|R6|NC_003098.1|ORF|110
gtgttgcgatcgataagttttgtaaatactccacccattgtttcgataccaagtgacaatggcgttacatcaagaaggacaacgtccttgacatcaccagtaatcacaccaccttggatagccgcacccatagcaactacttcatcagggtttactgatttgtttggttctttaccagtttcagctttaacagcttcaacaacggcagggatacgagttgaaccaccaacaaggataacttcgtcgatttctgacaagctcaaacctgcatcygaaagggcttga

SEQ ID NO: 4314 - DNA, 78 bp, Streptococcus pneumoniae
  misc_feature (1)..(78): tiling:Spneumo1:WAN024CM8; Cluster includes WAN023SE4 NC_0 03028.1_710||||537240..537317|+|78 bp|Glimmer 2.02 orf pre diction|S.pneumoniae|TIGR4|NC_003028.1|ORF|010
gtgttgggatttgaacagaccaacgagttcatagtggtgtatgccaatgactttgataagtctacgcgtcagacttat

SEQ ID NO: 4315 - DNA, 105 bp, Streptococcus pneumoniae
  misc_feature (1)..(105): tiling:Spneumo1:WAN024CNY; Cluster includes WAN0246SQ 5613 45-56-0||||||105 bp|DNA Streptococcus pneumoniae phage Dp- 1 open reading frame 252|S.pneumoniae||WAN0246SQ|ORF|000
gtgttgtataggtcgaaactaattttgcatattttctatatttcaaaagtgcttttgagatatcgttatcaaaatgctcgacaatactttcgcctgttcctctag

SEQ ID NO: 4316 - DNA, 324 bp, Streptococcus pneumoniae
  misc_feature (1)..(324): tiling:Spneumo1:WAN024G3Q; Cluster includes WAN023LF7 3139 96_1974b||||1067241..1067564|+|324 bp|EGAD orf prediction| S.pneumoniae|R6|NC_003098.1|ORF|110
gtgttgyttcacgtaatcaatacgaccatcatcgtaaacagtgttatcracgaactcatctttatagccgagaccattttcagtgatgtaaatcttcttgtagttaggataatctttcttcacacgcatgatttggtcatacaaaccttgagggtagataatccaatcccaatccgtgcgtggtacatagtcaggagctacacgacgaccaacacctttgatttgatacttagagcttcctttttyacctttaccattatggataatttcagtttctccatcaaaggcttccatccagtcactcatatagtagttgattcctag

SEQ ID NO: 4317 - DNA, 1005 bp, Streptococcus pneumoniae
  misc_feature (1)..(1005): tiling:Spneumo1:WAN024FNL; Cluster includes WAN023PB2 pne4 5_17||||14054..15058|+|1005 bp|Type 22F capsule operon, Gl immer 2.02 orf prediction|S.pneumoniae||WAN01UCHA|ORF|000
gtgtttaatatcaatgaccagtctattatttatgttgcatgtccttattttaataaaacaggtggaacggagctcgtccatcaattagtttattctattaatcattttggggggaaagctatcgttgcttattatggtagtgaaagtgctccaaatgaggtgaatcctgcgtttagagaatatgtttctacgtttgttgatataaaagatgttattgactctcttgataatattattattttaccggaaattaatccggatttagccgctaatctagagtctattcaaaaagcagtatggtggatgagcgttgacaattatttgaagcgtaatggtattttaggttccttggaacattttggacttttacgaacaattaaattatttgtaaaaggaaatattaaaataggtggatatagaatagataaagagattccccatctttatcaaagtgaatacgccaagcaatttcttctagctaaaggtgtcaaaaagtactatagattgtctgattatttaaacgagtcttatattcagcgatctatttcaacagacactaaaaaagatgttattctttacaatcctaaaaaagggattgaatttactcgtgagctaattaaacaggctccagaattaacgttctctccaattgagaatatgtcaactgaacaggtgaaaaaattactttcaaaaagcaaagtatatattgattttggcaaccatcctgggaaagatagattcccacgggaggcagcgatatcaggttgttgtgtgataactgggaaacgaggttctgcaaaatattataaggatattcctattccagattcatacaaatttgaagacactgttgaaaatatccccaacattattgagaccctgaaatcatgcttaaaaaattatgacaaacatactgttgactttgagaaatatcaacaatatattaaatctgaacatgatttatttgaaagagatgtgaaagaattattcactaggaataggggt

SEQ ID NO: 4318 - DNA, 2378 bp, Streptococcus pneumoniae
  misc_feature (1)..(2378): tiling:Spneumo1:WAN024COK; Cluster includes WAN0241Z2 SP17 59||15901590|NP_346194.1|1659636..1662008|-|2373 bp|prepro tein translocase, SecA subunit|S.pneumoniae|TIGR4|NC_00302 8.1|ORF|021
gtgtttagacgtttaggtcaagatttccagcttaggaaagtgaaaaagattttaaagcagattaatgccctgaaaggcaagatgtcctctctttcggatcaagaattagtagctaaaacagtagagtttcgtcagcgtctttccgagggagaaagtctagacgatattttggttgaagcttttgctgtggtgcgtgaagcagataagcggattttagggatgtttccttatgatgttcaagtcatgggagctattgtcatgcactatggaaatgttgctgagatgaatacgggggaaggtaagaccttgacagctaccatgcctgtctatttgaacgctttttcaggagaaggagtgatggttgtgactcctaatgagtatttatcaaagcgtgatgccgaggaaatgggycaagtttatcgttttctaggattgaccattggtgtaccatttacggaagatccaaagaaggagatgaaagctgaagaaaagaagcttatctatgcttcggatatcatctacacaaccaatagtaatttaggttttgattatctaaatgataacctagcctcgaatgaagaaggtaagtttttacgaccgtttaactatgtgattattgatgaaattgatgatatcttgcttgatagtgcacaaactcctctgattattgcgggttctcctcgtgttcagtctaattactatgcgatcattgatacacttgtaacaaccttggtcgaaggagaggattatatctttaaagaggagaaagaggaggtttggctcactactaagggggccaagtctgctgagaatttcctagggattgataatttatacaaggaagagcatgcgtcttttgctcgtcatttggtttatgcgattcgagctcataagctctttactaaagataaggactatatcattcgtggaaatgagatggtactggttgataagggaacagggcgtctaatggaaatgactaaacttcaaggaggtctccatcaggctattgaagccaaggaacatgtcaaattatctcctgagacgcgggctatggcctcgatcacctatcagagtctttttaagatgtttaataagatatctggtatgacagggacaggtaaggtcgcggaaaaagagtttattgaaacttacaatatgtctgtagtacgcattccaaccaatcgtccgagacaacggattgactatccagataatctatatatcactttacctgaaaaagtgtatgcatccttggagtacatcaagcaataccatgctaagggaaatcctttactcgtttttgtaggctcagttgaaatgtctcaactctattcgtctctcttgtttcgtgaagggattgcccataatgtcctaaatgctaataatgcggcgcgtgaggctcagattatctccgagtcaggtcagatgggggctgtgacagtggctacctctatggcaggacgtggtacggatatcaagcttggtaaaggagtcgcagagcttgggggcttgattgttattgggactgagcggatggaaagtcagcggatcgacctacaaattcgtggccgttctggtcgtcagggagatcctggtatgagtaaattttttgtatccttagaggatgatgttatcaagaaatttggtccatcttgggtgcataaaaagtacaaagactatcaggttcaagatatgactcaaccggaagtattgaaaggtcgtaaataccggaaactagtcgaaaaggctcagcatgccagtgatagtgctggacgttcagcacgtcgtcagactctggagtatgctgaaagtatgaatatacaacgggatatagtctataaagagagaaatcgtctaatagatggttctcgtgacttagaggatgttgttgtggatatcattgagagatatacagaagaggtagcggctgatcactatgctagtcgtgaattattgtttcactttattgtgaccaatattagttttcatgttaaagaggttccagattatatagatgtaactgacaaaactgcagttcgtagctttatgaagcaggtgattgataaagaactttctgaaaagaaagaattacttaatcaacatgacttatatgaacagtttttacgactttcactgcttaaagccattgatgacaactgggtagagcaggtagactatctacaacagctatccatggctatcggtggtcaatctgctagtcagaaaaatccaatcgtagagtactatcaagaagcctacgcgggctttgaagctatgaaagaacaratycrtgcggatatggtgcgtaatctcctgatggggctggttgaggtcactccaaaaggtgaaatcgtgactcattttccataactaat

SEQ ID NO: 4319 - DNA, 563 bp, Streptococcus pneumoniae
  misc_feature (1)..(563): tiling:Spneumo1:WAN024DB8; Cluster includes WAN02441W spr0 990||15903034|NP_358584.1|975065..975622|+|558 bp|Conserve d hypothetical protein|S.pneumoniae|R6|NC_003098.1|ORF|111
gtgtttatgaatatttggaccaaattagcaatgttttctttttttgaaacggatcgcttgtatttgcgtcctttcttttttagtgatagtcaggacttccgcgagatagcttcaaatccagaaaatcttcaatttattttcccaacgcaggcaagtctggaagaaagtcaatatgcactggccaattactttatgaagtcccctttgggagtgtgggcaatttgtgaccagaaaaatcaacaaatgattggttctattaaatttgagaagttagatgaaatcaaaaaagaagctgagcttggctattttttgagaaaagatgcttggtcgcaaggatttatgacagaggttgttagaaaaatttgtcagctttcttttgaggaatttggcttaaaacaattatytatcattacccaccttgaaaatraagctagccaaagagttgctcttaagtctggatttagtttgttccgtcagtttaagggaagtgatcgttacacaagaaaaatgcgggattatcttgaatttcggtatgtaaaaggagagttcaatgagtaactaat

SEQ ID NO: 4320 - DNA, 231 bp, Streptococcus pneumoniae
  misc_feature (1)..(231): tiling:Spneumo1:WAN024FRU; Cluster includes WAN023L5S 3151 52_2366||||1265293..1265523|+|231 bp|EGAD orf prediction|S .pneumoniae|R6|NC_003098.1|ORF|110
gtgtttcaaaatttcagctggttcaccccagagagtaatctcatccttggcaaagatatcgacacggtcatcggctaccaaacggtgaccacgtttgacaagctcaagacctgtctcrctcttaccaattccactatctccctgaatcaagacgcccatcccataaatatccatcaagacaccgtgcacactggtacgttctgccaaacgagaatccagatagctagataa

SEQ ID NO: 4321 - DNA, 327 bp, Streptococcus pneumoniae
  misc_feature (1)..(327): tiling:Spneumo1:WAN024GJ5; Cluster includes WAN023LYU 3142 58_921||||484256..484582|-|327 bp|EGAD orf prediction|S.pn eumoniae|R6|NC_003098.1|ORF|110
gtgtttcaagcttgcgagttcaccatcatagataacgacaccatcacggataacacggactttagagtcacgggcaaccttaccgttgataaccataaatccaccgatagttcccactttagacaccttgaaggtttcacggataaccgcttcaccaataactttttcttcaaattctggatcaagcatccctttcatagcttcttccatctcttcgataaccttgtagataatgctgtgaagacggatttccacatcgtcagcttctgcttgttgacgagcttgtggtgtagggcgtacgttgaaaccaacgataaaggcatttga

SEQ ID NO: 4322 - DNA, 489 bp, Streptococcus pneumoniae
  misc_feature (1)..(489): tiling:Spneumo1:WAN024G4M; Cluster includes WAN023LGE 3148 63_1930b||||1044494..1044982|+|489 bp|EGAD orf prediction| S.pneumoniae|R6|NC_003098.1|ORF|110
gtgtttcataagagtcttaacaactgcaagcgaaagaaggtctgttacagtagtcttcttcccagttgcttccatgattggctcaagaaccttcttacgaagagccaacatttcagtcatatcaacttcatagttgagggtgaaggttggcgcagtcaagtaagattcaaccatgcgttgggcaataaccttacgcattggtgtcattggaatacgctcgattttaccatatggtgttacgttatcagggacttcttccactttttcaatctgagcaggagatttgatgctatcgttttcgatattttcaggaagcagggccaaaacatccttcttcatgattttaccacgatgaccggttccttggatttcctgccaagcaatgttatgttcgagggcaattcgttttgcaagtggcgaaatgcgaaccacgtttgtgtctttataagtttccacgtcttctttgtggacacgaccgtttgcacctga

SEQ ID NO: 4323 - DNA, 324 bp, Streptococcus pneumoniae
  misc_feature (1)..(324): tiling:Spneumo1:WAN024G8K; Cluster includes WAN023LLQ 3150 28_1624b||||862475..862798|+|324 bp|EGAD orf prediction|S. pneumoniae|R6|NC_003098.1|ORF|110
gtgtttccccataatttcgataatcaaggtagcctggatatggtctccaatctcgtttttattggaaactgtmatttccacaatacggtcattttccacttgctcaatcgactcaatcagggccccctgcaaatactttctcaaaaccatgataaaggtagaaggttgagctggattttcaaaagtcgtttgggtcagctgaatgcgtccaaaaactggatgggcagaaaggagcaggcgatggctttggcgattgctgcggatttgcaagaccaactcttgttcaaaaggctgattgattttctggatgcgaccattcactaa

SEQ ID NO: 4324 - DNA, 225 bp, Streptococcus pneumoniae
  misc_feature (1)..(225): tiling:Spneumo1:WAN024BF9; Cluster includes WAN0241OZ SP21 40||15901953|NP_346557.1|2050206..2050415|-|210 bp|hypothe tical protein|S.pneumoniae|TIGR4|NC_003028.1|ORF|021
gtgtttcgcgtgaaacagaagaattatctggtttcaaatgctacagttagacaaacttatgataaaatagcagaaagtgaatgtttcctaagagcaattggaggtattatgctacacttaaaattagtaaaacaagaaatagaagctgaaaagccagcatctgtagaagcttggrtcatttccgtcaaatttaaaaaaggttgctaccgacatatactarctaat

SEQ ID NO: 4325 - DNA, 300 bp, Streptococcus pneumoniae
  misc_feature (1)..(300): tiling:Spneumo1:WAN024GGE; Cluster includes WAN023LWC 3149 87_1046b||||546767..547066|+|300 bp|EGAD orf prediction|S. pneumoniae|R6|NC_003098.1|ORF|110
gtgtttctgattccagttattgatgaattgagcgttagaagttccggtatcctcttgtgttgttttaccagcgatctggtcaagagaagtcaaaggatttttcttgttgctgacaaggacgaggggattgttggaaattggaagcgagtaaaggtatttttcagcacgctcttttgtgtaactcaagttattggccgcagcctgatagtgaccagaatcaagtcctgggaagatgctctcccaggcggttctttggaattgaatctcgtagtcgctgagtttttcatctactgcctttaa

SEQ ID NO: 4326 - DNA, 349 bp, Streptococcus pneumoniae
  misc_feature (1)..(349): tiling:Spneumo1:WAN024F5L; Cluster includes WAN023LY8 3129 60_948||||494016..494279|-|264 bp|EGAD orf prediction|S.pn eumoniae|R6|NC_003098.1|ORF|200
gtgtttctgtgtttatttcaccaacttcttcatctcatcaatacgtgctacggtcacatcatacttggcttggtagtcggcttgtttgtctttttctttttggacaacttctggtttagcgttggcgacgaagcgttcgttgctgagttttttgccaaccatgtcgagttctttctgccatttggcaagttctttttccagacgtgccaattcttcttcgacattcaagaggtctaccagtggcaagaagatttcggctcctgtaataacgcttgacatagccagttcaggtgcagggatggttgatgcgatttccaagtgttctggatttgtaaagcgtttgatgtag

SEQ ID NO: 4327 - DNA, 109 bp, Streptococcus pneumoniae
  misc_feature (1)..(109): tiling:Spneumo1:WAN024D9L; Cluster includes WAN023RDN cont ig_1547_1||||281..361|-|81 bp|Glimmer 2.02 orf prediction| S.pneumoniae|670|WAN01UDL4|ORF|001
gtgtttgaccagtcgcaagtgaacaatagtgtctgccgttttcagaaagaaagtcttcatcatgggaaatgaaaataacggtttgcctggtcttttgaatytggccttt

SEQ ID NO: 4328 - DNA, 117 bp, Streptococcus pneumoniae
  misc_feature (1)..(117): tiling:Spneumo1:WAN024BEA; Cluster includes WAN023XYD AL44 9941.1_10||||11466..11573|+|108 bp|Glimmer 2.02 orf predic tion|S.pneumoniae||AL449941.1|ORF|000
gtgtttgagctgacttcgtcagttctatccacaaccttaaaacggtgttttgagcagtctgtgcctagctttctagtttgctttttgatttttattgagtatgarttacctaaatta

SEQ ID NO: 4329 - DNA, 108 bp, Streptococcus pneumoniae
  misc_feature (1)..(108): tiling:Spneumo1:WAN024EVO; Cluster includes WAN023X8F AX56 7507.1_1||||1..108|+|108 bp|Glimmer 2.02 orf prediction|S. pneumoniae||AX567507.1|ORF|000
gtgtttgatatctatcaaacactttttctttttattgttggctctataatatttgtagtgggtaaatcccctatagatattatggagcctattttattgctaactaat

SEQ ID NO: 4330 - DNA, 264 bp, Streptococcus pneumoniae
  misc_feature (1)..(264): tiling:Spneumo1:WAN024G6I; Cluster includes WAN023L8N 3151 41_2255b||||1211995..1212258|+|264 bp|EGAD orf prediction| S.pneumoniae|R6|NC_003098.1|ORF|110
gtgtttggaaaattttctctaatagctttcaagagcttggactctgtaatggtatccagtgccgaggttgcatcatctaggatgagaaacggagcctggcgcaagactgctcgggcgatagacaatctttgtttttgtccacctgagaaatttcgcccccctgcctcaactagagcatccaagagtccttccttttcactgacaaaatccttagcttgcgcaatctccaaggcctgccagagttcctggtcagatacttcttga

SEQ ID NO: 4331 - DNA, 975 bp, Streptococcus pneumoniae
  misc_feature (1)..(975): tiling:Spneumo1:WAN024FDR; Cluster includes WAN023R11 cont ig_1420_6||||3566..4513|-|948 bp|Glimmer 2.02 orf predicti on|S.pneumoniae|670|WAN01UDWM|ORF|000
gtgttttacgggcttggtatcttaatgatggaaacatggcaagagttaaaagttacagtgaagcgtgagggagaggagttggtttccaatctcttgattgagytrggwgcscaaggkgtwgcrattgaagacagymtggactatgtgggaaatgtkgaccgmttcggygarattttcccagaggtsgagcarcargaagaaatcgtagtgacmgcctactaccctgamacggtkgatgtrrcagyrgttgargcggayttgcaggctcgymtrkcagaattgacsgaytttatggayytrggagarktmaaratrggcacgactgccttgrctgaggaagactgggctgacaactggaagaagtattatgaaccggcacgcatcacccatgacctgaccatcgtaccgtcatggacggactatgaggcaacagcaggagaaaagattatcaagctggatcctggtatggcctttgggacagggacccacccaacaaccaagatgagcctctttgccttggaacaggttcttcgtggtggcgaaacagtgctagatgtagggactggttcaggggttctttctattgcaagctcactcctaggtgccaaggagattttcgcctatgacytggatgatgtggcggttcgtgtcgctcaggaaaatattgagctcaacactggtatggaaaatatccatgtagcagcaggagayttgcttaagggtgtggaaattgaggcagatgtgattgtggctaatatcttggcggatatcctcattcatctaatagacgatgcctatcgtttggtcaaggatgaaggctacctcatcatgagtggcattatcaaggacaagtgggacatggtgcgccagtcggctgagtcagctggatttttcctcgaaactcacatggttcaaggggaatggaatacctgtgtctttaagaaaaccaaggatatctctggtgtgattggaggc

SEQ ID NO: 4332 - DNA, 81 bp, Streptococcus pneumoniae
  misc_feature (1)..(81): tiling:Spneumo1:WAN024DP7; Cluster includes WAN023SKC NC_0 03098.1_1289||||1007825..1007905|+|81 bp|Glimmer 2.02 orf prediction|S.pneumoniae|R6|NC_003098.1|ORF|100
gtgttttataaataccatctatctcgctatttttacacagacaaattcccagttatgagtattrrtaaaaaatccattcat

SEQ ID NO: 4333 - DNA, 371 bp, Streptococcus pneumoniae
  misc_feature (1)..(371): tiling:Spneumo1:WAN024CYA; Cluster includes WAN023M1I 3127 76_804b||||426380..426724|+|345 bp|EGAD orf prediction|S.p neumoniae|R6|NC_003098.1|ORF|220
gtgttttttagtttggatacaaccttgccaaaaacaggacctggaacctcagccttcatcacctctaggtggctatttttggcattgtccataatagcaagtgcaaaaacaagcactcccatccctccaatcaagtgggtaaaacttcgccagaagaggagggaacggctgagaaccgaaacgtcgttcaaaatacttgctccagtagttgtaaayccagaactaatttcaaaaaaggcatcaataaggctggggatttgcccagaaaagacaaaggggagaccaccaaagaaagaccaaaggatccaacagagggcaacgatcaagactccctccttggcataaatccgttgattttttggcttctgtaa

SEQ ID NO: 4334 - DNA, 114 bp, Streptococcus pneumoniae
  misc_feature (1)..(114): tiling:Spneumo1:WAN024F7N; Cluster includes WAN023S99 NC_0 03028.1_2117||||1599030..1599134|-|105 bp|Glimmer 2.02 orf prediction|S.pneumoniae|TIGR4|NC_003028.1|ORF|011
gtgttwatactyttcraaaatctcttcaaaccacgtcagcttcgccttgccgtaggtatggttactgacttcgtcagttyyatcyacaacctcaaaacmrtgtttctaactaat

SEQ ID NO: 4335 - DNA, 63 bp, Streptococcus pneumoniae
  misc_feature (1)..(63): tiling:Spneumo1:WAN024A5L; Cluster includes WAN024EER R6.I G_1201.2.1||||1162876..1162938|+|63 bp|Between spr1160 (+ strand) and spr1161 (+ strand)|S.pneumoniae|R6|NC_003098.1 |IG|110
gttaatagagttttttttgacatagactttgggctctactaggtaaagtagagctttttgtta

SEQ ID NO: 4336 - DNA, 105 bp, Streptococcus pneumoniae
  misc_feature (1)..(105): tiling:Spneumo1:WAN024A8Z; Cluster includes WAN024EGP-rc R 6.IG_1058||||998562..998666|-|105 bp|Between spr1019 (+ st rand) and spr1020 (hlpA) (+ strand)|S.pneumoniae|R6|NC_003 098.1|IG-rc|110
gttaatgattcctccarataatttctaattaacaaatataatcatatcctaaaatcccttttaggtcaagttaaaaacgctatttcttccmattttatttatttt

SEQ ID NO: 4337 - DNA, 266 bp, Streptococcus pneumoniae
  misc_feature (1)..(266): tiling:Spneumo1:WAN0249G8; Cluster includes WAN024E4J-rc R 6.IG_2152.1||||1927856..1928121|-|266 bp|Between spr1945 ( pcpA) (- strand) and spr1946 (+ strand)|S.pneumoniae|R6|NC _003098.1|IG-rc|110
gttaatttcttttttaacccackttaatttcttttttaacccactttaatttcttttttaacacgggttaaaaaagaaattaaagtgggttaattttycttgacttaaaatttaaaaatgatatactgtgtttatggagagatgacaatttataaaatgtactactctattctactagataatgattgaataaaactttttataacaacggctagcaaagttataattttatatctattagaaaataaatatgtaaggaaatttaa

SEQ ID NO: 4338 - DNA, 69 bp, Streptococcus pneumoniae
  misc_feature (1)..(69): tiling:Spneumo1:WAN024AQ8; Cluster includes WAN024EPM-rc R 6.IG_356||||337024..337077|-|54 bp|Between () (+ strand) a nd spr0333 (+ strand)|S.pneumoniae|R6|NC_003098.1|IG-rc|11 0
gttacagtcttgcaagacctttctatatgtccactttaaaaaatgaggttgagaaaatttctcagcccc

SEQ ID NO: 4339 - DNA, 61 bp, Streptococcus pneumoniae
  misc_feature (1)..(61): tiling:Spneumo1:WAN0249DQ; Cluster includes WAN024E37-rc R 6.IG_2242||||2028032..2028092|-|61 bp|Between spr2035 (+ s trand) and spr2036 (+ strand)|S.pneumoniae|R6|NC_003098.1| IG-rc|110
gttacctcgtagaatgatagaaaactcagttggttaacccaactgagttttgaagttttat

SEQ ID NO: 4340 - DNA, 178 bp, Streptococcus pneumoniae
  misc_feature (1)..(178): tiling:Spneumo1:WAN024AGG; Cluster includes WAN024EKB R6.I G_752||||728271..728360|+|90 bp|Between spr0728 (glnQ) (+ strand) and spr0729 (folD) (+ strand)|S.pneumoniae|R6|NC_0 03098.1|IG|110
gttagctttgtttagctatttgtagycwrytttaaamkttmaagasaagattagtgaaaagytcaaccagagctttttcttatagtttraarctataggatwrcctaggaaagaagtgttagagctacattgtattttttggtataattaaagatatttgtaagaaaagagaagtgat

SEQ ID NO: 4341 - DNA, 80 bp, Streptococcus pneumoniae
  misc_feature (1)..(80): tiling:Spneumo1:WAN0249YO; Cluster includes WAN024EBV-rc R 6.IG_1414||||1352983..1353062|-|80 bp|Between spr1370 (- s trand) and spr1371 (- strand)|S.pneumoniae|R6|NC_003098.1| IG-rc|110
gttaggaaaagtatcatagattgctttttttggacttttaagatataatattatggattatcaacaaggaggaaaaactt

SEQ ID NO: 4342 - DNA, 83 bp, Streptococcus pneumoniae
  misc_feature (1)..(83): tiling:Spneumo1:WAN024AP4; Cluster includes WAN024EP2-rc R 6.IG_420.1||||393907..393989|-|83 bp|Between spr0396 (prfC ) (+ strand) and spr0397 (+ strand)|S.pneumoniae|R6|NC_003 098.1|IG-rc|110
gttagtgaggcagttagctagttcgccaaatagcgactagcgtccaacaatttggaactttagttccaattgttggtactgag

SEQ ID NO: 4343 - DNA, 89 bp, Streptococcus pneumoniae
  misc_feature (1)..(89): tiling:Spneumo1:WAN024A7G; Cluster includes WAN024EFR-rc R 6.IG_1119.2.2||||1077280..1077368|-|89 bp|Between spr1081 (- strand) and spr1082 (lepA) (- strand)|S.pneumoniae|R6|N C_003098.1|IG-rc|110
gttatcagaaatgcctttccttgttcacaggaaatttatataagaatcaatagtaaagcaggcttagatggtctgcttttttagttttt

SEQ ID NO: 4344 - DNA, 56 bp, Streptococcus pneumoniae
  misc_feature (1)..(56): tiling:Spneumo1:WAN024AM9; Cluster includes WAN024ENM R6.I G_489||||472051..472106|+|56 bp|Between spr0465 (ip) (- st rand) and spr0466 (- strand)|S.pneumoniae|R6|NC_003098.1|I G|110
gttatgattctcctttttgataagataataaatagttatagagtgttatctgaaaa

SEQ ID NO: 4345 - DNA, 160 bp, Streptococcus pneumoniae
  misc_feature (1)..(160): tiling:Spneumo1:WAN0249YA; Cluster includes WAN024751-rc R 6.IG_160.1.1||||149105..149264|-|160 bp|Between spr0139 (u gd) (+ strand) and spr0140 (mutR) (+ strand)|S.pneumoniae| R6|NC_003098.1|IG-rc|110
gttatgtttttcctaatagtataccggaagagtgaaaggattttataatggagcggttacaaagaacctactttctattaaacagtatactatgaaaatgtgaaaatttaacatttttttgtacaaattttataaattattkcctttttaatatcaatag

SEQ ID NO: 4346 - DNA, 198 bp, Streptococcus pneumoniae
  misc_feature (1)..(198): tiling:Spneumo1:WAN0249XM; Cluster includes WAN024EB7 R6.I G_1487||||1425363..1425560|+|198 bp|Between spr1440 (- str and) and spr1441 (oxlT) (- strand)|S.pneumoniae|R6|NC_0030 98.1|IG|110
gttattcttctttctaaaggtggtgcgaagccaccctatagggcttagtttatacttttctttttatgacgtattttcatataactagatataaaatcgtgttgcttcttttccacaaaagaaaagtactgttttctttgcaacctatctagtataacacaagaccagagcaaaagatagccccatttctacagaaaa

SEQ ID NO: 4347 - DNA, 157 bp, Streptococcus pneumoniae
  misc_feature (1)..(157): tiling:Spneumo1:WAN0249RV; Cluster includes WAN024EG3 R6.I G_1098.2.1||||1053900..1054056|+|157 bp|Between spr1059 (- strand) and spr1060 (phpA) (- strand)|S.pneumoniae|R6|NC_ 003098.1|IG|110
gttcctaagacaagagctaacagactggccgtcaataatagtattgttctttttttcatcattactccttaactagtgtttaactgattaattagccagtaaatagtttatctttatttacactatctgttaagatatagtaaaatgaaataagaac

SEQ ID NO: 4348 - DNA, 157 bp, Streptococcus pneumoniae
  misc_feature (1)..(157): tiling:Spneumo1:WAN0249RW; Cluster includes WAN024EG3-rc R 6.IG_1098.2.1||||1053900..1054056|-|157 bp|Between spr1059 (- strand) and spr1060 (phpA) (- strand)|S.pneumoniae|R6| NC_003098.1|IG-rc|110
gttcttatttcattttactatatcttaacagatagtgtaaataaagataaactatttactggctaattaatcagttaaacactagttaaggagtaatgatgaaaaaaagaacaatactattattgacggccagtctgttagctcttgtcttaggaac

SEQ ID NO: 4349 - DNA, 112 bp, Streptococcus pneumoniae
  misc_feature (1)..(112): tiling:Spneumo1:WAN0249SS; Cluster includes WAN024E5Y-rc R 6.IG_1988||||1803012..1803123|-|112 bp|Between A (transpos ase) (- strand) and spr1829 (nadC) (- strand)|S.pneumoniae |R6|NC_003098.1|IG-rc|110
gttgtaaaataaactaactttttaaaggatgtctttcctctagaacgagttttatgtcagatagtttaaacgcctcttcaaatatagtaaaatgaaccaaaaatagtacaca

SEQ ID NO: 4350 - DNA, 208 bp, Streptococcus pneumoniae
  misc_feature (1)..(208): tiling:Spneumo1:WAN0249FP; Cluster includes WAN024E4B R6.I G_2165||||1944898..1945105|+|208 bp|Between spr1958 (arcC) (+ strand) and spr1959 (+ strand)|S.pneumoniae|R6|NC_0030 98.1|IG|110
gttgttttactaataagatgtattctatttctagtatctttatatcaaattagaaattattcttgaaaacatgtacaatatttcaaaagatactagttttagactttaatatggtaaaacaaatataaatagaaagcgttttcttgaatgtttatttaagaaagtagttggttttttacactttgttagacatcaggaggaaaaacaa

SEQ ID NO: 4351 - DNA, 78 bp, Streptococcus pneumoniae
  misc_feature (1)..(78): tiling:Spneumo1:WAN0249EV; Cluster includes WAN024E3O R6.I G_2202||||1989650..1989727|+|78 bp|Between spr1995 (pspC) (- strand) and spr1996 (- strand)|S.pneumoniae|R6|NC_00309 8.1|IG|110
gtttatttccttctatattttttctttaaccttactatatyacttcaatatgaactgtatataaatcgaattttgtat

SEQ ID NO: 4352 - DNA, 151 bp, Streptococcus pneumoniae
  misc_feature (1)..(151): tiling:Spneumo1:WAN0249DU; Cluster includes WAN024E39-rc R 6.IG_2240||||2025027..2025177|-|151 bp|Between spr2033 (im dH) (- strand) and spr2034 (trpS) (- strand)|S.pneumoniae| R6|NC_003098.1|IG-rc|110
gtttattttacaagaaactatcwtttctatctcgaagaaaagatagttttttatttacccctgtaacatttgacaaatttttatagaatggtatgatagatacaatataaaaagagtcaagctcaaaaagaaagaaaagaggaaacttcga

SEQ ID NO: 4353 - DNA, 96 bp, Streptococcus pneumoniae
  misc_feature (1)..(96): tiling:Spneumo1:WAN0249FA; Cluster includes WAN02471H-rc R 6.IG_224.2||||203231..203326|-|96 bp|Between spr0203 (rpsH ) (+ strand) and spr0204 (rplF) (+ strand)|S.pneumoniae|R6 |NC_003098.1|IG-rc|110
gtttattttctcctgttaaattgtcaggccagaacggccagttttcacggggttcagatacttatttagttcaagagctgaactgaacacgmtcta

SEQ ID NO: 4354 - DNA, 76 bp, Streptococcus pneumoniae
  misc_feature (1)..(76): tiling:Spneumo1:WAN024A36; Cluster includes WAN024ED8-rc R 6.IG_1323.2||||1274805..1274879|-|75 bp|Between spr1279 (- strand) and spr1280 (- strand)|S.pneumoniae|R6|NC_003098. 1|IG-rc|110
gtttcatttagtattattttgcatacctaaaatacagtaaaaaatcagtcatcttggtatgctcctgctttcacta

SEQ ID NO: 4355 - DNA, 84 bp, Streptococcus pneumoniae
  misc_feature (1)..(84): tiling:Spneumo1:WAN0249KX; Cluster includes WAN024E72 R6.I G_1873||||1727556..1727639|+|84 bp|Between spr1758 (cinA) (- strand) and spr1759 (lytR) (- strand)|S.pneumoniae|R6|N C_003098.1|IG|110
gtttcctcctacctatctattcgtatttttttgaaaaaatcgcaggaattttcctacgattgatttttttatttgtatcaaaag

SEQ ID NO: 4356 - DNA, 58 bp, Streptococcus pneumoniae
  misc_feature (1)..(58): tiling:Spneumo1:WAN0249ZK; Cluster includes WAN024ECA-rc R 6.IG_1387.1.2||||1328626..1328683|-|58 bp|Between spr1343 (tufA) (- strand) and spr1344 (glpF) (- strand)|S.pneumoni ae|R6|NC_003098.1|IG-rc|110
gtttctatttcattttactataaaataagcgattaggggggctattcttcgacctaca

SEQ ID NO: 4357 - DNA, 80 bp, Streptococcus pneumoniae
  misc_feature (1)..(80): tiling:Spneumo1:WAN024ABH; Cluster includes WAN024EHX-rc R 6.IG_960.2||||909128..909207|-|80 bp|Between spr0921 (xylH ) (- strand) and spr0922 (tdk) (+ strand)|S.pneumoniae|R6| NC_003098.1|IG-rc|110
gtttcttgcttcacgtccatttctaaatttttgctacattctagtatatcataattttcttaagctttaaacggcaaaat

SEQ ID NO: 4358 - DNA, 120 bp, Streptococcus pneumoniae
  misc_feature (1)..(120): tiling:Spneumo1:WAN024AEE; Cluster includes WAN024EJC-rc R 6.IG_841.2.1||||808137..808256|-|120 bp|Between spr0805 (- strand) and spr0806 (+ strand)|S.pneumoniae|R6|NC_003098. 1|IG-rc|110
gtttgactacctcccataattttctgataatgattttctttttatttaattatagcacaattatgatatatatcaggtaatatcaagctatattatctcttagctactcaatttgaaatt

SEQ ID NO: 4359 - DNA, 1514 bp, Streptococcus pneumoniae
  misc_feature (1)..(1514): tiling:Spneumo1:WAN024CIK; Cluster includes WAN023I0H 16S rRNA|16S rRNA|||15161..16674|+|1514 bp|16S rRNA|S.pneumoni ae|R6|NC_003098.1|RNA|440
gtttgatcctggctcaggacgaacgctggcggcgtgcctaatacatgcaagtagaacgctgaaggaggagcttgcttctctggatgagttgcgaacgggtgagtaacgcgtaggtaacctgcctggtagcgggggataactattggaaacgatagctaataccgcataagagtrgatgttgcatgacatttgcttaaaaggtgcacttgcatcactaccagatggacctgcgttgtattagctagttggtggggtaacggctcaccaaggcgacgatacatagccgacctgagagggtgatcggccacactgggactgagacacggcccagactcctacgggaggcagcagtagggaatcttcggcaatggacggaagtctgaccgagcaacgccgcgtgagtgaagaaggttttcggatcgtaaagctctgttgtaagagaagaacgagtgtgagagtggaaagttcacactgtgacggtatcttaccagaaagggacggctaactacgtgccagcagccgcggtaatacgtaggtcccgagcgttgtccggatttattgggcgtaaagcgagcgcaggcggttagataagtctgaagttaaaggctgtggcttaaccatagtaggctttggaaactgtttaacttgagtgcaagaggggagagtggaattccatgtgtagcggtgaaatgcgtagatatatggaggaacaccggtggcgaaagcggctctctggcttgtaactgacgctgaggctcgaaagcgtggggagcaaacaggattagataccctggtagtccacgctgtaaacgatgagtgctaggtgttagaccctttccggggtttagtgccgtagctaacgcattaagcactccgcctggggagtacgaccgcaaggttgaaactcaaaggaattgacgggggcccgcacaagcggtggagcatgtggtttaattcgaagcaacgcgaagaaccttaccaggtcttgacatccctctgaccgctctagagatagagytttccttcgggacagaggtgacaggtggtgcatggttgtcgtcagctcgtgtcgtgagatgttgggttaagtcccgcaacgagcgcaacccctattgttagttgccatcattyagttgggcactctagcgagactgccggtaataaaccggaggaaggtggggatgacgtcaaatcatcatgccccttatgacctgggctacacacgtgctacaatggctggtacaacgagtcgcaagccggtgacggcaagctaatctcttaaagccagtctcagttcggattgtaggctgcaactcgcctacatgaagtcggaatcgctagtaatcgcggatcagcacgccgcggtgaatacgttcccgggccttgtacacaccgcccgtcacaccacgagagtttgtaacacccgaagtcggtgaggtaaccgtaaggagccagccgcctaaggtgggatagatgattggggtgaagtcgtaacaaggtagccgtatcggaag

SEQ ID NO: 4360 - DNA, 247 bp, Streptococcus pneumoniae
  misc_feature (1)..(247): tiling:Spneumo1:WAN024ANT; Cluster includes WAN024E1L-rc T IGR4.IG_158||||158945..159191|-|247 bp|Between SP0162 (+ s trand) and SP0163 (+ strand)|S.pneumoniae|TIGR4|NC_003028. 1|IG-rc|020
gtttgcatyttcctyttctatttgatttcartkttaattgtaacatgattaaatctaaawttcaaatmwatkwtwyraaagatacamattgtakataaaatctattkkstaattcatcgtcaacttatttactttccatttcttcattcaaacgctttataaacttattcagcttcaacgccacttttcatacctatcactttctaattccaactgttcccctagttctttcagcccctttccgtat

SEQ ID NO: 4361 - DNA, 391 bp, Streptococcus pneumoniae
  misc_feature (1)..(391): tiling:Spneumo1:WAN0249QU; Cluster includes WAN024E7S-rc R 6.IG_1756.2||||1679269..1679659|-|391 bp|Between spr1707 ( amiA) (- strand) and spr1708 (- strand)|S.pneumoniae|R6|NC _003098.1|IG-rc|110
gttttataagtttgaaatcttctaccttgggtaggagatttttttatacgatgggcatgtcgtgcatctgaggtgtaagtcctctgtagggmtccactaccggtgaatacaatagcgctccccaagcctgactatcgtgaggtagcggattaaaatggtctggggatagatcgttttaagtctgacgcaggaaataagaattgtcagagaaagcaatagtgaaatcgtaggctatgaatagaaacgtgatagcgaggagcatatagtggataaggtagcgagaaattttaaagtataaaagatagtcttaatctatatatgtaaatcacaaaagtaattgaattcggrataaggttggtgtgaaaagacatagtaaactgaatcttgaata

SEQ ID NO: 4362 - DNA, 51 bp, Streptococcus pneumoniae
  misc_feature (1)..(51): tiling:Spneumo1:WAN024AD9; Cluster includes WAN024EIQ-rc R 6.IG_898||||856082..856132|-|51 bp|Between spr0862 (rpmI) (+ strand) and spr0863 (rplT) (+ strand)|S.pneumoniae|R6|N C_003098.1|IG-rc|110
gttttatttcctccaaatatttcctagaattgtttacttacagtcaagcta

SEQ ID NO: 4363 - DNA, 130 bp, Streptococcus pneumoniae
  misc_feature (1)..(130): tiling:Spneumo1:WAN0249FD; Cluster includes WAN024E43 R6.I G_2180||||1964066..1964195|+|130 bp|Between spr1973 (fcsK) (- strand) and spr1974 (fcsR) (+ strand)|S.pneumoniae|R6| NC_003098.1|IG|110
gttttattttttcaatatgtgaacgcttacttgaataatgttcaaatgttaacccaatattcataaaaataattcaaattcctccaatttgtgctataatatagttgaaatgataaattaggaggagctt

SEQ ID NO: 4364 - DNA, 53 bp, Streptococcus pneumoniae
  misc_feature (1)..(53): tiling:Spneumo1:WAN0249LE; Cluster includes WAN024E7B-rc R 6.IG_1858.2.1||||1716852..1716904|-|53 bp|Between spr1743 (- strand) and spr1744 (+ strand)|S.pneumoniae|R6|NC_00309 8.1|IG-rc|110
gtttttactatactttgatattcaaatatgttatactatgrttatcaaagtaa

SEQ ID NO: 4365 - DNA, 145 bp, Streptococcus pneumoniae
  misc_feature (1)..(145): tiling:Spneumo1:WAN0249V7; Cluster includes WAN024E9Q R6.I G_1591||||1528905..1529049|+|145 bp|Between spr1544 (secA) (- strand) and spr1545 (- strand)|S.pneumoniae|R6|NC_0030 98.1|IG|110
gtttttccttactttaaattccgaatattttagaatgttcctttaattttagcacaattactgattattttcaaggaagaatccccattttgaaaaggaaaaagaggttagtttycaagctaacctctcygacttttatgaywst

SEQ ID NO: 4366 - DNA, 101 bp, Streptococcus pneumoniae
  misc_feature (1)..(101): tiling:Spneumo1:WAN024ANA; Cluster includes WAN024EO3-rc R 6.IG_462.2.2||||439088..439188|-|101 bp|Between spr0438 (p yrG) (+ strand) and spr0439 (- strand)|S.pneumoniae|R6|NC_ 003098.1|IG-rc|110
kaaccaagaagctatccatcataattggatggcttyttactttttcctaagcaagactaggmtgaatgaaactgaaagagtattctgcagatatataatat

SEQ ID NO: 4367 - DNA, 121 bp, Streptococcus pneumoniae
  misc_feature (1)..(121): tiling:Spneumo1:WAN024A3V; Cluster includes WAN024EDI R6.I G_1315||||1266220..1266334|+|115 bp|Between spr1271 (rpsU) (- strand) and spr1272 (nagB) (- strand)|S.pneumoniae|R6| NC_003098.1|IG|110
katctattyyattytacacgtaaaaggaataattgtcaagcaaaaatgcggtttaattttgattttttcttccatttatacaagagttgaaagcgttcaatagaacattgcttttttattt

SEQ ID NO: 4368 - DNA, 152 bp, Streptococcus pneumoniae
  misc_feature (1)..(152): tiling:Spneumo1:WAN024ANS; Cluster includes WAN024E1K TIGR 4.IG_159||||160059..160210|+|152 bp|Between SP0163 (+ stra nd) and SP0164 (+ strand)|S.pneumoniae|TIGR4|NC_003028.1|I G|020
kgaatacggtgttcwagtgagcatcgtttttyaaayctarttyrratacaaaaaagtatyaaayaaaaaaaaataaaaaaasattataaaaayamttgacaagctaattttgaagtgataaaataaatgcaagaaaacraaaggagaggtat

SEQ ID NO: 4369 - DNA, 285 bp, Streptococcus pneumoniae
  misc_feature (1)..(285): tiling:Spneumo1:WAN024B5B; Cluster includes WAN023KOK 3135 86_3139a||||1671504..1671788|-|285 bp|EGAD orf prediction| S.pneumoniae|R6|NC_003098.1|ORF|210
ktgaaagcgaagctgtttagccaagycatagtaagggctaaacatatccatagtaataattttgacgcgacatcggacrrctctatcrtakykaagaaagtgatytcgratgayagcttgtgttctwccctcaagaacagtgatgatattgagattgttaaaatcttgcgcaatgaagctcatctttccctttgtaaaagcatactcatcccaagacataatctcaggaagacrmgaaaaatcatgtttaaagtgaaaatcattgagcttacgaataacagttga

SEQ ID NO: 4370 - DNA, 1751 bp, Streptococcus pneumoniae
  misc_feature (1)..(1751): tiling:Spneumo1:WAN024FR3; Cluster includes WAN0243TL spr1 290|ABC-N/P|15903333|NP_358883.1|1285200..1286945|+|1746 b p|ABC transporter ATP-binding/membrane-spanning protein - unknown substrate|S.pneumoniae|R6|NC_003098.1|ORF|111
ktgcgaatgaatggagggtttcaaatgaaagagttttataaaaaaagatttgctcttacagatggaggagcaagaaatttaagtaaagcaacactggcttcatttttcgtttattgtataaacatgcttcctgccatattacttatgatttttgctcaggaagttttggaaaatatgggcaaaagcaatggcttttatatagtattctcagttttgaytttgatagcaatgtatattttgctttctatcgaatacgataaattatataacacaacctatcaagaaagtgcagatttaagaataaggacagcggagaatttatcaaaattacctctatcttacttttctaaacatgacatttccgacatttcacaaacaatcatggctgatattgaaggcatagagcatgcaatgagccactcaataccaaaggtgggcggcatggtactgtttttcccattaatatctgtaatgatgctagcgggcaatgtcaagatgggtttagctgtaattattccatctattttaagctttatatttatacctttatctaaaaaatatcaggttaatggacagaatagatattatgatgtcttaagaaaaaactcagaaagctttcaagaaaatatcgaaatgcaaatggagattaaagcatataatttatcgaaggatattaaagatgacttatataaaaaaatggaagatagtgagaragtacacttaaaggcrgaagtaactacaattttaactttgtctatatcttcaatatttagctttatatctcttgctgttgtgatatttgtcggcgtaaatctaattattaataaagagataaattctctctaccttataggatatttactagctgctatgaagataamagactctttagatgcatctaaagagggcttgatggaaatattttatttatcgcccaaaatagaaagattaaaagaaattcaaaatcaagatttacaagaaggcgatgactatagcttaaaaaaatttgatattgatctaaaagatgttgagtttgcctacaataaagacgmaaaagttttaaatggtgtaagttttaaagctaagcagggagaggtcactgctttggtaggtgcaagtggctgcggtaaaacaactatcttgaaacttatatcaagactttatgattatgacaagggacaaatcttaatcgatggcaaagatataaargaaatatcaacagaatcyctttttgataaggtstctatwgttttccaagatgtggttctctttaatcaaagcrttatggaaaatattagaatcggwaagcaagatgcaagtgacgaagaggttaaaagagcagcaaaacttgcaaattgcacagattttatagaaaaaatggataaaggtttcgatacagttattggtgaraacggagctgagctatcaggaggagaaagacaaagattatcaatagccagagccttcttaaaagatgcgccgatattgatcttagatgagataacagcaagccttgatgttaacaacgagaaaaagattcaagagtctttaaataatttagttaaagataaaactgttgtaatcatttcacatagaatgaaatccatagaaaatgcagacaagatagtagttcttcaaaacggaagagtagaaagcgaaggtaagcatgaagagcttttacaaaaatcaaaaatttacaaaaatttaatagaaaagacaaaaatggcagaagaatttatttattarctaat

SEQ ID NO: 4371 - DNA, 1511 bp, Streptococcus pneumoniae
  misc_feature (1)..(1511): tiling:Spneumo1:WAN024FL2; Cluster includes WAN0243RL spr1 362|atpA|15903405|NP_358955.1|1344781..1346286|-|1506 bp|P roton-translocating ATPase, F1 sector, alpha-subunit|S.pne umoniae|R6|NC_003098.1|ORF|221
ktggcaattaacgcacaagaaatcagcgctttaattaagcaacaaattgaaaatttcaaacccaattttgatgtgactgaaacaggtgttgtaacctatatcggggayggtatcgcgcgtgctcayggccttgaaaatgtcatgagtggagagttgttgaattttgaaaacggctcttatggtatggctcaaaacttggagtcaacagacgttggtattatcatcctaggtgactttacagatatccgtgaaggcgatacaatccgccgtacagggaaaatcatggaagtccctgtaggtgaaagtctgattggtcgtgttgtggatccgcttggtcgtccagttgacggtcttggagaaatccacactgataaaactcgtccagtwgargcaccagctcctggtgttatgcaacgtaagtctgtttcagaaccattgcaaactggtttgaaagctattgacgcccttgtaccgattggtcgtggtcaacgtgagttgattatcggtgaccgtcagacagggaaaacaaccattgcgattgatacaatcttgaaccaaaaagatcaagatatgatctgtatctacgtcgcgattggacaaaaagaatcaacagttcgtacgcaagtagaaacacttcgtcagtacggtgccttggactacacaatcgttgtgacagcctctgcttcacaaccatctccattgctcttcctagctccttatrctggggtygctatggcggaagaatttatgtatcaaggtaagcatgttttgattgtataygatgatctatcaaaacaagcggtagcttatcgtgaactrtcgctcttgcttcgtcgtcctccaggtcgtgaagccttcccaggggatgttttctatctccacagccgtttgcttgagcgctcagctaaagtttctgatgaacttggtggtggatcaattacagccctaccatttatcgagacacaagcaggagatatctcagcctatatcgcaaccaacgtgatttctatcactgatggacaaatcttccttggcgatggcctcttcaatgcaggtattcgtccagccatcgatgcgggttcatctgtatctcgtgtaggtggttctgcacaaatcaaagccatgaagaaggttgctggtacacttcgtatcgaccttgcttcataccgtgagttggaagcctttactaagtttggttctgacttggacgcagcaacacaggctaagttgaaccgtggacgtcgtaccgttgaggtcttgaaacaacctgttcacaaaccattacctgttgagaaacaagtaaccattctttatgctttgacacatggtttcttggatactgttccagtagatgatattgttcgtttcgaggaagagttccatrccttctttgatgctcaacatccagagattttggaaaccattcgtgatacaaaagacttgccagaagaagcagtcttggatgctgcgattacagagtttctcaatcaatctagcttccaataactaat

SEQ ID NO: 4372 - DNA, 225 bp, Streptococcus pneumoniae
  misc_feature (1)..(225): tiling:Spneumo1:WAN024FBQ; Cluster includes WAN023KP5 3150 48_3107||||1656128..1656352|-|225 bp|EGAD orf prediction|S .pneumoniae|R6|NC_003098.1|ORF|110
ktgggtcagactagccgatggaaagacaaaaaggctcagcaccattcccagtttggcggcttcagtcgttccaactgtactcggtgcagcaaactgattttgggtaatagtctgcatgagaaggcctgccatactcatactagaggcagtcaggagaatactgatagttcttgggagacgggactcttgaaagaggagccaggtctgctggtcgaaatcaaatag

SEQ ID NO: 4373 - DNA, 258 bp, Streptococcus pneumoniae
  misc_feature (1)..(258): tiling:Spneumo1:WAN024DMF; Cluster includes WAN0244RJ spr0 067||15902111|NP_357661.1|74079..74336|+|258 bp|Conserved hypothetical protein|S.pneumoniae|R6|NC_003098.1|ORF|100
mtgacaaattcaaagtatattacttgtttgaaacgttcagagggccagttgygtgggattcaaaagatgattgaaggagatcgtgactgtgctgatattgtgacgcaactgacagcagtgaratctagtgtagagcgcgtgattgagatgataattaccgaaaatcttactgaatgtatcaatcagccmctagatgattctgaagctcaaaaggaacgcctagaaaaggctatccgatacttgattaaacggaaataa

SEQ ID NO: 4374 - DNA, 812 bp, Streptococcus pneumoniae
  misc_feature (1)..(812): tiling:Spneumo1:WAN024D5O; Cluster includes WAN0244BQ spr0 636|thiM|15902680|NP_358230.1|643414..644217|+|804 bp|Hydr oxyethylthiazole kinase|S.pneumoniae|R6|NC_003098.1|ORF|11 1
mtgatgcaggmattkacaaatccytttcctataggctctagttccctcattcactgyatkaccaatgagatttcttgtgagatgctggcaaatgggattttggctctgggatgcaaacctgtcatggcagatgatycccgtgargttcttgattttactaagcaaagycaggctctcttcatcaatttrggkcatttgtcagctgagaaggaraaagcaatccgyatrgcagcttyktatgcarmycaakyttstctcccratggtagtagatgcggttggcgtaacrrcttcatccattcgtaagagcttagtyaragaccttttakactatagacctacggtycttaaaggaaacatgtcagaaattcgaagtcttgttggattaaagcaycacggcgttggggtcgatgcgagtgctaaagatcaagaaacggaggatttgcttcaagtcttgaaagactggtgtcagacctatcmtggtatgtcwttcttagtyacwggycccaaggacctyrtygtttcgraraatcargtygctgtactkgrraatggctgtrcwgaattagactggataacagggacaggagayttggttggagccttaacagcygtttttctcagccaaggaaagactggttttgaagcttcttgcttagcagtctcttatctcaatatcgctgctgagaaaatagttgttcaaggaatgggattggaagaatttcgttaccaagtactcaatcagctttcgctcctaagaagagatgaaaattggctagataccatcaaaggagaggtttatgaatarctaat

SEQ ID NO: 4375 - DNA, 2264 bp, Streptococcus pneumoniae
  misc_feature (1)..(2264): tiling:Spneumo1:WAN024GC5; Cluster includes WAN024499 spr0 725|clpE|15902769|NP_358319.1|723946..726204|-|2259 bp|ATP dependent protease|S.pneumoniae|R6|NC_003098.1|ORF|221
mtgctttgtcaaaactgtaaaattaacgactcaacaattcatctttacaccaatctcaatggaaaacaaaaacaaattgacctctgtcaaaactgctataagattatcaaaacagatcctaacaatagcctcttcaaaggtatgacggatctgaacaatcgtgacttcgatccctttggtgatttcttcaatgatctaaacaatttcagaccttctagcaatactcctcctattcccccaacccaatcaggtggaggttacggtggaaacggcggttatggttcccaaaatcgtggatctgctcaaactccgccacctagccaagaaaaaggcctgctgraagaatttggtattaatgtaactgaaattgcccgtcgtggagacattgaccccgttattgggcgcgacgatgagattatccgtgtcatcgagattctcaatcgtagaaccaagaataatcctgtccttatcggtgaacctggtgtcggaaaaacggccgttgtcgaaggtctagctcagaaaattgtcgatggcgatgtgccacataaactccaaggtaaacaagtcatccgtctggatgtggttagcttagttcaaggaacggggattcgaggacaatttgaagaacgcatgcaaaaactcatggaagaaattcgcaaacgtgaagacatcatcctctttatcgatgaaatccatgaaattgttggtgctggttctgcgagtgatggtaatatggacgcaggaaatatcctcaagccagcccttgctcgtggagaactgcaactagtcggtgctactaccctcaatgaataccgtatcattgaaaaggatgctgccctcgagcgtcgtatgcagcctgttaaagtcgatgaaccaacggtggaygaaacaatcactattctcaaagggattcaaaagaaatacgaagattaccaccacgttcaatatacmgatgctgcgattgaagcagctgcaactctttccaatcgctacatccaagatcgcttcttgcctgacaaggccattgacctcctagatgaagctggttctaagatgaacttgaccttgaattttgtggatcctaaagtaattgatcagcgcttgattgaggctgaaaatctcaagtctcaagctacacgagaagaagattttgagaaggcggcctacttccgcgaccagattgccaagtataaggaaatgcaaaagaaaaagatcacagaccaggatactcctakcatcagcgagaaaactattgagcacattatcgagcagaaaaccaatatccctgttggtgatttgaaagagaaagaacaatctcaactcatccatctagccgaagatctcaagtctcatgttattggycaagatgatgcagtcgataagattgccaaggctattcgccgtaatcgtgtcggacttggtacccctaaccgcccaatcggaagcttcctcttcgttggrccaactggtgtcggtaagacagaactttccaaacaactggctatcgaactttttggttctgctgatagtatgattcgctttgatatgagtgaatacatggaaaaacatagtgtrgctaagttggtcggcgcycctccaggttatgttggctatgatgaggctggtcaattaactgaaaaagttcgccacaatccrtattctctcatccttctcgatgaagtggaaaaagctcacccagatgttatgcacatgtttcttcaagtcttggacgatggtcgtttgacagacgggcaaggacgcaccgttagcttcaaggatgccatcattatcatgacctcaaatgcaggtacaggaaagaccgaagctagcgttggatttggtgctrctagagaaggacgtaccaattctgtcctcggtgaactcggtaacttctttagcccagagtttatgaaccgttttgatggcattatcgaatttaaggctctcagcaaggataacctccttcagattgtcgagctcatgctagcagatgttaacaagcgcctctctagyaacaacattcgtttggatgtaactgayaaggtcaaggaaaagttggttgacctaggttatgatccaaaaatgggagcacgcccacttcgtcggactattcaagactatattgaggacacaatcactgactactaccttgaaaatccaagcgaaaaagatctcaaagcagttatgactagcaagggaaacattcagattaaatctgccaaaaaagctgaagttaaaagttctgaaaaagaaaaataactaat

SEQ ID NO: 4376 - DNA, 70 bp, Streptococcus pneumoniae
  misc_feature (1)..(70): tiling:Spneumo1:WAN024A5J; Cluster includes WAN024EEP R6.I G_1204||||1166108..1166176|+|69 bp|Between spr1163 (lemA) (- strand) and spr1164 (gidB) (+ strand)|S.pneumoniae|R6|N C_003098.1|IG|110
ratataagtcctttctrcttttagattagtaccagtatatcaaattttywatgattgtggtaaaataaga

SEQ ID NO: 4377 - DNA, 133 bp, Streptococcus pneumoniae
  misc_feature (1)..(133): tiling:Spneumo1:WAN024A85; Cluster includes WAN024EG7-rc R 6.IG_1088||||1045151..1045283|-|133 bp|Between spr1049 (ac oC) (- strand) and spr1050 (acoB) (- strand)|S.pneumoniae| R6|NC_003098.1|IG-rc|110
rgttacataakataagttatgtaaataaaataaagctgacgagaaactttgtatcttttaggtgcagagctcttcgtcattaatatcttagattagagcacgggctaaaagatcggaaaaaagataaatctcc

SEQ ID NO: 4378 - DNA, 133 bp, Streptococcus pneumoniae
  misc_feature (1)..(133): tiling:Spneumo1:WAN0249N3; Cluster includes WAN024E8C R6.I G_1708.2||||1633088..1633220|+|133 bp|Between spr1659 (- s trand) and spr1660 (exoA) (+ strand)|S.pneumoniae|R6|NC_00 3098.1|IG|110
rtattttcactccctttcataaaatcattcttaattataaacgaaagagagtaatttttcaaaccatacgttggggaaatagatctttttttggtataataaaatctataatctgaatgaaaaaggtaacttt

SEQ ID NO: 4379 - DNA, 1005 bp, Streptococcus pneumoniae
  misc_feature (1)..(1005): tiling:Spneumo1:WAN024G5I; Cluster includes WAN023PV8 pne1 0_13||||10061..11065|+|1005 bp|Type 7C capsule operon, Gli mmer 2.02 orf prediction|S.pneumoniae||WAN01UCKC|ORF|000
rtgaaaaatatggaacaaattgattttgtggtgacatgggttaatrrtaaagatgtagattggtgtaaaagaaagtctgaatttgagaaagaatataatatatttcaagatttaaatagtgaagarcgataycgtgaatggggyyttatgaaatattggttyagagctgtggaaaaatatgccccttgggtaaataaaatttattttataacygaagggcatgtaccaaattggttagatgtaaatcatcctaaattggttcatgttaaacatgaggattatatygaaaaacagtttttgccaacttttaattcaaacgttatagagatgartttgattcatttgaaagatttatcagagaaatttgttctttttaatgatgatwstttcataaatgattttgtaaaacaaagtgatttttttgaaaataatttacccaaagatacgggkatttttagtcctttaataccwagagaaaattctttarctcctattgtattaaacaatatggagattattaacaaatatttttcaaagaaaaaaattcttgagcagaatttttctaagttttttaacatcaaatatggaaaacatctattgaagaatatttgtttactgccatggtcagatttgttaggcttttatratagtcatattccagtaagttattgtaaaagtaatttcttggaagtytatgagaaagaayatgmcatttttaatttgacgtttaaaaataaatttaggaataaaaatgagattaatcattggttaattagatattggcaattgtctagcggtaatttcataccwagaaacattaattttgggaaaaattatgccatttcaaatgawcctacggatattattaatgaattaaaaytttctaaatataagattatatgtattaatgatggtgaaagtatagatarttttgatgaagtgaaagrtctaatgattratgcttttgaaaaaaagtttcctgagaaatcgagttttgagaaaaag

SEQ ID NO: 4380 - DNA, 1239 bp, Streptococcus pneumoniae
  misc_feature (1)..(1239): tiling:Spneumo1:WAN024DJJ; Cluster includes WAN0244KK spr0 318|cps2K|15902362|NP_357912.1|318314..319552|+|1239 bp|Th e type 2 capsule locus of Streptococcus pneumoniae|S.pneum oniae|R6|NC_003098.1|ORF|100
rtgaaaatagcagtarcaggtacgggatatgttggyctatccattgcrgttttattgkctcarcawcatcaagtaatrgcggtggacattattcctgagaaggtcgarttaattaatcaaagaaagtcacctattcaagatgactayatagagaaatatctggcaraaaaggatttaaatttagtggctacattggatgcaaaagaagcatatmaagatgcggattttgttgtgattgcagctccaactaactatgatccaaagaagaacttytttgacacttctgctgtagagtctgtcattgaaacggygcttaaatataatccagatgcyatcatggtcattaaaagtacrgttccagttggttatacagagtcagctcgaaagaaatttcagactgaaaatatmttatttagtcctgaatttttgcgtgagtcaaargcrctttacgataacttatatcccagccgtattattttagggacagataaaaataatgaacgcttggtaagtgytgctgagacrtttgcgrgattgctccaagaaggcgctttaaaagaarayattgatacattrtacatgggctttactgaagctgaggcggtcaagctttttgcaaatacttacctwgctttgcgtgtttcttattttaatgagctggatacttattctgagatgamggggctagayactcaagctattattgatggagttggtttggatccmcgwatyggytckcactayaacaatccttccttcggstatggtggytaytgtctycctaaagataccaagcaacttcttgccaactatgaagatrtaccagragaacttataggagcyatagtacggagcaattcgacacgtaaagactttattgcygatcaggttcttaagatggtagattmttatgattattcagcccataatrttttyratgagagagtagaaaaagatattattattggyatctatagattgaccatgaagagtaatagcgataattttcgtcaaagytctattcaaggtattatgaaacgtataaaagctaagggagtaagagtagttatttatgaaccmactttagaaagygggagtacattttttggaagttccrttatcaatgatttagaggaattcaaacgactgagtaatgccattgttgctaatcgctatgataactcattagaagatgtcaaggaaaaagtctatacacgtgatatttttgaaagagattra

SEQ ID NO: 4381 - DNA, 1198 bp, Streptococcus pneumoniae
  misc_feature (1)..(1198): tiling:Spneumo1:WAN024FWR; Cluster includes WAN02416Y |cps 9vL||AAM62296.1|||1194 bp|putative alpha-1,4-glucosyltrans ferase Cps9vL|S.pneumoniae||AF402095|ORF|000
rtgaaaattttatttgtgaatatgttttayaatgaagmaggaggwgcacaaaagagyaccaaatttctagctgaacaacttgtaaaagaaggacatgaggtatttgcatactctgatgatgcyattgattcagatattgakgaagttattaatrgggttaagrtttttagaagaagaacyccgctttttagtcttcactatattttcagtgcyaagaagaatccagctaaacattttttctataaaatatttgaaacctataatgtatttgcgaaaaraaaatttatcratatcattgaggaartacaaccagatattgttcaytttaatacaatttcaggaatgtctttatcaatagttaaagaagctaaaaagagaaatatcagraccrtttggaccttgcgagactattggctagaatatccatggggkgagaaagatattkctcttatyaaactkctaaatagaatatatagaccttttgttaagaaaagtttaaracacttagacatagtaacagcaccwtcagcatttacyttgaataattttatcaataaaggatttattaacccatcttctcaaaaatgtatggycattgaaaatgctgttatattttcaaagrgtaarttggaaaatattatcaaacraaagcaagaaacaaaaagaaatccagaaaaaacgaattttctttttgtaggytctatacttgaaataaagggcgtttttaacttagtaawggcytttaaaaaactaactartccrgaaatttctttgaaaattgtaggaaaaggaaaagatttagaaaaacttcaaaaagaaatygaragtgatcctagaatacaatatttaggctttcaagatacaraaamcctctatraaacttatcaaaattcggatgtattggtcgtyccatcwgcttgggatgaaccgtttggtagagttgtaattgaaggaaatgcaaatggccttcckgtcatcacttcagatagaggtggattacctgaaattgtgcaaacagtaggaggaggrgaartttttacagayraatcgggaaatacattatatagtmttttaaagaaatttgtagaaatggaaaactacaatgtctattaccratgcattcttgagaatattgatatttattctatcgaaaaacaaagtgaaaagttyataakyttatwtagrkarrgawakygaa

SEQ ID NO: 4382 - DNA, 363 bp, Streptococcus pneumoniae
  misc_feature (1)..(363): tiling:Spneumo1:WAN024G5N; Cluster includes WAN023LI4 3146 36_1871a||||1010352..1010714|-|363 bp|EGAD orf prediction| S.pneumoniae|R6|NC_003098.1|ORF|110
rtgaacytcrtaaatattgacaggacgytcwkcaaagccccaacgttttcttcgtgccagccaaagtccatccttccatttcttctcaggaagctctgttacgattgcccctgttcctggacgagcctcatacctgacagcaaaagggtcaatcttcatcagttgatgaccattttgacgtgtgacatgatatttgtaaatatgcccttcttgagccatattggtaaagacttcccagaccccaaaatcatttcttaccattggaatctgattttcaatccagttggtaaaatcaccaaccaagtgaacagcctgagcattaggtgcccaaacacggaaggtatagccatgctctccatttag

SEQ ID NO: 4383 - DNA, 285 bp, Streptococcus pneumoniae
  misc_feature (1)..(285): tiling:Spneumo1:WAN024GF6; Cluster includes WAN023LUH 3143 33_1131||||600364..600648|-|285 bp|EGAD orf prediction|S.p neumoniae|R6|NC_003098.1|ORF|110
rtgaccaagytcacctgctgcaccagcaacaccrtgaagcaatttgccttctgcgacrataccrccaccaacaccagtaccgagtgtyataaagacaacgtctggttggttatctccagcacccatccagcgctcaccaagagctgctacgttggcatcattatcgatgaaaaatggaatgcccaaagctttttcaatcttttgtttgattggttgaagggttttccagttcaagttgtaggcaccgataacagtccctttgtcacggtcaaccacacctggtga

SEQ ID NO: 4384 - DNA, 838 bp, Streptococcus pneumoniae
  misc_feature (1)..(838): tiling:Spneumo1:WAN024EZ6; Cluster includes WAN02441H spr1 005||15903049|NP_358599.1|987696..988526|+|831 bp|Conserve d hypothetical protein|S.pneumoniae|R6|NC_003098.1|ORF|221
rtgacgatwcagatgaagaatacaggtaaacgaattgatctgatagccaatagaaaaccgcagartcaaagggtyttgtatgaattgcgagatcgtttgaagagaaatcagtttatactcaatgayaccaatccggatattgtcatttccattggcggggatggtatgctcttgtcggcctttcataagtacgaaaatcagcttgasaaggtccgctttatcggtcttcayactggacatttgggcttctatacagattatcgtgattttgagttggacaagctagtgactaatttgcarctagatactggggcaagggtttcttaccctgttctgaatgtgaaggtctttcttgaaaatggtgaagttaagattttcagagcactcaacgaagccagcatccgcaggtctgatcgaaccatggtggcagatattgtaataaatggtgttccctttgaacgttttcgtggagacgggctaacagtttcgacaccgactggtagtactgcctataacaagtctcttggcggtgctgttttacaccctaccattgaagctttgcaattaacggarattgccagccttaataatcgtgtytatcgaacaytgggctcttccattattgtgcctaagaaggataagattgaacttattccaacaagaaacgattatcatactatttcggttgacaatagcgtttattctttccgtaatattgagcgtattgagtatcaaatcgmccatcataagattcactttgtcgcgactcctagccataccagtttctggaaccgtgttaaggaygcctttatcggygaggtggatgaaykarstwtga

SEQ ID NO: 4385 - DNA, 382 bp, Streptococcus pneumoniae
  misc_feature (1)..(382): tiling:Spneumo1:WAN024EW2; Cluster includes WAN023KFE 3148 15_3553b||||1907264..1907554|+|291 bp|EGAD orf prediction| S.pneumoniae|R6|NC_003098.1|ORF|220
rtgagcagtctcttcctgtggaagtgtgaawggatggtgggcgctcatgtagcggccttcttcttcagaccattcaaacatcggccagtcaaccacccaaaggaagttgaacttatcattatcaatcaagccaagctctttagcaatacgtccacgaagggcacccagtgttgcattagccacttcaagcgtatccgccacaaagagaaccaagtccttatcttcaagarcaagcgctgttgtcaattcttcttggataccagtcaagaacttggcaactggtccgtttaattctccatcaaccaccttgacccaagcaagacctttggcaccatactgtttggctacttccgtcatcttgtcgatgtctttacgtgaatag

SEQ ID NO: 4386 - DNA, 309 bp, Streptococcus pneumoniae
  misc_feature (1)..(309): tiling:Spneumo1:WAN024CAE; Cluster includes WAN023MA0 3132 62_324||||171458..171766|+|309 bp|EGAD orf prediction|S.pn eumoniae|R6|NC_003098.1|ORF|110
rtggaatgttgtgtttyttcgagaactgaattaaatcatctgttctcatcattttgccatcatgattcattatttcacaacataggccacactcttttagtccagctaattttaataaatcaacagttgcttctgtgtgtccatttctttctaggacaccacctttttttgcaattaaaggaaacatgtgtcctggcctgcgaaaatcagagggtgttatatcttcagctacacacatacgtgcggtcagtcctctttcctcggcagaaatacctgtggtcgtttctttataatcaattgaaactgtaa

SEQ ID NO: 4387 - DNA, 270 bp, Streptococcus pneumoniae
  misc_feature (1)..(270): tiling:Spneumo1:WAN024DWG; Cluster includes WAN023KE7 3130 86_3604||||1935556..1935825|+|270 bp|EGAD orf prediction|S .pneumoniae|R6|NC_003098.1|ORF|110
rtgraagctttcgtgcatgacacctgtaccaccatcgcaggcaaccagctgatccagcaagaattttttctctgccttatctcttgttgtcaakccttggatagaaagggcgattggccagatatagcgatagaaggtatgagaactkccgagaccgctwgcgtattctccttggtagaagtatggattttcagagctcaraatggtacgrcgagtrgcttgatacacttcatcatcgaycgaacagtagcccagatagggcgcagctag

SEQ ID NO: 4388 - DNA, 168 bp, Streptococcus pneumoniae
  misc_feature (1)..(168): tiling:Spneumo1:WAN024F3C; Cluster includes WAN0244FJ-5 sp r0499||15902543|NP_358093.1|497816..498883|+|1068 bp|Hypot hetical protein|S.pneumoniae|R6|NC_003098.1|ORF|120
rtgtacaatttcagcyaktcttgttataatcagcctataggaatcaaggaggtgactcttatggctgtttttgtgtctttggatggaattgtggtagaagtmcttgatgtcttttcttcttttaatggggatagtgagtttttcttgtgtatarcrtytydaactaat

SEQ ID NO: 4389 - DNA, 1407 bp, Streptococcus pneumoniae
  misc_feature (1)..(1407): tiling:Spneumo1:WAN024F85; Cluster includes WAN024113 |glf -like||AAL68431.1|||1104 bp|Glf-like protein|S.pneumoniae| |AF246898|ORF|220
rtgtacgattatcttrtygttggtgcyggtctytttrgygcagtmtttgcccatgaakyagccttaaaaggaaaaaargtaaaagttattgaaaaacgaaatcatatygygggtaatatctatactcgtgaasaggaaggaattcargttcatcartatggtgctcatatcttycatacttctgataaggagakctgggaktatgtraaycagtttgcagrgtttaaccgttayacmaattctcctgttgcaaactataagggwgagatttataacytwccttttaatatgaatacyttcaataaactytggggagttgtracgccagcagaagcacaagytaagattgakgaacaacgtgctattttaaatggtaaarctcctgaaaatttgraagaacargcgatttctcttgtaggtacagacatctacgaaaaattaatcaaagactatacagagaaacagtggggcaaaccractactgaacttccakcctttattattcgycgtttrccrgtacryctgacctatgataacaactattttaacgatacctatcaagggattccaattggtrratacactcaaatagttgaaaaaatgktggatyatgaaaatattgatgtagaaacaaaygttgatttctttgtgrayaaagagcaatatctgraagattttcctaagattgtcttwactggtatgattgatgaattctttgactataagttggscgaactagagtaccgtagtcttcgttttgaaaatgagrccttggatatggaaaattaccaaggaaatgcagttgtgaactatacggatgcagaaayyccatatactcgcattattgaacacaaacattttgagtttgggagtcaagcaaagacyatcattacyaaagaacattctaaaacatgggaaaaaggtgatgagccttattatccagttaataatgatcgtaataatcatttgtataaatcrtayaaaaaayttgctgatgagcaagggaatgttatctttggtggccgcttaggacactatcgttattacgatatkcaccaagtaattggagymgctttgcagtgcgtgagaaatgagttarwkthatactcaatgaaaayyaaagwgcaaactaggaarytagccgyagrytgctcaaarcastgttttraggttgyrgatrgaactgacgwagtcagctcaaaacacygttttgaggttgtggatagaactgacgwagtcagtaaccataysyacggcaargygamrytgacgtggtttgaagagaktttcgaagagtaywagtctccccacaataaaacgcatactatcaaggtttttatgtactgccccccaaaagttagacagaaagaatctaacttttggggggcagtacatttcaatacctga

SEQ ID NO: 4390 - DNA, 246 bp, Streptococcus pneumoniae
  misc_feature (1)..(246): tiling:Spneumo1:WAN024C7L; Cluster includes WAN023M7V 3153 56_453a||||233799..234044|-|246 bp|EGAD orf prediction|S.p neumoniae|R6|NC_003098.1|ORF|110
rtgtccaaaaactcgcggttgcatacgttttttagcccaacggccattgccatccatgatgatgccgatatgagcaggaacctgtgtcggaacctctacttccacagccttatctttcttaaaaaatccaaacatgatcttattcctattcaaaaatctatcgtttcattataccatatttccccattttcttctatcactaagctatttattctcaggcaccaagcccatttttcaaaaaaataa

SEQ ID NO: 4391 - DNA, 941 bp, Streptococcus pneumoniae
  misc_feature (1)..(941): tiling:Spneumo1:WAN024G84; Cluster includes WAN02443V spr0 919|dapA|15902963|NP_358513.1|906411..907346|+|936 bp|Dihy drodipicolinate synthase|S.pneumoniae|R6|NC_003098.1|ORF|1 11
rtgtcttatcaagatttaaaarartgtaaaatcatyacagcctttattacycccttccaygaggatggttccatyaactttgatgctattccagccttgattgagcatttattggmccatcatacggatggaattcttctcgcaggracsactgctgagagtccaactttgacccacgatgaggagttggagttrtttgcggctgtacaaaagrttgtcaatggacgmgttcctttgattgcgggtgtaggtactaatgatacgcgtgactctatygagtttgtcaaagaagtagcggaattyggyggtttygcwgctggkcttgctattgttccttactacaacaaaccttctcaagaaggratgtatcagcaytttaarrcyattgcagatgcttctgacctaccaattattatctataacattccagggcgtgtrgttgtygaattractccagaaaccatgcttcgcttggctgaycatccaaatattatcggtgtcaaagaatgtactagcttggctaatatggcttacttgattgagcacaarccwgaagagttcttgrtytatacwggtgaggatggagatgctttccatgccatgaaccttggggcggatggggttatttctgttgcctctcatacaaatggggatgaaatgcacgagatgtttaytgcsattgcagaaagygatrtgaagaaagccgcagcwattcarcgtaaattcattcctaaggttaatgctctcttctcttatccaagtcctgctccagttaaggcarttytkaactayatgggatttgaagctggaccmactcgtctacctcttgttccagcaccagaagaagatgcyaaacgcattatcaaggttgtcgtagatggcgactacgaagcracyaaggcaactgtaacaggkgtcttaagaccagattactaactaat

SEQ ID NO: 4392 - DNA, 285 bp, Streptococcus pneumoniae
  misc_feature (1)..(285): tiling:Spneumo1:WAN024C6P; Cluster includes WAN023M6E 3131 27_518||||264863..265147|+|285 bp|EGAD orf prediction|S.pn eumoniae|R6|NC_003098.1|ORF|110
rtgttcatctccaaaggcaatcaaatcttttttgtcacgattcattatcttgagcaagtagtccaaagcaaaggccttgttgacaccttttggggtacattcaaggatattgagcggacctccccaggtattgatagaaagttgatgctggtagaaggcgttcatktcttttgccaaggmatatttgtcactggctctrgtctgcaagaggatacagttagggtycttggtcaccaattcaggctggaattgatcttcaggctggaaagcttctacaccaaatag

SEQ ID NO: 4393 - DNA, 121 bp, Streptococcus pneumoniae
  misc_feature (1)..(121): tiling:Spneumo1:WAN024A5M; Cluster includes WAN024EES-rc R 6.IG_1199||||1162213..1162333|-|121 bp|Between spr1158 (- strand) and spr1159 (+ strand)|S.pneumoniae|R6|NC_003098.1 |IG-rc|110
taaaaaataaaactatcatagtaaatatgttaaaattttgaattttaattacaaagtttggtgtgctgatttgtagccttttcatggtataatcaagagagtaaatctttatggaggaagt

SEQ ID NO: 4394 - DNA, 99 bp, Streptococcus pneumoniae
  misc_feature (1)..(99): tiling:Spneumo1:WAN024AS5; Cluster includes WAN024EQP R6.I G_267||||243275..243373|+|99 bp|Between spr0246 (+ strand) and spr0247 (pulA) (- strand)|S.pneumoniae|R6|NC_003098.1 |IG|110
taaaaaatcctaatcaagtttattaggacaacaaatattgtacraaaattaatcccccgagctataatgcttgggggatttttctataggagggctagt

SEQ ID NO: 4395 - DNA, 70 bp, Streptococcus pneumoniae
  misc_feature (1)..(70): tiling:Spneumo1:WAN024AF6; Cluster includes WAN024EJQ R6.I G_813.2||||774316..774385|+|70 bp|Between () (- strand) an d spr0778 (fruR) (+ strand)|S.pneumoniae|R6|NC_003098.1|IG |110
taaaaaatgcttgacttcraaagaaagtatgatagaatgaatagtgtaaacgataacaggaggtgattcr

SEQ ID NO: 4396 - DNA, 88 bp, Streptococcus pneumoniae
  misc_feature (1)..(88): tiling:Spneumo1:WAN024AAO; Cluster includes WAN024EHJ R6.I G_987||||933709..933793|+|85 bp|Between spr0948 (nplT) (+ strand) and spr0949 (+ strand)|S.pneumoniae|R6|NC_003098.1 |IG|110
taaaaactagttgatgaagattatggtacatttcataccttatatagtataataaggctagttactaaacttgtaaaggagaacttaa

SEQ ID NO: 4397 - DNA, 165 bp, Streptococcus pneumoniae
  misc_feature (1)..(165): tiling:Spneumo1:WAN0249I2; Cluster includes WAN024E5H-rc R 6.IG_2034||||1845668..1845832|-|165 bp|Between spr1875 (- strand) and spr1876 (- strand)|S.pneumoniae|R6|NC_003098.1 |IG-rc|110
taaaaagattgtgtcagttttgtgacagagacctaacaaactatttcaagtaacctagtttgttacaaggaatagacagttctgttaaataggcccgagagggctttttttctacattttttgtgttatsatagacaggtactcatttgaaaggaatttgaaaga

SEQ ID NO: 4398 - DNA, 72 bp, Streptococcus pneumoniae
  misc_feature (1)..(72): tiling:Spneumo1:WAN024A9M; Cluster includes WAN024EH2 R6.I G_1031||||977769..977839|+|71 bp|Between spr0992 (map) (+ strand) and spr0993 (+ strand)|S.pneumoniae|R6|NC_003098.1 |IG|110
taaaaagtgaaaagactactggaagtttattttgataaaaaatccagtagatcttttcataataaaacgcat

SEQ ID NO: 4399 - DNA, 73 bp, Streptococcus pneumoniae
  misc_feature (1)..(73): tiling:Spneumo1:WAN024AIK; Cluster includes WAN024ELN R6.I G_651.1.1||||636102..636174|+|73 bp|Between spr0627 (lctO) (+ strand) and spr0628 (+ strand)|S.pneumoniae|R6|NC_0030 98.1|IG|110
taaaacagattgcctccactgaatgtggaggtttttcttcgtgtattggaagaataaattgctatcgaaaact

SEQ ID NO: 4400 - DNA, 87 bp, Streptococcus pneumoniae
  misc_feature (1)..(87): tiling:Spneumo1:WAN024A4D; Cluster includes WAN024790 R6.I G_141.2.2||||128269..128355|+|87 bp|Between spr0120 (+ str and) and spr0121 (pspA) (+ strand)|S.pneumoniae|R6|NC_0030 98.1|IG|110
taaaacayttgacaaatatttacggrggrrgctatacttaatataaktatagtctraaaatgactatcagaaaagaggtaaatttag

SEQ ID NO: 4401 - DNA, 182 bp, Streptococcus pneumoniae
  misc_feature (1)..(182): tiling:Spneumo1:WAN024AL7; Cluster includes WAN024EN4 R6.I G_539.1||||515126..515307|+|182 bp|Between spr0515 (metF) (+ strand) and spr0516 (pnpA) (+ strand)|S.pneumoniae|R6|N C_003098.1|IG|110
taaaagcaaaccattcttctcaggtgaggggaatggttcctttttaatggtaaagacctcactttttaagaaaaatatgataaaataaattctgtacgtacttgatacaaagatgaaggtattaaataatacaatgcatttaaactgtaagatttaacgacacgagtgagtcaaatcgatgt

SEQ ID NO: 4402 - DNA, 91 bp, Streptococcus pneumoniae
  misc_feature (1)..(91): tiling:Spneumo1:WAN024AAY; Cluster includes WAN024EHO R6.I G_980||||925965..926055|+|91 bp|Between spr0941 (+ strand) and spr0942 (ccrB) (+ strand)|S.pneumoniae|R6|NC_003098.1 |IG|110
taaaagtgttataatatacttgaaatgatagtccaaacttaaattaaaaaaattatatatgatatagaaaaattatattgagrttaatact

SEQ ID NO: 4403 - DNA, 54 bp, Streptococcus pneumoniae
  misc_feature (1)..(54): tiling:Spneumo1:WAN024A59; Cluster includes WAN024EEI R6.I G_1220.1||||1176515..1176568|+|54 bp|Between spr1176 (+ st rand) and spr1177 (rpmE) (+ strand)|S.pneumoniae|R6|NC_003 098.1|IG|110
taaaatacttgccaaacttttcagaatctgatagactagtatrgtaacaatcta

SEQ ID NO: 4404 - DNA, 379 bp, Streptococcus pneumoniae
  misc_feature (1)..(379): tiling:Spneumo1:WAN024A2T; Cluster includes WAN024ECX R6.I G_1337.1.1||||1289588..1289962|+|375 bp|Between spr1293 (+ strand) and spr1294 (- strand)|S.pneumoniae|R6|NC_003098. 1|IG|110
taaaatagagtctgttaaacatgtctatagaactagtaaattgtctaaaaatttaaaagatactaacacatattgatatttattagaaaattaacttcaggatttttacagtatttataaactttataatatgtatttatagtattartaatttccatatctttagggaaattatttatttacttaccataattaaagagatgagagataaatatcggcagtcttcggactgcctttatttttttacttaatttaatgcagtaaatcatacgattgaaaggaatctgcgttatatgctataattaggtagttaatctatacatttagaaaggtaaaatatagaattggagaatratatgggattttcatataataaatt

SEQ ID NO: 4405 - DNA, 215 bp, Streptococcus pneumoniae
  misc_feature (1)..(215): tiling:Spneumo1:WAN024AIP; Cluster includes WAN024ELQ-rc R 6.IG_648||||632362..632575|-|214 bp|Between spr0624 (glnP) (- strand) and spr0625 (+ strand)|S.pneumoniae|R6|NC_0030 98.1|IG-rc|110
taaaatgycctccttaataagtaagcgttyactttgtrtattacaaaaatatcttaactctttttcaaaacttttmaaatattttgtttggaaatttcagaaattttatgtctatgrtaaaaaatccttataacggcaataaaaaatagatattatccaaagaagattttaagtgctacaataactgtattatttctagatgggaggttctattt

SEQ ID NO: 4406 - DNA, 66 bp, Streptococcus pneumoniae
  misc_feature (1)..(66): tiling:Spneumo1:WAN024AND; Cluster includes WAN024EO5 R6.I G_462.2.1.1||||438797..438862|+|66 bp|Between spr0438 (pyr G) (+ strand) and spr0439 (- strand)|S.pneumoniae|R6|NC_00 3098.1|IG|110
taaaatttgaacaaattaattcggaaagccaaatcaatttctagcaaagttttaggaactggattg

SEQ ID NO: 4407 - DNA, 119 bp, Streptococcus pneumoniae
  misc_feature (1)..(119): tiling:Spneumo1:WAN0249GP; Cluster includes WAN024E4Q R6.I G_2124.2||||1899968..1900086|+|119 bp|Between spr1917 (mal M) (- strand) and spr1918 (malX) (+ strand)|S.pneumoniae|R 6|NC_003098.1|IG|110
taaaatttttacaaaaaatacttgcaaccgttttctatttgtgctatactaagctcataaaggaaaacgtttgcgtttccttatcaataaaacttgctattctttrggaggaatacact

SEQ ID NO: 4408 - DNA, 159 bp, Streptococcus pneumoniae
  misc_feature (1)..(159): tiling:Spneumo1:WAN024A3K; Cluster includes WAN024EDF R6.I G_1317.2||||1268615..1268769|+|155 bp|Between spr1273 (que A) (+ strand) and spr1274 (- strand)|S.pneumoniae|R6|NC_00 3098.1|IG|110
taaacaaaaagtgaacaaakctgaattctaatgtacagaagactaggcttgttcacttttttatagtcgctataagatgaccttatctatagctttttatatataattatatattcagacatactattatcaattttgtcgcagggaggaatctgttaa

SEQ ID NO: 4409 - DNA, 231 bp, Streptococcus pneumoniae
  misc_feature (1)..(231): tiling:Spneumo1:WAN0249RA; Cluster includes WAN024E6B R6.I G_1936.2.1||||1788652..1788882|+|231 bp|Between spr1818 (- strand) and () (- strand)|S.pneumoniae|R6|NC_003098.1|IG| 110
taaactaatacttatttaaaatcaaaaagagtagaaatttttatcagacaaacacatatatagtgtattgaatctataacagtaggccttaaatactaaaatatttctataaattaatttaactttcctgatagagctgttcatatcttatttcaattctctawattatacgttgaacaaaacccttctattkctttcttaaaratttataagagttataaaatctgttaa

SEQ ID NO: 4410 - DNA, 186 bp, Streptococcus pneumoniae
  misc_feature (1)..(186): tiling:Spneumo1:WAN0249MH; Cluster includes WAN024E82 R6.I G_1729.2.1.1||||1652598..1652783|+|186 bp|Between spr1680 (- strand) and spr1681 (- strand)|S.pneumoniae|R6|NC_00309 8.1|IG|110
taaactccttcgtcctccagtctacaaaagccttccattcgtactatcctatattttatgaggggacacatttttcctatcagaccatttattttaaagatagaagtaaatcataattgcttccatctgttcttttatagtatattgaagttagactagagcactgtatcttctaaaacattgata

SEQ ID NO: 4411 - DNA, 62 bp, Streptococcus pneumoniae
  misc_feature (1)..(62): tiling:Spneumo1:WAN024AQH; Cluster includes WAN024EPT R6.I G_331.2||||312372..312432|+|61 bp|Between spr0310 (dexB) ( + strand) and spr0311 (+ strand)|S.pneumoniae|R6|NC_003098 .1|IG|110
taaactttcattcttgaaattcaattaactttacaaattcccactattaaggagaaagaaga

SEQ ID NO: 4412 - DNA, 80 bp, Streptococcus pneumoniae
  misc_feature (1)..(80): tiling:Spneumo1:WAN0249NT; Cluster includes WAN024E8Q R6.I G_1671.2||||1598874..1598953|+|80 bp|Between spr1622 (- st rand) and spr1623 (+ strand)|S.pneumoniae|R6|NC_003098.1|I G|110
taaacttttcgccagtaaagttagcaaactatttttaaatcaatgacgggaaaaatagtttaaatgttaaatcgaaagga

SEQ ID NO: 4413 - DNA, 94 bp, Streptococcus pneumoniae
  misc_feature (1)..(94): tiling:Spneumo1:WAN024ACH; Cluster includes WAN024EIC-rc R 6.IG_938.2||||888167..888260|-|94 bp|Between spr0902 (+ st rand) and spr0903 (ccdA) (+ strand)|S.pneumoniae|R6|NC_003 098.1|IG-rc|110
taaagaaccaactttcttaataattctaatcctattttactatattcaattttatttgtaagctttctgctacgcaaaatcgtatcgggcacta

SEQ ID NO: 4414 - DNA, 191 bp, Streptococcus pneumoniae
  misc_feature (1)..(191): tiling:Spneumo1:WAN0249KP; Cluster includes WAN024E6X R6.I G_1878||||1731568..1731758|+|191 bp|Between spr1763 (plcR) (- strand) and spr1764 (+ strand)|S.pneumoniae|R6|NC_0030 98.1|IG|110
taaagataataaaccttcctatttgcttaatttcattataaagtttttagttcaaaatagcaagttaaaggaataaataattctttatggtaataaacaaaaaaaaaagttaaaaattacataaaaatacttgactaaataaaatatatctgttagaataaaaacaaggaaaaagaaaggggtttcattgc

SEQ ID NO: 4415 - DNA, 456 bp, Streptococcus pneumoniae
  misc_feature (1)..(456): tiling:Spneumo1:WAN024ACN; Cluster includes WAN0247H0-rc R 6.IG_118||||104786..105241|-|456 bp|Between spr0097 (- str and) and spr0098 (+ strand)|S.pneumoniae|R6|NC_003098.1|IG -rc|220
taaagatgcaacaccaattttctcatgatttatttctcctattatcgagagctattccgtagaaacagctatagtaatttgtcaacaagtatcgtagtccattggactcaccttccttctatttcatttcatttttaaacaacgaacttactcttaactagaagaatagttctcttctgtatcaggtctttgaacaaccagagtagtattaatcacactctaactattactcaagaatcagcccaataaacaatatggatagcgctttcaaatttttaaactcytatcccrtccttttatctatatwataagcataagcgaaaatataataactgtcaagtawctraagtgaattttataaaaaaattacaagccaaatttgtaaagtttacactaagccgctagggcaatcgtctatcagaatrtccgtttatttgtcaataatccgagaaaatc

SEQ ID NO: 4416 - DNA, 371 bp, Streptococcus pneumoniae
  misc_feature (1)..(371): tiling:Spneumo1:WAN024AE6; Cluster includes WAN024EJ8 R6.I G_847||||813193..813562|+|370 bp|Between spr0811 (- strand ) and spr0812 (+ strand)|S.pneumoniae|R6|NC_003098.1|IG|11 0
taaagcgcaccttctttccttataggttgaacgacttgcaagtgttaaattgaatggtatgttatctaggtaascttactaaaatgttagttcccgcttcctccttttcaaagtaagccttttcacacttatattttacaactttaaaaataggaaatcaaatcattttctaagtaattttgcttatatttcacccaatcttacaaaaatgtaagattaaagtctcttttgtaaggttaggttatggcaagcggtctttttttgatgtaaactagactcataaagaacaaaggagtaacatcatgaaacaaatcttacataagaaaactagaaaaccaagtcacaaagaaattgagcgcgttcagctggga

SEQ ID NO: 4417 - DNA, 51 bp, Streptococcus pneumoniae
  misc_feature (1)..(51): tiling:Spneumo1:WAN0249NR; Cluster includes WAN024E8O R6.I G_1677||||1602292..1602342|+|51 bp|Between spr1628 (pilD) (+ strand) and spr1629 (- strand)|S.pneumoniae|R6|NC_00309 8.1|IG|110
taaartccaatttctgccatatrtccttcatgaaattatttcacagttaaa

SEQ ID NO: 4418 - DNA, 299 bp, Streptococcus pneumoniae
  misc_feature (1)..(299): tiling:Spneumo1:WAN0249TY; Cluster includes WAN024EF5 R6.I G_1181.1||||1141602..1141658|+|57 bp|Between spr1140 (- st rand) and spr1141 (topA) (- strand)|S.pneumoniae|R6|NC_003 098.1|IG|220
taaataatagagcaactacagtagtagcttaaaaacatgattaaatcgctattcttaggagtagcgkwwyttctyytwgtttaatactcttygaaaatctcttcaaaccasgtcagcttccatcttcaacctcaaagtagtgctttgagcaacctgcgactagctttctaatttgctctttrattctcmttgagtataaaataatcttcttctagtttcgcataaaatgatgtwttttgtcaagttctaaccaaaaggagcctgaaatttactttcgggcccctcctcttatttaatct

SEQ ID NO: 4419 - DNA, 73 bp, Streptococcus pneumoniae
  misc_feature (1)..(73): tiling:Spneumo1:WAN024A9P; Cluster includes WAN024EH4 R6.I G_1027.1.1.1.2||||973158..973230|+|73 bp|Between spr0988 ( IS1167) (- strand) and spr0989 (murZ) (+ strand)|S.pneumon iae|R6|NC_003098.1|IG|110
taaatcacgagagtaattgaattcgtactaagattttctattttcactgtaaccttttaacgyccttatatct

SEQ ID NO: 4420 - DNA, 125 bp, Streptococcus pneumoniae
  misc_feature (1)..(125): tiling:Spneumo1:WAN0249SG; Cluster includes WAN024EJK-rc R 6.IG_828.2||||792770..792886|-|117 bp|Between spr0792 (hsd R) (+ strand) and spr0793 (argR) (- strand)|S.pneumoniae|R 6|NC_003098.1|IG-rc|110
taaatgactacaactaacaattatgcttwtaaaaaacctggtagaaagtctttaacatcagaaaacgcatagtatcaagtgttgaaaacccttgatactatgcgttttgctttatcctaggaaga

SEQ ID NO: 4421 - DNA, 106 bp, Streptococcus pneumoniae
  misc_feature (1)..(106): tiling:Spneumo1:WAN0249WP; Cluster includes WAN024731 R6.I G_166||||154367..154469|+|103 bp|Between spr0145 (+ strand ) and spr0146 (+ strand)|S.pneumoniae|R6|NC_003098.1|IG|11 0
taaattacccataaaaaaaacttatcacagagatagatatcatataatggcgtaaatgctctttttctgttaagattataaggtattctattttggaggaaatgac

SEQ ID NO: 4422 - DNA, 53 bp, Streptococcus pneumoniae
  misc_feature (1)..(53): tiling:Spneumo1:WAN024A3B; Cluster includes WAN024EDA R6.I G_1321.2||||1273755..1273807|+|53 bp|Between spr1277 (- st rand) and spr1278 (- strand)|S.pneumoniae|R6|NC_003098.1|I G|110
taaattagtactattatatcacattttagctggattgagaaaagagtaacaag

SEQ ID NO: 4423 - DNA, 212 bp, Streptococcus pneumoniae
  misc_feature (1)..(212): tiling:Spneumo1:WAN024AEM; Cluster includes WAN024EJH R6.I G_833.2.1.2.2||||802339..802549|+|211 bp|Between spr0797 ( pykF) (+ strand) and spr0798 (- strand)|S.pneumoniae|R6|NC _003098.1|IG|110
taaatttacatatcactattgtttaacaaaatctaatctaytttaggtcacttattctttttttgaaatgtagaatgaactttttcaaagtttttcgaatcttttaaaatctgtttgytttatatcgccattctccccccttttttaattctccctatatagcctgacarctttcccgatggtacgaatatggttgctttcgtctaggtgga

SEQ ID NO: 4424 - DNA, 63 bp, Streptococcus pneumoniae
  misc_feature (1)..(63): tiling:Spneumo1:WAN024A5K; Cluster includes WAN024EER-rc R 6.IG_1201.2.1||||1162876..1162938|-|63 bp|Between spr1160 (+ strand) and spr1161 (+ strand)|S.pneumoniae|R6|NC_00309 8.1|IG-rc|110
taacaaaaagctctactttacctagtagagcccaaagtctatgtcaaaaaaaactctattaac

SEQ ID NO: 4425 - DNA, 183 bp, Streptococcus pneumoniae
  misc_feature (1)..(183): tiling:Spneumo1:WAN024AJB; Cluster includes WAN024ELZ-rc R 6.IG_630.1||||619396..619567|-|172 bp|Between spr0606 (- s trand) and spr0607 (+ strand)|S.pneumoniae|R6|NC_003098.1| IG-rc|110
taacaaacctaacctttaataaataaaagaggggytaagtaaaacatactctagtccctcagtccgcaatcaataaaataatgactaattctattaatctcttgctgcaagactaatacggaaaattyaaatgactgtctaaaatgaaattgaaaaagcttgatgttagtaaatgaacaaact

SEQ ID NO: 4426 - DNA, 59 bp, Streptococcus pneumoniae
  misc_feature (1)..(59): tiling:Spneumo1:WAN024AOD; Cluster includes WAN0247R1 R6.I G_66.2||||46437..46492|+|56 bp|Between spr0045 (purC) (+ s trand) and spr0046 (purL) (+ strand)|S.pneumoniae|R6|NC_00 3098.1|IG|110
taacaacctcaaggctgtttgggaatattgcaagagctgaaataaaggaataagaattg

SEQ ID NO: 4427 - DNA, 95 bp, Streptococcus pneumoniae
  misc_feature (1)..(95): tiling:Spneumo1:WAN0249MB; Cluster includes WAN024E7W R6.I G_1735||||1658693..1658787|+|95 bp|Between spr1686 (fecE) (+ strand) and spr1687 (fatB) (+ strand)|S.pneumoniae|R6|N C_003098.1|IG|110
taacataaaagctcaagttagagaaccttcagtctcttagtcaataagattaagagactccctaaatcgttatcacattttaaaaaggagaaatt

SEQ ID NO: 4428 - DNA, 288 bp, Streptococcus pneumoniae
  misc_feature (1)..(288): tiling:Spneumo1:WAN024AG7; Cluster includes WAN0247K0 R6.I G_101.2||||87489..87776|+|288 bp|Between spr0080 (+ strand ) and spr0081 (+ strand)|S.pneumoniae|R6|NC_003098.1|IG|11 0
taacatattaaaaatctccagattaggaactatckctgagttccctagtctggagatttttcagtataccccgttgttggatgcttataacagagtgacgccatcactgggctaatagagataaaataaacaattgatttaggacatttgtttgatagtggtgataaagttttaaatctgctacataatttgtggagttttttctataattaggagtttaacctaacctgcaaataggagtatactaataatgtaatcgttatcaaaagtctaaaaaagaatttttag

SEQ ID NO: 4429 - DNA, 167 bp, Streptococcus pneumoniae
  misc_feature (1)..(167): tiling:Spneumo1:WAN024AFP; Cluster includes WAN024EJY R6.I G_786||||758967..759133|+|167 bp|Between spr0762 (pcp) (+ strand) and spr0763 (+ strand)|S.pneumoniae|R6|NC_003098.1 |IG|110
taacctaaaaaggatagtcaattatgcttgtttactaactattaactatgctaaatcrattgaggttgtttacataaaactctatatcagagaagcctgatatagagttttttcttgctagttttaggattttyttgtaaaatagaaaaagtgaagagaggtatgaa

SEQ ID NO: 4430 - DNA, 467 bp, Streptococcus pneumoniae
  misc_feature (1)..(467): tiling:Spneumo1:WAN0249QT; Cluster includes WAN024E3T-rc R 6.IG_2192.2.1||||1977967..1978431|-|465 bp|Between H (tran sposase) (- strand) and spr1986 (+ strand)|S.pneumoniae|R6 |NC_003098.1|IG-rc|110
taacggaaactcctttgtatttttgatttttttcaacttttattatacaataaaaccaaataaaaagaaagcggtaacaatatgcttaatgcgaaaattttttatatatttttatgtttgatcgttatcgaaactacaggcttgttgttgttgaaaagaggtctcgaaatgggttatttagacacagaagctattatcctcgcagttttttcatttgctttttacmacctatgttcattcgcttgggtctgctctacaataaaaaaacaataaaaaataaatagacgtattttcaaaaaaaaaaaaaatgcatatttatmttagcaaaacgacgatttaaatcgtcgtttttttgtagtacgacgggcatgtcgtatatctgaggtgtaagtcctcgstgrsyacstgstascrgkgagasccaatagcgattcccaagcctgactatcgtgaggtagcagggagag

SEQ ID NO: 4431 - DNA, 123 bp, Streptococcus pneumoniae
  misc_feature (1)..(123): tiling:Spneumo1:WAN024AB8; Cluster includes WAN024EHS R6.I G_972.2||||920116..920238|+|123 bp|Between spr0933 (+ stra nd) and spr0934 (+ strand)|S.pneumoniae|R6|NC_003098.1|IG| 110
taactaaaaataaaaactagatccttttttgaaaaaattatattattaaatttgtaactgtatctattgacaatgataattattatcgatacaatagacttgaaatatgtttaaggagttttt

SEQ ID NO: 4432 - DNA, 90 bp, Streptococcus pneumoniae
  misc_feature (1)..(90): tiling:Spneumo1:WAN0249Z9; Cluster includes WAN024EC6 R6.I G_1394.2.1||||1333448..1333537|+|90 bp|Between A (transpos ase) (- strand) and spr1351 (pgm) (+ strand)|S.pneumoniae| R6|NC_003098.1|IG|110
taactatatcaatgttttgttatgagaagacttactttttttactgaaattgaatttttcctagcctcaacatcatataaccccaaaatt

SEQ ID NO: 4433 - DNA, 92 bp, Streptococcus pneumoniae
  misc_feature (1)..(92): tiling:Spneumo1:WAN024AGY; Cluster includes WAN024EKQ R6.I G_720.2||||698703..698791|+|89 bp|Between spr0696 (metS) ( + strand) and spr0697 (+ strand)|S.pneumoniae|R6|NC_003098 .1|IG|110
taactattatgctttacaaactagtgtagaagtgatatactataggtgaagtyactagtaggtattacaaaatagattagaagggagaagtg

SEQ ID NO: 4434 - DNA, 458 bp, Streptococcus pneumoniae
  misc_feature (1)..(458): tiling:Spneumo1:WAN0249TG; Cluster includes WAN024E5W-rc R 6.IG_1990.2||||1805831..1805908|-|78 bp|Between spr1830 (+ strand) and spr1831 (- strand)|S.pneumoniae|R6|NC_003098. 1|IG-rc|120
taactctagcttaacatttttttgtgaatacaggttctaaataatcgaccacgaaaatttcttaagtggaaaacgccttatgaagtatgctacgggaaagttatgcacttaatttgacaattcaagatgtaaaaatatatactatagtagattgaaactagaatagtacacmtctacttctaaaatattgttagaaatcgatttgactrtcctgatckatttrtcctgttattatctcattttactataatatttgataagttatcctaaaagtattattatgttgttgtgttatagattgattgaatctaactaaaggatcctattcaattactagaactatcacatactcaaggtcagctcacagatgagcaactattttggttacaatgtctactaaatttaagtcaaacaaataatttagtcaaaattaaaaaaatagaggaacataaatatga

SEQ ID NO: 4435 - DNA, 139 bp, Streptococcus pneumoniae
  misc_feature (1)..(139): tiling:Spneumo1:WAN024AHQ; Cluster includes WAN024EL4 R6.I G_693||||674422..674560|+|139 bp|Between spr0669 (+ strand ) and spr0670 (rheB) (+ strand)|S.pneumoniae|R6|NC_003098. 1|IG|110
taactgaaaagaggttggaactataaaattccagccttttcttactagagaagctactggaaatagcctaaataagtgagactactgtaatggaataaaatatggtataattgataagrtagatagaatcgaggatgtt

SEQ ID NO: 4436 - DNA, 159 bp, Streptococcus pneumoniae
  misc_feature (1)..(159): tiling:Spneumo1:WAN024AK5; Cluster includes WAN024EFS R6.I G_1119.2.1||||1076977..1077129|+|153 bp|Between spr1081 (- strand) and spr1082 (lepA) (- strand)|S.pneumoniae|R6|NC_ 003098.1|IG|220
taactttatgctataagtataacactatatgaaaycgttgtyaattactttctrttcttttttgtctctttttttatatttttrttttgtttatagtttgttatataaaaataaacacacaaacaaatactccaagcattttttctgttctaataytca

SEQ ID NO: 4437 - DNA, 250 bp, Streptococcus pneumoniae
  misc_feature (1)..(250): tiling:Spneumo1:WAN024AD5; Cluster includes WAN024EIP-rc R 6.IG_900||||856931..857179|-|249 bp|Between spr0864 (lguL) (+ strand) and spr0865 (pyrDII) (+ strand)|S.pneumoniae|R 6|NC_003098.1|IG-rc|110
taacttttcctccttaaattttaaggggaccagataaagaaaagaccttgctagtgcaaggcctcagttaaaatcgtacaacacaagagagcacactcaaaaagtctcctctagaaaattgcacyattcttttatctgacaccttgtgagtctctctggactccccttaaaggttgaatttttattagtatactctttcagctaaaaaaagtcaagtagaaaacgaatattctacttaacttgcacgaaa

SEQ ID NO: 4438 - DNA, 99 bp, Streptococcus pneumoniae
  misc_feature (1)..(99): tiling:Spneumo1:WAN0249VJ; Cluster includes WAN024721 R6.I G_168||||156309..156407|+|99 bp|Between spr0147 (+ strand) and spr0148 (dapE) (+ strand)|S.pneumoniae|R6|NC_003098.1 |IG|110
taagaaacagggaggtgggagagaaaattccacctcttgcttttgtatagagtatagattgtaaagaagactattcgttcatagaaaggtagagagaat

SEQ ID NO: 4439 - DNA, 202 bp, Streptococcus pneumoniae
  misc_feature (1)..(202): tiling:Spneumo1:WAN024AF2; Cluster includes WAN024EJO R6.I G_825.1.2||||786306..786507|+|202 bp|Between spr0789 (+ st rand) and spr0790 (hsdM) (+ strand)|S.pneumoniae|R6|NC_003 098.1|IG|110
taagagcatcccaacaaggtagctatcataaaacttgttcgataactatttgaagcaggattaggtggtcagaaattaaattttaatatttcaattgagtcatagtattgtgtttgcgtatccttaaatcagctaaaaggatccatgacgacacctatacgatatagttttcaagataccaaacaagtctattaatattcaa

SEQ ID NO: 4440 - DNA, 151 bp, Streptococcus pneumoniae
  misc_feature (1)..(151): tiling:Spneumo1:WAN0249HK; Cluster includes WAN024E57-rc R 6.IG_2096||||1868904..1869050|-|147 bp|Between spr1889 (ar gR) (- strand) and spr1890 (argS) (+ strand)|S.pneumoniae| R6|NC_003098.1|IG-rc|110
taagagctcctttttggacttttctactattttatcacaattttaaagaaagaagaaaaaatttttgaaatctcctgtttttttggtataatatggttataaatatagttataaatatgcacgywakagratwtkcacgcaagaggatttt

SEQ ID NO: 4441 - DNA, 886 bp, Streptococcus pneumoniae
  misc_feature (1)..(886): tiling:Spneumo1:WAN0249Q9; Cluster includes WAN0247A0 R6.I G_140.2||||126670..127502|+|833 bp|Between spr0119 (+ stra nd) and spr0120 (+ strand)|S.pneumoniae|R6|NC_003098.1|IG| 110
taagcagtcaaagacttagaatagcctgaaaacatttattttatggcaattctaagcttagaattgctcatatatatgtatttgagctgctcgatagttaggacagctctattctgagaaatctgagctatcaatgcttcagaatagtatttcgccaatggtttttattgaagaggtgattgtgttatgatagtctaaaataaaattgatttaatggagtaaatggagaatcgttacatgaaacatttttttgcaggaattggtgagataaaacttgttggctacttattgtatatatgtgtaggactagcccctctttttcatatatatgtcataggttcggaactgagttttgtgaaaatagtgttatctattttgggagttatatttgtaagtatgttaactattgctcgaatttatcggacttttctataaagaatagtttggacttgaactgtatctaaaaacagaggttggtcgattatcagcctctttcttgtcgttgaaaagagtgagatatattgacttttgaaaaaaagatgtcataattgagttgggataaacctaaaartaatatagtagattgaatctggaatagtccgttatgacygttaaaatatttctagaaattaatttgactttcctaatcgatttgttcacatcttgtttcaatctactatactttctcgttaaaccgttcggyaattcatggtgacatggacacatagtagtaagcacactatgtggcttggcagakctaaaaactgttcccttgcgataagcctaataagcacaacatagggagttagagaagccgactctaatcaaccactttgggcagtagtggtaactgccccgtgctttttattttgagaaaatatggagt

SEQ ID NO: 4442 - DNA, 64 bp, Streptococcus pneumoniae
  misc_feature (1)..(64): tiling:Spneumo1:WAN0249VL; Cluster includes WAN024E9X R6.I G_1582.2.1.1||||1514338..1514401|+|64 bp|Between spr1535 ( - strand) and spr1536 (nanA) (- strand)|S.pneumoniae|R6|NC _003098.1|IG|110
taagctgctcacttcgtttttctaaaataattctaatctattattctagcactaatagactctt

SEQ ID NO: 4443 - DNA, 104 bp, Streptococcus pneumoniae
  misc_feature (1)..(104): tiling:Spneumo1:WAN0249J2; Cluster includes WAN024E5Z-rc R 6.IG_1985||||1801034..1801137|-|104 bp|Between spr1825 (ga pA) (- strand) and spr1826 (- strand)|S.pneumoniae|R6|NC_0 03098.1|IG-rc|110
taagggattccttgrtttacagtcttaaaaagaaactmacatagaaaaacaatggccatacttgcaattcaactcaaatagttgtataataggtttgttgaaag

SEQ ID NO: 4444 - DNA, 63 bp, Streptococcus pneumoniae
  misc_feature (1)..(63): tiling:Spneumo1:WAN0249JN; Cluster includes WAN024E6E R6.I G_1930.2||||1783264..1783326|+|63 bp|Between spr1812 (ansB ) (+ strand) and spr1813 (ccpA) (- strand)|S.pneumoniae|R6 |NC_003098.1|IG|110
taagtcaacatctcttgtttaagagcacmaaatcaggaaatcttctcgattccctgatttttt

SEQ ID NO: 4445 - DNA, 1859 bp, Streptococcus pneumoniae
  misc_feature (1)..(1859): tiling:Spneumo1:WAN024CNB-M; Cluster includes WAN02436S SP 0071||15900016|NP_344620.1|73761..79331|+|5571 bp|immunogl obulin A1 protease|S.pneumoniae|TIGR4|NC_003028.1|ORF|010
taaktctaagtgaagcgccgactgatacggctaaatactttgtaaaagtgaaatcagatcgcttcaaagaaatgtacctacctgtaaaatctattacagaaaatacggatggaacgtataaagtgacggtagccgttgatcaacttgtcgaagaaggtacagacggttacaaagatgattacacatttactgtagctaaatctaaagcagagcaaccaggagtttacacatcctttaaacagctggtaacagccatgcaaagcaatctgtctggtgtctatacattggcttcagatatgaccgcagatgaggtgagcttaggcgataagcagacaagttatctcacaggtgcatttacagggagcttgatcggttctgatggaacaaaatcgtatgccatttatgatttgaaraaaccattatttgatacattaaatggtgctacagttagagatttggatattaaaactgtttctgctgatagtaaagaaaatgtcgcagcgctggcgaaggcagcgaatagcgcgaatattaataatgttgcagtagaaggaaaaatctcaggtgcgaaatctgttgcgggattagtagcgagcgcaacaaatacagtgatagaaaacagctcgtttacagggaaacttatcgcaaatcaccaggacagtaataaaaatgatactggaggaatagtaggtaatataacaggaaatagttcgagagttaataaagttagggtagatgccttaatctctactaatgcacgcaataataaccaaacagctggagggatagtaggtagattagaaaatggtgcattgatatctaattcggttgctactggagaaatacgaaatggtcaaggatattctagagtcggaggaatagtaggatctacgtggcaaaacggtcgagtaaataatgttgtgagtaacgtagatgttggagatggttatgttatcaccggtgatcaatacgcagcagcagatgtgaaaaatgcaagtacatcagttgataatagaaaagcagacagattcgctacaaaattatcaaaagaccaaatagacgcgaaagttgctgattatggaatcacagtaactcttgatgatactgggcaagatttaaaacgtaatctaagagaagttgattatacaagactaaataaagcagaagctgaaagaaaagtagcttatagcaacatagaaaaactgatgccattctacaataaagacctagtagttcactatggtaacaaagtagcgacaacagataaactttacactacagaattgttagatgttgtgccgatgaaagatgatgaagtagtaacggatattaataataagaaaaattcaataaataaagttatgttacatttcaaagataatacagtagaatacctagatgtaacattcaaagaaaacttcataaacagtcaagtaatcgaatacaatgttacaggaaaagaatatatattcacaccagaagcatttgtttcagactatacagcgataacgaataacgtactaagcgacttgcaaaatgtaacacttaactcwgaagctamtaaaaaagtactaggagcagcgaatgatgcagccttagataacctatacttagatagacaatttgaagaagttaaagctaatatagcagaacacctaagaaaagtattagcgatggataaatcaatcaatactacaggagacggtgtagttgaatacgtaagtgagaaaatcaaaaataacaaagaagcatttatgctaggtcttacttatatgaaccgttggtacgatattaattatggtaaaatgaatacaaaagatttatctacgtacaagtttgactttaacggaaataatgag

SEQ ID NO: 4446 - DNA, 156 bp, Streptococcus pneumoniae
  misc_feature (1)..(156): tiling:Spneumo1:WAN024AOZ; Cluster includes WAN024EOY R6.I G_422||||394965..395120|+|156 bp|Between spr0398 (rpmB) (+ strand) and spr0399 (asp23) (+ strand)|S.pneumoniae|R6|NC _003098.1|IG|110
taataaaagcaaaggagaccttagggtcttttttcttttattgtgggtataacatcgtttgaaaaatagagtaaatatccgctgatacatcattctgcttttacacttgggctgaaatatgataaaatagagtatcaactagttgaggtaaaaagg

SEQ ID NO: 4447 - DNA, 177 bp, Streptococcus pneumoniae
  misc_feature (1)..(177): tiling:Spneumo1:WAN0249ZZ; Cluster includes WAN024770 R6.I G_154.2.1.2||||141522..141698|+|177 bp|Between spr0133 (- strand) and A (transposase) (- strand)|S.pneumoniae|R6|NC_ 003098.1|IG|110
taataagtaaccgcgctataacgaggtatctaccgagattgtcaattctccagtatactgttataaaaaacaaaactggaggatttttttatgtccccccatcgtcccatcgactgttccgtagctgcccaataacggagtatagtcggctgaaacaagaataggacaaaagtgcct

SEQ ID NO: 4448 - DNA, 180 bp, Streptococcus pneumoniae
  misc_feature (1)..(180): tiling:Spneumo1:WAN024A6Z; Cluster includes WAN024EE7 R6.I G_1244.1||||1195922..1196101|+|180 bp|Between spr1200 (- s trand) and spr1201 (- strand)|S.pneumoniae|R6|NC_003098.1| IG|110
taatactattatatcaacccactacagttgacaaaaagacaaaccagcctaatgactagcttgtcttcaatcaagagaggattctgttccccccatataagcactaacattccaacgtgcacatattggaacgacatccataactccagagaatctctaaagtttacaatttaaatgaat

SEQ ID NO: 4449 - DNA, 154 bp, Streptococcus pneumoniae
  misc_feature (1)..(154): tiling:Spneumo1:WAN0249E8; Cluster includes WAN024E3F-rc R 6.IG_2225.2||||2010580..2010733|-|154 bp|Between E (transp osase) (- strand) and spr2019 (tsf) (- strand)|S.pneumonia e|R6|NC_003098.1|IG-rc|110
taatagaaaggaagcaawttgcttccttttttgtatagggcttakatttttcctgaaattgtttttyccccagtctcactcgattagaataattaaaacaaaaagccctataataagggctaagtgcatttaggagactatacttcaaattcat

SEQ ID NO: 4450 - DNA, 59 bp, Streptococcus pneumoniae
  misc_feature (1)..(59): tiling:Spneumo1:WAN024ARX; Cluster includes WAN024EQN R6.I G_268.2.1||||247424..247482|+|59 bp|Between spr0247 (pulA) (- strand) and spr0248 (rpsL) (+ strand)|S.pneumoniae|R6| NC_003098.1|IG|110
taatagacggtactttttacttttggtctctcaagagtgtacagggacgtgctgacaaa

SEQ ID NO: 4451 - DNA, 112 bp, Streptococcus pneumoniae
  misc_feature (1)..(112): tiling:Spneumo1:WAN0249F7; Cluster includes WAN024E3W R6.I G_2190.2.1||||1975940..1976051|+|112 bp|Between spr1983 (- strand) and H (transposase) (- strand)|S.pneumoniae|R6|NC _003098.1|IG|110
taatgatagatttagatagtcaaaaaaatatctgaaaagttcccaggatcgtcgtctcagcatcaaaaatacgtgaaatttgcataattaaaataaatttcaggggagttaa

SEQ ID NO: 4452 - DNA, 84 bp, Streptococcus pneumoniae
  misc_feature (1)..(84): tiling:Spneumo1:WAN0249KT; Cluster includes WAN024E6Y R6.I G_1877.2.2||||1730620..1730703|+|84 bp|Between spr1762 (- strand) and spr1763 (plcR) (- strand)|S.pneumoniae|R6|NC_0 03098.1|IG|110
taattataaggctgatagtattaatctaactatcagccttacaggttatttaacgtttcagaaaaactataatgtcaagattaa

SEQ ID NO: 4453 - DNA, 335 bp, Streptococcus pneumoniae
  misc_feature (1)..(335): tiling:Spneumo1:WAN024AMR; Cluster includes WAN024D10-rc T IGR4.IG_504.2||||513073..513184|-|112 bp|Between SP0533 (+ strand) and SP0534 (+ strand)|S.pneumoniae|TIGR4|NC_00302 8.1|IG-rc|020
taattatttactcctttcctaacaaatccagcttatcaatcaagagcgatttttaacataatgtagcagcacccgttgcaactttgacaagtttagtatatcattgttttttaaaatttttcatccaaatcttgaattgtcatcgaaacatcttgaattgttaaaaaatttaaaaagtaagcattaaaaacatactttcctctttatattgtattgataccaacttgtttgtagacttttcatcctgctatcacatatcattttgacaggcgaaacaatattaaagaaactcccctgtaaattaagctagcaaatacaggggagaaatttatttt

SEQ ID NO: 4454 - DNA, 417 bp, Streptococcus pneumoniae
  misc_feature (1)..(417): tiling:Spneumo1:WAN0249UX; Cluster includes WAN024E9H R6.I G_1610||||1544117..1544530|+|414 bp|Between spr1563 (+ str and) and spr1564 (+ strand)|S.pneumoniae|R6|NC_003098.1|IG |110
taattcacyatctaactatatttagtaattatttcagaactgattaatattaaaattaactaacaattcaaaggattcatactagccataaattacgtccatcagagagagactcttactacttttakattttagtctttctagcttcagaatacatctaaactttagggaaaatgactattcgaaagcgcgaatgcctcaaaattatctcagataagctattcgaaacttagaatgcttttaaatttatggaattgcgattattcgaaacctagaatgcatataacctttagttgacagacctattctaagtctcgaagggctatttactttctattccttatcaaaaaagactcattccccckttctcctcyaaaatatggtatagtagaaatatactatctatgaggagtttac

SEQ ID NO: 4455 - DNA, 119 bp, Streptococcus pneumoniae
  misc_feature (1)..(119): tiling:Spneumo1:WAN024AB6; Cluster includes WAN024EHR R6.I G_977.1||||924063..924181|+|119 bp|Between spr0938 (+ stra nd) and spr0939 (+ strand)|S.pneumoniae|R6|NC_003098.1|IG| 110
taattgaatattggaattcatttaaaagtcgcaamttttgaactgaccctcaaaagttaggccaaaaaactaactaaaggaggtcagttttttaatggcaaatacagcacagaatttaa

SEQ ID NO: 4456 - DNA, 89 bp, Streptococcus pneumoniae
  misc_feature (1)..(89): tiling:Spneumo1:WAN0249SR; Cluster includes WAN0247X0 R6.I G_31||||20118..20206|+|89 bp|Between () (+ strand) and A ( transposase) (+ strand)|S.pneumoniae|R6|NC_003098.1|IG|110
taattgagttaagaggtttagacctcttttttgttatgtaataataatctattttgtgttatagtraaatgaaccaaaaatagtacaca

SEQ ID NO: 4457 - DNA, 132 bp, Streptococcus pneumoniae
  misc_feature (1)..(132): tiling:Spneumo1:WAN024AOS; Cluster includes WAN024EOV-rc R 6.IG_428.1||||400958..401089|-|132 bp|Between spr0404 (+ s trand) and spr0405 (+ strand)|S.pneumoniae|R6|NC_003098.1| IG-rc|110
taatttgctctatttgatataaaccgccatctatcgtctcatttattctgcgaagaggaccttcaatataggataaagcttctccgaatctaacagctgatttaggtcctaatgatttaccaactatatttg

SEQ ID NO: 4458 - DNA, 116 bp, Streptococcus pneumoniae
  misc_feature (1)..(116): tiling:Spneumo1:WAN0249IU; Cluster includes WAN024E5U-rc R 6.IG_1992||||1807292..1807406|-|115 bp|Between spr1832 (- strand) and spr1833 (bgl2) (+ strand)|S.pneumoniae|R6|NC_0 03098.1|IG-rc|110
taattttaaaatttgtctagacatttttaaaaattgttgatacatatcttgtgtttgcctcatttcttgaactttgttatactactattagaatattatagagagaaccagattaa

SEQ ID NO: 4459 - DNA, 382 bp, Streptococcus pneumoniae
  misc_feature (1)..(382): tiling:Spneumo1:WAN024AA2; Cluster includes WAN024EH9 R6.I G_1013||||960322..960703|+|382 bp|Between spr0974 (ppc) (+ strand) and spr0975 (+ strand)|S.pneumoniae|R6|NC_003098. 1|IG|110
taattttcaagagtgaatgctaaaagtgaatatcaaaaaaattctaatagactattgacaagtagtttaaaaatgatataatttaaccattcagaaaagtaatcatacaaactttttagagagtctgtggtagctgaaaacagataagtggcaatgatgaaaattgggctgaatgctatttagaatttgaaattataaaaattcggtaagcacaccttacagtgcatctcgttattgcgagactgagcgatagggaaattccctataattgaggtggtaccgcgcatcgacgtcctcacacaagttttttgtgtgaggatttttttgatggaggttagtatggaaagaaaacgatggcgtcgcttgtttagataagtgaaat

SEQ ID NO: 4460 - DNA, 93 bp, Streptococcus pneumoniae
  misc_feature (1)..(93): tiling:Spneumo1:WAN024AG9; Cluster includes WAN024EK8-rc R 6.IG_761.2.1||||736133..736215|-|83 bp|Between spr0737 (+ strand) and spr0738 (deoD) (+ strand)|S.pneumoniae|R6|NC_0 03098.1|IG-rc|110
taattttgatttagaggagagtcgcccgtattcagttcagcgaatacagtttacccatcctttcgtttttrtttttagaaaagttttctactc

SEQ ID NO: 4461 - DNA, 49 bp, Streptococcus pneumoniae
  misc_feature (1)..(49): tiling:Spneumo1:WAN024AFN; Cluster includes WAN024EJX-rc R 6.IG_787||||759365..759413|-|49 bp|Between spr0763 (+ stra nd) and () (+ strand)|S.pneumoniae|R6|NC_003098.1|IG-rc|11 0
tacaatcaacatggactattatatcatgaaaatttcaaaaaaacaagac

SEQ ID NO: 4462 - DNA, 187 bp, Streptococcus pneumoniae
  misc_feature (1)..(187): tiling:Spneumo1:WAN024ASK; Cluster includes WAN0246M0-rc R 6.IG_239||||212223..212408|-|186 bp|Between spr0218 (+ str and) and spr0219 (gpmB) (+ strand)|S.pneumoniae|R6|NC_0030 98.1|IG-rc|110
tacaggcgacttttgaaggagattattatgaaaaagtttaggagttcattaaataaagatattagatgaaaatcaaattcaaactaattcagtgttatctgtttcaaataatattaggaggtctttatttaatgattatagtatacacrtctaatcttaaatagaacttaaaatttctcctattttc

SEQ ID NO: 4463 - DNA, 128 bp, Streptococcus pneumoniae
  misc_feature (1)..(128): tiling:Spneumo1:WAN024A3J; Cluster includes WAN024EDE R6.I G_1318.2.2.1||||1269996..1270123|+|128 bp|Between spr1274 (- strand) and spr1275 (- strand)|S.pneumoniae|R6|NC_00309 8.1|IG|110
tacatcctacttctagtatagcatcttttctatcaaacgttaaacartatactttatatatmaaatagacttagaatgatatattgattattgaactaacactttaactatatcgtaatcaatctcat

SEQ ID NO: 4464 - DNA, 69 bp, Streptococcus pneumoniae
  misc_feature (1)..(69): tiling:Spneumo1:WAN0249QF; Cluster includes WAN024ED5 R6.I G_1326.2||||1277675..1277742|+|68 bp|Between spr1282 (- st rand) and spr1283 (+ strand)|S.pneumoniae|R6|NC_003098.1|I G|110
taccagataaagtawammrgrkmwaggaaaaaagtctttaaaatcttaaaaacgcatagtatcaggtat

SEQ ID NO: 4465 - DNA, 62 bp, Streptococcus pneumoniae
  misc_feature (1)..(62): tiling:Spneumo1:WAN0249OF; Cluster includes WAN024E93 R6.I G_1651.1||||1581189..1581250|+|62 bp|Between spr1605 (- st rand) and spr1606 (pepF) (- strand)|S.pneumoniae|R6|NC_003 098.1|IG|110
tacctctacatttctagcaactgttcaaaaaggcagtcttaaatgactcaatattgaattct

SEQ ID NO: 4466 - DNA, 55 bp, Streptococcus pneumoniae
  misc_feature (1)..(55): tiling:Spneumo1:WAN0249ER; Cluster includes WAN024E3M R6.I G_2205.2.1.2||||1992705..1992759|+|55 bp|Between spr1998 ( rr06) (- strand) and spr1999 (- strand)|S.pneumoniae|R6|NC _003098.1|IG|110
tacgctctaagacaaatacgacggagrgtaataaacatatgaattttgtgttgaa

SEQ ID NO: 4467 - DNA, 96 bp, Streptococcus pneumoniae
  misc_feature (1)..(96): tiling:Spneumo1:WAN024AMX; Cluster includes WAN024ENX R6.I G_468.1.1||||449858..449953|+|96 bp|Between spr0444 (glnA) (+ strand) and spr0445 (hsdS) (+ strand)|S.pneumoniae|R6| NC_003098.1|IG|110
tactaatatagaagaaagattgcctgtgggtaaacagtcacacagcagtctaagccatcaaatacctataacccttaaaatagcgatttcggtcgc

SEQ ID NO: 4468 - DNA, 60 bp, Streptococcus pneumoniae
  misc_feature (1)..(60): tiling:Spneumo1:WAN024AD4; Cluster includes WAN024EIO R6.I G_903||||861137..861196|+|60 bp|Between spr0867 (lytB) (+ strand) and spr0868 (flpA) (- strand)|S.pneumoniae|R6|NC_0 03098.1|IG|110
tactataagtgaatatgatttgagtgaatagtaagttaaaaatcctgatttcaagtaaaa

SEQ ID NO: 4469 - DNA, 91 bp, Streptococcus pneumoniae
  misc_feature (1)..(91): tiling:Spneumo1:WAN0249YY; Cluster includes WAN024EBZ-rc R 6.IG_1401.2||||1340816..1340906|-|91 bp|Between spr1357 (- strand) and spr1358 (+ strand)|S.pneumoniae|R6|NC_003098. 1|IG-rc|110
tactatacctctgtgtaaagataagactattatatcacaaaaacaagtaaattaaagatatccaattagatgtaagcactttaaaaaagag

SEQ ID NO: 4470 - DNA, 76 bp, Streptococcus pneumoniae
  misc_feature (1)..(76): tiling:Spneumo1:WAN0249MY; Cluster includes WAN024E8B-rc R 6.IG_1710.1||||1634443..1634515|-|73 bp|Between spr1661 (+ strand) and spr1662 (xpt) (+ strand)|S.pneumoniae|R6|NC_0 03098.1|IG-rc|110
tactatcaagyttttagacacctgacaatatgcctttttctaactttaaagacttttcccaatttttattattcta

SEQ ID NO: 4471 - DNA, 75 bp, Streptococcus pneumoniae
  misc_feature (1)..(75): tiling:Spneumo1:WAN0249HX; Cluster includes WAN024E5F R6.I G_2037||||1849283..1849357|+|75 bp|Between spr1878 (thrC) (- strand) and spr1879 (- strand)|S.pneumoniae|R6|NC_00309 8.1|IG|110
tactctctatcctttatctatagtctcgtccattatatcatgatttttcagaaaattctccctttataagagaaa

SEQ ID NO: 4472 - DNA, 226 bp, Streptococcus pneumoniae
  misc_feature (1)..(226): tiling:Spneumo1:WAN024F7B; Cluster includes WAN0246KS |||| ||146 bp|Incyte orf contig SPN2C0461 1161-1310|S.pneumonia e|23F|WAN0246KS|ORF|000
tactcttcgaaaatctcttcaaaccasgtcagcttcaccttgcmgtatakatgttactgacttcgtcagttctatcyrcaacctcaaaacrgtgttttgagctgacttcgtcagttctatcyrcaacctcaaaacrgtgttttgagctgacttcgtcagttctatccacaacctcaaaacggtgttttgagctgacttcgtcagttctatccacaacctcaaaacg

SEQ ID NO: 4473 - DNA, 90 bp, Streptococcus pneumoniae
  misc_feature (1)..(90): tiling:Spneumo1:WAN0249WX; Cluster includes WAN024EAS R6.I G_1522||||1456745..1456834|+|90 bp|Between spr1475 (+ stra nd) and spr1476 (- strand)|S.pneumoniae|R6|NC_003098.1|IG| 110
tactcttgaaaattaaatgtatacaaaacaaaagacctagaatacatactttcatgtgcattctaagtctttttaaatagaatctaatag

SEQ ID NO: 4474 - DNA, 825 bp, Streptococcus pneumoniae
  misc_feature (1)..(825): tiling:Spneumo1:WAN024FEE-M; Cluster includes WAN0243CG sp r1909|pbp1b|15903950|NP_359500.1|1886036..1888501|-|2466 b p|Penicillin-binding protein 1b|S.pneumoniae|R6|NC_003098. 1|ORF|111
tacttactctccttatgaaaatactggggagttgaagagtgatgaagacctagaaattggcttaagacgggctaaggcagttctttacagtatgtatygtacaggtgcattaagcaaagacgagtattctcagtacaaggattatgaccttmaacaggactttttaccatcgggcacggtyacaggaatttcacgagactatttatactttacaactttggcagaagctcaagaacgtatgtatgaytatctagctcagagagacaatgtctccgctaaggagttgaaaaatgaggyaactcagaagttttatcgagatttggcagccaaggaaattgaaaatggtggttataagattactactaccatagatcagaaaattcattctgccatgcaaagtrcggttgctgattatggctatcttttagacgatggaacaggtcgtgtagaagtagggaatgtcttgatggayaaccaaacaggtgctattctaggctttgtaggtggtcgtaattatcaagaaaatcaaaataatcatgcytttgataccaaacgttcgccagcttctactaccaagcccttgctggcctacggtattgctattgaccagggcttgatgggaagtgaaacgattctatctaaytatccaacaaactttgctaatggcaatccgattatgtatgctaatagcaagggaacrggratgatgaccttgggagaagctytgaactaytcatggaatatccctgcttactggacctatcgtatgctccgtgaaaakggtgttgatgtcaagggttatatggaaaagatgggttacgasat

SEQ ID NO: 4475 - DNA, 2013 bp, Streptococcus pneumoniae
  misc_feature (1)..(2013): tiling:Spneumo1:WAN024D3W-3; Cluster includes WAN0244RT sp r0057|strH|15902101|NP_357651.1|60528..64466|-|3939 bp|Bet a-N-acetyl-hexosaminidase precursor|S.pneumoniae|R6|NC_003 098.1|ORF|311
tactttactctggaccagctcaaacgcatcgtagacaaggccagtgagctcggatattctgatgtccatctccttctaggaaatgacggacttcgctttctactcaatgatatgaccattactgccaacggaaaaacctatgctagtgatgacgttaaaaaagctattatcgaaggaactaaagcttactacgacgatccaaacggtactgcactaacacaggcagaagtgacagagctaattgaatacgctaaatctaaggacattggtctcatcccagctattaacagtccaggtcacatggatgctatgctggttgccatggaaaaattaggtattaaaaatcctcaagcccactttgataaagtttcaaaaacaactatggacttgaaaaacgaagaagcgatgaactttgtaaaagccctcatcggtaaatacatggacttctttgcaggtaaaacaaagattttcaactttggtactgacgaatacgccaacgatgcgactagtgcccaaggctggtactacctcaagtggtatcaactctatggcaaatttgccgaatatgccaacaccctcgcagctatggccaaagaaagagggcttcaaccaatggccttcaacgatggcttctactatgaagacaaggacgatgttcagtttgacaaagatgtcttgatttcttactggtctaaaggctggtggggatataacctcgcatcacctcaatacctagcaagcaaaggctataaattcttgaataccaacggtgactggtattatgttataggcaatcacaaacaagatgaagcttaccctctttcaaaagcagttgaaaattctggtaaagttccattcaatcaactagcttctaccaaatatcctgaagtagatcttccaacagtcggaagtatgctttcaatctgggcagatagaccaagcgctgagtacaaggaagaggaaatctttgaactcatgactgcctttgcagaccacaacaaagactacttccgtgctaattataatgctctccgcgaagaattagctaaaattcctacaaacttagaaggatatagtaaagaaagtcttgaggcccttgacgcagctaaaacagctctaaattacaacctcaaccgtaataaacaagctgagcttgacacacttgtagccaacctaaaagccgctcttcaaggcctcaaaccagctgcaactcattcaggaagcctrgatgaaaatgaagtggctgccaatgttgaaaccagaccagaactcatcacaagaactgaagaaattccatttgaagttatcaagaaagaaaatcctaacctcccagctggtcaggaaaatattatcacagcaggagtcaaaggtgaacgaactcattacatctctgtactcactgaaaatggaaaaacaacagaaacagtccttgatagccaggtaaccaaagaagttataaaccaagtggttgaagttggckctcctgtaactcacaagggtgatgaaagtggtcttgcaccaactactgaggtaaaacctagactggatatccaaraagaagaaattccatttaccacagtgactcgtgaaaatccactcttactcaaaggaaaaacacaagtcattactaagggcgtcaatggacatcgtagcaacttctactctgtgagcacttctgccgatggtaaggaagtgaaaacacttgtaaatagtgtcgtagcacaggaagccgttactcaaatagtcgaagtcggaactatggtaacacatgtaggcgatgaaaacggacaagccgctattgctgaagaaaaaccaaractagaaatcccaagccaaccagctccatcaactgctcctgctgaggaaagcaaagctcttcctcaagatccagctcctgtggtaacagagaaaaaacttcctgaaacaggaactcacgattctgcagractagtagtcgcaggactcatgtccacactagcagcctatggactcactaaaagaaaagaagactaa

SEQ ID NO: 4476 - DNA, 267 bp, Streptococcus pneumoniae
  misc_feature (1)..(267): tiling:Spneumo1:WAN0249TC; Cluster includes WAN024EL9 R6.I G_683||||663616..663873|+|258 bp|Between spr0659 (livJ) (+ strand) and spr0660 (livH) (+ strand)|S.pneumoniae|R6|NC_ 003098.1|IG|210
tagaaaaatgttgaaatagggaatgagcctttgactcactccctgtttcgatatttaatactcttcgaaaatctcttcaaactgcgtcaacgtcgccttgsmktatatatgtgactgacttygtcagtcttatctacaacctcaaagcrgtgctttgagyaacctgcggctagtttcctagtttgctctttgattttcattgagtataagaacctatcaaaaagtgagggaaaaccctcggaattataaatagaaagagtgaatctt

SEQ ID NO: 4477 - DNA, 58 bp, Streptococcus pneumoniae
  misc_feature (1)..(58): tiling:Spneumo1:WAN024AES; Cluster includes WAN024EJL R6.I G_828.1.2||||792515..792572|+|58 bp|Between spr0792 (hsdR) (+ strand) and spr0793 (argR) (- strand)|S.pneumoniae|R6| NC_003098.1|IG|110
tagaaaacaaaaagccgagcaagaattcaattgcaggagaaaatgaaataatactcaa

SEQ ID NO: 4478 - DNA, 115 bp, Streptococcus pneumoniae
  misc_feature (1)..(115): tiling:Spneumo1:WAN024AOH; Cluster includes WAN024EOO R6.I G_438.2.2||||411998..412112|+|115 bp|Between spr0414 (dinP ) (- strand) and spr0415 (pfl) (+ strand)|S.pneumoniae|R6| NC_003098.1|IG|110
tagaaaagaaagtgtaaaaatagggawtttkcacttgttgaaatcggttactwtatggtatacttgtcttatgaatgtaacagatgactgttactagaaaaaagaggacattaat

SEQ ID NO: 4479 - DNA, 100 bp, Streptococcus pneumoniae
  misc_feature (1)..(100): tiling:Spneumo1:WAN024ADS; Cluster includes WAN024EIZ R6.I G_867||||832865..832943|+|79 bp|Between spr0831 (lytD) (+ strand) and spr0832 (proB) (+ strand)|S.pneumoniae|R6|NC_0 03098.1|IG|110
tagaaaagaaggttttagggccttctttttcctatcaactcttttctatttcctgttattcatgttataatggataaatatgaataatcggagtgagact

SEQ ID NO: 4480 - DNA, 199 bp, Streptococcus pneumoniae
  misc_feature (1)..(199): tiling:Spneumo1:WAN024ABC; Cluster includes WAN024EHU R6.I G_971.1||||918891..919089|+|199 bp|Between spr0932 (+ stra nd) and spr0933 (+ strand)|S.pneumoniae|R6|NC_003098.1|IG| 110
tagaaaagaatgacagtatatgactttctgcatttattacattcctacttggtataggaacagctattattcctttcttgcaaggtatcaattagaaaataggctcaatataaagattgataggatcatttttatatttaaaggagcgttgaaatgattgataaaggcaacaaaaaattttaggataaatttgctaagt

SEQ ID NO: 4481 - DNA, 58 bp, Streptococcus pneumoniae
  misc_feature (1)..(58): tiling:Spneumo1:WAN0249FG; Cluster includes WAN024E45-rc R 6.IG_2173||||1958874..1958931|-|58 bp|Between spr1966 (- s trand) and spr1967 (- strand)|S.pneumoniae|R6|NC_003098.1| IG-rc|110
tagaaagtgtggaggtggtatttgggatatcacctccattttggaagagaggtaaaga

SEQ ID NO: 4482 - DNA, 214 bp, Streptococcus pneumoniae
  misc_feature (1)..(214): tiling:Spneumo1:WAN024AHK; Cluster includes WAN024EL3 R6.I G_694||||675905..676118|+|214 bp|Between spr0670 (rheB) (+ strand) and spr0671 (metK) (+ strand)|S.pneumoniae|R6|NC_ 003098.1|IG|110
tagaaattgttggagtaytgagctccaactttttkmtttatgagaacgaactatctaaaccgaaacactacattaaagactgcaaattgcgattaaaaatggtataatgataaagttatatagtcccgataagatggtaggtatttattacgaagagttttcctatcagtactttgtaactctataacaatattttttaaggggggacattttt

SEQ ID NO: 4483 - DNA, 59 bp, Streptococcus pneumoniae
  misc_feature (1)..(59): tiling:Spneumo1:WAN0249NU; Cluster includes WAN024E8R-rc R 6.IG_1671.1.2||||1598655..1598713|-|59 bp|Between spr1622 (- strand) and spr1623 (+ strand)|S.pneumoniae|R6|NC_00309 8.1|IG-rc|110
tagaactacttttttagtgattttacctgccaagagaccaataagacctccagcaataa

SEQ ID NO: 4484 - DNA, 123 bp, Streptococcus pneumoniae
  misc_feature (1)..(123): tiling:Spneumo1:WAN0249HS; Cluster includes WAN024E59-rc R 6.IG_2088||||1859008..1859130|-|123 bp|Between spr1881 (gl tX) (- strand) and spr1882 (gpi) (- strand)|S.pneumoniae|R 6|NC_003098.1|IG-rc|110
tagaagaaaagagtggtttgcccactctttttactctctttatccatagaaattggactcagccaagacttgtgatataatatagaaagcaaaaaggcagacgcctagataataggagaaact

SEQ ID NO: 4485 - DNA, 76 bp, Streptococcus pneumoniae
  misc_feature (1)..(76): tiling:Spneumo1:WAN0249MZ; Cluster includes WAN024E8B R6.I G_1710.1||||1634443..1634515|+|73 bp|Between spr1661 (+ st rand) and spr1662 (xpt) (+ strand)|S.pneumoniae|R6|NC_0030 98.1|IG|110
tagaataataaaaattgggaaaagtctttaaagttagaaaaaggcatattgtcaggtgtctaaaarcttgatagta

SEQ ID NO: 4486 - DNA, 136 bp, Streptococcus pneumoniae
  misc_feature (1)..(136): tiling:Spneumo1:WAN0249MD; Cluster includes WAN024E7X R6.I G_1732.2.2||||1655887..1656022|+|136 bp|Between spr1683 (+ strand) and spr1684 (fatD) (+ strand)|S.pneumoniae|R6|NC_ 003098.1|IG|110
tagaataggataacaaaggagaaagtcttgttgctctctccttgttgtatttattaaattgtcagaaattttattgacagattagaaaaataatgttacatttatatccgcagrtatctttcgataccaaatctac

SEQ ID NO: 4487 - DNA, 105 bp, Streptococcus pneumoniae
  misc_feature (1)..(105): tiling:Spneumo1:WAN0249OR; Cluster includes WAN024E9A R6.I G_1630.2||||1566345..1566449|+|105 bp|Between spr1584 (- s trand) and spr1585 (- strand)|S.pneumoniae|R6|NC_003098.1| IG|110
tagaatatgttttgrggaatttggaacacatttrcmaaaataaacttgttgtttagaaatagtagtttagtagagacttgagaaaaagcctacyttwcartagac

SEQ ID NO: 4488 - DNA, 56 bp, Streptococcus pneumoniae
  misc_feature (1)..(56): tiling:Spneumo1:WAN024ARH; Cluster includes WAN0247U1 R6.I G_48.2.1||||28487..28542|+|56 bp|Between spr0027 (+ strand ) and spr0028 (prsA) (+ strand)|S.pneumoniae|R6|NC_003098. 1|IG|110
tagaatatttttcaaaagaatgatgcaagggtacaaatatggtgcccttcttttat

SEQ ID NO: 4489 - DNA, 67 bp, Streptococcus pneumoniae
  misc_feature (1)..(67): tiling:Spneumo1:WAN0249O9; Cluster includes WAN024E8Y R6.I G_1661.2.2||||1588936..1589002|+|67 bp|Between spr1615 (- strand) and spr1616 (cshA) (+ strand)|S.pneumoniae|R6|NC_0 03098.1|IG|110
tagaatggacatagtaagatatagtagatgagtcattctactcaaatccacgttagaaaggactgct

SEQ ID NO: 4490 - DNA, 65 bp, Streptococcus pneumoniae
  misc_feature (1)..(65): tiling:Spneumo1:WAN024AQQ; Cluster includes WAN024EPY-rc R 6.IG_327.1||||305821..305885|-|65 bp|Between spr0306 (+ st rand) and spr0307 (clpL) (+ strand)|S.pneumoniae|R6|NC_003 098.1|IG-rc|110
tagacccacctctttctattttactttaaataagtgttctagtaaggctttcatttaccttacgt

SEQ ID NO: 4491 - DNA, 255 bp, Streptococcus pneumoniae
  misc_feature (1)..(255): tiling:Spneumo1:WAN0249QK; Cluster includes WAN024E3Z R6.I G_2181.2.2||||1965843..1966097|+|255 bp|Between spr1974 (f csR) (+ strand) and spr1975 (adcA) (- strand)|S.pneumoniae |R6|NC_003098.1|IG|110
tagaccgamtgactagcctataaacacccrttaaatcgctaagatacgtcaaaaaagcccttaactatggcactagttaggggctttggtgttctaatgaaccttatacactaactacattctagcatataagyccagatatttcaagagttttatttattktttmaggttcccttagttctgaaaggtctataatgaagttagccatctagtatcaaaaaaccgactagctcttatgaactagtcgatttctca

SEQ ID NO: 4492 - DNA, 92 bp, Streptococcus pneumoniae
  misc_feature (1)..(92): tiling:Spneumo1:WAN024APL; Cluster includes WAN024EPA R6.I G_392.2||||368997..369088|+|92 bp|Between spr0368 (mutS2) (+ strand) and spr0369 (dagA) (+ strand)|S.pneumoniae|R6|N C_003098.1|IG|110
tagaccgctttttagcatttatctaagcattccagagtacatgtatcttgcatgtgctctttcttttggggttgaaacgataggagaaggaa

SEQ ID NO: 4493 - DNA, 305 bp, Streptococcus pneumoniae
  misc_feature (1)..(305): tiling:Spneumo1:WAN0249TM; Cluster includes WAN0247P1 R6.I G_84||||70252..70548|+|297 bp|Between spr0063 (+ strand) a nd spr0064 (agaS) (+ strand)|S.pneumoniae|R6|NC_003098.1|I G|210
tagactaatactcttcgaaaatctcttcaaactacgtcarcgtcgycttrccgtagtakatgttactgacttcgtcagtcttatccggcaacctcaaaacggtgttttgagctgacttcgtcagtcttatccggcaacctcaaagcagtgctttgagcagcctgcggctagtttcctacagattttagttggaactcgattcaattcatgtgacaacgtgaaaatcgttagagcattttatatagaatatacatgggaatgkagcttactcccattccyatatttaatagaaaaagaggaactca

SEQ ID NO: 4494 - DNA, 57 bp, Streptococcus pneumoniae
  misc_feature (1)..(57): tiling:Spneumo1:WAN024A8Q; Cluster includes WAN024EGJ R6.I G_1065.1||||1008048..1008101|+|54 bp|Between spr1026 (+ st rand) and spr1027 (- strand)|S.pneumoniae|R6|NC_003098.1|I G|110
tagactttgtttcarcaatctatgacagttatagtaggctgaaattggaatagcaca

SEQ ID NO: 4495 - DNA, 94 bp, Streptococcus pneumoniae
  misc_feature (1)..(94): tiling:Spneumo1:WAN024AH6; Cluster includes WAN024EKT R6.I G_707.2.2||||687484..687577|+|94 bp|Between spr0683 (+ str and) and spr0684 (+ strand)|S.pneumoniae|R6|NC_003098.1|IG |110
tagagatrttgtccccttcctccaacttgagaaaatccttggaacgtgataaaataaaggataaggatttttaataattcattatatagaatsa

SEQ ID NO: 4496 - DNA, 96 bp, Streptococcus pneumoniae
  misc_feature (1)..(96): tiling:Spneumo1:WAN0249FB; Cluster includes WAN02471H R6.I G_224.2||||203231..203326|+|96 bp|Between spr0203 (rpsH) ( + strand) and spr0204 (rplF) (+ strand)|S.pneumoniae|R6|NC _003098.1|IG|110
tagakcgtgttcagttcagctcttgaactaaataagtatctgaaccccgtgaaaactggccgttctggcctgacaatttaacaggagaaaataaac

SEQ ID NO: 4497 - DNA, 59 bp, Streptococcus pneumoniae
  misc_feature (1)..(59): tiling:Spneumo1:WAN024A8J; Cluster includes WAN024EGG R6.I G_1071.1||||1015888..1015943|+|56 bp|Between spr1032 (glgA ) (+ strand) and spr1033 (+ strand)|S.pneumoniae|R6|NC_003 098.1|IG|110
tagataaaatcgtatgatgacttcatacgatttttaggctgtttagagaggagaactga

SEQ ID NO: 4498 - DNA, 52 bp, Streptococcus pneumoniae
  misc_feature (1)..(52): tiling:Spneumo1:WAN024AFK; Cluster includes WAN0247J1 R6.I G_104.2.2||||91626..91677|+|52 bp|Between spr0083 (+ stran d) and spr0084 (+ strand)|S.pneumoniae|R6|NC_003098.1|IG|1 10
tagataaataaaaaatttagaaaatttaagaatagaaaagagaacaaatctt

SEQ ID NO: 4499 - DNA, 63 bp, Streptococcus pneumoniae
  misc_feature (1)..(63): tiling:Spneumo1:WAN024APY; Cluster includes WAN024EPI-rc R 6.IG_379.2||||353697..353759|-|63 bp|Between spr0355 (- st rand) and spr0356 (mtlA) (+ strand)|S.pneumoniae|R6|NC_003 098.1|IG-rc|110
tagatcatcctccttttcttaaaactagtatatacaaagttaaaaacctttaaaactaaagtt

SEQ ID NO: 4500 - DNA, 263 bp, Streptococcus pneumoniae
  misc_feature (1)..(263): tiling:Spneumo1:WAN024FEG; Cluster includes WAN0246KV |||| ||263 bp|Incyte orf contig SPN2C0469 9042-9308|S.pneumonia e|23F|WAN0246KV|ORF|001
tagatgatggatatagtggttctaattttgagcgaccaaattttaagaatatgattgatgacctgaataaaggaaagttttctatcattatggtaaaagatttatctcgtttcggcagagattatatcgagtcaggaaagtacttacaaaagatatttcctgaaaaaggtattcgctttatatctgtaaatgataactatgatagtgataatgcggatgttagcgatatccatttaaggtttgtttaaattctttttttatgg

SEQ ID NO: 4501 - DNA, 189 bp, Streptococcus pneumoniae
  misc_feature (1)..(189): tiling:Spneumo1:WAN024ALN; Cluster includes WAN024ENC R6.I G_527.2||||500683..500871|+|189 bp|Between spr0503 (+ stra nd) and spr0504 (licT) (+ strand)|S.pneumoniae|R6|NC_00309 8.1|IG|110
tagattgaaatatcataaaataaaaacggttacagagttattaattatttaagcttcatgtcaccattaaaaattgaaataaaaggatgttatcactaatacaagtgagcaggaacctatttaatcacatcagaagaagtttcttgatgttttttaagtaggttccttttatkttaaaagggaaatttt

SEQ ID NO: 4502 - DNA, 202 bp, Streptococcus pneumoniae
  misc_feature (1)..(202): tiling:Spneumo1:WAN024A2Z; Cluster includes WAN024780 R6.I G_147.1.2.1||||136629..136830|+|202 bp|Between spr0126 (- strand) and spr0127 (orf51) (- strand)|S.pneumoniae|R6|NC_ 003098.1|IG|110
tagattgaccttgattcgttacaattatttcaattataccacaaaatgaaaaattagtaaaagacggaaacgagaaagttaggggacgatttctttggtaagcgtttkcaaraataaagaaaatgtattatgttgataacggaagtgaaatttattgcttgtcataattccatatagattttaagtcaaggaggttgcccta

SEQ ID NO: 4503 - DNA, 175 bp, Streptococcus pneumoniae
  misc_feature (1)..(175): tiling:Spneumo1:WAN024A9O; Cluster includes WAN024EH3 R6.I G_1027.1.1.2.1||||973332..973506|+|175 bp|Between spr0988 (IS1167) (- strand) and spr0989 (murZ) (+ strand)|S.pneumo niae|R6|NC_003098.1|IG|110
tagattgtctgataggacggtatgtataaaacgcttctgtgaactgagagaaggggagaagttcttgctaaaatttagttgaacagccgtattccgatacttagataagagatctagtcttagmtcctactcagttttaggggataaaaaaggggcaatagcgattcgagaaaga

SEQ ID NO: 4504 - DNA, 54 bp, Streptococcus pneumoniae
  misc_feature (1)..(54): tiling:Spneumo1:WAN024A58; Cluster includes WAN024EEI-rc R 6.IG_1220.1||||1176515..1176568|-|54 bp|Between spr1176 (+ strand) and spr1177 (rpmE) (+ strand)|S.pneumoniae|R6|NC_ 003098.1|IG-rc|110
tagattgttacyatactagtctatcagattctgaaaagtttggcaagtatttta

SEQ ID NO: 4505 - DNA, 223 bp, Streptococcus pneumoniae
  misc_feature (1)..(223): tiling:Spneumo1:WAN0249ZE; Cluster includes WAN024EC9-rc R 6.IG_1388||||1329952..1330174|-|223 bp|Between spr1344 (gl pF) (- strand) and spr1345 (- strand)|S.pneumoniae|R6|NC_0 03098.1|IG-rc|110
tagattttagaatctaggaaccaggaaaagctcacagatgtgggcttttttcctggttttgagaacgaggtctttcgtaaagaataaaaacgcttacaagtctgttgaactgggaaactatgaatcctatttttttaaaaatatttccagaaatcagttgctaaatagggtaaaaattgataaaataaggaatatctaaaaaattttaaggagaatctagcaa

SEQ ID NO: 4506 - DNA, 489 bp, Streptococcus pneumoniae
  misc_feature (1)..(489): tiling:Spneumo1:WAN0249UK; Cluster includes WAN024ER4-rc R 6.IG_245.2.1||||217122..217258|-|137 bp|Between spr0224 (- strand) and spr0225 (- strand)|S.pneumoniae|R6|NC_003098. 1|IG-rc|330
tagcaccgagtccattttctacgataatactawactaaaatcaaaaagcattatataatagtgatatgaaatcaactaaagaagaaatccaaaccatcaaaacactttttaaagactctcgtacagctaaatatcataaacgccttcaaatcgttctatagtaaaatgaaacaagaacaggacaaattgatcaggacagtcaaatcgatttctaacaatgttttagaagcagaggtgtactattctagtttcaatccattatatttcgtctgatgggcaaatcttataaagagattatagaacttttatagtagtttgaaataagatgtgaacaactctatcaggaaagtcaaaytaatttatagaaatattttagcagycaargtgtactgttatagattcaatacactatagamtrkaatyrwabrwyktaaaaacgcttacattgttttaaaataaacttaaataacacaacggagrtatcccatc

SEQ ID NO: 4507 - DNA, 70 bp, Streptococcus pneumoniae
  misc_feature (1)..(70): tiling:Spneumo1:WAN024AJ7; Cluster includes WAN0247N0-rc R 6.IG_88.2.2.2||||75242..75310|-|69 bp|Between spr0067 (+ s trand) and spr0068 (+ strand)|S.pneumoniae|R6|NC_003098.1| IG-rc|110
tagccyrcctcctctaattttgtactattgtatcaaaawctgacmragtgtcaaggaggaagctgatgaa

SEQ ID NO: 4508 - DNA, 420 bp, Streptococcus pneumoniae
  misc_feature (1)..(420): tiling:Spneumo1:WAN024AAI; Cluster includes WAN024EHG R6.I G_993.1.2||||937415..937834|+|420 bp|Between spr0954 (+ st rand) and spr0955 (+ strand)|S.pneumoniae|R6|NC_003098.1|I G|110
tagcgactcctaagcctgaatatcgtgaggtaggggggataggaaggaattagcgaaatcaaggttctacaaacagaatcgtgacttgaagccatatatagcggatgaggaactctaaaatccaaataggtgtcgtaacctatatacgtaaattacgagagtaaactaggaaagatgtacggcttattccgtgagcgtttaggacgtagtacaacgaatcatgggagtcagctgaacacatagtattgaagaaatttctgtaatggaaatggagcgaagaagtgaacaattaaatgaatacctctctaattaaatttgtcaattctaattcctggtatgaaaagacagtgacctgaaaatgtaaacgatgggagctgatcataaatataggacggtacatgcagtggtgttagagattag

SEQ ID NO: 4509 - DNA, 150 bp, Streptococcus pneumoniae
  misc_feature (1)..(150): tiling:Spneumo1:WAN0249EX; Cluster includes WAN024E3P R6.I G_2201.2||||1987394..1987543|+|150 bp|Between spr1994 (+ s trand) and spr1995 (pspC) (- strand)|S.pneumoniae|R6|NC_00 3098.1|IG|110
tagcgctataaatccggctagagattacagagttattttttaatctaaacttcctacaagggtatattatctactgaaaggatatggtatttgtagggaatactttaaaragttcttacaggaagtcagtattaactagttatattaggt

SEQ ID NO: 4510 - DNA, 178 bp, Streptococcus pneumoniae
  misc_feature (1)..(178): tiling:Spneumo1:WAN0249KB; Cluster includes WAN024E6Q R6.I G_1889.2||||1743609..1743786|+|178 bp|Between spr1774 (+ s trand) and spr1775 (ndk) (- strand)|S.pneumoniae|R6|NC_003 098.1|IG|110
tagcgggtgttttttttgtctcgcacctaacggagcgagacaaactaatagtcacttaatcaaaaaacgcaccatatcaaaaactaaaaagtttgatatcatgcgtcatgtcttaaactaattgactatactttctattcaaatgagcttttaaccaattgattgagccaatccactc

SEQ ID NO: 4511 - DNA, 225 bp, Streptococcus pneumoniae
  misc_feature (1)..(225): tiling:Spneumo1:WAN0249VD; Cluster includes WAN024E9T R6.I G_1584.1.2||||1518574..1518795|+|222 bp|Between spr1537 (- strand) and spr1538 (axe1) (- strand)|S.pneumoniae|R6|NC_ 003098.1|IG|110
tagctactactatttttacagcaatctatctttaaatatacataaaratagattctatcactttttataagygttagtaaatttattatacctcatttttaaaacgctttcaatatagtgtaatatagtagattttagtttcaaaaaattcttttatataataatgtccttgaaagtagtttcagctgaacatttatagtccataaaaagaaaacagaaactcat

SEQ ID NO: 4512 - DNA, 89 bp, Streptococcus pneumoniae
  misc_feature (1)..(89): tiling:Spneumo1:WAN024A4J; Cluster includes WAN024EDT R6.I G_1283||||1238798..1238886|+|89 bp|Between spr1239 (amy) ( + strand) and spr1240 (alaS) (- strand)|S.pneumoniae|R6|NC _003098.1|IG|110
tagctcataataaccaagctaggtccaagcggatttggcttttttgtattcacaaaaagacctacccaaatggatagatctttacttga

SEQ ID NO: 4513 - DNA, 51 bp, Streptococcus pneumoniae
  misc_feature (1)..(51): tiling:Spneumo1:WAN024ADA; Cluster includes WAN024EIQ R6.I G_898||||856082..856132|+|51 bp|Between spr0862 (rpmI) (+ strand) and spr0863 (rplT) (+ strand)|S.pneumoniae|R6|NC_0 03098.1|IG|110
tagcttgactgtaagtaaacaattctaggaaatatttggaggaaataaaac

SEQ ID NO: 4514 - DNA, 58 bp, Streptococcus pneumoniae
  misc_feature (1)..(58): tiling:Spneumo1:WAN0249E2; Cluster includes WAN024E3C-rc R 6.IG_2230||||2015428..2015485|-|58 bp|Between spr2023 (mre C) (- strand) and spr2024 (- strand)|S.pneumoniae|R6|NC_00 3098.1|IG-rc|110
tagctttcaggaattgataaaaagttactgtaacagtttttgatataaaggtagggat

SEQ ID NO: 4515 - DNA, 88 bp, Streptococcus pneumoniae
  misc_feature (1)..(88): tiling:Spneumo1:WAN0249XS; Cluster includes WAN024EBA-rc R 6.IG_1481.2.2||||1421914..1421993|-|80 bp|Between spr1437 (msmK) (- strand) and () (- strand)|S.pneumoniae|R6|NC_003 098.1|IG-rc|110
taggaaaagagytagctaaagctagctcttttgtatttctctaaaaaattagaatccagtcaaatgtagtggagaatcagcgaaaata

SEQ ID NO: 4516 - DNA, 688 bp, Streptococcus pneumoniae
  misc_feature (1)..(688): tiling:Spneumo1:WAN0249TP; Cluster includes WAN024E7D R6.I G_1853.1||||1713046..1713733|+|688 bp|Between spr1738 (- s trand) and spr1739 (ply) (- strand)|S.pneumoniae|R6|NC_003 098.1|IG|120
taggaatctccttttttcacattttaatctttcttattataacacaagtttttttgattttcactagaggaaatggattttattagcaaatcaagctaggatagcactttacctgctaagatggtcttgcctttctatctttatcaacagrcactcatccacattcaaaaaacaaactagaccattatctgcaaatagaaagtttcagccaagtttgacaaagtcagctcaaattactgtttgaagtttgtagatataagcgacaaaaacaatcatactgcaccttttgttgacagtctactccagacatatcatagttcaagtaaatactttgaaattcaacagttcttataggcgctattgtattctaagaaatcaatagaagagtttctaagcaaacctctaatactcaataaaaatcaaagagcaaactagaaagctagccgcaggttgctcaaaacactgttttgaggttgcggatagggctgacatggtttgaagagattttctaagagtataatttacgtgttcctaagatggagaagttagactagtacactggcacttctaaamcattgctagcaattgatttgttcatatttaatttcattttttccataaatgggtattagatataaacagcaaaatatttccgatacgtgtcrttcttgaatttccaatcatctaa

SEQ ID NO: 4517 - DNA, 104 bp, Streptococcus pneumoniae
  misc_feature (1)..(104): tiling:Spneumo1:WAN024ANW; Cluster includes WAN024EOC R6.I G_453.2||||430088..430191|+|104 bp|Between spr0429 (+ stra nd) and spr0430 (+ strand)|S.pneumoniae|R6|NC_003098.1|IG| 110
taggataggaatctttttggcgctaagattttaagagragagactgcaagaagggcttgatttatgataaaatagaagtctaagaagcgaatgaagagagtaag

SEQ ID NO: 4518 - DNA, 202 bp, Streptococcus pneumoniae
  misc_feature (1)..(202): tiling:Spneumo1:WAN024A2Y; Cluster includes WAN024780-rc R 6.IG_147.1.2.1||||136629..136830|-|202 bp|Between spr0126 (- strand) and spr0127 (orf51) (- strand)|S.pneumoniae|R6| NC_003098.1|IG-rc|110
tagggcaacctccttgacttaaaatctatatggaattatgacaagcaataaatttcacttccgttatcaacataatacattttctttattyttgmaaacgcttaccaaagaaatcgtcccctaactttctcgtttccgtcttttactaatttttcattttgtggtataattgaaataattgtaacgaatcaaggtcaatcta

SEQ ID NO: 4519 - DNA, 190 bp, Streptococcus pneumoniae
  misc_feature (1)..(190): tiling:Spneumo1:WAN024AEK; Cluster includes WAN024EJG R6.I G_833.2.2||||802675..802864|+|190 bp|Between spr0797 (pykF ) (+ strand) and spr0798 (- strand)|S.pneumoniae|R6|NC_003 098.1|IG|110
taggtagtcgctgtttcttatctttggctccatggacttgctgacgacataagcgattgggtcgtagtcgtctgggataatggaaactccatawctaaatcgtygtcctgcatcragcggctacctgcagagataaactacctaacacgagagtaagtagtctgtctgtagtcgtccagtctgatgattt

SEQ ID NO: 4520 - DNA, 77 bp, Streptococcus pneumoniae
  misc_feature (1)..(77): tiling:Spneumo1:WAN0249GE; Cluster includes WAN02471J-rc R 6.IG_220||||201217..201293|-|77 bp|Between spr0199 (rplN) (+ strand) and spr0200 (rplX) (+ strand)|S.pneumoniae|R6|N C_003098.1|IG-rc|110
taggtttctccttgatttttcttacgcccataagggcaccctagcttgaagctaggggactagtttgttcctaaaaa

SEQ ID NO: 4521 - DNA, 115 bp, Streptococcus pneumoniae
  misc_feature (1)..(115): tiling:Spneumo1:WAN0249KD; Cluster includes WAN024E6R R6.I G_1889.1.2.1||||1743275..1743389|+|115 bp|Between spr1774 (+ strand) and spr1775 (ndk) (- strand)|S.pneumoniae|R6|NC _003098.1|IG|110
tagtaatctgtgttgaaggctcaaaacctatggtaaaaaagtagctttgaaaacgtattgcctccaaagatttagttaaataatgatttaacacaaaaagaaattattgaagttc

SEQ ID NO: 4522 - DNA, 320 bp, Streptococcus pneumoniae
  misc_feature (1)..(320): tiling:Spneumo1:WAN0249PP; Cluster includes WAN024EEG R6.I G_1224.1.2||||1178934..1179239|+|306 bp|Between C (transpo sase) (- strand) and spr1181 (gdhA) (+ strand)|S.pneumonia e|R6|NC_003098.1|IG|110
tagtagattgaaactagaatagtacacctctacttctaaaacattgttagaaatcgatttgactgtcctgatcgatttgccctgttcttgtttcgttttactatagaacgatttgaaggcgtttatgatatttagctgtacgagagtcttttaaaagtgttttgatggcttggatttcttctttagttgatttcatatyactattatataatgctttttgattttagtctggtataaatattgctttcctccaaaatggtcatarttttactrgcaaatctaacatatcacggataaattaacaagtgatttctgaattg

SEQ ID NO: 4523 - DNA, 634 bp, Streptococcus pneumoniae
  misc_feature (1)..(634): tiling:Spneumo1:WAN0249MW; Cluster includes WAN024E8A R6.I G_1710.2||||1634686..1635319|+|634 bp|Between spr1661 (+ s trand) and spr1662 (xpt) (+ strand)|S.pneumoniae|R6|NC_003 098.1|IG|110
tagtataamtgttagcttacaatggagtttttgttcaccctctcttctttttgttcgytttttaaaccaaaacactaacaaaatagttgatttctaaagttatttagtgtaaaataaaaacattggctcaagcctatttaaaattgaatatcgttttacttgtttatgtcgtgaattggcacgacgtttctacaaggtgccggaacacctaacaataagtaagtcagcagtgagatatggccgtttttgccatgtctatttaggggacttacttagagattaagtaggtcttttttgaatatttttaatatttcccttaattagtgcggacgggaggtgaaattatcctgtgaataatttcaggaatccagggaatttcatccctaatttttgagcccctagctctttcatttctaggcttaggctaaaatagttccccgaactattttactctcaaaaatcccgtcatagacaataacaagattattgtctatgataccactacaacgggaaatatttgataagactcgcttcgctcgtaatagttttatcaaatatatagtattagcaaaagggatcactatagaaatatttaaacaacaagtaaattaacttttagactttaggaggtctt

SEQ ID NO: 4524 - DNA, 106 bp, Streptococcus pneumoniae
  misc_feature (1)..(106): tiling:Spneumo1:WAN0249HU; Cluster includes WAN024E5E-rc R 6.IG_2038||||1850636..1850741|-|106 bp|Between spr1879 (- strand) and () (- strand)|S.pneumoniae|R6|NC_003098.1|IG-r c|110
tagtatagtgttaggaacgttgttattcttcgttccttttttatattatttttggtataattatagttattcaaattttatttagattaagaaagtgtaggggagt

SEQ ID NO: 4525 - DNA, 63 bp, Streptococcus pneumoniae
  misc_feature (1)..(63): tiling:Spneumo1:WAN024AE3; Cluster includes WAN024EJ5-rc R 6.IG_859.1||||826286..826348|-|63 bp|Between spr0823 (but) (+ strand) and spr0824 (- strand)|S.pneumoniae|R6|NC_0030 98.1|IG-rc|110
tagtatcttatagttrctaataagaagttagtctagcagaatgaatctctcatttctcccaca

SEQ ID NO: 4526 - DNA, 76 bp, Streptococcus pneumoniae
  misc_feature (1)..(76): tiling:Spneumo1:WAN024A37; Cluster includes WAN024ED8 R6.I G_1323.2||||1274805..1274879|+|75 bp|Between spr1279 (- st rand) and spr1280 (- strand)|S.pneumoniae|R6|NC_003098.1|I G|110
tagtgaaagcaggagcataccaagatgactgattttttactgtattttaggtatgcaaaataatactaaatgaaac

SEQ ID NO: 4527 - DNA, 94 bp, Streptococcus pneumoniae
  misc_feature (1)..(94): tiling:Spneumo1:WAN024ACI; Cluster includes WAN024EIC R6.I G_938.2||||888167..888260|+|94 bp|Between spr0902 (+ stran d) and spr0903 (ccdA) (+ strand)|S.pneumoniae|R6|NC_003098 .1|IG|110
tagtgcccgatacgattttgcgtagcagaaagcttacaaataaaattgaatatagtaaaataggattagaattattaagaaagttggttcttta

SEQ ID NO: 4528 - DNA, 76 bp, Streptococcus pneumoniae
  misc_feature (1)..(76): tiling:Spneumo1:WAN0249FZ; Cluster includes WAN024E4F R6.I G_2159.2||||1936838..1936913|+|76 bp|Between spr1952 (- st rand) and spr1953 (+ strand)|S.pneumoniae|R6|NC_003098.1|I G|110
tagttatytttraaactccttttctaaaggccctctttttctgatataatgtagaaaaacagctaaaggaaagact

SEQ ID NO: 4529 - DNA, 205 bp, Streptococcus pneumoniae
  misc_feature (1)..(205): tiling:Spneumo1:WAN0249JL; Cluster includes WAN0247W1 R6.I G_37.2||||21957..22161|+|205 bp|Between spr0019 (- strand) and spr0020 (+ strand)|S.pneumoniae|R6|NC_003098.1|IG|110
tagttctaataggayttacccaaaagttttaaggcggtctttttagaactttaattktttgaaatttaggtagcaaatttgtttctattttgtcaacttttcctatttttatcttgttgaggctggtattttaacaattcaggaattgatagtgaatgtgtaaaattttttgttagaataagtttataaaaaagaaaaggagtat

SEQ ID NO: 4530 - DNA, 131 bp, Streptococcus pneumoniae
  misc_feature (1)..(131): tiling:Spneumo1:WAN0249RI; Cluster includes WAN024ECF R6.I G_1378.2||||1321734..1321863|+|130 bp|Between spr1334 (- s trand) and spr1335 (mocA) (+ strand)|S.pneumoniae|R6|NC_00 3098.1|IG|110
tagttgggctgatacctagatgtctgagaatcctccttttcctccttctattatagcacatttttaaatctaggtttgctagattctatgcttctatctatttattcggaaaagaaagctaatagcttatt

SEQ ID NO: 4531 - DNA, 109 bp, Streptococcus pneumoniae
  misc_feature (1)..(109): tiling:Spneumo1:WAN024ANH; Cluster includes WAN024EO7 R6.I G_461.2.2||||436914..437022|+|109 bp|Between spr0437 (rpoE ) (+ strand) and spr0438 (pyrG) (+ strand)|S.pneumoniae|R6 |NC_003098.1|IG|110
tagttgtgaatctggtgcagtcgtcccagattattcttattagtagggtcttgttttctatatcccctcgtagttaacaagaccttgagcattttagaaagaggaatct

SEQ ID NO: 4532 - DNA, 150 bp, Streptococcus pneumoniae
  misc_feature (1)..(150): tiling:Spneumo1:WAN024AR7; Cluster includes WAN024EQ9 R6.I G_303.1.2||||281078..281227|+|150 bp|Between spr0282 (+ st rand) and spr0283 (+ strand)|S.pneumoniae|R6|NC_003098.1|I G|110
tagtttaaataatgagtgttaayattagcagtgaagagrtctttttaagatattcttctctgctttttcattttattttttygctatgtagggtatgaagcaaaatagaaagtagttcgaatagttgataaacagggaactgctgttatt

SEQ ID NO: 4533 - DNA, 73 bp, Streptococcus pneumoniae
  misc_feature (1)..(73): tiling:Spneumo1:WAN024AH3; Cluster includes WAN024EKS-rc R 6.IG_713||||690338..690410|-|73 bp|Between spr0689 (- stra nd) and spr0690 (+ strand)|S.pneumoniae|R6|NC_003098.1|IG- rc|110
tagtttattcgtaaaatcttgtagattttaggaaaattttatataatattgatataaaagaagggaggccaat

SEQ ID NO: 4534 - DNA, 53 bp, Streptococcus pneumoniae
  misc_feature (1)..(53): tiling:Spneumo1:WAN0249VN; Cluster includes WAN024E9Y R6.I G_1582.1.2||||1514142..1514194|+|53 bp|Between spr1535 (- strand) and spr1536 (nanA) (- strand)|S.pneumoniae|R6|NC_0 03098.1|IG|110
tagtttcttctttgattttcattmagtatctcctcaatcttcacaaggaggtc

SEQ ID NO: 4535 - DNA, 96 bp, Streptococcus pneumoniae
  misc_feature (1)..(96): tiling:Spneumo1:WAN024AAD; Cluster includes WAN024EHB-rc R 6.IG_1011.2.1.1.1||||955827..955879|-|53 bp|Between spr097 2 (+ strand) and spr0973 (ftsW) (+ strand)|S.pneumoniae|R6 |NC_003098.1|IG-rc|110
tagttttattgtattatatttttgtttcgcagaaagtctattattcctttcgttccaaggtttttacgcttttagcaacaagcttacacactccac

SEQ ID NO: 4536 - DNA, 51 bp, Streptococcus pneumoniae
  misc_feature (1)..(51): tiling:Spneumo1:WAN024ARF; Cluster includes WAN024EQD R6.I G_297||||275936..275986|+|51 bp|Between spr0276 (bglA) (+ strand) and spr0277 (+ strand)|S.pneumoniae|R6|NC_003098.1 |IG|110
tataaacaaactgagattattctcagtttgtttagcatattgaggtgacat

SEQ ID NO: 4537 - DNA, 187 bp, Streptococcus pneumoniae
  misc_feature (1)..(187): tiling:Spneumo1:WAN0249RC; Cluster includes WAN024ELM R6.I G_651.1.2||||636284..636465|+|182 bp|Between spr0627 (lctO ) (+ strand) and spr0628 (+ strand)|S.pneumoniae|R6|NC_003 098.1|IG|110
tataaagatatttttcggtcaaatatcttgctagggctttcattttttgctatactggttcagtarttaaataatagagacatttggggtgctttargctgagatratacccattgaacctgatacagttaagactggcgaagggaaatgtgaammgttttttcgtatggygaaatgaacgrtctaa

SEQ ID NO: 4538 - DNA, 210 bp, Streptococcus pneumoniae
  misc_feature (1)..(210): tiling:Spneumo1:WAN024A7U; Cluster includes WAN024EFZ R6.I G_1099||||1056806..1056929|+|124 bp|Between spr1060 (phpA) (- strand) and spr1061 (phtA) (- strand)|S.pneumoniae|R6| NC_003098.1|IG|220
tataaagtaataaaccggttaattaactagttaatagtttactctttttaatattgcttgtcaagaattttacatatatacataatgaaaaatgaaagyctckwtawmgagrctttcatttttcattatgtatatatgtaaaattcttgacaagcaatattaaaaagagtaaactattaactagttaattaaccggtttattactttata

SEQ ID NO: 4539 - DNA, 209 bp, Streptococcus pneumoniae
  misc_feature (1)..(209): tiling:Spneumo1:WAN0249O4; Cluster includes WAN024E8W R6.I G_1665||||1590612..1590820|+|209 bp|Between () (+ strand) and spr1617 (sacA) (- strand)|S.pneumoniae|R6|NC_003098.1| IG|110
tataaatacaacaggaaaagycttrkaaymwagggctttttttgcttaaataaaatttttttcaaattctttagaaaactagyttaaatcataatccaacaccaattttacaaataccataaactaagcttatatacccaaaacacaaaaagtcctctttccactattttagaaagagaactttttctttaggagaaataacttaattt

SEQ ID NO: 4540 - DNA, 113 bp, Streptococcus pneumoniae
  misc_feature (1)..(113): tiling:Spneumo1:WAN0249OB; Cluster includes WAN024E8Z R6.I G_1659||||1588041..1588149|+|109 bp|Between spr1613 (- str and) and spr1614 (- strand)|S.pneumoniae|R6|NC_003098.1|IG |110
tataacacgtgttacacgtattgtaaaggagtgatacttattattctattatacataaaagcccctagatgtggttctaagggaagccaatttattcatacctatttttctaa

SEQ ID NO: 4541 - DNA, 117 bp, Streptococcus pneumoniae
  misc_feature (1)..(117): tiling:Spneumo1:WAN024A4T; Cluster includes WAN024EDY R6.I G_1263||||1217036..1217152|+|117 bp|Between spr1219 (hom) (- strand) and spr1220 (mecA) (- strand)|S.pneumoniae|R6|N C_003098.1|IG|110
tataacagaattttgtgaaaattcctattatagtaaatcactatttcagtataaaaagaaaaaacgaatcagacgattcgctcttcttaaaatctgaaaatagctttccagaaagga

SEQ ID NO: 4542 - DNA, 65 bp, Streptococcus pneumoniae
  misc_feature (1)..(65): tiling:Spneumo1:WAN024A2A; Cluster includes WAN024ECP-rc R 6.IG_1357||||1303400..1303464|-|65 bp|Between spr1313 (- s trand) and spr1314 (- strand)|S.pneumoniae|R6|NC_003098.1| IG-rc|110
tataatagataaaggaaaactcagttagttggactagctgagtttactctttaaaaaagatagaa

SEQ ID NO: 4543 - DNA, 56 bp, Streptococcus pneumoniae
  misc_feature (1)..(56): tiling:Spneumo1:WAN024AMT; Cluster includes WAN024ENU-rc R 6.IG_471||||453279..453334|-|56 bp|Between spr0447 (xerD) (- strand) and spr0448 (hsdS) (- strand)|S.pneumoniae|R6|N C_003098.1|IG-rc|110
tataatagttttacgtgcggtggaatttctatcaaacataagataggagttttacg

SEQ ID NO: 4544 - DNA, 80 bp, Streptococcus pneumoniae
  misc_feature (1)..(80): tiling:Spneumo1:WAN024AQM; Cluster includes WAN024EPW-rc R 6.IG_328.1||||308158..308237|-|80 bp|Between spr0307 (clpL ) (+ strand) and spr0308 (luxS) (- strand)|S.pneumoniae|R6 |NC_003098.1|IG-rc|110
tatacgacatgcctgtcgtacctaaaaaggaaccagtttttttcagctggctccttcttttttatcctcaaaattctgtc

SEQ ID NO: 4545 - DNA, 270 bp, Streptococcus pneumoniae
  misc_feature (1)..(270): tiling:Spneumo1:WAN024F8B; Cluster includes WAN0243SD spr1 334||15903377|NP_358927.1|1321356..1321601|-|246 bp|Hypoth etical protein|S.pneumoniae|R6|NC_003098.1|ORF|111
tatactagtatagacgtcttggcggagttagataatggaatccaagttatcatcgaaattcaggttcatcatcagaattttttcatcaatcgcctatggscttatctgtgyagtcaggttaatcaaaacctagaaaaaattcgccaacgtgaaggtgatacccaccagagctacaaacaaatcgcacyagtatacgctatcgcaattgtcgatagtaattacttctcagatgacctagcttttcatagttttatagtaaaaykaactaat

SEQ ID NO: 4546 - DNA, 55 bp, Streptococcus pneumoniae
  misc_feature (1)..(55): tiling:Spneumo1:WAN024A9I; Cluster includes WAN024EGY R6.I G_1041.1||||986244..986298|+|55 bp|Between spr1002 (prs) ( - strand) and spr1003 (- strand)|S.pneumoniae|R6|NC_003098 .1|IG|110
tatagaccgtcctctgtaaactttataaatcctagttatatttaccttacatata

SEQ ID NO: 4547 - DNA, 204 bp, Streptococcus pneumoniae
  misc_feature (1)..(204): tiling:Spneumo1:WAN024AEQ; Cluster includes WAN024EJJ R6.I G_830||||795762..795965|+|204 bp|Between spr0794 (pepXP) ( - strand) and spr0795 (dnaE) (+ strand)|S.pneumoniae|R6|NC _003098.1|IG|110
tatagagaacagagtaacaataagaataaatagatagggtataaaagttctaggagatttatattatatgctttctatttttatatacaatatagtataaatataaaaatgatgacaaaaatacaaatgaatagaaaataaattagtaagctgatgaaatttttctcaagagaagccatttataggtgaaaatggtataatata

SEQ ID NO: 4548 - DNA, 75 bp, Streptococcus pneumoniae
  misc_feature (1)..(75): tiling:Spneumo1:WAN024AGR; Cluster includes WAN024EKM-rc R 6.IG_737||||715156..715230|-|75 bp|Between spr0713 (thiJ) (+ strand) and spr0714 (gph) (+ strand)|S.pneumoniae|R6|NC _003098.1|IG-rc|110
tatagcatttttttatgaaaaaagcgatgatttccctgagttttccacataaaaaacgagagaataactcccgtt

SEQ ID NO: 4549 - DNA, 140 bp, Streptococcus pneumoniae
  misc_feature (1)..(140): tiling:Spneumo1:WAN024AAQ; Cluster includes WAN024EHK R6.I G_986||||931807..931944|+|138 bp|Between spr0947 (+ strand ) and spr0948 (nplT) (+ strand)|S.pneumoniae|R6|NC_003098. 1|IG|110
tatatagagaaagccttttttaaggctttttgtatactttaaaagatagttcctttaacaacggacattccttgcaaatagttttacaaaaatagtatactggattyattgagtttgaaaacgtttgcgtaaaatttgaa

SEQ ID NO: 4550 - DNA, 55 bp, Streptococcus pneumoniae
  misc_feature (1)..(55): tiling:Spneumo1:WAN024A9H; Cluster includes WAN024EGY-rc R 6.IG_1041.1||||986244..986298|-|55 bp|Between spr1002 (prs ) (- strand) and spr1003 (- strand)|S.pneumoniae|R6|NC_003 098.1|IG-rc|110
tatatgtaaggtaaatataactaggatttataaagtttacagaggacggtctata

SEQ ID NO: 4551 - DNA, 128 bp, Streptococcus pneumoniae
  misc_feature (1)..(128): tiling:Spneumo1:WAN0249L4; Cluster includes WAN024E77-rc R 6.IG_1865||||1720811..1720938|-|128 bp|Between spr1750 (- strand) and spr1751 (- strand)|S.pneumoniae|R6|NC_003098.1 |IG-rc|110
tatattaattcaactgaacaacttttagaaaataacagaatttcgcaagggaagtatgaggaactgttactagatgctttcagatatgatattgtatatgggctagatgaagaggggggagttgtcgt

SEQ ID NO: 4552 - DNA, 651 bp, Streptococcus pneumoniae
  misc_feature (1)..(651): tiling:Spneumo1:WAN024AO8; Cluster includes WAN024EOI-rc R 6.IG_443||||416417..417067|-|651 bp|Between spr0419 (- str and) and spr0420 (xylR) (- strand)|S.pneumoniae|R6|NC_0030 98.1|IG-rc|110
tatattagaaatctatagacctgtttaaatcaactataacctgtagtagatatctcgtatttagacaatatgaaaacaagacgacttccatataggaaaccgccttctcgctatgttgagtgatttatattaaaataacttttcttctagctgcattttattattataaaaacattcatcataacccccagaacttaaataacaatttttattcaagatacatactcctagaataaactttatatgaaattctcatttttgtttttacaattctccttagttaaatcttgtttaatatatgttttacatatagtatttagcgccacatagtactgaactctctccaaaaacggttattcctctttgaatagggcgttatcacaagaaaagyatctccacgtttcaacttcatatggctcaaaaacaatcaattgatgctaaaacctgtacctagatgtttcggttcataaaaccatgaaactgtaaaagtggatgaaattgatagcgatagtcaaatcaagaggcatcataactctaaaaagtcacaatatataagttcatcctcggaaaaatatcattctaattgttgaaatgcctacatgaaaagaaacgtcaaatgctcatgaaacaacgaatacaggtatcaaaact

SEQ ID NO: 4553 - DNA, 204 bp, Streptococcus pneumoniae
  misc_feature (1)..(204): tiling:Spneumo1:WAN024AEP; Cluster includes WAN024EJJ-rc R 6.IG_830||||795762..795965|-|204 bp|Between spr0794 (pepXP ) (- strand) and spr0795 (dnaE) (+ strand)|S.pneumoniae|R6 |NC_003098.1|IG-rc|110
tatattataccattttcacctataaatggcttctcttgagaaaaatttcatcagcttactaatttattttctattcatttgtatttttgtcatcatttttatatttatactatattgtatataaaaatagaaagcatataatataaatctcctagaacttttataccctatctatttattcttattgttactctgttctctata

SEQ ID NO: 4554 - DNA, 470 bp, Streptococcus pneumoniae
  misc_feature (1)..(470): tiling:Spneumo1:WAN024AOO; Cluster includes WAN024EOT-rc R 6.IG_430.2.1||||403043..403512|-|470 bp|Between spr0406 (i lvA) (+ strand) and spr0407 (+ strand)|S.pneumoniae|R6|NC_ 003098.1|IG-rc|110
tatattcaacgaaaataattagttcagaattttcttacttcctttttaaatccgataatatataggttttgctagcctctacaccataaatatttgctaataaaaatactgtattattaccctcttaaggtgcgaaattattcaagttcttaaaaaatgcttctctatttccgtaagatagcttatttcttcgatttaagaactgaagatgatagttctaacctttagaaatccaagccttcactagctcaaaaactcctatctttcttcctcaataaatcatctgagagataggtattccttatgtccttcaaattcatcactcctttggatattgaggtgctagcctagaagcagacacccgattatctaaaccatccttaatagagatgacaagacagataagctcagttaattacttatatatctttttaatatrgtatatttgtcaacaaaaagaaatcaaatca

SEQ ID NO: 4555 - DNA, 57 bp, Streptococcus pneumoniae
  misc_feature (1)..(57): tiling:Spneumo1:WAN0249NC; Cluster includes WAN024E8H-rc R 6.IG_1698||||1622174..1622230|-|57 bp|Between spr1649 (- s trand) and spr1650 (- strand)|S.pneumoniae|R6|NC_003098.1| IG-rc|110
tatattgtttaaaatattaattgttactattgaactttgttaagaagaggtacctaa

SEQ ID NO: 4556 - DNA, 186 bp, Streptococcus pneumoniae
  misc_feature (1)..(186): tiling:Spneumo1:WAN0249MG; Cluster includes WAN024E82-rc R 6.IG_1729.2.1.1||||1652598..1652783|-|186 bp|Between spr16 80 (- strand) and spr1681 (- strand)|S.pneumoniae|R6|NC_00 3098.1|IG-rc|110
tatcaatgttttagaagatacagtgctctagtctaacttcaatatactataaaagaacagatggaagcaattatgatttacttctatctttaaaataaatggtctgataggaaaaatgtgtcccctcataaaatataggatagtacgaatggaaggcttttgtagactggaggacgaaggagttta

SEQ ID NO: 4557 - DNA, 146 bp, Streptococcus pneumoniae
  misc_feature (1)..(146): tiling:Spneumo1:WAN0249JI; Cluster includes WAN02471P-rc R 6.IG_200||||187585..187729|-|145 bp|Between spr0179 (+ str and) and spr0180 (cls) (+ strand)|S.pneumoniae|R6|NC_00309 8.1|IG-rc|110
tatcccctccttgatagtttgaatgctaaaaacaagtaattgatactagtataacgcaggtattcggtagaaggcaagtatttatrattattttctaggtaaaagtaaaaaggctgaaaaatccagccctttctacttgcatagtc

SEQ ID NO: 4558 - DNA, 104 bp, Streptococcus pneumoniae
  misc_feature (1)..(104): tiling:Spneumo1:WAN024A7B; Cluster includes WAN024EFN R6.I G_1132||||1092177..1092271|+|95 bp|Between spr1094 (- stra nd) and spr1095 (- strand)|S.pneumoniae|R6|NC_003098.1|IG| 110
tatcrttcctctttctagacttctgtaaccattatatcatgcctgagggaaaatcaaaaacagtgagtcraarcccactgtttatcttcttttactttaaattt

SEQ ID NO: 4559 - DNA, 180 bp, Streptococcus pneumoniae
  misc_feature (1)..(180): tiling:Spneumo1:WAN0249PZ; Cluster includes WAN024740-rc R 6.IG_165.1||||153561..153740|-|180 bp|Between spr0144 (+ s trand) and spr0145 (+ strand)|S.pneumoniae|R6|NC_003098.1| IG-rc|110
tatgaacaaatcgattgggaaagtaaaattaatttctataaatgttttagcaattgtttcgtactattttagattcagtctaytataacacattcagaaaagagaaaaaagtctgttgattttgaccatcataaaaagactggcaatccagtctcaaacatatattatagaaattctcca

SEQ ID NO: 4560 - DNA, 193 bp, Streptococcus pneumoniae
  misc_feature (1)..(193): tiling:Spneumo1:WAN024A8C; Cluster includes WAN024EGB R6.I G_1084.1||||1039495..1039687|+|193 bp|Between spr1045 (+ s trand) and spr1046 (xerC) (+ strand)|S.pneumoniae|R6|NC_00 3098.1|IG|110
tatgakyatttacataatttatgttatgtaaatgatcagtttgatttatttagaaaaccgattctcagraatgagatcggttattttttactgatgaggaattttacatataaataattgaactttattaaaaataagactataattaagttagaaatgataaagtataaagctagaaaggagtttactgtat

SEQ ID NO: 4561 - DNA, 360 bp, Streptococcus pneumoniae
  misc_feature (1)..(360): tiling:Spneumo1:WAN024GN4; Cluster includes WAN0244IF spr0 395|gatC|15902439|NP_357989.1|391847..392149|-|303 bp|Glut amyl tRNA-Gln amidotransferase, subunit C|S.pneumoniae|R6| NC_003098.1|ORF|111
tatggtaaaatagaacagactaaaaatcatcatttcacgaaaggatgcaagatgaaaattacgcaagaagaggtaacacacgttgccaatctttcaaaattaagattctctgaaraagaaactgctgcctttgcgaccaccttgtctaagattgttgacatggttgaattgctgggcgaagttgacacaactggtgtcgcacctactacgactatggctgaccgcaagactgtactccgccctgatgtggccgaagaaggaayaraccgtgatcgcttgtttaaaaacgtacctraamaagacaactactatatcaaggtgccagctatcctagacratggaggagatgccykaactaat

SEQ ID NO: 4562 - DNA, 103 bp, Streptococcus pneumoniae
  misc_feature (1)..(103): tiling:Spneumo1:WAN024AJE; Cluster includes WAN024EM2 R6.I G_626||||615268..615370|+|103 bp|Between spr0602 (+ strand ) and spr0603 (murD) (+ strand)|S.pneumoniae|R6|NC_003098. 1|IG|110
tatggtaagattcagttagaagaaagagtcacaaacacactttgtggcttttttatttccataaaaatggtaaaatagtaggagtagaaatggagttcgagac

SEQ ID NO: 4563 - DNA, 116 bp, Streptococcus pneumoniae
  misc_feature (1)..(116): tiling:Spneumo1:WAN024A22; Cluster includes WAN024ECL-rc R 6.IG_1370||||1313919..1314034|-|116 bp|Between spr1326 (+ strand) and spr1327 (- strand)|S.pneumoniae|R6|NC_003098.1 |IG-rc|110
tatgtattctttcttttaacaaagatagatgaaacgataacaaagagactagcagtttgtgtttgctagtcttttttcgctaaaaaaggaaccataatggttcctaaaaactatca

SEQ ID NO: 4564 - DNA, 103 bp, Streptococcus pneumoniae
  misc_feature (1)..(103): tiling:Spneumo1:WAN0249H3; Cluster includes WAN02471K R6.I G_212||||198498..198600|+|103 bp|Between spr0191 (rplB) (+ strand) and spr0192 (rpsS) (+ strand)|S.pneumoniae|R6|NC_ 003098.1|IG|110
tattaaactagtcgcttaagcaactagtaaatccgccagctcggtagcgctccataggagtgcaagccgctgtggtacaacatttaaaggagaaaatataaaa

SEQ ID NO: 4565 - DNA, 60 bp, Streptococcus pneumoniae
  misc_feature (1)..(60): tiling:Spneumo1:WAN024AGO; Cluster includes WAN024EKK R6.I G_740.2.1.1||||719809..719868|+|60 bp|Between spr0716 (ezr A) (+ strand) and C (transposase) (+ strand)|S.pneumoniae| R6|NC_003098.1|IG|110
tattaaagtgatttcgycagtcttatctgcagcttcaaatctgtactttgagtaacttgg

SEQ ID NO: 4566 - DNA, 276 bp, Streptococcus pneumoniae
  misc_feature (1)..(276): tiling:Spneumo1:WAN024AKF; Cluster includes WAN024EMJ R6.I G_584.1||||561687..561962|+|276 bp|Between spr0560 (+ stra nd) and spr0561 (prtA) (+ strand)|S.pneumoniae|R6|NC_00309 8.1|IG|110
tattacttgacatctattctcagagtgcyatactgtaagtgtaatcgccgatttagctyagttggtagagcaaggcactcgtaaagcctaggttataggtagataaacgactgaggakttgaaaaaatagataggtagaagataaccgttaagccttaytcttagcggttatttatattgtttaatagcgctratatttyatcaattatgcctgttttcgtgtttctggtagttgttcaagtttattgctactatttttgatggtatgaatgtgct

SEQ ID NO: 4567 - DNA, 391 bp, Streptococcus pneumoniae
  misc_feature (1)..(391): tiling:Spneumo1:WAN0249R5; Cluster includes WAN024E7S R6.I G_1756.2||||1679269..1679659|+|391 bp|Between spr1707 (ami A) (- strand) and spr1708 (- strand)|S.pneumoniae|R6|NC_00 3098.1|IG|110
tattcaagattcagtttactatgtcttttcacaccaaccttatyccgaattcaattacttttgtgatttacatatatagattaagactatcttttatactttaaaatttctcgctaccttatccactatatgctcctcgctatcacgtttctattcatagcctacgatttcactattgctttctctgacaattcttatttcctgcgtcagacttaaaacgatctatccccagaccattttaatccgctacctcacgatagtcaggcttggggagcgctattgtattcaccggtagtggakccctacagaggacttacacctcagatgcacgacatgcccatcgtataaaaaaatctcctacccaaggtagaagatttcaaacttataaaac

SEQ ID NO: 4568 - DNA, 111 bp, Streptococcus pneumoniae
  misc_feature (1)..(111): tiling:Spneumo1:WAN024AOW; Cluster includes WAN024EOX-rc R 6.IG_424.2||||397246..397356|-|111 bp|Between spr0400 (+ s trand) and spr0401 (ilvB) (+ strand)|S.pneumoniae|R6|NC_00 3098.1|IG-rc|110
tattcccctttctttcctcttaaaaataacttgttactatcataccattttttcaaaatttttcaagataaaagaagaaattttctgaattttctattttaacgtttattt

SEQ ID NO: 4569 - DNA, 54 bp, Streptococcus pneumoniae
  misc_feature (1)..(54): tiling:Spneumo1:WAN024A4R; Cluster includes WAN024EDX R6.I G_1269.1||||1223471..1223524|+|54 bp|Between spr1225 (licD 1) (- strand) and spr1226 (- strand)|S.pneumoniae|R6|NC_00 3098.1|IG|110
tattctttctatcgtatcgtttcattataccacaaacaaggggtgaaaatctat

SEQ ID NO: 4570 - DNA, 149 bp, Streptococcus pneumoniae
  misc_feature (1)..(149): tiling:Spneumo1:WAN024AQ2; Cluster includes WAN024EPJ-rc R 6.IG_371||||350080..350228|-|149 bp|Between spr0347 (+ str and) and spr0348 (+ strand)|S.pneumoniae|R6|NC_003098.1|IG -rc|110
tattgtatcctcctaatgtaattatagcgtactattctaaatttctyaatctactatagaatcaagaaatctaccaccttctttaaataccctccattatcacataaacaggyaaacttttcaattaatgactgcgcttttcaatcacg

SEQ ID NO: 4571 - DNA, 413 bp, Streptococcus pneumoniae
  misc_feature (1)..(413): tiling:Spneumo1:WAN0249NM; Cluster includes WAN024E8M-rc R 6.IG_1687.2.2||||1611575..1611987|-|413 bp|Between spr1638 (- strand) and spr1639 (ccpA) (- strand)|S.pneumoniae|R6| NC_003098.1|IG-rc|110
tattgtttaattcttgaaaatcctagtggaaaagatggagtgttctaaaataagttctgtttagcctccattcagtttctattgagttggatccaatttctaasragtgggacatgttcatgttcgatctaaggaagacatggtcayattcgaatgatattttcaaaaaaatcgtaaaaaagtcttgacaaagaaaaaacaaagtattaaaataagttcaacaaatcagaaaagtaactatttttgatcttcagggagcctgtggtgattgtgaataggtggttggaagtagtgaaagtgggctgattttgaaaatgaatttgaaacaatgaaaattcggtgcgcacaccttacagtgcagcttgttgttaaacaaggcagagatgtaaagggatagtccctttataattgag

SEQ ID NO: 4572 - DNA, 166 bp, Streptococcus pneumoniae
  misc_feature (1)..(166): tiling:Spneumo1:WAN024AQE; Cluster includes WAN024EPP R6.I G_349.1||||332697..332826|+|130 bp|Between spr0328 (+ stra nd) and spr0329 (pbpA) (- strand)|S.pneumoniae|R6|NC_00309 8.1|IG|110
tatttagtaaaacctcttaacaagattacggaagyagtctctatcttttccaatgaggtttatagtacagaaaaagcctgagaagatgtcttctcaggcttttgttaagcacataaatacaatagtgctatgacaaaatcacccagaaaaatctgggtgataaatg

SEQ ID NO: 4573 - DNA, 88 bp, Streptococcus pneumoniae
  misc_feature (1)..(88): tiling:Spneumo1:WAN0249LT; Cluster includes WAN024E7J R6.I G_1833||||1699734..1699821|+|88 bp|Between spr1718 (+ stra nd) and spr1719 (+ strand)|S.pneumoniae|R6|NC_003098.1|IG| 110
tatttccaagtgaaattcacagattttrggtaattttatggtacaatagtaaatgataaacttataaattgtagaaagttggttagtt

SEQ ID NO: 4574 - DNA, 260 bp, Streptococcus pneumoniae
  misc_feature (1)..(260): tiling:Spneumo1:WAN0249SK; Cluster includes WAN024EDQ R6.I G_1286||||1242527..1242786|+|260 bp|Between spr1242 (- str and) and spr1243 (potD) (- strand)|S.pneumoniae|R6|NC_0030 98.1|IG|110
tatttgttgccgctttctgtaaggttaatactcaataaaaatcaaaaagcaaactaggaagctagcytcaagctgtacttgagtacggcaaggcaacgctgacgtggtttgaagagtataggcttagtatactactaggcaagcaaataagcaaataaacaaataaacaactagaatagaaaaagatagggctctaaaaactgacttctattccttaaaaacgaaccagcttgactgattcgtcttcttacgtttatctc

SEQ ID NO: 4575 - DNA, 240 bp, Streptococcus pneumoniae
  misc_feature (1)..(240): tiling:Spneumo1:WAN024AZ7; Cluster includes WAN0242XI SP04 31||15900350|NP_344954.1|405744..405980|+|237 bp|conserved domain protein|S.pneumoniae|TIGR4|NC_003028.1|ORF|011
tatttrgatgtyatcytatcwgsymtyatctttgggattagccatttgatactatctcacagagatccaattagtttattatattatagtctgattggtttcttttttgcccttgtttatcgttctaccgacaatctgagattaacgattctctgccatagtttttttaactttctcaatcatgcaaaacctatctggatttttgtttacaattatatctattatcatttttttagatag

SEQ ID NO: 4576 - DNA, 88 bp, Streptococcus pneumoniae
  misc_feature (1)..(88): tiling:Spneumo1:WAN0249XT; Cluster includes WAN024EBA R6.I G_1481.2.2||||1421914..1421993|+|80 bp|Between spr1437 (ms mK) (- strand) and () (- strand)|S.pneumoniae|R6|NC_003098 .1|IG|110
tattttcgctgattctccactacatttgactggattctaattttttagagaaatacaaaagagctagctttagctarctcttttccta

SEQ ID NO: 4577 - DNA, 478 bp, Streptococcus pneumoniae
  misc_feature (1)..(478): tiling:Spneumo1:WAN0249QQ; Cluster includes WAN024EBF R6.I G_1474||||1414034..1414510|+|477 bp|Between spr1430 (dpr) (- strand) and spr1431 (lytC) (- strand)|S.pneumoniae|R6|N C_003098.1|IG|110
tattttttgtaaccacttcttaatgattactaccttagtatactactaaggaaaaccaatagcaagamaaagaacttatatgagaaaagttgcaatagactgataatttaagaattctttagaagacaaaaagagggttggatgcttatagtcaatggaaatccatcagcaaactaggaaactaaacccagcttgaccaaagcacaagttttgaggtcgcaggtagaactgaccaagctgatgtggtttgaagaaattccccaatactataatagattgaaataagatgaaaccaagtcgattaggaaaggtaaatgaatttctaaaatgttttaccaatcacaaggtatttgtctatattcaatctactatataagcttcatttccgagcaagawcttgaatttactcgaggatgaactatcataaaacaaagaaaaagagggtgctactatcacatccctctttcaaatcatcgct

SEQ ID NO: 4578 - DNA, 135 bp, Streptococcus pneumoniae
  misc_feature (1)..(135): tiling:Spneumo1:WAN0249EN; Cluster includes WAN024E3K R6.I G_2217||||2004534..2004668|+|135 bp|Between spr2010 (- str and) and spr2011 (- strand)|S.pneumoniae|R6|NC_003098.1|IG |110
tcaaaacctcttggcacccattataccataatacccctcaaaaagcgactttttaaaagtgtaatcagtaattctatcaattataagaaaaaggtagtttacaattcagtaaacctacctttacacatattgaaa

SEQ ID NO: 4579 - DNA, 229 bp, Streptococcus pneumoniae
  misc_feature (1)..(229): tiling:Spneumo1:WAN024A6P; Cluster includes WAN024EFF R6.I G_1147||||1111538..1111751|+|214 bp|Between spr1109 (fhs) (- strand) and C-terminus (dfp) (+ strand)|S.pneumoniae|R6 |NC_003098.1|IG|110
tcaaaattcctctaacctcttatatgataattcattatatcacaaaacaagatttttaacatcctaaaacyctctaaacgttcgtaaatatctctgtttttaagrcttttagartcctttcttaaattttatatggctttatagtttgaaactatartaaatcttcgtttttaccaaaaatttatcactttcattttacttaccgcttatttttgtgtacaatagtgct

SEQ ID NO: 4580 - DNA, 51 bp, Streptococcus pneumoniae
  misc_feature (1)..(51): tiling:Spneumo1:WAN0249PH; Cluster includes WAN024E7V R6.I G_1736.2||||1659927..1659977|+|51 bp|Between spr1687 (fatB ) (+ strand) and spr1688 (- strand)|S.pneumoniae|R6|NC_003 098.1|IG|110
tcaaacctgataggatgcgtttttatcattttgaaatctatttaccccacc

SEQ ID NO: 4581 - DNA, 193 bp, Streptococcus pneumoniae
  misc_feature (1)..(193): tiling:Spneumo1:WAN0249Y4; Cluster includes WAN024EBH-rc R 6.IG_1454.2||||1396553..1396745|-|193 bp|Between spr1410 ( pacL) (- strand) and spr1411 (+ strand)|S.pneumoniae|R6|NC _003098.1|IG-rc|110
tcaacttcctttctagtcacatagcattctaccattatactggttttcaaggaaaaattcaaataaggcagtttttactctttgaaaactccccaaaatttggtataatggtactactcaagggagtagctggcagaaacctgtgatagtgtcgtcattccgaattttatgctgaaaagtatgctttccggcc

SEQ ID NO: 4582 - DNA, 55 bp, Streptococcus pneumoniae
  misc_feature (1)..(55): tiling:Spneumo1:WAN024ARO; Cluster includes WAN024EQI-rc R 6.IG_279||||260364..260418|-|55 bp|Between spr0258 (pepC) (+ strand) and spr0259 (manN) (- strand)|S.pneumoniae|R6|N C_003098.1|IG-rc|110
tcaagcaactaaaaaggaaccaggttctaaaatctgattccttttttctatgctt

SEQ ID NO: 4583 - DNA, 62 bp, Streptococcus pneumoniae
  misc_feature (1)..(62): tiling:Spneumo1:WAN024ACQ; Cluster includes WAN024EIG R6.I G_931||||883904..883964|+|61 bp|Between spr0895 (+ strand) and spr0896 (dnaQ) (+ strand)|S.pneumoniae|R6|NC_003098.1 |IG|110
tcaaggagctgtttaggttaaatgctaacctgatggcttcttttgtttgtgaatagtatagt

SEQ ID NO: 4584 - DNA, 89 bp, Streptococcus pneumoniae
  misc_feature (1)..(89): tiling:Spneumo1:WAN024A4I; Cluster includes WAN024EDT-rc R 6.IG_1283||||1238798..1238886|-|89 bp|Between spr1239 (amy ) (+ strand) and spr1240 (alaS) (- strand)|S.pneumoniae|R6 |NC_003098.1|IG-rc|110
tcaagtaaagatctatccatttgggtaggtctttttgtgaatacaaaaaagccaaatccgcttggacctagcttggttattatgagcta

SEQ ID NO: 4585 - DNA, 130 bp, Streptococcus pneumoniae
  misc_feature (1)..(130): tiling:Spneumo1:WAN024AOF; Cluster includes WAN024EON R6.I G_439.1||||414438..414567|+|130 bp|Between spr0415 (pfl) ( + strand) and spr0416 (- strand)|S.pneumoniae|R6|NC_003098 .1|IG|110
tcaagttyttgaataatraaaaggaaccctcggtcaawcgactgagggttttgtgcttgggatagtrtgagcaattccttcggcgcaatatgcaatgtttttgggaaggaatagtggaccgaatctgaaa

SEQ ID NO: 4586 - DNA, 207 bp, Streptococcus pneumoniae
  misc_feature (1)..(207): tiling:Spneumo1:WAN024AKJ; Cluster includes WAN024EMO R6.I G_579||||555175..555381|+|207 bp|Between spr0555 (rplK) (+ strand) and spr0556 (rplA) (+ strand)|S.pneumoniae|R6|NC_ 003098.1|IG|110
tcaataacacagtagaaaatctcacagcagtctattagttgcttttcatactaggcaagtgactgaggcttgtacttgggtacagcaagggagcttaaggccgtaggaagagaaaaatagtagactgaaaacccgcaagacttcatcatttcgagaagtgacgtgggagatgaaaatcgattgaaccacttacaaggagaatagaaa

SEQ ID NO: 4587 - DNA, 114 bp, Streptococcus pneumoniae
  misc_feature (1)..(114): tiling:Spneumo1:WAN0249US; Cluster includes WAN024E9F-rc R 6.IG_1612.2||||1546390..1546503|-|114 bp|Between spr1565 ( scrK) (- strand) and spr1566 (scrA) (- strand)|S.pneumonia e|R6|NC_003098.1|IG-rc|110
tcaatcctctctaatgtgaaaacgaacaaatgacatgtttgttcgtttttattagatagtaagatttacagaggaaaatctaaaaaatagagacatttagactttcgaagtatg

SEQ ID NO: 4588 - DNA, 335 bp, Streptococcus pneumoniae
  misc_feature (1)..(335): tiling:Spneumo1:WAN024A5U; Cluster includes WAN024EEX-rc R 6.IG_1190||||1151028..1151362|-|335 bp|Between spr1149 (- strand) and spr1150 (+ strand)|S.pneumoniae|R6|NC_003098.1 |IG-rc|110
tcaatttacctcgtttttcattatatcataaagttagctaataagaaatgaagggcagtaagtcaagtaatcactttgaagtttcaaatcttaagttttaagttttctttaaggaaagtatattattctgaaggactctaaaatttcgcagccatttattagtaattgctacagaattcctagtcattactagaaatggactagtttctttgaataatagaactgcataattctcctattctagaaggggaggaccagtatttcttttatgataggactagattgtggtataatagagagaataagtttttttagtaagacaaaggagaaaatag

SEQ ID NO: 4589 - DNA, 61 bp, Streptococcus pneumoniae
  misc_feature (1)..(61): tiling:Spneumo1:WAN024APU; Cluster includes WAN024EPH-rc R 6.IG_382||||357948..358008|-|61 bp|Between spr0358 (mtlF) (+ strand) and spr0359 (mtlD) (+ strand)|S.pneumoniae|R6|N C_003098.1|IG-rc|110
tcaatttctccttttcctatttgagggacatatatactagatgacaaatgackaaattcaa

SEQ ID NO: 4590 - DNA, 127 bp, Streptococcus pneumoniae
  misc_feature (1)..(127): tiling:Spneumo1:WAN024A7E; Cluster includes WAN024EFQ-rc R 6.IG_1127||||1085316..1085436|-|121 bp|Between spr1089 (xs eA) (- strand) and spr1090 (udK) (- strand)|S.pneumoniae|R 6|NC_003098.1|IG-rc|110
tcacatgtggaggccttgcctcctttttctatttttccctcataatggtacataaatggagatttttaggcatatttttggtataataatacccatgaaagagcaagtaaatgaatagtaggtggag

SEQ ID NO: 4591 - DNA, 135 bp, Streptococcus pneumoniae
  misc_feature (1)..(135): tiling:Spneumo1:WAN024ARK; Cluster includes WAN024EQG-rc R 6.IG_284||||265529..265663|-|135 bp|Between spr0263 (- str and) and spr0264 (+ strand)|S.pneumoniae|R6|NC_003098.1|IG -rc|110
tcactttttcaatgtctttgtttgatttgtttaagaaattaatccaatttcattttttgtttggaatctgcttttctgcctgctttctgttataatagaagacatcttatctgaaaacacactagaaaggtccat

SEQ ID NO: 4592 - DNA, 96 bp, Streptococcus pneumoniae
  misc_feature (1)..(96): tiling:Spneumo1:WAN024A4E; Cluster includes WAN024EDR-rc R 6.IG_1285.2||||1242191..1242286|-|96 bp|Between spr1241 (- strand) and spr1242 (- strand)|S.pneumoniae|R6|NC_003098. 1|IG-rc|110
tcagagatgtagggaattggtctaattcaacggagatcatttccagttgacgcaagcttaaaaaaacgttataataagaaagttgagaattgattt

SEQ ID NO: 4593 - DNA, 166 bp, Streptococcus pneumoniae
  misc_feature (1)..(166): tiling:Spneumo1:WAN024AI8; Cluster includes WAN0247M0 R6.I G_96||||83672..83837|+|166 bp|Between spr0075 (+ strand) a nd spr0076 (rr08) (+ strand)|S.pneumoniae|R6|NC_003098.1|I G|110
tcagctaaggaaataaatgatggatagtgggctgactaagattagtttaacaactcaatcagcaatcaggactttctttcaatagcagattaaaatcatcgtaaaacaataaaaatagtgttatacttaaagcagtatagcactgtttttatcaaaggagagacag

SEQ ID NO: 4594 - DNA, 376 bp, Streptococcus pneumoniae
  misc_feature (1)..(376): tiling:Spneumo1:WAN0249K9; Cluster includes WAN024E6P R6.I G_1892||||1751672..1752047|+|376 bp|Between spr1777 (rpoB) (- strand) and () (+ strand)|S.pneumoniae|R6|NC_003098.1| IG|110
tcaggcttttctaatcgtcatatggttgtaaaccccttatcaccgtgtcctcttgacgaattttcagaatctttaagcctctgttacaaatgctcawaatcttgaaaaaaagcacaaaaagagcagctaaatctgactttttcagaagatttaactgctgtgagccttgtctggacaatatttcagacaaaacctacgacaaatgattacccatattataccctatttagctagatttttcaaggggtttcagtaggtttttggtaaattttttcccatagaaaacttggcatcacattcgaatcacgctatggtacaaaaaactgaaaaaactattgactgaaaatcattttcaaggtataataataaacgttaa

SEQ ID NO: 4595 - DNA, 436 bp, Streptococcus pneumoniae
  misc_feature (1)..(436): tiling:Spneumo1:WAN024ASC; Cluster includes WAN024EQU R6.I G_258.2.1.1||||231411..231846|+|436 bp|Between spr0237 (+ strand) and spr0238 (ruvB) (+ strand)|S.pneumoniae|R6|NC_0 03098.1|IG|110
tcaggtggagttttttagctctatttcaggcttttggggactattctaaaaataatttttcgatatttttcggtatttttcggattttggtcggggaattggcggggacttttttagcgaatataactaagaaataggtctgtggtcgcttcagctagttcaaactcaatttgattgtaagtgactgttaattgaagractggaactactgtaataatgattttgcttgtctagtagtggcgtattaaatgagaagtgacatgtaagattgtctcttcgtttacgaaatcaaaatttctatgaaattgatagaatccctaacgttctcttaatcttaaccgtcttgtcgtacagcggttgaagaaaatgtaaasytttgacaaaattcgtgaactatgggataataaaaaggaattgagtactagttctatatcat

SEQ ID NO: 4596 - DNA, 161 bp, Streptococcus pneumoniae
  misc_feature (1)..(161): tiling:Spneumo1:WAN0249QW; Cluster includes WAN024EMN R6.I G_580.1.1.1||||556072..556232|+|161 bp|Between spr0556 (rp lA) (+ strand) and spr0557 (+ strand)|S.pneumoniae|R6|NC_0 03098.1|IG|110
tcagtagttaaastaatgtaaaaaagttgaagacrctatgtctcaactttttttgatgtacgacgggcatgtygtatatctgaggtgtaagtcctcggtgggcacctactaccggtgaacccaatagcgattcccaagtctgacgctggaaataagaatcg

SEQ ID NO: 4597 - DNA, 106 bp, Streptococcus pneumoniae
  misc_feature (1)..(106): tiling:Spneumo1:WAN0249DB; Cluster includes WAN024ER5 R6.I G_240||||213159..213260|+|102 bp|Between spr0219 (gpmB) (+ strand) and spr0220 (- strand)|S.pneumoniae|R6|NC_003098. 1|IG|110
tcagtctagacttgcttgccatgagctagggatttgataagaatatcaagataagaaaaaacagccgagggyactcctttcggctgtttttgatgtggaaaactaa

SEQ ID NO: 4598 - DNA, 193 bp, Streptococcus pneumoniae
  misc_feature (1)..(193): tiling:Spneumo1:WAN0249PQ; Cluster includes WAN024EGO R6.I G_1059.1||||998943..999135|+|193 bp|Between spr1020 (hlpA) (+ strand) and spr1021 (+ strand)|S.pneumoniae|R6|NC_0030 98.1|IG|110
tcagtctttaaaaagcctattgtatcaagctttctagcttggtcagtaggttttttaattatgaaatctagtaataaatagagttaaaaagttgaatgttccgaaaatattgtatatagtagactgaatctaaaatagtacgaaacaattgctaaaacatttatagaaattaattttactttcccaatcgatt

SEQ ID NO: 4599 - DNA, 59 bp, Streptococcus pneumoniae
  misc_feature (1)..(59): tiling:Spneumo1:WAN024A8K; Cluster includes WAN024EGG-rc R 6.IG_1071.1||||1015888..1015943|-|56 bp|Between spr1032 (g lgA) (+ strand) and spr1033 (+ strand)|S.pneumoniae|R6|NC_ 003098.1|IG-rc|110
tcagttctcctctctaaacagcctaaaaatcgtatgaagtcatcatacgattttatcta

SEQ ID NO: 4600 - DNA, 84 bp, Streptococcus pneumoniae
  misc_feature (1)..(84): tiling:Spneumo1:WAN024ALB; Cluster includes WAN024EN6 R6.I G_536.2||||511336..511418|+|83 bp|Between spr0512 (+ stran d) and spr0513 (+ strand)|S.pneumoniae|R6|NC_003098.1|IG|1 10
tcataattcgctcatttttttaaaaatacatagacgtaaaaraaagagggttaagtgatgaagaatagtgctattgggagtaat

SEQ ID NO: 4601 - DNA, 55 bp, Streptococcus pneumoniae
  misc_feature (1)..(55): tiling:Spneumo1:WAN024ABK; Cluster includes WAN024EHY R6.I G_957||||906356..906410|+|55 bp|Between spr0918 (asd) (+ s trand) and spr0919 (dapA) (+ strand)|S.pneumoniae|R6|NC_00 3098.1|IG|110
tcatatcgtttaggagttcagatgaactccttctttgaaatagagaggtgttttc

SEQ ID NO: 4602 - DNA, 458 bp, Streptococcus pneumoniae
  misc_feature (1)..(458): tiling:Spneumo1:WAN0249UA; Cluster includes WAN024EKJ R6.I G_740.2.2.2||||720203..720315|+|113 bp|Between spr0716 (ez rA) (+ strand) and C (transposase) (+ strand)|S.pneumoniae |R6|NC_003098.1|IG|220
tcatatttatgttcctctatttttttaattttgactaaattatttgtttgacttaaatttagtagacattgtaaccaaaatagttgctcatctgtgagctgaccttgagtatgtgatagttctagtaattgaataggatcctttagttagattcaatcaatctataacacaacaacataataatacttttaggataacttatcaaatattatagtaaaatgarataakaacagkayaaatmgatyaggayagtcaaatygatttctaacaatrttttagaagtagakgtgtactattctagtttcaatytaytataktwyrtmtktttacatcttgaattgtcaaattaagtgcataactttcccgtagcatacttcataaggcgttttccacttaagaaattttcgtggtcgattatttagaacctgtattcacaaaaaaatgttaagctagagtta

SEQ ID NO: 4603 - DNA, 176 bp, Streptococcus pneumoniae
  misc_feature (1)..(176): tiling:Spneumo1:WAN0249GX; Cluster includes WAN024E4U R6.I G_2122.1||||1894692..1894867|+|176 bp|Between spr1915 (+ s trand) and spr1916 (malP) (- strand)|S.pneumoniae|R6|NC_00 3098.1|IG|110
tcatgagatatacaataaaattaattgggtataacgtattttcgttgtttatattctttatcttatcaatgttgtttaaagttccctttaggtggtggatcagcattgcaatgacgacttcgtcgtacattgtatataattacttaaagaaaaagagagaaaaggaatgatcttat

SEQ ID NO: 4604 - DNA, 143 bp, Streptococcus pneumoniae
  misc_feature (1)..(143): tiling:Spneumo1:WAN0249FN; Cluster includes WAN024E49 R6.I G_2168.2.1||||1948921..1949063|+|143 bp|Between spr1961 (- strand) and spr1962 (- strand)|S.pneumoniae|R6|NC_003098. 1|IG|110
tcattattactgtatattttgtatatcagaaatagtttgtattcacaaatctttctagttattcccttatcattcctaattaagggagataacatacaataatttttagttaaatgtatatcgatgttttttgtttttcttaa

SEQ ID NO: 4605 - DNA, 144 bp, Streptococcus pneumoniae
  misc_feature (1)..(144): tiling:Spneumo1:WAN0249IF; Cluster includes WAN024E5M R6.I G_2024||||1835947..1836090|+|144 bp|Between spr1865 (- str and) and spr1866 (adh) (- strand)|S.pneumoniae|R6|NC_00309 8.1|IG|110
tcattcctttgtaccgtatattataaccaattccgccagacaaggaaagaaatatgctcatttcttaattttttgataaaaaatccagccatctgatggatgactgaatttctatttacttatgtacaaaaatatttttactac

SEQ ID NO: 4606 - DNA, 106 bp, Streptococcus pneumoniae
  misc_feature (1)..(106): tiling:Spneumo1:WAN0249UO; Cluster includes WAN024E9D-rc R 6.IG_1617||||1553670..1553775|-|106 bp|Between spr1571 (mv aS) (- strand) and spr1572 (- strand)|S.pneumoniae|R6|NC_0 03098.1|IG-rc|110
tcattctttaaaatgatgaccaataagaggcttgatttggtgaatcaagtcttttttctctcttttactgccatttgtgataaaatagtatagaacgattttttac

SEQ ID NO: 4607 - DNA, 116 bp, Streptococcus pneumoniae
  misc_feature (1)..(116): tiling:Spneumo1:WAN0249WL; Cluster includes WAN024EAG R6.I G_1544.2||||1475870..1475985|+|116 bp|Between spr1497 (- s trand) and spr1498 (- strand)|S.pneumoniae|R6|NC_003098.1| IG|110
tcattgagtattacttcctattatcattataacgytttttcaactagttgraaactgcytatattctyaaatccttattaaaaggmagtttcaaattactgccttataacatcttc

SEQ ID NO: 4608 - DNA, 65 bp, Streptococcus pneumoniae
  misc_feature (1)..(65): tiling:Spneumo1:WAN024AHZ; Cluster includes WAN024ELA-rc R 6.IG_679.2||||661371..661435|-|65 bp|Between spr0655 (upp) (+ strand) and spr0656 (clpP) (+ strand)|S.pneumoniae|R6| NC_003098.1|IG-rc|110
tcatttctccttttgagttttaattttgttggtcaaatgactgaagataagactattataatatc

SEQ ID NO: 4609 - DNA, 103 bp, Streptococcus pneumoniae
  misc_feature (1)..(103): tiling:Spneumo1:WAN024ARU; Cluster includes WAN024EQL-rc R 6.IG_271||||250971..251073|-|103 bp|Between spr0250 (fusA) (+ strand) and spr0251 (polC) (+ strand)|S.pneumoniae|R6| NC_003098.1|IG-rc|110
tcattttcctcacattattcttctactattttaccatatttagaggtattttctaaagacaaaaggaagccactaagtgacttccttctagagtgaggacgga

SEQ ID NO: 4610 - DNA, 283 bp, Streptococcus pneumoniae
  misc_feature (1)..(283): tiling:Spneumo1:WAN0249QS; Cluster includes WAN024E6G-rc R 6.IG_1924||||1777806..1778067|-|262 bp|Between spr1806 (- strand) and spr1807 (rpmH) (- strand)|S.pneumoniae|R6|NC_0 03098.1|IG-rc|110
tccaaacgaattctatcaaaaatcagtaggaactcgagtctactgatttttatttttgtaaaaaagttcagtagatgcaaatggattcggaagcgatgttayagtagattgaaactagaatagtacacctctgtttctaaaacattgttagaaatcgatttgactgtcctgatcgatttgtcctgttattattttattttactataaagttgaagtagstggagatggyacagcracaatcrymttymmagatggttcagctattacaattccaggaaatcaa

SEQ ID NO: 4611 - DNA, 119 bp, Streptococcus pneumoniae
  misc_feature (1)..(119): tiling:Spneumo1:WAN0249Q7; Cluster includes WAN024EIL R6.I G_920.1||||876165..876283|+|119 bp|Between spr0884 (ppmA) (+ strand) and spr0885 (- strand)|S.pneumoniae|R6|NC_00309 8.1|IG|110
tccaaatcaatgagtcagggaaaaaactcgacttcaggaaaaaatgaagcaaacattcccacaataaaacgcatagtacaaggtttgtactgccccccaaaaaagttagacaattaatt

SEQ ID NO: 4612 - DNA, 92 bp, Streptococcus pneumoniae
  misc_feature (1)..(92): tiling:Spneumo1:WAN0249ZR; Cluster includes WAN024ECG R6.I G_1377.1.2||||1321173..1321264|+|92 bp|Between spr1333 (pg dA) (- strand) and spr1334 (- strand)|S.pneumoniae|R6|NC_0 03098.1|IG|110
tccacaattcctctagcaagccaaagcatcttacatcaactccaacatccgtatctgtagagattatgtagttttctatctatggaatttct

SEQ ID NO: 4613 - DNA, 212 bp, Streptococcus pneumoniae
  misc_feature (1)..(212): tiling:Spneumo1:WAN024AEL; Cluster includes WAN024EJH-rc R 6.IG_833.2.1.2.2||||802339..802549|-|211 bp|Between spr079 7 (pykF) (+ strand) and spr0798 (- strand)|S.pneumoniae|R6 |NC_003098.1|IG-rc|110
tccacctagacgaaagcaaccatattcgtaccatcgggaaagytgtcaggctatatagggagaattaaaaaaggggggagaatggcgatataaarcaaacagattttaaaagattcgaaaaactttgaaaaagttcattctacatttcaaaaaaagaataagtgacctaaartagattagattttgttaaacaatagtgatatgtaaattta

SEQ ID NO: 4614 - DNA, 298 bp, Streptococcus pneumoniae
  misc_feature (1)..(298): tiling:Spneumo1:WAN024A8G; Cluster includes WAN024EGD R6.I G_1077.1.2||||1021073..1021370|+|298 bp|Between A (transpo sase) (- strand) and spr1039 (rexB) (+ strand)|S.pneumonia e|R6|NC_003098.1|IG|110
tccacggtgtactattatagtttcaatttactatagttcaatcattctatcaagaatattgaatatataaaggcacgtaatattaaaacttcttctgatatcgaattagagtccgatgttgatggcgataaatcagacaatctaccagtcgacattaagatactgggacaacacattgaagtgtattccgtacctaagaaacaatcataaaactcaaagccttgttaccgaggcttttttattatgtgattttcagtagccagacttattctatctaatacaagtaaagctaagtatt

SEQ ID NO: 4615 - DNA, 597 bp, Streptococcus pneumoniae
  misc_feature (1)..(597): tiling:Spneumo1:WAN024FAI; Cluster includes WAN0244RD spr0 073||15902117|NP_357667.1|79471..80040|-|570 bp|Hypothetic al protein|S.pneumoniae|R6|NC_003098.1|ORF|211
tccataaacagatttggtgatttgatagacgacattggacagtttgcgatctggcaagacagaatgtttggtcaaacggctcaacatggtcttacgaatagcctgaaagacttctggatttttctgctgaatataggtccacaattggcgtttttttgccagatgctccgctgttccagatcggttgagcagggtactggaaatcaccgtcgtgakttcaatatgattcagcagatattctcgcattttgggatgactcacttgggacaaatcaagttggtctaycaagagtcgattgaccttgagttgctggtcaatgcacttaatcatcacttgctcattgacagactggtcctcacgcccaatcaaataacgatagaaatcgacaggcagatagtacatggtcttgacctgctgaaggggcgtaaagacaaagagattatcgacataaaaagtatgttcaggcarttagaactggctagcacgcaacaaatctgtccgataaatcagcgagtgcatcatgrtatactggcctttggagaaatttccgacctggtcccagccaawmayctgccgaacaggcaagacykaactaat

SEQ ID NO: 4616 - DNA, 371 bp, Streptococcus pneumoniae
  misc_feature (1)..(371): tiling:Spneumo1:WAN024AE5; Cluster includes WAN024EJ8-rc R 6.IG_847||||813193..813562|-|370 bp|Between spr0811 (- str and) and spr0812 (+ strand)|S.pneumoniae|R6|NC_003098.1|IG -rc|110
tcccagctgaacgcgctcaatttctttgtgacttggttttctagttttcttatgtaagatttgtttcatgatgttactcctttgttctttatgagtctagtttacatcaaaaaaagaccgcttgccataacctaaccttacaaaagagactttaatcttacatttttgtaagattgggtgaaatataagcaaaattacttagaaaatgatttgatttcctatttttaaagttgtaaaatataagtgtgaaaaggcttactttgaaaaggaggaagcgggaactaacattttagtaagsttacctagataacataccattcaatttaacacttgcaagtcgttcaacctataaggaaagaaggtgcgcttta

SEQ ID NO: 4617 - DNA, 117 bp, Streptococcus pneumoniae
  misc_feature (1)..(117): tiling:Spneumo1:WAN024ARA; Cluster includes WAN024EQB-rc R 6.IG_299||||276671..276787|-|117 bp|Between spr0278 (+ str and) and spr0279 (bglG) (+ strand)|S.pneumoniae|R6|NC_0030 98.1|IG-rc|110
tccctcctaaaacgtatgttttcatatattgaagcatattatacacttaaatcagtttatatcaaactcaaaacaatttatcttaacctaaatatttattgacatttcatgtgttca

SEQ ID NO: 4618 - DNA, 89 bp, Streptococcus pneumoniae
  misc_feature (1)..(89): tiling:Spneumo1:WAN024A7Y; Cluster includes WAN024EG4 R6.I G_1096.2||||1053347..1053435|+|89 bp|Between spr1057 (- st rand) and spr1058 (- strand)|S.pneumoniae|R6|NC_003098.1|I G|110
tccctttctgattttgaaatcatttacttaacattttatagttgagataatcaatagcttayctataaaaagagttatagtaaaattcc

SEQ ID NO: 4619 - DNA, 74 bp, Streptococcus pneumoniae
  misc_feature (1)..(74): tiling:Spneumo1:WAN024FAB; Cluster includes WAN023I0D tRNA -Asn|tRNA-Asn|||20044..20117|+|74 bp|tRNA-Asn|S.pneumoniae |R6|NC_003098.1|RNA|220
tccgccatagctcagttggtagtagcgcatgactgttaatcatgatgtcgtaggttcgagtcctactggcggag

SEQ ID NO: 4620 - DNA, 103 bp, Streptococcus pneumoniae
  misc_feature (1)..(103): tiling:Spneumo1:WAN024ARV; Cluster includes WAN024EQL R6.I G_271||||250971..251073|+|103 bp|Between spr0250 (fusA) (+ strand) and spr0251 (polC) (+ strand)|S.pneumoniae|R6|NC_ 003098.1|IG|110
tccgtcctcactctagaaggaagtcacttagtggcttccttttgtctttagaaaatacctctaaatatggtaaaatagtagaagaataatgtgaggaaaatga

SEQ ID NO: 4621 - DNA, 199 bp, Streptococcus pneumoniae
  misc_feature (1)..(199): tiling:Spneumo1:WAN0249T6; Cluster includes WAN024EC3 R6.I G_1396.2||||1335904..1336102|+|199 bp|Between spr1352 (bta ) (+ strand) and spr1353 (glnH) (- strand)|S.pneumoniae|R6 |NC_003098.1|IG|110
tcctaaaacagttacatcagtatttcattacagaacattttaattttggaagtcaaatcaatttttaacaatgttttagaaatcacagtgggctattccatattcaattatccatattcaatcgctattatcgttttcctagattacaaaaaaaactacgttttgctaatcaaaacgcagtttcagccactattttatc

SEQ ID NO: 4622 - DNA, 222 bp, Streptococcus pneumoniae
  misc_feature (1)..(222): tiling:Spneumo1:WAN024AAW; Cluster includes WAN024EHN R6.I G_981||||927736..927957|+|222 bp|Between spr0942 (ccrB) (+ strand) and spr0943 (+ strand)|S.pneumoniae|R6|NC_003098. 1|IG|110
tcctcaaaaggttccccaaactttttgagtcccactgacgcatcacgctgaggcggtatcactgcttgtacgagttgaagcatcagcraagtaaaagtagatgttcagccaatgcgacgaggtgagaccgaaggtcgataaggtgtgttctgggtatargactcgtaaagtaagtaggaaatatgatgagatgatacagagagcctgaattggtcaggtgac

SEQ ID NO: 4623 - DNA, 223 bp, Streptococcus pneumoniae
  misc_feature (1)..(223): tiling:Spneumo1:WAN024ARN; Cluster includes WAN024EQH R6.I G_282||||263184..263357|+|174 bp|Between spr0261 (manL) (- strand) and spr0262 (adhP) (- strand)|S.pneumoniae|R6|NC_ 003098.1|IG|110
tcctccttttttgttttagttttcatttaagaaaactttaagactgtttaagtataaaccgttttcataaaaaaagcaactatttatcataaaaaattaaaaaatttttatttttrtatgttgatatgttgagtttttgagkagtaatcttgaattcttatttaaaatttwmtatwaraaagttggaagaagcttccaacttttaaaataggtttctattaga

SEQ ID NO: 4624 - DNA, 112 bp, Streptococcus pneumoniae
  misc_feature (1)..(112): tiling:Spneumo1:WAN024ANL; Cluster includes WAN024EO9 R6.I G_460||||435919..436030|+|112 bp|Between spr0436 (+ strand ) and spr0437 (rpoE) (+ strand)|S.pneumoniae|R6|NC_003098. 1|IG|110
tcctgccactttctcccccttaacctttgactattccgcaaaattatcgtaaaataaagagtaaatgataaaatgaggtcagagtctgttcgctctggcgatagtagtataa

SEQ ID NO: 4625 - DNA, 148 bp, Streptococcus pneumoniae
  misc_feature (1)..(148): tiling:Spneumo1:WAN0249VU; Cluster includes WAN024EA4-rc R 6.IG_1573.2||||1503084..1503231|-|148 bp|Between spr1526 ( - strand) and spr1527 (- strand)|S.pneumoniae|R6|NC_003098 .1|IG-rc|110
tccttagttattctataaaaagtagttttttaaagaacctaagagtgtatacccccttttccctctacacagatagtgtaagaaaagggggcttttgtttaaaatgtaagaaactgtcacgaaattaaaatgaagttcttacataagc

SEQ ID NO: 4626 - DNA, 65 bp, Streptococcus pneumoniae
  misc_feature (1)..(65): tiling:Spneumo1:WAN024A2C; Cluster includes WAN024ECQ-rc R 6.IG_1356||||1303098..1303162|-|65 bp|Between spr1312 (trx B) (- strand) and spr1313 (- strand)|S.pneumoniae|R6|NC_00 3098.1|IG-rc|110
tccttgcgtgattgacaagaaagagttagaataaagatagttacaacaagaaagaaggaatctat

SEQ ID NO: 4627 - DNA, 80 bp, Streptococcus pneumoniae
  misc_feature (1)..(80): tiling:Spneumo1:WAN0249NS; Cluster includes WAN024E8Q-rc R 6.IG_1671.2||||1598874..1598953|-|80 bp|Between spr1622 (- strand) and spr1623 (+ strand)|S.pneumoniae|R6|NC_003098. 1|IG-rc|110
tcctttcgatttaacatttaaactatttttcccgtcattgatttaaaaatagtttgctaactttactggcgaaaagttta

SEQ ID NO: 4628 - DNA, 117 bp, Streptococcus pneumoniae
  misc_feature (1)..(117): tiling:Spneumo1:WAN024A4S; Cluster includes WAN024EDY-rc R 6.IG_1263||||1217036..1217152|-|117 bp|Between spr1219 (ho m) (- strand) and spr1220 (mecA) (- strand)|S.pneumoniae|R 6|NC_003098.1|IG-rc|110
tcctttctggaaagctattttcagattttaagaagagcgaatcgtctgattcgttttttctttttatactgaaatagtgatttactataataggaattttcacaaaattctgttata

SEQ ID NO: 4629 - DNA, 123 bp, Streptococcus pneumoniae
  misc_feature (1)..(123): tiling:Spneumo1:WAN0249MP; Cluster includes WAN024E86 R6.I G_1721||||1645521..1645643|+|123 bp|Between spr1672 (czcD) (- strand) and spr1673 (+ strand)|S.pneumoniae|R6|NC_0030 98.1|IG|110
tcctttgttataatagatttatgaacaccttgttcattatcattatccactaaaactcaaagaaaggatagaagcaaaacgtcagctttattcagttctgaacaatttgccttaagtgtccat

SEQ ID NO: 4630 - DNA, 151 bp, Streptococcus pneumoniae
  misc_feature (1)..(151): tiling:Spneumo1:WAN0249DV; Cluster includes WAN024E39 R6.I G_2240||||2025027..2025177|+|151 bp|Between spr2033 (imdH) (- strand) and spr2034 (trpS) (- strand)|S.pneumoniae|R6| NC_003098.1|IG|110
tcgaagtttcctcttttctttctttttgagcttgactctttttatattgtatctatcataccattctataaaaatttgtcaaatgttacaggggtaaataaaaaactatcttttcttcgagatagaaawgatagtttcttgtaaaataaac

SEQ ID NO: 4631 - DNA, 955 bp, Streptococcus pneumoniae
  misc_feature (1)..(955): tiling:Spneumo1:WAN024DFM; Cluster includes WAN0244BF spr0 647|pmi|15902691|NP_358241.1|653533..654477|+|945 bp|Manno se-6-phosphate isomerase|S.pneumoniae|R6|NC_003098.1|ORF|1 21
tcgacatgtcagaaccattatttttacaatcagttatgcaagaaaaaatctggggtggwrccaagctacgtgatgagtttggctacgacatcccaagtgaaaaartcggagartaytgggcyatctcagcycatcyaaatggwgtytctaaagttgccaatggtcgttacgagggaacagatcttgctactttgtatgcggaacaccgtgaattatttggcaatcgtccagaacctgtatttccacttttgaccaagatcctcgatgccaacgactggctcagtgtccaagttcacccagacgatgcttatggactcgagcatgaaggcgaactyggaaaaacagaatgytggtacatyatygcagcrgatgaaggttcagagattatctacggtcacaatgccaagtcaaaagaagaactccgccagcaaatcgaggayaagaactgggatgmsytgttgacmaaagtsccwgtyaargcwggagatttcttctatgtaccaagyggbacyatgcaygctatcggkrckggyaycttratycttgaaacccarcagtctagygataccacytaycgygtctatgactttgaccgyaaggatgacaarggcaayttrcgtgaacttcaycttgaaaaatcyatcgatgtcttgaacattggtgarccmrcaaatagccgtccwgtracwrtyaaagcagatgatytrcgttccactctccttgtatcyaatgatttcttcgcagtttacaartgggaaattactggaaaagttractttgaaaagacagctgactacagcttrttgagtgtcttrgctggtcaaggtcarctaactgttgacgggaaaaaytatccaatycaaaaaggsagmcactttatcctaccaagtgatgttgaakcttggactctrgaagggmaagrtttrgaattrattgttagycatccataactaat

SEQ ID NO: 4632 - DNA, 112 bp, Streptococcus pneumoniae
  misc_feature (1)..(112): tiling:Spneumo1:WAN024AEH; Cluster includes WAN024EJE-rc R 6.IG_837.2||||804958..805059|-|102 bp|Between spr0801 (- s trand) and spr0802 (+ strand)|S.pneumoniae|R6|NC_003098.1| IG-rc|110
tcgattagtcctcctattttctctaagttaaattatgtactaatacagatgaaactacaaagaataaactttaagaaatcttctcactgataagattttagcattagacttc

SEQ ID NO: 4633 - DNA, 216 bp, Streptococcus pneumoniae
  misc_feature (1)..(216): tiling:Spneumo1:WAN024A2M; Cluster includes WAN024ECU-rc R 6.IG_1343.2||||1292390..1292605|-|216 bp|Between spr1299 ( - strand) and spr1300 (guaA) (- strand)|S.pneumoniae|R6|NC _003098.1|IG-rc|110
tcgcaaaaaaattaaaagctttgtaaaatcaacggttacagaggattaaaaactgtaactgggattaaaacgggaacatttrctaaaaagaataaattgaataatagttccaagtgrtttacatttggacaaaaaattagaccgtagttttcaarctgcggtcttttgatatatataatgagaattaatttaattagagagccaactttctaatat

SEQ ID NO: 4634 - DNA, 248 bp, Streptococcus pneumoniae
  misc_feature (1)..(248): tiling:Spneumo1:WAN0249L7; Cluster includes WAN024E78 R6.I G_1864.1.2||||1720018..1720265|+|248 bp|Between spr1749 (- strand) and spr1750 (- strand)|S.pneumoniae|R6|NC_003098. 1|IG|110
tcggtataataaaatataagttttttgataaaataaccaaaaactactcgctatcccctctcacattaccctacatatcgtttgacatgcgactgatagttcaggaaaacttcaaggagaacttttctctcatccactatgcaggacttactatttcacttctactcctataggctcaatttgacacttttctttttcgaattgctcatatgcctcctgaatagtgagttcgatttatccaaatttat

SEQ ID NO: 4635 - DNA, 120 bp, Streptococcus pneumoniae
  misc_feature (1)..(120): tiling:Spneumo1:WAN024AL5; Cluster includes WAN024EN3 R6.I G_539.2||||515577..515695|+|119 bp|Between spr0515 (metF) (+ strand) and spr0516 (pnpA) (+ strand)|S.pneumoniae|R6|N C_003098.1|IG|110
tcgtcgagtgcgacgtcaccttcctatttttctacagaaatgttcggcaagccgaaccgtccaaaatatcttgtgtaattgaacacggccgaaaagctgtgtaaaaaagataaactgtct

SEQ ID NO: 4636 - DNA, 122 bp, Streptococcus pneumoniae
  misc_feature (1)..(122): tiling:Spneumo1:WAN024A99; Cluster includes WAN024EGU-rc R 6.IG_1050.1||||993604..993725|-|122 bp|Between spr1011 (+ strand) and spr1012 (rplU) (+ strand)|S.pneumoniae|R6|NC_0 03098.1|IG-rc|110
tcgtgggacgaaccacttaaacttgaataatcaagcaacgatgttcgtgcggttgcacaggatcgtgcatagtcaactcttcaagtatagcatatctcctattttcttacaagtaataacac

SEQ ID NO: 4637 - DNA, 67 bp, Streptococcus pneumoniae
  misc_feature (1)..(67): tiling:Spneumo1:WAN0249J5; Cluster includes WAN024E62 R6.I G_1984||||1799887..1799953|+|67 bp|Between spr1824 (rluD) (+ strand) and spr1825 (gapA) (- strand)|S.pneumoniae|R6|N C_003098.1|IG|110
tcgtgtcatccatttttccatataaaaaagcaagaccacaaagccttgctttctatcaactcaagaa

SEQ ID NO: 4638 - DNA, 68 bp, Streptococcus pneumoniae
  misc_feature (1)..(68): tiling:Spneumo1:WAN024AKT; Cluster includes WAN024EMT R6.I G_562||||539360..539427|+|68 bp|Between spr0538 (+ strand) and spr0539 (estA) (+ strand)|S.pneumoniae|R6|NC_003098.1 |IG|110
tcgttgaaataaacagagagaaagtcgagtttcggctttttcttatagaaaaatagaaggagaaaatc

SEQ ID NO: 4639 - DNA, 105 bp, Streptococcus pneumoniae
  misc_feature (1)..(105): tiling:Spneumo1:WAN0249WS; Cluster includes WAN024EAQ-rc R 6.IG_1526||||1458568..1458672|-|105 bp|Between spr1479 (- strand) and spr1480 (marR) (+ strand)|S.pneumoniae|R6|NC_0 03098.1|IG-rc|110
tcgtttcctcttgtctaatatctttatctagtatatcaaaaaaagctagatttctctagctgtgactttttatgttatacttattgcaagagaaaaaacgaggag

SEQ ID NO: 4640 - DNA, 216 bp, Streptococcus pneumoniae
  misc_feature (1)..(216): tiling:Spneumo1:WAN0249HN; Cluster includes WAN02471L R6.I G_208||||195860..196075|+|216 bp|Between spr0187 (rpsJ) (+ strand) and spr0188 (rplC) (+ strand)|S.pneumoniae|R6|NC_ 003098.1|IG|110
tctaaaatataaaagagcagaggctggtgtttcaatctaattgaacacgggctaaactcggtgtgaaaaagataaacttcctagtgtctgctagacactgcgtcagtttcctattttcacgttgagtttgacgccctttgtatcttagacttgagcataaaaaacgctcgttaaaaactttttgaataaaaaatatagaaaaggaactattttctc

SEQ ID NO: 4641 - DNA, 75 bp, Streptococcus pneumoniae
  misc_feature (1)..(75): tiling:Spneumo1:WAN0249G3; Cluster includes WAN024E4G R6.I G_2158||||1935388..1935462|+|75 bp|Between spr1951 (- stra nd) and spr1952 (- strand)|S.pneumoniae|R6|NC_003098.1|IG| 110
tctaaatttaaattttaacgttttaaatgtaaacttgtgattctgataagaatcggttgagctaaagcgagcccc

SEQ ID NO: 4642 - DNA, 86 bp, Streptococcus pneumoniae
  misc_feature (1)..(86): tiling:Spneumo1:WAN0249KQ; Cluster includes WAN02471R-rc R 6.IG_195||||184266..184351|-|86 bp|Between spr0174 (+ stra nd) and spr0175 (+ strand)|S.pneumoniae|R6|NC_003098.1|IG- rc|110
tctaacaccctctttccttagaatagtaccattatagcataattccttaccttctacaattcaggcagtctatttatttggatttt

SEQ ID NO: 4643 - DNA, 157 bp, Streptococcus pneumoniae
  misc_feature (1)..(157): tiling:Spneumo1:WAN0249KE; Cluster includes WAN024E6S-rc R 6.IG_1888||||1742842..1742998|-|157 bp|Between spr1773 (+ strand) and spr1774 (+ strand)|S.pneumoniae|R6|NC_003098.1 |IG-rc|110
tctaacttcctctccattatttcttcctttatcaagaaaaagttacctcaatattaataaagtacaattctaaattaagtacaattctaaattaactccaattcttgattcatgataatatttcagtaactcatcgtgcaattaaaaacaaggattt

SEQ ID NO: 4644 - DNA, 223 bp, Streptococcus pneumoniae
  misc_feature (1)..(223): tiling:Spneumo1:WAN024ARM; Cluster includes WAN024EQH-rc R 6.IG_282||||263184..263357|-|174 bp|Between spr0261 (manL) (- strand) and spr0262 (adhP) (- strand)|S.pneumoniae|R6| NC_003098.1|IG-rc|110
tctaatagaaacctattttaaaagttggaagcttcttccaactttytwatakwaaattttaaataagaattcaagattactmctcaaaaactcaacatatcaacatayaaaaataaaaattttttaattttttatgataaatagttgctttttttatgaaaacggtttatacttaaacagtcttaaagttttcttaaatgaaaactaaaacaaaaaaggagga

SEQ ID NO: 4645 - DNA, 240 bp, Streptococcus pneumoniae
  misc_feature (1)..(240): tiling:Spneumo1:WAN0249UB; Cluster includes WAN024EQ5 R6.I G_307.1.2.1.1||||288494..288587|+|94 bp|Between spr0286 (h ysA) (+ strand) and spr0287 (kdgA) (- strand)|S.pneumoniae |R6|NC_003098.1|IG|220
tctagctgaataatacagataaaacctgcctgtgagggtgggttttttgatttcaagctactcgttttagtatagtaaactgaatctagactagcacaatgctgyttctatagcgttttgaaactagaayagrayrwyataactgctaaaagatttctataaattcatttgattttcctaatcaatttgttcgtatcctatttcactcyactatawwayaktcykatcaattgatttgaa

SEQ ID NO: 4646 - DNA, 65 bp, Streptococcus pneumoniae
  misc_feature (1)..(65): tiling:Spneumo1:WAN024ACL; Cluster includes WAN024EIE-rc R 6.IG_935.2.2||||887319..887383|-|65 bp|Between B (transpos ase) (+ strand) and spr0900 (+ strand)|S.pneumoniae|R6|NC_ 003098.1|IG-rc|110
tctaggatcttgagtcggagctgagcttggagctgggacagggcttgcaggttgactaggaacag

SEQ ID NO: 4647 - DNA, 61 bp, Streptococcus pneumoniae
  misc_feature (1)..(61): tiling:Spneumo1:WAN024AAS; Cluster includes WAN024EHL R6.I G_985||||930811..930870|+|60 bp|Between spr0946 (+ strand) and spr0947 (+ strand)|S.pneumoniae|R6|NC_003098.1|IG|110
tctccagtacgtcagatttctcttttctgtattttcattgtataataggattacatttact

SEQ ID NO: 4648 - DNA, 78 bp, Streptococcus pneumoniae
  misc_feature (1)..(78): tiling:Spneumo1:WAN0249VP; Cluster includes WAN024E9Z R6.I G_1580||||1512043..1512120|+|78 bp|Between spr1533 (- stra nd) and spr1534 (- strand)|S.pneumoniae|R6|NC_003098.1|IG| 110
tctccttctcccttcttttacaagattgggctagagcttttcagctcactakcccacctattttctagtcttttacat

SEQ ID NO: 4649 - DNA, 77 bp, Streptococcus pneumoniae
  misc_feature (1)..(77): tiling:Spneumo1:WAN024ADL; Cluster includes WAN024EIW-rc R 6.IG_880||||843140..843216|-|77 bp|Between spr0844 (gidA) (+ strand) and spr0845 (pyrH) (+ strand)|S.pneumoniae|R6|N C_003098.1|IG-rc|110
tctccttctttcatcctacctattttatcacaatttctaagatttttatagtatcatgagcaattctttcaaaaaaa

SEQ ID NO: 4650 - DNA, 60 bp, Streptococcus pneumoniae
  misc_feature (1)..(60): tiling:Spneumo1:WAN0249HZ; Cluster includes WAN024E5G R6.I G_2036||||1847738..1847797|+|60 bp|Between transporter (MA TE) (- strand) and spr1878 (thrC) (- strand)|S.pneumoniae| R6|NC_003098.1|IG|110
tctctcctcctgatgaaaagaaactcagttggtttcccaaccgagtttrctccctctrtc

SEQ ID NO: 4651 - DNA, 129 bp, Streptococcus pneumoniae
  misc_feature (1)..(129): tiling:Spneumo1:WAN0249I8; Cluster includes WAN024E5J-rc R 6.IG_2028||||1841674..1841802|-|129 bp|Between spr1869 (tg t) (- strand) and spr1870 (+ strand)|S.pneumoniae|R6|NC_00 3098.1|IG-rc|110
tctcttattataccatagttcttatacatagttcgtgacagttcctactttttttgataaaatcatacagtgtgtccttgggcacactgtatgaactgggactgtctttcccagcttcggaggtaaaaa

SEQ ID NO: 4652 - DNA, 83 bp, Streptococcus pneumoniae
  misc_feature (1)..(83): tiling:Spneumo1:WAN024AHC; Cluster includes WAN024EKW R6.I G_703||||685312..685394|+|83 bp|Between spr0679 (ppiA) (- strand) and spr0680 (- strand)|S.pneumoniae|R6|NC_003098.1 |IG|110
tctgatcctctcaaaaattcatttataaccattgyaccctaaaaggaagtggatttcaaatattagtagtttacagaactggc

SEQ ID NO: 4653 - DNA, 97 bp, Streptococcus pneumoniae
  misc_feature (1)..(97): tiling:Spneumo1:WAN024AGC; Cluster includes WAN024EK9 R6.I G_761.1.1||||735848..735944|+|97 bp|Between spr0737 (+ str and) and spr0738 (deoD) (+ strand)|S.pneumoniae|R6|NC_0030 98.1|IG|110
tctgatggtasaatgayagttagtttgtctagtttataagaaagtactacctgagcttgaataggactcaggtagctctctrtgaaagaacaaaatt

SEQ ID NO: 4654 - DNA, 194 bp, Streptococcus pneumoniae
  misc_feature (1)..(194): tiling:Spneumo1:WAN024APS; Cluster includes WAN024EPF-rc R 6.IG_385.2||||359750..359943|-|194 bp|Between spr0361 (+ s trand) and spr0362 (ropA) (+ strand)|S.pneumoniae|R6|NC_00 3098.1|IG-rc|110
tctgtcatttctccttaaaattttttaaatacagtctattataacattttctataaataaaatctagactaatgcagmcaattatagacaacaagcctttttcctaactaaaacactcataaagtatagacaattttagactactttggatatcttttggttagtcattttccaaaactaatttatctaatttt

SEQ ID NO: 4655 - DNA, 1398 bp, Streptococcus pneumoniae
  misc_feature (1)..(1398): tiling:Spneumo1:WAN024FPM; Cluster includes WAN023PP4 pne2 0_18||||13937..15454|+|1518 bp|Type 11A capsule operon, Gl immer 2.02 orf prediction|S.pneumoniae||WAN01UCJ5|ORF|000
tctgtcgggatgaaagcggcactctggtatactgttgcaaattttattcaaaagggttttgtatttctttcaactccgattttaaccagaatacttaatgttaatgattacggtacattgatactttaccaatcatggtttgtactatttgctatttttgcgaccttgaatctttctcaaacagcttataataagggattggtagaatttgagaatgataaagataattttacattttctttgttgtttttgtctaagactattactataattgttgcttttttatattttacttttaatatactggttaaagatagtactggattaactcccagtttcatgatatttttattcagtgatatcttatttaatattagtatagaattttatttggcacgtcagagatttgaattcaaatatagaaaagcagttctaatttcaactttttcaagtttttttattgtagctattagtacaactatcttattagcgattaagaatgatttattcattaaaattgtattggatgctattatccgaattatctttggtttatattgtttttatctcttgtttttttcagggagaaggcaacttaagatagaaaaaaaatatattaaatatggtttgagttattcattacctttgataccgcatttcttatcgcactatattttgaatcagtctgaccgtttgatgattaacatgtttgatggtaaggagaaattagctatatatagtctagcttattctgtatcaatgattatgtttttgtttactaatgcaattaatcaatcaataatgccgcatacatttcaagctttgaaaaaaaaggattattgtgggatacatgggagcaccaaatggctttttgtagtagttggggggattacagctctctcaattctatttgcaccagaactaattgttattttaggcggcaataaatataaggaatcaatttggctagtacctccaattgccatctcggtttatttcctttttgtatattctatgtttagtaatatcagtttttattataagatgaataagctgatttcgttagtttccacaggtgcggctctttcaaatattattttaaattatatttttattaatatatttgggtatcaagctgcagcttacactacattattatgctatatattgttggcgttttctcattttttcttatatagatttttattaaaaaaagaggaaattcatgaggaactttataacatgaagatgattttaataatatctttaatattattaataatactatttttgatacttgttatttataacttagccattataagatatgcaattattgcaattattttatttcttttgtttacaaagagaaataaaataattacatcgctaaaaagt

SEQ ID NO: 4656 - DNA, 75 bp, Streptococcus pneumoniae
  misc_feature (1)..(75): tiling:Spneumo1:WAN024A52; Cluster includes WAN024EE3-rc R 6.IG_1255||||1207705..1207764|-|60 bp|Between spr1211 (rpl L) (- strand) and spr1212 (rplJ) (- strand)|S.pneumoniae|R 6|NC_003098.1|IG-rc|110
tcttaagctacacagcgtagcctagctacgaaaaaaactattataaaatttaaaacttatttggaggaaataaca

SEQ ID NO: 4657 - DNA, 80 bp, Streptococcus pneumoniae
  misc_feature (1)..(80): tiling:Spneumo1:WAN024A7R; Cluster includes WAN024EFX R6.I G_1103||||1062207..1062286|+|80 bp|Between spr1064 (nrdH) (+ strand) and spr1065 (nrdE) (+ strand)|S.pneumoniae|R6|N C_003098.1|IG|110
tcttagtacatcatccagaagaaactgcttttagggctaacttagaagcctttcttttgtaattagataagggaaatttt

SEQ ID NO: 4658 - DNA, 70 bp, Streptococcus pneumoniae
  misc_feature (1)..(70): tiling:Spneumo1:WAN024A5I; Cluster includes WAN024EEP-rc R 6.IG_1204||||1166108..1166176|-|69 bp|Between spr1163 (lem A) (- strand) and spr1164 (gidB) (+ strand)|S.pneumoniae|R 6|NC_003098.1|IG-rc|110
tcttattttaccacaatcatwraaaatttgatatactggtactaatctaaaagyagaaaggacttataty

SEQ ID NO: 4659 - DNA, 125 bp, Streptococcus pneumoniae
  misc_feature (1)..(125): tiling:Spneumo1:WAN0249SF; Cluster includes WAN024EJK R6.I G_828.2||||792770..792886|+|117 bp|Between spr0792 (hsdR) (+ strand) and spr0793 (argR) (- strand)|S.pneumoniae|R6|N C_003098.1|IG|110
tcttcctaggataaagcaaaacgcatagtatcaagggttttcaacacttgatactatgcgttttctgatgttaaagactttctaccagkttttttaaaagcataattgttagttgtagtcattta

SEQ ID NO: 4660 - DNA, 62 bp, Streptococcus pneumoniae
  misc_feature (1)..(62): tiling:Spneumo1:WAN024AQG; Cluster includes WAN024EPT-rc R 6.IG_331.2||||312372..312432|-|61 bp|Between spr0310 (dexB ) (+ strand) and spr0311 (+ strand)|S.pneumoniae|R6|NC_003 098.1|IG-rc|110
tcttctttctccttaatagtgggaatttgtaaagttaattgaatttcaagaatgaaagttta

SEQ ID NO: 4661 - DNA, 58 bp, Streptococcus pneumoniae
  misc_feature (1)..(58): tiling:Spneumo1:WAN0249FH; Cluster includes WAN024E45 R6.I G_2173||||1958874..1958931|+|58 bp|Between spr1966 (- stra nd) and spr1967 (- strand)|S.pneumoniae|R6|NC_003098.1|IG| 110
tctttacctctcttccaaaatggaggtgatatcccaaataccacctccacactttcta

SEQ ID NO: 4662 - DNA, 165 bp, Streptococcus pneumoniae
  misc_feature (1)..(165): tiling:Spneumo1:WAN0249I3; Cluster includes WAN024E5H R6.I G_2034||||1845668..1845832|+|165 bp|Between spr1875 (- str and) and spr1876 (- strand)|S.pneumoniae|R6|NC_003098.1|IG |110
tctttcaaattcctttcaaatgagtacctgtctatsataacacaaaaaatgtagaaaaaaagccctctcgggcctatttaacagaactgtctattccttgtaacaaactaggttacttgaaatagtttgttaggtctctgtcacaaaactgacacaatcttttta

SEQ ID NO: 4663 - DNA, 176 bp, Streptococcus pneumoniae
  misc_feature (1)..(176): tiling:Spneumo1:WAN024A9N; Cluster includes WAN024EH3-rc R 6.IG_1027.1.1.2.1||||973332..973506|-|175 bp|Between spr09 88 (IS1167) (- strand) and spr0989 (murZ) (+ strand)|S.pne umoniae|R6|NC_003098.1|IG-rc|110
tctttctcgaatcgctattgccccttttttatcccctaaaactgagtaggakctaagactagatctcttatctaagtatcggaatacggctgttcaactaaattttagcaagaacttctcccccttctctcagttcacagaagcgttttatacataccgtcctatcagacaatcta

SEQ ID NO: 4664 - DNA, 96 bp, Streptococcus pneumoniae
  misc_feature (1)..(96): tiling:Spneumo1:WAN024AHT; Cluster includes WAN024EL6-rc R 6.IG_691.1.1||||671089..671184|-|96 bp|Between spr0667 (ft sX) (+ strand) and spr0668 (ptsG) (+ strand)|S.pneumoniae| R6|NC_003098.1|IG-rc|110
tctttggaagctcttttcttctgcgcatctcttttcaaaaactcttgtagcaaaaaaggagattttacaatctcctcataaaagcagctattttac

SEQ ID NO: 4665 - DNA, 62 bp, Streptococcus pneumoniae
  misc_feature (1)..(62): tiling:Spneumo1:WAN024AON; Cluster includes WAN024EOS R6.I G_431.1||||403802..403863|+|62 bp|Between spr0407 (+ stran d) and spr0408 (glnQ) (- strand)|S.pneumoniae|R6|NC_003098 .1|IG|110
tctttggataacggcggattcttgaccttcaagtagtagagatagagaatctgccttttcat

SEQ ID NO: 4666 - DNA, 227 bp, Streptococcus pneumoniae
  misc_feature (1)..(227): tiling:Spneumo1:WAN0249JG; Cluster includes WAN024E6D R6.I G_1931.1||||1784368..1784594|+|227 bp|Between spr1813 (ccp A) (- strand) and spr1814 (rr11) (- strand)|S.pneumoniae|R 6|NC_003098.1|IG|110
tcttttacaagtagaggtactgattgaagctctatatctacttacaaaagtgaagatgtgaaaatttcgttttcatatttctacttattccattctatcactaattgtaaacactttcaagtgttttttgaagattgattgaaaaaatttcatagaaaacctaggtttagctccttgctaccaccttagactaaacaaaaaggaggaaactaagccctcctaaagtt

SEQ ID NO: 4667 - DNA, 103 bp, Streptococcus pneumoniae
  misc_feature (1)..(103): tiling:Spneumo1:WAN024AEO; Cluster includes WAN024EJI R6.I G_833.2.1.2.1||||802147..802249|+|103 bp|Between spr0797 ( pykF) (+ strand) and spr0798 (- strand)|S.pneumoniae|R6|NC _003098.1|IG|110
tcttttacttacgtgagtgtagatgttatttactgttttagcgtttttgtgttcyactctaaccattatagcattcttctcagctagtgtactaaggagtgtg

SEQ ID NO: 4668 - DNA, 170 bp, Streptococcus pneumoniae
  misc_feature (1)..(170): tiling:Spneumo1:WAN0249SA; Cluster includes WAN024EPG R6.I G_383||||359146..359315|+|170 bp|Between spr0359 (mtlD) (+ strand) and spr0360 (+ strand)|S.pneumoniae|R6|NC_003098. 1|IG|110
tctttttcgaaaatctcttcaaatcaggttagcatcgctttgtcttaggcatatgttactgacttcgtcagttctatctacaacctcaaagcagtgctttgagctgactccgtcagtcttatctgcaayctcaaaacactgtttgagttatctgcggtaatctttctagc

SEQ ID NO: 4669 - DNA, 181 bp, Streptococcus pneumoniae
  misc_feature (1)..(181): tiling:Spneumo1:WAN0249XY; Cluster includes WAN024EBE-rc R 6.IG_1478||||1418541..1418721|-|181 bp|Between spr1434 (me tA) (- strand) and spr1435 (apt) (- strand)|S.pneumoniae|R 6|NC_003098.1|IG-rc|110
tgaaaacagtccctagggctgttttctctacactaggatataaaaatagactataactagttagagaaaaactataattgaaaactatatcttcttgcagtataataaaaggactaagtgtttgagatttgtcttcaaacatatgcaattattcctgaaagagtacagttaggagagggtt

SEQ ID NO: 4670 - DNA, 228 bp, Streptococcus pneumoniae
  misc_feature (1)..(228): tiling:Spneumo1:WAN024A9E; Cluster includes WAN024EGW R6.I G_1046.1||||990438..990665|+|228 bp|Between spr1007 (pta) (+ strand) and spr1008 (- strand)|S.pneumoniae|R6|NC_00309 8.1|IG|110
tgaaaactataaagtgatatactatgctatactgtagttatgaaactatgtacgaaaagcactgccattaattcctgagaactaaattactgattggtgtcaaaaaggaaaacttccaagcgatgatatcctgtctatacacgacctatagaaatctgtaatatacatrtccgtaaaacgataaattccctttttgattttaaatgagtatgaaaagagaattttccg

SEQ ID NO: 4671 - DNA, 82 bp, Streptococcus pneumoniae
  misc_feature (1)..(82): tiling:Spneumo1:WAN0249EZ; Cluster includes WAN024E3Q-rc R 6.IG_2199.1||||1985311..1985392|-|82 bp|Between spr1992 (- strand) and spr1993 (hsp33) (+ strand)|S.pneumoniae|R6|NC _003098.1|IG-rc|110
tgaaaataaaaagagaaacagattattttagcatttgtcagatttatgctatgcttaaggtagaaaatgaaagggrtaacaa

SEQ ID NO: 4672 - DNA, 245 bp, Streptococcus pneumoniae
  misc_feature (1)..(245): tiling:Spneumo1:WAN024ABA; Cluster includes WAN024EHT R6.I G_971.2||||919383..919627|+|245 bp|Between spr0932 (+ stra nd) and spr0933 (+ strand)|S.pneumoniae|R6|NC_003098.1|IG| 110
tgaaaatttaatatgtaaatctcagacgatagaaattaaaaactctatcgtcttttttatactcaaaattaggaggtaaaaatggtaaggataagaggtcccacttaaaacaatttatggcaaaataaggacggaataacacaacaaattctctaaaacaaatcactaaatcaatgtaagattgaatgaaatcaatatttatgctataattaaataaatytaatgaagaaaaaaagagggatatt

SEQ ID NO: 4673 - DNA, 173 bp, Streptococcus pneumoniae
  misc_feature (1)..(173): tiling:Spneumo1:WAN0249K5; Cluster includes WAN02471Q R6.I G_198.2.2||||185646..185812|+|167 bp|Between spr0177 (+ st rand) and spr0178 (folC) (+ strand)|S.pneumoniae|R6|NC_003 098.1|IG|110
tgaaataaagaagaattgggacattcagtggatgttttactccacgttaatattcatagtwgctagtkattagctaaccaggtaagaggtcgggacgaaaatcctggccttgtttttattagtaaccatactttaatgcgataattgattggacttttgtcaaggagatgtgt

SEQ ID NO: 4674 - DNA, 228 bp, Streptococcus pneumoniae
  misc_feature (1)..(228): tiling:Spneumo1:WAN0249PT; Cluster includes WAN0247U0 R6.I G_52.2.1||||31115..31270|+|156 bp|Between spr0031 (- stran d) and spr0032 (polA) (+ strand)|S.pneumoniae|R6|NC_003098 .1|IG|110
tgaaataagatgtgaataactctatcaggaaagtcaaattaatttatagaaatattttagcagtcaaggtgtactattatagattcaatatactatattatagcacatttttaaatctaggtttactaaattctctggctctatctatttattcggaaaaagtttgaaaaatacttgctctagctcttcccaatggtattttttgattctttcctttataatgggtgt

SEQ ID NO: 4675 - DNA, 117 bp, Streptococcus pneumoniae
  misc_feature (1)..(117): tiling:Spneumo1:WAN024ARB; Cluster includes WAN024EQB R6.I G_299||||276671..276787|+|117 bp|Between spr0278 (+ strand ) and spr0279 (bglG) (+ strand)|S.pneumoniae|R6|NC_003098. 1|IG|110
tgaacacatgaaatgtcaataaatatttaggttaagataaattgttttgagtttgatataaactgatttaagtgtataatatgcttcaatatatgaaaacatacgttttaggaggga

SEQ ID NO: 4676 - DNA, 138 bp, Streptococcus pneumoniae
  misc_feature (1)..(138): tiling:Spneumo1:WAN024AAJ; Cluster includes WAN024EHH R6.I G_989.2||||934689..934825|+|137 bp|Between spr0950 (+ stra nd) and spr0951 (+ strand)|S.pneumoniae|R6|NC_003098.1|IG| 110
tgaatcgttatagatgtatttgtagatatcgtttgcgcatcgaaaaaattaatacaagaataaatatttatrgctctttaggtgacttttatagaagtaaagtttaggatagaaamacaagaaataacgcaccatttt

SEQ ID NO: 4677 - DNA, 95 bp, Streptococcus pneumoniae
  misc_feature (1)..(95): tiling:Spneumo1:WAN024AMV; Cluster includes WAN024ENV R6.I G_468.2.1||||450465..450558|+|94 bp|Between spr0444 (glnA) (+ strand) and spr0445 (hsdS) (+ strand)|S.pneumoniae|R6| NC_003098.1|IG|110
tgaattatctacaatctcatcaacaataaacctatttcaaccccattatctataggcgtatttttacgcctttttatatacttgaagcacataag

SEQ ID NO: 4678 - DNA, 78 bp, Streptococcus pneumoniae
  misc_feature (1)..(78): tiling:Spneumo1:WAN0249J8; Cluster includes WAN02471O-rc R 6.IG_201||||189263..189339|-|77 bp|Between spr0180 (cls) ( + strand) and spr0181 (orf47) (+ strand)|S.pneumoniae|R6|N C_003098.1|IG-rc|110
tgaattcccctcctctttctttctattcgtaaaagacaagaaaaataggtctggtttgtatcctaagtyctagatttc

SEQ ID NO: 4679 - DNA, 180 bp, Streptococcus pneumoniae
  misc_feature (1)..(180): tiling:Spneumo1:WAN024AIW; Cluster includes WAN024ELT-rc R 6.IG_638||||625781..625959|-|179 bp|Between spr0614 (pyrE) (+ strand) and spr0615 (+ strand)|S.pneumoniae|R6|NC_0030 98.1|IG-rc|110
tgacatcgtcctcytaagaagtgataaayaagatagttgattgatcaatttgatacatattayattttcattatatcaacaaaagaaagcgttgtcaattattttrtttaaaatattgtcatattttaaayaaaatggtaaaagagrctcggtagcctcgtctctctttatcttactgac

SEQ ID NO: 4680 - DNA, 91 bp, Streptococcus pneumoniae
  misc_feature (1)..(91): tiling:Spneumo1:WAN024AEY; Cluster includes WAN024EJN R6.I G_825.2||||786664..786754|+|91 bp|Between spr0789 (+ stran d) and spr0790 (hsdM) (+ strand)|S.pneumoniae|R6|NC_003098 .1|IG|110
tgacgcatagatatagttaattgaagctttgtttgaaatctgataaaataatgatattactaagttttaaaaactaaagaaaagggaagat

SEQ ID NO: 4681 - DNA, 65 bp, Streptococcus pneumoniae
  misc_feature (1)..(65): tiling:Spneumo1:WAN024APP; Cluster includes WAN024EPC R6.I G_391.2||||366346..366410|+|65 bp|Between spr0367 (+ stran d) and spr0368 (mutS2) (+ strand)|S.pneumoniae|R6|NC_00309 8.1|IG|110
tgactcgaatctatcagaatgtaaaaagctaccacacctagacattcaaagacaaggaaataaag

SEQ ID NO: 4682 - DNA, 255 bp, Streptococcus pneumoniae
  misc_feature (1)..(255): tiling:Spneumo1:WAN0249QI; Cluster includes WAN024E3Z-rc R 6.IG_2181.2.2||||1965843..1966097|-|255 bp|Between spr1974 (fcsR) (+ strand) and spr1975 (adcA) (- strand)|S.pneumon iae|R6|NC_003098.1|IG-rc|110
tgagaaatcgactagttcataagagctagtcggttttttgatactagatggctaacttcattatagacctttcagaactwagggaacctgaaamaataaataaaactcttgaaatatctggrcttatatgctagaatgtagttagtgtataaggttcattagaacaccaaagcccctaactagtgccatagttaagggcttttttgacgtatcttagcgatttaaygggtgtttataggctagtcaktcggtcta

SEQ ID NO: 4683 - DNA, 130 bp, Streptococcus pneumoniae
  misc_feature (1)..(130): tiling:Spneumo1:WAN0249HD; Cluster includes WAN024E52 R6.I G_2114.2||||1884930..1885059|+|130 bp|Between spr1907 (dap D) (- strand) and spr1908 (- strand)|S.pneumoniae|R6|NC_00 3098.1|IG|110
tgagataaaacgtgctgtcggtaaaagcaagcccctaccgatacaacctaaaaacactcttcacaactatctccccgtgttttattgactattccagtatagcacacttttagaattaagaaaagacttt

SEQ ID NO: 4684 - DNA, 176 bp, Streptococcus pneumoniae
  misc_feature (1)..(176): tiling:Spneumo1:WAN024ADG; Cluster includes WAN024EIT R6.I G_890||||849153..849328|+|176 bp|Between spr0854 (- strand ) and spr0855 (+ strand)|S.pneumoniae|R6|NC_003098.1|IG|11 0
tgagataacctacctttcaattgacggtcttgttttggttgtcacattccagttcataaatcaaaaatgtgacggtttcattgtatatgaaaccgcttcaaaaatcaagaaaaacttgtcatccmaatttttttatgctagactagtgaaaatcaagctctaatggagggaaamgt

SEQ ID NO: 4685 - DNA, 126 bp, Streptococcus pneumoniae
  misc_feature (1)..(126): tiling:Spneumo1:WAN0249H5; Cluster includes WAN024E4W R6.I G_2120.1.2||||1893489..1893614|+|126 bp|Between spr1913 (r rmA) (+ strand) and spr1914 (- strand)|S.pneumoniae|R6|NC_ 003098.1|IG|110
tgagtataaactagacttcscaaargtakaaaacttaccgaaaatcttcaatatkacaaaaacgtataagaacaggtacacaaaccttaatcttatgcgttttgttatagtttccatacacattaa

SEQ ID NO: 4686 - DNA, 298 bp, Streptococcus pneumoniae
  misc_feature (1)..(298): tiling:Spneumo1:WAN0249S3; Cluster includes WAN0247P1-rc R 6.IG_84||||70252..70548|-|297 bp|Between spr0063 (+ strand ) and spr0064 (agaS) (+ strand)|S.pneumoniae|R6|NC_003098. 1|IG-rc|110
tgagttcctctttttctattaaatatrggaatgggagtaagctmcattcccatgtatattctatataaaatgctctaacgattttcacgttgtcacatgaattgaatcgagttccaactaaaatctgtaggaaactagccgcaggctgctcaaagcactgctttgaggttgccggataagactgacgaagtcagctcaaaacaccgttttgaggttgccggataagactgacgaagtcagtaacatatacctacggyaaggcgacgttgacgtagtttgaagagattttcgaagagta

SEQ ID NO: 4687 - DNA, 125 bp, Streptococcus pneumoniae
  misc_feature (1)..(125): tiling:Spneumo1:WAN024AHO; Cluster includes WAN024E7K R6.I G_1831||||1697503..1697563|+|61 bp|Between () (- strand) a nd spr1717 (- strand)|S.pneumoniae|R6|NC_003098.1|IG|440
tgagttgytattttcaactcttactattatacagycttttyawrytttgtcaactactttttctaatttttttcattwtttttkcatgacttatagtaaaaaaagccagaattatactgactctt

SEQ ID NO: 4688 - DNA, 458 bp, Streptococcus pneumoniae
  misc_feature (1)..(458): tiling:Spneumo1:WAN024A8D; Cluster includes WAN024EGC-rc R 6.IG_1081||||1035853..1036310|-|458 bp|Between spr1042 (ig a) (+ strand) and spr1043 (+ strand)|S.pneumoniae|R6|NC_00 3098.1|IG-rc|110
tgagttttttcctttcrtagcaaggatttagatcccctattttattttactatwgtttgaacatagagagttttcaaatgaatgatgtccaaacagttcttgttttatgacatagaaatctactttatattatatcatgccttctttattttgtccgatgatagccttttaccctatcttttagcctatcttttaccctatatagaaaaaagccatcaaatgatgacttttcagagggagcaaaaaactgttcccgtcatattatgaaccaaaagaactaaactaccaacagctaataggcctaaagctgtaagctcagaagttgatgaacctgttgcaggaagagtttcctgctgataaataagakcataacttacttcattatcagtaggaattcctgcttgaatcttggtttgttcttcatcacctttttaaactttatttcctaatagtaraca

SEQ ID NO: 4689 - DNA, 159 bp, Streptococcus pneumoniae
  misc_feature (1)..(159): tiling:Spneumo1:WAN024AK4; Cluster includes WAN024EME R6.I G_585.2||||569299..569430|+|132 bp|Between spr0561 (prtA) (+ strand) and spr0562 (+ strand)|S.pneumoniae|R6|NC_00309 8.1|IG|220
tgartattagaacagaaaaaatgcttggagtatttgtttgtgtgtttatttttatataacaaactataaacaaaayaaaaatataaaaaaagagacaaaaaagaayagaaagtaattracaacgrtttcatatagtgttatacttatagcataaagtta

SEQ ID NO: 4690 - DNA, 56 bp, Streptococcus pneumoniae
  misc_feature (1)..(56): tiling:Spneumo1:WAN024A57; Cluster includes WAN024EEH R6.I G_1221||||1176853..1176908|+|56 bp|Between spr1177 (rpmE) (+ strand) and spr1178 (- strand)|S.pneumoniae|R6|NC_00309 8.1|IG|110
tgataagagaacagtttyggctgttcttttttgtttcttgaaatcaactgctgttt

SEQ ID NO: 4691 - DNA, 156 bp, Streptococcus pneumoniae
  misc_feature (1)..(156): tiling:Spneumo1:WAN024AHG; Cluster includes WAN024EKY R6.I G_698||||680647..680802|+|156 bp|Between spr0674 (sodA) (+ strand) and spr0675 (+ strand)|S.pneumoniae|R6|NC_003098. 1|IG|110
tgatagttggagggaagaattgttcttctcttttttaggttataagattctggtctgacaaaatcgtcagacttttttcatttttatgagaaacgtgctaactgctagaaattatggtagaataaagtattaagtaatcgtgraaaaaggatatct

SEQ ID NO: 4692 - DNA, 116 bp, Streptococcus pneumoniae
  misc_feature (1)..(116): tiling:Spneumo1:WAN024A23; Cluster includes WAN024ECL R6.I G_1370||||1313919..1314034|+|116 bp|Between spr1326 (+ str and) and spr1327 (- strand)|S.pneumoniae|R6|NC_003098.1|IG |110
tgatagtttttaggaaccattatggttccttttttagcgaaaaaagactagcaaacacaaactgctagtctctttgttatcgtttcatctatctttgttaaaagaaagaatacata

SEQ ID NO: 4693 - DNA, 61 bp, Streptococcus pneumoniae
  misc_feature (1)..(61): tiling:Spneumo1:WAN0249JE; Cluster includes WAN024E6C-rc R 6.IG_1931.2||||1784701..1784761|-|61 bp|Between spr1813 (c cpA) (- strand) and spr1814 (rr11) (- strand)|S.pneumoniae |R6|NC_003098.1|IG-rc|110
tgatataatattttcatgaagactatgtgctaaaattgacggtagtgaatggaacaatacc

SEQ ID NO: 4694 - DNA, 342 bp, Streptococcus pneumoniae
  misc_feature (1)..(342): tiling:Spneumo1:WAN024ABM; Cluster includes WAN024EHZ R6.I G_956||||904937..905278|+|342 bp|Between () (+ strand) and spr0918 (asd) (+ strand)|S.pneumoniae|R6|NC_003098.1|IG|1 10
tgatatgtatagggaaactcttgaatacgrgagtttttttgttatactcgatckraaaaatttcttattgacaaaatcaagtatctctagtaatatagaatatgcgatgagtcgataggtagtcttcggactactattgagcatraggaggtcataacgcaggagcggaccttgatgagttgtgtgaacctgctcatcacatgaagatgcctcttagtccctagtctagcgactgggatttttattttccaaaaaatgatgaaaaagctttgcaattcatggaaaaagtagtataatacttctattatagaaatttttagaaaattccgaaagaggttattt

SEQ ID NO: 4695 - DNA, 152 bp, Streptococcus pneumoniae
  misc_feature (1)..(152): tiling:Spneumo1:WAN0249Y8; Cluster includes WAN024EBN R6.I G_1440||||1375614..1375765|+|152 bp|Between spr1396 (rpsF) (- strand) and spr1397 (asnS) (- strand)|S.pneumoniae|R6| NC_003098.1|IG|110
tgatatgttcctccttttggtctaatgaccccaagactttgcaaggggtaagtgaggttcgctcacaataaactattatactagaaaaaatttttttacgcaagtaaaaacactagaattcgaaaaaacgccacatgggcgttttcctgttc

SEQ ID NO: 4696 - DNA, 399 bp, Streptococcus pneumoniae
  misc_feature (1)..(399): tiling:Spneumo1:WAN024BGR; Cluster includes WAN0244SB spr0 039|IS1381-truncation|15902083|NP_357633.1|39018..39311|+| 294 bp|Degenerate transposase (orf2)|S.pneumoniae|R6|NC_00 3098.1|ORF|200
tgattctggtaaaaagaaatttcacgctatgaaggctcaagcgattgtcacaagtcaagggagaattgtttctattgccatgatatgaagttgttcaaaatgagwtgcagaaatatcggacaagctggtaaaatcttggctgacagtrrttatcaagggcycatgaagatatatcctcaagcacaaactccacgtaaatccagcaaactcaagccrctaacagytgaagataaagyctrtaaycatgcrctatcyaaggaragaagcaaggttgagaayatctttgccaaagtaaaaacgtttaaaatrttttcaacaacctrtcgaaatcatcgtaaacgcttyggattacgaatgaatttgaktgctggyattatcaatcatgaactaggattctag

SEQ ID NO: 4697 - DNA, 1621 bp, Streptococcus pneumoniae
  misc_feature (1)..(1621): tiling:Spneumo1:WAN024C68-3; Cluster includes WAN0244LG sp r0286|hysA|15902330|NP_357880.1|285103..288339|+|3237 bp|H yaluronate lyase precursor (hyaluronidase/hyase)|S.pneumon iae|R6|NC_003098.1|ORF|111
tgattgatggcctgtctcaactgttgccagtcattcaaaagaccaagartccaatcgataaagataaaatgcaaaccatgtaccactggattgataaatcgtttgctcctttgctggtgaatggagarytgatggatatgagtcgtggacgctcgatcagtcgtgcaaatagcgaggggcacgtggccgcagtagaagtactaagagggattcaccgaatagcggatatgtctgaaggagaaaccaaacaaygtttgcagagtcttgtgaagaccattgttcaatcggatagttattatgatgtctttaagaatttgaagacttataaggatatcagtttgatgcaatccttgttaagtgatgcaggagtcgcaagtgttccaagamcaagttacctatctgcctttaacaagatggataaaacagccatgtacaatgcagagaaagggtttggatttggcttgtcactcttttccagtcgtaccttgaattacgaacacatgaacaaggaaaataaacgtggttggtatacgagtgatgggatgttctatctttacaatggcgatttgagtcactatagcgatggctactggccaacagttaatccatataagatgcctggtacaacagagacggatgctaagagagcggatagcgatacaggtaaagttttaccgtctgctttcgttggaacgagcaaactagatgatgccaatgygacagcaaccatggatttcaccaactggaatcaaacattgactgctcataagagctggtttatgctaaaggataagatygcctttttaggaagcaatatccaaaacacttcaacagatactgctgcaactacaatygaccagagaaaactggaatcargtaatccatataaagtctatgtcaatgataaagaagcctcccttacagaacaagaaaaggattatcctgaaacccaaagtgkstttttagaatcgtycgattcgaaaaagaatattggttactttttctttaagaagagttcaatcagyatgagtaaggctttgcaaaagggagcctggaaggatatcaatgaaggacagtcagacaaggaagttgaaaatgaatttcttacgattagtcaggctcataagcaaaatrgagattcttatggctatatgctmatycctaacgtggatcgtgccaccttcaatcaaatgataaaagagttagaaagyagcctcatcgaaaatarcgaaacccttcagtctgtttatgatgcyaaacaaggagtttggggcattgtgaaatatgatgattctgtctctactatttccaaccaattccaagttttgaaacgtggagtctatacyattcgaaaagaaggggatgaatataagattgcctactataatcctgaaacccaggaatcagctccagatcaggaagtctttaaaaagctagagcaagcagctcagccacaagtacagaattcaaaagaaaaggaaaaatctgaagaggaaaagaaccattcggatcaaaagaatctccctcagacaggagaaggtcagtcaatcttggcaagtctagggttcttgctacttggggcrttttatytattccgtagaggaaagaacaactaactaat

SEQ ID NO: 4698 - DNA, 129 bp, Streptococcus pneumoniae
  misc_feature (1)..(129): tiling:Spneumo1:WAN024A5H; Cluster includes WAN024EEN R6.I G_1205.2.1||||1167078..1167206|+|129 bp|Between spr1164 (g idB) (+ strand) and spr1165 (pyrP) (+ strand)|S.pneumoniae |R6|NC_003098.1|IG|110
tgatttacaaaatcatttttttctgctatactatcctaagcaaaggtttttaatgtcatcccgtgaggtgacgaagacgcaraaatatttraaactctttaaartctarattttaragaagtcttactc

SEQ ID NO: 4699 - DNA, 470 bp, Streptococcus pneumoniae
  misc_feature (1)..(470): tiling:Spneumo1:WAN024AOP; Cluster includes WAN024EOT R6.I G_430.2.1||||403043..403512|+|470 bp|Between spr0406 (ilvA ) (+ strand) and spr0407 (+ strand)|S.pneumoniae|R6|NC_003 098.1|IG|110
tgatttgatttctttttgttgacaaatatacyatattaaaaagatatataagtaattaactgagcttatctgtcttgtcatctctattaaggatggtttagataatcgggtgtctgcttctaggctagcacctcaatatccaaaggagtgatgaatttgaaggacataaggaatacctatctctcagatgatttattgaggaagaaagataggagtttttgagctagtgaaggcttggatttctaaaggttagaactatcatcttcagttcttaaatcgaagaaataagctatcttacggaaatagagaagcattttttaagaacttgaataatttcgcaccttaagagggtaataatacagtatttttattagcaaatatttatggtgtagaggctagcaaaacctatatattatcggatttaaaaaggaagtaagaaaattctgaactaattattttcgttgaatata

SEQ ID NO: 4700 - DNA, 130 bp, Streptococcus pneumoniae
  misc_feature (1)..(130): tiling:Spneumo1:WAN024AIO; Cluster includes WAN024ELP R6.I G_649||||632723..632849|+|127 bp|Between spr0625 (+ strand ) and spr0626 (lysS) (+ strand)|S.pneumoniae|R6|NC_003098. 1|IG|110
tgattttagcgtcaggttctttttagtttttaaagattatccgtgaatttcttgcttatttatgataaaatgggagtrtcgcaaaaaatgactcatcgtattcaattttgagtaaaactaggaggatccc

SEQ ID NO: 4701 - DNA, 51 bp, Streptococcus pneumoniae
  misc_feature (1)..(51): tiling:Spneumo1:WAN0249Z4; Cluster includes WAN024EC4-rc R 6.IG_1396.1||||1335825..1335875|-|51 bp|Between spr1352 (b ta) (+ strand) and spr1353 (glnH) (- strand)|S.pneumoniae| R6|NC_003098.1|IG-rc|110
tgcaccttacattatgcgtttttgtgattttaagacttgttagctgatttt

SEQ ID NO: 4702 - DNA, 123 bp, Streptococcus pneumoniae
  misc_feature (1)..(123): tiling:Spneumo1:WAN024B7P; Cluster includes WAN023M3R-3 31 4959_685||||359516..359749|+|234 bp|EGAD orf prediction|S. pneumoniae|R6|NC_003098.1|ORF|110
tgcgatctatatagtaaaatgaaacaagaacaggacaaatcgatcaggacagtcaaatcgatttctaaaaatgttttagaagtagagrtgtactattctagtttcaatmtactatataactga

SEQ ID NO: 4703 - DNA, 177 bp, Streptococcus pneumoniae
  misc_feature (1)..(177): tiling:Spneumo1:WAN0249YV; Cluster includes WAN024760 R6.I G_155.2||||142418..142594|+|177 bp|Between A (transposase) (- strand) and spr0135 (epsG) (+ strand)|S.pneumoniae|R6| NC_003098.1|IG|110
tgctaaaatttgaagtgtagtgcagatgkatttgtaatagtattatagcaattctttggagaaggtcgagacaagataaaataggtatctttgagatataagcatgatttactataaaattattgagttattcataaaaatttctctatcaaatatcataatgcgtcgtttaaggag

SEQ ID NO: 4704 - DNA, 540 bp, Streptococcus pneumoniae
  misc_feature (1)..(540): tiling:Spneumo1:WAN024FEJ-3; Cluster includes WAN0243LG sp r1584||15903626|NP_359176.1|1564646..1566259|-|1614 bp|Con served hypothetical protein|S.pneumoniae|R6|NC_003098.1|OR F|231
tgctaagttggctggtatcatggcgagcgaacttggtgaaaatgcggctcttgcccgtcgtgctggattccttcacgatatcgggaaagccattgaccatgaggttgaaggtagccacgttgaaatcggtatggaattggcccgtaagtacaaggaacccccagttgtggtgaatacgattgctagtcaccacggagatgttgaagctgagagcgtgatagcagttatcgtcgctgcagcagatgccttgagcgcagcccgtccaggtgctcgtagtgagtctcttgaaagctacatcaagcgtctccatgatttggaagaaattgctaacggctttgaaggagtgcaaactagctttgcccttcaagcaggacgtgaaattcgtatcatggtcaatccaggaaaaatcaaggacgacaaagtcacaatcttggctcacaaagttcgtaagaaaattgaaaacaatctcgattatccaggaaatatcaaggtaaccgtgattcgcgagcttcgtgcagtagattatgctaaataactaat

SEQ ID NO: 4705 - DNA, 81 bp, Streptococcus pneumoniae
  misc_feature (1)..(81): tiling:Spneumo1:WAN024ABR; Cluster includes WAN024EI4-rc R 6.IG_951||||903620..903700|-|81 bp|Between spr0915 (mscL) (- strand) and spr0916 (mesH) (- strand)|S.pneumoniae|R6|N C_003098.1|IG-rc|110
tgctccatttatgagccttttaattgccttctataatgatttaggatacaatgaaacacgaaacattgaaaggaaaacagt

SEQ ID NO: 4706 - DNA, 82 bp, Streptococcus pneumoniae
  misc_feature (1)..(82): tiling:Spneumo1:WAN0249LH; Cluster includes WAN024E7C R6.I G_1853.2||||1713844..1713925|+|82 bp|Between spr1738 (- st rand) and spr1739 (ply) (- strand)|S.pneumoniae|R6|NC_0030 98.1|IG|110
tggaaatcgctaggcaagagataaactttcagatatccgcagagagatcatcgcctctttttgtcgcaagcattctcctctc

SEQ ID NO: 4707 - DNA, 217 bp, Streptococcus pneumoniae
  misc_feature (1)..(217): tiling:Spneumo1:WAN024API; Cluster includes WAN024EP9 R6.I G_393||||370412..370628|+|217 bp|Between spr0369 (dagA) (+ strand) and spr0370 (mip) (+ strand)|S.pneumoniae|R6|NC_0 03098.1|IG|110
tggaatcacacagctcgtgtgatttttttgcctataaataatttttatcagcctgatatataatatatattatrcaagtgattggaagtgtgataaactaatataacaacgaaaatcttatgagagaataaagctttatcttagataaacttaggaatcaggattttataagattttccaataatattagtgtcaataataagaaaagaggtatctt

SEQ ID NO: 4708 - DNA, 180 bp, Streptococcus pneumoniae
  misc_feature (1)..(180): tiling:Spneumo1:WAN0249PX; Cluster includes WAN024740 R6.I G_165.1||||153561..153740|+|180 bp|Between spr0144 (+ stra nd) and spr0145 (+ strand)|S.pneumoniae|R6|NC_003098.1|IG| 110
tggagaatttctataatatatgtttgagactggattgccagtctttttatgatggtcaaaatcaacagacttttttctcttttctgaatgtgttatartagactgaatctaaaatagtacgaaacaattgctaaaacatttatagaaattaattttactttcccaatcgatttgttcata

SEQ ID NO: 4709 - DNA, 111 bp, Streptococcus pneumoniae
  misc_feature (1)..(111): tiling:Spneumo1:WAN024A8S; Cluster includes WAN024EGK R6.I G_1063||||1005445..1005555|+|111 bp|Between spr1024 (ligA) (+ strand) and spr1025 (pulI) (+ strand)|S.pneumoniae|R6| NC_003098.1|IG|110
tggatcgtttaaaaacagagtttagagaatatgactatgtctgttaattgagacgagattgacaaaaatttattagtgaaatagaaacaaagtaaaaaggaaaaataaaaa

SEQ ID NO: 4710 - DNA, 143 bp, Streptococcus pneumoniae
  misc_feature (1)..(143): tiling:Spneumo1:WAN024AG2; Cluster includes WAN024EK5 R6.I G_771||||743947..744089|+|143 bp|Between spr0747 (+ strand ) and spr0748 (+ strand)|S.pneumoniae|R6|NC_003098.1|IG|11 0
tggatggaagtcatttcttaggaagcggccaagggccgcttttttaagagttgagacaaagtcattttgtctmagtaaagcttgctactagacaaactagcaagttttattgaaataaaataagactctgaaaggaagagcac

SEQ ID NO: 4711 - DNA, 275 bp, Streptococcus pneumoniae
  misc_feature (1)..(275): tiling:Spneumo1:WAN024AMA; Cluster includes WAN024ENN-rc R 6.IG_485||||469144..469418|-|275 bp|Between spr0461 (blpT) (- strand) and spr0462 (blpS) (+ strand)|S.pneumoniae|R6| NC_003098.1|IG-rc|110
tggattctcctcctaagaaaagaataacagaaaaggtctagcccaagcmcacccaatcctaaacagtctttgaaaactcctaaaaggattattttcyacaacatcatgatgagcttacaactattttatcataaaattcactcagcgcaattcaagacatttcaatgacaattaaagatttgaataaaaaaaaagaattaaaagtgataaactaacagtatcaaaacacagttgccagaagtaagactggcacccagattaaaggaggcattccc

SEQ ID NO: 4712 - DNA, 147 bp, Streptococcus pneumoniae
  misc_feature (1)..(147): tiling:Spneumo1:WAN024AKZ; Cluster includes WAN024EMZ R6.I G_546.2||||522980..523124|+|145 bp|Between spr0522 (+ stra nd) and H-truncation (transposase) (+ strand)|S.pneumoniae |R6|NC_003098.1|IG|110
tggctgtaccactcacttattcacctccccgtgatttgtagtagtgataggytttctcactattattataaaacaaaataaagatcacaacactttttcattctgtgttgtgccttgagtgaaacgaaaggaatgaattataaatat

SEQ ID NO: 4713 - DNA, 341 bp, Streptococcus pneumoniae
  misc_feature (1)..(341): tiling:Spneumo1:WAN0249MI; Cluster includes WAN024E84-rc R 6.IG_1723.1||||1647157..1647432|-|276 bp|Between spr1674 ( - strand) and spr1675 (IS1167) (+ strand)|S.pneumoniae|R6| NC_003098.1|IG-rc|210
tgggacagagactttaaacatactgaactcaacttccttaaacgactagataaaagaatgctcagmcaatttcstctgggcttttttgatgtgagaatgactgaatgtcacttaaaatggaaagaaagagaaaattttcatgattttctaaaattttactgtaaagacagttgactattcataaaataggtgtataatattttgtgaactacttaacaaataagaggtttcagctcatgtcgactaaggttagaaatcttgtgtataggcagttcattatctaatagagcgttgcgtccgaaagtctatccagacacggctcttwaaaaacaaaaggagaa

SEQ ID NO: 4714 - DNA, 1828 bp, Streptococcus pneumoniae
  misc_feature (1)..(1828): tiling:Spneumo1:WAN024EWX-3; Cluster includes WAN0243G3 sp r1777|rpoB|15903819|NP_359369.1|1748021..1751671|-|3651 bp |DNA-dependent RNA polymerase subunit beta|S.pneumoniae|R6 |NC_003098.1|ORF|341
tgggacgtcaccaaggggtyaaccaagartatccagctmatrkygttgactayatggacgtttcwccwaaacaggtagttgccgttgcgacagcatgtattcctttcttggaaaacgatgactccaaccgtgccctcatgggwgccaayatgcaacgtcaggctgtkccrttgatyraycctmargcaccttwcgttggtactggtatggaataccaagcagcccaygaytchggwgckgcwgtkattgcwcartatratggtaaagttacttacgcagatgctgacaaggtagaagttcgtcgtgaagatggwtcattggatgtttaccacatccaaaaattccgtcgttcaaactcaggtactgcttacaaccaacgcactctcgtaaaagttggtgaygtcgttgaaaaaggygatttcatcgctgacggaccttctatggaaaatggagaaatggcgcttggacaaaacccaatcgttgcctacatgacttgggaaggttacaacttcgaggatgccgttatcatgagcgaacgcttggtgaaggacgatgtctacacatctgttcaccttgaagaatacgaatcagaaacgcgcgatacaaagcttgggcctgaagaaatcactcgcgaaattccaaacgttggtgaagatgccctcaaagaccttgacgaaatggggattatccgtattggtgctgaggttaaagaaggtgatattcttgtaggtaaagtaacacctaagggtgagaaagatctttcagctgaagaacgtctcttgcacgctatctttggagacaagtctcgtgaagtgcgtgatacttctcttcgtgtaccacacggtgccgatggtgtcgttcgtgatgttaagatctttacacgtgtaaatggagatgagttgcaatcaggtgttaacatgttggttcgtgtttacatcgctcaaaaacgtaagattaaggtcggagataaaatggccggacgtcacggaaacaaaggggttgtctctcgtatcgttcctgtagaagacatgccttaccttccagacggaactccagtcgacatcatgttgaacccacttggggtrccatcacgtatgaatatcggtcaggttatggagcttcaccttggtatggcagctcgtactcttggtattcacatygckacaccagtctttgatggagcaagttctgaagatctttggtcaactgttaaagaagcaggtatggatagcgatgccaaracratcctttacgatggacgtacwggtgaaccrtttgataaccgtgtttctgtyggagtcatgtacatgatcaaactccaccacatggttgaygataaattgcacgcgcgttcagtcggaccwtaytcaactgttacccaacaaccactcggaggtaargctcagtttggtggacaacgtttcggtgagatggaggtttgggctcttgaagcctacggtgcgtcaaatgtccttcaagaaatcttgacttacaagtckgacgatatcaacggacgtttgaaagcctatgaagctattacaaaaggcaaaccaattccaaaaccaggtgttccagaatccttccgagttcttgtcaaagaattgcaatctcttggtcttgacatgcgtgtcctagacgaagatgaccaagaagtggaacttcgcgacttggatgaaggaatggacgaagatgtcatccacgtagatgaccttgaaaaagcccgcgaaaaagcagcccaagaggctaaagcagcctttgaagctgaagaagctgagaaagcaacaaaagcggaagcaacagaagaagctgctgaacaagaataactaat

SEQ ID NO: 4715 - DNA, 58 bp, Streptococcus pneumoniae
  misc_feature (1)..(58): tiling:Spneumo1:WAN024A4A; Cluster includes WAN024EDP-rc R 6.IG_1290||||1246569..1246626|-|58 bp|Between spr1246 (pot A) (- strand) and spr1247 (murB) (- strand)|S.pneumoniae|R 6|NC_003098.1|IG-rc|110
tggggacctgacagagccccgatcggttaatctatgaaaaagaaggaatttatgccaa

SEQ ID NO: 4716 - DNA, 72 bp, Streptococcus pneumoniae
  misc_feature (1)..(72): tiling:Spneumo1:WAN024FAA; Cluster includes WAN023I09 tRNA -Gln|tRNA-Gln|||759504..759575|+|72 bp|tRNA-Gln|S.pneumoni ae|R6|NC_003098.1|RNA|220
tggggtatagccaagcggtaaggcaagggactttgactccctcatgcgttggttcgaatccagctaccccag

SEQ ID NO: 4717 - DNA, 182 bp, Streptococcus pneumoniae
  misc_feature (1)..(182): tiling:Spneumo1:WAN024A6G; Cluster includes WAN024EFB-rc R 6.IG_1165||||1131364..1131545|-|182 bp|Between spr1127 (rn cS) (- strand) and () (- strand)|S.pneumoniae|R6|NC_003098 .1|IG-rc|110
tgtaaacatcctaaaaagcctttaatagggcttttttctttatcctgacccaaatttgccgctaaaactgagaatctctgtctaaagaattcccaaatgctttccagtcccgttttagagtgactcagggggctttttttgatataataaaaaggactattatcagttagaaagargttggt

SEQ ID NO: 4718 - DNA, 58 bp, Streptococcus pneumoniae
  misc_feature (1)..(58): tiling:Spneumo1:WAN0249ZL; Cluster includes WAN024ECA R6.I G_1387.1.2||||1328626..1328683|+|58 bp|Between spr1343 (tu fA) (- strand) and spr1344 (glpF) (- strand)|S.pneumoniae| R6|NC_003098.1|IG|110
tgtaggtcgaagaatagcccccctaatcgcttattttatagtaaaatgaaatagaaac

SEQ ID NO: 4719 - DNA, 119 bp, Streptococcus pneumoniae
  misc_feature (1)..(119): tiling:Spneumo1:WAN024BEG; Cluster includes WAN0246R3 2036 67-34-9_4||||2041..2154|+|114 bp|Glimmer 2.02 orf predicti on from Patent Sequences|S.pneumoniae||WAN02470L|ORF|001
tgtagmtgacttcgtcagtttcatctacaacctcaaagcagggctttgagcaacctgcggctagcttcctagtttgctctttgattttcattgagtataagattrtaartgaaggagtr

SEQ ID NO: 4720 - DNA, 385 bp, Streptococcus pneumoniae
  misc_feature (1)..(385): tiling:Spneumo1:WAN024A34; Cluster includes WAN024ED7-rc R 6.IG_1325.2||||1276466..1276850|-|385 bp|Between spr1281 ( - strand) and spr1282 (- strand)|S.pneumoniae|R6|NC_003098 .1|IG-rc|110
tgtagttgtttagttttaaaaaaytatgcaaagctccatatacaacacttaaacgagattaaagaatggcgaaatcccttgatgcgcaagagattagctgtccttttttattttttaagtgataaagtcggagyttaggyatcaaagcctatcaaattaaacaaagaagygatgtcttagatattttgaaaaaaattaataagcagaaaactctctattattttgttgtagagagttttttgttaataaaatttyacaaaatgacatttatatattgcattaagttagatatatgatataatrttgttaaaaagaggcgcaactttttaaamtyaataagaatcaaagagcaaaccatgaatattaatggaggaataaaaaatgt

SEQ ID NO: 4721 - DNA, 391 bp, Streptococcus pneumoniae
  misc_feature (1)..(391): tiling:Spneumo1:WAN024AOB; Cluster includes WAN024EOK R6.I G_441||||415634..416024|+|391 bp|Between spr0417 (- strand ) and spr0418 (+ strand)|S.pneumoniae|R6|NC_003098.1|IG|11 0
tgtcttcctcctataaaatttagtttatattattgtagtttatattcaaaaatgtagtttttcttaattagctcgtatctataggatgatactgaaaatcttcttgttgctttaaatcacaatcgaaaaattctgtttttcatcttagaaaagaatgtttagaaatgtaaaatgaaccttttttcttatccgaaaaccttactaaagtatataatttaggmagtcaatyctgtatgataatgtttgtactatcgtcgagtttttgcttgattgcctaacgagataaattttagaagarttttcggtgtgatttgacaagyttctgactggaaggatagttacactagtattgtttattaaaatgagcagatagagaaaatttggaatctat

SEQ ID NO: 4722 - DNA, 247 bp, Streptococcus pneumoniae
  misc_feature (1)..(247): tiling:Spneumo1:WAN024CBM; Cluster includes WAN023MBH 3131 12_247||||127787..128065|+|279 bp|EGAD orf prediction|S.pn eumoniae|R6|NC_003098.1|ORF|110
tgtgagtttatcggcgatatyttctatatctaarmtarcaagttgttgcatcgtagctaaggatttatctaaaaatactatgaaattggacgtcatattttttgaggataraaataaaagatccgcagttttaggtttacgaagagacaaaagcggagtatttaaaccagttmcyctacattttacaagcgctaagaaatatgctaaagttcgtaaaacagatgtgaaagaaatgaaatggctataa

SEQ ID NO: 4723 - DNA, 140 bp, Streptococcus pneumoniae
  misc_feature (1)..(140): tiling:Spneumo1:WAN024AAL; Cluster includes WAN024EHI-rc R 6.IG_989.1||||934439..934578|-|140 bp|Between spr0950 (+ s trand) and spr0951 (+ strand)|S.pneumoniae|R6|NC_003098.1| IG-rc|110
tgtgattattaggctattagcaaagcgtatccaatacctcaataaagtgttgtttttactgatattttaactatattgtatagtctactatttaaatctcaattaggatattttatagaatacccaaaattcaacaataa

SEQ ID NO: 4724 - DNA, 299 bp, Streptococcus pneumoniae
  misc_feature (1)..(299): tiling:Spneumo1:WAN0249T9; Cluster includes WAN024E3V R6.I G_2192.1.1||||1977394..1977689|+|296 bp|Between H (transpo sase) (- strand) and spr1986 (+ strand)|S.pneumoniae|R6|NC _003098.1|IG|120
tgtgcgtattcctttcttrttttggtgcctgagggacatcttatattggtgarccttcatctagtcawtacgtgwcarastccagttctatcagaccwctcrttttacagacacaagtgaagtaggattacttcratctgtcgttttctctttctagcgacagacctcaaacagtctctccccagactgtttgagtattcaccccttcgctccacttccattacggaagtttcctcactactatgggytcggctgacttctcatgattcgttgttactacgctttcagcrctcatgaaa

SEQ ID NO: 4725 - DNA, 57 bp, Streptococcus pneumoniae
  misc_feature (1)..(57): tiling:Spneumo1:WAN024A8P; Cluster includes WAN024EGJ-rc R 6.IG_1065.1||||1008048..1008101|-|54 bp|Between spr1026 (+ strand) and spr1027 (- strand)|S.pneumoniae|R6|NC_003098. 1|IG-rc|110
tgtgctattccaatttcagcctactataactgtcatagattgytgaaacaaagtcta

SEQ ID NO: 4726 - DNA, 63 bp, Streptococcus pneumoniae
  misc_feature (1)..(63): tiling:Spneumo1:WAN024AE4; Cluster includes WAN024EJ5 R6.I G_859.1||||826286..826348|+|63 bp|Between spr0823 (but) (+ strand) and spr0824 (- strand)|S.pneumoniae|R6|NC_003098. 1|IG|110
tgtgggagaaatgagagattcattctgctagactaacttcttattagyaactataagatacta

SEQ ID NO: 4727 - DNA, 350 bp, Streptococcus pneumoniae
  misc_feature (1)..(350): tiling:Spneumo1:WAN024A7T; Cluster includes WAN024EFY-rc R 6.IG_1102||||1061638..1061969|-|332 bp|Between spr1063 (pt sH) (- strand) and spr1064 (nrdH) (+ strand)|S.pneumoniae| R6|NC_003098.1|IG-rc|110
tgtgtaactcctcttcaaaatttaatactatcttagtatatcagaaaataaaattttgtcaatgatttgaactaaatatagtggtgttcttttgttgtttttatatataaacacaatatatagtgtttgtattgtgaaatagcaatgattatcctataaattgtttttaaagaaactatatcctgtgttttgttatctaggatagaagattttcagcaagttatctgaaaggaaattgaaggaaaatccagaaaatgcttgaaaaaaatcctagaagatggtataatactaaattgtaagggttatcacatataactcaaaaaaagaaagaacaaaaggagagtcaaact

SEQ ID NO: 4728 - DNA, 234 bp, Streptococcus pneumoniae
  misc_feature (1)..(234): tiling:Spneumo1:WAN0249R3; Cluster includes WAN024EPS R6.I G_334||||313463..313694|+|232 bp|Between A (transposase) ( - strand) and spr0314 (cps2A) (+ strand)|S.pneumoniae|R6|N C_003098.1|IG|110
tgtgtactatattakattgaaactagaatagtacacmtctgcttctaaaayattgttagaaawcgatttgactgtcctgawcratttgtymtgttcttatttcattttactatatttttgkttcgcgggaagtctactaagatacttaaagatgcagatagtraaaataaaggtgtagacattaccgtaaaaaagtgatataaycgtawratgttcaatgtataggtrttaatc

SEQ ID NO: 4729 - DNA, 112 bp, Streptococcus pneumoniae
  misc_feature (1)..(112): tiling:Spneumo1:WAN0249SX; Cluster includes WAN024E5Y R6.I G_1988||||1803012..1803123|+|112 bp|Between A (transposase ) (- strand) and spr1829 (nadC) (- strand)|S.pneumoniae|R6 |NC_003098.1|IG|110
tgtgtactatttttggttcattttactatatttgaagaggcgtttaaactatctgacataaaactcgttctagaggaaagacatcctttaaaaagttagtttattttacaac

SEQ ID NO: 4730 - DNA, 70 bp, Streptococcus pneumoniae
  misc_feature (1)..(70): tiling:Spneumo1:WAN0249QO; Cluster includes WAN024EGE R6.I G_1077.1.1||||1020976..1021044|+|69 bp|Between A (transpos ase) (- strand) and spr1039 (rexB) (+ strand)|S.pneumoniae |R6|NC_003098.1|IG|110
tgtgtactatttttggttcattttaytatagtagattgaaataagatacgaayagcttgattagggaaat

SEQ ID NO: 4731 - DNA, 89 bp, Streptococcus pneumoniae
  misc_feature (1)..(89): tiling:Spneumo1:WAN0249SY; Cluster includes WAN0247X0-rc R 6.IG_31||||20118..20206|-|89 bp|Between () (+ strand) and A (transposase) (+ strand)|S.pneumoniae|R6|NC_003098.1|IG- rc|110
tgtgtactatttttggttcatttyactataacacaaaatagattattattacataacaaaaaagaggtctaaacctcttaactcaatta

SEQ ID NO: 4732 - DNA, 129 bp, Streptococcus pneumoniae
  misc_feature (1)..(129): tiling:Spneumo1:WAN0249OT; Cluster includes WAN024E9B R6.I G_1629||||1564517..1564645|+|129 bp|Between spr1583 (gmk) (- strand) and spr1584 (- strand)|S.pneumoniae|R6|NC_00309 8.1|IG|110
tgtgtctccttttagtcaatctgtgaaataacatttctctagaataatggcaaaaagccagattatcctttacagtctttctatctagtgtaacaaaaaagcagtaatttttcaactgctctttcttat

SEQ ID NO: 4733 - DNA, 155 bp, Streptococcus pneumoniae
  misc_feature (1)..(155): tiling:Spneumo1:WAN024ALF; Cluster includes WAN024EN7 R6.I G_534||||510691..510845|+|155 bp|Between spr0510 (- strand ) and spr0511 (+ strand)|S.pneumoniae|R6|NC_003098.1|IG|11 0
tgtgtgagtacctcaatttgcaatggttgctcggagctaatgtgactttgtgactttacttgattgatattctttttcttgtcttcctyatagattaagtacaacccaagtaaaaaaagtccaatttaagattgaaatgattaaaaggcacagag

SEQ ID NO: 4734 - DNA, 115 bp, Streptococcus pneumoniae
  misc_feature (1)..(115): tiling:Spneumo1:WAN024AP2; Cluster includes WAN024EOZ-rc R 6.IG_421||||394661..394775|-|115 bp|Between spr0397 (+ str and) and spr0398 (rpmB) (+ strand)|S.pneumoniae|R6|NC_0030 98.1|IG-rc|110
tgtgttttcctcctattagatctaatatagcggatgtgctagcaccacataccgtactatgttatcacaytttcttgttttttgcaagggaattggaagattttttatttgtgtc

SEQ ID NO: 4735 - DNA, 372 bp, Streptococcus pneumoniae
  misc_feature (1)..(372): tiling:Spneumo1:WAN024AMM; Cluster includes WAN024ENT-rc R 6.IG_474||||458713..459084|-|372 bp|Between spr0450 (hsdR) (- strand) and spr0451 (+ strand)|S.pneumoniae|R6|NC_0030 98.1|IG-rc|110
tgttaaaatccttttggcataaaaaaatctttatttaaacgaaaatattatggcaaaatttacgccagtttttgaacggctgatgtagatattttatactttcaaaatgtttaaatgtgattatttatttttgaaaaatagmtcaccagcccgactgaaagtgcttatagaatgataataagtcgcctgccgaaaacagcgaaaaatagcrgtgttatgcggagataatctgacgcgatgcgaaagtatattgcatacttattttcaacaatttagcagagtatttttataagtgtgatataatagaagtataatttgttctgatagtttattttatggagaagtagatttttagaatgcggagggttcaat

SEQ ID NO: 4736 - DNA, 76 bp, Streptococcus pneumoniae
  misc_feature (1)..(76): tiling:Spneumo1:WAN024AMZ; Cluster includes WAN024ENY R6.I G_466||||448042..448117|+|76 bp|Between spr0442 (+ strand) and spr0443 (glnR) (+ strand)|S.pneumoniae|R6|NC_003098.1 |IG|110
tgttacattttataacattatcaattgacgtttgtctttttttagactataatagacagaaagaaggaaattgtaa

SEQ ID NO: 4737 - DNA, 75 bp, Streptococcus pneumoniae
  misc_feature (1)..(75): tiling:Spneumo1:WAN024A53; Cluster includes WAN024EE3 R6.I G_1255||||1207705..1207764|+|60 bp|Between spr1211 (rplL) (- strand) and spr1212 (rplJ) (- strand)|S.pneumoniae|R6|N C_003098.1|IG|110
tgttatttcctccaaataagttttaaattttataatagtttttttcgtagctaggctacgctgtgtagcttaaga

SEQ ID NO: 4738 - DNA, 136 bp, Streptococcus pneumoniae
  misc_feature (1)..(136): tiling:Spneumo1:WAN024A76; Cluster includes WAN024EFL-rc R 6.IG_1137.2||||1097989..1098124|-|136 bp|Between spr1099 ( gyrA) (- strand) and spr1100 (ldh) (+ strand)|S.pneumoniae |R6|NC_003098.1|IG-rc|110
tgttttaaacatctccttaattttattaggggattttccctagacaacttcattctatcacttttaaaaaactttgtcacgaatatgccttatagttctcgatgtaaacgttttagtggtttagaggctgaaatag

SEQ ID NO: 4739 - DNA, 62 bp, Streptococcus pneumoniae
  misc_feature (1)..(62): tiling:Spneumo1:WAN0249IP; Cluster includes WAN024E5R R6.I G_2000.1||||1815835..1815896|+|62 bp|Between spr1840 (- st rand) and spr1841 (tktA) (- strand)|S.pneumoniae|R6|NC_003 098.1|IG|110
tgttttctcctttgtcttttacataggactactatatcaaatttcagctacttttacaagat

SEQ ID NO: 4740 - DNA, 77 bp, Streptococcus pneumoniae
  misc_feature (1)..(77): tiling:Spneumo1:WAN0249JY; Cluster includes WAN024E6L-rc R 6.IG_1907||||1761514..1761590|-|77 bp|Between spr1789 (acy P) (+ strand) and spr1790 (+ strand)|S.pneumoniae|R6|NC_00 3098.1|IG-rc|110
tgtttttattccttctttaaaaattatacctttctattctactgtttttttacaaaatatacaatagttctggagac

SEQ ID NO: 4741 - DNA, 458 bp, Streptococcus pneumoniae
  misc_feature (1)..(458): tiling:Spneumo1:WAN024A8E; Cluster includes WAN024EGC R6.I G_1081||||1035853..1036310|+|458 bp|Between spr1042 (iga) (+ strand) and spr1043 (+ strand)|S.pneumoniae|R6|NC_00309 8.1|IG|110
tgtytactattaggaaataaagtttaaaaaggtgatgaagaacaaaccaagattcaagcaggaattcctactgataatgaagtaagttatgmtcttatttatcagcaggaaactcttcctgcaacaggttcatcaacttctgagcttacagctttaggcctattagctgttggtagtttagttcttttggttcataatatgacgggaacagttttttgctccctctgaaaagtcatcatttgatggcttttttctatatagggtaaaagataggctaaaagatagggtaaaaggctatcatcggacaaaataaagaaggcatgatataatataaagtagatttctatgtcataaaacaagaactgtttggacatcattcatttgaaaactctctatgttcaaacwatagtaaaataaaataggggatctaaatccttgctaygaaaggaaaaaactca

SEQ ID NO: 4742 - DNA, 122 bp, Streptococcus pneumoniae
  misc_feature (1)..(122): tiling:Spneumo1:WAN0249PW; Cluster includes WAN024EAJ-rc R 6.IG_1537||||1466782..1466903|-|122 bp|Between spr1490 (+ strand) and spr1491 (pepO) (- strand)|S.pneumoniae|R6|NC_0 03098.1|IG-rc|110
trcaaaaaatctagtcatcagaaaaaaggcatccaatcaygtgtgaaaaccttgataggatgccttttrtaatagaaagatttgctggatagtttacttaaatttcgattgtcatcatcttg

SEQ ID NO: 4743 - DNA, 205 bp, Streptococcus pneumoniae
  misc_feature (1)..(205): tiling:Spneumo1:WAN0249DS; Cluster includes WAN024E38-rc R 6.IG_2241||||2026204..2026408|-|205 bp|Between spr2034 (tr pS) (- strand) and spr2035 (+ strand)|S.pneumoniae|R6|NC_0 03098.1|IG-rc|110
trtttttctcctatatgtgtaatatatttattctactagaaaatacagaaatattcaaatttttatttgtcaattttgtgtaaattatatttacagtatcctttacacaaatctgtaaaaagcaaggctgatttattttgataaattacggttatttcattaaaaaaatgctataattgaaaggactatatcgaaggagaacaaa

SEQ ID NO: 4744 - DNA, 94 bp, Streptococcus pneumoniae
  misc_feature (1)..(94): tiling:Spneumo1:WAN024AH5; Cluster includes WAN024EKT-rc R 6.IG_707.2.2||||687484..687577|-|94 bp|Between spr0683 (+ strand) and spr0684 (+ strand)|S.pneumoniae|R6|NC_003098.1 |IG-rc|110
tsattctatataatgaattattaaaaatccttatcctttattttatcacgttccaaggattttctcaagttggaggaaggggacaayatctcta

SEQ ID NO: 4745 - DNA, 88 bp, Streptococcus pneumoniae
  misc_feature (1)..(88): tiling:Spneumo1:WAN0249EC; Cluster includes WAN0247W0-rc R 6.IG_38.1||||22405..22492|-|88 bp|Between spr0020 (+ stran d) and spr0021 (purA) (+ strand)|S.pneumoniae|R6|NC_003098 .1|IG-rc|110
ttaaaaaatgatttagaaaaattactagctatttactatcatctttccataaaagagtaaattagttcggaaatttactaaaattacc

SEQ ID NO: 4746 - DNA, 137 bp, Streptococcus pneumoniae
  misc_feature (1)..(137): tiling:Spneumo1:WAN024AK3; Cluster includes WAN024EMD-rc R 6.IG_589.1.1.1||||578810..578905|-|96 bp|Between spr0565 ( bgaA) (+ strand) and spr0566 (- strand)|S.pneumoniae|R6|NC _003098.1|IG-rc|110
ttaaaaagctagagttccacaattggaaatatctagcttttttgtggttgagaactattttgtyycagrctctttatcttctatttaggacaagagtttttctttggtctttaatgataaagaaggtatcaaaattt

SEQ ID NO: 4747 - DNA, 290 bp, Streptococcus pneumoniae
  misc_feature (1)..(290): tiling:Spneumo1:WAN0249XX; Cluster includes WAN024750 R6.I G_161||||150363..150652|+|290 bp|Between spr0140 (mutR) (+ strand) and spr0141 (+ strand)|S.pneumoniae|R6|NC_003098. 1|IG|110
ttaaaaatggaatgacaataacccactccgaaataagtaggagtatcagttggatttttcttttcttcatctattatmtycctcctyrttagtartaactttattataccagrgaartaatcaaatyyaycaaaatcgcaaatmwgaaatttctataagaaaaaatatcaaatatgcgattttytaaaataagccaatkttcgtgttatactgtacttgtaaagcacttgaagcaaatcctaggtcgcagaagtggtttacaaatgaagataattgaaggagtgtaaaag

SEQ ID NO: 4748 - DNA, 180 bp, Streptococcus pneumoniae
  misc_feature (1)..(180): tiling:Spneumo1:WAN0249MV; Cluster includes WAN024E89 R6.I G_1714||||1638437..1638616|+|180 bp|Between spr1665 (dpnC) (- strand) and spr1666 (- strand)|S.pneumoniae|R6|NC_0030 98.1|IG|110
ttaaaaattcctcactaatatgagaactcactcgatataagcaattaaaatctactataactagtataccacatatatgtacctattacatttgtatttcatcactctcttttatatttccttctaacatatctcataaattaaaaatgagtgagataaatttatcccactcacctttct

SEQ ID NO: 4749 - DNA, 92 bp, Streptococcus pneumoniae
  misc_feature (1)..(92): tiling:Spneumo1:WAN024A66; Cluster includes WAN024EF6-rc R 6.IG_1180||||1141150..1141241|-|92 bp|Between spr1139 (cut C) (- strand) and spr1140 (- strand)|S.pneumoniae|R6|NC_00 3098.1|IG-rc|110
ttaaaacagtagttatttgccttgataaaattgaaagcatattcataacaatatgatataataaawttgaagtaatattcaaggagaatcaa

SEQ ID NO: 4750 - DNA, 219 bp, Streptococcus pneumoniae
  misc_feature (1)..(219): tiling:Spneumo1:WAN0249QX; Cluster includes WAN024EQV-rc R 6.IG_258.1||||231088..231306|-|219 bp|Between spr0237 (+ s trand) and spr0238 (ruvB) (+ strand)|S.pneumoniae|R6|NC_00 3098.1|IG-rc|110
ttaaaactagcttaacttttctaaaattttactattttgcaaaaaatttctatcaccagcacctcaccacgcaaaaaagccacctgattgggtggcttcattaggagattgtgatgaaaaaagtttaggattttattaaataaagttaggaggtctttatttaatgactatataatactagaccatccttaaattttgcttaagaaaaaacaagttttg

SEQ ID NO: 4751 - DNA, 202 bp, Streptococcus pneumoniae
  misc_feature (1)..(202): tiling:Spneumo1:WAN024AAT; Cluster includes WAN024EHM-rc R 6.IG_982.1.2||||928619..928820|-|202 bp|Between spr0943 (+ strand) and spr0944 (+ strand)|S.pneumoniae|R6|NC_003098. 1|IG-rc|110
ttaaaagtggagaggatttttwacacagtaactttaaatctttggtattaaaaaattttcacaatatttatagaaataaaatctgtctcaaatcagttatcaaatctagtataaattatgagcggctactctaatactttccctctaaacaagaaaaagacttacactcaagggttttcttmccccccttcgttataacgtt

SEQ ID NO: 4752 - DNA, 187 bp, Streptococcus pneumoniae
  misc_feature (1)..(187): tiling:Spneumo1:WAN024A7O; Cluster includes WAN024EFW-rc R 6.IG_1104||||1064447..1064633|-|187 bp|Between spr1065 (nr dE) (+ strand) and spr1066 (nrdF) (+ strand)|S.pneumoniae| R6|NC_003098.1|IG-rc|110
ttaaaatctctttctgtgtttagtattgcgaactcacaattatttctactttaccataattctataggagtatcgcacaaaaagtcggaagcccgacttttaaaatgttacataaattatgttatgacatagtagatttgattttatcagtgctgcttagggaaaaatartgtttctatgctagaaa

SEQ ID NO: 4753 - DNA, 119 bp, Streptococcus pneumoniae
  misc_feature (1)..(119): tiling:Spneumo1:WAN024AB5; Cluster includes WAN024EHR-rc R 6.IG_977.1||||924063..924181|-|119 bp|Between spr0938 (+ s trand) and spr0939 (+ strand)|S.pneumoniae|R6|NC_003098.1| IG-rc|110
ttaaattctgtgctgtatttgccattaaaaaactgacctcctttagttagttttttggcctaacttttgagggtcagttcaaaakttgcgacttttaaatgaattccaatattcaatta

SEQ ID NO: 4754 - DNA, 266 bp, Streptococcus pneumoniae
  misc_feature (1)..(266): tiling:Spneumo1:WAN0249G9; Cluster includes WAN024E4J R6.I G_2152.1||||1927856..1928121|+|266 bp|Between spr1945 (pcp A) (- strand) and spr1946 (+ strand)|S.pneumoniae|R6|NC_00 3098.1|IG|110
ttaaatttccttacatatttattttctaatagatataaaattataactttgctagccgttgttataaaaagttttattcaatcattatctagtagaatagagtagtacattttataaattgtcatctctccataaacacagtatatcatttttaaattttaagtcaagraaaattaacccactttaatttcttttttaacccgtgttaaaaaagaaattaaagtgggttaaaaaagaaattaamgtgggttaaaaaagaaattaac

SEQ ID NO: 4755 - DNA, 60 bp, Streptococcus pneumoniae
  misc_feature (1)..(60): tiling:Spneumo1:WAN024AFD; Cluster includes WAN024EJT-rc R 6.IG_806.1||||771750..771809|-|60 bp|Between spr0776 (dacA ) (- strand) and spr0777 (+ strand)|S.pneumoniae|R6|NC_003 098.1|IG-rc|110
ttaacagatgaattattaaagcaagaatattttttttctttatgatagaataagactact

SEQ ID NO: 4756 - DNA, 159 bp, Streptococcus pneumoniae
  misc_feature (1)..(159): tiling:Spneumo1:WAN024A3L; Cluster includes WAN024EDF-rc R 6.IG_1317.2||||1268615..1268769|-|155 bp|Between spr1273 ( queA) (+ strand) and spr1274 (- strand)|S.pneumoniae|R6|NC _003098.1|IG-rc|110
ttaacagattcctccctgcgacaaaattgataatagtatgtctgaatatataattatatataaaaagctatagataaggtcatcttatagcgactataaaaaagtgaacaagcctagtcttctgtacattagaattcagmtttgttcactttttgttta

SEQ ID NO: 4757 - DNA, 231 bp, Streptococcus pneumoniae
  misc_feature (1)..(231): tiling:Spneumo1:WAN0249PS; Cluster includes WAN024E6B-rc R 6.IG_1936.2.1||||1788652..1788882|-|231 bp|Between spr1818 (- strand) and () (- strand)|S.pneumoniae|R6|NC_003098.1| IG-rc|110
ttaacagattttataactcttataaatytttaagaaagmaatagaagggttttgttcaacgtataatwtagagaattgaaataagatatgaacagctctatcaggaaagttaaattaatttatagaaatattttagtatttaaggcctactgttatagattcaatacactatatatgtgtttgtctgataaaaatttctactctttttgattttaaataagtattagttta

SEQ ID NO: 4758 - DNA, 376 bp, Streptococcus pneumoniae
  misc_feature (1)..(376): tiling:Spneumo1:WAN0249K8; Cluster includes WAN024E6P-rc R 6.IG_1892||||1751672..1752047|-|376 bp|Between spr1777 (rp oB) (- strand) and () (+ strand)|S.pneumoniae|R6|NC_003098 .1|IG-rc|110
ttaacgtttattattataccttgaaaatgattttcagtcaatagttttttcagttttttgtaccatagcgtgattcgaatgtgatgccaagttttctatgggaaaaaatttaccaaaaacctactgaaaccccttgaaaaatctagctaaatagggtataatatgggtaatcatttgtcgtaggttttgtctgaaatattgtccagacaaggctcacagcagttaaatcttctgaaaaagtcagatttagctgctctttttgtgctttttttcaagattwtgagcatttgtaacagaggcttaaagattctgaaaattcgtcaagaggacacggtgataaggggtttacaaccatatgacgattagaaaagcctga

SEQ ID NO: 4759 - DNA, 112 bp, Streptococcus pneumoniae
  misc_feature (1)..(112): tiling:Spneumo1:WAN0249F6; Cluster includes WAN024E3W-rc R 6.IG_2190.2.1||||1975940..1976051|-|112 bp|Between spr1983 (- strand) and H (transposase) (- strand)|S.pneumoniae|R6 |NC_003098.1|IG-rc|110
ttaactcccctgaaatttattttaattatgcaaatttcacgtatttttgatgctgagacgacgatcctgggaacttttcagatatttttttgactatctaaatctatcatta

SEQ ID NO: 4760 - DNA, 143 bp, Streptococcus pneumoniae
  misc_feature (1)..(143): tiling:Spneumo1:WAN0249FM; Cluster includes WAN024E49-rc R 6.IG_2168.2.1||||1948921..1949063|-|143 bp|Between spr1961 (- strand) and spr1962 (- strand)|S.pneumoniae|R6|NC_0030 98.1|IG-rc|110
ttaagaaaaacaaaaaacatcgatatacatttaactaaaaattattgtatgttatctcccttaattaggaatgataagggaataactagaaagatttgtgaatacaaactatttctgatatacaaaatatacagtaataatga

SEQ ID NO: 4761 - DNA, 417 bp, Streptococcus pneumoniae
  misc_feature (1)..(417): tiling:Spneumo1:WAN0249IW; Cluster includes WAN024E5V-rc R 6.IG_1991.1||||1806104..1806520|-|417 bp|Between spr1831 ( - strand) and spr1832 (- strand)|S.pneumoniae|R6|NC_003098 .1|IG-rc|110
ttaagaaaaatttaaaacagggcaagaaggtcccatctatgcttaaatggtttctcttttctaaataagatggctttaaaagagtgatcgttktatccatcatgttgaaaaatatcttcgtatagcttatagagtaggtactgaaattgttcacctgatctacttcttatagttatttagttttaaatagtgtttcaaayattcttacactgacgagaagtttttgagtcttttcttgtaacacatatagtatactgwggttagaatagtagactgtgacttctaacaaattgctagaaatgaatttcaatctcccaatttatttgttcawatmttsttttaatatattraataaattctraatcataatcatttaaaaaaattttatttttttatttttcattacgaataatatag

SEQ ID NO: 4762 - DNA, 64 bp, Streptococcus pneumoniae
  misc_feature (1)..(64): tiling:Spneumo1:WAN0249ZA; Cluster includes WAN024EC7-rc R 6.IG_1392.1||||1332449..1332512|-|64 bp|Between spr1348 (- strand) and B (transposase) (- strand)|S.pneumoniae|R6|NC _003098.1|IG-rc|110
ttaagagaagacggtatacaatcaaaccattcaccgtgtagccgaaatcgttcagaatgaagac

SEQ ID NO: 4763 - DNA, 88 bp, Streptococcus pneumoniae
  misc_feature (1)..(88): tiling:Spneumo1:WAN024AAN; Cluster includes WAN024EHJ-rc R 6.IG_987||||933709..933793|-|85 bp|Between spr0948 (nplT) (+ strand) and spr0949 (+ strand)|S.pneumoniae|R6|NC_00309 8.1|IG-rc|110
ttaagttctcctttacaagtttagtaactagccttattatactatataaggtatgaaatgtaccataatcttcatcaactagttttta

SEQ ID NO: 4764 - DNA, 230 bp, Streptococcus pneumoniae
  misc_feature (1)..(230): tiling:Spneumo1:WAN0249SD; Cluster includes WAN024EAI R6.I G_1538.2||||1468857..1469086|+|230 bp|Between spr1491 (pep O) (- strand) and spr1492 (psaB) (+ strand)|S.pneumoniae|R 6|NC_003098.1|IG|110
ttaataaccatttaactattattttttagctattataaaaaatctttccatgataaaacgcataattccaagttttttacacttgatactatgcgttttataatttagaaatttatcctgaaagttatctttagaatctatttttcagttattattttaattttttcaaaaattaacttgacttaattttttttttaatgtatattaagagacaggaggaatacaagttt

SEQ ID NO: 4765 - DNA, 209 bp, Streptococcus pneumoniae
  misc_feature (1)..(209): tiling:Spneumo1:WAN0249RS; Cluster includes WAN024ELJ R6.I G_661||||644843..645050|+|208 bp|Between spr0637 (thiE) (+ strand) and spr0638 (thiD) (- strand)|S.pneumoniae|R6|NC_ 003098.1|IG|110
ttaatactcaatgaaaatcaaagagtaaactagaaagctagtcgcaggttgctcaaagtactgccttgaggttttagataagactgacgaagtcagctcaaaacagtgttttgaggctgcagatggaagctgacgtagtttgaagagattttcgaagagtataaaaactctctaattcccttaaagtgggaactagagagtttttttyc

SEQ ID NO: 4766 - DNA, 241 bp, Streptococcus pneumoniae
  misc_feature (1)..(241): tiling:Spneumo1:WAN0249RN; Cluster includes WAN024EMC R6.I G_597||||584385..584547|+|163 bp|Between spr0573 (nha2) (+ strand) and spr0574 (+ strand)|S.pneumoniae|R6|NC_003098. 1|IG|110
ttaatactcttcgaaaatctcttcaaaccacgtcagcgtcgccttaccgtatgtatgtgactgacttcgtcagtcytatcyacaacctcaaaacagtgttttgagcarcytgcggytagcytyctagtttgctctttgattttcattgagtataaatyatwmaatgtaaatgaaaaaaattctcaactaaagataaatcgaaattagtagatcgtataaagtgaaaaggaaggatttcaat

SEQ ID NO: 4767 - DNA, 116 bp, Streptococcus pneumoniae
  misc_feature (1)..(116): tiling:Spneumo1:WAN0249IV; Cluster includes WAN024E5U R6.I G_1992||||1807292..1807406|+|115 bp|Between spr1832 (- str and) and spr1833 (bgl2) (+ strand)|S.pneumoniae|R6|NC_0030 98.1|IG|110
ttaatctggttctctctataatattctaatagtagtataacaaagttcaagaaatgaggcaaacacaagatatgtatcaacaatttttaaaaatgtctagacaaattttaaaatta

SEQ ID NO: 4768 - DNA, 84 bp, Streptococcus pneumoniae
  misc_feature (1)..(84): tiling:Spneumo1:WAN0249KS; Cluster includes WAN024E6Y-rc R 6.IG_1877.2.2||||1730620..1730703|-|84 bp|Between spr1762 (- strand) and spr1763 (plcR) (- strand)|S.pneumoniae|R6|N C_003098.1|IG-rc|110
ttaatcttgacattatagtttttctgaaacgttaaataacctgtaaggctgatagttagattaatactatcagccttataatta

SEQ ID NO: 4769 - DNA, 131 bp, Streptococcus pneumoniae
  misc_feature (1)..(131): tiling:Spneumo1:WAN0249NE; Cluster includes WAN024E8I-rc R 6.IG_1695.1||||1618842..1618972|-|131 bp|Between spr1646 ( - strand) and spr1647 (galE) (- strand)|S.pneumoniae|R6|NC _003098.1|IG-rc|110
ttaatgaaatgcatatttaatgaaagataaattwaaaaaaatgtttgmmagygcttgacaaaggaaacggtttcattgtataatgtaaacatrrtgacaccgatgtcaaatataaaaaagaaggtctttat

SEQ ID NO: 4770 - DNA, 126 bp, Streptococcus pneumoniae
  misc_feature (1)..(126): tiling:Spneumo1:WAN0249H4; Cluster includes WAN024E4W-rc R 6.IG_2120.1.2||||1893489..1893614|-|126 bp|Between spr1913 (rrmA) (+ strand) and spr1914 (- strand)|S.pneumoniae|R6| NC_003098.1|IG-rc|110
ttaatgtgtatggaaactataacaaaacgcataagattaaggtttgtgtacctgttcttatacgtttttgtmatattgaagattttcggtaagttttmtacytttgsgaagtctagtttatactca

SEQ ID NO: 4771 - DNA, 155 bp, Streptococcus pneumoniae
  misc_feature (1)..(155): tiling:Spneumo1:WAN024A6W; Cluster includes WAN024EE5-rc R 6.IG_1249.1||||1204662..1204816|-|155 bp|Between spr1205 ( - strand) and spr1206 (- strand)|S.pneumoniae|R6|NC_003098 .1|IG-rc|110
ttaattcatttaaattgtaaactttagagattctctggagttatggatgtcgttccaatatgtgcacgttggaatgttagtgcttatatggggagaatccaaaggattctccctttttatttaaataagtctgtctagctatagatatattaagt

SEQ ID NO: 4772 - DNA, 146 bp, Streptococcus pneumoniae
  misc_feature (1)..(146): tiling:Spneumo1:WAN024AAC; Cluster includes WAN024EHA R6.I G_1011.2.2||||956230..956375|+|146 bp|Between spr0972 (+ s trand) and spr0973 (ftsW) (+ strand)|S.pneumoniae|R6|NC_00 3098.1|IG|110
ttaattctgtaaaaacagtaaaattcgaaggattgtaaggtaagagtttttttctttctgaaaaaatggtataatagcaatcaaaactagaaaataaaacggaatttggaacagatttgtctgtatcctagtagagtggtgatact

SEQ ID NO: 4773 - DNA, 136 bp, Streptococcus pneumoniae
  misc_feature (1)..(136): tiling:Spneumo1:WAN0249NO; Cluster includes WAN024E8N-rc R 6.IG_1679.1||||1604241..1604376|-|136 bp|Between spr1630 ( - strand) and spr1631 (trpA) (- strand)|S.pneumoniae|R6|NC _003098.1|IG-rc|110
ttaattgattttactatagaagatataattttctaaattacyctgacacagaactttaagaaaaagataattattgtagtaatttctttaagaaaatgrtataattcattaaaaagtatttggaggaggaagaatt

SEQ ID NO: 4774 - DNA, 72 bp, Streptococcus pneumoniae
  misc_feature (1)..(72): tiling:Spneumo1:WAN024A4N; Cluster includes WAN024EDV R6.I G_1280.2||||1234730..1234800|+|71 bp|Between spr1236 (- st rand) and spr1237 (- strand)|S.pneumoniae|R6|NC_003098.1|I G|110
ttacaactacattctaacaaactataaaagcgtttgtcgaattgaatttatcaagcaagcgaccaaccagtc

SEQ ID NO: 4775 - DNA, 76 bp, Streptococcus pneumoniae
  misc_feature (1)..(76): tiling:Spneumo1:WAN024AMY; Cluster includes WAN024ENY-rc R 6.IG_466||||448042..448117|-|76 bp|Between spr0442 (+ stra nd) and spr0443 (glnR) (+ strand)|S.pneumoniae|R6|NC_00309 8.1|IG-rc|110
ttacaatttccttctttctgtctattatagtctaaaaaaagacaaacgtcaattgataatgttataaaatgtaaca

SEQ ID NO: 4776 - DNA, 110 bp, Streptococcus pneumoniae
  misc_feature (1)..(110): tiling:Spneumo1:WAN024AI9; Cluster includes WAN024ELG-rc R 6.IG_666||||651221..651330|-|110 bp|Between spr0642 (spxB) (+ strand) and spr0643 (+ strand)|S.pneumoniae|R6|NC_0030 98.1|IG-rc|110
ttactctcctccataaaaagaccggattgctccgatcttttaaagttctgctctatgaaaatcaaagaataaagtctacaagtttcatatttgattttcggcgagaggaa

SEQ ID NO: 4777 - DNA, 99 bp, Streptococcus pneumoniae
  misc_feature (1)..(99): tiling:Spneumo1:WAN024ABN; Cluster includes WAN024EI2-rc R 6.IG_953||||904765..904863|-|99 bp|Between spr0917 (ccl) ( + strand) and () (+ strand)|S.pneumoniae|R6|NC_003098.1|IG -rc|110
ttacttaagaagtatactatattcagaaaaacttgtcaagtttccttagaaattttccataggaaaaagccaggtaaraactacctagcttatcttctt

SEQ ID NO: 4778 - DNA, 115 bp, Streptococcus pneumoniae
  misc_feature (1)..(115): tiling:Spneumo1:WAN0249KK; Cluster includes WAN024E6V-rc R 6.IG_1881||||1732452..1732566|-|115 bp|Between spr1766 (+ strand) and spr1767 (cylM) (+ strand)|S.pneumoniae|R6|NC_0 03098.1|IG-rc|110
ttacttacctcaaacctatacgacttactattgtttwaaaaaaaaacctctctcaaaattattagttacgagagaggaaaataaagagcaacttttatttttaaaattgaatatt

SEQ ID NO: 4779 - DNA, 107 bp, Streptococcus pneumoniae
  misc_feature (1)..(107): tiling:Spneumo1:WAN0249LZ; Cluster includes WAN024E7Q R6.I G_1762||||1688032..1688138|+|107 bp|Between spr1713 (aga) (- strand) and spr1714 (msmR) (+ strand)|S.pneumoniae|R6|N C_003098.1|IG|110
ttacttcacctcatcactttattgattatattttatcacctgaaatcgctttccaaaatagaaaaatgtctcaagaatatggtaaaatgttaggtaggaggtagcac

SEQ ID NO: 4780 - DNA, 53 bp, Streptococcus pneumoniae
  misc_feature (1)..(53): tiling:Spneumo1:WAN0249LF; Cluster includes WAN024E7B R6.I G_1858.2.1||||1716852..1716904|+|53 bp|Between spr1743 (- strand) and spr1744 (+ strand)|S.pneumoniae|R6|NC_003098.1 |IG|110
ttactttgataaycatagtataacatatttgaatatcaaagtatagtaaaaac

SEQ ID NO: 4781 - DNA, 113 bp, Streptococcus pneumoniae
  misc_feature (1)..(113): tiling:Spneumo1:WAN0249OA; Cluster includes WAN024E8Z-rc R 6.IG_1659||||1588041..1588149|-|109 bp|Between spr1613 (- strand) and spr1614 (- strand)|S.pneumoniae|R6|NC_003098.1 |IG-rc|110
ttagaaaaataggtatgaataaattggcttcccttagaaccacatctaggggcttttatgtataatagaataataagtatcactcctttacaatacgtgtaacacgtgttata

SEQ ID NO: 4782 - DNA, 114 bp, Streptococcus pneumoniae
  misc_feature (1)..(114): tiling:Spneumo1:WAN024AK7; Cluster includes WAN024EMF R6.I G_585.1.2.1||||569054..569167|+|114 bp|Between spr0561 (pr tA) (+ strand) and spr0562 (+ strand)|S.pneumoniae|R6|NC_0 03098.1|IG|110
ttagaaaatagagtctatcaaaatttaaaggctaatagaggtgatgagacaatttcraggaattaagtagcgtttggttgcttaattcctttttatttggaaggaagtttttcg

SEQ ID NO: 4783 - DNA, 65 bp, Streptococcus pneumoniae
  misc_feature (1)..(65): tiling:Spneumo1:WAN0249N6; Cluster includes WAN024E8E-rc R 6.IG_1701.2.2||||1626073..1626137|-|65 bp|Between spr1652 (- strand) and spr1653 (+ strand)|S.pneumoniae|R6|NC_00309 8.1|IG-rc|110
ttagaaaatctagtgtcttgttctagttttcaattcaccctattttttgaaagacgtgagtttcc

SEQ ID NO: 4784 - DNA, 76 bp, Streptococcus pneumoniae
  misc_feature (1)..(76): tiling:Spneumo1:WAN024AOV; Cluster includes WAN024EOW R6.I G_427||||400615..400690|+|76 bp|Between spr0403 (ilvC) (+ strand) and spr0404 (+ strand)|S.pneumoniae|R6|NC_003098.1 |IG|110
ttagaaatatatagcgctggagatgattttatgaaaaagattatgagaaaaattgcatcgttattattggttctag

SEQ ID NO: 4785 - DNA, 104 bp, Streptococcus pneumoniae
  misc_feature (1)..(104): tiling:Spneumo1:WAN0249ZD; Cluster includes WAN024EC8 R6.I G_1390||||1331854..1331957|+|104 bp|Between spr1346 (- str and) and spr1347 (- strand)|S.pneumoniae|R6|NC_003098.1|IG |110
ttagagttgctgctatatctgactcttgaataccaacttccttactaccatttctagcggcagtatatgtgtatttatctgtttctacttctagctgattatcc

SEQ ID NO: 4786 - DNA, 688 bp, Streptococcus pneumoniae
  misc_feature (1)..(688): tiling:Spneumo1:WAN0249TQ; Cluster includes WAN024E7D-rc R 6.IG_1853.1||||1713046..1713733|-|688 bp|Between spr1738 ( - strand) and spr1739 (ply) (- strand)|S.pneumoniae|R6|NC_ 003098.1|IG-rc|120
ttagatgattggaaattcaagaaygacacgtatcggaaatattttgctgtttatatctaatacccatttatggaaaaaatgaaattaaatatgaacaaatcaattgctagcaatgktttagaagtgccagtgtactagtctaacttctccatcttaggaacacgtaaattatactcttagaaaatctcttcaaaccatgtcagccctatccgcaacctcaaaacagtgttttgagcaacctgcggctagctttctagtttgctctttgatttttattgagtattagaggtttgcttagaaactcttctattgatttcttagaatacaatagcgcctataagaactgttgaatttcaaagtatttacttgaactatgatatgtctggagtagactgtcaacaaaaggtgcagtatgattgtttttgtcgcttatatctacaaacttcaaacagtaatttgagctgactttgtcaaacttggctgaaactttctatttgcagataatggtctagtttgttttttgaatgtggatgagtgyctgttgataaagatagaaaggcaagaccatcttagcaggtaaagtgctatcctagcttgatttgctaataaaatccatttcctctagtgaaaatcaaaaaaacttgtgttataataagaaagattaaaatgtgaaaaaaggagattccta

SEQ ID NO: 4787 - DNA, 187 bp, Streptococcus pneumoniae
  misc_feature (1)..(187): tiling:Spneumo1:WAN0249RF; Cluster includes WAN024ELM-rc R 6.IG_651.1.2||||636284..636465|-|182 bp|Between spr0627 (l ctO) (+ strand) and spr0628 (+ strand)|S.pneumoniae|R6|NC_ 003098.1|IG-rc|110
ttagaycgttcatttcrccatacgaaaaaackkttcacatttcccttcgccagtcttaactgtatcaggttcaatgggtatyatctcagcytaaagcaccccaaatgtctctattatttaaytactgaaccagtatagcaaaaaatgaaagccctagcaagatatttgaccgaaaaatatctttata

SEQ ID NO: 4788 - DNA, 402 bp, Streptococcus pneumoniae
  misc_feature (1)..(402): tiling:Spneumo1:WAN024F66; Cluster includes WAN023LY5 3142 56_952a||||495980..496261|-|282 bp|EGAD orf prediction|S.p neumoniae|R6|NC_003098.1|ORF|211
ttagcttttcttcaacccactacaattgacaaagagccaaactttgatgatatacgttttcttgtgagaatatttacttcatttttkcctaaaattcaatgtttactcagtattwggattatgaaaratcgaggtctaaatctagatacattttttctgaagacaaatcattttgaccaccgagcaagagattttcaaaaaaagctgttaaaaactcagracgtcgctgtaaaatctttgcattatctaayacyaaggcatcacgaaaatayttggaatgttgctgaaatggtrtattatcaatatcaaaaccaaactcacgaagatactgaatcaaaaakaccgttacygtccgagtgtttccttcgcgaaatggatgaatctgccagattcctgaaataa

SEQ ID NO: 4789 - DNA, 57 bp, Streptococcus pneumoniae
  misc_feature (1)..(57): tiling:Spneumo1:WAN0249ND; Cluster includes WAN024E8H R6.I G_1698||||1622174..1622230|+|57 bp|Between spr1649 (- stra nd) and spr1650 (- strand)|S.pneumoniae|R6|NC_003098.1|IG| 110
ttaggtacctcttcttaacaaagttcaatagtaacaattaatattttaaacaatata

SEQ ID NO: 4790 - DNA, 238 bp, Streptococcus pneumoniae
  misc_feature (1)..(238): tiling:Spneumo1:WAN024AMG; Cluster includes WAN024ENQ-rc R 6.IG_479.2.1||||464240..464477|-|238 bp|Between spr0455 (d naK) (+ strand) and spr0456 (dnaJ) (+ strand)|S.pneumoniae |R6|NC_003098.1|IG-rc|110
ttagrtcgggktcaattcctttcttttatatttagtaagaaattctgaaacccgtgttcagttacgaacactctttgttcctttctattgatgagacaaaacccaaacaaatgagattccgtccctttttatcgaaaaacagaggctgggttgcaacctctgcaaataagtaaattaactttattttgattttaaatatcctataagtacagaaatatttatatatttttgtctcttc

SEQ ID NO: 4791 - DNA, 90 bp, Streptococcus pneumoniae
  misc_feature (1)..(90): tiling:Spneumo1:WAN024AIR; Cluster includes WAN024ELR-rc R 6.IG_643||||629329..629407|-|79 bp|Between spr0619 (+ stra nd) and spr0620 (- strand)|S.pneumoniae|R6|NC_003098.1|IG- rc|110
ttagtcattaactcttaaaaggractggattttaagctccaatccctttttaagattttacctataacatcctgagtctatctaagatgt

SEQ ID NO: 4792 - DNA, 105 bp, Streptococcus pneumoniae
  misc_feature (1)..(105): tiling:Spneumo1:WAN0249KU; Cluster includes WAN024E6Z-rc R 6.IG_1877.1.1||||1730322..1730426|-|105 bp|Between spr1762 (- strand) and spr1763 (plcR) (- strand)|S.pneumoniae|R6| NC_003098.1|IG-rc|110
ttagtctctagtgtttgtttagcgtcttaaagagacatttgagaagattagaaacagttctctcttttctcctagtataatgattggtaggaagggagagagaag

SEQ ID NO: 4793 - DNA, 504 bp, Streptococcus pneumoniae
  misc_feature (1)..(504): tiling:Spneumo1:WAN0249QH; Cluster includes WAN024E42-rc R 6.IG_2181.2.1.2||||1965244..1965747|-|504 bp|Between spr19 74 (fcsR) (+ strand) and spr1975 (adcA) (- strand)|S.pneum oniae|R6|NC_003098.1|IG-rc|110
ttagtttcacctcctctcacgaaccswwaggaacgtaatcggtaaccgatgacaaaaatagtataycacactamattyagrtcatcaacctyacttaatrcttgaactattgtagattatatgctaraatgtagttaattgataaggttcattagaacaccaaagcccctaactatggccgtagttaagggcttttttgacgtatcttagcgatttaacgggtgtttataggctagtcastcggtctactccttactatctagccatctgcagacgaaatacaagataattccagctataacatccgctataatagtaagagcgagctctatgataaggctcattagtttcacctcctctcacgaacccataggaacgtaatcggtaaccgatgacaaaaatagtataccacaatacatttagatcatcaaggtcacttaattcttgaaatatmrgrtctargmgamaaagtctttaaaatcaraaaaacgcataatatcaggt

SEQ ID NO: 4794 - DNA, 106 bp, Streptococcus pneumoniae
  misc_feature (1)..(106): tiling:Spneumo1:WAN0249DA; Cluster includes WAN024ER5-rc R 6.IG_240||||213159..213260|-|102 bp|Between spr0219 (gpmB) (+ strand) and spr0220 (- strand)|S.pneumoniae|R6|NC_0030 98.1|IG-rc|110
ttagttttccacatcaaaaacagccgaaaggagtrccctcggctgttttttcttatcttgatattcttatcaaatccctagctcatggcaagcaagtctagactga

SEQ ID NO: 4795 - DNA, 143 bp, Streptococcus pneumoniae
  misc_feature (1)..(143): tiling:Spneumo1:WAN0249X8; Cluster includes WAN024EAX R6.I G_1512.2||||1448098..1448240|+|143 bp|Between spr1465 (+ s trand) and spr1466 (cadD) (- strand)|S.pneumoniae|R6|NC_00 3098.1|IG|110
ttataagaatctcctaatcaaatcaaaagccactctacaatagagtaactttaagattgtccatttatactcaatgaaaaagccctctgaaaatcagagagctgatttgagctcgggctaaaatcctagtgaaacaaaaaaat

SEQ ID NO: 4796 - DNA, 99 bp, Streptococcus pneumoniae
  misc_feature (1)..(99): tiling:Spneumo1:WAN0249L8; Cluster includes WAN02471S-rc R 6.IG_191.1||||179084..179182|-|99 bp|Between spr0170 (corA ) (- strand) and spr0171 (uvrA) (+ strand)|S.pneumoniae|R6 |NC_003098.1|IG-rc|110
ttataccaaaaaaagtgagattctattacccaaaaggccgattttgtagtataatagtacagtgtgaaaaaatctgaaaaatgagaaaggataagggat

SEQ ID NO: 4797 - DNA, 112 bp, Streptococcus pneumoniae
  misc_feature (1)..(112): tiling:Spneumo1:WAN024ANK; Cluster includes WAN024EO9-rc R 6.IG_460||||435919..436030|-|112 bp|Between spr0436 (+ str and) and spr0437 (rpoE) (+ strand)|S.pneumoniae|R6|NC_0030 98.1|IG-rc|110
ttatactactatcgccagagcgaacagactctgacctcattttatcatttactctttattttacgataattttgcggaatagtcaaaggttaagggggagaaagtggcagga

SEQ ID NO: 4798 - DNA, 58 bp, Streptococcus pneumoniae
  misc_feature (1)..(58): tiling:Spneumo1:WAN024AEB; Cluster includes WAN0247I1-rc R 6.IG_111||||97961..98017|-|57 bp|Between spr0090 (- strand ) and spr0091 (+ strand)|S.pneumoniae|R6|NC_003098.1|IG-rc |110
ttatagtgaaaaagccttaaaataagctgttattaaaatcagctagaagaggtattat

SEQ ID NO: 4799 - DNA, 228 bp, Streptococcus pneumoniae
  misc_feature (1)..(228): tiling:Spneumo1:WAN0249L2; Cluster includes WAN024E76 R6.I G_1868.1||||1721711..1721938|+|228 bp|Between spr1753 (- s trand) and spr1754 (lytA) (- strand)|S.pneumoniae|R6|NC_00 3098.1|IG|110
ttatcatattcatacacctctcataaaaagaatagcacactyttgtcataattttttaaataaaaaaattatgacaaaacaaggaagcaatttattgatgctgcttaaaaatctaaaattgatgagttcctatcaaaaatcgtatcttcaacctcaaaacagtacttaaagctatccgactcggtttacattgtcaaatttagattttatttgagcataactttctag

SEQ ID NO: 4800 - DNA, 189 bp, Streptococcus pneumoniae
  misc_feature (1)..(189): tiling:Spneumo1:WAN0249XK; Cluster includes WAN024EB6-rc R 6.IG_1488||||1426788..1426976|-|189 bp|Between spr1441 (ox lT) (- strand) and spr1442 (merA) (+ strand)|S.pneumoniae| R6|NC_003098.1|IG-rc|110
ttatcttcctcctattcgaattacattctagcacaagaaaaaaacttttgcacaattctgctacgaaaaagacaaaaaatgaaaacgctttctaggcaaaaaactagtaattttttgacaagcttgataaactaaaatcctatctatttttatataagatagaataaatgttcgaaaataggaggtttt

SEQ ID NO: 4801 - DNA, 122 bp, Streptococcus pneumoniae
  misc_feature (1)..(122): tiling:Spneumo1:WAN024GIQ; Cluster includes WAN02414E-3 |p ncF||CAC18592.1|||201 bp|hypothetical protein|S.pneumoniae ||AJ278419|ORF|010
ttatggattttaaaagttttattattggtttagtagttggtatatttggtccttatatggatgacttaattagaaaaatattttcaaaatcttccaaaaaggatacggatagtactctctaa

SEQ ID NO: 4802 - DNA, 159 bp, Streptococcus pneumoniae
  misc_feature (1)..(159): tiling:Spneumo1:WAN0249X2; Cluster includes WAN024EAU-rc R 6.IG_1516.2.2||||1451273..1451431|-|159 bp|Between spr1469 (+ strand) and spr1470 (+ strand)|S.pneumoniae|R6|NC_0030 98.1|IG-rc|110
ttatgtacctcaaaagagagggacacctctgatcggctctaacgtggccaccgttttatgttttcataaaaaactcaagagtagtatcagtttagacttcctatgcgtttccagcaaccacgcactctctagtagaaagggactaagtgacttgtctct

SEQ ID NO: 4803 - DNA, 92 bp, Streptococcus pneumoniae
  misc_feature (1)..(92): tiling:Spneumo1:WAN024AJJ; Cluster includes WAN024EM5-rc R 6.IG_619.1||||608512..608603|-|92 bp|Between spr0595 (+ st rand) and spr0596 (+ strand)|S.pneumoniae|R6|NC_003098.1|I G-rc|110
ttatgttctaagaactccttaaattttatacaaattaattatactataaaacaatagcttcatcctatcattcgactaatttggaaataagg

SEQ ID NO: 4804 - DNA, 342 bp, Streptococcus pneumoniae
  misc_feature (1)..(342): tiling:Spneumo1:WAN024AJA; Cluster includes WAN024ELY R6.I G_631||||620574..620915|+|342 bp|Between spr0607 (+ strand ) and spr0608 (+ strand)|S.pneumoniae|R6|NC_003098.1|IG|11 0
ttatgtttttgcttataaaaaagaaggtataatgtatttacgtggtcggagtatgcgggaaatagctatagaacctcaaatttcgcaagaatttatcaacgatctatttaatagttgtaaggaactattagagatagaagaagtattaggcagtaaactaacatttgaactataaatgaacaaattttaatttcggatgagatagatattgatagtagatattctagaactaaaggttactattcgttattttataatgaagagtataataaaatacagaataaaacagtattagtattaggagcaggagycttaggatgttatatatctctaagtctaagt

SEQ ID NO: 4805 - DNA, 773 bp, Streptococcus pneumoniae
  misc_feature (1)..(773): tiling:Spneumo1:WAN024F8G; Cluster includes WAN0244EK spr0 534|glnH|15902578|NP_358128.1|533461..534255|-|795 bp|BC t ransporter substrate-binding protein - glutamine transport /Major cell bindin...|S.pneumoniae|R6|NC_003098.1|ORF|221
ttattgattagccttttcggccttgctgctgccaaaccagtccaggctgatacwagtatcgcagacattcaaaaaagaggcgaactggttgtcggtgtcaaacaagacgttcccaattttggttacaaagatcccaagaccggtacttattctggtatcgaaaccgacttggccaaratggtagctgatgaactcaaggtcaagattcrctatgtgccggttacagcacaaacccgcggcccccttctagacaatgaacaggtcgatatggatatcgcgacctttaccatcacggacgaacgcaaaaaactctacaactttaccagtccctactacacagacgcttctggatttttggtcaataaatctgccaaaatcaaaaagattgaggacctaaacggcaaaaccatcggagtcgcccaaggttctatcacccaacgcctrattactgaactgggtaaaaagaaaggtctgaagtttaaattcgtcgaacttggttcctacccagaattgattacttccctkcacgctcatcgtatcgatrccttttccgttgaccgctctattctrtctggctacactagtaaacgsacagmactactagatgatagtttcaagccatctgactacggtattgttaccaagaaatcaaatacagagctcaacgactatcttgataacttggttactaaatggagcaaggatggtagtttgcagaaactttatgaccgttacaagctcaaaccatctagccatactgcagattaactaat

SEQ ID NO: 4806 - DNA, 59 bp, Streptococcus pneumoniae
  misc_feature (1)..(59): tiling:Spneumo1:WAN0249NV; Cluster includes WAN024E8R R6.I G_1671.1.2||||1598655..1598713|+|59 bp|Between spr1622 (- strand) and spr1623 (+ strand)|S.pneumoniae|R6|NC_003098.1 |IG|110
ttattgctggaggtcttattggtctcttggcaggtaaaatcactaaaaaagtagttcta

SEQ ID NO: 4807 - DNA, 140 bp, Streptococcus pneumoniae
  misc_feature (1)..(140): tiling:Spneumo1:WAN024AAM; Cluster includes WAN024EHI R6.I G_989.1||||934439..934578|+|140 bp|Between spr0950 (+ stra nd) and spr0951 (+ strand)|S.pneumoniae|R6|NC_003098.1|IG| 110
ttattgttgaattttgggtattctataaaatatcctaattgagatttaaatagtagactatacaatatagttaaaatatcagtaaaaacaacactttattgaggtattggatacgctttgctaatagcctaataatcaca

SEQ ID NO: 4808 - DNA, 67 bp, Streptococcus pneumoniae
  misc_feature (1)..(67): tiling:Spneumo1:WAN024ALG; Cluster includes WAN024EN8-rc R 6.IG_533||||509622..509688|-|67 bp|Between spr0509 (pheT) (+ strand) and spr0510 (- strand)|S.pneumoniae|R6|NC_00309 8.1|IG-rc|110
ttattttatataaaatcacccctctartgttcataaactagagggggaatttgtatcmtactatcgt

SEQ ID NO: 4809 - DNA, 518 bp, Streptococcus pneumoniae
  misc_feature (1)..(518): tiling:Spneumo1:WAN024AA9; Cluster includes WAN0247F0-rc R 6.IG_125.2.1.1||||113219..113375|-|157 bp|Between spr0104 (- strand) and spr0105 (+ strand)|S.pneumoniae|R6|NC_00309 8.1|IG-rc|210
ttattttctccttttttattaagcatgsttaggatggtttcctaacaagtgatcgcaggctttgtttagttacctaaattagacttccttcctttatcttattttaaatatttaaaaccagttactgcttgaagcttaacagtttacttaattcaaataacagctaatcactgattccctgattttatcaaatatactaataacaacaattgtgatacgatcatcattataagaacaacatttaacgaatcaaagtttttccgagataataataaagcaacagcaagcagtattattactaaagattgaataactactattactcttaacattttatcctccactaacaactcaarctcccttacattatatcgrccagccccatggaaagattatagcyagactaatcaatratataatacatactagaatacaaaatatttttttattcatactttttctcctatctttattttctacctacatmrtacctcttattaagctcatttcaaaattac

SEQ ID NO: 4810 - DNA, 124 bp, Streptococcus pneumoniae
  misc_feature (1)..(124): tiling:Spneumo1:WAN024A69; Cluster includes WAN024E7M R6.I G_1822||||1695385..1695508|+|124 bp|Between RNA (ribosomal ) (- strand) and () (- strand)|S.pneumoniae|R6|NC_003098.1 |IG|440
ttattttctgacctttcagtcataaactcttattaatactacagcgttttcggtttattttcttgttactatttgatatagatattcaattttcaatgtgcattacttggtgatctctcaccaa

SEQ ID NO: 4811 - DNA, 70 bp, Streptococcus pneumoniae
  misc_feature (1)..(70): tiling:Spneumo1:WAN024ASO; Cluster includes WAN024800-rc R 6.IG_4||||4116..4185|-|70 bp|Between spr0004 (+ strand) an d spr0005 (pth) (+ strand)|S.pneumoniae|R6|NC_003098.1|IG- rc|110
ttatttttcctttcaaaagccaaaagggttggaatttttttccaacctaattgacaccatttattaattt

SEQ ID NO: 4812 - DNA, 268 bp, Streptococcus pneumoniae
  misc_feature (1)..(268): tiling:Spneumo1:WAN024DDA-3; Cluster includes WAN024468 sp r0834|proC|15902878|NP_358428.1|835350..836147|+|798 bp|Py rroline-5-carboxylate reductase|S.pneumoniae|R6|NC_003098. 1|ORF|111
ttatygaggcyttggcagatgcaggtgttcagacrggattaccacgagaaayagcmttgaaaatggcagcmcaaactgtggtaggagctgggcaattggtcctwgaaagycagcaacatcctggagtwttgaaagaycaagtytgtagyccaggcggttcgactatygytggygtagcaagcytagaagcgcatgctttycgaggmayagtcatggakgcagttcatcaagyctayaaacgaacacaagaactaggtaaataactaat

SEQ ID NO: 4813 - DNA, 242 bp, Streptococcus pneumoniae
  misc_feature (1)..(242): tiling:Spneumo1:WAN0249VE; Cluster includes WAN024E9U R6.I G_1583||||1518052..1518293|+|242 bp|Between spr1536 (nanA) (- strand) and spr1537 (- strand)|S.pneumoniae|R6|NC_0030 98.1|IG|110
ttaytccagaaaatgcacttagtttgtcttttattaactttcttttactacagttcatttaaatgacaaaaatgaactaaacaaactatctcaaattggtgccaawtttcccctctcctttctccaatcagactcctgccaatctagtttatctaccaggacaccgctgcaattaaactaaaatatctctttataagcaaatgatggacatcagcytatgctatttacaccatacttcctgc

SEQ ID NO: 4814 - DNA, 240 bp, Streptococcus pneumoniae
  misc_feature (1)..(240): tiling:Spneumo1:WAN0249U6; Cluster includes WAN024EQ5-rc R 6.IG_307.1.2.1.1||||288494..288587|-|94 bp|Between spr0286 (hysA) (+ strand) and spr0287 (kdgA) (- strand)|S.pneumon iae|R6|NC_003098.1|IG-rc|220
ttcaaatcaattgatmrgamtrwwwtatagtrgagtgaaataggatacgaacaaattgattaggaaaatcaaatgaatttatagaaatcttttagcagttatrwyrtyctrttctagtttcaaaacgctatagaarcagcattgtgctagtctagattcagtttactatactaaaacgagtagcttgaaatcaaaaaacccaccctcacaggcaggttttatctgtattattcagctaga

SEQ ID NO: 4815 - DNA, 140 bp, Streptococcus pneumoniae
  misc_feature (1)..(140): tiling:Spneumo1:WAN024AAP; Cluster includes WAN024EHK-rc R 6.IG_986||||931807..931944|-|138 bp|Between spr0947 (+ str and) and spr0948 (nplT) (+ strand)|S.pneumoniae|R6|NC_0030 98.1|IG-rc|110
ttcaaattttacgcaaacgttttcaaactcaatraatccagtatactatttttgtaaaactatttgcaaggaatgtccgttgttaaaggaactatcttttaaagtatacaaaaagccttaaaaaaggctttctctatata

SEQ ID NO: 4816 - DNA, 55 bp, Streptococcus pneumoniae
  misc_feature (1)..(55): tiling:Spneumo1:WAN0249EQ; Cluster includes WAN024E3M-rc R 6.IG_2205.2.1.2||||1992705..1992759|-|55 bp|Between spr199 8 (rr06) (- strand) and spr1999 (- strand)|S.pneumoniae|R6 |NC_003098.1|IG-rc|110
ttcaacacaaaattcatatgtttattacyctccgtcgtatttgtcttagagcgta

SEQ ID NO: 4817 - DNA, 51 bp, Streptococcus pneumoniae
  misc_feature (1)..(51): tiling:Spneumo1:WAN024ABP; Cluster includes WAN024EI3-rc R 6.IG_952||||904133..904182|-|50 bp|Between spr0916 (mesH) (- strand) and spr0917 (ccl) (+ strand)|S.pneumoniae|R6|NC _003098.1|IG-rc|110
ttcaaccttactagtatagcacaatagcctgctttatgctatacttaaagc

SEQ ID NO: 4818 - DNA, 68 bp, Streptococcus pneumoniae
  misc_feature (1)..(68): tiling:Spneumo1:WAN0249HH; Cluster includes WAN024E55 R6.I G_2106||||1878460..1878526|+|67 bp|Between spr1899 (phoU) (+ strand) and spr1900 (+ strand)|S.pneumoniae|R6|NC_00309 8.1|IG|110
ttcaactaatccttaaaagagaagagtacgattaagtrctcttttttatggttgtaaaaaagttcatt

SEQ ID NO: 4819 - DNA, 221 bp, Streptococcus pneumoniae
  misc_feature (1)..(221): tiling:Spneumo1:WAN024AR2; Cluster includes WAN024EQ7-rc R 6.IG_305||||284216..284436|-|221 bp|Between spr0284 (xylS) (+ strand) and spr0285 (basA) (- strand)|S.pneumoniae|R6| NC_003098.1|IG-rc|110
ttcacaatctcactatgattaggtttcctttaacctgatgaatagtgagattttttgatkggctttgacttaaatagaaaaacaccccatgatatgaaacatgaagtgttgtaaagtctatgttgtaggtgcttatttcacawtttcaatgtgaccagtgataacgaataccatacagaatcttcatatacactaaacaaatgactttctaattatttcaa

SEQ ID NO: 4820 - DNA, 148 bp, Streptococcus pneumoniae
  misc_feature (1)..(148): tiling:Spneumo1:WAN024A7D; Cluster includes WAN024EFP R6.I G_1129.2||||1086578..1086725|+|148 bp|Between spr1091 (- s trand) and spr1092 (truB) (- strand)|S.pneumoniae|R6|NC_00 3098.1|IG|110
ttcacacctctaaatttctatatagattatttgagtacctacaactcgcaacaattggaatattataattcccaaaaccattctactattagtatggggttttatcaagcaattgttatctatcacccgatttttattccyaaacgat

SEQ ID NO: 4821 - DNA, 111 bp, Streptococcus pneumoniae
  misc_feature (1)..(111): tiling:Spneumo1:WAN024AF4; Cluster includes WAN024EJP R6.I G_820||||783349..783458|+|110 bp|Between spr0784 (thiI) (+ strand) and spr0785 (+ strand)|S.pneumoniae|R6|NC_003098. 1|IG|110
ttcagaaaatccaaaagaatagcgaaaatcagtaaaaaaagttagttttttctctaaaaacaggtaaaaaactaactttttttatttttatgatataatgatataaaattt

SEQ ID NO: 4822 - DNA, 107 bp, Streptococcus pneumoniae
  misc_feature (1)..(107): tiling:Spneumo1:WAN0249NL; Cluster includes WAN024E8L R6.I G_1688||||1612990..1613096|+|107 bp|Between spr1639 (ccpA) (- strand) and spr1640 (- strand)|S.pneumoniae|R6|NC_0030 98.1|IG|110
ttcagtcctccattacgaacattctaatattactatacaatatttaattttttttaacaagagaatttagtaaattatttaagatccacaaattcacaaaattaatt

SEQ ID NO: 4823 - DNA, 120 bp, Streptococcus pneumoniae
  misc_feature (1)..(120): tiling:Spneumo1:WAN0249MF; Cluster includes WAN024E7Y R6.I G_1731.1||||1654514..1654633|+|120 bp|Between spr1682 (pep A) (- strand) and spr1683 (+ strand)|S.pneumoniae|R6|NC_00 3098.1|IG|110
ttcagttccttctttctttcatccattttaccactttttataggagaaggatagtgggaaggtggatttctaagttagtatcttagtcctgctctatcttagaaaaggatagtattctct

SEQ ID NO: 4824 - DNA, 230 bp, Streptococcus pneumoniae
  misc_feature (1)..(230): tiling:Spneumo1:WAN024AC2; Cluster includes WAN024EI7-rc R 6.IG_944.1||||898260..898489|-|230 bp|Between spr0908 (pht E) (+ strand) and spr0909 (+ strand)|S.pneumoniae|R6|NC_00 3098.1|IG-rc|110
ttcataattacctcatttctataattatttatatgatgtcttcattattaaatgattaaataaattaattaaccarttaattaaytagtaaatattccacctctttttaagttgtatgtcaagaaattttatatattaataataaaatgaaattctcccaaagtcagagttttatttctaacttttgagagaacttcatttttgattcagactttttctactgctattcc

SEQ ID NO: 4825 - DNA, 167 bp, Streptococcus pneumoniae
  misc_feature (1)..(167): tiling:Spneumo1:WAN024AFQ; Cluster includes WAN024EJY-rc R 6.IG_786||||758967..759133|-|167 bp|Between spr0762 (pcp) (+ strand) and spr0763 (+ strand)|S.pneumoniae|R6|NC_00309 8.1|IG-rc|110
ttcatacctctcttcactttttctattttacaaraaaatcctaaaactagcaagaaaaaactctatatcaggcttctctgatatagagttttatgtaaacaacctcaatygatttagcatagttaatagttagtaaacaagcataattgactatcctttttaggtta

SEQ ID NO: 4826 - DNA, 109 bp, Streptococcus pneumoniae
  misc_feature (1)..(109): tiling:Spneumo1:WAN024APH; Cluster includes WAN024EP8 R6.I G_394||||371178..371274|+|97 bp|Between spr0370 (mip) (+ s trand) and spr0371 (shetA) (+ strand)|S.pneumoniae|R6|NC_0 03098.1|IG|110
ttcatatctgagtaaaatgaagtctgaaataagcggacttcgtttttttaaatcctcatttaagcgcttttatgttatactgaaactaayatgattattggaggttagg

SEQ ID NO: 4827 - DNA, 70 bp, Streptococcus pneumoniae
  misc_feature (1)..(70): tiling:Spneumo1:WAN024AJ8; Cluster includes WAN0247N0 R6.I G_88.2.2.2||||75242..75310|+|69 bp|Between spr0067 (+ stra nd) and spr0068 (+ strand)|S.pneumoniae|R6|NC_003098.1|IG| 110
ttcatcagcttcctccttgacactykgtcagwttttgatacaatagtacaaaattagaggaggyrggcta

SEQ ID NO: 4828 - DNA, 68 bp, Streptococcus pneumoniae
  misc_feature (1)..(68): tiling:Spneumo1:WAN0249JC; Cluster includes WAN024E6A-rc R 6.IG_1936.2.2||||1788987..1789054|-|68 bp|Between spr1818 (- strand) and () (- strand)|S.pneumoniae|R6|NC_003098.1|I G-rc|110
ttcattacagagatatgtgagtgtgtatttttaaaactagatattatatacattaagagggaatcagt

SEQ ID NO: 4829 - DNA, 370 bp, Streptococcus pneumoniae
  misc_feature (1)..(370): tiling:Spneumo1:WAN0249YR; Cluster includes WAN024EBW R6.I G_1411.2||||1349453..1349822|+|370 bp|Between spr1367 (IS1 239) (- strand) and spr1368 (- strand)|S.pneumoniae|R6|NC_ 003098.1|IG|110
ttcattatttccattttcttttggatttcactctattctgaaaaacttgtgtatatttactgaagctagcaagtcttacctgtaaatttaatgaaagcaacacaaaatccgagaggggaatctcggattaatagatagagagtttttagtttaaataaattgtttaaaatatcaacaacatcacttcttttcttaacctgataagtcttgattcctaattttggggctacgattatattgtcctcaatatcgtctagaaagacacaatttctaggttataactggtatttatcgatagttactcatatacatcagtccacctccatacttatgtgcgagcctctctttgtattatacctccatactcacc

SEQ ID NO: 4830 - DNA, 132 bp, Streptococcus pneumoniae
  misc_feature (1)..(132): tiling:Spneumo1:WAN024A2I; Cluster includes WAN024ECT-rc R 6.IG_1344||||1294169..1294300|-|132 bp|Between spr1300 (gu aA) (- strand) and spr1301 (+ strand)|S.pneumoniae|R6|NC_0 03098.1|IG-rc|110
ttcatttctatcttttctctattgyaccccaataaactagaaaaagtcaaacttcgccttgtttagttggtaattcgcccttatttgtgatagaatattgagaaaagatatttcttttgagaaaggaaaaag

SEQ ID NO: 4831 - DNA, 407 bp, Streptococcus pneumoniae
  misc_feature (1)..(407): tiling:Spneumo1:WAN024GJC-3; Cluster includes WAN0243S4 sp r1343|tufA|15903386|NP_358936.1|1326964..1328160|-|1197 bp |Translation elongation factor TU|S.pneumoniae|R6|NC_00309 8.1|ORF|331
ttccgtaaacaacttgacgaaggtcttgctggagataacgtaggtgtccttcttcgtggtgttcaacgtgatgaaatcgaacgtggacaagttatcgctaaaccaggttcaatcaacccacacactaaattcaaaggtgaagtctacatccttactaaagaagaaggtggacgtcacactccattcttcaacaactaccgtccacaattctacttccgtactactgacgttacaggttcaatcgaacttccagcaggtactgaaatggtaatgcctggtgataacgtgacaatcgacgttgagttgattcayccaatcgccgtagaacaasbwactacaytmwctatccgtgagggtggacgtactgttggttcaggtatggttacagaaatcgaagcttaactaat

SEQ ID NO: 4832 - DNA, 111 bp, Streptococcus pneumoniae
  misc_feature (1)..(111): tiling:Spneumo1:WAN024AKQ; Cluster includes WAN024EMS-rc R 6.IG_563||||540208..540318|-|111 bp|Between spr0539 (estA) (+ strand) and spr0540 (murM) (+ strand)|S.pneumoniae|R6| NC_003098.1|IG-rc|110
ttcctactctctttcctccagtattttattactattctactactttcgtttgaaaagtctagtgaaaacatattttattttagttctactccccctatgctgaagttcaaa

SEQ ID NO: 4833 - DNA, 87 bp, Streptococcus pneumoniae
  misc_feature (1)..(87): tiling:Spneumo1:WAN024A4W; Cluster includes WAN024791-rc R 6.IG_141.2.1||||128066..128152|-|87 bp|Between spr0120 (+ strand) and spr0121 (pspA) (+ strand)|S.pneumoniae|R6|NC_0 03098.1|IG-rc|110
ttcctataaaaacatttccgatgagagagcttgttttttaatttcgttaaacaacaaaaaacgcaagcttaagcctgcggacaatct

SEQ ID NO: 4834 - DNA, 115 bp, Streptococcus pneumoniae
  misc_feature (1)..(115): tiling:Spneumo1:WAN0249Y7; Cluster includes WAN024EBI R6.I G_1452||||1392827..1392941|+|115 bp|Between spr1408 (def) (- strand) and spr1409 (- strand)|S.pneumoniae|R6|NC_00309 8.1|IG|110
ttcctcacactcctcttgctttttactatattatagcaattatagcacaaaagccgataactgcaaaccctttccctcaactgtagcaaaaagccatccgaagatgacttttttg

SEQ ID NO: 4835 - DNA, 265 bp, Streptococcus pneumoniae
  misc_feature (1)..(265): tiling:Spneumo1:WAN0249JT; Cluster includes WAN024E6I R6.I G_1920||||1774274..1774529|+|256 bp|Between spr1802 (- str and) and spr1803 (plcR) (- strand)|S.pneumoniae|R6|NC_0030 98.1|IG|110
ttcctccaaaaagttacttggtcacttmgtgagaaggtgaccacagtcactgcgatgttaagaagcttattaagttctttctgctagcaacatcttcaaatacattatatccgttttttcaagaactatcaaggacatcaatgtccttaaaatctaacyatttcrtrtyatttttagcttatatctaaaaaaacakyyctaaagacgaactttagaactgttttgatacgaggacaaggacatytttgtcactgattcactatgt

SEQ ID NO: 4836 - DNA, 126 bp, Streptococcus pneumoniae
  misc_feature (1)..(126): tiling:Spneumo1:WAN024A3X; Cluster includes WAN024EDJ R6.I G_1314||||1265905..1266018|+|114 bp|Between spr1270 (hprK) (- strand) and spr1271 (rpsU) (- strand)|S.pneumoniae|R6| NC_003098.1|IG|110
ttcctccttcaaatgagttcttctctctattatatcaaattgtaggaggaagtttcagatttttgcaggctttggagtatttatttaaaagaaaaaggactagatttctctagcctttcatttcaa

SEQ ID NO: 4837 - DNA, 110 bp, Streptococcus pneumoniae
  misc_feature (1)..(110): tiling:Spneumo1:WAN024AIC; Cluster includes WAN024ELG R6.I G_666||||651221..651330|+|110 bp|Between spr0642 (spxB) (+ strand) and spr0643 (+ strand)|S.pneumoniae|R6|NC_003098. 1|IG|110
ttcctctcgccgaaaatcaaatatgaaacttgtagactttattctttgattttcatagagcagaactttaaaagatcggagcaatccggtctttttatggaggagagtaa

SEQ ID NO: 4838 - DNA, 92 bp, Streptococcus pneumoniae
  misc_feature (1)..(92): tiling:Spneumo1:WAN024APK; Cluster includes WAN024EPA-rc R 6.IG_392.2||||368997..369088|-|92 bp|Between spr0368 (mutS 2) (+ strand) and spr0369 (dagA) (+ strand)|S.pneumoniae|R 6|NC_003098.1|IG-rc|110
ttccttctcctatcgtttcaaccccaaaagaaagagcacatgcaagatacatgtactctggaatgcttagataaatgctaaaaagcggtcta

SEQ ID NO: 4839 - DNA, 123 bp, Streptococcus pneumoniae
  misc_feature (1)..(123): tiling:Spneumo1:WAN0249M9; Cluster includes WAN024E7U R6.I G_1745.2.1||||1665739..1665861|+|123 bp|Between spr1696 (m urI) (- strand) and spr1697 (- strand)|S.pneumoniae|R6|NC_ 003098.1|IG|110
ttccttgtactgaacgaactgaccgacagcttgatagaatgtcaactacctctctcttaatcataatcaaatatcaatagaatgcaaggaaaaagtctcatccctaaaccataaccaacatag

SEQ ID NO: 4840 - DNA, 351 bp, Streptococcus pneumoniae
  misc_feature (1)..(351): tiling:Spneumo1:WAN0249PI; Cluster includes WAN024EQF R6.I G_293||||273258..273608|+|351 bp|Between spr0272 (rpsI) (+ strand) and B (transposase) (+ strand)|S.pneumoniae|R6|NC _003098.1|IG|110
ttcgaaagaattactatacttatacagagcacctttcggggtgttctttttttatactttcttactaaattggtgcaattgacacagttgttgcgactttagtcgcttacaaatgtggctgcaacctgacawggtcagttgcctcaaaacgttaatcaatacgattatatcaaygtttcaaagcactcaarrgtttaccytatgggtgcttttttcrtrctttytwraaaagtttacctwawwtttrymstaawrtkammtaagaataggacaaatcgaggatagtcaaatcgaattctaacaatgttttagaagtagaggtgtactattctagtttcaatctactatatt

SEQ ID NO: 4841 - DNA, 52 bp, Streptococcus pneumoniae
  misc_feature (1)..(52): tiling:Spneumo1:WAN0249ZO; Cluster includes WAN024ECC-rc R 6.IG_1386.2.2.2||||1326912..1326963|-|52 bp|Between C (tra nsposase) (- strand) and spr1343 (tufA) (- strand)|S.pneum oniae|R6|NC_003098.1|IG-rc|110
ttcgatttagttcccagaagaacaattatttaagttagacactaaaagaatc

SEQ ID NO: 4842 - DNA, 107 bp, Streptococcus pneumoniae
  misc_feature (1)..(107): tiling:Spneumo1:WAN0249I7; Cluster includes WAN024E5I R6.I G_2031.2.1.2||||1843306..1843412|+|107 bp|Between spr1872 (- strand) and spr1873 (- strand)|S.pneumoniae|R6|NC_00309 8.1|IG|110
ttctaactcctcaaaaccaattcaatgagacttttttcttaaaaacaagtataacatatttcccttattctggattaaaaaggattagcgagattagaatcgacctt

SEQ ID NO: 4843 - DNA, 61 bp, Streptococcus pneumoniae
  misc_feature (1)..(61): tiling:Spneumo1:WAN024AGT; Cluster includes WAN024EKN-rc R 6.IG_734.1.2||||710714..710774|-|61 bp|Between spr0710 (+ strand) and spr0711 (dinG) (+ strand)|S.pneumoniae|R6|NC_0 03098.1|IG-rc|110
ttctagcctgctgatttttktaaaatagtgaagaaatacgaaaaattgagagaagaaatgt

SEQ ID NO: 4844 - DNA, 2236 bp, Streptococcus pneumoniae
  misc_feature (1)..(2236): tiling:Spneumo1:WAN024CTY-M; Cluster includes WAN0244DP sp r0565|bgaA|15902609|NP_358159.1|572123..578809|+|6687 bp|b eta-galactosidase precursor|S.pneumoniae|R6|NC_003098.1|OR F|331
ttctatctctaccaaagccaatgggtttctgttaagaagaaaccgatggtacaccttcttcctcactggaactgggaaaacaaagaattagcatccaaagtagctgactcagaaggtaagattccagttcgtgcttattcgaatgcttctagtgtagaattrttcttgaatggaaaatctcttggtcttaagactttcaataaaaaacaaaccagcgatgggcggacttaccaagaaggtgcaaatgctaatgaactttatcttgaatggaaagttgcctatcaaccrggtaccttggaagcaattgctcgtgatgaatctggcaaggaaattgctcgagataagattacgactgctggtaagccagcggcagttcgtcttattaaggaagaccatgcgattgcagcagatggaaaagacttgacttacatctactatgaaattgttgacagccakgggaatgtggttccaactgctaataatctggttcgcttccaattgcatggccaaggtcaactggtcggtgtagataacggagaacaagccagycgtgaacgctataaggcgcaagcagatggttcttggattcgtaaagcatttaatggtaaaggtgttgccattgtcaaatcaactgaacaagcagggaaattcaccctkactgcycactctgatctcttgaaatckarycaagtcactgtctttactggtaaraaagaaggacaagaraagactgttttggggacagargtrscaaragtwcrkaccattattggwrargmaccwraaatgcckammacwgtwssktttstatacagygatggtagycgtgmaraacktccwgtaacytggtctyhagtmgatgtkagcaagcmtggwrttgtrackgtkaaaggtayrgcwrayggacgwgargtagargctcrtgtmgargtkmtwgcwmttrmrwmagarytaccarywgtkaaacgtattgctccaaatactracttgaattctgtagacaaatctgtttcytatgttttgaytgatggaagtgtwsaagagtaygaagtrgayarstgggagattrcsgaagwagataaagcyaarytwkcartwscwggwtcwcgtattcaarygacyggtyakttagmwggwsaamcwattcatgcaacccttgtggtagaagaaggmaatsctgcrgcacctgyagtrccaactgtwackgttggwggtgargcwgtmacaggtcttactagtcramaaccaatgcaataycgyactctwkcttatggwgcymarttgccagaagtcacagcaagtgctraaaatgcwgmtgtkacagttcttcaagcaagcgcagcaaacggcatgcgtgcragcatmtttrttcagcctaaagatggtggccctcttcaaacctatgcaattcaattmctwgaagaagcrccaaaaattgctcacttgagcttgcaagtggaaaaagctgacagtctcaaagaagaccaaactgtcaaattgtcggttcgagctcactatcaagatggaacgcaagctgtattaccagctgataaagtaaccttctctacaagtggtgaaggggaagtcgcaattcgtaaaggaatgcttgagttgcataagccaggagcagtcactytsaamgckgaatatgagggagctaaagrccaagttgaactcactatccaagccaatactgagaagaagattgcgcaatcyatccgtcctgtaaatgtagtsacagatttgcatcarraaccwastcttccarcaacagtaacrgttgagtatgacaaaggtttccctaaarctcayaaagtcacttggcaagctattccgaaagaaaaactagactcctatcaaayatttgaagtactaggtaaagttgaaggaattgaccttgaagcgcgtgcaaaagtctctgtagaaggtatcgtttcagttgaagaagtcagtgtgacaactccaatcgcagaagcaccacaattaccagaaagygttcggacatatgattcaaatggtcacgtttcatcagctaaggttgcatgggatgcgattcgtccagagcaatacgctaaggaaggtgtctttacagttaatggtcgcttagaaggtackcaattaacaactaaacttcatgttcgcgtatctgctcaaactgagcaaggtgcaaacatttctgaccaatggaccggttcagaattgccacttgcctttgcttcagaytcaaatccaagcg

SEQ ID NO: 4845 - DNA, 51 bp, Streptococcus pneumoniae
  misc_feature (1)..(51): tiling:Spneumo1:WAN0249DL; Cluster includes WAN024E35 R6.I G_2253||||2033191..2033241|+|51 bp|Between () (- strand) a nd spr2041 (comE) (- strand)|S.pneumoniae|R6|NC_003098.1|I G|110
ttctatctgtagcagatataaccattatatcaatttcttgctaattgtcaa

SEQ ID NO: 4846 - DNA, 65 bp, Streptococcus pneumoniae
  misc_feature (1)..(65): tiling:Spneumo1:WAN024A2B; Cluster includes WAN024ECP R6.I G_1357||||1303400..1303464|+|65 bp|Between spr1313 (- stra nd) and spr1314 (- strand)|S.pneumoniae|R6|NC_003098.1|IG| 110
ttctatcttttttaaagagtaaactcagctagtccaactaactgagttttcctttatctattata

SEQ ID NO: 4847 - DNA, 89 bp, Streptococcus pneumoniae
  misc_feature (1)..(89): tiling:Spneumo1:WAN024AHR; Cluster includes WAN024EL5-rc R 6.IG_691.1.2||||671232..671320|-|89 bp|Between spr0667 (ft sX) (+ strand) and spr0668 (ptsG) (+ strand)|S.pneumoniae| R6|NC_003098.1|IG-rc|110
ttctatgatttaattataccactttaattttttttgtaaaggcttttataaaaaaattacacttttttctaaaaaatttctagtgcgcc

SEQ ID NO: 4848 - DNA, 341 bp, Streptococcus pneumoniae
  misc_feature (1)..(341): tiling:Spneumo1:WAN0249MJ; Cluster includes WAN024E84 R6.I G_1723.1||||1647157..1647432|+|276 bp|Between spr1674 (- s trand) and spr1675 (IS1167) (+ strand)|S.pneumoniae|R6|NC_ 003098.1|IG|210
ttctccttttgtttttwaagagccgtgtctggatagactttcggacgcaacgctctattagataatgaactgcctatacacaagatttctaaccttagtcgacatgagctgaaacctcttatttgttaagtagttcacaaaatattatacacctattttatgaatagtcaactgtctttacagtaaaattttagaaaatcatgaaaattttctctttctttccattttaagtgacattcagtcattctcacatcaaaaaagcccagasgaaattgkctgagcattcttttatctagtcgtttaaggaagttgagttcagtatgtttaaagtctctgtccca

SEQ ID NO: 4849 - DNA, 591 bp, Streptococcus pneumoniae
  misc_feature (1)..(591): tiling:Spneumo1:WAN024AHA; Cluster includes WAN024EKV R6.I G_705.2||||685891..686481|+|591 bp|Between spr0681 (- stra nd) and spr0682 (rpsP) (+ strand)|S.pneumoniae|R6|NC_00309 8.1|IG|120
ttctctaaacgytaagaactagctacaayacagcatttacaacacttcatggttcacaccatggggtgttttttwatgattttaagcaaaattcacacttaattgaaagttatttaaattagatgaaaatttattttttgaaaaagtgggaaaacattgattctaagcgaattttgaatcatattcgaatgggagtttttaaaatcatgtttcagtggtaaaagtaccaaactggattctccatagtaaaatgatatctcttgctagtgaatcatctgctaataagtccatatttcgcttgggaacgggtttggaacttagaagccaagtatccaactctccaactctcgttcaggcgatatgaagggtttgacttggtgttctttataaaatttttctaaaatagtattcacggatagcatctttcaaacatttatttcctattctaacaaatttctaaatactttaagaaatttatagtctgtcaagtttttttcttgacacmtgccagaaatctgctataatagaacatgtgctaaatagctcagctatttcaccgaaataaaaaattaaagaaatgagactttaaaa

SEQ ID NO: 4850 - DNA, 50 bp, Streptococcus pneumoniae
  misc_feature (1)..(50): tiling:Spneumo1:WAN0249GL; Cluster includes WAN024E4O R6.I G_2127.2||||1903808..1903857|+|50 bp|Between spr1920 (malD ) (+ strand) and spr1921 (malA) (+ strand)|S.pneumoniae|R6 |NC_003098.1|IG|110
ttctctatataataatactcatatagaaaacaccttttagaaagatacct

SEQ ID NO: 4851 - DNA, 191 bp, Streptococcus pneumoniae
  misc_feature (1)..(191): tiling:Spneumo1:WAN0249GD; Cluster includes WAN024E4L R6.I G_2147||||1923404..1923593|+|190 bp|Between spr1940 (- str and) and spr1941 (+ strand)|S.pneumoniae|R6|NC_003098.1|IG |110
ttctcttcctttctaactacaattatagtgtaaaaattataagaataaaagagtatttgagcacaatataatctcaccttttaaaagaaattattgggctgaaagtttttagtgattatttttcaactttctattgactttwwaaawyaaagtgatatcatttagatatcaaataayrggaggtcattctt

SEQ ID NO: 4852 - DNA, 450 bp, Streptococcus pneumoniae
  misc_feature (1)..(450): tiling:Spneumo1:WAN0249GA; Cluster includes WAN024E4K-rc R 6.IG_2151.1||||1925304..1925741|-|438 bp|Between spr1944 ( rpmG) (+ strand) and spr1945 (pcpA) (- strand)|S.pneumonia e|R6|NC_003098.1|IG-rc|110
ttcttacatatgtaggaagattttttggattctcaaaactagtttaaaagactacgctatttaaaccaattttaagaatggatatataaggatattcagaaatctagttggtcaacttttgtattttgaatataccttagatggtgacgatgtcttggtatatctggtactcacttacatattctaacttattttaactaagatrcaactgtagttggtgaatttgctacaaatagtgtagaggcgttatttgaaaaatatacaaaaaaggaaccccaacttacatttgagttyctcttrcttttaatygtccgaatccgtattcttatttcaaaaaaggtagtgaaaaatgtagtcattcgaatgatttcycttrcaatrtagtgaaattaacaaaaagaaaaaacgctgatcaagcgtttttcttctgtattgattcgtattgaatgc

SEQ ID NO: 4853 - DNA, 68 bp, Streptococcus pneumoniae
  misc_feature (1)..(68): tiling:Spneumo1:WAN0249WV; Cluster includes WAN024EAR R6.I G_1523||||1457138..1457205|+|68 bp|Between spr1476 (- stra nd) and spr1477 (- strand)|S.pneumoniae|R6|NC_003098.1|IG| 110
ttcttactcctttaatagctacattttatcataattatccaaagaaaaaaagagggcatttatccctc

SEQ ID NO: 4854 - DNA, 161 bp, Streptococcus pneumoniae
  misc_feature (1)..(161): tiling:Spneumo1:WAN024AFM; Cluster includes WAN024EJW R6.I G_793||||759576..759736|+|161 bp|Between () (+ strand) and spr0764 (rpsA) (+ strand)|S.pneumoniae|R6|NC_003098.1|IG| 110
ttcttaggtaataatcaagataraaagcaaaatatcttagggtattttatttttataattgaaagacgtgaatgatatgaacatgtccttgckggtgcttaggaaaaaaattataagtatgtcaagtttaagaaaaacttgattgttggaggattttttag

SEQ ID NO: 4855 - DNA, 177 bp, Streptococcus pneumoniae
  misc_feature (1)..(177): tiling:Spneumo1:WAN0249S6; Cluster includes WAN024EJF R6.I G_834.1||||803120..803296|+|177 bp|Between spr0798 (- stra nd) and spr0799 (+ strand)|S.pneumoniae|R6|NC_003098.1|IG| 110
ttcttattgagtccaaccattactagtctatattgttttatagttgattgagtttggaatagtacgctgtagctgctaaaacatttctaggaattaatttgcctttcctaatagagttgttcatatcttatttcaatctaytatrtttttcacctctaacaatcgcaatctcttctt

SEQ ID NO: 4856 - DNA, 67 bp, Streptococcus pneumoniae
  misc_feature (1)..(67): tiling:Spneumo1:WAN0249J4; Cluster includes WAN024E62-rc R 6.IG_1984||||1799887..1799953|-|67 bp|Between spr1824 (rlu D) (+ strand) and spr1825 (gapA) (- strand)|S.pneumoniae|R 6|NC_003098.1|IG-rc|110
ttcttgagttgatagaaagcaaggctttgtggtcttgcttttttatatggaaaaatggatgacacga

SEQ ID NO: 4857 - DNA, 103 bp, Streptococcus pneumoniae
  misc_feature (1)..(103): tiling:Spneumo1:WAN024A45; Cluster includes WAN024EDM R6.I G_1301.1.2||||1256556..1256658|+|103 bp|Between spr1257 (p stS) (- strand) and spr1258 (- strand)|S.pneumoniae|R6|NC_ 003098.1|IG|110
ttctttatgagttgacgcatgaattcttaccaaatttctgcgcaattgattatttatataatataggctatattactctttcctaacctccttttttcatatg

SEQ ID NO: 4858 - DNA, 202 bp, Streptococcus pneumoniae
  misc_feature (1)..(202): tiling:Spneumo1:WAN024AN9; Cluster includes WAN024EO2 R6.I G_463.1||||440821..441022|+|202 bp|Between spr0439 (- stra nd) and spr0440 (+ strand)|S.pneumoniae|R6|NC_003098.1|IG| 110
ttctttttcctccgaaaaataatcgcggaatatctcctattctattttaaaggataaaagtaaatctaacaagtgttaatgtcaagtttgtaaaagaaaattataattgataagtgtattatttttaagagtttttaaccttattttagatttgtgcaaacagttattgktttttgtctaaaaatgttttaggataaaaatg

SEQ ID NO: 4859 - DNA, 83 bp, Streptococcus pneumoniae
  misc_feature (1)..(83): tiling:Spneumo1:WAN024A5X; Cluster includes WAN024EEY R6.I G_1185||||1146755..1146837|+|83 bp|Between spr1144 (smf) ( - strand) and spr1145 (licC) (- strand)|S.pneumoniae|R6|NC _003098.1|IG|110
ttctttttctactcatctatctattcgtaaaagttcgtaaaaaatcaaaaaacatccgactattttgtcagatgttggaatct

SEQ ID NO: 4860 - DNA, 267 bp, Streptococcus pneumoniae
  misc_feature (1)..(267): tiling:Spneumo1:WAN024BFT; Cluster includes WAN023KFL 3124 80_3547||||1905703..1905942|+|240 bp|EGAD orf prediction|S .pneumoniae|R6|NC_003098.1|ORF|111
ttgaaaaaacttgatactatgcgttttawtgtgggaagatttacttccttttctactgaaattgagtcttttyccaagatctttttatactcaatgaaaatcaaagwgcaaactaggaagctagccgcaggttgctcaaaacactgttttgaggttgtrgatgaaactgacgaagtcagtaaccatacctacggyaaggygamgctgacgtggtttgaagagattttcgaaragtataasaakagctcatggaatctactaactaat

SEQ ID NO: 4861 - DNA, 785 bp, Streptococcus pneumoniae
  misc_feature (1)..(785): tiling:Spneumo1:WAN024FIV; Cluster includes WAN0243PN spr1 432|tpi|15903475|NP_359025.1|1416054..1416833|-|780 bp|Tri ose phosphate isomerase|S.pneumoniae|R6|NC_003098.1|ORF|21 0
ttgaaaaaagaggtatgtgaaatgtcacgtaaaccatttatcgctggtaactggaaaatgaacaaaaatccagaagaagctaaagcattcgttgaagcagttgcatcaaaacttccttcatcagatcttgttgaagcaggtatcgctgctccagctcttgatttgacaactgttcttgctgttgcaaaaggctcaaaccttaaagttgctgctcaaaactgctactttgaaaatgcaggtgctttcactggtgaaactagcccacaagttttgaaagaaatcggtactgactacgttgttatcggtcactcagaacgccgtgactacttccatgaaactgaygaagatatcaacaaaaaagcaaaagcaatctttgcgaacggtatgcttccaatcatctgttgtggtgaatcacttgaaacttacgaagctggtaaagctgctgaattcgtaggtgctcaagtatctgctgcattggctggattgactgctgaacaagttgctgcctcagttatcgcttatgagccaatctgggctatcggtactggtaaatcagcttcacaagacgatgcacaaaaaatgtgtaaagttgttcgtgacgttgtagctgctgactttggtcaagaagtcgcagacaaagttcgtgttcaatacggtggttctgttaaacctgaaaatgttgcttcatacatggcttgcccagacgttgacggtgcccttgtaggtggtgcgtcacttgaagctgaaagcttcttrgctttgcttgactttgtaaaataactaat

SEQ ID NO: 4862 - DNA, 542 bp, Streptococcus pneumoniae
  misc_feature (1)..(542): tiling:Spneumo1:WAN024GCF; Cluster includes WAN0244A7 spr0 691|bioY|15902735|NP_358285.1|690854..691390|-|537 bp|Biot in synthase|S.pneumoniae|R6|NC_003098.1|ORF|211
ttgaaaaaagctcacgtttatgctatccctgctattggggctgctctcattgctgytttggcacaaatcagtcttccaattggacctgttcccttcactctgcaaaactttgcaatcggcttgattgctactgtctttagaccgagagaggctgtactttctgctggactctatcttcttctaggtgctatcggtcttcctgtctttgcaggaggtggagctggttttcaggctttagttggccctactgcaggctatctttggttttatctcgtttactctggacttacttcctctctaaccaacagcaagagtggtgttgttaagatttttcttgcaaacctcttgggtgatgcccttgtctttgtcggcgggattctcagcttgcatttcctagctggaatggcatttgaaaaagctcttgytgtgggggttcttccctttatcattccagaccttggcaaacttctrgctattagttttattagccgtcccctacttcaacgccttaaaaatcagrcttactttactaactaactaat

SEQ ID NO: 4863 - DNA, 569 bp, Streptococcus pneumoniae
  misc_feature (1)..(569): tiling:Spneumo1:WAN024DGB; Cluster includes WAN0244CJ spr0 607||15902651|NP_358201.1|619725..620573|+|849 bp|Hypothet ical protein|S.pneumoniae|R6|NC_003098.1|ORF|110
ttgaaaaaatcctatcttgttgtyattatatytgcaacgatacatgaawttagtcatgcaataattgctaataattatcaaattgagatcccaaattgtggaataatgctacttttgtttaatttggctttttttgtagatttaagtggggtgcaattcctaaaaaataaaaaacaatttttgaaaattatgttagcaggaattgcttcaaattcgattttatcacttacaggtttacttgttttattgttcacatcgtataaattgcttggactcttattttttatcattaacttaggtatgatttttattaattcaattcctttttttcagtatgatagtggtattattttaagatacttgaattctaacaataataacttgaattttcaatatatagttcaacttttaatagcatttgttattatttatttycctttgagtcaactattacagtttttgacacccaatattattgttcgtagtataggaggggtggttgtttctatactgctttctatattatatatgataggaaggacgaaatatgttctacgtaaatarctaat

SEQ ID NO: 4864 - DNA, 246 bp, Streptococcus pneumoniae
  misc_feature (1)..(246): tiling:Spneumo1:WAN024GM7; Cluster includes WAN023KH7 3130 57_3478||||1863913..1864158|+|246 bp|EGAD orf prediction|S .pneumoniae|R6|NC_003098.1|ORF|110
ttgaaaaaatggactttttcaagggctttttgccgtgctctaaaatcatcgccaaatcatcaaattgaaataagaaatagtttagataaaactattgacttttcttatagtttgtctttcatttctgtgtttcatagatttcacggtaaacggcattgttggcaaccaagtctgcatgcgtrccttgaccaatcaatcgtccttgatttagaaccaagatcttgtctgcatggacaaccgagctaa

SEQ ID NO: 4865 - DNA, 87 bp, Streptococcus pneumoniae
  misc_feature (1)..(87): tiling:Spneumo1:WAN024DNE; Cluster includes WAN023SI0 NC_0 03098.1_2213||||1717998..1718084|+|87 bp|Glimmer 2.02 orf prediction|S.pneumoniae|R6|NC_003098.1|ORF|101
ttgaaaaaccttgatactatacgtttgattgtgggaagattgacttcattttctcctgaaattgaagttttttctagtttccagrta

SEQ ID NO: 4866 - DNA, 75 bp, Streptococcus pneumoniae
  misc_feature (1)..(75): tiling:Spneumo1:WAN024GKH; Cluster includes WAN023YTT AL44 9927.1_160||||132123..132197|-|75 bp|Glimmer 2.02 orf pred iction|S.pneumoniae||AL449927.1|ORF|000
ttgaaaaagcttgctagagcgcatttcaaaccaggcagcractgcgtcaagaaattagaagacaaactcgttttc

SEQ ID NO: 4867 - DNA, 870 bp, Streptococcus pneumoniae
  misc_feature (1)..(870): tiling:Spneumo1:WAN024FXH; Cluster includes WAN0240P9 |cps 14K||CAA59783.1|||849 bp|capsular polysaccharide synthesis protein|S.pneumoniae||X85787|ORF|000
ttgaaaaataaaattcatagaatgtttccgatatatattatcagcaatcaaaatatagcttttcaacaagagattgatattgcttatagaaaaatgaagcgacaatttagccatatttcgttgactgaaagtgaacaaaaaaatgatatgaacatttcgaataaagtttggatttgttggtttcagggcgaagaacgccctccggagttaattagaacatgtattcaatcaatgagaactcattttcttggaagagagattatcgtactgacagaagaaaatataagtgactatatagatataccagattatatcactgataaatataaaaagggttcgatttctcgtgcacattattcagatatccttcgggtagaactcttatgtcgttatggaggattatgggtagatgtaacagtgttgaatacaggaggagatttctcaaatcttgagttgccactttttgtatataaatatttggatttatcaagaaaagattctcaagccattgtagcatcaagttggttaatttcgtcatatagtaatcatcctatattgctgtatgcgagaaaactactctgggagtattggcgtagaaaaaatagtttatgcaattattttttatttcatatattctttacaacagctacagagctgtacccaatcgaatggtctgctgtccttacttttaacaatcattctcctcatatgcttaattttgagttaaataatcaattttcagaaaaaaggtgggaacagctaaaacagatatcggtgtttcataaattaaatcatcatatagattattctatcggtgttaacaatttttataagtttatagtatcttcgaaagttgagaaaaatgagtaa

SEQ ID NO: 4868 - DNA, 1029 bp, Streptococcus pneumoniae
  misc_feature (1)..(1029): tiling:Spneumo1:WAN024FXE; Cluster includes WAN0241A9 |cps 15bO||AAP76300.1|||1029 bp|putative glycerol-2-phosphate d ehydrogenase|S.pneumoniae||AY250187|ORF|001
ttgaaaaataatgatttaaagataggaagtggagctattcatcaaatytccgctacactttctcaaaatartatttcgggaaagattttatattgtgctgatccagttgtcgatgacttgtacggttcgatagtacgttcacaaataraggaaattggtcgggtaaaggaagaaagttgcaattataatactattgcttatgcgatgaatatagcagaamggrctattgccacagatattgactgtattgtgggaatgggaggaggtcgtgttttagatgtctgcaagtatgcatcttttatttcgaaacgtccttacctatcgattccgacaacagcagcaaatgatggcattgcttccccagttgctgttttgaaaagrcaggatgatagaccaaaaagcttaggggcggctatcccctcaatgacactaattgatattgatgttattgcatcaggacctatacaaaayataaaagctggtatcggtgatacaatatccaattacactgcattgaaagattgggagttggcagttgagcgagggaaagatgagatgcatggttttgcatatctaatgtcgcaaaattctttagatgctttaatgaaaacgaagtataattctattacccctgattttattgaagttttggtaaacyctttagttttatcaggcattgcaatggattttgcgggaagtagtagacctgtcagtgggtcagagcacttatttagtcatgcattagattactatggttctacaaggaatcttcatggaattcaggttgcattaggtacagtcgcagttttgaaattaattgaaaattctgttgatrctgtrgtggattacttgcaaagatttgaggttcatattaacccgaaacttttggggatagatgaagagttgtttatttattgtatgcaacatgctacaaaaatgagaagtaatcgctatacytatctgcatgargttgatcttagyacagatagattgaaacaaatatatwaggaactcataagcgagttgtag

SEQ ID NO: 4869 - DNA, 90 bp, Streptococcus pneumoniae
  misc_feature (1)..(90): tiling:Spneumo1:WAN024G3Y; Cluster includes WAN023U4U AX57 1764.1_435||||343951..344040|+|90 bp|Glimmer 2.02 orf pred iction|S.pneumoniae||AX571764.1|ORF|000
ttgaaaaatggatttcctgacctcacaattgagtcttggtctcaattgtgccccttgccaatctacagattggcaatcacaccacagcaa

SEQ ID NO: 4870 - DNA, 78 bp, Streptococcus pneumoniae
  misc_feature (1)..(78): tiling:Spneumo1:WAN024DNK; Cluster includes WAN023SIC NC_0 03098.1_2032||||1578515..1578592|-|78 bp|Glimmer 2.02 orf prediction|S.pneumoniae|R6|NC_003098.1|ORF|110
ttgaaaaatggcrragggcaagaaaaaagagaccaaagaaagtacttggtctctcgtttgattagctcaattcagcaa

SEQ ID NO: 4871 - DNA, 105 bp, Streptococcus pneumoniae
  misc_feature (1)..(105): tiling:Spneumo1:WAN024DQQ; Cluster includes WAN0242SS SP06 12||15900520|NP_345124.1|579707..579805|+|99 bp|hypothetic al protein|S.pneumoniae|TIGR4|NC_003028.1|ORF|111
ttgaaaacagaccttcattttgaaaatcatcaaaaaaatggtataatggtaggaaaagattcggctgaaagtatcagaacttttagaataagagggctarctaat

SEQ ID NO: 4872 - DNA, 87 bp, Streptococcus pneumoniae
  misc_feature (1)..(87): tiling:Spneumo1:WAN024DP8; Cluster includes WAN023SKD NC_0 03098.1_1279||||995636..995722|+|87 bp|Glimmer 2.02 orf pr ediction|S.pneumoniae|R6|NC_003098.1|ORF|110
ttgaaaacaggtacacttcatgtgaaaaaaacaacatttcagattttctgttccagaaatagctatcgctatgatataattatttta

SEQ ID NO: 4873 - DNA, 1233 bp, Streptococcus pneumoniae
  misc_feature (1)..(1233): tiling:Spneumo1:WAN024CZK; Cluster includes WAN0243DY spr1 854|ackA|15903896|NP_359446.1|1828803..1829993|-|1191 bp|A cetate kinase (acetokinase)|S.pneumoniae|R6|NC_003098.1|OR F|111
ttgaaaacgcttaaaaaggggtatcatgttatgacaaaaacaattgcaatcaatgcaggaagttcaagtttgaaatggcaattatacttaatgccagaagaaaaagtattggcgaaaggtttgattgaacgtatcggtttgaaagattcaatttcaactgtaaaatttgacggccgttctgaacaacaaattttggatattgaaaatcatayacaagcygttaaaattttattggatgacttgattcgtttcgatattatcaaggcttatgacgagattacaggtgttggacatcgtgttgttgctggtggagaatatttcaaagaatcaacagttgttgagggagatgttttagaaaaagttgaagagttgagtttgttggctcctctacacaacccggcmaatgcagcaggtgttcgtgccttcaaggaattgttgccagacattaccagtgtagttgtttttgatacttccttccacacaagtatgccagagaaagcttatcgctaccctctaccaacaaaatattacacagaaaacaaggttcgtaaatacggtgctcatggtacaagtcaccagtttgtagcaggagaagctgcaaaactcttgggacgtccattagaagacttgaagttaattacctgtcatattggtaacggaggctcaattacagctgtgaaagccggcaaatctgtagacacttctatggggttcactcctcttggtggtattatgatgggaacgcgtacaggggatattgatccagctatcattccttatttaatgcaatatacagaggattttaacacaccagaagatatcagtcgtgttcttaaccgtgaatcaggtcttttgggagtttctgctaattctagcgatatgcgcgatatagaagcagctktagcagaagggaatcacgaggctagcttggcttatgaaatgtatgttgaccgtatccaaaaacatatcggtcagtaccttgcagtgctaaatggagcagatgccattgttttcacagcaggtgtcggtgaaaatgcagagagtttccgtcgtgatgtaatctcagggatttcgtggtttggttgtgatgttgatgatgaaaagaatgtctttggcgttacaggagacatctcaacagaggcagctaaaatccgtgtcttggttattccaacagatgaagaattagtcattgcccgtgacgttgaacgcttgaaaaaataastrawactaaaa

SEQ ID NO: 4874 - DNA, 246 bp, Streptococcus pneumoniae
  misc_feature (1)..(246): tiling:Spneumo1:WAN024FF5; Cluster includes WAN023KTL 3154 80_2899b||||1547990..1548235|+|246 bp|EGAD orf prediction| S.pneumoniae|R6|NC_003098.1|ORF|110
ttgaaaagaccacgcacacccatgaagagacctgtcgctacgataactgggatgattggaacgaaaacatcaccraaagtacggatagcacgttggaaccagttcccttgtttagcaacttctgctttcatgtcatccttagatgatgttggtaakccaagtacaacaacttcatcgtacattttgttaactgtacctgtaccaaagataatttggtattgccctgagttaaagaaagcaccttga

SEQ ID NO: 4875 - DNA, 231 bp, Streptococcus pneumoniae
  misc_feature (1)..(231): tiling:Spneumo1:WAN024B4O; Cluster includes WAN023KRD 3132 28_3007||||1601409..1601639|+|231 bp|EGAD orf prediction|S .pneumoniae|R6|NC_003098.1|ORF|110
ttgaaaagactccttccaaggcttgaagkgtcagtagaaaaggaatccttggtcccatccattgttcttgaaaggatttgcctagggagttggaccactggcatacaaattgagcgttttctgtgctcaccttttcttcaaaacgaattgtcatcttttcctcaccaccttatctatgtttctccattatactatttctcccattttttacgaatagataagtatgattga

SEQ ID NO: 4876 - DNA, 2142 bp, Streptococcus pneumoniae
  misc_feature (1)..(2142): tiling:Spneumo1:WAN024B83; Cluster includes WAN0243XQ spr1 141|topA|15903184|NP_358734.1|1141707..1143812|-|2106 bp|D NA topoisomerase I|S.pneumoniae|R6|NC_003098.1|ORF|343
ttgaaaaggtgtgatactrtggctacggcaacaaaaaagamaaaatcaacagttaaaaaaaatctagtcatcgtggagtcgcctgctaaggccaagacgattgaaaaatatctaggcagaaactacaaggttttagccagtgtcgggcatatccgtgatttgaagaaatccagtatgtccgtcgatattgaaaataattatgaaccgcaatatatyaatatccgaggaaaaggccctcttatcaatgacttgaaaaaagaagctaaaaaagctaataaagtttttctcgcgagtgacccggaccgtgaaggagaagcgatttcttggcatttggcccatattctcaacttggatgaaaatgatgccaaccgtgtggtcttcaatgaaatcaccaaggatgcagtcaaaaatgcttttaaagaacctcgtaagatcgatatggacttggtcgatgcccaacaagctcgtcggatcttggaycgcttggtagggtattcgatttcgcctattttgtggaagaaggtcaagaagggcttgtcagcaggtcgcgttcagtccattgcccttaaactcatcattgaccgtgaaaatgaaatcaatgccttccagccagaagaatactggacagttgatgctgtctttaaaaagggaaccaaacaatttcatgcttccttctatggagtagatggtaaaaagatgaaactgaccagcaatracgaagtcaaggaagtcttgtctcgtctgacgagtaaagacttttcagtagatcaggtggataagaaagagcgyaagcgcaatgctcctttaccctataccacttcatctatgcagatggatgctgccaataaaatcaatttccgtactcgaaaaaccatgatggttgcccaacagctctatgaaggaattaatatcggtwctggtgttcaaggtttgattacctatatgcgtaccgattcgactcgtatcagtcctgtagcgcaaaatgaggcggcaagctycattacggatcgttttggtagyaagtatwctaarcacggtagcaaggtcaaaaacgcatcaggtgctcaggatgcccatgaggctattcgtccgtcaagtgtctttaatacaccaraaagcatcgctaaktatctggacaaggatcagctyaasctatatacccttatctggaatcgttttgtggctagccakatgacagcggccgtttttgataccatggctgttaaattgtctcaaaaaggggttcaatttgctgccaatggtagtcaggttaagtttgatggttatcttrccatttataatgattctgacaagaataagatgttaccggacatggttgttggagatgtggtcaaacaggtcaatagcaaaccagagcaacatttcacccaaccgcctgcccgttattctgaagcaacactgattaaaaccttagaggaaaatggggttggacgtccatcaacctacgcgccaaccattgaaaccattcagaaacgttattatgttcgcctggcasccaaacgttttgaaccgacagagytgggagaaattgtcaataagctcatcsttgaatatttcccagatatcgtaaacgtgaccttcacarctgaaatggaasgtaaactggatgatgtcgaagtyggaamagakcagtggcgacgggtcattgatgccttttacaaaccattctctaaagaagttgccaaggckgaagaagaaatggaaaaaatccagattaaggatgaaccagctggatttgaytgtgaagtgtgtggyagtccaatggtcattaaacttggtcgttttggtaaattctacgcttgtagcaatttcccagattgccrtcatacccaagcaatcgtgaaagagattggtgttgagtgtccaagctgtcatcagggacaaattattgagcgaaaaaccaagcgtaatcgcctmttctatggttgcaatcgctatccagaatgtgaatttacctcttgggacaagcctgttggtcgtgactgtccaaaatgtggcaacttccwcatggagaaaaaagtccgtggtggtggcaagcaggttgtttgtagcaaaggcgactacgaggaagaaaagatkrmtmwttgtcaactgtmrmkmaycaccaccaccaccactgac

SEQ ID NO: 4877 - DNA, 378 bp, Streptococcus pneumoniae
  misc_feature (1)..(378): tiling:Spneumo1:WAN024G79; Cluster includes WAN023RTW cont ig_1606_1||||579..956|-|378 bp|Glimmer 2.02 orf prediction |S.pneumoniae|670|WAN01UDD2|ORF|000
ttgaaaagtatgggatatgaagtacaattagctttgattgcgacaaagcctaagctgtcctatctgagcacccttatccgttatgaaaaactgtaygctatcaatccagatcaagcacgcgcaactccaaaagaacatcatgatttcattgtaaatcatctagttgataatacaagacaattggaaaaactagctatctttgaaagaattcaaatttaccaacgagatagaagttgtgtatacgattcrgaagaagataaaacttcagtagcaaccgttcttcatgatttactatttggcgaatggaatcaagttgagaaagagatgcttaaatcaggagaagraaaattgaaagatttaactaatcgaaatggttgt

SEQ ID NO: 4878 - DNA, 1145 bp, Streptococcus pneumoniae
  misc_feature (1)..(1145): tiling:Spneumo1:WAN024EXP; Cluster includes WAN0242AH SP13 25||15901179|NP_345783.1|1248255..1249394|-|1140 bp|oxidor eductase, Gfo/Idh/MocA family|S.pneumoniae|TIGR4|NC_003028 .1|ORF|021
ttgaaaatatataaaaagaggataaaaattatggtaaattacggtattgttggagctggatattttggagctgatttrgctcgctcaatgaacaaaattgaagatgcaaaagtggttgcggtatttgacccaaatcatggagaagaagttgctcaagagttgggatcagatgtttgtgcaagtttagatgaacttgtagcacgtgaagatattgattgtgtgatcgtagcttcacctagctaccttcaccgtgaaccwgttgtgaaagctgctcaacatggcaaacacgtattttgtgaaaagccaattgcattgtcttatgaagattgtaaagccatggttgacgcatgtaaagaaaataatgtyatctttatggctggtcacatcatgaacttctttaayggtgtacaccatgctaaagaattgattactcaaggtaaaatcggtaaagttctttattgccatgcygctcgtacaggttgggaagaacaacaaccaactgtatcatggaagaaacttcgttctcaatctggaggacatttgtaccaccatattcatgaattagattgcattcagttyatcatgggaggacttcctgaaaaagcgacaatggtaggaggcaatgtatatcataaaggtgaaaactttggtgatgaagatgatatgctcattgtaaacytagaatactctgatgatcgttatgctgttttggaatatggtaatgctttccgttggggtgaacactacgtcttgattcaaggaactgaaggagctatcaaacttgacttgttcaatactggmggtactcttcgtgttaaaggtgaaggagaatcacacttcttagtwcatgaaactcaagaggaagatgatgaycgtacagctatctataccggtcgtggtatggatggagcaattgcgtacggtaaaccaggagtacgttgcccattatggttrcaaacatgtattgataaagaaatggaatatctacatgacatcattaaaggtggagaaattacagaagaatwtgaaaaacttctcaatggtgtagctgctttagaatcaatcgctaccgctgatgcatgtactttatcagttaaagaagatcgaaaagtaagtctttcagaaatcacaaatgcttaactaat

SEQ ID NO: 4879 - DNA, 201 bp, Streptococcus pneumoniae
  misc_feature (1)..(201): tiling:Spneumo1:WAN024F7E; Cluster includes WAN023WE2 AX56 9725.1_1||||1..201|+|201 bp|Glimmer 2.02 orf prediction|S. pneumoniae||AX569725.1|ORF|000
ttgaaaatcattcaacaacagagtgctacaattgatagtctcaccaatgaacttgcccttcttcgtgaacaagtggcttatctaacgcaaaagctctatggaaaatcctctgagaaaagtgtttgcccatctggacaactcagtctttttgaagaggaacaaaatatggaagaagactctgacttacccagtctaactaat

SEQ ID NO: 4880 - DNA, 487 bp, Streptococcus pneumoniae
  misc_feature (1)..(487): tiling:Spneumo1:WAN024F7Z; Cluster includes WAN0243TF spr1 296||15903339|NP_358889.1|1291130..1291498|-|369 bp|Hypoth etical protein|S.pneumoniae|R6|NC_003098.1|ORF|301
ttgaaaatcattcaacaacagagygctayaattgatagtctcacyaatgaacttkcccttctgygtgaacaagtggcttatctrackcaaaagctctmtggaaaatcctctgagaaaagtgtttgcccytytggacaactcaacctttttgaggaagagtctccatctgagraagatggagatgttcccagttgaaacagaggaaattacctacaaacgtaagaaatctaaagggaaacgtcaagctattcttgcccaatttgattcagaagaagttcatcatcaagtagaagagagcatttgccctgattgtcaggacgatttaaaagagattggagcgagccttcaacgacaagaattggtctttattcctgcgcaattaaaaagagtggatcatatccaacacgcttacaaatgccaaacatgcagtaagaataatccaagtgataaaattgtaaaagctcctattcctaaagcccctttataa

SEQ ID NO: 4881 - DNA, 111 bp, Streptococcus pneumoniae
  misc_feature (1)..(111): tiling:Spneumo1:WAN024BEV; Cluster includes WAN023SIM NC_0 03098.1_1941||||1514040..1514141|+|102 bp|Glimmer 2.02 orf prediction|S.pneumoniae|R6|NC_003098.1|ORF|110
ttgaaaatctcttcaaaccacagtcgcttcaccttggattatataggtcagtcttatctacaacctcaaagcggtgttttgggcaatctgctactagcttgcctaactaat

SEQ ID NO: 4882 - DNA, 459 bp, Streptococcus pneumoniae
  misc_feature (1)..(459): tiling:Spneumo1:WAN024D8E; Cluster includes WAN0243SS spr1 319||15903362|NP_358912.1|1306669..1307121|+|453 bp|Hypoth etical protein|S.pneumoniae|R6|NC_003098.1|ORF|111
ttgaaaatgaaaactaccttttcctacccaaaatgggcaraaattccaaacattracctctatctggaccaggttttgctctatgtcaatcaggtctgcgcccctatctctcctaataaagacaarggcctaacagcatctatggtcaacaattatgtgaaaaatggttacctgacaaagcctgacaaaaaaaaataccaacgccaacagattgcccgtttgattgctatcacaaccctcaagtctgtattttctattcaagaaatagcccagacacttaatactctacaaactcaagcaagttcagaccaactctacgatgcttttgtggactacatgaaccaaggaattgacccagctaaccctattatccaaaccagctgccaaaccrtyaaactctatcatcaaactctagacttaatcgatcatactcaagaggaggtaatccaaykaactaat

SEQ ID NO: 4883 - DNA, 569 bp, Streptococcus pneumoniae
  misc_feature (1)..(569): tiling:Spneumo1:WAN024DGO; Cluster includes WAN0244DJ spr0 571||15902615|NP_358165.1|581508..582071|+|564 bp|Conserve d hypothetical protein|S.pneumoniae|R6|NC_003098.1|ORF|111
ttgaaaatgaaaagaccacttgagatggcacatgattttttggctgaggtcgtgacaaaagaggatgtcgtagtggatgcgactatgggaaatggtcatgacacgctttttttagccaagctagccaagcaagtctatgcctttgatattcagaagcaagccttgraaaagacccaagagcgtttgcatcaggctgrcttgacaaatgcccagttaatcttgcaaggccatgagacactggaccagtttgtgayaaaarctaaggcagggatttttaatytgggctatttgccgkcagctgataagtctgtcatcacccgaccgcagacaacsattgargcattagaaaagctatgtsryttrcttgtcaarggtggacgaattgctattatgatttactatggtcatgaaggaggcgayctcgagagagatgctgtcttggattttgtratccagttgaaccaacaagagtacacagctgccatttaccgaactttaaaccaagtcaacaacccgccgtttttagtgatgattgaaaaattagagagatacagacatggataactaat

SEQ ID NO: 4884 - DNA, 1194 bp, Streptococcus pneumoniae
  misc_feature (1)..(1194): tiling:Spneumo1:WAN024FR5; Cluster includes WAN023PV9 pne1 0_12||||8868..10061|+|1194 bp|Type 7C capsule operon, Glim mer 2.02 orf prediction|S.pneumoniae||WAN01UCKC|ORF|000
ttgaaaatgaagattttatattttatgaataatacagatcatggtggggctgctttagcattattagatttagttactcagataaaygagaattatcctgagtatgaacttattgttgtaacaggraaaaaaaataatttaaatgttaagttaacagaaattggtattgaaaattacttttttccatttagaaattttattagttcatataaaaarcctgcaatactatggacgattttatataaaattcgtcattatatcggaaatcgaatggctctaaaaaaaatagaaaaaaaaattgatttgaaaaaaatcgatattattcattctaatttaaatagaatcgatataggagcaatattagccaaaaagcacagtataccccatttatgkcatataagagagcatttggatgtatggtatttttataataaattagatcatagaaagtttgagtatgrcttkaaggtcttgactacggaaaaaaattatattttttatatgtgttctttttcaacgaaatatattgcaatctctaactctgtagctatggattggtgtaaaaaaggactatctcagtcatctattgttaaagtttacgacggkatcaagttacctcargtatttggtgataaraaatggtttagaaataaaaaaataaatattgtatttgttggtggttacgatattaaaaaaggtcaggagttgtttttaagctattttttaaaattaccaaaagaaatacaaatgcaatatactttgactttctatggaagtggaaaatctaagtatataaagaaattacaaaagatgtctcaacatctatgttctgatcaagttaaatttcatagttatatagataatcttacagaattactaccaaattatgatattgggattaatttttcaacaayggaaggttttggaagagtgaytgttgaatatttagcgaacggtctttgtgttgttgcaartaaaartggagctagtccagaattaataacagaagaagttggatttttaatcgacaaggataatcaggatgaatttattcagttrtttactaaattrtctattgaaaagaataagataagacaaatgggraataaagcarttrawcakgcacaaaagttttcaataraccaacatacaagagagattataaatgtatatcaagaaatgagaaataaacar

SEQ ID NO: 4885 - DNA, 872 bp, Streptococcus pneumoniae
  misc_feature (1)..(872): tiling:Spneumo1:WAN024G8B; Cluster includes WAN02444Y spr0 880|tehB|15902924|NP_358474.1|870728..871594|+|867 bp|Tell urite resistance|S.pneumoniae|R6|NC_003098.1|ORF|221
ttgaaaatggaaaaattagttgcctataaacgcatgcctttgtggaataaacaaacaatgcctgaagctgttcagcaaaagcacaatacaaaagttgggacttgggggaaaattactgtcttgaagggagctctcaagtttattgaattgacagaagaaggggaagttctagctgaacacctctttgaagcaggggcagacaatccaatggcccaacctcaagcctggcaccgagtggaagctgccacagatgatgtggaatggtacttggaattttattgtaaacctgaggattattttgctaaaaaatacaataccaatcctgttcattcagaggtcctagaggccatgsagacagtgaaacaagggaaagctttggatttgggttgtggtcaggggcgtaattctctttttctagcccagcaagattttgatgtgacggctgtagatcaaaatggactagctcttgaaatcttgcaaagcattgtggagcaggaagatttggacatgcctgttgrcctttacgatatcaattcagctagcattgaacaagaatatgattttatcgtttcaacagttgttctcatgtttctacaagcggaccgcattccagctattattcaaaatatgcaggagaaaaccagtgttggyggttacaaccttatcgtttgtgccatggacacggaggattatccttgctcggttaacttcccattcacctttaaagaaggagaactggcagactattacaaggattgggaattggttaagtacaatgaaaatccaggccatttgcaccgtcgcgatgagaatggcaatcgtattcaactacgctttgcgaccttactagctaagaaaatcaagtaactaat

SEQ ID NO: 4886 - DNA, 1521 bp, Streptococcus pneumoniae
  misc_feature (1)..(1521): tiling:Spneumo1:WAN024GDQ; Cluster includes WAN0244BE spr0 648|NSS transporter|15902692|NP_358242.1|654580..655971|-| 1392 bp|Sodium-dependent transporter|S.pneumoniae|R6|NC_00 3098.1|ORF|542
ttgaaaatgrttttcttgacagacrttagaaaacatrataggatagtcaagtctatcaatcaaaragaaggctatttgacaactcaagtarrtttttcttattttgaaaarggagatcagagtttaactatgtcagaaaaatcacaatgggggtcgaaacttggytttattctagcatctgctggctcggycatcgggcttggtkccgtttggaagtttccctacatgactgctgctaatggcggtggaggctttttactaatctttctcatttccactattttaatcgrtttccctctcctgctggctgagtttgcccttggccgtagtgctggygtttccgctatcaaaacctttggaaaactgggcaagaataacaagtacaactttatcggttggattggcgcctttgccctctttatcctcttatctttttacagtgttatcggaggatggattctagtctatctaggtattgagtttgggaaattgttccaacttggtggaacgggtgattatgctcagttatttacttcaatcatttcaaatccagccattgcyctagkagctcaagcrrcctttatcytattraatatcttyattgtatcacgtggggttcaaaaagggattgaaagagcttcgaaagtcatgatgcccctgctctttatcrtctttgtyktyatcatcgrwcgctctcycagtttgccaaatgccatggaaggggttctttacttcctcaaaccagayttttcaaaactgactagcrctggtcycctctatgctctgrgacaatctttctttgccctctcactaggggttacagycatgytgacctatgcttcttacttrgacaagaaaaccaatctrgtccagtcargaatctccatcgtagccatgaatatctcgrtatccatcatggcaggtctagccattttccaagctcgrtcccccttcarwmtssakwytgaagggggaccsagcytgstctttatcgtcttgcctcaactctttgacaagatgccttttggaaccattttctacyktcctyttkcctctttgcgacwgtcacttyttctgtcgtkatgctggaratcaatgtrgrcaatatcaccaaycaggayaacagcaarcgtgcyaaatggagtgttattttaggaattttgacctttgtctttggcattccttcagccctatcttacggtgtcatggcggatgttcacatttttggtaarrycttctttgacgctatggacttcttggyttccaatctcctcatgccatttggagctctctwcctttcactttttacaggctatatctttaaaaaggctcttgcaatggaggaactccatctcgatgaaagagcatggaaacaaggactgttccaagtctgrctcttccttcttcgtttcttcgtttcgtcatyccaatcatcatrattgtggtcttcatygcccaatttatgtaayyaawaaggacttgagtarykaaytcaggycctttctttttatggatgrctaa

SEQ ID NO: 4887 - DNA, 2241 bp, Streptococcus pneumoniae
  misc_feature (1)..(2241): tiling:Spneumo1:WAN024DJV; Cluster includes WAN0244LI spr0 284|xylS|15902328|NP_357878.1|282002..284215|+|2214 bp|Alp ha-xylosidase|S.pneumoniae|R6|NC_003098.1|ORF|111
ttgaaaatttttaagggagagttttatcgmatctctgtattaacagacaagytagtaaggttagaatactctmraactggmarttttgaggatagaackacacaacttatctataatagagattttggycaarwttcgttagattatatcgagacatcaaaygtactagatattatgacggactattttcatctgcactttaataaaggaraatttaacgccgaaaatttatttatagaattaaaaggaaattttgccgtatatggtagtcgctggtattttggtgaatckattgaaacgttaaaaggaacagctcggactctggataaggcagatggagcaatcycrttagaagatggaattattagycgaaatggtatagccttattggatgattctcaaggatttatttgggatgaacartctggttatattgagagagaaaatcaaattgacctstatttctttgcctatgggcatgattatagaggagcaatcagagayttttaccatttgactggttcaacacccttgttrccaagatatgctttaggsaattggtggagtagatattggccttatacgtcggatgaatacttggatttaatagacagatttgaaacagagaaaattccattatctatcggtgtgttagatatggattggcatataactgacattccagctcgytttggaagtggctggacaggatatagttggaataraaacttaataccwaatccagaacagttattgcaacaacttcatgatagaaagytaaarctctcyttaaatgtccatcctgctgatggkatacgggcttatgaagaagcttatcctcaartcgcmaaacgrttrgggttaaatgtagaactagaagaacctgcyatttttgatttttttaatccctcttttagggaagcctactttaaagatgttcattatgarctagaaaagcagggagtagatttttggtggattgactggcaacargggacwcaaggyatrytrgatccactwtggcttttaaaccattatcaytatcaggatagttgtaaaaatgcagaaggtggtttgattttatcaagatatgcaggtcctggtagycaccgctaccctgttggtttttcaggggayactattattagttggaattccttaagatttcaaccytattttacagcgacagcatctaatatcggttatagttggtggagycatgatatcggtggrcayatgytgggggattatgacgaagagctrcaaactagatggctacagtttggtgtttttagtccgatyactcgattacatagttctagaagtccttttaatagtaaagaaccttggttyttttcagaaacaacatctaagattatgaagaaataccttcgtttgagrcatcagatgatycchtatctatayacyatgaatgtamagacacaygaggaaggtgccccattaatcagyccaatstattatttctayccagagaatgatgagagctataatgttccaaaccaatacttttttggaacagaactratggtggctcccattgtagaaaagatggayttgrcattccaatctgcaaaagtrgatgtatggttccctgaaggtgaatggtatgacttyttttcagakaaaaaatayacaggtggtgtgaagttragtgtttatagrgacatytcgactayrcctgtgtttgcaaaaagtggtgcratcattcccttggttggttctgagatagrtatgggtgttgatttacctgargttgtagattggtatgtattcccaggvaaacaacattcttttgaaatgcttgaagatcaaaatggtcaaagatataaaacaagattatcaatcgattgggaaatgggratggtagagttarcattacaaggagattctagtatcgttccaagcaatagaarrcatagaattcattttaaaggaacgaatgtgtctataattgaattrccaaataagaatgatacagctaratttgaatgkaaagataataaaasrayatctttaaatgaygaagtttttagactactaaagacagcttctcttccatatgaattaaaagatagattgttaaatcaattcatcaatgcsaaaaactctcatgacttaatgaatatcttgcatcatcaggataaggaattgagagggcgtttgttggaaatgatatttactagccmaaamctaaytratataattagaaagtcatctaac

SEQ ID NO: 4888 - DNA, 387 bp, Streptococcus pneumoniae
  misc_feature (1)..(387): tiling:Spneumo1:WAN024FWF; Cluster includes WAN023L96 3154 20_2233||||1197763..1198149|+|387 bp|EGAD orf prediction|S .pneumoniae|R6|NC_003098.1|ORF|110
ttgaaaatttttccatctttcaatattaatgcacgatcagttttcgaggccaattctatatcgtgcgttaccataattacacacttacccgcccctactaactctctcaataattcaaaaattacttcacgagaaacgctgtctaaagccccagttggctcatcagcaaatattatatcactatcagcaataaccgctctagctatagcaaccttctgttgttctccaccagacagagttccaacaaaatcgtttaagccagcattaaacttcattcttttgagtaagttttctacatttttaatagttaattttttttgtgataatcgcaaaggaagtgctatattttctattaccggcagggaaggtattaaattgtatgcttga

SEQ ID NO: 4889 - DNA, 135 bp, Streptococcus pneumoniae
  misc_feature (1)..(135): tiling:Spneumo1:WAN024DTC; Cluster includes WAN023SN5 NC_0 03098.1_134||||108269..108403|-|135 bp|Glimmer 2.02 orf pr ediction|S.pneumoniae|R6|NC_003098.1|ORF|100
ttgaaacaaaaaaacctagaaatgctacataaaatgtcattcctaggcgtatttatgctatttttctctggaaaacatgagtattcagccagtcaaaaggagctgaatgaactcattttccctcgcccaattcaa

SEQ ID NO: 4890 - DNA, 228 bp, Streptococcus pneumoniae
  misc_feature (1)..(228): tiling:Spneumo1:WAN024G5D; Cluster includes WAN023LHY 3137 10_1877a||||1014863..1015090|-|228 bp|EGAD orf prediction| S.pneumoniae|R6|NC_003098.1|ORF|110
ttgaaacacggttcgcatagagaatacctgccttcatccagttcagacagttgttccatcgaagggtgccatcagcgtaacgttcaaagccaactccaaacaaatcacccaacattccttctgaaaattgtccttggaattctaaattatgaatggttaaaactgtttcaatgtcctcataggcttgaatccaacggtatttttccttcaacaagaaaggaatcatag

SEQ ID NO: 4891 - DNA, 99 bp, Streptococcus pneumoniae
  misc_feature (1)..(99): tiling:Spneumo1:WAN024CM7; Cluster includes WAN0242R0 SP06 83||15900584|NP_345188.1|655986..656084|-|99 bp|hypothetic al protein|S.pneumoniae|TIGR4|NC_003028.1|ORF|021
ttgaaaccgmtttcttatgtgataagaataacwtttttattatttgttgtcaaggaaaaaatcgaattttttagatattttactatattacctctrtga

SEQ ID NO: 4892 - DNA, 392 bp, Streptococcus pneumoniae
  misc_feature (1)..(392): tiling:Spneumo1:WAN024FK5; Cluster includes WAN0243QR spr1 392||15903435|NP_358985.1|1372514..1372900|-|387 bp|Conser ved hypothetical protein|S.pneumoniae|R6|NC_003098.1|ORF|2 11
ttgaaactattgaaatcgaggactaagatgaaaatcggtgataagctaaaggggcgtattacagggattcagccctacggtgcctttgttgagttagagacgggtgatacggggctgattcacatttcagarattcggacaggatttattgaaaatattcaygaaaccttgaaagtcgatgaagaggttcaagttcaggtagtggatttagatgaatttacrgggaaagccagtctttctatccgcactttggaggaagaaaagtaccagtttcctagacggagacgcttttcaagcgaccgctttaactacggytttgctccctttcgacgaatgctaccaatctggactggagaagccctgcaccatttaaaaaagaagaagtarctaat

SEQ ID NO: 4893 - DNA, 105 bp, Streptococcus pneumoniae
  misc_feature (1)..(105): tiling:Spneumo1:WAN024FWI; Cluster includes WAN023Y26 AL44 9935.1_88||||70262..70366|-|105 bp|Glimmer 2.02 orf predic tion|S.pneumoniae||AL449935.1|ORF|000
ttgaaactgaaatctattatactacaaactattgaaagcgttttaattttaaggtataataatctcatagaaataaagaaaaggaggaaagaggatgccacagat

SEQ ID NO: 4894 - DNA, 1367 bp, Streptococcus pneumoniae
  misc_feature (1)..(1367): tiling:Spneumo1:WAN024CTM; Cluster includes WAN0244TD spr0 001|dnaA|15902045|NP_357595.1|1..1362|+|1362 bp|DNA biosyn thesis, initiation, binding protein|S.pneumoniae|R6|NC_003 098.1|ORF|111
ttgaaagaaaaacaattttggaatcgtatattagaatttgcacaagaaagactgactcgatccatgtatgatttctatgctattcaagctgaactyatcaaggtagaggaaaatgttgccactatatttctacctcgctctgaaatggaaatggtctgggaaaaacaactaaaagatattattgtagtagctggttttgaaatttatgacgctgaaataactccccactatattttcaccaaacctcaagatacgactagctcacaagktgaagaagctacaaatttaactctttatractatagtccaaagttagtatctattccttattcagatacgggattaaaagaaaagtatacctttgataactttattcaaggggatggaaatgtttgggctgtatcagccgctttagctgtctctgaagatttggctctgacctataaccctctttttatctatggrggaccwggscttggtaagactcacytrttaaacgctattggaaatgaaattctaaaaaatattccwaatgcgcgtgttaaatayatycctgcmgaaagctttatyaatgactttctkgatcacctaagacttggggaaatggaaaagtttaaaaaracctatcgtagtcttgatcttttgttaatcgatgatathcagtcactcagcggaaaaaaagtygcaactcaggaagaatttttcaatacctttaacgcccttcatgacaagcraaaacarattgtcctaacgagtgatcgtagtccaaarcatytagaagggctcgargaraggcttgtcacgcgytttagttggggattgacacaaactatcacmccccctgactttgaaacacgtattgccattttacaaagtaaracggaacatttaggctacaatttccaaagtgatactctagaatacctagctgggcaatttgattcaaatgttcgagatcttgagggagccatcaacgacatcactttaattgccagagtaaaaaaaatcaaggatatcactattgatattgctgcagaagccattagagcccgcaaacaagatgttagccaaatgctcgtcatcccaattgataaaatccaaactgaagttggtaacttttatggtgttagtatcaaagaaatgaagggaagtagacgccttcaaaatattgttttggcccgtcaagtagccatgtatttatctagagaactaacagataatagtcttccaaaaattgggaaggaatttgggggaaaagatcataccacagtcattcatgcccatgccaaaataaaatctttgattgatcaagacgataatttacgtttagaaattgaatcaatcaaaaagaaaatcaaataactaat

SEQ ID NO: 4895 - DNA, 536 bp, Streptococcus pneumoniae
  misc_feature (1)..(536): tiling:Spneumo1:WAN024CZA; Cluster includes WAN0243PK spr1 435|apt|15903478|NP_359028.1|1418722..1419252|-|531 bp|Ade nine phosphoribosyltransferase|S.pneumoniae|R6|NC_003098.1 |ORF|211
ttgaaagaaagaaaaaagatgaatttaaaagattacattgcaacaattgaaaattatccaaaggaaggcattaccttccgtgatattagtcctttgatggctgatggaaatgcttatagctacgctgttcgtgrratcgttcagtatgctactgacaagaaagtcgacatgatcgtgggacctgaagctcgtggatttatcgtgggttgtccagttgcctttgagttgggawttggttttgcgcctgttcgtaagccaggtaaattgccacgcgaagttatttctgctgactatgaaaaagagtacggtgtcgatacyttgactatgcacgcggatgccattaagccaggtcaacgtgttcttattgtagatgaccttttggcgacaggtggaactgttaaggcaactatcgagatgattgaamaacttggtggtgttatggcaggttgtgccttccttgttgaattggatgaattgaacggccgtgaaaaaatyggtgactacgactacaaagttcttatgcattattaactaat

SEQ ID NO: 4896 - DNA, 606 bp, Streptococcus pneumoniae
  misc_feature (1)..(606): tiling:Spneumo1:WAN024CY6; Cluster includes WAN0246QE 2036 68-79-5_1||||268..873|-|606 bp|Glimmer 2.02 orf prediction from Patent Sequences|S.pneumoniae||WAN024707|ORF|000
ttgaaagaacaaatttttttgatgggtgggaatcccccaatraagaaatatagtattgttgataaaattgtattatcaaccaagattaaaagaattatcatttttacagtttttcgagaaaattgggaaccgtacatgaaaaagtacacggaagtttttcaaagtcaatttcctaatctaaacattgattacttgctcctggacactgagcagattgatcttgatagctatctagatgctgaymtaattatcatcggtggtggaaatacggaaaaatatatwgctacttatgtyaatcaggagttcaaaarttatatygatcatatgcttaayaaagrggcraaarttataggrttttctgcaggagccctaytattaggagaaaaagtctaygtctcacctaaygataattcagatcatcagataaagataaaaratggattaggactctttagtcagtttttaattagtgtcyattatgattcmtggaatgataaagcaaataaggatagagctgaagaactcgttaatgttcccataattccactaaatgatcattcwtgtcttgtattrgataaacttggaaacatyatwgagaaaattgac

SEQ ID NO: 4897 - DNA, 656 bp, Streptococcus pneumoniae
  misc_feature (1)..(656): tiling:Spneumo1:WAN024GDH; Cluster includes WAN0244B7 spr0 655|upp|15902699|NP_358249.1|660612..661262|+|651 bp|Uraci l phosphoribosyltransferase|S.pneumoniae|R6|NC_003098.1|OR F|110
ttgaaagaaggaattccaaaaatgggaaaaattgaagttattaatcacccactgattcaacacaaattgtcaatcttgcgtcgtacagatacttctacaaaagcttttcgtgagctagtagatgagattgcaatgttgatggggtatgaagtacttcgtgatcttccactagaagatgtggaaatcgaaacaccaattacaaaaacagttcaaaaacaattggcaggtaagaaattggccatcgtcccaatcttgcgtgcaggtatcgggatggttgatggtctcttgarcttggttccagctgctaaagttggccacatcggtatgtaccgtgatgaagaaacacttcaaccagttgaatacttggtgaaattgcctgaggacattgaccaacgtcaaatttttgtagtagayccaatgttggcaacaggtggctcagcaatcttggctgttgattctcttaaaaaacgtggcgcatcaamtatcaaatttgtctgccttgtatctgctccagagggtgtaaaagyccttcaagaagctcatccagatgtagaaatctttacagcagccttggatgaacgtttgaacgaacacggttatatcgttccaggtcttggagatgctggagaccgcttgttcggtacaaaataactaat

SEQ ID NO: 4898 - DNA, 153 bp, Streptococcus pneumoniae
  misc_feature (1)..(153): tiling:Spneumo1:WAN024GH9; Cluster includes WAN0242T7 SP05 96||15900505|NP_345109.1|564985..565131|+|147 bp|hypotheti cal protein|S.pneumoniae|TIGR4|NC_003028.1|ORF|011
ttgaaagaggcaaataaaaatcatccagcaggagctccaacctttgctaaaggtgaaggagagcatgcaaatgatattgtagcaacttattcagatggtacaacttattatgtaccgttaaatgatgtgacaaaatatgcgaggctarctaat

SEQ ID NO: 4899 - DNA, 1481 bp, Streptococcus pneumoniae
  misc_feature (1)..(1481): tiling:Spneumo1:WAN024GMH; Cluster includes WAN02446Q spr0 816|cad|15902860|NP_358410.1|818663..820138|+|1476 bp|Lysi ne decarboxylase|S.pneumoniae|R6|NC_003098.1|ORF|111
ttgaaagagttagatcaaaaccaagccccaatttatgarkccttggtgaagttacgcaagaaaaggattgttccctttgatgttccaggtcacaagcgtggacggggaaatccagaacttgtcgaactcttaggagaaaaatgtgtaggcattgatgtcaattcgatgaaaccyttggataatttaggccatcctatttcgattattcgtgatgcagaggagctggctgcagatgcttttggagctagccatgcctttctaatgattggtggaacaacttcatcggtgcagactatgattctggcaacctgcaaggcaggagataagattattctgccacgaaatgtccataaatctgctatcaatgcgttggttctatgtggtgccattcccatctatatcgagatgagtgtagatcctaagattggtatcgctttaggtcttgaaaatgaccgagtagcacaggccataaaggaccatccagatgctaaggctatcctaatcaacaatcctacttactacggcatmtgttcagacctaaaggggttgacagaaatggctcatgaagctggcatgatggttttagtagatgaagcccayggagcgcatttgcatttcactgrtaaacttccaatttctgctatggatgcaggrgctgatatggcagcagtttccatgcataagtctggtgggagtttgacmcaaagytcsmttytwytwatcggggagcagatgaatycygartacgttcgtcagatwatwaacctgachcagtctacatctgcctcttacttrttgatggctagtttggatatttcacgtcgcaacttggcccttcgtggtaaagagtcgtttgagraagtcattgagctatcygagtaygcycgycrtgaaatcaatrcyatyggyggytactatgcytactcaaaagagttaatagayggtgtktcggtytgygattttgaygtaacyaagytgtcagtttacactcagggwatwggcttaacaggtatcgaggtttatgacctcttgcgagacgaatacgacattcagatcgagtttggtgatatcggcaatatcttggcctatatttccatcggcgaccgcatccaagacatcgagcgcttggttggtgctctggctgatattaagagactctattcamgagatggraargayttratagcwggagaatatattcagcccgagttrgtgctgtctccrcaagaagccttctattcagaragaaaaagtttracyttrgaygadtctgttggacaggtctgtggrgaatttgtyatgtgytaycctccaggdatycctatcttggctcctggygaacgcatyacacgagaaattgtmgactatatccaattygccaaggaacgtggttgctccctccaagggacggaagatccagaggtcaatcayatcaacgtyattaagagaaagacaaactataagaaaagtcaatarctaat

SEQ ID NO: 4900 - DNA, 803 bp, Streptococcus pneumoniae
  misc_feature (1)..(803): tiling:Spneumo1:WAN024GKG; Cluster includes WAN0244GZ spr0 447|xerD|15902491|NP_358041.1|452481..453278|-|798 bp|Inte grase/recombinase|S.pneumoniae|R6|NC_003098.1|ORF|211
ttgaaagattttgaattacatttgaagaaagctggtttagctgaaaatactgtgcgttcgtacctttatggtgttcgatttttcttggagaattacraactcaaaatggaagatttatttgaatacaaaggatatttattagacaattttaaacctaaaactgtcaatttgcgactacaaggagtaaataaatatctggcttttattggtcatgatgatttgaaattaaaatttgtcaaagtacagcaaaaaccrtttttagaagatgtcattagccatgctgattacctttttcttaaacgtagtttgaaaaaagatggtattttaaaatggcattttgtcgtttggtttttaggtgcaactggggctcgtgtaagtgaacttattaaactaaaagtagagcatgtagaaatcggttattttgacatttactcaaaaggtggtaaaattcgtagactgtacattcctaaaaaattaagaaatagttgtcttagttggttagaatcagaaaatcgccgaagtggttatttatttttgaataaatttaacgaaccaattacagcaagaggagttgctcaacagttaaaaaattatgctgataaatacaaaatgaatcctaamgtaatttaccctcattcttttaggcatttatttgctaagaattttttagcgaagtataatgatattgccttgcttgcagatttgatgggacacgaaagtatagaaactactcgaatttatctaaggaaaacagctactgaacaacaaaatattgtagataaaattgttaattggtaactaat

SEQ ID NO: 4901 - DNA, 225 bp, Streptococcus pneumoniae
  misc_feature (1)..(225): tiling:Spneumo1:WAN024GH6; Cluster includes WAN023LX8 3152 25_1003||||523844..524068|-|225 bp|EGAD orf prediction|S.p neumoniae|R6|NC_003098.1|ORF|110
ttgaaagccgaactggtaaaggttacatccttggatgaatcctcaagagccgttaagctaaccaagttattgtctgcagctgataaatcatcacgctccacgctctgctcgccagtcactgcttccttgtcttttagttttgcgaccgtctcaagttcaggagagacattttccagccccttaatcttgcttacagatgctaggtctgacaacttgaatgtctga

SEQ ID NO: 4902 - DNA, 2678 bp, Streptococcus pneumoniae
  misc_feature (1)..(2678): tiling:Spneumo1:WAN024ER7; Cluster includes WAN0243EF spr1 837|adhE|15903879|NP_359429.1|1811697..1814369|-|2673 bp|A lcohol-acetaldehyde dehydrogenase|S.pneumoniae|R6|NC_00309 8.1|ORF|431
ttgaaagctrtggaggaaaatatggctgataaaaaaactgtgacaccagaggaaaagaaactcgttgctgaaaarcacgtagatgagttggttcaaaaagctctagttgcccttgaagaaatgcgtaaattgratcaagarcaagttgactacatcgttgccaaagcatcagtagcagctttggatgcccayggagaattggctttacatgcctttgaagaaacaggacgtggtgtatttgaagayaaagcaactaagaacttgtttgcytgtgaacacgtagtaaacaacatgcgycacactaagacagttggygttatcgaagaagacgatgtaacaggattgactcttattgctgaaccagttggtgttgtttgtggtattactccaacaacaaacccaacatcaacagcaatcttcaaatcattgatttcattgaagacacgtaacccaatcgtctttgccttccatccatcagcacaagaatcatctgctcatgcagctcgtatcgtccgcgatgcagctatcgcagctggtgctcctgaaaactgtgtgcaatggattactcaaccatctatggaagcaacaagtgcccttatgaaccacgaaggtgttgcracaatccttgcaacaggtggtaatgccatggttaargcsgcwtaytcatgtggtaaaccagctcttggggtaggtgccggaaacgttccagcttatgttgaaaaatcagcaaacattcgtcaagcagcacacgatatcgtcatgtctaaatcatttgataacggtatggtctgtgcatctgaacaagcagttatcattgataaagaaatttacgatgaatttgtagcagagttcaaatcttaccacacttactttgtaaacaaaaaagaaaaagctcttcttgaagagttctgcttcggcgtcaaagcaaacagcaaaaactgtgctggtgcaaaattgaacgctgacatcgttggtaaaccagcaacttggattgcagaacaagcaggatttacagttccagaaggaacaaacattcttgctgcagaatgtaaagaagttggcgaaaatgagccattgactcgtgaaaaattgtcaccagttattgcagttttgaaatctgaaagccgtgaagatggtattactaaggctcgtcaaatggttgaatttaacggtcttggacactcagcagctatccacacagctgacgaagaattgactaaagaatttggtaaagctgttaaagctattcgtgttatctgtaactcaccttctacttttggtggtatcggggacgtttacaatgccttcttgccatcattgacacttggatgtggttcttacggacgmaactcagttggggataacgttagtgccattaacctcttgaatatcaaaaaagtcggaagacggagaaataacatgcaatggatgaaacttccttcaaaaacatactttgaacgtgattcaattcaataccttcaaaaatgtcgtgacgttgaacgtgtcatgatcgttactgaccatgccatggtagagcttggtttccttgatcgtatcatcgaacaactggaccttcgtcgcaataaggttgtttaccaaatctttgcggatgtagaaccggatccagatatcacaactgtaaaccgtggtactgagattatgcgtgccttcaaaccagataccatcatcgcactcggtggtgggtctccaatggatgctgccaaagtaatgtggctyttctacgagcaaccagaagtggacttccgtgaccttgtccaaaaattcatggatatccgtaaacgtgccttcaagttcccattgcttggtaagaagactaaattcatcgcgattccaactacatctggtacaggatctgaagtaacaccatttgccgttatctctgataaagcaaacaaccgtaaatacccaatcgctgactactcattgacaccaactgtggcaatygtagaycctgctttggtattgacagttccaggatttgttgctgctgatactggtatggacgtattgactcacgcgacagaagcatacgtatcacaaatggctagtgactacactgatggtttagcacttcaagcyattaaattggtctttgaaaatctcgaaagctcagttaagaatgcagacttccactcacgtgagaaaatgcataacgcttcaacaatcgctggtatggcctttgccaatgccttcctaggtatttctcactcaatggcccataagattggtgcgcaattccacacarthcacggwcgtacaaatgcyatcttgcttccrtacgttatccgttacaacggtacacgtccagctaagacagcaacatggcctaagtacaactactaccgtgcagatgaaaaataccaagatatcgcacgcatgcttggacttccagcttctactccagaagaaggggttgaatcttacgcaaaagctgtctacgaactcggtgaacgtattgggatccaaatgaattttagagaccaaggaattgacgaaaaagaatggaaagaacattctcgtraattagccttcctggcttatgaagaccaatgttcaccagctaacccacgtcttccaatggtagaccatatgcaagaaatcatcgaagatgcatactatggctacaaagaaagaccaggacgccgtaaataactaat

SEQ ID NO: 4903 - DNA, 1571 bp, Streptococcus pneumoniae
  misc_feature (1)..(1571): tiling:Spneumo1:WAN024G4S; Cluster includes WAN02440D spr1 045||15903089|NP_358639.1|1037929..1039494|+|1566 bp|Conse rved hypothetical protein|S.pneumoniae|R6|NC_003098.1|ORF| 221
ttgaaaggaaataccatggaggaacagtcggaaatagtccgttctaagaaagaattcgcctttgcatcyagcactatactatcccaagttggtcgaggaatcatygtcggcctcatcgttggaatwatcgtcggatcctttcgtttcttaattgaaaagggmttccacmtgatacaaggagtttatcaagatcaagggtacttagtgcgcaatctttttgtactggttttgttttatatactcatctgttggctcagtgccaaactaacacggtcagaaaaagatattaaaggctcaggaattcctcaagtcgaagccgaactgaaaggcctcatgtccctcaactggtggggcattctttggaaaaaatatgtgctaggtattctygctattgccagtggactcatgctgggtcgagarggacccagyattcaacttggagcagttggtggtaaaggaattgccaagtggctcaaatccagtccagtagaggaacgttccttgattgccagtggagctgcagcaggtttagccgcagcctttaatgctcctattgcagcacttctctttgttgtagaagaagtctatcaccatttttcgcgctttttctgggtctcaactctagcagccagcatcgtagcaaactttgtgtctctactcatgttcggtttgacaccagtattggatatgccagataacattcctcccatgaccctagatcagtattggatatatctcgtcatgggaattttccttggattttcaggytttctctatgagaaagctgtattaaacgttggaagagtttatgacttgattggtcaaaaaatccatttggatagrgcttattatcccatcttggcttttatccttatcataccagtcggaatcttcttacctcaaatcmttggtggcggaaatcagcttgtcctttctttaactgaacaaaattttagtttycaagttttattagcttactttttratccgctttatttggagtatgattagctatggaagtggactgccaggaggaattttcctccccattttagctcttggttctttgcttggtgccttarttggtgttatctgtgtcaatcttrgacttgtcagtcaagagcaattccctatatttgtcattctaggaatgagtggctattttggakccatatcaaaagctcccttaaccgctatgatcctcgtaactgagatggtaggagatattcgcaacctyatgccacttggtcttgtcactcttgtttcttatattatcatggatttgctcaaaggtacgccagtctatgaagccatgctggaaaaaatgcttccagaagaagtatctagcgaaggagaagttacacttatcgaaataccagtttctgataaaattgctgggaaacaagttcatgaactcaacttaccacacaacgtcctcatcacaactcaagtccataatggcaagagccaaacrgttaacggctcaaccagaatgtatctgggtgatatgattcacctggttattccaaaaagtgaaattggaaaagtcaaagatttgttgttgtarctaat

SEQ ID NO: 4904 - DNA, 1014 bp, Streptococcus pneumoniae
  misc_feature (1)..(1014): tiling:Spneumo1:WAN024FDC; Cluster includes WAN0243KF spr1 621|scrR|15903663|NP_359213.1|1595432..1596445|-|1014 bp|S ucrose operon repressor (SCR operon regulatory protein)|S. pneumoniae|R6|NC_003098.1|ORF|200
ttgaaaggagktgataatatggtagaacaaagaaaatcaattaccatgaaagatgttgctttagaagcaggagttagtgttggaactgtttcacgtgtaattaataaagaaaaaggcattaaagaagtaactttaaggaaagttcaaagggctataaaaacattggactatatccctgataattatgctcgaggtatgaaaaagaatagaacagaaactatcgctttgattattccgagcatatggcatccatttttttcggagtttgcctatcatgttgagaaagagttattaaaatataattataaattatttatttgtaacgctgatagcgattcacaaaatgaaatcgaatatatcgaaatgttgaaacaaaataaagtggatggaatkattggtattacatattctgatattgacaaatatattttatctgatttaccgtttgtaagtatagatagacatttttcggaaaatgtatgctatgttacttcagcaaattacaaaggaggacaaactgcagcagaggaactggttagaagggataataagcaccttgcttttattggttcaattaatatgtatgagaatgagactatactcagaagtaaaggattcagagaaaaagctaaggaattaggagtagatgtctataattttgaaatgaaagaacctttaataaatcctgaagatcagataagaatttttttgcaatctcataaagaaattgatggtatatttacaataaatgatatgatggctctgagagttattagtgttatgaaagaactggggaaaatagcacctgatgattaccagataattgggtttgatggtttaaaaacttctgtcgatcaatcttatctagtgtctacaatagttcaagatattggtatgatggcaaaagaatctgttgcaatgatactgaaaatgattaagcgagaagagattctagaaaaacgaatcgtaattcccacatatttttggggagataaaacaacaaaaaaaatttaa

SEQ ID NO: 4905 - DNA, 558 bp, Streptococcus pneumoniae
  misc_feature (1)..(558): tiling:Spneumo1:WAN024CD6; Cluster includes WAN0240Y4 |cps 6bQ||AAL68410.1|||558 bp|Cps6bQ|S.pneumoniae||AF246897|ORF |000
ttgaaagttcaagaaaaattgaaattattaaaagagtttataaaaatatgttctaaaaataaaatgaagtattttgcttctggaggtagtctattggaagctgcaagatacaaaggttttattccttggaatgatgatatggctctaggtttaccaagaaagcattttgaaaagtttataaatgaaatagattttgaaaaatataataaaaattatattttagaaagttcggaaatgaatttaggtatttttcaatataaattaaaatctgctattttaattttagggaaatcgtatgacgtatgtttgaatttatttctgttagacaggatgtcagaattggttattgatggtgagtcaggttttaaagtcccactatataatttagaagtggctgtagatagaagtagaagtattattgagaatagagaactagccaatgagttaggtagtgttgctttccaaagagttcaatctatatttgaaataaaagaaaaagtgtcagagctagagaatatattcatgagtttaggagaagatgataatgtcaatatataa

SEQ ID NO: 4906 - DNA, 128 bp, Streptococcus pneumoniae
  misc_feature (1)..(128): tiling:Spneumo1:WAN024A3C; Cluster includes WAN024EDB-rc R 6.IG_1319.2||||1271302..1271410|-|109 bp|Between spr1275 ( - strand) and spr1276 (nadE) (- strand)|S.pneumoniae|R6|NC _003098.1|IG-rc|110
ttgaaataagaaagtgagaraaggtcygggggatcttgaaccccgagtttagaaataagaaaatgaggcagattcrgtaactcgaagagttcgatttcatcgtcttacccctgcaacgatgactaggt

SEQ ID NO: 4907 - DNA, 221 bp, Streptococcus pneumoniae
  misc_feature (1)..(221): tiling:Spneumo1:WAN024AR3; Cluster includes WAN024EQ7 R6.I G_305||||284216..284436|+|221 bp|Between spr0284 (xylS) (+ strand) and spr0285 (basA) (- strand)|S.pneumoniae|R6|NC_ 003098.1|IG|110
ttgaaataattagaaagtcatttgtttagtgtatatgaagattctgtatggtattcgttatcactggtcacattgaaawtgtgaaataagcacctacaacatagactttacaacacttcatgtttcatatcatggggtgtttttctatttaagtcaaagccmatcaaaaaatctcactattcatcaggttaaaggaaacctaatcatagtgagattgtgaa

SEQ ID NO: 4908 - DNA, 426 bp, Streptococcus pneumoniae
  misc_feature (1)..(426): tiling:Spneumo1:WAN024FCG; Cluster includes WAN0243J6 spr1 666||15903708|NP_359258.1|1638617..1639042|-|426 bp|Conser ved hypothetical protein|S.pneumoniae|R6|NC_003098.1|ORF|2 11
ttgaaatatcaggaggaaacgatgaaagactttcattttgacgctatatctgcctttgaaaattacgaaattgaaaaaatgagagatggtcacgttgtggtgacgaccaaagtagtgaactcrtcgctcaactactatggcaatgcccatggtggctatctattcacgctatgtgaccaaatcagtggtttggtggttatctcgctgggacttgatggggtgacactccaatcctctatcaactaccttaaggcaggaaaactcgacgatgtattgaccattaaaggagaatgtgtccatcaaggycgtacaacytgtgtratggatgtggatatcaccaatcaagarggcagaaatgtctgyaargcaacctttaccatgtttgtcacaggccarmggtcwgargamagacrggtaagkatataa

SEQ ID NO: 4909 - DNA, 1199 bp, Streptococcus pneumoniae
  misc_feature (1)..(1199): tiling:Spneumo1:WAN024FAW; Cluster includes WAN0243I0 spr1 708||15903750|NP_359300.1|1679660..1680853|-|1194 bp|Hypot hetical protein|S.pneumoniae|R6|NC_003098.1|ORF|221
ttgaaatcaataggctttattgaaaagctgaaggggttgtctagtaaagagctgattttattgggaattatcctragtatctttttacccttttatctttttgtagttgtactctgtttatatattatcagtttgatttttacaggagacatgaaaagtattcttcagaaaatgggggagcatccgatgctgcttctttttcttagctatagtactgttatatccattcttgcacaaaattggatgggtcttgtggcttcagtaggaatgtttctatttactattttctttttgcactatcagtcgattttatcccataaattctttcgattgattttgcagttygtcttgtttggtagtgtcttgtcagctgyttttgccagtttagaacatttccaaattgtgaagaaatttaactatgcttttctttcacccaatatgcaggtgtggcatcagaaccgggcagaagtgaccttctttaatcctaattattatggaattatttgttgtttctgtattatgattgctttctatctgtttacaacgaccaagttgaattggttgaaagtattctgtgtgattgcaggctttgttaatctctttggtttgaactttactcaaaatcgaactgcctttcctgctattatcgctggagcaattatctatctctttacgactattaaaaactggaaggccttttggcttagtattggggtcttcgcgattggtttgagtttcctcttttctagtgatttgggagttcgaatgggtactttagactcttctatggaagaacgcatttctatctgggatgctgggatggccttgtttaagcaaaatcctttttggggtgaagggccattgacctatatgmactcttatcctcggatacatgctccttatcatgaacatgcccacagtctttatattgatacgattctgagttacggaattgtgggkacyattttattagttttgtcttctgttgctcctgttcgcttgatgatggatatgagtcaggagtcggggaaacgtccgattatcggcctttatctatctttccttacagtggttgctgtgcacggaatttttgacttggctctcttctggattcagtcaggctttattttcttgctagttatgtgcagtattccattggagcatcgaatgttggtatcggacatgacggattaactaat

SEQ ID NO: 4910 - DNA, 554 bp, Streptococcus pneumoniae
  misc_feature (1)..(554): tiling:Spneumo1:WAN024GKA; Cluster includes WAN0244GS spr0 454|grpE|15902498|NP_358048.1|461030..461578|+|549 bp|Heat -shock protein (activation of DnaK)|S.pneumoniae|R6|NC_003 098.1|ORF|211
ttgaaatcattaaaggaggcgaacatggcccaagatataaaaaatgaagaagtagaagaagttcaagaagaggaagttgtgraaacagctgaagaaacaactcctgaaaagtctgagttggacttggcaaatgaacgtgcagatgagttcgaaaacaaatatcttcgcgctcatgcagaaatgcaaaatatccaacgccgtgccaatgaagaacgtcaaaacttgcaacgttatcgtagccaggacttggcaaaagcaatcttaccatctcttgacaaccttgagcgtgcacttgcagttgaaggtttgacagatgatgtgaagaagggcttggsgatggtgcaagaaagcttgattcacgctttgaaagaagaaggaattgaagaaatcgcagcagatggcgaatttgaccataactaccatatggccatccaaactctcccagsagacgatgaacacccagtagataccatcgcycaagtctttcaaaaaggctacaaactccatgaccgcatcctacgcccagcaatggtagtggtgtataactaactaat

SEQ ID NO: 4911 - DNA, 126 bp, Streptococcus pneumoniae
  misc_feature (1)..(126): tiling:Spneumo1:WAN024A3W; Cluster includes WAN024EDJ-rc R 6.IG_1314||||1265905..1266018|-|114 bp|Between spr1270 (hp rK) (- strand) and spr1271 (rpsU) (- strand)|S.pneumoniae| R6|NC_003098.1|IG-rc|110
ttgaaatgaaaggctagagaaatctagtcctttttcttttaaataaatactccaaagcctgcaaaaatctgaaacttcctcctacaatttgatataatagagagaagaactcatttgaaggaggaa

SEQ ID NO: 4912 - DNA, 259 bp, Streptococcus pneumoniae
  misc_feature (1)..(259): tiling:Spneumo1:WAN024BFV; Cluster includes WAN023LDJ 3146 26_2052||||1109622..1109846|-|225 bp|EGAD orf prediction|S .pneumoniae|R6|NC_003098.1|ORF|111
ttgaaattgactttaagtgagtttggaaataatatccaagctcattttttctcagactgcaagcagttcatcaataagatttatactcttcgaaaatctyttcaaacyacgtcagcttcaccttgccgtaggtatatgwtactgactctgtcagttctatcyrcaacctcaaaacastgttttgagcarcctgcggctagcttcctagtttgctctttgattttcattgagtataarctwrctwwtcacaaaaaggata

SEQ ID NO: 4913 - DNA, 863 bp, Streptococcus pneumoniae
  misc_feature (1)..(863): tiling:Spneumo1:WAN024FAS; Cluster includes WAN0243HY spr1 710|msmG|15903752|NP_359302.1|1682791..1683624|-|834 bp|AB C transporter membrane spanning permease - multiple sugars |S.pneumoniae|R6|NC_003098.1|ORF|411
ttgaaatttaagaggagaagcatgatgaaacaagatgaaagaaaagccctgattggcaaatacattctattgrttctaggatcggttctgmttttagtgccgctccttgctaccctctttagttccttcaaacccactaaggatattgtagataatttctttggctttccaaccaacttcacatgggacaactttagccgtctcttagctgatgggattggaggctattattggaactctgtcgtcatcactgtcttgtctttacttgcagtaatgatctttatccctatggcagcctactccatcgctcgcaatatgagtaaaagaaaagyctttaccatcatgtataccctcttaatcctcggaatmttcgtacctttccaagtcatcatgattccgattacggttatgatgagtaaactcggtttggctaatacctttggtttgatcttgctctacttgacctatgcgattccacagaccctctttctctatgttggctatatcaaaatctcgattccagaaagtctggatgaagcagcagagatcgatggggctaatcaatttacaacctatttccgcatcatcttcccaatgatgaaaccgatgcatgcgacaaccatgatcatcaatgccctttggttctggaatgacttcatgttgccactccttgtcttgaaccgggattccaaaatgtggactctgcctttgttccaatacaactacgcaggccaatatttcaacgactacggaccaagctttgcctcttacgtggtcggcattatcagtatcaccattgtctatctcttcttccaacgccatatcatykcaggaatragcaacggggcagtgaagtaactaat

SEQ ID NO: 4914 - DNA, 342 bp, Streptococcus pneumoniae
  misc_feature (1)..(342): tiling:Spneumo1:WAN024FMD; Cluster includes WAN023L32 3155 50_2496b||||1330679..1331020|+|342 bp|EGAD orf prediction| S.pneumoniae|R6|NC_003098.1|ORF|110
ttgaacaacatcttcttttacattttggttcgtaactttatcaacgtaatgaatgatacgcgttatagtcttcgtctcagtagaggttgctgttttgggaaccactgtttcctcaacattctcacggtagtaatagtcaactgttgcaccgtcttctggtacgcatttkcaggagttgctaccaaggtgtatgttgttttccttgtgataactcggtcttctttgtcctcagttgttgttttcccttcaatagtttttgattctgtggtatactcagaacctatcgctaaatcagcttttataacagactctaccaacttctcttgcctaccttctttatag

SEQ ID NO: 4915 - DNA, 156 bp, Streptococcus pneumoniae
  misc_feature (1)..(156): tiling:Spneumo1:WAN024CML; Cluster includes WAN02430T SP02 97||15900231|NP_344835.1|273501..273650|-|150 bp|hypotheti cal protein|S.pneumoniae|TIGR4|NC_003028.1|ORF|020
ttgaacaaccttgataatatgcgttttattatggaaatatttgcttcattttctcctgaaatagagcttttgctatcctatttttctctatttctaatgatttacttcaacttcttacctcttgggaaaaacaacaaagatatgaacctarctaat

SEQ ID NO: 4916 - DNA, 99 bp, Streptococcus pneumoniae
  misc_feature (1)..(99): tiling:Spneumo1:WAN024FMQ; Cluster includes WAN023P6Q pne5 3_35||||21485..21583|+|99 bp|Type 25F capsule operon, Glim mer 2.02 orf prediction|S.pneumoniae||WAN01UCCQ|ORF|000
ttgaacaagttctattcycaaaaaatcacaccgttactatcttcgaataaattaaaagcaaagcaagtgattgatagaaaatcggctctttgtcaactg

SEQ ID NO: 4917 - DNA, 174 bp, Streptococcus pneumoniae
  misc_feature (1)..(174): tiling:Spneumo1:WAN024BFB; Cluster includes WAN0243TS spr1 283||15903326|NP_358876.1|1277743..1277910|+|168 bp|Hypoth etical protein|S.pneumoniae|R6|NC_003098.1|ORF|101
ttgaacaatcttgatattatgcgttttattgtgggaagatttacttcattttctcttgraattgagttttctcctacttcaaaactagatgatttgctatttaaaatagcgttccttatgattttggcaacctggattaaagcgagaaaaacaaaagrggcaactctaactaat

SEQ ID NO: 4918 - DNA, 75 bp, Streptococcus pneumoniae
  misc_feature (1)..(75): tiling:Spneumo1:WAN024DO6; Cluster includes WAN023SJ1 NC_0 03098.1_1755||||1365568..1365642|-|75 bp|Glimmer 2.02 orf prediction|S.pneumoniae|R6|NC_003098.1|ORF|110
ttgaacaatcttttaggagaacttgaaacttattccttttttagcgtmaaaatagctaaaattatctttcaaaaa

SEQ ID NO: 4919 - DNA, 138 bp, Streptococcus pneumoniae
  misc_feature (1)..(138): tiling:Spneumo1:WAN024DO5; Cluster includes WAN02424D SP15 56||15901399|NP_346003.1|1466555..1466692|-|138 bp|hypothe tical protein|S.pneumoniae|TIGR4|NC_003028.1|ORF|120
ttgaacacggactacctgcctcttgaaaaaagatgcctgtcttgcctttcgtggaaagtcagtgccattccctatttttcagaggcagctaaggtcctttgtatcttgataattgaacacgcctggaaccctgtgtga

SEQ ID NO: 4920 - DNA, 1557 bp, Streptococcus pneumoniae
  misc_feature (1)..(1557): tiling:Spneumo1:WAN024DL2; Cluster includes WAN0244OC spr0 182||15902226|NP_357776.1|189502..191058|+|1557 bp|Hypothe tical protein|S.pneumoniae|R6|NC_003098.1|ORF|111
ttgaacagragaaacgatatgagtgtgtatggtagagtagaagaagttcataaggagaatcgtgaacctctagaataccaaatcgaacaagaatcgcatcatcgtgaatcaagtcgtcttcctttggtgaaaattttactatggagtacgcttgtaacggggataactctaggagtaccgctattactcgacttaatgagtgcacaagaagtgcaggatttttatgcaggttgggsgcttcatcagacagggaagatttacagcgactattatggaagtcaaggtttgctttattatttgctgacttacgtgagtcagggcggatttttctttgycatctttgagtggttagccttggtagcaggaggatttttcctttttagatcagcggacaccttgacagagcaaggagaccaagctggacatctggtgactattttttacatgctagttacaggtcttgcttttggtggaggctatgcgactcttttagcgcttcctttcttattcgcagcctttagtttagttgcggcttacctaagcaatccaagccatgataagggatttgtacggattgggctagctttggcaggcggatttttctttgctcccttatcatcgctcctgtttattgctgtagtgagtttaggcttgttggtctttaaccttgggcatagacgytttgygcatgggttttatcagtttcttgcagtggctttaggtttttcacttgtcttttatccaactgcctactatagtgctgcaacaggaagttttggggatgcgwttagtggtattcgttatcctattgacagtattcgctttgattttacttctaaaattttagagaatatgtttttttatggcttgttgtcccttggtttgggatttgtggtttgtatctttttaggtctctttcaatccaaaccctttaaactatacgtcatttcggttcctgcaagtcttgtggtaattytarstwtgattttacttttcttttcacaagagcctctgcacgcttcttatttgatggtcgtcttccctgttttcctacttttattggtaaccaatattaagagtcaacagagggggcgtagtgytagaagaagccgwagagaaacgccagttagcctatggagtcgtttcttcaaaggaaatctatatctgctagtwtttgggbttgtctatcttttgtctgtwccttttttgatgaagtttgtcctttatccrgtaccttatcaagaacgtaatcgtcttgctgatttggtaaaagaggagacaaatacggaagatgctatctatgcatgggatratamtgcgactctttatcgtaagagtgagcgcttgtcgccatcggcgattttgtccccgttgcactatacagcaactgaggaaaatcgtaataagttacttaatgacttgaaagaaaaacaacctaaggtgattgtggtaaatgacaaggtggwagtctggtctgaagtggaaacactcttaaaagaaaattaccaacaagtmaagmctraytamtcagagtttaaagtctataaaattaaataa

SEQ ID NO: 4921 - DNA, 250 bp, Streptococcus pneumoniae
  misc_feature (1)..(250): tiling:Spneumo1:WAN024GOA; Cluster includes WAN023LDY 3154 06_2033||||1095667..1095912|+|246 bp|EGAD orf prediction|S .pneumoniae|R6|NC_003098.1|ORF|110
ttgaacagtcataagaccggccagcaagccatttttttcggtaattttagctgtctgcattcccttaccaccacgaccttttgttgggtattcagtagcgactgtacgcttaccatatcctttttctgtgataataagaacctcatcttgatcagtaatcaagctggcaccaacaactgtgtctccttcacgaaggttaacacctttcacaccagtggcgatacggctcataccacgaacggctgattga

SEQ ID NO: 4922 - DNA, 2364 bp, Streptococcus pneumoniae
  misc_feature (1)..(2364): tiling:Spneumo1:WAN024CEG; Cluster includes WAN0240SS |||A AG38042.1|||2364 bp|Orf26|S.pneumoniae||AF295925|ORF|001
ttgaacatgaaaagaaaatcaaatacattaaagaaacaacaaacttcaaygactwataaaaaggaaraagttaaagrkaaaaaagaggaagtgttaccmtcwacggckaatacymtttcctatcaagccytgtatcaaaatggtctratgcaggtaaargaagattatttytcacaaagctayttacttggkgatgtcaattaccaracygttggtttagaagataagggvgcaatcattgagaagtattctgatttgattaamtcyytagaygaccaaaccaacttccaattgacyatytttaataaaagattraatttagaaaarttyagacamagtgttttgtatgaggaaaaagaagatggrtaygatasctatcgtmaagaattgaatcgratgatgaatcaraatttagayagtggkgaaaataayttttcrgctgtgaaactgattagytttggtagraaggattctaatcccaaacaagcytatcgttccttgtctcaaatwggmgaatatttcaagagtggtttytcagaaattgatgcwcgwtttgratccttgrctggagaagaacgkgtsaacttgttggcmgatatgcttagaggagaacaycatcttcctttttcttayygtgatttaacgagatctggycagacaactcgtcacttcatagcmcctaayctyttrgattttaaaaacaagaattacctacaratyaatgaccgcttattrcagattgtctatgtgagagactacggyatggaattaggkgatcagtttatmmgagacctcatgcaaggagatytggaattgatwgtragyctycatgctcaaagttcgaccaagkcrgatgcyatgaagaaactacgaacaaagaaraccttratggaatcccaaaagattggggaacaacaaaaactwgctcgtacaggtatctatttggaaaaagtaggycatgtwttagaaagcaatatygatgaagcygaggaactcttaaaaaccatgacmgagacaggagataaactrtttcaaacrgtcttcttgattggkgtytttggtcaggatgaagaagaactyaaacaagchctagacackrtycaacaagtggccggmtcaaatgacctaatgattgataaactwccatatatgcaagaagcagcytttaatwgtttgctgccatttggttgtgattttytagagggagtatcacggagtttattaacrtcyaatrtagcagtgaactcaccttggacttcagtagayytacaagaccgtagtgggaaatattayggtatcaatcaaatmtcaagyaatattattaccattgatcgcagcctattaaatacaccgtctggtctgatwttaggracatctggagcwgggaaagggatggcaacyaagcatgaaattatcacgacyaaaatcaaggaatctggtgaaaatactgaaattatcatcgtggatccagaagcagartacagtgtcattggacgrrcttttggkggagaaatgattgatattgcgccygattccsaaacytatctcaatgtccttgacttgtctgaggaaaatatggatgargatcctgtaaaggtaaaatcagaatttcttttatcytttatyggyaarttattggatagraaaatggatggragagaaaaatcgattatmgaccgagtyacsagrctcacytatcagtcatttaaagarccttctttggaagaatgggtctttgtmttgagycaacaaccagaagaagaagcgcagaatttggcacttgatatggaactgtatgtygaaggttctcttgatattttttctcataagaccaatattcagacaggatctaayttcttratytataaygttaaraagttaggagatgagytgaaacaaatcgcyctyatggtwgtktttgatcagatatggaatcgtgtygttcggaaccaaaaattagggaagaagacytggatttattttgatgaaatssarcttctyttattagataaatatscsagtgatttcttctttaaattgtggagtcgtgtcagaaaatatggagccagtccgactggrataacycaaaaygtcgaaaccttattgttagatccaaayggtagacggattattgcmaatagtgaatttatgattctcctmaagcaagcaaaaaatgaymgagaagaaytrgttcaactcttaggmttgtcaaaagaactygaaaaatacctwgtcaatccagaaaaaggkgcaggactrataaaagctggttcmgttgthgtwccctttaaaaataagattccymaagghwcwcaattgtttgatatcatgagwwcrgatcctgataaaatggcttctaaytaa

SEQ ID NO: 4923 - DNA, 165 bp, Streptococcus pneumoniae
  misc_feature (1)..(165): tiling:Spneumo1:WAN024FRF; Cluster includes WAN023PVY pne0 8_16||||10794..10958|+|165 bp|Type 7A capsule operon, Glim mer 2.02 orf prediction|S.pneumoniae||WAN01UCKE|ORF|000
ttgaacatttgggatgatttgtatttcaagttcaataataatgatatttgtacttatgaattgatgaaagaatttgaagagcttccatacaagagtaaggttatcttctcttcaaaaaattacagtgacctaccttccttgattcattttaaatcagccgagaag

SEQ ID NO: 4924 - DNA, 825 bp, Streptococcus pneumoniae
  misc_feature (1)..(825): tiling:Spneumo1:WAN024AYD; Cluster includes WAN02406U |cps 19fG||AAC44964.1|||810 bp||S.pneumoniae||U09239|ORF|000
ttgaaccagacagagatgattcgcttaattcaaaaagttgaattagatgctataaaagagtttaaaaaaatctgtgaagagaatgatatagattttttcctccgcggtggtagtgtacttggtgcrgtcaaatacgacggctttattccatgggatgatgatatggatatcgctgtccctcgtgaagcatacgacaaacttccaagtgttttcaaagatagaattatcgctgggaaatatcaggttcttacttatcaatactgtgatacgttgcatkgctactttcctcgactattycttttagmagatgaaagaaaacgtttgggcttgccacgaaataccaatctrggattgcatttgattgatatcattcctttagatggagcaccaaatcattcggttttaagaaagatttactttkgyaaagtatactggtatcgttttttagcaagyttaggaacaacttatgttggcgaccatgtggatatgcattccactaagcaaaaactaattattggtttctttaaaaaactaggatttgcaaaactatttcctcaaaattctgtatacagacgcttggataatctctataraaagtatgattggaaaaagcagaagtatgckgggactatcaatgcttctttatttgcyaaagaagttatgccagtagagatttggggagaaggagtagagaagccttttgaggatacyttctttaaagttccaacggrgtatgatcgctacctgaaaagactttacggagaaaactatcttyacgaagagcckagtgatgatgaaaagaaatcgcatttaggrggayamtaa

SEQ ID NO: 4925 - DNA, 852 bp, Streptococcus pneumoniae
  misc_feature (1)..(852): tiling:Spneumo1:WAN024FXC; Cluster includes WAN0241A7 |cps 15bQ||AAP76302.1|||834 bp|putative glyceraldehyde-2-phosph otransferase|S.pneumoniae||AY250187|ORF|001
ttgaaccgaatacggagaatgaaattgacaaatagagttgattattttggtgctgatattagtgaacttcagaataaaaaattattcttatttgatatggatggtaccatttatgaagaagatagrttgtttgagggtactctcgaattattagactatattcataatattggcggtgagtatatttttattacaaacaattcatctaagtctgttgttgactatgtwgaaaaagttaacagattaggtattaaagctgaacgagataatttttttacctctgctcargccacaattgtttatattaaagaaaattatcctaaatctaaagtttattgccaaggaacaaaatytttgataaaagaactatctgacgcaggaattgatgtaactgagcaagttagtgctgatatagatgttgttcttgttggttttgatacagaattaaccagtgataaaattcgcaatacctgcgagattytatcaacaaaggacrtacctttcatagctactaaccctgatattcgctgcccagtatcgtttggattcatcccrgattgtggttctatttgtgatatgattagtaaatcartcgataggaaacctgtttacataggtaaacctgaacctacgatggttgatattgttcgaaaaaaattaaattattctytatttgaaacagttgtgattggagatcgcttgtatacggatatcatgactggtataaatgcaggagtaacttcagtttgtgtgctgacaggagaagcaacggtgaatgatattcaacaagrtagtataaaaccgacttatacatttaaaaacgtgaaagaaatgtggaaaggaattgtctga

SEQ ID NO: 4926 - DNA, 246 bp, Streptococcus pneumoniae
  misc_feature (1)..(246): tiling:Spneumo1:WAN024C47; Cluster includes WAN023M47 3132 72_648||||340738..340983|-|246 bp|EGAD orf prediction|S.pn eumoniae|R6|NC_003098.1|ORF|110
ttgaaccgcaagagctacgatatcacgtactgcttgttggtacttagcagtaacatccaagaagtactcgtccaaaagaaggttggcaagatctgcatcgcggttgtaagcatctgtaatcttttgcaagaaacgagaacggatgatacagccatcacgccagatagatgcgatatctgcaaatggcaagttccagttgttttctttagaggctacacgcaattgagcaaatccttgtgcgtatga

SEQ ID NO: 4927 - DNA, 1425 bp, Streptococcus pneumoniae
  misc_feature (1)..(1425): tiling:Spneumo1:WAN024GH7; Cluster includes WAN0244EU spr0 524|vex1|15902568|NP_358118.1|523650..524927|+|1278 bp|ABC transporter membrane-spanning permease - Pep export|S.pne umoniae|R6|NC_003098.1|ORF|222
ttgaaccgccgtatgccgaacggcacgtacggtggtgtgagaggggctagagattatcccctactcgatattttttttttcgtatttcataaacatttcatatttgggttttataatagtcttacaaatatggaggtgacaaatgaatccaatccaaagatcttgggcttatgtcagcagaaagcgactgagaagttttattttatttctgattttattggtcttattggccggaatttcagcctgtttgactctgatgaagtccaacaaaacagtagaaagcaatctttayaaatcactcaatacatctttttctattaagaagatagagaatggtcagacattcaagttgtcagacctagcatctgtaagcaagattaaggggctggaaaatgtctctcctgaacttgagacggtcgcaaaactaaaagacaaggaagcagtgactggcgagcagagcgtggagcgtgatgatttatcagctgcagacaataacttggttagcttaacggctcttgaggattcatccaaggatgtaacctttaccagttcggctttcaatctaaaagaagggcgacaccttcaaaaaggggattccaagaaaatccttatccacgaagaattggctaagaagaacggtctttcrcttcatgacaagattggcttggatgctggtcagtctgaatytggaaaaggacaaacagtagagtttgagattatyggcatcttttctggtaaaaaacaagagaaattcacaggcttgtcttctgacttcagtgaaaatcaagtctttacagactatgaaagtagccaaacccttttgggcaatagtgaagctcaagtcagtgcagcacgcttctatgtagaaaatcctaaggaaatggacggactcatgaagcaggtagaaaacttggccttggaaaatcaaggctaccaagtcgaaaaggaaaacaaggcttttgaacaaatcaaagactcagttgcaactttccaaaccttcctgaccatcttcctttatgggatgttgatagcaggagctggagccttaattctggttttgtctctctggttgagagaacgggtctatgaagtggggattttacttgcacttggaaaaggcaagagctcgatcttcctacaattctgtttagaggtagttttggtatctcttggagctttgcttccagcatttgttgcaggaaaygsaatcacaacttacctactccaaactctactagcaagtggagatcaggcaagcttacaagatacactagccaaagcaagcagtttatcaactagyatcttatcttttgcagaatcctatgtttttctagttctgcttagttgcttatctgtagccctttgtttcctattcttatttagaaaatcaccgaaagaaattttatcatctattagttaactaat

SEQ ID NO: 4928 - DNA, 252 bp, Streptococcus pneumoniae
  misc_feature (1)..(252): tiling:Spneumo1:WAN024E2J; Cluster includes WAN023KJE 3155 14_3396||||1821419..1821670|+|252 bp|EGAD orf prediction|S .pneumoniae|R6|NC_003098.1|ORF|110
ttgaaccgtagaaataatctgcatgggttgttccgtagaaaggaatatcacgacctgcctgagcccaaccaacagcttctgtcgaatgggtgtgaaccacactaccaatttctgaccaagycttatataattgcacatgagttgggaggtcggaagatggtcttaaatccccttctaggatcttaccatctagatcagtcactaccatgttttcaggtgtcaattcgtcataatccacgcctgatggtttga

SEQ ID NO: 4929 - DNA, 258 bp, Streptococcus pneumoniae
  misc_feature (1)..(258): tiling:Spneumo1:WAN024CH8; Cluster includes WAN023MEX 3151 10_89||||47675..47932|-|258 bp|EGAD orf prediction|S.pneum oniae|R6|NC_003098.1|ORF|110
ttgaacctcagcaccagcagtctctacagactcaactgtttgaaccttagaagagcccgtcgcaccaccgacaccatcacgacctgttttrcctccgagaaggatgatcacatcacctgcttcaggtttttcacggacaacattgcccttgggagycgcaccaacaacggcaccaagttccatacgtttagctacaaagcctgggtggaagtattcacgaacgtaggttgtkgcaagcccaatctggttaccatatga

SEQ ID NO: 4930 - DNA, 411 bp, Streptococcus pneumoniae
  misc_feature (1)..(411): tiling:Spneumo1:WAN024CPX; Cluster includes WAN023LBG 3154 12_2131||||1147102..1147512|+|411 bp|EGAD orf prediction|S .pneumoniae|R6|NC_003098.1|ORF|110
ttgaaccttgtagtcatctccataraccaagaaccattcgttggtacaatcttcacgataaacactaaaataagtcgaacgwgtcaaatcattgcggaacatatttttaaagagatarttrtcwgcatcaataacatagctgttggccaattcttcttttacaagatagagagagtaaaagttattgtagtcagcgtatttatcattgaaaacgagacgaacaccgtatttctctttcaagtaatcgaattgttctttaagataaccaacaatgatgatgatgtcattgattcctttttctttgagaaactcaatttggtactcaatcaaaggtttttgattaacctgaaccaaggctttaggggtattttcagtcataggacgcaagcgagttcccaatcccgctgctaa

SEQ ID NO: 4931 - DNA, 87 bp, Streptococcus pneumoniae
  misc_feature (1)..(87): tiling:Spneumo1:WAN024CMJ; Cluster includes WAN023SF7 NC_0 03028.1_445||||336504..336590|+|87 bp|Glimmer 2.02 orf pre diction|S.pneumoniae|TIGR4|NC_003028.1|ORF|010
ttgaacgtatttgatggaaatgtcttacttgatagtcgagggatagccattctatcggatttttggcttgtttttgcgcttcatgtt

SEQ ID NO: 4932 - DNA, 382 bp, Streptococcus pneumoniae
  misc_feature (1)..(382): tiling:Spneumo1:WAN024GG4; Cluster includes WAN023LW2 3145 23_1064||||555516..555866|-|351 bp|EGAD orf prediction|S.p neumoniae|R6|NC_003098.1|ORF|220
ttgaacgttacctgcacggtcagcacggtaagtgattttaccacctttagactcttcaactgctttagcaacatccattgttacagtaccagttttagggtttggcatcaagttacgtggtccaaggacacgtccaagacgtccaacaagagccatcatatcaggtgtagcgataactacgtcgaagtccaaccaaccgtcgttgattttagcaacaaggtcatcttcaccaacaaagtctgcaccagcagcttttgcttcttcagcttttgcaccacgtgcgaaaacaagaacacgtgaagttttaccagtaccgtttggcaataccattgctccacggatttgttggtcagcttttttaacgtcgatgttcaagttgtaa

SEQ ID NO: 4933 - DNA, 453 bp, Streptococcus pneumoniae
  misc_feature (1)..(453): tiling:Spneumo1:WAN024FXB; Cluster includes WAN0243WK spr1 183|ABC-NBD-truncation|15903226|NP_358776.1|1181497..11821 38|-|642 bp|BC transporter ATP-bindng protein - possibly m ultidrug efflux, t...|S.pneumoniae|R6|NC_003098.1|ORF|212
ttgaacmgaagtattcttgataayataactttaaagmacgaagttacttcacaaaagatagaggaagtttgtaaagcagttcaaatctatgatgaaatcatggctatgccgatgaaatttaatactatcatctcagagatgggktcaaatatttcaggtggkcaaagrcaacggatagcactggcacgtgcattaataaataatcctagtattgtaattttagatgaagcaactagtgcwttagacactattaatgaggaaagaataacaaagtatatamaaagtcagggytgtactcaaataattrtagctcatagattgtcaacgattaaggatgcggatrttattkttgtaatgaaaggtggtaagattgttgagtcaggaaatcataagtacttaatrrmkcttggtggagagtactacagcttatatacaaaaaggaaaykaactaat

SEQ ID NO: 4934 - DNA, 315 bp, Streptococcus pneumoniae
  misc_feature (1)..(315): tiling:Spneumo1:WAN024DVG; Cluster includes WAN023KDG 3155 05_3642b||||1961642..1961956|+|315 bp|EGAD orf prediction| S.pneumoniae|R6|NC_003098.1|ORF|110
ttgaactatcgacgtaactatctaatggcattaaatacagaatggaatctaataattctggaatatttacaccatcacaacgaattagcttatttgcacatgaggcagaaggataattcgcgtcagctaatactatttcatctccatgtcccatttccattaaagtcttcaataaatctggagaaatatttttcggtatatgttttaacattaatatcctccctattttctctgaccgtatgttttaaatttttctgccatcaattccatctcctcatcaggaagaactactggctctccaaaattcttagctaa

SEQ ID NO: 4935 - DNA, 279 bp, Streptococcus pneumoniae
  misc_feature (1)..(279): tiling:Spneumo1:WAN024GKJ; Cluster includes WAN023M0B 3131 48_856||||455333..455611|+|279 bp|EGAD orf prediction|S.pn eumoniae|R6|NC_003098.1|ORF|110
ttgaactcatctaccagtttttgtttcaagcgagtttttacaccttcaccaaatagaaaaccatcaggtaaaataactccaacacgaccattttctttcaaacgatacataatgacagccataaataaatcagctgtttcagaactccgtaattctgctggaaagttattttttattgtttctaattctgaccctccaaaaggtggattcatcataataatgtcaaatttttcatcatccgtatattcacgaacatttttctccaaagtatttccatga

SEQ ID NO: 4936 - DNA, 448 bp, Streptococcus pneumoniae
  misc_feature (1)..(448): tiling:Spneumo1:WAN024C93; Cluster includes WAN023M91 3133 01_380||||200075..200332|-|258 bp|EGAD orf prediction|S.pn eumoniae|R6|NC_003098.1|ORF|220
ttgaactgttttgatgcgagcgatttgttttttaacttctttcaagcgagctgtttgttccaattgaccagtagcagcttggaaacgaagttcaaacaattcttttttcaattcgttttcgcgcttcgcgagttcttcttgagaaagaccacgaagttctttaacaaattcttttacttcattaagtttcatgccttctccttattctgcttcacgttttacgaatttacatttaactggcaatttgtggctagcaagtcgaagcgcttcacgtgcaatctcttcagatacaccagcgatttcgaacatcactttaccacgtttaactggtgctacccaaccttcaggtgcccctttaccagatcccatacgcacaccgatagctttagcagtgtatgatttgtgtgggaagattttaatccaaactttaccaccacgtttcatgtaa

SEQ ID NO: 4937 - DNA, 206 bp, Streptococcus pneumoniae
  misc_feature (1)..(206): tiling:Spneumo1:WAN024D8W; Cluster includes WAN0243U4 spr1 271|rpsU|15903314|NP_358864.1|1266019..1266219|-|201 bp|30 S Ribosomal protein S21|S.pneumoniae|R6|NC_003098.1|ORF|12 0
ttgaacttgaagggagtgaaaaaaatgtctaaaacagtagtacgtaagaatgaatctcttgacgacgcacttcgccgtttcaaacgtgcggttactaaagctggtactcttcaagaaacacgcaaacgtgaattctatgaaaaaccttctgtaaaacgtaaacgtaaatcagaagtagctcgtaaacgtaaaaaattctaactaat

SEQ ID NO: 4938 - DNA, 1723 bp, Streptococcus pneumoniae
  misc_feature (1)..(1723): tiling:Spneumo1:WAN024G3M; Cluster includes WAN023RR0 cont ig_1590_2||||1727..3070|-|1344 bp|Glimmer 2.02 orf predict ion|S.pneumoniae|670|WAN01UDFE|ORF|001
ttgaactttacaagagaggagttaaataaaatggataagttaataatttttattgagaaaggaaagcctttctttgagaaattatcgagaaatatatacttaagagcgataaaagatggttttatttccagtatgccagcagtattattctcaagtatttttatactaatagctgctgtgcccaatatttttgggtttaaatggtctgatgaacagttagcttttattttgaaaccttacaactactcaatggggattttagctctcttagtagctgggacaactgcaaaatcgttaacagattcagttaatacacgtagtatgggagaaaaccaaccaaatcaactacatgtcaacttttttagcagctgttgttggattgttaatactggcagctgatccaattgaaggtggatttgctaatggtcttttaggtactagaggattacttactgcatttttggcagcttttattacagtaaatatctataaagtatgtattaaaaataatgtaaccattagacttcctgaagaggttccaccaaatattgcacaagtttttaaagatgttattccgtttgccttatctgttctttcaatatatggattggatttaattgttagaaatatttttggtacaaatgtagcagaatctgttggtaaaatattagcccctctattttcagctactgatggttatatcggtttagctattgtatttggtgcttatgctttcttttggtttgttggaattcatgggccatctgttgtagaacctttaattgtagctatcagttatgcaaatatagaagctaatgttcagcttgtgcaagctggtatgcacgcagataaaattttaaatccagttactcaaacttttgttgtaacaatgggtggtactggtgcaacactagtagttccatttatgtttatgtggttatgtaaatcaaaaagaaatagaattgtcggacgtgcgtctgtagttcctactttctttggcgtaaatgaaccaatcctatttggtgctccaattgttttaaatcctatcttctttattccgtttgttactgctcctattatcaatgtttggattatgaaattttttgtagatgttctacaaatgaatagtttcagtattattttaccttggacaacacctgctccaattggtattgttatgggaacggcgctggctccattgtcattcgtcttggctataactttaatcattatcgacactttaatctattatccatttgttaaagtttatgaccatcaaattttagaagaagaacggaaaggaaactcttcatctgaattgaaagaaaaagttgctgcaaacttcaacactgcaaaagcggatgctattcttgaaaaagcgggtgtcgatgcagcacaaaataccatcactgaagaaacaaatgtcctcgttctctgtgcwggtggaggtacaagtggwctccttgcaaatgctttgaataaggcagcagcagaatacaatgtccctgtgaaagcagcagcaggcggctatggtgctcaccgtgaaatgttaccagagtttratytrgttatccttgcycctcaagttgcttcaaactttgaagatatgaaggcagaaacagataagctcggtattaaactwgckaaracagaaggcgctcaatacatcaaattaactcgtgatggaaaaggtgccctagcattcgtacaagarcaattcgat

SEQ ID NO: 4939 - DNA, 377 bp, Streptococcus pneumoniae
  misc_feature (1)..(377): tiling:Spneumo1:WAN024EW4; Cluster includes WAN0243DZ spr1 853|rnpA|15903895|NP_359445.1|1828283..1828654|-|372 bp|Ri bonuclease P - protein component|S.pneumoniae|R6|NC_003098 .1|ORF|221
ttgaagaaaaactttcgtgtaaaaagagagaaagattttaaggcgattttcaaggaggggacaagttttgctaatcgcaaatttgtggtctaccaattagaaaaccagaaaaaccrttttcgagtaggtctatcagttagcaaaaaactggggaatgccgtcactagaaatcaaattaagcgacggattcggcatattatccagaatgcaaaagggagtctggtagaagatgtcgactttgttgtcattgctcgaaaaggagtcgaaaccttgggatacgcagagatggagaaaaatctactccatgtattaaaattatcaaagatttaccgggaaggaaatgggagtgaaaaagaaactaaagttgactarctaat

SEQ ID NO: 4940 - DNA, 285 bp, Streptococcus pneumoniae
  misc_feature (1)..(285): tiling:Spneumo1:WAN024CWO; Cluster includes WAN023LR2 3135 02_1334||||706884..707168|-|285 bp|EGAD orf prediction|S.p neumoniae|R6|NC_003098.1|ORF|110
ttgaagaacaactgcttcgactgcagctttttcacggctaatcaagtcaacacgygctgcaatttccttgattcccataccgatgttacggctaagagcaaggtcagaaagttgcggytcaaagaactccttgtattccgccaagcgttgctgagtcttaaatacatgagcaggaaggataacaaagctatcaaagctcatatctcctccaagggctgccttaatccaagcccagttttcacgcgcccaagaccaagctgttttctgagttgcttgatgagctag

SEQ ID NO: 4941 - DNA, 206 bp, Streptococcus pneumoniae
  misc_feature (1)..(206): tiling:Spneumo1:WAN024DSW; Cluster includes WAN02433L SP01 95||15900131|NP_344735.1|182989..183087|+|99 bp|hypothetic al protein|S.pneumoniae|TIGR4|NC_003028.1|ORF|210
ttgaagaagtcttcaacagctttatggaggagtgatacagtctgggagactgtatcagcccaactcccagaaatggggaagrgttggaacrtccagykratrwttttagccyagytcytttaaataagagagaactggtaagtccagtggacgtttttagcctgacgctaaaaataaaaaccgtcagtaagttcgggggacgtttt

SEQ ID NO: 4942 - DNA, 240 bp, Streptococcus pneumoniae
  misc_feature (1)..(240): tiling:Spneumo1:WAN024G7P; Cluster includes WAN023LK6 3147 29_1724||||916930..917169|-|240 bp|EGAD orf prediction|S.p neumoniae|R6|NC_003098.1|ORF|110
ttgaagaagttgacaagggcttgccagagggagcttaagaagttaccaccgtcctctagcgccttatccgmatcaaagttaaggttgatatttttaaaactgtcgccagcttgtgatacgatgctttgtttaaggtcatttarggttttagtgaaatctgcattgctgaggatatcactctttgagagattcaaggcaaaattgatgatgatattgatctggtttcctgttatgacctga

SEQ ID NO: 4943 - DNA, 243 bp, Streptococcus pneumoniae
  misc_feature (1)..(243): tiling:Spneumo1:WAN024FAK; Cluster includes WAN023KNV 3157 35_3159||||1684125..1684367|+|243 bp|EGAD orf prediction|S .pneumoniae|R6|NC_003098.1|ORF|110
ttgaagacttgcttgaagatcaaagccactgtcaaaccagataaaacagctgggaagaagaaccaagmacggaagaaggtttggcctttgattttagarttcaagacacgcgcaatgaagatcccgagtgcaatctcaccaaccaccatggcaatcgyaatgattgcggtaaagccaatcgcattcatgaattttggatccatgaagaggagcttaaagttgtttaagccracaaatttgtag

SEQ ID NO: 4944 - DNA, 773 bp, Streptococcus pneumoniae
  misc_feature (1)..(773): tiling:Spneumo1:WAN024AZK; Cluster includes WAN0243F0 spr1 816||15903858|NP_359408.1|1786460..1787227|-|768 bp|Conser ved hypothetical protein|S.pneumoniae|R6|NC_003098.1|ORF|2 10
ttgaagagacgcagaagggagataactaagatgaaacgatggmtagcacttagtaagatagaatttttattgaccaaacgacaattratctattatytattrtcrgtagggatgccgacrgcyttctatttattyttttcwggyatstaycaggacacaccaggtgrrcycgcgaattttatgcgtgattatcttatctccatgactgcattttccatgatgtcaacagctatcttctcattcccagttgttttacataccgacaagatcaacaactggcagaaaacattgcgtcatagccctgtaaatatggtagaatattatctatcaaagataacaagtatgctggttgattatttggtttcaatcttggtggttttctcagttgggcattttgtaagaggtgtggacatgtctcttggaaattggattggggctgcacttttgctgatagtaggaagtattgccttcgtagcgcttggtttgaccttgactctcttaccaactagtcagttgatgtctgtcgtgggcaatcttctttatctagggttggctgttttaggtggactctggatgcctatctctttatttccagactggatgcaagtagtaggtaagtgtctcccgacctatcagttgatggagttgctcaagaccttcttaaatgagggtggcatcaatctatcagccacagtttatttacttgttttttcagtagttttgtttggtttgaccatttaccttcaaggtcataaggagaatgcttaactaat

SEQ ID NO: 4945 - DNA, 108 bp, Streptococcus pneumoniae
  misc_feature (1)..(108): tiling:Spneumo1:WAN024AZA; Cluster includes WAN023SB9 NC_0 03028.1_1575||||1198620..1198727|+|108 bp|Glimmer 2.02 orf prediction|S.pneumoniae|TIGR4|NC_003028.1|ORF|010
ttgaagagattttcgaaaagtatcatcatctatttcagaccattttttataataaccattttatttttatttgtcaaggtctttgaattctttcttaaacaagccttg

SEQ ID NO: 4946 - DNA, 189 bp, Streptococcus pneumoniae
  misc_feature (1)..(189): tiling:Spneumo1:WAN024BEW; Cluster includes WAN0244E5 spr0 549||15902593|NP_358143.1|550225..550377|+|153 bp|Hypothet ical protein|S.pneumoniae|R6|NC_003098.1|ORF|110
ttgaagagattttcgaagagtattagaagaaaaagaatgaaagaaatagcctttgacgcattttaccagctttaccaaaacgaccagctttctytagtggatgtgagagaagtggatgagtttgcagctcttcatttagaaggtgcccacaacctaccgcttagtcaattggctgatagttatgattaa

SEQ ID NO: 4947 - DNA, 243 bp, Streptococcus pneumoniae
  misc_feature (1)..(243): tiling:Spneumo1:WAN024BE2; Cluster includes WAN023L27 3154 56_2535||||1350695..1350937|+|243 bp|EGAD orf prediction|S .pneumoniae|R6|NC_003098.1|ORF|110
ttgaagagattttcgaagartagcaaaatggaaaaaggagtgagtgaagcacatcgcctccccactcctttttctgtttttaggctgttttttcaaccttcaagatttttacatcatagctaccaacaggcgtttcaatggttgctgtrtcacctgttttcttgccaatcaaggcctgcccaattgggctttcatttgaaaccttacctrcaaaggcatcygcaccagctgaacctacgataa

SEQ ID NO: 4948 - DNA, 242 bp, Streptococcus pneumoniae
  misc_feature (1)..(242): tiling:Spneumo1:WAN024DAI; Cluster includes WAN0243ZU spr1 064|nrdH|15903108|NP_358658.1|1061970..1062206|+|237 bp|lu taredoxin-like protein involved in electron transport syst em for ribonucleot...|S.pneumoniae|R6|NC_003098.1|ORF|111
ttgaagaggagttacacaatggtaaccgtttattctaaaaacaattgtgtccaatgtaaaatgaccaagcgtttcttggacagtaataatgtctcttatcgtgaaatcaatcttgatgagcaacctgagtrcgtcgatcaagttaaagagctcggttttagcgcagctcctgttatccaaacaccaactgaagtcttttcaggtttccaaccaggaaaactgaaacaattagcataactaat

SEQ ID NO: 4949 - DNA, 456 bp, Streptococcus pneumoniae
  misc_feature (1)..(456): tiling:Spneumo1:WAN024CRD; Cluster includes WAN023MB6 3135 47_260||||133951..134244|-|294 bp|EGAD orf prediction|S.pn eumoniae|R6|NC_003098.1|ORF|110
ttgaagagttttagaaatactacgatttttaccttccagatacaccatcaaaatagaaatatctgctgggtttactcccgaaatacgrctggcttggccgatggtttctggattgatgagtttgaacttctgacgrgcttcsgtygcratagaatcratgtcatcccagtcgatattggcyggaatgcgtttttcttccatrcgtttcatcttggcaacctgrtccatggctttggaaatatagccttcrtacttgatttctgtttcaatcaattcgataatcttgtcatcyaagtcttctgcagctggtccgatgaaggccaccacatcttggtaagaaacttctggacggcgaaggaattccttggctgtcactgcatcggtcaagggtttgaagcccatctcctcaaccttggcattggtttccttgactggcttgagtttgatactgtctag

SEQ ID NO: 4950 - DNA, 415 bp, Streptococcus pneumoniae
  misc_feature (1)..(415): tiling:Spneumo1:WAN024ER6; Cluster includes WAN023KJM 3133 58_3383||||1813948..1814220|+|273 bp|EGAD orf prediction|S .pneumoniae|R6|NC_003098.1|ORF|220
ttgaagattgctgttgatgttgggtttgttgttggagtaataccacaaacaacaccaactggttcagcaataagagtcaatcctgttacatcgtcttcttcgataacrccaactgtcttagtgtggcgcatgttgtttactacgtgttcacargcaaacaagttcttagttgctttrtcttcaaatacaccacgtcctgtttcttcaaaggcatgtaaagccaattctccrtgggcatccaaagctgctactgatgctttggcaacgatgtagtcaacttgytcttgatycaatttacgcatttcttcaagggcaactagagctttttgaaccaactcatctacgtgyttttcagcaacgagtttcttttcctctggtgtcacagtttttttatcagccatattttcctccatag

SEQ ID NO: 4951 - DNA, 1110 bp, Streptococcus pneumoniae
  misc_feature (1)..(1110): tiling:Spneumo1:WAN024FTF; Cluster includes WAN0240FX |cps 19CS||AAD19925.1|||1110 bp|putative glucosyl transferase|S .pneumoniae||AF105116|ORF|000
ttgaagattgtaattccaagaattattcataacaaagaacaactgacctgggattggtccgggacaataactaatataaaaaaatttttagggaaatacgagattgttgaggaacagaatattttctatacttttagaatgaatgtgcacaaagtgcttgttcgtttaggtattaaaaaatctgatatgagcatgacgtatataaaatatgctgaaaatcaagttcatctatcgccagaggatgtttgtctcacgtttgatgaatttcctttatcttttcctgataatccagtttatatctatcaagacttaaatcttcattatttgatagagagttctcaaaacaatagtcaatcgttcaaatatagtggttttcaaaacgtcccggctgatattctagatagacgaatgagaaaacaggaaatattttataatcaagctactggaatatttactatgagtaaatggttttcagattacttgatagctcaacaaggacttccagttgaaaaagttcattatgtgggggcaggaacaaatatgaataatctatttcttgaccactctcataaggaacgtaataagtttttatttattggtaaagatttttttcgtaaaggaggagatcttgtttataatgcttttgtctatttgcaaaataatctcatgccggaggcagagttgtacattataggtccttcagatgttccgatggaatttaacaatccgaatgtttattttttaggtaatctatcagcygataaggtgcaatatttttataatctttgtgatgtatttgttttaccttcccgatttgaggcatttggaattgtatttgttgaagctctttgctatggtttaccatgtatcggtcgtgatttaatggaaatgccaaacctaattcaaaataatgaaactggattattattacctactgaagaggaaaatccacaggttttagctgacgtaatgtataatttgataaaagatgaaagcttttttaaaaatgttcagactaaacaagattattataaagcagaatattcgtgggacacagttgccaaaagaatgatttcaattatgaagcaagatatgaacaacaatctataa

SEQ ID NO: 4952 - DNA, 264 bp, Streptococcus pneumoniae
  misc_feature (1)..(264): tiling:Spneumo1:WAN024GDN; Cluster includes WAN023LSP 3147 42_1235||||656305..656568|-|264 bp|EGAD orf prediction|S.p neumoniae|R6|NC_003098.1|ORF|110
ttgaagattttgtgccaaagtttgaaagacttggttaaaggcggccgtagcctcgtcttcgtgacctttttggcgttcgagcgcttgtcccatgacttcttgaccatatttctctaccgcttcttggtggtatttttgattgtcttgatagctaaatcccgtgaatttttcctcaatggtcatttttctttctcctttttgttcttgaatagttttttgcaaggtggaaatcaaggtatccagatgttgcctttcgcgagttag

SEQ ID NO: 4953 - DNA, 255 bp, Streptococcus pneumoniae
  misc_feature (1)..(255): tiling:Spneumo1:WAN024FBY; Cluster includes WAN023KPA 3154 92_3098||||1649594..1649848|+|255 bp|EGAD orf prediction|S .pneumoniae|R6|NC_003098.1|ORF|110
ttgaagcaaactttcagtcaccgtaccrgtaaattcaggataratgtcaatatcrccttttttcagagcttcataaaggaarcttgtcktcccaaaattcggtttaacagtcgcagtcatgctggtattttcttcaatcagcaayttatacatattrgccaaaatttctggttctggrcctattttcccagcaataaycaagttttccttctctttttgarccaaaagrgctggactataagacagacccagtaa

SEQ ID NO: 4954 - DNA, 240 bp, Streptococcus pneumoniae
  misc_feature (1)..(240): tiling:Spneumo1:WAN024D3S; Cluster includes WAN023MDO 3156 50_133||||61932..62171|+|240 bp|EGAD orf prediction|S.pneu moniae|R6|NC_003098.1|ORF|110
ttgaagccctctttctttggccatagctgcgagggtgttggcatattcggcaaatttgccatagagttgataccacttgaggtagtaccagccttgggcactagtcgcatcgttggcgtattcgtcagtaccaaagttgaaaatctttgttttacctgcaaagaagtccatgtatttaccgatgagggcttttacaaagttcatcgcttcttcgtttttcaagtccatagttgtttttga

SEQ ID NO: 4955 - DNA, 225 bp, Streptococcus pneumoniae
  misc_feature (1)..(225): tiling:Spneumo1:WAN024CGW; Cluster includes WAN023MEA 3151 07_109||||53201..53425|-|225 bp|EGAD orf prediction|S.pneu moniae|R6|NC_003098.1|ORF|110
ttgaagccgtcttcaacaaacactgactccaatttaaaatcaaagatatcatatgaatcatcaaaaagtcaatctgtaaatagagccttcactacttccggatacarcctgtactctgcttcatggatgcgagcttcaaatctgtcaatggtatcatcagctagtcgtggcacacgaacctgtttgatgacctggcctgtatccacacccgaatccacccagtga

SEQ ID NO: 4956 - DNA, 105 bp, Streptococcus pneumoniae
  misc_feature (1)..(105): tiling:Spneumo1:WAN024ET4; Cluster includes WAN0241T8 SP19 77||15901800|NP_346404.1|1881763..1881867|+|105 bp|hypothe tical protein|S.pneumoniae|TIGR4|NC_003028.1|ORF|011
ttgaaggaaaaacaagatttttgcctattttttagaaagcaatctgtttttcaatttcattttcaatctattatcagattattcttcaaaatcgaagccatataa

SEQ ID NO: 4957 - DNA, 294 bp, Streptococcus pneumoniae
  misc_feature (1)..(294): tiling:Spneumo1:WAN024GHN; Cluster includes WAN023LXR 3132 33_979||||512186..512443|-|258 bp|EGAD orf prediction|S.pn eumoniae|R6|NC_003098.1|ORF|110
ttgaaggaaagtgaagggacctacaagaacaggacgagtgttcaatccaagttctttggcttcttgraactcatcraaaatcttgtgaccwgcmartttkacttgagtgtctttttcaaatttaggaacgatgtagtggtagttagtgttgaaccatttcttcattggaagggcgcgaacgtcccctttttctccctggtaaccacgtcccaaagcgaagtagcgctcaaggtcagacaagtccaagttttgaackgatgcaggcaccacgttgaaaaggaaagccgcatctag

SEQ ID NO: 4958 - DNA, 1000 bp, Streptococcus pneumoniae
  misc_feature (1)..(1000): tiling:Spneumo1:WAN024CPG; Cluster includes WAN02445T spr0 849|phoL|15902893|NP_358443.1|845750..846718|+|969 bp|PhoH -like protein|S.pneumoniae|R6|NC_003098.1|ORF|111
ttgaaggaacattcaatagacattcaactgagtcatccagatgacctgtttcatctttttggttccaatgarcgccatcttcgtttgatggaagaagagcttgatgtkgtgattcatgctcgtacggagattgtccaggttttgggagaagagtctgcytgtgaggaagcccgtcargttattcargctytsatggtcttggtraaycgtgggatgaccgttggtacgccagatgtrgtmactgcrattagcatggtcaaaaaygatgaaattgayaagtttgtcgccctttacgaaraagaaatyatcaargayaatactgggaarcckatccghgtcaaaaccytrggkcaaaarctttatgtggacagtgtcaaacagcatgatgtgacctttggaatyggrccwgcaggkacrgggaagaccttycttgcagtkacyttggcagtgactgcccttaaacgtgggcaagtcaarcgrattatcytracwcgyccagcggtggaagcrggagagagtctwggwtttcttccgggtgatcttaaggagaaggtrratccttaccttmrwcctgtttaygatgccttgtatcaaatyctkgggaaaraccaaacractcgwctcatggagcgtgaaattatcraaattgcgccccttgcctatatgcgtgghcggaccttggatgatgcctttgtcattctygatgaggcgcaaaayacgaccatcatgcagatgaagatgttcttgackcgtttaggytttcattctaagatgattgtcaatggagatatyagtcagattgayctgccacgtaatgtcaagtccggtttgattgatgcycaagaraarctcaagaacatyyaycarattgactttgttcatttttcagcyaaggatgtggttcgccatccwgttgtcgctcagattatccgagcytatgaayaktcyastkaarwwgmasacgastramkaattagagtctcaacctctgtctgaagga

SEQ ID NO: 4959 - DNA, 75 bp, Streptococcus pneumoniae
  misc_feature (1)..(75): tiling:Spneumo1:WAN024DQS; Cluster includes WAN023SLX NC_0 03098.1_621||||495198..495272|+|75 bp|Glimmer 2.02 orf pre diction|S.pneumoniae|R6|NC_003098.1|ORF|101
ttgaaggaacgagaagtcttgayaggtcaacgacttaatgaactggaaatcaacggtattcgtttgactaagttt

SEQ ID NO: 4960 - DNA, 332 bp, Streptococcus pneumoniae
  misc_feature (1)..(332): tiling:Spneumo1:WAN024FIZ; Cluster includes WAN023KZ9 3154 67_2656||||1413725..1413976|+|252 bp|EGAD orf prediction|S .pneumoniae|R6|NC_003098.1|ORF|220
ttgaaggaactctgtcaatgtagagaatgggcttccaccgagtgtaatcaagcgttcrctgatttcatccaattgaccgtcaagagcttccatgtactcatccatttttggatgccatacaaggaaaccacgaccatgcatataccagtgcacttggtgcaaagcaacgtgagctacatacaaatcagcaacagcttggttcaagacttcctttgtttttgccaatgctactggcgctgcttttgtcaatgatgttacgtcttttactgcttcttttttcaattctaccattttctttacctcattcattattttttgtaaccacttcttaa

SEQ ID NO: 4961 - DNA, 366 bp, Streptococcus pneumoniae
  misc_feature (1)..(366): tiling:Spneumo1:WAN024G3W; Cluster includes WAN023LFE 3137 05_1966||||1063127..1063492|-|366 bp|EGAD orf prediction|S .pneumoniae|R6|NC_003098.1|ORF|110
ttgaaggaattcttgagcatcgttgatcaagcttggttcttgaacttgaagaatctcagaacacaagttactcatgataatctttccatcaacaggatttgcacggttagccgtatcgatgttgactacataaggatagccagactcttgttgcaatttagagatttcagtttccaaatcccgcgccttgatttttgtcttgcgaatatttggatttgcgaccaattcatcgtatttttcagtaatgtcgatgtaattgaatggcacaccgtattctttttctacagagtaagggctgaagaggtacatttcttcatttttacgagccaattcgtagaatttatcaggtactacaacaccaagtga

SEQ ID NO: 4962 - DNA, 951 bp, Streptococcus pneumoniae
  misc_feature (1)..(951): tiling:Spneumo1:WAN024FRV; Cluster includes WAN0243U5 spr1 270|hprK|15903313|NP_358863.1|1264954..1265904|-|951 bp|HP r(ser-P)kinase/phosphatase|S.pneumoniae|R6|NC_003098.1|ORF |221
ttgaaggaggaaatgatgtcggttttagtaaaagaagtgattgaaaagcttagactagayattgtctatggtgaaccagaattgcttgaaaaggaaatcaatayagcggatattacgcgacctggtcttgaaatgacaggctattttgactactatacaccagagcggattcaacttttggggatgaaggagtggtcttatctgatcagcatgccttccaacagccgttatgaagttttgaaaaaaatgtttctacctgagacaccagcagtcattgttgcccgtggtttggtggttccagaggagatgttaaaggctgctagagaatgtaagattgctattttaaccagccgtgcagctaccagtcgtttatctggaragttatctagctatctggattctcgtttggcagaacgtaccagtgtgcacggtgtcttgatggatatttatgggatgggcgtcttgattcagggagatagtggaattggtaagagygagacaggtcttgagcttgtcaaacgtggtcasygwttggtagccgatgaccgtgtcgatatctttgccaaggatgagattactctctggggtgaaccagctgaaattttgaaacacttgattgaaattcgtggggttggtattatcgatgttatgagtctytacggtgcgagtgctgtcaaggattcttcacaggttcagcttgctgtctatttggaaaattacgatacrcataagacctttgatcgtcttggaaayaatgcagaggaacttgaagtttctggcgtagccattcctcgtattcgtattccagttaamwmakgkcgtaatatctctgttgtgattgaggcagctgccatgaattatcgtgccaaggaaatgggctttgatgckacccgtttgttcgacgaacgactgacaagtctmathgctcgaaatgaggtgcaaaatgcttga

SEQ ID NO: 4963 - DNA, 371 bp, Streptococcus pneumoniae
  misc_feature (1)..(371): tiling:Spneumo1:WAN024DK4; Cluster includes WAN0244LR spr0 275||15902319|NP_357869.1|273944..274309|+|366 bp|Hypothet ical protein|S.pneumoniae|R6|NC_003098.1|ORF|110
ttgaaggatgattttggaggatataagatgacattgactattcatgtatattataaaggtgatggagatagtgcaataaagtttgcaagagaaatgcttgatagtggccttgttraagaaattagaaatcaaaaaggtaacttgaaatacgaatattttttaccaattgaaaaagagggaactattctccttattgatcagtggataaatcaagaarctttagatraacatyatcaatcaaagacaatgcagaaaatcttagatttaagaaaaaaatatcacttgcagatgcaagttgaacgttatatagaagatgattctgggatgccagaaagcgataagtcgtttatagacacagggaattarctaat

SEQ ID NO: 4964 - DNA, 363 bp, Streptococcus pneumoniae
  misc_feature (1)..(363): tiling:Spneumo1:WAN024FHV; Cluster includes WAN023KXN 3139 69_2729a||||1452644..1452916|-|273 bp|EGAD orf prediction| S.pneumoniae|R6|NC_003098.1|ORF|220
ttgaaggccagtgagggcaccagatttttcgtaacggtgcatcataccgatttcagcgatacggattggcaattcacggtaagagtgaacatggtgtttgaaaacttggatgtggtgcggacagttcattggacgaaggacaaattcttccccgtcacccatgtccatggttgggaacatgtcttcttggtaatgatcccagtgaccagaagtcttgtaaagctcaacagaagcaagtggtggagtgtagacgtgttggtagccagaaaccaactctttgtttacgatgtagcgttccaattcacgacggatagtcgcaccatttggcaaccagaatggcaaaccttgtcccacttcttgtga

SEQ ID NO: 4965 - DNA, 99 bp, Streptococcus pneumoniae
  misc_feature (1)..(99): tiling:Spneumo1:WAN024CYH; Cluster includes WAN023S6X NC_0 03028.1_2728||||2069184..2069273|+|90 bp|Glimmer 2.02 orf prediction|S.pneumoniae|TIGR4|NC_003028.1|ORF|010
ttgaaggctgcttatgtttttcctaagattttttcaaaaatatatttatcagatagcggtttgtcttcttcttcagcttggtttttgtatctaactaat

SEQ ID NO: 4966 - DNA, 288 bp, Streptococcus pneumoniae
  misc_feature (1)..(288): tiling:Spneumo1:WAN024FC9; Cluster includes WAN023KPU 3154 91_3079b||||1640891..1641178|+|288 bp|EGAD orf prediction| S.pneumoniae|R6|NC_003098.1|ORF|110
ttgaagggctgcttgagctttaagggtacgttggttttcaagcacagcatggcgagcacgtttcaaacgattttcatctttaatcagatagctatattggtcaacggcccactcgtccaattcacccagrgtctgaatatccaaggmaacttgcaattcttccactgctttttcacactcagcacgacgttcattgtatttagagtccgccaattcacggcgtttgttggtgttcatgataacaacgacattgtccttcaaatcaagtggcaccaartcrtaytctaa

SEQ ID NO: 4967 - DNA, 252 bp, Streptococcus pneumoniae
  misc_feature (1)..(252): tiling:Spneumo1:WAN024GED; Cluster includes WAN023LTO 3136 50_1170a||||617387..617638|-|252 bp|EGAD orf prediction|S. pneumoniae|R6|NC_003098.1|ORF|110
ttgaaggtcttctgcatagcctttyttwacaaagtaagctgcattttcaatctggtcaccacgactagcttcacgaccaagcggcacaatgacatgcaattttgctatcgccaagagctcaaaaatcgtattggcaccacctcgtgtcacaacaatatcagccaattccatcaagggttgatagagatcggtcacatagtcaacacgaaaaagattttgsctcaactcrttcagactagaatctccagttag

SEQ ID NO: 4968 - DNA, 237 bp, Streptococcus pneumoniae
  misc_feature (1)..(237): tiling:Spneumo1:WAN024BIM; Cluster includes WAN023LNJ 3132 56_1522||||807900..808136|+|237 bp|EGAD orf prediction|S.p neumoniae|R6|NC_003098.1|ORF|110
ttgaagtacactagatgggagttgttgaaaagcagtcatctagtttttcttttctgctttgacttttttctctttgtcatcagggaaagtaacttgtttcaaatcagggagtttagcaaactcttcaaacatcttgtccaagtcgtctcgttttgtaaatttgacagccataggtgtacctcgattctarattctacctctattatactattattttgcggaaaagggaaaagttaa

SEQ ID NO: 4969 - DNA, 261 bp, Streptococcus pneumoniae
  misc_feature (1)..(261): tiling:Spneumo1:WAN024FVO; Cluster includes WAN023L8R 3154 22_2249||||1207831..1208091|+|261 bp|EGAD orf prediction|S .pneumoniae|R6|NC_003098.1|ORF|110
ttgaagtacagaaaggagcatagaaagaagtccttcgcggtttggaagagttgcaagtgcaagaatctcttctttagatgcgacagcgccttcgattgcaccacctttaatttcaagtgcttcagcgtttttagaaaagtcgttcaagattttcgctggtgcgataacatcttcattagaaaatgctactgcagatggtccaacaaatacagatgcaagatcttcaagaccagctttttcagctgcacgacgcaagattga

SEQ ID NO: 4970 - DNA, 503 bp, Streptococcus pneumoniae
  misc_feature (1)..(503): tiling:Spneumo1:WAN024C6L; Cluster includes WAN023M6D 3143 78_519a||||266233..266562|-|330 bp|EGAD orf prediction|S.p neumoniae|R6|NC_003098.1|ORF|220
ttgaagtacctgcaatggcaccgactgtcgttccaatcaaatcagagtaaagagccttatccaatttggctgattggtgattttcaccatttgtcgctacgataccaactttttcacctgtaccgatcaaggtaccaattgtgtcaaaaatatctgtcaatgagaaggcaagaatggccatcagagtttcaggcaagcgagctgtatctgaaaccaaagctcccaawccttctgaaccaagagctgcaccaaagattgtcttcaaatcttcaaaagctgcaccaacatggttattagcaaaatcgatactagacaaatcaaccaaaccaactgcaatagcaagaacagttgttgtcaagatagagagaataattccccctttaatccctttgatgacaaagaagatagtaatggcaagtcctgcaagagccactaaaacagctggattattaaagctgaccaatcctggaactgctgaagagtttgctgcaatcgttgcttga

SEQ ID NO: 4971 - DNA, 360 bp, Streptococcus pneumoniae
  misc_feature (1)..(360): tiling:Spneumo1:WAN024GBI; Cluster includes WAN023LPY 3133 79_1398||||740166..740525|-|360 bp|EGAD orf prediction|S.p neumoniae|R6|NC_003098.1|ORF|110
ttgaagtcagttcttgaccgtctcgttttttttgkattaaatcaactgctctcattctttcacacttctaaggatatagtatcccttgtcttttttaaggatttcacaattrccaaacacatcytccatcttrgacttrgcacttggagcyccttgttttttctggatgacgatkgtcaaatcyccacyartttccaagaaatctttacttttctcratgatttcatgaacgacttgcttgcccgcacggataggaggattggaaatgacatgrtcaaawygyccttsaactyktkcataratrttrgaytgraawatcgtcgcttttgcattatttttttcagcatttctcygagctaa

SEQ ID NO: 4972 - DNA, 296 bp, Streptococcus pneumoniae
  misc_feature (1)..(296): tiling:Spneumo1:WAN024FKG; Cluster includes WAN023L1Q 3156 46_2554||||1361934..1362176|+|243 bp|EGAD orf prediction|S .pneumoniae|R6|NC_003098.1|ORF|110
ttgaagtctttsgcttygccccccctgacaagagtcgtccgcgttcaccaacttcagtatctagtccctctttcatggagcgaatctcatcacctagtgatactaagtctagcactttcatcaattcatcatcagttactaagcgattcaaaccgagacaaagattgtcacgaatactgccagataagactgcattattttgtgaaacccaagcgattttacttctccattcttttaagttaaaatcatatatacttgattgctccattagaatatctcctgaaagcggtttataa

SEQ ID NO: 4973 - DNA, 255 bp, Streptococcus pneumoniae
  misc_feature (1)..(255): tiling:Spneumo1:WAN024G8C; Cluster includes WAN023LLI 3147 31_1638a||||869212..869466|-|255 bp|EGAD orf prediction|S. pneumoniae|R6|NC_003098.1|ORF|110
ttgaagtgcctcctgactaatctcactggcagtyccataaatgcgcaagccaaaactcgaagcataatcaataaacttctgaaccttttcagccttaggctcctcgtgaattcgatagataaaaggcaaatccaacttgctgaaatgttcggcaactgtttcattagccatcaacataaaagactcaatcatccgctcggcaataccacgctgccgaagaacgatatcaacaggcttaccttgtttatccactaa

SEQ ID NO: 4974 - DNA, 322 bp, Streptococcus pneumoniae
  misc_feature (1)..(322): tiling:Spneumo1:WAN024CUM; Cluster includes WAN0246OW 2084 09-66-9_1||||48..260|-|213 bp|Glimmer 2.02 orf prediction from Patent Sequences|S.pneumoniae||WAN0246Y3|ORF|000
ttgaagttcgagaatactgggtgtcttctgatgttaagtggttgtgtcaaaaccatcccaaatggcataaattgcagtggaattggaatgactcgtaatactattgatagagatggtattacaagtcaagacgttcgctattttatctttaactttaagcttrrtgtwgtrrccttttgccatagtgttcgaggtcattggtcagcagaaagtatgcattggttattggatgtggtttatcgtgaagaccatcatcagaccctggataaacgagctgcttttaaccttaatcttatccgaaaaatgtgtttatattttctaa

SEQ ID NO: 4975 - DNA, 252 bp, Streptococcus pneumoniae
  misc_feature (1)..(252): tiling:Spneumo1:WAN024GCM; Cluster includes WAN023LRP 3136 44_1291||||683036..683287|-|252 bp|EGAD orf prediction|S.p neumoniae|R6|NC_003098.1|ORF|110
ttgaagttctcctacttcttccatgagagcatcaacatccgcgccgtcttcagccattttcatatagaggtcattgatacgagcttcagctttgaaaagctcatcaaaagccgtacggagaacatcacgcaccgactgtctttcagcaaggacagagtgctgatccaagtaaccagccgtcacatatttggaccactcaacctttccttcatctggcagcattttaccagtcacgatactcataaaggttga

SEQ ID NO: 4976 - DNA, 92 bp, Streptococcus pneumoniae
  misc_feature (1)..(92): tiling:Spneumo1:WAN024CLB; Cluster includes WAN023S7W NC_0 03028.1_2461||||1861710..1861793|+|84 bp|Glimmer 2.02 orf prediction|S.pneumoniae|TIGR4|NC_003028.1|ORF|011
ttgaagttctggaaagatgttgtttcagtattgagaaaaggtgggaaaaacttgcgattttcacagagaaaggaagaaaaagtatagaaata

SEQ ID NO: 4977 - DNA, 234 bp, Streptococcus pneumoniae
  misc_feature (1)..(234): tiling:Spneumo1:WAN024CRC; Cluster includes WAN023MBD 3150 98_252||||130877..131110|-|234 bp|EGAD orf prediction|S.pn eumoniae|R6|NC_003098.1|ORF|110
ttgaagttgttcttgcgaaagttggctgaggaaataggtctgatccttgccattgtccacgccacgaagcatgtgaacrgtrccatcctcatcacgcgccactcgagcatartgcccagtcgctacatagtctgcccccaaggtyatggcatagtccaaaaaggccttgaacttgatttccttgttgcacataacgtccggatttggcgtgcgccctgcacggtattcmgctag

SEQ ID NO: 4978 - DNA, 153 bp, Streptococcus pneumoniae
  misc_feature (1)..(153): tiling:Spneumo1:WAN024BEY; Cluster includes WAN023S7K NC_0 03028.1_2595||||1963497..1963640|+|144 bp|Glimmer 2.02 orf prediction|S.pneumoniae|TIGR4|NC_003028.1|ORF|010
ttgaagtttcagataaaactgacgtggtttgaagagattttcgaagagtatgacaaagaaaaaacgaacgagaatcgctttccatcacgaaagctagatctcattcgtcaaaatgatgttatcaagtcgggtttatccattcatctaactaat

SEQ ID NO: 4979 - DNA, 746 bp, Streptococcus pneumoniae
  misc_feature (1)..(746): tiling:Spneumo1:WAN024GBT; Cluster includes WAN024493 spr0 731|rpiA|15902775|NP_358325.1|730520..731260|+|741 bp|Ribo se-5-phosphate epimerase|S.pneumoniae|R6|NC_003098.1|ORF|1 11
ttgaataaaaagcggtttcatagtaaaataagaaytgagaatgatggaggtaaatcggtggaaaatctgaagaaaatggcaggtatcamggctgctgarttyrtsarsgatggratggtygtwggrctwggaacaggytckactgcctattattttgtcgaagaaatcggtcgtcgwatcaaggaagaaggmttgcagattayagctrtracracttctagtgtgaccastaaacaggcwgaaggsctyaatatcccrctcaartctattgaccaagtagactttgtcgatgtgacrgtygayggsgcrgatgaagtggatagtcagtttaatggaatcaaaggyggtggtggtgcycttctsatggaraaggtkgtygcracaccatcaaaagaatacatttgggtggtggatgaaagcaagctggtcgaaaaactaggtgcttttaaattgccagtagaagtggttcagtatggtgcagarcargtctttcgtcrttttgaacgagctggctacaaaccaagtttccgtgaaaaagacggccaacgttttgtgacsgatatgcagaattttatcattgacctcgccttggatgtyattgaaaatccaattgcttttggacaagaattggaccatgtcgttggtgttgtggagcatggtttattcaaccaaatggtggataaggtmatcgttgctggacgrgatggagttcagatttcaacttcaaaaaaaggaaaatarctaat

SEQ ID NO: 4980 - DNA, 305 bp, Streptococcus pneumoniae
  misc_feature (1)..(305): tiling:Spneumo1:WAN024GJ9; Cluster includes WAN0244G2 spr0 480||15902524|NP_358074.1|481597..481896|+|300 bp|Conserve d hypothetical protein|S.pneumoniae|R6|NC_003098.1|ORF|111
ttgaataagcaaaagatragtaatctcttggggcttgctcagcgagcagggcgcatcatatcgggtgaagaattggtggtcaaggccattcaagacggcaaggccaagttggtctttctagctcatgatgctggacycaatctgrccaagaagattcaagataaaagtcattattatcaagtagaaattgtaaccgtgttttcaacactggaattaagcatagcagtcgggaaatcgagaaaggttttggctgtaacagatgctggatttacaaagaaaatgaggtctcttatggaatarctaat

SEQ ID NO: 4981 - DNA, 237 bp, Streptococcus pneumoniae
  misc_feature (1)..(237): tiling:Spneumo1:WAN024G8A; Cluster includes WAN023LLG 3137 21_1641||||871319..871555|-|237 bp|EGAD orf prediction|S.p neumoniae|R6|NC_003098.1|ORF|110
ttgaatacgattgccattctcatcgcgacggtgcaaatggcctggattttcattgtacttaaccaattcccaatccttgtaatagtctgccagttctccttctttaaaggtgaatgggaagttaaccgagcaaggataatcctccgtgtccatggcacaaacgataaggttgtaaccaccaacactggttttctcctgcatattttgaataatagctggaatgcggtccgcttgtag

SEQ ID NO: 4982 - DNA, 355 bp, Streptococcus pneumoniae
  misc_feature (1)..(355): tiling:Spneumo1:WAN024GFA; Cluster includes WAN023LUM 3147 05_1125a||||597573..597881|-|309 bp|EGAD orf prediction|S. pneumoniae|R6|NC_003098.1|ORF|220
ttgaatactgctcyacytgrcasagacgctccacgtgctcrctcccmacytcagaaatacgrttcatatcattgcgcaagaggtccacaatcatcatattttcagagcgatttttggratcctgttccaaccaactggcctgctycaagatcttcttggtcagttaysscacgctgagtcgtycccttcattggtcgygttgtcaaytcgcgrtcattttgctcaaaaaagagctctgggctcatggaaatyactgycatmtcgtcatgttccacataggcattgtagcccgcctcctgctctaccaccatrcgattgtagatrgcaaaaggattggcryttaacttttgcttaa

SEQ ID NO: 4983 - DNA, 315 bp, Streptococcus pneumoniae
  misc_feature (1)..(315): tiling:Spneumo1:WAN024G83; Cluster includes WAN023LKN 3134 82_1701||||906858..907127|-|270 bp|EGAD orf prediction|S.p neumoniae|R6|NC_003098.1|ORF|110
ttgaatagctgcggctttcttcacatcactttctgcaatggcaataaacatctcgtgcatttcatccccatttgtatgagaggcaacagaaataaccccatccgccccaaggttcatggcatggaaagcatctccatcctcaccwgtataraycaagaactcttcwggyttgtgctcaatcaagtaagccatattagccaagctagtacattctttgacaccgataatatttggatgrtcagccaagcgaagcatggtttctggagtyaattcgacaactacacgccctggaatgttatagataataattggtag

SEQ ID NO: 4984 - DNA, 782 bp, Streptococcus pneumoniae
  misc_feature (1)..(782): tiling:Spneumo1:WAN024C7M; Cluster includes WAN0244MQ spr0 240|uppS|15902284|NP_357834.1|233892..234668|+|777 bp|Unde caprenyl diphosphate synthase|S.pneumoniae|R6|NC_003098.1| ORF|112
ttgaataggaataagatcatgtttggattttttaagaaagataaggctgtggaagtagaggttccgacacaggttcctgctcatatcggcatcatcatggatggcaatggccgttgggctaaaaaacgtatgcaaccgcgagtttttggacayaaggcgggcatggaagcattgcaaaccgtgaccaaggcagccaacaaactgggcgtcaaggttattacggtctatgctttttctacggaaaactggacccgtccagwtcaggaagtcaagtttatcatgaacttgccagtagagttttatgataattatgtcccggaactacatgcgaataatgttaagattcaaatgattggggagacagaccgcctgcctaagcaaaccttygaagctttaaycaaggctgaggaattgactaagaacaacacaggattgattcttaattttgctcttaactatggtggacgtgctgasattacacaggcgcttaagttgatttcccaggatgttttagatgccaaaatcaayccaggtgacatcacagaggaattgattggyaactatctctttacycagcatttgcctaaggacttacgagacccagacttgattatccgtactagtggagaattrcgtttgagcaatttccttccatggcagggagcctatagtgagctttattttacggacaccttatggcctgattttgacgaagcrgccttgcaggaagctattcttgcctataatcgtcgycatcgccgatttggaggagtttarctaat

SEQ ID NO: 4985 - DNA, 339 bp, Streptococcus pneumoniae
  misc_feature (1)..(339): tiling:Spneumo1:WAN024EWH; Cluster includes WAN023KOF 3154 97_3145||||1673912..1674250|+|339 bp|EGAD orf prediction|S .pneumoniae|R6|NC_003098.1|ORF|110
ttgaatagttacatccaaggcagttgttggctcatcacagatcaagacatcaggtcggcaggcaagggcaatmgcaataacgatacgttgacgcattcctccagaatattggaatgggtattcattaaaacgtctatctgcgtctggaatgccaaccttattcatgtagtcaatggccaattctttcgcttctttagctgtttttccttggtgttttacaataacttctgtaatctgactaccaattgttttaatggggtccaaactagtcattgggtcctggaagatagtcgcaatcttagcaccacgaatttgttcccaatccttgtgagaagataa

SEQ ID NO: 4986 - DNA, 717 bp, Streptococcus pneumoniae
  misc_feature (1)..(717): tiling:Spneumo1:WAN024DEL; Cluster includes WAN02448A spr0 760||15902804|NP_358354.1|756677..757387|+|711 bp|Conserve d hypothetical protein|S.pneumoniae|R6|NC_003098.1|ORF|111
ttgaatataaaggagtttgatatggagtggattagattaataggaatagcaatcattgttgtgggttttattttaaaatttgatacaattgcaacagtagtcttagctggtttggttacagctttagtttcaggtgtttctctcgttgaatttttggagattttgggaaaagaatttagcaatcagcgagtgctcacgatttttatggttaccttgcctcttgtggggctgtcagaaacctttggactcaagcaacgatcaatcgatttgattcgaaagattaaaggtctgacagttggaaacttctatacagtttatttytttattcgagagttagctggtttcttttcaattcgtctaggaggacaccctcagtttgtcagacctttggttcarcctatgggagaagcagctgcagagtctcaattaggtagaaagttaacagaggttgaagatgagacaataaaagcgcgtgcggctgcgaatgaaaattttggaaatttctttgctcaaaatacgtttgtaggtgctgggggagtcctcttgatagggggaacattagatcagttaggctatgaaagcaattatgcagggattgcttctacatctattattgttgctgttataacacttattgtagtggggatttayaattatttatttgataaaaaattgatatcaaaaaagactaggggaggagaacaaaaaykaactaat

SEQ ID NO: 4987 - DNA, 854 bp, Streptococcus pneumoniae
  misc_feature (1)..(854): tiling:Spneumo1:WAN024GAD; Cluster includes WAN02447L spr0 785||15902829|NP_358379.1|783459..784307|+|849 bp|Hypothet ical protein|S.pneumoniae|R6|NC_003098.1|ORF|111
ttgaatatagagagttttctgacaatgaatcaatcctacttttatctaaaaatgaaagaacacaaactcaaggttcmttatacaggtaaggagcgccgtgtacgtattcttcttcctaaagattatgagaaagatacagaccgttcctatcctgttgtatactttcatgacgggcaaaatgtttttaatagcaaagagtctttcattggacattcatggaagattatcccagctatcaaacgaaatccggatatcagtcgcatgattgtcgttgctattgacaatgatggtatggggcggatgaatgagtatgcggcttggaagttccaagaatctcctatcccagrgcagcagtttggtggtaagggtgtggagtatgctgagtttgtcatggaggtggtcaagccttttatcraksasacctatcgtacaaaagcagactgccagcatacggctatgattggttcctcactaggaggcaatattacccagtttatcggtttggaataccaagacmaaattggttgcttgggcgttttttcatctgcaaactggctccaccaagaagcctttaaccgctatwtcgagtgccagaaactatcgcctgaccagcgcatcttcatctatgtaggaacagaagaagcagatgatacagacaagaccttgatggatggcaatatcaaacaagcctatatcgactcgtcgctttgctattaccatgatttgatagcagggrgagtacatctggataatcttgtgctaaaagttcagtctggtgccatccatagtgaaatcccttggtcagaaaatctaccagattgtctgagattttttgcagaaaaatggtaactaat

SEQ ID NO: 4988 - DNA, 202 bp, Streptococcus pneumoniae
  misc_feature (1)..(202): tiling:Spneumo1:WAN024AEZ; Cluster includes WAN024EJO-rc R 6.IG_825.1.2||||786306..786507|-|202 bp|Between spr0789 (+ strand) and spr0790 (hsdM) (+ strand)|S.pneumoniae|R6|NC_ 003098.1|IG-rc|110
ttgaatattaatagacttgtttggtatcttgaaaactatatcgtataggtgtcgtcatggatccttttagctgatttaaggatacgcaaacacaatactatgactcaattgaaatattaaaatttaatttctgaccacctaatcctgcttcaaatagttatcgaacaagttttatgatagctaccttgttgggatgctctta

SEQ ID NO: 4989 - DNA, 1868 bp, Streptococcus pneumoniae
  misc_feature (1)..(1868): tiling:Spneumo1:WAN024GJB; Cluster includes WAN0244CS spr0 598|typA|15902642|NP_358192.1|609733..611595|+|1863 bp|GTP -binding protein TypA/BipA (tyrosine phosphorylated protei n A).|S.pneumoniae|R6|NC_003098.1|ORF|111
ttgaatattatagaggaaatcatgacaaaattaagagaagatatccgtaacattgcgattatcgcccacgttgaccacggtaaaacaaccctsgttgacgaattattgaaacaatcagaaacgcttgatgcacgkactgaattggcagagcgtgctatggactcaaacgatatcgaaaaagagcgtggratyaccatccttgctaaaaatactgccgttgcttacaacggaactcgtatcaacattatggacacaccaggacacgcggacttyggtggagaagttgagcgtatcatgaaaatggttgacggtgttgtcttggtcgtagatgcctatgaaggaaccatgccacaaactcgtttcgtattgaaaaaagccttggaacaagaccttgtcccaatcgtggttgttaacaaaatcgataagccatcagctcgtccagyagaagtagtggatgaagtcttggaacttttcatcgagcttggtgcagatgacgaccagcttgatttcccagtggtttatgcttcagcgatcaacggaacttcttcattgtcagatgatccagctgaccaagaagcgactatggcaccaatctttgacacgattatcgaccatatcccagctccagtagataactcagatgagcctttgcagttccaagtgtcrcttttggactacaatgacttcgttggacgtatcggtatcggtcgtgtcttccgtggtacagttaaggttggggaccaagttaccctttctaaacttgacggtacaactaaaaacttccgtgttacaaaactcttcggtttctttggtttggaacgtcgtgaaatccaagaagccaaagcgggtgacttgattgccgtttcaggtatggaagacatctttgtcggtgaaaccatcactccgacagatgcagtagaagctcttccaatcctacacatcgatgagccaactcttcaaatgactttcttggtcaacaactcaccatttgctggtaaagaaggtaaatgggtaacytctcgtaaggtggaagaacgcttgcaggcrgaattgcaaacagacgtttcccttcgtgttgacccaactgattcaccarataaatggactgtttcaggacgtggagaattgcacttgtcaatccttatcgaaacaatgcgtcgtgagggctatgaacttcaagtatctcgtccagaagttatcgtaaaagaaatcgacggtrttaaatgtgaaccatttgaacgtgtacaaatcgacactccagaagaataccaagggtctgttatccaaagcctttctgaacgtaaaggtgaaatgttggatatgatttcaactggtaatggtcaaactcgtttggtcttccttgttccagcgcgtggtttgattggatactcaactgagttcttrtcaatgactcgtggttacggtatcatgaaccataccttcgaccartacttgccattgattccaggggaaattggtggacgtcaccgtggtgcccttgtttctatcgatgctggtaaggctacaacttactcaatcatgtctatcgaagaacgtggtacgatctttgtcaacccaggtactgaggtttatgaaggaatgatcatcggygaaaactctcgtgaaaatgacttgacagttaacatcacgaaggcaaaacaaatgaccaacgttcgttcagctactaaggaccaaacagctgttatcaagacgcctcgtatcttgacacttgaagagtctcttgagttcttgaacgacgatgagtacatggaagtaacgcctgagtctatccgtttgcgtaaacaaatccttaacaaagcagagcgtgagaaagctaacaagaagaaaaaatcagctgaataactaat

SEQ ID NO: 4990 - DNA, 246 bp, Streptococcus pneumoniae
  misc_feature (1)..(246): tiling:Spneumo1:WAN024CAR; Cluster includes WAN023LL7 3134 84_1648||||873963..874208|-|246 bp|EGAD orf prediction|S.p neumoniae|R6|NC_003098.1|ORF|110
ttgaatattgatatacatagtagttatagtagaagtgtggaatgcgagcccactcgtattggatttcaggattgtcttccttactcaaaccataatactcttggttcaagtctgcgtagagtttatttaggaaatcgcttgtcaagacctccccattttgatctgcttggtgaatggcgtgttcaaactcagcaaattgagtttggcggaaaactgttccacggaaaccatctaggaagttattga

SEQ ID NO: 4991 - DNA, 213 bp, Streptococcus pneumoniae
  misc_feature (1)..(213): tiling:Spneumo1:WAN024FVW; Cluster includes WAN0243VT spr1 210||15903253|NP_358803.1|1206960..1207172|-|213 bp|Hypoth etical protein|S.pneumoniae|R6|NC_003098.1|ORF|101
ttgaatattgttctcctttttttattttcaggagggaaaatgrcaaaagaaytacaatcatcaygctatattgtcatttcatttttagtacgtgaaatgggaattgayattgttgaagccatctctcttatggcwgaattagaaaaaartggcttggttcgattggaatcaagtggagatttaatactcaaagaactwggaggagckctatga

SEQ ID NO: 4992 - DNA, 439 bp, Streptococcus pneumoniae
  misc_feature (1)..(439): tiling:Spneumo1:WAN024GB9; Cluster includes WAN023LPP 3136 37_1409||||744560..744889|-|330 bp|EGAD orf prediction|S.p neumoniae|R6|NC_003098.1|ORF|220
ttgaatcagttcagactgaccatttccatcaatccccgcaataccaacaatctctccagcacgaacatccaaggacagatttttaacagctggaacaccacggttttcattgaccaccaaatctttgatagacaaaaccacttcttttggtttagaggcttgcttctctgttttaaaggaaacagaacgtcctaccatcatttccgccaaatcagcattggtagcccctgcaatttcaacggtttcaattgatttcccacgacggataactgtaacacggtcagaaactgckcgaatttcatccaatttgtgggtaatcaagataattgattttccttctttgacaagatttttcataatagccatcaactcatcaatttctgatggagtcaaaacagccgttggttcgtcaaagataaggatatcagccccccgataa

SEQ ID NO: 4993 - DNA, 996 bp, Streptococcus pneumoniae
  misc_feature (1)..(996): tiling:Spneumo1:WAN024FWN; Cluster includes WAN0243WA spr1 193|appB|15903236|NP_358786.1|1189778..1190773|-|996 bp|AB C transporter membrane-spanning permease - oligopeptide tr ansport|S.pneumoniae|R6|NC_003098.1|ORF|200
ttgaatcatgtatctctcactcttgttttttcaggagaaattaaaatgaaaaaatatattctaaaaaaagtattattcatgattcctatgttgttgattattagctttttagtattcattgcactagatttaacaccagcagatccattgacatatatggtatctccagatatggctagtagtgcagaacaaatcgaaaagctaagacagcaattaggtttaaatgatccagtattagttcgctatggaagatggctttggcaattactccatggtgattttggatacagtattgtaaatggtaacccaatttccaaaattgtaggacaagcattgcctgcaacttttgaattagcttttgtgtcattaattatttcaacaattgttggtattgtaattggggttatatcagccgttaaacaaaatggtattatcgataatgttgctcgttttctagctgttatcggaactgcgattccacaatttttctttggtattttaattttaaacttctttgcaattcagttaagaattttacctattggtggtagatttgccagtggagattttacatttattaatagagttgaacacttaattctaccagtaatggctatgtcaattgcattggtagctgctttaatgagatacacacgtaattctatgttggatgtttttaatgcagattatgttaaaacagctcgtgcaaaaggtgttcctgaatggaaagtttattttaaacacatatttagaaatgctatgcgaccaattttagtgttattgattttccgtctaccaatgttaattggtggatcagtaattatcgagagtgtcttttcttggcctggaattggttctatcatcctatctagtgtaacagcaggtgactatcctgtaattatgattaccacattaatgatttctgtcgtagtgttatttgctagtctacttgtagatattatggctgcaatattagacccacgtattcgttattag

SEQ ID NO: 4994 - DNA, 885 bp, Streptococcus pneumoniae
  misc_feature (1)..(885): tiling:Spneumo1:WAN024C7X; Cluster includes WAN023QQH cont ig_1343_7||||7619..8503|-|885 bp|Glimmer 2.02 orf predicti on|S.pneumoniae|670|WAN01UE6I|ORF|000
ttgaatccattaaaagaatgctatgaaaaaaacggtatactaattgcagcacaccgtggtacaaacggaggaaatatattacaaaacacatcaaaagcctatttgaattccatacgccataacgcagatatgtttgaggttgatgtaattcgttcaaaagatggagaattttttgcatttcacgatgggcaagaacctttagtatttggtgaaaaaattgatattagaactttgagttctgaagagatccaaagaaaggaatgttttaattcactgaatgaacccatattacaaaagattgaaaaaatttctgatgtattaaaaaattttgagggacagtctttaataaatatagatagaagttggttttactgggataccttcctagataagttaaaaacatatccatctttgaatcaagttcttttaaaatcacctgtaaaaaaagaattattggaaatgcttagagactctggtttgaatrttatgtatatgccaattatcaaaacaattgaagagttagattttgttctctcatttgaaggaataaatayagtagctgtcgaacttgtattccaagatttagaaaatccaatcataagtaagaaartaattgatgatttacatgaaaaaggattacttatttgggttaatgctttaaccttaagtgattcaattattctttcggctaagattgatgatgatacagctattgctcatgatggcgaatcttgggggaaattggtttcaataggatttgatattattcaaacagattggccattattactttatcaatatctagttgaaaaaaataaaaaaataaaaawaaagggagaactatcatgttcaaaaactttaaaaagattgcattcacttcttcac

SEQ ID NO: 4995 - DNA, 144 bp, Streptococcus pneumoniae
  misc_feature (1)..(144): tiling:Spneumo1:WAN024DQT; Cluster includes WAN0242VM SP05 04||15900418|NP_345022.1|485745..485882|+|138 bp|hypotheti cal protein|S.pneumoniae|TIGR4|NC_003028.1|ORF|122
ttgaatcctgatcgagcggaagaatatttctgccgaggttgccaaggggaaaatmctgaagatattgaattttatgatgaacaattacaggcagaaaaggtggaggwtttgaatattcgattkgaagtaaaaaatykaactaat

SEQ ID NO: 4996 - DNA, 75 bp, Streptococcus pneumoniae
  misc_feature (1)..(75): tiling:Spneumo1:WAN024GCJ; Cluster includes WAN023WQB AX56 8818.1_1||||449..523|-|75 bp|Glimmer 2.02 orf prediction|S .pneumoniae||AX568818.1|ORF|000
ttgaatcctgtccagttagaaaagcatcgtcttccagacccagaacctcttggtcaaaatcctctagaatttgat

SEQ ID NO: 4997 - DNA, 2097 bp, Streptococcus pneumoniae
  misc_feature (1)..(2097): tiling:Spneumo1:WAN024D3L; Cluster includes WAN0244DH spr0 573|nha2|15902617|NP_358167.1|582330..584384|+|2055 bp|Na+ /H+ antiporter|S.pneumoniae|R6|NC_003098.1|ORF|132
ttgaatcctgttgtaaaaaagattaaggaggacgtgcgtggaattactgatttacctcatcctatttttactggtyttgattgtctcaagtacaaccaataagctmmtrccctttttgcctctccctttggtgcarattcttttrggaattgtgattggtctctttttacccaatacygactttcacctyaatacggagttgtttttggcmctggttatcggmcccttgcttttccgagaggctgaagaagcagatgttacggctattttaaaacactggcgaatcattgtttatctcatatttccagtgatttttatctcgaccctgagtttgggtggcttggcccatcttctttggttcagccttcccttggcagcttgcttggctgttggkgcagcccttggtcctacggacttggtggcctttgcctctctttcggagcgttttagctttcctaagcgcgtgtccaatattcttaagggcgaaggactcttgaatgatgcttctggtttggtggcttttcaggtagctttgacagcttggacaactggagctttttctctggggcaagctagcagttcrctcatcttttcaatcctaggcggttttttaattggatttttaacagccatgaccaaccgcttcctccataccttcttgctaagtgtgcgygcaacggatattgccagtgaacttttattagaattragtttgcctctwgtgaccttctttctggcagaagaagtycatgtttcaggkattattgccgtcgtagttgctggaattttaaaggcaagtcgyttcaagaaaatcacgctcctcgaagcccaagtggatacggtgaccgagacggtctggcatacagtgacctttatgctcaacggttctgtctttgtgatttkagggatggagytggaaatgatarcagaacctatcttgaccaatccaatctataatcctctacttttattgctatctctyatcgcccttacctttgtcctytttgtcattcgttttattatgatctatggctattatgcctatagaacccgacgcctcaagaaaaagctaaataagtatatgaaggacatgtttctcttgaccttttcaggtgttaagggaacggtgtcgattgctacgattctcttgataccaagtaatctarmwmadgagtatcctctyttgcttttccttgttgcaggtgtgacgcttgtyagctttttaacaggtctcttgrtcttgcctcatctttctgatgaagaggaagaaagcaaggattatctyatgcatatcgccattttgaatgaagtaacgctagagttggaaaaagagttggaagacaccagaaataaacttyccctctatgcggctattgacaattatcatggacgtattgaaaatctcattttaagccaagaaaaccaggatgatcaagaagaytgggctgctttgaaamtckwgattcttagtattgaaagtgatggtttggarcaggcctatgaagaggggaacattagcaatcgtgyttaccgagtttaccaacgttatctgaaaaatatagaacaaggaatcaatcgtaaacttgcctcaagactgacctattatttycttgtttcyttgmggattttacgttttctycttcatgaagtttttactctyggaaagaccttccgtagctggaagracaaggagcaaagccgtctccgtgctcttgattatgaccaaattgcagagctctatcttgccaatacrgagatgattattgaaagtttggaaaacctgaagggagtctacagmcgctctttgattagttttatgcaggagtctcgtcttcgagaaacarctattatyagcagtggtgcctttgtcgaacgggttatcaatcgtgtcaaacccaacaatatcratgaaatgctgagaggctattatctggagcgcaagttgattttcgaatacgaagaaaaacgattrattacractaagtatgccaagaaattacgacaaaatgtaaataacttagagaactattccttgaaggaagctgccaataccctrccgtatgatatggtggaattggtaagaagaaattarctaat

SEQ ID NO: 4998 - DNA, 255 bp, Streptococcus pneumoniae
  misc_feature (1)..(255): tiling:Spneumo1:WAN024BH8; Cluster includes WAN023LON 3128 58_1469||||777889..778143|-|255 bp|EGAD orf prediction|S.p neumoniae|R6|NC_003098.1|ORF|110
ttgaatcgcttcttttctttccagttctgctttagacggtctccgtcttgttgtacttgtattcttgtttgccattcttctattataccatatttcacaggcatttcgggaagagaaaaagactgcaccaaacggtccaatcttttcatttttctattttttatgcttgtggtttgcgtaggtaaccataaaccacaccacttacgattgctcctaccaagacagaaacgaggtaaaggagagcatttgaagtaa

SEQ ID NO: 4999 - DNA, 1278 bp, Streptococcus pneumoniae
  misc_feature (1)..(1278): tiling:Spneumo1:WAN024FNM; Cluster includes WAN023PB3 pne4 5_16||||12781..14058|+|1278 bp|Type 22F capsule operon, Gl immer 2.02 orf prediction|S.pneumoniae||WAN01UCHA|ORF|000
ttgaatcttagtatgttagccttgacaataggatcagtggtatttgttaaaaaaacgtataggacgtttctcaatcccataattttatttgcaattttgtggtttattataacaactttgtcaaatttaaaactattccaacttttcgagattagtactcatacacaacaaattattttgcttgggacttctctatttgttatagggggagggatagcaatttggtttcgggataaattttattttaaagttggcggtaactcatattttacaacagactttgaaattaattataatttgttctttttgctaggtatcatttgtcttttctattatttgccagatttcttttcctcactggtatcattaataagaggtgggaatttaaacttagttagacaatctgcgcaggatgcagtagataccagtggattaaagaatttcattggaacatttattgttattcctagtgccatggtattagaaatattaggaatattagatttctggagcaataaaaaaggcagaaaactattttatcttaatttagctgtcatttttgtaagagttgttgcagatgctggtagaacgcctctatttaatgttgtcatatatttattacttactgttttagcaaataggttctctgaaaaaactgaaaagaagagaaaagttagtaaaattaagatagtaaattatggtatgctaggttcaattatcttatggctatcaactttatctaggacaacaacctccgtttataggattctttatttttatttcgcaatgtccccaatactattagaaaagtggagtagtatacttgattctgaaaaattagtaacaaagggtttggtttcgttgaacggtttctttttttcaatctcatatgtacttaaaaatctgtttagaataggttattctcaaagagtattagaagcatacacaatgattgcgaatactgatgcaatctggtataatattgcacctggtttgaccaaggcaaatgcatatgtctctctgttttggtttttttatgcggatggacgtttattaggagttttaataggatcccttctatatggtgccttttgtggctatatcttttgcaggtatatccagcaacaaaataaaaagaatttggctatgttactatttatttatcaaggtgtttttttctcttttattagatttccgttttcaaaatcaaattatgcaattgcattcgtactcttattattttttgcttttaagaagaaaggaatagagaaaagtgtt

SEQ ID NO: 5000 - DNA, 228 bp, Streptococcus pneumoniae
  misc_feature (1)..(228): tiling:Spneumo1:WAN024D4L; Cluster includes WAN023M0L 3150 69_846a||||448922..449149|-|228 bp|EGAD orf prediction|S.p neumoniae|R6|NC_003098.1|ORF|110
ttgaatcttatcacaagcacggagaacttcatcgtacttaaagtcaatctcatgctgtccaaccgcaacctcgtggtgactcgcttctacttcaaatcccattttggtcaagacattcacaatctcacgacgtgtgttgtccgcaaggtcagtaggtgccaartcaaagtagccacccttgtcattcacttcaagtgttgggtccccattttcatccaacttaaatag

SEQ ID NO: 5001 - DNA, 1643 bp, Streptococcus pneumoniae
  misc_feature (1)..(1643): tiling:Spneumo1:WAN024FKE; Cluster includes WAN0243R0 spr1 383|PST transporter|15903426|NP_358976.1|1365671..1367293| -|1623 bp|Polysaccharide transporter|S.pneumoniae|R6|NC_00 3098.1|ORF|321
ttgaatgaggaatctatgtcgcacgaaaacaatcaccagcaggcccagatgttacgggggactgcttkgctaacggctagtaactttatcagtcgcctactcggggctgtttacattatcccttggtacatctggatgggggcttatgcagctaaggcaaatggtctctttaccatgggttacamtatctatgcttggttcttgttggtttcaacagcggggattccagttgcggtggccaagcaagttgccaagtataataccatgcgagaagaagagcatagctttgccctgattcggagcttcttaggctttatgacaggactaggcctggtttttgctttagtcttgyatgtctttgctccttggctagcagacttgtctggcgtgggyaaagacttgatcccaatcatgcaaagcttggcttggggagtcttgattttcccgtctatgagtgttatccgaggatttttccaagggatgaataacctcaaaccctatgcyatgagccaaattgctgagcaggtcattcgtgttatctggatgctcctagcaacctttatcattatgaagctcggttcaggagattatctagcagccgttacccaatcaacctttgctgcctttgtcggtatggtagccagttttgcagtcttgatttatttccttgcccaagaargttcactcaaaagartctttgaaacaggagataagattaacagtaagcgtctcttggttgataccattaaggaagccattccttttatcctgacagggtctgccatccagmtcttccagattttgsatmagctrayctttatcaatagtatgagctggtttaccaactacagcaatgaggacttggttgtcatgttttcttatttctcagccaatcctaataaaatcacgatgattttgatttctgtaggggtttcgattgggagtgttggtttgccacttttgacggaaaactatgtcaagggggacttgaaagcrgcttctcgtctsgttcaggacagtctcaccctactctttatgttcttgctaccagcaacggttggagtggttatggtaggagaacctctwtatacrgtcttctatggtaagccagatagtttggctctgggcttatttgtctttgcagttttgcagtctattattttaggcttgtacatggtcttgtctccaatgcttcaggccatgttccgcaaccgcaaggccgttctctattttatctatggttctattgccaagctagtcttgcaactacctaccatcgccctcttccacagttatggtcctttgatttcaacaaccattgctctcatcattcctaacgtcttgatgtatcgggatatttgtaaagtaactggtgtcaagcgcaaggtgattttgaagcgaaccattttaatcagtttgctgaccctagtcatgtttctgttaataggaaccatccagtggctgttaggatttttcttccaaccaagtggacgtttgtggagcttcttttatgtagctctygtcggtgccatggggggtggactttatatggttatgagtytgcgtacctatttattagataaggtaataggaaaagcccaagcagatcgcctgcgagcaaaatttaagctttcgtaactaat

SEQ ID NO: 5002 - DNA, 821 bp, Streptococcus pneumoniae
  misc_feature (1)..(821): tiling:Spneumo1:WAN024GGF; Cluster includes WAN0244E9 spr0 545|ABC-SBP|15902589|NP_358139.1|546440..547255|-|816 bp|B C transporter substrate-binding protein - glutamine transp ort/Major cell bin...|S.pneumoniae|R6|NC_003098.1|ORF|211
ttgaatggagacagtatgaaaaaatttagcctattactagctatcctaccatttttggttgcctgtgrgaatcaagctacacccaaagagwcyagckctcaaaagacaatcgtccttgctacagctggcgacgtgccaccatttgactacgaagayaarggcaatctgacaggcttygatatcgaagttytaaaggcagtagatgaaaaactcagcgactacgagattcaattycaaagaacygcytgggaragyatcttcccaggacttgattctggtcactatcaggctgcggccaataayttgagttacacaaaagagcgtgctgaaaaatacctttactcgcttccratttccaacaatcccctcgtccttgtcagcaacaagaaaaatcctttgacttctcttgaccagatcgctggtaaaacaacacaagaggataccggaacttctaacgctcaattcatcaatmactggaatcagaaacacactgataatcccgctacaattratttttctggtgaggatattggtaaacgaatcctagaccttgctaacggagagtttgatttcctagtttttgacaaggtatccgttcaaaagattatcaaggaccgtggtttagacctctcagtcgttgatttaccttytgcagatagccccagcaattatatcattttctcaagcgaccaaaaagagtttaaagagmaatttgataaagcgctcaaagaactctatcaagacggaaccctygaaaaactcagcaatacctatctaggtggttcttacctcccagatcaatctcagttacaataactaat

SEQ ID NO: 5003 - DNA, 102 bp, Streptococcus pneumoniae
  misc_feature (1)..(102): tiling:Spneumo1:WAN024DO9; Cluster includes WAN023SJ3 NC_0 03098.1_1715||||1332512..1332604|-|93 bp|Glimmer 2.02 orf prediction|S.pneumoniae|R6|NC_003098.1|ORF|110
ttgaatgtttggaatgcttttttaaaactagatgactataacggttctaaaggaacctatcgagtagtcattaaaactaaggatactgctggtctaactaat

SEQ ID NO: 5004 - DNA, 68 bp, Streptococcus pneumoniae
  misc_feature (1)..(68): tiling:Spneumo1:WAN0249ZG; Cluster includes WAN024761-rc R 6.IG_154.2.2||||141977..142040|-|64 bp|Between spr0133 (- strand) and A (transposase) (- strand)|S.pneumoniae|R6|NC_ 003098.1|IG-rc|110
ttgaattaagatcgagacaacgcacaccagagattgcgatactgttatagaagtactaatgccctttt

SEQ ID NO: 5005 - DNA, 156 bp, Streptococcus pneumoniae
  misc_feature (1)..(156): tiling:Spneumo1:WAN024DZ3; Cluster includes WAN023Y44 AL44 9935.1_11||||6172..6318|-|147 bp|Glimmer 2.02 orf predicti on|S.pneumoniae||AL449935.1|ORF|001
ttgaattggattttcgaagagtataagcattttactgaaattttatcaggtagtttaggatggcaaatgacattccctgtcaaaaatggtaaaataagaaaaaataatctgagaatcgaggaaaaaagatgcaagaaaagattttggctaactaat

SEQ ID NO: 5006 - DNA, 291 bp, Streptococcus pneumoniae
  misc_feature (1)..(291): tiling:Spneumo1:WAN024G9A; Cluster includes WAN023LMR 3134 88_1566||||834666..834956|-|291 bp|EGAD orf prediction|S.p neumoniae|R6|NC_003098.1|ORF|110
ttgaattggttccagtccagcttccttacgctctgcaaccarcayttgmtccaagcgaggaaggawgcttgctgccttgttttcatgaaccagcagaacctccatggcattacaaacagaaggacgactggttttagcattgttgatgatagacagcgccttgtcttcgtctgcatccttatccacatagacatggacaatcccagtccctgtctcgataacaggtacaatsgcattctcaacyactgcattgatcaagccagctcctccacgaggaatgagaaggtctag

SEQ ID NO: 5007 - DNA, 2393 bp, Streptococcus pneumoniae
  misc_feature (1)..(2393): tiling:Spneumo1:WAN024GA3; Cluster includes WAN02447C spr0 794|pepXP|15902838|NP_358388.1|793374..795761|-|2388 bp|Xa a-pro dipeptidyl-peptidase|S.pneumoniae|R6|NC_003098.1|ORF |211
ttgaatttagtactttattcatttttattggattatttccttttgaagttaacaattccctttctgcttttttttgatataataaccttaactgtcattctatatggaggttctatgcgttttaatcaatatagttatatcaattttccaaaagaaaatgtcttatctgarctaaaaaaatgtggctttgatttacaaaatacagccaatcacaaagactcacttgaaacctttttacgtcgtttctttttcacttatcaagacaccaactacccactttctatcctagcagctgataaaaaaacagacctgctgacattttttcaatcagaagatgaactgacagcagatattttttatactgttgcttttcaacttttaggcttttcttatttggttgacttcgaagatagtgacgtttttcgtaaagaaactggatttcccattatatatggtgacttgattgaaaatctctatcagttactcaatactcgcaccaaaaaaggaaatactcttatcgaccaacttgttagtgatggtcttattccggaggataatgactaccactactttaacggcaagagtttggctactttttctaaccaggatgtcattcgtgaagtcgtttacgttgagtctcgtgtcgatactgaccaaaaagggctatcagacctagtaaaggttagcattattcgccctcgttttgatggaaaaatccctgccatcatgacagccagcccttatcatcagggaaccaatgacaaggctagtgacaaggctctctacaagatggaggkygagcttgaggttaagcttcctcacaagattgagctagagraacctcaactaaatctcgtccaaccccaaggtmaagctgagcttrtagcagaggctgaggaaaagctaactcacatcaactctagctatacactaaacgactacttccttccgagaggctttgccaatctctatgtctcaggtgttggtaccaaagactcgacaggtttcatgactaatggagactaccagcaaatcgaggcttataaaaatgtcatcgattggcttaacggycgttgccgtgcctttactgatcacacgcgccagcgtcaagtcaaggctgattggtcaaacggaaaagttgctacaacrggactttcctatctaggtaccatgtccaatggtcttgcgactacaggagtcgatggtttagaagttatcattgccgaggcaggaatttcatcatggtacaactactaccgtgaaaacggtctggtgactagcccaggtggttatccaggtgaggactttgactcccttgctgagttaacctattctcgtaatctcttagctggcgactatatccgtggcaatgaagctcaccaagctgacttagaaaaagtgaaagctcagctagaccgaaaaactggggactacaatcarttttggcatgaccgcaattatctgctcaatgcccataaagtaaaggcagaggttgtctttactcatggttctcaggattggaatgtcaaaccacttcatgtttaccagatgttccatgctcttcctactcatatamacaagcatctctttttccataatggtgcccatgtttacatgaacaattggcaatcaattgacttccgtgagtccataaatgccttattraccaagaaattactaggacaggaaacagactttcaacttcctactgttatctggcaggacaatacagctccacagacttggttatcacttgataacttcggtgggcaagaaaactgtgaaaccttctcacttggtcaagaagagcaagctattcaaaaccagtacccagataaggattttgagcgctatggtaagacataccaaaccttcaatacagagctctatcaagggaaagcyaatcagattactattaaccttcctgtgactaaagatctccacctaaacggtcgcgctcagctcaatcttcgtatcaaatccagtacaaacaaggggctcttatctgcccaactgctagaatttgggcaaaagaaatacctacaaccttatccagctattttaagtgctagaaccattgacaacggtcgctatcacatgttggaaaatctctgtgaattgccatttagaccagaggcacaacgagtcgtgacaaaaggttaccttaatttacaaaatagaaatgatttactgttagtagaggatattactgcagatgaatggatggaygttcaatttgaactgcagccaactatttacaagctaaaagaaggagacactctccgtttagtcctctatactactgactttgaaatcaccatccgtgacaatacagactaccacttgactgtcgacctcgctcagtccatgcttaccttaccttgctaactaat

SEQ ID NO: 5008 - DNA, 468 bp, Streptococcus pneumoniae
  misc_feature (1)..(468): tiling:Spneumo1:WAN024FWK; Cluster includes WAN023L9C 3152 91_2224||||1193834..1194190|+|357 bp|EGAD orf prediction|S .pneumoniae|R6|NC_003098.1|ORF|210
ttgaatttccaaaccatcgtagcgttcacgcttggtacaatccagagcaatcacctcgatgtccagttctgccaattcatcaacttctttcatagtagccgtgatgaagggttcctgaggtggataatcacgtttgataatcccaatgattggaagtttagtgacttccttaatttccttgatatcgcgaacactgtttgctcggataccgactgctccaccttgctcagccgctttgaccagcaagggaatcacccctcccgcttctgtataaagcggttcatgaggaagagcctgacaagaaacgatgattccatctttgatttgctcaatcaaggcttctttrctaatctgtgrcatcctctttcctccytttcttttttcttkatttctatgagattattataccttaaaattaaaacgctttcaagagtttgtagtataatagatttcagtttcaaaaactag

SEQ ID NO: 5009 - DNA, 186 bp, Streptococcus pneumoniae
  misc_feature (1)..(186): tiling:Spneumo1:WAN024BF8; Cluster includes WAN0243KM spr1 614||15903656|NP_359206.1|1588150..1588329|-|180 bp|Hypoth etical protein|S.pneumoniae|R6|NC_003098.1|ORF|111
ttgaatttgattttcgaagagtatcagtttgtaaaaattggagataaaaaatatagagtacgcagtgktcctatgattcattcaactccgcctcaatctgtcttagatcgagatacttttacaattgactatacagatgatgaattgctcgataaagaagcagtttttactactcatctarctaat

SEQ ID NO: 5010 - DNA, 231 bp, Streptococcus pneumoniae
  misc_feature (1)..(231): tiling:Spneumo1:WAN024G64; Cluster includes WAN023LIN 3156 08_1830||||984879..985109|+|231 bp|EGAD orf prediction|S.p neumoniae|R6|NC_003098.1|ORF|110
ttgaatttgctgggctgtgatttcttgattttctggctggataatggttgcttcaaacccaaagtgttgaaccaagtaatcaattgtttcaaggacagcatggtgctcgatggcagttgtgatgatatgttttccttgttcttggtgacgaagacagtagccaatgatggtagtattattgscttcagtcccaccagaagtgaaaaagatatgttgaggttttgtccttag

SEQ ID NO: 5011 - DNA, 61 bp, Streptococcus pneumoniae
  misc_feature (1)..(61): tiling:Spneumo1:WAN024APV; Cluster includes WAN024EPH R6.I G_382||||357948..358008|+|61 bp|Between spr0358 (mtlF) (+ strand) and spr0359 (mtlD) (+ strand)|S.pneumoniae|R6|NC_0 03098.1|IG|110
ttgaatttmgtcatttgtcatctagtatatatgtccctcaaataggaaaaggagaaattga

SEQ ID NO: 5012 - DNA, 228 bp, Streptococcus pneumoniae
  misc_feature (1)..(228): tiling:Spneumo1:WAN024GAE; Cluster includes WAN023LOQ 3129 55_1465||||775815..776042|-|228 bp|EGAD orf prediction|S.p neumoniae|R6|NC_003098.1|ORF|110
ttgaattttcatcktttttctacctcaacttttccatatgtttctttaataaattccgccgttgccaagtcatctgagaaggtagttgccgttccgcaagccactccccatttgaaggcttctactrcgtcttttgatttgacaaattcacctgtgaatccagcaaccatagaatcaccagctccaactgaatttttgactgttcctttgattggtttagcgaagtaa

SEQ ID NO: 5013 - DNA, 123 bp, Streptococcus pneumoniae
  misc_feature (1)..(123): tiling:Spneumo1:WAN024CLK; Cluster includes WAN0241Y8 SP17 91||15901620|NP_346224.1|1707031..1707147|-|117 bp|integra se-related protein|S.pneumoniae|TIGR4|NC_003028.1|ORF|020
ttgacaaagagccaaattttaggacataaagatatctccatgttgattgacgtttatgggcataccttggaggaaaaaattagtgaggagtttatggctgtgaaaagtttgttgctaactaat

SEQ ID NO: 5014 - DNA, 126 bp, Streptococcus pneumoniae
  misc_feature (1)..(126): tiling:Spneumo1:WAN024EZN; Cluster includes WAN023PPO pne1 9_22||||16395..16520|-|126 bp|Type 10C capsule operon, Gli mmer 2.02 orf prediction|S.pneumoniae||WAN01UCJ7|ORF|000
ttgacaaagagccaaggaactaagaaaacgactcctaaagaagccgccttcatcgaaaagtggatcaataactatcctaaaaaatgcttggactacaagtctcccagagaatttttgattgctggc

SEQ ID NO: 5015 - DNA, 881 bp, Streptococcus pneumoniae
  misc_feature (1)..(881): tiling:Spneumo1:WAN024CCG; Cluster includes WAN0244QL spr0 101|ABC-SBP|15902145|NP_357695.1|108506..109303|+|798 bp|A BC transporter solute-binding protein - amino acid transpo rt|S.pneumoniae|R6|NC_003098.1|ORF|120
ttgacaaaggatgcatatagatgtattgtttatacaaataaaaggaataaacataaagtaggctttattatgaataagatgaagaaggtgttgatgacgatgtttggtttagtgatgctccccctactatttgcttgtagyaacaatcaatcggctggaattgaagccatcaagtccaaaggaaaattggttgtagccctcaatccrgattttgctccatttgaataycaaaaagtggttgatgggaaaaatcagattgtgggttcagatatcgaattagccaaggctatcgcaacaraactaggtgtcgaattggaactatctccyatgagttttgayaatgtactggctagygttcaatcaggaaaagcygaccttgccatatcaggtgtttctaagacagatgaacggagcaaggtgtttgayttttcmaytccctactatactgcaaaaaataaactcattgtcaaaaaatctgayttrrcyacttatcagtctgtmaacgayttggcgcagaaaaaggtyggagcgcagaaaggttcgattcaagagacgatggcgaaagatttgctacaaaattcttccctcgtatctctgcctaaaaatgggaatttaatcacagatttaaaatcaggrcaagtggatgccgttatytttgaagaaccygttkccaagggatttgtggaaaataatcctgatttagcaatcgcagacctcaattttgaaaaagagcaagatgattcctaygcggtagccatgaaaaaagatagcaagraattgaaagaggcagtcgataaaaccattcaaaagttgaaggagtctggggaattagacaaactcattgaggawgcctttaamkmrtccattgaaaaatarctaat

SEQ ID NO: 5016 - DNA, 246 bp, Streptococcus pneumoniae
  misc_feature (1)..(246): tiling:Spneumo1:WAN024F7O; Cluster includes WAN023JZP 8300 6_581||||325620..325856|+|237 bp|EGAD orf prediction|S.pne umoniae|TIGR4|WAN01UC25|ORF|111
ttgacaaatcatttaacaaaggaaaaatcaacatgcctagcacctttttatactcttcgaaaatctcttcaaaccacgtcagctctatctgcaacctcaaaacagtgttttgagcaatctgcggctagcttcctagtttgcttttcgatttccattgagtgttactgcttattttcttttattatacccttttttctgaaaaaaagaaaaaaggactttatttttttcaaaaatataatacagttt

SEQ ID NO: 5017 - DNA, 426 bp, Streptococcus pneumoniae
  misc_feature (1)..(426): tiling:Spneumo1:WAN024DFR; Cluster includes WAN0244BN spr0 639|copY|15902683|NP_358233.1|646178..646603|+|426 bp|COPA B ATPases metal-fist type repressor|S.pneumoniae|R6|NC_003 098.1|ORF|111
ttgacaaatgtagattttggaggtatggtaatgcagatttcagatgcagaatggcaggtcatgaagattatttggatgcagggggagcagaccagtacagatttgattagggttttggcagagcggttygactggtccaagtcmacsrttcaracwcttttgkctcgkytggttgakaaagagtgtytgactcggaaaaaagaaggcaagtcctttgtttattcagcccttttaactctagaccaaagtcgggatttacttgtccaagatatcaaagacaaggtttgttcccgtaggattaggaatttgttggctgacttgattgtagaatgtgaatttactcagactgacttggaagacttggaagctgtgatttcagagaagaaatcaagtgctgtaacagaagtaagatgtaattgtatgtaa

SEQ ID NO: 5018 - DNA, 1430 bp, Streptococcus pneumoniae
  misc_feature (1)..(1430): tiling:Spneumo1:WAN024DAS; Cluster includes WAN02440U spr1 028|gapN|15903072|NP_358622.1|1008379..1009803|+|1425 bp|N ADP-dependent glyceraldehyde-3-phosphate dehydrogenase|S.p neumoniae|R6|NC_003098.1|ORF|111
ttgacaagatatcagaatttagtaaatggaaaatggaaatcatcygaacaagaaattacgatttattcaccaatcaatcaagaagaattgggtacagttccagccatgactcagactgaagctgatgaggctatgcaagctgcgcgtgcagccctgccakcatggmgagctttatcagcarttgaacgtgcggcttatttrcataaaacagcagctattttagaacgcgataaggaaraaattggtactatccttgccaaagaagtagcaaaagggattamagcagcaattggagaagtagtgcgtacagcagacttgattcgttatgctgctgaggaaggtytccgtatcactggacaagcaatggaaggtggtggttttgaggcarcaagtaaaaacaaactggctgttgtccgtcgtgaaccagttggtatcgtgctagcgattgctccytttaattatccagttaatttatctgcttctaaaattgcacctgccttgattgcagggaatgtkgtcatgttkaagccaccaacacaaggttccatttctggactcttgttggctaaagcatttgaagaagcagggattccggcaggtgttttcaacaccattacaggtcgtggttcagaaattggggattatatcattgagcacaaagaagtcaacttcatcaactttacaggttcaacycctattggagaacgtattggtcgtttagctggtatgcgtcctatcatgttggaacttggtgggaaagatgcagctcttgtactagaagatgcagatttggaacatgctgccaagcaaattgttgcgggagcctttagctactcaggacaacgttgcacggccattaaacgtgtcattgttctcgaaagtgtagcagataaattagctactttgcttcaggaagaagtttctaaattaacagttggtgatccatttgacaatgctgatattacacctgttattgacaatgcttcagccgacttcatttggggcttgattgaggatgcacaagaaaaagargctcaggctcttacaccaatcaaacgtgagggcaatctyctctggccagtgctttttgaccaagttacaaaagatatgaaagtggcatgggaagagccatttggtcctgttttaccaatcattcgtgtggctagtgtagaggaagctattgcctttgccaacgaatctgaattcggccttcaatcatcagtctttacaaatgatttcaaaaaagcctttgaaattgctgaaaaacttgaagtaggtacagtccacattaataataaaacccagcgtgkyccagatawtttcccattccttggtgtcaaaggtyctggagctggagtscaaggaattaaatatagcattgaagcgatgacaaatgtcaaatccattgtttttgatgtgaaataactaat

SEQ ID NO: 5019 - DNA, 1827 bp, Streptococcus pneumoniae
  misc_feature (1)..(1827): tiling:Spneumo1:WAN024EWX-5; Cluster includes WAN0243G3 sp r1777|rpoB|15903819|NP_359369.1|1748021..1751671|-|3651 bp |DNA-dependent RNA polymerase subunit beta|S.pneumoniae|R6 |NC_003098.1|ORF|341
ttgacaaggcttggaacttatttacaaaggagaatcatcttggcaggacatgacgttcaatacgggaaacatcgtacccgtcgtagtttttcaagaatcaaagaagttcttgacttaccaaatttgattgaaattcaaactgactcattcaaagctttcctagaccacggtcttaaggaagtgtttgaagatgtattgccaatttcaaacttcacagacacaatggagttggaatttgttggatatgaaatcaaggaaccaaaatayacgctagaagaagctcgtatccacgatgctagctactcagcaccaatttttgtaaccttccgyttgatcaataaagaaacargcgaaatcaagacccaagaagttttctttggtgatttcccaatcatgacagaaatgggtactttcatcatcaatggtggtgaacgtattatcgtttctcagttggtccgctcaccaggtgtttactttaacgacaaagtagacaaaaatggtaaggtgggctatggttcaactgttatccctaaccgtggagcttggttggaacttgaaagcgactcaaaagatatcacctacactcgtatcgaccgtactcgtaagattccatttacaaccttggttcgtgctcttggtttctcaggtgatgatgaaatctttgatathtttggwgacagcgaattggttcgcaacactgttgaaaaagatatccacaagaatccaatggactctcgtacagacgaagccttgaaagaaatttacgaacgccttcgtccaggtgagcctaagacrgctgaaagctcacgtagcttgcttgtrgctcgcttctttgacccacgtcgytatgacttggcagcagttggtcgttacaaaatcaataaaaaactcaatgttaaaacacgtttgctcaaccaaaccattgcagagccattggtagaccctgaaactggagaaatcttggtagaagctggtackawyatgactcgtagygtrattgaaagcattgaaagccatttggatgrygayttgaacaagattgtytacatyccaaaygatgcagcygttgtgactgagccwgttgttcttcaaaarttcaaggttrttgchccaackgatccagaycgygtcgtaacdatcatyggtaatgcyaayccagatgacaaggttcgtacggtgactcctgcagatatccttgcygagatgagctacttcctcaacttggctgarggrcttggccgtgtwgatgayatcgaycacctyggaaaycgtcgtatycgtgcsgttggtgaattgcttgcyaaccaagtacgtttgggactttctcgtatggaacgtaatgyycgtgaacgtatgtctgttcargayaaygaagtmttgacaccacaacamattatcaatatycgtcctgtaacagctgcagttaaagaattctttggttcatcacagttgtcacagttcatggamcaacacaayccrctttctgagttgtcthacaaacgccgtttgtcagccttaggacctggtggtttgacwcgtgaccgtgcyggatatgaagtvcgtgacgtgcactacactcactatggtcgtatgtgtccaatcgaracacctgaaggacctaacatcggtttgatyaayaacttgtcatcttayggacacttgaacaaatatggttttgttcaaacaccataccgtaaggttgaccgtgmaacwggtgwwgtyacsaacgaaattgtttggttgacwgcygatgaagaagatgaatwyacwgtagctcaggctaactctmrwytgaaygmagatggaachtttgctgaraarrttgtc

SEQ ID NO: 5020 - DNA, 51 bp, Streptococcus pneumoniae
  misc_feature (1)..(51): tiling:Spneumo1:WAN0249DK; Cluster includes WAN024E35-rc R 6.IG_2253||||2033191..2033241|-|51 bp|Between () (- strand ) and spr2041 (comE) (- strand)|S.pneumoniae|R6|NC_003098. 1|IG-rc|110
ttgacaattagcaagaaattgatataatggttatatctgctacagatagaa

SEQ ID NO: 5021 - DNA, 318 bp, Streptococcus pneumoniae
  misc_feature (1)..(318): tiling:Spneumo1:WAN024FS9; Cluster includes WAN023L62 3131 40_2351b||||1259947..1260264|+|318 bp|EGAD orf prediction| S.pneumoniae|R6|NC_003098.1|ORF|110
ttgacacaattggatttggttaattcactcttaacgatggttttaaacgatatatatttttatatatgyaaattaaaaacatctttcmtttcacttcctacgacttttcagayacagatasccaaagaagytttcatagagggcaaaaaagaggaggaaggcatgaagaaagaaggtctctggcaaaatcataataacaggatccttggctggatcaaaaagccaggtatcatctcccacaaagagaatttgatggaaaagagtaaagaattggtcaaaaccaatcaaaactcccccaagtccaatcatcacaggtaa

SEQ ID NO: 5022 - DNA, 327 bp, Streptococcus pneumoniae
  misc_feature (1)..(327): tiling:Spneumo1:WAN024FCD; Cluster includes WAN023KPW 3154 90_3077||||1640066..1640392|+|327 bp|EGAD orf prediction|S .pneumoniae|R6|NC_003098.1|ORF|110
ttgacactgaggataattactagcttgcaccaacttggctrccrcaatctctttsggatcyttttcaggcttagagagattgatggtaatttcaagttctccrtartcagatggaacacgataagcgatatttytagcaatggccttgagtttgatgtagtcatttttctgactgagttgrtaaaaatcctctatcgcttgytcwggagagtrggcrtaggytkcccaraartcacgattgacctgactyggacaaggagtcaccaartccatcarttcagyaccaaggatttcacgcgcagtctgactatcctcaatcgtctctaa

SEQ ID NO: 5023 - DNA, 102 bp, Streptococcus pneumoniae
  misc_feature (1)..(102): tiling:Spneumo1:WAN024DO3; Cluster includes WAN023SIV NC_0 03098.1_1860||||1449876..1449977|-|102 bp|Glimmer 2.02 orf prediction|S.pneumoniae|R6|NC_003098.1|ORF|110
ttgacagaaaatttaaatcttggtaaaatagggattgtcgtaaagacaaataacttcttcttggttacaggcatgccaacctgtcactcggatgaagccaaa

SEQ ID NO: 5024 - DNA, 1197 bp, Streptococcus pneumoniae
  misc_feature (1)..(1197): tiling:Spneumo1:WAN024CSB; Cluster includes WAN0242F5 SP11 45||15901011|NP_345615.1|1071948..1073138|+|1191 bp|hypoth etical protein|S.pneumoniae|TIGR4|NC_003028.1|ORF|010
ttgacagcagaaattggaatattaaataaaaatggtgttgtattggcttctgatagcgctgtaaccttatcagacgggaaaaattcaaaagtttttaatagcgcccgaaaattattcactttatcaaaagaacattccgtggggatcatgatatatgggaacgcttcgtttatggaaattccgtgggaggtaattttaaatgagtttaagcaggctattggcacagatttattagataatactgcccaatacgttgaaaagctaatagaatttttaatttcctttaaacatctacaagttgaggatttattaagaaattatattgtcagaagtacaagaagtattttggacagcattgcctatgaagcgcaagaaacagctgatttaagagtttctaatggtgaaaccatcactctagatgattttaataaaattttattaaatgctataactaattttagtttagaaatttcaaaagtagaagctgaaagtaattttgaattttttgaagctgagttagagttaataaaaagcattgtagacgatgtttttaaatcctttcctcatactgatgatgaggttgaagttattgctaaatctttatataaagcgattttcattggatatgactcaacaaacataactggattagttatagcaggttatggtacagacgagatatttccatctataagacaaattgaattatatggaattttttctaaacgattaatttggaaagttattaatgaaagtgtgataaatcatcataaaacttgtcatataatcccttttgcacagtcagagatggttgagacgattatgaatggtatagatcctaacttaaatgtatatatcgcagagcaagtatcatcagttatggagaaaaatggattgggtgatgaaattgagaatatatttgaaaatatatcatctatacagcaaaaatattatataaatcctataatagaccttattggaatgcaaccacttaatgaaatggcgagtacagctaaaacatttattgaattaacttcatttaagagaaaaattgtcaacactcttgaaacagtaggaggtccggtagatgtacttgctatttctaaaggagaaggaccaatttggattgatagaaaatactattttgacattgataaaaatcttgattacaggatgagaaaggagagtctarctaat

SEQ ID NO: 5025 - DNA, 57 bp, Streptococcus pneumoniae
  misc_feature (1)..(57): tiling:Spneumo1:WAN0249DF; Cluster includes WAN024E32 R6.I G_2261||||2037588..2037644|+|57 bp|Between spr2045 (sphtra ) (+ strand) and spr2046 (spo0J) (+ strand)|S.pneumoniae|R 6|NC_003098.1|IG|110
ttgacatctatgtaaagaaagctttacataagagaaaagatgtgttagtgtagaatc

SEQ ID NO: 5026 - DNA, 231 bp, Streptococcus pneumoniae
  misc_feature (1)..(231): tiling:Spneumo1:WAN024DYK; Cluster includes WAN023KGQ 3133 86_3500||||1876710..1876940|-|231 bp|EGAD orf prediction|S .pneumoniae|R6|NC_003098.1|ORF|110
ttgacatgtagcccctcacttgacagcatatacatatgyagggctagagaacggcctgaagacatgagactayttggcgtattggtagaggtacctaatgtatacatgagggcagctgtytcaccaacgatacggccaatagctagtatcactccagctaaaatacctggcatggcaactggtagaacaattctaaaaacagtccgtaacttacctgccccaagtccataa

SEQ ID NO: 5027 - DNA, 246 bp, Streptococcus pneumoniae
  misc_feature (1)..(246): tiling:Spneumo1:WAN024GB4; Cluster includes WAN023LPJ 3134 96_1421||||751554..751799|-|246 bp|EGAD orf prediction|S.p neumoniae|R6|NC_003098.1|ORF|110
ttgacattatcttcaatccatttacggcgtggttctaccttatctcccatgagaacattgacgcggcgttcggcgcgcgctaaatcttcaattgtgacacggatgagggtacgtgtttctgggttcatggttgtttcccagagctggtccgcattcatctcaccaagtcctttgtatcgttggagggtagcgcctttaccgaactgtttacggagttcttctagttctccgtccgtccaagcgtag

SEQ ID NO: 5028 - DNA, 474 bp, Streptococcus pneumoniae
  misc_feature (1)..(474): tiling:Spneumo1:WAN024BGW; Cluster includes WAN024475 spr0 801|IS1381-truncation|15902845|NP_358395.1|804729..804917| -|189 bp|Degenerate transposase (orf1)|S.pneumoniae|R6|NC_ 003098.1|ORF|100
ttgacatttttctattgcwwrgttwwtwtawtagacttcctgcgaaacaaaatatggtatagtagttctatgaatgatgaagcaartaaacaactaactgatgcacgatttaagcgtcttgttggtgttcagcgyacsacttttgaagagatgttarctgkattaaaaacagcttatcaacttaaacaygcaaaaggtggacgaaaacctaaattaagcctagaagaccttcttatgvccactcttcaatatrtgygagaataycgmacttatgaasaaattgcggctgattttggtattcacgaaagcaacttaatccrtcggagccaatgggttgaagtaactcttgttcaaagtggtkttrcgatttcaagaactcctctcagytctgargacacggtaatgattgatgcgacggaagtaaaaatcaatcgmcctaaaaaaasaattagcgaattattmtggctaactaat

SEQ ID NO: 5029 - DNA, 447 bp, Streptococcus pneumoniae
  misc_feature (1)..(447): tiling:Spneumo1:WAN024FJ4; Cluster includes WAN023KZC 3154 66_2650b||||1411847..1412293|+|447 bp|EGAD orf prediction| S.pneumoniae|R6|NC_003098.1|ORF|110
ttgaccaaatccgatgactttttcacccagacgttgtttgacaatttcttcaataccatcaaaagcaccacccacgatgaagaggatattttttgtatccacttgaatcatctcttgttgtggatgtttgcgtccaccttgaggcggtacgctagcaacagttccctcrataatcttgagaagggcttgttgcaccccttcaccagaaacatcacgtgtgatagacacattctcactcttcttggcaatcttgtcaatttcatccacatagataatgccacgctctgcacgttcgatgttaaagtcagcaacctgcaagagtttgaggaggatattttccacrtcctcacccacataaccagcctccgtcagagctgtcgcatccgcaatagcaaaaggyacattcaagctcttagccaaggtctgggcaaggaaagttttccctga

SEQ ID NO: 5030 - DNA, 517 bp, Streptococcus pneumoniae
  misc_feature (1)..(517): tiling:Spneumo1:WAN024FC6; Cluster includes WAN023KPQ 3157 31_3083b||||1643478..1643900|+|423 bp|EGAD orf prediction| S.pneumoniae|R6|NC_003098.1|ORF|220
ttgaccaacagccccatcaccgataacaacaaccttgtcccctttttgaacatttgcaacacgcgctgcatgatagcctgtcggcatgacatctgcaagagtcaaaagggacttgagcatcccttctgtatartcagaaggttgaccagggattttaaccagcgcccagtttgcatagtggaagcgaatatattctgcctgaaaatcaccccccaaattattrccaatatgattgtcgcaagaaccgtcaaatccagcaagacaggcatcacactcaccacatccatgtgtaaaagggacaatcacaaaatcacctggtttcaccgtcgtaatggcttccccagcttcttcaacaatcccaatcgcttcgtgtccactatttttrtgtccagctttcgtttctggattacggtacctccataaatctgaaccacaaacgcacgcacgaaccacacgaataatcacatcatccgcttctattatttgcggacgttcaatgctagcaagtccaacctga

SEQ ID NO: 5031 - DNA, 309 bp, Streptococcus pneumoniae
  misc_feature (1)..(309): tiling:Spneumo1:WAN024CRN; Cluster includes WAN023M29 3136 08_758a||||393352..393660|-|309 bp|EGAD orf prediction|S.p neumoniae|R6|NC_003098.1|ORF|110
ttgaccaacagctcccagcatgtactcacctgtttggtaattcttataaagctgaacggctccttcttgcaccaattgctcaatccccttgtggaaggatttttgcttcataacattcttrgcagaaactttcatgaaaatytcaggwgtaaaggttggcagkggttcaaattcaaacttgttttttccaaccgtcaaggtatccccaacctgataagtaccggtatcgtaaaccccgataatatcacctgccacggcattgrtcacattctcacgactytccgccataaactgggtaacattagatag

SEQ ID NO: 5032 - DNA, 240 bp, Streptococcus pneumoniae
  misc_feature (1)..(240): tiling:Spneumo1:WAN024CXO; Cluster includes WAN023M8J 3134 27_417||||211407..211646|-|240 bp|EGAD orf prediction|S.pn eumoniae|R6|NC_003098.1|ORF|110
ttgaccaaccaattgaccgatacgagtgattttaaaggcagttttcttaactgtttcggctactacatcaaagctctgtccacgaactttttccaaagcacgtttcacmacaccaggaccagaaactccgacattgatgataacatctgcttccccaacaccatgaaaggcacccgccataaatggattgtcctcaacagcattagcgaatacaaccaacttggccactcccatatctga

SEQ ID NO: 5033 - DNA, 225 bp, Streptococcus pneumoniae
  misc_feature (1)..(225): tiling:Spneumo1:WAN024FZD; Cluster includes WAN023LC6 3156 25_2103||||1133532..1133756|+|225 bp|EGAD orf prediction|S .pneumoniae|R6|NC_003098.1|ORF|110
ttgaccaatgcttttctgattcttaatgtattcaatagtgtgacggaccaactgcatgaggggattatcataggtgaactctctcgttgygtaggcaatatttcccgtgaaaggaagatttttcttgagatggtttcttacawcaatcactcccttaacatkactgtcgttatgagaaaatcgatgatattccttataaagaccttttcgaatagcagcttgtag

SEQ ID NO: 5034 - DNA, 261 bp, Streptococcus pneumoniae
  misc_feature (1)..(261): tiling:Spneumo1:WAN024GE2; Cluster includes WAN023LTA 3135 12_1201a||||635595..635855|-|261 bp|EGAD orf prediction|S. pneumoniae|R6|NC_003098.1|ORF|110
ttgaccacgacgaacaccagagtcaaagacaatcggcacacgtctatcaactgcttctgccacttcttgaagcgagtcaaaggcagctggtccaccgtcgatttgacgaccaccgtggttggttacccagataccagaagctcctgcagcaagcgaacgttcaacgtcctcacggcattgtggtcccttgacatacacaggaagaccagagtattcagcgataaattctacatcgcgtggagacaagcgttgtttagctga

SEQ ID NO: 5035 - DNA, 267 bp, Streptococcus pneumoniae
  misc_feature (1)..(267): tiling:Spneumo1:WAN024F3R; Cluster includes WAN023M2N 3136 10_740||||385639..385905|-|267 bp|EGAD orf prediction|S.pn eumoniae|R6|NC_003098.1|ORF|110
ttgaccacgttcttccgctccgacaccaggataagcacctgctgtattgataaaggtcacaactggacggccaaatttctcagcctgtttcatcaaccgcagtgcctttcggtagccttctggatgtggttggccaaaattccgtttgaggttgtcttgcaaactcttgcctttttggataccaaccactgttacagcttggtctccaagccaaccaataccaccaacaactgcaccatcatcacgaaaagaacggtcaccatgtaa

SEQ ID NO: 5036 - DNA, 417 bp, Streptococcus pneumoniae
  misc_feature (1)..(417): tiling:Spneumo1:WAN024FDV; Cluster includes WAN023KRW 3154 86_2977b||||1582049..1582465|+|417 bp|EGAD orf prediction| S.pneumoniae|R6|NC_003098.1|ORF|110
ttgaccagaatgcccgatttcatgaatcaaggtatagacatcgctcaaacggcctgtccagctcatgagtacataagggtgtacgcgatatgggtccgccgcataaccaccggaatccttgccactgttagcagcaaagtccacccagcgctcttcttggtaacgagcaacttcctgacaatattcttgccccaaaggttctaccgacttcatgaccaaatcataggcatcgtcaatagtcacttcaggattcagggcgctgtccaagtccaatttccagtctgcaaaggtcatcttttcaagaccatttaccttggcaacatgcttgaggtatctctgagcgactggtgcaaagtccttcatgatgaggtcaatctggcggtcaaacatgacacggtccacttcttgttcagctag

SEQ ID NO: 5037 - DNA, 300 bp, Streptococcus pneumoniae
  misc_feature (1)..(300): tiling:Spneumo1:WAN024GC2; Cluster includes WAN023LQK 3132 40_1366b||||724576..724875|+|300 bp|EGAD orf prediction|S. pneumoniae|R6|NC_003098.1|ORF|110
ttgaccagcctcatcatagccaacataacctggaggggcgccgaccaacttagccacactatgtttttccatgtattcactcatatcaaagcgaatcatactatcagcagaaccaaaaagttcgatagccagttgtttggaaagttctgtcttaccgacaccagttggcccaacgaagaggaagcttccgattgggcggttaggggtaccaagtccgacacgattacggcgaatagccttggcaatcttatcgactgcatcatcttgrccaataacatgagacttgagatcttcggctag

SEQ ID NO: 5038 - DNA, 240 bp, Streptococcus pneumoniae
  misc_feature (1)..(240): tiling:Spneumo1:WAN024GMB; Cluster includes WAN023KH5 3155 21_3480||||1864661..1864900|+|240 bp|EGAD orf prediction|S .pneumoniae|R6|NC_003098.1|ORF|110
ttgaccaggttcaatagtaaagctcacatctttcagcatcggttccttgtccattggataggtaaaggtcacattttcaaagctaagacttccaaccaactcttcatctgggatatccttgaaggtcatagctggctctgcgtcaagaatttctcgaatacgacgcatggaaatcatggcacggctgacagaatttcccaaaaatccaaccataacaatggtaaagataatctggcttag

SEQ ID NO: 5039 - DNA, 243 bp, Streptococcus pneumoniae
  misc_feature (1)..(243): tiling:Spneumo1:WAN024CPS; Cluster includes WAN023M2I 3130 65_750||||389770..390012|+|243 bp|EGAD orf prediction|S.pn eumoniae|R6|NC_003098.1|ORF|110
ttgaccataaggacgaagggagatgttggcatccacacgcatcgaaccttcctccatcttaacgtcagaaatgccagcgtactggataacttccttgagggctgtcagataagcataggcttcttcaggagaacgcatatctgcctcagatacaatctcaatcaagggaaccccttggcggttgaggtcaacataagagtagccatctgtaccatgggtgtttttaccagcgtcttcctctag

SEQ ID NO: 5040 - DNA, 566 bp, Streptococcus pneumoniae
  misc_feature (1)..(566): tiling:Spneumo1:WAN024FE3; Cluster includes WAN0243KV spr1 605||15903647|NP_359197.1|1580628..1581188|-|561 bp|Hypoth etical protein|S.pneumoniae|R6|NC_003098.1|ORF|220
ttgaccatgtatcaagatttactaagaaaaatagcagaagaaaaaccaaattataaccaggaagaaatccagtggttgtttgatcatttgggaaatccttctccagaaattcgtaatgtccttttaaatcaaggcttgcactatctttcaaaagaaaaggatacaasrggtttctcaagtcagtatggttgggttcacgcttttgcacatggagccgatttactgacagaggtggtttgtcatccagactttcctaaaaacagagttcatgaagtatttgatatacttggccaactatttaaaagaatgtcgattcgctttacagatgatgaggattggcgtttagcaagagtgatctatgaacctattttacaagggaagttggagcaagaacaagtagcttcttggataaaaactgttgattttccgatagaagaaagggaggatttttacaaattttccaactttagatcctgtctggtggaagtctatgtccaacttgaccagagaaatagtttacaagatgacctgaaagaagctatccagtcttttcaatactarctaat

SEQ ID NO: 5041 - DNA, 795 bp, Streptococcus pneumoniae
  misc_feature (1)..(795): tiling:Spneumo1:WAN024FE2; Cluster includes WAN023REY cont ig_1553_3||||1631..2332|+|702 bp|Glimmer 2.02 orf predicti on|S.pneumoniae|670|WAN01UDJZ|ORF|001
ttgaccatgtatcaagatttactaagaaaaatagcagaagaaaaaccaaattataaccaggaggaaatycagtggttgcttgatcatttgggagatccttctccagaaattcgygatgaycttgtttttacaagctttgctaaggagattcaggaagagctatttacacaggarcaatttcatttcattgctgargkggtytyakctgatgkagggttagataaagagattgataagrtaggcytgycaacacttgaacgttcttttagggcrcttatttatgcaamtctcttgtctgmmgatgcyaaccagcaatcgrttttytatcagrraytamawkcagrawttcgtaatgwcctttyaaatcaaggcttgcactatctttcaaaagaaaaggatacaacaggtttctcaagtcagtatggttgggttcattcttttgcacatggagccgatttactgamagaggtggtttgtcatccrgrctttcctawaaacagagttcatgaagtatttrakatacttggccaactatttaaaagaatgtcgattcgctttacagatgatgaggattggcgtttagcaagagtgatctaygaacctattttacaagggaagttrgmgcaagaacaagtagcttcttggataaaaactgttgattttccgatagaagaaagggagratttttmcaaattttccaactytagatcctgtctggtggaagtctatgtccaacttgaccagagaaatagtttacaagatgagttgaaagaagctatccagtcttttcaatac

SEQ ID NO: 5042 - DNA, 249 bp, Streptococcus pneumoniae
  misc_feature (1)..(249): tiling:Spneumo1:WAN024C9I; Cluster includes WAN023M94 3134 31_373||||197757..198005|-|249 bp|EGAD orf prediction|S.pn eumoniae|R6|NC_003098.1|ORF|110
ttgacctacttcaagaccttttggagcgatgatgtatgctttcacaccgtcagtgtagtgtacaagagcgatgtttgcagaacggtttggatcgtactcgattgttttaacaactgcttcaacgttgtctttattacgtttgaagtcaaccaaacggtaraaacgtttgtgtccaccaccttggtgacgaactgtgatacgaccgttgttgttacgaccagccttgctcttcaatgcaacaagcaatga

SEQ ID NO: 5043 - DNA, 164 bp, Streptococcus pneumoniae
  misc_feature (1)..(164): tiling:Spneumo1:WAN024EUL; Cluster includes WAN0244RH spr0 069||15902113|NP_357663.1|76547..76705|+|159 bp|Hypothetic al protein|S.pneumoniae|R6|NC_003098.1|ORF|110
ttgacctatagtcacatctatcaagtattgttcttgcctaagctatcaataaaaaggtggcattttttaggcttggtgttagtrrattttgccttatcctatctaagtcatttcgarctttttatggtacaatggaaacatgttattcaaattatctaactaat

SEQ ID NO: 5044 - DNA, 395 bp, Streptococcus pneumoniae
  misc_feature (1)..(395): tiling:Spneumo1:WAN024EZ2; Cluster includes WAN023LBQ 3154 11_2123||||1143286..1143615|+|330 bp|EGAD orf prediction|S .pneumoniae|R6|NC_003098.1|ORF|220
ttgaccttcttccacaaaataggcgaaatcgaataccctaccaagcgatccaagatccgacgagcttgttgggcatcgaccaagtccatatcgatcttacgaggttctttaaaagcatttttgactgcatccttggtgatttcattgaagaccacacggttggcatcattttcatccaagttgagaatatgggccaaatgccaagaaatcgcttctccttcacggtccgggtcactcgcgagaaaaactttattagcttttttagcttcttttttcaagtcattgataagagggccttttcctcggatattaatatattgcggttcataattattttcaatatcgacggacatactggatttcttcaaatcacggatatgcccgacactggctaa

SEQ ID NO: 5045 - DNA, 402 bp, Streptococcus pneumoniae
  misc_feature (1)..(402): tiling:Spneumo1:WAN024FUP; Cluster includes WAN023L84 3131 38_2280||||1226602..1226871|+|270 bp|EGAD orf prediction|S .pneumoniae|R6|NC_003098.1|ORF|120
ttgaccttgagctcctcagcatccttgataactgttacaccttgggcttgggtcgcaagyagggcaataatgggcaattcatcaatcaatcgtggaatcaaagcgccaccaatytctgttcctttcaagtcagaagactcaacartcaaggtagmagatttagcgactggatcgatttcagtwayttcyaattttccacccatggcacgaatgacatcaataataccrgtrcgmgtttcgttgatycccacattctgcagcactagaygagaatttggagcaatcaaacctgcgactaaccaaaaggctgcactggaaatatctcctggtacgaccaccttctgtcctgtcaatttttgtggcccctggactgtgattttcttaccatccacacttaaatga

SEQ ID NO: 5046 - DNA, 999 bp, Streptococcus pneumoniae
  misc_feature (1)..(999): tiling:Spneumo1:WAN024FTS; Cluster includes WAN0240C8 |cap 33fH||CAA07401.1|||918 bp|glycosyl transferase|S.pneumonia e||AJ006986|ORF|000
ttgacgaagaaaaaaaatactggaaaaatattaacagtagttgtaccatcatataatgcagaaaattatttacaagagacgatgccgacgatactttctgctaagaatatagagagggkagaattactgattgtaaacgatggttctacagacagaaccgaagaaatagcaagacaattcgagagagaatatgagggaattgtyagagttataagtaaggaaaactgtggtcacggttcggcagtaaatgcggggattgagaatgctgttggtaattactttaaagtggtagatgcagatgattgggtgaacaccaataatttagaagatttgatagtgtttctatctgaggtggatgtggatcaagttttatcaccatatgataaaatttttgtgaattatcgaggtgatatagagcgtgaagaagagtgcaacgagttttckcaagttgagaacgaggtgatctattctgcagaagaattctatacacgaattaaacaaacggtaggaatgcattccattactgtgaaaacgagtcttttgcaagagaacaatattcggctgtctgaaaaaatgttctatgtagatatggaatatattgtttatatgcttccatatgtaaaaaaggttgttttatttgataaaagtatctatagatatcgtctaggaacagagacacaaagcattagtatggcgagttatattaaaaatcgtgatatgcataaacaagtgatctatcatttggttgatttttataatcaaatgagatctagcgctgttttaaggagaataacatggaaattgattttaaatttaataagacagcaatggataatttattttaatttatctaaaaaagaggggaaaaacagcgagtgttttgaatttgataattggctaataaaagaaggacggataaaaaaaataccactatacttttttaaagctgtgaaatatatcagatttaaggtgaaatattttctggggataagaaaataa

SEQ ID NO: 5047 - DNA, 78 bp, Streptococcus pneumoniae
  misc_feature (1)..(78): tiling:Spneumo1:WAN024CLP; Cluster includes WAN023S9Q NC_0 03028.1_2024||||1528139..1528216|-|78 bp|Glimmer 2.02 orf prediction|S.pneumoniae|TIGR4|NC_003028.1|ORF|010
ttgacgaagaaacttcagtttctaggagattttatcttttttgccaagtgcttaggccgtgttcaattgagcatatct

SEQ ID NO: 5048 - DNA, 234 bp, Streptococcus pneumoniae
  misc_feature (1)..(234): tiling:Spneumo1:WAN024FYS; Cluster includes WAN023LB7 3134 65_2140||||1153860..1154093|-|234 bp|EGAD orf prediction|S .pneumoniae|R6|NC_003098.1|ORF|110
ttgacgaagagccacatacttatagctcttgtcgacaatgctcaagtctgtaaatcgatcaattgggaagacatcgatgaaaaggctggtatcatgacgcttgtacttaacatggtcttctataacagtagaagtgtccaaaatcgatgcgaaattatggaagtaccaagaagatgtatcgtaggaaagaaccttgtagcgagggtgattttcttcttcaataatcttcagtaa

SEQ ID NO: 5049 - DNA, 303 bp, Streptococcus pneumoniae
  misc_feature (1)..(303): tiling:Spneumo1:WAN024DW8; Cluster includes WAN023KDX 3156 75_3616||||1942430..1942732|-|303 bp|EGAD orf prediction|S .pneumoniae|R6|NC_003098.1|ORF|110
ttgacgaataycgaacagcgattacacttcttcacgttcaaatggcatagacatacaacgaggtccaccacggccccgaaccaattcacttccgcgaatcttaatcaagcgaagcccgtattcttccaaaatcttattggtcacggtattgcggtcataaacaactaccacaccaggtgcgatggtcaaagtgttagaaccgtcgttccattgttcacgcgcagctgctacgatattgccaccaccgcaacgaatcaaatgaactttttctacaccaaggttttgagcaagaagttcagctaa

SEQ ID NO: 5050 - DNA, 139 bp, Streptococcus pneumoniae
  misc_feature (1)..(139): tiling:Spneumo1:WAN024DOV; Cluster includes WAN023SK3 NC_0 03098.1_1345||||1066707..1066796|-|90 bp|Glimmer 2.02 orf prediction|S.pneumoniae|R6|NC_003098.1|ORF|110
ttgacgagtgaagaattgaaaagtcttggaaaatggtatgtctcgactgstraagaatgggatactatctcctttgattcagattttatgccgtttcaacaatcgtaaccaatttctcaaaaaagttaaatcttatatt

SEQ ID NO: 5051 - DNA, 174 bp, Streptococcus pneumoniae
  misc_feature (1)..(174): tiling:Spneumo1:WAN024BEZ; Cluster includes WAN0243O2 spr1 489||15903532|NP_359082.1|1465568..1465786|+|219 bp|Hypoth etical protein|S.pneumoniae|R6|NC_003098.1|ORF|110
ttgacgcggtttgaagagatttttgaagagtataaaaatcctcaagatactttcttctatcctttagtttataaggagaatacctatgaaaaaaactgctatttctatctttgctctcctaaygttaggagtttgctgcctgttcytattcagccagcaaagctaywaamtaat

SEQ ID NO: 5052 - DNA, 421 bp, Streptococcus pneumoniae
  misc_feature (1)..(421): tiling:Spneumo1:WAN024CHD; Cluster includes WAN023MEV 3128 79_91a||||47962..48261|-|300 bp|EGAD orf prediction|S.pneu moniae|R6|NC_003098.1|ORF|330
ttgacgctcttctgggagtttgacatccttgtccacaactttggcatcgacaaccacgcgcacaccattgrtgtcaaggaaacgacgctccaagtcaacgattgtctcaccattccagtgcatgacaagatttggtttttcagttactgtcgccaccacaacagcatcaatattttctttgttacattcggcaacgaaggyatccacatcttcaggacgaaccacraccgccatccgttcttgtgattcagagatggcaatttctgtaccattcaagccctggtatttaagaggcaccttgttgaggtcgatttcaagaccgtctgccaattcaccgatagccacacagacaccgcctgccccaaagtcattggacttcttgatcagacgagtgacattgccattacggaagaggcgctga

SEQ ID NO: 5053 - DNA, 243 bp, Streptococcus pneumoniae
  misc_feature (1)..(243): tiling:Spneumo1:WAN024GCW; Cluster includes WAN023LRW 3135 07_1278a||||676974..677216|-|243 bp|EGAD orf prediction|S. pneumoniae|R6|NC_003098.1|ORF|110
ttgacggtaaattggacgcttgaggtccagcatttggataatccctgcagggcgaaggtcaaagatttgacgagccgctttttcaagttgactttcagctactgttcctgtaccgaaagtatcgatacgaacagaaacaggttgcgcaacaccgatagcataggccaactgcacttctgccttcttagcaaggyctgctgcaacgatattcttggcaatatagcgagccgcataagaggctga

SEQ ID NO: 5054 - DNA, 321 bp, Streptococcus pneumoniae
  misc_feature (1)..(321): tiling:Spneumo1:WAN024G5Z; Cluster includes WAN023LIB 3137 11_1849a||||993740..994060|-|321 bp|EGAD orf prediction|S. pneumoniae|R6|NC_003098.1|ORF|110
ttgacggtgaccttgtttacggtggctaccttttttaggtttgtacttgtaagtaaccactttcttttgttttccttgtttttcaacagttccaactacagtagctccagcaacaagtggagttccgacaacagtgttttcaccaccaacaagaacaacttcgttaaaagtaacttcttgaccagcttcaacgttcaatttttcaacgtaaactgcttgaccaacttcaactttaacttgttttccgccagttttgataattgcgtatgtgctcattatgcacctcctatgatttttatggrtttccccgattttttgtga

SEQ ID NO: 5055 - DNA, 420 bp, Streptococcus pneumoniae
  misc_feature (1)..(420): tiling:Spneumo1:WAN024D7R; Cluster includes WAN023KBM 3125 67_3724b||||2011979..2012356|+|378 bp|EGAD orf prediction| S.pneumoniae|R6|NC_003098.1|ORF|220
ttgacgtccttcgataatagcgtcagccaatttagctgtgatcaatttaacagcacggatagcgtcatcgttagctgggatgattacatcgatatcatctggatcagtattggtgtcaaccatcgctacaactgggattcccaattttttagcttctttaacagcgatttgctctttatgtgggtcaactacgtacatcacatctgggatacgaggcatatcttcgataccrcccaagaatttttcaagacgcgcacgttgtttgttaagaagtgcaacttctttcttaggaagaacttcgaaagttccatcttcttccatacgtttaatttctttcaaacgagcgatacgtttttggattgttccccagtttgtaagagttccacccaaccaacggtggttgatgaagtattgacctga

SEQ ID NO: 5056 - DNA, 231 bp, Streptococcus pneumoniae
  misc_feature (1)..(231): tiling:Spneumo1:WAN024GDF; Cluster includes WAN023LSF 3135 10_1248||||660780..661010|-|231 bp|EGAD orf prediction|S.p neumoniae|R6|NC_003098.1|ORF|110
ttgacgttggtcaatgtcctcaggcaatttcaccaagtattcaactggttgaagtgtttcttcatcacggtacataccgatgtggccaactttagcagctggaaccaagytcaagagaccatcaaccatcccgatacctgcacgcaagattgggacgatggccaatttcttacctgccaattgtttttgaactgtttttgtaattggtgtttcgatttccacatcttctag

SEQ ID NO: 5057 - DNA, 261 bp, Streptococcus pneumoniae
  misc_feature (1)..(261): tiling:Spneumo1:WAN024F56; Cluster includes WAN023MFQ 3152 94_53||||30365..30625|+|261 bp|EGAD orf prediction|S.pneum oniae|R6|NC_003098.1|ORF|110
ttgactaaacattttcctgtcctcctcggaccagctcttgtagtccagcagttgatttgcttgggtaatggctcgttgcggttgctgggtaaagggcttgttgccgaaaaactccaaccatggcttgcgaaccttgtctttgctggtttctctgtattttttaattccaagaatgccatcttaaccagatggttttcctgtccattgttggtaatcgccaatacctcacctgttgtgtcttcgcgcatactaaagctatga

SEQ ID NO: 5058 - DNA, 327 bp, Streptococcus pneumoniae
  misc_feature (1)..(327): tiling:Spneumo1:WAN024CHA; Cluster includes WAN023MEN 3135 61_96||||49432..49758|-|327 bp|EGAD orf prediction|S.pneum oniae|R6|NC_003098.1|ORF|110
ttgactaaggcttggaatccattacaaataccgataatcaaaccaccacgggcgataaagctatcaatagccacacgcactttttcattaagcaggatattgacgataaacttagctgaaccatctggttcatccgcagccgagaatccaccagcaaagaagagaatattagtcttgtcgatattgtcaaccatagtttcaactgacttgacaatagcttcttcattcaaggtcacgaatggcaccaaattgacctctgcaccttctttttcgaaggccttagctgaatcatattctgagttggttcctggaaagactgggatgtaa

SEQ ID NO: 5059 - DNA, 431 bp, Streptococcus pneumoniae
  misc_feature (1)..(431): tiling:Spneumo1:WAN024F9A; Cluster includes WAN0243GU spr1 750||15903792|NP_359342.1|1720385..1720810|-|426 bp|Hypoth etical protein|S.pneumoniae|R6|NC_003098.1|ORF|221
ttgactagtcgtgtatttattgatgcagattgtatttcagtatttttatgggttggcactgaacatcttttagaaaagctctattygggtaaaattgttattccacaagaggtgtatgatgaaatcaatatacctacaattccccatttaaaatctaggatagaycagttggtarctaagggttcagctgagattgtgagcatagacattggaactgaagaatacgcattatatagagatttaacaagaaatcatgatartaacaagattattggtaagggagaagbgrcwtctatttycttagcgaaaaagcataatgggatattaggaagtaataacctaagagatgttaaaycatatgtagaagaattttctttagaayatatgacaacaggagatatactgattgaagcgtttaaagygtaactaat

SEQ ID NO: 5060 - DNA, 267 bp, Streptococcus pneumoniae
  misc_feature (1)..(267): tiling:Spneumo1:WAN024DU8; Cluster includes WAN023KBI 3153 29_3730||||2014928..2015194|+|267 bp|EGAD orf prediction|S .pneumoniae|R6|NC_003098.1|ORF|110
ttgactatagtagagttctcctctacttttgaaacactcccaatcaagccaccatttgcaatagctaacatgttctcagaagcaccttttgatctacctgcatctaaggtcaactcctgcttccaagataccggagaacgcataataacatctgctgctaaagtctttgtggcttgcaatttagacttcatatcaagcaattggcgcagttgttcattttctgtctttaaactttccacctcatttgatttaacttctaattggtaa

SEQ ID NO: 5061 - DNA, 129 bp, Streptococcus pneumoniae
  misc_feature (1)..(129): tiling:Spneumo1:WAN024DQC; Cluster includes WAN0242OZ SP07 63||15900657|NP_345261.1|722937..723065|+|129 bp|hypotheti cal protein|S.pneumoniae|TIGR4|NC_003028.1|ORF|011
ttgactattgcaaggttttctagagcaacagagtcatggaatggactcatggttgagatttctccttgttgcttggacttcattcaaaagtctgttacccaagccttgttcaaacttcyaatacactag

SEQ ID NO: 5062 - DNA, 496 bp, Streptococcus pneumoniae
  misc_feature (1)..(496): tiling:Spneumo1:WAN024GFW; Cluster includes WAN023LVP 3145 22_1081||||570306..570629|-|324 bp|EGAD orf prediction|S.p neumoniae|R6|NC_003098.1|ORF|220
ttgactcacaccattgttatcagcataccatttaatcaagagacctgtgatagacaagtgccagatatcaaagatatcgacatcaagtgtatckgttttcttcatagcwagcatcactaygttgacaatcaacatgatgagcaagaagtawagtgtccaagcagaaccccaagtgattgtwgcragtggtgcccaaccaacgtckgtaatactcaattggataccagtgttttcaacgaattttgcwagtgatgctgagaaagcasyrtttagcataccgatgatagcaccgatacctgtaagagcgatggcaagtttgataccaccttcaagcgctttggagaatttcactccaaaaagtaaagccaatactgtcaaaatgatyaacatgatgacaggtccacccatttctaagatgggattgaaaacctttccgattaggtcaaagattgcatccataacagttcctccctttttkatgttatatgaatgttaa

SEQ ID NO: 5063 - DNA, 516 bp, Streptococcus pneumoniae
  misc_feature (1)..(516): tiling:Spneumo1:WAN024GBE; Cluster includes WAN023LPU 3129 56_1404a||||741789..742058|-|270 bp|EGAD orf prediction|S. pneumoniae|R6|NC_003098.1|ORF|210
ttgactcccatatcagatccaactgtttcacgcattaatgtaacatctgctatcgtagcaccaccagttgaaaaaccagtagatgttttaacaaagtcagccccagctttttgggccaattggcaaacaacaattttttcttggtctgtcagaaggcaagcttcaataatgactttcactaacttatcaccacttgcttccactactgcgcgaatatctgactcaaccaaggctaaattacctgatttgagagctccaacattgatcaccatatcaatctcatctgcaccattttggatagcttcttttgtctcaaatgctttcacggctgaagttgttgctcccaaagggaaacctactactgtgcaaaccttaacatctgtgccttcaagtccttttttagcatgttcaacccaggtcggattaacgcaaacactggcaaagycatactctctagcctcagacaacaaactatcaatttgttttttctttgcatcttgttttaaaagcgtatga

SEQ ID NO: 5064 - DNA, 294 bp, Streptococcus pneumoniae
  misc_feature (1)..(294): tiling:Spneumo1:WAN024CUR; Cluster includes WAN023MG0 3135 68_41||||26290..26583|-|294 bp|EGAD orf prediction|S.pneum oniae|R6|NC_003098.1|ORF|110
ttgactcggattgagtacctcaaccaagccgcccgactgcatctcaaaaatcccaatctcattagtggaaccaaaacgatttttgaccgctctcaaaatacgaaaggtgtggtgacgctccccttcaaagtaaagcaccgtatccaccatatgctccaacatacgaggcccagccaaggttccttctttggtcacatgacctacgataaagatggcaatgttattggtcttggccaactgcatgagttcagcggtcacttcacgyacctgagaaacagacccctgcacccctga

SEQ ID NO: 5065 - DNA, 2013 bp, Streptococcus pneumoniae
  misc_feature (1)..(2013): tiling:Spneumo1:WAN024D3W-5; Cluster includes WAN0244RT sp r0057|strH|15902101|NP_357651.1|60528..64466|-|3939 bp|Bet a-N-acetyl-hexosaminidase precursor|S.pneumoniae|R6|NC_003 098.1|ORF|311
ttgactctcgttaatataagaaataaaataaaggcgttgatttatataatcgctatcaatataacaatgcaatcaggaggttttgcaatgaaacatgaaaaacaacagcgtttttctattcgtaaatacgctgtaggagcagcttctgttctaattggatttgccttccaagcacagactgttgcagccgatggagttactcctactactacagaaaaccaaccgaccatccatacggtttctgattcccctcaatcatccgaaaatcggactgaggaaacacctaaagcagagcttcaaccagaagctccaaaaactgtagaaacagaaactccagctactgataaggtagctagtcttccaaaaacagaagaaaaaccacaagaggaagttagttcaactcctagtgataaagcagaggtggtaactccaacttctgctgaaaaagaaactgctaataaaaaggaagaagaagctagccctaaaaaggaagaagcgaaagaggttgattctaaagagtcaaatacagacaagactgacaaggataaaccagctaaaaaagatgaagcgaaagcagaggctgacaaaccggaaacagagacaggaaaggaacgtgctgcaactgtaaatgaaaaactagcgaaaaagaaaattgtttctattgatgctggacgtaaatatttctcaccagaacagctcaaggaaatcatcgataaagcgaaacattatggctacactgatttacacctattagtcggaaatgatggactccgtttcatgttggacgatatgagcatcacagctaacggcaagacctatgccagtgacgatgtcaaacgcgccattgaaaaaggtacaaatgattattacaacgatccaaacggcaatcacttaacagaaagtcaaatgacagatctgattaactatgccaaagataaaggtatcggtctcattccgacagtaaatagtcctggacacatggatgcgattctcaatgccatgaaagaattgggaatccaaaaccctaactttagctattttgggaagaaatcagcccgtactgtcgatcttgacaacgaacaagctgtcgcttttacaaaagcccttatcgacaagtatgctgcttatttcgcgaaaaagactgaaatcttcaacatcggacttgatgaatatgccaatgatgcgacagatgctaaaggttggagtgtgcttcaagctgataaatactatccaaacgaaggctaccctgtaaaaggctatgaaaaatttattgcctacgccaatgacctcgctcgtattgtaaaatcgcacggtctcaaaccaatggcctttaacgacggtatctactacaatagcgacacaagctttggtagttttgacaaagacatcatcgtttctatgtggactggtggttggggaggctacgatgtcgcttcttctaaactactagctgaaaaaggtcaccaaatccttaataccaatgatgcttggtrctacgttcttggacgaaacgctgatggccaaggctggtacaatctcgatcaggggctcaatggtattaaaaacacaccaatcacttctgtaccaaaaacagaaggagctgatatcccaatcatcggtggtatggtagctgcttgggctgacactccatctgcacgttattcaccatcacacctcttcaaactcatgcgtcattttgcaaatgccaacgctgaatacttcgcagctgattatgaatctgcagagcaagcacttaacgaggtaccaaaagacctgaaccgttatactgcagaaagcgtcgcggccgtaaaagaagctgaaaaagctattcgctctctcgatagcaaccttagccgtgcccaacaagatacgattgatcaagccattgctaaacttcaagaaactgtcaacaacttgaccctcacgcctgaagctcaaaaagaagaagaagctaaacgtgaggttgaaaaacttgccaaaaacaaggtaatctcaatcgatgctggacgcaaa

SEQ ID NO: 5066 - DNA, 129 bp, Streptococcus pneumoniae
  misc_feature (1)..(129): tiling:Spneumo1:WAN024F7J; Cluster includes WAN023SJ5 NC_0 03098.1_1708||||1328506..1328625|-|120 bp|Glimmer 2.02 orf prediction|S.pneumoniae|R6|NC_003098.1|ORF|111
ttgactctgctgagtcctatgattgttatcgttttatctgcaattttatactcaatgaaaatcaaagggcaaactaagaagctagccgcaggttgttcaaaacacagttttgaggttgtactaactaat

SEQ ID NO: 5067 - DNA, 929 bp, Streptococcus pneumoniae
  misc_feature (1)..(929): tiling:Spneumo1:WAN024D8D; Cluster includes WAN0243SN spr1 324|apbE|15903367|NP_358917.1|1311068..1311991|+|924 bp|Th iamine biosynthesis lipoprotein|S.pneumoniae|R6|NC_003098. 1|ORF|111
ttgactcttcgttcacattctgaacggctaatggggactactatcactatttcattagtggatgagcaagccgatatctttctccaaaaatcctttgacttgctcaaagarcttgaataccgcttcaacgccaatagtcaagaatctgagttgatggaaatcaattatcaagcaggartakcccccgtcacggttcatccagacctgtttgagctgatttcacttgggttagagcatagcctagcgctctctagccacctcaatatcagcattggtcccttaattcaaacctggcgtatcggtttttcagatgccaaggtcgcccagcctcaagaaattgaatcggtgctgcctctaatcaatcctcatggtatcgagttagattcttctacttctactgtgtttttaaaacagaaaggaatgaagatcgatctaggttgtttagccaaaggatacagtgcggataaggttgcccaatttcttaggaaagagggggtgacttctgccttgatcaatctgggagggaatatcctgaccattggaaaaaatcaggcaagaggggataacccatggcaaatcgggattcaagacccagccaatcctaggggaaatcatttaatgaccatccctgttgtcaataaatctgtcgtracttcaggcatttatgaacgtcacctgaccgtcgatggacaagattaccatcacatttttgacagtcaaacaggatatcctgttgaaacggaactagcgagtctaacaatcatctctgataaatcagtcgatggcgaaatctggacgactcgactctttggagaaagacctgcttctatcctctggcaagtcgaaartttggagggcatcgaagtcatcctcatcgataaagaaggccacctaagctgttcttcaggaattcctactctatarctaat

SEQ ID NO: 5068 - DNA, 75 bp, Streptococcus pneumoniae
  misc_feature (1)..(75): tiling:Spneumo1:WAN024DPH; Cluster includes WAN023SKQ NC_0 03098.1_1189||||928544..928618|-|75 bp|Glimmer 2.02 orf pr ediction|S.pneumoniae|R6|NC_003098.1|ORF|110
ttgactcttttactagcaaaggtatatactcacaaggaactttggttgactattgaatctctccaacttcttctt

SEQ ID NO: 5069 - DNA, 267 bp, Streptococcus pneumoniae
  misc_feature (1)..(267): tiling:Spneumo1:WAN024EUF; Cluster includes WAN0244PO spr0 134|transposase A|15902178|NP_357728.1|142041..142307|-|26 7 bp|Degenerative transposase|S.pneumoniae|R6|NC_003098.1| ORF|110
ttgactgaaatagctgctgaattcaactgtcctccaacaactattcattacgctctaaaggctatgggatatagtctaaaaaagagccgtacctactgcgaacaagacccagaaaaagtaaatcggttccttaaagaattgaatcacttaagctacctgactcctatttatatttatgagacaggggttgagacctatttttatctcraatatgatcgagccttgagcaggcagttagtctctctggaagaagatataattatttga

SEQ ID NO: 5070 - DNA, 234 bp, Streptococcus pneumoniae
  misc_feature (1)..(234): tiling:Spneumo1:WAN024DUK; Cluster includes WAN023KC6 3132 20_3694||||1995569..1995802|+|234 bp|EGAD orf prediction|S .pneumoniae|R6|NC_003098.1|ORF|110
ttgactgactcgctcaccaatcgagtaaagcagctcccggagcatttcatgatgactagaaaactcaatccgtcctatacgaatgtagcctccgccaccacgcttactttcaaccaagtagcctctactttccgtaaagcgtgtcttgatcacgtagttaatctgactaggaacaacctgaaaggtatctgccaactgactccgttgcaactccacgataccagattgatctaa

SEQ ID NO: 5071 - DNA, 285 bp, Streptococcus pneumoniae
  misc_feature (1)..(285): tiling:Spneumo1:WAN024FBO; Cluster includes WAN023KP4 3150 47_3110||||1658345..1658629|-|285 bp|EGAD orf prediction|S .pneumoniae|R6|NC_003098.1|ORF|110
ttgactgagcaggtcagcctgcatgatttgatcggttcttcccttgctaaagacctggccgtccttgaaggcgacaatttcatctgcrtactgactggccatgttgatatcgtggaggacgatgataatggtcttgccgagttcctccaccagtcgtcgaagaatctgcatcatgctgacgctttgcttgatatcgagattgttgagtggttcgtccagcaagataaagtccgtatcctgggccagtaccatagcgataaagacgcgctggagttgcccccctga

SEQ ID NO: 5072 - DNA, 225 bp, Streptococcus pneumoniae
  misc_feature (1)..(225): tiling:Spneumo1:WAN024CHJ; Cluster includes WAN023MEZ 3135 63_85||||44392..44616|-|225 bp|EGAD orf prediction|S.pneum oniae|R6|NC_003098.1|ORF|110
ttgactgatgaggttgccgatttcggcttgggtttggctagctgctgcattctgggacgcgatggtctcattttgttgcgatgtactagccctaagactgcctgcttgactgatgtagtcgcgaaaggtggcttggtagccaaacttatcctcctctggaaagtggttctccccttcttgcaggctcttttgcagatactccaattgctttttttgatcctttag

SEQ ID NO: 5073 - DNA, 414 bp, Streptococcus pneumoniae
  misc_feature (1)..(414): tiling:Spneumo1:WAN024F4U; Cluster includes WAN023KQG 3154 88_3054||||1627775..1628179|+|405 bp|EGAD orf prediction|S .pneumoniae|R6|NC_003098.1|ORF|110
ttgactgatratkgtgtcctcatccttgtagttgatgctggctggagaggtaatycctgcttgcaagagcaaggttgccatcatttcagggctatactgctctgtataacgtggcacttcaggtcgtgtaccgacaaaggacatctcacctttaaggacattgaccaaytgaggcagttcgtccaaacggacacgtcggatgaaatttccaaccttggtaatrcggctatcgttagcagaagtcaccagacttccttttttatccgcatccgtcaccatggtacgraacttccaaatcttgaaccgacggttgtactgggtcacacgctcttgcttgtaaatcactggcccyttgctatccaacttgatccaaatgctcaagatgagaaagatgggagargtyagaaccagtaa

SEQ ID NO: 5074 - DNA, 255 bp, Streptococcus pneumoniae
  misc_feature (1)..(255): tiling:Spneumo1:WAN024CRX; Cluster includes WAN023KSA 3129 25_2960||||1575282..1575536|-|255 bp|EGAD orf prediction|S .pneumoniae|R6|NC_003098.1|ORF|110
ttgactgggytgtcaaccagtttgagcaagaggttgctgagracctgcccaatcccatctggtggtgcaatttcagtattggcactatttrgggtaatttcaatagggacgatgaaayttgctagtacagctacaagagcagcggcgaaagtccctatcataggatatacaagaaaacaacagttttcatattgctatcttgtcccttttgatgttgggaaagggcattggcaacgagrgcaaagactaggatag

SEQ ID NO: 5075 - DNA, 308 bp, Streptococcus pneumoniae
  misc_feature (1)..(308): tiling:Spneumo1:WAN024G2F; Cluster includes WAN0243YR spr1 104||15903147|NP_358697.1|1105118..1105420|-|303 bp|Hypoth etical protein|S.pneumoniae|R6|NC_003098.1|ORF|221
ttgactgracacctaaaaagtaatacaatggtgttaccattaaaaaagggagcacaaaagatgactactattacattaaaagtttctgaagctgataaaacatttatgaaagcaatggctaagtttgaaggagtttccctttcggaacttattcgcaccaaaactcttgaagccctagaagatgaatacgatgctcgtgtggcagatttagcctatcawgagtatttagaagacttggaaaaaggagttgaacccattacttgggaagaaatgatgcatgatttaggcttgaaggatgaataactaat

SEQ ID NO: 5076 - DNA, 231 bp, Streptococcus pneumoniae
  misc_feature (1)..(231): tiling:Spneumo1:WAN024FJE; Cluster includes WAN023KZQ 3131 66_2633||||1405246..1405476|+|231 bp|EGAD orf prediction|S .pneumoniae|R6|NC_003098.1|ORF|110
ttgactgtaattttttgcggagtcgccacagcggtcagcccattgggtaaatcttcaatgctcaaaggaacttcaatcgttccaacaccggcatctgttaggtcagcagtaaccttgaatttacgtgtactttcttgcatttcactagctagcgataggcgatttgcaccagtcaagaccactgatacttctgaagcaaaaccgctaataaaatacttatcactattatag

SEQ ID NO: 5077 - DNA, 225 bp, Streptococcus pneumoniae
  misc_feature (1)..(225): tiling:Spneumo1:WAN024B7G; Cluster includes WAN023M3S 3136 12_682||||359458..359682|-|225 bp|EGAD orf prediction|S.pn eumoniae|R6|NC_003098.1|ORF|110
ttgactgtcctgatcgatttgtcctgttcttgtttcattttactatatagatcgcattcgaaagaattcgttccaaaattgcttggttcgttcttctcttggacsactaaagaattgatgggcattatttttttcaacaattttcccactgtccataaaaataacatgatgggctacatctctagcaaracctatctcataaagctgatcaaaaactcaatctga

SEQ ID NO: 5078 - DNA, 276 bp, Streptococcus pneumoniae
  misc_feature (1)..(276): tiling:Spneumo1:WAN024G4X; Cluster includes WAN023LH5 3137 06_1904||||1028000..1028275|-|276 bp|EGAD orf prediction|S .pneumoniae|R6|NC_003098.1|ORF|110
ttgacttggttcatcatagcggtctgtcttgtagtcgaacagaacaattttgttttcgtaaagcagatagccatcaaggataccacggacaacaaagtcttcctgactcttttggtctcgtttgagcatggagaaaggttgctcgcgataaagatggtcggtattagcaagaatttcctgaccgagtactgtgtcaaagaaagcaagaattttatcaagattgatcttgtctctgacagcttggctagtttgaacttgtttgagtgtttctgttag

SEQ ID NO: 5079 - DNA, 351 bp, Streptococcus pneumoniae
  misc_feature (1)..(351): tiling:Spneumo1:WAN024BE7; Cluster includes WAN023LWV 3155 37_1024||||534270..534620|+|351 bp|EGAD orf prediction|S.p neumoniae|R6|NC_003098.1|ORF|110
ttgactttgtcactttcgtggttgataattttgctgaggaattgttgggcacgaggttcgcttggattgtcaaaaaagttatcgacatctgtcgtatctactaaaacttctccgtcggccataaagataatgcggtccgcaacctctcgagcaaagcccatttcgtgggtaacgatgatcatgttcatcccatcatgcgccagtttctgcataactgctagaacatctccgatagtctcaggatcaagagcagatgttggttcatcaaagaggaggagttccggatgcatagcaagaccacgagcgatggcgatccgctgtttttgtccaccagatagcatggcgggatag

SEQ ID NO: 5080 - DNA, 105 bp, Streptococcus pneumoniae
  misc_feature (1)..(105): tiling:Spneumo1:WAN024DQE; Cluster includes WAN0242PE SP07 47||15900642|NP_345246.1|707467..707565|-|99 bp|hypothetic al protein|S.pneumoniae|TIGR4|NC_003028.1|ORF|120
ttgactttttcaaacatgataaatcctctttctaagaaatctctccctattataccaaaaaaagcaaacccagtcgagtttgccttctatcatcatctarctaat

SEQ ID NO: 5081 - DNA, 1473 bp, Streptococcus pneumoniae
  misc_feature (1)..(1473): tiling:Spneumo1:WAN024B7H; Cluster includes WAN0240P8 |cps 14L||CAA59772.1|||1464 bp|putative repeating unit transpor ter|S.pneumoniae||X85787|ORF|000
ttgagaaaaatgagtaataaaatcagtaaaaatttagcctacaatataggatatcaattaattggtattgcctttcctttgataacttctccttatttatcacggatattaggcgctgaaaatttaggtattcattcttttactatctcagtagcactttactttatgatgtttatgctacttggaattgcaaattatggaaataggacaatagcgaccgttaaacgagaagggaaagagattttatcaaaaacgttttggaatatctactatgtccagttgctaatgtcggttctagtaactatcgcatatctcatttatttatatttttgggtgtcgagttacaagttcattgcgattttacaactttttttgttattatcgaatgcagttgatattacttggttattttatggattagaagattttaaacaaattgtttttagaaatgcattagttaaacttcttggtttgtttttaatattttcgtttgtacatgaaagctcagatttatggaagtacaccttaataaacggaggagtgactttagttgggcaacttttgttatggggacaattaaaaggcagattatcttgggtgaagattcaaaaaaaggatttactatctcatatcaaaccaattttagttcttttcattcctgtgttagcaatcagtatctttagtaatatggataaatatatgcttggtttaatggttggtgttaagcaagttggattttatgataatgcaaatcgtattatcgatattcctaaagcattaattgcagcattagaggctgttatgttaccacgaacatcttatttattagcagaaggtcaggaggaaaaaagtaattactatatagaggttacaatcctttatgcgatgatgatttcgagtgtattgatatttggtataatatcggtttctgatattttctcgcttgtattttggggagaagaattccttgaatcaggaagattaattgctgctatggcaccagtttttgttttttctgttccaggaaatataattagaacacagtatttgattcctagagcaaaggataaagattatgtgttgtctctaataataggtgctctagttaatatattattgaactgtttcttaataaaaccttttggagccatgggtgctacgattagtacagttttggcagaatttgtcttgtatggagtgcaattttggacagtcagaagagatttagactttaaaaaatatttaaagaatggttttatattttacctatttggtatgattatgtatttagctattatagcagcaaaagctcatttgcaatataatataataaatcttgttctccttatagtgctgggaggaatagtatatactggcttttgttgtttctacattttaatatcaagaaacgtacattttgagatattacgggaaaaaattaaacgaaagattggttatgaaaatatattataa

SEQ ID NO: 5082 - DNA, 81 bp, Streptococcus pneumoniae
  misc_feature (1)..(81): tiling:Spneumo1:WAN024GES; Cluster includes WAN023Z1S AL44 9926.1_39||||38786..38866|+|81 bp|Glimmer 2.02 orf predict ion|S.pneumoniae||AL449926.1|ORF|000
ttgagaaaaatggagaaaagaactaatggttacttggattttgtgggcacttatactagcaatgttggcgtggatgggctt

SEQ ID NO: 5083 - DNA, 497 bp, Streptococcus pneumoniae
  misc_feature (1)..(497): tiling:Spneumo1:WAN024BFI; Cluster includes WAN0243RE spr1 369|greA|15903412|NP_358962.1|1350774..1351265|-|492 bp|Tr anscription elongation factor GreA|S.pneumoniae|R6|NC_0030 98.1|ORF|211
ttgagaaaaatggcagaaaaaacatatcctatgacccttgaggaaaaggaraaacttgaaaaagaattagaagaattgaaattggttcgtcgaccagaagtggtagaacgcattaagattgcccgttcatacggtgayctttcagaaaacagtgagtacgaagcagcyaaggatgaacaagcctttgtcgaaggacaaatctctagcttagaaacaaaaatccgctatgctgaaatcgtcaatagcgacgcagttgcccaggacgaagtagcgattggtaaaacagtcaccatccaagaaattggtgaggacgaagaagaagtttatattatcgtaggttcagctggtgcrgatgcctttgyaggtaaggtttcaaatgaaagcccaattgggcaggccttgattggcaagaaaacaggtgayacagcaaccattgaaacgcctgttggtagctatgatgtaaaaatcttgaaggttgaaaaaacagcctaactaat

SEQ ID NO: 5084 - DNA, 288 bp, Streptococcus pneumoniae
  misc_feature (1)..(288): tiling:Spneumo1:WAN024B6C; Cluster includes WAN023MAM 3127 91_286||||145205..145492|-|288 bp|EGAD orf prediction|S.pn eumoniae|R6|NC_003098.1|ORF|110
ttgagaaagaagctaatagcgcctgctaacgtttctacagttgtctttctttgtataaccatctttaataaaattcctgcttctttaattttcttaggcaatacatataaaagattcaaggacgctaacacatcaaatccattcaatatagtctcactagattttaaaaaagcttcattttggttagttaaatttagactaacttctcgcattttcgatgcaaagatttttggtacaagtagcataatcattaatgaaaacaaggtggctacagtcaatgaccaatga

SEQ ID NO: 5085 - DNA, 1046 bp, Streptococcus pneumoniae
  misc_feature (1)..(1046): tiling:Spneumo1:WAN024FZ8; Cluster includes WAN0243XJ spr1 148||15903191|NP_358741.1|1149293..1150333|-|1041 bp|Conse rved hypothetical protein|S.pneumoniae|R6|NC_003098.1|ORF| 211
ttgagaaagactagtaaaatgattaatcaaatttatcaactaactaarcctaagtttatcaatgtcaaatatcaggaagaggctattgaccaagagaatcatatccttatccgtcccaactacatggctgtctgtcmtgcggatcagcgttactaycagggaaaacgtgatcccaagattttgaataaaaagcttccaatggcaatgattcacgagtcatgtggaaycgtcatttctgacccgascggaacctacgaggttggtcmaaaagttgtcatgattcccaatcagtctcctatgcagagtgatgaagaattctatgaaaactacatgacagggacccatttcttgtctagtggatttgatggctttatgagagagtttgtttctctccctaaagatcgtgtggtggcttatgatgctattgaagatacggttgcagccattacagagtttgtcagtgtgggcatgcacgctatgaatcgtctattgactcttgctcatagcaagcgggagcggatcsccgttattggagatggaagtttagcttttgtggttgccaatattatcaactatactttgccagaakcagagattgtggttattggtcgtcattgggaaaagttggaactcttctcatttgccaaagaatgctatattacggataatattcctgaagakttggcctttgaccatgcttttgaatgttgtggtggtgatggtactggaccagctattaatgacttgattcgctacattcgtcctcagggaacrattctcatgatgggagttagcgaatataaagtcaatctcaatactcgcgatgccttagaaaagggcttgmtyttggttgggtcatctcsttctggtcgcattgattttraaaatgctatccaaatgawgraagtcaagaaatttgccaatcgycttaaaaatatcctttatctagaagaacctgtaagagaaattaaagatattcaycgtgtctttgcaaccgatttaaacacagcctttaaaacagtgtttaagtgggaagtataactaat

SEQ ID NO: 5086 - DNA, 321 bp, Streptococcus pneumoniae
  misc_feature (1)..(321): tiling:Spneumo1:WAN024C5Q; Cluster includes WAN023M5L 3136 19_570||||295837..296157|-|321 bp|EGAD orf prediction|S.pn eumoniae|R6|NC_003098.1|ORF|110
ttgagaaagagaatccccaatacctgccaatggtcccatcaaggccatcttgatgctacgtgtttcttttgyyggwcggccattttccaacattacaagatgcaagctggtaataaaaggcaggaagtgtgggttggtattataraattcacagttttcttccaaggcttggtagaaaccttcctgatcctctccatagtgttttttcaaagcaggatacatcacattggcatatcccaacccttgatagttactatagttaaatccattttgacaaaagaatgcccgcaaagacgttttaagataatcacgttttgttaa

SEQ ID NO: 5087 - DNA, 1248 bp, Streptococcus pneumoniae
  misc_feature (1)..(1248): tiling:Spneumo1:WAN024DJL; Cluster includes WAN0244KN spr0 315|cps2H|15902359|NP_357909.1|314551..315585|+|1035 bp|Th e type 2 capsule locus of Streptococcus pneumoniae|S.pneum oniae|R6|NC_003098.1|ORF|100
ttgagaagattatatcaggggtatatattgaaaacggtaaatagtataacaaattatattttattattagtatggatagttataatgctctctctatatacaggaaatggtgttactcctgttattgttattttattttttttgtcggcattgtattctttatatcgaaaaagcaaattaagtataaatttaaattttttgtttatatatatttttttagcctactatttgttattaacagttatattcacacaagatttattggtgatgacttctaaatttatattatttccaatatttgtttattatataatacctaaaaatataaatggcgttataagaatactatctatttttaaatctttcattggttttactgctatttttggattatatgaatatatgcaacatttcaatcttatggtgaattttgtaaaaatagatgcagttaaatggatacaaacgatgaatttgaatagtgtgtattatcccagttcaatatttctccactacacctattttgcatatgttttgttactagcttttattttggtaattgttatcccatataagaaccgagtgttaaatttagtttataaaacacttattgcaatttcaatttttttgccccaatctcgtatagtttggatagcttttggggtaattttaattctttcgtttatactaaatagacaggggatattaacctatagaaagttgagtgttatagtacttattttaattatagtagtctctctctgcctatattttgatgtgtttgcgtttatttctaattatataagtttaagattttcttcactttatcgttatggactggctgatggttctctaggtcaacgtattggaactcttagaaattgggaaaattatttagactctgatactataaaggctattattgggtcaggatttggtggtgtcaatagttacttgagtacttattcattttttaatggctatactacagctgattcaacagtgacaagtttccttattgatactggggttattggcttatttatctttttattatctatgtttcagatattagtaatagtggtaaaaggaaaaggaatttttagagaattagcgttatatactattgtagcttcttctatagttagtttaacaattgatttttgggcaaattatgttattcttcatatattttacgtggttattatctgtgcatttataggaatgagattgactaagcaagaaaaataa

SEQ ID NO: 5088 - DNA, 312 bp, Streptococcus pneumoniae
  misc_feature (1)..(312): tiling:Spneumo1:WAN024GC4; Cluster includes WAN023LQF 3150 05_1369b||||725309..725611|+|303 bp|EGAD orf prediction|S. pneumoniae|R6|NC_003098.1|ORF|220
ttgagaatagtgattgtttcgtccaccgttggttcatcgactttaacaggctgcatacgacgctcgagggcagcatccttttcaatgatacggtattcattgagggtagtagcaccgactagttgcagttctccacgagcaagggctggcttgaggatatttcctgcgtccatattaccatcactcgcagaaccagcaccaacaatttcatggatttcatcgataaagaggatgatgtcttcacgtttgcgaatttcttccatgagtttttgcatgcgttcttcaaattgtcctcgaatccccgttccttga

SEQ ID NO: 5089 - DNA, 900 bp, Streptococcus pneumoniae
  misc_feature (1)..(900): tiling:Spneumo1:WAN024GN8; Cluster includes WAN023ZC1 AL44 9924.1_104||||73401..74000|-|600 bp|Glimmer 2.02 orf predi ction|S.pneumoniae||AL449924.1|ORF|001
ttgagaatgaaacgtttaattagtgcaaatccatctgagatattacagatgaatgctgaagaattaaaacaaagtattttagcaagtgaaggtagagttgttctatctgaaaatgtagttactcgtgagacatttgttggggatataactaattctgaaattgctagagcttttggagctgatatgattttattgaattgtgttgatgtttttgagcctaaaatttatgctttggatagttcaggtgatgatgttattcatcgcttacaccagcttgttgcttgtccaattggtgtaaatttggaaccgattgacccatctgcaaagatgctagaggaaacacaggaaattgttgcaggtygtgttgctagtgttgaaacattgaagcgaatagaggagttaggttttgactttgtctgtttgactggaaatcctggaacaggagttagcaatcragaratyatyaargcwgttcaawctgctaargaraayttytcwggtttgattatwgcwggtaaratgcacggggcaggagtgaatgagcctgtggcagagctttctgtmgcagagcaattgttggaagcaggtgcggatgtgatacttgttccagcagttggaaccgttccagcctttcatgaccaagagttgcgtgaagtcgttgatctcgttcatagtaagggtggkctwgtaytgagtgctattggtactagccaagaaacatctgatacagatactatcaaggaaattgcacttagaaataaaatttgtggagttgatattcaayatataggtgacgcaggatatgggggactggcaacagtcgataatatttatgcattgagcaaggcaattagaggagtgagacatacagtatctcgcttggctaggtcagtaaatagg

SEQ ID NO: 5090 - DNA, 189 bp, Streptococcus pneumoniae
  misc_feature (1)..(189): tiling:Spneumo1:WAN024EVB; Cluster includes WAN0241XH SP18 18||15901647|NP_346251.1|1730864..1731046|+|183 bp|hypothe tical protein|S.pneumoniae|TIGR4|NC_003028.1|ORF|010
ttgagaatgatgttttcttctctcgtttcagatgaacccaactttacagctttctctgcttgttttcagcaaccacaagctctctgtgagagaaagaactgtaatttttccatctattattttttagcttctagtagtctgcaatcgcagctaggtccttgcctccacgaccagagacatykaactaat

SEQ ID NO: 5091 - DNA, 231 bp, Streptococcus pneumoniae
  misc_feature (1)..(231): tiling:Spneumo1:WAN024G4P; Cluster includes WAN023LGG 3156 12_1929b||||1043796..1044026|+|231 bp|EGAD orf prediction| S.pneumoniae|R6|NC_003098.1|ORF|110
ttgagaatggcaatcaagtacccatcttcttcggcttccaattccatgctgactttatcagtcatgatttccaaaaggatttctccttcttttacaaattctccgacttttttattccattggacgatttgtccttctgtcatatccacgccggcttttggcataattacttctaaggccatgtcttccttcctttatctatatcttaaaaatgaatactcttgctcttaa

SEQ ID NO: 5092 - DNA, 358 bp, Streptococcus pneumoniae
  misc_feature (1)..(358): tiling:Spneumo1:WAN024CFT; Cluster includes WAN023MDG 3151 03_140||||67598..67831|-|234 bp|EGAD orf prediction|S.pneu moniae|R6|NC_003098.1|ORF|220
ttgagacatattcccaacattaagggtttcaagtggtacacctgcttctaccaaaccaaggaagcggtctggtttacgagccacgataaagagacgttggctatcgtatttrccascaagaatattggctgcagctttctcaactggcaaaatactcaatttcacacctggtggtgtcgcaagtttcaaaccactcttttcaatatcgttgttgacaacttcgtcgtctacaaccataatgcgtgaaacatttagttttccagcccaaagattggctacttgtccgtggatcaaacgtccatcaatacggcatcctacaattgtcataagttttccccctttatatgttttagtgtag

SEQ ID NO: 5093 - DNA, 336 bp, Streptococcus pneumoniae
  misc_feature (1)..(336): tiling:Spneumo1:WAN024DX6; Cluster includes WAN023KF6 3132 48_3563||||1910972..1911307|+|336 bp|EGAD orf prediction|S .pneumoniae|R6|NC_003098.1|ORF|110
ttgagaccatcgcgagctcgaagctcttttagacgattttttagttgcaygttacacacctactctccgtcaaattcaacggtttggatatcytcaatacgttgcaacttgaatttttcttttcccgtattatctacacgtcgtagctttacccattcctcatcaacatccacaacttcccagttatctggcccaatatacactcccgttataattggttyctttccaatcatttcttgyaataatctcgacatttctgcgtttcctttctcttttcgctcaagtyttttgattttattctctagtttcttgatttttttagaattattagaataa

SEQ ID NO: 5094 - DNA, 315 bp, Streptococcus pneumoniae
  misc_feature (1)..(315): tiling:Spneumo1:WAN024C4N; Cluster includes WAN023M4D 3154 02_637b||||333295..333609|+|315 bp|EGAD orf prediction|S.p neumoniae|R6|NC_003098.1|ORF|110
ttgagaggtcttgatgtggttttcaatttcctcgtctgtatagttagaggttcctgttttaccagcctgagggagccaagcaagataggcatttcgtccagttccataastcaagactgttttcatcatgtcggtcatcatataggctgtcgtttcyttcatggcacgagttccgacattagagaactctttttcactcccatcactaaagacgactttatggatatacattggtttatagtaagttccaccatttgcaaaggcagcgtaagcagcagccatcttttcactacttgctccatattttttgtctga

SEQ ID NO: 5095 - DNA, 261 bp, Streptococcus pneumoniae
  misc_feature (1)..(261): tiling:Spneumo1:WAN024CP7; Cluster includes WAN023LFR 3148 66_1953b||||1055774..1056016|+|243 bp|EGAD orf prediction| S.pneumoniae|R6|NC_003098.1|ORF|320
ttgagagtaagggatgaagtgrtaatgrtctccgtgyggyacwgcaacaccwytrgckgttcgacttgtgatttgygctggrtcraarayaaggccatcagattctacatgkcgttgactcaaaggcagtttgtagagctgtttcaagagactatcaatgtcattactttgacttgcttgactgttagtgttgctgttgttgcttgtgttagtatttgtagttcctggattgcttacagaaggtacccagtttgttcttga

SEQ ID NO: 5096 - DNA, 271 bp, Streptococcus pneumoniae
  misc_feature (1)..(271): tiling:Spneumo1:WAN024G7X; Cluster includes WAN023LKE 3153 44_1708b||||908609..908854|+|246 bp|EGAD orf prediction|S. pneumoniae|R6|NC_003098.1|ORF|110
ttgagagtgtggctggcaaccttgttcaagtcttttcctttaaaaatcttttgcgcaatagcaaaactgtctgttccgctcaggcggacaataccaatagccccttcacctagtggagtagagatagcagcgatggtatcaaattcacgtgtaatcataatgtttcctttaattaatwgctcttttcttggaawttctccaagtytcttttcaaattgtaacaaatttagrmtatttcttcaatgrrtgctacttggagattgaaaaagcc

SEQ ID NO: 5097 - DNA, 1119 bp, Streptococcus pneumoniae
  misc_feature (1)..(1119): tiling:Spneumo1:WAN024B7M; Cluster includes WAN0240P7 |tas A||CAA59773.1|||1080 bp||S.pneumoniae||X85787|ORF|000
ttgagatattacgggaaaaaattaaacgaaagattggttatgaaaatatattataaattattattaaagagattaatatttccccccttttatttagtggtaaccaataaatattggttaccactaaataaaagaaaagttgtatttgataactttggtggtagaggatatggagacaatccaaagtatattgctgatgaactattaaaacaagatgagaatcttgatttagtttgggtagtggaaaatatgagtacttttgttccaaaaggagttagaaaagtatggtatggaagttggggagctttttttgaatggagcaccgcaaaggtatggattgacaacattagaaattcagatcgtccttggaaaaggaaaaatcaagtttatttgcaaacatggcatggttctgatggagttaaaataatcgaaaaagatgcagagtcaacactttcaaaatcatatatcaggatggctaaatacgatggtagcatctctgatgcaatcatttctagttgccaactgcaaacacaaacagaacagtttaaaaaatcattttggttggctgataatgttgaaatcttggagtatggtttaccaagaaatgatgatttttttcaaaaaaagaaagttgaccatataaaccatacagtcagatctaagtataatatctccctagatgaattggtaattttgtatatgcctacttttagggatgatgcttcaacgaaggcgtataatcttgattacgataaggtaataaattcatttcaagatttttataacagaaaagttaaagtattgattcgttttcatccaaatgtagataatacattttttaataatactgataaaagattaattaatgtgacagattatcctaatccgcaggatttaatgtttgtggctgatattatgatttcagactattcgtcagcacccatagattttttgttattaaatcgagtagtctttctgtatctaccagattttaaagaatatcagagcgataaaaatccgttttttgaagttttcaaagtttcgaaaaccaaaggcattgcgcttgatccgtttgatgagattattggtcgcttccagtttggcgttagaatagtgtag

SEQ ID NO: 5098 - DNA, 225 bp, Streptococcus pneumoniae
  misc_feature (1)..(225): tiling:Spneumo1:WAN024FK4; Cluster includes WAN023L10 3132 64_2580||||1374073..1374297|+|225 bp|EGAD orf prediction|S .pneumoniae|R6|NC_003098.1|ORF|110
ttgagatcacgaatctctggaacaacaccaaaaatgccacgtccagaggcgattcctgttaaaattcctttttcacgcaactgtttaaaaacagtgggaattgtagttggaataaaccctgtctttgaattccgcaatgtatcatcaatatcaaaaaagacaatcttgatcttctttgccttgtatcttaatttcgcgtccatctcactacctctttcaatctaa

SEQ ID NO: 5099 - DNA, 270 bp, Streptococcus pneumoniae
  misc_feature (1)..(270): tiling:Spneumo1:WAN024CDU; Cluster includes WAN0244R6 spr0 080||15902124|NP_357674.1|87044..87313|+|270 bp|Hypothetic al protein|S.pneumoniae|R6|NC_003098.1|ORF|111
ttgagatcattgacaggtgtatcgaatcctaccacagattcagcacstctggttttggcagaggctaakaaagcttttgcagatgatagtttgacagagcaaggtttacgtgatatcttgcaaacagtcaaagatgccattgcttccctagagtccattaaggaaagccagtcagcaactaaggatggaggacaaacagcgggcaaagaaacagcaggagaagatgagtctgcaaatcaaactcaagaaattagccaaggaattaagtaa

SEQ ID NO: 5100 - DNA, 225 bp, Streptococcus pneumoniae
  misc_feature (1)..(225): tiling:Spneumo1:WAN024D7A; Cluster includes WAN023M3Y 3134 12_662||||347682..347906|-|225 bp|EGAD orf prediction|S.pn eumoniae|R6|NC_003098.1|ORF|110
ttgagattagcctgcatttttcttagagaaagctcttcgatccctcgccaaaacagggctaagagacaggtyatggacatgctgaaaaccaacaataaaaagacaaatttttctgttttttcgacatcgtgcaaaaagatagaccagtcaaaatcaagtatttccagcaagctgtgggagaaaaaaaagacaaayaggaaggaggtgagagcaataatgacatag

SEQ ID NO: 5101 - DNA, 285 bp, Streptococcus pneumoniae
  misc_feature (1)..(285): tiling:Spneumo1:WAN024FQP; Cluster includes WAN023L4P 3155 45_2418||||1293173..1293457|+|285 bp|EGAD orf prediction|S .pneumoniae|R6|NC_003098.1|ORF|110
ttgagcaaggaatttcacatctttgagcttgcttgcttcgtcatcgaatacatagacaaactcgttaccratgattttacgtttttgttcaggrtcagaaacgccagcaagtttgtcaaggaaacgtttagcagcgtctgctttgacgatattcaaaccaaacttaccaccgagcatgtccataacttgatcagcttcgcctttacgaagaagaccgtggtctacgaagatacagatcaattgatcgccaatcgctttttggagaagaaccccaacgacagatga

SEQ ID NO: 5102 - DNA, 279 bp, Streptococcus pneumoniae
  misc_feature (1)..(279): tiling:Spneumo1:WAN024GJT; Cluster includes WAN023LZN 3131 49_881b||||466418..466696|+|279 bp|EGAD orf prediction|S.p neumoniae|R6|NC_003098.1|ORF|110
ttgagcaagtttgtcaaagtctggttcgtgggcgataaaatcaatcttgaggtcatcgtcagcactgtagcgaggcacaaggtgaacgtgagtatgaaaaactgtttgaccagcgacttcttcacagttggaaatgatattcataccagcagccttagtgactttcatgactttttgagctacttttggtacttgggcaaagagttggctggcgctcgtagcatccatctccaaaagattgcgatagtgttcttttggcacgaccaaggtgtgtcctag

SEQ ID NO: 5103 - DNA, 108 bp, Streptococcus pneumoniae
  misc_feature (1)..(108): tiling:Spneumo1:WAN024DR6; Cluster includes WAN0242Y6 SP04 07||15900326|NP_344930.1|387450..387551|-|102 bp|hypotheti cal protein|S.pneumoniae|TIGR4|NC_003028.1|ORF|120
ttgagcagttgcctgccttgccccttcggtgcctttacggtctctccagagttccgtccatttacagtcatggaaaatcaaacgattccccacttctatctaactaat

SEQ ID NO: 5104 - DNA, 231 bp, Streptococcus pneumoniae
  misc_feature (1)..(231): tiling:Spneumo1:WAN024FK8; Cluster includes WAN023L15 3154 61_2575||||1371563..1371793|+|231 bp|EGAD orf prediction|S .pneumoniae|R6|NC_003098.1|ORF|110
ttgagcatagataagtttgactggcaagcgtgctcgtgtatatttggctcccttcccactattgtggatagcgaggcgtcttctcatatcagtcgtatagcctatatagtaggatccatcacgacactccagaacgtacatataagccttatgatccataataaatctcttcgatttcgggcgtataagagccatcatcattgtggacaatcaaaggaggtaagaccttaa

SEQ ID NO: 5105 - DNA, 243 bp, Streptococcus pneumoniae
  misc_feature (1)..(243): tiling:Spneumo1:WAN024F28; Cluster includes WAN023LRH 3133 80_1306||||688971..689213|-|243 bp|EGAD orf prediction|S.p neumoniae|R6|NC_003098.1|ORF|110
ttgagccaaatcttcagcataagcctgatcaaactgctttccagcaggatcraggagaataacgcgcggatttttcttttcaatagcatcaaaggaatcgaaaataggttgtrctctgagcaacatgccctgaccgcctccgtagggctcatcatctacatgacgggccttttcagcattttctcgaaaattatgatactggatatccaagagccctttttctcgagcctttccaacgattga

SEQ ID NO: 5106 - DNA, 240 bp, Streptococcus pneumoniae
  misc_feature (1)..(240): tiling:Spneumo1:WAN024GNX; Cluster includes WAN023M3I 3128 75_697||||366037..366276|-|240 bp|EGAD orf prediction|S.pn eumoniae|R6|NC_003098.1|ORF|110
ttgagccaactggttgttaycggtatgctctggatgatgtgttttgcgacgatactcttttcaagaggattttgtataactgccatggggatggtcgccaagattgtcaaggccatttgcaagacaaataaggtcaccaacatggacaagatacctgctgaaacttggaacaacttaccacccagttttttgctaggaatcaagtgtaagagaagaccaagyaaacgaccaatgctatag

SEQ ID NO: 5107 - DNA, 282 bp, Streptococcus pneumoniae
  misc_feature (1)..(282): tiling:Spneumo1:WAN024CJV; Cluster includes WAN023KBZ 3130 13_3701b||||1998232..1998513|+|282 bp|EGAD orf prediction| S.pneumoniae|R6|NC_003098.1|ORF|110
ttgagccaagtcaaactatccatgagcacagccataagacaggcaatcaaaactcccaaaatcagccccagtaaagccactctcaaggtcgcccagctatggtgccagagaaattctctgtcacgaacaaagggctggagaatttcaagaggtgtcggcaggataaacttggggagaagtttaagaaaacctgctaactgccagattgacaatactccgagaaagcccaatagactaatgtgtcgtctcagtatacttytcaagtttctcatcaatacttaa

SEQ ID NO: 5108 - DNA, 240 bp, Streptococcus pneumoniae
  misc_feature (1)..(240): tiling:Spneumo1:WAN024ATO; Cluster includes WAN023M59 3136 18_590||||304165..304404|-|240 bp|EGAD orf prediction|S.pn eumoniae|R6|NC_003098.1|ORF|110
ttgagccacttagcaagggtctcagcagtctcctttgtccaaccatacatatctggaacctcctctgctttatcagataagataaggacttgctggttcggggcaagattcttcccttcttcagcagaactgtttttaatcttcgttcctgttcccacaacgatgggttgtacaagattgcgacgcaattcttctgctaaatcaccaggtgaaatatccttgacactrggcataggataa

SEQ ID NO: 5109 - DNA, 258 bp, Streptococcus pneumoniae
  misc_feature (1)..(258): tiling:Spneumo1:WAN024CWJ; Cluster includes WAN023M4G 3134 16_633||||331650..331907|-|258 bp|EGAD orf prediction|S.pn eumoniae|R6|NC_003098.1|ORF|110
ttgagcctgagcaggagctgtaagacttgcaaagtcatctgctaccaaagccgtyttcttctgaaccaaagcattcttcaargcttcaatcttggcaatctctgcacgcgcttcttccacactgatatcatcatcggcctgactgaggttaaagaccgcctctttcaaagcatccatagactctttggtgtagttagtcatggcaaccgttggcaagtagttcttcagagcattttctgtcaacatcttacctgttag

SEQ ID NO: 5110 - DNA, 307 bp, Streptococcus pneumoniae
  misc_feature (1)..(307): tiling:Spneumo1:WAN024FBB; Cluster includes WAN023KOU 3130 40_3128||||1665433..1665738|+|306 bp|EGAD orf prediction|S .pneumoniae|R6|NC_003098.1|ORF|110
ttgagccttgatttcttcccagacraccgcagtcgcagtgttacaagcaatgacaatcattttgacatccttggtcaagagaaagttgaccagctgccaagtatattcacgaatttgctcagcaggacgggggccatagggcgcccgcgccgaatctccaatatagacgatttcttcatggggaagctggcgcatgagctcgcgcacaacggtcaagcccccgacacccgaatccaaaaaaccaattggtcgattatccatacagtcttctttctagtctttttttctgattgatcgttcattatga

SEQ ID NO: 5111 - DNA, 529 bp, Streptococcus pneumoniae
  misc_feature (1)..(529): tiling:Spneumo1:WAN024FJS; Cluster includes WAN01UC3F |||| ||471 bp|Incyte orf contig SPN2C0488 12477-12947|S.pneumon iae|23F|WAN01UC3F|ORF|001
ttgagccttgccctttttaacaacaggaaaaggagtaaagacatgacagatattcagattgaactaaaacgtacaggatttccagtaaaaatcggagaagtagagctatggtttgatacaagtcaagagagcttaatgtgcttttatgacatggaagaagaactaaaacgtcgccttgtccaatatgaattagatgtggtatctgcaaatatcaataacaaaattgagcgtgatggagtaactaaagaagtagttgctggggctattgaattggagaagaaacagcttgagattcaatatgatcttatttttggcgacggtacatttgacaagttatattctatatatccagattataacgccctaaataacgctctagaacagaccgcaatcatgttgcatgacaagttggaagamgttgctgagcaacacaaaacggtggtgaaagagcgtgctagtcactatttaaacaagggraaagtcactccaattcaagaacaacaagaaacaaaaaaagaacaaaaagaaa

SEQ ID NO: 5112 - DNA, 444 bp, Streptococcus pneumoniae
  misc_feature (1)..(444): tiling:Spneumo1:WAN024CPH; Cluster includes WAN023M9E 3150 94_352||||186545..186826|-|282 bp|EGAD orf prediction|S.pn eumoniae|R6|NC_003098.1|ORF|110
ttgagcgtctgccctttcttcaaaatcgctgataaattctcggtaagaagaaactatatcgtaacctgtcacatccctttcgtccaaagccccctgatagtcaaagccggtcaccttgagttccacctgaggcaatttttcagtcagataacccaacatcccttgataatccttacgtttcaaggatccaaagaggatttgaggtcgatagccttcctgctctttttctttgataaactcarccaagcgagtcaaggcagggaggttatgagcaccatccaartaaatctgtgggcgaatacgctccaagcgaccagcccaatgggtctgttccaaggcctttcttacagcctgttcatcaacagcttcctttcyttctcycataaaaagaagaaaagtttgcaacgccaaggctgcattctcctgctgatagactccttctaa

SEQ ID NO: 5113 - DNA, 267 bp, Streptococcus pneumoniae
  misc_feature (1)..(267): tiling:Spneumo1:WAN024EZA; Cluster includes WAN023LL2 3133 17_1661||||880678..880944|-|267 bp|EGAD orf prediction|S.p neumoniae|R6|NC_003098.1|ORF|110
ttgagcgttattggtattgatatttttcaaagcctcaaacaaacgctcgttgtcaaagacgtatgttccagtgttgatttccttgatttgcttttcaaaatctgtagcatccttctgctcaacaatacgaagaacctcagcattgtcattacgaacaattcgtccatarccaaaaggattatccgtttcagcagtcaagatagtggccacatttttatgattgatatggaaatcaatcaagtttttcaagctttcaccagtgattaa

SEQ ID NO: 5114 - DNA, 397 bp, Streptococcus pneumoniae
  misc_feature (1)..(397): tiling:Spneumo1:WAN024D7Q; Cluster includes WAN023KBO 3153 28_3723||||2011511..2011894|+|384 bp|EGAD orf prediction|S .pneumoniae|R6|NC_003098.1|ORF|110
ttgagcgttttttgcaacgaagtcagtttcagcgtttacttcaataactgctgcaacattaccgttaacataaacaccagtcaaaccttctgcagcaacacggtcagctttcttagctgccttagccatacctttttcacgaagcaattcaatcgctttttcgatgtcaccgtctgtttctacaagcgcttttttagcgtccataacaccggcaccagatttttcacgcaactcttttacaagtttagctgtaatttctgccattttaattctcctatattttttgaaaataggagagccgggctaagccccgccctcctaggtaattactatttgtataaattaagcgttgtcrccttctacaacttcaacgatttcttcaattgaatctgcttga

SEQ ID NO: 5115 - DNA, 258 bp, Streptococcus pneumoniae
  misc_feature (1)..(258): tiling:Spneumo1:WAN024CU9; Cluster includes WAN023MCW 3151 01_163||||75677..75934|-|258 bp|EGAD orf prediction|S.pneu moniae|R6|NC_003098.1|ORF|110
ttgagctactgccgcaagagcagaacactccatctccacaacagcacagccttcttccttacgataagccaccttttcagccgtttctcggtaaaaaccgtctgtcgtccaggtcatgacttcttcataaggaatccctctgtcttccaaaacttcctcaatagcagcaatagcctctggctgcatttccatataacgacaaggtgccacatagtggtaactggctccytcatctcgcaragcgcgaacagggactag

SEQ ID NO: 5116 - DNA, 308 bp, Streptococcus pneumoniae
  misc_feature (1)..(308): tiling:Spneumo1:WAN024EUV; Cluster includes WAN023PMG pne2 7_15||||13581..13694|-|114 bp|Type 14 capsule operon, Glim mer 2.02 orf prediction|S.pneumoniae||WAN01UCIR|ORF|010
ttgagctattcagaagacttgaaacaccactataatctctatcaactcttgctttttcactttcagaataaggagcctgacaaatttttcggactcattgaggacaatctgaatcaagttcatcctctaaaaccttcctcaaagataaagagaagattgtcaatgcccttcaactacactattctaatgccaaactggaagcgaccaataatctcatcaaackkatcaagcgcaatgcctttggttttcgaaactttgaaaacttcaaaaaacggatttttatcgctctgatattctttaaaatctgg

SEQ ID NO: 5117 - DNA, 357 bp, Streptococcus pneumoniae
  misc_feature (1)..(357): tiling:Spneumo1:WAN024DZR; Cluster includes WAN023KIC 3157 52_3430b||||1838640..1838996|+|357 bp|EGAD orf prediction| S.pneumoniae|R6|NC_003098.1|ORF|110
ttgagctgtctgcaaagctgtggcaatcgtatctgcatacaattttgctcctgcttcgatagtgctactctcactcccgaaatgaacctggtctgttccagcccaaatttctggatgctctttcgcaacttgattccaatctgctatcgtaatgtaaggtgtcttctctgccaattctctcatataggcagcagccttctcaacgatggcataggtctcttttgtcttatctccctcataaggagtcaccaaaatcatatggtgtcccttaggaagatttttcacgatactgtcccagtcatccttgtaattctcaggattatttaccccagtcgcaatgaccaccgtcttaggtaa

SEQ ID NO: 5118 - DNA, 252 bp, Streptococcus pneumoniae
  misc_feature (1)..(252): tiling:Spneumo1:WAN024CQ7; Cluster includes WAN023MF7 3134 43_72||||38319..38570|-|252 bp|EGAD orf prediction|S.pneum oniae|R6|NC_003098.1|ORF|110
ttgagctgttttttcaaaccwctgaggctgtccttgagaaggagggcacctagtttcgctcgaagrccaccacctgtaatagctgtcttgagcaagcccatgattcccatagctgtcccttcgatggatttgagcacagcgtttcccgtgaaaccatctgccacaacaacatctgcaacgccattcatcaaatcacgcgcttccacgtttccgataaagttcaaactttcatcagccgccagtaattcataa

SEQ ID NO: 5119 - DNA, 270 bp, Streptococcus pneumoniae
  misc_feature (1)..(270): tiling:Spneumo1:WAN024D3T; Cluster includes WAN023MDN 3156 51_134||||62616..62885|+|270 bp|EGAD orf prediction|S.pneu moniae|R6|NC_003098.1|ORF|110
ttgagcttcaggcgtgagggtcaagttgttgacagtttcttgaagtttagcaatggcttgatcaatcgtatcttgttgggcacggctaaggttgctatcgagagagcgaatagctttttcagcttcttttacggccgygacgctttctgcagtataacggttcaggtcttttggtacctcgttaagtgcttgctctgcagattcataatcagctgcgaagtattcagcgttggcatttgcaaaatgacgcatgagtttgaagaggygtga

SEQ ID NO: 5120 - DNA, 565 bp, Streptococcus pneumoniae
  misc_feature (1)..(565): tiling:Spneumo1:WAN024CCQ; Cluster includes WAN023MC0 3156 52_208b||||101844..102377|+|534 bp|EGAD orf prediction|S.p neumoniae|R6|NC_003098.1|ORF|240
ttgagcttcatagatgccttttgccttatagtaagaacgatatatctgcacggcttcagaaatttggtctttggacaggcaggtcgcaaaactactttcgagaggtggtcccataaaaccacgaatagttttggcatcagggctaggcacccccagctctttaaaggtataggtaaaggcattgtgaatcccgatagaactatcaacgagggttccatccaaatcgaaaaaaatcgctgtgatagaggtcatggtttctcctatttgataagcttattctccgaaaatttctttttggaggcgacgaccagtaggggtggtagcgagtccaccttcagctgtttcacgaaaggcagttggcatgcttgctcctacttggtacatggcatcgatcacttcatccacagggattttagattcgatacctgccaaggccatgtctgctgcgatgaaagcaaagctagctcccatggcattacgtttgacacagggaacttcgaccaaacctgcaacagggtcacagatgaggcctagcatatttttaatgacaaaggcaatagcttga

SEQ ID NO: 5121 - DNA, 297 bp, Streptococcus pneumoniae
  misc_feature (1)..(297): tiling:Spneumo1:WAN024F4Q; Cluster includes WAN023M71 3134 23_487||||249216..249512|-|297 bp|EGAD orf prediction|S.pn eumoniae|R6|NC_003098.1|ORF|110
ttgagcttggtcaaggtattcagctgggatgtcttcttcaaggatatccgtaccaaggtcgttagtatagatttcagctttcatcttgatcaagtcaatgataccacggaagtcatcttcagaaccgattggcaattggattgggtgtgcatttgcttgaagacgatcgtgaagtgtgcttacagagtaaaggaagtcagcaccgattttgtccattttgttggcaaatacgatacgtggaactccgtactcagttgcttgacgccaaactgtttcagtttgaggctcaacacctga

SEQ ID NO: 5122 - DNA, 243 bp, Streptococcus pneumoniae
  misc_feature (1)..(243): tiling:Spneumo1:WAN024FFG; Cluster includes WAN023KU8 3154 78_2875||||1535516..1535758|+|243 bp|EGAD orf prediction|S .pneumoniae|R6|NC_003098.1|ORF|110
ttgagcttggttcagcttgaccaaactgttctgctagrcgctgactccagcttgtggtcgcacgcgccccagcatagtcagcctgaacacggtcataagcttggattgcctcagttgactgttcttggtattcttcctcaaagacwacattmtctagtggcagtctyggtttcayatcatgakkttgatttggmacaccyagtgccatcccaaagacagrataggtgtagtcaggyaggttaa

SEQ ID NO: 5123 - DNA, 345 bp, Streptococcus pneumoniae
  misc_feature (1)..(345): tiling:Spneumo1:WAN024FID; Cluster includes WAN023KYI 3139 72_2683a||||1429415..1429648|-|234 bp|EGAD orf prediction| S.pneumoniae|R6|NC_003098.1|ORF|220
ttgaggaaagtgaagtataaaccattagttcatctcctttctaacaatctgacgactagccagcagttcacgaaattccagcatggcagtataagttgccagaatataggcatgcttgcagtcttgattctcaatggtcttgagaacttgctccagattactcgtttcagtgattttctcagctggatagccagtcactcggaggcgacgagcgatttcagaatgacgaacaccgccagcgttgatttcaggaatgtccatgtcagtgatttgttcaaagtctgcatcccagatccagctagtgtcaattccatctgcatagttggcattaaggaggacagatag

SEQ ID NO: 5124 - DNA, 344 bp, Streptococcus pneumoniae
  misc_feature (1)..(344): tiling:Spneumo1:WAN024F7P; Cluster includes WAN023IQP 8580 8_2668||||1515627..1515851|-|225 bp|EGAD orf prediction|S. pneumoniae|TIGR4|WAN01UC25|ORF|010
ttgaggagcggaaggtataaattaagtttgctgctgtataatggatttatcactaatactcttcgaaaatctcttcaaaccacgtcagcttcgccttgccgtagatatagttatcgacttcgtcagttctatccacaacctcaaaacagtgttttgagyygacttcgtcagttttatctgcaacctcaaagctgtactttgagcagyctacgrctagcttcctagtttgctctttgmttttcattgagtataaaagtgctccaggcyatattttacacagcaatagtcttctaaaaatggacaraaawcattgtaaaggctatcaaaaaggagtactaactaat

SEQ ID NO: 5125 - DNA, 342 bp, Streptococcus pneumoniae
  misc_feature (1)..(342): tiling:Spneumo1:WAN024CG5; Cluster includes WAN023S1F cont ig_1623_1||||110..436|+|327 bp|Glimmer 2.02 orf prediction |S.pneumoniae|670|WAN01UDAF|ORF|001
ttgaggagttggaagatgatggaagagttaaagcaaaaagttaatgaagtatacaactggacggtagaagacggraagccgcaacctcccaagcaagatttaccacaagyrgtgaaagamcgggyggactatytwwskrawatggcagaagatggtatgacgtttatgggagcgatggaatgcatcttcgctgatgaaaagcctacmgactatgatttgggagctactaaggrttggttgccaaaatctaaggagtttgatgattggrttggctatkcgccaagcatgkctcagktagttattgcagtttatttgatttayagaggaarcgaagatgaaact

SEQ ID NO: 5126 - DNA, 866 bp, Streptococcus pneumoniae
  misc_feature (1)..(866): tiling:Spneumo1:WAN024GG3; Cluster includes WAN0244DW spr0 558||15902602|NP_358152.1|559541..560401|+|861 bp|Conserve d hypothetical protein|S.pneumoniae|R6|NC_003098.1|ORF|111
ttgaggatattatccgtcgcttctaccgaaaggagctctaggatgatcaaattgtggagacgttataaaccctttatcaatgcaggggttcaggagttgattacttaccgagtcaactttattctctatcggattggcgatgtcatgggggcttttgtggccttttatctctggaaggctgtctttgattcttcgcaagagtctttgattcagggcttyagtatggcggatatcaccctctacatcatcatgagttttgtgaccaatcttctgactagatccgattcgtcctttatgattsgggaggaggtcaaggatggctccattatcatgcgtttgttgcgaccagtgcattttgcggcctcctatcttttcaccgagcttggttccaagtggttgatttttatcagcgttggccttccatttttaagtgtcattgtcttgatgaaaatcatatcgggtcaaggtattgtagaggtgctaggattaactgtcmtttatctttttagcttaacgctcgcctatctgattaactttttctttaatatttgctttggattttcagcctttgtgtttaaaaatctttggggttccaacctacttaagacttccatagtggcttttatgtcggggagtttgattcccttggcattytttccaaaggttgtttcagatattctytcctttttgcctttttcrtccttgatttatactccagttatgatcattgttggaaaatacgatgccagtcagattcttcaggcactccttttgcagttcttctggctcttagtgatggtgggattgtctcagttratttggaaacgggtccagtcctttatcaccattcaaggaggttarctaat

SEQ ID NO: 5127 - DNA, 1261 bp, Streptococcus pneumoniae
  misc_feature (1)..(1261): tiling:Spneumo1:WAN024CCE; Cluster includes WAN0244QK spr0 102|argG|15902146|NP_357696.1|109269..110516|+|1248 bp|Arg ininosuccinate synthase|S.pneumoniae|R6|NC_003098.1|ORF|40 0
ttgaggatgcctttaaagcgtccattgaaaaatagaaagaaggaaaagaacatgagtaaagaaaaagtaattttggcctattctggcggtttagacacatcagttgctattacctggctgaagaaagactatgatgttgttgcagtttgtatggatgtgggtgaagggaaagacttagatttcatccatgataaggctcttaaggttggggcagtcgaatcttatgtcattgatgttaaggacgaatttgctacagattatgtgctagtggctcatcagtcacatgcctattatgaacaaaagtatcccttggtatctgccttgagccgccctctgatttctaaaaaattggttgaaatagcgcatcagataggagcgactacaattgctcatggttgtaccggtaaggggaatgaccaagtacgttttgaagtatcgattgcagccttggatctcaatttaaaagtgattgctccagttcgtgaatggaaatggtctcgggaggaagaaatttattatgccaaggaaaatggggtgcctgttcctgctgaccttgacaatccctactctgtcgaccaaaatctttggggacgtgccaatgagtgtggtattttggaaaatccatggaatcaggctccagaagaagcctttggcatcacaacttctccagagcaagctccagatatgccagaatacattgagattgagtttagtgaaggtgttccagtttccctcaatggagaagtgttaaaattggcagatttgattcaaaaactcaatgaaatagctggaaaacatggggttggacggattgaccacgtggaaaatcgcttggttgggattaaatcaagagaaatctatgagtgtccaggtgcagtgaccctgctgacagctcataaggaaattgaggacttgacgcttgtgagagaagtggctcattttaaaccaatcatagaaaatgaattatcaaatctcatttataatgctttgtggtttagttcggctacacaagccttgattgcttatattaaagagactcaaaaagttgtcaatgggactgcaaaagtcaaactgtataaggggagcgctcaggtcgtggctcggaaatcaccaagttctctttacgatgaaaatttggcgacgtatactagtgcagatacctttgaccaagatgcggctgttggctttattaagttatggggacttccaaccaaggttcattctgaggttcaaaaaagcgccaaataggacgattggatag

SEQ ID NO: 5128 - DNA, 567 bp, Streptococcus pneumoniae
  misc_feature (1)..(567): tiling:Spneumo1:WAN024GNZ; Cluster includes WAN0244J7 spr0 367||15902411|NP_357961.1|365759..366307|+|549 bp|Conserve d hypothetical protein|S.pneumoniae|R6|NC_003098.1|ORF|112
ttgaggattccttatgatttcattccttcttctattggtcttggtttggggattttatatcggctatcggagaggcctgctcttacaggtttattacctgatttcagccatggcatcggcttttatggctggccagttttataaggggcttggagagcaattccatttattgctcccttatgcaaattcgcaggaagrtcaggggactttctttttcccatcggatcaactctttcagctggataaggtcttttatgcaggyatcggctacttgcttgtatttgggattgtctatagcattggtcgtttrcttggtcttctcttacacttgattcctagcmaaaaactgggtggtaagttgttccaagtttcagcaggtatcttgtccatgttggtgaccttatttgtcttgcaaatggccttgacaatcttggcgaccatccccatggcagttatacaaaatcctcttgaaaagagtatcgtcgcaaaacacatcatccagagcataccgrtaacaaccagttggctcaaacaaatctgggtgacaaatttaatcggataactaat

SEQ ID NO: 5129 - DNA, 552 bp, Streptococcus pneumoniae
  misc_feature (1)..(552): tiling:Spneumo1:WAN024DZM; Cluster includes WAN023KI3 3132 46_3443||||1845245..1845628|+|384 bp|EGAD orf prediction|S .pneumoniae|R6|NC_003098.1|ORF|110
ttgagggcttgcttgtgtttcctgcttctcagctggagtcgtttcctgaggagttgcttcttcaactgggcgagttgtttcggtcgtttgctcctctgggacagaagtgcccgtagatggtgccacttcttcagaagcaatcactgtctttgtaacttctgcaattggttgagaaaggtctgcaacctgaacagtttgatcatcaacggtcacttgattagtggtcaaatctgctgtcgcagttgtcacttcttcactagagtctgcttgaggtgtttggatttcaacttctgttacttcttctgcttcattgacagtcgttgtcaaaacagtttctgggaaaatcaagtccatattagtgattttgttcagattcgcaagcactgtgacatctacacccaaggcttctgcaatggtgctcaaagtatcaccatactgtacggtataacttgttttgttgtccgttttagtcaaatcgttttggatttgctcaacactacgtgcagtccaaagaacttcttctgcttgagttgccaatactggggcaaatga

SEQ ID NO: 5130 - DNA, 274 bp, Streptococcus pneumoniae
  misc_feature (1)..(274): tiling:Spneumo1:WAN0249QN; Cluster includes WAN024EEW R6.I G_1193||||1154475..1154748|+|274 bp|Between spr1152 (licD2 ) (+ strand) and spr1153 (carB) (- strand)|S.pneumoniae|R6 |NC_003098.1|IG|110
ttgagggggattatacaaactactaagatagaggttattcaaaaacataattttagtagaaaatgaaatacatattcccacaataaaacgcatcatatcaaggtttttgaaaaaccttgatatgatgcgttttataattttaaagacttttttctatagtagattgaaataagatgcgaacaaatcaattagaaaattcaaattaatttmtagaaatattttagtattcctgtgtactgttctaaattcagtmtgctatatcttatttttctat

SEQ ID NO: 5131 - DNA, 426 bp, Streptococcus pneumoniae
  misc_feature (1)..(426): tiling:Spneumo1:WAN024CW9; Cluster includes WAN02401X |yor fC||CAB01926.1|||192 bp|OrfC|S.pneumoniae||Z79691|ORF|010
ttgagggtatttataggccagaaggagtggaataagatttccgaaaatcatcagataaaagaggaygataaagacttggttcccaatactatcggcctcacgccgtttgtattcgtcaaggggaccagaaataccgtatgtgcgtttgatcagtttttcagtgaaggtttcttttttcatgagtttgctccttttttaaaaatcttcctyccaaaagagactgttgaggtcagtttggaggctgcgggcgagattgagacagagttccarrgttggattgtacttgtcgttttcaatcatattgatrgtctgtctcgagacaccgatatccttggcgagytcgagctgggaaatrcccarttccttgcgaaattctttcacacgattcatctgktctcctttctgatttrtgtcgtatatatttga

SEQ ID NO: 5132 - DNA, 443 bp, Streptococcus pneumoniae
  misc_feature (1)..(443): tiling:Spneumo1:WAN024ETH; Cluster includes WAN023KLH 3157 44_3293||||1762773..1763012|+|240 bp|EGAD orf prediction|S .pneumoniae|R6|NC_003098.1|ORF|220
ttgagggtcttgacgaacttaccaagttcaatcaagtcatcatctctgtctgtcaatcctggaactagcacgtggcgaatccagacaggttttccaatatctgatagatactgggcacaagccaagatatttttattggtttggctagtgacaatcttgtgctgttcttcgttgatttccttgatatccaaaagaaccaagtcagtgacagccatgagtttgtcaaacttctcaaggtaacgyggtttattacggaaaggaagagcacaggtgtccaaggtacagtggattccttgttccttagccttggtgaagagagcaatcaggaaatcaatctgcaagagagcttctcctccactgactgtaatcccacccttatttccccagaaaccacggtagcgcaaggcctctgtcaagacatcatctaccgtccgttcacgtga

SEQ ID NO: 5133 - DNA, 255 bp, Streptococcus pneumoniae
  misc_feature (1)..(255): tiling:Spneumo1:WAN024G4H; Cluster includes WAN023LG6 3154 49_1936b||||1046920..1047276|+|357 bp|EGAD orf prediction| S.pneumoniae|R6|NC_003098.1|ORF|110
ttgaggtcaatccctttagcaatagcttgcccgtgtccacggtggtttgaggtaatcagatcatctggattgagagctaacatagcccccacgttagctgcctcttcaccaacagaaaagtgcgtcattcctggcactttccctttctttactaattgtgcaatttttaagtccatgcgacggatttcttccatcttacggaacatttctagcaaaagatttttatctaaagttgacatcttcttgcctttctaa

SEQ ID NO: 5134 - DNA, 231 bp, Streptococcus pneumoniae
  misc_feature (1)..(231): tiling:Spneumo1:WAN024GEW; Cluster includes WAN023LU8 3147 45_1145||||605188..605418|-|231 bp|EGAD orf prediction|S.p neumoniae|R6|NC_003098.1|ORF|110
ttgaggtccgtagatttccaaatctgtctgctcttcattggcctgaaaggcacggctagaaaggaaacctggcaaaccaaaaatgtggtctccatgcagatgggtaataaagattttgctgaccttacgtggtcgaattgtggtttccagaatgcgattttgcgtaccttctccacagtcaaagagccaaacttcgttaatctcatccaaaagtttcagggcgagacttga

SEQ ID NO: 5135 - DNA, 372 bp, Streptococcus pneumoniae
  misc_feature (1)..(372): tiling:Spneumo1:WAN024GNU; Cluster includes WAN023M3C 3134 10_702||||368136..368507|-|372 bp|EGAD orf prediction|S.pn eumoniae|R6|NC_003098.1|ORF|110
ttgaggtcctcgcccagaagttcgtttcacaacattgacctgtttcttcttgactgstttttcttgctgggcttgracaagatcaaactctttctcttccaaggtcatcttaatcaagccaacttgggcttcccagcgrccgtccttgagttgactggtcaaggtaccacgctgaccataactgagaaccacgatatcatctcccacctttggagctcgttttttcttggccttttgaaggaccttrtttttagacaagtccactttttcaggagccaattttttcaacttggccttggcttcaatgatttcgtggggcttgagttgggatttactgtggagatttttgagaatctggtcactttcacttag

SEQ ID NO: 5136 - DNA, 1470 bp, Streptococcus pneumoniae
  misc_feature (1)..(1470): tiling:Spneumo1:WAN024D4G; Cluster includes WAN0243JZ spr1 637|trpE|15903679|NP_359229.1|1609440..1610903|-|1464 bp|A nthranilate synthase component I|S.pneumoniae|R6|NC_003098 .1|ORF|211
ttgaggtggcaccgcgaatttcgtcctcacgcaagttattttgcgtggggatttttcatacagtcrcyacgractmgaaktagaactgaaagggaaatkacaatggaacgaatcattcatggagatgtcttatcaccaatcttggcttatatgcgcttaaaggggcaacayaaggttatyttagagagtattccgagagacaaggaaacrgctcgtttttctatcctagcctataatccwgtttttgagattaagtttgaaaatggrgttctytatcaaaatggtcaagygattgatcgggatcccttggatytcctttatgaagtgattcataagagycagcaccaytcagasctmccttttggtggkggagccattggttttgtkggttacgatatgatttcgctttatgaagaaattggtcaaatccctgaggatacaattgggacgccmgacatgcatttctttgtctatgagagctatatrgtctttgaccacaagaaggagaagatacatgtcatagaggatgcwytytatagtgagcgcagtcaagargycttggaaaaatccttgaaccaagtgcttgaggaattacgcattcctgctccaaatgaatttgaagayttggatytatcwccrytwgacttcaaaccgcatatcgctccacataagtttgagggaatggtagaaacagctcgtgacttgattcgtaaygghgatatgttccratgygtactcagccagcgyttytcagcagargttactggaaatccatttgacttctacagaaatctccgcgtrayyaatccwtcyaattacctytatttctatgattttggggattatcaaatcatcggagcyagtccagaaagtttggtttctgtcaaaaatggcatcgtgacaaccaatccgattgcagggacgcgaccaagaggggctacggatgaagaagacaaggccttggcgactgacctcctctctgatgagaaggaaacagcagarcatcgaatgttrgtagacytgggkcgtaaygatattggycgcatctctgaaacgwccagtgtccaagtcactaagtatatggaagtggagctcttccgytaygtyatgcatytgaccagcgtrgtcaaggggcgtttgcttscagaactcactgccatggatgccttgaaakcwacrcttccwgctggaaccgtttctggakcrccaaagattcgwgckatgagacgtatctatgaactggaaacrgaaaaacggggmgtataygcwggrgcaatcggctacttgtctgcgacgggtgatatggatttggccatygccatccgaaccatrattctcaaaaatcaaagagcctatgtgcaggctggggcagggattgtctacgactctatcgcccaaaacgaataccaagaaaccattaacaaagcaaaatctatgactagaattggagaactaagaccaykaactaat

SEQ ID NO: 5137 - DNA, 435 bp, Streptococcus pneumoniae
  misc_feature (1)..(435): tiling:Spneumo1:WAN024FZ5; Cluster includes WAN023LB9 3138 05_2137b||||1150539..1150949|+|411 bp|EGAD orf prediction| S.pneumoniae|R6|NC_003098.1|ORF|220
ttgaggtgtttgtccttgataaaggtgagcacgatttggaatatctgtaataaattgaccattggtactttcaacgatagtatcaaccgcttctaccactgtgtccactgcgtcatgattttgggcaagttggatattgtcctgaatcatgcgaagtgtaataaatggacgaacagaatcgtgggtaacaacgatatcctctggagtaagcggacgataagcatcaatggcttcaatgatgttcttaatacttgtattgcggtcagcaccaccctttgtaatgatgatacgttccttataaagaggaagatatttatctacaagatcttctgcatgagaaacccagtctccatgaacaccaactacaattttttcaatacttggctccaagacaaatttttcaattgtatgaatcaaaataggtcgatcacctag

SEQ ID NO: 5138 - DNA, 306 bp, Streptococcus pneumoniae
  misc_feature (1)..(306): tiling:Spneumo1:WAN024FKD; Cluster includes WAN023L1J 3156 47_2560b||||1366815..1367120|+|306 bp|EGAD orf prediction| S.pneumoniae|R6|NC_003098.1|ORF|110
ttgaggttattcatcccttggaaaaatcctcggataacactcatagacgggaaaatcaagactccccaagccaagctttgcatgattgggatcaagtctttgcccacgccagacaagtctgctagccaaggagcaaagacatacaagactaaagcaaaaaccaggcctagtcctgtcataaagcctaagaagctccgaatcagggcaaagctatgctcttcttctcgcatggtattatacttggcaacttgcttggccaccgcaactggaatccccgctgttgaaaccaacaagaaccaagcatag

SEQ ID NO: 5139 - DNA, 954 bp, Streptococcus pneumoniae
  misc_feature (1)..(954): tiling:Spneumo1:WAN024FXQ; Cluster includes WAN0243WR spr1 176||15903219|NP_358769.1|1175567..1176514|+|948 bp|Conser ved hypothetical protein|S.pneumoniae|R6|NC_003098.1|ORF|2 21
ttgaggttatttatggagatttgccaacaaattttagaaaaaattaaagaatacgacaccattatcattcatcgtcatatgaaaccagaccctgatgccttgggaagtcaggtgggattgaaagccttgctrgaacatcatttcccagaaaaaaccatcaaagccgtcggttttgatgaaccaactcttacttggatggctgagatggatcttgttgaagatagagcctaccaaggcgcacttgtcatcgtctgtgatacagctaatactgctcgtatcgatgrtaagcgctatagtcaaggtgattttctcattaagattgaccaccatccaaatgatgatgtatacggtgacctgtcttgggtcgatactagttcaagtagcgctagcgagatgattaccctatttgcccaaacaacccaactagccttggcagatcgcgatgctgagttgctctttgcaggaattgtcggtgatacaggtcgcttcctctacccttctaccactgcacggactcttcgcctggctgcttatttgagagaacataactttgactttgcggctctcactcgcaaaatggacactatgagctacaaaattgctaaactgcaaggctacatctacgaccatctggaagtggatgaaaatggtgctgctcgcgttatcctgagtcarraartcttgaaacaatacaatrtaaccgatgctgaaactgcrgccattgtmggtgcacctggacgcattgacagagtgagtctctggggaatttttgtcgaacaggctgatggccactaccgmgttcgcttacgcagtaaartccatcctatcaatgaaatygccaaggagcatgatggtggaggccaccctctagcaagtggtgctaattcctatagcctaraagaaaacgaaatcatctaccaaaagttaraaracttgcttaaaaacykaactaat

SEQ ID NO: 5140 - DNA, 867 bp, Streptococcus pneumoniae
  misc_feature (1)..(867): tiling:Spneumo1:WAN024GD8; Cluster includes WAN0244AT spr0 669||15902713|NP_358263.1|673606..674421|+|816 bp|Hypothet ical protein|S.pneumoniae|R6|NC_003098.1|ORF|232
ttgaggttggaagctgtattccaacctcttattttgggagaaaagaatgaaatttttaacactcaatactcayagttggatggagaaagaagcagaggaaaaattccagattttgctykaaswwattcttgaaaaggactatgatttgatttgtttycaagaaatyaatcaggagatgacctcgtcagaggtggaggttaatgacctttatcaagctttgccagcagctgagcctattcaccaagaycaytatgttagactcttggttgaaaagttrtywgagcaagggaaaaattactactggacctgggcytataaccatatcggctatraccgctaccaygaaggtgtggctatcttgtctaaaacacctattgaagccagagaaattttggtttcrgatgtggatgatccaacagactatcatactcgccgtgttgccctagctgaaactgtagtcgatggcaaggagctagcagttgccagtgttcatctctcttggtgggataaaggtttycaagaagaatgggcacgatttgaggytgtcttgaaaaaattgaacaagccacttttactagctggagatttyaacaayccrgcwggwcaggaaggttaccaagctattttagctagtccattaggcttacaagacgcatttgaagttgctcaagagaaaagtggtagctatactgttccgcctgaaattgatggctggaaagrgaacactgaaccccttcgaatcgattatgtctttactaccaaagagttagcggtggaaaatttacatgtcgtatttgatggtaacaagagtccacaagtgagtgatcactatggcttgaatgctatrttaaactggaaataactaat

SEQ ID NO: 5141 - DNA, 207 bp, Streptococcus pneumoniae
  misc_feature (1)..(207): tiling:Spneumo1:WAN0249ZN; Cluster includes WAN024ECB R6.I G_1387.1.1.1||||1328161..1328367|+|207 bp|Between spr1343 (tufA) (- strand) and spr1344 (glpF) (- strand)|S.pneumoni ae|R6|NC_003098.1|IG|110
ttgagtaaaagcctccaataaaatatattttatagatagacagtaggcaatacagtctaactttccttactattttatcaaatttcagctaaattgcaagtgttttacaacgtttttgtgaattattcttggtaaaaatttaactaattaatagaaagtactaaatagacttatccttcaaggagttttcagcattatccatccact

SEQ ID NO: 5142 - DNA, 102 bp, Streptococcus pneumoniae
  misc_feature (1)..(102): tiling:Spneumo1:WAN024FOW; Cluster includes WAN023PLW pne2 8_17||||13258..13332|+|75 bp|Type 15F capsule operon, Glim mer 2.02 orf prediction|S.pneumoniae||WAN01UCCC|ORF|000
ttgagtaagttacagctagagtttaggtttgattatatcagatatttagatgatttggaaaataataaaataagttgggaactatttttttattgttttgag

SEQ ID NO: 5143 - DNA, 1410 bp, Streptococcus pneumoniae
  misc_feature (1)..(1410): tiling:Spneumo1:WAN024C54; Cluster includes WAN0244KL spr0 317|cps2J|15902361|NP_357911.1|316869..318278|+|1410 bp|Th e type 2 capsule locus of Streptococcus pneumoniae|S.pneum oniae|R6|NC_003098.1|ORF|100
ttgagtagaagatataattacttactaaaaaatattggattactaactttaagcaactttggttctaaaattttagtctttttaatggttccgttatatacaagcgtactatctacatctgattatggaacatatgatttatttaatacgacaatctcattgctaattccaattatttcaattaatatttctgaaggggttcttcgatttgcattagatgaaaaaaatgacagtagtatagtatattcaattggctggaatattataataaaaggtttcttagttgtagtattaggaattattttcaataatatctttaatatattcccattacttaaagaaaattccataacttttttattactttatttatcaactattgtttatcaatttctttcttcatttattagaggtatagataaagtttctatattatcaattgctgctattctcaatacaatttctatattggggtttaacattctatttcttataattatacctctaggtttggttggatatttttggtctaatatattgggtttggtgctacctagtttatacttgatatataagatatctcaatataacattaagtacactagccttcagaataaaaagttacagcaaagacttgttagttacagtattcccttaatcttaaattcattaggttggtggattaataatgcaatagatagatacgtagttattgcattttgtggtgtagcggtgaatggcatctattcagttggttataaaatcccatcaattttaaatatttttgcaaatatatttaaccaagcgtggatattatcatctgtaaagtcttatcgtgatgaagatagtgaatatttcttttctcaagtttataataagtataacatgattatggtattaatttccgggctactaatttcttgtagtaaaatacttgctaagtttctatatatgaatgaattttatgatgcttggaagtttgttccgtttttactaattgcaaatgtttttggagctatttcaggatttgctggtggaattttttccgcggttaaagattcaaaaatatatagtcagtcaaccttagtaggagcgatagtgaatattattttcacatttgtttttgtatattattatggagctataggtgctgctattgccactatgatatcttactttgttgtttggataatacgtgttcatacaatgagaaaatatataaagttaaaaatttttattagaagagatgtattttcctatgtattgcttatttttcagtcaatagtcttatggttggaaaatagttatattctttatcctatacaagttgtgttattcttattattagttatgttattttataaagaaataaagagtattattggtgaattaaaaaagtttctaacataa

SEQ ID NO: 5144 - DNA, 396 bp, Streptococcus pneumoniae
  misc_feature (1)..(396): tiling:Spneumo1:WAN024GMZ; Cluster includes WAN023M26 3142 71_764a||||396083..396361|-|279 bp|EGAD orf prediction|S.p neumoniae|R6|NC_003098.1|ORF|220
ttgagtagcttctttctcaacctgtgcttcgtgttggttacgcatattgtcaacttttaccttgaccaagctaccatatttgagaccttcttgcataacaagtcctggatcttctgtatgaacatggactttgacaatttcatcatcgttaacaacraggagagaatcyccaagctcatccaagtagttacggaattcatcgtagtcaaaatctttagcataggttggaccttgcttaagagctaccatgatttcagtacagtaaccaaacgtgatgtcctcagtcgctacgtgaccagctacagacttatgatgctctacattgatcatctcactcatgttggcaggagtcgctacaaagtcctcagatgcaatatattcgccagtaagggctga

SEQ ID NO: 5145 - DNA, 278 bp, Streptococcus pneumoniae
  misc_feature (1)..(278): tiling:Spneumo1:WAN024EU2; Cluster includes WAN0244JR spr0 347|alkD-truncation|15902391|NP_357941.1|349807..350079|+| 273 bp|DNA alkylation repair enzyme, truncation|S.pneumoni ae|R6|NC_003098.1|ORF|111
ttgagtataaaatggagcctatyagataatatctggctgagacgtgtcgctattraccaccagttgttaaraaaagagaagaccaatactcaattaatggaaaarattctmcttcataacttgaaccaaacagaattttttatcaataaagccattggctggaytctgcgagmctactccaaaacgaayccmacttgggtarcatgctttattgakraaaayaaggaaagaatggctgaacttagtatcaaagaagcaagcamkwacctctarctaat

SEQ ID NO: 5146 - DNA, 96 bp, Streptococcus pneumoniae
  misc_feature (1)..(96): tiling:Spneumo1:WAN0249GS; Cluster includes WAN024E4S-rc R 6.IG_2122.2.1.2||||1895536..1895622|-|87 bp|Between spr191 5 (+ strand) and spr1916 (malP) (- strand)|S.pneumoniae|R6 |NC_003098.1|IG-rc|110
ttgagtataagatacaaatttatactaatacattttgtaaaaaagcgagtttcgattgaaattcgcttttttaaatgmtgtrgatttgggtcaatc

SEQ ID NO: 5147 - DNA, 159 bp, Streptococcus pneumoniae
  misc_feature (1)..(159): tiling:Spneumo1:WAN024DNV; Cluster includes WAN023SIN NC_0 03098.1_1929||||1501013..1501162|-|150 bp|Glimmer 2.02 orf prediction|S.pneumoniae|R6|NC_003098.1|ORF|111
ttgagtataggaaaatcaatctatcaagatacagaagtatattttatagatttagagaatatagaggttataagtgtctacaaaatggagggtatgcagttactttatgaastwwygtmakacacttatmaacttaagaatggttttagtctaactaat

SEQ ID NO: 5148 - DNA, 2186 bp, Streptococcus pneumoniae
  misc_feature (1)..(2186): tiling:Spneumo1:WAN024CHR; Cluster includes WAN0244S7 spr0 043|comA|15902087|NP_357637.1|41902..44055|+|2154 bp|Trans port ATP-binding protein ComA|S.pneumoniae|R6|NC_003098.1| ORF|111
ttgagtattagggaaaaggagatgaatatgaaatttgggaaacgtcaytatcgtccgcargtggatcagatggactgcggtgtagcttcattagccatgrtttttggctactatggtagttattattttttggctcacttgcgagaattggctaagacgaccatggatggracgacggctttgggcttggtyaaggtggcagaggagattggttttgagacgcgagccattaaggcrgatatgacgctttttgacttgccggatttracttttccttttgttgcccatgtgcttaaggaagggaaattgctccactactatgtggtgactgggcaggataaggatagcattcatattgccgatccagatcccggggtgaagttgacyaaactgccacgtgakcgttttgmggaagaatggacaggagtgactctttttatggcacctagtccagactayaagcctyataaggaacaaaaaaatggtctgytctcttttatccctatattagtgaagcagcgtggyttgattgcyaatatcgttttggcaacactcttggtaaycgkgattaacattgtgggttcttattatctgcagtctatcattgatacctatgtgccagatcagatgcgttcgacactagggattatttctattgggctagtcatcgtctacatcytccagcaaatcttgtcttacgctcaggagtatctcttgcttgttttggggcaacgcttgtcgattgacgtgattttgtcctatatcaagcatgtttttcacctccctatgtccttyttygcgacacgcaggacaggggaratygtgtctcgtttyacrgatgctaacagtatyatcgatgcgctggcttcgaccatyctttcgattttcctagatgtgtcaacrgttgtcattatttcccttgttytattttcacaaaataccaatctctttttcatgactttattggcgcttcctatctacacagtgattatctttgcctttatgaagccgtttgaaaagatgaatcgggayaccatggaagccaatgcggttctgtcttcttctatcattgaggacatcaacggtattgagactatcaagtccttgaccagtgaaagtcagcgttaccaaaaaattgacaaggaatttgtggattatctgaagaaatcctttacctatagtcgagcagagagtcagcaaaaggctctgaaaaaggttgcccatctcttrcttaatgtcggcattctctggatgggggctgttctggtcatggatggcaagatgagtttggggcagttgattacctataataccttgctggtttactttacyaatcctttggaaaatatcatcaatctgcaaaccaagcttcagacagcgcaggttgccaataaccgtctaaatgaagtgtatctagtagcttctgagtttgaggagaagaaaacagttgaggatttgagcttgatgaagggagatatgaccttcaagcaggttcattacaagtatggctatggtcgagaygtcttrtcggatatcaatttaaycgttccccaagggtctaaggtggcttttgtggggatttcagggtcaggtaagacgactttggccaagatgatggttaatttttacgacccaagtcaaggggagattagtctgggtrgtgtcaatctcaatcagattgataaaaaagccctgcgccagtacatmaactatctgyctcaacagccctatgtctttaacggaacgattttggagaatcttcttttgggagccaaggaggggacgacacaggaagatatcttacgggcggtcgaattggcagagattcgagaggatatcgagcgcatgccactgaattaycagacagaattgacttcggatggggcagggatttcaggtggtcaacgtcagagaatcgctttggcgcgtgctctcttgacagatgcgccggtcttgattttggatgaggcgactagcagtttggatattttgacagagaagcggattgtcgataatctcatkgctttggacaagaccttgattttcattgctcaccgcttgactattgctgagcggacagagaaggtrgttgtcttggatcagggcaagattgtcgaagaaggaaagcatgctgatttgcttgcacagggwggcttttacgcccatttggtcaatagctarctaat

SEQ ID NO: 5149 - DNA, 836 bp, Streptococcus pneumoniae
  misc_feature (1)..(836): tiling:Spneumo1:WAN024FFN; Cluster includes WAN0243MF spr1 548||15903591|NP_359141.1|1530638..1531429|-|792 bp|Hypoth etical protein|S.pneumoniae|R6|NC_003098.1|ORF|111
ttgagtattatattactttctatttgtaggaggtggcttatgaasattcctctcttaactttkgcaaggcataaatttgtttatgtcttgcttactttgctttttcttgctttggtttatcgtgaygttttgatgacttatttcttttttgatattcatgcgcccgatctagctaaattcgatggacaagcaattaaaaatgacttattaaaatcagcattagattttcgtattctccagttcaatctaggtttttatcaatcatttattattccaatcatcattgttttgctaggttttcaatatattgagctgaaaaataaagttttacgattgagtattggaagagaagtgagytatcmagggttaaaaagaaagttgactttgcaagttgcaagtatcccttgtttgatatatttagtgactgtgctgayaattgcaattataacctatttcyttgggactttttctcctcttggatggaattctctattttctgatggaagtggtttacaaagactcctagatggagagataaaaagctatttgttctttacttgtgtcctrctaatcggtattttcatcaatgcaatctattttttacaaatagttgattatgtggggaatgtgactcgttcggcaatcacctatttgatgtttctttggcttggttctatgctgctytatagtgccttgccttactatatggttcctatgacgagtttgatgcaagctagctatggggatgtaagtttgatgaaactctttactccttatatcctttatattgtcccttayatggtgcttgaaaaatatgaagataatgtttaactaat

SEQ ID NO: 5150 - DNA, 58 bp, Streptococcus pneumoniae
  misc_feature (1)..(58): tiling:Spneumo1:WAN024AER; Cluster includes WAN024EJL-rc R 6.IG_828.1.2||||792515..792572|-|58 bp|Between spr0792 (hs dR) (+ strand) and spr0793 (argR) (- strand)|S.pneumoniae| R6|NC_003098.1|IG-rc|110
ttgagtattatttcattttctcctgcaattgaattcttgctcggctttttgttttcta

SEQ ID NO: 5151 - DNA, 348 bp, Streptococcus pneumoniae
  misc_feature (1)..(348): tiling:Spneumo1:WAN024DM4; Cluster includes WAN0244QH spr0 105|Transporter-truncation|15902149|NP_357699.1|113542..11 3775|+|234 bp|Transporter, truncation|S.pneumoniae|R6|NC_0 03098.1|ORF|100
ttgagtatttctatgttaaaaaaatatccttgtacgatkcaacatgaycagtcagattgtgctgcggcagttgtttcaacagttcttttatcttacaaaaaggaactatcaatcatgaagattmgggaaattattggtacagacatgtatggaacgactgtcagtggtattgtttcaggtctgaataagttgaattttacagtaaaagctgttcgagtagcactggaagattwgactccaaaattaacatttcctgcgattcttcaagttaagaatgatttaggtcaaaatcattttgtggtattacatagtataaaggagaaaataaagggaactcgtattaccaaa

SEQ ID NO: 5152 - DNA, 365 bp, Streptococcus pneumoniae
  misc_feature (1)..(365): tiling:Spneumo1:WAN024CXR; Cluster includes WAN0244ND spr0 217||15902261|NP_357811.1|210516..210875|+|360 bp|Conserve d hypothetical protein|S.pneumoniae|R6|NC_003098.1|ORF|111
ttgagtattttcgttagaattatgctatactatttgaaaagaatcctgtttaatgttaaggtttcttattttaagaagaattggagtttacttatgaaagcsattataactgttgttggtaaagataaatctggaattgttgcaggtgtttctggtaaaattgcagaattaggattgaatattgacgatatctctcaaactgtmttggatgaatattttacgatgatggctrttgtatctagtgatgaaaagcaagattttacctatcttcgtaatgaatttgaagcttttgggcaaactttgaatgtaaaaatcaatattcagagtgcagcgattttcgaagctatgtataatatctarctaat

SEQ ID NO: 5153 - DNA, 332 bp, Streptococcus pneumoniae
  misc_feature (1)..(332): tiling:Spneumo1:WAN024C59; Cluster includes WAN023LRA 3135 04_1319||||697593..697832|-|240 bp|EGAD orf prediction|S.p neumoniae|R6|NC_003098.1|ORF|220
ttgagtcaaaactgcacgactagtttccatcataaatggttcaatcaagtgagcaactacacgaatgctggctgccaagtggctcatgacacttgccaattggtcacgaagagcttcatccttggccaagacccatggtgcggtctcatcgatgtatttattggtacgagagatcagagtccagactgcttcaagcgcacgtggatagtcaactgcttccatgtgtgtatggaagtctgcgattgattgttctgcaacctcagcaagaacatgatcaaattcagtcacaccttctacataggcagggatttgtccatcaaagtacttattaa

SEQ ID NO: 5154 - DNA, 417 bp, Streptococcus pneumoniae
  misc_feature (1)..(417): tiling:Spneumo1:WAN024DVV; Cluster includes WAN023KDO 3156 66_3632b||||1954527..1954943|+|417 bp|EGAD orf prediction| S.pneumoniae|R6|NC_003098.1|ORF|110
ttgagtctcagcatctgtgcgattataaattttaacaagcccaactttatccatttttttcaaatcgacttcccaccaagagggattatctgccctagtgtgtgttacmgaaccagagttaaaattaccatttctgttaccatccacagctctattagggtctccattgtaatctacagaactttgtgttgttggttttgcatatgctatattcaaattaccatcattaaatttatctggtgttgggaaagagactggrcctgtcccytcagtatttatagacatctctaccattccattatgattaaccgtaatggtataaacatgggtattctcatcccaattttctgtataagtataatgatttttatcgccacttatatttatctgaggtttatgaccagtatgcccttttaa

SEQ ID NO: 5155 - DNA, 285 bp, Streptococcus pneumoniae
  misc_feature (1)..(285): tiling:Spneumo1:WAN024EUI; Cluster includes WAN023KLU 3145 82_3278a||||1756227..1756457|-|231 bp|EGAD orf prediction| S.pneumoniae|R6|NC_003098.1|ORF|110
ttgagtgaagtttccaaactagcgcacaaacagagaagatggtataatagtcaaatggttcaattattattcactctaagtagtcatatgytctttatttatgtgagtttttaccttttaaaggatcttgttagatgggagaaggttttaaaagtgacagatgataatacaagaaaagttcgtttattagtagccttttttagcattgtcataggctacatcctgagttctttctttattagcctgtatcatttgtggcaagaagcgcttagaggattattatga

SEQ ID NO: 5156 - DNA, 743 bp, Streptococcus pneumoniae
  misc_feature (1)..(743): tiling:Spneumo1:WAN024DZ8; Cluster includes WAN0243D5 spr1 884|guaA|15903925|NP_359475.1|1860650..1861387|-|738 bp|Gl utamine amidotransferase|S.pneumoniae|R6|NC_003098.1|ORF|2 10
ttgagtgatatgataggactatcgttagcattcgaaaggagaggcatcatggctagaacggttgtaggagttgctgcaaatctatgtcccgtagacgcagaaggcaaaatcattcattcatctgtatcttgtagattcgcagagatcattcgtcaagtcggtggtctccctttagtcattcctgttggtgatgagtcagttgtacgtgattatgtggaaatgattgacaaactcattttgacaggaggccaaaatgttcatcctcagttttatggagagaaaaagaccgtcgaragcgatgattacaatctggtccgtgacgaatttgaattggcactcttgaaggaagcgcttcgtcagaataaaccaattatggcaatctgtcgcggtgtccaacttgtcaatgttgcctttggtggaaccctcaatcaagaaatcgaaggtcactggcaaggactacctttcgggacatctcactctattgagacagtagaaggaagcgtggtggctaagctatttgggaaagaaagtcaggtcaactcagtccatcgtcaaagcattaaagatttggcacctaatttccgtgtaactgctattgattcaagagaccaaactattgaagcgattgagtctatcgacgagcaccgcattatcggtttacagtggcatccagagtttctggttaatgaagaagatggcaatttagaattatttgagtatttattgaatgaactgtaactaat

SEQ ID NO: 5157 - DNA, 237 bp, Streptococcus pneumoniae
  misc_feature (1)..(237): tiling:Spneumo1:WAN024CTV; Cluster includes WAN023LV8 3136 54_1094||||577901..578137|-|237 bp|EGAD orf prediction|S.p neumoniae|R6|NC_003098.1|ORF|110
ttgagtgctttcttgaggcaattcacttggtgcaaggaaggtcatctcaatcatcgcaacaccgctcttrtcwgctttacgctccatacgccatctcatrrctttggctttgayagctttaaatgttacgttgatttcatcaccagctgcratgtctttatccgcacgataaggmacagcttcccaattttctggattgttraatggatgkycwgmktcgtaggcttggtagtttga

SEQ ID NO: 5158 - DNA, 1661 bp, Streptococcus pneumoniae
  misc_feature (1)..(1661): tiling:Spneumo1:WAN024FKU; Cluster includes WAN0243RD spr1 370||15903413|NP_358963.1|1351327..1352982|-|1656 bp|Hypot hetical protein|S.pneumoniae|R6|NC_003098.1|ORF|221
ttgagtgraaagtcaagagragragagaaattaagctttaaagagcagattctgagagatttagaaaaagtaaaaggctatgatgaagttctgaaagaagatgaggcagtagttcgcactcctgcaaatgaaccttcarctgaagaactcatggctgattccttgtcaacggtagaggagattatgagaaaagctcctaccgtgcctactcacccaagtcaaggtgtaccagcttctccagcagatgagattcaaagagaaactcctggtgttccaagtcatccaagtcaagatgtaccttcttctccagcggaagaaagtggatcaagaccaggtccaggtcctgttagacctaagaaacttgaaagagaatacaatgaaaccccaacaagggtagctgtttcctatacgacggcagagaaaaaagcagaacaagcaggtccagaaacacctacgcctgctacagaaacagtggatatcatcagmgatacatcacgtcgtagccgtagagaaggagcaaaacccgytaarcctaagaaagagaagaagtcacatgtgaaagcttttgtgatttcattccttgtattccttgccttgctctcagcaggtggttactttggttaccagtacgtgctagattcyttrttacctatcgatgctaattctaagaaatatgtgacggttggaattccagaaggttcaaacgttcaagaaatcggtacgacgcttgaaaaagctggtttggtaaagcatggtctgatttttagtttttatgccaagtataaaaattataccgacttgaaagcaggttactacaatttgcaaaagagtatgagtacagaagacttactcaaagagttgcaaaaaggtggaacagatgaaccgcaagaacctgtacttgcgactttgacaattccagaaggttataccttggatcagattgctcaarctgtgggtcaattgcaaggtgacttcaaagagtctttgacagcggagrctttcttggctaaagttcaagatgagacgtttatcagtcaagcagtagcgaaatatcctactttactggaaagtttgcctgtaaaagacagcggtgcgcgttatcgtttggaaggataccttttcccagctacatactctatcaaggaaagcacaactattgagagcttgattgatgagatgttagctgctatggataagaacctatctcyttactatagtactatcaaatctaaaaacttgactrtcaatgagttgttgaccattgcttccttggtcgaaaaagaaggtgccaagacagaagatcgtaagctcattgcaggtgtattctacaatcgtttraatcgtgatatgccacttcaaagtaatattgcaatcttgtatgcccaaggaaaactggggcaaaatatcagtctagctgaggatgttgcgattgataccracattgattcaccttataatgtttataaaaatgtaggtctcatgcctggtccagtcgatagtccaagtctggatgcgattgagtcaagcatcaatcaaactaagagcgataacctctactttgtagcagatgtcacagaaggcaaggtctactatgctaacaatcaagaagaccacgaccgcaatgtcgctgaacatgtcaacagcaaattaaactaactaat

SEQ ID NO: 5159 - DNA, 264 bp, Streptococcus pneumoniae
  misc_feature (1)..(264): tiling:Spneumo1:WAN024GD6; Cluster includes WAN023LS5 3135 08_1268||||673362..673625|-|264 bp|EGAD orf prediction|S.p neumoniae|R6|NC_003098.1|ORF|110
ttgagtgttaaaaatttcattcttttctcccaaaataagaggttggaatacagcttccaacctcaagtatattacaattctactttagcaactgctgttttagctgcaagagaacctgttttttctaayttaactgatttaattgcatcaccatttgtgaagacaactactgttgaagtttcacgtcctgctgcacggatagcatycaagtcagctgtgacaaggagatctcctgctgcaactttttgtccttcagcaacatga

SEQ ID NO: 5160 - DNA, 237 bp, Streptococcus pneumoniae
  misc_feature (1)..(237): tiling:Spneumo1:WAN024C5U; Cluster includes WAN023M5O 3150 84_564||||293231..293467|-|237 bp|EGAD orf prediction|S.pn eumoniae|R6|NC_003098.1|ORF|110
ttgagttctaactgccgaataaccttatcgattgcctggccgacttcttctttcgtcagaagtggtacttctaagaagcgctcaggcgattttattttttcaatcgtaaccttttttatcattcttttaccctttaaatacccgattcgaaatcttcttcctcttcctctgcatccgttgaaaacaattctttaccatttacgactccgccctgggccgccactactgatttattaa

SEQ ID NO: 5161 - DNA, 243 bp, Streptococcus pneumoniae
  misc_feature (1)..(243): tiling:Spneumo1:WAN024GJ6; Cluster includes WAN023LYW 3147 57_919||||483472..483714|-|243 bp|EGAD orf prediction|S.pn eumoniae|R6|NC_003098.1|ORF|110
ttgagttcttggatttcagcyacaagaaggactgtttccaacaattcttcgatattttggttgaatttagcygaratttcaacaaattcagaatctccaccccaagcrgttgacatcacaccatgctctgccaattcaccgataacgcgttctgggttagcacctggtttatcaatcttgttaatrgctacgatgattggaacgttagctgcttttgagtggttgatggcttcaatagtctga

SEQ ID NO: 5162 - DNA, 258 bp, Streptococcus pneumoniae
  misc_feature (1)..(258): tiling:Spneumo1:WAN024F2O; Cluster includes WAN023LUA 3133 81_1141||||603396..603653|-|258 bp|EGAD orf prediction|S.p neumoniae|R6|NC_003098.1|ORF|110
ttgagttgggctaggtggacttggagcttcccttcatggcttcgagcccgcatggcaaagatatccaaaatcaactgcatacggtcaatgaccttaacaccgagaacttcctctagattgacattctgccttggggtcagacgrttgttgacgatgacagtagtgatttcttctgcatccaccataagcgcaatctcttccaacttaccagagccgacgaaggtcttggaatcatatttttcacgtttttgtctgtag

SEQ ID NO: 5163 - DNA, 555 bp, Streptococcus pneumoniae
  misc_feature (1)..(555): tiling:Spneumo1:WAN024F8S; Cluster includes WAN023LAN 3132 15_2169b||||1170002..1170493|+|492 bp|EGAD orf prediction| S.pneumoniae|R6|NC_003098.1|ORF|210
ttgagtttgttggccaatttaccagcaaaggttgttttaccagccccttgtaaaccaaccatcatgatgatggttggaatcttaggtgacttgataatttctgccgtatcagaacctaaaacggctgtcarttcctcatcaacgattttaataatctgttgcgcaggattaagtgtatcaatgacctcatgcccgactgcacgctcacgaactttcttgataaagtcctttacaacaggcaaggcaacgtcggcctcgagcaaggccaagcgaatttctttggttgcctcttggacatcagattcagagatttttccttttttacgtagatttttaaagacgttctgcaaacgttctgttaaactttcaaatgccatttttcttcctcttattctctattatcaatgcttgttaaaatttctatctgctcctgcagaaartyatccttgggatagcgmtccaaratytgrtcaaaaatctgactrcggacaatrtagtccgagtacatgtgcaatttcatctcataatcttccagaatcttttctgttcgcttga

SEQ ID NO: 5164 - DNA, 279 bp, Streptococcus pneumoniae
  misc_feature (1)..(279): tiling:Spneumo1:WAN024G24; Cluster includes WAN023LDI 3153 06_2054||||1110068..1110346|+|279 bp|EGAD orf prediction|S .pneumoniae|R6|NC_003098.1|ORF|110
ttgagttttagccatacagattggcaatttgtcccaaccgttttgaacgatttgagcaatttgtgtttgagmtttcttctcaaagttcactttgctaccacgatagatttcagtgacaattttttcaatcttttcttggacagaaaggtcattatcatacaaacgtttatagttagctggattttcagcaattgtcttaacaactgtttcggcaagtgctactccaccttctgctccatcagcccagacactagccaattcaactggtacatcgattga

SEQ ID NO: 5165 - DNA, 258 bp, Streptococcus pneumoniae
  misc_feature (1)..(258): tiling:Spneumo1:WAN024C96; Cluster includes WAN023M92 3134 30_378||||199446..199703|-|258 bp|EGAD orf prediction|S.pn eumoniae|R6|NC_003098.1|ORF|110
ttgagttttgattcctttagctccagcacgcattgcacgttggattgcttgtttttgtgcacgacggaaagcaacacgttgctccaattgacgagcaattccttcacctacaaggtgagcatccaaatcaggttgtttgatttcgatgatgttgatgtgtacttgttttccagtcaatttgttaagttttgcacggagtgcatcaacgttagcaccacctttaccgataaccatacctggtttagcagtgtgaagtga

SEQ ID NO: 5166 - DNA, 432 bp, Streptococcus pneumoniae
  misc_feature (1)..(432): tiling:Spneumo1:WAN024CZ6; Cluster includes WAN0243CP spr1 900|transposase-truncation|15903941|NP_359491.1|1878527..1 878943|+|417 bp|Transposase, IS1380-Spn1 related, truncati on|S.pneumoniae|R6|NC_003098.1|ORF|111
ttgamcaatttaagcagtgtagatagtgaggagytgtttcaattctatcgtgaacgagggaatgctgaaaactttatcaaagaaaggaaagcaggattctttggggataagacagatagttcgaccatgattaagaatgaagtacgtatgatgatgggctgtctggcttataatctctacctctttttaaagcagctagctggtgatgaagtaaagkccttgactatcaagcgttttcgacgtctcttccttcatattgccggaaaatatgtctctactgctagacgacatattctcaaattctcaagtctataygcctattcaaaacagtttcaagccttatttgatacaatctgccagataaatctgatactccctgttccatatagagctagagggcaggggaaaacatgcctaacagaactaactaat

SEQ ID NO: 5167 - DNA, 648 bp, Streptococcus pneumoniae
  misc_feature (1)..(648): tiling:Spneumo1:WAN024DCF; Cluster includes WAN024442 spr0 912||15902956|NP_358506.1|900059..900688|+|630 bp|Hypothet ical protein|S.pneumoniae|R6|NC_003098.1|ORF|111
ttgarcaaggcaaatcaactcttggaacaaatccatgaagaaggaatcagacaatccttggcagaagaagtagaaaatytaaaagctgccacaaacaaggytgatgcagacttggatgaagtaaacagtcaggtaaaagatgtyttgactcgtatcgctagcgcccttcaacaagaaaaggaaaatgctgagcaagatyctcagacacttgtactctatcaaaaactctacgatattctcatgtcgcttsamwsttatttagaaagtaataatggatctgatgcggactttgataaggtggmtgcattattagatcaactttctgctaakagtaaagacaaaacagctttacttgaatcgacaaaagctattctagttttgaatcatcaaatccagtcaaaagctagcgcaagtgaagaaacaagtccagcaagaaatgctgaagcaaatrgtgataacaccagtgctgagaaccaaccaaacgcaactgcagaatctaacattgaaaytgctagcgacgaaaacaaaccaagcaatacaagagattctaaacctgctgaatcaacttcagaaaatraaacaacagaatcttctacaactactggaaatcaagaaaaaccagtagaamtaamwrawaggcgaagtagc

SEQ ID NO: 5168 - DNA, 111 bp, Streptococcus pneumoniae
  misc_feature (1)..(111): tiling:Spneumo1:WAN024DOP; Cluster includes WAN023SJK NC_0 03098.1_1565||||1234176..1234274|-|99 bp|Glimmer 2.02 orf prediction|S.pneumoniae|R6|NC_003098.1|ORF|101
ttgataaaaaaaatgctcctccaagacggaagagcattttttattgtgattcttacacatttayttcctagttttgcaggaagtctagtataccattttttaaaagaagag

SEQ ID NO: 5169 - DNA, 228 bp, Streptococcus pneumoniae
  misc_feature (1)..(228): tiling:Spneumo1:WAN024F5U; Cluster includes WAN023KMQ 3130 47_3234||||1725628..1725855|+|228 bp|EGAD orf prediction|S .pneumoniae|R6|NC_003098.1|ORF|110
ttgataaaaatggcaattgttttggttttattgatagaggcgccaagtttacgcatggcctggctcatcatacgagcctgcaaaccaacatggctatctccgatatctccatcaatttccgcacgaggaacaagggcagcaactgagtcgactacgacaagatcaactgcacctgagtcaatcaattttcccgcaatctcaagaccttgctctcctgagtctggttga

SEQ ID NO: 5170 - DNA, 639 bp, Streptococcus pneumoniae
  misc_feature (1)..(639): tiling:Spneumo1:WAN024ETF; Cluster includes WAN023P68 pne5 4_8||||4787..5416|+|630 bp|Type 25A capsule operon, Glimme r 2.02 orf prediction|S.pneumoniae||WAN01UCGY|ORF|000
ttgataaaartrtattttgttttwaaaaatattttagatagatttttggcgtttttcctatttatyachytgataatcataccgattattcckataacaattytgsytatttggatagaagatccaggagatrtrtttytmtttcaagatagarttggtttaaatggraararmttyaaagtaataaagttycggagyatgtataaagatgcygatcaragrataaagraaagtattawtagtggtraaaytgakcgtctaaattttaaagaacattctcaaagtatgactacaaaagtcggtaaagtgatacgmaaactttcaattgatgaattrcctcaattaktgaatattataaaaggtgatatgkctatagtsggacctcgtccattacaacartttgaaatmactcatcatattcttaccyatmaagaaayggrkaytrmtttaaagatgtctaaaagattgtctgtgaaacctggtttgctttgttattggcaagttrcgccraataaaaatgacatkccttttrstgayagaatgratctmgatttattatayattgataatgtatctttcaagactgatttcttgcttattttraagggwttytwtacagttttaatgggtaataayart

SEQ ID NO: 5171 - DNA, 120 bp, Streptococcus pneumoniae
  misc_feature (1)..(120): tiling:Spneumo1:WAN024DTI; Cluster includes WAN023SNC NC_0 03098.1_80||||65511..65630|-|120 bp|Glimmer 2.02 orf predi ction|S.pneumoniae|R6|NC_003098.1|ORF|100
ttgataaaatatgagcaatccctatatcgcttaatttttcaractattattctaattttttattcaaaagactactatttttttcgcttttatggtaaaattttctatggagaaggaaaa

SEQ ID NO: 5172 - DNA, 2642 bp, Streptococcus pneumoniae
  misc_feature (1)..(2642): tiling:Spneumo1:WAN024FW7; Cluster includes WAN0243VY spr1 205||15903248|NP_358798.1|1202025..1204661|-|2637 bp|Conse rved hypothetical protein|S.pneumoniae|R6|NC_003098.1|ORF| 211
ttgataaaatttcttggagattttgttatggattataatttcaatttggagcatcctttctttttcactaataatgattatagtacagatactagcataaagtaccaagtaagtctgccttttaattggcacgaagtaatgaataatgatgagtgggtttatcaataccctattggaaaatttgttgaaagacaagggtggaaaatacacattagttcagagtataacagttcacatgaattgttacaagatgtagcaaaaatttgccatgaaatgcgaattccatttaaacatcttagtacagaagacaaatttatcatgcgaaacgggaaattggttagtcgaggattttctggtaaatttattacatgttatccaaatcaaaatgaattagagtcggttttgcaaaggttagaaagtgccttaaagcaatataatgggccatatattttaagcgataaacgttgggatgaagcaccaatatatctgaggtatggtgtgtttaggccgtcaagggatgatgaaaagaaggttgctattgatgaattaattgttggcgatgaagttgttaaagatgaacgtttaccagtatttaaaattccaaaaggtatagtgccccctgactttttgaataaatggcttgacaagaaagataaaaaacagggagactttccctttattatagataatgcaattagattttcaaacagtggtgggatatataatgctaggctaaaagaagatgggaaaaaaataattttaaaagaggctagaccgtatacaggtctaggatttgatggtacttattcttcagagaaattagcttcggagtgcaaagcactaaaaattctaaatgaatggagtgagrcgcctaaaatatactggcacggtaagatctgggagcacaccttcttaggaattgaacatatgaagggcgttccactaaatagatgggttaccaataattttcctttatatgaagttgttgataagaccaaagattatctattgagagtttcaaagatagtagaaaaactcatcgatttaacgaataagtttcattctgaaaatgtatatcatcaagatttacatttaggaaatatcttggttaaggatgaagatgagattagtataatagactgggaacaggctgtcttttcaaatgatgaaaaagttgtacataaagttgcagcccctggttttagagcatggcgagaaacacttcccagtgagatagattggtatggtattagacaaatagctcattatttatacatgccactagtaactacatcggatttgacatacaactatgtaagtcaaaccaggatagaaggaaaaaaactatttgagtctttgggttatacaagagaacatatagattatgtagaaagtttattgtcatatctagattctaaatgtccacagattgagaatatttccaggaaaaaagttttaaaayccatgcatgagattagaactatcgagagtgagcaagatatacaagattttattataaaattattgagagggtttacgctaacttatggacagtggcgtaaagaatttcaatcaagattcttcccagttcattattatggtctgaattttaatcaaggaattgcgttttcagatttagctatcctttggagttatcaacaactagctaagaaagtaaaaaatttcaagtttgatgactattatgagattcgaacacaggttattaatgaggcagtaaataattttaagaaatcgtccctttctggtctttttgatggtaaaattggtacaatctggctcatttatgaatttggggagatagatcgggcagttgaactttttacaactcattttatagagatatttgagaattcacaaaataaaaatttatatagtgggcaggctggaattttactggttggactgtattttcttagtaaaggggraattgataataaactaggagaagaaatactaattaggcttagagaatatactttaaattatatagaaaatccagaaactttttgtaaagttggcgctagtgatgttcagagtaaygatccttatgagaattttggtggattactatatggtcacgcaggggtagcttggctcttcggtgaagcttataaattaactggtgaaagtatctataaaaatggtctagaattggctgtagataaagaattagttgcttataaagtagatagtaataattcattgcagtacagccaakgtcatagattactaccatatctagcaactggaagtgctggcctgcttttacttattaatagaaataaagaaatcttgtcaagcaaatacttaaaatatttaacttctttagagagggcaactgatgtagttttttgtgtattaccaggtttatttaacggattttgtggtcttgaagttgctaataatatatatagtgatatcgatgataacttttcaggacaaaagaaattaattgaacaactttatagatatttgtgtgtaattgaagaaggatttgttattgcgggagataatggtttaaagataacaacagatattgcttcgggatttgcgggtgttgcaattggattggtatcaataatggataataaattgacgattcttcctcaaatataactaat

SEQ ID NO: 5173 - DNA, 105 bp, Streptococcus pneumoniae
  misc_feature (1)..(105): tiling:Spneumo1:WAN024FMY; Cluster includes WAN023P6U pne5 3_31||||18488..18592|+|105 bp|Type 25F capsule operon, Gli mmer 2.02 orf prediction|S.pneumoniae||WAN01UCCQ|ORF|000
ttgataaaggaaggaaaaaagtatgttcattcaaaaaatcaaaaagataataagagtatttttaaggaaatctttagtaaaagattatcgacaaagaattcaaaa

SEQ ID NO: 5174 - DNA, 912 bp, Streptococcus pneumoniae
  misc_feature (1)..(912): tiling:Spneumo1:WAN024G74; Cluster includes WAN023Q1A cont ig_1214_1||||594..1049|+|456 bp|Glimmer 2.02 orf predictio n|S.pneumoniae|670|WAN01UEL5|ORF|000
ttgataaaggagatttttatggattataagcttatttctacttacttagattattgcaaaactcataagcgtttgagttcacacacgattcgagcttataagaatgatcttatgcaattttataattcaaactatgataatgtcgaatcctatatcgaagagttgacacaatctaacataaaaacgaatacattaagaagaaaaattgcttgtataaaggtgttttataactatctaaaataccagcacataattgaagagaatcccttcaatcaattacgctttcaatttagaactgaaaaaatattgcctaaaacgattccgtatgatattctgaaaaatattttttcatatttagagcagagagtagttatatctaaaactgactatcaaaaacaaaaagctgaaagaaatctactaattatttccctattactttcaacaggtatcagaatttctgaacytwryyacattcatctcaaagatattaatctttccaataagacactccatattataggaaaaggtaagaaagagcgtatcctatttttaggagatcaaacaaccttcaatttattagaaacatatataaataaaaacggaaaggaatctaatgatttcctattcccaggaaaacattcgcctaaaccattgtcagagcaaagtgtacgtttaattttaaagagaatcgttgaacaaaatggcttatctaaaactattacaccacatatgtttagacatagctttgcaacaatgcttctagataatgatgtagatattcgatatattcaacaaattcttggacacagttctatatcaatcacacaaatctatactcacgtatctcattcaaaacaaaaagaaatacttagttctttcaatcctatgtcagtgattcattctgaaatcgag

SEQ ID NO: 5175 - DNA, 551 bp, Streptococcus pneumoniae
  misc_feature (1)..(551): tiling:Spneumo1:WAN024DD7; Cluster includes WAN024463 spr0 839||15902883|NP_358433.1|839217..839762|+|546 bp|Conserve d hypothetical protein|S.pneumoniae|R6|NC_003098.1|ORF|111
ttgataaatcagaaagaaggtgattttttgcgaacatacgaaaataaagaagaactaaaagctgagatagagaaaacatttgagaaatatattttagaatttgataatattccaraaaatttaaaagataagagagctgatgaagttgacagaactccagcagaaaaccttgcttatcaggttggttggaccaacttggttcttaaatgggaagaagatgaaagaaaggggcttcaagtaaaaacaccatcggataaatttaaatggaatcaacttggtgaattatatcagtggttcacagatacctacgctcatttatctctgcaagagttgaaagcaaaattaaatgaaaatattmattctatctctgcaatgattgattcgttgagtgaggaagaattatttgaaccgcatatgagaaagtgggctgatgaagcgactaaaacagcgacttgggaagtgtataagtttattcatgtaaatacggttgcaccttttggaactttcagaactaaaatcagaaaatggaagaagatagtattataactaat

SEQ ID NO: 5176 - DNA, 252 bp, Streptococcus pneumoniae
  misc_feature (1)..(252): tiling:Spneumo1:WAN024FIT; Cluster includes WAN023KZ7 3154 68_2659||||1414718..1414969|+|252 bp|EGAD orf prediction|S .pneumoniae|R6|NC_003098.1|ORF|110
ttgataacccgcctgcttcatcgtgtccatgtacttgttgatgattttaacccaagtgyctgtatcacttggagctctcttgctcttatttacatattcccarttctcaacatcataatagatagggtaagacaggttcatattgtatttctttataagttcaatggtctgtttagcgtcaytctcagcatcggtctcattttcagcataggtatagagatagacaccataaggaattcccagacggtttaa

SEQ ID NO: 5177 - DNA, 467 bp, Streptococcus pneumoniae
  misc_feature (1)..(467): tiling:Spneumo1:WAN024ESC; Cluster includes WAN0243CX spr1 892||15903933|NP_359483.1|1871577..1872086|+|510 bp|Conser ved hypothetical protein|S.pneumoniae|R6|NC_003098.1|ORF|1 11
ttgataagaactctagagttagctccccatrttgaaggtggctattttagacaaacaaaaaaagcttcagacactataaaccttgctggtaagggaagggcgctttataccagtatttatttcttattagaagaaacgaatccttcacattttcaccgattgacagcagatgaaatctggtattttcatgcaggatccccacttactgttcacatgattacagcagatggtcactacgaagcagtcactttaggcctggacatatccaaagggcaacaacttcactactgtgttcctaagggcactatttggggatcaacagttgataaggatkatgctctggtttcttgtcttgttgctcctggttttgaatttgaggattttgaattatttgaaagggyagatctactggcgacctatccagagcacaaggagatgattgagcrtttgaccagatactarctaat

SEQ ID NO: 5178 - DNA, 339 bp, Streptococcus pneumoniae
  misc_feature (1)..(339): tiling:Spneumo1:WAN024C78; Cluster includes WAN023M74 3136 24_482||||247738..248076|-|339 bp|EGAD orf prediction|S.pn eumoniae|R6|NC_003098.1|ORF|110
ttgataagacgagtaactagttgtgaattgtatagcggatctggcaatacgtcacgttttggagctctatttttacgactcatttctctttatcccctttccttatgcttttggacgtttagtaccgtatttagaacggccttgtttacgatcgttaacacctgcagtatcaagtgcaccacggacgatatggtaacgtacccctggaaggtcttttacacgtccaccgcgaagaagcaccacgctgtgctcttgcaagttgtgtccgatacctgggatgtaggcagtaacttcgataaggttgctcaaacgtacacgagcgaatttacgaagggctga

SEQ ID NO: 5179 - DNA, 144 bp, Streptococcus pneumoniae
  misc_feature (1)..(144): tiling:Spneumo1:WAN024CZY; Cluster includes WAN023R3J cont ig_1455_1||||554..658|-|105 bp|Glimmer 2.02 orf prediction |S.pneumoniae|670|WAN01UDT2|ORF|001
ttgataagtagctatccaggcgatgtttgggaaaatgagatgcaacaagggaaaaagccaaaccaaaaccatgctgctgatcatgagcaaggtggtttgtctttgaaccttgctgaggagtggtggttggtcaatagtcaagga

SEQ ID NO: 5180 - DNA, 336 bp, Streptococcus pneumoniae
  misc_feature (1)..(336): tiling:Spneumo1:WAN024DWO; Cluster includes WAN023KEA 3156 62_3601||||1934541..1934876|+|336 bp|EGAD orf prediction|S .pneumoniae|R6|NC_003098.1|ORF|110
ttgataagtgttcaggaagcgcaccttctacagcttgaacatattcatcaaaagaactatgaacaaagattacatccgggaagagttcatttgccacacgaatggcttcgctcagatttttctgtacaggctggtggtcacagccgttcatcatcaaccattggttggtcgaagcgtaggcacgcacatctgacaatttttgtttccagaaggtcaaggcctcatctttgtcaactggratttcattcccrttactgtaccagttggcaaagagaatacctaaaacacgactaccatccacaccctgccagtacatttctgaaaactgrgaygtaa

SEQ ID NO: 5181 - DNA, 441 bp, Streptococcus pneumoniae
  misc_feature (1)..(441): tiling:Spneumo1:WAN024DXT; Cluster includes WAN023KGF 3156 57_3517||||1884288..1884590|+|303 bp|EGAD orf prediction|S .pneumoniae|R6|NC_003098.1|ORF|220
ttgataatacgagctggaacacctgctactaccacgttttctgggacatcttgggtaacaatagctcctgctgcgacaactgaaccactaccgatttggactccttcgataaccactgcattagcmccgatragaacattgtctccgacacggactggttcagcactagctggctcaatcacacctgccaaaactgcacctgcaccaacgtggctattttttccaacgatggcacggccaccaaggatggcacccatgtcaatcatggttccagcaccgatttcagcaccgatattgataacagmtcccatcatgataacagcattgtcaccaatttccacctggtcacggataatmgcacctggctcgatacgagcgttgatagcacgcttatctagcaaaggaactgcagaattacgagcatcttgctcgacaacataa

SEQ ID NO: 5182 - DNA, 407 bp, Streptococcus pneumoniae
  misc_feature (1)..(407): tiling:Spneumo1:WAN024C63; Cluster includes WAN023M5Q 3153 19_562||||292187..292456|+|270 bp|EGAD orf prediction|S.pn eumoniae|R6|NC_003098.1|ORF|220
ttgataatctttccatgccctttctttatcatagaaggaataactgcctttgaaacgataaatggtgcgtttaagtcaatatcgatgaccttacggaaatcagcggcgctcatttcgcacattggaactcggcggataataccagcgttattaacgaggatgtcaatgacaccaacctcttgttcgatttgcttgaccatggcttggataccgtcctcgtctgtcacgtcacagacatatccatgggcttsgatgccaacttcacgataagcttcaatccctttattgaccagatcttgattgatatcgttaaagacaatagtagcgccggcttcagcgtaggatttggcaatagcaaatccaattccataagaagcgccggtgatgagagcaatttttccttttaa

SEQ ID NO: 5183 - DNA, 692 bp, Streptococcus pneumoniae
  misc_feature (1)..(692): tiling:Spneumo1:WAN0249X6; Cluster includes WAN024EAW-rc R 6.IG_1513.1||||1448856..1449546|-|691 bp|Between spr1466 ( cadD) (- strand) and spr1467 (rpsO) (- strand)|S.pneumonia e|R6|NC_003098.1|IG-rc|110
ttgataatraagctactctaaattgggtagcttttttgcgttgtcaccttacctcgmtatactcaagtataatctttggttacggttcctagcactgtaaggtaaaataaaccagcttttctcccttcggggagattttttttgtttcactgaaagtttcgtacgatcttcgcctcgtcgcctagtctataaacgatttatctagcaagaatcatgatgctaagggcgtcaaaaatccgtatgaaaatagggaaatgacacagtgttcgatgagcacaaggagtttcatctttttcactaggattttagcccgggctcaaatcagctctctgacttcagagggcttttttattgaggttttatcggtaacaattttggagactacaaaaacctcaaacggtatcagctaattacaccataaaggtgcgcagttactcggcttttcaagccgagtagctgtatgcaagccccctagaagagcccactctttacaaagtaaagtatagtatgttatactttacatggaagtagtcactgaattccagttagaaattactttgtaactacgttttgaggaggagtaaaatgctttcctacgttcgayattacccactagcgatagctaaattaatgtgtctgtgctctcctaaaatctgctgatttattactgactaatacaggagktttttttt

SEQ ID NO: 5184 - DNA, 375 bp, Streptococcus pneumoniae
  misc_feature (1)..(375): tiling:Spneumo1:WAN024GIX; Cluster includes WAN023L38 3155 49_2490b||||1327406..1327780|+|375 bp|EGAD orf prediction| S.pneumoniae|R6|NC_003098.1|ORF|110
ttgataccaacgatttcgatttcgtcgttgactttaacgataccacggtcgatacgtcctgaagcaactgtaccacgtccagtgattgagaatacgtcctcgactggaagaagcaatggtttgtcagtgtcacgttctggttctgggatatactcatcaactgtgttcatcaattccataacgatgtcttcgtatttagagtcaccttcaagagctttaagtgctgaaccttggataactggaagatcgtcacctgggaagtcgtattctgacaataggtcacggatttccatttcaaccaattcaagcaattcttcgtcgtcaaccaagtcaactttgttcatgaagacgataaggtgtttaacaccaacctga

SEQ ID NO: 5185 - DNA, 271 bp, Streptococcus pneumoniae
  misc_feature (1)..(271): tiling:Spneumo1:WAN024AQW; Cluster includes WAN024EQ3 R6.I G_311||||292630..292899|+|270 bp|Between spr0290 (gno) (- strand) and spr0291 (+ strand)|S.pneumoniae|R6|NC_003098.1 |IG|110
ttgatacttcctttcaaatttgttaagacttctctataaccaaattatattctagtaaaccggttttgtcaataaataaatatttttatttataaaaagrtttrttttcctwaaaaawcggaakattttgaaatttctgtctattaaamtgrttaaaaagataatgaaagcgctaatatttttttaaaaaaactattgacaagataaaaataaaggattacaatggggaatataaagtaaaccggtaaacctaaacaagaaaggagaaaag

SEQ ID NO: 5186 - DNA, 99 bp, Streptococcus pneumoniae
  misc_feature (1)..(99): tiling:Spneumo1:WAN024EUK; Cluster includes WAN02436N SP00 76||15900021|NP_344625.1|82590..82682|-|93 bp|hypothetical protein|S.pneumoniae|TIGR4|NC_003028.1|ORF|020
ttgatagatgtgactataggtcaaaaaagcaagacaggagcttttaacgccagctactctatatgcttttcaggagaaaatttctcttttykaactaat

SEQ ID NO: 5187 - DNA, 309 bp, Streptococcus pneumoniae
  misc_feature (1)..(309): tiling:Spneumo1:WAN024DUE; Cluster includes WAN023KBT 3130 14_3709b||||2002153..2002461|+|309 bp|EGAD orf prediction| S.pneumoniae|R6|NC_003098.1|ORF|110
ttgatagattttcactggcacatcaatcaaaccaaccgctcgaatcggagcttgtacttgaatatgacgtttatcaatcttaattccaaattgcttttgcaattcttctgcaatcttcttattggtaatagaaccaaaggtacgaccatctggaccaactttttcaacaaattctacaacagtttcttctgcttcaagttgtgctttaattgcttttccttctgcaatcatctcagcgtgagctttttcttccgatttttgtttaccacgaagttcacctacagcttgagcagtcgcttctttggctag

SEQ ID NO: 5188 - DNA, 339 bp, Streptococcus pneumoniae
  misc_feature (1)..(339): tiling:Spneumo1:WAN024CXQ; Cluster includes WAN023M8K 3134 28_415||||210684..211022|-|339 bp|EGAD orf prediction|S.pn eumoniae|R6|NC_003098.1|ORF|110
ttgatagattttctccgcagcacgattgatatytggatcgatacagtccaaaagagaaatccccatggtaatggttctaatatcgaagttttgctcctcaatcatggcgatggtttcagtaacttgtctaatatccatgatgacctcctagatattatacatagcttcgaaaatcgctgcactctgaatattgatttttacattcaaagtttgcccaaaagcttcaaattcattacgaagataggtaaaatcttgcttttcatcactagatacaacagccatcatcgtaaaatattcatccaakacagtttgagagatatcgtcaatattcaatcctaa

SEQ ID NO: 5189 - DNA, 373 bp, Streptococcus pneumoniae
  misc_feature (1)..(373): tiling:Spneumo1:WAN024GJJ; Cluster includes WAN023LZF 3130 19_896||||474529..474834|+|306 bp|EGAD orf prediction|S.pn eumoniae|R6|NC_003098.1|ORF|320
ttgatagcgattttcttcactcgtgagcgactttatagtttcaatcccgttgatatcttcgataatggcagagctaaccatagaattactttgcatgacatcatggttcattttttcraaaggtttcataaaagaaaagatgatgaacatgtatataggaatggaaakaagagaaagraggaagagattagggttttgtgccagyaagackccycctacaagaatcagaatagaaacatccagaaaaagagaaagaatggtagaagccaaggcatctataatagagttagcatctgtgaaycgtgaaatgatttctcctgtacgacgtgtcgcaaagaaagacatgggaagttcaaaaatatggcgaatatag

SEQ ID NO: 5190 - DNA, 106 bp, Streptococcus pneumoniae
  misc_feature (1)..(106): tiling:Spneumo1:WAN024DPT; Cluster includes WAN023SL7 NC_0 03098.1_944||||738026..738127|+|102 bp|Glimmer 2.02 orf pr ediction|S.pneumoniae|R6|NC_003098.1|ORF|111
ttgatagctgatttaatgtttgccaatgttcttacctccatatttactaactataccattatatatgaaaacttacgttttgacaagggaaaattayttttttaag

SEQ ID NO: 5191 - DNA, 435 bp, Streptococcus pneumoniae
  misc_feature (1)..(435): tiling:Spneumo1:WAN024CPM; Cluster includes WAN023M50 3142 84_602a||||311069..311458|-|390 bp|EGAD orf prediction|S.p neumoniae|R6|NC_003098.1|ORF|220
ttgatagtgccatttaggctgaccttcctgatactgaagaccgatatgttcaaactggaagaccatagacaattcttgcccctttggatcagagtagarcttggcaatctctggmgttgctccccaagtctcccctactgtcaagagatccttatctccaaaggtcgcctgattcatttccttgagatagggatggagcataggaccattattgactaccttctcgtcaggaattttgccaatcatgtcaataacatccatacggaaaccaccaatacctttatcaatccagaagtycatcatctcataaattttctggcgaagtttttcattttcccarttgagatccggctgtttcttgctgaaaaagtggagatagtattgaccwgatttttcatcgtattcccaagcagatccactaaaaatagaatctaa

SEQ ID NO: 5192 - DNA, 237 bp, Streptococcus pneumoniae
  misc_feature (1)..(237): tiling:Spneumo1:WAN024ERI; Cluster includes WAN023KJV 3136 65_3374||||1809637..1809873|-|237 bp|EGAD orf prediction|S .pneumoniae|R6|NC_003098.1|ORF|110
ttgatattgaagataccaggtccaaaagataatttagccacgtttttagagacagcattgcgactcactaagaatgttgctattaataaacataatgtagatccactaccacccattaaagcgaatgtttgtatttgtgataggttgatgatgtgtggaatggcttgtccattatttgctgcagtgatgttttcagtaatgttaattaatagtaatggttctaggatggcactgtaa

SEQ ID NO: 5193 - DNA, 311 bp, Streptococcus pneumoniae
  misc_feature (1)..(311): tiling:Spneumo1:WAN024FD6; Cluster includes WAN023KR2 3154 87_3024||||1609127..1609369|+|243 bp|EGAD orf prediction|S .pneumoniae|R6|NC_003098.1|ORF|330
ttgatattgctctgtttcccatgcatgacttttggagccaaacctagcttaccaccaaagacttctgcaatggcttggtggcccaaacaaatcccaagaatcggcttcttgcctgcaaaatcacgaatcatgtcttccatctttccagcatcaactggccaaccaggaccaggagaaaagaccagaccatctgctttttcagcttcttcatacagcttggaatcatcatttctcagaacctgaacttctgcaaaattcccaatgtattgggccaagttataggtaaaagaatcatagttgtcaatcaataa

SEQ ID NO: 5194 - DNA, 185 bp, Streptococcus pneumoniae
  misc_feature (1)..(185): tiling:Spneumo1:WAN024FY5; Cluster includes WAN023LAY 3152 85_2150||||1158851..1159114|+|264 bp|EGAD orf prediction|S .pneumoniae|R6|NC_003098.1|ORF|110
ttgatattgtctgtcggtaaaactgttgcttggagctggtccgtcacatggtccatactgtccccaacatgggtcaaggttgcacgcatagtaccatgcttacggataatcttggtaagagcacgcgtatcaattcctgaaatccctggaattttcttggctttcaaaaattcatccaaggtcat

SEQ ID NO: 5195 - DNA, 354 bp, Streptococcus pneumoniae
  misc_feature (1)..(354): tiling:Spneumo1:WAN024F5A; Cluster includes WAN023KNM 3155 00_3185b||||1702562..1702915|+|354 bp|EGAD orf prediction| S.pneumoniae|R6|NC_003098.1|ORF|110
ttgatcaatcatgttaacccactcgccagttgctgcgttaaatcctataccaagctcagcatttttcaaacgatcgataacgatagatccttcaaatcctgcattgtgagcaatttgacgaacgggttcttccaaagcacggagaacaatattacgtcctgttgcttcatctcctgtcaattccaaggtagcaacagctggaatcacattggcaagagctgttccaccacctgcaacaataccttcttcaacagctgcacgagtagcgttgagggcatcttcaatgcggagtttcatttctttcaactcagtttcagttgcggctccaaccttaataaccgctacaccacctga

SEQ ID NO: 5196 - DNA, 426 bp, Streptococcus pneumoniae
  misc_feature (1)..(426): tiling:Spneumo1:WAN024FH9; Cluster includes WAN023KWN 3131 74_2772b||||1475026..1475343|+|318 bp|EGAD orf prediction| S.pneumoniae|R6|NC_003098.1|ORF|110
ttgatcatgctagtactccaaactgtcaatatcctgaggatgctggttgagcaccacatccttgacactggcatcgtgcatttgaatcacgcgatcagcaatgggcgccaaagctccattatgagtcacgatgatcaccgtcgctcccttttgacgagacatgtcttggagaattttcaaaacctgcttgcccgtctgataatccaaggctccagtcggttcatcacaaaggagaattttaggatttttggctaccgcgcgtgcaatggagactcgctgttgctcccctccagaaagctgggctggaaagttattkagacgatgagccagacctacatctgtcaaggcctgatcaggattcaaggcatctgtcacaatttcagaagccagttccacattttccttagctgtcagattagaaactag

SEQ ID NO: 5197 - DNA, 246 bp, Streptococcus pneumoniae
  misc_feature (1)..(246): tiling:Spneumo1:WAN024FFY; Cluster includes WAN023KUX 3130 27_2846||||1521403..1521648|+|246 bp|EGAD orf prediction|S .pneumoniae|R6|NC_003098.1|ORF|110
ttgatccagcgcgtcacaataggcttccgacctgctggcatctggtcgataatggaaacatccatatctccaaaggctgtgatggcaagcgtccgtggaatgggagtcgccgtcatcatgaggacatctggattgtcacctttttcccgtaaaatacgcctttgccctacaccaaaacggtgctgctcatcgataataatcaaaccaagacgagcatactccaccccatcttgtatcagagcgtga

SEQ ID NO: 5198 - DNA, 597 bp, Streptococcus pneumoniae
  misc_feature (1)..(597): tiling:Spneumo1:WAN024FKB; Cluster includes WAN0243QX spr1 386||15903429|NP_358979.1|1369185..1369469|-|285 bp|Hypoth etical protein|S.pneumoniae|R6|NC_003098.1|ORF|321
ttgatccgctatctggaycagtatgaggatgtgattctacgggraattaaggctcaatttccagatgttgcagttgataaactcatggaagagtatataaaggcargcttgattctacgtgaaaataagcgctattacctcaattttcctacgcttgaatcacttgatagtcttgaactggatcaagagatttttgtcagagaagctagtccggtctatcaagccttgttggagcagagttttgagacggaattgcgcaatcaaatcaatgcagctattttagttgaaaagacggactttgcgcgcattaaaatgacyctgtccaattatttttacaaggtcaaacagcagtatcctttgacagaaaaacagcaggagctctatgacattttaggagatgttaatcctgagtatgcmctcaagtatatgacggcttttttgttgaaatttctcaaaaaagaccagcttatgcagaaatgccgtgatatctttgtggacagttwrstwrtcttaggctatattgtgcaaaatgaagatrgaaagtatgagttggctatcgattttgataaggagagattaactttctacttagcgtga

SEQ ID NO: 5199 - DNA, 273 bp, Streptococcus pneumoniae
  misc_feature (1)..(273): tiling:Spneumo1:WAN024GFK; Cluster includes WAN023LV0 3135 18_1111||||587202..587474|-|273 bp|EGAD orf prediction|S.p neumoniae|R6|NC_003098.1|ORF|110
ttgatcgtatttcttagccacctcatcaaagacttggttaatcacttccaaatccttgtcatctgtgtaataaacaccagtacggtactgggtccccacatcatttccttgtttatttttgctggttggattgataatgcggaaatagtgaagcaggatttccttgagagaaatttgcttggcatcataggtgacatggacggtttctgcatgacctgtttggttaatcaattcgtacttggttgtttctcctctaccatttgcatagcctga

SEQ ID NO: 5200 - DNA, 114 bp, Streptococcus pneumoniae
  misc_feature (1)..(114): tiling:Spneumo1:WAN024CHT; Cluster includes WAN0241TN SP19 62||15901785|NP_346389.1|1870417..1870524|+|108 bp|hypothe tical protein|S.pneumoniae|TIGR4|NC_003028.1|ORF|010
ttgatcgtcggttcaaatccgtctaccgccttctataacttgatttatcaggtttcaaatgaacagaaagcccaatttgaagggctttttttattttccctcgaactaactaat

SEQ ID NO: 5201 - DNA, 441 bp, Streptococcus pneumoniae
  misc_feature (1)..(441): tiling:Spneumo1:WAN024FN6; Cluster includes WAN023L3I 3133 69_2475b||||1319080..1319520|+|441 bp|EGAD orf prediction| S.pneumoniae|R6|NC_003098.1|ORF|110
ttgatcttgatacacacctggcgccaagcgaacttgattgaccgcaggaacgatagttgcagtttcaagcaaggcatccaaatgatggggaagaaaattgctaacgccgatagcacggattttcccttcttgatagaggtcttccatcgctctccaaacttccgcattgcgagttttccatgcgtcattttctctgagcggttttgggttcggccaatgaatcaaatacaaatccaaataatccaagcccagtttttctatagatttttccaaagcttgacgagtttgctcataggtttgctgactattccaaagcttggtagttacgaacatttcttcacgtggaactccgctatctttgattgcttgaccaacactttcttcattctgataaatcgccgccgtatcaatatgacgataaccagccttcaaggcttctaa

SEQ ID NO: 5202 - DNA, 1898 bp, Streptococcus pneumoniae
  misc_feature (1)..(1898): tiling:Spneumo1:WAN024GMJ; Cluster includes WAN0244I0 spr0 410||15902454|NP_358004.1|406350..408242|+|1893 bp|Hypothe tical protein|S.pneumoniae|R6|NC_003098.1|ORF|111
ttgatgaaaaaaacttttttcttactggtgttaggcttgttttgccttcttccactctctgtttttgccattgatttcaagataaactcttatcaaggggatttgtatattcatgcagayaatacggcagagtttagacagaagatagtttaccagtttgaggaggactttaagggccaaatcgtgggacttggacgtgctggtaagatgcctagcgggtttgacattgaccctcatccaaagrttcaggcygcgaaaaacggtgcagaactagcagatgtgactagcgaagtaacagaagaagcggatggttatactgtgagagtctataatccaggtcaggagggcgacatagttgaagttgacctcgtctggaacttaaaaaatttacttttcctttatgatgatatcgctgaattaaattggcaacctctgacagatagttcagagtctattgaaaagtttgaatttcatgtaargggagacaagggggctgaraaactctttttccatacagggaaactttttagagagrgaacgrttgaaaagagtaaccttgattatactatycgtttagacaatcttccggctaagcgtggagttgarttgcatgcctaytggyckcgracygattttgctagcgctagggatcagggmttgaaagggaatcgwttagaagagtttaataagatagargaytcgatygttaragaaaaagakcaragtaaacaactmsttacttggrtcytcccttcgatmctttcyatctccttgttattgagyrtctgyttctattttatytatagaagaaagaccrctccttcartcaaatatgcyaaaaatcatcgtctctatgaaccmccaatggaattagagcctatggttttatcagaagcagtctactcgacctccttggaggaagtgagtcccttggtcaagggagctggaaaattcacctttgatcaacttattcaagctaccttgctagatgtgatagaccgtgggaatgtctctatyatttcagaaggagatgcagttggyttgagrytrgtraaagaagatggtttgtcaagmtttgagaragactgyctaaatctagcyttttcaggyaaaaaagaagmmactctttccaatttgtttgcggattacaaggtatctgatagtctttatcgtagagccaaagtttctgatgaaaaacggattcaagcaagagggcttcaactcaaatcttcttttgaagaggtattgaaccagatgcaagaaggagtgagaaaacgagtttccttctgggggctcccagattaytatcgtcctttaactggtkkggaaaagrcyttgcaagtgggtatrggtgycttgactatcytgcccctatttatcggatttggtttgttcttgtacagtttagacgttcatggctatctttacctccctttgccaatacttggttttctagggttagttttgtctgttttctattattggaagcttcgactagataatcgtgatggtgttctaaatgaagcgggagctgaggtctactatctctggaccagttttgaaaayatgttvcgtgagattgcacgaytggatmaggctgaaytggaaagtattgtkgtytggaatcgyctcttggtctatgcraccttatttggctatgcggacaaggttagtcatttgatgaaggttcatcagattcaagtkgaaaatccagatatcaatctctatgtagcttatggctggcacagtaygttttatcattcaasmgcrcaaatgagccattatgctagtgtcgcaaatacagcaagyacctactcygtatcttctggaagtggaagttctggyggtggcttctctggaggcggaggtggcggcagtatcggwgccttttaactaat

SEQ ID NO: 5203 - DNA, 1090 bp, Streptococcus pneumoniae
  misc_feature (1)..(1090): tiling:Spneumo1:WAN024DUQ; Cluster includes WAN0243A3 spr1 994||15904035|NP_359585.1|1986304..1987314|+|1011 bp|Conse rved hypothetical protein|S.pneumoniae|R6|NC_003098.1|ORF| 111
ttgatgaaaaggacctggaggaactcattcgtgacaaatcttaatacaccttttatgattggcaatrttgagattcccaatcgtaccgttttagcgcctatggctggcgtgaccaactcagcctttcgtacyatygcaaargagctcggagctggactcgttgtaatggaaatggtctctgacaagggaatccaatacaacaacgaaaaaaccctgcayatgcttcatatcgatgagggcgaaaaccctgtctctatccaactttttggtagcgatgaagacagcctagcacgcgcagcagaattyatccaagaaaacacyaagaccgatatcgtcgatatcaacatgggctgccctgtcaacaaaatcgtgaagaacgaagctggwgctatgtggctcaaggatccwgacaagatytactcyatcatcaacaaggtccagtctgtccttgatatcccacttactgtcaaaatgcgtaccggctgggcggacccatctctkgcagtagaraatgcyctcgctgctgargctgcaggtgtttctgccctcgccatgcatggccgtacccgtgaacaaatgtatactggccacgcagaccttgagaccctttacaaggttgcccaagctctaaccaagattccattcatcgccaacggtgatatccgtactgtccaagaagccaagcaacgcatcgaagaagttggtgctgacgcagtcatgattggccgagctgccatgggaaatccttacctcttcaaccaaatcaaccattactttgaaacaggagaaatcctacctgatttgacctttgaagacaagatgaagatcgcctacgaacacttgaaacgattgattaacctcaaaggagaaaacgtcgcagttcgtgaattccgcggyctcgctcctcactayctccgtggaacatctggcgctgccaaactccgtggagccatttcgcaagcyagcaccctrgcagagattgaarccctcttgcaattggagaaggcttaatartttaaaacccgtaactctcttaaagagtctcttgaatgccgccattctttcctcatcaaaaaaactccgtagtctc

SEQ ID NO: 5204 - DNA, 1095 bp, Streptococcus pneumoniae
  misc_feature (1)..(1095): tiling:Spneumo1:WAN024FOH; Cluster includes WAN023PIU pne3 3_15||||8388..9482|+|1095 bp|Type 16A capsule operon, Glim mer 2.02 orf prediction|S.pneumoniae||WAN01UCI4|ORF|000
ttgatgaaaattttgcatattccaacaggaggtttgttttctgatgggattggaacatttatatattcatacctcgaatacatggacttgagtgaaattgaagtgacgattctagctaccaataaaccgttgttagaagataaattaaaatttcaagtattaggtgttcagattgtagaaattgaaagaaagaaatcctcaatactggcatatatgagagaattccttgaactcttaaaagtaggaaaatacgatgttgtacatgttcacgggagtagtgctcttatgtcaattgaattgtttatagcaaaaattatgggagttcctgtaagaatagcgcatagtcataatacaacgtgtaatcatattctactagacagaatgttacgtccttttttttacactttatatactcaatcttgggcgtgtggtgaaaaggcaggagaatggctttttaaggataaacgatttaaagttatacataatgccagggatgtagaaaaatatagttttaatcctcatcttcgccgagtatttcggacaacacattcattaaaagaaaatacacttgcattaggacatgtaggcagattcaatattcaaaaaaatcatacatttcttctggatttaatggatgaaatgaaatgtaagcagaaggatgtaaaattgtttttggtcggtgaaggagaaaaagtagaagatgttaagagatatgtaaaagaacgaaaattagaagattcaattgtttttttgaatcggtattcggatatgcaatcgtttatttctgctatggatataatgttattaccgagtttatacgaggggttacctttagttgctattgagtggcaaattaatggaattcaatctattctttcaacgacaatttctgatgagtgcatcttcacaaacagtatccaacaattaccaattgacaacgtaagtacttggataaaaaaagctattgaagatttttcatatataaacagattggaaaaatctagagaaaatattgacctagctcaaaaatcaaactatgatatcaggattgaggctaaaaaattagagcatgagtataaaaagttgattggggag

SEQ ID NO: 5205 - DNA, 141 bp, Streptococcus pneumoniae
  misc_feature (1)..(141): tiling:Spneumo1:WAN024DMT; Cluster includes WAN0241O1 SP21 77||15901987|NP_346591.1|2094751..2094885|-|135 bp|hypothe tical protein|S.pneumoniae|TIGR4|NC_003028.1|ORF|121
ttgatgaaacagagaaaagaattgtacctctttcttggtcggacagccttgtattttcttatctttctagggctgctttacttctttagctatcttggtcagggtcaaggaagctttatctataatgaatttctaactaat

SEQ ID NO: 5206 - DNA, 1527 bp, Streptococcus pneumoniae
  misc_feature (1)..(1527): tiling:Spneumo1:WAN024DQL; Cluster includes WAN023RUS cont ig_1608_4||||2043..3548|+|1506 bp|Glimmer 2.02 orf predict ion|S.pneumoniae|670|WAN01UDCO|ORF|001
ttgatgaaatcaaaaatagttttgggagcttcgctagcgatcgcaacacttagcttagtatctcttgtcgagattgaaggactctcaccgtttttaatagagaatgttagcgcaaatactcattctgcaaataaagttattaatcataaagtaagtatttacttagaaaatgctgatgaaggtaaaggtctaactgtaaacttttcaacagacagtgttagtccaaatttatttgatgagttcgaaaaaaagagtggaattacaataactactatgttagtgaatgctaagacaggtgaagttgtagaaaaaagattaacaccaagcgtttttttacgttccaatgatttaaccagtgggaccatatcttcgtttatttttagtgaatatcctgatggagaatataaatatgttgtgtctaaaggagactttatcgatcctaagactcagtttaaacatcagtatagaggagaatctccagtttttagaatacgtaatcgaaaatatgtggagttgggaacaactgataaaaaattagatgaaagacgtgataatagcgtttataaagatggggttgttgaacacaaggtaaatttaagtttaacaagttatcaaggaggtaatggagttactgcaattttttcaactgatagtgttaactctaacttacttaattcttttggtgaaaaggctaaaaaagttttgattaggtctaagttaattaatgttaagactggcgaggttattgatgaaacgttttctccaaaagtaagtttaacctctaaaattttgaaaagtggttctacagcagtattttattttatagatttaactgatggcgaatataaatatgttgcgtatgaaagccagcaatatactgatcctcaaacaacattgactcatcagtatagaggagaatctcctatttttagtatcaaagatggaaaattttctggtttagtatctgcctcaaaaccagacgaaaacccgamgccaacgccaaaaccggatgagaaaccaaaaccttcagcaccacaacaggagaaamcaaaacctacagttcagtctggttgggtaggttcatcttattatcaaaatggtaaaaaagtcactagtaagtggatttttgataaaaaatataattcatacttctatctagatgcatcaggaaattatgttcaaaacgcttgggtaggtaactattatctcaaatcaggcggatacatggctaaaagtgagtggatttatgataagaactatggttcatactactatctaacatcagaaggcagctacgctcgtaacacttggtcaggcaattattatttgaagtcaaatggtaagatggctaaaagtgagtgggtatacgatagtaactacaaatcatattactacttgacatcagaaggaagttatgctcgtaacacttgggtaggcaattactatcttaaatcaaacggtaaaatggctgttaatgaacgtacaccagatggttatcgtgtagatggttcaggtaaatgggttaaa

SEQ ID NO: 5207 - DNA, 102 bp, Streptococcus pneumoniae
  misc_feature (1)..(102): tiling:Spneumo1:WAN024CI2; Cluster includes WAN0241XG SP18 19||15901648|NP_346252.1|1731351..1731446|-|96 bp|hypothet ical protein|S.pneumoniae|TIGR4|NC_003028.1|ORF|010
ttgatgaacttgagttctatctacagctccatgcctactactaaaagcaaacaaaaaggctggactaatacgaaaaaagctagtaatactcaaykaactaat

SEQ ID NO: 5208 - DNA, 153 bp, Streptococcus pneumoniae
  misc_feature (1)..(153): tiling:Spneumo1:WAN024GEG; Cluster includes WAN0242QS SP06 91||15900592|NP_345196.1|663024..663170|+|147 bp|hypotheti cal protein|S.pneumoniae|TIGR4|NC_003028.1|ORF|010
ttgatgaagaaggtaacacatatgtcagatgaagtattcttatttgaagaaattgaagaaatcgtagcccctacagatggtgaatttttgggggaagttttacttggaactggggtagttctcttaattggagtagcctgttgtctaactaat

SEQ ID NO: 5209 - DNA, 687 bp, Streptococcus pneumoniae
  misc_feature (1)..(687): tiling:Spneumo1:WAN024DXY; Cluster includes WAN0243CL spr1 904||15903945|NP_359495.1|1881722..1882402|-|681 bp|Conser ved hypothetical protein|S.pneumoniae|R6|NC_003098.1|ORF|2 11
ttgatgaaggaaatctttgatagacgttaccctgtgacgagtttcttcctcttagtgacggccttggtatttttactaatgttggtcactgcaggcggaaactttgacagggcagatacattatttcgatttggagccatgtatgggccagctattcgcctctttcccgagcagrtttggcgtctcttgtctgccatttttgttcatattgggtgggaacatttcattgttaatatgctttcactttattatcttggaaggcaggtagaggagattttcggytctaagcagttyttytttctctatctyttatcaggaatgatgggcaatctctttgtttttgtatttagtcctaaatccttagcagcaggcgcctctacctctctttatgggctatttgccgcgattatyrttcttcgctatgcaackcgyaatccttatatycarcagytrggscaatcctatctgacactttttgtggttaacattattggaagtgttctgattccaggaatcagcctagcaggccatatcggtggtgcagttggtggcgcatttctagcagttatctttccagttagaggagaaaaacggatgtataayaccagccagagattaggagcggtagtcttgttcgtaggactcgccattttgcttttctacaagggaatgggawtgykaactaat

SEQ ID NO: 5210 - DNA, 303 bp, Streptococcus pneumoniae
  misc_feature (1)..(303): tiling:Spneumo1:WAN024FGG; Cluster includes WAN023KVQ 3157 07_2820b||||1501476..1501778|+|303 bp|EGAD orf prediction| S.pneumoniae|R6|NC_003098.1|ORF|110
ttgatgaaggtaaagattgcaagggctgcaaaccctggtttcacaatcgggaaggctacactccagaaggtacgaatctcaccacaaccgtcgattttagctgattcaagcaactctgtaggratattttcactgaactgtttcatgaggaagacaccgaatggccatccaatcaaaggcaagataactgcccagagagtatcrtggattcccatgaagttgacratacgtaccaatggtacaaggacaacttgttttggaagcgccatagcagcgataaagatagcaaatagratgcgttga

SEQ ID NO: 5211 - DNA, 1941 bp, Streptococcus pneumoniae
  misc_feature (1)..(1941): tiling:Spneumo1:WAN024FZK; Cluster includes WAN0243Y1 spr1 130||15903173|NP_358723.1|1134145..1136079|-|1935 bp|Hypot hetical protein|S.pneumoniae|R6|NC_003098.1|ORF|211
ttgatgaataaaagaaaagttagtttagaagatttttataaatggtatagtctaaataaagaagagttattaaataaggcaactgttggtgaaaagtttaatgataaattaaaagaagagtttctccaggaatggcctttggataggattttaacaatgtcaatcgatgaatatgtaataggaaagggacagcaaaatwartctttatgctacgctcttgagaagggaaaatacaaaaatctatttcttggaatttctggtggctcagcttcaaaatttggtatttattggaataaaaaaacaaacaaatataaagatcaagctaataatgagatttcagagttggatcagcgattttcaaaattaaaatcagatttgtatgaaattatcaaagaaggtattcgttttaactttgaaaatyctatttttgatatgaaaagatcaacaaatgaatttattggtcgttctgctatggtgacaaaattactttgtatctatwctgagggagatcctttctttggtgtaaatattaatagtcagaaagaattttggaaccactttgtttctcagacaaatcaaggtggaccttatctgcaaaatcataaaataattgaactggtgtccaaaacttatcctgagttggagccatcgaaattaggaactatgctttttgagtattctaagctttttatggaaaataaggaagacaatagtacaatggattcatcaaacaattttmgtcatcaattaactcaatctctattaaagtctccaaacctyatcctycgyggtgctcctggcacrggaaaracttatcttgctaaagaaattgcyaaagaattaacggatggyaacgaagaycaaatcggatttgtacaatttcacccatcmtatgattatacggattttgtagaaggtttaagaccagtatcaaatggggatggagctattgagtttaggctacaggacggtatttttaaagatttttgtcagaaagcaaaagaamcccaattgattggaggacaagataattttgatgaggcttgggattcttacttagaatatataaatgttgctgaagaaaaagaatatataacaaaaacatctkacttatctgttaatagtagacaaaatttrtcagtaaattatgatagtggtgttccaggatggtcactacctagcaaatatgtttacgagttgtataaagataaaaattataataagcaagaatactacaaaagtggtggaaaaactgtcctagaaacattgagaaagagatttggtttgaaagactatrtttcyccarmagarrttgawacwgayaagaawttygtyttcatcatcgatgaratcaatcgtggggagatttctaagatttttggcgaactctttttytctatcgacccyggctatcgtggtgaaaaaggaagtgtttctacccaatatgcaaatctacacgaaactgatgaaaagttctatatccccgaaaatgtttacatcatcggaactatgaatgatattgatcgttcagtggatacctttgattttgctatgcgtcgtcgttttcgttttgttgaagttactgycgagggtcaagytggcatgttggataaagakytgaatatccatgcagaagaagcaaaaattcgtctaagaaacttgaacgctgctatcgaaaatrttcaggaattaaacagtcattatcatattggaccaagttattttcttaagttgaaggatgtagattttgactatgaattactctggtcygattatattaagcctctcctagaagactacttgcgaggttcttatgatgaggttgaaactttggaaactttgaaaaaagcatttgawctgacaaataatgakcaaamwgrtcarsmagtagctgrtgayaatgawrsbgatramaacgatgatgcggattacykaactaat

SEQ ID NO: 5212 - DNA, 1428 bp, Streptococcus pneumoniae
  misc_feature (1)..(1428): tiling:Spneumo1:WAN024CCW; Cluster includes WAN0240F9 |cps 19aJ||AAC78672.1|||1428 bp|putative repeat unit transporte r Cps19aJ|S.pneumoniae||AF094575|ORF|000
ttgatgaatagcaaaattaaaaatatactaactaatttctcttatgtcatttcttcaaatcttttgacagtcttgacctcttccttggttgtcttaattttccccaaattaatgggggtaacagagtacagttactggcaactttatattttttatctgacctatatcggttttttccacttgggttggattgatgggatttatcttaaatatggtggcttagaatataataatttagatagaaaacagttttattctcagatgattctattttctagcttcttaatgattatctccttgctattgtttggtttaaatgtattagctgtaacagattcgaatgcacgatatatttataatatgactattataagtatgataatcacaaatttaagaacgctctacgtgtatgttttgcagatgacaaaccgcttgaaggatagttccatcattctactcagtgatcgcgttttatatgtgctccttttattcctgtttattgtatttggttggcatgaatacaaggttatgattttggcagatattctaggtcgatcattttctctcatactttccttctggatttgtaaagatattgtgtttcagcctttgtcaaaattcatctttaatataaaagagtcttttgataatatccgagttggtatcaatttaatgttatccaacatcgcaagtagtttgattatcggtattgttcgtctaggaatccaatggaactggaatatcgaaacattcgggaaagtatctctgaccttgagtgtttccaatctattgatgactttcattaatgccattggactagtcgtctttccgctattaagacgaacaaaagcagaaaacttacctaagatttattctaatttaagaaacgttttgatgcttatcatgttcgcgattttgctcatttactatcctttaaaaattgtattagacctctggttgccagcctatcaagatgccttgattttcatgacccttattttccctatgtcagtctatgaagggaaaatggcattggtcattaatacttacttaaaggcattaagaatggaaagagatatccttagagtcaatgccttagtaatgttgatcagtatgggagtgaccctggttacaacatacctgttaaatagtttggagctgactgttgtatcgatagttgttttgctagctttgagaagtatcatagccgaattaattctgtctaaaaaactggatgtttcggttaagaaggatattgtattagaatttcttttgacgcttgtctttatttcttcaagttggtatttgccgattgggctggcagtaattgtctacacaatagcctacggtttatatctctatttgaaacacgaagatatcaaaacctatttagcttactttaaagctagtaaaaaaacatcaaattaa

SEQ ID NO: 5213 - DNA, 869 bp, Streptococcus pneumoniae
  misc_feature (1)..(869): tiling:Spneumo1:WAN024D7T; Cluster includes WAN02439D spr2 020|rpsB|15904061|NP_359611.1|2011840..2012619|-|780 bp|30 S Ribosomal protein S2|S.pneumoniae|R6|NC_003098.1|ORF|221
ttgatgaattgtgaagcagttgcccttgggtcgttttgcgagttgaagtcaagaagaggaaaaaaacaaaaaggagaaatactcatggcagtaatttcaatgaaacaacttcttgaggctggtgtacactttggtcaccaaactcgtcgctggaatcctaagatggctaagtacatctttactgaacgtaacggaatccacgttatcgacttgcaacaaactgtaaaatacgctgaccaagcatacgacttcatgcgtgatgcagcagctaacgatgcagttgtattgttcgttggtactaagaaacaagcagctgatgcagttgctgaagaagcagtacgttcaggtcaatacttcatcaaccaccgttggttgggtggaactcttacaaactggggaacaatccaaaaacgtatcgctcgtttgaaagaaattaaacgtatggaagaagatggaactttcgaagttcttcctaagaaagaagttgcacttcttaacaaacaacgtgcgcgtcttgaaaaattcttgggyggtatcgaagatatgcctcgtaycccagatgtgatgtacgtagttgacccacataaagagcaaatcgctgtyaaagaagctaaaaaattgggaatcccagttgtagcgatggttgacaccaatactgatccagatgatatcgatgtaatcatcccagctaacgatgacgctatccgtgctgttaaattgatcacagctaaattggctgacgctattatcgaaggacgtcaaggtgaggatgcagtagcagttgaagcagaatttgcagcttyagaaactcaagcagattcaattgaagaaatcgttgaagttgtagaaggygacaacrmwtarctaat

SEQ ID NO: 5214 - DNA, 1215 bp, Streptococcus pneumoniae
  misc_feature (1)..(1215): tiling:Spneumo1:WAN024CVH; Cluster includes WAN0242WO SP04 64||15900380|NP_344984.1|443275..444456|+|1182 bp|cell wal l surface anchor family protein|S.pneumoniae|TIGR4|NC_0030 28.1|ORF|010
ttgatgacaatgcagaaaatgcagaaaatgattagtcgtatcttctttgttatggctctgtgtttttctcttgtatggggtgcacatgcagtccaagcgcaagaagatcacacgttggtcttgcaattggagaactatcaggaggtggttagtcaattgccatctcgtgatggtcatcggttgcaagtatggaagttggatgattcgtattcctatgatgatcgggtgcaaattgtaagagacttgcattcgtgggatgagaataaactttcttctttcaaaaagacttcgtttgagatgaccttccttgagaatcagattgaagtatctcatattccaaatggtctttactatgttcgctctattatccagacggatgcggtttcttatccagctgaatttctttttgaaatgacagatcaaacggtagagcctttggtcattgtagcgaaaaaaacagatacaatgacaacaaaggtgaagctgataaaggtggatcaagaccacaatcgcttggagggtgtcggctttaaattggtatcagtagcaagagatgkttctgaaaaagaggttcccttgattggagaataccgttacagttcttctggtcaagtagggagaactctctatactgataaaaatggagagatttttgtgacaaatcttcctcttgggaactatcgtttcaaggaggtggagccactggcaggctatgctgttacgacgctggatacggatgtccagctggtagatcatcagctggtgacgattacggttgtcaatcagaaattaccacgtggcaatgttgactttatgaaggtggatggtcggaccaatacctctcttcaaggggcaatgttcaaagtcatgaaagaagaaagcggacactatactcctgttcttcaaaatggtaaggaagtagttgtaacatcagggaaagatggtcgtttccgagtggaaggtctagagtatgggacatactatttatgggagctccaagctccaactggttatgttcaattaacatcgcctgtttcctttacaatcgggaaagatactcgtaaggaactggtaacagtggttaaaaataacaagcgaccacggattgatgtgccagatacaggggaagaaaccttgtatatcttgatgcttgttgccattttgttgtttggtagtggttattatcttacgaaaaaaccaaataacykaactaat

SEQ ID NO: 5215 - DNA, 291 bp, Streptococcus pneumoniae
  misc_feature (1)..(291): tiling:Spneumo1:WAN024BEN; Cluster includes WAN023KY1 3133 72_2709b||||1441663..1441953|+|291 bp|EGAD orf prediction| S.pneumoniae|R6|NC_003098.1|ORF|110
ttgatgacctgcttggatcaattcaataacagtgtgggttccaataaaaccggcaccaccagttaccaaaatcttttcttgcatcttttttcctcgattctcagattattttttcttattttaccatttttgacagggaatgtcatttgccatcctaaactacctgataaaatttcagtaaaatgcttatactcttcgaaaatccaattcaaacyacgtcaacgtcgccttgccatgggtatggttactgacttcgtcagttctatcyacaacctcaaaacagtgttttga

SEQ ID NO: 5216 - DNA, 767 bp, Streptococcus pneumoniae
  misc_feature (1)..(767): tiling:Spneumo1:WAN024CJY; Cluster includes WAN02439T spr2 004|ABC-MSP|15904045|NP_359595.1|1997745..1998506|-|762 bp |ABC transporter membrane-spanning permease - unknown subs trate|S.pneumoniae|R6|NC_003098.1|ORF|322
ttgatgagaaacttgaraagtatactgagacgacacattagtctattgggctttctcggagtmttgtcaatctggcagttagcaggttttcttaaactkctccccaagtttatcctgccgacacctcttgaaattctccagccctttgttcgtgacagagaatttctctggcaccatagctgggcgaccttgagagtggctttactggggctgattttgggagttttgattgcctgtcttatggctgtrctcatggatagtttgacttggytcaatgacctgatttaccctatgatggtggtcattcagaccattccgaccattgccatagctcctatcctggtcttgtggctrggttatgggattttgcccaagattgtcttgattatcttaacracaacctttcccatcatcgtyagyattttggacggttttaggcattgygacaaggatatgctgacyttgtttagtctgatgcgrgcmaasccttggcaaatcctgtggcattttaaaatyccrgtyagcctgccytacttttatgcwggtctgagggtcagtgtctcctacgcytttatcacaacwgtggtatctgagtggttgggaggytttgarggkcttggtgtttatatgattcagtcyaaraaaytgtttcagtatgataccatgttygcyattattattctggtrtcgattatcagycttttgggtatgaagytggtcgatatyagtgaaaaatatgtkattaaatggaaacgtwcktarctaat

SEQ ID NO: 5217 - DNA, 377 bp, Streptococcus pneumoniae
  misc_feature (1)..(377): tiling:Spneumo1:WAN024EXL; Cluster includes WAN0243MM spr1 541|acpS|15903584|NP_359134.1|1523839..1524201|-|363 bp|Ac yl Carrier protein synthase|S.pneumoniae|R6|NC_003098.1|OR F|221
ttgatgagaatgatagttggacacggaattgacatcgaagaattggcttcgatagaaagcgcagttacacgacatgaaggatttgctaagcgtgtactgaccgctcaggaaatggagcgcttcaccagtctcaaaggacgcaggcaaatagaatatttagctggtcgctggtcggctaaggaggccttttccaaggctatgggaacgggcattagcaagctcggttttcaggatttggaagtcttgaacaatgaacgtggggcgccttattttagtcaggcaccattttcaggaaagatttggctgtctatcagccacaccgatcagtttgtgacagccagtgtcattttggaggaaaatcatgaaagctarctaat

SEQ ID NO: 5218 - DNA, 935 bp, Streptococcus pneumoniae
  misc_feature (1)..(935): tiling:Spneumo1:WAN024DF3; Cluster includes WAN02449Z spr0 699||15902743|NP_358293.1|700006..700935|+|930 bp|Conserve d hypothetical protein|S.pneumoniae|R6|NC_003098.1|ORF|111
ttgatgagatacataactcttggtcaagatgacaaagaattatcagaaattgttctcggaatgatgagaataaaagataartctgtaaaagaagttgaagagcttgtagaaacagcactttctgttggaatcaatgccttcgacttggctgatatttatggtcgtggtcgttgtgaagaactgttaggtcttgtcctaaaaaatcrtccagatttaagagaaaagatgtggattcagtccaaatgtggcattcgyattgaagaatttacctattttgatttttctaaggactatattataaaatcagtagacggtattttgcaaagattgaagattratcatctagatagcttgctccttcatcgaccagatgctttgatggaatctgaccaagtagcagaagcctttratctcctttataaacaaggtaargttcgagattttggagtttctaatcaaaatcctatgatgatggagttrcttaaaaaagatgtcaagcagccgttagctgttaatcagctacaattgagtgcggcttttactccaggatttgaatcagcttttcatgttaatatggaagatagtcaagcagctatgcgagatggcagcatttttgaatattgcmaattacacgatgtggtcattcaagcatggtctgtcttrcaattcgggtattttaaagggaaytttgttggaaatgagaaatttcaagctttaaatcaagtacttgatcgtttagctattaaatatggagtaacctcttcaactattgccatttcttggatattgcgttatccagcaaaaatgcaggcagtygtaggtacmacaaatcctaagcacttgagagaagttagccragcggcaaactttagcttaacaagaaaagaatggtatgaaatttatcttgctgcagggaataatttgccgtaactaat

SEQ ID NO: 5219 - DNA, 1140 bp, Streptococcus pneumoniae
  misc_feature (1)..(1140): tiling:Spneumo1:WAN024FWW; Cluster includes WAN023PSS pne1 4_13||||9743..10882|+|1140 bp|Type 9L capsule operon, Glim mer 2.02 orf prediction|S.pneumoniae||WAN01UCJV|ORF|000
ttgatgataaaaagaaaaatatatataatctgtgtattactgtcgtattttttacctagtttttttacagttggmtcaatggcgactttatttgctttgctttctactttagttaagctatttgtracttttgattatattcccaaagttcttttacarcataaagtaacactgattgatattctagttgttctatttttattttttcaagcatttgcagcttttcaaagccaaacgttgtaccttaactaygttggaggtcagtttttccttttaggactatattcatttttgaaacactttttattgttggattgtaaaacaacaataaaaagcctctttttaacctttatcttgtttttgtgtgttcargtaataactcaattgctttttccggtcggtttcgattctttgcaccctacaggagataatagactttactttttaggaagaaagaacatagctaccccgtatatcattgttggattaggtggtttttacttattaaataaaaaaatgaatgagttyatatcactaaaggagattatttttttaggattgttcggaattttatcatttttaacacaatccagtacagcgattatatgttatgggctttttattttcatacgtctattgggattaaaggaaaatataggaaaactatattctttagtcagtatggctgtatatgtttgtttttctctttctataatcttttcacaaagtacaattttatcaacttttacagcgattttttccaaaaatgcaactttttcaggacgtatyaatatttggcaattagcgattcgtatttttgaagagaatttttggtttggacgaggcctcracgttaattttaatgcttggacaaatgggattatcgttaattcagcacacaataccttattagatatacttgctcgaactggyatatttccaggtgttttatttatagtgcttcttatgaatctgtttcttggaaaatatagaatagaatcaaaaacactgttggctatgttagcctcatttatgatttatattacaatggagacttcatctatgagcatattgctgctaattattgttctttgtgtatattggccacgtggagaggagaagttgcatgagcaagttact

SEQ ID NO: 5220 - DNA, 261 bp, Streptococcus pneumoniae
  misc_feature (1)..(261): tiling:Spneumo1:WAN024D6H; Cluster includes WAN023L02 3131 64_2617b||||1396147..1396407|+|261 bp|EGAD orf prediction| S.pneumoniae|R6|NC_003098.1|ORF|110
ttgatgataaccacagctaggatgataatggcatctgcgatatcttccccaccagaagtcacgactgacaagattgctgccgcaactaggatgataatcatcaaatccttaaattgctcgatgaatttgaccaagattgatcgtttctcgccttcttcgagttcattgtgcccaaattcggcaaggcgcttttccgcctcacttgatgacaaaccttgctcggtcgcatccacagcctgcaagacctcttcagggctctga

SEQ ID NO: 5221 - DNA, 237 bp, Streptococcus pneumoniae
  misc_feature (1)..(237): tiling:Spneumo1:WAN024DWT; Cluster includes WAN023KEP 3133 60_3580b||||1921417..1921653|+|237 bp|EGAD orf prediction| S.pneumoniae|R6|NC_003098.1|ORF|110
ttgatgatattaaagtttgaacatgatttttatctcttaaaattgttgttaaatgtgacaaagcctttaaatgactctcattatcaatggctgcaatacaaatcaacaatcttacctcttgttctggattatccaataaataaatcggttcttccaaaactaacattgacattcctatttcattcacaccttcatctggccgagcgtgaggaattgctactcccttccctaaattaa

SEQ ID NO: 5222 - DNA, 195 bp, Streptococcus pneumoniae
  misc_feature (1)..(195): tiling:Spneumo1:WAN024AV2; Cluster includes WAN0242A7 SP13 35||15901189|NP_345793.1|1257904..1258092|-|189 bp|hypothe tical protein|S.pneumoniae|TIGR4|NC_003028.1|ORF|010
ttgatgcccaattatccatgtgagtttgaggtaacatttttagatgattaccataaaaaacataattacccactattttatgaatcctatcttcaaaacgttatggaattccttgaaagtcaggatataaagaacggagttaatgcctttgtagatgataatcagaatcttgtttttgttttatatykaactaat

SEQ ID NO: 5223 - DNA, 114 bp, Streptococcus pneumoniae
  misc_feature (1)..(114): tiling:Spneumo1:WAN024DTG; Cluster includes WAN02436J SP00 80||15900025|NP_344629.1|84877..84984|+|108 bp|hypothetica l protein|S.pneumoniae|TIGR4|NC_003028.1|ORF|120
ttgatgccyaagatggcaaatagagacagaagccccttgtcttctagtaaaagttcttcaaaggctggactttatggtaaaatagaargaagtgacaagagagagctaactaat

SEQ ID NO: 5224 - DNA, 276 bp, Streptococcus pneumoniae
  misc_feature (1)..(276): tiling:Spneumo1:WAN024CYQ; Cluster includes WAN023LGN 3156 11_1924b||||1041525..1041800|+|276 bp|EGAD orf prediction| S.pneumoniae|R6|NC_003098.1|ORF|110
ttgatgcgattgatttcggccaattcttcttctgaaaagacgtattcagtcatctctgggtactcttttttcatgtattccaagagtaaatcacggaatttttcgactgtgattttttttggtaattcattgataatattggttacacgggcacggacggatttcacaccttttgattcaaatttatcttttgaaaccttaagggcatttgcgaggactgacaaatcaacgtcaaagagcaagcaaccgtggtgcatgatacggccgttgatatag

SEQ ID NO: 5225 - DNA, 771 bp, Streptococcus pneumoniae
  misc_feature (1)..(771): tiling:Spneumo1:WAN024DHI; Cluster includes WAN0244FP spr0 493||15902537|NP_358087.1|494407..495177|+|771 bp|Conserve d hypothetical protein|S.pneumoniae|R6|NC_003098.1|ORF|101
ttgatggagaaagtgatgtccaaacaccctcattatgaattgttaaatttaattggctacggtcttgccaagtttgacaagctttttataaaagaatttcaatgctytagcaagtcggagttttatcgctatgtggtttctctgggaattgctgaaacaactggagttgtaaaaaatagaatggatttatttgatccttattttgacaataatcgaaaaggttggtggcagaaagctgaagtttatcgttttcgtaaagatttaattgatatgatgtttggaaatgaagatgttcatagttatgctgaaatagttaaaatgttacttgccagtgaagggaagaaaacaggcataaccatcgttgaaaaaccaatagttcgaactaaattcaaacgtctacaggaaacgggaatggaggctgagaattattttatccttcattttgataaagaagaaaaattccaaggtggacagttaaccgatgcccgtctttatggtgatggatatgactttcaggtagatgtccaagagtattcttaccttgccgaagtaaaaggtatccgaaaatctaaggggcgtgtgcgtttaactgcaaaagaatttgaaaaagtcaaggagtttcaatcggattttattttatccttggtcacaaatctagatgatattccaaagttagtgttaatcgataatcctttaaaacattttgagtttaaaaagaatattatcaaaaatgaaatcattgaatatagaagcgtagaggatttgtattag

SEQ ID NO: 5226 - DNA, 1878 bp, Streptococcus pneumoniae
  misc_feature (1)..(1878): tiling:Spneumo1:WAN024CHF-5; Cluster includes WAN0244S4 sp r0046|purL|15902090|NP_357640.1|46493..50221|+|3729 bp|Pho sphoribosylformylglycinamide synthetase|S.pneumoniae|R6|NC _003098.1|ORF|551
ttgatggataaacgtatttttgttgaaaaaaaggctgattttcaggtcaagtcagagagtttggttagagagctccagcacaacktgggactgtcaagcttgaaaagtattcgtattgtgcaagtatatgatgtatttgacttggytgaggacttgtttgcacctgcagagaagcacattttctctgagcaggkaaccgaccatgttttagatgaagtatctgtgcaggcggatcttgctaactatgctttctttgccattgaaagtctrccagggcagtttgaccagcgtgcagcttcgtcacaggaagccttgcttttgttgggaagttcgagtgacgtgacagtyaacacagcccaactttacttggtgaataaagatattgatgcgactgagttgraagctgtcaaaaactacctgctcaatccagttgattctcgtttcaaggatatcacgacagggattgccaagcaggagttttcagagtcagacaagaccattccmaaattgactttctttgaaagctatrcagcagaagaytttgctcgctacaaggccgarcaagggatggccatggaagtggatgatttgctctttatccaagactactttaagtcaatcgggcgcgtgccaactgagactgaactyaaggttttggacacttactggtctgaccactgccgtcatacgacttttgagacagagttgaaacacatcgacttttcagcttctaaatttcaaaagcaattgcagtcaacctatgacaagtatattgccatgcgcgaggarttaggtcggtctgaaaaaccacaaaccttgatggatatggcgactattttcggtcgttatgagcgtgctaayggacgattggatgatatggaagtctctgacgaaatcaatgcctgctcagttgaaattgaagtggaygttgatggtgtcaaggaaccttggctcctcatgtttaaaaaygaaacccacaaccatccaacagaaattgagccatttggtggagcggctacctgtatyggtggagctattcgtgatccgttgtcaggccgttcctatgtttaccaagccatgcgtatttcaggtgctggtgatattacagcaccgatttcggaaactcgygctgggaaattgccacaacaagtcatttctaaaacagcagctcatggttattcttcatatggtaaccagattgggcttgcmacaacctacgttcgtgaatacttccacccaggctttgtagctaaacgtatggaacttggtgccgttgttggtgcgrctcccaagggcaatgttgtccgtgaaaaacctgaagcaggtgatgtgatcatccttctcggaggyaaaacaggtcgtgatggtgtcggtggtgcgacgggctcttctaaggttcaaacagttgagtctgtagagactgctggtgctgaggttcaaaaaggaaatgccatcgaagaacgcaagattcagcgcctcttccgtaatggcaatgtcactcgtctgatcaagaagtccaatgactttggggcaggcggygtctgtgtggctatcggtgaattggcagacggtcttgaaatcgacctcaacaaggtgcctcttaaataccagggcttgaatggtacagaaattgccatctctgaatcacaagaacggatggcggtygtggttcgtcctgaagatgtggatrccttcgttgccgaatgtaacaaagaaaatattgatgctgttgtggtggcgayagtaactgaaaaaccaaatcttgtcatgcactggaatggtgagacaatcgttgacttggagcgtcgtttccttgacaycaatggtgtgcgcgtggttgtcgatgccaaagttgtggacaaggatgtcaaactccca

SEQ ID NO: 5227 - DNA, 383 bp, Streptococcus pneumoniae
  misc_feature (1)..(383): tiling:Spneumo1:WAN024DAK; Cluster includes WAN024400 spr1 058||15903102|NP_358652.1|1053436..1053594|-|159 bp|Hypoth etical protein|S.pneumoniae|R6|NC_003098.1|ORF|211
ttgatggawagtattggtcttgttatcgtttcacattccaaacacattgcagaaggtgttgttgaactrattagtaaagtagctaaagatgttccgattacttatgtargaggaaccgagggcggaggaattggaacgagttttgawyaagtagatagggttgtttccgaaaatccagcagatactttacttgccttttttgacctaggttctgctaaaatgwacttaaaaatggtgactgatttcagtgataaaagtatcatcatcaacagggttccaattgtagaaggtgcctataatgcagctgctcttcttcaggctggtgcagaactgtcagttattcaaacacagttagcggagcttgaaatcaataaataactaat

SEQ ID NO: 5228 - DNA, 387 bp, Streptococcus pneumoniae
  misc_feature (1)..(387): tiling:Spneumo1:WAN024GOE; Cluster includes WAN023KL5 3155 09_3304b||||1767467..1767853|+|387 bp|EGAD orf prediction| S.pneumoniae|R6|NC_003098.1|ORF|110
ttgatggcatactccactcgttcactagagttttcaaccgttgcgtattctcgttcgtactgggcaggtgtcatgatgtcttcaataatttgccccagttgcaattctcccagaatccctcgcgtcttggttccagagagaaccttgttaagagctccgacatcacgggcaactgtctgcatttctccaagrccacgattgacagactccagttgtttagaaactrtctcaaaggaagcctgtaagcgtgtctgcaaggtcttttctagtttttcctcgaccgtctggcgcatttgttccaaacgttgctcatttgattcctgcaaggcttggagacgttggtctgtcttgtctctagtttggaggagattatctgtcatttcttga

SEQ ID NO: 5229 - DNA, 708 bp, Streptococcus pneumoniae
  misc_feature (1)..(708): tiling:Spneumo1:WAN024DEM; Cluster includes WAN0244D9-5 sp r0581|zmpB|15902625|NP_358175.1|591447..597077|+|5631 bp|Z inc metalloprotease|S.pneumoniae|R6|NC_003098.1|ORF|111
ttgatggctccttctgtagtggacgcagccacctatcactatgtaaataaagagattatttcacaagaagctaaagatttaattcagacaggaaagcctgacaggaatgaagttgtatatggtttggtgtatcaaaaagatcagttgcctcaaacagggacagaagcatctgttttgacagcttttggtttgctgactgttgggagcttgcttttaatctacaagagaaagaaaattgctagcgtctttctagttggarctatgggattggtagttcttcctagtgcaggggctgtagacccagttgcgaccctagcrctggctagtcgagagggtgttgttgaaatggakggctatcgctatgttggttatctatcaggtgacatcctcaaaacgcttggcttggacactgttttagaagaaacctcagcaaaacctggagaggtgactgtrgtcgaagttgagactcctcaatcaayaacaaatcaggagcaagctaggacagaaaaccaagtagtagagacagaggaagctccaaaagaagaagcacctaaaacagaagaaagtycaaaggaagaaccaaaatcggagrtaaaacctactgacgacacccttcctaaagtagaagaggggaaagaagattcagcagaaccagctccagttgaagaagtaggtggagaagttgagtcaaaaccagaggaaaaagta

SEQ ID NO: 5230 - DNA, 363 bp, Streptococcus pneumoniae
  misc_feature (1)..(363): tiling:Spneumo1:WAN024CRF; Cluster includes WAN023L1Y 3154 58_2547b||||1357109..1357471|+|363 bp|EGAD orf prediction| S.pneumoniae|R6|NC_003098.1|ORF|110
ttgatggctctcggcaagaatctcctcacgacttgctttcaaaccatgaacaacagycacatccaactgtggagcaaatttctgaaactcatctgcccagttgtaaatcaaacccgacggagcgagaatcaaaacccgactttcttttgtcacttgactagtcaaaaaagcaatggtctgaagggttttcccaagtcccatatcatcagccaaaatcccaccaaaaycataatgatggagcatctgcaaccagccaattcccttttcctgataatctcgcaagtcagccttgacctgagttgcttgcaaaggaaagtcctctggatgcgtcaaatcctgggccagattctggaattcttgtga

SEQ ID NO: 5231 - DNA, 237 bp, Streptococcus pneumoniae
  misc_feature (1)..(237): tiling:Spneumo1:WAN024FGK; Cluster includes WAN023KW0 3131 75_2808b||||1494994..1495230|+|237 bp|EGAD orf prediction| S.pneumoniae|R6|NC_003098.1|ORF|110
ttgatgggagctgaaccttggaagacaatggactggtctgtcaaggtctggtttcctgacaagactccattttcccaacctgagctgatggtcgccgccttgacaaccgaacctggaacaaagacattggttaccgttcccaaggaatcaggcgtcaactctcccgttttcaagtcatgtttaatccctgacatagacaaaaccgcacctgtttttgggttaagggcgactgcatag

SEQ ID NO: 5232 - DNA, 288 bp, Streptococcus pneumoniae
  misc_feature (1)..(288): tiling:Spneumo1:WAN024GNK; Cluster includes WAN023M31 3155 30_717b||||374355..374642|+|288 bp|EGAD orf prediction|S.p neumoniae|R6|NC_003098.1|ORF|110
ttgatgggagttagttggcgagaacggagaatgatagaaagatcgtcgatacctgttggcatatgttcccaaccgatgttaagttcttccaggatttgcagaaccttgcggccaaatccaacctcacggttcatgaggtatttcgacatgttaatgctgacaaagcctgagtcaccagcaattcccacaactggaaattcatcattactgtgttttagaacgatacgagtacctggatggtcagggttgttggtattcttgataaccagaggaatttttccacggtag

SEQ ID NO: 5233 - DNA, 78 bp, Streptococcus pneumoniae
  misc_feature (1)..(78): tiling:Spneumo1:WAN024DRF; Cluster includes WAN023SMK NC_0 03098.1_275||||205089..205166|+|78 bp|Glimmer 2.02 orf pre diction|S.pneumoniae|R6|NC_003098.1|ORF|111
ttgatgggggagacaaccttttctcccttatcggcgctagcattttacaaaagaggagaaaataaaaatgaaacttca

SEQ ID NO: 5234 - DNA, 279 bp, Streptococcus pneumoniae
  misc_feature (1)..(279): tiling:Spneumo1:WAN024G2M; Cluster includes WAN023LE1 3153 05_2028b||||1093022..1093300|+|279 bp|EGAD orf prediction| S.pneumoniae|R6|NC_003098.1|ORF|110
ttgatgtttatgagcaatctctgccagtttttccaggtctggaatattaatcaaggggttacccaaggtttcaatcaagacaagcttggtattgtctttgatagctgcttctacttcctccaaattatcaayatcgamaaaggttgttgtgataccataacgaggaaggggttctttcaaaagattgaaggttccaccgtaaatagtcgaagcagccactacatgstcaccagcatgggcaakcgccaaaatcgtataagtcactgcagtcatacctga

SEQ ID NO: 5235 - DNA, 78 bp, Streptococcus pneumoniae
  misc_feature (1)..(78): tiling:Spneumo1:WAN024DPL; Cluster includes WAN023SKT NC_0 03098.1_1175||||919885..919962|-|78 bp|Glimmer 2.02 orf pr ediction|S.pneumoniae|R6|NC_003098.1|ORF|111
ttgattaaaagtagttatttgaccagtaccttgattgatgttttcttcaacttcattaaagcctatacttctcttgca

SEQ ID NO: 5236 - DNA, 330 bp, Streptococcus pneumoniae
  misc_feature (1)..(330): tiling:Spneumo1:WAN024G27; Cluster includes WAN023LDK 3154 09_2051b||||1108954..1109283|+|330 bp|EGAD orf prediction| S.pneumoniae|R6|NC_003098.1|ORF|110
ttgattaaaatcacccggacgatccggattaatcaagatctccatcattgcctgaaaaatttttcgattacttggaatcccaatatcgtggttgacttcaaacagacgcgccaagacccgcatgacattaccatctacagctggctcaggcaagttaaaagcaatactggaaatggctcctgctgtgtaaggtccaatccctttcaagctggaaattccttcataggtatttggaaattggccaccaaagtcagtcataatctgctgggctgcagcctgcatattgcgaactcgagaataatagcccaagccctcccaagctttcagtaa

SEQ ID NO: 5237 - DNA, 911 bp, Streptococcus pneumoniae
  misc_feature (1)..(911): tiling:Spneumo1:WAN024CR8; Cluster includes WAN0244JP spr0 349|cbpG-truncation|15902393|NP_357943.1|350465..351121|+| 657 bp|Choline binding protein G, truncation|S.pneumoniae| R6|NC_003098.1|ORF|111
ttgattaaaattgataatactttacagtatccrtattcgacttcagctatggttttatctaagtattatggagtagccgatggaatgaatgtagaagggaggggaagtgcgaattttattaaagataatgtgttaattacagcggctcacaactactacagacatgactatgggaaagaagcggatgatatttatgttcttccggctgttagtccaagtcaagaacyatttggaaagatcaaagtaaaggaagttcgttatttgaaggaatttagaaatttaaattctaagratgcaagggaatatgacttggctttattaattctagaaragcccattggtgcaaaattagggactttgggtcttcctactagtcaaaaaaatttgacaggaataactgtgactatcacaggctatcyatcatataattttaaaattyatcaaatgtatacagataaraaacmagttttaagtgatgatggcatgttcttggattaccragttgatactttagaggggtctagtggrtctrcagtttatgatgctastcaccgygtagtaggagtgcatactttaggagatggagctaatcaaattaacagtgcagttaaattaaatgrrcgamatttgycatttakttawtcggttcttaaaggttactctcttgaaggatggaagaaaataaatggtagttggtacyattatagacaacatgataaacaaacgggttggcaggagataaatgatacytggtattatttagacagttccggtaagatgcttacagattggcaaaaagtmmatggaaaatggtattatctcaattcaaatrgagcaatggttacaggtagccaaactatcgatggtaaagtttataacttcgcttcatctggtgagtggatttaactaat

SEQ ID NO: 5238 - DNA, 416 bp, Streptococcus pneumoniae
  misc_feature (1)..(416): tiling:Spneumo1:WAN024F9B; Cluster includes WAN0243H4 spr1 740||15903782|NP_359332.1|1715352..1715762|-|411 bp|Hypoth etical protein|S.pneumoniae|R6|NC_003098.1|ORF|221
ttgattaagagaggagatgttgtagytctttatttgccttttccgactattagtagcgatttggctgtgaagaatcatatgtatatctgtattgacaacagcatgactaaaaacaaagagttggttaaaaatcagaccttcaaaccagctctcttgaccagacgtttggtcaagaactttatgatagaagagccggatctagctcgtaatccttttacaagaccaaccttgattgacttagataaggtatttatgttggataatacggtyattccgacttcttatytagccagacggcgacgcaatgtctcagaagaattgtacgaggaaattttggatyacttagtccaaccacggctgatttcgctgaacaagtctgagtttatgcaactcaatccaggaacttattarctaat

SEQ ID NO: 5239 - DNA, 252 bp, Streptococcus pneumoniae
  misc_feature (1)..(252): tiling:Spneumo1:WAN024EXO; Cluster includes WAN023KVD 3130 24_2829b||||1507798..1508049|+|252 bp|EGAD orf prediction| S.pneumoniae|R6|NC_003098.1|ORF|110
ttgattaatgagttcttttgcatgatgaacaccattaaagaaattcataatatgtcctgccataaaggttacattgttttctttacacgcatctaccatctcgcgacaatcttgataagaaagcgcaattggtttttcacagaaaacatttttaccatgctgtgcagccttaataaccggttccttatgaagattatttggagttgcgacgataacacartctacttcatcgctagaaaccaactcatctaa

SEQ ID NO: 5240 - DNA, 61 bp, Streptococcus pneumoniae
  misc_feature (1)..(61): tiling:Spneumo1:WAN024ABY; Cluster includes WAN024EI6 R6.I G_946||||899812..899872|+|61 bp|Between spr0910 (+ strand) and spr0911 (- strand)|S.pneumoniae|R6|NC_003098.1|IG|110
ttgattacttctctaaattttgggcacactaaaaagaggtcttgacacctaaactttaaaa

SEQ ID NO: 5241 - DNA, 632 bp, Streptococcus pneumoniae
  misc_feature (1)..(632): tiling:Spneumo1:WAN024DCM; Cluster includes WAN02444I spr0 896|dnaQ|15902940|NP_358490.1|883965..884591|+|627 bp|DNA polymerase III, epsilon chain|S.pneumoniae|R6|NC_003098.1| ORF|111
ttgattagaacagagacagtagaggagaggtacagaatggaacgattagaagattacattgcttttgayttagaatttaatcagcacgaaggacaaamacacttgattcaagtatcggcagtgcgttttagagatggtcgggaaatcgatgcctatgattcctatgttcataccagcgtycctctaaaaagctttatcaatggtttgaccgggattacagctgagaccttaaaagatgctcctccagttgagaaagtcttagaagaattccaagagtttgtgggttctttgctgaygayaggctacaatgctgctaaaagtgatttacctattttagcagagyatggtttagactatagccaacagtacaaggtggatttgtatgatgaagcttytgaackwmkgagttcagatttacatggtattgccaatctcaaattgcaaactgttgcctcatttcttggatttcaaggtcagtctcataatagtttagaggatgctcggatgacggcgcgtgtttacgaatccttcttagagtcggatcaagctagggaattgttagagacagaaagtagcttatcaaacaatccttttggtggcttgracttgtctcaattatttgactarctaat

SEQ ID NO: 5242 - DNA, 1331 bp, Streptococcus pneumoniae
  misc_feature (1)..(1331): tiling:Spneumo1:WAN024D4X; Cluster includes WAN0243KJ spr1 617|sacA|15903659|NP_359209.1|1590821..1592140|-|1320 bp|S ucrose-6-phosphate hydrolase|S.pneumoniae|R6|NC_003098.1|O RF|111
ttgattatgrkarataaramatwyacagtagaaaaagccaatcgttttatagcagaaaataaacatctcgttaatactcaatataagcctgaagaacatttttcagctgagattggttggatcaatgatccaaatggatttgtytattttygtggagaataccatctcttttatcaattctatccatatgatagtgtttggggrcctatgcactggggacatgctaaaagtaaggacttggtgacttgggagcacttgccagtggcacttgctcctgaycaagattatgaccgaaatggttgtttctcaggctctgccattgtcaaggatgatcgcctctggctcatgtacactggrcatatcgaagaaraaaccggtgtccgccaagtgcaaaatatggyattttcagatgacgggattcactttgaaaagatttcccaaaatccagttgyaactggadcagacttrccagatgagttgattgctgctgatttccgtgatccaaaactctttgaaaaagatggacgctattactcygtagtagctrycaaacacawgrataatgtgggctgtatcgttctactagggtccgataacctagtagaatggcagttcgaatccatctttttaaaaggggkagaacaccaaggytttatgtgggaatgcccagattacttcgagttagatgggaaagattgccttattatgtcacccatgcgttatcagcgtgagggagactcatatcataacatcaactcatcgcttttgttcacgggtaaggtagaktggrgagaaaaaygttttatcccagaatcagttcaagaaattgatcatggccaagacttctatgcgcctcaaacattgttggacratcaaaatcgtcgtatcctgattgcttggatgcagacatgggggcgtacccttccaacccatgaccaagaacacaartgggcatgtgccatgactytacctagaattctaagattggaagatggcaaactaagacaattccctgttaaaaaaggccaatatcaaatccaaatagataaagattgtcattaccacttaggaaatgatayagattatcttgaatttggttatgacagtaatgygcagcaagtttacattgatcgtagccatcttattcaaaaaattctaggtgaagaagaacaggacactagtcgacggtatgtagatattgaagctaaagaattggaagttgttctagataaaaattccatcgagatttttgtyaatcaaggtgaagcaagcttgactgcaacttattacttaacggtgccagctgagctatcacgaattgattaactaat

SEQ ID NO: 5243 - DNA, 249 bp, Streptococcus pneumoniae
  misc_feature (1)..(249): tiling:Spneumo1:WAN024DMM; Cluster includes WAN0244SU spr0 020||15902064|NP_357614.1|22162..22404|+|243 bp|Hypothetic al protein|S.pneumoniae|R6|NC_003098.1|ORF|111
ttgattatgttacaaaaaatttatgagcagatgrctaatttctatgatagtattgaagaagagtatggtcctacatttggtgataattttgactgggaacatgttcattttaaatttttaatttattatttagtgagatatggcattggttgtcgtarggattttatygtttaccattatcgtgttgcttatcgtttgtatcttgaaaaattggtaatgaatcggggktttatttcttgtykaactaat

SEQ ID NO: 5244 - DNA, 162 bp, Streptococcus pneumoniae
  misc_feature (1)..(162): tiling:Spneumo1:WAN024AZS; Cluster includes WAN0243NO spr1 503||15903546|NP_359096.1|1483401..1483562|-|162 bp|Hypoth etical protein|S.pneumoniae|R6|NC_003098.1|ORF|100
ttgattcagcaccgggatttgaagcaccgcaagaatctgttacaattttataagaaatattctgagaacaatatcttatccttatattcccagcgagcaggagatggtgtgagtcctgcattccctatcgataagattatcctctcaaamwmtcaagtctga

SEQ ID NO: 5245 - DNA, 237 bp, Streptococcus pneumoniae
  misc_feature (1)..(237): tiling:Spneumo1:WAN024FGX; Cluster includes WAN023KWC 3154 71_2792||||1487474..1487710|+|237 bp|EGAD orf prediction|S .pneumoniae|R6|NC_003098.1|ORF|110
ttgattccttctacagcaaattgtccacgcttacttccttcaaaaccaaagggacgtgttacaacaccaactgtaagcgcacctaaatctttggcgatacgagcaataacaggagcagctccagttccagagcctcctcccataccagcagtgatgaagaccatatcggcaccactaatagcttccgtcagtgtttcttcgctttcttcagcggctttacgaccaacctcaggttga

SEQ ID NO: 5246 - DNA, 396 bp, Streptococcus pneumoniae
  misc_feature (1)..(396): tiling:Spneumo1:WAN024G9U; Cluster includes WAN023LNW 3147 35_1503||||800215..800610|-|396 bp|EGAD orf prediction|S.p neumoniae|R6|NC_003098.1|ORF|110
ttgattccttgtttagttgcaacacgaattttttcaccagttttgtatgaatattctttagcttcaccttcgaacaattctgtacggatttcaggtccttttgtatcaagaaggaaaccaacttttttacctgcaattttttccgcaagtttaacagttgccatacgctcaccttgttcttggtggtcgccgtgtgagaagttgaatcggaatgtgttagcaccagcttcaatcaatttagcaatgtttttagctgaagcttcaacatcaagtttttcaccccagtatccgtcctcaccgaattttttaccaccacggatttctaccgcaggacccaaagttgcaacgatttttacacgtttgttcatgatttttgtgactcctttatatatatga

SEQ ID NO: 5247 - DNA, 92 bp, Streptococcus pneumoniae
  misc_feature (1)..(92): tiling:Spneumo1:WAN024A67; Cluster includes WAN024EF6 R6.I G_1180||||1141150..1141241|+|92 bp|Between spr1139 (cutC) (- strand) and spr1140 (- strand)|S.pneumoniae|R6|NC_00309 8.1|IG|110
ttgattctccttgaatattacttcaawtttattatatcatattgttatgaatatgctttcaattttatcaaggcaaataactactgttttaa

SEQ ID NO: 5248 - DNA, 261 bp, Streptococcus pneumoniae
  misc_feature (1)..(261): tiling:Spneumo1:WAN024FAY; Cluster includes WAN023KOA 3132 59_3149||||1676616..1676876|+|261 bp|EGAD orf prediction|S .pneumoniae|R6|NC_003098.1|ORF|110
ttgattgatgtacttttcataaatagctttattggtcgcatttgcttctactgttacagaagaatccatgctacttgccttttcttgcaactctttagtatcgtaatactcaatgtagcccatacgctcaaacacagtattttcatagttatcacgtttatcagccgttgtcgcaattttattatagttaggatcctgcttgaaaatcaattttcgaggaaccaaggtatagataatcgtgtaggtcaaagtcgttactaa

SEQ ID NO: 5249 - DNA, 261 bp, Streptococcus pneumoniae
  misc_feature (1)..(261): tiling:Spneumo1:WAN024DYZ; Cluster includes WAN023KH2 3130 58_3483||||1867996..1868256|+|261 bp|EGAD orf prediction|S .pneumoniae|R6|NC_003098.1|ORF|110
ttgattgccttcgcggtctatggaaaccaaaaaattattctgactgtccggcttactgctatcgaccactgtccctggcgtaatgacctgaacaacctctcgtttaacaaccccaactgcttgtttaggatcttccatctgctctgcgatagccaccttataaccctgctcaatcaagacatcgatatactgttgggcagaatgatagggaacacccgccatagggatcggattgtcggcattcttgttgcgactcgttaa

SEQ ID NO: 5250 - DNA, 481 bp, Streptococcus pneumoniae
  misc_feature (1)..(481): tiling:Spneumo1:WAN024ESW; Cluster includes WAN023KL1 3132 29_3310||||1770795..1771019|+|225 bp|EGAD orf prediction|S .pneumoniae|R6|NC_003098.1|ORF|220
ttgattggcaggtyaggatttttaaaattytggatatgttgcgccaaatcaaccttgagaatatcttcgttaactacggtcacattatcaaaatcacgcagggtatctgccaaaattggcaccaaacggtggtcaatctcaaaagccatgacttgggctgcacgctcagccaaaaattctgtcaaggcaccaatacctggcccgatttcgatgacattgacctgatcatcaatttcagccgtatccacaattttttgaaggatattggtatccgtcarraaattttgcccraaggactttttaaaggtaaaaccgtgacgctccagcactgccttggtcacgctataatctgcaattctcatctattctcttttctattatctgttactactattgtaacacattccccttgtattttgggaatgaaaatcataccaaaaaactatctttcctcatgaagaaagatagtyttggaaatctt

SEQ ID NO: 5251 - DNA, 81 bp, Streptococcus pneumoniae
  misc_feature (1)..(81): tiling:Spneumo1:WAN024GKK; Cluster includes WAN023X63 AX56 7677.1_1||||246..326|-|81 bp|Glimmer 2.02 orf prediction|S .pneumoniae||AX567677.1|ORF|000
ttgattggtcgtggagagccacctctgacaatttcaaccaatgtagaaaacctcacccactcccaagtatcaggaatatca

SEQ ID NO: 5252 - DNA, 593 bp, Streptococcus pneumoniae
  misc_feature (1)..(593): tiling:Spneumo1:WAN024DD2; Cluster includes WAN02445N spr0 855||15902899|NP_358449.1|849329..849898|+|570 bp|Conserve d hypothetical protein|S.pneumoniae|R6|NC_003098.1|ORF|111
ttgattggttggaaaagtatggaatcaatwttwgtraaayttgcccagtatccgtctatagaaacggagcgtttattgctyagacctgtaactttggatgatgcggaagcaatgtttgactatgcctcggacaagggtaatacacgttacacttttccaaccaatcaaagyttggaagaaaccaagaataacattgctcagttctayttggctaatcccttgggacgttggggratwraaytaaaarryaayggymartttatyggaachattgayttrcacaagattgatyctgttcttaagaaggcagctattggytayattatcaaymaaamgtattggaatcaaggattaacgacagaarccaatcgtgctgtgattgagctagcttttgagaagataggratgaataagttrrytgcyytwyacgataaggmyaatccygcrtcaggaaaggtcatggagaaatcaggmatgcgtttttcccatgcagaaccatatgcttgtatggaccagcatgaaaaagrycgaatcgtkacaagagttcattatgtcttgaccaaggaagactattttgcaaataaataactaat

SEQ ID NO: 5253 - DNA, 225 bp, Streptococcus pneumoniae
  misc_feature (1)..(225): tiling:Spneumo1:WAN024CQ9; Cluster includes WAN023MFE 3134 44_66||||36585..36809|-|225 bp|EGAD orf prediction|S.pneum oniae|R6|NC_003098.1|ORF|110
ttgattgtagcccgctggaattttagcaaaaatatagaaggcaccgtctggtttgataatctcaaaaccaagagcagtcattttttcgatgatatagtcccgacgttggatatattccttcttcatgggctccgcatcgtttttaccagccgtcaaggcttctaccgcagcatgttgcgccatggtatttgcggcagtgaccaagtactggtgactcttgattaa

SEQ ID NO: 5254 - DNA, 282 bp, Streptococcus pneumoniae
  misc_feature (1)..(282): tiling:Spneumo1:WAN024FPU; Cluster includes WAN023L4I 3131 56_2425||||1296802..1297083|+|282 bp|EGAD orf prediction|S .pneumoniae|R6|NC_003098.1|ORF|110
ttgattgtccttaaaatacgcaaaagaggctccgggataaatccctgcctcgatttgttcttctatttttttaataatcttggtccacttcatacttcttcaaaccacaattcaacattatttctatctttaccaaggaagaatttttcagacttaggaataaaatattcagtagactcaaacttctggcgaagacttgctatgtctaattcattgaccaagaacttgagcatagataagtcccaggtaaccgtattgtccacagtcaaatcctgcccctga

SEQ ID NO: 5255 - DNA, 776 bp, Streptococcus pneumoniae
  misc_feature (1)..(776): tiling:Spneumo1:WAN024CU2; Cluster includes WAN0243Q0 spr1 419||15903462|NP_359012.1|1405621..1406499|-|879 bp|Conser ved hypothetical protein|S.pneumoniae|R6|NC_003098.1|ORF|2 21
ttgattgttgcttatattttataccattttacaaaagctattgcaggaaccaagattatgattttggtacgtggagttttggtrtttattttascycaaatccttgcaaatatgattggtttgactacgatttcttggttaatcaatcaaattattacttatggggttattgcggcggttgttatcttctctccagagattcggactggtttggaacgtttgggaagagcgacagatttcttttccaatgcccctattagtgctgaggaacagatgattcgtgcctttgttaagtctgttgaatacatgagtcctcgtaaaatcggggccttggttgctattcagcgtgtacgtaccttgcaggagtatatktcgacaggaattcccttggatgctaagatttctgcagaacttctcattaacatttttattcccaacactcccctacatgayggtgcggtgattatcaaagaagaacgtatcgctgtgacgtctgcctatctgcccttgacaaaaaacacagggatttccaaggaatttgggaccagacaccgggcggctatcggtttatcagaagtctcagatgccttgacttttgtcgtatcagaggaaacgggaggaatttcgataacctataatggaaggtttaagcacaacctaacacttgatgaatttgaaacagaattacgtgaaatcttacttccaaaagaggaagtgggtcttagttttaaagaacgattgctaggaggatggaaacatgaaaaaaaatarctaat

SEQ ID NO: 5256 - DNA, 1998 bp, Streptococcus pneumoniae
  misc_feature (1)..(1998): tiling:Spneumo1:WAN024D3Y-5; Cluster includes WAN024376 SP 0057||15900002|NP_344606.1|59624..63562|-|3939 bp|beta-N-a cetylhexosaminidase|S.pneumoniae|TIGR4|NC_003028.1|ORF|020
ttgatttatataatcgctatcaatataacaatgcaatcaggaggttttgcaatgaaacatgaaaaacaacagcgtttttctattcgtaaatacgctgtaggagcagcttctgttctaattggatttgccttccaagcacagactgttgcagccgatggagttactcctactactacagaaaaccaaccgaccatccatacrgtttctgattcccctcaatcatccgaaaatcggactgaggaaacacctaaagcagwgcttcaaccagaagctccaaaaactgtagaaacagaaactccagctactgataaggtagctagtcttccaaaaacagaagaaaaaccacaagaggaagttagttcaactcctagtgataaagcagargtggtaactccaacttctgctgaaaaagaaactgctaataaaaaggcagaagaagctagccctaaaaaggaagaagcgaaagaggttgattctaaagagtcaaatacagacaagactgacaaggataaaccagctaaaaaagatgaagcgaaagcagaggctgacaaaccggmaacagaggcaggaaaggaacgtgctgcaactgtaaatgaaaaactagcgaaaaagaaaattgtttctattgatgctggacgtaaatatttctcaccagaacarctcaaggaaatcatcgataaagcgaaacattatggctacactgatttacacctattagtcggaaatgatggactccgtttcatgttggacgatatgagcatcacagctaacggcaagacctatgccagtgacgatgtcaaacgcgccattgaaaaaggtacaaatgattattacaacgatccaaacggcaatcacttaacagaaagtcaaatgacagatctgattaactatgccaaagataaaggtatcggtctcattccgacagtaaatagtcctggacacatggatgcgattctcaatgccatgaaagaattgggaatccaaaaccctaactttagctattttgggaagaaatcagcccgtactgtcgatcttgacaacgaacaagctgtcgcttttacaaaagcccttatcgacaagtatgctgcttatttcgcgaaaaagactgaaatcttcaacatcggacttgatgaatatgccaatgatgcgacagatgctaaaggttggagtgtgcttcaagctgataaatactatccaaacgaaggctaccctgtaaaaggctatgaaaaatttattgcctacgccaatgacctcgctcgtattgtaaaatcgcacggtctcaaaccaatggcttttaacgacggtatctactacaatagcgacacaagctttggtagttttgacaaagacatcatcgtttctatgtggactggtggttggggaggctacgatgtcgcttcttctaaactactagctgaaaaaggtcaccaaatccttaataccaatgatgcttggtactacgttcttggacgaaacgctgatggccaaggctggtacaatctcgatcaggggctcaatggtattaaaaacacaccaatcacttctgtaccaaaaacagaaggagctgatatcccaatcatcggtggtatggtagctgcttgggctgacactccatctgcacgttattcaccatcacgcctcttcaaactcatgcgtcattttgcaaatgccaacgctgaatacttcgcagctgattatgaatctgcagagcaarcacttaacgaggtaccaaaagacctgaaccgttatactgcagaaagcgtcrcggccgtaaaagaagctgaaaaagctattcgctctctcgatagcaaccttagccgtgcccaacaagatacgattgatcaagccattgctaaacttcaagaaactgtcaacaacttgaccctcacgcctgaagctcwaaaagaagaagaagctaaacgtgaggttgaaaaacttgccaaaaacaaggtaatctcaatcgatgctggacgcaaatactttactctgaaccagctc

SEQ ID NO: 5257 - DNA, 1121 bp, Streptococcus pneumoniae
  misc_feature (1)..(1121): tiling:Spneumo1:WAN024G65; Cluster includes WAN02441L spr1 001|nifS|15903045|NP_358595.1|984159..985274|-|1116 bp|Pyr idoxal-phosphate dependent aminotransferase|S.pneumoniae|R 6|NC_003098.1|ORF|431
ttgatttatttggacaatgctgcaacgactcctatgtcagcagttgctatttcagctatgaccaaggttatgcaagaaacccacggaaatccttctagtattcatggtcatggtcgtcaagctggcaaactcttgcgagaagcccgtcaggaactagcccagttactaaggacaaaacctcaacatatctttttcacttctggtgggactgaagscaataatactaccatcattggctactgtcttcgtcaccaagaacaaggaaaacatatcatcacaactgccatcgagcaccatgctgtccttgaaacaattgattacttggttcaacactttgggtttgaagcaaccattatccagccagaaaatcaagaaatcacagcccagcaaattcaaaaggctttacgtgacgatacgattttkgtttctacyatgtttgycaataatgagacaggaaacctactkcccatcgctgaaattggccaaatactcaagcaacaccctgctgcctatcatgttgatgcagttcaggctattggtaaaatcccaattcattcagaagaattgggcattgattttctcactgcttctgcccacaaattccatggtcctaagggaatcggttttctctacgcatctagcatggactttgattcctatctacatggcggagaycaggaacagaaaaaacgtgcaggaactgaaaatctgcctgccatygtaggcatggttgcagcyctaaaagaaracctagaaaaacaagaagaacattttcaacatgtacaaaatctagaaactgcctttctggcagagctggagggcattcagtattacytgaatagaggaaaacatcatctcccttatgttctcaatattggatttcctggtcagaaaaatgacctcttactccttcggctagatttagctggaatttcaatctctactggctcagcctgtactgcaggcgttgtccaatccagccatgttcttraagccatgyatggcgcaaattcagaacgcttgaaggaatcccttcgcatcagtttgtcgccacaaaataccgttgaagacctacaaaccctcgcaaaaaccttaaaagaaattatcggaggttarctaat

SEQ ID NO: 5258 - DNA, 120 bp, Streptococcus pneumoniae
  misc_feature (1)..(120): tiling:Spneumo1:WAN024E2U; Cluster includes WAN0242XZ SP04 14||15900333|NP_344937.1|394103..394207|-|105 bp|hypotheti cal protein|S.pneumoniae|TIGR4|NC_003028.1|ORF|020
ttgatttcattgagtgttaaattatttcactgtcaaagtatatcttttttaggagcagaaagcaagaaaaaatcgactgaaagtgtctcagccgataagaaaggctcgcttctarctaat

SEQ ID NO: 5259 - DNA, 283 bp, Streptococcus pneumoniae
  misc_feature (1)..(283): tiling:Spneumo1:WAN0249R9; Cluster includes WAN024E6G R6.I G_1924||||1777806..1778067|+|262 bp|Between spr1806 (- str and) and spr1807 (rpmH) (- strand)|S.pneumoniae|R6|NC_0030 98.1|IG|110
ttgatttcctggaattgtaatagctgaaccatctkkraakrygattgtygctgtrccatctccasctacttcaactttatagtaaaataaaataataacaggacaaatcgatcaggacagtcaaatcgatttctaacaatgttttagaaacagaggtgtactattctagtttcaatctactrtaacatcgcttccgaatccatttgcatctactgaacttttttacaaaaataaaaatcagtagactcgagttcctactgatttttgatagaattcgtttgga

SEQ ID NO: 5260 - DNA, 432 bp, Streptococcus pneumoniae
  misc_feature (1)..(432): tiling:Spneumo1:WAN024DVZ; Cluster includes WAN023KDT 3156 65_3626b||||1949388..1949819|+|432 bp|EGAD orf prediction| S.pneumoniae|R6|NC_003098.1|ORF|110
ttgatttcctttagaggcaaaggtattcaaggtatccaaatactggttggtcaagaggatagacatgatttgttcttctgtcatgccaacattggcttccttgagttcggtgatagactctgccaatccatccacaatcgccttacgttgttgggcaatccccacaccatgaaggcggtctttttctgcttckgcttcagctgcagtgacaattttaatcttgtcagcttccgccaattcttgtgctgcgacccgcttacgttgcgccgcattgatttcattcatrgattgcttaacttctgcatctggttcgaccttggtaatcaaggttttcacgataatgtagccgtaagtggtcatttcttctgctacttggtgttgaacytcaagggcaatctcatcttttttctcaaacaattcatccaaggttaa

SEQ ID NO: 5261 - DNA, 507 bp, Streptococcus pneumoniae
  misc_feature (1)..(507): tiling:Spneumo1:WAN024GL6; Cluster includes WAN023M14 3126 56_827||||441145..441651|-|507 bp|EGAD orf prediction|S.pn eumoniae|R6|NC_003098.1|ORF|110
ttgatttcctttggttttaatgttttttctgtatttttagggacatctggctggacttctttttcagtcttattagcttckgctgctggyttagactcatccccttggttagttgcttcgggctttgcttctgtttccttgtcagacttaggttttgcttctgcagatggtgtttctgcaaccacctcacttgctttttcctctggtttagctgcgctagctgcttctgcagtttcagtagttgcagcttcattgcttgctggcgaagcagtttcagatgctrtcgctactccttctgccttttctagcttgttttctctagcatgttccccttcattctgcttatcagcttcattggtcgaatgctcactctctcctgaaacaagctctgtattagctccgctattttcaggaactgcagtttcttcagccaaggctggaccagcaaataaaacagcaccaatcatcagcgagcaggctcctactgataacttacgaatactgtaa

SEQ ID NO: 5262 - DNA, 268 bp, Streptococcus pneumoniae
  misc_feature (1)..(268): tiling:Spneumo1:WAN024DDA-M; Cluster includes WAN024468 sp r0834|proC|15902878|NP_358428.1|835350..836147|+|798 bp|Py rroline-5-carboxylate reductase|S.pneumoniae|R6|NC_003098. 1|ORF|111
ttgatttcgatggcagctggattgaccttagaaaaactagcaagtcttatcccaagycaacaycgaattattcgtatgatgcctaatacccctgcttctatcgggcaaggagtgattagttatgccttgtctcctaattgcaggrctgaggacagtgagmtcttttrtcagcttttakccaaggctggtctcttggttgaaytaggagaaagyttaatcratgcagcgacaggtcttgcaggytgtggaccagcctttgtctatctyt

SEQ ID NO: 5263 - DNA, 488 bp, Streptococcus pneumoniae
  misc_feature (1)..(488): tiling:Spneumo1:WAN024FKW; Cluster includes WAN0243RF spr1 368||15903411|NP_358961.1|1349823..1350305|-|483 bp|Hypoth etical protein|S.pneumoniae|R6|NC_003098.1|ORF|211
ttgatttctaagacattgttagaaattagattaaattccttaatcgatttgcgcatgttttatttcatttcaytatactttagattggaaaataaggaatcacataaatcgcaagaaatagggaatctgattcgtgtttataaccgttcaaaaagagaagaggctgaaagtgagccacttaatctttatgtcgaagatgaaaagggcaatctcctkgcrggtttgatagcagagacttttggaaattggctagaaatcgagtatttgtttgtaaaagaggaactgcgaggrcaaggaatcggttcaaaactattgcaacaggcagaaagtgaagctaagaatcgaaattgttgttttgcctttgtcaatacttaccagttccaggcaccggacttttatcagaaacatggctacaaggaagttttttctttgcaagactrtctctacattaggcaaagatattattaycaaaagaatctgtaactaat

SEQ ID NO: 5264 - DNA, 270 bp, Streptococcus pneumoniae
  misc_feature (1)..(270): tiling:Spneumo1:WAN024GAF; Cluster includes WAN023LOR 3134 92_1464||||775158..775427|-|270 bp|EGAD orf prediction|S.p neumoniae|R6|NC_003098.1|ORF|110
ttgatttctgtttcttggtctgctttgattttaacattgatacgagtatcttctgccacctggacaaaacgtgtctcgatttcttcctctgctaaagtatctgtgataaatttaccagtaaagccaccgataaatcccgtcgctgtatttggtatattcaaacgtttcaagacacggctgacattgattcctttcccaccagcaaacttatcatcactgtccatacgattkacactaccaactttgacttggtccaaacgaacgatatag

SEQ ID NO: 5265 - DNA, 240 bp, Streptococcus pneumoniae
  misc_feature (1)..(240): tiling:Spneumo1:WAN024DYF; Cluster includes WAN023KGN 3150 33_3506||||1879597..1879836|-|240 bp|EGAD orf prediction|S .pneumoniae|R6|NC_003098.1|ORF|110
ttgatttgctcgggaagatttccccaaatacgtacctcgtgtccattgtcatttaagacttgtgaaagggcggttccccaagaaccaggccccaagacggcgacggtttgtttttccatgatttcctccttgatagakttctttctcttattctatcatattctaggggattttgcacttgcattactggggtatggtggaaaaatacacaaaraccgagaygaagggataaactcttag

SEQ ID NO: 5266 - DNA, 426 bp, Streptococcus pneumoniae
  misc_feature (1)..(426): tiling:Spneumo1:WAN0249RE; Cluster includes WAN024ELK-rc R 6.IG_654.1||||639027..639452|-|426 bp|Between spr0630 (thi E) (+ strand) and spr0631 (+ strand)|S.pneumoniae|R6|NC_00 3098.1|IG-rc|110
ttgatttgttcgcatcttatttcaatctactatatcatcttcatccagtttcgtaaaagaaaaaactctaattacagatacraattagagttcagcttacaagattagacagttcttttcgacatacgaaaaaaacatttcacatttcccttcgccagtcttaactgtatcaggttcaatgggtatcatctcagcctaaagcaccccaaatgtctttattatttaattatgtgattattataacacacattttatactagttcaagaaattgaactggaaatacagccttgcactcacaaagacagcagatctttcttttgcaaaaaacaaatgacctgtttgatgaattagccattcaagctgaatctggacatagctttttaaaaaaggaaaatcctacttacttagaatccaaggatagatat

SEQ ID NO: 5267 - DNA, 1621 bp, Streptococcus pneumoniae
  misc_feature (1)..(1621): tiling:Spneumo1:WAN024C68-5; Cluster includes WAN0244LG sp r0286|hysA|15902330|NP_357880.1|285103..288339|+|3237 bp|H yaluronate lyase precursor (hyaluronidase/hyase)|S.pneumon iae|R6|NC_003098.1|ORF|111
ttgattttacaatatgtttattggagtgtatacatgcaaacaaaaacaaagaagctcattgtgagtttgtcttcacttgttttatcaggatttttattaaaccattatatgacarttggagcggaagaaacgactacgaatacyattcagcaaagccagaaggaagttcagtatcagcaaagggatacaaaaaatttagttgaaaatggtgattttggtcagacggaggacggaagcagtccgtggacaggaagcaaagctcaggggtggtcarcttgggtagaccagaagaatagttctgcagatgcctcaactcgagtcattgaggctaaggatggggctatcactatctcaagccmtgagaaattaagggcagcgsttcaccgtatggttcctattgaagctaagaaaaagtataaactgcgtttcaagattaaaacagatmataaartcgggattgccaargttcgtatcattgaggaaagtggtaaggacaagcgattgtggaattctgcaacgacgtcaggaacaaaggactggcagaccattgaagcagactatagcccgactttagatgttgataaaatcaagctggagttattctatgaaacaggaactgggactgtttcctttaaggatattgagctggtagaggtagcagmccagcyttctgaggattctcaaacagataaacarcttgaggaaaagattgatttaccaattggaaaaaaacatgtttttyctcttgcggactatacttataaggtagaaaatcctgacgttgcttcagtcaaaaatggaattttagaacctcttaaggaagggacaaccaatgtcattgtcagtaaagatggcaaggaagtgaaaaagattcctttgaagattctrgcctctgttaaggatrcatacacagmccgtttggatgactggaatggcatcatcgctgggaatcaatactatgattctaaaaatgamcagatggccaaattaaaccaggaattggaaggaaaggtagctgatagcctatcyagtatttcaagtcaggcggaccgcayctatttgtgggaaaaattttcaaattataaaaygtctgcaaatctgactgccacttatcggaaattggaggagatggccaagcaagtgaccaatccttcttctcgttattatcaagatgaaactgtcgttcgaacagtcagggattccatggaatggmtgcataaacatgtctacaatmgtgaaaagagcattgttgggaactggtgggattatgaratcggtacacctcgtgccatcaacaataccttgtctctgatgaaagaatacttctctgatgaggaaattaaaaaatatacagatgtrattgaaaaatttgtaccagaycccgaacatttccgaaagacgactgataacccattyaaggctctaggtggaaacttagttgatatgggaagrgtaaaagtaatagctggtttactgcgtaargatgatcaagaaatttcttctaccattcgctcgattgagcaagtgttcaagttggtagaccaaggtgaaggtttttatcaagatggatcctatatcgaccacaccaatgttgcctatacgggtgcttatgggaatgttt

SEQ ID NO: 5268 - DNA, 225 bp, Streptococcus pneumoniae
  misc_feature (1)..(225): tiling:Spneumo1:WAN024FUR; Cluster includes WAN023L85 3156 38_2276||||1223727..1223951|+|225 bp|EGAD orf prediction|S .pneumoniae|R6|NC_003098.1|ORF|110
ttgattttcattgagtattatcttatctyaagcccatttgagcgagcttggtttgatatttgttttgatcaaccagcargcccaagccyccataaacatcataggcatctacccagtcacccagttctggaatcgtcaatttttcaataccattttttgctccatccaaaacagataaaccgtttgttaggaggaaagtatagggtacgttggttgaggtcatag

SEQ ID NO: 5269 - DNA, 309 bp, Streptococcus pneumoniae
  misc_feature (1)..(309): tiling:Spneumo1:WAN024GFU; Cluster includes WAN023LVM 3128 66_1084||||571546..571854|-|309 bp|EGAD orf prediction|S.p neumoniae|R6|NC_003098.1|ORF|110
ttgattttcattgagtttatattttataggagcgcattattttgcttttgctgcgtactcttcgttacgtttgatcatttgttttctgtaccaagcaaagataccgatatagaatacaaggaagrctactgcaccaaggattgctttgatatcaccagttgtagtgttaccaattgtccaaccaagaagtttttcgattggtccttcaagagtagagtgagtaatcaattgagtttggctcacaccttctgggaaggcacctacacctttagcaagttctgttgcaaatggtgcaataagtgtacctga

SEQ ID NO: 5270 - DNA, 225 bp, Streptococcus pneumoniae
  misc_feature (1)..(225): tiling:Spneumo1:WAN024EVR; Cluster includes WAN023KCB 3153 26_3689||||1992899..1993123|+|225 bp|EGAD orf prediction|S .pneumoniae|R6|NC_003098.1|ORF|110
ttgattttcattgartttcactccactgtgacttatggtcagatgctgatacttttattcttttatgcaatatcaaattttaactggcctgctttgacaccaatcttaagtrtgctgcctgccactaaatctcccttragaagaagttctgccaacttgtcctccacttctgtttgcagggttctgcgaagtgggcgagctcccatctmtgggtcatatccttga

SEQ ID NO: 5271 - DNA, 252 bp, Streptococcus pneumoniae
  misc_feature (1)..(252): tiling:Spneumo1:WAN024FJG; Cluster includes WAN023KZR 3157 01_2631b||||1403265..1403516|+|252 bp|EGAD orf prediction| S.pneumoniae|R6|NC_003098.1|ORF|110
ttgattttcttggtcatgttggagcaattggaaattcacatccaccttggtttcaggagctccattttcattttcccattcaaaattacgcgcatcaaaatgatactgactaacaaattcttgttcacgtttaagattcatgtctttctccatcggctacaatattataagctattgtaccataattttttattttcatctagttttctaggatttagtcaatcccaatttcagcacgaactacatctgtga

SEQ ID NO: 5272 - DNA, 84 bp, Streptococcus pneumoniae
  misc_feature (1)..(84): tiling:Spneumo1:WAN024DNM; Cluster includes WAN023S91 NC_0 03028.1_2192||||1653669..1653752|+|84 bp|Glimmer 2.02 orf prediction|S.pneumoniae|TIGR4|NC_003028.1|ORF|010
ttgattttgtctatcatttatactataatcataatcactacacaaaaaggagattattatgaaaagaatcattcatgcttggaa

SEQ ID NO: 5273 - DNA, 377 bp, Streptococcus pneumoniae
  misc_feature (1)..(377): tiling:Spneumo1:WAN024C6G; Cluster includes WAN0244LW spr0 270||15902314|NP_357864.1|271725..272096|-|372 bp|Hypothet ical protein|S.pneumoniae|R6|NC_003098.1|ORF|221
ttgatttttaatcctatttgctgtatgataaggraaaagaaaggrgacagagatatggcttttaccaatacccacatgcgrtctgctagttttggyattgttaccagcttgccygatgacatcattgactctttttggtatatyatcgaycatttcttaaaaaatgtctttgaattggaagaagaactcgagtttcaattgcttaataaccaaggaaagattaccttccacttttcaagtcaacacctccctacagccattgattttgactttaaccatcctttcgaccctcgttatcccccaagagtactggttttagacatggacggtagagaaactatcctcctcccagaagaaaatgacctattttaactaat

SEQ ID NO: 5274 - DNA, 84 bp, Streptococcus pneumoniae
  misc_feature (1)..(84): tiling:Spneumo1:WAN024DNB; Cluster includes WAN023SHV NC_0 03098.1_2342||||1820964..1821047|-|84 bp|Glimmer 2.02 orf prediction|S.pneumoniae|R6|NC_003098.1|ORF|111
ttgatttttattgagagtaaagttggarttgaagtaattttaaaagattttttagaaatagcgcttgatatatatatggtaaaa

SEQ ID NO: 5275 - DNA, 111 bp, Streptococcus pneumoniae
  misc_feature (1)..(111): tiling:Spneumo1:WAN024E2V; Cluster includes WAN024347 SP01 72||15900109|NP_344713.1|165586..165690|+|105 bp|hypotheti cal protein|S.pneumoniae|TIGR4|NC_003028.1|ORF|021
ttgatttttattgagtataccactattttactccctctggcaagggactttgtctatgtggagggattgggctcctatgtggtggagyttttctgttctttcykaactaat

SEQ ID NO: 5276 - DNA, 258 bp, Streptococcus pneumoniae
  misc_feature (1)..(258): tiling:Spneumo1:WAN024FMS; Cluster includes WAN023L3G 3156 44_2477||||1319811..1320068|+|258 bp|EGAD orf prediction|S .pneumoniae|R6|NC_003098.1|ORF|110
ttgatttttcaaatactcaatgacccttggcaaggcattgactgtcggactgtgaatatcatgcatcaaaacgatagagccattagctacttgatrctgaatttctgtcaaaatagatgcttcatttttactcttccagtccagactatccacatcccacatgataaagctcaaatccaagctattgcgaatatcatctgtaatagcaccataaggtggacgcatgagtttagaactagaacccagcactttagttag

SEQ ID NO: 5277 - DNA, 324 bp, Streptococcus pneumoniae
  misc_feature (1)..(324): tiling:Spneumo1:WAN024GKI; Cluster includes WAN023M0C 3125 94_855b||||454755..455078|+|324 bp|EGAD orf prediction|S.p neumoniae|R6|NC_003098.1|ORF|110
ttgatttttccttcactgataagtttttctttttcagctttaattctctttaataattcacttgcaggttcgtcattgggattttgcggcactaatttcccttccatcgctctttggagaatacttgctttaagttgttctggtgtcattatttgtcctccaacaactgcaaaatatcagctaatacattatcaatcttatgatttaaagttgctctttccgcttgataattctgaatcaactcaaagggatttaagatttcctcttcctcttttggaaagycacactggtctaaattataattcaactcagccaattcactag

SEQ ID NO: 5278 - DNA, 510 bp, Streptococcus pneumoniae
  misc_feature (1)..(510): tiling:Spneumo1:WAN024FT9; Cluster includes WAN0243UY spr1 241||15903284|NP_358834.1|1241527..1242024|-|498 bp|Conser ved hypothetical protein|S.pneumoniae|R6|NC_003098.1|ORF|2 21
ttgatttttggaggtgttgatgaaaacatttcttgtcaaacaaaagtttcgtcttggaggcgaacgcttcgctatcaagratgacaggggagaaattgcctatcaggtggagggrtyattttttaagattccyaaaacytttamcatctatgatgcggctggtgaacaagtcagtsagatyagtaaagaaatcttgaccttgcttcctcgttttgarattcagcttcgggatggctcgagttttgtcattcgtaagaagttgaccttctggcgagataagtatgagtttgataatytaggtcttcgtatcgagggcaatatctgggatttgaatttcaaattgctggatgatcgcgatcagytgattgcggaaattaagaaggamctcttccatctgacytctacctataccgtaacggttcttgargacgcttatgcagacctagtcatttccctctgtgtcgcgattgactatgtggaaatgctggaaagccaatcacattaactaat

SEQ ID NO: 5279 - DNA, 270 bp, Streptococcus pneumoniae
  misc_feature (1)..(270): tiling:Spneumo1:WAN024FLW; Cluster includes WAN023L2T 3135 37_2506||||1335006..1335275|-|270 bp|EGAD orf prediction|S .pneumoniae|R6|NC_003098.1|ORF|110
ttgatttttggttctgtacctgaagggcgaacggcaatccatgaaccgtcagcaagtgtgtatttcaacacatcacttggaggagttgtcaagtttgtaacagtaccgtcagcaacagtagcagtttgtgccttgaagtcttctacgacagtgatagctgttgcgttccattctgttggagcattgttgcggaatttagccataatcgctttgatttgttcagcaccatcgacacctgaaagagtaacagagattgttttttctgcgtag

SEQ ID NO: 5280 - DNA, 228 bp, Streptococcus pneumoniae
  misc_feature (1)..(228): tiling:Spneumo1:WAN024D3I; Cluster includes WAN023LV2 3135 20_1103||||582048..582275|-|228 bp|EGAD orf prediction|S.p neumoniae|R6|NC_003098.1|ORF|110
ttgattttttggtcaatcttggaacagtctttgtgctcaatttttctctggcaccgttccatttcaagagcaactaattttttcttgattttaagcatttttttgctcatatgcgcttggtctagcacgcccaycgmtcgttcgtggtgggttgattcaacaaaattctggcgcatggcatccagcttttcgtgtargtattgtttatccatgtctgtatctctctaa

SEQ ID NO: 5281 - DNA, 821 bp, Streptococcus pneumoniae
  misc_feature (1)..(821): tiling:Spneumo1:WAN024CVJ; Cluster includes WAN0243V1 spr1 238|ABC-NBD|15903281|NP_358831.1|1236416..1237222|-|807 bp |ABC transporter ATP-binding protein - unknown substrate|S .pneumoniae|R6|NC_003098.1|ORF|211
ttgatttttttgtatcaaagtgctagtataryrrtrtrtaatayagataaagataggagtyrtcccatgattgaatttcaaaatgttagtaagttgtatggtgataaagaggccttgagtaatctcaatttgcagattgaaaatggagagattatgggcttgattggtcataatggggctggaaaatcgaccacyataaaatccctagtcagtatcatttcacccagcagtggtcgtattttggtarayggtcaggagttatcggaaaatcgcttggckatyaaacgaaagattggctacgtagcagaytcgcctgacttatttttacgyttaacggccaatgaattttgggaattgatygcytcatcctatgatytgasyagmtctgacttggarrctagtytagctaggytattgaacgtttttgattttgctgaaaaycgytatcaggttattgaaacyctttctcayggaatgcgtcagaaagtytttgtcatyggrgcactcttgtctgmtccygatatttgggtyttggaygaacccttgactggtttggatccccaggcygcctttgatttgaarcaratgatgaaggarcatgcrcaaaaaggbaagacrgtyttgttttcaactcatgtsctwgaggtrgchgagcaagtctgtratcggattgcyattttgaaaaaggggcatttgatytattgtggtarkgtagagracttgagraaagayhacccagaccagtytttggaaagtatctaccttagycttgctggtagaaaagaggaggttkcrgatgcgtctcaaggtcattaactaat

SEQ ID NO: 5282 - DNA, 127 bp, Streptococcus pneumoniae
  misc_feature (1)..(127): tiling:Spneumo1:WAN0249UR; Cluster includes WAN024E9E R6.I G_1613.1||||1548388..1548514|+|127 bp|Between spr1566 (scr A) (- strand) and spr1568 (scrB) (+ strand)|S.pneumoniae|R 6|NC_003098.1|IG|110
ttgcaaaaatctccttatataacattttgttcttgtttgaaagcgattttattcgcccttacgactattattttatcatgttttaaaaatatgtcaagcgttttgcagaaaaaatattctatccact

SEQ ID NO: 5283 - DNA, 258 bp, Streptococcus pneumoniae
  misc_feature (1)..(258): tiling:Spneumo1:WAN024CVX; Cluster includes WAN023LIF 3134 76_1841||||990081..990338|-|258 bp|EGAD orf prediction|S.p neumoniae|R6|NC_003098.1|ORF|110
ttgcaaaacaggtcctacagccgcaaagccacccaggcgttcagccatcttgtaaccratatttcctgcctcgatacctgggaagatgaagacatttgcttgaccagctacygtacttccmggagctttcagagctgcagtttcrggaacaaaggcygcatcaaattgcaactcaccatcgatttcaaggtcaggacgcaagtcgtgagcaattttagttgcttcaacgaccttatcaacgctttcaccaaaccctga

SEQ ID NO: 5284 - DNA, 324 bp, Streptococcus pneumoniae
  misc_feature (1)..(324): tiling:Spneumo1:WAN024F47; Cluster includes WAN023M2X 3150 74_725||||379640..379963|-|324 bp|EGAD orf prediction|S.pn eumoniae|R6|NC_003098.1|ORF|110
ttgcaaaagttcaaccgctcgatcaactgcaaccacttctccagcaatgacgatttgtgcaggtgtgttatagttggctggagtaaccactccaagttcagaagctttttgacaggcttcttcaatgacctctactggcgtattgagaactgctaccatcttgccagagtcagcaggagccgcttcttccatataggctccacgcttagctaccaaggcaaccgcatcttcaaaatccaaggcgccrcttgccaccaaggcagagtattctccaagagacaaaccagcaaccatatcaggctgatagcccttttcttgcaataa

SEQ ID NO: 5285 - DNA, 120 bp, Streptococcus pneumoniae
  misc_feature (1)..(120): tiling:Spneumo1:WAN024DD4; Cluster includes WAN023Q6L cont ig_1242_11||||8151..8261|+|111 bp|Glimmer 2.02 orf predict ion|S.pneumoniae|670|WAN01UEHZ|ORF|001
ttgcaaaatttggctctggtggacaatgctgaaaatacagaggattactttcatataaagataaaatacttggaatatccttttcagttagtatcctacaactgtaatactctaactaat

SEQ ID NO: 5286 - DNA, 249 bp, Streptococcus pneumoniae
  misc_feature (1)..(249): tiling:Spneumo1:WAN024CDT; Cluster includes WAN02436C SP00 89||15900032|NP_344636.1|92585..92680|+|96 bp|hypothetical protein|S.pneumoniae|TIGR4|NC_003028.1|ORF|011
ttgcaaacagtcaaagatgccattgcttccctagagtccattaaggaaagccagtcagcaactaaggatggaggacaaacagcgggcaaagaaacagcagataaggatgtccttgaaaactctcaagaagaacttcaaaaagcagttttgttcttggcagatgaaaaaggctctgagcatactgmagcagagktgattgataatcttaaagaggttattgctaagttgaaagcaaacgccctaactaat

SEQ ID NO: 5287 - DNA, 228 bp, Streptococcus pneumoniae
  misc_feature (1)..(228): tiling:Spneumo1:WAN024EZY; Cluster includes WAN023LNI 3134 90_1525||||810825..811052|-|228 bp|EGAD orf prediction|S.p neumoniae|R6|NC_003098.1|ORF|110
ttgcaaacgacgggcgatagaaatggcagagcgtttttcaacggtcaagtctggaaactcctgacgagcaagttcgctggcagaatagacagaagcaccactttcattaacgataacatagctgacttcagggaaatctttcagaacttccgctacaaaagcttcactttcacgactggccgttccatttccaatggcaataatctctacaccgtattgaccaattaa

SEQ ID NO: 5288 - DNA, 249 bp, Streptococcus pneumoniae
  misc_feature (1)..(249): tiling:Spneumo1:WAN024FLF; Cluster includes WAN023L2L 3154 55_2520||||1342004..1342252|+|249 bp|EGAD orf prediction|S .pneumoniae|R6|NC_003098.1|ORF|110
ttgcaaagcaatcttagcacgacgttcttggtcaatcaaatgtttgtcttgtgcttcttcaattgcacgttctgcacgaagtttggcacgttctgcacgactgatatcgatatcacgagcacgttctgcagagtcagcgacgattgtgatcatatcattggcaatttcaataacgccaccgtttactgcaatccagttcacgtgatctttatcatcgatacgttttacctttacttcatcaactgctaa

SEQ ID NO: 5289 - DNA, 1310 bp, Streptococcus pneumoniae
  misc_feature (1)..(1310): tiling:Spneumo1:WAN024FRL; Cluster includes WAN0243TT spr1 282||15903325|NP_358875.1|1276851..1277576|-|726 bp|Hypoth etical protein|S.pneumoniae|R6|NC_003098.1|ORF|542
ttgcaaataggagaaatcatgacaaaaacattaaaacgtcctgaggttttatcacctgcagggactttagagaagctaaaggtagctgttcagtatggagcagatgctgtytttatcggtggtcaggcctatggtcttcgtagccgtgcsggaaactttactttcgaacagatggaagaaggcgtgcagtttgcggccaagtatggtgccaaggtctatgtagcggstaatatggttatgcacgaaggaaatgaagctggtgctggtgagtggttccgtaaactgcgtgatatcgggattgcagcagttatcgtatctgacccagccttgattatgattgcagykactgaagcaccaggccttgaaatccacctttctacccaagccagtgccactaactatgaaacccttgagttctggaaagagctaggcttgactcgtgtcgttttagcgcgtgaggtttcaatggaagaattagctgaratccgcaaacgtacagatgttgaaattgaagcctttgtccatggagctatgtgtatttcatactctggacgttgtactctttcaaaccacatgagtatgcgtgatgccaaccgtggtggatgytctcagtcatgccgttggaartacgacctttacgatatgccatttgggaaagaacgtaagagtttgcagggtgagattccagaagaattttcaatgtcagcygttgayatgtctatgattgaccayatyycagatatgattgaaaatggtgtggacagtctaaaaatcgaaggacgtatgragtctattcactaygtatyaacagtaaccaactgctacaaggcggctgtggatgcctatcttgaaagtyctgaaaagtttgaagctatcaaacaagacttggtggacgagatgtggaaggttgcccaacgtgaaytggywacaggwttytactayggtayaccatctgaaaatgagcagttgtttggtgctcgyygtaaaatycctgagtacaagtttgtcgctgaagtggtttcttatgatgatgcgryacaaacagcaachattcgtcaacgraaygtcattaacgaaggggaccaagttgagttttatggtccaggtttccgtcattttgaaacctatattgaagatttgcatgatgcyaaaggmaataaaatcgaccgcgctccaaatccaatggaactattgactattaargtsccwcaacyyrttcaakcwkkmkmhawgrtwcgwgcwytwaaagarggrctyatcaatytttataaggaagatggaaccagcgtcacagttcgwgcttaactaat

SEQ ID NO: 5290 - DNA, 240 bp, Streptococcus pneumoniae
  misc_feature (1)..(240): tiling:Spneumo1:WAN024CEQ; Cluster includes WAN023MDC 3135 56_145||||68482..68721|-|240 bp|EGAD orf prediction|S.pneu moniae|R6|NC_003098.1|ORF|110
ttgcaaatccaagacctggaagcatacgtcctgcragtgtcaagccatctgcaacccatttgtaggcttcaacgaagtctactactgattgtacaaaggcaccaccaaaagcaagggcaaagaagactggaagggcacgagatagagcccacggaatcgcaccaagcaagtagttgcgttcaatacctttatagtcaaagcgttcgattgcagcatccacacggtgagcgaagaaggtag

SEQ ID NO: 5291 - DNA, 1895 bp, Streptococcus pneumoniae
  misc_feature (1)..(1895): tiling:Spneumo1:WAN024FF6; Cluster includes WAN0243LX spr1 566|scrA|15903609|NP_359159.1|1546504..1548387|-|1884 bp|P hosphotransferase system enzyme II|S.pneumoniae|R6|NC_0030 98.1|ORF|431
ttgcaaatgaacaatcaggaaattgcaaaaaaagtcatcgatgccttgggcggacgtgaaaatgtcaatagtgttgcccactgtgcgacwcgtctacgtgtcatggtcaaagatgaagagaaaatcaataargaagtgattgagaacttggaaaaagttcaaggtgctttctttaactcagggcaataccaaattatctttggtacaggtacagttaacaaaatgtacgatgaagttgttgtacttggmttaccaacatcatctaaggatgacatgaaagcagaagttgctaaacaagggaactggttccaacgtgctatccgtactttyggtgatgttttcgttccaatcatcccagttatcgtagcgacaggtctcttcatgggtgtgcgtggtcttttcaacgctcttgaaatgccacttccaggtgactttgcaacttacacacaaatcttgacagatacagccttcatcatcttgccaggtttggttgtgtggtcaaccttccgtgtatttggtggaaatcctgccgttggtatcgttcttggtatgatgcttgtctctggctcacttccaaacgcttgggcagttgctcaaggtggtgaagtaacagcratgaacttctttggtttcatccctkttgttggtttgcaaggttccgttcttccagccttcatcatcggggttgtcggagctaaatttgaaaaagctgtccgcaaggttgttccagatgtcattgacctcttggtaacwmcattcgtgacacttttggtcatgtctatccttggactctttgtcattggaccagttttccacgttgttgaaaactacatccttattgctacaaaagcgattcttagcatkccatttggtcttggtggtttcttgattggtggggttcaccaattgatcgtcgtgtcaggtgtgcaccacatcttcaacttgcttgaagtgcaattacttgctgctgaccatgctaacccattcaacgctatcatcacagctgctatgacagctcaaggtgctgctactgttgcggttggtgttaaaacaaaaaatccaaaactgaaaacacttgctttcccggctgctctttctgcyttcctaggtattacagagcctgctatcttcggggtgaacttgcgcttccgtaaaccattcttcctttcattgattgctggtgcaatcggtggtggattggcttctatccttggacttgctggtactggtaatggtatcaccatcatccctggtacaatgctttatgttggtaacggacaacttccacaataccttcttatggtagctgtatcatttgcccttggttttgctcttacttacatgtttggttacgaagatgaagtagacgcaactgcagctgcaaaacragctgaagtggctgaagaaaaagaagaagttgcgccagcagctcttcaaaatgaaacacttgtaactcctatcgtcggtgatgttgtcgctcttgctgatgtcaatgacccagtcttctcaagtggagctatgggacaaggtatcgytgtgaaaccaagycaaggcgtggtctatgcacyagctgatgctgaagtttcaattgcctttccaacagggcacgcttttggtttgaaaacaagaaatggtgctgaagttttgattcaygttggtattgayactgtatctatgaacggtgacggttttgaarcaaaagttgctcaaggtrataaggtgaaagytggcgatgttcttggaacatttgactcaaayaaaatcgctrcagctggacttgatgatacaacaatggttatcgttacaaatacagstgactacgcttcagtagctccagtcgcaacaggttcagttkckaagggggatgctgtgatcgaagtgaaaatctaactaat

SEQ ID NO: 5292 - DNA, 78 bp, Streptococcus pneumoniae
  misc_feature (1)..(78): tiling:Spneumo1:WAN024EVI; Cluster includes WAN023SKV NC_0 03098.1_1135||||886363..886440|-|78 bp|Glimmer 2.02 orf pr ediction|S.pneumoniae|R6|NC_003098.1|ORF|110
ttgcaaccacaaaaaagcaagcattcacaagaatacttacctatcatgggaggaacaaccgttcctcttttttattac

SEQ ID NO: 5293 - DNA, 1277 bp, Streptococcus pneumoniae
  misc_feature (1)..(1277): tiling:Spneumo1:WAN024CSH; Cluster includes WAN02447X spr0 773||15902817|NP_358367.1|767190..768416|+|1227 bp|Conserv ed hypothetical protein|S.pneumoniae|R6|NC_003098.1|ORF|11 1
ttgcaactatcgaagagaaattgtcaaaacgctaaggggaagcctatgttagatgtagaagcgattcgcaaggattttccaattttagatcagattgtcaatgatgaacctctggtctatctggacaatgctgcgacgacacaaaaaccactagtagttctgaaagctattaacagytactatgagcaggacaatgccaatgttcaccgtggtgtccataccttagcggaacgagcgacagcttcttatgaagctgctcgtgaaaccattcgtaagtttattaatgcaggctctacaaaggaagttctctttaccagaggaacgacaaccagccttaactgggtggcacgctttgctgaggaaattctcrctgagggagaccrggtcttgatttcagtaatggaacaccattctaatatcattccatggcaggaagcttgtcgaaagactggagcagagcttgtctatgtctatcttaaagacggtgccttggatatggaggrtttgcgagctaaattgactgataaggttaaatttgtttccctagctcatgcctccaatgttcttggtgtggtcaatccgatcaaggaaatcactcaattagcccaccaagttggggcaatyatggtagtggatggtgctcaatctacacctcatatgaagattgatgtccaggacttggatctggactttttcgccttttcggstcacaagatggctggtccgactggtatcggtgtcctttacggcaaaraaaagtatcttgagcaaatgtctccagtasaatttggcggcgagatgattgattttgtctacgagcaatyygctagttggaargaattgccttggaaatttgaggctggaacgccaaatatggcaggagctattggacttgcgactgcagttgattatctggaaaagattggtatggatgccrttgaagctcatgaacaggaattgattgcgtacgtctatccaaaactgcaggcaattgagggattgaccatttacggttctcaggatttggctcaacgttcgggtgttattgcctttaacctaggtgatctccatcctcacgatcttgcgacrgctctggattatgaaggagtggctgttcgtgctggtcaccattgtgcgcaacccttgcttcagtatttggaagtcccagcawyagctcgtgcaagtttttatatctayaataccaaggcagattgcgacaaactagtcgatgccctacaaaagacaaaggagtttttcaatggcactttctaactaat

SEQ ID NO: 5294 - DNA, 767 bp, Streptococcus pneumoniae
  misc_feature (1)..(767): tiling:Spneumo1:WAN024D8K; Cluster includes WAN0243T0 spr1 311|trmH|15903354|NP_358904.1|1301386..1302147|+|762 bp|tR NA (guanosine-2'-O-)-methyltransferase, TrmH family|S.pneu moniae|R6|NC_003098.1|ORF|121
ttgcaagacggggttttgtgttataatagagrcatgaaaacaaatgatattgtctatggtgtccacgcygttaccgaagcyctccttgcaaatacaggaaacaaactctacctccaagaagatctccgaggtaagaatgttgagawagtcaaggaactagctacagaaaagaaggtgtccatttcttggacatcaaaaaaatctctctctgagatkactgaaggtgctgttcatcaaggttttgttctacgagtgtctgaatttgcctatagcgagctagattacatccttgcaaaaacacgscaagaagaaaatccacttctattgattctagatggtctaaccgawycccataatctgggttctatcttgcgaacagccgatgcgaccaatgtttcaggtgtcatcattcccaagcaccgtrctgtcggagtaactcctgtcgttgccaaaacagccacaggtgctattgaacacgttccaattgcccgagtgacmaacctcartcaaaccttakataaactyaaggatgaaggyttctggacctttggaacggatatgaacggtactccttgccacaagtggaatacaaaagggaaaatcgccctcatcattggaaatgaaggaaaaggtrtctctagcaacatcaaaaaacargtcgatgaratgattaccattccgatgaatggacatgttcaaagccttaatgccagtgttgctgcggccattctcatgtacgaagttttccgaaatagactataactaat

SEQ ID NO: 5295 - DNA, 1178 bp, Streptococcus pneumoniae
  misc_feature (1)..(1178): tiling:Spneumo1:WAN024DJ8; Cluster includes WAN0244K5 spr0 333||15902377|NP_357927.1|337078..338250|+|1173 bp|Conserv ed hypothetical protein|S.pneumoniae|R6|NC_003098.1|ORF|11 1
ttgcaagactgtaacatgaaaaaagaatttaatttaattgcaactgtggcagcaggkcttgargctgtygtkggwcgwgaagtgcgagagttgggctacgattgtcaggttgaaaatggwcgtgttcgttttcaaggagacgtgagarctattatcgaaaccaacctktggcttcgggcagcagatcgtatcaarattatcgtaggaacgttcccagctaagacttttgaagagctrtttcagggagttttcgctttrgattgggaaaattatttaccacttggagctcggttcccgatttcaaaagctaaatgtgttaagtccaaacttcacaatgagccyagtgttcaggctatttctaagaaagctgttgtcaagaaattgcagaaacactatgctcgcccagaaggggttcctytgatggagaatggyccagagtttaagattgaggtctctattctcaaagatgtggcaactgtcatgattgatacgaccgggtctagcctctttaaacgtggttatcgtaccgaaaaaggtggygctcctatcaaggaaaatatggcagcagccattttacaactttctaactggtayccagacaagcctttgattgatccgacctgtggttcggggactttctgtattgagkcagttatgattgctagaaagatggcgccaggtcttcgtcgctcttttgcatttgaggaatggaactggatcagcgatcgcttgattcaagaagtgcgcacagaagcggctaaaaaagtagamcgtragcttgagytggatatcatgggytgtgatattgatgctcgcatggtggaaattgctaaggccaatgctcaggyagctggtgttgcaggagacattacttttaagcagatgcgcgtgcaggatttacgttccgataaaatcaatggagtaatcatttccaatccgccttatggtgaacgtttgtcagatgatgcaggggtgaccaagctctatgctgagatggggcaagtatttgcaccgctgaaaacttggagcaaatttatcctgactagtgatgaagcttttgaaagcaagtatggtagccaagcagataagaagcgtaagttatacaacggaaccttgaaagtggatytatatcaatattttggtcagcgtgtcaaacggcaagaggtaaaatarctaat

SEQ ID NO: 5296 - DNA, 456 bp, Streptococcus pneumoniae
  misc_feature (1)..(456): tiling:Spneumo1:WAN024FEZ; Cluster includes WAN023KTE 3135 29_2905||||1550634..1551089|-|456 bp|EGAD orf prediction|S .pneumoniae|R6|NC_003098.1|ORF|220
ttgcaagagaagatcaatagtgagacaagcaatctcttccaaaggttgcttgatagtagccaattgagggtagtaattttcgataaagtaggtcccatcatagccgatgaccttgagctcttttgggacagaaatgcccaattcttgagcgattttaatgaccagaatagctgtcaaatcatccgaagcaaaaatggcatctggtttttcccgggtcaagatattcttgatttccatttcttttctgacgggagaaaagtcactggaaacattgataataggagcttttgggagtacggatgcaaaaccagcgtggcgcagtccggttggcgaattrgaattgtcattccctgtaatcatgatgatagactgggcacctgtcttgaccaaggtttgggcagcaagaaccccaccagcatagttgtcagaggagacracagggatgtctggcgatag

SEQ ID NO: 5297 - DNA, 276 bp, Streptococcus pneumoniae
  misc_feature (1)..(276): tiling:Spneumo1:WAN024G6E; Cluster includes WAN023LJB 3147 23_1793||||965164..965439|-|276 bp|EGAD orf prediction|S.p neumoniae|R6|NC_003098.1|ORF|110
ttgcaagagatcttcaatcccatcagcgtccaaggtaaaaggaataaccagacttgcattgatttcatcatctgttgctgtccctttttgcttatgattacggataaattctgctacctgtacgtcaaatgttgttacttctttttgttttgttgccattattactccattcttctcttttgggaaattaaacgttccaattcttctagggctgtatctgtatctcctacatggctagcttcctgcaccttctttttgattctcatattgtcctga

SEQ ID NO: 5298 - DNA, 75 bp, Streptococcus pneumoniae
  misc_feature (1)..(75): tiling:Spneumo1:WAN024F94; Cluster includes WAN023OCV spn0 19g01_1||||751..825|+|75 bp|Glimmer 2.02 orf prediction|S. pneumoniae|23F-1|WAN01UCLR|ORF|002
ttgcaagatatggatatggatccacatggtctgagtggttgtttggttggttattggtacagtattcatgcgtct

SEQ ID NO: 5299 - DNA, 894 bp, Streptococcus pneumoniae
  misc_feature (1)..(894): tiling:Spneumo1:WAN024C6H; Cluster includes WAN0240M5 |dpn B||AAA88582.1|||867 bp|DpnII endonuclease|S.pneumoniae||M1 4339|ORF|000
ttgcaaggaagaggttggaggcagaaaatgaaacaaactagaaattttgatgagtggttgtcaacgatgaccgacacagtagctgactggacttattatacagattttcctaaggtttataaaaatgtatctagtataaaagttgctctaaatattatgaatagtcttattggtagtaaaaatatacaagaggattttttagacttatatcaaaattatccagaaattttgaaagttgtgcctctacttattgctaaacgtttgagagatacgattattgttaaggatccgataaaagatttctattttgattttagtaaacgaaactatagtattgaagaatatactatgtttttggaaaaatcaggtatatttgatttattgcaaaatcatttagtatcaaatttagttgactacgttacaggtgttgaggttggtatggatactaatgggcgcaaaaatcggactggagatgcgatggaaaatattgttcaaagctatcttgaagctgaagggtatattttaggagagaatttatttaaagagattgaacaaaatgaaatagaggaaattttttctgtcgatttatctgctattacgaatgatgggaatactgtgaaacgttttgattttgtcataaaaaatgaacaagtgctttatctgattgaggttaatttttattcaggaagtggttcaaaattaaatgagacggctagatcttacaaaatgattgctgaagaaaytaaagctattcctaatgttgagtttatgtggattactgatggacaaggttggtataaggctaagaataatttacgagaaacatttgatattttaccattcttatataatattaacgatttggaacataatattttaaagaatttgaaatag

SEQ ID NO: 5300 - DNA, 318 bp, Streptococcus pneumoniae
  misc_feature (1)..(318): tiling:Spneumo1:WAN024CJW; Cluster includes WAN0241NH SP22 00||15902007|NP_346611.1|2121378..2121488|+|111 bp|hypothe tical protein|S.pneumoniae|TIGR4|NC_003028.1|ORF|120
ttgcaaggcaatgcttgctttcataagaacctcctcttctcgttttccttttwaaaaaaagaaaaacctttaccatacatggaaaaggtgcaaaattagactaagtatcgttccctccgctggcattacccagatcaggtgcggtcgaagtttaacacttcctctcagactgtacacagactcccatatattatatgtatatatgatagcgcaaaataagaaaaatgtcaaggaaactgcttacagaaaagagcaggaaatttctcctactccaattttctatactcgttctccatcactgtttactctgtarctaat

SEQ ID NO: 5301 - DNA, 225 bp, Streptococcus pneumoniae
  misc_feature (1)..(225): tiling:Spneumo1:WAN024FVI; Cluster includes WAN023L8J 3154 24_2261||||1215511..1215735|+|225 bp|EGAD orf prediction|S .pneumoniae|R6|NC_003098.1|ORF|110
ttgcaagtctggtacaatttgcaaagcgattttgagcaagagattacgctcgtcatgtggaatccatttgccaatctggtgttcaatcagccactcatctcgttcttcgcagacctcaatttgaagatacttggttacagctacaccgaccgagtcaaaacctggcccgatattggcactggttgcaggtacaataatcttcatcttattctcctagcaccttga

SEQ ID NO: 5302 - DNA, 225 bp, Streptococcus pneumoniae
  misc_feature (1)..(225): tiling:Spneumo1:WAN024GCL; Cluster includes WAN023LRN 3132 73_1293||||683678..683902|-|225 bp|EGAD orf prediction|S.p neumoniae|R6|NC_003098.1|ORF|110
ttgcaagttcttggcttggaagataaagcgccctggtgtacgagctggtttgaaatcaaaggatggttttggtttctcactttggagttcgataatatccatcttatccaatttcttttgacgagacatagccatattacgagttgcaacacgggctttattacgagccacaaagtccttgaggtctgcaatctctttctgctggcgttcgtaggctgcctctag

SEQ ID NO: 5303 - DNA, 635 bp, Streptococcus pneumoniae
  misc_feature (1)..(635): tiling:Spneumo1:WAN024D7J; Cluster includes WAN0243QH spr1 402||15903445|NP_358995.1|1379398..1380027|+|630 bp|Hypoth etical protein|S.pneumoniae|R6|NC_003098.1|ORF|111
ttgcaagttcttttgttttgttgtaatayattttataacaacgagagagttctcgaaattttaagaaaaaggagacacatcatgtctaaaaaagtattatttatcgtcggatcactacgtcaaggttctttcaaccaccaaatggcgctcgaagctgagaaagcwcttgctggtaaagcggaagttagctaccttgattattcagcccttcctctcttcagccaagatttggaagttccaacayatccagctgtagctgctgctcgtgaagcagttctcgttgcggatgctatctggattttctctccagtctacaacttctctatccctggtacagtgaaaaacttgcttgactggctatctcgtgcccttgacttgtctgatacacgtsgygtttctgcccttcaagacaagtttgtcacagtatcatctgtagccaatgcagggcacgatcaacttttcgctatctacaaagacctcttgccatttatccgtacacaaggcgttggtgatttcactgctgcacgtgttaatgactctgcctgggcasacggaaaattggttcttgaagaaacagtcctaaactcacttgaaaaacaagctcaagacttggtcgaagckatymagtaactaat

SEQ ID NO: 5304 - DNA, 237 bp, Streptococcus pneumoniae
  misc_feature (1)..(237): tiling:Spneumo1:WAN024F2N; Cluster includes WAN023LU9 3133 22_1142||||604069..604305|-|237 bp|EGAD orf prediction|S.p neumoniae|R6|NC_003098.1|ORF|110
ttgcaagttttcacgactgtcctcagacttggcagaaatgagggtatatggcgtttgggtaggcgtgaaatcctccaccaaatccgctttattataaagcgtcaagtgaggaatatcttccatgtccaggtctttcatgatggagagaaccgttttttcatgctcctcgtggtaaggattgctagcatcgataacatgaaccagaaggtccacatgcttgctttcttccaaggttga

SEQ ID NO: 5305 - DNA, 478 bp, Streptococcus pneumoniae
  misc_feature (1)..(478): tiling:Spneumo1:WAN024CHO; Cluster includes WAN023KNA 3130 45_3204||||1709737..1710006|+|270 bp|EGAD orf prediction|S .pneumoniae|R6|NC_003098.1|ORF|220
ttgcaatcaaggctaagtagacagcagcaaatttcatattgtataatttctgactcatacttctctctttctatgtgtactagtataaataagaaaaagaaggycgtcaagccttcttttgatttattcttctgcttcatcttctgtaaattgactattgtacaagtcagcgtagaagccaccttgcgccatcagttcctcatagttgccttgctcgatgatatttccatctttcatgaccaagatcaagtctgcatttcggatggttgacaagcggtgggcaatgacaaaggatgtgcgtccttccatcaaacggtccatggctttttggatcaattcctctgtccgtgtgtcaacagaagaagtcgcctcatccaaaatcaaaagcgrtgcatccttaagaagggcacragcaatagtcaatagttgtttttgtcytacagacaaggtcacggtgtcatccaagatggtatcatag

SEQ ID NO: 5306 - DNA, 135 bp, Streptococcus pneumoniae
  misc_feature (1)..(135): tiling:Spneumo1:WAN024BDV; Cluster includes WAN02423P SP15 81||15901423|NP_346027.1|1486361..1486489|+|129 bp|hypothe tical protein|S.pneumoniae|TIGR4|NC_003028.1|ORF|010
ttgcacaaaactttagagaatatcggagaatttgaagaagataatctttattattcttctatagacaaaagcagaaacaaggatcagttttcccatattttcgggctctataatatttgtagtgggctaactaat

SEQ ID NO: 5307 - DNA, 351 bp, Streptococcus pneumoniae
  misc_feature (1)..(351): tiling:Spneumo1:WAN024CGY; Cluster includes WAN023MEC 3135 59_106||||52582..52932|-|351 bp|EGAD orf prediction|S.pneu moniae|R6|NC_003098.1|ORF|110
ttgcacgctcaagcacataggcatcacgatggtctgaaaagacaaactccactggaaattcttcggcaatcacctgaaaatttgagccattaccagaggcaaaaaccgctatttttttcatttgataatgacactttcgttttctttcttgacgatgcgaccaatttcatagactgcttcatccaacaattcttttacacgctctacattttcagggctgaccgccaacataagtcccacacccatattgaagatttcaaacatttcttcgtgtttaatctgaccrtatttttcaagggytttgaaaattggaagcactggaactttrctttcatcaatttcagcagctag

SEQ ID NO: 5308 - DNA, 432 bp, Streptococcus pneumoniae
  misc_feature (1)..(432): tiling:Spneumo1:WAN024BDG; Cluster includes WAN023KZY 3131 65_2622||||1398049..1398480|+|432 bp|EGAD orf prediction|S .pneumoniae|R6|NC_003098.1|ORF|110
ttgcactttgattttcgaatagtcttaactatcaaattcactgagatactcatagcgttcgtatttttcaaggagtgcttcatttttctcatccaattctttttggagagtagccagcttaccaaagtcagagccgttagcctgcatttcctcttcaatagcagcgatacgtttttccaaggtttcaatatcaccttcaatacttgcccactcctgcttttcttggtaggtcatgcgtttcttgtcttctcgaaccttgaccactttttccttttcgrccttttgcacttgattggccatatctgtttcaaaagctttttcatcaagatagtcggtgtaatgaccaaagaaaggacgaatcttgccatcctcaaaagcgagaatcttggtcgctaccttatccaagaaatagcggtcgtgactgactgttaa

SEQ ID NO: 5309 - DNA, 1946 bp, Streptococcus pneumoniae
  misc_feature (1)..(1946): tiling:Spneumo1:WAN024GLY; Cluster includes WAN0244HO spr0 422||15902466|NP_358016.1|419729..421669|+|1941 bp|Hypothe tical protein|S.pneumoniae|R6|NC_003098.1|ORF|110
ttgcagataaacgcaatcttgaaaaagaaaaagctactgttggagggaaataagatggttatcagagtatttgatcaacagaaaaatacttattctagctttgccttagaggaattaagttactatatgaatcgggtctttaagactaacatagagcttgtcgaggagaaggaagcggatatttttgtaggattagtcaataaagaggacagaaaagaccatgttcttatctcattagacaagggtaagggragaattgagtctaatacaattgtaggtttacttattggaatttaccgaatgtttcatgaatttggggttgtgtayactagaccagggcgcagacatgactttgttccagagttacgatttgaagattttttagataaasagctatctatagatgaaacagccagttactatcataggggagtatgtatagagggagcggattcatttgaaaatatactagatttcattgattggctacctaagattgggatgaacagttttttcatccagtttgaaaatccttactcttttttgaaacgttggtatgaacatgartttaatccatayctaaataaagaamaattytcaaatgaattagtacaagaattgagtgataggttggataaagaattgcaaaaaagaggtcttattcatcatcgtgttggtcatggatggacaggtgargttttaggttactyttcaaaatttggctgggaatcaggtcttagtatttcagaggagaagaaaccstatgtcgctgaaataaacgggaaacgagaattrtttaatacggctccgattttaaccagyctggatttttcaaatccagatgtrgckgataagatggtagaaattatcaaggattatgccaagaaaagacctgatgttaactacttacatrtatggttgtcggatgctcgtaataatatytgtgaatgcgaaaactgtagacaagaattggtttcggatcagtatattcgtattctcaatcaattggatagggctttaacgagtgagggattagatacaaagatttgttttmtgctttaycatgagttgytatgggcrcctcagaaagaaaaattagataatcctgaacgctttaccatgatgtttgcaccgattacaagaacatttgaaatgagttatgcagatgtagattttgacaattccatacctacgcctaaaccttatmtgcgtaataaaattatacttccgaattctcttgaggaaaatttatcttatctttttgagtggcaaaaarcatttaaaggagatagtttcgtatatgactatcctttagggcgtgctcattatggcgatttaggctatatgaaaattagtcaaacyatttacagagatgtatcttatctttchaacctacatttgaayggktacatttcgtgtcaagaattacgtgccggattccctcataattttcctaattatgtyatggggsaaatgctctggaagaagacaagaagttatgaagaattgattgaagaatacttttctgctttgtatggggaaaattggcagtctgttgttgaatatttagaaaaattatccakttattcctcwtgtgaytattttaatgcaattggcagycgtcaaartgatgttttagcgaatcattattatatagcttacaatctagctgataattttttrccaattattgaggaaaatatttctaagttattaaatagtcaaaaggatgaatggaaacagctcagttatcatcgtgaatatgttgttaagatggcgaaggctttatatcttcaagcaacyggaaaaacaaggcaagctcaagatgaatggagaaatgtgttgaattatatccgtgggcacgaaytgctattycaatctaatttggatgtttatcgtgtaattgaagtagcaaaaaattacgctggtttccacttataactaat

SEQ ID NO: 5310 - DNA, 111 bp, Streptococcus pneumoniae
  misc_feature (1)..(111): tiling:Spneumo1:WAN024G3K; Cluster includes WAN023U18 AX57 1765.1_140||||117936..118046|-|111 bp|Glimmer 2.02 orf pre diction|S.pneumoniae||AX571765.1|ORF|000
ttgcaggagaaaggtcagttttatagtgaattgaatctggaatattacactacggttcctaaaatattttcagaaagcgatttgaatttcccaataaatttgttcagtttt

SEQ ID NO: 5311 - DNA, 255 bp, Streptococcus pneumoniae
  misc_feature (1)..(255): tiling:Spneumo1:WAN024GJR; Cluster includes WAN023LZM 3134 62_882||||467268..467522|-|255 bp|EGAD orf prediction|S.pn eumoniae|R6|NC_003098.1|ORF|110
ttgcaggagattgcctttggmacgcacctctcccttgtgaagaatgacaaaggcatcacacatcttctccgccgaatccagcacgtgggtactcatgagaatagacttgcccttttgcttctccacttccaaaagctgaatcaaatcagaaatagccagcggatcaagaccaaggaaaggctcatccacgatgaaaagacttggatccaccacaaaagcacagataatcatgaccttctgcttcatcccttttga

SEQ ID NO: 5312 - DNA, 102 bp, Streptococcus pneumoniae
  misc_feature (1)..(102): tiling:Spneumo1:WAN024AYR; Cluster includes WAN023YM1 AL44 9928.1_86||||67035..67136|-|102 bp|Glimmer 2.02 orf predic tion|S.pneumoniae||AL449928.1|ORF|001
ttgcaggtaggtcaagctaacgaaattgggratccaggagcgcacttcacccagtggaatctgctggacgatatargatttgaccaactgatccagcccaat

SEQ ID NO: 5313 - DNA, 258 bp, Streptococcus pneumoniae
  misc_feature (1)..(258): tiling:Spneumo1:WAN024FAN; Cluster includes WAN023KNR 3157 37_3164||||1685478..1685735|+|258 bp|EGAD orf prediction|S .pneumoniae|R6|NC_003098.1|ORF|110
ttgcagttcgatggactgtgggtaaatattgaccacatcaggcacatctcctgcgagaacgcgtgtcttcaatacttcaccagcatttggtacattgacgactttgaccttgatcttagggttttccttctcaaaatcacgagtgatttcttccaaggttttggtcatttcttttttctggttgaaatactcgatggtcactgtgccatccgcagatttaccatagttggagcaagcgccgagcccaaacaaagctaa

SEQ ID NO: 5314 - DNA, 324 bp, Streptococcus pneumoniae
  misc_feature (1)..(324): tiling:Spneumo1:WAN024G36; Cluster includes WAN023LEN 3154 50_2003b||||1080514..1080837|+|324 bp|EGAD orf prediction| S.pneumoniae|R6|NC_003098.1|ORF|110
ttgcagttcttgtttaatctcagcttcgagttgctgagccaaattatgacgagcagaagcaagttgacctgccaaattgacaagattgacttccaacttcttaagctctgcttccatgtcctcagacgaaagattattgcctgtcaagagattgtattcttccgtaatcttggcaaaataaagcaaaacatcatcaacagtcccaccatacttacgagtaatagtatgaaggaggtccaaacgattctcaacctgcatsaggcgattgccatcaaaatcaaggtcctcaatgatagcttccaaacgtttgctaatgtcttctaa

SEQ ID NO: 5315 - DNA, 81 bp, Streptococcus pneumoniae
  misc_feature (1)..(81): tiling:Spneumo1:WAN024DII; Cluster includes WAN023RPN cont ig_1584_8||||5784..5858|-|75 bp|Glimmer 2.02 orf predictio n|S.pneumoniae|670|WAN01UDG7|ORF|000
ttgcagttgcctatcagtttcatcacatcctgtcttgatagaaaacaaattggtaatattcatatgatttcaacccctaaa

SEQ ID NO: 5316 - DNA, 621 bp, Streptococcus pneumoniae
  misc_feature (1)..(621): tiling:Spneumo1:WAN024CUQ; Cluster includes WAN023MFZ 3135 67_42||||26590..27210|-|621 bp|EGAD orf prediction|S.pneum oniae|R6|NC_003098.1|ORF|110
ttgcataaactgttcaaaatacgacacgattccctccttgaaaatttgatagtcaaatatttctcctatcttatcatttttaagagaatttgtcacggattatgcaaagacctttttcaaracttcctgaatcgttgtcacgccaatgacctgaatttccttaggcagagtgattcctgtcaaggaattcttaggtacataaatcttagtaaagcccagtttagcagcttcgttgatgcgttgctcaatacgattcacgcgccgaatctctcctgtcaagcccagttctccgacaaaacattcctgaggattagttggcttgtctttgtagctcgaagcaatagcaactgcaacagccaagtcaatcgcaggttcatccaatttaacaccaccagcagatttgagataggcatcctgattttgcaagagaagccctgcccgtttttccaaaacagccataatcaagctagcacggttaaaatcaagtcctgtcgtagtacgcttggcatttccaaacatggtcggtgttaccaaagcctgaacctccgccaaaatcggacgcgtcccttccatggttacaacgatggaggaaccagtcgccccatccaaacgctcttctag

SEQ ID NO: 5317 - DNA, 264 bp, Streptococcus pneumoniae
  misc_feature (1)..(264): tiling:Spneumo1:WAN024FOX; Cluster includes WAN023L4E 3156 41_2429||||1298742..1299005|+|264 bp|EGAD orf prediction|S .pneumoniae|R6|NC_003098.1|ORF|110
ttgcatccgttggtagaatttttcaatcatttctggagtcataaaactttcaagatctgtaaaaatcgtaccttccttgacaaaatcacccttcatccccgttacaacaaactggtcctgacacgctcgacccttgaaatgagtcaaagccttgttgacaatggcgtcatcccatgtctgagcctgaatcaattcattgttttcaaaaatacgagcgccattagcaacaaccagaaccactcgatccaccaagggactcagtag

SEQ ID NO: 5318 - DNA, 285 bp, Streptococcus pneumoniae
  misc_feature (1)..(285): tiling:Spneumo1:WAN024FZH; Cluster includes WAN023LC7 3153 12_2102||||1133132..1133416|+|285 bp|EGAD orf prediction|S .pneumoniae|R6|NC_003098.1|ORF|110
ttgcatctagaacaatctttcgttctctgtcataaaaatctggatatacttttcgtttcccaacagaaaatactgaaattccatccgtcttatccttatttctgggatgtacaaaaccttttggcaacaaggtgtaaacatactcttcccaaagccaggcaacatcaaagagaataccatagattttttgatcttgataccctaaaccgtgcttttcttggtttaggatcatcagacaaagttcttgtaagtttctgtactcgtgaaagtatgcatgacgtatag

SEQ ID NO: 5319 - DNA, 123 bp, Streptococcus pneumoniae
  misc_feature (1)..(123): tiling:Spneumo1:WAN024CLE; Cluster includes WAN0241W6 SP18 66||15901694|NP_346298.1|1773102..1773224|+|123 bp|hypothe tical protein|S.pneumoniae|TIGR4|NC_003028.1|ORF|021
ttgcatgtagtgcaaaatctagtaaacattccaaaattaactcgaatatttatttccaaacaaaaaaacaatacaccatcaaagttgtttggatttttcatgaaatttacagaaaatagttga

SEQ ID NO: 5320 - DNA, 276 bp, Streptococcus pneumoniae
  misc_feature (1)..(276): tiling:Spneumo1:WAN024CIJ; Cluster includes WAN023MG7 3132 70_18||||14956..15210|-|255 bp|EGAD orf prediction|S.pneum oniae|R6|NC_003098.1|ORF|440
ttgcatgtattaggcacgccgccagcgttcgtcctgagccaggatcaaactctcattaaaaagtttgagttctyactcatttctgtcactgacagatttattgtttttttcattgttcagtactacaacttaygttgtagcgccctgcacattggttcgtcttgttcagttttcaaaggtctttgtcacttgcttctctcaagcgacaactatattagtatatcacarcyrctttcrcttgtcaacacttttttgaagatttttaagtttttttaa

SEQ ID NO: 5321 - DNA, 941 bp, Streptococcus pneumoniae
  misc_feature (1)..(941): tiling:Spneumo1:WAN024DBO; Cluster includes WAN024433 spr0 947||15902991|NP_358541.1|930871..931806|+|936 bp|Conserve d hypothetical protein|S.pneumoniae|R6|NC_003098.1|ORF|111
ttgcatrcgacgaaatgtaaacatttctgtttaaaattaaggataaaatcaatgaaaaaagcaatggtaattatcaaccctacttctggtggcgagaaggctttggattacaaagaaaagctggagaataaagcaaaagaatactttgaatatgttgaaaccaaaattaccgaaaaagygctggatgcaacacattttgctgaagaagcttctcgtgagcagtatgatgcagtggttgtgtttggtggagatggaactgtcaatgaagtcatttcaggtattgatgagagagactacattcctaagttagggattatcccaggcggtacgggtaacctcattacaaaacttttggaaatcaatcaagacatcgatggcgcaattgacgaactrgattttgatttawccamtaagattgatatcggtaaagcaaatgrcaactatttyggtwatatctttagtatcggttctctgcctgaggcgattcacaatgttgaaatagaggacaaarcaaaattcggtattttaacctatgctgtaaataccatgaagtctgtcatgacagatcaggtctwtaacattaaggttgagacagaaaatggaaattatgttggtgaagctagccatgttttggtccttttgacaaattacttcgctgataagaaaatctttgaagaaaacaaggacggctatgccaacattttgattctgaaagatgcctctatattctccaaattatccgtcattcctgatttattaaaaggggatgttrtcgcaaatgataatatcgagtatatcaaagcgcgtaatattaaaatctcttcagatagtgaattggagtcagatgttgacggagataaatcagataacctacctgtagaaatcaaagtcctagctcagcgagtagaagtattttcaaaaccgaaagaggattarctaat

SEQ ID NO: 5322 - DNA, 893 bp, Streptococcus pneumoniae
  misc_feature (1)..(893): tiling:Spneumo1:WAN024DXH; Cluster includes WAN0243C5 spr1 920|malD|15903961|NP_359511.1|1902742..1903605|+|864 bp|AB C transporter membrane-spanning permease - maltose/maltode xtrin|S.pneumoniae|R6|NC_003098.1|ORF|111
ttgcattcaagaaactacacgcatttgatatggaggacgtctaagatgaataactcaattaaactcaaacgtagactgactcaaagccttacttacctttacctgattggtctatcaattgtaattatctatccactgttgattaccattatgtcagcctttaaagcaggtaacgtctcagcctttaaactagatactaatatcgacctcaattttgataaytttaaaggyctcttcactgaaaccttgtacggtacttggtacctcaacactttgattatcgccttaattaccatggctgttcaaacaagtatcatcgtacttgctggttatgcttacagccgttacaacttcttggctcgtaaacaaagtttggtcttcttcttgatcatccaaatggtgccaactatggccgctttgacagccttcttcgttatggcgcttatgttgaacgcccttaaccacaactggttcctcatcttcctctacgttggtggtggtatcccgatgaatgcttggctcatgaaaggctacttcgatacagtgccaatgtctttagacgaatctgcaaaactagacggtgcaggacacttccgccgcttctggcaaattgttctwccacttgttcgcccaatggttgccgtacaagctctctgggccttcatgggacctttcggggactayatcctctctagtttcttgcttcgtgagaaagaatactttactgttgccgtaggtctccaaaccttcgttaacaatgcgaaaaacttgaagattgcctacttctcagcaggtgctatcctcatcgcccttccaatctgtattctcttcttcttcctacaaaagaactttgtttcaggacttacaagtggtggcgacaagggataactaat

SEQ ID NO: 5323 - DNA, 1958 bp, Streptococcus pneumoniae
  misc_feature (1)..(1958): tiling:Spneumo1:WAN024FHK; Cluster includes WAN0243O0 spr1 491|pepO|15903534|NP_359084.1|1466904..1468796|-|1893 bp|E ndopeptidase O|S.pneumoniae|R6|NC_003098.1|ORF|221
ttgcattccctagtgatttttgttaagataaakgcaaatacaaatgaaagcgagaacaagatgacacgttatcaagatgatttttatgatgctatcaatggagaatggcaacagacagctgaaatcccagcagataagtctcaaacaggaggttttgttgatttagaccaggaaattgaagacctgatgytggcgacaacagacaagtggttagcaggtgaagaagtgcctgaggatgctatcttggaaaactttgtcaaataccaccgcctagttcgtgattttgacaagagagaagctgacggtatcacacctgtcttaccactccttaaagaattccaagaattggaracttttgcggattttacagctaaactagcagagtttgagcttgcaggaaaaccaaacttccttccttttggtgtatcgccagactttatggatgctagaatcaatgttctatgggctagcgctccaagcacaatcttgccagatacgacctactatgcagaagaacatcctcagcgcgaagagctcttgactctttggaaagaaagcagcgcaaatctcctcaaggcttatgatttctctgatgaagaaattgaagacttgctagaaaaaagacttgaattggaccgccgagttgyggcagtggtgctctctaatgaagaaagttcagaatatgctaaactctatcatccatattcttacgaagatttcaagaaattcgcgcctgccctacctttggatgacttcttcaaagcagttattgggcaattaccagacaaggttattgtagacgaggaacgtttctggcaagcagcagagcaattytacagtgaggaakcctggtctctccttaaagcaaccttgattttgagtgttgtcaatctttcaaccagctatttaacagaggatatccgtgttttgtytggtgcctacagccgtgccctttctggagttccagaggcaaaagataaggycaaagcagcttatcatctagcacargaacctttcaagcaagccctgggkctttggtacgcccgtgagaagttctctccagaagccaaggcggatgtggagaaaaaagtggcaaccatgattgatgtytataaggagcgtctgcttaagaatgactggctcactccagaaacctgtaaacaggctatcgtgaagctcaatgtgatcaaaccttatattggctatccagaagaattgcctgcacgttacaaggataaggtagtgaatgaaactgccagtctttttgagaatgctctagcctttgcgcgtgtggaaatcaagcacagttggagtaagtggaaccagcctgtaraytataaggaatggggcatgcctgctcatatggtcaatgcctactacaatcctcagaagaacctgattgtctttccagcggccattttacaggcgsctttctatgacttgcatcagtcatcttctgctaactacggtggtattggggcagtgattgcccatgaaatttcccacgcctttgatactaacggggcttcctttgacgaaaatggtagcctcaaggattggtggacagagagcgactatgctgccttcaaggagaaaacacaaaaagtcattgaccaatttgatggacaggattcttatggagcaaccattarcggtaaattgactgtatcagaaaacgtggctgacttgggaggaatcgcagcagcgcttgaagcagctaagagagaagcagacttctcagcagaagagttcttctacaacttcggtcgcatctggcgcatgaaaggtcgwccagaatttatgaaacttttggctagcgtcgatgtgcacgcaccagccaaactccgtgtcaatgtgcaagtaccaaacttcgacgatttctttacaacctatgatgtcaaagaaggagacggaatgtggcgttcaccagaggagcgcgtgattatttggtaactaat

SEQ ID NO: 5324 - DNA, 225 bp, Streptococcus pneumoniae
  misc_feature (1)..(225): tiling:Spneumo1:WAN024C66; Cluster includes WAN023M5X 3136 20_554a||||286573..286797|-|225 bp|EGAD orf prediction|S.p neumoniae|R6|NC_003098.1|ORF|110
ttgcattttatctttatcgattggattcttggtcttttgaatgactggcaacagttgagacaggccatcaatcaaaacattcccataagcacccgtataggcaacattggtgtggtcgatataggatccatcttgataaaaaccttcaccttggtctaccaacttgaacacttgctcaatcgagcgaatggtagaagaaatttcttgatcatccttacgcagtaa

SEQ ID NO: 5325 - DNA, 243 bp, Streptococcus pneumoniae
  misc_feature (1)..(243): tiling:Spneumo1:WAN024F97; Cluster includes WAN0243GS spr1 752||15903794|NP_359344.1|1721344..1721586|-|243 bp|Hypoth etical protein|S.pneumoniae|R6|NC_003098.1|ORF|211
ttgccaaaatggaaaaaggtgaaaggaatatcacgaatggatttaagtaataaagcttcaaatcttagaaaaaagttgggagctgatggtgaakcgccgatagatatttttaaattggtacaaaagatagaaaatttgacgctggtattttatggactcggaaagaatattagcggagtctgttataaaggaactcagttcagtctcattgcagtcaattcagacatgycattaggaaggtaa

SEQ ID NO: 5326 - DNA, 264 bp, Streptococcus pneumoniae
  misc_feature (1)..(264): tiling:Spneumo1:WAN024DYU; Cluster includes WAN023KGZ 3135 77_3486||||1869474..1869737|-|264 bp|EGAD orf prediction|S .pneumoniae|R6|NC_003098.1|ORF|110
ttgccaaagagcgagagcttcctcatctccattttcaagtttacggaaccattcgcgcgcttcttcatccaagctagggtcattttcagcttcagcgttgatgcggacatagagtttaaggagttcatcgattggatgagcttttacagcttcttcgtcgccccattttttgtaggcaacaatcaacatcccaaattgtttaccccagtctcccaaatggttgaccttgaccgtttgataaccgattttttggaaaatatgtga

SEQ ID NO: 5327 - DNA, 297 bp, Streptococcus pneumoniae
  misc_feature (1)..(297): tiling:Spneumo1:WAN024CWD; Cluster includes WAN023MG9 3134 48_8||||8184..8480|-|297 bp|EGAD orf prediction|S.pneumoni ae|R6|NC_003098.1|ORF|110
ttgccaaagcgaatttcaacttggtcattaactttcaagtccgttgaacttttggccaagattccattaaccttgattctacctttatctgctacttcctttgcgactgtacgacgcttgataattcgcgatacttttaaatatttatctaatctcatccttattacctcaatttattattgtaccatttttatctattttatagaagaaaaatatcaaatggaattttyttccttagactcttttatctctaataaactttctccaaaaatcagcaraccttctaaaatttcataa

SEQ ID NO: 5328 - DNA, 1448 bp, Streptococcus pneumoniae
  misc_feature (1)..(1448): tiling:Spneumo1:WAN024FMT; Cluster includes WAN0243SE spr1 333|pgdA|15903376|NP_358926.1|1319730..1321121|-|1392 bp|P eptidoglycan GlcNAc deacetylase|S.pneumoniae|R6|NC_003098. 1|ORF|111
ttgccaaattgtatcattgaaattattgctcaaatttgttatgatataaatatgaataaaagtagactaggacgtggcagacacgggaaaacgagacatrtattattggctttgattggtattttagcaatttctatttgcctattaggcggatttattgcttttaagatctaccagcaaaaaagttttgagcaaaagattgaatcgctcaaaaaagagaaagatgatcaattgagtgagggaaatcagaaggagcattttcgtcaggggcaagccgaagtgattgcctattatcctctccaaggggagaaagtgatttcctctgttagggagytgataaatcaagatgttaaggacaagctagaaagtaaggacaatcttgttttctactatacagagcaagaagagtcaggtttaaagggagtcgttaatcgtaatgtgaccaaacaaatctatgatttagttgcttttaagrttgaagagactgaaaagaccagtctaggaaaggttcacttaacagaagatgggcaaccttttacacttgaccaactgttttcagatgctagtaaggctaaggaacagctgataaaagagttgacctccttcatagaggataaaaaaatagagcaagaccagagtgagcagattgtaaaaaacttctcygaccaagacttgtctgcatggaattttgattacaaggatagtcagattatcctttatccaagtcctgtggttgaaaatttagaagagatagccttgccagtatctgctttctttgatgttatccaatcttcgtacttactcgaaaaagatgcggccttgtaccaatcttactttgataagaaayatcaaaaagttgtcgctctaacctttgatgatggtccaaatccagcaacgaccccgcaggtattagagaccctagctaaatatgatattaaagcgactttctttgtgcttgggaaaaatgtttctgggaatgaggacttggtgaagaggataaaatctgaaggtcatgttgttggaaaccatagytggagccatccgattctctcgcaactytctcttgatgaagctaaaaagcagattactgatactgaggatgtgctaactaaagtgctgggttctagttcwaaactcatgcgyccrccttatggwgcyattacagatgatattcgcaatagcttggatttgagctttatcatgtgggatgtggatagtctggactggaagagtaaaaatkaagcatctattttgacrkaaattcasyatcaagtagctaayggytctatckttttgatgcatgatattcacagtccgacagtcaatgccttgccaaggktcattgagtatttgaaaaatcaaggttatacctttgtgaccataccagagatgctcaatactcgcctaaaasctcatgarctgtaytatagtcgtgatgaataactaat

SEQ ID NO: 5329 - DNA, 618 bp, Streptococcus pneumoniae
  misc_feature (1)..(618): tiling:Spneumo1:WAN024FS5; Cluster includes WAN023L5Y 3134 55_2356b||||1261446..1262063|+|618 bp|EGAD orf prediction| S.pneumoniae|R6|NC_003098.1|ORF|110
ttgccaagtaatgattgcttgggcattgataaccccatcacttgtaatttcatgcttgctttccagtccagtccgttcaacagccgatgtaatcaccccacctggtcgaacttccttgacatacttgaggttgattttcttgggaatatagtgggtcaaaaaatccgctcccatgacctcaaaaatccagtccaagtatttactgttattgacatgaccattcatatccaagtcgtaaaaacgaacatggtaatccttgctgatcggytcttccaaggaytcatacttcggtccacggataagttttttatcaaaatcagactggtaaggagccacaatctcaggttcaacarcatggacttttcgactgtcgcggtccatgagaacaaaggtcgccatcatrtggatgagctcctgcyccgcttcattataaatagtaaagcgacggtagcaaaaaagtcgattgtagctcaaggcttccgtttcgatggtaatttcttccgcaaaacgaggcaaacgaaccacctcaatatcatattctrcgataatccagaccagattataktcttccaaaatggccttatcactaactcccagttcaatcgaytgcatccctga

SEQ ID NO: 5330 - DNA, 2169 bp, Streptococcus pneumoniae
  misc_feature (1)..(2169): tiling:Spneumo1:WAN024GJK; Cluster includes WAN0244GE spr0 468||15902512|NP_358062.1|473479..475104|-|1626 bp|Conserv ed hypothetical protein, truncation|S.pneumoniae|R6|NC_003 098.1|ORF|432
ttgccaatgacttcttataaacrtacatttgttcctraaatagatgcgagagactgrggtgtcgctgccttagcrtcgattgctaaattctatggttcagatttttctrtagctcacttgagagaacttgcaaagarcaataaagaagggacgactrctcttggcattgtaaaagrcgctgatgaaatgggctttgaarcaagrcctgttcaagcakataaaackctctttgaratgagtgatgtccrctatccatttatcgttcacgttaacaaagaaggaaaaytccaacattactatgttgtctatcaaacaaagaaagactatctgrttattggtgatcctgacccttctgtaaaaatcactaaaatgtcaaaagaacgctttttctmtgaatggactggagtagctatttttctagctmccaaacccagctatcaaccccataaagataaaaagaatggtctactaagcaagcttccttcctctgattttcaaacaaaaatctctcattgcttacattgttctctcaagcttattggtcactattatcaatatmggtggttcttaytatctccaaggaatcttrgaykartacatyccaaatcagatgaaatcaactttaggaatcatctcagttggtctggttatcacctatatcctccaacaagtcatgagcttytccagagattatctcctaaccgttctgagycagagattaagyattgatgtgattttatcctatattcgccatatttttgaacttcccatgtctttctttgcgacacgtcgtacaggagaaatcatttcacgrttcacagatgctaactctattatagatgccttggcttctaccattctttctcttttyctggatgtttctattctgattcttgtaggrggmgtcttrctggcacaaaaccctaatctcttcctyctttctcttmtttcyattcctatatacatgttcatcatcttttcttttatgaarcctttygaaaaaatgaaccatgatgtcatgcaaagtaattctatggttagctctgccattatcgaagatatcaacgggattgaaactataaagtcgctcacgagtgaagaaaatcgctatcaaaatatagacagcgaatttgtagattatttggaaaaatcctttaagctcagtaaatattctattttacaaacragtttaaagcagggmacaaaattagttctgaatatccttatcctatggtttggcgctcaattagtcatgtcragtaaaatttctatcggtcagctgattacctttaacacacttttttcttactttacaactcctatggaaaatattatcaacctccaaaccaaactccaatctgcgaaggtygctaataaccgtttgaacgaagtctatctagtcgaatctgaatttcaagttcaagaaaaccctgtycattcacattttttgatgggcgatattgaatttgatgacctttcttataagtatggttttggaygagataccttaacagatattaatctcacgattaaacaaggagataaggttagcctagttggagttagtggttctggtaaaacaactttagccaaaatgattgtcaatttctttraaccctacaaaggrcatatttcyatcaatyatcaggatattaaaaacattgataaaaaagtcttgcgccgtcatattaattacctaccmcaacaagcctatatctttaatggctctatyttggaaaayttaacyttgggcggtaatcatatgattagycaagaagatattctaaragcttrtgaaktagctgaaatycgtcaagacattgaaagaatgcctatgggctatcaaactcagctctctgatggagctggtctatcaggaggacaraagcaacgaatmgcyctcgctcgtgctcttttaactaaakctcctgttttaatactagaygaagctactagcggtcttgatgtcttgactgagaaaaaggttatagataatcttatrtcyctaactgataaaaccattctctttgtagcccatcgtctcagtatagccgaacgaacyaaccgtgtcattgttcttgaccaggggaaaatcattgaagttggtastmaccaagagttaatgcaggcgcaaggyttctaccatcatctattcaataaataactaat

SEQ ID NO: 5331 - DNA, 414 bp, Streptococcus pneumoniae
  misc_feature (1)..(414): tiling:Spneumo1:WAN024FIK; Cluster includes WAN023KYW 3131 70_2673||||1423897..1424310|+|414 bp|EGAD orf prediction|S .pneumoniae|R6|NC_003098.1|ORF|110
ttgccacgacttccttttttgaactcatcacggcgaccattgccacggcgatcacgctctcgacggtcgtccccacgacggcctccacgacctcccttagctttaccaccgaaaccattacctgatggtttaaacggtagtggtttttcacgtgcaatctccacttctggaaggctatctgggtcttggactgtcagactcaagatatacattgccaattcttctggagtaaactcagcagccaatttgcgagcatccttaccaaatttctcaaagttggcacgaatggtttcatctgcaaaatcacgttcgattttcttgagagctacctgtttttttgattggaaggattcttctacacttgcaggtttgagacctttcatgcgtttcttagtcaagttttcaatgatttga

SEQ ID NO: 5332 - DNA, 284 bp, Streptococcus pneumoniae
  misc_feature (1)..(284): tiling:Spneumo1:WAN024FI2; Cluster includes WAN0243OX spr1 458|fer|15903501|NP_359051.1|1439432..1439710|+|279 bp|Fer redoxin|S.pneumoniae|R6|NC_003098.1|ORF|110
ttgccacggttcttttgccataccttactccttgtttttttttacttttcttattacaatataaatatgaacatgaaaatcacacttatacctgaacgatgtatcgcctgtggrctttgccaaacttattctgatttatttgattaccacgatwatggaatcgtgcgtttttacgatgaccctgaccaactggaaaaagaaatttctcctagtcaggatrtcttagaggctgttaaaaattgcccaactcgcgccctgattggaaaccaggaagcctaactaat

SEQ ID NO: 5333 - DNA, 279 bp, Streptococcus pneumoniae
  misc_feature (1)..(279): tiling:Spneumo1:WAN024BGI; Cluster includes WAN023LRE 3135 05_1314||||692955..693233|-|279 bp|EGAD orf prediction|S.p neumoniae|R6|NC_003098.1|ORF|110
ttgccactttttagctttaccattctttttcttcataatgaaactccttttcttttttacaatactttgctattataccaaatttccctccagcaaacaatacagttcaggattaaacaatcgttcggaattttgcttttctrttgtactagatatataatacactatcttgacttatttggcaagcttttttgcaattttttgtgcgtagcagatttttgcaatcaaatcaaaaaaagaataaaatataactatcaaaaaagacgctctactatttaa

SEQ ID NO: 5334 - DNA, 120 bp, Streptococcus pneumoniae
  misc_feature (1)..(120): tiling:Spneumo1:WAN024B24; Cluster includes WAN023RIX cont ig_1567_14||||8748..8858|-|111 bp|Glimmer 2.02 orf predict ion|S.pneumoniae|670|WAN01UDI7|ORF|001
ttgccagacatttccattagaaaatcrratttacgtaccatttctcgtacatatctagtaaaaagagaaacrgataaaaatggagaactgactgaaaataaattgagttcactaactaat

SEQ ID NO: 5335 - DNA, 246 bp, Streptococcus pneumoniae
  misc_feature (1)..(246): tiling:Spneumo1:WAN024DUX; Cluster includes WAN023KCQ 3134 57_3667||||1980104..1980349|+|246 bp|EGAD orf prediction|S .pneumoniae|R6|NC_003098.1|ORF|110
ttgccagatacaaagactgcaaccgcaactgcaatcccccaacccatagtaatcacaatccaacctgagctattgctcttggttttaggaagaaccacacctgcaacaacaccatttcctagaagaatcaggattaaagtccctagaaattctccaaataattcattcatcatctttctgtctccattaaaaagaagggacgggcgacaaggaatgctgccctccacctcttttattttttcttaa

SEQ ID NO: 5336 - DNA, 84 bp, Streptococcus pneumoniae
  misc_feature (1)..(84): tiling:Spneumo1:WAN024D37; Cluster includes WAN023SJT NC_0 03098.1_1472||||1170701..1170784|-|84 bp|Glimmer 2.02 orf prediction|S.pneumoniae|R6|NC_003098.1|ORF|110
ttgccagctatcaattggaaattacttggggctaggctcatgtctttttcaaatttagctatctatcttcttggatcggcttcc

SEQ ID NO: 5337 - DNA, 258 bp, Streptococcus pneumoniae
  misc_feature (1)..(258): tiling:Spneumo1:WAN024DZ5; Cluster includes WAN023KHE 3155 20_3473b||||1860935..1861192|+|258 bp|EGAD orf prediction| S.pneumoniae|R6|NC_003098.1|ORF|110
ttgccagtgaccttcgatttcttgattgagggttccaccaaaggcaacattgacaagttggacaccgcgacagattgccataattggtttattctgacgaagcgcttccttcaagagtgccaattcaaattcgtcacggaccagattgtaatcatcgctctcgacggtctttttctctccataaaactgaggatgaacattttggcctcctgtcaaaatgagtttgtcaatcatttccacataatcacgtacaactga

SEQ ID NO: 5338 - DNA, 228 bp, Streptococcus pneumoniae
  misc_feature (1)..(228): tiling:Spneumo1:WAN024G7D; Cluster includes WAN023LJZ 3147 27_1739a||||925714..925941|-|228 bp|EGAD orf prediction|S. pneumoniae|R6|NC_003098.1|ORF|110
ttgccatgtcaaaactatttttcatctcttgattttttgctggcgttggatcgggtagattatctaaatctaaagcaccagcatattttgcaatcagatttgctattaaatcagccaatccattccagtcattgtccaatatatacctcctctaaagttttatatctaataattatttgtttaattaagttttttgacattgacaagtgctttggattagcaacatag

SEQ ID NO: 5339 - DNA, 78 bp, Streptococcus pneumoniae
  misc_feature (1)..(78): tiling:Spneumo1:WAN024DPG; Cluster includes WAN023SKP NC_0 03098.1_1190||||928820..928897|-|78 bp|Glimmer 2.02 orf pr ediction|S.pneumoniae|R6|NC_003098.1|ORF|101
ttgccattttcatcacctcaagttaattctatcacaggtgtaacacttgtgtcaactggcttttataatacattagtt

SEQ ID NO: 5340 - DNA, 273 bp, Streptococcus pneumoniae
  misc_feature (1)..(273): tiling:Spneumo1:WAN024FYO; Cluster includes WAN023LB2 3154 14_2145b||||1155673..1155945|+|273 bp|EGAD orf prediction| S.pneumoniae|R6|NC_003098.1|ORF|110
ttgcccaacgatataagagtcgacaagaactgggtggtctggactagccttaacagcagttcgcatgtaagaacgaaggtcttcttcgttttcaacgatttccatggcacgtccaccaagtacataagatgggcggacaagaactgggaagccaatcttgcgagctgcaagagctgcttcttcttcattggtagccgtttgtcctggtggctgtggaatatccaattctttgagagcttgctcgaagaggtcacggtcttcggcacgatctag

SEQ ID NO: 5341 - DNA, 273 bp, Streptococcus pneumoniae
  misc_feature (1)..(273): tiling:Spneumo1:WAN024EX8; Cluster includes WAN023KSW 3157 20_2927b||||1558317..1558589|+|273 bp|EGAD orf prediction| S.pneumoniae|R6|NC_003098.1|ORF|110
ttgcccaatagactgggtgataatatttttttgcggatgagcttctgcctcttctggtgtcaattgaccagccttgagcaattcattaaccaaggaatgatcgctcgtcaactgatggtattcttctccacgaatcaagccgatacgcgaatcaccaatatgagcatagatagcctgattatcaataatagcaaggacttccaaagtagttcccatgcctctgtaagcttcatcctgaccaagctggtgaatcttttgattttcaatttctag

SEQ ID NO: 5342 - DNA, 303 bp, Streptococcus pneumoniae
  misc_feature (1)..(303): tiling:Spneumo1:WAN024D3J; Cluster includes WAN023LV1 3135 19_1106||||582561..582863|-|303 bp|EGAD orf prediction|S.p neumoniae|R6|NC_003098.1|ORF|110
ttgccccagagaaaaagctccagttgtccaagctgtcaaagctacctgaaaagccaccaaaccagaagcatcattcaagagtccttcgcccttaagaatattggacacgcgcttaggaaagctaaaacgctccgaaagagaggcaaaggccaccaagtccgtaggaccaagggctgccccaacagccaagcaagctgccaagggaaggctgaaccaaagaagatgggccaagccacccaaactcagggtcgagataaaaatcactggaaatatgagataaacaatgattcgccagtgttttaa

SEQ ID NO: 5343 - DNA, 273 bp, Streptococcus pneumoniae
  misc_feature (1)..(273): tiling:Spneumo1:WAN024G2S; Cluster includes WAN023LE8 3154 05_2021b||||1086757..1087029|+|273 bp|EGAD orf prediction| S.pneumoniae|R6|NC_003098.1|ORF|110
ttgccccgtttttctagaatggctaacaatttatcatcttcaaaggcagccagttctttgtccgtttggtctagctcaataaaacgaccaaakcgaacttctgtagcctcttctggasttaggaaaactttgacaaggtcacctgtcccaatctctaaaggatggagaaaatctaattgcccagcctctactttttcagcaatttcctccaaggcaagagcgtcttctaattgtaagccagcagcactagtacgagtcaaatgggacatatga

SEQ ID NO: 5344 - DNA, 243 bp, Streptococcus pneumoniae
  misc_feature (1)..(243): tiling:Spneumo1:WAN024EY2; Cluster includes WAN023KX6 3157 06_2753||||1464102..1464344|+|243 bp|EGAD orf prediction|S .pneumoniae|R6|NC_003098.1|ORF|110
ttgcccctttatacctttcttataagcccagtgagccgcaaccccgtactcagccacctcgtgcatttccttggttcgaatctggaattcaatcggcccttttggtccataaacagtcgtatggatagactgataaccattggccttgcggttggcgatatagtctttgaagcgacctggcatcggtttccaaaattcatgcacgtaaccaagcatggcataaacatcactttgggtatctaa

SEQ ID NO: 5345 - DNA, 126 bp, Streptococcus pneumoniae
  misc_feature (1)..(126): tiling:Spneumo1:WAN024DQU; Cluster includes WAN0242VN SP05 03||15900417|NP_345021.1|485368..485487|-|120 bp|hypotheti cal protein|S.pneumoniae|TIGR4|NC_003028.1|ORF|120
ttgcccgatattgtttttgaaattgaatttttccatagtgactccttrattttcttctacacgtctgatgataaatctaattcgcaaaagagtcaagaggatttttcgaaaaataaactarctaat

SEQ ID NO: 5346 - DNA, 225 bp, Streptococcus pneumoniae
  misc_feature (1)..(225): tiling:Spneumo1:WAN024CDS; Cluster includes WAN023MCS 3135 51_177||||87025..87249|-|225 bp|EGAD orf prediction|S.pneu moniae|R6|NC_003098.1|ORF|110
ttgcccgctgtttgtcctccatccttagttgctgactggctttccttaatggactctagggaagcaatggcatctttgactgtttgcaagatatcacgtaaaccttgctctgtcaaactatcatctgcaaaagctttmttagcctctgccaaaaccagasgtgctgaatctgtggtaggattcgatacacctgtcaatgatctcaaaagattttctaaggtttga

SEQ ID NO: 5347 - DNA, 84 bp, Streptococcus pneumoniae
  misc_feature (1)..(84): tiling:Spneumo1:WAN024DOC; Cluster includes WAN023SJ9 NC_0 03098.1_1691||||1318659..1318742|+|84 bp|Glimmer 2.02 orf prediction|S.pneumoniae|R6|NC_003098.1|ORF|110
ttgccctacttggctcccactatcccaagctcgcttgaagaacgccataagactttctttcctgctgactattatatcaaaaat

SEQ ID NO: 5348 - DNA, 330 bp, Streptococcus pneumoniae
  misc_feature (1)..(330): tiling:Spneumo1:WAN024FRX; Cluster includes WAN023L5V 3132 63_2362||||1263694..1264023|+|330 bp|EGAD orf prediction|S .pneumoniae|R6|NC_003098.1|ORF|110
ttgcccttatcacttgttaaaaacaaggcaagagctgcacctgaaacsgttcctaaaaggattgaggataatttacccataaggattctccttttttattttttgaaaaatttacttgcaagacgaagagctgacagacttgcaccagtcttgagtgtttttgaaccagctgatgaagctttcttgctcaagacacgcgcatggtcattgaggtctgaaacagatagagataaatctgcaacagcactgaagagtggatcaatcgtagccaccttgacattgatatcatctgccaagacattgaccttagccaacaactcattggtgtga

SEQ ID NO: 5349 - DNA, 330 bp, Streptococcus pneumoniae
  misc_feature (1)..(330): tiling:Spneumo1:WAN024D2X; Cluster includes WAN023LCL 3153 09_2092||||1128212..1128541|+|330 bp|EGAD orf prediction|S .pneumoniae|R6|NC_003098.1|ORF|110
ttgcccttgcagttctgtcttaagcaagcgagcttgcgccacctcttcctgcaaattttgatagcgttcttggatggcrtttttrttagacttaatytcttcaatctcagcttccagattttgcttktcactggmgatwgyagcaagrckctcttgrcakttttccttatccgcttgccaatctccctcrgaaagacgatctatttcctcttcttggagtttccaaagagtttccagttcttcaacttgctgactagtttgctgataagcgaggracaagccttgctcctgaatacgtgcctgctctccttgagatttratrgcttctaa

SEQ ID NO: 5350 - DNA, 150 bp, Streptococcus pneumoniae
  misc_feature (1)..(150): tiling:Spneumo1:WAN024BDL; Cluster includes WAN023S7F NC_0 03028.1_2649||||2014008..2014148|+|141 bp|Glimmer 2.02 orf prediction|S.pneumoniae|TIGR4|NC_003028.1|ORF|010
ttgccgtacgtatggttactgacttcgtcagtttcatctacaacctcaaaaccatgttttgagctgacttcgtcagttttatctgcaacctcaaagctgtactttgagcaacctacggctagtttactctttgattttcatctaactaat

SEQ ID NO: 5351 - DNA, 353 bp, Streptococcus pneumoniae
  misc_feature (1)..(353): tiling:Spneumo1:WAN024FJQ; Cluster includes WAN023L0P 3154 62_2597||||1383059..1383310|+|252 bp|EGAD orf prediction|S .pneumoniae|R6|NC_003098.1|ORF|200
ttgccgttcaacacgtctttaccgtcacgtccatcacgtccgtcacgacctgctgctccatccgcacctttagctccttgcgctccagtcaggccgcgttcgcctcggtctcctttttcgcctttagcaccatctgcacctttgtcacctttagggcctttgatgttgccctctttatcccagttgccgttattcttaacgaagacgtcgcctgtttctgtattaacgtatttatcgccgtctttaccttgatgtgcttctgggttagctttgccgttcaacacgtctttaccgtcacgtccatcacgacctactgcgccatccgcacctttagctccttgcgctccagttag

SEQ ID NO: 5352 - DNA, 1458 bp, Streptococcus pneumoniae
  misc_feature (1)..(1458): tiling:Spneumo1:WAN024FYM; Cluster includes WAN0240UL |wzx ||AAK20716.1|||1305 bp|Wzx|S.pneumoniae||AF316642|ORF|000
ttgcctartttaaagaaaaayattgtttacaatgtcttatatcagatcttagctgtaatagtaccrtttattacctcaccttacttagcgcgtgtgttaggtgcagagcaaattggagtttattcttttacttattccattgctttttactttatgattctgtccatgttgggratttctaattatgggaatcggacaatrgcacrggtacgaacaagtagagaacatttgaatcargaattttcgaatatttacgcrgttcarttgacgtgttcactagtaatgaccrtctcatatttgatttatgcaacagtatttgtgaatagttttcagattgtagcctatatccaagtattacatgttttatcgtatgcaacagatgttagttggtttttttatggtcttgaagagtttcgtattacggttgctaggaattcatttgttaagttattaactttaatatctatctttacatttgtaaaaagccctaatgatatctatttatatacctttataatggcagggrgtaccctgcttggtcagttgattacatggcmatttttgctaaaacaagtaaactttgtgygccctartcttggaaaaataaagaaacacatgaaacctattattattttatttttycccgtcttagcgrttagtattttttcgtttmtagataaaataatgcttgggatgtatagtagtttgarggaaactgctttttatgagaattcagataagatmattagtattccaaaagctctgattcaagcctttggagctgtaatgttgcctcgaacagtacatttactgagtataggtgatgaacaaaaaagtttagaatatgttgataaaacgatgtgggytgttttagtgattacaatgggctgtgctttcggtttagcaggagtttctgcaacctttgctcctgtttattggggtgaagaatttagrgccagtagccaaattattgcaggaatgacaccggctttagtattttcggcttttggaaatgtcatccgaacccagtttttaattccacgaagttttgacaaggaatatacggtatctttrctttatggagccgtwgttaatatyttgattaatattcttttrattccgaagatrggagcaatgggagctgttatcggaayaattgttgcagagttagttctatgttgctatcaaacrtggattgctagaaattatttacatatcagagaatatctgataaatgctgggatattrtttcttatyggttcagtaatgtatatggttttaattcttatttcaagtattttacctacwtcgttacttacacttattattgaaattatagtcgsagctttcatttatattagtttactgrttctgyatatcttttcttcaaaaaacagggtaattattggtttacgaacaaattttttagaacrtactcatttatttaaaaggaartaa

SEQ ID NO: 5353 - DNA, 330 bp, Streptococcus pneumoniae
  misc_feature (1)..(330): tiling:Spneumo1:WAN024FAZ; Cluster includes WAN023KOB 3130 42_3148b||||1675435..1675764|+|330 bp|EGAD orf prediction| S.pneumoniae|R6|NC_003098.1|ORF|110
ttgcctcctttctcagtcaatttaatacgtgggtcaataatagtcatccaaatatctcccaaaagacgtgagaagatagaaatacatgtaaagatgaagacaagaccaacgaccatagagttattagatgcttttacagagtcaatcaacattttacccatacctgggaaggcgaagactgtttcagtaagggttgcaccaccgataaccccaataatggcagcaggaattcctgaaaccagcggaaccatggcatttttaaagatgtgtttgtttgaaatttctttttcagacaaaccttttgcacgagcgaaacgaacaaagtcttga

SEQ ID NO: 5354 - DNA, 405 bp, Streptococcus pneumoniae
  misc_feature (1)..(405): tiling:Spneumo1:WAN024F9C; Cluster includes WAN023KN6 3130 46_3209||||1711786..1712190|+|405 bp|EGAD orf prediction|S .pneumoniae|R6|NC_003098.1|ORF|110
ttgcctgtagttgaccgagaactttctcaaaaatcagtaattcatcttcatcaatgtcttccatcaactgcttgtctatgcgttcaaaaaagccttaacctgttgcatctgagaacgtgctttgtccgtcagacgaacaaacttagcccgcttatcaacaggactcgcctccaattccaccaaaccattttgcactatacgcttaaccagattactagcaacagrcttggtaatattgagttcctgctcgatatctttaatcaagaccaagtcttggtttttctcgcgattatccaaaaaacgcacaacctgaccttgcggcccacccataaattcaatgccgcaacgtttggcttccttttgcaccatcaggtraatttgatgaccaaaacgcttaaagactaa

SEQ ID NO: 5355 - DNA, 84 bp, Streptococcus pneumoniae
  misc_feature (1)..(84): tiling:Spneumo1:WAN024C76; Cluster includes WAN023YEX AL44 9930.1_128||||105035..105118|-|84 bp|Glimmer 2.02 orf pred iction|S.pneumoniae||AL449930.1|ORF|000
ttgcctgtcttagaaaattcttcgctcaaacctttctttaattctaaaaagatttcaatcggtaaaatattagaaaatacgaaa

SEQ ID NO: 5356 - DNA, 87 bp, Streptococcus pneumoniae
  misc_feature (1)..(87): tiling:Spneumo1:WAN024CXV; Cluster includes WAN023PZ2 WO-0 2077021_258||||||87 bp|Glimmer 2.02 orf prediction|S.pneum oniae|TIGR4|AX571766.1|ORF|010
ttgccttcacctaaattattcggagaaaaaagaaaaagtgagaaaatttctcactttagtcaagataatgaatcaaattcttttctg

SEQ ID NO: 5357 - DNA, 294 bp, Streptococcus pneumoniae
  misc_feature (1)..(294): tiling:Spneumo1:WAN024CGC; Cluster includes WAN023ME2 3135 58_119||||57790..58083|-|294 bp|EGAD orf prediction|S.pneu moniae|R6|NC_003098.1|ORF|110
ttgcgaaatgcggagcagatctgttccttgagggagttgtccatccttgataacggcatccaaaccgtcagcgtcgacattttcaaactcrtaagtgaggacatcgcaacggtctgccaactgacggagggcgtcyacatcgttataaggtgccacaatgatttccgccacrcgagagrccgggcaatccgccgcaggatccagcgcgataaccttgtggcccatgtagatagcagaaatggccatcatctgacccagttgaccgccaccgataattccgattgttttagatga

SEQ ID NO: 5358 - DNA, 886 bp, Streptococcus pneumoniae
  misc_feature (1)..(886): tiling:Spneumo1:WAN024FR6; Cluster includes WAN023PVA pne1 0_11||||8012..8896|+|885 bp|Type 7C capsule operon, Glimme r 2.02 orf prediction|S.pneumoniae||WAN01UCKC|ORF|000
ttgcgaagagttagtgtgcccaatttatatgcagtagtagttttatacaatagtttattatcagaagcaaaaattttaaaaaccttaaatacattaaattgtaaagaattaaacttaattgtagtagacaatagtgataggaaagaaatacagttaaaaaataagaacttttccactgaaaataatataacattggtgaatatgaatggaaatmagggattatctaaagcttataataaagtcctagaattattaaagggtagaataggttatgtggtttggttagatgatgatactgagattagtrtagaatatttaacaaaattattgtatgcatcaagaggtaattacgacattattttgcctattattcaagatacccatggtaaaattgtytctccaaattctcgtggtttactttcaaataaaccgattaaaagttacaaagatggaaaraaacttgaaaaatttaacgcaataaatagttgtacagctgtcaatttagacatttatgaagaatatagatatgatgaacgacttttcttggatgaaattgatcattcgtttttctatgaccacagaaataaaaatttaaagatcgaattaattaatacaatagttattcaaaatttttctcaaagrgctgataatttaaattttgatactgcatggagtagattgaaaattagaattcgggatttgatagtggcttataaaattagaggtgggatttttatgggtcttgtagctgttttaaaaagtatcctacttggactccarttatacttgaaaattaaggatttgcgtatagttatctatagtttcacatctgctktatgtattttttttagaaagacttgaaaatgaagattttatattttatgaa

SEQ ID NO: 5359 - DNA, 526 bp, Streptococcus pneumoniae
  misc_feature (1)..(526): tiling:Spneumo1:WAN024FLX; Cluster includes WAN023L2Y 3141 17_2502a||||1334026..1334361|-|336 bp|EGAD orf prediction| S.pneumoniae|R6|NC_003098.1|ORF|220
ttgcgacaagaacatctgcaccaacttgacgaccaagttcttcagcaagggcaaaggctgcttggctttctgggtttggagatgttacagttgaaaagtctgggtcagcagttgcttgcgcttcaacaacttgaacagagtcaaatcctgcttgggcaagagcacgacgagccaacatttcaccagtaccatgaagtggtgtgtagacaatcttcatgtctttaccaaattcttcaatcaaggctgggttgatgtttatgtccttaacctctttaaggtattctatgtcaacagcttcgccgataacttcaatcaagccagaagctttttcagtttccacatcagcaacttcaactgcaaatgggttttcgattgcacggatataagtagtcaaagcgtccgcatcgtgtggaggcatttgtccaccgtcttcaccgtaaaccttgtaaccgttaaatggagcagggttgtggctggctgtgaccatgatacctgcgaaacagttgagatgacgaactgcaaatga

SEQ ID NO: 5360 - DNA, 282 bp, Streptococcus pneumoniae
  misc_feature (1)..(282): tiling:Spneumo1:WAN024CB2; Cluster includes WAN023MAB 3136 34_309||||162352..162633|-|282 bp|EGAD orf prediction|S.pn eumoniae|R6|NC_003098.1|ORF|110
ttgcgacgacctccatatcccacttatcaaagggaatcaaacgcttcagaccttctgtcaccatgtactcatcatctactaataatactttatacattttctccctttctactcatcttgaattgtaatacgatactgaacaccggcttgctctgcagactctatagtaatggcatagcggtctccaaaatagagcacaaaacgctcgtgtacattgacaatcccgatagactgcctttgatcactgtagctggcttggtgttcaaaatatytctgacttaa

SEQ ID NO: 5361 - DNA, 228 bp, Streptococcus pneumoniae
  misc_feature (1)..(228): tiling:Spneumo1:WAN024DUS; Cluster includes WAN023KCK 3156 69_3674||||1982286..1982513|+|228 bp|EGAD orf prediction|S .pneumoniae|R6|NC_003098.1|ORF|110
ttgcgagattcgttcatagatggctcaaagagttctcctgtctcgttcaagagtttcaactcgtccaagtctttccagtaycctactgayaaacctgctaggaaggccgctcctagagctgttgtttccargtttttagcacgtgcaatgtcaatgcctaaaatatccgcctggaactgcatgaggaagttgttcatggctgcaccaccatccaccttcagtacttga

SEQ ID NO: 5362 - DNA, 228 bp, Streptococcus pneumoniae
  misc_feature (1)..(228): tiling:Spneumo1:WAN024CPF; Cluster includes WAN023LM4 3133 94_1595||||846236..846463|-|228 bp|EGAD orf prediction|S.p neumoniae|R6|NC_003098.1|ORF|110
ttgcgcctcatcgagaatgacaaaggcatcatccaaggtccggccacgcatataggcaaggggcgcaatttcgataatttcacgctccatgagacgagtcgtttggtctttcccaagaatttgatacaaggcatcgtaaacaggacgaaggtaaggatccaccttctccttaagatcacccggaagaaatccaagactctctcccgcttccaccgctggacgagttag

SEQ ID NO: 5363 - DNA, 114 bp, Streptococcus pneumoniae
  misc_feature (1)..(114): tiling:Spneumo1:WAN024FVX; Cluster includes WAN02429P SP13 53||15901207|NP_345811.1|1274483..1274590|-|108 bp|hypothe tical protein|S.pneumoniae|TIGR4|NC_003028.1|ORF|120
ttgcggaatccctatttaccagtctttgagagcgataagcgattgatagaaactgataaattgatttggtttcctgccaaaaattctttggcaggrtttttstttytaaytaat

SEQ ID NO: 5364 - DNA, 1039 bp, Streptococcus pneumoniae
  misc_feature (1)..(1039): tiling:Spneumo1:WAN024CNG; Cluster includes WAN0241Q8 SP20 93||15901908|NP_346512.1|2001113..2002081|+|969 bp|hypothe tical protein|S.pneumoniae|TIGR4|NC_003028.1|ORF|020
ttgcggacactatcaaagaaaaagattatggagaacaaatttgtagaatttatcgaaaacaataaaaaagtaatcatttcatcagttgcagttggtgttgtattggtattagggtttggatggtattcatataaccaacaacaagcagaacaacaagcaaaaattgtacaattagaaaaagatagcaaatcagacaaagaacaagttgataaactatttgaatcatttgatgcatcttcagatgaatctatttctaaattaaaagaactatctgaaacttcacttaaaaccgatgcaggtaaagactatcttaataacaaagtcaaagaatcatctaaagcaattgtagattttcatttgcaaaaaggtttggcttatgatgttaaagattcagatgacaaatttaaagataaagcaactcttgaaacaaatgtaaaagaaattacaaaacaaattgattttatcaaaaaagttgatgaaacttttaaacaagagaatttggaagaaactcttaaatctctaaatgatcttgttgataaatatcaaaaacaaatcgaacttttgaagaaagaagaagaaaaagctgctgaaaaagctgctgaaaaagcaaaggaatcttctagtcaaagtaattcttctggtagtgcttctaatgagtcttataatggatcttccaattcaaatgtagattatagttcatctgaacaaactaatggatattcaaataattatggcggtcaagattattctggttcaggagatagttcaacaaatggtggatcatcagaacaatattcatctagcaattcaaacagcggagcaaataatgtctacagatataaaggcactggtgctgacggctatcaaagatactactacaaagatcataataatggagatgtgtatgatgacgatggaaattaccttgggaactttggtggcggcattgcagaacctagtcaacgctamtaactawtttagagctgtgttgtttcgaatggttccaaaacacattaaaagctactcattttttaagtag

SEQ ID NO: 5365 - DNA, 384 bp, Streptococcus pneumoniae
  misc_feature (1)..(384): tiling:Spneumo1:WAN024F9V; Cluster includes WAN023KNF 3155 01_3192b||||1705826..1706140|+|315 bp|EGAD orf prediction| S.pneumoniae|R6|NC_003098.1|ORF|120
ttgcggagcatttggcaaatgcaattcacgaggactrcacatcatmccaaaactcttttcaccacgaagttcrcctgggaaaatgarattcccttttggcatcatrgcwccaggaagmgcsacaatggttttcaacccmacacgcgcattrggwgctcctgcaacgatttgyacwrtcttrtcacttgcgactgcaacttggcagatgttgaggtggtcactrtctggatgrgctaccatctcracaatttcaccwacaacaaacttaggttccttatcattaacaatttcttctgtaaaaccttccgcctgyaactcttggttcaaacgagcgacttgctcatctgtcaaaaagacttgaccgcgctctgcaatttcaaataa

SEQ ID NO: 5366 - DNA, 255 bp, Streptococcus pneumoniae
  misc_feature (1)..(255): tiling:Spneumo1:WAN024DZ6; Cluster includes WAN023KHG 3156 56_3472b||||1860582..1860836|+|255 bp|EGAD orf prediction| S.pneumoniae|R6|NC_003098.1|ORF|110
ttgcgtaaaatgccacattctaaaaattttgaaaaaataaaagaaagaacgaccagatgttccaatcgttacagttcattcaataaatactcaaataattctaaattgccatcttcttcattaaccagaaactctggatgccactgtaaaccgataatgcggtgctcgtcgatagactcaatcgcttcaatagtttggtctcttgaatcaatagcagttacacggaaattaggtgccaaatctttaatgctttga

SEQ ID NO: 5367 - DNA, 234 bp, Streptococcus pneumoniae
  misc_feature (1)..(234): tiling:Spneumo1:WAN024EWP; Cluster includes WAN023KR6 3130 35_3017||||1606339..1606572|+|234 bp|EGAD orf prediction|S .pneumoniae|R6|NC_003098.1|ORF|110
ttgcgtartaaagrggagtttcacgtccyacrtactggcgcaaaagytggtttaattcctcttggaaacttgggtctgcctgactttcacggtaggccttctccaactccaaaactgctgtcatcaatgtttctgggacaaaacgtccgccraattttccgtaaaatccatctttatttggttcytgatatgccatkctttaccctctctataaatcttctaatcttttcatga

SEQ ID NO: 5368 - DNA, 308 bp, Streptococcus pneumoniae
  misc_feature (1)..(308): tiling:Spneumo1:WAN024D56; Cluster includes WAN0243KZ spr1 601||15903643|NP_359193.1|1577898..1578200|+|303 bp|Hypoth etical protein|S.pneumoniae|R6|NC_003098.1|ORF|111
ttgcgtgcgcaatcatttttcttgacattctcttttataaggagtaaaataaagttagcattaaacaaaggagttttaaayatgattgaaattacctatatagatgccagcaagaacgaaagaactgtgactttcgagtcttatgaagactttgaacgttcgcaacaagcttgccttatcggcgtcgcagactactaccctgtccaaaaattaacytacaagggkcataatttggactaccatgggacttatggagatatcttcttctatctcatgaaacaagatttaagccaatataactaactaat

SEQ ID NO: 5369 - DNA, 578 bp, Streptococcus pneumoniae
  misc_feature (1)..(578): tiling:Spneumo1:WAN024ESI; Cluster includes WAN0243KX spr1 603||15903645|NP_359195.1|1578797..1579369|+|573 bp|Conser ved hypothetical protein|S.pneumoniae|R6|NC_003098.1|ORF|1 21
ttgcgtgctctgaacatttcccattttggaaggagtactatgaaacrtcaatyagccttggtcgtctttagtggyggtcaagattcaamaacctgccttttctggrycatgcaacactatgaaacagtcgaagctgtcacctttgcctacggccaacrtcatcacctcgaaattcaaatyactagagaaatcgctaaggaacagggcattcgtcaccatatcctcgatatgtctctgctgggacaaatcactgctcagccagactttgcgacgattcatatttcctacattcytgacaagctmygtgtcgagtcaaaatccctcaaamtatatctatttagctaccgaaacmacggagattycmacgaaaactgtatcaacaccatcgggaaagacttrgtcaamttgctagaccctcgctatttagaagtctggggaaaattcactccgcgcggtggcatttcaatcgacccctactayaactacggtaagcaaggaactaagtatgagggcttggcagaacaacgcctcttccaacacgacctttatccagagaaaattgacaaccgctaactaat

SEQ ID NO: 5370 - DNA, 432 bp, Streptococcus pneumoniae
  misc_feature (1)..(432): tiling:Spneumo1:WAN024CW6; Cluster includes WAN023K3J 8276 9_400a||||215269..215574|-|306 bp|EGAD orf prediction|S.pn eumoniae|TIGR4|WAN01UC25|ORF|020
ttgcgtgtaacagcccatatcgatcagttctcgaacgcgtttttcattattttcaagagcatcatagcgctcaatgtgggcaatgactggagtaattcccaacatcaagatcttgctcaaggcgctatgaatatcgcgataaggagtgttcatactaaactctatcaaggcataacgactatcattgagggtcggaatccgctttttttccagcttatccagaacatctggtgtgtaataaatttcagccccgtaagcaatgaccaagtcactcgccacttccttagctatttcccgaacctgaagaaagttttctgctatcttctcttccggagtttcaaacatgcccttgcgacggtgagaggtagaaacaatggttcgcaccccctgtctgtaggattctgccaagagagccttgctttcctctcttga

SEQ ID NO: 5371 - DNA, 435 bp, Streptococcus pneumoniae
  misc_feature (1)..(435): tiling:Spneumo1:WAN024DUV; Cluster includes WAN023KCN 3130 12_3671||||1981501..1981737|+|237 bp|EGAD orf prediction|S .pneumoniae|R6|NC_003098.1|ORF|220
ttgcgttcccttattagacaaattacgtactttatcactccaaggacctgttgtattaataaccagacgggccttgatttcaaayacttggtctgtcaagagatcacgagctacaacacctgtaatcttgccactttcgtcaaagaggaagccttctgccttcacgtggttggcaatgagggcaccgtcttggttggcacgtttgatgttttcaatcacgagacgcgcatcgttgttacggaagtcaagatacactccacctcctaccaagccttccttcttcaagtttggctggcgttccaagacttgatccttgctcaaaaccttgttcgcagytggtgtgttgctaacacctgccaagaggtcgtacaagtccatggctactttaagacggaagaggctaaaggttgctccatcttcatcgtaaactggtaa

SEQ ID NO: 5372 - DNA, 246 bp, Streptococcus pneumoniae
  misc_feature (1)..(246): tiling:Spneumo1:WAN024GK7; Cluster includes WAN023L3X 3155 47_2456||||1309676..1309921|+|246 bp|EGAD orf prediction|S .pneumoniae|R6|NC_003098.1|ORF|110
ttgcgttgtaaccagcagctttcgctttttcaagagtcaaaccagttgaaaccatgtgaagaccgtagattgagataccatttgaaccttgaacaccgattccttccaattcatgtccacaagcrttgtaggcaccaacgataccagtgcgaacagcatttgaagcaagagcgatatagcttgtatctttacgagcattgtcataaacagtcgcacagtcaccaacagcgtaaacgyctgggatag

SEQ ID NO: 5373 - DNA, 240 bp, Streptococcus pneumoniae
  misc_feature (1)..(240): tiling:Spneumo1:WAN024GH5; Cluster includes WAN023LX6 3147 52_1005||||524476..524715|-|240 bp|EGAD orf prediction|S.p neumoniae|R6|NC_003098.1|ORF|110
ttgcgtttcctgcaacaaatgctggaagcaaagctccaagagataccaaaactacctctaaacagaattgtaggaagatcgagctcttgccttttccaagtgcaagtaaaatccccacttcatagacccgttctctcaaccagagagacaaaaccagaattaaggctccagctcctgctatcaacatcccataaaggaagatggtcaggaaggtttggaaagttgcaactgagtctttga

SEQ ID NO: 5374 - DNA, 345 bp, Streptococcus pneumoniae
  misc_feature (1)..(345): tiling:Spneumo1:WAN024FG6; Cluster includes WAN023KV2 3157 08_2840b||||1517595..1517939|+|345 bp|EGAD orf prediction| S.pneumoniae|R6|NC_003098.1|ORF|110
ttgcgttttcaagtttctttagtttatctagttcacttgataaatcaactctctgaccatttgaagcattggtttcaacatcttctttttctatcactgtttcgacattttccaaatctcgtgcatagtaatctcttggaattttttcttcttgcttatctttcctttcttgttcttgcttattgccagaaagttcagtctctgaagaaggctggctcttttctgtatcagttagggttgagctctcccccgaaagttgagtttcatttgccagaggttgctcacttgccccttcttgagctaaaacaggagacgttccaaataccactgctcctacaatcatag

SEQ ID NO: 5375 - DNA, 234 bp, Streptococcus pneumoniae
  misc_feature (1)..(234): tiling:Spneumo1:WAN024GDT; Cluster includes WAN023LT2 3136 47_1217||||644573..644806|-|234 bp|EGAD orf prediction|S.p neumoniae|R6|NC_003098.1|ORF|110
ttgcgtttttgcctcaatatcttctgcttgcatcaaatcacgtacaacagctacaccagctatgccagtgcccataagctgatcaatattctccgaagtcaagcctccaatagcaactactggaatggcaaccgtttggcaaattgttttcaaggtcgatatcagagtaatgggcgcattttccttggtggtggttgggaaaatggctcctgtacccaagtaatctgcacctga

SEQ ID NO: 5376 - DNA, 240 bp, Streptococcus pneumoniae
  misc_feature (1)..(240): tiling:Spneumo1:WAN024F3X; Cluster includes WAN023M2W 3134 09_727||||380973..381212|-|240 bp|EGAD orf prediction|S.pn eumoniae|R6|NC_003098.1|ORF|110
ttgctaaactattccaaaattcttctggtgtatttccgattggagatgttactccataacctgttaccactactcgatttagtttcattcttttcacctctagctttcgctacatacttaagccaccatcaatggcaaycacttgwccagttagataatcttggcctgctaaaaatactgtcaaatctgcaacctgctctgcctgcccaaattctttcatcggaatctgagctagtgtag

SEQ ID NO: 5377 - DNA, 249 bp, Streptococcus pneumoniae
  misc_feature (1)..(249): tiling:Spneumo1:WAN024F23; Cluster includes WAN023LP3 3147 37_1446||||763822..764070|-|249 bp|EGAD orf prediction|S.p neumoniae|R6|NC_003098.1|ORF|110
ttgctaagcgaatcatttcaaacagatttttttgaggaagtgccaaattttctacaaagactgaactatgatgagtatttkctccccctgtttgaacaattaacaagtctcttaaatagtgcaaaagatcggtcacaaaacgagtcatgctcttaccattgtcaaaaagaagattcaagcaagacaaagctttgggaacatcctgttgagacaaggccgccacataatcatccaaggctgrtaggctaa

SEQ ID NO: 5378 - DNA, 258 bp, Streptococcus pneumoniae
  misc_feature (1)..(258): tiling:Spneumo1:WAN024EZZ; Cluster includes WAN023LNH 3136 77_1526||||811124..811381|-|258 bp|EGAD orf prediction|S.p neumoniae|R6|NC_003098.1|ORF|110
ttgctactttcagggatacgaaggaaaccagcagcctgctcaaaggccttggctcccagacgaggaactttcttgatttgggcgcgtgaagtgatttttccttcttcctcgcggtatttgacaatattttcagagatagttttgttgagtccagctacgtgtgaaagaagagctgggctagctgtattgacattgacaccaacttggttaaccactgtatcgacaacaaagtccagactctcagatagtttcttctga

SEQ ID NO: 5379 - DNA, 282 bp, Streptococcus pneumoniae
  misc_feature (1)..(282): tiling:Spneumo1:WAN024BEB; Cluster includes WAN023IM7 8602 8_2826a||||1602161..1602436|-|276 bp|EGAD orf prediction|S .pneumoniae|TIGR4|WAN01UC25|ORF|010
ttgctagaaaatataagccatatcgaaattgaattatttaaatttatactcttcgaaaatcaaattcaaaccaagtcagcttcgccttgctgtactcaagtgctgtctgtggctagcttcttagtttgctttttgattttcattgagtattactcttatggtagttatttatggcataataatattgatttgggagttatagcgaaaattttaggttctataatatttgtagtgggtaaatccactatagatattatggagcctattttattgctarctaat

SEQ ID NO: 5380 - DNA, 728 bp, Streptococcus pneumoniae
  misc_feature (1)..(728): tiling:Spneumo1:WAN024DGU; Cluster includes WAN0244EC spr0 542||15902586|NP_358136.1|542892..543551|+|660 bp|Hypothet ical protein|S.pneumoniae|R6|NC_003098.1|ORF|111
ttgctagaaaggtggagagacatgcgctggctttttcgtttgataggggctttcttttcttttgtgtggcgtttgttttggcgtctggtttggatagttgtgctcttatgtgtgcttgctttcggacttctctggtatctgaacggrgattttcaaggagcgctaaagcaagcagaacggtcagtaaaaattggtcaacaaagtattgaccaatgggagaaaacagggcaactgcytaagttaagccagacagatagtcaccagcattctgaaggaaggtggscacaggcctctgctcgtatttacctggatccgcagatggattcacgctttcaagaggcttatttagaagcratccagaactggaatcaaactggtgcttttaactttgaactcgtgactgagtctagtaaggcggatattacggctacggagatgaacgacggaggcactcctgtggcaggagaggcggaaagtcaaactaatctcttaacagggcaattcttgtccgtaacggtgcggttgaatcattattatttgtccaatccatactatggctactcctatgaacgccttgtccatacggcagaacatgagttaggtcatgcgattggcttggaccatacagatgagaagtctgtcatgcaaccagcaggttccttttatggtatccaggaagaggatgttgcaaacctccgaaaaatatatgagactagtgagtarctaat

SEQ ID NO: 5381 - DNA, 114 bp, Streptococcus pneumoniae
  misc_feature (1)..(114): tiling:Spneumo1:WAN024CLU; Cluster includes WAN0242ET SP11 58||15901023|NP_345627.1|1093715..1093828|-|114 bp|hypothe tical protein|S.pneumoniae|TIGR4|NC_003028.1|ORF|021
ttgctagaaattgatttgattgtcctgattgttttatcctatttctatttcatttctctatataattgctattgttttctttttcatgattttaatcttactgtacagatttga

SEQ ID NO: 5382 - DNA, 87 bp, Streptococcus pneumoniae
  misc_feature (1)..(87): tiling:Spneumo1:WAN024DOD; Cluster includes WAN023SJA NC_0 03098.1_1687||||1316499..1316585|-|87 bp|Glimmer 2.02 orf prediction|S.pneumoniae|R6|NC_003098.1|ORF|100
ttgctagagggatatgcaccgccrtactgttatgtggggatttttgaaaccttaggttcaaaaatcagtcagctaaatccactttta

SEQ ID NO: 5383 - DNA, 225 bp, Streptococcus pneumoniae
  misc_feature (1)..(225): tiling:Spneumo1:WAN024FW2; Cluster includes WAN023L91 3134 58_2237||||1202396..1202620|+|225 bp|EGAD orf prediction|S .pneumoniae|R6|NC_003098.1|ORF|110
ttgctagatatggtagtaatctatgaccttggctgtactgcaatgaattattactatctactttataagcaactaattctttatctacagccaattctagaccatttttatagatactttcaccagttaatttataagcttcaccgaagagccaagctacccctgcgtgaccatatagtaatccaccaaaattctcataaggatcrttactctgaacatcactag

SEQ ID NO: 5384 - DNA, 223 bp, Streptococcus pneumoniae
  misc_feature (1)..(223): tiling:Spneumo1:WAN0249ZF; Cluster includes WAN024EC9 R6.I G_1388||||1329952..1330174|+|223 bp|Between spr1344 (glpF) (- strand) and spr1345 (- strand)|S.pneumoniae|R6|NC_0030 98.1|IG|110
ttgctagattctccttaaaattttttagatattccttattttatcaatttttaccctatttagcaactgatttctggaaatatttttaaaaaaataggattcatagtttcccagttcaacagacttgtaagcgtttttattctttacgaaagacctcgttctcaaaaccaggaaaaaagcccacatctgtgagcttttcctggttcctagattctaaaatcta

SEQ ID NO: 5385 - DNA, 135 bp, Streptococcus pneumoniae
  misc_feature (1)..(135): tiling:Spneumo1:WAN024CY7; Cluster includes WAN023QG7 cont ig_1291_10||||5296..5430|-|135 bp|Glimmer 2.02 orf predict ion|S.pneumoniae|670|WAN01UEC8|ORF|000
ttgctagctgtctcatatctgactcctttccttttagacttctcttttttaagagaaaaatactattctttgacattttgtttaccagttaattatatcacaagcaaaaaaagagtcaagaaaaaacgtgaaaac

SEQ ID NO: 5386 - DNA, 2097 bp, Streptococcus pneumoniae
  misc_feature (1)..(2097): tiling:Spneumo1:WAN024COC; Cluster includes WAN0241YR SP17 71||15901601|NP_346205.1|1676077..1678167|-|2091 bp|glycos yl transferase, family 2/glycosyl transferase family 8|S.p neumoniae|TIGR4|NC_003028.1|ORF|031
ttgctagtggatgataaaataacrgtcattgtaccagtatacaatgtggaaaactatctgaggaagtgcctagatagtattattactcaaacatataaaaatattgagattgttgtcgttaatgatggttctacggatgcttcaggtgaaatttgtaaagaattttcagaaatggatcaccgaattctctatatagaacaagaaaatgctggtctttctgccgcacgaaacaccggtctgaataatatgtccggaaattatgtgacctttgtggactcggatgattggattgagywagattatgtagaaacyctatataaaraaataryagartatcargctgatattgcagttggkaattaytattctttcaacgaaagtgaaggaatgttctactttcatatatyrggagactcctattatgagaargtatatgayaatgtttcyatctttgagaayttgtatgaaactcaagaaatgargagtttygctttgatatctgcttggggtaaactctataaggcragattgtttgagcagttgcgctttgacatrggtaaattaggagaagatggttacctcaatcaaaaggtatatttattatcagaaaaggtaatttatttaaataaaagtctttatgcttatcgkattagaaaaggtagtytatcaagartttggacagaaaagtggatgcaygcwttrgttgatgcyatgtcygaacgyattacgctactagctaatatgggttaycctytagaraarcayttggcrrtttatcgtcaratgttggaaktcagtctckccaacggtcaagctagyggtttatctgacacagcaacrtataaagagtttgaaatgaaacaaaggcttttaaatcagctatcgagacaagaggaaagtgaaaagaaagccattgtcctmgcagcaaaytatgsctatgtagaccaagttttaacgacaatcaagtctatttgttatcataatcgttcgattcgtttttatctgattcatagcgattttccaaatgaatggattaagcaattaaataagcgcttagagaagtttgactcagaaattattaattgtcgggtaacttctgagcaaatttcatgttataaatcggatattagttacacagtctttttacgctatttcatagctgatttcgtgcaagaagacaaggccctctacttggactgtgatctagttgtaacgaaaaatctggatgacttgtttgctacagacttacaagattatcstttggctgctgttagagattttgggggcagagcttattttggtcaagaaatctttaatgccggtgttctcttggtaaacaatgctttttggaaaaaagagaatatgayccaaaaattaattgatgtaaccaatgaatggcatgataaggtggatcaggcagatcagagcatcttgaatatgctttttgaacataaatggttggaattggactttgattataatcatattgtcattcataaacagtttgctgattatcaattgcctgagggtcaggattatcctgctattattcactatctttctcatcggaaaccgtggaaagatttggcggcccaaacctatcgtgaagtttggtggtactatcatgggcttgaatggacagaattgggacaaaaccatcatttacatccattacaaagatctcacatctatccaataaaggaacctttcacttgtctaatctatactgcctcagaccatattgaacaaattgagacattggttcaatccttgcctgatattcagtttaagatagcagctagagtaatagttagtgatcgattggctcagatgacaatttatccaaacgtgactatatttaacggaattcactatttggtagatgtcgataatgaattggtagaaaccagtcaagtacttttagatattaatcatggygaaaaracagargaaattmtcratcaatttgcwarwcttggmaarmctatyttrtcctttgaaaatacyaaaacctatgaagyaggtcaggaggcatatgctgttgaccaagttcaagcaatgattgaaaaattragagaaataagyaaaykaactaat

SEQ ID NO: 5387 - DNA, 317 bp, Streptococcus pneumoniae
  misc_feature (1)..(317): tiling:Spneumo1:WAN024DXO; Cluster includes WAN0243CD spr1 912||15903953|NP_359503.1|1892042..1892353|-|312 bp|Hypoth etical protein|S.pneumoniae|R6|NC_003098.1|ORF|221
ttgctatataataatgataaggaggaaataagtatgttaaaagaagtattaaccgttgcaaaagttgcgaaaaaatcttcattatttttgggtggtgtcgcatttggtacccttggtttgaaaatcttagcaagtaaggaagctaaaaaaggttattctaaagctttggctaaggcttacaagttgaaagacgagctagatgcatctgtttctgttgtgaagcaacatggagacgatgtcttgcaagatgccaaatatttgtacgagcaagagaaaaaagaagagcaattagatagccttataggtgaataactaat

SEQ ID NO: 5388 - DNA, 881 bp, Streptococcus pneumoniae
  misc_feature (1)..(881): tiling:Spneumo1:WAN024G4U; Cluster includes WAN02440F spr1 043||15903087|NP_358637.1|1036311..1037162|+|852 bp|Conser ved hypothetical protein|S.pneumoniae|R6|NC_003098.1|ORF|1 11
ttgctaygaaaggaaaaaaactcaatggctactattcaatggtttcctggtcacatgtctaaagckcgtcgacaggtgcaggaraatttaaaatttgttgattttgtracgattttrgtrgatgcacgcttrcctctatctagtcaaaatcctatgttgaccaagattgttggtgataaaccaaaactcttgattttaaayaaggcsgayttggctgatccagcaatgaccaaggaatggcgtcagtattttgaatcacaaggaatccarackctrgctatcaactccaargagcaagtgactgtaaaagttgtaacagatgcggccaagaagctcatggctgataagattgctcgccagaaagaacgtgggattcagattgaaaccttgcgtacyatgattatcgggattccaaacgctggtaaatcmactctgatgaaccgtttggctggtaaaaagattgctgttgttggaaacaagccaggggtcacaaaaggtcaacaatggcttaaaaccaataaagayctggaaatcttggatacaccggggattctctggcctaagtttgaggatgaaactgttgcacttaagttggcattgactggagctatcaargaycagttgcttcctatggatgaggttaccatttttggtatcaattatttcaaagaacattatccagaaaagctggctgaacgcttcaaacaaatgaaaattgaagaagaascgyctgtgattattatrgatatgacccgcgccctcggtttccgtgatgactatgaccgtttttacagtctcttcgtgaaggaagtycgtgatggcaaactcggtaactataccttagatacattggaagacctcgatggcaacgattaactaat

SEQ ID NO: 5389 - DNA, 279 bp, Streptococcus pneumoniae
  misc_feature (1)..(279): tiling:Spneumo1:WAN024FYN; Cluster includes WAN023LB6 3154 13_2143||||1154860..1155138|+|279 bp|EGAD orf prediction|S .pneumoniae|R6|NC_003098.1|ORF|110
ttgctcaccatcttcgtcagcagttcgttttgttcctactgtgttaatgatagcttgaattcttcctttgcgtacaaaacttgggatatccttatcgtcatcaccaatcttaccaacaggttgggcttgcaagccatgactagcaaagaaggctgctgtcccttctgtcgcaaggattccataaccaatgttttggaaacgacgagccaagttcaaggcttcttctttggcatcatcagcgatggtaaagacgacattaccaaaagttggcaagtgtag

SEQ ID NO: 5390 - DNA, 246 bp, Streptococcus pneumoniae
  misc_feature (1)..(246): tiling:Spneumo1:WAN024C3Y; Cluster includes WAN023M46 3134 14_650||||341463..341708|-|246 bp|EGAD orf prediction|S.pn eumoniae|R6|NC_003098.1|ORF|110
ttgctcacgagtcaatactttcttgcttcccataagtgtcgccaaaaggtcatactcacggcgtgtcagagcaatcatctcttcaccacgataaaccgtgtgatgttcaacatctatcctaagattgcggtaggtccttggaactttcatcagactgcagtgttgatcaatgaagtcccgacctcggaagatcgccgaaatacgcgctaccagattttcgataaggactggcttatagatgtatga

SEQ ID NO: 5391 - DNA, 352 bp, Streptococcus pneumoniae
  misc_feature (1)..(352): tiling:Spneumo1:WAN024EVZ; Cluster includes WAN023KFB 3155 23_3555b||||1908380..1908811|+|432 bp|EGAD orf prediction| S.pneumoniae|R6|NC_003098.1|ORF|110
ttgctcacgcgcagcgacctgaccagtcacctcaataacaaattcgctacgaaggctttcagctgttgccataacctctgcagatactttttcagggttgataaccaactgcatgattccttcacggtcacgaagatcgataaagatcaaaccaccaaggtcacgacgacggccaacccatcctttcaaggttatttcttgtccgatgtgttcctcacgaacacgaccagcatacatactacgtttcattatttctctcctcttttattctgttactattttaccataaaagcgcaggctcttcatgaaaatcatcagaaaagtttgccagtctttaaaagtcaggtgaaag

SEQ ID NO: 5392 - DNA, 246 bp, Streptococcus pneumoniae
  misc_feature (1)..(246): tiling:Spneumo1:WAN024C7D; Cluster includes WAN023M7B 3150 89_474||||242807..243052|-|246 bp|EGAD orf prediction|S.pn eumoniae|R6|NC_003098.1|ORF|110
ttgctcataacgcaattcctgccagtgcggacggtctttggaaatagcatccaccacttgcttagtcggatggaaataatctttcaccgcctgctcaccatcttccgcaatccacccccaagaatgggctcccactttcaagtctttgtcagcatggcccgcttcgcttccaatctcacgataagcctgaatcaactttttaaaataacgtggattaccaccaataatagcatatacaatcggtag

SEQ ID NO: 5393 - DNA, 320 bp, Streptococcus pneumoniae
  misc_feature (1)..(320): tiling:Spneumo1:WAN024ESS; Cluster includes WAN0243FG spr1 800||15903842|NP_359392.1|1771287..1771601|-|315 bp|Hypoth etical protein|S.pneumoniae|R6|NC_003098.1|ORF|221
ttgctcatgtgtgaaaaaatccgtattcgyagggtatctgattatcctagtgccagaggtggtttagaagatatcctcatcatggaaaatatgaccaatcatctccttttggttcaaatccgagtgcatggctatttgcttgattttgctagtattgaagggcaaaggcaaaagcattatcgtttgaaaaatttacctcagayggttgaactgacagtggatgatgtggaggaggatgtggatttgaccctaccygaaaatmgaagttatcaagaagctgatttttttgaacgcatgtttcgagagaactgytaactaat

SEQ ID NO: 5394 - DNA, 257 bp, Streptococcus pneumoniae
  misc_feature (1)..(257): tiling:Spneumo1:WAN024EZI; Cluster includes WAN023LMO 3147 32_1570||||836596..836847|-|252 bp|EGAD orf prediction|S.p neumoniae|R6|NC_003098.1|ORF|110
ttgctccaaagggagactagcatcaatcttgacaatgcgatttccctctttatccagaagagaaaggtagccttgacgaacttttttatgcaagtccaacccttccaaatccaaacgattaacctcgcggtcactattagcagcaatacgagccagcccttcttccacctcgatgtcaaaatagagtgtcaaatcgggtttgaggccatctgtcgcaaactgattgagccagtcaatggcttcaatatctaactaat

SEQ ID NO: 5395 - DNA, 327 bp, Streptococcus pneumoniae
  misc_feature (1)..(327): tiling:Spneumo1:WAN024C73; Cluster includes WAN023M6Z 3133 91_490||||251506..251832|-|327 bp|EGAD orf prediction|S.pn eumoniae|R6|NC_003098.1|ORF|110
ttgctccacatcaaaaacaaccccttcaaataccagacgattttcctctgtcgtcacttcgatcataggagtaatctccgccttatccagcttgggtttagctgcagcttttttcgcttgaaaatcaaagrctggtttctcttccgctggaggaggtgccatctgctccagttgttccatagcacggagcgcttcctcattggcagcttgaacaatctgctcattttcagcatgaaaggcctcttcctgctcttgggtcaggacatcattcttctcgacttgacagttaaaagttggaaaaccaaacttttcaagttgtttggctaa

SEQ ID NO: 5396 - DNA, 815 bp, Streptococcus pneumoniae
  misc_feature (1)..(815): tiling:Spneumo1:WAN024FRW; Cluster includes WAN0243U6 spr1 269|lgt|15903312|NP_358862.1|1264173..1264973|-|801 bp|Pro lipoprotein diacylglycerol transferase|S.pneumoniae|R6|NC_ 003098.1|ORF|121
ttgctcgaaatgaggtgcaaaatgcttgatccaattgctattcaactaggacccctagccattcgttggtatgccttatgtattgtgacaggcttgattcttgcggtttatttgaccatgaaagaagcacctagaaagaagatcataccakacgatattttarattttatcttagtagcctttcccttggctattttaggagctcgtctctactatgttattttccgatttgattactatagycagaatttaggagagatttttgccatttggaatggtggtttggccatttacggtggtttgataactggggctcttgtgctctatatctttgctgaccgtaaactcatcaatacttgggattttctagatattgcggcgcctagcgttatgattgctcaaagyttggggcgttggggtaatttctttaaccamsaagcttatggtgcaacagtggataatctggattatctacctggctttatccgtgaccagatgtatattgagggragctaccrtcaaccgactttcctttatgartctytatggaatctgcttggctttgcyttgattctgatttttagacggaaatggaagagtctcagacgaggtcatatcacggccttttacttgatttggtatggtttcggtcgtatggtyatcgaaggtatgcgaacagatagtctcatgttcttcggmyttcgagtgtcccaatggctgtcagttgtcyttatcggtctcggtataatgatcgttatttatcaaaatcgaaagaaggccccttactatattacagaggaggaaaamtaactaat

SEQ ID NO: 5397 - DNA, 2579 bp, Streptococcus pneumoniae
  misc_feature (1)..(2579): tiling:Spneumo1:WAN024DZ2; Cluster includes WAN0243D1 spr1 888|hexA|15903929|NP_359479.1|1865872..1868445|-|2574 bp|D NA mismatch repair protein HexA|S.pneumoniae|R6|NC_003098. 1|ORF|221
ttgctctcaagacttatttttgaaaaggagagacagaaaatggcgatagaaaagytatcacccggcatgcaacagtatgtggatattaaaaagcaatatccagatgcttttttrctctttcggatgggtgatttttatgaattattttatgaggatgcggtcaatgctgcgcagattctggaaatttccttaacgagtcgcaacaagaatgccgacaatccgatccctatggcgggtgttccctatcattctgcccaacagtatatcgatgtcttgattgagcagggttataaggtggctatcgcagagcagatggaagatcctaaacaagcagttggggttgttaaacgagaggttgttcaggtcattacgccagggacagtggtcgatagcagtaagccggacagtcagaataattttttggtttccatagaccgcgaaggcaatcaatttggcctagcttatatggatttggtgacgggtgacttttatgtgacaggtcttttggatttcacgctggtttgtggggaaatccgtaacctcaaggctcgagaagtggtgttgggttatgacttgtctgaggaagaagaacaaatcctcagccgccagatgaatctggtactctcttatgaaaaagaaagctttgaagaccttcatttattggatttgcgattggcaacggtggagcaaacggcatctagtaagctgctccrgtatgttcatcggactcagatgagggaattgaaccacctcaaacctgttatccgmtacgaaattaaggatttcttgcagatggattatgcgaccaaggctagtctggatttggttgagaatgctcgctcaggtaagaaacaaggcagtcttttctggcttttggatgaaaccaaaacggctatggggatgcgtctcttgcgttcttggattcatcgccccttgattgataaggaacgaatcgtccaacgtcaagaagtrgtgcaggtctttctcgaccatttctttgagcgtagtgacttgacagacagtctcaagggtgtttatgacattgagcgcttrrctagtcgtgtttcttttggyaaaaccaatccaaaggatctctyrcarytrrygactaccttgtctagtgtgccacggattygtgcgattttagaagggatggagcaacctrctytagcctatctcatygmacaactggatgcaatccctgagttggagagtttgattagcgcagcgmttgctcctgaagctcctcatgtgattacagatgggggaattatccgractggatttgatgagactttagacaagtatygttgygttytcagagaagggactagctggattgctgagattgaggctaaggagcgagaaaactctggtatcagcacgctcaagattgactacaataaaaaggatggctactattttcatgtgaccaattcgcaactrggaaatgtgccagcycactttttycgcaaggcgacgctgaaaaactcagaacgctttggaaccgaagaattagcccgtatcgagggagatatgcttgaggcgcgtgagaagtcagccaacctcgaatacgaaatatttatgcgcattcgtgaagaggtcggcaagtacatccagcgtttacaarctctagcccaaggaattgcgacggttgatgtcttacagagtctggcggttgtggctgaaacccagcatttgattcgacctgagtttggtgacgattcacaaattgatatccggaaagggcgccatgctgtcgttgaaaaggttatgggggctcagacctatattccaaatacgattcagatggcagaagataccagtattcaaytgrttacagggccaaacatgagtgggaagtctacctatatgcgtcagttagccatgacggcggttatggcccagctgggttcctatgttcctgctgaaagcgcccatttaccgattwtygatgcgatkktyacccgtatcggagcagcagatgacttggtttcgggtcagtcracctttatggtggagatgatggaggccaataatgccatttcgcatgcgaccaagaactctctcattctctttgatgaattgggacgtggaactgcaacttatgacgggatggctcttgctcagtccatcatcgaatatatccatgagcacatcggagctaagaccctctttgcgacccactaccatgagttgactagtctggagtctagtttacaacacttggtcaatgtccacgtggcaactytggagcaggatgggcaggtyaccttccttcacaagattgaaccgggaccagctgataaatcstmcggtatccatgttgccaagattgctggcttgccagcagaccttttarcaakggcggataagattttgastcagctagagaatcaaggaacagagagtcctcctcccatgagacaaactagtgctgtcactgaacakatttcactctttgatagggcagaagagcatcctatcctagcagaattagctaaactggatgtgtataatatgacacctatgcaggttatgaatrwcttagtagagttaaaacagaaactataactaat

SEQ ID NO: 5398 - DNA, 234 bp, Streptococcus pneumoniae
  misc_feature (1)..(234): tiling:Spneumo1:WAN024G99; Cluster includes WAN023KPK 3135 88_3088||||1645632..1645865|-|234 bp|EGAD orf prediction|S .pneumoniae|R6|NC_003098.1|ORF|110
ttgctctctttcaaaaagatgatggaagaggtagcggcagagctggtccagaagaagctccttactctcatagtgacagtaaaaggtggatcgtcccacatctgcgagatcaatgatatcctgaacagtagtggcctcgtagcccttagcattcaaaagttgtataaaagcttgatagatggcttttttggttttgctgatacggcggtcaatgttagtcatatggacacttaa

SEQ ID NO: 5399 - DNA, 231 bp, Streptococcus pneumoniae
  misc_feature (1)..(231): tiling:Spneumo1:WAN024DZ9; Cluster includes WAN023KHL 3133 59_3468||||1859314..1859544|+|231 bp|EGAD orf prediction|S .pneumoniae|R6|NC_003098.1|ORF|110
ttgctctggaagagtcacatacatgtttggtacatcaccatctgtgtgggcaagaagaacaccgtcagttgcttttttgtttacaaagtcaacgtcttttccttgaaggtaaccaagtccgtcaaggtcttcttccaaagtaggaataagcacgtttttacgaggtttgtcaacacggacaactgtttcaaacatgatacgagttccttcttggataaattgaccaagtga

SEQ ID NO: 5400 - DNA, 354 bp, Streptococcus pneumoniae
  misc_feature (1)..(354): tiling:Spneumo1:WAN024GB2; Cluster includes WAN023LL4 3128 55_1658a||||878485..878709|-|225 bp|EGAD orf prediction|S. pneumoniae|R6|NC_003098.1|ORF|100
ttgctcttgacatttttctaccgttacatgcgtccgctagtcgaggcaggtcatgtctatattgccctcccacctctttacaagatgtccaaaggtaaaggcaagaaagaagaagtggcctacgcttkgayggaykrwgmmytagaasaactmcstamwcasktcgtctatcatttcatcatcggtatcgtcctatcaagtacccttttgatcttaattccaaatgcaggaaacgctgaaagtatccaatacacaggactttcacttgtcggttatgtcatcatcgccttcttctttgcgctgggaatctggcttggtatttggatgagtcaattggaggataaatataaataa

SEQ ID NO: 5401 - DNA, 171 bp, Streptococcus pneumoniae
  misc_feature (1)..(171): tiling:Spneumo1:WAN024D6D; Cluster includes WAN0243O3 spr1 488||15903531|NP_359081.1|1465305..1465475|-|171 bp|Hypoth etical protein|S.pneumoniae|R6|NC_003098.1|ORF|110
ttgctctttgattttcatttagtattaattccaaaatccagtcaaggtaccagtgtatgtgatacgagttccaccgtttatctttcgtatcttcaatggaattggggaagtcagaaagtctttgggttacaatatggtttccgttcttctatctctccttctatcacctaa

SEQ ID NO: 5402 - DNA, 649 bp, Streptococcus pneumoniae
  misc_feature (1)..(649): tiling:Spneumo1:WAN024GJ7; Cluster includes WAN023LZ5 3128 69_913a||||481810..482289|-|480 bp|EGAD orf prediction|S.p neumoniae|R6|NC_003098.1|ORF|300
ttgctgacggcgctcatttctacgtttttgctgaccttgctgcttcttagcttggtcattaaagcgacgattgtcgcggttgctttgaccttgttttccaccattacggccatcgtttttctgacggtttccgttttgttgttggtcacggttattgcccttattttgcttgcgtcgttctgcctgctctttagcacgggcttcacgctcagccttgaaattacggctttgcggtttcgctgctactttttctgttttcggagcaactggctcagccggttttgcctcttccttagctacagctggtttagctggctcagatttttcggttttcttttctgcacttacttttggtgctgcaggttttgcttctactttcggagcagctgcaggcttaaagctggcagcaatttttgcagcgacagcttcttccacacttgatgagtggcttttcacatccaagcccaactcttttgcacgcgctacaacttctttactttcttttccaagttcttttgcgatttcgtacaatcttttcttagacaaatcatgtcctcctcttctattccataagagacctcattttctttgtaaatccagcatctgttacagccaaaacctttctcgatttcccgactgctatgcttaa

SEQ ID NO: 5403 - DNA, 733 bp, Streptococcus pneumoniae
  misc_feature (1)..(733): tiling:Spneumo1:WAN024GJ2; Cluster includes WAN023JWW 8320 1_727a||||416712..417182|-|471 bp|EGAD orf prediction|S.pn eumoniae|TIGR4|WAN01UC25|ORF|020
ttgctgacggcgctcatttctacgtttttgctgaccttgctgcttcttagcttggtcattaaagcgacgattgtcgcggttgctttgaccttgttttccaccattacggccgtcgtttttctgacggtttccgttttgttgttggtcacggttattgcccttattttgcttgcgtcgctctgcctgctctttagcacgtgcttcacgctcagccttgaaattacgactttgcggtttagccgctactttttctgttttcggagtgactggctcagctggttttgcctcttccttggctacagctggttttactggttcagacttttcggctttcttttctgcacttgcttttggggctgcaggttttgcctcttccttagctacagctggtttagctggctcagatttttcggctttcttttctgcacttacttttggggctgcaggttttgcttctactttcggagcagctgcaggcttaaagctggcagcaatttttgcagcgacagcttcttccacacttgatgagtggcttttcacatccaagcccaactcttttgcacgcgctacaacttctttactttcttttccaagttcttttgcgatttcgtacaatcttttcttagacaaatcatgtcctcctcttctattccataagagacctcattttctttgtaaatccagcatctgttacagccaaaacctttctcgatttcccgactgctatgcttaa

SEQ ID NO: 5404 - DNA, 234 bp, Streptococcus pneumoniae
  misc_feature (1)..(234): tiling:Spneumo1:WAN024GBZ; Cluster includes WAN023LQM 3153 33_1365||||724253..724486|+|234 bp|EGAD orf prediction|S.p neumoniae|R6|NC_003098.1|ORF|110
ttgctgagagccttaaattcgataatgccatcaaaacggttcataaactctgggctaaagaagttaccgagttcaccgaggacagaattggtacgtccttctctagcagcaccaaatccaacgctagcttcggtctttcctgtacctgcatttgaggtcatgataatgatggcatccttgaagctaacggtgcgtccttgcccgtctgtcaaacgaccatcgtccaagacttga

SEQ ID NO: 5405 - DNA, 1883 bp, Streptococcus pneumoniae
  misc_feature (1)..(1883): tiling:Spneumo1:WAN024G2G; Cluster includes WAN0243YT spr1 102|spnII-interrupted-N|15903145|NP_358695.1|1102916..1104 793|-|1878 bp|Uncharacterized restriction enzyme, interrup ted-N|S.pneumoniae|R6|NC_003098.1|ORF|220
ttgctgatgacaatagatattagtgaagaaagtttggctaaagaatcggctgacttattaaaaattcttttaaaagatcgaacgacaaagaaatcaattgtttgggctacgcattcttatgaattgttaggaaagggatttgctccaagtgatcgcatcaatccaagtaaggttactggaaactttgccaacttgattcagcccagatctgaaaaatccaaatatgaacaaaaagatcggacaaaaataagggcagaagtgtttacaccaacgtggttggtcgcaaagcaaaatggatatgtagaatcgaaattaggctcgttaagtcttgaggagtatgtggacttacgatggttagaggtaacttgtggtgaagcaccttatatggtaacgagatatgataccgtaactggtgaggaaattccattatctgagcgagttggttttgttgatagaaaactgcaacggattagtcgtgaggtttcagatgaagtcacattttataaacttgtaaaagatgcttatcatgcttcgtatggttatgagtatcaaggagattctctccttttggcgcgtgagaatcttttggcaacttttgaggactattatctagctaagactggaaatcaaccaacattagagcaaaagaaagaaattgcgactattatctcttacaatgtctttcagatggatggattgaaaaaaagtagtccttattcagctaaacaaaagcaatctcaacaattgagtttgtttgcggatgagctagaagtccaagaagtagaagaatctaaaacccatatcaaagactggaaaaagaatagaatgataggttttgagcgcctatctagcgaggaaagtgaaatgaaatttgatgtcgtgataggaaatcctccgtatcaggaaacaggagaagccagagatgagccgatatatcactattttattgatgaagcttataaaatcgcagataaatctatactaatcaccccagcaaggtttttatttaaagctggtcaaactcctaaaaattggatggaaaagatgcttgaagacaagcatttaaaagttcaattctatgaacttaaaagcggtaaagtatttacaggaacggatattaagggtggagtagcaataacttatcgtgatgttgataaagatttgggaccaatcggagtatttactatttttgaaactttgaatggtattgtaaaaaaaatcgaaaaacatccagaatttgaaactttttctgatttagtttatcctcaaggtatttatagattttcaaataaacttttttctgattatccaaatgctgaaaagctgcaaggaaaagggacaaaaaataaaattgtttcgaaatcactaactcagttagattttgttttcaaaaacaacgaagaaaaagaccatgttgctctacttggaagaattggctccgaacgtgtttatcgatatattaataaaaaatatttagatttaccggaaacattcgaaaattataatgtttttgtaccagaagctaatggaagtggtgccttaggtgaagtcttatcaacacccctaatcggggaacccctaatcgggcatacagatacttttttatctattggtaattttaaaacaaaatttgaagccgatgcttgtattaaatttattaaaactaaattcgctagagtattattaggtgttttgaaagttactcagcataattcacgcaaaacttggtattacgtccccctccaagactttacggtcaattcggacattgattggacacaatcagtgactgatattgaccgccagcttgatcaaaaatatgacytttcccctgaagaaattgcctttattgagaatcatgtaagggagatggattarctaat

SEQ ID NO: 5406 - DNA, 1053 bp, Streptococcus pneumoniae
  misc_feature (1)..(1053): tiling:Spneumo1:WAN024GEV; Cluster includes WAN0244CX spr0 593|cpsY|15902637|NP_358187.1|606890..607936|-|1047 bp|Reg ulatory function on capsule expression|S.pneumoniae|R6|NC_ 003098.1|ORF|331
ttgctgcacatcatagaatgttttcataagactcattctagcaaaattttgtgtttttttcaagaagagactcacacaatgctccttattttcctatcttctttagcgattctaaggcaagtatggtacaataaaaacatgagaattcaacaattacattatattatcaaaatcgtcgaaactggctccatgaatgaggcagccaagcaactctttatcactcagccaagtctctccaatgcagtgcgagatttggaaaatgaaatgggcattgagatctttatccgcaatcccaagggaatcaccttgacccgtgatggsatggagtttctctcttatgcccgtcaggttgtcgagcagacccagcttctggaggaacgctataaaaatcctgtcgcccaccgcgaactmtttagcgtttcgtctcaacactatgcctttgtggtcaatgcctttgtctctttgctcaagaaaagcgatatggagaaataygaactcttccttcgtgaaactcggacttgggagattatcgacgacgtcaagaacttccgcagtgaggtcggggtcctcttcttaaacagttacaaccgtgatgttttaaccaagatgctggatgacaatcacmtgctagcccaccatctcttcacagcgcaaccrcatatctttgtcagcaagaccaaccctctggcaaagaaagacaaggtgaaactgtctgatttggagaatttcccttacctcagctatgaccaagggacgcacaactccttctacttttcagaagagattctttctcaagaacaccacaaraaatccattgtggtcagtgaccgtgccaccctctttaatctcttgattggtttggatggttataccattgcgacagggattttgaacagcaacctaaacggagacaatatygtttctatcccactggatattgatgacccgatygagctggtctatatccagcatgagaaaaccagcctatctragatgggcgaacgctttatmgactatctmctagaagaagttcagtttgatagtykaactaat

SEQ ID NO: 5407 - DNA, 1280 bp, Streptococcus pneumoniae
  misc_feature (1)..(1280): tiling:Spneumo1:WAN024GBU; Cluster includes WAN024492 spr0 732|deoB|15902776|NP_358326.1|731211..732485|+|1275 bp|pho sphodeoxyribomutase|S.pneumoniae|R6|NC_003098.1|ORF|111
ttgctggacgrgatggagttcagatttcaacttcaaaaaaaggaaaatagaagggggcataagatgtctaaatttaatcgtattcatttggtggtactggattctgtaggaatcggtgcagcaccagatgctaataactttgtcaatgcaggggttccagatggagcttctgacacactgggacacatttcaaaaacagttggtttgaatgtcccaaacatggctaaaataggtcttggaaatattcctcgtgaaactcctcttaagactgtagcagctgaaakcaatccaactggatatgcaacaaaattagaggaagtatctcttggtaaggatactatgactggacactgggaaatcatgggactcaacattactgagcctttcgatactttctggaacggattcccagaagaaatcctgacaaaaatygaagaattctcaggacgcaaggttattcgtgaarccaacaaaccttattcaggaacggctgttatckatgattttggaccacgtcagatggaaactggagagttgattatctatacttcagctgaccctgttttgcagattgctgcccacgaagacattattcctttggatgaattgtaccgtatctgtgaatacgctcgttcgattacccttgagcgtcctgcccttcttggtcgcatcattgctcgcccttatgtaggtgaaccaggtaacttcactcgtacggcaaaccgtcgtgacttggctgtatctccattttycccaactgttttggataaattgaatgaggctgrtatcgatacttatgctgtgggtaaaatcaacgatatctttaacggtgctggtatcaaccatgacatgggtcacaacaagtcaaatagtcatggaattgatacactattgaagactatgggacttgctgagtttgaaaaaggattctcattcacaaacctagttgactttgatgccctttacggccatcgtcgtaatgctcacggttaccgtgattgcttgcatgagtttgatgaacgcttacctgaaattatcgcagctatgagagagaatgaccttctcttgattactgcggaycatggaaatgacccaacgtatgcaggaacggatcacactcgggaatatattccattgttggcctatagccctgcctttaaaggaaatggtctcattccagtaggacattttgcrgatatttcagcgactgttgccgataactttggtgtggaaactgctatgattggggaaagtttcttagataaattggtataactaat

SEQ ID NO: 5408 - DNA, 1668 bp, Streptococcus pneumoniae
  misc_feature (1)..(1668): tiling:Spneumo1:WAN024CVK; Cluster includes WAN0243V2 spr1 237||15903280|NP_358830.1|1234801..1236462|-|1662 bp|Hypot hetical protein|S.pneumoniae|R6|NC_003098.1|ORF|321
ttgctggtagaaaagaggaggttgcggatgcgtctcaaggtcattaaaaaattagttgatatcaatatcctytattcatctcaagaagctaatctggctaatctacgaaagaagcaggctaagaatcctgggaaaaaagtaaatgtttcygctagagtcytaagttcttacattttttcyagtctcttgatgmtywtctgttttakwaatatagccwttcrttttccttttgaggaaatrcmwakttwttttagywcgatgrttgctattttactrgtgmtkgccttttcaacttctttmackgcmttttacaatgtcttttatgagagtaaggayytgrymtcstataggccctatgcctttaaagaatcagagattataatkgcyaaaggwctgtctgtcctyttgccagctctarctggaattgtaccaatcctagcttattttctrgycctctayattagkctagcwccttctctdtggytgggtttgcctttgatgctactgtccttgaccttattatttgtctctgtkrctytagtgayggtagtggcagtrcatttcttggctcaractagggtcttcagaaagtatcrgtctattttttcgaatgtgatgattgggataggagttctcatacctttaatatttatcttctttcttcagtcgacttttggaagtattgttgacaaagttagagacattccatttctcctttatcctcttcatatcttttacaaaatagcagtggagcctttttcgacagaagccttagtgggtctgctcgcttggataggactaactctcttcctgctttatctgaccaaaaagaaggtccttcctcgtttttatgacgtgatcctgcttaayagtgaggakaaggtcaaaaaagaacgtcgcagcaaggagagratttcaacyactaaaaagggmtttttycgyatggttttacgctaccacctcaccctcttgggacagggkactggygtgrttacagtgctttttacaagtgctttcyttccttatctcatgatgatcrgtctgatttccaaaatccgagattctcagatrgttccagacattcatcctccatactggttacccttgttttttrtagswststttatagcagttgtcaataacaatatcaccagcctgcattcaattgccttgtccttggagagggaaaatgttgattttctkaagagtttaccctttgactttgctcgttatgtgaaagtgaaattttggattatmtwtgcygtycagtcctttttaccarttctgactttrctyggtctttctctatatctaggcttgycyatcmtttcgatratttaccttmttgtrgymtggatcmttgccagtgtcatcctttcttgccaccattactttaaggacgttaaaaatctgtcaaccaattggagtagcattacggacctggtgaatcgttcaaatggcatagtcgccatagttttattgtttatttatagtgcaatcctgatggcccttgtaattgggagcatattcttggttcagtctctctccmctatccttgccatcarcttgggagtaggagctcttatcstcytgcttgctcttgctatttttggctatcattattacctgtcacgcatattggcagaaatagaaaaaagaykaactaat

SEQ ID NO: 5409 - DNA, 68 bp, Streptococcus pneumoniae
  misc_feature (1)..(68): tiling:Spneumo1:WAN0249M7; Cluster includes WAN02471U R6.I G_188.2||||176090..176157|+|68 bp|Between spr0167 (+ stran d) and spr0168 (- strand)|S.pneumoniae|R6|NC_003098.1|IG|1 10
ttgctgtaatatgtgatgaaaatgccagtaatrataccgagaaaaaagctgagaaacttttcccagct

SEQ ID NO: 5410 - DNA, 255 bp, Streptococcus pneumoniae
  misc_feature (1)..(255): tiling:Spneumo1:WAN024BH6; Cluster includes WAN023LOJ 3156 83_1475||||780570..780824|+|255 bp|EGAD orf prediction|S.p neumoniae|R6|NC_003098.1|ORF|110
ttgctgtgttttttcttgactagtgttagtctctttagttggactggtgttttccttaggggattccttttggatttctttgacaatggttgtcgtctggcttgtcgtaggttcttttttaatatttttgttattatccaaggcgttcataatcgtgatacttgcggtaatcaagccaaggatactagcgattgtagcaacggttttttgaaagactgtaaagccttttttgatgtgttctgtttttggttttga

SEQ ID NO: 5411 - DNA, 1628 bp, Streptococcus pneumoniae
  misc_feature (1)..(1628): tiling:Spneumo1:WAN024DTV; Cluster includes WAN02438Y spr2 035|ABC-NBD|15904076|NP_359626.1|2026409..2028031|+|1623 b p|ABC transporter ATP-binding protein - unknown substrate| S.pneumoniae|R6|NC_003098.1|ORF|111
ttgcttacagtatctgatgtttcactacgttttagtgatcgcaaactttttgatgatgtcaatatcaaatttacagaaggaaatacttacggattaatcggtgctaatggtgccggaaaatcaacctttttaaaaattttagctggagatatcgaacctactactggtcacatctctcttggtccagatgaacgtctctctgttcttcgtcaaaatcactttgactacgaagatgaacgtgccattgatgtcgttatcatgggaaatgaaaaactttatagcatcatgaaagagaaagatgctatctacatgaaggaagatttctcagacgaggacggggttcgtgctgccgaactcgaaggagagtttgccgaacttggaggttgggaagcagagagtgaagcctctcaactacttcaaaacctaaacattccagaagaattacactaccaaaacatgagcgaattggccaacggtgaaaaagtaaaggttctcctcgccaaagcactttttggtaaaccagatgttcttctcttggacgagcctactaacggtttggatatccaatcgattacttggttagaagacttcttrattgactttgataacacagttatcgtagtatcccacgaccgtcacttcttaaacaaagtttgtactcacatggccgaccttgactttggaaaaatcaaactctatgtcggaaactacgacttctggaaggaatcttctgagcttgctgctaaattgctagcagaccgtaatgctaaagcagaagaaaaaattaaacaattgcaagaattygttgctcgtttctctgccaatgcttctaagtcaaggcaggcaacatcacgtaagaraatgcttgataagattgagctagaagagattgtrccatctagtcgtaaatatccatttatcaactttaaagcrgaacgtgagattggtaatgatctcttgacagtagaaaatytaactgtaaagattgatggtgaaactatcttggataatattagtttcatcttgcgtccagatgataagacagcacttattggacaaaatgatattcaaacgactgcattaattcgtgcaatcatgggagatattgactatgaaggaactgtcaagtggggagttacaactagtcaatcttacctaccaaaagataactcarctgattttgcaggaggagaatcaattcttgactggttgcgtcaattcgcaagtaaaraagawgatgacaatactttcctacgtggyttcctcggccgtatgctcttctctggagatgaagttaacaaacctgtaaatgtcttgtcagggggagaaaaagttcgtgtcatgctttcaaaactcatgctcttaaaatcaaatgtccttgtacttgatgatccaacaaatcacttggacttggaatctatctcaagcttgaatgatggattgaaaaactttaaagaatcaatcatctttgcyagccatgaccacgartttattcaaactttggctaaccatatcattgtcttatctaaaaatggcgtcattgaccgtatcgatgaaacctacgatgaattcctagaaaatgcagaagtacaagcaaaagttaaagaactttggaaagactaactaat

SEQ ID NO: 5412 - DNA, 369 bp, Streptococcus pneumoniae
  misc_feature (1)..(369): tiling:Spneumo1:WAN024DOA; Cluster includes WAN0243RX spr1 350|transposase A|15903393|NP_358943.1|1333089..1333304|-| 216 bp|Degenerative transposase|S.pneumoniae|R6|NC_003098. 1|ORF|112
ttgcttagttttaaacaagcatattataataaagctatggcatatagtactgattttaaacagcgagcattagattmcatcaaagaggggcacagccatgtcgaggcagccaagktttttggtgttggcgtcagaactctcttcacgtgggaaaagaaagaygtgamcaagracacwmtagagaggaaaaagcgagtcgtcaaaaaccgaaagattcctttagaggaattgaaagcctttgtagaggctcatccagatgcttttttacgggaaattgcggcacattttgattgtgctstkccytcmgtatgggcagctttaaagyakattaaggtcactttaaaaaaagatgacgagcttctaactaat

SEQ ID NO: 5413 - DNA, 321 bp, Streptococcus pneumoniae
  misc_feature (1)..(321): tiling:Spneumo1:WAN024F5T; Cluster includes WAN023KMT 3157 41_3232b||||1725228..1725548|+|321 bp|EGAD orf prediction| S.pneumoniae|R6|NC_003098.1|ORF|110
ttgcttatcaatttcatcaaagatttctgggtgctctgccaagtatttcttagcattctcagaaccttgcccaattttttcatctttgtaagaataccaagcccctgcttttttgataatatccaaatcgcttgcaatcttcaaaagctcaccagtcttagaaattccttctccgtacataatttcaactacggcttccttaaacggtggagctaccttattttttacaaccttaatcttagtttctttaccgacattggtttctttttgrtcaccagttcccttaatttgtgtattaccacgaacatccaagcggactga

SEQ ID NO: 5414 - DNA, 174 bp, Streptococcus pneumoniae
  misc_feature (1)..(174): tiling:Spneumo1:WAN024DID; Cluster includes WAN0244HS spr0 418||15902462|NP_358012.1|416025..416195|+|171 bp|Hypothet ical protein|S.pneumoniae|R6|NC_003098.1|ORF|121
ttgcttattatcaatcgtttttttagcttatttgtcttagattggtatagaactgakctatggattaatmytcttstatcttatcctgttcctaaatatgttggtagaaaaatgaagcagttgttacgagtgtctgtattggraaaaattttgtctatasaattctttaaatga

SEQ ID NO: 5415 - DNA, 651 bp, Streptococcus pneumoniae
  misc_feature (1)..(651): tiling:Spneumo1:WAN024G8X; Cluster includes WAN023LMC 3132 74_1588a||||844100..844357|-|258 bp|EGAD orf prediction|S. pneumoniae|R6|NC_003098.1|ORF|430
ttgcttcatatccgtgtatgcaaaacctttgaccgtatcccctactgtatgttgrccttcttccttagcaagagcataggtttgaccatccttttgcacaaagtaaaaacggtcrttttcatcgatgatcagtccaacgataaaacttgcaagatttgtattcatatttccttctttcgaataaaactcagccagcaatgccaactgagtttttctgtttatttttagacttccaaaagttctttctctttgttagcagtcatgtcgtcgatgtgtttaacagcatcgtctgttactttttgaatrtctttttcaagagtcttcaattcgtcttcagtgatttcttttgctttttctygtttcttagcttcgtccatagcatcgcgacggatattgcggacagccactttagcattttcgccgaccttcttcacttctttagcaaggtcacgacgagtttcttctgtaagagctgggataaccaagcgaatcacagaaccgtcattagccggtgtgataccaakatcagaagcgttcaaggcacgktcgatgtctttcaatgaagacttgtcaaatggtgttaccaacaaaacacgcgcttctggaatcgtaattgaagcgatttggttaagaggagtttcgactccatag

SEQ ID NO: 5416 - DNA, 411 bp, Streptococcus pneumoniae
  misc_feature (1)..(411): tiling:Spneumo1:WAN024CNA; Cluster includes WAN023I1J 8725 5_3751a||||2132643..2133017|-|375 bp|EGAD orf prediction|S .pneumoniae|TIGR4|WAN01UC25|ORF|020
ttgcttccatcgcatcaagtgtatacattacatcatatgatccatgcatataactttgaagcgcctcatccgaatcgaaacgttccaccggattatatgtatgcaatctattcaaatcatctttttctgctttatataacgtatttaaagctaaaatatgagaatttacactatctacagattgcagtaaaccaagtgcgtataactccgctcccaatccttcacgtctaccatttccttcaaagtagattgcagaatcagaattatgaaccatttcatgagtataaaccgacgttccataagcatctaataatctatctaacacaaagtgcgttaaacttccattcgcatacgctcctgcactactattatactcataccatttcccaacaggtccgaagaattctttaa

SEQ ID NO: 5417 - DNA, 228 bp, Streptococcus pneumoniae
  misc_feature (1)..(228): tiling:Spneumo1:WAN024FLS; Cluster includes WAN023L2O 3154 54_2515||||1338452..1338679|+|228 bp|EGAD orf prediction|S .pneumoniae|R6|NC_003098.1|ORF|110
ttgcttcttcaaaatgtcccaattcacgcaagagatagatatagtgttccagaaattctggattgtccttcaaatctcctgwcaactcttgataatactcataagcagtatccaaatcgtccatttcttgataagaacgagcaatcatccacttggtcaaaagattttctggctcctcactctgcaattctagaatatcctcataacgctcctgctccagataaatag

SEQ ID NO: 5418 - DNA, 722 bp, Streptococcus pneumoniae
  misc_feature (1)..(722): tiling:Spneumo1:WAN024CQB; Cluster includes WAN023MFD 3142 18_67a||||36911..37534|-|624 bp|EGAD orf prediction|S.pneu moniae|R6|NC_003098.1|ORF|110
ttgcttgattccaggcttgagcgaaatggtctccaaagtctcaaaatcaatagcttgaaattgattgagcagataggggatattgggattgagatgrcaacgtctctyatcctcatgataatgctctggacagagrcaggytccatatttgaaagaaaagtcaaaagcctgaccaacccgatggcagaagacacactcattaaaattgaggctgattccaaatcgagtcaaaatttgaatttcaaaaatattggtcaaaacctgataatccaagcctgcttccatcaactccaaagtcttttgcaaaaaagcaaacaagggagcatcctgctgattgtcctgcaaactagcatctgcaagagctgccacataggtcgcataggccatgacaaagaggtcactattaatcttgggaaaagtcatgacctcatgatagtcttcgatgtaactgagtccgtcatcattgattcgcaagagaaatcgtgccagcaccaagggctgaataacaggcgccagcttagactgaccagcgtgtttgacaaaaaacatgcrtttgccaacctgctctgtaaaaattttgacragcttgtcatcctcacgaaaattgcgattgtaaagcaccaagccttgactcgtgatagactgaatcatgcttctctcatrtactcctcaagtcgtttcatggcttctttgatagtctccatgctggctgcataactaat

SEQ ID NO: 5419 - DNA, 1040 bp, Streptococcus pneumoniae
  misc_feature (1)..(1040): tiling:Spneumo1:WAN024C88; Cluster includes WAN0244NA spr0 220|ABC-MSP|15902264|NP_357814.1|213261..214295|-|1035 bp| ABC transporter membrane-spanning permease - iron transpor t|S.pneumoniae|R6|NC_003098.1|ORF|222
ttgcttgtatttatgagagcattctcagactttggaacgcctatgttgattggcgaaggrtatcggactttccctgtcctgatttatacccaatttattagcgaggttggaggaaattctgcttttgcaattatggcgattatcattgccttggcaattttccttatccaaaaacacattgcaaaccgctacagtttcagcatgaatctgctccatccaattgagcctaaaaaaactacaaaaggaaaaatrgctgccatttatgcaacagtctacggaattatctttatctctgttttacctcaaatctacttaatttatacctctttcctaaaaacatcagktatggtatytkttaaaggttattctccaaacagttacaagstagctttcmatcgtatgggatctgctattttcaataccattcgtatccctttgattgccttagttctagttgttctatttrcgacatttatctcctacctagccgttagaaaacggaatttgtttacaaacttaattgacagcctcagtatggtaccttatattgtaccaggaaccgttctagggattgccttcatttcttccttcaatactggtctatttggaartggatttcttatgattacagggactgctttcatcttgattatgtctctayytgycagaarattaccktatactattcgctcatctgttgctagcttacaacaaatagcaccaagtattgaagaagctgctgaaagcttaggaagtagtcgtctcaatayctttgctaagattacaactccaatgatgctayckgrtatyatttctggagccatcytatctkrrstmayamtgatttcaraactctctacttctatcctcctctacaatgtcaaaacaagaacaatgactgtagctatttatacagaggttctcagaggaaattacggtgtagcygcarccttgtcaactatcctgactgttctaacagtaggttccttgctcttgtttatgaaaatctctaaaagcaatagcattacactttarctaat

SEQ ID NO: 5420 - DNA, 87 bp, Streptococcus pneumoniae
  misc_feature (1)..(87): tiling:Spneumo1:WAN024DQ3; Cluster includes WAN023SLF NC_0 03098.1_896||||704485..704571|-|87 bp|Glimmer 2.02 orf pre diction|S.pneumoniae|R6|NC_003098.1|ORF|110
ttgcttsaraaaaaaggattggacagcgatttccaaaactttcttccttctaatagtctacagtgggtagaccttgcgaaattcttc

SEQ ID NO: 5421 - DNA, 521 bp, Streptococcus pneumoniae
  misc_feature (1)..(521): tiling:Spneumo1:WAN024ESA; Cluster includes WAN0243F6 spr1 810||15903852|NP_359402.1|1780109..1780624|+|516 bp|Conser ved hypothetical protein|S.pneumoniae|R6|NC_003098.1|ORF|2 21
ttgctttacttctatagtgaaaaggtttacaattatagtaagaaaatttcaggaggtttcattatggcacaacgttaccaaaatatcatggtcgcaatcgatggttctaaggaagcggacttggcttttgtcaagggagttcattctgctctacgaaacgacgctaaactcaccatcgyacatgtcattgacacacgcgctctccaaagcgtatccacctttgatgctgaagtttacgaagaactccaagtcgacgctgaaagtctgatgaaagagtacgaaaaacgtgctaaagatgctggggtagcagatgttcatatcgtcattgaaatgggaaatccaaagaccctgctagcacgtactattccagatgccgaggaagtggacctcatcctcgttggcgcaactggtctcaacgcctttgaacgcctcttrgtcggctcttcatctgaatacatactccgccatgctaaggtcgatttgctggttgtragagaacaagaaaaaaccttataactaat

SEQ ID NO: 5422 - DNA, 126 bp, Streptococcus pneumoniae
  misc_feature (1)..(126): tiling:Spneumo1:WAN024DP2; Cluster includes WAN0242EF SP11 72||15901037|NP_345641.1|1107250..1107369|-|120 bp|hypothe tical protein|S.pneumoniae|TIGR4|NC_003028.1|ORF|120
ttgctttatgcagttcctttttattttaacaggagtgaaactatagtgtttctaaattgtgaatcaatcaaaactgattgtgatggggctattctagctttagaawccttcaaaaatctaactaat

SEQ ID NO: 5423 - DNA, 231 bp, Streptococcus pneumoniae
  misc_feature (1)..(231): tiling:Spneumo1:WAN024F2T; Cluster includes WAN023LV6 3144 77_1098||||579869..580093|-|225 bp|EGAD orf prediction|S.p neumoniae|R6|NC_003098.1|ORF|100
ttgctttctctacaaaatagtatagacaataacactatacaattttatacaaagaaaagagtctgggacaatagtctcttatctccaaaaaaagcaacggatttgccgttgctttttttgsatggttacgatagtcttggtaaaatagaattgcccaataaaccatttagaaaggctatcccatgcatattcactataacacaaatcaaacaactttaccacctarctaat

SEQ ID NO: 5424 - DNA, 153 bp, Streptococcus pneumoniae
  misc_feature (1)..(153): tiling:Spneumo1:WAN024DOO; Cluster includes WAN02428Z SP13 79||15901233|NP_345837.1|1301599..1301745|+|147 bp|hypothe tical protein|S.pneumoniae|TIGR4|NC_003028.1|ORF|020
ttgcttttttactcttcttttaaaaaatggtatactagacttcctgcaaaactaggaagtaaatgtgtaagaatcacagtaaaaaatgctcttccgtcttggaggagcatttctttttatcaacgaaaatcaaatagcaaactaykaactaat

SEQ ID NO: 5425 - DNA, 87 bp, Streptococcus pneumoniae
  misc_feature (1)..(87): tiling:Spneumo1:WAN024GA7; Cluster includes WAN023SL4 NC_0 03098.1_1008||||786219..786305|+|87 bp|Glimmer 2.02 orf pr ediction|S.pneumoniae|R6|NC_003098.1|ORF|110
ttgcwgatttcggacaacgtcaagaataagaactatcggattaaggaaattmactcccttaatccttttgttttgtctgrtaaaaaa

SEQ ID NO: 5426 - DNA, 995 bp, Streptococcus pneumoniae
  misc_feature (1)..(995): tiling:Spneumo1:WAN024DFG; Cluster includes WAN0244AX spr0 665|prfB|15902709|NP_358259.1|668470..669459|+|990 bp|Pept ide chain release factor 2|S.pneumoniae|R6|NC_003098.1|ORF |111
ttggaaaacaagatgacagaacctgatttttggaacgataatattgcggcccaaaaaaygtcgcaagaattraatgwattwaaaaacacttacaataccttccataagatggaagagttgcaggatgaagtcgaaattttattggattttttggctgaagacgagtcagtgcatgatgaactggtagcgcagttagccgaacttgataagataatgaccagctacgagatgactytactcttgtcagaaccttatgaccacaacaatgccatcttggaaatccatccaggttctggtggtactgaggcgcaggactggggtgatatgttgcttcgtatgtatactcgttatggtaatgctaaaggctttaaagtggaagtgttggattaccaagcaggtgatgaggctggtattaagtcggtaactttatcatttgaagggcctaatgcctatggtctcctcaagtcagaaatgggtgttcaycgcttagtgcgaatctcaccatttgactctgccaaacgtcgccatacctctttcacatctgtagaagtgatgccagaattggatgatactattgaagtggaaatccgtgaagatgatatcaagatggataccttccgttcaggtggtgccggtggacaaaacgtcaataargtttcaacaggtgtacgtttaaccyacattccaactggaattgttgtccaatcaacagtrgatcgtacccagtatggaaatagagatcgygccatgaagatgttgcaggctaagctctatcaaatggagcaagakaagaaggctgcggaggtagattctctcaaaggtgagaaaaaggagatyacttggggaagccaaatccgttcttatgtcttcacgccttatactatggtaaaagatcaccgaactagctttgaggttgctcaggtagataaggttatggatggggacctagatggttttatcgatgcttatctcaagtggcgaattagctaactaat

SEQ ID NO: 5427 - DNA, 479 bp, Streptococcus pneumoniae
  misc_feature (1)..(479): tiling:Spneumo1:WAN024FUT; Cluster includes WAN023L87 3156 37_2272||||1222383..1222607|+|225 bp|EGAD orf prediction|S .pneumoniae|R6|NC_003098.1|ORF|220
ttggaaaataaattctcattctccacaaaaaagctcgtaaccatctggtttggcgataatcttgaagggattttaaaatgcgtacatgctttggaacagattcatatcccttgtcaaagtgctccatttcaagaatatcaatatcatacttttctggatccagatttgaaacaatggttgatagaatcttctctgcaccacctccaagagaaaaagaccacataaaaaataagatttttttcttagccaccatattctcccttgtattctgtataagacttatccatatcagcratgacagyatcatgatgcggtacctgcttgtctgctggtggaggcgtcatataatccccaaaagcagttctgagatagacatcatagccgattggaataggcatctctgttccttcaaatggcaagaaaagattgtcttcaaaagatgtgattgggtacttgtttctcatgtagccaggacctga

SEQ ID NO: 5428 - DNA, 267 bp, Streptococcus pneumoniae
  misc_feature (1)..(267): tiling:Spneumo1:WAN024DUG; Cluster includes WAN023KBV 3156 71_3707||||2000760..2001026|+|267 bp|EGAD orf prediction|S .pneumoniae|R6|NC_003098.1|ORF|110
ttggaaaatcaattccactgttccacgagctccactacggtttttctcgataataacttccaccttattatttgggataccctcctcttcttcaccaccacgttcatagtagtcatcgcgatagagaaaagctacgatatcagcgtcctgctcaatagacccagattcacgaatatcagacaagaccggtctcttgtcctgacgttgttctacaccacgagaaagctgactcagagcgattactggaaccttcaattccttggctag

SEQ ID NO: 5429 - DNA, 160 bp, Streptococcus pneumoniae
  misc_feature (1)..(160): tiling:Spneumo1:WAN024AZG; Cluster includes WAN023JVZ 8325 5_766||||434161..434436|-|276 bp|EGAD orf prediction|S.pne umoniae|TIGR4|WAN01UC25|ORF|020
ttggaaacatgcgatcaaaagaatcaaaggacagttgcatactttcctgcattgccagttctatcagtttctttccaaacaagcgagcctctcgactcggaatcgcttcctcaaagaagaaccaaatatggagtccgtgacccgaacgagaaatctctaa

SEQ ID NO: 5430 - DNA, 713 bp, Streptococcus pneumoniae
  misc_feature (1)..(713): tiling:Spneumo1:WAN024DCI; Cluster includes WAN02444B spr0 903|ccdA|15902947|NP_358497.1|888261..888968|+|708 bp|Cyto chrome c-type biogenesis protein|S.pneumoniae|R6|NC_003098 .1|ORF|111
ttggaaacgatagtatttttaatctctgtttttctagcaggtgttttatcctttttttctccttgtatttttcctcttctgccagtctatgctgggattttattggatgatcaagaaagtgcaaaaagcttttctttgtttgggagaaaggttctctggtcaggcttgattcgaacactttgctttatcgctggtatctctctcattttctttattctaggctttggtgctggttactttggtcatattctctatgcaaattggtttcgatatgkcatgggagctattattatcattttgggtcttcaccagatggaaatttttcatttgaagaaattagaagttcaaaaaagttttacctttaaaaaatcagaytctaatcgttattggtcagcttttttacttggtattacctttagctttggttggacaccttgtattggtccagttttaagttctgttttagcacttgcggcttctggaggcaatggygcttggcaaggagcgatttatactctcatttacactctgggcatggcccttcctttcttggtmttggcactagcttcaggtctagtcatgccatattttagtaaaatcaagcgtcatatgatgctactaaagaaaattggtggtttcctcattgttttaatgggaattttgttactattaggacaagtaaatgttctagctggaatttttgaataactaat

SEQ ID NO: 5431 - DNA, 1107 bp, Streptococcus pneumoniae
  misc_feature (1)..(1107): tiling:Spneumo1:WAN024FTZ; Cluster includes WAN023PHG pne3 5_9||||6420..7526|+|1107 bp|Type 17A capsule operon, Glimm er 2.02 orf prediction|S.pneumoniae||WAN01UCHX|ORF|000
ttggaaagaagtatggwcagagtttttgaaatgttagaaaaaraatctccactttttagtgttattgttccaacctataagatatcagaatctaatctacgccartgyatagactctctgttatatgatartcaagatgttgarattattttggtrgatgayaayrmraactyrgatatatgtggwraagtrwtrgacgaatatgctgaaaaatataataatatttcagttattcatcargaaaaccaaggtgtgtcagtcgcaagaaatgctgstatgtcwattgctgtaggaaagtatcttrtttttgtagayccygatgattgggttgctgaaaatttttatagycaaatgrcyyttgcggttcaaaaaaatccttcaagygatgtgattatattagctgctattgtagactayaatggtaaacratttacgaatyatttttggcacacytctcgttcttttyrkggaamagwyaaagatgatytggaacttcaattgattgcyaaaggagcaacgagttatttyccarctgagataggggttggtgttccytgggcaaaaatttatcgtaatgagtttgtgcgagmaaatggcttrgwttttaatccttctcttcgycgaatgcaagataayattttcaatatgtatgcattygaatttgcgaatgaratcgtctacattratgagccgatttactattatagaaagagyatggatagtgtaactaataagaaaaatgataaagtaatttattatttcgacttagttaatgatgaggttgaaaaatttattcwaaaatttaataarcctaaaatatttgaagatgctctrcatataaaaagacttataggwatcaattcgtattataagttgtattttmagtttgcrwctacttcaagcgagaaaaagaaaatgcgacaagaatttcgtgaacttttagaaagggaagaatatgyaaattcgttaaaamaagtgaatacagcytatcttctyccaaaagaaaaaatttttataagyattttaaagcagaaasacttrygratattytcmttkttacaaaaacttgaaaarttrtctgygakrttraagagycgwcaktttagt

SEQ ID NO: 5432 - DNA, 375 bp, Streptococcus pneumoniae
  misc_feature (1)..(375): tiling:Spneumo1:WAN024G54; Cluster includes WAN023LHQ 3133 97_1886a||||1018436..1018810|-|375 bp|EGAD orf prediction| S.pneumoniae|R6|NC_003098.1|ORF|110
ttggaaagcgattggagcgtcagagtgagaaccaccgttgatgatgttcatcattggagttggaagaactttagtgttgaatccaccaagrtagctgtaaagtgggatttcaaggtagtcagcagcagcacgagctacagcgatagacacaccgaggattgcattcgcacccaatttacctttgttaggagtaccgtcaagtgcgatcatagcacggtcaatagcttgttgatcacgtacatcgtagccaatgatagcttcagcaatgatgttgtttacgttgtcaacagctttttgtgtaccaagaccaccgtaacgagatttgtcaccgtcgcgaagttcaactgcttcgtgttcaccagtagaagctcctga

SEQ ID NO: 5433 - DNA, 225 bp, Streptococcus pneumoniae
  misc_feature (1)..(225): tiling:Spneumo1:WAN024CMG; Cluster includes WAN0242W3 SP04 87||15900401|NP_345005.1|467294..467512|-|219 bp|hypotheti cal protein|S.pneumoniae|TIGR4|NC_003028.1|ORF|020
ttggaaaggattcctctatctattctcactttttatatcccaaaagttccctcttactctattaaagaaaaacaaagcaagtggttacaatccggctataaatctatcaaaacagacaaggctattctttcgtcttctcccatccagactatactgtcggttgtggaatctcaccacatcassttgcgctcacggacttctttawarmkaakgaaactarctaat

SEQ ID NO: 5434 - DNA, 779 bp, Streptococcus pneumoniae
  misc_feature (1)..(779): tiling:Spneumo1:WAN024FSH; Cluster includes WAN0243UF spr1 260||15903303|NP_358853.1|1258385..1259233|-|849 bp|Conser ved hypothetical protein|S.pneumoniae|R6|NC_003098.1|ORF|3 40
ttggaaagtaaatttgaatttgctaaagagcttgttaagaaagcaggycagtacattcttgaccatatgcaggaagacttgcgtgttgaaaccaagtcctctycaacagatttggtgaccagactggacaaagaagttcaggaactcttggttggtgagattttgtcccgttatcctgaggataagatttgtgctgaagaaggttgtctgcgagcctcggttcaagagggcaaggtttgggtcattgatcccattgatggtaccaataattttgtagcccagcaggaagattttgctgttatgatggcttattttgaaaatggtcagggacagtttggtctgatttatgatgtggtcaaaggggattgttaccacggtggtggggaatttccagtttgtctaaatgataggyccctagctccttttaaaactaaaccacttggagattttctcattgcagggaatagtggtatgctggaaaccaatgaatgggggctggctgatttgagccgakcggttcttggtgttcgtgtctatggaagtgcggccattagttttgccaagattttgtcagggcrtttgttgacctatctcacytatctgcaaccatgggattatgccgcagctagtattytarskrawagtctgggctatcgggttgtgaccctttttggtgaagctcctgattttcaaaccagacagcckgtcatgatggtgcctcttgagatgcaggaggaaattcagtcctatatttacgaaaggaaaagaacttaactaat

SEQ ID NO: 5435 - DNA, 297 bp, Streptococcus pneumoniae
  misc_feature (1)..(297): tiling:Spneumo1:WAN024CS3; Cluster includes WAN023L6J 3155 43_2333||||1251680..1251976|+|297 bp|EGAD orf prediction|S .pneumoniae|R6|NC_003098.1|ORF|110
ttggaaataatcacgacccgtaacaatggcttctggatttttcttaatctcttcagtcgcaaggtcacggatagtttcaaaatagtggttaatttgctcatccatggaggccacccggtatgcgtcgtcaacagaaccattaagataaagatcaagtgctgcttcmacaacgcttttaacttcacgtcccatttttttaatttcttcctctacagctggratgcgytcttcccccttcatacggatggttgcctgggcaatggctacagcgtgatcccccatacgctccacatctga

SEQ ID NO: 5436 - DNA, 303 bp, Streptococcus pneumoniae
  misc_feature (1)..(303): tiling:Spneumo1:WAN024BE4; Cluster includes WAN023KLB 3155 08_3298b||||1765616..1765918|+|303 bp|EGAD orf prediction| S.pneumoniae|R6|NC_003098.1|ORF|110
ttggaaatgacaaccatccgatcacttcttcttaatttcatttctatttcctattccatttttattcaaaaaatcaaaaagcaaactagaaagctggtcgctggtggttcaaaacactgttttgagattgtcaatagaactgacaaaccctgtaatatacctgcatatatacatacgacaaggcgatactaccctagtttgaagagattttcgaagagtattcatttttgtcttttacttattataccatattyacataaaaaaacgaacattcttatcctaaaaaatgctcatttttcttaa

SEQ ID NO: 5437 - DNA, 711 bp, Streptococcus pneumoniae
  misc_feature (1)..(711): tiling:Spneumo1:WAN024DFX; Cluster includes WAN0244C8 spr0 618||15902662|NP_358212.1|627980..628684|+|705 bp|Hypothet ical protein|S.pneumoniae|R6|NC_003098.1|ORF|111
ttggaaatgggaaagttaagtagtcacatgtggaggttgaatcagataatctataccaagtacttttggggttatgttcttttttggatattgatttgtttaggattatggtattggttagaaggaaatgatagacttgttatagaaattttaaaagggcctaatctgagtcaaaactcttttttagtcttatctatatggttgcttcattggtttattattcatacattttttctagcagttgtatatcgtagaagagcatccgatttctttatggaagtgattcgattttcttctattaagctctggattaggtatcagatttggacctgttttctttatggactcattttaatcatggtaaaagttctagtgattcaatttatgttacagttaccaaactgggatataggagttttgtttatagttgattctttgaatgcttgtgtgttagtcttgttttgctttatgttatacgcactaggagcgaatgtacaaatgaactttgcttgcgttagtttctttttactcatgattgtgtttggtggtctatttgtaggaaatcgaactaattatctattttatattttgaatcgagggaatggagatataggacgagatttatttcttcagttgctatttttagtctttctttttmaaagyattttctatttcactcgtcaaaagaggaggtttatagaaykaactaat

SEQ ID NO: 5438 - DNA, 180 bp, Streptococcus pneumoniae
  misc_feature (1)..(180): tiling:Spneumo1:WAN024DZ7; Cluster includes WAN0243D6 spr1 883||15903924|NP_359474.1|1860467..1860646|-|180 bp|Hypoth etical protein|S.pneumoniae|R6|NC_003098.1|ORF|110
ttggaacatctggtcgttctttcttttatttyttcaaaatttttagaatgtggcattttacgcaaacgtttgaattytgataaaaattggagaaattcgacaaaaaaacttgaaaaaaacgaaggtaagcgttatgatagaaaagaagaaatattggaggaagaacatgtcacatattaa

SEQ ID NO: 5439 - DNA, 370 bp, Streptococcus pneumoniae
  misc_feature (1)..(370): tiling:Spneumo1:WAN024CQA; Cluster includes WAN023MF6 3142 17_73||||38621..38962|-|342 bp|EGAD orf prediction|S.pneum oniae|R6|NC_003098.1|ORF|220
ttggaactccgattgctattttccttgaatgattttaaccacatctcctacgttttggagttggtcaatttcttcatcgctgatttcgatactaaattcatcttccagagtcaagataaactccatcaagtcaacagaatccgcatccaaatcgtctttcagactcaaggattctgtcacgacaaagtcctctccctgtcgctcttggataatggtcacaatacggtcaaaaatttctttttctgtcatctcttttattctcctgaaaattcacgcgcagtctgggcaaccacgtctgtttctagcatggtacggatctgacgaatcgtactataaacagccttggcatcgcttgagccatgagtcttga

SEQ ID NO: 5440 - DNA, 255 bp, Streptococcus pneumoniae
  misc_feature (1)..(255): tiling:Spneumo1:WAN024GCK; Cluster includes WAN023LRO 3144 76_1292||||683396..683650|-|255 bp|EGAD orf prediction|S.p neumoniae|R6|NC_003098.1|ORF|110
ttggaactggtagtagtcaccagagtaacgcgtcagctgttgattttccacatgatagacaatattaataacgtcattgaggaatggaatatcgtgcgaaatgagaacaaaggcattctcatagttttggagatagcgcttgagccaatcaatatgctcagcatccaagtagttggtcggctcgtccaacagcaagatatcaggcttttcaaggagaagttttgccaaaagcaccttggttctttgcccacctga

SEQ ID NO: 5441 - DNA, 453 bp, Streptococcus pneumoniae
  misc_feature (1)..(453): tiling:Spneumo1:WAN024DTW; Cluster includes WAN023KBB 3156 72_3745||||2023878..2024330|+|453 bp|EGAD orf prediction|S .pneumoniae|R6|NC_003098.1|ORF|110
ttggaagatttcagtttcgcctggagcttcatcagttccagcaaacatagatccaagcataacagcatttccacctgcagcaagtgcttttacaatatctccagaatacttgatcccaccgtcagcaataatcgttttaccatattcgcgcgcaacagctgcagcatcgtagatagctgttacttgcggaacaccaacaccagcaatcacacgagtagtacagatagaacctggtccaataccaaccttaacaacgtctacacccgcttcataaagggcacgtgcaccttcagcagtagcaatatttccagcaatcaaagtccgatctgggaaatgagcacgaatctcggcaattttacgcaagacacctgcagaatgaccatgtgcagtatcaataacaatcgcatccgctcctgcctcaaaaagagcctctgcacgttcaaatgtatctga

SEQ ID NO: 5442 - DNA, 78 bp, Streptococcus pneumoniae
  misc_feature (1)..(78): tiling:Spneumo1:WAN024EZR; Cluster includes WAN023SA3 NC_0 03028.1_1887||||1422449..1422526|+|78 bp|Glimmer 2.02 orf prediction|S.pneumoniae|TIGR4|NC_003028.1|ORF|010
ttggaagcgtttaataaaaattatttccattttgctaaatttcaagttcaagttagccatccagaagtcttctctggg

SEQ ID NO: 5443 - DNA, 273 bp, Streptococcus pneumoniae
  misc_feature (1)..(273): tiling:Spneumo1:WAN024DHD; Cluster includes WAN0244F5 spr0 513||15902557|NP_358107.1|511419..511685|+|267 bp|Conserve d hypothetical protein|S.pneumoniae|R6|NC_003098.1|ORF|111
ttggaaggatgtccatctgagctctttagcaaggaggaaatccttgaaagtgatatgcgagtggctatcatgagcgagttgattgaggctaggtatgaacaaggaatcagtcagaaaaagctggaagaagtcagtggartragycagcctgtyatagctaggatggagacaggwragasyagtcywcagttggayacrgtcttaaaagtyctarcyagtytaggaaagacactagcartcgtycsacttgaacagggraaaagtykaactaat

SEQ ID NO: 5444 - DNA, 524 bp, Streptococcus pneumoniae
  misc_feature (1)..(524): tiling:Spneumo1:WAN024ETX; Cluster includes WAN0244IL spr0 389||15902433|NP_357983.1|386914..387126|+|213 bp|Hypothet ical protein|S.pneumoniae|R6|NC_003098.1|ORF|110
ttggaagtacggcttccgagcagggtaatctttcaaaaaagtacgatgagaaacacaaaaaaactaagacaatttggaatatttttgcttattattttactatctacctatttaccacaaacaattggattgtatgtgacgatcattttagggttaggagctgatgtctattctcttattttaacaatgggattagtgggaagtttccttctattaatttggaggttaaaaaagaaaaagatgctctttatctttgagaaaaagagctggaactggtcatttgtcttctacttatttgcaacttatgtggtttatcagattctcggtaatttttgggcacgctatgctcatttgattaatcataggaatattcatgatgagtattttaccgtgsttytttcaaatggacaaccaacctttttatcgactatcttatcttttgtcctgcctgtaatcatcgrtcctgtttttgaggagactcttgatagagggtattttatgaataccttctttccctarctaat

SEQ ID NO: 5445 - DNA, 384 bp, Streptococcus pneumoniae
  misc_feature (1)..(384): tiling:Spneumo1:WAN024FIO; Cluster includes WAN023KYZ 3131 69_2671b||||1423039..1423422|+|384 bp|EGAD orf prediction| S.pneumoniae|R6|NC_003098.1|ORF|110
ttggaagttaagaagctgaatcccaacaacggtactggcaatctcaacaagaaccaagtcctcatcttcgaattttttatcattacgccaaataatcaaagaaccaaggcgaatccccgatacatgaatcggtgcaatagtcgtcaagccatctggaaaatcatctctactctcaayagggaaaatactcatatcatgctcaacaggcaagtttgcttctgtttcgtaaatcatattagccccttgaacgtagtcatctgggaaaatcttagtttggaagaattgctctacgcgatctgtatttgttttataacgcataaaatagccaagcagacgtcccttactattgataatgcaggcattgcaatgaataatatccgctaa

SEQ ID NO: 5446 - DNA, 81 bp, Streptococcus pneumoniae
  misc_feature (1)..(81): tiling:Spneumo1:WAN024DOL; Cluster includes WAN023SJG NC_0 03098.1_1624||||1273674..1273754|-|81 bp|Glimmer 2.02 orf prediction|S.pneumoniae|R6|NC_003098.1|ORF|110
ttggaatacatgaaagttcttgaaaattttcatgggtttctagctaaggaagtaggaaaagtatgtatccagatgatagtt

SEQ ID NO: 5447 - DNA, 2435 bp, Streptococcus pneumoniae
  misc_feature (1)..(2435): tiling:Spneumo1:WAN024GHO; Cluster includes WAN0244F4 spr0 514|metE|15902558|NP_358108.1|511802..514195|+|2394 bp|Tet rahydropteroyltriglutamate methyltransferase|S.pneumoniae| R6|NC_003098.1|ORF|221
ttggaatatagctgtaaagtaagaattacaaaggatttgagacgtttgcttcaagtctttttcttttgtccgaaacagatatatagtttcaaactatatcaaascctaattttttacaattatacagacgctttcttttctgttaagatagtttcaacaacaaattttggaggacacatcatgtcaactacaatcrtcggtttccctcgtttgggcgaattccgtgaattaaaatttacaactgaaaaatactttagaaaagaaatctcagaagaagaactyytwgcagcmgcaaaagacttgcgtgctaaacactggaacatygtcaaagaaaaaggcatcactgaaatyccatcaaatgacttttctcactatgayaacttcctagatgcggctttccttttcaacgtrgtgcctgcmtcmgttcaaaacttggacttgtctgaccttgagcgctacttcgctttgggacgtggttaccagggagaaaaaggggacgttcgcgccctyccaatgaagaaatggttyaacactaactaccactacatcgttcctaaatttgaaaaagacactcaagtmaaaytkgcwggtcacaagattttygatgagttycaagaagcmaaagaamttggattgaacactcgtcctgttcttgtaggtccmttcactttccttcaattgtcagactttgaagaaggcgtgaaagcagacgacttcgtagatagcttwgtggytgcttaccaagaagtttttgctaaattggctgamcttggtgcgactygcatccaattggatgaagcggctcttgtaaaagacttgacagctgaagaaaaagctctcttcttgaayctttacaacaaactcttggctgacaaaaaaggtcttgaagtcttgyttcaaacttatttcggtgatgttcgtgacgtatacgctgaccttgtaaacttrccagtagatgctatcggtyttgactttgttgaaggtaagaaaactcttgaactmgttaaaggtggcttcccagctgacaagactctctatgyaggtattgtcaatggtaaaaacatmtggcgcaacaactaygaaaagagcttgrctgttcttgagcaaatyccagctgaaaacatcgttttgacaagctcttgctcacttcttcatgtgccatttacaactgctaatgaagaatttgaaccagcactcttgaaccactttgcctttgcagttgaaaaattggatgaaatccgtgacttggatgctatccgmaatggtcaaggttcagaagctcttgcagccaacaaagaactctttgcgactgagcgtgttggtgaaaatgctgaacttcgtgcgcgtatcgctggcttgacagacryagactacactcgtttgccagcctttgcagaacgtgaagctatccaagaagaagctttcaaacttccagctcttccaacaacaacgattggktcattccctcaaacwaaagaagttcgtgccaaacgtytggcttaccgtaaaggtgaattgtctcaaaaagagtmmgrygctttccytgstgaaacgattgacgaatggatcmagtggcmagaagatattgactttgatgtccttgttcacggtgaatttgagcgtaatgacatggttgagtacttcggtcaaaacttgtcaggatacctcttctctaaaaatggatgggtacaatcatacggtatgcgtggggtaaaaccaccaatcatctggggtgatgtcactcgtcttaacyctatcactgttaaatggtctagctatgcacaaagtcgtacaaacaaacctgttaaaggtatgttgactggacctgttaccatccttaactggtcattcccacgtgaagacatctctatcaaggattcwactctycaaatcgcccttgctatcaaggatgaagtrcttgaccttgaagctgctggtgtgaaaatcatccaaatygaygaggctgctcttcgtgaaaaattgccactccgycgtagygactggtacgaagaytaccttgactgggcwattcctgccttccgcttggtacactcaacagtagcgycagacacacaaatccacactcacatgtgttactcagaatttacagatatcatcccagctatcgataacatggatgcagacgttatttcctttgaagcyarccgttcaaaccttgaaatcttggacgaactcaaagcgaaaaacttccaaacagaagtgggacctggggtttacgatatccactcacctcgtgtaccaaatgaaggcgaaatcgacaacacaatcgaagccatccttgctaaagtgccaagcaagaaagtttggatcaaccctgactgtggtttgaaaacacgtggtatcccagaaacaaaagaaagcttgatccgccttgttgaagcagctaaagctgcgcgtgagaaattgtaactaat

SEQ ID NO: 5448 - DNA, 1065 bp, Streptococcus pneumoniae
  misc_feature (1)..(1065): tiling:Spneumo1:WAN024B6F; Cluster includes WAN0244PP spr0 133|IS1167-truncation|15902177|NP_357727.1|140419..140970| -|552 bp|Degenerate transposase (orf2)|S.pneumoniae|R6|NC_ 003098.1|ORF|321
ttggaatgttttggctctataatttctgtagtgggtaatcccaccccaggaattatagggtcgtttcttgtagaaaaaaagccccatatgacctataatgaaaagcgtctaaccaactcattagaaagggttcatatggaacaacttaagaataccacagatttgctcggattgraagacaaaaatatcaaaatcttgtctgttctgaaataccaaacccatctagtcgttcaggcaaagttggattcccccgctcctccttgtcctcattgtcaagggaagatgatcaaatacgacttccagaaagcctctaaaattccgcttctcgactgtcagggtttacccacggtactrcatctcaaaaagcgccgctttcagtgcaagaattgccttaaggtggtcgtttctcaaacatccattgtcaagaaaaattgccagatttccaacatggtgagacaaaaaatcgctcagctcctccttgaaaagcagtctatgactgagattgcccacagattggcggtctcaacttccascgtcatccgaaaactgagggaatttaagtttgaaaccgattggaccaagttgccaaaagttatgagttgggatgastatagcttcaaaaagagcaaaatgagcttcattgcccaagattttgagtccaaatccatcctcgcaattttagacgggcgaactcatgcggtgattcgaaaccatttccarcgctatcagagagaggttcgggagctggtcgaggtcatcaccatggacatgtacagcccttattatcggctcgctaagcaactctttccaaaggcgaagattgttcttgaccgcttccacattgtccaacatctgagccgagctatgaaccgagtacgaatccaaatcatgaaccaatttgaccgaaaatccttggagtatcgggcgctcaagcgcttttggaaccctcgctttttcgtttctaggctcgggctaaatcagtccactggactgatttactacrccagkatagcttcaagctctgtcagaaacgattctatcagcccacgtttcgaatgcacttaa

SEQ ID NO: 5449 - DNA, 252 bp, Streptococcus pneumoniae
  misc_feature (1)..(252): tiling:Spneumo1:WAN024GJN; Cluster includes WAN023LZJ 3131 50_892||||472463..472714|+|252 bp|EGAD orf prediction|S.pn eumoniae|R6|NC_003098.1|ORF|110
ttggaattctatttttaccttcaaattcgctgttcagatgaacgatacctttacttggrgmggttaaggtattgttttcyaarcgctgtgtsgcttgatctagttgtacttttaattctgttaattgrttctccacrgttagttgttgctgwgargctgtytgtaaaaaytgagtgcggagtacttcaattttggytgctaaactrttatcataagttgctacacttccgataccagcttgctgaattttga

SEQ ID NO: 5450 - DNA, 108 bp, Streptococcus pneumoniae
  misc_feature (1)..(108): tiling:Spneumo1:WAN024DP4; Cluster includes WAN0242F1 SP11 50||15901015|NP_345619.1|1075242..1075343|-|102 bp|hypothe tical protein|S.pneumoniae|TIGR4|NC_003028.1|ORF|111
ttggaatttttcatcaccctatattataccatgattagcctcgtaaatctgttaaaatatttaggccatcctttcttttcttcatcatctgctaaatctctaactaat

SEQ ID NO: 5451 - DNA, 141 bp, Streptococcus pneumoniae
  misc_feature (1)..(141): tiling:Spneumo1:WAN024DGS; Cluster includes WAN0244E4 spr0 550||15902594|NP_358144.1|550378..550512|+|135 bp|Conserve d hypothetical protein|S.pneumoniae|R6|NC_003098.1|ORF|110
ttggacaaagatcgcttgcattatattatttgcaaatctggaatgagatcggcgcgtgcttgccaattcctattagaacaaggttataatgttatcaatgtccagggtggcatgttagcctttgaagaacttctaactaat

SEQ ID NO: 5452 - DNA, 315 bp, Streptococcus pneumoniae
  misc_feature (1)..(315): tiling:Spneumo1:WAN024E2X; Cluster includes WAN023KJO 3157 49_3381||||1812591..1812905|+|315 bp|EGAD orf prediction|S .pneumoniae|R6|NC_003098.1|ORF|110
ttggacaaggtcacggaagtccacttctggttgctcgtagaagagccacattactttggcagcatccattggagacccaccaccgagtgcgatgatggtatctggtttgaaggcacgcataatctcagtaccacggtttacagttgtgatatctggatccggttctacatccgcaaagatttggtaaacaaccttattgcgacgaaggtccagttgttcgatgatacgatcaaggaaaccaagctctaccatggcatggtcagtaacgatcatgacacgttcaacgtcacgacatttttgaaggtattgaattga

SEQ ID NO: 5453 - DNA, 246 bp, Streptococcus pneumoniae
  misc_feature (1)..(246): tiling:Spneumo1:WAN024GOB; Cluster includes WAN023LDX 3154 07_2034||||1096336..1096581|+|246 bp|EGAD orf prediction|S .pneumoniae|R6|NC_003098.1|ORF|110
ttggacaccacgacccccacgtttttgagcagtgaactcgtcctgatccaaacgcttaatgtagcctctgttagaaagggtaatcaagacatccgattcttcaatcaagtcctcatcctcgagactcaagacctgtccaaycatcaactctgtacggcgyttatcagaaaatttacgtttaacttcatccaattcgtctttgataatttgagaaacacgttcaggcttagcaagaatatctgctaa

SEQ ID NO: 5454 - DNA, 255 bp, Streptococcus pneumoniae
  misc_feature (1)..(255): tiling:Spneumo1:WAN024G2I; Cluster includes WAN023LDU 3154 08_2039||||1100863..1101117|+|255 bp|EGAD orf prediction|S .pneumoniae|R6|NC_003098.1|ORF|110
ttggacataaaacctcgtttaagaacttctctagcttttatctggcgaggagtggttagaactgcctttgcatcaatttcaaccatcttaccagcacggtcttcggcaataattggaaagaagtttaataattctctaatattttcttcgcgtgtagctgaagttcctctaccagctgcagttacaagcrataagttgttggcaaactcatcaaagagaatcaaggttctttccggcgcaaagtcaaatacatag

SEQ ID NO: 5455 - DNA, 1805 bp, Streptococcus pneumoniae
  misc_feature (1)..(1805): tiling:Spneumo1:WAN024CQY; Cluster includes WAN0242AP SP13 17||15901171|NP_345775.1|1240552..1242327|-|1776 bp|v-type sodium ATP synthase, subunit A|S.pneumoniae|TIGR4|NC_0030 28.1|ORF|021
ttggacttagtaaggagaataactttgactcaagggaagattataaaagtatcgggacctctagttattgcatcaggtatgcaggaggctaatattcaagatatttgccgtgtaggtaagctagggttaatcggtgaaattattgaaatgagaagagatcaggcatctatccaagtctatgaagaaacatctggtcttggtccgggagaacctgttgttacaactggagaacctctctcggttgaattagggccaggattgatttctcaaatgtttgatggcatacaacgcccattagatcgatttaaattggctactcataatgattttctagttcgtggggtagaagttccaagtttggatagagatattaagtggcattttgattccactatagcaattggtcaaaaagtgagtacgggtgatattcttggaactgtcaaggaaaccgaggtagttaatcataaaattatggttccttatggagtatctggagmagtcgtttctattgcatctggcgattttacaattgatgaagttgtatatgaaataaaaaaattggacggtagtttctataaaggaacgcttatgcaaaaatggcctgtccgcaaggcgcgtcctgtttctaaacgtttaattccagaagaaccattaatcacaggtcaacgagttattgatgcattctttccagtaaccaaagggggagctgcagcagttcctggaccgtttggagcaggaaagacagttgtacaacaccaagtagctaaatttgccaatgttgatattgttatttatgtcggttgtggagaacgtggaaatgaaatgacggatgtactgaatgagtttcctgagttgattgaccctaataccggacaatcaattatgcaacggacagttctgattgctaatacttcaaatatgcctgttgctgctcgtgaggcttcaatttatacaggaattaccatggctgagtattttcgtgatatgggctactctgtcgccattatggctgattcaacttcacgttgggcagaagcgctacgtgaaatgtcaggacgtctagaagaaatgcctggtgatgagggttatcctgcttatctgggaagtcgtatcgctgaatattatgaaagagcaggacgttctcaggttctagggcttccagaacgtgaaggaacgattactgctattggagctgtatcgccacctggtggagatatttcagaaccagttactcaaaacactttacggattgtgaaagttttttgggggcttgatgctccgttggcacagcgacgtcattttcctgcaattaactggcttacatcttattcactatataaagacagtgtgggcacttatatagatggtaaagagaagacagattggaatagtaaaataactcgtgcgatgaactacttacaacgggaatctagtttagaggaaattgttcgtcttgttggaattgattctctgtctgataatgaacgactaacgatggaaattgctaaacaaattcgagaagattatttgcaacagaacgcttttgattcggtagatacattcacttcgtttgcaaaacaagaagcaatgctaagtaatattctcacttttgctgatcaggcaaatcatgctttagagttgggttcttactttacagagattatggaaggtaccgtggcagttcgagaccgtatggcgagaagtaaatatgtttcagaagatagattagatgaaatcaaaattatatcaaatgagattacacatcaaattcatttgatattagaaacaggaggtctataactaat

SEQ ID NO: 5456 - DNA, 105 bp, Streptococcus pneumoniae
  misc_feature (1)..(105): tiling:Spneumo1:WAN024GHP; Cluster includes WAN023X3R AX56 7846.1_1||||1..105|+|105 bp|Glimmer 2.02 orf prediction|S. pneumoniae||AX567846.1|ORF|000
ttggactttggctattccaagttcctctttcaaaaggtggcagtgcatttaatgcgtccctatgagagcttatttttgcaagtgctccatgacgcactaactaat

SEQ ID NO: 5457 - DNA, 1007 bp, Streptococcus pneumoniae
  misc_feature (1)..(1007): tiling:Spneumo1:WAN024B5Y; Cluster includes WAN0244L4 spr0 298|regR|15902342|NP_357892.1|298847..299914|+|1068 bp|Tra nscription regulator, member of GalR family|S.pneumoniae|R 6|NC_003098.1|ORF|111
ttggagaagaaactgaccataaaagacattgcggaaatggctcagacctcgaaaacaaccgtgtcattttacctaaacgggaaatatgaaaaaatgtcccaagagacacgtgaaaagattgaaaaagttattcatgaaacaaattacaaaccgagcattgttgcgcgtagcttaaactccaaacgaacaaaattaatcggtgttttgatyggtgatattaccaacagtttctcaaaccaaattgttaagggaattgaggatatcgccagccagaatggctaccaggtaatgataggaaatagtaattacagccaagagagtgaggaccggtatattgaaagcatgcttctcttgggagtagacggctttattattcagccgacctctaatttccgaaaatattctcgtatcatcgatgagaaaaagaagaaaatggtcttttttgatagtcagctctatgaacaccggactagctgggttaaaaccaataactatgatgccgtttatgacatgacccagtcctgtatcgaaaaaggttatgaryattttctcttgattacagcggatacgagtcgtttgagtactcggattgagcgggcaagtggttttgtggatgctttaacagatgctaatatgcgtcacgccagtctaaccattgaagataagcatacgaatttggaacaaattaargaatttttacaaaaagaaatcgatcccgatgaaaaaactctggtatttatccctaactgttgggccctacctctagtctttaccgttatcaaagagttgaattataacttgccrcaagttgggttgattggttttgacaatacggagtggacttgcttttcttctccaagtgtttcgacgctggttcagccctcctttgaggaaggacaacaggctacaaagattttgattgaycagattgaaggycgcaatcaagaagaaaggcaacaagtcttggattgtagtgtgaattggaaagagtcgactttctaactaat

SEQ ID NO: 5458 - DNA, 336 bp, Streptococcus pneumoniae
  misc_feature (1)..(336): tiling:Spneumo1:WAN024G5C; Cluster includes WAN02440P spr1 033|serB-truncation|15903077|NP_358627.1|1016262..1016591| +|330 bp|Phosphoserine phosphatase, truncation|S.pneumonia e|R6|NC_003098.1|ORF|101
ttggagagattagcaaaatcccttggtattgcctatttcactgccaacmagcttgaagtcaaagaaggtcttttwacaggaaaattagttggacaaattataagtccccaggtcaaaaaararactctggaaaaatggagaaagaaactaaaactttctaaagaaagaasggtggcaatcggtgatggggtyaataatctattaatgttgaagtckgcgragttaggaatcgccttttgtkccaaagaartgctcwaaaaagwwatwccwcatcatgttgacaagagggattttytagaagttctycctttgattgactgtttagaaykaactaat

SEQ ID NO: 5459 - DNA, 2241 bp, Streptococcus pneumoniae
  misc_feature (1)..(2241): tiling:Spneumo1:WAN024EY4; Cluster includes WAN0243O4 spr1 487|relA|15903530|NP_359080.1|1462935..1465157|-|2223 bp|G TP pyrophosphokinase|S.pneumoniae|R6|NC_003098.1|ORF|111
ttggagagtagagatgccgaaagaagtgaatttaacaggcgaagaagttgtcgctttaaccaaagaatatttaacggaagaggatgttcattttgtccataaggccttggtctatgctgttgaatgccacagtggtcaatatcgcaaatcaggcgagccttatatcattcaccctatccaagtggcaggtattttagctaagctaaagctggatgctgtaacagtagcttgtggattcttgcatgatgtggtggaagatacagatgcgacyttggacgatttggaaagagagtttggtcctgatgtgcggrtgattgttgacggagttaccaagcttggcaaggtcgagtacaaatcratcgaggagcaattagcggaaaatcatcgcaagatgctcatggccatgtctgaggacatccgcgttattttggtcaaactgtctgaccgcttgcacaatatgcggaccctgaaacatcttcgaaaagacaagcaggagcgtatttmcaaagaaaccatggaaatctatgccccrcttgcccatcgtttggggatttccagtgtcaaatgggaattagaagacttgtctttccgttatctcaatccaacggagttttacaagattacccatatgatgaaggaaaagcgcagggagcgtgaggccttggtggatgaggtagtcacaaaattagaggagtatacgacagaacgtcacttgaaagggaagatttatggtcgtcccaagcatatttactcaattttccgcaaaatgcaggacaagagaaaacggtttgaggaaatctatgatctgattgctattcgttgtattttagatacccaaagtgatgtttatgccatgcttggttacgtgcatgaattttggaaaccgatgccaggtcgcttcaaagactatatygccaaccgcaaggcyaatggttatmagtctatccatacgactgtttatggrccaaaagggccgattgaattccagattcgaaccaaggaaatgcacgaggtggctgagtacggggttgcggctcactgggcttataagaaaggtataaaggggcaagttaacagcaaggaatcagctattggaatgaactggatcaaggagatgatggagctccaagaccaggctgatgatgctaaggaatttgtggactctgttaaggaaaactatytggctgaggagatttacgtttttaccccagatggagctgtccgttcycttcccaaagattcaggaccgattgattttgcctacgaaatccataccaaggtcggtgaaaaagcaactggtgccaaggtcaatggccgcatggttccactgacaaccaagttaaagacaggggatcaggttgaaattrtcgccaacccgaactcctttggacctagccgtgactggctcaatatggtcaagactagcaaggcgcgcaataagattcgccagttctttaaaaaccaagataaggaattgtctgtcaacaagggtcgtgagatgctgatggctcagttccaagaaaatggctatgtggcaaataaatttatggacaagcgccacatggatcaagttctgcaaaagaccagttacaagacagaagactccctctttgcggccattggttttggggaaatcggtgcgattaccgtctttaaccgtctgactgaaaaggarcgccgtgaggaagagcgtgccaaggccaargctgaggcagaggagcttgtcaaaggtggcgaggtcaaggttgaaaataaagaaacyctcaaggtcaagcatgaggggggagtggttattgaaggtgcttctggtctcctagtgcggattgctaagtgttgtaaccccgtrcctggtgacgatattgttggctacattaccaagggtcgtggtgtggctattcaccgtgtggactgtatgaayctgcgtgcccaagaaaactacgagcaacgtctccttgatgtggaatgggaagaccagtacyctagctcaaataaggagtatmtggcccatatcgatatctacggtctcaaccgtacaggactgttgaacgatgtactgcaagttctttcaaatacaaccaagaatatttcaacggtcaatgcccaaccaaccaaggatatgaagtttgctaatatccatgtgtmcttcggtattgccaacctctctacactgaccacggttgtcgataaaattaagagtgtgccagaagtttactctgtcaaacggaccaacggctarctaat

SEQ ID NO: 5460 - DNA, 680 bp, Streptococcus pneumoniae
  misc_feature (1)..(680): tiling:Spneumo1:WAN024CBG; Cluster includes WAN0244PN-3 sp r0135|epsG|15902179|NP_357729.1|142595..143809|+|1215 bp|G lycosyltransferase involved exopolysaccharide (EPS) synthe sis|S.pneumoniae|R6|NC_003098.1|ORF|122
ttggagagtataataaaaaataagaagatagttgcaataaataacggaattaatgtatcaaatagcgatttagatgtagtaggtgttcaagactttaaaaaagaattttgtattccaaataacaaaaaaatcatttgttatgttggaaggttggatccagaaaaaaggccggatagattccttgaatttgcagaaaaattatttttagtcagagaagatgtgatttttattatggctggaaatggtagtatgtgggctgctttgaaagaaaaaatttgccatttgaaatgtagarataatttcaggttacttggtgaaatctatccagctactatagtttaccaaatatcggatttattgtatattccttctgatacagaaggaatacctatgtgtgttttagagtcaatgtcacaaggaactycggttttagctagtaatgttggcgggttaagtgaaattattgaacatagggttgatggatttttatttgagaaggaagatgttgagggagtgtgtgcttgtgctaattttttactcaatgattctgagtatttgaaatatataggtgagaatagtaaatcaaaaataagaaaacatkwkwstrtrcaaaaaatgtttgtagaaaccatgagagtatatgatgaattattagagaagagtagtcatggatarctaat

SEQ ID NO: 5461 - DNA, 986 bp, Streptococcus pneumoniae
  misc_feature (1)..(986): tiling:Spneumo1:WAN024ERS; Cluster includes WAN0243EQ spr1 826||15903868|NP_359418.1|1801138..1802118|-|981 bp|Conser ved hypothetical protein|S.pneumoniae|R6|NC_003098.1|ORF|2 21
ttggagagtccttttgggatgaacatgtcawrkrywaswawagatgggcaagaaatggatctgagtcaaacgatgccttcttatgctcaagtagtgagtctttatgatgatacaagtatctctgttagtaataatgagacggacaaagtgttgrctggmtccctctatactgawacaaatgaacagggattaacgattccaagcagtttactaaaaaattggaatgaacagacaggaaaaaatttgacarctaatgatcttattggcaaatcagtctcagccagcattgtagaaagtgctgccgaarctagtaagattgctcaatttcaaacgaagattgtacgtgtaatcaatgatgaagatgacatggaggacagcaacagtttcatgctgtctcatcaaatggaaacgattttgaaagaggctggatttacgaaagctgtatcttattttatcttggaactcaaagatccatcacagacaaaagtagtaacagaagaattacagaaaaataagaagtatactgtgytttctcaacagagagttcttgatattgtgattacctttattcgtgttattcagggattattgattgtgctttcatcacaagctattgtggtagcagcggttatgattggtatcattatttacatcaatatcatgcaacgttccaaggaaataggtgtcatgaaagcagttggttatcagaatcgtgrtgtcaaaggaatttttatttacgaggctatctggattgtaggcatcgccttgctgctggcatttttggttgcacaaggggtgggaagtttggcgaatgcgattgtaagtcacttttacccatccatcactaaggtttttraattaaatcttttatctgttttaggaactctagttttcgcwctmttrcttggytatgtmtcagcctacttcccrgcrcgtaarattagtaaaatggaycctrtagaatcgytaygctatgaatarctaat

SEQ ID NO: 5462 - DNA, 981 bp, Streptococcus pneumoniae
  misc_feature (1)..(981): tiling:Spneumo1:WAN024FM5; Cluster includes WAN023P1E pne6 1_16||||10410..11390|+|981 bp|Type 33B capsule operon, Gli mmer 2.02 orf prediction|S.pneumoniae||WAN01UCGA|ORF|000
ttggagagtgaaatcttgaataaaatcaaaaaaatgacaagagaatacatgaaattgaaaaaaattttctctacccaaattgcaaataatatgctcttagaaaagatagctgcacgactatcaagatataattttttgcatggtttagtagtatttatttactctaaaaaacataaggatattttagattttctaaaaaaggattttgatatatttttatctacctattcttatgatttcgaaaaatctaatgagcaaaatggaaaaaagattttttcattatggcttcaaggatatgaaaatgctccagaaattgttcaaaaatccatacaaacccaaaaagaatatgctgaaagatttggttatgaatacatattgttagataagtcaaatttagagacatttgttaaaattcctgaaaatattgctagaaaatttgaagatgggaaaatagatgcaataaaatattcagatatcattagaactttcttgttatttaaatacggtggtatctggttcgatgcaactatttatataaaaacagattcaaagttaagttatttagatgatgagttttatactattcgtgcgaagggagatgaaacctatcctaagtatgttgcggatggacgttgggccttgttttgtatagctggatatcgtaatgggattgtattcgattttttaagaaaatttcaagttgaatatttctctaaatatgacttaccaataaattactttttgatagactatttaatggagttaggctatgagtataatccaataattcgaaaacaggttgataaggtaattaccaacaaccaagatctctattttttagtaaataatttttctaatatgtacagggatgaggattggaaaaaagtattagaaacaacaaatatttttaaatgyagctataaaatatatgtaagcgataaattggacacatacttttataaattgaaaaatcaaactcta

SEQ ID NO: 5463 - DNA, 267 bp, Streptococcus pneumoniae
  misc_feature (1)..(267): tiling:Spneumo1:WAN024CRE; Cluster includes WAN023L1X 3131 61_2548||||1358797..1359063|+|267 bp|EGAD orf prediction|S .pneumoniae|R6|NC_003098.1|ORF|110
ttggagataaaattcgatccaaaaacttgccacccaaggtcaccttggtttcaacrgcctctttttcttcatgaccttcttccagactccacaagatttcctgaccacgctcatcatttttcagaaaatgctctagcgctgccaaatgcacacagtagcccctcttttgaaaaraatcacaggcacaaaaaaccaaatcatcctctaaactatagcgcagttcttcttctgcaacgcgagcgtagagccgattgttcttttccttga

SEQ ID NO: 5464 - DNA, 417 bp, Streptococcus pneumoniae
  misc_feature (1)..(417): tiling:Spneumo1:WAN024C58; Cluster includes WAN023M51 3155 28_601b||||309786..310202|+|417 bp|EGAD orf prediction|S.p neumoniae|R6|NC_003098.1|ORF|110
ttggagatggaaggggtcaatcatgttgacatcatcaaggtcagctgtggcagcttcataagccaagttaactggatgatgaaggggaagattccaaayagggaaggtttcaaatttagcgtagccagayttgatgccattgatttggtcgtggtacatattggacatacacgttgccaattttccagaaccrggtccaggagcggttacgacaatcaagttgcgactggttttgatgtagtcgtttttgcccatgccttctggggaaatgatgtgatccatatccgtmggatatcctttgattggataatgaagataagaatcaattccgtttttctcaagttgrttgcggaaggcatctgcagcgggttggccagcgtattgtgtaatgacaacggaaccaacaaaaatccctaa

SEQ ID NO: 5465 - DNA, 312 bp, Streptococcus pneumoniae
  misc_feature (1)..(312): tiling:Spneumo1:WAN024FG5; Cluster includes WAN023KV4 3130 26_2839b||||1515784..1516095|+|312 bp|EGAD orf prediction| S.pneumoniae|R6|NC_003098.1|ORF|110
ttggagcgaattataggcaaactctcctttttgaattggattgtgtttgagccaagtcaactcaccattttcttcgacacgtgccaagtggaccatcccattttcacgtttcggtccacctgcattactgaggatgatgtattcttttccttcgtgcatcgtatggatagcagacatttgaacatagacatctttaacctgtggataacgtttgatatccttctcccaagtcactcctccgtctttacttgtagcaacctgaagatctccagtcaaaccacgcataaagagtttaacatctccattgtttag

SEQ ID NO: 5466 - DNA, 389 bp, Streptococcus pneumoniae
  misc_feature (1)..(389): tiling:Spneumo1:WAN024FVU; Cluster includes WAN0243VS spr1 211|rplL|15903254|NP_358804.1|1207321..1207704|-|384 bp|50 S Ribosomal protein L12|S.pneumoniae|R6|NC_003098.1|ORF|21 1
ttggaggaaataacaatggcattgaacattgaaaacattattgctgaaattaaagaagcttcaatccttgaattgaacgaccttgtaaaagctatcgaagaagaatttggtgtaactgcagctgctcctgtagctgttgctgcagctgatgcwgctgatgctggtgctgctaaagattcattcgacgttgaattgacatctgcaggcgacaaaaaagttggygttatcaaagttgtacgtgaaatyactggtcttggtcttaaagaagctaaagaacttgttgacggtgcaccagcacttgttaaagaaggcgttgcaactgcagaagctgaagaaatcaaagctaaattggaagaagctggagcttcagttactcttaaataactaat

SEQ ID NO: 5467 - DNA, 2048 bp, Streptococcus pneumoniae
  misc_feature (1)..(2048): tiling:Spneumo1:WAN024ESN; Cluster includes WAN0243FE spr1 802||15903844|NP_359394.1|1772231..1774273|-|2043 bp|Conse rved hypothetical protein|S.pneumoniae|R6|NC_003098.1|ORF| 311
ttggaggaaatgatgaaacgtttatttattttgatttcaatggtattrgtatcgctttatatggtgataacttccgttgaccatcgagaagagattttatttggtaactatccttctrttgatgtgacaggaatgatgayaaatcaaccagtagctagtcgcgaagaggtgacagaggctttgagtcacttggcggtagagcayaatagtctcatygcycgtcgaatcgttgagccaaatgaagctggagaaacacgctttacctatgcmacttatggtgagggaragcttccagaaggtctgaccatttcctccaaggagagtgcagaaacgagtgatttattagggtcttacttgattgtrtcaggaagtttggatggagtgagcttacagaccaccttgaaagarcttggytatcaaggctttgtttcgaatggagaagatccattttcgatagtcttactattgacggccacccctatggtgctactgagtttagctatttttctgctgacctttatgagtctgaccctgatttatcggatmaaatcccttcgtcargcagggattcgcttaatagctggtgagagcttgtttggarttgctctcagaccagtgttagaagatgtgagacagcttatctgctcagtgctggtatccagtcttttgggattggggattctctggtatcaaggtgccttgtttatggcaacggtgcaactggtcatcattgctcttctactytatggattgaccytggcagggatttctaccttactaagtgtcgtcyatctacttggtttacaggaaaatagtctggtggatctattgaaagggaaactccctctcaaacgtatratgacattgatgatggtggggcaactcttagctgtattggtggtcggatcgagtgcgacagctctcctaccccactaccgtgaaatgcaggaaatggagagagctagcaataaatggagccagtcctcagaccgttaccgtctatcctttggttggtctagtgcatttgccgatgaagaaggaacrcgtaaggataatcgtgagtggcagacatttactgaagaacggttagccaatacagactctttttatattatgagcaatgttgacaatttctcagatggagcagaagtggacctagatggcaatcgtctcagtgactacacaccgtcagggaatgttatctatgtctcaccrcgctatctgatagaagaaaagattaccgtttcttcagagtttatggacaagatgcaaaacttgtctgagggagagtttgggctgatcttgcctgagagcttgcgagagcagtctgtctactaccaaggattgtttacagattacctgcaaaayttttcatctgaaagtgtagaagtgacgagtcagaaacactacctcccacaggtaaggctagcttttacagaaacaggacaggaacgtttcctctataatgatgggtacaagacaacacgccagtacctaaaagatccgattattgtagttctaacgccgcaagcgactggarcaagacctgttgcagggatgttgtggggaactacggctaatagtgccttgaaactagatcgatatggagacagcatcacagctctaaaagagmaaggtctgtatcacaaggtttcttacttggtaaaaagccagctattttttgccaaggtactaaatgacaaacgggtggagttttactctctccttattgggacgattttgaccctgtctacggctatcttgttatttgattccatgaatcttctctattttgagcagttcagacgggadcttatgattaaacgtcttgctggtatgacaatctatgagcttcatggcaagtatttactggcgcaaggaggagttctcttgcttggcytagtcctatctagtattttgacaagagatggtttgattagcgctctagttgtagctttgtttacgcttaacgccctcttgattttagtaaggcaggacaaaaaagaagaagctggtagcatggcagtattgaaaggaaaataactaat

SEQ ID NO: 5468 - DNA, 584 bp, Streptococcus pneumoniae
  misc_feature (1)..(584): tiling:Spneumo1:WAN024DI6; Cluster includes WAN0244HD spr0 433||15902477|NP_358027.1|433829..434407|+|579 bp|Conserve d hypothetical protein|S.pneumoniae|R6|NC_003098.1|ORF|111
ttggaggaacctgttatgacaaacacacgtcgactttcgaccattgcaattytatcagccatctcatttgtgctgatgtactttgaytttccgcttttaccagcggcatctttcctcaagatcgaatttagtatcttgccagtccttgtgggtctggtggtcatggatttgcctgskkctctaggagtgctcttgcttcgctcactmttgaarttgcttcttaacagccaaggagtgaatacttacattggtttgccgatgaatatcgtagctttgggagtttttgtcatcgtatttgctttgatttggaaaaaggaacggacaacccttcgtttcctactaggctctctagctggaactrttggtttaaccttggccatgttggttctcaactatgtttatgctgttcctttgtacgctaagtttgctaactttgatattggaaaaattttgggactttccaactacctaatgaccatggtattaccttttaacttgattgarggtgtwatcttttccgtttcattctggttgttgtaygtyctyttgaaaccaaccttaaaacaytatgaragataactaat

SEQ ID NO: 5469 - DNA, 431 bp, Streptococcus pneumoniae
  misc_feature (1)..(431): tiling:Spneumo1:WAN024CO8; Cluster includes WAN0241Y5 SP17 94||15901623|NP_346227.1|1709556..1709981|-|426 bp|hypothe tical protein|S.pneumoniae|TIGR4|NC_003028.1|ORF|020
ttggaggaactgatgaagaacaatgaaagattaggtattaaattaagtagagatagcgttttaggattgagggaagttagaaggctttatttaggcagttcagatatcccagtttctgatggctatgtgattgaagttgcttataaccagatatcacatgagattgatattattgattgggtagagttgaacaagtcaaaaattaagataagtgaaattagtgaaagcgtggatatagatgccactagcttgagaacaactttgactttagacacattagtatatgaaggtatgagagatatacagttaaagttgagagagcttacaaaggggagagtattcttttcatttgtagtgaagttagttttgtttgcttctattttaaagaaaaaagatttactagaaaaatttcaagaaaagtgttaactaat

SEQ ID NO: 5470 - DNA, 354 bp, Streptococcus pneumoniae
  misc_feature (1)..(354): tiling:Spneumo1:WAN024G3E; Cluster includes WAN023LET 3156 18_1996||||1078539..1078892|+|354 bp|EGAD orf prediction|S .pneumoniae|R6|NC_003098.1|ORF|110
ttggaggataaccccacggtaagcatcgtaaacagagtcgaaaatcaaggccttaagtggcgccgtcacatcacccgttggtgctggtactttttctacaatttgctcgaggatttcttcaatcccaataccagccttggcagaagccaaaactgcttcactggcatccaaaccaatcacatcttcaatctctgtacgcacgcgctccggatctgcagccggcaggtcaattttattaatgataggcatgatttccaaatcattatccaaagccagataaacgttggcaagagtttgagcctcaattccttgagccgcatcgaccaccaaaatagcaccctcacaggcagctag

SEQ ID NO: 5471 - DNA, 761 bp, Streptococcus pneumoniae
  misc_feature (1)..(761): tiling:Spneumo1:WAN024FDU; Cluster includes WAN0243KT spr1 607||15903649|NP_359199.1|1583235..1583990|-|756 bp|Conser ved hypothetical protein|S.pneumoniae|R6|NC_003098.1|ORF|2 11
ttggaggctagsatgcarcagtattttgtmaaaggcagtgctatctctcctgtcacyatcgaggacaaggaaaycagtaagcatatgtttcaggttatgcgcttgaaagaagaggatgaggttaccttagtctttgatgatggcatcaagcgcttggcgcgcgtgctggatatggaaaatcgtcagtttgagttggtccaagaattaaatgacaatgtggaactaccagtycaagtgaccatcgcatctggatttcccaagggagacaagctggagttcatcgctcaaaaagtaaccgaactgggkgctagccaaatctgggcctttcctgcagactggtcagttgccaagtgggatggcaagaaattgggtaaaaaagttgaaaaactagaaaaaattgcccttggagcagccgagcaaagcaagcgtaatattgtaccaagtattaaacttttcgagaaaaaagcagattttctagctcagctggaccagtttgactctatcatagtagcctatgaagaatcagctaaagaaggagaagccgctgcgctyytrcaagcrgtcwctggtcttgaaacaggagccaaactgctctttatctttggwccagaaggyggtctctcacctgcagaaatcgaaagttttgaagctaarggagcmgttttggyaggcctaggtcctcgtattttgcgagcagaaacagcaccgctttacgcyttatcagcccttagtgttttagtagaattagagaaataactaat

SEQ ID NO: 5472 - DNA, 407 bp, Streptococcus pneumoniae
  misc_feature (1)..(407): tiling:Spneumo1:WAN024GJC-5; Cluster includes WAN0243S4 sp r1343|tufA|15903386|NP_358936.1|1326964..1328160|-|1197 bp |Translation elongation factor TU|S.pneumoniae|R6|NC_00309 8.1|ORF|331
ttggaggcttttactcaaatggcaaaagaaaaatacgatcgtagtaaaccacacgttaacattggtactatcggacacgttgaccacggtaaaactaccctaactgcagctatcacaactgttttggcacgtcgcttgccttcatcagttaaccaacctaaagactatgcgtctatcgatgctgctccagaagaacgcgaacgcggtatcactatcaacactgcgcacgttgagtacgaaactgaaaaacgtcactacgctcacatcgacgctccaggacacgcggactacgttaaaaacatgatcactggtgctgctcaaatggacggagctatccttgtagtagcttcaactgacggaccaatgccacaaactcgtgagcacatccttctttcacgtcaggttgg

SEQ ID NO: 5473 - DNA, 1416 bp, Streptococcus pneumoniae
  misc_feature (1)..(1416): tiling:Spneumo1:WAN024CEY; Cluster includes WAN023RVZ cont ig_1609_45||||31204..32562|-|1359 bp|Glimmer 2.02 orf pred iction|S.pneumoniae|670|WAN01UDCD|ORF|002
ttggagggatttttactgaatgaacaaacttggttacagcatttaaaagaaaaacgcttggcttatggactatctcaaaaccgtttagctgttgcgactggtattacaaggcagtatctaagcgatattgaaacaggaaaagtcaagccatcagaggatttacagcagtccctttgggaagctctggaacgcttcaatcccgacgctccccttgaaatgctgtttgattatgtaagrattcgctttccgacaacagacgtacagcaggtggtcgaaaacatcttacaactgaaactgtcctattttcttcatgaggactatggtttctattcttattcagagcattatgctttaggcgacatattcgtcctttgctcccatgaactggacaaaggagttctggtggaattgaaaggtcgtgggtgcagacaatttgaaagctatcttctggcacaacaaagaagctggtatgagttctttatggacgttttggtggctggcggtgtgatgaaacgccttgaccttgccattaacgataagacagggattttraatatccctgtactcactgaaaagtgccaacaggaagaatgtatctccgtcttccgcagttttaaaagctatcgcagtggcgaactggtacgcaaagaggaaaaggaatgtatgggaaacaccctctatatcggttcattacaaagtgaagtttatttctgtatctatgaaaaggactacgagcagtacaagaaaaatgatattcccattgaagacgcagaagtaaaaaaccgttttgagattcgattgaaaaatgagcgtgcctattatgcagtccgtgatttactcgtctatgacaatccagagcataccgcctttaaaattatcaatcggtatatccgttttgtagataaagacgattccaaacctcgttctgattggaaactgaatgaagaatgggcttggtttattgggaacaatcgtgaacgattaaaactaaccacaaaaccagagccttactcyttccaaaggacgctgaactggctatctcatcaagttgccccgaccttaaaggttgcgattaaacttgatgaaatcaaccagacgcaggttgtaaaagacattctcgaccatgcgaaactgacagaccgacacaagcagattttgaagcaacagtcagtaaaagaacaggacgtgataacaacaaaaaaaggatatctgtcaaccataccagttgacagatatccaaaaaaagatataatgggagataagacggttcgtgttcgtgctgacttgcaccatatcataaaaatcgaaacagcaaagaatggcggaaacgtaaaagaagttatggaaataagacttagaagcaaacttaagagtgtgttgatagtgcattatcttaaaattttgtataataggaat

SEQ ID NO: 5474 - DNA, 332 bp, Streptococcus pneumoniae
  misc_feature (1)..(332): tiling:Spneumo1:WAN024ERG; Cluster includes WAN02422T SP16 18||15901455|NP_346059.1|1519405..1519731|-|327 bp|PTS sys tem, IIB component|S.pneumoniae|TIGR4|NC_003028.1|ORF|020
ttggagggtatccgtatgaaaattgttggtgttgcagcttgtactgtgggaattgcccacacttatattgcacaggaaaaattagagaatgccgcaaaggtagctggacatgtgattcatgttgagactcaggggacaataggggtagaaaatgaattgagtcaagagcagattgatgcagcggatgtagttattttagcagttgatgttaagatttctggtatggaacgctttgagggtaaaaagattatcaaggttccaacagaagtggcagtcaaatctcccaataaactgattgctaaagctgttgagattgttacgaaataactaat

SEQ ID NO: 5475 - DNA, 917 bp, Streptococcus pneumoniae
  misc_feature (1)..(917): tiling:Spneumo1:WAN024GNP; Cluster includes WAN0244J3 spr0 371|shetA|15902415|NP_357965.1|371275..372186|+|912 bp|Exf oliative toxin A|S.pneumoniae|R6|NC_003098.1|ORF|221
ttggaggttaggatgaaaaaactccccttagtattttcaggttgtttgctaggtttggcaggagctggaaatcttattttagatacgttgccggttctatcccatctttttagtctgaytggtttggttttatggatttactttctaattctgcatctctttaattggaaagaaaccaagcaagaattgaccaagccccctcttttgtcaggaatggcaacctttcctwtggctgggatgattttatcgacctatgtctttcgcgtattctcttatcttcctttggtagcacaagggatttggtggttttcatttctcttggatttgaccttgattgctggttttaccatcaagtttgcttgtccagggcggagggttcatgccactccaagytggacggttctctatgtggggatagcagtggctgccttgacctatcctctggtaggtattatcgaaattgcctatgcgaccttragttttggttttctcttgaccttctatctctatccccttatttatagcgatttaaagaaacatccactcccactagccttgcttggacaagaaggaatctactgtgctcctttctctctactcttggcttctctagttcgagtaggaggaaccagcctgccgacttgggtcttgattgtcatgattttggcttctcaatccttctttttctttgttttaactcgtctgcccaacattttaaaacaaggttttcaaccagccttctcagccctcaccttcccaaccattatcacagcgacctcgctcaagatggctcagggaattttgaaacttccatttctggattacctggtattgrctgaaaccattatatgcctaactattttattctttgtactaggtgmttatctgatttggttacgaaaaaaggtctarctaat

SEQ ID NO: 5476 - DNA, 1129 bp, Streptococcus pneumoniae
  misc_feature (1)..(1129): tiling:Spneumo1:WAN024BFM; Cluster includes WAN0244SG spr0 034||15902078|NP_357628.1|34652..35674|-|1023 bp|Conserved hypothetical protein|S.pneumoniae|R6|NC_003098.1|ORF|320
ttggaggtttttatgtcatttctatcaaaaaatggagcaggtatcttggcctgccttctcatttccatcctatcttggtacttaggaggattcttccctgtgrttggcgcgcccgtttttgccattttcataggcatgctcctacatccctttctctcgtcctataaacaactggatgctggtttgacctttagttccaagaagttgctccaatatgccgttgtcttgcttggttttggtctcaatatctcgcaggtcttcgcagttggccaatcttcactccctgtcatcctgtccactatctcaatagctctgattattgcctacctcttccagcgtttctttgcmctggatacaaaactggctaccttggttggagtaggttcttctatctgtgggggttctgccattgcagcgacagcgccygttatysatgctaaggaaaaggaagtagcccaagccatttccgttatctttttcttcaatgtcttggctgcgctcatctttccaaccctcggcacctggcttcatctatccaatgaaggcttcgccctctttgcagggactgcggtcaacgacacttcctctgtaacggctgccgccagcgcttgggacagtctttaccaaagcaataccctcgagtctgcaaccattgttaaactcacacgtactttggccattatccctatcacgctctttctatcctactggcaaagtcgccaacaagaaaacaagcaaagcctrcaactgaaaaaagtcttcccactttttatcctttactttatccttgcctctctcctcactacactactcacctctctaggtgtgtccagtagtttctttacycctctcaaasaactctctaaattccttattgtcatggmcatgagtgctatcggtctcaaaaccaatctggtcgctatggtcaaatccagtggaaaatccattcwtcwtggagcyawctrmtggattgccatcatcctcaccactcttggtatgcagacccttatcggcattttctaatamtcttcgaaaatctcttcaaaccacgtcaacgtcgccttgccgtaggtatatgttactgacttcgtcagttctatctgcaacctcaaaacggtgtttgagctga

SEQ ID NO: 5477 - DNA, 111 bp, Streptococcus pneumoniae
  misc_feature (1)..(111): tiling:Spneumo1:WAN024GFT; Cluster includes WAN023XU1 AL44 9946.1_30||||17786..17896|-|111 bp|Glimmer 2.02 orf predic tion|S.pneumoniae||AL449946.1|ORF|001
ttggagtatgctcgtgatgttaaaatgaatctatcaaacagaatgtgtaaaaaagtaaaaagggtagccaattccttgatatacaggggattgattatcctttacttgttt

SEQ ID NO: 5478 - DNA, 1409 bp, Streptococcus pneumoniae
  misc_feature (1)..(1409): tiling:Spneumo1:WAN024DCG; Cluster includes WAN024449 spr0 905|yfnA|15902949|NP_358499.1|889898..891301|+|1404 bp|Cat ionic amino acid transporter - APC Superfamily|S.pneumonia e|R6|NC_003098.1|ORF|110
ttggagtcaaagatgaatatatttagaacaaagaatgttagtttagataaaacagagatgcataggcatttgaagttatgggatttgattttgctgggtatyggagccatggtagggacaggygtytttacaatcacaggtactgcagctgcwacacttgctggyccagcmctagtgatttcaatcgttatttctgccttgtgtgtgggattatcagccctcttttttgcagaatttgcctcgcgagtacccgctacaggaggtgcctatagttacctctatgctatcttaggagaattccctgcctggttggctggttggttaaccatgatggagttcatgacagccatatcaggcgtagcttcgggttgggcagcttattttaamggcttgctctctcaatacgggatagccyttcctcaggctttaaatggtacctttaatcctcaagcagggacatttgttgatttattgcctattcttgtcttggtyttggtgacttcgcttgttttaytaaatgccaaggcagccttacgctttaattcgattctagttattttgaaattttccgctttagctctctttgttttagtaggaatttggaatattaagtttgataattggagcaattttgctccttacggttttggacaaatctatggagctagyactggtattatggctggtgcgtccttgatgttcttcggttttttgggatttgaatccatctctatggctgtagatgaagtcaagactcctcaaaaaaatattcctagagggattgtcttatcgctttctatcgtaaccattctctatgccttggtgacccttgttttgactggtgtggttcactatagtcatttaaatgtcgatgatgccgttgcctttgcccttcgtagtgttgggattagttgggcagccaactatgtgtcattagtggctatcttgaccttgattacagtttgtatttcgatgacctatgccctatcgcgtatgatttacagtttagcacgtgacggcttagtgcctgctgcctttaaggaactgacgaagactagcaagrtaccaaagaatgctactatcttgacaggtctagcttcagcagtagcagcaggaatgttcccactagccagtattgcagcctttttaaatatttgtaccttagcctacttgatcmtgytggcttatggtctgattcgcttacggaaagaaaaaggaatgcccaaagctggggaatttaaaacaccattggtacctctgttaccaattttatcgatcatcatttgtttatccttcatgttacagtataatrtgaayacctggattgctttcctagttgcgttgttagtaggaagtattatttacttcacttatggctataagcattctaccatagaagaataactaat

SEQ ID NO: 5479 - DNA, 630 bp, Streptococcus pneumoniae
  misc_feature (1)..(630): tiling:Spneumo1:WAN024CDX; Cluster includes WAN023RTT cont ig_1606_4||||1538..2167|-|630 bp|Glimmer 2.02 orf predicti on|S.pneumoniae|670|WAN01UDD2|ORF|000
ttggarttgactaccaagcaggaaaagcaactaggtcagacgcagtggtttcatgctacattattgagacatttagaatccttaaaaagtggtatagatgttaaatttaatttaggaagtgagctagattttggtcctggtttctatatcacgcctgactttgaacaagctagaaaatttattaacaagcaagttgaagtattaaatcgaagcagctctaataataatatttttgactcagaagaagaagtaggaattatagtagaatttcgtatttcaaattttatagaaatttttaagaaccctgactatcattgtcactattttgcaaaacataaaaagtcagagtcagatttagattttgctgaatttgtcgttcaaaatcgggaaaatccagatgaattacaacaccattttgattttatctatggtgttcagactgatgacaatccaacccaagctttagctcgttttcgtcagaatgaaattacaaaagaagaaatgcttgctgagtttagaaaaccatattcttttaaacaattatccatccacaaccaatctttttgtgatataatgaaaatagagaaggtttatcaatcaaaaacaggagaggagttacaaaaatggcag

SEQ ID NO: 5480 - DNA, 375 bp, Streptococcus pneumoniae
  misc_feature (1)..(375): tiling:Spneumo1:WAN024G2P; Cluster includes WAN023LE5 3156 20_2025b||||1091247..1091621|+|375 bp|EGAD orf prediction| S.pneumoniae|R6|NC_003098.1|ORF|110
ttggataaagaattgaggacgaacaacatacattttttcatactcgtgactgacgtcaacaatccctgtgttaaagtagtcattatcagcctcaagcatggtcaccaaaacggcatactcacagttcttctcccgacggtccttgtccaattccttgtaaaaatctgcattcttgtgcttcttctctgttccgtccgcttcgtttttcatctcaaacatgatagaaatgatttcaactccattttcatcacactcacggaagataaagtcccctttagacccacgcgaagagaccttgttatccttctcaaagtaagcatttggaaaggcgaaactacgaaccttgttaaactcactctctgcatactgttctag

SEQ ID NO: 5481 - DNA, 360 bp, Streptococcus pneumoniae
  misc_feature (1)..(360): tiling:Spneumo1:WAN024F3S; Cluster includes WAN023M2O 3136 11_738||||385279..385638|-|360 bp|EGAD orf prediction|S.pn eumoniae|R6|NC_003098.1|ORF|110
ttggataaattcatcaaaaatgcctgtcgcaaagtccaaggttgtcaagcgactctgctcacgcgcttctctgactatttttgcaatattcatctaggactccctccatgcaatctgactaggctagcaatcgtatctggtaagtctcttcttttgacaatagcatccacaaagccatgttctaataggaattctgccttttggaaatcctcaggcaagctttcacgaaccgtattttcaatcacacgacgcccagcaaaaccaaccaagctctgtggttcagccagaatgatatcgccttccatagcgaaagaagctgtcacaccaccagtcgttggatctgtcaaaatggtcaggtaa

SEQ ID NO: 5482 - DNA, 423 bp, Streptococcus pneumoniae
  misc_feature (1)..(423): tiling:Spneumo1:WAN024B4X; Cluster includes WAN0243TC spr1 299|IS1381-truncation|15903342|NP_358892.1|1292117..129235 6|-|240 bp|Degenerate transposase (orf1)|S.pneumoniae|R6|N C_003098.1|ORF|122
ttggataaggctttaagcctttctaagctttttttattgacagtatcaggatatctttttcaaaattttggtttgttagataatgaaaatgtttctactaatctagatttaggattagtaaatcgtaaatgtaattatatagaaagtaagcgcgtcataacaaggtatctatcattcatggagytcctcctgtatactattagtaaagtaaaactattggaggatattttaatgccacaacctattgttcctgtagagattccacaatctcgtcbttttgattctaaaaagagaaatgatattctrcttaaaattcgtattggcaagcttgaagtaagtttttttcaatctctcaatctcgaaatgrtagaacagcttttggataargtgttgctctatgacaattcatctatyctarctaat

SEQ ID NO: 5483 - DNA, 105 bp, Streptococcus pneumoniae
  misc_feature (1)..(105): tiling:Spneumo1:WAN024FL5; Cluster includes WAN023ORZ pne7 5_19||||12987..13091|-|105 bp|Type 35A2 capsule operon, Gl immer 2.02 orf prediction|S.pneumoniae||WAN01UCEX|ORF|000
ttggatacaagaataccacaattattctccttaatgaaactagctattgctgcctctgaccatacaactactggtatgcctgaagctaaatatagtgaagtcttg

SEQ ID NO: 5484 - DNA, 264 bp, Streptococcus pneumoniae
  misc_feature (1)..(264): tiling:Spneumo1:WAN024G55; Cluster includes WAN023LHO 3137 08_1887||||1019057..1019320|-|264 bp|EGAD orf prediction|S .pneumoniae|R6|NC_003098.1|ORF|110
ttggataccacgtgcaaggtagtcagtgtttgttacgaagaagtcgtcaccaacaagttgtactttcttaccaagacgttcagtaagagctttccaaccatcccagtcgttttcatccataccatcttcaatagtgatgattgggtatttgttaaccaattcttcaaggtagtcgatttgttctgcagatgtacgaacagcagcaccttcrccttcaaatttagtgtagtcgtaaactttacgttctttatcgtagaattctga

SEQ ID NO: 5485 - DNA, 249 bp, Streptococcus pneumoniae
  misc_feature (1)..(249): tiling:Spneumo1:WAN024FI8; Cluster includes WAN023KYD 3133 84_2688||||1430781..1431029|-|249 bp|EGAD orf prediction|S .pneumoniae|R6|NC_003098.1|ORF|110
ttggatacgaggagtgaggttgtcaaactcagcagtctcaaaaactgttttcaaaccatggtatttggtcaagatgagattgtcaaactcaacagcgacacgtttgaagtcaagttgtggaagagcatgtttgattttttgccatggattttcagaatcgacatagcccactactgggaaggaaacggtgctacttgcacgttctacttcaagagctgggacaaagaggagaggttcctgatcygctag

SEQ ID NO: 5486 - DNA, 231 bp, Streptococcus pneumoniae
  misc_feature (1)..(231): tiling:Spneumo1:WAN024C6T; Cluster includes WAN023M6L 3153 99_509||||261037..261267|+|231 bp|EGAD orf prediction|S.pn eumoniae|R6|NC_003098.1|ORF|110
ttggatagcagcgtcatcgatttccacaccgttagcacgttcttcttcaagcgcaagagtaacccccatgactggagcagctacgtatggatgagtgttgaagaactcaaggtgacgctcaagagcagcgatttgatcttcttttttagtatagagttttttgatagctggaatgagtgtataagcccagcccaagttttgcatccgttcaaagttccaagacccttgtaa

SEQ ID NO: 5487 - DNA, 309 bp, Streptococcus pneumoniae
  misc_feature (1)..(309): tiling:Spneumo1:WAN024FHT; Cluster includes WAN023KXK 3150 59_2730a||||1453040..1453348|-|309 bp|EGAD orf prediction| S.pneumoniae|R6|NC_003098.1|ORF|110
ttggatagtagaaagggtttcttcttttccaagggcagttttaatctggatatccaattttggtccgtagaaggctgcttcaccttcggcttcaaagtagtccacgcccatttcatcaagagctgcacgaagcatggtttgggcattttcccacatctcatcgttatcaaagtacttatgagtatcttgagggtcacgaagagagaggcggaagcggtagtcagtcaagttgaagtcttcataaacatcgataatcaactgaagggcacgttggaattcttcttggatttgttctggagtaacgaatag

SEQ ID NO: 5488 - DNA, 258 bp, Streptococcus pneumoniae
  misc_feature (1)..(258): tiling:Spneumo1:WAN024GD5; Cluster includes WAN023LS7 3147 39_1266||||672754..673011|-|258 bp|EGAD orf prediction|S.p neumoniae|R6|NC_003098.1|ORF|110
ttggatatcagatttcaaaatgtcagcttttggaccgtagatagcttgaaccccttgtcctttcatsacaagacccatagctccttctgctttccattgctctgcatttcctactttatctgcatctttaacagttacacgaagacgagtcatacatgcatcaacatcaacgatgtttacacgtccaccaagaaggttgataatgtttacagcttgagagcctgctgcaactttcacttcgctgctggtttcttctga

SEQ ID NO: 5489 - DNA, 246 bp, Streptococcus pneumoniae
  misc_feature (1)..(246): tiling:Spneumo1:WAN024EZ4; Cluster includes WAN023LIK 3137 12_1834||||987392..987637|-|246 bp|EGAD orf prediction|S.p neumoniae|R6|NC_003098.1|ORF|110
ttggatatcatcacgaatttcacccatttcttcatccaactgatgggcgattctagctgtaatttccagtcgcttcttaatctcatctgggaaatccccttggtacttgtagttgagagaatgttctatcgttgcccagaaattcatggccaaagtacgaatttgaatttctgccaaaatagtcttagctccattgatggtatcaaccgtatattctactaccacatgataggaacgatagcctga

SEQ ID NO: 5490 - DNA, 330 bp, Streptococcus pneumoniae
  misc_feature (1)..(330): tiling:Spneumo1:WAN024D3R; Cluster includes WAN023MDQ 3156 49_131b||||60987..61316|+|330 bp|EGAD orf prediction|S.pne umoniae|R6|NC_003098.1|ORF|110
ttggatatccagtctaggttttacctcagtagttggtgcaagaccactttcatcacccttgtgagttacaggagmgccaacttcaaccacttggtttataacttctttggttacctggctatcaaggactgtttctgttgtttttccattttcagtgagtacagagatgtaatgagttcgttcacctttgactcctgctgtgataatattttcctgaccrgctgggaggttaggattttctttcttgataacttcaaatggaatttcttcagttcttgtgatgagttctggtctggtttcaacattggcagccacttcattttcatctag

SEQ ID NO: 5491 - DNA, 1233 bp, Streptococcus pneumoniae
  misc_feature (1)..(1233): tiling:Spneumo1:WAN024FLL; Cluster includes WAN023OVB pne7 0_14||||11852..13084|+|1233 bp|Type 32F1 capsule operon, G limmer 2.02 orf prediction|S.pneumoniae||WAN01UCC2|ORF|000
ttggatatgaacaaaattacaataagagaattgataatactatttgtgttaattctttttatatttcaaaatcttttagaaaagtattttgtatatgctcagtatattgatgaaatagttgcattattatttctcattcattactttttaagagtagtgttaaataagagtatttcaaaaaaattttcccgacttgttcttcttttattaactatcatattaattactttaatttcaaatttttggaataatgtgcaaactaatattttaattatctccattgatttatttagtatttttaaatttatttttatatttttgggggcacaatcttttctcaatgacttaacgcataaagaaataaaaagaataattttacgagtttactttattagtaatatatacttatctgttttgattgtcttagcatttttaaatatttttataggcttaggaatgcatcaagaatatcgctatggtttaccaactttttcttttatttttggtacgccaggtcaagtaattaatctctcgattatattcttacttctatatcagttaaataaactttataattctaaaaataatctcattcatttagtattaatttttttattactgctgtctacattaaaaacacgggcaattgtcttagcaattgtgtttgtctatattctctatctatttgaaatacgaaatatttcatcaatgaaaaagagagtacttcctgttctaggcttgggagcagtggttgggtttgaacaatttaaaacttattttttgacttctgatactccaaggctcacattatttaaatacggtatgcttacaatgagacgctattttcctctgggaagtggttttgctacatatggatccgatattgctgctaaaaactattctctgttatattatcaatatggatttcataacagatatggaatgaatccatatgatattagatttttaaatgataatttttatccaatgatttttgcacaatttggatttttaggaggaatactttatgtatttctactattagattattttagattattattacgtgttgcaagtataaatgataaggttattaaaacttcagtatttatttatatctttaatgttgtcttatcgtctattcaatcatcttatccgggaacgaattcaatggtaataacaacgtttctaatctgtttaatattgagatatagtgacaagtggaggatttta

SEQ ID NO: 5492 - DNA, 597 bp, Streptococcus pneumoniae
  misc_feature (1)..(597): tiling:Spneumo1:WAN024G77; Cluster includes WAN02442R spr0 959||15903003|NP_358553.1|940146..940742|+|597 bp|Hypothet ical protein|S.pneumoniae|R6|NC_003098.1|ORF|101
ttggatattatggaagaagaaaatcataaaaaatataaagtctacattcgagaaacgtcttcttactttgtctataataaagaaaacatggataataattgtttcatcaagggtaggaccttaatcagacaattgagcaacgatagccaaaaactcccctatagacgaccaactttaaaaagtcttcaagagaagatttctgaaattaatcttatgattgaactatctaacacgaacaaacaataccaagaaatcaaagatgagcwtgtattagaaattgcagagattgatatgaagctagaagaaacccaagaaaaaatcgccaccttaaayaagatggcggaagtsyttatcaatytraaragtgaagatsagakmsgtagaaaattagctaagtatgattttgaccaaatgaacatgacggaatcaataatgttagatcgactcaatacagatattttaaaattacaacaggaacttrgtaatgaaattaataaatatgaggagatagctagaagattggatttgtttgtgaaaattattaataccaataaatttacagttctaaaatttcacgagaatgccttactagaataa

SEQ ID NO: 5493 - DNA, 423 bp, Streptococcus pneumoniae
  misc_feature (1)..(423): tiling:Spneumo1:WAN024F59; Cluster includes WAN023MFY 3142 22_46a||||29087..29338|-|252 bp|EGAD orf prediction|S.pneu moniae|R6|NC_003098.1|ORF|220
ttggatattgtccgtagcaggaccagaaagaactgggtgcgtacagcttgcatagacttcaacagcaccagcttccgcaagagcatctgccgcatgacaaatcgttccagcggtatcaatcatatcatcaatcaagatacaagtcttgccttcaaccttaccgatgatrttcataacttcactagtattcatcttatcaacgctacgacgtttatcaataatagcgatagatgttttcaaaaattctgccaacttacgagcacgagtcacccctccatggtccgggctgacaaccacatagtcagaaccaaccataccacgmcgctcaaaataatctgcaatyagaggagcacccatcaaatgatccacaggaatatcaaagaatccttgaatttgcgcagcatgcaagtcgatggtcaataa

SEQ ID NO: 5494 - DNA, 345 bp, Streptococcus pneumoniae
  misc_feature (1)..(345): tiling:Spneumo1:WAN024FTD; Cluster includes WAN023L7E 3142 04_2303a||||1237529..1237807|-|279 bp|EGAD orf prediction| S.pneumoniae|R6|NC_003098.1|ORF|220
ttggatcagataaatcccagatttactgcgtttggcatcgtagtctgtaccggtgaagtggtaccaatgccagtggaagccattataggtatcttggcgaccatcgaaggtaaaactagtccagccattgatggtgaagggttctccaagttcaactgtacggtctacaggatcaacttcgataacctgaaaggcttccctgtgatcggcagcagccttgtggttgagaactacatcggccataggttgaattccctgtgctttaagggcttgaatggcttgaagatagtcttctttgaaaccatacttggtgcggacagtccctttttggttgaactctcctaa

SEQ ID NO: 5495 - DNA, 351 bp, Streptococcus pneumoniae
  misc_feature (1)..(351): tiling:Spneumo1:WAN024FB4; Cluster includes WAN023KOM 3157 34_3136||||1668129..1668479|+|351 bp|EGAD orf prediction|S .pneumoniae|R6|NC_003098.1|ORF|110
ttggatcgttgtcggataagttccrgkaatagtcgctgtataagcatcttggttggtgatgataacaggagtttctgtcaccagacctgcagccttaatgacatccatatcaaaacgaatcagttgctgaccaactgtaacgtgatctccttggactacaagactttcaaaacctttgccatcaagacctactgtatccataccgatgtggatgagcaattcaactccctcgtcagagacaatgccgatggcatgcttggtagggaaaagaaccgtcactgtyccattaactggagaggtcaactcaccttggcttggttcaatgacyagaccttgccccatgacacctga

SEQ ID NO: 5496 - DNA, 228 bp, Streptococcus pneumoniae
  misc_feature (1)..(228): tiling:Spneumo1:WAN024GK3; Cluster includes WAN023LZX 3147 60_871||||463246..463473|-|228 bp|EGAD orf prediction|S.pn eumoniae|R6|NC_003098.1|ORF|110
ttggatgacaatagtttgttctttttgagttccaaggtctttggccttaacagacacgataccgttcttgtcgatgtcaaatgttacttcgatttgaggaattccacgaggtgcagctgggatatcagtcaattggaagcgtccaagagtcttgttatctgctgccattgggcgttcaccttgaagaacgtggatatcaacggctggttggttgtctgctgctgttga

SEQ ID NO: 5497 - DNA, 285 bp, Streptococcus pneumoniae
  misc_feature (1)..(285): tiling:Spneumo1:WAN024FJZ; Cluster includes WAN023L0Y 3156 99_2582b||||1374369..1374653|+|285 bp|EGAD orf prediction| S.pneumoniae|R6|NC_003098.1|ORF|110
ttggatgagaaaaaagacatatttatgaaaaagctccatcgtgcttttaatgtgttctcttgttttcaaactcgtaaaaagggagccactgakcctaactcgctctctcatttcaaagcttgtgaaaaaagacccgttggggtcttaattcgctttcttgttttcaagctcatgaaaaagagacccaacygggtcttttctttaatcttcgtttacgaaaggcatcaaagccattacgcgagcgcgtttgatagctgttgttactttacgttggtttttagctga

SEQ ID NO: 5498 - DNA, 231 bp, Streptococcus pneumoniae
  misc_feature (1)..(231): tiling:Spneumo1:WAN024CRT; Cluster includes WAN023KJY 3135 81_3370||||1807461..1807691|-|231 bp|EGAD orf prediction|S .pneumoniae|R6|NC_003098.1|ORF|110
ttggatggaagtgcggaaagaattaactccaatttccttcatcaagtggaaatcttcggtgtaagtatgaaaaaagttactggctacaagaggtccgacattatcgaaaaaatcttctggatgcgttttgaaccagtagtccatcacattttcatgtacttttccatattgaccttctgtctgaggtccgctagaagcwgctccccaccaaaacagattaggaaatactaa

SEQ ID NO: 5499 - DNA, 234 bp, Streptococcus pneumoniae
  misc_feature (1)..(234): tiling:Spneumo1:WAN024GM4; Cluster includes WAN023M1O 3144 81_789||||412638..412871|-|234 bp|EGAD orf prediction|S.pn eumoniae|R6|NC_003098.1|ORF|110
ttggattgcttctttcacgttcatcgctggtttgcgaacatcaaccccgtaaaggtcacccaggcgaacaacttgttgcaatgcttggtattgaaggtttacttcttcacgaagacggattgtttcttcatcgatttctttgattgcattccagtcatttactttttcttgcatcaagtagtctgcaccgtaaagagcaagacgtgcgtaaacaccratgatacgtccgcgtga

SEQ ID NO: 5500 - DNA, 686 bp, Streptococcus pneumoniae
  misc_feature (1)..(686): tiling:Spneumo1:WAN024GE8; Cluster includes WAN0244C2 spr0 624|glnP|15902668|NP_358218.1|631681..632361|-|681 bp|ABC transporter membrane-spanning permease - glutamine transpo rt|S.pneumoniae|R6|NC_003098.1|ORF|221
ttggattgrtccattgttgaacaatatctaccactatatcaaaaggcattctttctgaccttgcatattgcagtttggggaattttgggatcctttctgctcggtttaatcgttagtatcatccgacattatcgaatccytgttttgkcgcaagtagcgacagcctacattgaattgtcacgtaatacgccccttttgattcaactcttctttctctacttcggtcttccccgaatcgggattgtcctatcttcagaagtctgtgcaacgcttggscttgtctttttaggagrmtcctatatggcagaatctttccgaagtgggctggaagccatcagtcaaacccagcaggagattggcctcgctattggtctgacacctctacaggtctttyrctatgtggttcttccgcaagcaacagcggtggcactcccctcctttagtgccaatgtcattttccttatcaaggaaacctctgttttctcagcagtggctttggccgacctcatgtacgtcgccaaggatttgattggtctctactatgagacagacattgcgctmgctatgttggtasttgcttatctratcatgctgctacccatctcactggtctttagctggatagaaaggaggmyccgccatgcaggattcgggaatccaagtactctttcaaggaaataactaat

SEQ ID NO: 5501 - DNA, 134 bp, Streptococcus pneumoniae
  misc_feature (1)..(134): tiling:Spneumo1:WAN0249QE; Cluster includes WAN024E74-rc R 6.IG_1870.2||||1723267..1723400|-|134 bp|Between spr1755 ( - strand) and spr1756 (dinF) (- strand)|S.pneumoniae|R6|NC _003098.1|IG-rc|110
ttggatttactgaataaaatccatttcctctagtgaaaatcgaaaaaacttgtgttctcktctttagtttggtgttgaaaatagtttaacagacttttgacttcttttatatgatataataaagtatagtattt

SEQ ID NO: 5502 - DNA, 237 bp, Streptococcus pneumoniae
  misc_feature (1)..(237): tiling:Spneumo1:WAN024C49; Cluster includes WAN023M4B 3150 77_643||||338420..338656|-|237 bp|EGAD orf prediction|S.pn eumoniae|R6|NC_003098.1|ORF|110
ttggattttcatcatctagcaatagaggatccaagccttgctcctcatcgtccagaggcaagggtagtaagatgtcttcagaagatggaacttcctccgaagaagcttctgacttctctacagcctcacgcatctcttgaattaaatcatccagactctgagtttcaacgaactcctcttttttgtattgacgagtcgcaaacttatccgcctcaatttcatctctgtgttgcttaa

SEQ ID NO: 5503 - DNA, 294 bp, Streptococcus pneumoniae
  misc_feature (1)..(294): tiling:Spneumo1:WAN024CAC; Cluster includes WAN023M9Y 3153 14_327b||||172754..173047|+|294 bp|EGAD orf prediction|S.p neumoniae|R6|NC_003098.1|ORF|110
ttggcaaagaaatgccttcacctccgacaggaaacttggcactgcctccaaaaatttttggtgcaatatatattttcagctcatcaacaatttgttgttccaaagcactccaattcattagactgcccccttctagaactaggctatcaatctgcatgtttcctagatgttgcattaaactcgataagtctatatgattgccttttttctttatggaaagtatttcacagccatgattttgatatagcttcattttatttttgtcttcagaggaagtggcaatgtaagttttaa

SEQ ID NO: 5504 - DNA, 294 bp, Streptococcus pneumoniae
  misc_feature (1)..(294): tiling:Spneumo1:WAN024GBK; Cluster includes WAN023LPZ 3156 80_1394||||737325..737618|+|294 bp|EGAD orf prediction|S.p neumoniae|R6|NC_003098.1|ORF|110
ttggcaaagtttttggtaattttctttttgagttttgctacgcccatcccaaagaatccatctgataaactcccactcaaagcgttcagggcaatctrccgccatactttctctgacttttccacggtatttaagataacgcttaaaggctctaaagagacaggtcaatggcraaaaattgagaaagatgatttggtcagcttcttgcattcgttcttggtagtagcaccaagaataattaccatcgatgacccaagctttatgcttggtgagaaagttttttatctcggttaa

SEQ ID NO: 5505 - DNA, 117 bp, Streptococcus pneumoniae
  misc_feature (1)..(117): tiling:Spneumo1:WAN024DP3; Cluster includes WAN0242EM SP11 65||15901030|NP_345634.1|1101327..1101437|+|111 bp|hypothe tical protein|S.pneumoniae|TIGR4|NC_003028.1|ORF|121
ttggcaaatactgtcaaagtttttctaaaagaaatttcacaaaataaaaaagaaaaccccgtgaaaacaagggattttcttgtcaagaatattttttcacaaacttttctarctaat

SEQ ID NO: 5506 - DNA, 609 bp, Streptococcus pneumoniae
  misc_feature (1)..(609): tiling:Spneumo1:WAN024F5C; Cluster includes WAN023KNI 3138 91_3188b||||1703622..1704218|+|597 bp|EGAD orf prediction| S.pneumoniae|R6|NC_003098.1|ORF|210
ttggcaacagggatggcgttgtttttcaaagcttcaactgctgcggcaactgctgtttcaatcccacgacgaataccgattggatttgcacctgctgtgacgtttttgattccttcacggacgatagcttgggtcaagactgttgcagtcgtagtyccgtcacctgcgatatcattggttttagaagctacttctgatactaacttagcacccatattttcaaaatggtcttccaattcgatttctttggcaatggtcacaccgtcattggtaatcaagggtgaaccgaatgacttttcaagaacgacattgcgaccttttggtcccaaggttactttaacagtgtctgcaaggatatcgacaccacgaaccatggctgaacgggcatctgatgaaaatttaatttcttttgacatacttactttctccttctattcctcaatgattgccaaaatgttagcttcgcctacgatgatgtacttttcatcgccatctttgacatcaagacctgcgtgggcttcaactaagacacgatctccagttttaacacttggagcaaccaagtcaccgttcaaggtacgaacaccttgtccagtagccacaacttga

SEQ ID NO: 5507 - DNA, 243 bp, Streptococcus pneumoniae
  misc_feature (1)..(243): tiling:Spneumo1:WAN024B4W; Cluster includes WAN023LJ3 3147 21_1813||||977845..978087|-|243 bp|EGAD orf prediction|S.p neumoniae|R6|NC_003098.1|ORF|110
ttggcaatacgaacrttaaacagaattccatttctctttttagaatcaaaacgacaatattgtggaatctctacaggaacaatagactgcgacactaaaatatcctcycttagttttactttactaatagtatataggaggagagccctgaatcctagaccctttgttatgatgcgcttacaaacagagttggaaaaaatcttaaaagcagaaaaacgcatgatatcagcccctaacacttga

SEQ ID NO: 5508 - DNA, 366 bp, Streptococcus pneumoniae
  misc_feature (1)..(366): tiling:Spneumo1:WAN024G6J; Cluster includes WAN023LJD 3137 16_1789||||962633..962998|-|366 bp|EGAD orf prediction|S.p neumoniae|R6|NC_003098.1|ORF|110
ttggcaatcaggagattctctgccactgtcatacgaggagctgtccccatctttggatcttggaagactcgagacagatacttagcgcgcttctctggtgaaaacttggtrasatcytcacctaaaatacggatagttccactrgttagtgatawggtycctgcwatagtgttaaagagrgttgatttwccagcaccatttccrcccaaaatcgtgataaagtccygttcaaaaatttctaaggaaacatcatttaaaataatcttttcttcatcaaagccatttttaacgattttggttgcattttttaattctacaattgctgtcatttgcttaacttggctcctttcaagattgtttgcttaa

SEQ ID NO: 5509 - DNA, 237 bp, Streptococcus pneumoniae
  misc_feature (1)..(237): tiling:Spneumo1:WAN024FMC; Cluster includes WAN023L35 3131 59_2494||||1330279..1330515|+|237 bp|EGAD orf prediction|S .pneumoniae|R6|NC_003098.1|ORF|110
ttggcaattcctctctcttacctgtctcataagtcggaacttctgggtctggattcactggagtttcagtttttggagtacctggttctggagttggtttatctggtgttggagtctcttgatttggtagttctgggtttggtgtcggaacacttggatgctctggatttggttgtgggattggtttttctggtgttgataaacggtcataccttaccgttatttctttatcactag

SEQ ID NO: 5510 - DNA, 285 bp, Streptococcus pneumoniae
  misc_feature (1)..(285): tiling:Spneumo1:WAN024FND; Cluster includes WAN023P7K pne5 3_4||||1481..1765|+|285 bp|Type 25F capsule operon, Glimme r 2.02 orf prediction|S.pneumoniae||WAN01UCCQ|ORF|000
ttggcagatgctcaggatgcctatttcaacaaagaaaaagcccaagcaaaatttgcggaagctaaaaaagaattggcaagtcaaggtgtgactttccctattyacgtgaatgtggcagtagatcagacaagtaaaaatgccgttacaggcatgaactcagttaagcagactctggagtcagttttaggtgctgataacattgttattgatgttcagcaactttcaacagatgattttaataatgtaccttcttggcaccgatgccagctgatagaggctatgatt

SEQ ID NO: 5511 - DNA, 339 bp, Streptococcus pneumoniae
  misc_feature (1)..(339): tiling:Spneumo1:WAN024CX9; Cluster includes WAN02438V spr2 038||15904079|NP_359629.1|2031088..2031426|-|339 bp|Conser ved hypothetical protein, truncation|S.pneumoniae|R6|NC_00 3098.1|ORF|111
ttggcagatggatctrggaaactagcagaaggtggaacaaagttaacttctggattggaagatttacagacaggacttgcttctttaggacaaggactaggtaatgctagtgatcaactcaaatcagtatcaacagaatctaaaaatgcagagattttgtcaaatccactcaatctttcaaaaacagacaatgatcaagttcctgtaaatggaatcgcaatagctccttatatgatatcagttgctctttttkttgcagcaatatcaacaaatatgatatttgcgaaattgccttcaggacgtcatccagagagccgttgggcttggttgaaatcttga

SEQ ID NO: 5512 - DNA, 357 bp, Streptococcus pneumoniae
  misc_feature (1)..(357): tiling:Spneumo1:WAN024EYL; Cluster includes WAN023L1B 3133 70_2570||||1370629..1370883|+|255 bp|EGAD orf prediction|S .pneumoniae|R6|NC_003098.1|ORF|220
ttggcagcttgcattgcagcttcaatttctgcttggcgttccaaaacttcagcgatgtcaactgtgttcacttgggcaacacggacattatttccgttgagttcaaaagtcttagcatcgatrtcaatcaattcttcagcagatttgctagccaagttggtaccagctttcaacattgccaaaccatattcttccaagttyacaccagccaattcagccaattcaggagcaatgattttatctgttgggtgtgttgttggtgatttcaaaagaagggtatctgaaatcaaacctgaaagcatcaaacctgcaatctctttaggcacagctacaccatgttctttgaacatacggtaa

SEQ ID NO: 5513 - DNA, 315 bp, Streptococcus pneumoniae
  misc_feature (1)..(315): tiling:Spneumo1:WAN024DTS; Cluster includes WAN02438W spr2 037||15904078|NP_359628.1|2030746..2031060|-|315 bp|Conser ved hypothetical protein, truncation|S.pneumoniae|R6|NC_00 3098.1|ORF|210
ttggcaggaattttggtatatggaggagttcagcttattggtttaactgctaatcatgagatgagaatatttattctcatcatcctaacaagtttagtattcatgtctatggtgaccactttagcaacgtggaatagccgtataggagcttttttctcacttattttgcttttactacagttagcatcaagtgcaggtacttatccacttgctttgacaaatgatttctttagatctattaatccctggttaccaatgagctattcagtttcgggattacgacaaacaatctctatcaacaagtcattttcctag

SEQ ID NO: 5514 - DNA, 270 bp, Streptococcus pneumoniae
  misc_feature (1)..(270): tiling:Spneumo1:WAN024DTP; Cluster includes WAN023KB5 3156 73_3760||||2037128..2037397|-|270 bp|EGAD orf prediction|S .pneumoniae|R6|NC_003098.1|ORF|110
ttggcaggcatattactttgtaccgaacgaacaattacaccagatgtaacattacttggaatattgagtcttctgatgtcgcttgtactcacattagataaattaaccatctggattcccaaagctggacgcgtcacttttccgtttttttctaactgttcaataatattgatagcatcatttgcaggaattgcgaaaccaagaccttctacagatgttcctccatttgtagcaattttacttgaggtaattccgataacctgcccttga

SEQ ID NO: 5515 - DNA, 1817 bp, Streptococcus pneumoniae
  misc_feature (1)..(1817): tiling:Spneumo1:WAN024DZ4; Cluster includes WAN0243D4 spr1 885|ABC-NP|15903926|NP_359476.1|1861478..1863289|-|1812 bp |ABC transporter ATP-binding/membrane spanning protein - u nknown substrate|S.pneumoniae|R6|NC_003098.1|ORF|421
ttggcagtagctaactgcgctaaatataatataaggaggagtaaaatgaagacagttcaatttttttggcattattttaaggtctacaagttctcatttgtagttgtcatcctgatgattgttctggcgacttttgcccaakccctctttccagtcttttctggacaagcggtgacgcagctagccaatttagttcaagcttatcaaaatggcaatccagaacttgtatggcaaagcctatcaggaatcatggtcaatcttggcctgctggttttggttctatttatctctagtgtaatatacatgtgtctcatgacgcgcgtgattgcagaatcgaccaacgagatgcgcaaaggyctctttggtaagcttgctcagttgacggtttctttctttgaccgtcgacaagatggcgatatcctgtctcattttaccagtgatttggataatatcctmcaagcctttaacgaaagcttgattcaggtcatgagcaatattgttttatacattggtctgattcttgtcatgttttcgagaaatgtgacgctggctctcatcaccattgccagcaccccattggctttccttatgctgattttcatcgtgaaaatggcacgyaaatacaccaacctccagcagaaagaggtagggaagctcaacgcctatatggatgagagcatctcaggccaaaaagccgtgattgtgcaaggaattcaagaggatatgatggcaggatttcttgaacaaaatgagcgcgtgcgcaaggcaacctttaaaggaagaatgttctcaggaattcttttccctgtcatgaatgggatgagcctgattaatacagccatcgtcatctttgctggttcggctgtacttttgaatgataagtctattgaaacaagtacagccctaggtttgattgttatgtttgcacaattttcacagcagtactaccagcctattatccaagttgcagcgagttggggaagccttcagttggcctttactggagctgaacgaattcaggaaatgtttgatgcagaggaggaaatccgacctgaaaaggctccaaccttcactaagttgcaagaaagtgttgaaatcagtcatatcgwtttttcatacttgcctgataaacctattttgaaagatgtcagcatttctgcccctaaaggccagatgacagcagttgttgggcckacaggttcaggaaaaacgactattatgaacctcatcaatcgcttttatgatgttgatgctggtggyatttattttgatggtaaagacattcgtggctatgacttagatagtcttagaagcaaggtgggaattgtattgcaagattcggtcttgtttagcggaacgattmgagacaatatccgatttggtgtgycagatgctartcaggaaatggttgaggtagcagcaaaagcaacccacattcacgactatatcgaaagtttgcctgataagtacgatactcttattgatgatgaccagagcatcttttcarcagggcagaagcaattgatttcaatcgctcgaaccctgatgacagatccagaagttctcattctcgatgaagcaacttcaaacgtagatacggtgacrgaaagcaagattcarcatgccatggaggtggttgtagcaggtagaactagtttcgtcattgcccaccgcttgaaaaccattctcaatgcagatcagattattgtccttaaagatggagaagtcattgaacgtggtaaccaccatgaacttttgaagctaggtggcttttattcagaactctatcacaatcaatttgttttcraataactaat

SEQ ID NO: 5516 - DNA, 58 bp, Streptococcus pneumoniae
  misc_feature (1)..(58): tiling:Spneumo1:WAN024A4B; Cluster includes WAN024EDP R6.I G_1290||||1246569..1246626|+|58 bp|Between spr1246 (potA) (- strand) and spr1247 (murB) (- strand)|S.pneumoniae|R6|N C_003098.1|IG|110
ttggcataaattccttctttttcatagattaaccgatcggggctctgtcaggtcccca

SEQ ID NO: 5517 - DNA, 249 bp, Streptococcus pneumoniae
  misc_feature (1)..(249): tiling:Spneumo1:WAN024CB7; Cluster includes WAN023MAD 3132 18_303||||156785..157033|-|249 bp|EGAD orf prediction|S.pn eumoniae|R6|NC_003098.1|ORF|110
ttggcatcaaaggtcacaatccccttattgccaccagaaatttccagctgttccaaggcatttttggtcccttgttcccagaccaacaaatccgccccacggagtttgtctgcatgcttttccaaatacttatctaggtctgttgaagccgattcctccgctccctccatgataaagctgatattgacaggtaaatcatcatggtgctgcatatattttctcaaagcactcaagcgagctgtgatatga

SEQ ID NO: 5518 - DNA, 899 bp, Streptococcus pneumoniae
  misc_feature (1)..(899): tiling:Spneumo1:WAN024G8Y; Cluster includes WAN02445V spr0 847||15902891|NP_358441.1|844547..845440|+|894 bp|Conserve d hypothetical protein|S.pneumoniae|R6|NC_003098.1|ORF|221
ttggcattgctggctgagttttattcgaaagaaggaaatatgaatacaaatcttgcaagttttatcgttggactgatcatcgatgaaaaygaccgtttttactttgtgcaaaaggatggtcaaacctatgctcttgctaaggaagarggycaacatacagtaggggatacggtcaaaggttttgcatacacggatatgaagcaaaaactccgcctgacaaccttagaagtgactgccactcaggaccaatttggttggggacgtgtcacagaggttcgtaaggayttgggtgtctttgtggatacaggccttcctgacaaggaaatcgttgtgtcactcgatattctccctgwgctcaaggaactctggcctaagaagggcgaccaactctacatccgtcttgaagtggataagaaagaccgtatctggggyctcttggcttatcaagaagacttccaacgtctygctcgtcctgcctacaayaacatgcagaaccaaaactggccagccattgtttaccgtctcaagctrtcaggaacttttgtttacctaccagaaaataatatgcttggttttattcatcctagcgagcgttacgcagagccacgtttggggcaagtattagatgcgcgcgttattggtttccgtgaagtggaccgcactytgaacctctccctcaaaccacgctcctttgaaatgttggaaaacgatgctcagatgattttgacttatttggaaagyaatggcggtttcatgaccttaaatgayaagtcatctccagacgacatcaaggcaacctttggcatttctaaaggtcagttcaagaaagctttaggtggtcttatgaaggctggtaaaatcaagcargaccagtttggkacagagttgatttarctaat

SEQ ID NO: 5519 - DNA, 258 bp, Streptococcus pneumoniae
  misc_feature (1)..(258): tiling:Spneumo1:WAN024FHO; Cluster includes WAN023KXB 3131 72_2741||||1458007..1458264|+|258 bp|EGAD orf prediction|S .pneumoniae|R6|NC_003098.1|ORF|110
ttggccaatcgaacccggattgacaatcaattgcccaccagtcccgtaacgaagcaactgctggtgaatatgtccataaacagcaatatcacagggaggatgagtcaccaagcggtcaaactcctcttgtttgccagtatgaatcaactctcgcccccagttcttatcaggcagatgatggctaattcccaccgtcaaatccccaaactgacgatgaatttgaagaggttgattgtggagcacttcaatttcttctag

SEQ ID NO: 5520 - DNA, 474 bp, Streptococcus pneumoniae
  misc_feature (1)..(474): tiling:Spneumo1:WAN024DZW; Cluster includes WAN023KIL 3130 70_3426b||||1837429..1837881|+|453 bp|EGAD orf prediction| S.pneumoniae|R6|NC_003098.1|ORF|220
ttggccacagacgtcatcgatgtgaacggatttagctgggttgaagctggccatcatgactgcttcatgcggattcgcaattccccattcgaccacattcttcaaaccatctttgagtttgaggatagaacctgccaagttacctgtcgatttgaggcgtgcagttccatttgcaacgacaactgggaattctcccaacatataatctccgtcttccaatcccccagctgtcatacagtctgtgataagagcgatgttttctgttcctttttgtttgataagaatttcgcaagcctttggatctacgtggtgaccatcacagatcaactctgcataggtatgtggcaattggtacatggctccaaccatccccaattcacggtgagtcaacccacgcattccattgtaggcatgcacccaaacactcgctccagcatcgaytgcttttttggcttcatcaaaagtcgcgtttga

SEQ ID NO: 5521 - DNA, 273 bp, Streptococcus pneumoniae
  misc_feature (1)..(273): tiling:Spneumo1:WAN024CPT; Cluster includes WAN023M2E 3130 66_753||||391000..391272|+|273 bp|EGAD orf prediction|S.pn eumoniae|R6|NC_003098.1|ORF|110
ttggccgcgtttaagattgtttccttaacctctggatcaattccttcgcctaggtattccttaggcaaagcrattttcatrcccttratgtcttggccgatttttgaagtaaagtcggcgatgcggacaggagcagaagtagagtctttagcatcttcgctggcaatagcgttgagcaagagggcattttccttaacagtaggagcaaaaggtccaatctggtctaatgagctaccaaaggcaatgagaccgaaacgtgaaactgttccgtag

SEQ ID NO: 5522 - DNA, 231 bp, Streptococcus pneumoniae
  misc_feature (1)..(231): tiling:Spneumo1:WAN024DUC; Cluster includes WAN023KBS 3130 15_3714||||2006122..2006352|+|231 bp|EGAD orf prediction|S .pneumoniae|R6|NC_003098.1|ORF|110
ttggcctctactacgaaaacatccacacaagggaaggtaactccrcgctccaagattgtcgtactgataagtattgtcagttctccatctcgaaaagcttgtacttgctctaatcgatcctctgttacagaagatacaaagccaattttctcatttggaaattgctcctgtaagatttctgctaactgctcccctttcttaatttctgaagcaaaaatgagtaacggataa

SEQ ID NO: 5523 - DNA, 233 bp, Streptococcus pneumoniae
  misc_feature (1)..(233): tiling:Spneumo1:WAN024FCF; Cluster includes WAN023KPY 3154 89_3075||||1638647..1638874|+|228 bp|EGAD orf prediction|S .pneumoniae|R6|NC_003098.1|ORF|110
ttggcctgtgacaaacatggtaaaggttgcyttrcagacatttctgccctcttgattggtgatatccacatccatyacacargttgtacgaccttgatggacacattctcctttaatggtcaatacatcgtcgagttttcctgccttaaggtagttgatagaggattggagtgtcaccccatcaagtcccagcgagataaccaccaaaccactgatttggtcacatarctaat

SEQ ID NO: 5524 - DNA, 535 bp, Streptococcus pneumoniae
  misc_feature (1)..(535): tiling:Spneumo1:WAN024FZM; Cluster includes WAN023LCG 3151 32_2096b||||1130797..1131105|+|309 bp|EGAD orf prediction| S.pneumoniae|R6|NC_003098.1|ORF|320
ttggccttgaccgatgctcttaccttcaacaagaacttctacatcaaagaccttatcgtgagcaggccctgtttcagaaatcacctgataacgaatagccacatcaccattgacctgaagcaactcttggagatgggttttatagtctgtaatcatctcaaaytcgcctgcttcwaccttaggaatcatracttgrtagataaattccttgaccttkgccacatccttatccaaaagaagggcaccaagaaaggcttcaaaggcatcaccaagaatggtgtcacgattgcgaccaccwgatttttcttcccctttacccaacttgataaactggtcaaactggcaatcacgcgcaaaaccagctaaactctcctcacggacaatcatagcacggagttttgataggtcaccttcaggctttttaggatattttttatatagatattctgaaatcaataactgtagaacagcgtctcctaaaaattccaagcgttcattgtgtgaaatttttaagaggcggtgctcattggcataa

SEQ ID NO: 5525 - DNA, 246 bp, Streptococcus pneumoniae
  misc_feature (1)..(246): tiling:Spneumo1:WAN024F3G; Cluster includes WAN023LZ6 3150 68_910||||481193..481438|-|246 bp|EGAD orf prediction|S.pn eumoniae|R6|NC_003098.1|ORF|110
ttggccttgcccgtaggatcaataaagacttgtccttccttgttcttgacaatgcggagcaaatcacgcttatcaatcacttcgttagacacaacagacttgcgcaaagggatttttcttgttttcatctttccctcctctagcagcttttattcttctacagtatcgttttctacttccaactctactgaagcagcgtcttccatggcttcaaattcgctagcagacttgatatcgatacggtaa

SEQ ID NO: 5526 - DNA, 306 bp, Streptococcus pneumoniae
  misc_feature (1)..(306): tiling:Spneumo1:WAN024FLV; Cluster includes WAN023L2Z 3133 88_2501||||1333537..1333842|-|306 bp|EGAD orf prediction|S .pneumoniae|R6|NC_003098.1|ORF|110
ttggcgaacaacgtagatgttgatacggtttgtaccagcaccaaccaagccacgcatacctgcagtaccaaattcaagatttgtatagaaggcatcttccttagttttttcgtccatattttccaaatcttgacgaaggtagtcaggaagctccacaaaatcaacccatttctggtaattttcttggtaagacattcaaattctcctttatttttaaaacatttaatcagtttaattatatcattttttttagttttagtaaaaccttatctgcttcgaacatctcttcaaaccaggtcagattga

SEQ ID NO: 5527 - DNA, 246 bp, Streptococcus pneumoniae
  misc_feature (1)..(246): tiling:Spneumo1:WAN024F5X; Cluster includes WAN023M7P 3150 92_459||||236630..236875|-|246 bp|EGAD orf prediction|S.pn eumoniae|R6|NC_003098.1|ORF|110
ttggcgaacataaccagcacgcaacataagagcatggctgataacttgagcatcgcttggcatttcgcgaagcgttgggataggcattttactttgtttcataatattcctcgattatctaaaaaagagtcgcataatgtcattccaagtcacagcaatcatcaagacaaccatgatgaccactccggccaaggtgacataggtttcaatttcttgtttcaatggtttgcggcggatggcttctag

SEQ ID NO: 5528 - DNA, 321 bp, Streptococcus pneumoniae
  misc_feature (1)..(321): tiling:Spneumo1:WAN024FKI; Cluster includes WAN023L1V 3154 59_2551b||||1360418..1360738|+|321 bp|EGAD orf prediction| S.pneumoniae|R6|NC_003098.1|ORF|110
ttggcgcaaatctgcaatcaaatctctagcatcctcaatcccaatagacaaacgcaagaggtcatctgtcaaaccataagaatggcgtacytctgctggaatatcagcatgagtttgagtcgttggataagtaataagactttccactccacccaaactttccgcaaaagagaagaccttgagactgttcaaaatatgaggaatgcgtgtttcatcggctactttaaaggaaatcatgcctccacgaccagtgtagagaacttccttaactgctggagaatccttcaaaaaggcaaccacttcttgggcgttagctgttga

SEQ ID NO: 5529 - DNA, 252 bp, Streptococcus pneumoniae
  misc_feature (1)..(252): tiling:Spneumo1:WAN024CAI; Cluster includes WAN023MA2 3134 34_319||||168441..168692|-|252 bp|EGAD orf prediction|S.pn eumoniae|R6|NC_003098.1|ORF|110
ttggcgcaattgaccagtccctgctgtccgcgtcatttccttgccatcactaatcaagctaaaagaaatctcaggatgggccaagcccagacggttgacaatatcaatgatatgagacaactccgcttgctggctcttcatatacttgagacgggcaggcgtgttgaaaaagagatcctccacacaaaccttggttcccacaggactagtcgctgggatgacttcctcaacttcacccccacgcgcgactaa

SEQ ID NO: 5530 - DNA, 486 bp, Streptococcus pneumoniae
  misc_feature (1)..(486): tiling:Spneumo1:WAN024C7N; Cluster includes WAN023M86 3136 28_442||||227356..227841|-|486 bp|EGAD orf prediction|S.pn eumoniae|R6|NC_003098.1|ORF|110
ttggcgcattggtttgcggacaactggatagcctccacgctcagaagttccgtcaggaagcacttcttcattggcaatggcagttcccaattcctcaacccagtttactggcacttcagcttcataggccaagcctttttcgtaaagcttggtgaaaatccattgagtccacttgtagtagtttggatctgttgtgttgacttcacgatcccagtcataagaaaatccaagcgcattratttgacgtttgaagttggcaatgttttccgctgtaaattctgctgggtcattaccagtatccatagcgtattgctctgcaggcaaaccaaaagcatcccaacccattgggtgaaggacattgtagccttgcgcacgtttgtaacgactgaggatatcggttgcagtataaccttctgggtgtcctacgtgcagaccarctccagacggataagggaacatatcaagcgcataaaacttaggttttga

SEQ ID NO: 5531 - DNA, 480 bp, Streptococcus pneumoniae
  misc_feature (1)..(480): tiling:Spneumo1:WAN024GGI; Cluster includes WAN023LWI 3135 21_1040||||544695..544991|-|297 bp|EGAD orf prediction|S.p neumoniae|R6|NC_003098.1|ORF|120
ttggcggtggaaagtgatagcaaagcggtgcacctcatcttggatgcgttggaggaggaaaaattcctgagaattgcgagacaaatccaccacctcaagcggatctccaaagagcaattcatgggtttggtgcttatcattcttttgcagcccagcaattggaatatccaagcccagttcctcttggataacctgcttagcgatattgacttgaccttgccccccatcaatcacaatcaaatctggaggagtcaaagcctcacgctgtactcgaccatagcgtctgcgaatgacctctctcatgctggcatagtcgtctggtccaacaaccgtttttatcttgtacttacggtaatccttcttactcggtttaccgttgacaaagaccaccatagccgaaacagggctagttcccatgatattagagttatcgaaggactcgatacgtactggggtcgggatttggagcaaacgccctag

SEQ ID NO: 5532 - DNA, 324 bp, Streptococcus pneumoniae
  misc_feature (1)..(324): tiling:Spneumo1:WAN024GD2; Cluster includes WAN023LS2 3136 45_1273||||675572..675895|-|324 bp|EGAD orf prediction|S.p neumoniae|R6|NC_003098.1|ORF|110
ttggcgtttagctttacgctctgcacgaccgcgagcgcgattttcagcacgcttrgttttacggcgcttttcatcaaccgcccattgaattttcttcttataacccggtttgacttttttctttttctttttaaccaaaccaatcatttcgatatcaagtttatcttgttttttctcacggttggcacgacgatcacggtcataggtatcttgaaattccccrtctttgaccatcttaggactaaacttgattcccaatttctccaactcacggatatccgagtcatcacttggctgataaagggtaatagctgtacctggtag

SEQ ID NO: 5533 - DNA, 389 bp, Streptococcus pneumoniae
  misc_feature (1)..(389): tiling:Spneumo1:WAN024C8F; Cluster includes WAN0244NG spr0 214|rpsK|15902258|NP_357808.1|208585..208968|+|384 bp|30S Ribosomal protein S11|S.pneumoniae|R6|NC_003098.1|ORF|111
ttggctaaaccaacacgtaaacgtcgtgtgaaaaagaatatcgaatctggtattgctcatattcacgctacatttaataacactattgttatgattactgatgtgcatggtaatgcaattgcttggtcatcagctggtgctcttggtttcaaaggttctcgtaaatctacaccattcgctgctcaaatggcttctgaagctgctgctaaatctgcacaagaacacggtcttaaatcagttgaagttactgtaaaaggtccaggttctggtcgtgagtcagctattcgtgcgcttgctgccgctggtcttgaagtaacagcaattcgtgawgtgactccagtgccacacaatggtgctcgtcctccaaaacgtcgccgtgtataactaat

SEQ ID NO: 5534 - DNA, 315 bp, Streptococcus pneumoniae
  misc_feature (1)..(315): tiling:Spneumo1:WAN024DXF; Cluster includes WAN023KFM 3135 75_3542||||1902204..1902518|-|315 bp|EGAD orf prediction|S .pneumoniae|R6|NC_003098.1|ORF|110
ttggctaatcaaagtaggtgccgcaacagccaaaatcattgggaaagtgatgttgcggaatttttgccaagcgttggcaccgtcaatataagctgcttcgtaaaggtcgttaggaatagattgcaagatacccaargtcaraacgtagatgtatgggaatccgagccaaccttgcatcataatcaaggcaatcttagtccaagttgggtctgttttccaaggaataagagctccatcaaggaaaggaaggaatttagccaagattggcaatacttgagtgttgatagcaccgacactatcgttaaacatgtttga

SEQ ID NO: 5535 - DNA, 258 bp, Streptococcus pneumoniae
  misc_feature (1)..(258): tiling:Spneumo1:WAN024FFC; Cluster includes WAN023KU3 3157 16_2881b||||1537317..1537574|+|258 bp|EGAD orf prediction| S.pneumoniae|R6|NC_003098.1|ORF|110
ttggctaccttcatggcatatttctcattgatatttgccgaatcsaccttattaaaggtcaataaragaatratattgatgacttcgtccagyaagcccaagccagccatctgttgcaagagttctctttctgtttgggtaatggttcccttgcgtgtttgcttgatttctgcyaagaactgcagggcagttttacttttrgcttctttgataatggtygyttccttaagactaaagtcagaggaaactggtttttga

SEQ ID NO: 5536 - DNA, 357 bp, Streptococcus pneumoniae
  misc_feature (1)..(357): tiling:Spneumo1:WAN024CD9; Cluster includes WAN023MC6 3135 50_201||||100201..100557|-|357 bp|EGAD orf prediction|S.pn eumoniae|R6|NC_003098.1|ORF|110
ttggctacgttggttaaagccagtgacaatcaactccgccacgcgcttggttgctcccataacatttggtggattractgccttatctgtcgaaatcataaccatcttagacactttagcttcatcaacagccttagcaacattgtaagttccacggatattgtttttgaaggcttcttttggattgcgctccatcataggaacatgcttgtgggctgccgcatgataaacaatagcaggtttgtactgctcaaagacttgcaacaaacgatcatagtcttgaatgtccgcaatcacaggtacataatcaatcccttggaacttacgaatcaattcatgataaacaaggtagattga

SEQ ID NO: 5537 - DNA, 282 bp, Streptococcus pneumoniae
  misc_feature (1)..(282): tiling:Spneumo1:WAN024EZO; Cluster includes WAN023LNB 3154 42_1537||||816811..817092|+|282 bp|EGAD orf prediction|S.p neumoniae|R6|NC_003098.1|ORF|110
ttggctagttccctatcttggtctagcaagagtttttctcgcgaaacggcagcttcctcggtatcttttggagttgaaacggatacatattctccaccagccattgaaaaggcaccagctaagatagccgyaaaacctgataaaaagataatccagatattgstcgtggcactggcaactccgataaccacaccagcaatggaaataattccatcgttagcatcaagaacacccgcacgcaggatatttaaacgacctgcaaaatttgaatcaatttcgtga

SEQ ID NO: 5538 - DNA, 78 bp, Streptococcus pneumoniae
  misc_feature (1)..(78): tiling:Spneumo1:WAN024GNY; Cluster includes WAN023SF0 NC_0 03028.1_506||||384850..384927|+|78 bp|Glimmer 2.02 orf pre diction|S.pneumoniae|TIGR4|NC_003028.1|ORF|010
ttggctcaaacaaatctgggtgacaaatttaatcggataaaaagggcaggagttttcctagccctttgtttacagatt

SEQ ID NO: 5539 - DNA, 109 bp, Streptococcus pneumoniae
  misc_feature (1)..(109): tiling:Spneumo1:WAN024DQG; Cluster includes WAN023SLO NC_0 03098.1_765||||611894..611989|+|96 bp|Glimmer 2.02 orf pre diction|S.pneumoniae|R6|NC_003098.1|ORF|102
ttggctctcttttttgctaggaattttacaagattgcaatttatttttgagttatcaccatctcttttgtttggataatatgaatgggaaaaacttgaataaaattckt

SEQ ID NO: 5540 - DNA, 108 bp, Streptococcus pneumoniae
  misc_feature (1)..(108): tiling:Spneumo1:WAN024CLN; Cluster includes WAN02420Q SP16 96||15901530|NP_346134.1|1600606..1600713|-|108 bp|hypothe tical protein|S.pneumoniae|TIGR4|NC_003028.1|ORF|020
ttggctcttatactagagtcatcaaaaagaaacgaggactctcatatgacagtaacgattaaagtaaattaccaaaccactttccaaaagaaggaagcaaaaaactag

SEQ ID NO: 5541 - DNA, 231 bp, Streptococcus pneumoniae
  misc_feature (1)..(231): tiling:Spneumo1:WAN024GBN; Cluster includes WAN023LQ1 3133 19_1387||||734059..734289|-|231 bp|EGAD orf prediction|S.p neumoniae|R6|NC_003098.1|ORF|110
ttggctgaaattccagctggagctagaaatcaaagccgactacaacagatacaactccgatacttaattttttatgccaaagcgcataattcgttgaccaattttcattatttcttatctttcttttcgtttatttacaagcagactcaagcgaaatctcattgtgctatatatgataagactgagaaattcagaaagtcaattcattctcatctctccttatcatactag

SEQ ID NO: 5542 - DNA, 234 bp, Streptococcus pneumoniae
  misc_feature (1)..(234): tiling:Spneumo1:WAN024EVF; Cluster includes WAN023KLY 3130 49_3273||||1752418..1752651|+|234 bp|EGAD orf prediction|S .pneumoniae|R6|NC_003098.1|ORF|110
ttggctgaccaattcatagctgagtttctcagtcgttggaatagttcccactcctgtcaaataataaccagcgatrgtatcaacgtcatcactttccagttcaacatcaaagtaattattgaaatcattgagggtcatagttccttgaacaatgtaggtatcctcgccaatctgatgaacatctattgctgctttgtccgtttcatcatcaatttcaccaacaatttcctctaa

SEQ ID NO: 5543 - DNA, 487 bp, Streptococcus pneumoniae
  misc_feature (1)..(487): tiling:Spneumo1:WAN024FU5; Cluster includes WAN023L7R 3152 93_2290||||1229525..1229944|+|420 bp|EGAD orf prediction|S .pneumoniae|R6|NC_003098.1|ORF|220
ttggctgcctttacgataaccagcctcaaagccaagaccaaattccacccctttaaaggcattgatagagacaacagcttgagccaatcttgcatccaattttctatcccattggacataggaaccaagaccaactggaacgcctccgacgactgtctccacaaccccaccgatggtatcaccatcacgtttgatttggtcaatatagtccttgatttcctgttctcgttcttggttgacaatagaaacttcagactgggcagctctttgcttaatttcagcgactgtcagattttcaggaacatcgatttccttrccaccaaagaccacgacatggttggcaatctccatatccagctcagccaagaggcgtttggctactgcaccaactgccacccgcatggtggtttcacgagctgatgaacgctccaaagaatttcgcaaatcatcaaaacggtacttaatccccccaaccaaatcggcatga

SEQ ID NO: 5544 - DNA, 102 bp, Streptococcus pneumoniae
  misc_feature (1)..(102): tiling:Spneumo1:WAN024CM9; Cluster includes WAN023X4A AX56 7814.1_1||||1..102|+|102 bp|Glimmer 2.02 orf prediction|S. pneumoniae||AX567814.1|ORF|000
ttggctggagaaccatataaagcttgtaaaattgaagttttatttactccatatctattacagacacctcaggattatttaacttataagtttctaactaat

SEQ ID NO: 5545 - DNA, 405 bp, Streptococcus pneumoniae
  misc_feature (1)..(405): tiling:Spneumo1:WAN024GEE; Cluster includes WAN023LTM 3147 43_1171a||||617758..618153|-|396 bp|EGAD orf prediction|S. pneumoniae|R6|NC_003098.1|ORF|110
ttggctggtttttcctttgtagcctttttagcaagctttttatcctgttcctccttctctttagactctggttcttctttctcttctttctctttgtcagcctctgaggatgctactttttcttcagactcttccttagctgattctgaatcttcctggtctgtttcactctcctggtcctgtttrtcctctgacttctcagattcttctcccattcgagcttgtctttccttttccttctcctcagctagagccrcctcttcttcagccttcttttttagatattcttggtttcgtttctgccattctgataactctttcaattcttcgagggtttctttgtcctcatttttcttatcttttgacatttactttccttatgataaatcttttttcaacaattga

SEQ ID NO: 5546 - DNA, 1479 bp, Streptococcus pneumoniae
  misc_feature (1)..(1479): tiling:Spneumo1:WAN024FAV; Cluster includes WAN0243HZ spr1 709|gtfA|15903751|NP_359301.1|1680991..1682433|-|1443 bp|D extransucrase (sucrose 6-glucosyltransferase)|S.pneumoniae |R6|NC_003098.1|ORF|221
ttggcttcaattagaaaaaggagagtaatgatgccrattcaaaataaaaccatgttgattacctattctgatagccttggaaataatcttaaagacttatatgataatttggaagagcattttsgagatgctattggaggagttcaccttttaccatttttcccatcaacagktgatcgtggatttgcgccagttgactacgacgaagtggactcagyttttggtgattgggaggatgtkaagcgtttaggtgagaratattatcttatgtttgattttatgattaatcatatttctcgtcaatccaagtattataaggactatcaagaaaaacatgaagccagtgaatttaaagmtctctttttaaactgggataagttttggccagaaaaccgtccgacacagtctgatgtagatttaatttacaagcgtaaggatcgtgcaccaaagcaagagattgtgtttgaagatggttcagtggaacatttgtggaatacctttggtgaggagcagattgatcttgatgtgaccaaagaagtaactatggaatttatccgtaagaccattcagcacttggcaagtaatgggtgtgatttgattcgtctagatgcctttgcttatgcagtgaagaaattggatactaatgatttctttgtggaaccagatatttgggatttattggacaaagttcgagatatcgctrcygagtatgggacagagyttttacctgagattcatgaacactattcgattcagtttaaaatagcagaccatgattactatgtttatgattttgctcttccaatggtgacactttatactctttacagttccagaacagagcgtttggctaagtggttaaagatgagcccgatgaagcaatttacgacgctagatacccatgatgggattggagtagtagatgtcaaggatatcctgaccgatgaggagattgactatgcttcaaatgaactctataaggttggagccaatgtcaaacgtaagtactctagtgccgagtataacaacttagatrtctaccaaatcaattcaacctactattcagcgcttggagatgatgawgtcaagtattttctcgctcgtctaattcaagcttttgccccaggtattcctcagrtttactatgtgggtctattagcaggcaagaatgacttgaaattattagaagaaactaaagaaggtcgaaatattaatcgtcattactatagcaacgaggaaatagcaaaagaagtgcaacgacctgttgtgaaggcccttctcaatctattttctttccgtaaccrttcagaagcctttgatctagargggactactgagatagagacaccaacagctcacagcattgtaatcaaacgtcaaaataaagataagtccgtaacagcagtagyagaaattgatttgcaaaatcagacttatcgggtaattgagaatggagttgaagtawcatttykaactaat

SEQ ID NO: 5547 - DNA, 1133 bp, Streptococcus pneumoniae
  misc_feature (1)..(1133): tiling:Spneumo1:WAN024G4N; Cluster includes WAN024409 spr1 049|acoC|15903093|NP_358643.1|1044023..1045150|-|1128 bp|D ihydrolipoamide S-acetyltransferase|S.pneumoniae|R6|NC_003 098.1|ORF|211
ttggcttcatcgaagccatcgtcgatttcctatttttcagtcgcttttgacgccctttgtatcataaatagaattggagaggtcatggctgatgacaagctaagagcgactcctgcagctagaaagttagcrgatgatttagggataaacctctacgacgtttctggctcaggtgcaaacggtcgtgtccacaaagaagacgtggaaacttataaagacacaaacgtggttcgcatttcgccacttgcaaaacgaattgccctcgaacataacattgcttggcaggaaatccaaggaaccggtcatcgtggtaaaatcatgaagaaggatgttttggccctgcttcctgaaaatatcgaaaacgatagcatcaaatctcctgctcagattgaaaaagtggaagaagtccctgataacgtaacaccatatggtraaatcgagcgtattccaatgacaccaatgcgtaaggttattgcccaacgcatggttgaatcttacttgactgcgccaaccttcaccctcaactatgaagttgatatgactgaaatgttggctcttcgtaagarggttcttgagccaatcatggaagcaactgggaagaagactactgtaacagaccttctttcrcttgcagttgttaagwctcttatgaaacayccatacatcaaygcttcattgacagaagatggcaagactattatcactcacaactatgtcaatcttgccatggcagttgggatggataatggattgatgacacctgttgtttacaatgctgagaagatgagtctttcagaactggttgtagcctttaaggatgttattggccgtaccttggatggtaaattggctccaagtgagttacaaaattcaacattcacaatcagtaatttgggaatgtttggtgttcagtcctttggyccgattattaaccaacccaactcagctatccttggtgtcagttcgacaatcgagaagccagttgtcgtcaatggtgaaattgtgattcgcccaatcatgagtttaggattaaccattgaccaccgtgtcgtagatggtatggctggtgctaagtttatgaaggacttgaaagagttgattgaaacsccaatctcaatgttratttaactaat

SEQ ID NO: 5548 - DNA, 681 bp, Streptococcus pneumoniae
  misc_feature (1)..(681): tiling:Spneumo1:WAN024CGR; Cluster includes WAN023ME8 3133 02_113a||||55355..55975|-|621 bp|EGAD orf prediction|S.pne umoniae|R6|NC_003098.1|ORF|120
ttggcttcctcgaaatctgaaaatgtgccatatgttgctgtcggaacgccgtatttgaccatgatttccttggcraaatccttggaccactccagctccgctgcagccctagtcggaccaaaggccttaagyccagcttggttaaaatcatccacgataccagcagcaagggcatcatctggaccgataaaggtccaagcaacatcattggtctttgcgaagtcaatcaatttakaatgttcggaaatagagatatttaccaattccaaaccatccagagtcatcccatcattcccaggagctacaaagactttttccacgtcttttgattcaagtaactttttagcaatcgcatgctcacgaccaccagaaccgacaacaagcagtttcattcctcaacctcttttgcgaattatttaccaacattatatcaaaaaagttcgttttaatcttgtttcagttagyattttaagccaaaaaaggaaagaaactgttttcttcccttttatcttcttaatgtctaaaatgtctcacacctgtaaagaccatagtcaagccgtatttatccgctgcttcgatggattcttggtcacggacagagccaccgggctggatgatggccttaattcctgctttggcgatttcttccacgttatccgcaaatgggaagaaggcatctga

SEQ ID NO: 5549 - DNA, 369 bp, Streptococcus pneumoniae
  misc_feature (1)..(369): tiling:Spneumo1:WAN024DVB; Cluster includes WAN023KD8 3156 67_3648b||||1966191..1966559|+|369 bp|EGAD orf prediction| S.pneumoniae|R6|NC_003098.1|ORF|110
ttggcttgtacctccaaaaaagatatggaaatgttctgccttaactggggcrayattgtggtcactaaactgaacatacttgaattgtccagcgtcagcatctgtggcttcaaagaggaaacgcacgccacgattgcctttcttgtaagtcaaaattttcttaccgacatacttgtaagtgtatttcttgctttgtccaccttgaacaaattccatagtattatcagtaatgttaatcttagtcacatctgtmtgatagccttttgtatagtaagccttgtactcagcctgggtcatcttaccagtcaacttagccttgtagtcaaagacttggtcaaacgtgccgtcttcaaggaaaggataaactga

SEQ ID NO: 5550 - DNA, 267 bp, Streptococcus pneumoniae
  misc_feature (1)..(267): tiling:Spneumo1:WAN024CL4; Cluster includes WAN02436W SP00 67||15900012|NP_344616.1|72141..72401|+|261 bp|hypothetica l protein|S.pneumoniae|TIGR4|NC_003028.1|ORF|010
ttggctttgaccttggctggagcagttttgacaaatgatgtttttgcgaacgacagacttgtggcaacacaaactactgatggtaaaaatgaaaatgtattgacctcagaggtgctaaaaccttctagtggcaatgttttggttggaatcaaaggagaatttgtggctcctcatcaacaatctattttggatgccatcaatgctatctgtaaagaagcggctgacgaaggtttggtagataagtatgtccctatcaaaykaactaat

SEQ ID NO: 5551 - DNA, 222 bp, Streptococcus pneumoniae
  misc_feature (1)..(222): tiling:Spneumo1:WAN024D3G; Cluster includes WAN0243HF spr1 729||15903771|NP_359321.1|1707340..1707555|-|216 bp|Conser ved hypothetical protein|S.pneumoniae|R6|NC_003098.1|ORF|1 11
ttggcttttacgtttgatgtatctatgtactacagcgtagatgatgtagtgtcraatgcttttaaaaaacgaatgwtattggacagtttttttgcctttaattgctcaggaaccatgaaagtcagtacttgggtttatgacaagggagaatggtattatgtaagttcttctggttccatgattgcgaatgattgggtcaaagacaatggcaagctarctaat

SEQ ID NO: 5552 - DNA, 423 bp, Streptococcus pneumoniae
  misc_feature (1)..(423): tiling:Spneumo1:WAN024D2Y; Cluster includes WAN023LCI 3153 10_2095b||||1130246..1130668|+|423 bp|EGAD orf prediction| S.pneumoniae|R6|NC_003098.1|ORF|110
ttgggaaataatagagaaggaatctcgtcccaatccagtatccaagaagaggtcatgaatatcacgcagacggactttcttgccgtcaatcttgtattcgctatctccactacgatagayatggcgttccaccctgatttcttgacctgcatccttgataaatccgtcatgattatccagagtcacaactacagaagcataattgagcggtttgcgactttckgttccagcaaagatgayatccggcatcttgcccccacggagactcttgacactagactcccccaaagcccaacgcagactttctgtaatattggactttccagatccattgggtccaacaactgccgtcacaccttggtcaaaaacgaccttggtcttatcagcaaaagacttgaacccctgaatttcgatttcctttaa

SEQ ID NO: 5553 - DNA, 246 bp, Streptococcus pneumoniae
  misc_feature (1)..(246): tiling:Spneumo1:WAN024GLP; Cluster includes WAN023KVZ 3133 83_2809||||1496853..1497098|-|246 bp|EGAD orf prediction|S .pneumoniae|R6|NC_003098.1|ORF|110
ttgggaacacttgtaaagagtacagtctttgcccccatctccttrgcatctaatagactatctaaaatagaaggagttgagcctgaaagtgagaagcccagtactagacaattttcatccatgatgctggttgtccaggcaaagccgtcttggtctgtcaaagcttcgcagaccacacctartcgcataaaacgtaatttcatttcacgggcgacgaggccagaactccctgttccaaagaagtag

SEQ ID NO: 5554 - DNA, 108 bp, Streptococcus pneumoniae
  misc_feature (1)..(108): tiling:Spneumo1:WAN024DTJ; Cluster includes WAN024374 SP00 59||15900004|NP_344608.1|64593..64694|+|102 bp|hypothetica l protein|S.pneumoniae|TIGR4|NC_003028.1|ORF|020
ttgggaattgccatatttttacctctattttccttcttccatagaaaattttaccataaaagcgaaaaaaatagtagtcttttgaataaaaaattagaactaactaat

SEQ ID NO: 5555 - DNA, 383 bp, Streptococcus pneumoniae
  misc_feature (1)..(383): tiling:Spneumo1:WAN024DBK; Cluster includes WAN02442W spr0 954||15902998|NP_358548.1|936852..937304|+|453 bp|Hypothet ical protein|S.pneumoniae|R6|NC_003098.1|ORF|111
ttgggacaaaaagttgtagccatgcttgattttttattagcatatagtgattattctaaagacttcagaccattgattattgatcagcctgaagacaatctagacaatcgttatatttacaggcatttagttcagcagtttagagatgtgaaagctcaacgtcaaattattttagcaacacataatgctacaattgtaacaaattctatgacagatcaagttgttattatggagtcagatggagttaacggatggattgaatcacagggatatgttagtgaaaaatatataaaaaatcatatcatcaatcaattagagggaggaaaagattccttcaagcataaaatgtctatatatgagacggctttatcagagtarctaat

SEQ ID NO: 5556 - DNA, 353 bp, Streptococcus pneumoniae
  misc_feature (1)..(353): tiling:Spneumo1:WAN024DCP; Cluster includes WAN02444L spr0 893||15902937|NP_358487.1|882279..882626|+|348 bp|Hypothet ical protein|S.pneumoniae|R6|NC_003098.1|ORF|111
ttgggagttgcagaaaaaatagaggaggtcagtatgggtaaatctttattaacggatgaaatgattgaaagagctaatagaggcgaaaaaatttcaggtcctcctttgctagatgataatgaggaractaagattttaccaacctcttcttcccgttttggttatgccaatcctaaggatcatggttttagccaggaaaccttgaarattcaggtcgaaccatctattcataaaagccgtcgyattgaaaataccaagagaaatgtcttcaattctaagttgaataaaatcttattygcggtcatytttctcttgattttgcttgttttagcaatgaaacttttgtaactaat

SEQ ID NO: 5557 - DNA, 267 bp, Streptococcus pneumoniae
  misc_feature (1)..(267): tiling:Spneumo1:WAN024DWA; Cluster includes WAN023KE0 3156 63_3612||||1940385..1940651|+|267 bp|EGAD orf prediction|S .pneumoniae|R6|NC_003098.1|ORF|110
ttgggatacttcaaggagcaagtcgccctttcctctcctccaaggactgaccttaaccgaataatctgtgtgagctgtcggataaaggacaaagccatcgtggtgcttgaccaccaaaatcaactttttgaagcccgtttccttgagcacacgaacccactcacgcgcatccaactgactcgggttaaagcgctcaggatcctcctgtccagtcccccattcttggtcataaaaggtattaggaccgaagtggataaaagctgctag

SEQ ID NO: 5558 - DNA, 759 bp, Streptococcus pneumoniae
  misc_feature (1)..(759): tiling:Spneumo1:WAN024CBW; Cluster includes WAN0244Q3 spr0 119||15902163|NP_357713.1|125670..126428|+|759 bp|Hypothet ical protein|S.pneumoniae|R6|NC_003098.1|ORF|101
ttgggatggattcatatctgcracagtaagatgagtaatgtagataagattcgaaaaatacayatyatcgtdtgttggrtrtatatatttttatcattyarkscgatwatmartracacggagtattttttgcttatttttttagcttttatctactcaatagtatcactacctctatattctgtgaaaaataaaatagtatctatctgtctagyyataaattcgattctgttaatgagtttycccattttaatcaataartttttcccagaaagttttttgacttataycgtattaataagtgtttttatymyagagttrryaatytttcatttaattrggraagattttgmtaytaaattgactaacgaatataagaaaattagtcagttyagaagcaaggtgtctcaatctccttggataaaatatttagagatttctagttttatattaactatatttccatctattctttatggtacagttgataatcatgtactgactcttatctttttgataaaaatttgtgyagatacyacgataaaatttttattcatcagattatttgacacaagtactttaatgaagaggagaatattttttcttttcgcattggatgttatagyttacttatttttaggatatcttttagtgattcaaaaagcaggctatttgttttcggttttacttcttttytctaatttttcagttccmtttatcaragaaaargartwygaattatttaaaaatagmaagtaa

SEQ ID NO: 5559 - DNA, 339 bp, Streptococcus pneumoniae
  misc_feature (1)..(339): tiling:Spneumo1:WAN024DUP; Cluster includes WAN023KCF 3142 29_3680a||||1986589..1986861|-|273 bp|EGAD orf prediction| S.pneumoniae|R6|NC_003098.1|ORF|220
ttgggcaaccttgtaaagggtctcaaggtctgcgtggccagtatacatttgttcacgggtacggccatgcatggcgagggcagaaacacctgcagcytcagcagcgagrgcattttctactgcmagagatgggtccgcccagccggtacgcattttgacagtaagtgggatatcaaggacagactggaccttgttgatgatrgagtaratcttgtcwggatccttgagccacatagcwccagcttcgttcttcacgattttgttgacagggcagcccatgttgatatcgacgatatcggtcttggtgttttcttggatgaattctgctgcgcgtgctag

SEQ ID NO: 5560 - DNA, 135 bp, Streptococcus pneumoniae
  misc_feature (1)..(135): tiling:Spneumo1:WAN024BIN; Cluster includes WAN0242G4 SP11 09||15900976|NP_345580.1|1038685..1038804|-|120 bp|hypothe tical protein|S.pneumoniae|TIGR4|NC_003028.1|ORF|021
ttgggcaagatgtttgaagaatttcctaaactccctgatttgaagcaagtcactttccctratgacaaagaaaaaagccaaaacagcaaagaaaaactagatgactgctttccaacaactcccatcctarctaat

SEQ ID NO: 5561 - DNA, 288 bp, Streptococcus pneumoniae
  misc_feature (1)..(288): tiling:Spneumo1:WAN024EX6; Cluster includes WAN023KSJ 3154 84_2949||||1570685..1570972|+|288 bp|EGAD orf prediction|S .pneumoniae|R6|NC_003098.1|ORF|110
ttgggcaaggaagtcccgcaccatgctggacgagatatccatgagcggtacgtccacccagataactggataggaagtccctaccttgtagcgtggacgctgaacccccacaaactgaaccatgtcaaccagttcatcaattcggtaccacttaggcagatagtcaaccatgtcggcaccgatgataaagtaataatccgtatctggattcttctctgtcaaaatcttcatggtrtcgtaggtgtaggaaatacccttgcgctccaactcaatggtttcaatgactag

SEQ ID NO: 5562 - DNA, 405 bp, Streptococcus pneumoniae
  misc_feature (1)..(405): tiling:Spneumo1:WAN024FEK; Cluster includes WAN023KSQ 3154 82_2936||||1564073..1564477|+|405 bp|EGAD orf prediction|S .pneumoniae|R6|NC_003098.1|ORF|110
ttgggcaatcacttctgcactatctgttccacgacctaccaagcgatcttgcaattcatccaaatctggtggtgtcaggaagataaagacagcatctggaacctttttcttgacctgaagagcaccctgaacttcaatttcaaggaaaacatcgattcccttgtccaaggtttcattgacataggtcagaggagttccatagtagttaccgacatattctgcgtattccaacatctgtccttgacgaatcagctcttcaaattcttcacgagtacggaagaaatagtcaacaccgtccacttctccaggacgttgtgcgcgtgtcgtcatcgatacagaatattgaaattggttttcagaactctcaaaaatctctcttctaaccgttccttttccaacccctga

SEQ ID NO: 5563 - DNA, 299 bp, Streptococcus pneumoniae
  misc_feature (1)..(299): tiling:Spneumo1:WAN024DLZ; Cluster includes WAN0244Q2 spr0 120||15902164|NP_357714.1|127503..127802|+|300 bp|Hypothet ical protein|S.pneumoniae|R6|NC_003098.1|ORF|110
ttgggcagtagtgagaactgccccgtgctttttattttgagaaaatatggagtttgtcgttgaaattacttgattgtattttggaytatcaagaaagattcaatrgaaaarcatgtcaagtatcaacgaattataagtatttagagaytttcaaagtgaatttttgcttgactgatttacatcatttatttgrcttayacaaaatcacacgagattatgctagtcaaacaaaacctgctattcaagmtggtgtttttattttagaagattttagaaatatcctatgtacaatgatgtaa

SEQ ID NO: 5564 - DNA, 475 bp, Streptococcus pneumoniae
  misc_feature (1)..(475): tiling:Spneumo1:WAN024EY9; Cluster includes WAN023KXW 3154 70_2715b||||1446035..1446346|+|312 bp|EGAD orf prediction| S.pneumoniae|R6|NC_003098.1|ORF|220
ttgggcagttggattcttatcctcactatgggccatgtagctagtcaagatgctggcaatagcctcttcaccrtamgtttccgtcaryggaagaacagcctccacctgcatctttccttgggtgatggtrcccgtcttgtccagacagagcatatccacgcgcgccaaggtctcaacagagtacatctcctgcaccaagacctttttcaagcccaacttaatcactgcagtcaagagcgaagtaatggtcaaaagggcaattcccttaggcaacattcccaaaagagctgtcgacgagtttacaacggatgacttgagaggcaggccttttaaaagcaaggcttccagcaagagagccagaccaaagggaatgataatcttcccagtaaaaccagccaacttgtccagcgatttcatgatacgggagttgatgggtttaacggtcttagcctcaagcatgagtttggcagcatag

SEQ ID NO: 5565 - DNA, 294 bp, Streptococcus pneumoniae
  misc_feature (1)..(294): tiling:Spneumo1:WAN024CE4; Cluster includes WAN023MD4 3135 53_154||||71308..71601|-|294 bp|EGAD orf prediction|S.pneu moniae|R6|NC_003098.1|ORF|110
ttgggcataaacgatgtaagggaagacacggtaaatatcattcaagacaccgccacaaccaagggccacttctttgacattttcaagaccaaaagcttgatcactcaaaagcacaacacgacgagcaatctggtcaccagcaacttcacgaaccaagtccaagtcgtacttacgagtgtagtctgtcgttgtaccaaagaccaaaacaactgtattgtcgttgataagagattttggaccgtgacggaagccaactgggctttcatacatggtcgcaacttgaccagcagttaa

SEQ ID NO: 5566 - DNA, 315 bp, Streptococcus pneumoniae
  misc_feature (1)..(315): tiling:Spneumo1:WAN024GHD; Cluster includes WAN023LXE 3147 53_993||||520327..520641|-|315 bp|EGAD orf prediction|S.pn eumoniae|R6|NC_003098.1|ORF|110
ttgggcatccacrtttcctgtaaatggttgttcgtaagtattcttsagatacttgagattggtctcggcatcgcgaactgccttttccgtgaagttgataggcttacggtagtgctgggtcgcaaagaagaaacgaagtacttgcccatcaagagttttaagggcatcgtgtaccgtaatgaagttacccaaggacttagacattttgacattgtcgatattgacaaagccattgtgcatccagtagttagcaaaagccttgcctgttttagcttcagaytgggcaatttcattggtgtggtgtggaaactctag

SEQ ID NO: 5567 - DNA, 360 bp, Streptococcus pneumoniae
  misc_feature (1)..(360): tiling:Spneumo1:WAN024G7S; Cluster includes WAN023LK7 3147 30_1722||||915553..915912|-|360 bp|EGAD orf prediction|S.p neumoniae|R6|NC_003098.1|ORF|110
ttgggcgataaaatcgatataggcaggtccaaaattataggcttgaacagctgtccagatatctacmcccttcttctgcgccagatagagattgcctgtcagagtttgaatgccttgccgaatgctagaggcattatcattgatggtgttggtggaaccacttgcagactcactagactgcataacatcgccttcttttccttttgtttcagtataaatcatagcaagcacaagctcttcgtttgctggggtgtcttkttcactcaayatttctcgcaccatgggttgataggtcatgacttgtttgacatcttgatgaacgcggtaagctttatagccagcaaaaaggaagactgctag

SEQ ID NO: 5568 - DNA, 569 bp, Streptococcus pneumoniae
  misc_feature (1)..(569): tiling:Spneumo1:WAN024FVP; Cluster includes WAN0243VR spr1 212|rplJ|15903255|NP_358805.1|1207765..1208265|-|501 bp|50 S Ribosomal protein L10|S.pneumoniae|R6|NC_003098.1|ORF|22 1
ttgggcgcgtttttctttttgaaaaattccccaagcaaaataattacggaggtgaacacactaatgagtgaagcaattattgctaaaaaagcggaactagttgacgtagtagctgaaaaaatgaaagctgctgcatctatcgtcgttgtagacgctcgtggwttgacagttgagcaagatacagttcttcgtcgtgagcttcgtggaagcgaagttgagtataaagttattaaaaactcaatcttgcgtcgtgcagctgaaaaagctggtcttgaagatcttgcatctgtatttgttggaccatctgcagtagcattttctaatgaagatgttatcgcaccagcgaaaatcttgaayracttttctaaaaacgctgaagcacttgaaattaaaggtggtgcaatcgaaggcgctgtcgcatctaaagaagagattcttgcacttgcaactcttccaaaccgcgaaggacttctttytatgctcctttctgtacttcaagcgccagtgcgcaacgttgctcttgcagtcaaagcggttgcagaaagcaaagaagacgcggcttaactaat

SEQ ID NO: 5569 - DNA, 660 bp, Streptococcus pneumoniae
  misc_feature (1)..(660): tiling:Spneumo1:WAN024F4Z; Cluster includes WAN023M9X 3143 98_328a||||174412..174954|-|543 bp|EGAD orf prediction|S.p neumoniae|R6|NC_003098.1|ORF|221
ttgggcgttagcgcgtgtagcaaaaatcttggctctatttcgaatgatggctggattctccagcaaggcttccaattcagtgtcggtcatctctgcgactgcktgaatttgatagcyatraaakrcttctcggaaagcttggcgtttgttgagyaccgtttcccaagacaggcctgcctgataggtttccatacacaacaactcaaacaayrcttggtcatcatggaggggctggccccactcctcatcatgataggcgatgtagagyggrttggtcatcttgacccacgaacaacgttttgtcatkctctgctcctatttgaccaacattttaagggccgacttgatatagttctcagctgtatctgtcgttccttcaaagaatttcttgattttcttgagctctgttgccttgtagcccagagccaacatggcttccatagcttcttccaattcttggttttcagcacttgcttgcactgcgaccttggcaggaaggycatctcctgcaactactaccttgccttccaagtccagcaccatctgctgggctgttttcttgccaattttagggaacttggtcaagtaggtratgttcttggtttcaatggcttgaaccaagccagcattgtcatcagcagcgataatagcaagagctga

SEQ ID NO: 5570 - DNA, 228 bp, Streptococcus pneumoniae
  misc_feature (1)..(228): tiling:Spneumo1:WAN024F3E; Cluster includes WAN023LZ9 3133 82_908||||480405..480632|-|228 bp|EGAD orf prediction|S.pn eumoniae|R6|NC_003098.1|ORF|110
ttgggcttcgatgctaccaaggttgacatagataaagcggttgtcaaagcgttctactgtaccagacatgatttcttgctcatgttctttgtaagtattgtaagtgatggcacgtgtttgcttgcgcattttttccatgatggtttgtttggcagattgggctgctacacgaccaaactcagctggtgcttcttcaaacttgattttgtctccaagttcataagctga

SEQ ID NO: 5571 - DNA, 114 bp, Streptococcus pneumoniae
  misc_feature (1)..(114): tiling:Spneumo1:WAN024DP9; Cluster includes WAN0242GA SP11 03||15900970|NP_345574.1|1035922..1036029|-|108 bp|hypothe tical protein|S.pneumoniae|TIGR4|NC_003028.1|ORF|121
ttgggcttgatggctatgctactaataacaattaggagagaaaatcaggcacttgttaacaacaaggattatccccttgagatgaaaggaactttagaaatcttaykaactaat

SEQ ID NO: 5572 - DNA, 264 bp, Streptococcus pneumoniae
  misc_feature (1)..(264): tiling:Spneumo1:WAN024FYP; Cluster includes WAN023LB1 3152 84_2146||||1156649..1156873|+|225 bp|EGAD orf prediction|S .pneumoniae|R6|NC_003098.1|ORF|220
ttgggctttgacaaccttttcaatcaaggcatcatcagaaactgctgcaagttcaggtatttcattgtggtgcaccccaatttcaagggagcggcaggccttgagaagagattcctcgatgttacgaccgattgccatgacttctccagtcgccttcatttgtgtaccgagacggcgttcacccttttcaaacttgtcaaatgggaaacgtggaatcttagcaactacgtagtcaagggctggttcaaacatggcataggttga

SEQ ID NO: 5573 - DNA, 251 bp, Streptococcus pneumoniae
  misc_feature (1)..(251): tiling:Spneumo1:WAN024GIT; Cluster includes WAN023LYT 3135 25_923||||484908..485153|-|246 bp|EGAD orf prediction|S.pn eumoniae|R6|NC_003098.1|ORF|110
ttgggctttttggttatccgaagcaaggttactcaaaatggtgtaataaaccttggcaacagacaagtcacccagcatctgaacatctrtgatggtcacaccttggacacgtggatcacggactttcttttgcaaaatctcattgacttcacgcttgatttccatgcccacacgatctrtacggaaatgatttrccatgatattcctttctctactttgaaccaaaagctaggccagcagacctarctaat

SEQ ID NO: 5574 - DNA, 123 bp, Streptococcus pneumoniae
  misc_feature (1)..(123): tiling:Spneumo1:WAN024CMQ; Cluster includes WAN024349 SP01 70||15900107|NP_344711.1|165095..165211|+|117 bp|hypotheti cal protein|S.pneumoniae|TIGR4|NC_003028.1|ORF|020
ttggggagaagattttgcttcatctgttccttgaaaaaagtcacagcagtcatcacagacgatagtactgaacaaaactatgaagagttagaaatttatacgcaggtgattgtactaactaat

SEQ ID NO: 5575 - DNA, 228 bp, Streptococcus pneumoniae
  misc_feature (1)..(228): tiling:Spneumo1:WAN024G4W; Cluster includes WAN023LH8 3137 07_1902||||1025948..1026175|-|228 bp|EGAD orf prediction|S .pneumoniae|R6|NC_003098.1|ORF|110
ttggggattttgcgcatagcgttggaatttctcattgaaaatctgcgggtctgcctgacggaaacgatagatggattgcttgatatctcccaccataaagcgattgtggccattagacaacaattccagcatccgttcttgaatatggttggtatcctgatactcatcgaccatgacttcatggaagcgctcctgataagactcacgaacttgtgggaaattctctaa

SEQ ID NO: 5576 - DNA, 231 bp, Streptococcus pneumoniae
  misc_feature (1)..(231): tiling:Spneumo1:WAN024EYD; Cluster includes WAN023KZF 3133 71_2647||||1410787..1411017|+|231 bp|EGAD orf prediction|S .pneumoniae|R6|NC_003098.1|ORF|110
ttggggccttatctgtatgaattgtttttgccattttcttttcctcacaatttttctaagattgcatcccaagcctcatccatccctgccttrctgacagatgaaaagaggatgaaatcgtcactygggtcaaagtttaatttctttttgattgctgattcatgcttgttccatttaccacgaggaatcttgtccgccttggtcgccacaatgatgactggaatctcataa

SEQ ID NO: 5577 - DNA, 258 bp, Streptococcus pneumoniae
  misc_feature (1)..(258): tiling:Spneumo1:WAN024GFG; Cluster includes WAN023LUV 3136 51_1116||||590441..590698|-|258 bp|EGAD orf prediction|S.p neumoniae|R6|NC_003098.1|ORF|110
ttggggtctagaatcaatcttcatmtggtaattggctccaaaatgaagtttgagccgttgatcgacattttgaagaccaactcccccacgtttgagttgactttgactactatcaccagcatcttggaagccaacgccatcatcctcaatacggatgaccaatcccgaatcctgtttctggacagaaagtttaatatggccctgaccttccttttccttaatgccatggtaaagagcattttctacaaggggttgtag

SEQ ID NO: 5578 - DNA, 150 bp, Streptococcus pneumoniae
  misc_feature (1)..(150): tiling:Spneumo1:WAN024BFG; Cluster includes WAN023SH8 NC_0 03098.1_2508||||1948064..1948189|+|126 bp|Glimmer 2.02 orf prediction|S.pneumoniae|R6|NC_003098.1|ORF|112
ttggggtgttttattatgaaattgagttatgaarataaagttcagatctatgaactaagaaagcaaggacaaagcttcaaacagctttcaaaaagatttggtgtggatgtttctggtctaaagtcatstgaawctttgagactaactaat

SEQ ID NO: 5579 - DNA, 411 bp, Streptococcus pneumoniae
  misc_feature (1)..(411): tiling:Spneumo1:WAN024GGN; Cluster includes WAN023LWQ 3152 24_1030||||537929..538339|-|411 bp|EGAD orf prediction|S.p neumoniae|R6|NC_003098.1|ORF|110
ttgggtaatttcatccctaacttcactttcactagccacctgaatattgctgtctgcattggccgaatcactgaggagagccaggacgccgtcacgaccaatctctgccaaacgagcaaaatcagttgcataagattcactagccgtttggtcaaatttgaagtcacctgtataaacgatgcttccttccgatgtcttcaagacaattcccagactctctggaacggagtaagtcgtagggaagaaggaaaccactgtcccaccaaaatcaatctccgtattctcatcaatgacatggaaatcattaaatttcttaacggcatcatttcctttgacaaagagctttgccaactcaatggtcaactcagacccaaatacaggaactttagcctctgccaagagatamggtag

SEQ ID NO: 5580 - DNA, 327 bp, Streptococcus pneumoniae
  misc_feature (1)..(327): tiling:Spneumo1:WAN024DDX; Cluster includes WAN024478 spr0 798||15902842|NP_358392.1|802865..803119|-|255 bp|Hypothet ical protein|S.pneumoniae|R6|NC_003098.1|ORF|110
ttgggtactaagatwggtataagtaaaaacaccattrgaaattatgaaaaaagggttargtctactaagaaaaatactatatttgacttagytaaagtattcagtagcttgatygatgccctctttyctccagttcaaaaggattctcctagcgatatccaatctatctacgaccaacgggmaccayccagacaaggtaaagtyctracctatgccgagaggcaactgtatgatcagaaaaacgaagtatcgtaaaaatcatcagactggacgactacagacagactacttactctcgtgttaggtagtttatctctgcaggtagcc

SEQ ID NO: 5581 - DNA, 309 bp, Streptococcus pneumoniae
  misc_feature (1)..(309): tiling:Spneumo1:WAN024FRJ; Cluster includes WAN023L51 3156 40_2395b||||1279086..1279394|+|309 bp|EGAD orf prediction| S.pneumoniae|R6|NC_003098.1|ORF|110
ttgggtagaaaggtggatttcaaggcctggtgcttcagtcrctgcaatcataatcaaggctgggtcagatacgataactgctgcaatcccgatatcacgcagtttacggaaccactcaccagcaccagcttcatttccttcgtgcataaccatattagccgctacatagaccttggcaccatacttggccgcaaactgcacgccttcttccatctgttcgaaagtaaagtttcccgcacggctacgaagaccataggcctgaccaccgataaaracagcatctgctccatactgaacagctacctttag

SEQ ID NO: 5582 - DNA, 261 bp, Streptococcus pneumoniae
  misc_feature (1)..(261): tiling:Spneumo1:WAN024DXV; Cluster includes WAN023KGG 3155 22_3515||||1883441..1883701|+|261 bp|EGAD orf prediction|S .pneumoniae|R6|NC_003098.1|ORF|110
ttgggtcacaaagtaactagccgccaccaaggcgtcattggcttcatgaggaaaagctgcgtggccacctttgcctttgaaacggatcttcacctcgcaagttcctgcaaagagtgtatgagtattagtcgcaatctggccgactttcaaatctggacgaacatggagaccatagaattgatctggcaaccaatctccaaaagcaycgtcctcatacatgagcataccaccagcttcattttcttcagcaggctgaaatag

SEQ ID NO: 5583 - DNA, 240 bp, Streptococcus pneumoniae
  misc_feature (1)..(240): tiling:Spneumo1:WAN024FFX; Cluster includes WAN023KUW 3157 10_2847||||1521963..1522202|+|240 bp|EGAD orf prediction|S .pneumoniae|R6|NC_003098.1|ORF|110
ttgggtcagggcaaaaggaagacttrctttaactgctgtcactttttcctgagaccaattcagaaccagaccacttccctgaactctattttcagacttgagcrtctgcarctgcatttggaaataaaagagttcckcaaacttkatacggcgaagagcctgcttgtattctgccaaatmctttggaaaatgcatagcwcggactgcctgacaacgggacatgagtttgtatttgtctag

SEQ ID NO: 5584 - DNA, 78 bp, Streptococcus pneumoniae
  misc_feature (1)..(78): tiling:Spneumo1:WAN024FK2; Cluster includes WAN023QWQ cont ig_1373_7||||4415..4492|-|78 bp|Glimmer 2.02 orf predictio n|S.pneumoniae|670|WAN01UE2V|ORF|001
ttgggtctctttttcatgagcttgaaaacragaaagcgaattaagaccccaacgggtcttttttcacaagctttgaaa

SEQ ID NO: 5585 - DNA, 105 bp, Streptococcus pneumoniae
  misc_feature (1)..(105): tiling:Spneumo1:WAN024DRE; Cluster includes WAN023SMI NC_0 03098.1_308||||231306..231410|-|105 bp|Glimmer 2.02 orf pr ediction|S.pneumoniae|R6|NC_003098.1|ORF|100
ttgggtggagttaagggagattattatgaaaaagaaaagtttaggattttattaaataaagttaggaggtctttatttaataactacatgatacaagacgaaact

SEQ ID NO: 5586 - DNA, 102 bp, Streptococcus pneumoniae
  misc_feature (1)..(102): tiling:Spneumo1:WAN024CMP; Cluster includes WAN023SFO NC_0 03028.1_286||||200619..200720|+|102 bp|Glimmer 2.02 orf pr ediction|S.pneumoniae|TIGR4|NC_003028.1|ORF|011
ttggtaaaatcaagatacaaagctcgtaaagaacaaagcaaaattaggaagttggagaagtttgtttacaaacaagccaacttatctattttgcacagttct

SEQ ID NO: 5587 - DNA, 462 bp, Streptococcus pneumoniae
  misc_feature (1)..(462): tiling:Spneumo1:WAN024B8K; Cluster includes WAN0243TH spr1 294||15903337|NP_358887.1|1290375..1290836|-|462 bp|Hypoth etical protein|S.pneumoniae|R6|NC_003098.1|ORF|201
ttggtaaactgcgaacckctagaagcttatygtcaactggaagaagctgmacttgttggatgttgggyrcatgtgagaaggaarttttttgaagygmcccccaagcaagcrrataaatcatccttagragctaaaggtttagcttattgtratcagttatttkccytggaaagaractgggaggcwttgycagctgatgaacgactacagaaacgtcaagaasakctccarcccytaatggaagayttctttgcttggtgccggcgtcagtcagttttatcgggttcaaaactaggaagggcaattgaatacagcctcaagtatagcctcaagtataaagaaacctttaagactattttgaaagacggacatctggtcctttccaataatctagctgaaygcgccattaaatcattggttatgggacggagtaaaagartycagtggactcttttagcctaa

SEQ ID NO: 5588 - DNA, 456 bp, Streptococcus pneumoniae
  misc_feature (1)..(456): tiling:Spneumo1:WAN024B8L; Cluster includes WAN0244KD spr0 325||15902369|NP_357919.1|324231..324680|+|450 bp|Hypothet ical protein|S.pneumoniae|R6|NC_003098.1|ORF|132
ttggtaaactrcgarcmgctagaagcttatcgtcaactggmagaagctgmacttgttggatgttgggyrcatgtgagaaggaarttttttgaagygmcccscaagcaagcrgataaatcatcbttaggagctaaaggwttagyytattgtratcagttatttkccttggaaakagactgggaggctttryyagctgatgaacgrctacrgaaacgtcaagaasakctccarcccytamtrgaagayttctttgcttggtgccgbcgtcagtcagttttakcrggttcaaaactaggaagggcaattgaatacagcctcaagtatraagaaacctttaagacyattttraaagacggacatctggtcctttccaataatctagctgaaygcrccattaaatcattggttatgggacggagtaaaagagtycagtggactcttttagccykractaat

SEQ ID NO: 5589 - DNA, 393 bp, Streptococcus pneumoniae
  misc_feature (1)..(393): tiling:Spneumo1:WAN024ATK; Cluster includes WAN023M5A 3150 82_589||||302858..303250|-|393 bp|EGAD orf prediction|S.pn eumoniae|R6|NC_003098.1|ORF|110
ttggtaaaggatatcacgccaaacaaagtcctctgtaatgccttcttttgtatctgcatcaaaggtcggtcgttgcgttgttgccagaatttcccctgttttagcactgaccaaagtcgctgtcatgtactttccttttaccttctcttgaaaagcatccatctgggtttccataaaggactggagggggctggaaatggttgtataaacatccttaccgtccatcgttcgttgggaaacttgttctgttccgggtacaatattacccagacgatccttttcataggtaataatgccgtctgtccctgcaagaatactgttcaaggaactctccattccagaggttcccagcaagctcttgcttccatcttcattttcatggagctgagctag

SEQ ID NO: 5590 - DNA, 114 bp, Streptococcus pneumoniae
  misc_feature (1)..(114): tiling:Spneumo1:WAN024DD6; Cluster includes WAN023R6X cont ig_1532_33||||26381..26494|-|114 bp|Glimmer 2.02 orf predi ction|S.pneumoniae|670|WAN01UDMU|ORF|000
ttggtaaccatttttatgaaattttttaaagttaaaaatataatttataatactatcttcttccattttctgattttagttctgaaagttccaaaaggtgcaaccgtatttaca

SEQ ID NO: 5591 - DNA, 237 bp, Streptococcus pneumoniae
  misc_feature (1)..(237): tiling:Spneumo1:WAN024ES5; Cluster includes WAN023KKF 3130 50_3336||||1786723..1786959|+|237 bp|EGAD orf prediction|S .pneumoniae|R6|NC_003098.1|ORF|110
ttggtaagagagtcaaggtcaaaccaagcgctacgaaggcaatacttcctactatcagcaaaagtgcagccccaatccaatttccaagagacatgtccacacctcttacaaaatgcccaactgagaaaaccaccaagattgaaaccaaataatcaaccagcatacttgttatctttgatagataatattctaccatatttacagggctatgacgcaatgttttctgccagttgttga

SEQ ID NO: 5592 - DNA, 270 bp, Streptococcus pneumoniae
  misc_feature (1)..(270): tiling:Spneumo1:WAN024GEP; Cluster includes WAN023LTZ 3131 37_1156b||||609194..609463|+|270 bp|EGAD orf prediction|S. pneumoniae|R6|NC_003098.1|ORF|110
ttggtaagtcttatcgacatgatattggggatggaggagctgaaagcccaagggaccgttatcggtcaagaggaggagtcccgttgtatctcggtccagtcggccaacggcatagagcttgtcagactggatgtyagatggaagcaggtccatgacggtcggaagttccttgtctttgttggctgtaacgrcaccagcaggtttatgaagcataagataggtgtgttcatagccttgaatgattcgatcctgaaaaaggagttcttgtag

SEQ ID NO: 5593 - DNA, 267 bp, Streptococcus pneumoniae
  misc_feature (1)..(267): tiling:Spneumo1:WAN024GAR; Cluster includes WAN023LPA 3133 78_1434||||757545..757811|-|267 bp|EGAD orf prediction|S.p neumoniae|R6|NC_003098.1|ORF|110
ttggtaatcacaagaacagaaattgtagcaaacaaggcggcaaggctaatcgaaatcttgctaaattctggaatcatttgcgctaagaccaacgcaagtattgccatcagcataactggaataaaaattttatttttcaacctgttagattcaatattggctttcatttcatctaaggatggcaaggttccgatacggacttgcttaaacaatgttaacagcgataataggattacaataataccaatactcatatttggcatatag

SEQ ID NO: 5594 - DNA, 704 bp, Streptococcus pneumoniae
  misc_feature (1)..(704): tiling:Spneumo1:WAN024EYV; Cluster includes WAN0243RS spr1 355|glnP|15903398|NP_358948.1|1337591..1338289|-|699 bp|AB C transporter membrane-spanning permease - glutamine trans port|S.pneumoniae|R6|NC_003098.1|ORF|211
ttggtaatcttgtttattcatgctataataggaacaattacttttaggaggtgcagtatgtcttatttatttgagatattaccgagtttactgaatggtgcgagcacgactgtacaggtctttgcactggtcttgctattttcgattcccttgggcgttttgattgcctttgccttgcaagtccattggaagcccctccattatctgattaacatttacatctgggttatgcgaggaacccccttactcttgcaactgatttttatctattatgtgctcccaagtattgggattcgtttagaccgccttcctgcagctattattgcctttgttctcaactatgcagcttactttgcagaaattttccgtgggggaattgacactattccaagaggacagtatgaggcygccaaggtcttgaagtttagcccttttgacagagtgcgctatattatcttgccccaagtgaccaagatcgttcttcctagtgtctttaatgaagttatgagtttggtcaaggatacttctttggtctatgctctcggaatttcagaccttatcttggctagtcgaacagctgctaaccgcgatgctagtctrgttcctatgttcttggcaggagccatttayttgattttrattgggattgtgacaattatttccaaaaaagttgagaaraagtayagttattatagatarctaat

SEQ ID NO: 5595 - DNA, 264 bp, Streptococcus pneumoniae
  misc_feature (1)..(264): tiling:Spneumo1:WAN024CPI; Cluster includes WAN023M66 3134 19_528||||269481..269744|-|264 bp|EGAD orf prediction|S.pn eumoniae|R6|NC_003098.1|ORF|110
ttggtacaaaccaagcaggctagtctggaagcgaccttgtctgacagcacttgtatagtcaaagacttcccctgtcaccacactttcttgatgacgaacctgataatctgtcccgtaggcaagtctcggcgcatctttcccttccgcaatgcggtcaatcacagccaaggcttctggagcaatacgccctgttaccaagggcatcccttgtttgataatacctgccttctgctctgctatgrcctccaaggtgtcaccaagtar

SEQ ID NO: 5596 - DNA, 261 bp, Streptococcus pneumoniae
  misc_feature (1)..(261): tiling:Spneumo1:WAN024F8H; Cluster includes WAN023KUM 3130 28_2854b||||1524997..1525257|+|261 bp|EGAD orf prediction| S.pneumoniae|R6|NC_003098.1|ORF|110
ttggtacgaggcttagcagtatacacgcgcatgaccatgaaaatcttatccgctaccttcttttgcaaggcagataaacggcgagcatattccaagaccgcctcttcattatcagaagagcaaggaccaatcaccaagagaatacggtcatcttcccctgaaataatatctgccaattccctgtcacggctttccttgagtctcaaggcttccgcagacaattgggtttcagccttgatgacttccatatcgatttcttga

SEQ ID NO: 5597 - DNA, 618 bp, Streptococcus pneumoniae
  misc_feature (1)..(618): tiling:Spneumo1:WAN024G6A; Cluster includes WAN023LJ1 3140 16_1817a||||979250..979816|-|567 bp|EGAD orf prediction|S. pneumoniae|R6|NC_003098.1|ORF|120
ttggtactgagcgtggttggtatcttggtactcatcaacgtggatgtattggaatttttgctggtagtaggtcaaaacatcaggattttgatcaaagagacgcaaggtcagcataatcaaatcatcaaagtcaacggattcagactgacgaagttctttttgataggctgtataacactgggccacaatttgcgtatacatatcgccagcttgggcagcataagcaacatcatcaatcaaatcattcttagcattggaaatggtccccaaaatagttcgttcattccattttttaggrtccaagttcaactgtttgagaatacgtttcatgagcgttcgctgttcaccaggatccacaattgtaaaattacgattgtagccaatatggtccgcatcgcgacgcaaaatacgcacacacatggagtggaaggtcgcaatcagacagtcctgagtmgctggattgaggctataagcacgctctttcatctcacgcgcagccttgttggtaaaggtaatggccaagatattccaaggattgaccagcttttcatcaatcaaataagcgatacggtgggtyaaaacacgagtctttccagaaccagcccctgccatgattag

SEQ ID NO: 5598 - DNA, 108 bp, Streptococcus pneumoniae
  misc_feature (1)..(108): tiling:Spneumo1:WAN024CFJ; Cluster includes WAN023RWK cont ig_1609_20||||12145..12252|+|108 bp|Glimmer 2.02 orf predi ction|S.pneumoniae|670|WAN01UDCD|ORF|000
ttggtagaagatactcttcgttcttcaggtmtatttgccttagacaacttaaaagcagcaagtgtcactatagctattgatgtcatagaaagtcctatttcaaygtcc

SEQ ID NO: 5599 - DNA, 1042 bp, Streptococcus pneumoniae
  misc_feature (1)..(1042): tiling:Spneumo1:WAN024GHT; Cluster includes WAN023LXY 3152 28_968||||505559..505786|-|228 bp|EGAD orf prediction|S.pn eumoniae|R6|NC_003098.1|ORF|330
ttggtagaatccacggatatcgttgattccataacggagcatagctacacgctcttgtccaagaccaaaggcaaarccagagtatacagtcgcatcgataccactcatttcaaggacacgtgggtgaaccataccggcycccataatttcgatccaacctgttttcttacatacrttacagccttctccaccacacttgaagcaagaaacatccacctcaacagatggctctgtgaatgggaagtaagatggacgcaaacgaatttgacgctcttcaccaaacattttttggacaatcaactgaagcgttccttgaagatcagccatagagatatttttcccaactaccaagccttcgatttggtggaattggtgactgtgggtcgcatcgtccgtatcgcgacggaagacacgccctggcgagatcatcttcaaaggacctttagaaaaatcatgggcatccatagcacgcgcctgaactggagacgtgtgggtacggagcaagatttcttcagtgatatagaaagtatcctgcatatcacgagctgggtggtcttttggaaggttcatacgttcaaagttatagtagtcttgctccacttcaaaaccatccacgacttgataacccataccgatgaagatatcttcgatttcttcactggtttgtgtcaaaacgtgacggtgaccagtcgcaactggacgacctggaagcgtcacatckatactctcgctagccagttgagccgcgactttcttttcttccaagagcttagctgtttcttcaaaagcagcwgtcaagacatcacgagcttcattgacgtgtttcccgatgattggacgcatctcagcagaaacatctttcatccctttgaggatttcagtgagcgaaccctttttaccaaggacagagacacgcaaatcttgcatctctttttcatttccagcagtaatctgcttcaagctagycagcgtttcttcgcgaagcgcttttaattgttcttcaatagttgacatatttcctccatcagtctctcgtagataa

SEQ ID NO: 5600 - DNA, 240 bp, Streptococcus pneumoniae
  misc_feature (1)..(240): tiling:Spneumo1:WAN024CNP; Cluster includes WAN023IF4-5 86 455_3148c||||1789142..1790035|-|894 bp|EGAD orf prediction |S.pneumoniae|TIGR4|WAN01UC25|ORF|011
ttggtagcacaagatccaaaagcacaagatagcactaaacygactgctgaaaaatcaactgttaaagcacctgctcaaagagtagatgtaaaagatataactcatttaacagatgaagaaaaagttaaggttgctattttacaagcaaatggttcagcattagayggagcgacaatcaatgtagctggagatggtacagcaacaatcacattcccagatggttcagtagtgacgattcta

SEQ ID NO: 5601 - DNA, 75 bp, Streptococcus pneumoniae
  misc_feature (1)..(75): tiling:Spneumo1:WAN024F45; Cluster includes WAN023RQO cont ig_1589_11||||6116..6190|-|75 bp|Glimmer 2.02 orf predicti on|S.pneumoniae|670|WAN01UDFI|ORF|001
ttggtaggaagggagagagaagatgaaatcaatgagaatcttatttttgttagctttaattcaaatcagtttgag

SEQ ID NO: 5602 - DNA, 264 bp, Streptococcus pneumoniae
  misc_feature (1)..(264): tiling:Spneumo1:WAN024D5D; Cluster includes WAN023LC0 3156 27_2114||||1139493..1139756|+|264 bp|EGAD orf prediction|S .pneumoniae|R6|NC_003098.1|ORF|110
ttggtagtaatcttggcgaatattgagagccactgcaatttcttccaaagcagcattttcagctcgctccctaataccattgatagtcccttcaacacgtcctgcaccattcttgacagcagcaaggctatttgccactgccattccgaggtcatcatgacagtgaggcgaatagatgatctgacgatccgtcttgacattctcaatcaggtatttgaagatggcaccayattcctctrgtgtggtaaatcctatattttctga

SEQ ID NO: 5603 - DNA, 267 bp, Streptococcus pneumoniae
  misc_feature (1)..(267): tiling:Spneumo1:WAN024FZQ; Cluster includes WAN023LCS 3147 12_2079||||1121461..1121727|-|267 bp|EGAD orf prediction|S .pneumoniae|R6|NC_003098.1|ORF|110
ttggtagttacgagcaatgataatcttaccagtttggaagagttcaaccaaaccgatagcagatacgatagttgtatctttaagagcgataacgaattggttgacaaagtttggcaacatcaatttagttrcttgtggcaagataatcttacgcatggtttttccataagagatacccaagcttcggctggcttccatttggccaactggaacggcctgaataccaccacgaacgatttcagcgatataagcagccgcattgagtga

SEQ ID NO: 5604 - DNA, 402 bp, Streptococcus pneumoniae
  misc_feature (1)..(402): tiling:Spneumo1:WAN024FVT; Cluster includes WAN023L8U 3152 92_2247b||||1207364..1207708|+|345 bp|EGAD orf prediction| S.pneumoniae|R6|NC_003098.1|ORF|111
ttggtatatgcctcttatttaagagtaactgaagctccagcttcttccaatttagctttgatttcttcagcttctgcagttgcaacgccttctttaacaagtgctggtgcaccgtcaacaagttctttagcttctttaagaccaagaccagtratttcacgtacaactttgataacgccaacttttttgtcgcctgcagatgtcaattcaacgtcgaatgaatctttagcagcaccagcatcagctgcatcagctgcagcaacagctacaggagcagctgcagttacaccaaattcttcttcgatagcttttacaaggtcgttcaattcaaggattgaagcttctttaatttcagcaataatgttttcaatgttcaatgccattgttatttcctccaaataa

SEQ ID NO: 5605 - DNA, 123 bp, Streptococcus pneumoniae
  misc_feature (1)..(123): tiling:Spneumo1:WAN024CMF; Cluster includes WAN0242UT SP05 34||15900447|NP_345051.1|513185..513301|+|117 bp|hypotheti cal protein|S.pneumoniae|TIGR4|NC_003028.1|ORF|020
ttggtatcaatacaatataaagaggaaagtatgtttttcatgcttgcttttttaatttttacaattcaagaggttttgatgaccatttatgatttgagtgatccaaggtcaaaactaactaat

SEQ ID NO: 5606 - DNA, 350 bp, Streptococcus pneumoniae
  misc_feature (1)..(350): tiling:Spneumo1:WAN024B2S; Cluster includes WAN024216 SP16 79||15901514|NP_346118.1|1579024..1579368|-|345 bp|hypothe tical protein|S.pneumoniae|TIGR4|NC_003028.1|ORF|020
ttggtatcttctaagtatgctgcaagagctagtttcttagatggacaggggattacagttgatgagatggcttggataattaggggcattgtgaatgcattgattggtagatacataaaattaggtacttatgcggctaagtatggtattagtatggcacgctcgatcttaagtagggtagctgcaactgcagcagcaagagtaggattactgaccaagatttctggatggattttacgagtagctgtgaatgtagctgatgtatatggtaattttgccaacaatattgctgcagcttgggatgcatatgataaaattcctaacaatggtcgtataaacttttaactaat

SEQ ID NO: 5607 - DNA, 1154 bp, Streptococcus pneumoniae
  misc_feature (1)..(1154): tiling:Spneumo1:WAN024B5S; Cluster includes WAN0244GQ spr0 456|dnaJ|15902500|NP_358050.1|464641..465759|+|1119 bp|Hea t-shock protein (activation of DnaK)|S.pneumoniae|R6|NC_00 3098.1|ORF|111
ttggtatcttgtatgaacaatactgaattttatgatcgtctgggggtatccaaaaacgcttcggcagacgaaatcaaaaaggcttatcgtaagctttccaaaaaatatcacccagatatcaacaaggagcctggtgctgaggacaagtacaaggaagttcaagaagcctatgagactttgagtgacgaccaaaaacgtgctgcctatgaccagtatggtgctgcaggcgccaatggtggttttggtggagctggtggtttcggyggtttcaatggggcaggtggyttcggtggttttgaggatattttctcaagtttcttcggcggaggcggttcttcgcgcaatccaaacgctcctcgccaaggagatgatctccagtatcgtgtcaatttgacctttgaagaagctatcttcggaactgagaaggaagttaagtatcatcgtgaagctggctgtcgtacatgtaatggmtctggtgctaagccagggacaagtccagtcacttgtggacgctgtcatggcgctggtgtcattaacgtcgatacgcagactcctcttggtatgatgcgtcgccaagtaacctgtgatgtctgtcacggtcgaggaaaagaaatcaaatatccatgtacaacctgtcatggaacaggtcatgagaaacaagctcatagcgtacatgtgaaaatccctgctggtgtggaaacaggtcaacaaattcgcctcgctggtcaaggygaagcaggctttaacggtggaccttatggkgacttgtatgtagtagtttctgtrgaagctagygacaagtttgaacgtgaaggaacgactatcttctacaatctcaacctcaactttgtccaagcggctcttggtgatacagtagatattccaactgttcacggtgatgttgaattggttattccagagggaactcagactggtaagaarttccgcctacgtagtaagggggcaccgagccttcgtggcggtgcagttggtgaccaatacgttactgttaatgtcgtaacaccgacaggcttgaacgaccgccaaaaagtagccttgaaagaattcgcggctgctggtgacttgaaagtaaatccaaagaaaaaaggcttctttgaccatatwaaagatgcctttgatggagaataactaat

SEQ ID NO: 5608 - DNA, 354 bp, Streptococcus pneumoniae
  misc_feature (1)..(354): tiling:Spneumo1:WAN024B2T; Cluster includes WAN0243N4 spr1 523||15903566|NP_359116.1|1500093..1500437|-|345 bp|Hypoth etical protein|S.pneumoniae|R6|NC_003098.1|ORF|201
ttggtatcttsktrtcwktctrwgtatgctrcaagagctagtttcttrgatggacagggrattacagttgatgagatggcttggataattarkggcattgtgamtgsattgattggtagatacataaaattaggtacttatgcrgytaagtatggtattagtatggcgcgytckatcttaartagggcagctgcaactgcggcagcaagagtaggattattgactaagatttttggatggattttacgaatagctgtgctcgsagctgatgtatatggtaattttgccaacaatattgctgyagcttgggatgcacatgataaaatccctaacaatggtcgtataaacttttaa

SEQ ID NO: 5609 - DNA, 426 bp, Streptococcus pneumoniae
  misc_feature (1)..(426): tiling:Spneumo1:WAN024FRP; Cluster includes WAN023L5N 3142 00_2371a||||1267172..1267426|-|255 bp|EGAD orf prediction| S.pneumoniae|R6|NC_003098.1|ORF|220
ttggtattcaaagcggacaatgcgtcccccgtgggtcaattcttctgtaacgacagcgctgaggcggccatcaccaaagctgatacgagtaccgaccttgaggcgtttggcaggtttagccagaacttcccactcgtctccactagtgttcttaaggaggagaagttccacatgacytcctgtctccactttttgaccatagaggcgggcagggagaactcgggtgtcgttcatgacaagggcatcaccaggttccagcatatcaataatagagtggaartgtttatcttgcatttctcctgtctcacggttgacgatgaggagtttggaggcatcacgtttttcaaggggcgtttgggcaatcaattcctctggcaagtggaaatcaaaatcagctgtattcatatatytgttcattctttctaa

SEQ ID NO: 5610 - DNA, 660 bp, Streptococcus pneumoniae
  misc_feature (1)..(660): tiling:Spneumo1:WAN024D4F; Cluster includes WAN023KQX 3152 02_3028||||1609831..1610058|+|228 bp|EGAD orf prediction|S .pneumoniae|R6|NC_003098.1|ORF|220
ttggtattcgttttgggcgatagagtcgtagacaatccctgccccagcctgcacataggctctttgatttttgagaatcatggttcggatggcgatggccaaatccatatcacccgtcgcagacaagtagccgattgccccagcgtatactccccgtttttccgtttccagttcatagatacgtctcatcgctcgaatctttggtgctccagaaacggttccagcaggaagcgttgctttcaaggcatccatggcagtgagttctgcaagcaaacgccccttgactacgctggtcaaatgcatgacgtagcggaagagctccacttccatatacttagtgacttggacactggtcgtttcagagatgcggccaatatcgttacgccccaagtctaccaacattcgatgttctgctgtttccttctcatcagagaggaggtcagtcgccaaggccttgtcttcttcatccgtagcccctcttggtcgcgtccctgcaatcggattggttgtcacgatgccatttttgacagaaaccaaactttctggactagctccgatgatttgataatccccaaaatcatagaaataaaggtaattagaaggattagtyacgcggagatttctgtagaagtcaaatggatttccagtaacttctgctga

SEQ ID NO: 5611 - DNA, 282 bp, Streptococcus pneumoniae
  misc_feature (1)..(282): tiling:Spneumo1:WAN024GDG; Cluster includes WAN023LSE 3135 09_1249||||661089..661370|-|282 bp|EGAD orf prediction|S.p neumoniae|R6|NC_003098.1|ORF|110
ttggtcaaaaaaggtcaaatttttgctctgctttcattagacagaaacaaaaacccaacctcctttcgtgactggaaatacttttccaagtcattcttcttttcgatcttattttgtaccgaacaagcggtctccagcatctccaagacctggaacgatataaccgtgttcgttcaaacgttcatccaaggctgctgtaaagatttctacatctggatgagcttcttgaagggcttttacaccctctggagcagatacaaggcagacaaatttgatatttga

SEQ ID NO: 5612 - DNA, 240 bp, Streptococcus pneumoniae
  misc_feature (1)..(240): tiling:Spneumo1:WAN024EWQ; Cluster includes WAN023KR7 3126 44_3015||||1605702..1605941|+|240 bp|EGAD orf prediction|S .pneumoniae|R6|NC_003098.1|ORF|110
ttggtcaaggtagctgcgtggtgctcygtatccacaccaagyccwgctgcttcagyyccatacatagctacwgactcatcttctacaaagggatggaagagmccgatrgcattcgacccaccaccaacacaggctactagggcatctggcagatytygwcctgtcaagtcacggtactgttgtttagcctctcgaccgatgacactttggaagtcacgaacgatttctggaaatggatga

SEQ ID NO: 5613 - DNA, 630 bp, Streptococcus pneumoniae
  misc_feature (1)..(630): tiling:Spneumo1:WAN024AUH; Cluster includes WAN02443O spr0 926||15902970|NP_358520.1|912179..912790|+|612 bp|Conserve d hypothetical protein|S.pneumoniae|R6|NC_003098.1|ORF|101
ttggtcaarataggatggtygtsgttgatgatggacaggattagacaagagttggaaaakggtggagctgtcrttctrcctacagagackgtttatggtctttttkccaaggccttagaygaaaaagcagttgaccatgtttaccarctcaaacgtcgtcctagagayaaggcrctcaatctcaatrtygcctctttmgaggayatcttgcacttttcwaagaatcagccarcttatctacaaaaacttgtagagacctttttgccaggtcccttgaccattattctcgaagccaatgaccgagttccctattgggtaaattctgaccttgcaactattggatttcggatgcccagtcaccctatcacactggatttaattcgagagacaggtcccttgattgggccgtctgccaatatctcaggtcaggcaagtggtgtaacctttgaacaaattctgaaggattttgaccaagaggttctgggtctggaagacgatgcttttctaactggacaggattcaactattgtggatttgtctggagacaaggtgaaaatcttacgccaaggygcaattaaacgagaagatattcttgctcggttgccaragatttcttttgaggaggmwtga

SEQ ID NO: 5614 - DNA, 347 bp, Streptococcus pneumoniae
  misc_feature (1)..(347): tiling:Spneumo1:WAN024GBS; Cluster includes WAN023LQ9 3136 39_1378||||730478..730795|-|318 bp|EGAD orf prediction|S.p neumoniae|R6|NC_003098.1|ORF|100
ttggtcaatagacttgagcgggatattaaggccttctgcctgtttagtggtcacactagaagttgttacagctgtaatctgcaatccttcttccttgatacgacgaccgatttcttcgacaaaataataggcagtcgagcctgttccaagtccaacgaccattccatcgctcacgaactcagcagccttgatacctgccattttcttcagattttccaccgatttacctccatcattctcagttcttattttactatgaaaccgctttttattcaagtaaaaacatcaaatctacatttttcatcaatctttctttaaaaatatgcattttatttttaccaaacgaa

SEQ ID NO: 5615 - DNA, 258 bp, Streptococcus pneumoniae
  misc_feature (1)..(258): tiling:Spneumo1:WAN024G7N; Cluster includes WAN023LK5 3134 80_1726||||917505..917762|-|258 bp|EGAD orf prediction|S.p neumoniae|R6|NC_003098.1|ORF|110
ttggtcaatgacaggatcctggataaagaaatcttcaaggggcatgaggttrtgcgaattcttacggaaaaatcctgtttccaagacaccattcactcgacgaacgggcacctgcgccttattgcgatacttgactggatgttccataccaagcgtttcagcaacttctacatctgcaattccagcaatcttgtagagactgtccttgacttgcttggttttaaacttgagctgttctggataagaaaggtgtcctaa

SEQ ID NO: 5616 - DNA, 351 bp, Streptococcus pneumoniae
  misc_feature (1)..(351): tiling:Spneumo1:WAN024FOO; Cluster includes WAN023L44 3156 43_2441b||||1302675..1303025|+|351 bp|EGAD orf prediction| S.pneumoniae|R6|NC_003098.1|ORF|110
ttggtcacggaagaaagcaccatcacacacagcacagtaagaaacaccacgactgttcagttcttcttctccaggtactcccaaaggacggtgtttagaaccagttgctacgataactgtacgtgtttcatatgtttggtcatcagtcatcactttcttaaaatcaccatggtcttcgacattttcaacataaccataaatgtgctcaacaccaagattttcaagtggttcaaacatcttttcagccaattcaggtccactaatattagcgtatcctgggtaattttcgatatcagatgtattattcatctgaccacctggcagaccaccttcaatcaaagctacttttag

SEQ ID NO: 5617 - DNA, 585 bp, Streptococcus pneumoniae
  misc_feature (1)..(585): tiling:Spneumo1:WAN024EYZ; Cluster includes WAN0243WP spr1 178||15903221|NP_358771.1|1176909..1177487|-|579 bp|Hypoth etical protein|S.pneumoniae|R6|NC_003098.1|ORF|221
ttggtcagaaattattggaaggctaaaagctggttactagttttagctttgtcatttttaattctttccccagcaggtgcccaagaaagcttgagttttttctttgtgaaaatcacagatgcatccaaaacggttaaaaatggtggtcagactgagacccagaaactcgttacgaagatggcatcagacttcgaaagagtagaaaataaggattctgaggttggtaagattgttaaggaaaagttagctctatctggagatattactgaagccaaactcaccgaaatttcctcagctctattagcttttgaaaaagaacaaaatcctgttgacctagatgcggaaaaggaaaaattggtaawsmgtmtaagtcctcgttttgaaaccttagarcaggccattgcctccaaagatttggaaaaagtccgagaagcttttaagaaaatgaattccacttggaccatcaatgaaagtgtggttcgtgacaatagtayagctcattatggacgtgttgaaacagctatttccttcctgcctagtagcatggaaaycgaacctacagatgagtctggaacaykaactaat

SEQ ID NO: 5618 - DNA, 568 bp, Streptococcus pneumoniae
  misc_feature (1)..(568): tiling:Spneumo1:WAN024D58; Cluster includes WAN023LBY 3156 28_2116b||||1139967..1140479|+|513 bp|EGAD orf prediction| S.pneumoniae|R6|NC_003098.1|ORF|110
ttggtcatgcttgaggttgactgcttccacttgtccttctctgcccttttccagcttattccaagagattttcatcaagacggcataccacttttgattgccttcatggcgcaatacagctgtatcaggcgatttttcccacagatactccaactggtttccatacttttcctgaacttgagtcatgatacgcttagtctgatgacagataaaatcttgcacatcaaaacaagccttccgaatctggtaaagaatctccagacaagcctcacggacatttccgacaaaacttcccctcatgctttccatataaacgtgaggatagaggtcaccagtctcttggtcaaagacttgaaagytcacattatcagcagtgatggacacagtcatgacaaagtcaccttgcaaaatctggcaactatatgtccagamttcsctattttctataaaaccataatcatgagccttttccttgattaaattgataggatttaaaaatttcaaacataagttgaaaactgctacccaaggcttagcagttcctttcctattttttaaaaaacaacct

SEQ ID NO: 5619 - DNA, 309 bp, Streptococcus pneumoniae
  misc_feature (1)..(309): tiling:Spneumo1:WAN024FG2; Cluster includes WAN023KUY 3157 09_2844b||||1519467..1519775|+|309 bp|EGAD orf prediction| S.pneumoniae|R6|NC_003098.1|ORF|110
ttggtcattaacaaatacattcatggcttcgtgagcatactcaggcatgatrcgataggttttatcgcaggtcagacgattataaatcgcaaactgggtaatgggatagcaaacatcgtcgtccaagcccgtaatcatcttaacctcaccttggatacgatgggcaagatttttgacatcgatataggcaagggtcgccatgatttcctcctctgtttcatggaaggggtcgtraaacttgaaataacggaaaagttcgtcgtaagcctcgctagtattaccaatctcaatcacccgtctgaagtctga

SEQ ID NO: 5620 - DNA, 333 bp, Streptococcus pneumoniae
  misc_feature (1)..(333): tiling:Spneumo1:WAN024FBU; Cluster includes WAN023KP8 3154 93_3101b||||1651640..1651972|+|333 bp|EGAD orf prediction| S.pneumoniae|R6|NC_003098.1|ORF|110
ttggtcattttcaggtgttcgatagtagtcaatgacatcccaatgctcaacaatacaaccattctcatcctcacggaaagtatccgtcgtcacccattgagcttctccaccattcagatattgatgaacatgaacaaagaccagattgccatcctcaatggtgcggacaatcttaatctgacgctctggatgacgctcaaagaaatctgcaaagaaggctgcaaatccttctttcccgtcaggaacacctgtcgaatgttggatataggtatcccctacagactgggcttgagcctcagcaactcgyccgtcttgaatggcatggatgtatag

SEQ ID NO: 5621 - DNA, 375 bp, Streptococcus pneumoniae
  misc_feature (1)..(375): tiling:Spneumo1:WAN024EXG; Cluster includes WAN023KUU 3157 11_2849||||1522914..1523288|+|375 bp|EGAD orf prediction|S .pneumoniae|R6|NC_003098.1|ORF|110
ttggtccatcgaaaccctgccgacaattgggcaagcttggccatctaccaagacagagaaattttgcatgtctcttgtccatccatctgcatacccgattggcacggtcgcgatgacttgctcgctatccgcttgataagttgctccatagcccatgcaagctccagctggaactgtcttgacatgaaccagagcagactccaaggtcaaggccggtatcaaatcataaggcaaatccaagaccgctccacttggattgagrccatacatggcatctcccatacgaaccgcattgaaaatagtctctacatgccaaagagtcgttgcagaattgctagcatgaaccagctctggaacttccttcatactagctaa

SEQ ID NO: 5622 - DNA, 243 bp, Streptococcus pneumoniae
  misc_feature (1)..(243): tiling:Spneumo1:WAN024GCZ; Cluster includes WAN023LS3 3133 20_1272||||674992..675234|-|243 bp|EGAD orf prediction|S.p neumoniae|R6|NC_003098.1|ORF|110
ttggtcgaaatcaaccaattatcaatggtgtcagaaataaccgttttrgtcttaattttctccataacaggatttgataagtattttttcaagaatggttgcagtttttgtgggatagtcgctgagaagaccatgaattgcaagtcttttggaagactgccagcaatcttatcaacagtttccaagaatcccatatccaaggtcatatctgcttcatcaacaacaaatgtcttggctttatga

SEQ ID NO: 5623 - DNA, 237 bp, Streptococcus pneumoniae
  misc_feature (1)..(237): tiling:Spneumo1:WAN024G5T; Cluster includes WAN023LI8 3147 19_1860||||1000546..1000782|-|237 bp|EGAD orf prediction|S .pneumoniae|R6|NC_003098.1|ORF|110
ttggtcggctcatccagaatcaaaaarttattgttttccatagacaatttagctaaaagcaaacgagctttttcgccaccagatagcatgccgactgattttttaacatcatctcctgagaaaaggaaggctccaagacggttgcggatttcaacttctggtgtcagtttgaaatcattccagagttcatccagcaccgtattacttggtgtcagcttgctttgggtttggtcatag

SEQ ID NO: 5624 - DNA, 723 bp, Streptococcus pneumoniae
  misc_feature (1)..(723): tiling:Spneumo1:WAN024G3Z; Cluster includes WAN023LFH 3132 34_1961b||||1060034..1060756|+|723 bp|EGAD orf prediction| S.pneumoniae|R6|NC_003098.1|ORF|110
ttggtctgcaagcatagccgctgcaggaatctcgatcatgataccaacttgaatgttatccgcaactgcaacaccttcagcaagaaggtttgctttttcttcatcaaagactgctttcgctgcacggaattctttcaagagcgcaaccattgggaacatgatacgcaattgaccgtgaacagacgcacgaagaagagcacggatttgtgtgcggaacatagcatctccagtctcagagatagagatacgaagagcacggaatccaaggaatgggttcatttcgtgaggcatatcgaagtaaggaagttccttatctccaccgatatccattgtacgaacgacaacaggtttaccgttcattccttcaagaacagccttgtatgcttcatactgctcatcttcagttgggaagtcttgagaatccatgtacaagaactctgtacggtaaagtccaacagcttctgcaccgttgttgttaacaccttcaacgtcttttggagtaccratattrgcagccaactcgaagtgtttaccgtcagcagtcactgtttgagcatctttcaaaagtgcccattcagctttttgtttcgcataggcttcaccagctgctttaaattctgccgcttgttcatctgttgggttgataatcacttctccagtgatcccgttaacagcaaggatgtcaccgtctttaacgatttcagtgatgttrtttgtacctaa

SEQ ID NO: 5625 - DNA, 411 bp, Streptococcus pneumoniae
  misc_feature (1)..(411): tiling:Spneumo1:WAN024FNI; Cluster includes WAN023L3O 3131 57_2468b||||1315369..1315779|+|411 bp|EGAD orf prediction| S.pneumoniae|R6|NC_003098.1|ORF|110
ttggtcttcacgccagaagaattctccgtcttccaagcgggctaccaagactttttcatttcctttgatgacatttttcaaacgctctgcgtttccgttacgaacagaaatgaagtttggcaagagttttccatcttgatcacgaacaacaaagtaacgctggtgttccttcatagaagtcaccaagacttcttctggaacttcaaggtatttagcatcaaaacttcccatgaaggcagttgggtattcaaccaaattcaagacttcattcagcaaatccgcatcaatttcgatacgtacaccatgttttgcctcaatttycttgatttggtcaacaatcatttgctcacgttcacatggatctgcgattacaaactgcttacgaaggtcttcttcatagctcaatgctga

SEQ ID NO: 5626 - DNA, 1532 bp, Streptococcus pneumoniae
  misc_feature (1)..(1532): tiling:Spneumo1:WAN024E2D; Cluster includes WAN0243E3 spr1 849|PTS-EII|15903891|NP_359441.1|1824217..1825743|-|1527 b p|Phosphotransferase system sugar-specific EII component|S .pneumoniae|R6|NC_003098.1|ORF|211
ttggtctttttgtttgcgctttcgcattatataataaacttacaaaaacaattcaaaaggagaacaattatggaagtcgtttcaartgttctaaattggttttctagcaatattttgcagaatcccgcatttttcgtaggtttattggtgttgataggatatgcacttttgaaaaaacctgcccatgacgttttttcagggtttgttaaagcaacagtagggtatatgttgcttaacgtgggtgctggtggtttggttacaacctttcgtccaatcttagcagctcttaactacaaattccaaattggtgcagcggttatcgacccttactttggacttgctgcagcaaacaacaaaattgyagcagagtttccagattttgttggaactgcaactacagctctattgattggtttyggaataaatatcttgctcgtagctcttcgaaagattacgaaggtaagaaccctctttattactggtcacatcatggtacaacaagctgcaacagtatctcttatggttctattcttagtaccacaattgcgcaatgcttacggtacagcagcgattggtatcatctgtggactttactgggcagttagttcaaatatgactgttgaggcaactcaacgcttgactggtggtggcggatttgcgattggtcaccaacagcaatttgcaatctggtttgtagataaagtagcaggacgctttggtaagaaagaagaaagtttagacaatcttaaattacctaagttcctctyaatcttccacgatacagttgttgcatctgctaccttgatgctcgtattcttcggrgccattcttttaatcttgggtccagacattatgtctaataaagaagtcatcacttcaggaactctattcaatcctgctaaacaagatttctttatgtacattatccaaacagcctttaccttctcagtttacttgttcgttttgatgcaaggtgtccgaatgttcgtatctgagttracaaacgcyttccaaggtatttcaaacaaattgttgccaggttcattcccagcggttgacgttgcagcttcttatggatttggttctccaaatgctgtcttgtcaggatttacctttggtttgattggtcaattgattacaattgtyttgctcatcgtctttaaaaatccgattcttattattacaggatttgtaccagtgttctttgacaatgcagccattgcggtctacgctgataaacgcggcggatggaaagcggctgttatcctttcctttatatcaggtgtccttcaagttgctctaggagctctttgtgtggcccttctcgatttggcatcttatggtggctaccatggaaatatcgactttgaattcccatggcttggatttggatatatcttcaaataccttggtattgttggttatgtacttgtgtgtctcttcttgcttgttattcctcaacttcaatttgccaaagcaaaagataaagagaaatattacaacggtgaagttcaagaagaagcttarctaat

SEQ ID NO: 5627 - DNA, 339 bp, Streptococcus pneumoniae
  misc_feature (1)..(339): tiling:Spneumo1:WAN024FF3; Cluster includes WAN023KTN 3130 31_2898b||||1547488..1547826|+|339 bp|EGAD orf prediction| S.pneumoniae|R6|NC_003098.1|ORF|110
ttggtgaaccccaccaatcaagaaaccaccaagaccaaatggcatgctaagaatcgcttttgtagcaataaggatgtagttttcaacaacgtggaaaactggtccaatgacaaagagtccaaggatagacatgaccaaaagtgtcacgaatggtgttaccaagaggtcaatgacatctggaacaaccttgcggacagctttttcaaatttagctccgacaaccccgatgatgaaggctggaagaacggaaccttgcaaaccaacaacagggatgaaaccaaagaagttcatcgctgttacttcaccaccttgagcaactgcccaagcgtttggaagtga

SEQ ID NO: 5628 - DNA, 1322 bp, Streptococcus pneumoniae
  misc_feature (1)..(1322): tiling:Spneumo1:WAN024FEQ; Cluster includes WAN0243LL spr1 579|sunL|15903621|NP_359171.1|1558835..1560151|-|1317 bp|r RNA methylase|S.pneumoniae|R6|NC_003098.1|ORF|231
ttggtgactaaagtagaaacggctagaagtttagctctagcagtgctagaggatgtttttgtgaaycaagcataytcaaatatygccttaaataarcayctmaagggragtcarctytykgcagcagacaagggcttagtgaccgagctrgtctatggaacggtagcccgtaaactgactctggaatggtacctatcccactttatcgaagacagagaccagttagacagctggctctatgtccttcttctcatgagtgcctaccaactccgctatttggacaagattccagatcatgctgtggtyaatgaagcagtggaattrgccaaactycgtaaaaaaggcagtgaaaaattggtcaaygcystccttcgccgtatcttgcgtgaagrctggccagatattgctagcatcaagcgaaaaaacaagcgtgactccattgcctattctctcccagtttggctagttgccaaactcaaggaagaatacggagaggagagagcaaaagccatctttgaaagcctgttagtgcgaaacaaagccagtattcgtgtaacagacctaagtcgaaaagaggaaatccaagccttgttggaggcgaatrattcccttttagcaaccactggtctggttaaggagcargggcattttgcagggcataatttgtttgcggatggagccattaccatccaagaygagtccagtcagctggttgctccgacgcttgatttacaaggtgatgagcgagtgcttgatgcctgtgcggctccaggtgggaaaacagcccatatagcctcttatcttacgacaggtcaggttactgctctggacttgtacgaccacaagttggatttaattcaagaaaatgcccaacgtctgggagttgaagatcgggttcaaactcaaaaattggatgccagaaaggtgcatgagttttttgaccaggattcctttgataagattttggtggatgctccttgttcaggaatcggtcttttgcgccgaaaaccagatatcaaatacaataaagaaacggcagatttcgcgtccttgcaggaaattcagttagaaatattaggtagtgtttgtcaaatactaggcaaaggtggtataataacttatagcacctgcactatcgtctcagaggagaattttcaagtcgttaaggcctttttagagagtcatcccgagttcgagcaggtaaaactagaacatgaatgtaaggatatcatgaaagacggctgtatcctcattacacctgaattgtatggaastgatggattcttcatcagtcaattkcscaagatatcggattarctaat

SEQ ID NO: 5629 - DNA, 124 bp, Streptococcus pneumoniae
  misc_feature (1)..(124): tiling:Spneumo1:WAN024A68; Cluster includes WAN0247Y0 R6.I G_22||||16821..16944|+|124 bp|Between () (+ strand) and RN A (ribosomal) (+ strand)|S.pneumoniae|R6|NC_003098.1|IG|44 0
ttggtgagagatcaccaagtaatgcacattgaaaattgaatatctatatcaaatagtaacaagaaaataaaccgaaaacgctgtagtattaataagagtttatgactgaaaggtcagaaaataa

SEQ ID NO: 5630 - DNA, 438 bp, Streptococcus pneumoniae
  misc_feature (1)..(438): tiling:Spneumo1:WAN024G8W; Cluster includes WAN023LMI 3129 53_1585a||||843585..843815|-|231 bp|EGAD orf prediction|S. pneumoniae|R6|NC_003098.1|ORF|310
ttggtgagaytgggtcattctctctttagctttttcaataattrcgttagccatattctttcttattccttttcttcgatattatttgaaactgttgttccgatattttcaccaaatacgacacgtttgatgttgcctgrttggttcatgttgaakacaaccaagtcaatgtcgttgtccattgagagggttgargctgttgagtccatgatacgaagacctttrttgataacrtcacggtgggtcaattcttcaaacttaacrgctgtcttrtcyttcttaggatcggcattgtamacaccatcgacgccatttttagccatgaggatggcatctgcttcgatttcagctgcacgaagggccgctgttgtatctgtcgagaagtatggtgaaccaattccagcaccaaagataacgatacggcctttttcaaggtga

SEQ ID NO: 5631 - DNA, 363 bp, Streptococcus pneumoniae
  misc_feature (1)..(363): tiling:Spneumo1:WAN024FZT; Cluster includes WAN023LCX 3146 25_2077a||||1120230..1120469|-|240 bp|EGAD orf prediction| S.pneumoniae|R6|NC_003098.1|ORF|220
ttggtgatttcaatttcaaaaccttggtctttagcgattgccttaatcaattccatatcaataccagtgtattggttgcttgaattttggaaaacaaaaggggcaaaagaagaatcgctggcaatgatatatttagccttaacaggaatagcttttaatcctgcgagagtagttgtagttggcactgctgaagatgatgaagcagtccatttcttgataattttatcaagactaccatcttttttcatttcagacaaggcttggttaaattcagtaaccaggtgctcgtatttacttccttttttcacaccgaaagcaaaacttcctacagcttcaccatccatttcaatatggaggtcttga

SEQ ID NO: 5632 - DNA, 225 bp, Streptococcus pneumoniae
  misc_feature (1)..(225): tiling:Spneumo1:WAN024GC7; Cluster includes WAN023LQY 3136 42_1345||||714686..714910|-|225 bp|EGAD orf prediction|S.p neumoniae|R6|NC_003098.1|ORF|110
ttggtgccgcacaaatggctgctagtttcttcccttcttgctcgaagctttgcaattcttgaatcaaggtctgattatcacgtaaatgtgcagaaccaggcatacctccaggaagaacaatcatatcatagtctgataaatctccatcaaagacatgatctgctcttacttggattgcatgcgaacccgttacttgctcttcaaaaccaaccatatcacatgtga

SEQ ID NO: 5633 - DNA, 237 bp, Streptococcus pneumoniae
  misc_feature (1)..(237): tiling:Spneumo1:WAN024G2C; Cluster includes WAN023LDP 3156 22_2045b||||1105260..1105496|+|237 bp|EGAD orf prediction| S.pneumoniae|R6|NC_003098.1|ORF|110
ttggtgcgaataagttccgaaagggaaactccttcaaacttagccattgctttcataaatgttttatcagcttcagaaacttttaatgtaatagtagtcatcttttgtgctcccttttttaatggtaacaccattgtattactttttaggtgttcagtcaatataaaaagaacaccttctcagcgttctttctatatctctgtcaatggtgttgcggtatctggtgaggtatcataa

SEQ ID NO: 5634 - DNA, 303 bp, Streptococcus pneumoniae
  misc_feature (1)..(303): tiling:Spneumo1:WAN024B7E; Cluster includes WAN023J89 8479 2_1906a||||1088709..1088939|-|231 bp|EGAD orf prediction|S .pneumoniae|TIGR4|WAN01UC25|ORF|020
ttggtgttgagtgtccaagctgtcatcagggacaaattattgagcgaaaaaccaagcgtaatcgcctattctatggttgcaatcgctatccagaatgtgaatttacctcttgggacaagcctgttggtcgtgactgtccaaaatgtggcaacttcctcatggagaaaaaagtccgtggtggtggcaagcaggttgtttgtagcaaaggcgactacgaggaagaaaagatggctctttgtcaactgtagtgggttgaagtcagctaagctcgagaaaggacaaattttgtcctttcttttttga

SEQ ID NO: 5635 - DNA, 114 bp, Streptococcus pneumoniae
  misc_feature (1)..(114): tiling:Spneumo1:WAN024BDU; Cluster includes WAN023UFN AX57 1764.1_4||||3583..3696|+|114 bp|Glimmer 2.02 orf predictio n|S.pneumoniae||AX571764.1|ORF|001
ttggttaacaatcataaaggttggccagaaactttttttgaaaaaagtagacattttcattatttgttgccgctttctgtaaggttaatactcaataaaaatcaaaaagcaaac

SEQ ID NO: 5636 - DNA, 300 bp, Streptococcus pneumoniae
  misc_feature (1)..(300): tiling:Spneumo1:WAN024GAH; Cluster includes WAN023LOT 3136 36_1462a||||774569..774868|-|300 bp|EGAD orf prediction|S. pneumoniae|R6|NC_003098.1|ORF|110
ttggttaatctggttaagagcaacgcccccgatactagcatctgtcgccgtcttgacgtttcctccaaccatgacagttggaatctgcttttcaaccaactgagcggcatggtgaatggagttggtcacaactgtaacattcttattgaccaattcatgaatcaaaaaagcagttgttgttccagcatcgataaagatgacatctttttctttaatgagagaggctgctttctgagccagcaayttcttttcttgaaggtttttgacmgatttttcttgaatggtttcttcttcctgtaa

SEQ ID NO: 5637 - DNA, 105 bp, Streptococcus pneumoniae
  misc_feature (1)..(105): tiling:Spneumo1:WAN024G3T; Cluster includes WAN0242E6 SP11 81||15901046|NP_345650.1|1119751..1119849|-|99 bp|hypothet ical protein|S.pneumoniae|TIGR4|NC_003028.1|ORF|020
ttggttaatttttcttgtttgagcatattatcacctcgtttcctactactatcttaccataaactagctcatcattcaaatacaaaaacaacaaaactaactaat

SEQ ID NO: 5638 - DNA, 258 bp, Streptococcus pneumoniae
  misc_feature (1)..(258): tiling:Spneumo1:WAN024G3S; Cluster includes WAN023LFA 3134 70_1971||||1065891..1066148|-|258 bp|EGAD orf prediction|S .pneumoniae|R6|NC_003098.1|ORF|110
ttggttacgacgcggatattgtcaataggcaactcacgcgcaaaaaactctaatgttgttcctggtccaatgaaaatagtttctctttcttctactagactgcctgcaaaatgggctatttcttgtttttctgccgtttggagggcttgtttttcaatatttgatcgctcattagtcaaaagggagttggttcgaagtttttcagctccaccatgcacacgaatcagcaaatctttatcagctaattcctgtaaatag

SEQ ID NO: 5639 - DNA, 105 bp, Streptococcus pneumoniae
  misc_feature (1)..(105): tiling:Spneumo1:WAN024FRB; Cluster includes WAN023PVZ pne0 8_15||||10686..10790|+|105 bp|Type 7A capsule operon, Glim mer 2.02 orf prediction|S.pneumoniae||WAN01UCKE|ORF|000
ttggttagagagatagaaaaatttgctccttgggtgaataaagtttatcttgttacagaaaatcaaaaaccggtctggttgactattaatagtgataagttatat

SEQ ID NO: 5640 - DNA, 678 bp, Streptococcus pneumoniae
  misc_feature (1)..(678): tiling:Spneumo1:WAN024GFP; Cluster includes WAN0244DL spr0 569||15902613|NP_358163.1|580406..581026|+|621 bp|Hypothet ical protein|S.pneumoniae|R6|NC_003098.1|ORF|121
ttggttaggataatgcagacgactaaggtcagtatcaataataaaatagatgctaatttcattaaaatcatacccatattgtatcataaaaaaargctaatggaaacgagaaacagaggaatttataggaaagtcaggcttttgagattgtgggtgatttttgttataatgaaagtyatraaatcttatrataccttgaatgattattatcgaaaactctttggagaaaagacttttaaagtccctattgatgcggratttgaytgtcccaatcgtgatggractgtggctcatggrggctgtactttttgtacggtttchggttctggagatrcyattgtrgcmccrgatscgcctatccgtgagcaattttataaggaaattgactttatkcaycgyaagtggccrgatgttcrgaagtatctggtttattttcaaaattttaccaacacccrtgaaaaggtggaagttattcgagagcgttatgaacaggctatcaatgagccaggtgtggtaggaatcaatattggaaygcgcccagactgtttaccagacgaaaccatcgaatatttggctgagttatcggagtgcatgcatgtgacggttgaattgggcttgyaractacttatgaagcaacctctgacctgattaaccgtgcgcattcttatgaattgtag

SEQ ID NO: 5641 - DNA, 174 bp, Streptococcus pneumoniae
  misc_feature (1)..(174): tiling:Spneumo1:WAN024CME; Cluster includes WAN0242UK SP05 43||15900456|NP_345060.1|516699..516866|+|168 bp|hypotheti cal protein|S.pneumoniae|TIGR4|NC_003028.1|ORF|020
ttggttagtcctagaaccaatcaacttatgtttatcggcttggcagattttatgtttgtcatttgtttgtatagaggtatttcagaaacagaattctatcaacaactaatcgcttatataggtgtattctctgcttgtttatcacgcttctgctcatgtggggctykaactaat

SEQ ID NO: 5642 - DNA, 111 bp, Streptococcus pneumoniae
  misc_feature (1)..(111): tiling:Spneumo1:WAN024CLW; Cluster includes WAN0242FC SP11 38||15901004|NP_345608.1|1068977..1069087|-|111 bp|hypothe tical protein|S.pneumoniae|TIGR4|NC_003028.1|ORF|020
ttggttagtttgccacacttggtttatatggtcgtggaaagcatggctattacttctcaaagggcgatttctcaccccatgaaaagtgtctatttttgtttaggtttgtaa

SEQ ID NO: 5643 - DNA, 279 bp, Streptococcus pneumoniae
  misc_feature (1)..(279): tiling:Spneumo1:WAN024CRP; Cluster includes WAN023M2A 3136 09_757||||392638..392916|-|279 bp|EGAD orf prediction|S.pn eumoniae|R6|NC_003098.1|ORF|110
ttggttatagaggtcatacaagccctcaaaggctttccccatcccgataggccagttcatagggtagctagcaatgcccaagatttcttccaattcttgcaagagatccaaaggctcacgaccgtcacggtccagcttgttcataaaggtaaaractggaatgccacgatgtttcacaacctcaaacaatttcttggtttgagcctcgatccccttggcagagtccacgaccatgaccgcagcatccaccgccatcaaggtacgataggtatcttctga

SEQ ID NO: 5644 - DNA, 228 bp, Streptococcus pneumoniae
  misc_feature (1)..(228): tiling:Spneumo1:WAN024GE4; Cluster includes WAN023LTD 3136 49_1197||||632837..633064|-|228 bp|EGAD orf prediction|S.p neumoniae|R6|NC_003098.1|ORF|110
ttggttaycaagcgtcctgcgatagtagctgtttcgtttttatcgtgtaattgttctttatcgaggttggcatatttatcttttaattcttgtgaatttgcagtacgttcaaaacgttttccgaaaggatcgattccttgttcgcggagcgcagccattttttcacggcgaacgatctgctggtcatttagttcttccatatgttctgtagacatgggatcctcctag

SEQ ID NO: 5645 - DNA, 383 bp, Streptococcus pneumoniae
  misc_feature (1)..(383): tiling:Spneumo1:WAN024GIU; Cluster includes WAN0244G0 spr0 482|rbfA|15902526|NP_358076.1|484929..485306|+|378 bp|Ribo some binding factor A|S.pneumoniae|R6|NC_003098.1|ORF|111
ttggttcaaagtagagaaaggaatatcatggyaaatcatttccgtayrgatcgtgtgggcatggaaatcaagcgtgaagtcaatgagattttgcaaaagaaagtycgtgatccacgtgtccaaggtgtgaccatcayagatgttcagatgytgggtgacttgtctgttgccaaggtttattacaccattttgagtaaccttgcttcggataaccaaaaagcccaaatcgggcttgaaaaagcaactggtaccatcaaacgtgaacttggtcgcaatttgaaattgtacaaaatcccagatttgaccttcgtcaaagacgagtccatcgagtatggaaacaagattgacgagatgctacgcaatctggataagaactaactaat

SEQ ID NO: 5646 - DNA, 472 bp, Streptococcus pneumoniae
  misc_feature (1)..(472): tiling:Spneumo1:WAN024CES; Cluster includes WAN023MDB 3153 78_147||||69219..69479|-|261 bp|EGAD orf prediction|S.pneu moniae|R6|NC_003098.1|ORF|220
ttggttcaagatgtcttggaaatcaatcatcttttcaccgattggcaacttgtaagaaatttcaaagttaatcactgttgctacaagagcacccatcatgaagacaccaagtacagatgcagcgtcaatcaaagctgtcaaggtactttgcatgttgttgataaggttaaccccttctttgtaagcaaattccaactgtttccaacggaagatgtcatacgctactgcaactgcaatccaaaggaagatcccccaaggttggccagcgatagccatagttgctgcgactgaccccatgatagcaggtacaagtgaaccaaagattgtatccccaagaggagcgaatggtcccatcaaacctgtcttgataccgttaacrgcgtcttttgaacctacaccatctttttcttccatggcaaggtcaaaaccagcgataatggtatggaagaatggygaagtattgaagaattga

SEQ ID NO: 5647 - DNA, 225 bp, Streptococcus pneumoniae
  misc_feature (1)..(225): tiling:Spneumo1:WAN024D4E; Cluster includes WAN023KQU 3157 28_3030||||1610325..1610549|+|225 bp|EGAD orf prediction|S .pneumoniae|R6|NC_003098.1|ORF|110
ttggttcaaggatttttccaaggcctcttgactgcgctcactataaartgcatcctctatgacatgtatcttctccttcttgtggtcaaagacyatatagctctcatagacaaagaaatgcatgtctggcgtcccaattgtatcctcagggatttgaccaatttcttcataaagcgaaatcatatcgtaacccacaaaaccaatggctccaccaccaaaaggtag

SEQ ID NO: 5648 - DNA, 240 bp, Streptococcus pneumoniae
  misc_feature (1)..(240): tiling:Spneumo1:WAN024GK5; Cluster includes WAN023M01 3147 61_868||||461659..461898|-|240 bp|EGAD orf prediction|S.pn eumoniae|R6|NC_003098.1|ORF|110
ttggttcgcttcgctcactattacaaagccaaacatattttatctttcttcatagtttattgtcgtttcggacaagttttctattatgtaaattgcgacacgaggagtcgaaatcgattttatttcgacgacgagttagtaaggaagctaggcaaacgycatagcgattgccgttttctgacgagttgctttagctaccgtcagaattgccgaatcgaacacgccctaagctctgagtaa

SEQ ID NO: 5649 - DNA, 237 bp, Streptococcus pneumoniae
  misc_feature (1)..(237): tiling:Spneumo1:WAN024FHY; Cluster includes WAN023KY6 3157 03_2705||||1438821..1439057|+|237 bp|EGAD orf prediction|S .pneumoniae|R6|NC_003098.1|ORF|110
ttggttcttaagagccatataggtcgctgcacgatacatagctcctgtatcaaggtaggtgaayccaaaatccttagcaataatctttgcgaccgtactcttaccgctggaagcaggaccatcaatagcaatttgaattgttttcatatcggctcctattttatttttataacatcacctggattagcaaaccaagatcctgtagccatgtgcccaggattcaaggcctctaactga

SEQ ID NO: 5650 - DNA, 276 bp, Streptococcus pneumoniae
  misc_feature (1)..(276): tiling:Spneumo1:WAN024GCH; Cluster includes WAN023LRI 3154 32_1298||||684751..685026|+|276 bp|EGAD orf prediction|S.p neumoniae|R6|NC_003098.1|ORF|110
ttggttgatgaagaactggctgccattggtgtttggttgaccagtattagccatagcaagagcaccrcggatgttatacaaataaggagtaatctcgttcttgaaaccagttcctttgtctttagtcttatccttgtcatgccagatggactgaccacctgtaccgtccccttttggatctccagtttggaccataaagccatcgatgacacggtggaaggtaataccgttatagtagccttctttggcrtgagtgaggaaattttcaaccgctag

SEQ ID NO: 5651 - DNA, 270 bp, Streptococcus pneumoniae
  misc_feature (1)..(270): tiling:Spneumo1:WAN024B4U; Cluster includes WAN023L6U 3132 52_2321||||1246104..1246373|+|270 bp|EGAD orf prediction|S .pneumoniae|R6|NC_003098.1|ORF|110
ttggttgatgatagcacgggcgatggccacacgctgacgttgtcctccagaaagtttgcggatggaacgtttttcataaccttccaactgaaccatcttgagaacttccgctacacgctgctcratttctttcttatcaattttacgcaagcgaagtggaaaggcaacattttcaaacacattcatatgtgggaacaaggcataggattggaagacggtatgtacgtcgcgcttgttggttggaatatcattgatacgaacaccgtctag

SEQ ID NO: 5652 - DNA, 234 bp, Streptococcus pneumoniae
  misc_feature (1)..(234): tiling:Spneumo1:WAN024E2O; Cluster includes WAN023KJG 3157 51_3392||||1818921..1819154|+|234 bp|EGAD orf prediction|S .pneumoniae|R6|NC_003098.1|ORF|110
ttggttgattttccacggtttgaccaaaggtccatgacaacgttagcaccagctggtgtcttaatccaagtaccacagttgcctagccaccacatggcaaarttgccttcaggtacgacttcttcttcgatttcttcgttcaaccatgttccccactctgggaaagtggctaaaatccatgactctcttgtaatttctttgacgtttggcatatgttgcctcctttggatataa

SEQ ID NO: 5653 - DNA, 147 bp, Streptococcus pneumoniae
  misc_feature (1)..(147): tiling:Spneumo1:WAN024B7O; Cluster includes WAN02444F spr0 899|transposase B|15902943|NP_358493.1|887083..887223|+|14 1 bp|Degenerate transposase|S.pneumoniae|R6|NC_003098.1|OR F|100
ttggttgcaggtctaacaaatggtgaattaatcgctccaatgacttacgaagagaygatgacgagcgacttttttgaagywtggtttcagaagtttytcttaccaacattaaccacaccatcggttattatagtaaaaykaactaat

SEQ ID NO: 5654 - DNA, 279 bp, Streptococcus pneumoniae
  misc_feature (1)..(279): tiling:Spneumo1:WAN024B7L; Cluster includes WAN023PR9 pne1 7_3||||462..740|-|279 bp|Type 10A capsule operon, Glimmer 2.02 orf prediction|S.pneumoniae||WAN01UCJH|ORF|000
ttggttgcaggtctaacaaatggtgagttaatcgytccaatgacttacgaagagacgatgacgagcgacttttttgaagcttggtttcagaaatttctcttaccaacattaaccacaccatcggttattattatggataatgcaagattccatagaatggggaagctagaactcttgtgtgaagagtttgggcataaacttttacctcttcctccctattcacctgagtacaatcctattgagaaaacatgggctcttttgtcttgttcttgtttcaat

SEQ ID NO: 5655 - DNA, 1119 bp, Streptococcus pneumoniae
  misc_feature (1)..(1119): tiling:Spneumo1:WAN024FDQ; Cluster includes WAN0243KQ spr1 610||15903652|NP_359202.1|1585462..1586580|-|1119 bp|Hypot hetical protein|S.pneumoniae|R6|NC_003098.1|ORF|211
ttggttggaggtgttatgaagaaaattgggacttatttggtttatgtgctagctkttgtctttattatgctagcttttgcttgtggaacaatcgcatttgcagagttggggtattccgcagttttagcctttacttttggttatgccttcgctcttctaagcatgtatttaatytttattcttcatgagctgggtcatgctttttgtggctacttgacaggctatcggctggtggcttttggattaggacattttattttgaccaaaaagtcaggcaggtttcatcttagtagaacagccattctgaaaaatgttggtgctcaatacattggtttaaaagaggatgaaagcgatcaaagaatcatcctgatgctttcaggaggcttgatggttcatctcggcttgatattattggcgataktgtttggatttttgacaagaagctggtattttgcagggacttggawttttcttaatttatctttcttcctaaataacattttgccagtcgacatcaccgatggagcaaaaatttgggaattactacaacaccctgaaaataccaaatacgcctacctggtattgagacattctgcycaracyttgctrgctcctcaagaatatgatttgaaagactttgttcaagcagttcctgaggatgcacgagggagttttgcggatggtgtattaggtatgcaaggtgaagtttccattttggaagggaaggaagaagtagctaaacagcagtttcaagcattacttgagaggrcaactactccgatgatgcagacagttgcccaactatccctgcttcatatcgccttgttggaaggagattttgagcaagcggagcaatatgctagtmtwckamwggtcaaatcgtttctgtctctcaaactgtccaatcttcaagtgatacaagcytggtatcaattwaaggtraagaaagatgtagatcgaactcgtaaggctctcaagattgctagacagaaaatggatagtagtcgaatgttgagggaygagaaamgmtattatgaaaactkgttagcmgagctggaaaaggaaatgttagaaggaactgaagatggaactagaaatttctrrytwmycaggctgtaa

SEQ ID NO: 5656 - DNA, 159 bp, Streptococcus pneumoniae
  misc_feature (1)..(159): tiling:Spneumo1:WAN024FNB; Cluster includes WAN023P7I pne5 3_6||||2086..2244|+|159 bp|Type 25F capsule operon, Glimme r 2.02 orf prediction|S.pneumoniae||WAN01UCCQ|ORF|000
ttggttggtattaagggtgatggcaataactacaagtacatgaaactgcaaaaagatactgtaacaaccaaacggtttgaaaaagctaagaccaaatgggagcaagaaagcaaaaaagcaatcgaaaaagcccaaaaagaagcagaaaaacatgttaaa

SEQ ID NO: 5657 - DNA, 246 bp, Streptococcus pneumoniae
  misc_feature (1)..(246): tiling:Spneumo1:WAN024G2H; Cluster includes WAN023LDV 3156 21_2038||||1099884..1100129|+|246 bp|EGAD orf prediction|S .pneumoniae|R6|NC_003098.1|ORF|110
ttggttggtcttctgcggtggaatatagtcaaaaatgtcttctttttgatctttaaaataatccgccaactcctttttcttgcgaagaaattcttgaatagcttcgtcaaatgttgctttatcaaagagatgccctgcaaaatcctgcccaccatctcgcaaatatctaaactgatcaatcgtaatccctgttacttcataaaaaacatgttcaggaacaaaggcatcaaaattatcaagtgttag

SEQ ID NO: 5658 - DNA, 240 bp, Streptococcus pneumoniae
  misc_feature (1)..(240): tiling:Spneumo1:WAN024CG6; Cluster includes WAN023MDU 3134 41_128||||60093..60332|-|240 bp|EGAD orf prediction|S.pneu moniae|R6|NC_003098.1|ORF|110
ttggttgtcccaagagtaggctgtttttggttgcaccaagtcataggcttgctcacgggtcatgcctttttcaatcaatgtcaacatagcccgttggctaaagataagaccaaaagtcgagttcatgtttcggatcatattttctgggaagactgtcaagttcttgacgatatttccaaaacggttgagcatgtagtcaatcaaaatggtcgtatctggtgtgatgatacgctcagctga

SEQ ID NO: 5659 - DNA, 78 bp, Streptococcus pneumoniae
  misc_feature (1)..(78): tiling:Spneumo1:WAN024DPE; Cluster includes WAN023SKN NC_0 03098.1_1203||||937337..937414|-|78 bp|Glimmer 2.02 orf pr ediction|S.pneumoniae|R6|NC_003098.1|ORF|110
ttggtttcatctgcagcaaatatccacagaggacttggacctcagatgtacactatgcctgtcggacaaagaaaaaag

SEQ ID NO: 5660 - DNA, 1046 bp, Streptococcus pneumoniae
  misc_feature (1)..(1046): tiling:Spneumo1:WAN024D72; Cluster includes WAN0243JS spr1 644|ABC-NBD|15903686|NP_359236.1|1615977..1616987|-|1011 b p|ABC transporter ATP-binding protein - unknown substrate| S.pneumoniae|R6|NC_003098.1|ORF|111
ttggttttagtaatagagggagttagtgagatgattaaatttgataatattcaaattaaatatggtgattttgttgcaattgataatctgaatttagatatacatgaaggggaattytttacatttcttgggccttcaggatgtggtaaatcaactactttgagagcattggtaggttttytagatccatcatcaggaagtattgaagttaatggaacagatgtcactcatttggaacctgaaaagcgtggaattggtattgtatttcaatcttatgcgctatttccaactatgactgtttttgataatattgcatttggtttaaaagttaagaaggtagctccagatgttattaaagctaaagtatcagcagtggcagcaaaaattaagatctctgatcaacagttacagcgtaatgtatcagaattatctgggggtcaacaacaaagggtagcattggctcgtgctctggttcttgaacctaaaattctttgtctagatgaaccattgtcaaaccttgacgcaaaattacgtgtagatttgagaaaagagttgaaaagacttcaaaaagagttaggtattactactttatatgttactcatgatcaagaggaagccttgactttatctgatagaattgcagtctttaacaatggatacatcgaacaggtcggtacaccagtagagatttatcataattctcaaactgaatttgtatgtgattttattggagatattaatgttttgaccgatgaaacagtccacgaagtattaytgaaaaatacaagcgttttcttagargataaaaaaggwtacattcgattagagaaagttcgattcaatcgtgaaactraacaagatttyattctaaaagggacaattattgatgttgagttttctggagttacaattcactatacaataaaagtttctgaaagtcagattcttaatgtaacaagtattgatagtcaggctgctattagatctgtcggagaaagtgtggaattatttatcacaccatcagacgttctgcaattttaactaat

SEQ ID NO: 5661 - DNA, 180 bp, Streptococcus pneumoniae
  misc_feature (1)..(180): tiling:Spneumo1:WAN024B7I; Cluster includes WAN023WR4 AX56 8758.1_1||||1..180|+|180 bp|Glimmer 2.02 orf prediction|S. pneumoniae||AX568758.1|ORF|000
ttggttttgttccttttacttggtggtttagctctcctgttttctcttttagctttaaccagccataaatggtattacgtgagatttggaaaacgtgtgatgcttctgttatactacctattcgctcacaataagagagaacttttttacgaaaatctattgaatatgccactaactaat

SEQ ID NO: 5662 - DNA, 90 bp, Streptococcus pneumoniae
  misc_feature (1)..(90): tiling:Spneumo1:WAN024DR4; Cluster includes WAN023SM6 NC_0 03098.1_494||||388826..388915|-|90 bp|Glimmer 2.02 orf pre diction|S.pneumoniae|R6|NC_003098.1|ORF|111
ttggttttttcttctctaccaactcccaataactattttggctttatttccagagtattttatggtaaaatgaagagtaataatatttat

SEQ ID NO: 5663 - DNA, 102 bp, Streptococcus pneumoniae
  misc_feature (1)..(102): tiling:Spneumo1:WAN024FXM; Cluster includes WAN0242AX SP13 04||15901163|NP_345767.1|1232385..1232486|-|102 bp|hypothe tical protein|S.pneumoniae|TIGR4|NC_003028.1|ORF|020
ttggtttttttgaaaatagataaaaaaacgaacgtttttcttggaaatatctttctcaaagacaaaatcttaaagtatgctataagaaaagaaaatgtttag

SEQ ID NO: 5664 - DNA, 243 bp, Streptococcus pneumoniae
  misc_feature (1)..(243): tiling:Spneumo1:WAN024CRB; Cluster includes WAN023MB8 3135 48_258||||133039..133281|-|243 bp|EGAD orf prediction|S.pn eumoniae|R6|NC_003098.1|ORF|110
ttgmacatagacttcctcwgtattgcgyccttctggctcaaggaagagttggtgacgttccttgtccgcaaagcgcacaatcttgtcytcaatcgayggacagtaacgaggycccactcccttgaccacacctgtaaacataggcgcacggtggaggttgttttggataatctcatgactggtaccattggtataggtcaaccagcatggtacttggtccttgacataatcctcatcacgtga

SEQ ID NO: 5665 - DNA, 167 bp, Streptococcus pneumoniae
  misc_feature (1)..(167): tiling:Spneumo1:WAN024G7E; Cluster includes WAN024439 spr0 941||15902985|NP_358535.1|925803..925964|+|162 bp|Hypothet ical protein|S.pneumoniae|R6|NC_003098.1|ORF|111
ttgracaatgactggaatggattggctgatttaatagcaaatctgattgcaaaatatgctggtgctttagatttagataatctacccgatccaacgccagcaaaaaatcaagagatgaaaaatagttttgacatggcaaaaacacaaattgagacggactaactaat

SEQ ID NO: 5666 - DNA, 90 bp, Streptococcus pneumoniae
  misc_feature (1)..(90): tiling:Spneumo1:WAN024GNH; Cluster includes WAN023ZCA AL44 9924.1_95||||70340..70429|-|90 bp|Glimmer 2.02 orf predict ion|S.pneumoniae||AL449924.1|ORF|001
ttgracatyctagattcgcaaaaaagctctcactatcgtgatgattggaaatatctttccattttgaaaactcttttccacagtcaaacg

SEQ ID NO: 5667 - DNA, 162 bp, Streptococcus pneumoniae
  misc_feature (1)..(162): tiling:Spneumo1:WAN024AVF; Cluster includes WAN02440W spr1 026||15903070|NP_358620.1|1007886..1008047|+|162 bp|Hypoth etical protein|S.pneumoniae|R6|NC_003098.1|ORF|100
ttgrtaaaaaatccattcattgaaattgaaagaatagaaagaacctggctaacagctcacttgtatagaaaatttgataaatattttcacraaacaagacctcctatcaaagtttttgaacayttgataggrggtctttttattatgaagacttttacctag

SEQ ID NO: 5668 - DNA, 67 bp, Streptococcus pneumoniae
  misc_feature (1)..(67): tiling:Spneumo1:WAN0249HE; Cluster includes WAN024E53-rc R 6.IG_2113||||1884065..1884131|-|67 bp|Between spr1906 (hip O) (- strand) and spr1907 (dapD) (- strand)|S.pneumoniae|R 6|NC_003098.1|IG-rc|110
ttgtaaaagtaaaaaagaggcggaaccctttttccagcctctttctgctatatcggaggacagatag

SEQ ID NO: 5669 - DNA, 131 bp, Streptococcus pneumoniae
  misc_feature (1)..(131): tiling:Spneumo1:WAN024AGJ; Cluster includes WAN024EKD-rc R 6.IG_749.1||||726205..726335|-|131 bp|Between spr0725 (clp E) (- strand) and spr0726 (- strand)|S.pneumoniae|R6|NC_00 3098.1|IG-rc|110
ttgtaacaacttctcaaagcttcaatctttttacttgctttacaccccaatcctgttataatgagagtatagaatttgactatttttgacctttaaacaagtcaggctaaagaaagaaatgaggtagatgt

SEQ ID NO: 5670 - DNA, 363 bp, Streptococcus pneumoniae
  misc_feature (1)..(363): tiling:Spneumo1:WAN024GEY; Cluster includes WAN023LUB 3135 14_1139||||602865..603227|-|363 bp|EGAD orf prediction|S.p neumoniae|R6|NC_003098.1|ORF|110
ttgtacaccagattctccaatctgataaaaggtgacctgcatgcgattacggaaccaggtcagctgacgcttggcaaaacgacgrgtcgcctgtttaagactctcackagcttcctcmaaggtctgctctccacggaaataaggaaagagttccttatagccaattcctttagcagcctgtacattaggggaatggtcaaacagccacttggcctcatccaaaagcccagcctcaaacatcaaatccactcggtggttgatacgctcataaagttgactacgttcatcatccaagcagataatcagcggttcatacaarrtctcttgattttccaaatcctgaccaaaatgggcaatttctaa

SEQ ID NO: 5671 - DNA, 228 bp, Streptococcus pneumoniae
  misc_feature (1)..(228): tiling:Spneumo1:WAN024GIW; Cluster includes WAN023LYV 3150 65_920||||483908..484135|-|228 bp|EGAD orf prediction|S.pn eumoniae|R6|NC_003098.1|ORF|110
ttgtacatcagccttgatgataacattaacagatttgagttccccagctttaagggtatcaaagaggttttcaaggctaacacgttgggtagcttgacgttgtttcatgagggcacgtttggcacgctcttcacctgctgcacgcgcagatttttcatcctcgtaaacggcaaagtggtcacccgccatcggtgcttcgttcaaacctgtgatagagactggtgttga

SEQ ID NO: 5672 - DNA, 1491 bp, Streptococcus pneumoniae
  misc_feature (1)..(1491): tiling:Spneumo1:WAN024CDL; Cluster includes WAN023RPJ cont ig_1583_2||||499..1275|-|777 bp|Glimmer 2.02 orf predictio n|S.pneumoniae|670|WAN01UDGB|ORF|000
ttgtacccattttatcattttttaggaaattttgaaagaggtactactatgataacaacaaataaagtagctatatatgtcagggtatcgacgacaaaccaggttgaggagggatactctatagatgagcaaaaagacaagctctctagctactgcgacattaaagactggaatgtatacaaagtatatactgatggaggtttctcaggatccaatactgacagaccagcgctagaaagtcttatcaaagacgctaaaaaaagaaaatttgacactgttctagtctataagctggaccgtcttagccgtagtcaaaaagacacgcttcacttgattgaggatgtattcatcaagaatgggattgaatttctgagcttgcaggagaactttgacacctctactccttttggtaaggctatgattggactcttgagcgtctttgctcagctagaaagggagcaaatcaaggaacgcatgcaacttggcaagctaggacgtgccaaatctggtaaatccatgatgtgggctaagacatcctatggttacgattaccacaaagagacaggcacagtgaccatcaatccagctcaggctctgaccattaagtttatctttgagagttacctgagagggagatctattactaagttgagagatgatctaaatgagaaatacccaaagcatgtgccttggagctatcgggcggtcagaaccatactcgataaccctgtctattgtggtttcaatcagtataagggagaaatttatccaggtaatcatgagccgattatttcaaaagaggaatacgataagactcaatctgagctaaaaataagacaaagaacagcagcagagaatgtcaatcctagaccattccaagctaagtacattttatccggtatcgcccaatgtggatattgtggcgctcctttaaaaattatgttaggcgtaaagaggaaagatgggagcaggttaaaaaaatatgaatgccaccaaaggcacccacgaacgctgagaggcgttactacctacaacgacaataaaaagtgtgactcaggattttactacaaagacaagctagaggcctatgtgctaaaagaaataagcaaactacaagatgacgctgattacctggacaaaatattttcaggagacaatgctgagaccatagaccgtgagagctataagaaacaaatagaggagctatcaaagaaactgagcagacttaacgacctctacatagacgaccgtatcacgctggaggaattacagagcaagtcagccgaatttataagcatgagggggactcttgaaactgaactagaaaacgatccagcactcaggaagaacaaaagaaaggctgatatgaggaaactgctaaacgctgagaaagtcttttcaatggactacgaaagtcaaaaggtgcttgttagaaggcttataaacaaggttaaggtgacagctgaggacattgttatcaattggaaaata

SEQ ID NO: 5673 - DNA, 881 bp, Streptococcus pneumoniae
  misc_feature (1)..(881): tiling:Spneumo1:WAN024CVU; Cluster includes WAN0242YT SP03 80||15900303|NP_344907.1|359377..360252|-|876 bp|hypotheti cal protein|S.pneumoniae|TIGR4|NC_003028.1|ORF|022
ttgtaccccccagaactggattctaaaatactctctatcatcaagaaggcagtgacaattagaacgacacacacatatraatatcaatactcactgctatttggtgatgcaggctatctatggttactcctacatttattttctatcagtaaaaatcaatactatctacaattagcaaacgtcaccgctaaaaaattaatagagaattatgatactctagaggaaatagactttgcattgggaaaatctggtgtcctattatcattaataaaatactatcaatttaccaatgacaatactcttaaaaytttcatccacaatagtataggggaaatttatcattatttcctacaaagagatacagccaaagaaagcattttagactatagctttgctcatggatattgtgraattgcatatgctttatttgcctattctaaagtcttagaaccttctatgttytataatgatctccatacattccatrctgaattaaaaaaattattagaaaaagttacttctaatactgaaaatttaggaaatttacaactttcttggtgcraaggaatttccggaataatcttatatctttgtatgtacgattgtgacggaaacaaagatattattagtaaatatcaagaatttgtttttaaccatcatctaaaaatgatgacaggatattgccacggaataactagcttactacaaaccactgtctacaatcaaaacaaattactgatgaaaaaaatccaacaggtaattttagcatgttctgaacgagatgatcacggtttactgatgtttcaaggagatagtggtaaarcagatttgtttgacttcggaataggaagcatggggtatattggtgtctattaactaat

SEQ ID NO: 5674 - DNA, 321 bp, Streptococcus pneumoniae
  misc_feature (1)..(321): tiling:Spneumo1:WAN024CGB; Cluster includes WAN023ME0 3135 57_122||||58750..58980|-|231 bp|EGAD orf prediction|S.pneu moniae|R6|NC_003098.1|ORF|110
ttgtaccttatcttggtcagcactggcatacaacacttcaacaactgctccagtcttatmcttttcaataaatgtattaacgataatttgtatcatagacttgtcctaaaaatcaatcccttccccaarctcwtccacactatccggyacatcactaaacaargtcacatgtcccatcttrcgrttrtgcttygcttctattttaccatacatgtggaggtgggcgcttgrattttctgtgacatatttttcagcagcctcgacatgctgaccgaggacattaagcataacggctggcgcatggagtttgatgactggtaa

SEQ ID NO: 5675 - DNA, 190 bp, Streptococcus pneumoniae
  misc_feature (1)..(190): tiling:Spneumo1:WAN0249T2; Cluster includes WAN0247M1 R6.I G_89.1.1||||76076..76265|+|190 bp|Between spr0068 (+ stran d) and spr0069 (+ strand)|S.pneumoniae|R6|NC_003098.1|IG|1 10
ttgtacwggcaaaggatttgttttatcataaaatgtctagctcatacttttcaaaaatatgtttaaacgaggtcaccttcctcttgtcctaggcatgttgaggttgggaaaaatctttaaaatcagaaaaacgtatcatatcaggtgatgaaaaytttgayactatgcgttttatgtygrtaagatttag

SEQ ID NO: 5676 - DNA, 272 bp, Streptococcus pneumoniae
  misc_feature (1)..(272): tiling:Spneumo1:WAN024GMS; Cluster includes WAN0244I6 spr0 404||15902448|NP_357998.1|400691..400957|+|267 bp|Hypothet ical protein|S.pneumoniae|R6|NC_003098.1|ORF|111
ttgtataatgtaattacaccgtcggtaatagtgctagcagaccaaaataaagcagattggtcgtatgatgaaaatrctgtaattaacatttatgatgatgctaattttgaagatggtaggttgcatatgamctttgaacaattcttcaaattggcacaaatagctagagaagaaggtcttgaaattcattctccgtttgagagagctggtgcgactaaatctgctcgttatatagcgaaatggattttgagaaataaaaaayattaactaat

SEQ ID NO: 5677 - DNA, 1573 bp, Streptococcus pneumoniae
  misc_feature (1)..(1573): tiling:Spneumo1:WAN024DUT; Cluster includes WAN0243A6 spr1 991|glpK|15904032|NP_359582.1|1982216..1983724|-|1509 bp|G lycerol kinase|S.pneumoniae|R6|NC_003098.1|ORF|331
ttgtatactagtaagtgtaaagaggaaacacctcaagatctttatcaggaggacagtacatgtcacaagaaaaatacatcatggcyattgaccagggaactacaagttctcgtgccatcattttcaacaaaaaaggggaaaaggttagctcgagtcaaaaagagtttacccagattttccctcaggcaggttgggttgagcacaatgccaatgaaatttggaactctgttcagtcagttattgcgggtgctttcatygaaagtggygtcaagccaaatcaaatcgaggcaatcgggattaccaaccaacgtgaaacaacggttgtctgggataagaaaacaggacttcctatctacaatgctatcgtttggcagtcacgccagacagcacctttggctgagcaactaaaaarccaaggttatgtggaaaaattccatgaaaagactggtttgattattgatgcttacttctctgctaccaaggttcgttggattttggatcatgtagaagrygctcaagagcgagcagaaaaaggggaattgctctttggtactatcgatacttggttggtttggaaattgactgacggtgcggctcacgtgactgactactcaaatgcagctcgtaccatgctttataacattaaagaactcaaatgggatgatgarattttggaaatccttaacattccgaaggctatacttccagaagttcgttctaactccgaaatctacggcaagacagctccattccatttctacggtggagaggtgccaatctcaggtatggctggggaccaacaagcagccctctttggacagttggcttttgagccaggtatggttaagaatacttatggaacaggctctttcatcatcatgaatactggggaagagatgcagttgtctgaaaacaacctcttgacaaccattggttacggaatcaacggtaaggtttattatgccttggaaggttctatcttcatcgcaggaagtgctattcagtggcttcgtgacggtcttcgcatggttgaaaattcaccagaatctgaaaaatacgctcgtgattctcacaacaacgatgaagtttatgtcgttccagcctttacaggtctaggcgctccataytggaaccaaaatgctcgtggttccgtctttggtttgactcgtggaacaagcaaagaagactttatcaaggcgactttgcaatctattgcttatcaagtgcgtgayatcatcgacacyatgcaagtggatactcagacygccattcaagtaytgaaggtggatggtggtgcagccatgaacaacttcctcatgcarttccaggcggatattttargcattgayattgcacgtgctaaaaacytggaaacaacagctctaggagcggccttcctagcaggtttrtcagtaggrtactggaaagacttggacgagttgaaactcttgaacgagacaggagaactctttgagccatctatgaaygaatctcgcaaggaacaactctacaagggctggaagaaggctgtgaaagcaactcaagtctttgcggaagtagacgactaactaat

SEQ ID NO: 5678 - DNA, 578 bp, Streptococcus pneumoniae
  misc_feature (1)..(578): tiling:Spneumo1:WAN024D4R; Cluster includes WAN0243KD spr1 623||15903665|NP_359215.1|1598954..1599526|+|573 bp|Hypoth etical protein|S.pneumoniae|R6|NC_003098.1|ORF|111
ttgtatatgtcaaaagcaaagaaaatatgtttcattattttctgtattttaatcttgacaattttccttcctgttttgatagattatcatcaagttagtgatctaggtattcatctacttagctggagacagmactccgtagttgaattctatcttgctagatatgtcttttgggggacagtggttctatcaactttagttttattatccattttagttgtgatgttttatcctaaacgttacttggaaatccaacttgaaactaaaaacgatacattaaaattaaagaattcggcaatcgaaggttttgttagaagtttggtgagtgatcatagattgatcaagaacccaactgttcatgtaaatttacgaaaaaataaatgtttcgttcatgtagaaggtaaaattcttccttcagacaacatcgctgacagatgccaaataattcaaaatgaaataactaatggattgaagcagttttttggtattgagcgtcaagtaaaacttgaagttgcagtaaaaaattaccaaccaaaacctcaaaacaaaaagactgttagtcgtgtgaagtaactaat

SEQ ID NO: 5679 - DNA, 1424 bp, Streptococcus pneumoniae
  misc_feature (1)..(1424): tiling:Spneumo1:WAN024ES9; Cluster includes WAN0243F5 spr1 811||15903853|NP_359403.1|1780659..1782077|-|1419 bp|Conse rved hypothetical protein|S.pneumoniae|R6|NC_003098.1|ORF| 321
ttgtatcacaaaaggggagattggrataggatggaagtcaaagctgttttttttgatatcgatggaaccttggtcaacaatcgcaagagtgttttgaaatccactaaggaygcgattaagattgtcaaagaacaaggggtactagttggcgtagcgacagggcgaggacctttttttgttaaggaattgatggacgatttggatctggattttgcggtaacctataatggccagtatatctttagtaaagacagagtcttgttcacgagccctatttccaagttacatttgcgccatctaattagctatgctaaaaaagagggcacggagattgcyytagggaccaaggatgccatgttgggttctaaaatcatgtcctttggtctgggttctttttcccaacgaattagtcgcttcgttccctctgttttaactcggacggtgagtcagtcttttaatcgcatggtcagcaaggttgttccccaaaaggaagaggacctgcttcacctgatgaatcarcctatytaccaagttttgatgctgatgacaccagaagaatctgagaaggcggcagctgattttgaagacttgaaattgacacgtagcaatccttttgcatcggatgtcatcaatcagggaaattctaaattagaaggcattckccgagttgggaaagaatatggctttgacctcaaycaagtcatggcttttggtgactcagataatgaycttgaaatgctggctggcgtyggtatgtcggtcgctatgggaaatggtagtagcagtgtcaaggaagctgccaagcacattaccactagcaatcaacaagatggratccacaaggccttggaacattttggtgttttgtcttcagaaaaagtytttgtcagccgtgactatcatttcaataaggtcaagaccttccaccacatgatggatgaacgaacccaagaagaacctcgagcttgggatttagagggtgcaacccatagggctggttttaaaatagaagaattggtggagtttgttcgakcagccagtccttctgaagaagattttggtcaagctgtatcgcaacttcatcaggcccttgataaggcagcagrtaaagtagccaagaagacacctgctcagcaagatttgatagggcaagtggatgccttgattgacacgctttacttcacctacggcagttttgtcttgatgggggtggacccagaacgtatttttgatattgtccatcaggccaatatggggaaaatttttccagatggcaaggctcattttgatccagtgacccataaaatcttaaaaccagataattgggaagaaaaatatgctccagaacctgctattaaaaaggaactgcagcgccagctcaaggcttacgaacgccataaagagagaaataaatcgtaactaat

SEQ ID NO: 5680 - DNA, 243 bp, Streptococcus pneumoniae
  misc_feature (1)..(243): tiling:Spneumo1:WAN024D88; Cluster includes WAN0243RZ spr1 348||15903391|NP_358941.1|1332206..1332448|-|243 bp|Hypoth etical protein|S.pneumoniae|R6|NC_003098.1|ORF|110
ttgtatcagaatgaagacttgtataaraaaggtttgaatgttgaacttgcgcaccaacaaattaagggattttttgaagcagagtttaaaaatcgtattaatggagttctkaatactaaaataaaaaatagtacattaaatcgtgtaaataaaaaaactatacaccagagcaacaaaaactccatgatcaatttgaagcagaagcaacggaagatgctaaaaaacaaggcgatattgtgttga

SEQ ID NO: 5681 - DNA, 730 bp, Streptococcus pneumoniae
  misc_feature (1)..(730): tiling:Spneumo1:WAN024GBM; Cluster includes WAN02448W spr0 738|deoD|15902782|NP_358332.1|736505..737215|+|711 bp|Puri ne nucleoside phosphorylase (inosine phosphorylase)|S.pneu moniae|R6|NC_003098.1|ORF|221
ttgtatcataaattatgtctatccatattgctgctcagcagggtgaaattgctgataaaattcttcttcctggggatcctcttcgtgctaagtttattgcggagaatttccttgrtgatgctgtttgttttaacgaagtgcgtaacatgtttggttacactggtacttacaagggtcacygtgtatctgtcatgggaactgggatgggaatgccatctatttcgatttatgcgcgtgagttaatcgtagactacggtgtgaagaaattgattcgtgtgggaactgcaggttctttgaatgaagaggttcatgttcgtgaattagttttggcgcaggcggctgcaaccaactcaaacatcgttcgtaatgactggccacagtacgattttccacaaattgctagctttgatttgcttgataaagcctaccatatcgccaaaraacttggtatgactactcacgttgggaacgttttgtcatctgatgtcttttactcaaattactttgaaaagaatatcgagcttggtaaatggggagtcaaggctgtggaaatggaagcagcagctctttactatcttgctgcccaataccatgttgatgcgctagctatcatgaccatctctgatagcttggtcaatccagacgaagacacaactgcagaagaacgtcaaaataccttcactgatatgatgaaggttggtttggaaaccttgattgcagaataactaat

SEQ ID NO: 5682 - DNA, 628 bp, Streptococcus pneumoniae
  misc_feature (1)..(628): tiling:Spneumo1:WAN024BHA; Cluster includes WAN02447O spr0 782||15902826|NP_358376.1|780417..780950|-|534 bp|Hypothet ical protein|S.pneumoniae|R6|NC_003098.1|ORF|220
ttgtatcatgaaacggagcttgcgacaagaaagggmaatttctctttttttaagatttttttaaagaaacagagtataataaatcataatcaaaggagagaatgtatgtctaactatcgtagaacttcaaaaccaaaaacagaacacatcaaaaaaggctttacagtctttcaaaaaaccgttgctacaatcgctagtatccttggcttgattaccgcaagtatcacgattatgaacgccttggataataacaaaaatattaaaaaagaacctacgacaagccagacgacaaccaktgtcaaagaaatccaaaaggaatcccctaaggaaaacaccagtccaactaaagagactaacactagtcaagaaaaaacacagcaagaggaaacaccaaaatctagcgtcaaggaagagaaaaaagaagatcagaaaacagcaactcaggactcttctactcctgcttcaagtaaacctgctactgaaaacgaaaaacagtccaatgcgccaacttcagaaaataaaagcaatcaatarcyavwaaaatagcttccctccaaacttggaaagaagctatttttttattgttgtaacacttttcgaggtttggtaccttcagctggaccgatga

SEQ ID NO: 5683 - DNA, 168 bp, Streptococcus pneumoniae
  misc_feature (1)..(168): tiling:Spneumo1:WAN024D8Y; Cluster includes WAN023SBW NC_0 03028.1_1419||||1066214..1066372|-|159 bp|Glimmer 2.02 orf prediction|S.pneumoniae|TIGR4|NC_003028.1|ORF|010
ttgtatcgctgtatcgatatcctccgtggaatagtagatttattttctaatatcattcaagacttgtttaacccatttcttgaaagaaataaaattacatcttctttatccttggcatctgctttgtctgagacaaatagaatgtcaatacctggcagactaactaat

SEQ ID NO: 5684 - DNA, 264 bp, Streptococcus pneumoniae
  misc_feature (1)..(264): tiling:Spneumo1:WAN024FHF; Cluster includes WAN023KWS 3150 54_2766||||1471448..1471711|-|264 bp|EGAD orf prediction|S .pneumoniae|R6|NC_003098.1|ORF|110
ttgtatctgaaacagtcagaattttccaatgatttgaccggaaatrtgggcatagaaaaaacgccagctcayrtgagaatgacgtttttcakaggyttattttgccaatccttcagcaatcttgtcaaggttgtatttcatcatgctgtagtagctgtcgccttctttaccttgttctgcgatagagtcagtaaagatttgwgcgtagattgggatgtttgtgtcttgagaaacagttttcattggacggtcatccacacttga

SEQ ID NO: 5685 - DNA, 294 bp, Streptococcus pneumoniae
  misc_feature (1)..(294): tiling:Spneumo1:WAN024G7K; Cluster includes WAN023LK3 3156 96_1728b||||919089..919382|+|294 bp|EGAD orf prediction|S. pneumoniae|R6|NC_003098.1|ORF|111
ttgtatgccccttttatgaaaaaagataaagaggtttatgataaagtttgtgaatatcttagtcctcatttgaataaagatatggaggtgcttgaacttgcttgttggtttcgtgtcataacagttatagaggcaaatagttatgtaaatataaggagttcaagacttctaccaaagtttaaaactcaaaaaataaatagttggtgtgctgcttacaatatccattttaataatggatattgtaagcagcayaccaatgaatttaaagattctttaaagagtcttattttgtga

SEQ ID NO: 5686 - DNA, 129 bp, Streptococcus pneumoniae
  misc_feature (1)..(129): tiling:Spneumo1:WAN024D73; Cluster includes WAN02423R SP15 79||15901421|NP_346025.1|1484602..1484724|-|123 bp|hypothe tical protein|S.pneumoniae|TIGR4|NC_003028.1|ORF|020
ttgtatgcttttgattctagtttatcaaataatagattagaattgtcagataatatcattttgtgttataatgaagaaaaaacagaggtgttcaaatgtcagaagcaggtcataagttttctarctaat

SEQ ID NO: 5687 - DNA, 117 bp, Streptococcus pneumoniae
  misc_feature (1)..(117): tiling:Spneumo1:WAN024BEE; Cluster includes WAN023W96 AX57 0068.1_1||||1..117|+|117 bp|Glimmer 2.02 orf prediction|S. pneumoniae||AX570068.1|ORF|001
ttgtatgggtataaaaatctcatactcttcgaaaatctcttcaaaccacgtcagtttccatctgcaacctcaamacactattttgagcaacctgcggctagctttctactaactaat

SEQ ID NO: 5688 - DNA, 1245 bp, Streptococcus pneumoniae
  misc_feature (1)..(1245): tiling:Spneumo1:WAN024CKQ; Cluster includes WAN02430S SP02 98||15900232|NP_344836.1|273952..275160|-|1209 bp|conserve d hypothetical protein|S.pneumoniae|TIGR4|NC_003028.1|ORF| 010
ttgtattatactatctttgaggtaactattatgaactatatcaaaagaccacattatttagattttttaagaaaacatcgtgaccgaccaatcatcaaagttgtgagtggagttagacgagctggtaaatctgtgctttttcaactctataaagaggagttactagcaactggggtagacgaggatcagattatattcatcaatttcgaagatttgagttactatgatctgcgacattttcaaacattattcgcttatataaaagatcaattagttagcaagaaaacatactatatctttttagatgaaattcaatatgttgaaaaatttgaactggtagcagatagtctattcatcttagcaaatgtagacctctatttgactggatctaacgcctactttatgagtagccaattagcaacaaacttgactggtcggtatgttgagatagaggttcttcctttgtcatttgaagaatatctatcaggtcaatctctcacagagaatctgaatacaacagaaatttttaacaattatctctttagtgctttcccttacttattgcaaacatcatcttacgatgaaaaaattgactatctcagaggaatatataactccatactgttaaatgatattgtcactagattgggaaaaccaaatcctactattattgagcgcattgtccgaacccttctcagtagtacaggtagcttaatatcaacaaataagattcgcaataccctagtcagccaaaatgtttcaatatcccataatactttggaaaattatttgacaactttgacagatagtttacttttttattccgttccacgttttgatgtaaaaggtagagcattattgcaacgtttagaaaaatattatcccgttgatttaggtttacgacatctcttattaccagaccagaaagaagacattaggcatatcttggaaaatatggtatatttggaattgagacgtagatattcacaagtatatgttggtaatttagataagtatgaggttgattttgttgttgtaactgatcttggccactacgcttattatcaggtcagtgaaacaacacttgctccagaaacactagaaagagaacttagaccactagaagccattaaagatcaattccctaaatatctattaacaatggatacgattcagccaacagccaattacaatggaatcgagaagaaaagcattatagattggttactagaaaaactarctaat

SEQ ID NO: 5689 - DNA, 587 bp, Streptococcus pneumoniae
  misc_feature (1)..(587): tiling:Spneumo1:WAN024DLA; Cluster includes WAN0244P3 spr0 155||15902199|NP_357749.1|163827..164408|+|582 bp|Hypothet ical protein|S.pneumoniae|R6|NC_003098.1|ORF|110
ttgtattcctttacaaaaggtgctataatattatcaggaggtyctatcatgaaaaagaaaccaatttatctatgggtyttgctaatcttgtctgcccttatttcagttccgtctctgtttggaattgtgagtcccttgcctagtaaagaagcccttcgtgctgctcagaaacaagttgcaggggtcaatgctcagcaattagaagaccagcttaattatacctatagagtagcagaagcatctcattctatttttaatgttgctttgattgtgctatctactattttagtggtcgtagcgattgtcttccttgttcgtaaaaatttgcaatatgcaaactatacttacgttggctatgttttgttagctattattggttcgatttatggctatgttggtttacaagacgctgtgcagttggttcaagatgagagcatgcgtttgacagtgagtattggytcaaaagctgttagcattttctatatcgtcatcaatgttctcttcctagcccttgtcttctataagatgtggcgacaacagaaagccttggcagaagaagaggaaacagaagagcttrcctaactaat

SEQ ID NO: 5690 - DNA, 124 bp, Streptococcus pneumoniae
  misc_feature (1)..(124): tiling:Spneumo1:WAN0249VT; Cluster includes WAN024EA3 R6.I G_1574||||1504561..1504684|+|124 bp|Between spr1527 (- str and) and spr1528 (- strand)|S.pneumoniae|R6|NC_003098.1|IG |110
ttgtattctcctatgtaataagcgtatccaacttggataatgagttctttatttcttgtatgcgatttcatttcatcctactcatccatcactctcctctgttttttattaagtcagtaagtac

SEQ ID NO: 5691 - DNA, 1406 bp, Streptococcus pneumoniae
  misc_feature (1)..(1406): tiling:Spneumo1:WAN024FXX; Cluster includes WAN0243WY spr1 169||15903212|NP_358762.1|1171103..1172503|+|1401 bp|Conse rved hypothetical protein|S.pneumoniae|R6|NC_003098.1|ORF| 331
ttgtatttcgcatccgaatcttcacatcaggccctctttcttgtctcttgtcctactattttaccaaaaagagcaggattttgctataatggtcatatgaacgaaaaagtattccgtgacccwgttcacaactacatccatgtcaataatcaaatcatctatgacttgattaatmcamaagaatttcagcgtttgcgccggatcaaacaactgggaacttccagttataccttccacggtggagaacacagtcgcttctctcactgtctaggagtctatgaaattgcacgacgcatcacagagattttcgaagaaaaatatcctgaggaatggaatcctgccgagtctctcttgaccatgaycgctgctctcctacaygaccttgggcatggygcctactcccatacttttgaamatctctttgatacagaccatgaagcyattactcaggagattattcaaartcctgagacagagattcaccaagtcytgctacaagtrgcrccygatttyccagaraargtkgccagtgtcatwgaccatacctatcctaayaagcaggtcgtrcarctcatttctagtcagattgacgcagatcgcatggactatctcttgcgygactcctattttacaggagcatcctatggggaatttgacctgactcgmatcctccgagtcattcgtcctrtcgaaaatggtatcgcctttcagcgcaatggcatgcacgccatcgaagactaygtcctcagtcgctaccagatgtayatgcaggtytatttccacccmgcaacacgcgcyatggaagttctcctacagaatcttctcaarcgcgcyaaggaactctaycctraggacaarrayttctttgcmcgaacttcyccacayctcctgcctttcttygaaaaaaatgtgaccttgwctgactatctggctctrgatgatggygtgatgaatacctacttccarctytggatgacyagtcctgacaarattctygcagatttatckcawcgctttgtcaaccgcaaggtctttaaatccattaccttttcacaagargaycaagaycaactyrctagcatgagaaaattggktgaggayatyggctttgatcccgactactayactgccattcataagaactttgacctcccttatgatatytaycgtcccgaatctsaaaayccamggacacagattgagattttacaaaaraatggagaactggcmgaactctctagcctgtcycctatcgtccaatcccttgctgghagtcgycacggagataatcgyttytatttyccraaagaaatgttrgaycaaaacagyatcttygcwagcatyacccagcaatttttayacttgaytrasaacgatcattttaccccaaataaaaactarctaat

SEQ ID NO: 5692 - DNA, 249 bp, Streptococcus pneumoniae
  misc_feature (1)..(249): tiling:Spneumo1:WAN024FEC; Cluster includes WAN023KG2 3156 58_3524||||1888245..1888493|+|249 bp|EGAD orf prediction|S .pneumoniae|R6|NC_003098.1|ORF|110
ttgtcaaataaggccactccgtaycccaaagcaatcccagctcccaacattcctcctagaaaaccgagtacaaagagtaagttaaataaggcttttatactcagtaaaatagctgggaaaatgrctgacttatctaaggttttagattttttggtacttgaacctttcttgccaggtctagctgattttttatttttttgtttttgctggaaaaattccagcatttttcgttttaattcatttaattga

SEQ ID NO: 5693 - DNA, 184 bp, Streptococcus pneumoniae
  misc_feature (1)..(184): tiling:Spneumo1:WAN024EX3; Cluster includes WAN023KSG 3157 21_2955||||1573653..1573913|+|261 bp|EGAD orf prediction|S .pneumoniae|R6|NC_003098.1|ORF|110
ttgtcaaattgtcwtgtcarattrtyrttyagaatattgttgtaagaggctgaaagctgctgtaaaatctgagagattaggtctgtcatggataccagctgatgagcctcaatcatggcatcatcaaactgttctctctcaatctcatcaaaactacgatacaaggcatgaccttgaatatgct

SEQ ID NO: 5694 - DNA, 612 bp, Streptococcus pneumoniae
  misc_feature (1)..(612): tiling:Spneumo1:WAN024FWP; Cluster includes WAN023L9H 3125 55_2218b||||1188959..1189510|+|552 bp|EGAD orf prediction| S.pneumoniae|R6|NC_003098.1|ORF|200
ttgtcaacctcctactgttgtttcggatccattatatctcgtaatccatcaccaataaagttgatagaaagaacgaaaagagtaatgattgaccctggaactaaccacagccaccaactatttttaataacatcggctgttttggcagcatttatgatatttccccaagtaggaatatcagaaggaacacctactcctaagaaactaagacctgcctcactgagaatgaaaccagcaacgtttaaagacaacgatacaattactggtgagatagcatttcttaaaatattattaaagataattcgactgtcagaaaaaccaaaagctctacatacatccacatatgtttcttgtttcaaagacatgaactcattacgaaccattcggaacgttgtcatccaacccattactgagaatacgaagataagattgaatacaccttgtccaaaaatacttgaaagcaagagaatgacaatcatattcgggaatgttaagaataattctgctagacgaactagaagagcatcaattttcccaccaaaatatccagcaataccaccaagtacagtaccaataaccgctccacaaatcgctccatacatcccgacttga

SEQ ID NO: 5695 - DNA, 924 bp, Streptococcus pneumoniae
  misc_feature (1)..(924): tiling:Spneumo1:WAN024DQM; Cluster includes WAN023RUR cont ig_1608_6||||3638..4561|+|924 bp|Glimmer 2.02 orf predicti on|S.pneumoniae|670|WAN01UDCO|ORF|001
ttgtcaacgattgataaatcaggagttcttcctttttcagcgcaaacggtgcaggctgacatacaaacgcttaccccaatggcaaaatattatattattcttccgaaggatgcagaaatatataaaacttggagaggtactgtcaatattcccattattgatgctacaaaaactactccagaattatcttatttcaaagaagatcatcgcaactatatagctaatgagaataagtctggtgccaattacatagagtggaagggaacagtagaagagtttaaagaggccattaagaagttgactgataaaaaatcaactactgcaacaccaaaaaaggatgaaaagccaacaccaaaaccggatgagaagccaaaaccaacacctacagttcagtctggttgggtaggttcatcctattatcaagatggtaaaaaagtcattagtaagtggatttttgataaaaaatataattcatacttctatctagatgcatcaggaaattatgttcaaaacgcttgggtaggtaactattatcttaaatcaggcggatacatggctaaaggtgaatgggtttatgatgccacctatcaagcttggtattatttgacatcagatggttcttatgcttacagtacatggcaaggaaattactatctaaaatcggatggtaaaatggctgtcaatgaatgggttgatggtggacgttattatgttggcgctgacggagtttggaaggaaggtcaagcaagtacagyttcttctagtaatgatagcaatagtgaatattctgctgctttaggaaaggcaaaaagttataattcgttattccacatgtcaaaaaaacgtatgtatagacaattaacttctgattttgataaattttcaaatgatgcagctcaatatgccattgatcatttagataat

SEQ ID NO: 5696 - DNA, 99 bp, Streptococcus pneumoniae
  misc_feature (1)..(99): tiling:Spneumo1:WAN024G7Q; Cluster includes WAN0242I9 SP10 28||15900899|NP_345503.1|970317..970409|+|93 bp|hypothetic al protein|S.pneumoniae|TIGR4|NC_003028.1|ORF|110
ttgtcaacttcttcaagagttttggttcttaagaaatttcatggtataatggatggtaaccgtaacgttgccgtcttttttgtcggccaactarctaat

SEQ ID NO: 5697 - DNA, 99 bp, Streptococcus pneumoniae
  misc_feature (1)..(99): tiling:Spneumo1:WAN024DT4; Cluster includes WAN02433R SP01 88||15900125|NP_344729.1|180767..180859|+|93 bp|hypothetic al protein|S.pneumoniae|TIGR4|NC_003028.1|ORF|120
ttgtcaagaaaaaagtacgaaaatgacgaaaaaagtcaaaaaaaattaaaaataggtcgcaagtcggatgttttttatggtataatagacctaactaat

SEQ ID NO: 5698 - DNA, 108 bp, Streptococcus pneumoniae
  misc_feature (1)..(108): tiling:Spneumo1:WAN024DLW; Cluster includes WAN02435C SP01 26||15900068|NP_344672.1|128097..128204|+|108 bp|hypotheti cal protein|S.pneumoniae|TIGR4|NC_003028.1|ORF|020
ttgtcaagaatgtcaaaatttgtcattgaactttcctccttttttcttgttcacttttatattcggaaaagaaaaggaaaagtgagcatttttttaaattatttttag

SEQ ID NO: 5699 - DNA, 267 bp, Streptococcus pneumoniae
  misc_feature (1)..(267): tiling:Spneumo1:WAN024FVZ; Cluster includes WAN023L90 3154 21_2238||||1204015..1204281|+|267 bp|EGAD orf prediction|S .pneumoniae|R6|NC_003098.1|ORF|110
ttgtcaagccatttattcaaaaagtcagggggcactataccttttggaattttaaatactggtaaacgttcatctttaacaacttcatcgccaacaattaattcatcaatagcaaccttcttttcatcatcccttgacggcctaaacacaccatacctcagatatattggtgcttcatcccaacgtttatcgcttaaaatatatggcccattatattgctttaaggcactttctaacctttgcaaaaccgactctaattcattttga

SEQ ID NO: 5700 - DNA, 240 bp, Streptococcus pneumoniae
  misc_feature (1)..(240): tiling:Spneumo1:WAN024FF7; Cluster includes WAN023KTU 3130 30_2895||||1546150..1546389|+|240 bp|EGAD orf prediction|S .pneumoniae|R6|NC_003098.1|ORF|110
ttgtcaatatcaatcggcccaaatgaaccaactgcaagaccagcaaggttatcgaattttgagaagaactcaatggttttatcgattgtttcgattggagttgttgttggaaattgtgttttttctacaacgttaaagttttcatcaccgacagcacagacaaactttgtaccgcccgcttccaagcttccatataattttgtcatgataaacctcttgtttttattttctttattatag

SEQ ID NO: 5701 - DNA, 108 bp, Streptococcus pneumoniae
  misc_feature (1)..(108): tiling:Spneumo1:WAN024BEC; Cluster includes WAN023SM9 NC_0 03098.1_449||||353589..353696|-|108 bp|Glimmer 2.02 orf pr ediction|S.pneumoniae|R6|NC_003098.1|ORF|111
ttgtcacagattttgtgtcaaaacattacttttgaygaggctgggcaaaaaggcttaaaaattataaaacgcatcatatcaggtgtacatgaactacaccccaaaagt

SEQ ID NO: 5702 - DNA, 138 bp, Streptococcus pneumoniae
  misc_feature (1)..(138): tiling:Spneumo1:WAN024CL7; Cluster includes WAN023S7H NC_0 03028.1_2624||||1994313..1994441|-|129 bp|Glimmer 2.02 orf prediction|S.pneumoniae|TIGR4|NC_003028.1|ORF|010
ttgtcacatcttgtcctttctagtgaagaaagtaagggagatacgacacctccctacttgccttctttatcttattgtacgatgaaacgtctgcatctctttagagatttatggagcaaacattttattctaactaat

SEQ ID NO: 5703 - DNA, 123 bp, Streptococcus pneumoniae
  misc_feature (1)..(123): tiling:Spneumo1:WAN024G5Y; Cluster includes WAN023URM AX57 1762.1_370||||310154..310276|+|123 bp|Glimmer 2.02 orf pre diction|S.pneumoniae||AX571762.1|ORF|000
ttgtcagaagaagggatagcgaaatcgtggctctacgaacaggaacgtgataataaggcgtatatagcggataagagggcatcaaactctaaagtccaaaaaggtagtcgtaacctatatgcg

SEQ ID NO: 5704 - DNA, 252 bp, Streptococcus pneumoniae
  misc_feature (1)..(252): tiling:Spneumo1:WAN024FQZ; Cluster includes WAN023L50 3136 00_2400||||1284895..1285146|-|252 bp|EGAD orf prediction|S .pneumoniae|R6|NC_003098.1|ORF|110
ttgtcagaccctctttctataatttttccactatccatgacaataatttcatcaaggtctttaattgtagatagcctgtgtgcaatcatgataactgttttatccttcataagatttttaaaagctttttgcaattcaaactcgttatctgggtcaatagatgctgatgcttcatccataataataattttggaatcctttaaaattgctctagcaattgcaattctttgtttttctccaccggataaataa

SEQ ID NO: 5705 - DNA, 120 bp, Streptococcus pneumoniae
  misc_feature (1)..(120): tiling:Spneumo1:WAN024ESY; Cluster includes WAN0243XO spr1 143||15903186|NP_358736.1|1145198..1145383|-|186 bp|Hypoth etical protein|S.pneumoniae|R6|NC_003098.1|ORF|121
ttgtcagtaaggaaaaataaattcttcaaaagtagagattacaaggcttgtttaagaaagaattcaaagaccttgacaaataaaaataaaatggttattataaaaaatggtctgaaatag

SEQ ID NO: 5706 - DNA, 231 bp, Streptococcus pneumoniae
  misc_feature (1)..(231): tiling:Spneumo1:WAN024C6B; Cluster includes WAN023M60 3136 21_548||||281227..281457|-|231 bp|EGAD orf prediction|S.pn eumoniae|R6|NC_003098.1|ORF|110
ttgtcatcttttctttatctatatctaaggacatatgctacctcctttagatacattataccatgtttctctgtagcttttaaaaattttattttgtttgtcatatctaagttttcagcacgcttatcctattttataarcctcaaacccaaatataaaacgcattctttttgcttttttactattgtatcgtattctacgataacatactttactttattgtttttttaa

SEQ ID NO: 5707 - DNA, 75 bp, Streptococcus pneumoniae
  misc_feature (1)..(75): tiling:Spneumo1:WAN024C98; Cluster includes WAN023QYS cont ig_1388_2||||489..563|+|75 bp|Glimmer 2.02 orf prediction| S.pneumoniae|670|WAN01UDYY|ORF|000
ttgtcatgcaaaaaaatagaagatgtgatagagaatcactttgatgatctcaatcacacttcctattcaagtagt

SEQ ID NO: 5708 - DNA, 276 bp, Streptococcus pneumoniae
  misc_feature (1)..(276): tiling:Spneumo1:WAN024F5J; Cluster includes WAN023J03 8526 0_2261||||1282281..1282556|+|276 bp|EGAD orf prediction|S. pneumoniae|TIGR4|WAN01UC25|ORF|010
ttgtcatgttttttctccgaaaagtatctttttattttccagtttgccttatgtgattggcacgcaagcaaccaacttcgttgtttcattgctaaaattggagccaaaagtctccaattttgcctagtatccttagtttcactaaggataccttcatcactgcggcaactggctcagggctcactctgttcgcccattttcgtaatttgtcactctctttattctgcgtcttctgctaggagtttagctcttgtttcttcatccaaaagtgggtag

SEQ ID NO: 5709 - DNA, 600 bp, Streptococcus pneumoniae
  misc_feature (1)..(600): tiling:Spneumo1:WAN024DAY; Cluster includes WAN023Z69-5 AL 449925.1_124||||115476..120710|-|5235 bp|Glimmer 2.02 orf prediction|S.pneumoniae||AL449925.1|ORF|001
ttgtcattattaaaaaaagataaattttccattmggaaaataaagggtattgttggttcgrtattcttggggagtyttttatttgcacygtcagttgttggtgyatcgacttatcattacttagattatagtastttgacacaaactgaacgtgatcaactcaaacaaggtagacctgatgaatcmaaagagtcatatgctttggwttatgaaaaagacgcaytaccaaacacaggaagttctcaatctattatgactgyattgggtttgttagctatcgggagtcttattgtgattatcacaaaagataawarrarkaaaaaaatagctacatttttgattgtaggggcgacaggtttagttacactatcaactgcttcagcacttaatttgaatgctaacatccatgagtctggacgtgatggtgtgttgcaaatttctggttacagatatgttggttacttggagcttgatgataaaactgtttcgtcggtttctccagcatcaactgtttcgccagttgagcaacccaaagttgtaacagagaaaggcgaaccggaagttcatgagaagcctgactatacgcaaccaataggtgca

SEQ ID NO: 5710 - DNA, 216 bp, Streptococcus pneumoniae
  misc_feature (1)..(216): tiling:Spneumo1:WAN024CFR; Cluster includes WAN023RX2 cont ig_1609_1||||289..504|+|216 bp|Glimmer 2.02 orf prediction |S.pneumoniae|670|WAN01UDCD|ORF|000
ttgtcattcactyatttcatcctttctaaattcagaatcatcgaattgtctttctttaccaaaggcatggtcaagagcttcttcmwaactmatgtgactratgctttgacgccttttgaacgtcgcaaacatcgctgtctccagttgytctttgtaagcagcgagtttttctgtctctcttgctaccttrctttcttgcctagtgaccttttcttc

SEQ ID NO: 5711 - DNA, 447 bp, Streptococcus pneumoniae
  misc_feature (1)..(447): tiling:Spneumo1:WAN024FC3; Cluster includes WAN023KPL 3130 39_3087b||||1644862..1645308|+|447 bp|EGAD orf prediction| S.pneumoniae|R6|NC_003098.1|ORF|110
ttgtccaatcgctccaggccactctttacttgcttgatatcaagaccttctggcacagcatccaagaaaatcttgagtgtagaccaaaaacgtggaagggcttttgaaagaataaagaaagaaatgacaagggacaaaagaggatctaggatataccagtccgtaaatcgaagaacaatcgccatcaggataacagctacccaccctagcgtatcttccagaaaatgcagactcagaatagactcattctttgtctttcccttaccaaccaccagactcgctaacagattgatagtaatcgcaataattcctaaccagagaatcccctcatcattgactggttgcggatgcaaaatcttcgtgacattttccaaaatgactagaacagagcccgttacgagaatcacagctgttaccaaggctcctagcaggctaaaccgcttatag

SEQ ID NO: 5712 - DNA, 345 bp, Streptococcus pneumoniae
  misc_feature (1)..(345): tiling:Spneumo1:WAN024GCR; Cluster includes WAN023LRQ 3135 06_1288||||682035..682379|-|345 bp|EGAD orf prediction|S.p neumoniae|R6|NC_003098.1|ORF|110
ttgtccacaagctgcgtcaatatctgtaccatrctcttgacgaaccacacagttgmccccttttttcttaagcgtatcatagaaagccaacacgcrctctttgggactacggctatattggtcatgctcactaactgggttataaggaatcaagtttacataagacaatttcttgatgttcttgagcaattcagycaattccaaggcttgttctacacygtcgttgacttcattaagcatgatatattcaaaggttacacgacggtttgttgtctcaatgtagtattcaatagcagcaaagagtttttcaatcggaaaggcacggttaatcttcatgatacttga

SEQ ID NO: 5713 - DNA, 249 bp, Streptococcus pneumoniae
  misc_feature (1)..(249): tiling:Spneumo1:WAN024C46; Cluster includes WAN023M48 3136 13_647||||339919..340167|-|249 bp|EGAD orf prediction|S.pn eumoniae|R6|NC_003098.1|ORF|110
ttgtccaccaggcatgatagaaggaccttcaagggcacctttttcaccaccagaaaccccagtaccgataaagttgataccagagtttgccaattcttcattacgacggatggtatctttgtagaaagtatttccwccgtcaatcaagatatcacccttgtcaaggtgyggaagaagggcttgratagtagcatctgtaccaggtccagcttgaaccatcagcatgatacgacgaggtttttcgattga

SEQ ID NO: 5714 - DNA, 528 bp, Streptococcus pneumoniae
  misc_feature (1)..(528): tiling:Spneumo1:WAN024F3F; Cluster includes WAN023LZ8 3135 26_909a||||480636..481163|-|528 bp|EGAD orf prediction|S.p neumoniae|R6|NC_003098.1|ORF|110
ttgtccacgacgaccaatggcaagagaaagcttgttatctggaacaaccaccaaggcacgtttgctgtcgytttcatcaaagataacttggtcaacctcagcaggagcgatggcattgtagataaattcagctggatctgctacccactcgataacatcgatattttcttcgattggtaccatgcggtcatttttagcatcgtaacgagctgggtggaatttgctagtaatcttcttgatattagcaccaccacgtccaacgattgtaccgatagcatccacgtttggattgtggctacgaacagcaaccttcgtacggtcacctgcttcacgagccacgctcatgatttcaacagttccatcataaacttctggaatttcttgctccatyaaacgtttgatcatttctggatggctacggctaacaaagacgttcacaccacgagggttgtcttcaaccttgtaaacataaacttcgatacgatcatgagaagcaaaaacttctccaggaatttggtcttgttttga

SEQ ID NO: 5715 - DNA, 120 bp, Streptococcus pneumoniae
  misc_feature (1)..(120): tiling:Spneumo1:WAN024DNT; Cluster includes WAN023SIJ NC_0 03098.1_1944||||1514523..1514642|-|120 bp|Glimmer 2.02 orf prediction|S.pneumoniae|R6|NC_003098.1|ORF|102
ttgtccactcgaaacaagtattgtaagaatttgattatttttgaaagtacttttaatatayttgakatagttaaaaaagatttgaaactaaattccaaattagaaaaagacttgaaatrc

SEQ ID NO: 5716 - DNA, 237 bp, Streptococcus pneumoniae
  misc_feature (1)..(237): tiling:Spneumo1:WAN024FFF; Cluster includes WAN023KU7 3157 15_2876||||1535847..1536083|+|237 bp|EGAD orf prediction|S .pneumoniae|R6|NC_003098.1|ORF|110
ttgtccagcmaragcygcatcsaccgaactaatcaagagaccttcyacaccttggggttggaaggtgtcggtatgaagtcgggctcccttttctgctcggttcaaatctccgacaaagagaaggaaaacagcagactggcgaatggcttcttgaggtaccaattcatacaaggcatctttcttctcttgacttcgtaccacaatcacagagtaggattggaaattcttccaagatga

SEQ ID NO: 5717 - DNA, 237 bp, Streptococcus pneumoniae
  misc_feature (1)..(237): tiling:Spneumo1:WAN024FAL; Cluster includes WAN023KNW 3154 98_3158b||||1683458..1683694|+|237 bp|EGAD orf prediction| S.pneumoniae|R6|NC_003098.1|ORF|110
ttgtcccatgtgaagttggttggaaagccaaagaaattatctacaatatccttagtgggtttgaaggaactaaagagggtagcaaggagcggcactaaaatcagaaccgatcctagaatcaatagaatgtatttgccaatcagggcttttctttcatcttgtttcatcatgcttctcctcttaaatttcaaatttcttagatactctcaattggatgatcgaaatcactacaattaa

SEQ ID NO: 5718 - DNA, 447 bp, Streptococcus pneumoniae
  misc_feature (1)..(447): tiling:Spneumo1:WAN024B7K; Cluster includes WAN023LBR 3156 29_2122b||||1141908..1142354|+|447 bp|EGAD orf prediction| S.pneumoniae|R6|NC_003098.1|ORF|110
ttgtccctgatgacagcttggacactcaacaccaatctctttcacgattgcttgggtatgayggcaatctgggaaattgctacaagcgtagaatttaccaaaacgaccaagtttaatgaccattggactrccacacacttcacagtcaaatccagctggttcatccttaatctggattttttccatttcttcttcagccttggcaacttctttagagaatggtttgtaaaaggcatcaatgacccgtcgccactgctcttttccaacttcgacatcatccagtttaccttccatttcagctgtgaaggtcacgtttacgatatctgggaaatattcaacgatgagcttattgacaatttctcccaactctgtcggttcaaaacgtttggctgccaggcgaacataataacgtttctgaatggtttcaatggttggcgcgtaggttga

SEQ ID NO: 5719 - DNA, 683 bp, Streptococcus pneumoniae
  misc_feature (1)..(683): tiling:Spneumo1:WAN024FFO; Cluster includes WAN0243MG spr1 547||15903590|NP_359140.1|1530004..1530681|-|678 bp|Hypoth etical protein|S.pneumoniae|R6|NC_003098.1|ORF|221
ttgtcccttatatggtgcttgaaaaatatgaagataatgtttaagaattttaacaatatttkgctaaakagaaagatygttttactacttcgtatagttctgatgatgattttgataaacyatctattgtcaacagcggttcaaaagcaggatgctgttatctttttcaagagagaattgatttcaatyttttcctataatgactattctgaagcgaatttagaaatccccaaactmttgttaaacctttcgcttttcatggtaggatggctctctgtcattttacttgaaagtgatttggcagaccattaccatcacttgattcgctatcaatcaagctcctttttcgattatacaaggaaacgattggttgtcatttctaaattttttactcaagatttryttgtctggttycttggtttacttcckctaggaattcatttcaaaacagtcgcacttttctttttacttgctcagttaatgatgttgtacttactactgtcttatctgatagcactgattagtgcgggcgctggtttttccttttttctctattttttagyatttgtgggacaagaatggatgatggatcatattgtaacagtgtatttastactcttaagyttattagttatgttgattsttagtcgcttggaagagaaatttaagaaaggataactaat

SEQ ID NO: 5720 - DNA, 225 bp, Streptococcus pneumoniae
  misc_feature (1)..(225): tiling:Spneumo1:WAN024CRA; Cluster includes WAN023MBC 3132 30_253||||131678..131902|-|225 bp|EGAD orf prediction|S.pn eumoniae|R6|NC_003098.1|ORF|110
ttgtccgaaagtcttgttgagtcattcttgtcctttcccttaaacgacacaaaaacagtcaaaactacaaagaagtgcaggacaaaaaagcctgcaacatccatgagctttgaccatcatttctattgctgttattattgtagcaaattgagaaaatttgtcaatctaaatgtactgacaaacttgtccatcgcggtaagcattgtcaatcaaaccgccacctag

SEQ ID NO: 5721 - DNA, 246 bp, Streptococcus pneumoniae
  misc_feature (1)..(246): tiling:Spneumo1:WAN024EVG; Cluster includes WAN023KLX 3132 44_3274||||1752611..1752856|+|246 bp|EGAD orf prediction|S .pneumoniae|R6|NC_003098.1|ORF|110
ttgtccgtttcatcatcaatttcaccaacaatttcctctaagaggtcttccaaagtcaccaaaccagccataccaccgtattcatccagcaagattgccatttgtctttgggtatttcgcagttcttttagcaagtcatccacaaaaatagtttcaggtacaaaaagtggatcttgtaaaattctcttccaaacaatattgtcaaaaccgtccacaaagcctgccttaaggagactcttggtgtga

SEQ ID NO: 5722 - DNA, 261 bp, Streptococcus pneumoniae
  misc_feature (1)..(261): tiling:Spneumo1:WAN024C5H; Cluster includes WAN023M5B 3150 83_588||||302576..302836|-|261 bp|EGAD orf prediction|S.pn eumoniae|R6|NC_003098.1|ORF|110
ttgtccgtttgggtaactacgattgggactggttgtaaaatcaatccccttgacctctgcagcttccaattcttttttgatagacatcatattggcataggtaatcccatttccctttgctccaaaggaaacttgcttgagattaggttgcgagagttgctctcttacataggattcttccatgtccagatacttatgaaagacctctgcaaccttgttaaattgtgttttttctacgtaaagaatcttacccgttgctga

SEQ ID NO: 5723 - DNA, 495 bp, Streptococcus pneumoniae
  misc_feature (1)..(495): tiling:Spneumo1:WAN024F3M; Cluster includes WAN023M2L 3131 45_747||||388298..388792|+|495 bp|EGAD orf prediction|S.pn eumoniae|R6|NC_003098.1|ORF|110
ttgtcctgcttcgatgaagtctggaacgtttacgacaagtccagtttccatcgttgctggtttaccagaacctgtaacagtagcacctttgatagatggttgagtttcagcaactgtcaactcaacagtagtaggaacggtgacaccgatcacttcagttccgtagaattggattttcacatcagagttttcaaggatgtaaagcaattcgttttcaacattgactacagggatttcgtattggtcataagtttctgtattcatgaagtatgctgtgtcatccattttgtacaagtattgagctgggacagtctcgataatagcttgttcaaatttttcctctggacggtagcttgtgtcaaatgtagaaccagtacggacatcacgcaatttcatacgcatgatcgtgtttcctttacctggtttgtggtgactagcttccaaaacgcgaatcaatttgccgtcagctgtttcaaaggtcataccagcttttaa

SEQ ID NO: 5724 - DNA, 273 bp, Streptococcus pneumoniae
  misc_feature (1)..(273): tiling:Spneumo1:WAN024F4X; Cluster includes WAN023M9F 3150 95_348||||184331..184603|-|273 bp|EGAD orf prediction|S.pn eumoniae|R6|NC_003098.1|ORF|110
ttgtcctttgagrtagtagcgaaccaattcctcaacgatttcatcacgctcatacttacggatttgatttcgtgcattattataacgaggaacgtaggcagggtctccactcaatacgtaacctacgatttggttaattgggttgtaacccttatcgttcaacgaagcataaacatctgtcaaagtttcgctaatttcttttttattggaatcgtccaatttaaaacgtactgtttcttcagtaaatcccattctaacaccctctttccttag

SEQ ID NO: 5725 - DNA, 111 bp, Streptococcus pneumoniae
  misc_feature (1)..(111): tiling:Spneumo1:WAN024CLR; Cluster includes WAN023S9S NC_0 03028.1_2017||||1522114..1522224|+|111 bp|Glimmer 2.02 orf prediction|S.pneumoniae|TIGR4|NC_003028.1|ORF|010
ttgtcctttgcaatggacatttttgtttttatcaaaaatatgatatcaaatagaacagaacctcactatgccaaaatcattttaccttttcttcataacatctattttagt

SEQ ID NO: 5726 - DNA, 252 bp, Streptococcus pneumoniae
  misc_feature (1)..(252): tiling:Spneumo1:WAN024G78; Cluster includes WAN023LJV 3133 98_1752||||935543..935794|-|252 bp|EGAD orf prediction|S.p neumoniae|R6|NC_003098.1|ORF|110
ttgtcgcaattaaggccaattgtacttcatatcccttatttttcaagagttgtgcygttttctttggaacatcaaytgttcgtaaagttccctckatcaaaagattgtatcycaaactactcaattttgttactaaagactctaccatttttcctgcaaaatctttggtrtattcwacrctrtctttgccatattcttgctgcagttctaaatagtgtggatgctgagaacgaaaactatcrccatctatga

SEQ ID NO: 5727 - DNA, 243 bp, Streptococcus pneumoniae
  misc_feature (1)..(243): tiling:Spneumo1:WAN024DZP; Cluster includes WAN023KI9 3130 54_3434||||1840615..1840857|+|243 bp|EGAD orf prediction|S .pneumoniae|R6|NC_003098.1|ORF|110
ttgtcgcacttgcttcatcaggttaagcaagaagtaaagattgtggtagctagtcaagcggataccaaaggtttcatcagccttgagcaggtgacgaaggtaagcgcgtgtatagttattacatgtgtagcaatcacactcaggatccagtggcgtaaagtcctcagcaaactgggcatttttcacaaccaaacgtccttgactggtcatacaagtcccgttacgagcaattcgagtcggtaa

SEQ ID NO: 5728 - DNA, 234 bp, Streptococcus pneumoniae
  misc_feature (1)..(234): tiling:Spneumo1:WAN024C9N; Cluster includes WAN023M97 3136 30_369a||||197065..197298|-|234 bp|EGAD orf prediction|S.p neumoniae|R6|NC_003098.1|ORF|110
ttgtcgctatttgcgatgtcaagaacacttgcagttgtagcagttgcaactttcacgtttggaaggttacgagctgaaagagctgcgaattcatttccttcttcaaggataacaagaactttagaatcgatgctcaatgctgcaagaacttttgcaaattcagcagtttttggagctgtaaatgaaagagcgtctacagctacgaatttgttttcagcaactttttcagagtaa

SEQ ID NO: 5729 - DNA, 1738 bp, Streptococcus pneumoniae
  misc_feature (1)..(1738): tiling:Spneumo1:WAN024GMK; Cluster includes WAN0243D2 spr1 887|ABC-NP|15903928|NP_359478.1|1864031..1865725|-|1695 bp |ABC transporter ATP-binding/membrane spanning protein - u nknown substrate|S.pneumoniae|R6|NC_003098.1|ORF|211
ttgtcgctcccttttgtctattttttaaggagaaagtatgctgattcagamaataaaaacctacaagtggcaggccctggcttcgctcctgatgacaggcttgatggttgctarytmayttctgcaaccgcgttatctgcaggaagtcttaggcgccctccttrctgggaaatatgaagytatytatagtatcggggcttggttgattggtgtggccgtagtcggtctagttgctggtggactcaatgttgtcctcgcagcctatattgcccaaggagtttcatccgaccttcgggaggatgccttccgtaaaattcaaaccttttcttatgctgatattgaacaattyaatgcgggaaatctagtcgttcgaatgacaaatgatatcaaccagattcagaacgttgtcatgatgaccttccarattcttttcasacttcccctcttgttcatcggttcgtytatcctagcggttcaaaccttaccttctctgtggtgggtgattgttctcatggtagtcttgatttttggtttgactgctgtcatgatgggaatgatggggcctcgttttgcyaartttcaaacccttcttgagcgcatcaatgccattgccaaggaaaatttacgtggcgttcgtgtggtcaagtcctttgtccaagaaaaagagcaatttgctaagtttacagagrtctcagacgagcttyttggtcaaaacctttacattggttatgccttttcagtagtggaaccctttatgatgttggttggttacggggcggtcttcctctctatttggctggtcgcgggaatggttcagtcggatccgtctgttgttggttccatcgcttcttttrttaattacctaagccagattatctttaccattgttatggttggatttttgggaaattctgtcagccgtgccatgatttccatgcgtcgtattcgagaaattcttgacgcagagccagctatgaccttcaaggatatcccagatgaagagttggttggaagycttagctttgaaaatgtgacctttacctatccaatggacaaggaaccgatgctgaaagatgtgagctttactattgaacctggtcaaatggttggtgtagttggagcgactggtgcaggaaagtcaaccttggctcaattgattccacgtctctttgatccacagramggggcyatyaaaatcggwggyaaggatattcgagaagtgagtgaaggaaccctgcgtmaaacagtttccatcgttctccaacgtgccattctttttagtggaacgattgcagataacttgagacaggggaagggraatgctactctatttgaaatggagcgcgcagccaatattgcccaggctagtgaattcattcatcgtatggagaaaamctttgaaagtccagttgaagaacggggaaccaatttctctggtggacaaaaacaaaggatgtcgattgcgcgtgggattgtcagcaatccacgtattctgatttttgaygattcgacctcagccttggatgccaaatcagagcgcttggtgcaagaagctttgaataaggacttgaaggggacgacaaccattattattgctcaaaaaattagctcggttgtccatgcaracaagatcttggttctaaatcaaggacgattgattggtcaaggyacgcatgcagacttggttgccaacaatgccgtttaccgtgaaatctatgaaacacagaaaykaactaat

SEQ ID NO: 5730 - DNA, 462 bp, Streptococcus pneumoniae
  misc_feature (1)..(462): tiling:Spneumo1:WAN024FUL; Cluster includes WAN023PIW pne3 3_13||||7416..7877|+|462 bp|Type 16A capsule operon, Glimm er 2.02 orf prediction|S.pneumoniae||WAN01UCI4|ORF|000
ttgtctaaaaaagagataaaactttgtctagtaggatctagcggtgggcatttaaatcatctctatctattgaaaccattttggcaggataaagatagactatggattacttttgataaagaagatgctcgaagtattttatcaaatgaaaaatgtcattattgctattatccgactaatcgtaatataaaaaatctaataaaaaatacatttcttgctttaagaatattatataaagaaaggccagatgttatcatttcatccggagcagcggttgcaataccgttcttttatttaggtaaaatatttggtgctaaaactgtttatatagaagtatttgatcgtgtagacgctccaacaatgactggcaaaatagtataccctgttacagatagattcattgtccaatgggaagaaatgaaaaaaatctatcccaaggcaatcaatttgggaggaattttc

SEQ ID NO: 5731 - DNA, 81 bp, Streptococcus pneumoniae
  misc_feature (1)..(81): tiling:Spneumo1:WAN024CL5; Cluster includes WAN023S7B NC_0 03028.1_2654||||2016115..2016195|-|81 bp|Glimmer 2.02 orf prediction|S.pneumoniae|TIGR4|NC_003028.1|ORF|010
ttgtctaaaaatagggaaatcctagatacagtgaaggctttaaatgctggtttttactgtcctcagccttatattttttcg

SEQ ID NO: 5732 - DNA, 2793 bp, Streptococcus pneumoniae
  misc_feature (1)..(2793): tiling:Spneumo1:WAN024GJA; Cluster includes WAN0244G1 spr0 481|infB|15902525|NP_358075.1|481913..484705|+|2793 bp|Ini tiation factor IF2|S.pneumoniae|R6|NC_003098.1|ORF|331
ttgtctaagaaaagattgtacgaaatcgcaaaagaacttggaaaagaaagtaaagaagttgtagcgcgtgcaaaagagttgggcttggatgtgaaaagccactcatcaagtgtggaagaagctgtcgctgcaaaaattgctgccagctttaagcctgcagctgctccgaaagtagaagcaaaacctgcagcaccaaaagtaagtgcagaaaagaaarccgaaaaatctgagccagctaaaccagctgtagctaaggaagaggcaaaaccggctgagccagttgctccgaaaacagaaaaagtagcagygaaaccgcaaagycgtaatttcaaggctgagcgtgaagcmcgtgctaaagagcaggcagarcgacgyaagcaaaataagggcaataaccgtgaccaacaacaaaacggaaaccgtcagaaaaacgayggmcgtaatggtggaaaacaaggtcaaagcaaccgcgacaatcgtcgctttaatgaccaagctaagaagsagcaaggtcagcaaaaacgtagaaatgagcgccgtcagcaagaggayaaacgttcaaatcaagyggctccacgtattgactttaaagcccgtgcagcagccctaaaagcagagcaaaatgcagagtacgctcgttcaagtgaggaacgcttcaagcagtatcaggctgctaaagaagccttggctcaagctaacaaacgcaaggaaccagaggaaatctttgaagaagcggctaagttagctgaacaagcacagcaagttcaagcagtggttgaagtcgtccctgagaaaaaagaacctgcagtggatacacgtcgtaaaaaacaagctcgaccagacaaaaatcgtgacgattatgatcatgaagaagatggtcctagaaaacaacaaaagaatcgaagtagtcaaaatcaagtgagaaatcaaaagaatagtaactggaataacaacaaaaagaacaaaaaaggcaataacaagaacaaccgtaatcagactccaaaacctgttacggagcgtaaattccatgaattgccaacagaatttgaatatacagatggtatgaccgttgcggaaatcgcaaaacgtatcaaacgtgaaccagctgaaatygttaagaaacttttcatgatgggtgtcatggccacacaaaaccaatccttrgatggggaaacaattgaactcctcatggtggattacggtatcgaagccaaacaaaaggttgaagtggataatgctgacatcgaacgtttctttgtcgaagatggttatctcaatgaagatgaattggttgagcgtccaccagttgttactatcatgggacaygttgaccacggtaaaacaacccttttggatactcttcgtaactcacgtgttgcgacaggtgaagcaggtggtattactcagcatatcggtgcctaccaaatcgtggaaaatggtaagaagattaccttccttgatacaccaggacacgcggcctttacatcaatgcgtgcgcgtggtgcttctgttaccgatattacgatcttggtcgtagcggcagatgacggggttatgcctcagactattgaagccatcaaccactcaaaagcagctaacgttccaatcatcgtagcyattaacaagattgataaaccaggtgctaacccagaacgcgttatcggtgaattggcagagcatggtgtgatgtcaacygcttggggtggagattctgaatttgttgaaatytcrgctaaattcaaccaaaatatcgaagaattgttggaaacagtccttcttgtrgctgaaatccaagaactcaargcagacccaacagtkcgtgcratcggtacggttatcgaagcgcgcttggataaaggaaaaggtgcggtcgcaacccttcttgtacaacaaggtaccttgaatgttcaagayccaatcgttgtcggaaataccttcggtcgtgtccgtgctatgaccaacgaccttggtcgtcgtgttaaagttgctggaccatcaacaccagtctctatcacaggtttgaacgaagcaccgatggcgggtgaccactttgccgtttacgaggatgaaaaatctgcgcgtgcagcaggtgaagagcgtgccaaacgtgccctmatgaaacaacgtcaagctacccaacgtgttagccttgaaaacctctttgatacccttaaagctggggaactcaaatctgttaatgttatcatcaaggcygatgtacaaggttctgttgaagccctttctgcctcacttcaaaagattgacgtggaaggtgtcaaagtgactatcgtccactcagcggtcggtgctatcaacgaatcagaygtgacccttgccgaagcttcaaatgcctttatcgttggtttcaacgtacgccctacaccacaagctcgtcaacaagcagaagctgacgatgtggaaatccgtcttcacagcattatctacaaggttatcgaagagatggaagaagctatgaaagggatgcttgatycagaatttgaagaaaaagttattggtgaagcggttatccgtgaaaccttcaaggtgtctaaagtsggaactatcggtggatttatggttatcaacggtaaggttgcccgtgactctaaagtccgtgttatccgtgatggtgtcgttatctatgatggygaactcgcaagcttgaaacactayaaagacgacgtkaargaagtkacaaacggycgtgaaggtggattgatgatcgacggctacaatgatattaagatggatgatgtgattgaggcgtatgtcatggaagaaatcaagagataa

SEQ ID NO: 5733 - DNA, 555 bp, Streptococcus pneumoniae
  misc_feature (1)..(555): tiling:Spneumo1:WAN024G7H; Cluster includes WAN023LK2 3144 97_1730a||||921235..921630|-|396 bp|EGAD orf prediction|S. pneumoniae|R6|NC_003098.1|ORF|110
ttgtctaagacgttattattcggtaaaattaaaaaacttacaaaactgcttaaagccatactaacacaagttcctgataaggcaagttttataggggtaaggcctgcttttccgcttacagcaatcgcgtatacaaaaattgcacttactaagccaccaatgattgcaaaacttatatggcttatgcttgatgaaattcctaaaaaagaaagaccaattactacactaagacttgctcctgtgtttataccgagtatacctggatcagctattgggtttctagtaactgattgcatcaatacaccgcttatggcaagactagaacctgctaaaattgcaaaaatagttctaggtattcttttatatataattgatttaataaaatcatcatttgtattacccattccaaaagctgctaaaaaatctctgatattaatttcttttgttccaagctttaatgacaaaaatattgtaataagaagacctaggcagattayaaaaattatgcctaggtttatttgttttttatttcgcatttttgcatgcatttcctaa

SEQ ID NO: 5734 - DNA, 258 bp, Streptococcus pneumoniae
  misc_feature (1)..(258): tiling:Spneumo1:WAN024GLO; Cluster includes WAN023KVY 3135 90_2810||||1497046..1497303|-|258 bp|EGAD orf prediction|S .pneumoniae|R6|NC_003098.1|ORF|110
ttgtctacgatagccgttgagttttttattttcccagtagctattaaagattttttccttgctttcgcgattgatttccaaaaagtaggcataaatcaaatcgataaagaagagcataggaagttgagcggatattcgttggatataggagggttggctgtgggtggctacaagaacagtctctgtataggtctggctatytttattgggaacacttgtaaagagtacagtctttgcccccatctccttrgcatctaa

SEQ ID NO: 5735 - DNA, 552 bp, Streptococcus pneumoniae
  misc_feature (1)..(552): tiling:Spneumo1:WAN024DXX; Cluster includes WAN0243CK spr1 905||15903946|NP_359496.1|1882383..1882928|-|546 bp|Conser ved hypothetical protein|S.pneumoniae|R6|NC_003098.1|ORF|2 11
ttgtctatgaaatcggaattacgcaagcaagtcttgcatgaaatgaaggctwtatctcaagarcaaaaacaggctatagaccaagctttaaccgagcgrmttttacamcaycccttytaycaagaagccaaggtcatcgcaacctacctctctttttctcatgagtttcaaacgcrggaactgattgagcaggcgctgaaggacggcaagaaggttttaatacccaaaacttatcccaaggggcgcatggastttgtrgyctatgatccgcarcagttggtaaaaactkyctttgccttactggagcyacagggagatktggaagtggtggatgyatctcagattgatttgattcatgttcctggyctggcttttacgacgrawggatatcggatwggatayggtggaggytattatgaccgctatctggaacatttttctggtcrtactttgagtacgrtwyatccttgtcaaattcaggactttatacctgaaaaccatgatattcctgttcaggaggtattaattgatgaaggaaatcttykaactaat

SEQ ID NO: 5736 - DNA, 1004 bp, Streptococcus pneumoniae
  misc_feature (1)..(1004): tiling:Spneumo1:WAN024EU8; Cluster includes WAN0243FV spr1 785|asnA|15903827|NP_359377.1|1758618..1759616|-|999 bp|As partate--ammonia ligase (asparagine synthetase A)|S.pneumo niae|R6|NC_003098.1|ORF|211
ttgtctatgaagaaaagttttatccatcaacaagaagaaatttcctttgtcaaaaacacttttacccagtatttgaaagataagctagaagttgtcgaagttcaaggtcctatcttgagtaaggtcggtgacggaatgcaggacaacctgtctggtgtggaaaatccagtatcggtcaaggttctccaaatccctgatgctacttatgaagtggtgcactcacttgctaaatggaaacgccacaccttggctcgttttggctttggtgaaggagagggtctctttgtccacatgaaagcccttcgtccagatgaggattccttggatgcaacccactctgtttatgttgaccagtgggactgggagaaggttatcccaaatggtaagcgtaacatcgtttatctaaaagaaacagttgagaagatttataaggctattcgyctgactgagctagctgttgaagcycgctatgacatcgagtctatcttgccaaaacaaatyacctttatccatacagaagaattggtagaacgctayccagacttkacrycgwmagarcgtgaaaatgcgatttgtwaaraatttggagccgtctttttgattggtatcggtggcgagttgccagatggtaaaccgsacgatggacgtgcaccagactatgatgactggacaagcgagtctgagaatggctacaagggtctaaatggtgatattcttgtctggaatgagtctttaggtggagcctttgagttgtcttctatgggaattcgtgtagatgaagaaactcttagacgtcaggtggaaattacaggtgatgaagaccgcttggaattggaatggcacaagtctttgttgaatggyctattcccattgacaatcggtggaggaattggacaatctcgtatggccatgttcctacttcgcaagagacacatcggagaagtgcaaacaagtgtttggcctcaagaagtmcgcgatacttacgaaaatattttgtarctaat

SEQ ID NO: 5737 - DNA, 237 bp, Streptococcus pneumoniae
  misc_feature (1)..(237): tiling:Spneumo1:WAN024FBI; Cluster includes WAN023KOX 3154 96_3120||||1661321..1661557|+|237 bp|EGAD orf prediction|S .pneumoniae|R6|NC_003098.1|ORF|110
ttgtctcaatcaaagccaaactggaatctgggtccttttcatacttctgggctaattttcctaaactytgctggatgcctgtcggtggcagagagaggagttcagctaactggcggacccgaatcccatcttcacccgctacaaacaagagcgcttctatttttgctaaagtactcatctttcctctctatcaagtctagctttgaggcacttgactttcttccttcttttccatga

SEQ ID NO: 5738 - DNA, 82 bp, Streptococcus pneumoniae
  misc_feature (1)..(82): tiling:Spneumo1:WAN024ADJ; Cluster includes WAN024EIV-rc R 6.IG_885.1.2||||846753..846810|-|58 bp|Between spr0849 (ph oL) (+ strand) and spr0850 (+ strand)|S.pneumoniae|R6|NC_0 03098.1|IG-rc|110
ttgtctcagacctttggataaaacctttagcctatacaactggattttcctctctcaaaagtatattagacttgttcggaat

SEQ ID NO: 5739 - DNA, 270 bp, Streptococcus pneumoniae
  misc_feature (1)..(270): tiling:Spneumo1:WAN024FGD; Cluster includes WAN023KVK 3154 74_2823b||||1504106..1504375|+|270 bp|EGAD orf prediction| S.pneumoniae|R6|NC_003098.1|ORF|110
ttgtctccagctttacttgcttgtacgatgttttcattgttgacatctttaacaaattcatctgtgaagaggtcrttcaactcagccaatttaccgtttttaccgtattggatgatacgtcctggtgcatcaaagagtacgtctggagctgttcctgcttcgatggctgttgtgattttttcaggacctgacttgaagtcgatggtttcyaatttcacttttatatctgggtttgctttttcaaacgcttcgatgattgatttttcataa

SEQ ID NO: 5740 - DNA, 237 bp, Streptococcus pneumoniae
  misc_feature (1)..(237): tiling:Spneumo1:WAN024B8B; Cluster includes WAN023MAS 3135 45_276||||139660..139896|-|237 bp|EGAD orf prediction|S.pn eumoniae|R6|NC_003098.1|ORF|110
ttgtctccgcagagwcgcagaggkggratgataacmttgacatctgtgatttcrgytgctaggcgttctctgagacctttattggctgccacaccacctgccacaactaggrttttaacaggatatttctccaaagccttcttggtttttgccatgagaatgtccataactgctgcttggaaggaagcacacaaatcttctgtagacaggctttctcccttttgctcggcattgtga

SEQ ID NO: 5741 - DNA, 234 bp, Streptococcus pneumoniae
  misc_feature (1)..(234): tiling:Spneumo1:WAN024CA3; Cluster includes WAN023M9I 3134 32_341||||180987..181220|-|234 bp|EGAD orf prediction|S.pn eumoniae|R6|NC_003098.1|ORF|110
ttgtctgaattacggttgagcttctgggcaatggcttttttgagaatgctgttgattagagtcgatttccctgaacccgacacacctgtcactgcgataaattttcctagtggaaagcgagccgtgacattttgcaagttgttctcacgcgctcctatcacttcaataaaacgaccatttccgacacggcgctcttctggtactgggatgacacgtttgcctgacaagtactga

SEQ ID NO: 5742 - DNA, 243 bp, Streptococcus pneumoniae
  misc_feature (1)..(243): tiling:Spneumo1:WAN024EXF; Cluster includes WAN023KUQ 3157 12_2851||||1523625..1523867|+|243 bp|EGAD orf prediction|S .pneumoniae|R6|NC_003098.1|ORF|110
ttgtctgagttcaatggcttcatcgatattggaaacgcaaaagccatcaacatcatcttgaattgccttggcaacggcaacagctccatgaccataagcattggccttaaccacagccaacttgagcgttccttgagggatatgagcccccatttgctgaatattttgtcgaatagctcccagatgaatcagagccttggttggtctatgtggactagctttcatgattttcctccaaaatga

SEQ ID NO: 5743 - DNA, 240 bp, Streptococcus pneumoniae
  misc_feature (1)..(240): tiling:Spneumo1:WAN024DCE; Cluster includes WAN024443 spr0 911||15902955|NP_358505.1|899873..900088|-|216 bp|Hypothet ical protein|S.pneumoniae|R6|NC_003098.1|ORF|121
ttgtctgattccttcttcatggatttgttccaagagttgatttrccttgytcaaaagactttctacttcttccttgctatctgtcgcagattattggttgcyatctaccatgtaytcctaaaacaggagagttataatmcaagattacaaggccttacagaaataagaaatccagataagacaatgtycgtccaagacgctattcgcttcgcacarcagcrcggattcaatatgctttaa

SEQ ID NO: 5744 - DNA, 75 bp, Streptococcus pneumoniae
  misc_feature (1)..(75): tiling:Spneumo1:WAN024DT9; Cluster includes WAN023SMX NC_0 03098.1_175||||137793..137867|-|75 bp|Glimmer 2.02 orf pre diction|S.pneumoniae|R6|NC_003098.1|ORF|110
ttgtctgcttactattatactacaaaagctggcacatgggaattttctttgcccccagacaagagtgccctcact

SEQ ID NO: 5745 - DNA, 587 bp, Streptococcus pneumoniae
  misc_feature (1)..(587): tiling:Spneumo1:WAN024DA4; Cluster includes WAN0243YI spr1 113||15903156|NP_358706.1|1113794..1114375|+|582 bp|Hypoth etical protein|S.pneumoniae|R6|NC_003098.1|ORF|111
ttgtctggtttattgtaccatactagtgtatatgcagttaaaaaggagattcttgtgaatacacggaaaaagacacaatttatgacaatgacagcccttttaacggctattgcgattttgattccaattgttatgcctttcaagattgtcattccacctgcttcctatactttggggagccacatcgctatttttatagccatgttcttgtcgcccttgatggcagtttttgtcatcctagcctctagttttggatttttgatggctggctatcccatggttatcgtttttcgggctttttcccatatatcttttggtgctttaggagctctttacctacaaaaattccccgataccctagataaaccaaaatcttcctggrttttcaaytttgttttggctgttgttcatgcccttgctgaagtattrgcctgtgtcsttttttacgcaacttckggtaccaatgtagaaaayatgttytatgttctatttgtrctagttggatttggyacaattatccatagtatggtagactatacattagcactagctgtctataaagtgcttcgaaaacgccgttaactaat

SEQ ID NO: 5746 - DNA, 293 bp, Streptococcus pneumoniae
  misc_feature (1)..(293): tiling:Spneumo1:WAN024CUE; Cluster includes WAN0243LS spr1 572||15903614|NP_359164.1|1553776..1554063|-|288 bp|Hypoth etical protein|S.pneumoniae|R6|NC_003098.1|ORF|221
ttgtctgtaadtctactgaccttgttgtttatcccagtcatggtttctagttcgggctcagagtttcaaagtggatggcaagagcatcaattgattgctgagaaggttagtaaaacacttgayaagacatttgataaggatgtcagaraaattccgaycagtcagttttatcaaraatttgtagatgagatgggaaggayttactcaggaaatttgatcctccaggagctgataactgtgaatgragcttataaagctacttatatcggtgaactctctagcaactaactaat

SEQ ID NO: 5747 - DNA, 489 bp, Streptococcus pneumoniae
  misc_feature (1)..(489): tiling:Spneumo1:WAN024F8R; Cluster includes WAN023LAU 3154 16_2165||||1168906..1169136|+|231 bp|EGAD orf prediction|S .pneumoniae|R6|NC_003098.1|ORF|220
ttgtcttacttgcgtttcttcttcgctttcttcattttgttagccatacgtttcatggactgtttcatggcaaattcaccaattttacctttcaaaccgccaccaaacatctggctcatatctggcattcctgctcctccgagagctgataagtcaggcataccgccttgtcccatcattccttcaagggcagacatatccattcctcccatatttggcatatttttaggaaggttatttggattaatccccatttgcttcatcattttattcatatccccagacataacaccctgcatgagctgtttagcctggttaaagtccttgatgaatttattgacttcgacgaatgtatttccagaaccagcagcaatacgacggcgacggcttggatttaacaaatctgggttttcacgctcttcaggtgtcatcgaagacacaatggcacgtttacgagcaatctggcgttcatccaccttcatgttttga

SEQ ID NO: 5748 - DNA, 2333 bp, Streptococcus pneumoniae
  misc_feature (1)..(2333): tiling:Spneumo1:WAN024GHJ; Cluster includes WAN0244F2 spr0 516|pnpA|15902560|NP_358110.1|515696..518023|+|2328 bp|Pol yribonucleotide nucleotidyltransferase|S.pneumoniae|R6|NC_ 003098.1|ORF|111
ttgtcttcatcgaagacttcgtcagtttcctatttttactttgcttttgacgtccttggtatcttgatctttgtaggcaaggcgtataatttcatcaatccaaaggggattaaaatggcaaaacaagtgtttcaaacgacttttgcgggtcgtgagttaattgtagaractggtcaggttgctaagcaagcaaatggmtctgttgtygtacgttacggtgagtcaactgtcttgactgctgccgttatgtctaagaaaatggcaactggggatttcttcccmctccaagtcaactacgaagaaaaaatgtatgcggctgggaagtttcctggtggctttatgaaacgtgaaggacgtccttcaacagatgcgaccttgacagcgcgtttgattgaccgtccgattcgtcctatgtttgcggaaggtttccgtaatgaagtccaagtcatcaatacagtgctttcttatgatgaaaatgcatctgcaccaatggctgctatgtttggttcatctttggcactgtctatttcagatattccatttgacggaccaattgctggggtacaagtgggatatgtagatggccaaatcatcatcaacccaagtcaagaacaagcagagcaatctcttcttgaattgacagtagctggaaccaagcacgctrtcaacatggtagagtctggtgccaaagaattgtcagaagaaatcatgttggaagcgctycttaaagggcacgaagctgtcaaagaattgattgccttccaagaagaaatcgttgctgctgtcggtaaagaaaaagcagaagtggaattgcttcacgtggatgctgaattgcaagctgaaatcattgcagcctacaacagtgacctccaaaaggcagttcaagtagaagagaaattggcccgtgaagctgcractcaagyagtgaaagaccaagtgactgccgtttacgaagaaaaatatgcgraccacgaagaatttgaccgtattatgcgtgatgtggctgaaatcttggaacaaatggaacacgcagaagtgcgacgtttaattacagaagacaaggtgcgtcctgatggtcgtaaggtcgatgaaatccgtcctttggatgcggttgtygacttccttcctcgtgtacatggttcaggtctctttactcgtgggcaaactcaagctctttcagtcttgaccttggctccgatgggagaaactcaaatcattgatggtttggatccagagtacaagaaacgctttatgcaccactataacttccctcaatattctgtaggggaaacaggtcgttacggtgcgccaggtcgtcgtgaaatcggtcacggtgcccttggtgagcgtgctcttgctcaagtcttgccaagcttggaagaattcccmtacgctatccgtctagtagcagaagttttggaatcaaacggttcttcatctcaagcttctatctgtgcgggaactcttgcccttatgrctggtggtgtgccaatcaaggcgccagtagctggtattgctatgggrcttatctcagatggaaataactacacagtattgacagatatccaaggtttggaagatcactttggagatatggacttcaaggttgcaggtactcgtgatgggattacagcccttcaaatggatatcaagattcaagggattactgcagaaatcttgacggaggctcttgctcaagccaagaaagcgcgttttgaaatccttgatgtcattgaagcaaccattccagaagttcgtcyagaattggctccaactgctccgaaaattgatacgatcaagattgatgtrgacaagattaagattgtcatcggtaagggtggagaaaccatcgacaagattatcgctgaaacaggtgttaagattgatatagacgaagaaggaaatgtgtctatctactctagtgaccaagatgctattaaccgtgccaaagaaattattgctggtttggttcgtgaagccaaagtggatgaagtttaccgtgctaaagtcgttcgtatcgagaaatttggtgcctttgttaacctctttgataagacagatgcccttgttcatatctctgagatggcttggactcgtaccaatcgtgtagaggatttggtagaaatcggggatgaagttgatgttaaggttatcaarattgatgaaaaaggccgtatcgatgcctctatgaaggctcttctacctcgtccgccaaaacctgagcatgatgaaaaaggtgaaaagtctgagcgccctcaccgcccacgtcatcamaaggatyacaaacctaagaaagaatttacagaaacaycaaaagattcagartaactaat

SEQ ID NO: 5749 - DNA, 153 bp, Streptococcus pneumoniae
  misc_feature (1)..(153): tiling:Spneumo1:WAN024DOJ; Cluster includes WAN02427K SP14 32||15901284|NP_345888.1|1351178..1351324|+|147 bp|hypothe tical protein|S.pneumoniae|TIGR4|NC_003028.1|ORF|120
ttgtcttctaagctcttaaaagcaaaagaacaagtaaagagtcaagacaaggataaaaagtccatattagggcaaataaaaagctttaagacagatgacaaatctaagtcaaataagaaagaccatagcaaaggtgcagagagactaactaat

SEQ ID NO: 5750 - DNA, 261 bp, Streptococcus pneumoniae
  misc_feature (1)..(261): tiling:Spneumo1:WAN024G8L; Cluster includes WAN023LLU 3153 40_1622||||861596..861856|+|261 bp|EGAD orf prediction|S.p neumoniae|R6|NC_003098.1|ORF|110
ttgtcttctgcggataaaacctgtttgaatcaattcttcacggatttcagcgatttcttccagtccagcttggttgaggacggtttctacactttccagatagagaatagtggctttggtttcttcaatcaaatcagtcaagtatttgacagcttctttgagtttctgataccgtttaaaatagcgttgggcattctggttgggagtcagagccttatcaagcgcaatcatgataggttggttggtatagtagttgtctag

SEQ ID NO: 5751 - DNA, 333 bp, Streptococcus pneumoniae
  misc_feature (1)..(333): tiling:Spneumo1:WAN024DVP; Cluster includes WAN023KDJ 3130 11_3638||||1960621..1960953|+|333 bp|EGAD orf prediction|S .pneumoniae|R6|NC_003098.1|ORF|110
ttgtcttcttcacctagagctacacctcccgttaccttttcattttcctccgttttactcatctgtcctacattgaggtactccaattttaaatttccttcaatagaatcatacacatcttttggatttgtatatatcagcattgttctcttttttattggcacagagtttaaaacttccacaaaccgttttacactaaagaaaacaatttttaaacctaccggtgcagaaatctttaaaatagattgtcgtrttttatcttctgagatgcgatcattaacaatgataacttgctcaatatcatacttttttagccacgtagtgacaacttga

SEQ ID NO: 5752 - DNA, 126 bp, Streptococcus pneumoniae
  misc_feature (1)..(126): tiling:Spneumo1:WAN024CUY; Cluster includes WAN02437N SP00 40||15899985|NP_344589.1|39716..39841|-|126 bp|hypothetica l protein|S.pneumoniae|TIGR4|NC_003028.1|ORF|011
ttgtcttgttacaaacttgacaagtttagtataacagtatctattaatttttttcatccaaatcttgaattggmatcgaaacgtcttgaattagcttttttgtttcaaaatcatctctatttttaa

SEQ ID NO: 5753 - DNA, 276 bp, Streptococcus pneumoniae
  misc_feature (1)..(276): tiling:Spneumo1:WAN024GN3; Cluster includes WAN023M2B 3155 32_756||||391896..392171|+|276 bp|EGAD orf prediction|S.pn eumoniae|R6|NC_003098.1|ORF|110
ttgtcttkttcaggtacgtttttaaacaagcgatcacggtctrttccttcttcggccacatcagggcggagtacagtcttgcggtcagccatagtcgtagtaggtgcgacaccagttgtgtcaacttcgcccagcaattcaaccatgtcaacaatcttagacaaggtggtcgcaaaggcagcagtttcttcttcagagaatcttaattttgaaagattggcaacgtgtgttacctcttcttgcgtaattttcatcttgcatcctttcgtgaaatga

SEQ ID NO: 5754 - DNA, 165 bp, Streptococcus pneumoniae
  misc_feature (1)..(165): tiling:Spneumo1:WAN024DIY; Cluster includes WAN0244JE spr0 360||15902404|NP_357954.1|359316..359474|+|159 bp|Hypothet ical protein|S.pneumoniae|R6|NC_003098.1|ORF|121
ttgtctttgattttkgttgktatttataaggtaaaagaagctggacaaaaagtcttcaaaatcggraaaaggcagcctatcgggtgttcaaaaatcttgataggatgtcctttattatggaaagccttattggattttctcctcagattgagttttykaactaat

SEQ ID NO: 5755 - DNA, 366 bp, Streptococcus pneumoniae
  misc_feature (1)..(366): tiling:Spneumo1:WAN024FFV; Cluster includes WAN023KUK 3138 56_2857b||||1526406..1526759|+|354 bp|EGAD orf prediction| S.pneumoniae|R6|NC_003098.1|ORF|220
ttgtcttttaccgtgacagtttttaaatttcttaccagaaccacatgggcaaagttcattgcgtccaatctggytcaaatccaaatcttctggcatacttgcttggtgagcagcgatattgcgagtcgctgttgtactgatatgacgttctgcctgtggtctttcttgttcatgaatttgtgctttcatcatcaagcgtgtcacatcaaactcaatcgaaccaatcatatcattaaacatacggaaaccttctgcctgatactcaacaacagggttgttctgagcatagccacgaagtccaaccgcgttacgcaattgatcaagggcatcgatatgatctgtccacttgttatccaccactcgtag

SEQ ID NO: 5756 - DNA, 1698 bp, Streptococcus pneumoniae
  misc_feature (1)..(1698): tiling:Spneumo1:WAN024C7Y; Cluster includes WAN023QQK cont ig_1343_4||||3873..5570|-|1698 bp|Glimmer 2.02 orf predict ion|S.pneumoniae|670|WAN01UE6I|ORF|000
ttgtgcatgagaaagagtctaaactggaaagattgkctcataagattaggagttttatggctaatctttgccctgattatttatccaaatattgaacttttgtctggagtgttttataaaaatggttcatttactctagaggcattcaataagattatacactctcagagagcgatgagtagtatatttaatagctttattttggcgatttcaatggtctttactgtaaatattgttgggacattgattgttctactcacagagtactgggatattaggggttcaaaaatacttaaattaggttatatgagctctctagtatatggaggaattgtattagcgacaggatataaatttgtttatggcgctaatggtcttgtaactaaaacgctctcaagtataattccaggtcttgcccctaactggtttcaaggatttggtgcagtattgtttattatgacatttgcttgtacctcaaatcacataatgtttttaacaaatgcagttcgtagtgttgattatcatacaattgargcagctaaaaatatgggtgcaagtcctttaaaagttttctttagtgtggtttttccaacttttaaacctacgttatttgccttaaccatcttaacttttttgacaggtctttcagcagtttctgctcctttgatagtaggggggaaagattttcaaactattaacccattgattatcagtttcgctaaaactacaagttcgagagatttagcagctttactagctatcatgttaggtttagcaactattctattattgacacttttgaatcatgtcgaaaaaggaggtaattatgtatctgtttcgaaaaccaaggctagtattaagaagcagataatttcttctccattatggaatactcttgctcacattgttgcgtatgtattgtttgcaatctatatgttaccaatagttttgataattctatactcgtttacagactcgttgacgatcaagacgggaactttagatctatctaaatttacgttagcgaactatgctaatttatttacagatgctcaatcatttcgtccttacctagtcagcgttgtttatgcaattttagctgcggtaattgctacaattatagcaatagtaatttcacgtattgtacataaaaacaagagtaagttcgataaattctttgagtatggtgcactrataccatggatattgccaggtacattgattgcactaggattaatgttcacttataatatacctcatttaatactatttaatttagttttagtaggaacagtaattattttacttattgcatatactattcaaaaattaccattttcttatagaatgattcgggctgtatttttcagtatagataatgatatggaagaagcwgcacgtagtatgggtgcatctagtttctacactatggtgcgagttattataccgtatattttaccagtcgtattatcagtagttgtgttaaactttaattctttattatctgactatgacttatctgtattcttgtaccatccacttttccaaccattgggaatcgttattaaacagtctactgatgaaacagcaactttaaatgcacaggcaatgatgtttgtttattctgtaattttaatgattatgtctagtgcagctctttatttatcaagcctattccaaggtaaacgaggtaagaga

SEQ ID NO: 5757 - DNA, 348 bp, Streptococcus pneumoniae
  misc_feature (1)..(348): tiling:Spneumo1:WAN024GJZ; Cluster includes WAN023LZW 3147 59_872||||463480..463827|-|348 bp|EGAD orf prediction|S.pn eumoniae|R6|NC_003098.1|ORF|110
ttgtgcgccttctgctccttcttgagcttgttgcgctgctgcggcttgttcgtagagtttaacagcaagtccttgagctttttcgttcaatgcttcaagttttgytttcatgtcgtccaagttgttgtcttcttgagctttcttaaggtcatcaagggcagcttgggcagcgtcacgttctgcgtcgaagcctttaccttcagtttccttgattgtcttttcagtcgcaaagattgcttggtctacttcattacgaaggtctacttcttctttacgtttcttatcggcttcagcgtttgcttctgcatctttcatcatgcggtcgatttcttcgtcagtcaaacctga

SEQ ID NO: 5758 - DNA, 231 bp, Streptococcus pneumoniae
  misc_feature (1)..(231): tiling:Spneumo1:WAN024F8F; Cluster includes WAN023LWW 3130 20_1022||||533998..534228|+|231 bp|EGAD orf prediction|S.p neumoniae|R6|NC_003098.1|ORF|110
ttgtgctgtaaccggcacatagcgaatcttgaccttgagttcatcagctaccatcttggccaagtcggtttcgataccagaataagtaccggtcttgggatctttgtaaccaaaattgggaacgtcttgtttgacaccgacaaccagttcgcctcttttttgaatgtctgcgatactwgtatcagcctggactggtttggcagcagcaaggccgaaaaggctaatcaataa

SEQ ID NO: 5759 - DNA, 228 bp, Streptococcus pneumoniae
  misc_feature (1)..(228): tiling:Spneumo1:WAN024DLO; Cluster includes WAN023M76 3153 97_480||||245665..245892|+|228 bp|EGAD orf prediction|S.pn eumoniae|R6|NC_003098.1|ORF|110
ttgtgctgtctagagtttgtttccaagttcctctttcccctttttcragagcgacagttccaactactttgtcagggtcattcttgtcgtagacaacaacagaaaccttatcagcacttggtgaccaaagggtcaaatcaacttgttttccttcttcttttaggtcagctcccagtttgccatcatagctgtatgtctcatctttcaggygccagcttgttttggtag

SEQ ID NO: 5760 - DNA, 310 bp, Streptococcus pneumoniae
  misc_feature (1)..(310): tiling:Spneumo1:WAN024BGJ; Cluster includes WAN023LJ2 3147 20_1814||||978430..978738|-|309 bp|EGAD orf prediction|S.p neumoniae|R6|NC_003098.1|ORF|110
ttgtgcttgaggatatatcttcatgagcccttgataaccactgtcagccaagattttaccagcttgtccgatatttctgcractcattttgaacaacttcatatcatgacaatagttcacagygatatccaaagaaacaattctcccttgacttgtgacaatcgcttgagccttcatagcgtggcattttttttacmagaatmattcgctaattctttttttagggcgattgatttktacttccgtcgcatcaatcattaccgtgkcctcagaactgagaggagttcttgaaatcgtaacaccactttga

SEQ ID NO: 5761 - DNA, 369 bp, Streptococcus pneumoniae
  misc_feature (1)..(369): tiling:Spneumo1:WAN024FKO; Cluster includes WAN023KTI 3139 59_2902a||||1549118..1549462|-|345 bp|EGAD orf prediction| S.pneumoniae|R6|NC_003098.1|ORF|110
ttgtggacagtagagaaggacaggwtgttcctctacaaagaccarattaggacattccatcatgtaggcagtacggtcgttagcaaagtcaaggtcgccaactgcttgccagtttgtgtagtcgttattgacagccttgtagagacgracgaarccttttttctccaagtcytgtccrccgacrayrgcatartattgaccytkaaagttaaaaatttgtggatcgcggaagtggtcagtagagtctgctggctggtcaatcaagatcttgtcaatctttgtaatcttaccctccttgtccatcaaagcaccgatctggtatgggtgacggatccagttttyatcgcgaacatttcctgtataaaatag

SEQ ID NO: 5762 - DNA, 765 bp, Streptococcus pneumoniae
  misc_feature (1)..(765): tiling:Spneumo1:WAN024D7H; Cluster includes WAN0243QE spr1 405||15903448|NP_358998.1|1389671..1390399|-|729 bp|Conser ved hypothetical protein|S.pneumoniae|R6|NC_003098.1|ORF|1 11
ttgtggctaaaaaatatgctacactatcaatatgaarattttaatcccwacagcaaaagaaatgaayacagacttsccragtatcgagrcaaytcytttaaraycagaaagtcagrcygtrcttgatgccttggctctctattctgccagtcaattggaragtttctacaaggtatcrgctgagaargckgcggaagaatktcaaaatatccaagctttgaaaaggcaaactgctcaacactayccagccttgaarctttttgatgggcttatgtaccgymayatyaagagagayaarctgaccgaggyrgaacaagmytatcttgaaaatcatgtyttcattacctcggctttgtacggwgtygttccagycttgtcrccyatggcwcctcaccgtttggattttttgatgaaattaaaagtcgctggtaagactttgaagagccattggaaggcagyctatgatgaarctstgaagmaggaagaagtgattttctctctcttgtcatcagagtttgagactgtattttctaaggaaatcagagcaaagatggtgaccttcaaattcatggaggatagaggcggtcagctgaagattcactcaactatctccaagaaagcgcgcggggcctttctaacagctttaatagaaaatcaagtacaaactgtgggggaagcacgtcgcttgaactttgctggatttgtttaccgagaagatttgtcacaaccacagggattggtttttgtaaaggaagtatarctaat

SEQ ID NO: 5763 - DNA, 195 bp, Streptococcus pneumoniae
  misc_feature (1)..(195): tiling:Spneumo1:WAN024CRY; Cluster includes WAN023QL9 cont ig_1313_18||||9489..9656|+|168 bp|Glimmer 2.02 orf predict ion|S.pneumoniae|670|WAN01UEA3|ORF|001
ttgtggggaatcctaggactgacccttcctaatctctcagggattgggctactcgrggatttattcgttggaggtctaaaagctgttgctcctatcctagtctttgcyctcgttgccaatgccctttcccaacatcaaaagggacaagatagcaatatgaaaactgttgttttcttgtatatcctactaactaat

SEQ ID NO: 5764 - DNA, 234 bp, Streptococcus pneumoniae
  misc_feature (1)..(234): tiling:Spneumo1:WAN024BDX; Cluster includes WAN023LCR 3134 66_2081a||||1122285..1122518|-|234 bp|EGAD orf prediction| S.pneumoniae|R6|NC_003098.1|ORF|110
ttgtgggttatcaaagatttggtcaggtgttccgtcttcaaggaactcgccatctgcagtaaagataacgcggttggcaacctgacgagcaaatcccatctcatgggttacgataatcatggtcatgccttgctcagccaattccttcataacgttaagtacgtctccaaccatctcagggtcaagggcagaagttggttcatcgaagagcatgatgtctggattcattgctag

SEQ ID NO: 5765 - DNA, 1199 bp, Streptococcus pneumoniae
  misc_feature (1)..(1199): tiling:Spneumo1:WAN024F2D; Cluster includes WAN0244BB spr0 651||15902695|NP_358245.1|657297..658490|-|1194 bp|Conserv ed hypothetical protein|S.pneumoniae|R6|NC_003098.1|ORF|21 1
ttgtggtacaatagagctatgaaacattttgatactattgtcatcggtgggggacctgctggtatgatggctackatttccagtarcttttatggacagaaaaccctcctcatcgaaaaaaatcggaaacttggaaaaaaattagctgggactggtgggggacgttgcaatgtgaccaacaatggtagcttagacaacctgctagctggaattcctggaaacggacgctttctttacagtgttwtctcccarttcgataatcatgacatcatcaactwttttacagaaaatggtgttaaacttaaggtcgaagacyacggacgcgtctttccagccagtgacaagtctcggactattatcgaagctttggaaaagaaaatcacygaactaggtggtcaagttgctactcaaatagaaatcgtttctgttaaaaaagtagatgaycagtttgtccttaagtcarcggatcaaaccttcacttgtragaaactcattgtcacaacaggtggtaagtcttatccttcgactggttcgactggytttggtcacgagattgctcgccattttaagcataccatcaccgatcttgaggctgctgaaagtcctttattaacagattttccacataaagccttacaaggkatttctytggacgatgtgaccctaagttatggtaagcatgtcatcactcatgatttactctttacccactttggtttgtcaggtcctgctgccctacgcatgtctagcttkgtcaaaggtggggaggttctctcactcgatgttttgcctcaactttctgagaaggacttggttacatttctagaagaaaatcgggaaaaatccttgaaaaacgctttaaaaaccttgttaccagaacgcttggccgaattttttgtacaaggatatcctgaaaaagtcaaacarctgactgaaaaggaacgagaacarcttgtccagtccattaaagaacttaaaattcctgtaactggaaaaatgtcccttgcaaagtcctttgttaccaagggtggagtcagtctcaaggaaatcaatcctaaaacccttgaaagtaagctggtacctggcctccactttgcaggcgaagttatggatatcaatgcccacacgggtggctttaacatcacwtctkcyctctgtaccggctgggtggcgggaagtctgcattatgattaactaat

SEQ ID NO: 5766 - DNA, 2154 bp, Streptococcus pneumoniae
  misc_feature (1)..(2154): tiling:Spneumo1:WAN024F22; Cluster includes WAN02446Y spr0 808|tex|15902852|NP_358402.1|809733..811880|+|2148 bp|Toxi n expression - transcriptional accessory protein|S.pneumon iae|R6|NC_003098.1|ORF|111
ttgtggtataatagatttatggataaaaaatatgaaaaaatctctcaggatttgggagtgacgttaaagcaaattgataccgttctaagtttgacagctgaaggggcgactattccctttatcgcgcgttatcgcaaggacatgactggtagtctggatgaggtggcgattaaggctattattgatttggataaaagtctgacaaatctcaatgaccgtaaggaagctgtcttagctaagattcaagaacaaggtaagttgaccaaggaattggaagaagctatcttagttgccgaaaaattagcagacgttgaagaactctatcttccttataaggaaaagcgtcgtaccaaggcaaccattgcccgtgaagctggactctttcctcttgctcgyttgattttgcagaatatagttgacttagagaaagaagctgaaaagttcgtctgtgaaggatttgcgactggcaaggaagccttgaccggtgcagttgatattttggtcgaagccttatcggaagatgtgaccttgcgttctatgacttatcaggaagtgctgagacactctaaactyacttctcaagccaaggatgaaagtcttgatgaaaagcaggtttttcagatttattatgatttttcagagacagttggaactatgcaaggctatcgtaccttggctctcaatcgtggggagaaacttggtgtcttgaagatcggttttgaacatgcgacggaccgtattcttgccttctttgctactcgtttcaaggtgaaaaatgcttatattgatgaagttgttcagcaatccgttaagaaaaaggtcttgcctgctatygagcgtcgtattcggacagaattaactgagaaagctgaagarggagctatccaacttttttctgacaatctgcgcaatctcctcttggttgctccactgaaagggcgcgtggttcttggrtttgacccagcctttcgtacaggtgccaagytagctgtcgtggatgcaacaggaaaaatgctgacaactcaggttatttatcctgttaaaccagcatcagctcgtcaaatcgaagaagccaagaaagatttagcagatttaattggtcaatacggtgtagagattattgccattggaaatggaacggccagtcgtgaaagtgaagcttttgtagcggaagttctgaaagatttccctgaagtcagctatgttatcgttaatgaaagtggtgcttctgtctattctgccagcgaacttgctcgtcaggagtttccagacttgaccgttgaaaaacgctctgccatttctatcgcccgtcgtttgcaagatcctcttgcggaattggtcaaaatcgatcctaagtcaattggtgtcggtcaataccaacacgatgtcagtcagaagaaactmtctgagagtctggactttgttgtcgatacagtggttaaccaagttggtgtcaatgtcaatacagctagcccagctcttctttcacacgtagctggactcaayaaaacyatytctgaaaatatygtcaaataccgygaggaagarggaaaaatcacttcacgckcccaaatcaagaaagttcctcgtytgggrgccaaggcytttgarcaggctgctggtttcctycgtatccctgaaagtagcaatatccttgataatacaggagttcayccagaraattacrctgcmgttaaggaactcttcaaaygyttrgayattaargayctraaygaagargcccaaagcaaactcaagtcsctttcagtcaaggaaatggckcaagagytagacctyggtccagaaacycttaaagatatcattgcagatcttctcaaaccaggtcragatttccgtgattcctttgaygcwccwgtkctycgycaagatgtcctagatatcaargacytagtggtwggwmaraagctagaaggwgtkgtgcgtamcgttgttrayttcggtgcyttygttgatatcggrattcaygaggacggyytsatycatatttcycatatgagtcgcaagtttatcaaacaccctagtcaagtggtgkcagttggagatttggtgascgtttgggtyaagaaaattgatactgaacgtgaaaaagttaatctgtckctcctmgctccaaatgaaactgacykaactaat

SEQ ID NO: 5767 - DNA, 1544 bp, Streptococcus pneumoniae
  misc_feature (1)..(1544): tiling:Spneumo1:WAN024FDB; Cluster includes WAN0243KE spr1 622||15903664|NP_359214.1|1596789..1598327|-|1539 bp|Conse rved hypothetical protein|S.pneumoniae|R6|NC_003098.1|ORF| 211
ttgtggtataattgcaagaggtttaatccgataatttataaagagagaaagatattcatgagagatttattatctaaaaaaagtcataggcaattagaattattagaattattatttgaacataaacgttggtttcatcgttctgaactagcagagttattaaattgtacagaacgtgcagtcaaagatgatctatcccatgttaaatctgcttttcctgacttgatttttcattcttctactaatggtatacgcattattaataccgatgatagtgatattgaaatggtttaccatcatttctttaaacattcaactcatttttcgattttagaattcatcttctttaatgaaggttgtcaagctgagagtatttgtaaagaattttatatcagttcatcttcgctctatcgtattattagccaaatcaataaagtgattaaaaggcaatttcaatttgaagtyagtctgacccctgttcaaatcattggaaaygagagagacattcgttacttttttgcacaatatttttcagaaaaatattatttcctagaatggccrtttgaaaatttttcatcagagccactatctcaattgttagaattggtttataaggaaacaagctttccaatgaatttgtcaacgcatagaatgctaaagttgctcctagttacgaacctatatagaataaagtttggtcattttatggaagtagataaagattcttttaacgaccaaagtttggattttttaatgcaggcagaaggaatagaaggtgttgctcagagttttgaatcagaatacaatatctctttagatgaagaagttgtttgccaattatttgtgtcttactttcaaaaaatgtttttcatagatgaaagtctctttatgaaatgcgtaaaaaaggatagttatgttgaaaaatcttaccatctattgagtgattttattgatcagatttcagtcaagtatcagattgaaatkgagaataaggataatctgatytggcatctgcataayaccgcacatctgtatcgtcaagagttgtttactgagtttattttatttgatcaaaaagggaatacaatcaggaactttcaaaatatttttccaaaatttgtttcagatrtaaaaaaagagmtttctcactatttagagactcttgaggtttgttctagttcaatgatggtaaatcatctatcttataccttcatcactcataccaaacatttggtgattaatttgctacaaaatcagcctaaactaaaggttttrgttatgagtaattttgatcagtatcatgcaaaattcgttgcagagacactttcttattaytgtagcaataattttgaactggaagtttggacygaattagaattatcaaaggaatctttagaagattcaycttatgatatcattatttcyaattttattattcctcctattgaaaataagagactcatctattcaaataatataaacacggtctcactcatatayttgttaaatgccatgatgtttattcgattagatgagtaactaat

SEQ ID NO: 5768 - DNA, 246 bp, Streptococcus pneumoniae
  misc_feature (1)..(246): tiling:Spneumo1:WAN024G6P; Cluster includes WAN023LJG 3147 25_1786||||960952..961197|-|246 bp|EGAD orf prediction|S.p neumoniae|R6|NC_003098.1|ORF|110
ttgtggtcagatacccctgtaacgttgccacctggttttttcaaatctttaaccaagttagcaccaattgggtctgtaatagcggccatgataaccggtaggtcttttgttgcactagccaacccttgggctgctggtgttgcgataccaaccacaaggtcattyccatttgcaaccaattgtttactcattgtcgcaaccttactttggtcaccttctgagttcataaaatcaattttaacttga

SEQ ID NO: 5769 - DNA, 90 bp, Streptococcus pneumoniae
  misc_feature (1)..(90): tiling:Spneumo1:WAN024DYS; Cluster includes WAN023SHR NC_0 03098.1_2410||||1874187..1874276|-|90 bp|Glimmer 2.02 orf prediction|S.pneumoniae|R6|NC_003098.1|ORF|110
ttgtgtaaagaatcaaaaaaagccacttttgaaaaatggctgctcctaaaaatagctttaaaaattattagtcctgtgcgaaagattggt

SEQ ID NO: 5770 - DNA, 294 bp, Streptococcus pneumoniae
  misc_feature (1)..(294): tiling:Spneumo1:WAN024FLA; Cluster includes WAN023L2I 3131 60_2524||||1343929..1344222|+|294 bp|EGAD orf prediction|S .pneumoniae|R6|NC_003098.1|ORF|110
ttgtgtaatcgccgcctgtctggcacggttatactgaattgtcaaatcattgatgactttcttagcattatctgtcgctgtttgcatggctgtcatgcccgcagcattctcagctgtcttggcatcgataatggcaccgtaaatcatactttctgcaaactgaggcaacaactgctccagaatttcttctcggctggtttccaattcaaaagtcaagctgtactcttcatccgcttcatttggatccaagtcaacaatcggaagcatttgttccacacgcatttgactggttag

SEQ ID NO: 5771 - DNA, 75 bp, Streptococcus pneumoniae
  misc_feature (1)..(75): tiling:Spneumo1:WAN0249SV; Cluster includes WAN0247L0-rc R 6.IG_99.2||||86485..86558|-|74 bp|Between spr0078 (rpsD) ( + strand) and A (transposase) (+ strand)|S.pneumoniae|R6|N C_003098.1|IG-rc|110
ttgtgtactatttttggttcattttactatatcactttggactatatcggtctagttatgtctcaacgattatag

SEQ ID NO: 5772 - DNA, 71 bp, Streptococcus pneumoniae
  misc_feature (1)..(71): tiling:Spneumo1:WAN0249SW; Cluster includes WAN024EIF-rc R 6.IG_933.2.2||||886489..886558|-|70 bp|Between spr0897 (+ strand) and A (transposase) (+ strand)|S.pneumoniae|R6|NC_ 003098.1|IG-rc|110
ttgtgtactatttttggttcattttactatattttataagttatagtgtagcattccaacttcaaagcact

SEQ ID NO: 5773 - DNA, 93 bp, Streptococcus pneumoniae
  misc_feature (1)..(93): tiling:Spneumo1:WAN0249SU; Cluster includes WAN024EKF-rc R 6.IG_745||||722782..722873|-|92 bp|Between spr0721 (- stra nd) and A (transposase) (+ strand)|S.pneumoniae|R6|NC_0030 98.1|IG-rc|110
ttgtgtactatttttggttcatttyactataataataacgatactagataatgaggaaaatgcaatggcaaacccaactttcggagaaaaaaa

SEQ ID NO: 5774 - DNA, 1358 bp, Streptococcus pneumoniae
  misc_feature (1)..(1358): tiling:Spneumo1:WAN024DWK; Cluster includes WAN0243B9 spr1 952||15903993|NP_359543.1|1935463..1936767|-|1305 bp|Conse rved hypothetical protein|S.pneumoniae|R6|NC_003098.1|ORF| 331
ttgtgtatgtattttctgtctcaaaagctatatactgaacatgaaacttgtttgaaagaggkaawatkyamratgrtttatycgaaagaaattgtyagagartggctagatgaagtagcagagcgggcyaaggacyatccagagtgggtkgatgtyttygagcrttgctacaccgataccttggacaatacggttgaaatcttagaagatggttcaacttttgtcttgactggggatattcctgcyatgtggcttcgrgattcgacagcccaactcagaccctacctkcatgtagctaaaagagatgccctcctgcgtcagaccattgcaggtttggtcaaacgtcagatgaccttggtactcaaggatccytatgcyaaytccttcaacatwgagraraactggaargggcaccacgagacygaccacacmgaccttaayggctggatytgggarcgcaagtatgaggtggaytcrctttgctatcctttgcagttgkcttatctcctctggaaagaractggcgagactrgtcagtttgatgarayttttgtcgcagcgactaaggaaattctycatctrtggacrgtdgaacaagaycayaagaactctccttatcgttttgtccgagatacggaccgyaaggaagacaccttggtaaatgatggctttggacctgaytttgcagtgacaggwatgacttggtcagcytttcgtccgagygatgactgytgycagtatagttacttgattccgtcaaatatgtttgctgtagtagtcttgggttatgtgcaagaaatcttcgcagcattaaacctagctgatagccagagtgttattgctgatgccaagcgtcttcaggatgaaatccaagaaggaatcraaaactacgcttacaccaccaacagcaagggcgaaaagatttacgcttttgaagtrgatggcctaggaaatgccagcatcatggatgatccraatgtrccaagtctactagctgcgccctatctgggctactgttcgrtcgatgatgaagtgtatcaagcyactcgycgtaccattytgagctctgaaaatccatayttctaccaaggagaatacgcwagcggtctmggmagttctcataccttctatcgctatatctggccaatcgccctttctatccaaggmttgacaacaagagataaggcagagaaaaaattcttgctggatcagctggttgcctgcgatggtggtacaggtgtcatgcacgaaagcttycaygtagatgatccgaccctctactctcgtgaatggttctcytgggctaacatgatgttctgtgagttggtcttrgattacttggatatycgctaactaat

SEQ ID NO: 5775 - DNA, 764 bp, Streptococcus pneumoniae
  misc_feature (1)..(764): tiling:Spneumo1:WAN024ETV; Cluster includes WAN0243FS spr1 788|yjfA|15903830|NP_359380.1|1760461..1761219|-|759 bp|Po ssible rRNA/tRNA methylase|S.pneumoniae|R6|NC_003098.1|ORF |211
ttgtgttataatatttctatgactattataacctcaaaagccaattctgtggtaaaaaatrccaagaaattacrccaaaaaaaataccgcaagtcwgcctayttgattgaaggctggcacttgtttgaagargctgtycaagctggagtgacgattgagaaaatctttrccctagaaaattatcgagatcagttagcwrcttttycgcaaactgtctggrtktcagaggatattttgctagatttggcggattctcagactccacagggaattgtkgcsgtggttcaaaaagaagaagtaggacaagctgatttgagtcagggcaagttcttgtttttggaagatgtgcaagatccyggtaatgtaggaactatcattcgaactgcggatgcagcaggttttacaggagtgattgtttcagataagtcggcagacatctacagtctcaaaaccctacgttccatgcaaggtagtcatttccatctgcccatttaccggatgactagtcmagcgcttyttgacgaaactaaaaaggtagctatcccagtgytagcaacaaccctatctaaagattctgttgattacagagaactgccttctatagaaaattttgtactagttatgggaaatgagggtcaaggaattagtccccttatggctgaaagtgcagaccagttggtccatattagcatgaaggggcaggccgagagtttgaatgttgcrgttgcagccggtattttaatyttccatttaagctaactaat

SEQ ID NO: 5776 - DNA, 228 bp, Streptococcus pneumoniae
  misc_feature (1)..(228): tiling:Spneumo1:WAN024GBC; Cluster includes WAN023LPR 3134 99_1407a||||742875..743102|-|228 bp|EGAD orf prediction|S. pneumoniae|R6|NC_003098.1|ORF|110
ttgtgttctttaccccaagcctgcaaaccttcccaagctgattggtygaatgatttgtcatcaacaccaccagtatcagtgacgattgctgcttttgtcttcacatcagaagatgaagctgcgttacgagaagagcggttaccacatgcagcaagtccaactgctgccactgcaactaggccaagacctagccattgtttcttgttcattactgaacctcctaaataa

SEQ ID NO: 5777 - DNA, 267 bp, Streptococcus pneumoniae
  misc_feature (1)..(267): tiling:Spneumo1:WAN024CS5; Cluster includes WAN023L6I 3155 44_2335||||1252289..1252555|+|267 bp|EGAD orf prediction|S .pneumoniae|R6|NC_003098.1|ORF|110
ttgtgttggggatcaaggaacatctgcttggtatcattaaattcaatcaaatctccatctaggaaaaatcctgtcttatcagagatacgtgaagcttgctgcatggaacgggttaccagaagcatggtgtacttgtcttttagaccatacaaggtttcctcaattttaccagctgaaatcggatccaaagccgaagttggctcatccaagaggatgattttaggactagttgccaagacacgggccacgcagacacgctgctgttga

SEQ ID NO: 5778 - DNA, 888 bp, Streptococcus pneumoniae
  misc_feature (1)..(888): tiling:Spneumo1:WAN024GN5; Cluster includes WAN0240M7 |dpn M||AAA88580.1|||855 bp|DNA adenine methyltransferase|S.pne umoniae||M14339|ORF|000
ttgtgttttaatttctatggtataattaaaagcatgaagataaaagaaataaagaaagttactttacaaccgttcacgaaatggacaggtggtaaaagacaattattgcctgttattagagaattaatrcctaaaacctataacaggtatttcgaaccttttgttggaggtggagctttattttttgatttggctcctaaagatgcagttattaatgattttaacgctgaactaataaattgctatcaacaaattaaggacaatcctcaagaattgattgaaattttgaaagttcatcaggaatataattcaaaagaatattatttagatttacgttctgcagatcgtgatgaaagaatagatatgatgtccgaagtacaaagagctgcacgtattctatatatgttgagagtgaactttaatggtctatatcgtgtgaattctaagaatcaatttaatgttccatatggacgttataagaatcctaaaattgttgatgaggaattgatatctgctatttcagtttatataaataacaatcaactagaaattaaagtgggagattttgaaaaggcaattgtagatgttcgaacaggagattttgtgtattttgaccctccatatattccattgtctgagacgagtgcatttacgtcttatactcatgagggattctcttttgcagatcaagtaagattaagagatgcctttaagagattgagtgatacaggagcttatgttatgttatcaaattcttctagtgctttagtagaggagttgtataaggattttaatatacattatgttgaagctacccgaactaatggagcaaaatcttcaagtcgaggaaaaatttctgaaattatagtcacaaattatgaaaaataa

SEQ ID NO: 5779 - DNA, 455 bp, Streptococcus pneumoniae
  misc_feature (1)..(455): tiling:Spneumo1:WAN024DI3; Cluster includes WAN0244HA spr0 436||15902480|NP_358030.1|435469..435918|+|450 bp|Hypothet ical protein|S.pneumoniae|R6|NC_003098.1|ORF|122
ttgtgttttgttccttattataaggtcaatcattgtgaggaagcttttgcttggtatcaggatgtgaacttggtttacctcgtagatggggtgaagcttccttacagtcaagcgaccttggaagccatgtattcctatytgratcggcatggykarctwwtttggattgaagtcaaggagaagggagaatggtttccaattggggatattacactatctcaggataatctccccattgtgattgggaattccgcttaccaacatcgaggacttggaaaaaagattctaagtgctttgattgaattggctcgagtaaaaggatggaaagaattgagagtcaagraaatctacacctacaatcatgytkstaggaggtgtttcaagtcgsttggatttgtggaaaatggagcaacagaaaaaggaakgagttttatattggaattagtctaactaat

SEQ ID NO: 5780 - DNA, 390 bp, Streptococcus pneumoniae
  misc_feature (1)..(390): tiling:Spneumo1:WAN024DKZ; Cluster includes WAN02433F SP02 01||15900137|NP_344741.1|188283..188549|+|267 bp|hypotheti cal protein|S.pneumoniae|TIGR4|NC_003028.1|ORF|011
ttgtgtttttttttttttccctttttttttttttttttttttttgggatcgagctcggtacccttatcaagacgtaatcgtcttgctgatttggtaaaagaggagacaaatacggaagatgctatctatgcatgggatgatactgcgactctttatcgtaagagtgagcgcttgtcgccatcggcgattttgtccccgttgcactatacagcaactgaggaaaatcgtaataagttacttaatgacttgaaagaaaaacmacctaaggtgattgtggtaaatgayaaggtggtagtctggtctgaagtggaaacactyttaaaagaaaattaccaacaagtaaagactgattactcagagtttaaagtctataaaattaaactaactaat

SEQ ID NO: 5781 - DNA, 2165 bp, Streptococcus pneumoniae
  misc_feature (1)..(2165): tiling:Spneumo1:WAN024FCT; Cluster includes WAN0243JK spr1 652||15903694|NP_359244.1|1623066..1625225|-|2160 bp|Hypot hetical protein|S.pneumoniae|R6|NC_003098.1|ORF|211
ttgttaaaaatagtaaaaaaattggaggttctgatgaaatattttgttcctaatraggtattcagtattcgtaaattaaaggtggggacttgctcggtactattggcaatttcaattttgggaagccaaggtattttatcggatgaagttgttactagttcttcaccgatggctacaaaagagtcttctaatgcaattactaatgatttagataattcaccaactgttaatcaraatcgttctgctgaaatgattgcctctaattcaaccactaatggtttagataattcgttaagtgttaatagyatcagctctaatggtactattcgttccaattcacaattagacaacagaacagttgaatctacagtaacatctactaatgaaaataagagttataaggaagatgttataagtgacagaattatcaaaaaagaatttgaagatactgctttaagtgtaaaagattatggtgcrgtaggtgatgggattcatgatgatcgacaagcaattcaagatgcaatagatgctgcagctcaagggctaggtggaggaaatgtatattttcctgaaggaacttatttagtaaaagaaattgtttttttaaaaagtcatacacacttagaattgaatgagaaagctacaattctaaatggtataaatattaaraatcacccttccattgtttttatgacaggtttatttacggatgatggtgcgcaagtagaatggggcccaacagaagatattagttattctggtggtacgattgatatgaacggtgctttgaatgaagaaggaactaaagcaaaaaatctaccacttataaattcttcaggtgcatttgctattgggaattcaaataacgtaactataaaaaatgtaacattcaaggatagttatcaagggcatgctattcaaattgcaggttcgaaaaatgtattagttgataattctcgttttcttgggcaagccttacccaaaacgatgaaggatgggcaaatcataagtaaggagagcattcagattgaaccattaactagaaaaggttttccttatgccttgaatgatgatgggaaaaaatctgaaaatgtgactattcaaaattcctattttggcaaaagtgataaatctggggaattagtaacagcaattggcacacactatcaaacattgtcgacacagaacccctctaatattaaaattywaaataatcattttgataacatgatgtatgcaggtgtacgttttacaggattcactgatgtattaatcaaaggaaatcgctttgataagaaagttaaaggagagagtgtacattatcgagaaarcggagcagctttagtaaatgcttatagctataaaaacactaaagacctattagatttaaataaacaggtggttatcgccgaaaatatatttaatattgccgatcctaaaacaaaagcgatacgagttgcaaaagatagtgcagaatdtttaggaaaagtatcagatattactgtaacaaaaaatgtaattaataataattctaaggaaacagaacaaccaaatattgaattattacgagttagtgataatttagtagtstcagagaatagtmtawyyrrkggtaaagaaggaattgttattgaggattcaaagggtaaaataaccgttttaaataaccaattttataatttatccggtaagtatatatcattcatcaaatctaatgcaaaygggaaagaacctgttatacgtgatagcgatggtaatttcaatattgtaacggagaatgggctttacaaaattgtaacaaataatttaagtgataaaaacgaaaaagaaaaaaacaaagaggaaaaacaatctaattcaaataatgtaattgatagtaaccagaagaacggagagtttaactcaagtaaagataatagacaaatgaatgacaagatcgacaataaacaagataataagasagaagaagtaaactataaaatagttggagatggcagagaaactgaaaatcatattaataaatctaaagaratagtagatgtmaaacaaaaattaccaaagactggttcgaayaagattatggaactattcttaacagtgacaggaattggtttacttttgacactaaaagggttgaagtattatggtaaagataaataactaat

SEQ ID NO: 5782 - DNA, 495 bp, Streptococcus pneumoniae
  misc_feature (1)..(495): tiling:Spneumo1:WAN024FNE; Cluster includes WAN023P7L pne5 3_3||||938..1432|+|495 bp|Type 25F capsule operon, Glimmer 2.02 orf prediction|S.pneumoniae||WAN01UCCQ|ORF|000
ttgttaaaagatttcacatcaaaatcatttatcgagtatgtgaaaaacccacattactatgatcatgccaaagtatcgattgaacacgtgaaattggcttactttaatggatcagatcaagaattgactatccgtaactttgaaagtggagcttattctatcgctggagtttatccaaatagttcgaactttgctaagaccaaggagaaatataaggataatatcgtctatagcttgcaggacaagacttcttggtatttaaatttcaatgtcaatcgcgaggcttgcaatcacactactaaaacgacagatgagcmgaagaagtcaactgagacagctgtcttgaacaaaaacttccgccaagcagtaaactttgccttggaccgcacagcccattctgcccagtcaaatggggaagaggcggctagcaagacccttcgtaacaccttggtgctcctacatttgtccaagttggagacaagacctttggagaag

SEQ ID NO: 5783 - DNA, 243 bp, Streptococcus pneumoniae
  misc_feature (1)..(243): tiling:Spneumo1:WAN024FFM; Cluster includes WAN023KUD 3154 77_2865||||1530626..1530868|+|243 bp|EGAD orf prediction|S .pneumoniae|R6|NC_003098.1|ORF|110
ttgttaaaattcttaaacattatcttcatatttttcaagcaccatrtaagggacaatataaaggatataaggagtaaagagtttcatcaaacttacatccccatagctagcttgcatcaaactcgtcataggaaccatatagtaaggcaaggcactataragcagcatagaaccaagccaaagaaacatcaaataggtgattgccgaacgagtcacattccccacataatcaactatttgtaa

SEQ ID NO: 5784 - DNA, 252 bp, Streptococcus pneumoniae
  misc_feature (1)..(252): tiling:Spneumo1:WAN024FQY; Cluster includes WAN023L4Z 3136 96_2402||||1286474..1286725|-|252 bp|EGAD orf prediction|S .pneumoniae|R6|NC_003098.1|ORF|110
ttgttaacatcaaggcttgctgttatctcatctaagatcaatatcggcgcatcttttaagaaggctctggctattgataatctttgtctttctcctcctgatagctcagctccgttytcaccaataactgtatcgaaacctttatccattttttctataaaatctgtgcaatttgcaagttttgctgctcttttaacctcttcgtcacttgcatcttgcttwccgattctaatattttccataacgctttga

SEQ ID NO: 5785 - DNA, 507 bp, Streptococcus pneumoniae
  misc_feature (1)..(507): tiling:Spneumo1:WAN024CUZ; Cluster includes WAN0246P5 2036 69-41-4_2||||345..431|+|87 bp|Glimmer 2.02 orf prediction from Patent Sequences|S.pneumoniae||WAN0246Z7|ORF|001
ttgttaagraggaggcatcagatgtcctctgaacaacaggaacgaatggcrgttcaatatgcwgagcgtagtcttttatttactgtwaaargtctyttaaagatwctmgaatggtctagacgtcaggctttagcacargattccgcctataarataggrgtrcagaaattagaagaattgctacaatctccytattcgattgatacgattaatctgaaaaaagattttttagacaaaccaattgatatagagaaatttaaagcttttttagaaaaagaagagattcctttagccatcgcttggcaaggggattctctrcatttctayacgaaagaccgttcgattctrgacaatcatttagascawytgttagaaaaaatggttaatgatccrgakaaattagctgattttaycatggataagtcattrgacgatgcaattgatgaggctaaatcccaaatwacctttagacaagaaggdgccgtcaaacagaaagagatggtgaga

SEQ ID NO: 5786 - DNA, 327 bp, Streptococcus pneumoniae
  misc_feature (1)..(327): tiling:Spneumo1:WAN024G7Y; Cluster includes WAN023LKH 3125 49_1706b||||908276..908602|+|327 bp|EGAD orf prediction|S. pneumoniae|R6|NC_003098.1|ORF|110
ttgttaatgaggtcagaaagggagccgtctaattgtttgaccgcaatgttcatggccttgtcagtcttggcacggatgatatccatcacagcctctgcctgtgtcaagtctacgcgaccgtttaaaaaagcacgtttggtaaattcaccaggttctgccaaccgagccccttcacgaatagctagctggagaatttcattggtcaccgcaatcccaccgtgggtgttaatctcgataatatcctcacgagtgaaggtctttggagacttcatagccccaaccataacctcgtccatgactttaccagtcagaggatcaataatgtga

SEQ ID NO: 5787 - DNA, 594 bp, Streptococcus pneumoniae
  misc_feature (1)..(594): tiling:Spneumo1:WAN024DEU; Cluster includes WAN023JNE 8381 8_1186||||670531..671118|+|588 bp|EGAD orf prediction|S.pn eumoniae|TIGR4|WAN01UC25|ORF|010
ttgttacaagagcaattggagaaggcagaagttgtcttgctggggcctggtttacgagacgatacgtttggagaaaatcttgtaaaacaggtctttgctagcttaaaaaagaatcagattttgattgtagatggaggggccttaaccatccttgctaggacaagtttgttgtttccatctaaccagcttatcttaactccccaccaaaaagaatgggaaaaactgtctggtattgctattgaaaagcaaaacgaaggtacaacatctagtgccctgacttctttccctcaaggaacaattttggtagagaaaggtccagctactcgtatttggcaagttggccagtctgattattaccagttaaaggttggcggtccctatcaggcgactggtggtatgggtgatacactggctggaatgattgcaggatttgcaggccaatttcgacaggccagtctctacgaacgtgtggcagtagcaacccatcttcattcagccatagcccaagaactatctcaagaaaattatgtggtcttgccgacggaaattagtaattgtcttcctaaagtaatgaaaagatatgtcctaactaat

SEQ ID NO: 5788 - DNA, 318 bp, Streptococcus pneumoniae
  misc_feature (1)..(318): tiling:Spneumo1:WAN024FBS; Cluster includes WAN023KP6 3157 32_3104||||1653066..1653383|+|318 bp|EGAD orf prediction|S .pneumoniae|R6|NC_003098.1|ORF|110
ttgttactactatttgaacgctcacgagatagatcttacaaaaaatgctttgatccacaatggaatcaaagcattttaaagagttcctcatacataagcgcagaagtcgcagttcctctgtacttggcttcttctcttttgayaaagcgagccaagttgagcaactcaggtgctggatgtttgggatttaggagcaattcacgattgaccaggcctgagagacgaactgcctgcaattgctcatttgtagtaggcagttttttagyagtctctaggagagcagcaactaaatcttcactcaaatcatgtcgagcatga

SEQ ID NO: 5789 - DNA, 195 bp, Streptococcus pneumoniae
  misc_feature (1)..(195): tiling:Spneumo1:WAN024F7Y; Cluster includes WAN023SF8 NC_0 03028.1_421||||310253..310438|+|186 bp|Glimmer 2.02 orf pr ediction|S.pneumoniae|TIGR4|NC_003028.1|ORF|011
ttgttagaaatcgatttgactgtcctgatygatttgtcctgttcttatttcrttttaatatayagttttgagatggttgatagaactgacgaagtcagctcaaaacayggttttgaggttgtagataaggagaagctgatgtggtttgaagaggttttcgaagagtgtaaaaaaatattgstmagtctaaytaat

SEQ ID NO: 5790 - DNA, 145 bp, Streptococcus pneumoniae
  misc_feature (1)..(145): tiling:Spneumo1:WAN024B7N; Cluster includes WAN0242D9 SP12 17||15901079|NP_345683.1|1146529..1146672|+|144 bp|hypothe tical protein|S.pneumoniae|TIGR4|NC_003028.1|ORF|011
ttgttagaaatcgatttgactgtcctgawcgattygtcctattcttatttcattttackatatttttatgaaaatcttaaaaaatcagtgaaatccatggatttcactgatttgtattaataaaattgtttatatggttgattga

SEQ ID NO: 5791 - DNA, 1760 bp, Streptococcus pneumoniae
  misc_feature (1)..(1760): tiling:Spneumo1:WAN024B7V; Cluster includes WAN0244FH spr0 501||15902545|NP_358095.1|499462..499665|+|204 bp|Hypothet ical protein|S.pneumoniae|R6|NC_003098.1|ORF|211
ttgttagaaatcgatttgactttcctgawmratwtgkcctgtyattwtytmatykwaytwtatttaaagcaggctatgcgacagccaacctatcaaattcctgagagaatgtatttatttggagaatccgatcattatttatggttgccaagaggtttgctgtatccattgcaagataaatttaagcaggtatctgtggaagataggagaaaggtacaaaggtctattagcgtggaatttaagggagaactcacttttgagcaagagttagccctgtcagatatgacttctaaagaaaatggtttacttcatgcggagactggttttgggaagaccgttttaggtgctgctcttatctctgaacggaaaacaaaaacaattattctagtccataataagcaactcttagaccaatggctagatcgcttaaactgctttttgactttcgaagaggaggaggctatccgttatacggcatcaggtcgtgaaaaggtaatcggctatgttggrcagtacggtgggactaagaaatggctgagtaaactggttgatgtcgttatgattcaatctctatttaagttggaaaatagtcaaagtcttttggatgagtatgagatgatgattgtggatgagtgtcatcatrtctctgccttgatgtttgaaaaagttgttgctcagtttagagggaagtatctttacggtttgacggctacgcctgagcgtaagaatggtcatgarcctattgtttttcagagaattgrtgagatactccatactgctgataagagggaaacggattttaaacggcaattgcaattaagattcacttcttttggtcatttggarattgaaaagaccaaagcaagtaattttatacagctyagtgattggattgctacwgactcagygaggaatcagwtgattctcaaggatattctagcccaagtggcagaaggacggaatatcttggttttagttaatcgaattcaacagatagatgtctttgaaaarttattgaaagagaaagaggttgatgrctgttacattattagcggaaaaaccaaagtccgagaragaacgagtttactggagacgttagaacagttagataaagggtttgttttgttgtctactggaaaatacattggcgaaggttttgacttacctcagttggacacgcttatcttggcagcacccttttcttggaaaaataatttrattcagtaykcaggtcggattcatagaaactacaaggataagtctttggtgcgkattttcgattatgtggatattcatgttccttatttagaaaagatgtttcagaaacgacaagtagcttatcgaaagatggattatcgtgycatygagggtgaggagaaacaattcgtttatgttgatagtagatatgagaaggtgttgagagaggacttagcaggggaaagacaggaatgtctgcttattttaccttatgtgcaccagacaaaactgatgaattttctaaaagaatttaggattagtcaaattgagatatgtataccagagacggttgcaaataaakyrkggstagwccagttgaagagccagaaaattaaagtgtcttttactcaatcaaaaatagtaacgcctattcttttggtgaataagactattgtttggtatggtgcaatgccattattagggaaggtagatgagatgaccatattacgtttggaatcagctagtatagtttctgaactagtggcaggtttacgatarctaat

SEQ ID NO: 5792 - DNA, 638 bp, Streptococcus pneumoniae
  misc_feature (1)..(638): tiling:Spneumo1:WAN024CP9; Cluster includes WAN024445 spr0 909||15902953|NP_358503.1|899089..899229|+|141 bp|Hypothet ical protein|S.pneumoniae|R6|NC_003098.1|ORF|211
ttgttagaaattactttaaaatccccttatcaatttgctcatattctatttcaayctackatagtaccacatggtggtcactatcatttcattcctgasasygamtwrtsggywkstgmaktagmwghyrswwawgtmtwwaaccctaatgatattgtcagagatacaggtgatgcttatatagtaagacatggggatcactatcactatattcctaagtcatctcttaacaatcccccatcacactctaacacggaagaggtaggaagttcttctagttctgtattaagtaatmcgtcactacatgtccaycatgaggaagaagatggtcatggttttgatgccaatcgaattataagtgaagattcagaaggttttgtrattcctcatggcgaccacaatcactacatcaaggttcaaactaagggatatgaagcggctttgaaaaacaagattccatccctgcaatccaactatcmacctggaacttttgatgagaaggcagtcttggcaaaagtagatcaacttctagctgatagcagaagcatctacaaagacaagmytgagtckarcwaakacagattgagttagctttaggtcagtttactgaaagtttgaaaaaaataaaagttagttga

SEQ ID NO: 5793 - DNA, 606 bp, Streptococcus pneumoniae
  misc_feature (1)..(606): tiling:Spneumo1:WAN024F4I; Cluster includes WAN0244KJ spr0 319|cps2P|15902363|NP_357913.1|319581..320186|+|606 bp|The type 2 capsule locus of Streptococcus pneumoniae|S.pneumo niae|R6|NC_003098.1|ORF|100
ttgttagaagcggtccatactgagaagcaatgggaacgctcagcgacagaacttcctccatttatcattaaacgccttccagttcgtttaacctttgataataactattttaacgaccgttatcaagtgattcctattggtggatacaatgtgattattgaaaatatacttaaagacgtagaagttgggctaggagtggattgctttgactatcgtgaagagctggaagcatctgctaacaaagttgcttttacaggaatgattgaccagtattttgattataagcatggtgagctagagtatcgcagtttacgttttaagcacgaagtgcttgatgaggaaaatcaccaaggaaatgctgtagtgaactatacagatcgtgagattccttatactcgtatcattgagcataaaaaatttgagtatggtctgcagcctaagacagtcataacgcatgaatatccagctgactggaaacgtggagatgaaccatattatccaattaatgatgagaaaaataatgctatcttttctaaataccacgaagaagcttcacagaatgataaggttatcttctgtggacgtttagcagattataaatattag

SEQ ID NO: 5794 - DNA, 944 bp, Streptococcus pneumoniae
  misc_feature (1)..(944): tiling:Spneumo1:WAN024DYP; Cluster includes WAN0243CU spr1 895|pstS|15903936|NP_359486.1|1874313..1875251|+|939 bp|AB C transporter substrate-binding protein - phosphate transp ort|S.pneumoniae|R6|NC_003098.1|ORF|111
ttgttagactataaatgtagtaagcctacacaagaaaaatacatagagataaaggtgattattatgaaattcaaaaaaatgcttactcttgcagccattggcttatcaggatttgggcttgttgcctgtggcaatcagtcagctgcttccaaacagtcagcttcaggaacgattgaggtgatttcacgagaaaatggctctggracacggggtgccttcacagaaatcacagggattctcaaaaaagacggtgataaaaaaattgacaacactgccaaaacagctgtgattcaaaatagtacagaaggtgttctctcagcagttcaagggaatgctaatgctatcggctacatctccttgggatctttaacgaaatctgtcaaggctttagagattgatggtgtcaaggctagtcgagacacagttttagatggtraataccctcttcaacgtcccttcaacattgtttggtcytctaatctttccaagctaggtcaagattttatcagctttatccactccaaacaaggtcaacaagtggtcacagataataaatttattgaagctaaaacygaaaccacrgaatatacmagccaacacttatcaggcaagttgtctgttgtaggttccacttcagtatcttctttaatggaaaaattagcagaagcttataaaaaagaaaatccagaagttacgattgatattacctctratgggtcttcagcaggtattaccgctgttaaggagaaaaccgctgatattggtatggtttctagggaattaactcctgaagaaggtaagagtctcacccatgatgctattgctttagacggtattgctgttgtggtcaataatgacaataaggcaagccaagtcagtatggctgaacttgcagacgtttttagtggcaaattaaccacctgggacaagattaaataactaat

SEQ ID NO: 5795 - DNA, 291 bp, Streptococcus pneumoniae
  misc_feature (1)..(291): tiling:Spneumo1:WAN024B4S; Cluster includes WAN023L2S 3156 45_2511||||1336824..1337114|+|291 bp|EGAD orf prediction|S .pneumoniae|R6|NC_003098.1|ORF|110
ttgttagactggtactttgaccaattatctccactagtttcgctagaatttttcccacaagctactaagaacaaagcagtcatcagactgactaatacaagcatccattttttcatccatttttcctcctatttaggttctactttcaataatacatctgcgatattttcagcaaactgcaaatcatgggtaaccacaatctgggtcatcccaagttccctattttgcaagattagcttctccacttccaaacgtaattctggatccagggcagaagttggttcatcgtag

SEQ ID NO: 5796 - DNA, 278 bp, Streptococcus pneumoniae
  misc_feature (1)..(278): tiling:Spneumo1:WAN024F7H; Cluster includes WAN023JXJ 8314 8_685||||395235..395501|-|267 bp|EGAD orf prediction|S.pne umoniae|TIGR4|WAN01UC25|ORF|010
ttgttagagattactttaaaatcctcttatcaatttgttcatattctatttcaatctattatatatatcccatcaactatgcatcataatttaggtaattcatactcaataaaaatcaaaaagcaaactagaaagctaggcacagactgctcaaaacaccgttttaaggttgtggatagaactgacgaagtcagctcaaacactgttttgaggttgtggatagaactgacgaagtcagtaaccatacccatgrcaagscgacgytgacgctaactaat

SEQ ID NO: 5797 - DNA, 93 bp, Streptococcus pneumoniae
  misc_feature (1)..(93): tiling:Spneumo1:WAN024FH7; Cluster includes WAN023ZHJ AL44 9923.1_164||||142249..142341|-|93 bp|Glimmer 2.02 orf pred iction|S.pneumoniae||AL449923.1|ORF|000
ttgttagcagaagcagccatgttttcacctgccatcgtgttggtagaacttgtcatggtgtcagcaggcatgctatctgtagtacctgtagca

SEQ ID NO: 5798 - DNA, 231 bp, Streptococcus pneumoniae
  misc_feature (1)..(231): tiling:Spneumo1:WAN024FVJ; Cluster includes WAN023L8I 3156 36_2262||||1216686..1216916|+|231 bp|EGAD orf prediction|S .pneumoniae|R6|NC_003098.1|ORF|110
ttgttagcagtaacaacgtgttttccagcttccaaggcacgagtgataaaggttttagcaggctcaatacgccccatcaattccactacgatagtaatatcctggtctgataaaatatcatccacattggttacaaagttaaagtcattccctgctgcaagcaagcgatttttttcatcttcatccttgaccaataccttagcaactttgatatctgaatgtgctgattga

SEQ ID NO: 5799 - DNA, 210 bp, Streptococcus pneumoniae
  misc_feature (1)..(210): tiling:Spneumo1:WAN024GDP; Cluster includes WAN023Q94 cont ig_1257_3||||185..301|-|117 bp|Glimmer 2.02 orf prediction |S.pneumoniae|670|WAN01UEGC|ORF|001
ttgttagccatccataaaaagaaagggcctgagttcactactcaagtcctttttgattacataaattgggcaatgaagaccacaatgatgatgattggratgacgaaacgaagaaacgaagaaggaagagccagacttggaacagtccttgtttccatgctctttcatcgagatggagttcctccattgcaagagccttttctaactaat

SEQ ID NO: 5800 - DNA, 252 bp, Streptococcus pneumoniae
  misc_feature (1)..(252): tiling:Spneumo1:WAN024GJ4; Cluster includes WAN023LTV 3135 13_1160a||||611322..611573|-|252 bp|EGAD orf prediction|S. pneumoniae|R6|NC_003098.1|ORF|110
ttgttagctttctcacgctctgctttgttaaggatttgtttacgcaaacggatagactcaggcgttacttccatgtactcatcgtcgttcaagaactcaagagactcttcaagtgtcaagatacgaggcgtcttgataacagctgtttggtccttagtagctgaacgaacgttggtcatttgttttgccttcgtgatgttaactgtcaagtcattttcacgagagttttcaccgatgatcattccttcataa

SEQ ID NO: 5801 - DNA, 82 bp, Streptococcus pneumoniae
  misc_feature (1)..(82): tiling:Spneumo1:WAN0249F2; Cluster includes WAN024E3Q R6.I G_2199.1||||1985311..1985392|+|82 bp|Between spr1992 (- st rand) and spr1993 (hsp33) (+ strand)|S.pneumoniae|R6|NC_00 3098.1|IG|110
ttgttayccctttcattttctaccttaagcatagcataaatctgacaaatgctaaaataatctgtttctctttttattttca

SEQ ID NO: 5802 - DNA, 405 bp, Streptococcus pneumoniae
  misc_feature (1)..(405): tiling:Spneumo1:WAN024GH4; Cluster includes WAN023LX7 3135 22_1004||||524151..524474|-|324 bp|EGAD orf prediction|S.p neumoniae|R6|NC_003098.1|ORF|110
ttgttcaaaagccttgttttccttttcgacttggtagccttgattttccaaggccaagttttctacctgcttcatgagtccgtccatttccttaggattttctacatagaagcgtgctgcactgacttgagcttcactattgcccaaaagggtttggctactttcatagtctgtaaagacttgattttcactgaagtcagaagacaagcctgtgaatttctcttgttttttaccagaaaagatgccrataatctcaaactctactgtttgtccttttccagattcagactgaccagcatccaagccaatcttgtcatgaagygaaagaccgttcttcttagccaattcttcgtggataaggattttcttggaatcccctttttgaaggtgtcgcccttcttttag

SEQ ID NO: 5803 - DNA, 318 bp, Streptococcus pneumoniae
  misc_feature (1)..(318): tiling:Spneumo1:WAN024EXA; Cluster includes WAN023KT0 3130 33_2924||||1556194..1556511|+|318 bp|EGAD orf prediction|S .pneumoniae|R6|NC_003098.1|ORF|110
ttgttcaacaaccatgccttctrcactacctgcaggcgctgtcgtcacttctacaacttctatattagcttccttaatcccaacaatttgaatcaaattgttcttagtaaactccaagctrgaaccaatgtaactcggcatggcaacacttgtaacttttttagctactgtcaagacaatttgagtaggtttactcacatcataagtcgttccggcacctggactttgtttcataatcgttcctggttcgctttcgctggactcttcttcctctatcttaatcaaattctcaggaaccttcttctgcttgagttctga

SEQ ID NO: 5804 - DNA, 267 bp, Streptococcus pneumoniae
  misc_feature (1)..(267): tiling:Spneumo1:WAN024G9V; Cluster includes WAN023LNV 3136 78_1504||||800612..800878|-|267 bp|EGAD orf prediction|S.p neumoniae|R6|NC_003098.1|ORF|110
ttgttcaagaccgaaacggatatcgtcgttatcgcgttcagcaagagctgggaaaggaattttagtgttagggatgttcacacctttttgtttagcgatgataccatcgttttcaacttcaacttcaaattcacgagttgcatcatctttagcaaccacacgaagaccaagtttaccatcgtcaaccaaaacttgacgaccaacttcaacatcatcatagatatcaagagcaccagcaacgttcaacgcaatcacttcacgagttga

SEQ ID NO: 5805 - DNA, 100 bp, Streptococcus pneumoniae
  misc_feature (1)..(100): tiling:Spneumo1:WAN024D79; Cluster includes WAN0243PZ spr1 420||15903463|NP_359013.1|1406396..1406569|-|174 bp|Hypoth etical protein|S.pneumoniae|R6|NC_003098.1|ORF|110
ttgttcaatgtaaaatggactaggatagggaaaaaaatgccagaaaatggtataataggacgaaagtgttttgatagggaggatatcrgggatgaatttt

SEQ ID NO: 5806 - DNA, 64 bp, Streptococcus pneumoniae
  misc_feature (1)..(64): tiling:Spneumo1:WAN024AJ2; Cluster includes WAN024ELV R6.I G_636.1.1||||624096..624159|+|64 bp|Between spr0612 (- str and) and spr0613 (pyrF) (+ strand)|S.pneumoniae|R6|NC_0030 98.1|IG|110
ttgttcaattaaagggtaacaagcaaactctttttctctgtcckaagtgaaagtctttaactat

SEQ ID NO: 5807 - DNA, 288 bp, Streptococcus pneumoniae
  misc_feature (1)..(288): tiling:Spneumo1:WAN024BDN; Cluster includes WAN023KZU 3157 00_2626||||1400373..1400660|+|288 bp|EGAD orf prediction|S .pneumoniae|R6|NC_003098.1|ORF|110
ttgttcagaggattcaaaagtaaaatcagtctccaaatcaaacagtctgttgagcttgtcctggctagatgccatatcagggagatagtcataagcttgactctcaatcatggaagccaagccccttctccaaaatggagccagcaagagtttatcaaactcgacgaaggtacgctctacagaaattttctccaaaagcggcgtcaaggtcttcatagctttaaatgtttctggctcaagtgcaaaaccaagactagcctgaaaacggaaaccacgcataatccgtaa

SEQ ID NO: 5808 - DNA, 123 bp, Streptococcus pneumoniae
  misc_feature (1)..(123): tiling:Spneumo1:WAN024DPY; Cluster includes WAN023SLC NC_0 03098.1_928||||730295..730417|-|123 bp|Glimmer 2.02 orf pr ediction|S.pneumoniae|R6|NC_003098.1|ORF|100
ttgttcatctctttccagttacaaaaacaaactcttaactttgatacgtctagtttagccttaaagcaggcgcatttcaagaatcataaattaagagaaggaagtagatttatctgtctattt

SEQ ID NO: 5809 - DNA, 105 bp, Streptococcus pneumoniae
  misc_feature (1)..(105): tiling:Spneumo1:WAN024DNW; Cluster includes WAN024217 SP16 78||15901513|NP_346117.1|1578729..1578827|-|99 bp|hypothet ical protein|S.pneumoniae|TIGR4|NC_003028.1|ORF|121
ttgttcatggtagggacttatgaaagctttactracaaaaaagaaaacagtttacaaagaaaaatgatggaggagcaaacatggcacaaaaaggagctaactaat

SEQ ID NO: 5810 - DNA, 375 bp, Streptococcus pneumoniae
  misc_feature (1)..(375): tiling:Spneumo1:WAN024FIS; Cluster includes WAN023KZ3 3131 68_2663||||1416769..1417143|+|375 bp|EGAD orf prediction|S .pneumoniae|R6|NC_003098.1|ORF|110
ttgttcattttccagttaccagcgataaatggtttacgtgacatttcacatacctcttttttcaatttattttctatttattctatcacaattatacacagcttgcaaatcttactcggatttcaagcctacttgcatggattaatccttccagagatccatggcatttmtgaaatctgcagatacctgtgtcaactgaggattgcttgcttctctttctgctctcttggcctcaatttgagccacactcttgattccttcatggcgccagtttctcaaaatcgcctgaatgtacttccagtttggttttccattcaaaacagcttcacgaagagcctccttaatcaagtcagcactggttccatcttcctttag

SEQ ID NO: 5811 - DNA, 324 bp, Streptococcus pneumoniae
  misc_feature (1)..(324): tiling:Spneumo1:WAN024GHH; Cluster includes WAN023LXL 3152 27_986a||||516392..516715|-|324 bp|EGAD orf prediction|S.p neumoniae|R6|NC_003098.1|ORF|110
ttgttccaagatttcagccacatcacgcataatacggtcaaattcttcgtggtycgcatatttttcttcgtaaacggcagtcacttggtctttcactrcttgagtygcagcttcacgggccaatttctcttctacttgaactgccttttggaggtcactgttgtaggctgcaatgatttcagcttgcaattcagcatccacgtgaagcaattccacttctgctttttctttaccgacagcagcaacgatttcttcttggaaggcaatcaattctttgacagcttcgtgccctttaagragcgcttccaacatgatttcttctga

SEQ ID NO: 5812 - DNA, 225 bp, Streptococcus pneumoniae
  misc_feature (1)..(225): tiling:Spneumo1:WAN024GIV; Cluster includes WAN023LTX 3147 44_1158||||609895..610119|-|225 bp|EGAD orf prediction|S.p neumoniae|R6|NC_003098.1|ORF|110
ttgttccaaggcttttttcaatacgaaacgagtttgtggcatggttccttcataggcatctacgaccaagacaacaccgtcaaccattttcatgatacgctcaacttctccaccraagtccgcgtgtcctggtgtgtccataatgttgatacgagttccgttgtaagcaacggcagtatttttagcaaggatggtrattccacgctctttttcgatatcgtttga

SEQ ID NO: 5813 - DNA, 384 bp, Streptococcus pneumoniae
  misc_feature (1)..(384): tiling:Spneumo1:WAN024DWI; Cluster includes WAN023KE4 3130 87_3607||||1936237..1936602|+|366 bp|EGAD orf prediction|S .pneumoniae|R6|NC_003098.1|ORF|120
ttgttccaccgtccacagatggagaatttccttagtcgctgcgacaaaartytcatcaaactgactagtctcgccagtctctttccagaggagataagccaactgcaaaggatagcaaagcgaatccacctcatacttgcgctcccagatccagccgttaaggtctgtgtggtcagtctcgtggtgccctttccagttctcctcaatgttgaaggagttagcatagggatccttgagtaccaaggtcatctgacgtttgaccaaacctgcaatggtctgacgcaggagggcatctcttttagctacatgaaggtagggtctgagttgggctgtcgaatctcgaagccacatggcaggaatatccccagtcaagacaaaagttga

SEQ ID NO: 5814 - DNA, 282 bp, Streptococcus pneumoniae
  misc_feature (1)..(282): tiling:Spneumo1:WAN024CHB; Cluster includes WAN023KJ1 3148 07_3411b||||1830365..1830631|+|267 bp|EGAD orf prediction| S.pneumoniae|R6|NC_003098.1|ORF|220
ttgttccatgagcaagtgatgggcgtaagtatgttcttggctagaagcaacttgatggcgcgacgcaacggcatcatcaggataatagccgacaggcaagtcactgatgaccacatcgctttctttgagcatttgtgggcgaacggcatctccttggacaaagccagcctgcaaaccaattacatctgccatgctagctgccagatcaatcagcaaatcatccacttccattcccaagtaatccacctttttagtaagcgaggtcaagaaaatagcgcctag

SEQ ID NO: 5815 - DNA, 243 bp, Streptococcus pneumoniae
  misc_feature (1)..(243): tiling:Spneumo1:WAN024F3J; Cluster includes WAN023M0U 3133 89_835a||||446089..446331|-|243 bp|EGAD orf prediction|S.p neumoniae|R6|NC_003098.1|ORF|110
ttgttcgatgatgtacttaatagttggaagagctgctgtgatacggttatcgttagtgattacgccatctttcaatggtacgttgaagtcaacacgaacgaggacttttttacctttcaagtcaacgtctttaacagtaagttttgccatgttacaaaaactcctttatttattttattcgaaactattatatcacactttggaaatataaggaaagatttcacaagatttttcgatatttaa

SEQ ID NO: 5816 - DNA, 396 bp, Streptococcus pneumoniae
  misc_feature (1)..(396): tiling:Spneumo1:WAN024G9Q; Cluster includes WAN023LNM 3154 41_1518b||||806197..806592|+|396 bp|EGAD orf prediction|S. pneumoniae|R6|NC_003098.1|ORF|110
ttgttcgtttttatcttgattttcttaaaaagctctatatacatagggattttctggtttatcgactttggtaaagctgtcgatttccaaggttggaaggttttgtttgagttctttatggtagtgattgaccagttttcctttggctgtwatccargtgttgttttcatactgccgggtattgcccttggtcagcaatccatagacaccagaatctgcgatacagtggataatgccgaatcggaacagaaattgactattggcatgactggggtcgttatagacaaagcctgtaaactggattgtcttgccctcaaaytcatctggatagtcgtagatagcctccatgacttccatatagttttcattagtgatctgaatactatcttgggataa

SEQ ID NO: 5817 - DNA, 719 bp, Streptococcus pneumoniae
  misc_feature (1)..(719): tiling:Spneumo1:WAN024G4B; Cluster includes WAN024401 spr1 057||15903101|NP_358651.1|1052265..1052978|-|714 bp|Conser ved hypothetical protein|S.pneumoniae|R6|NC_003098.1|ORF|2 21
ttgttctacaaatttctactcttcgacctcgaccacactcttcttgattttgatgctgctgagratgtggctttgacccaacttctaaaagaagaaggagttgcggatattcaggcttataaagattattacgttcctatgaacaaggctctctggaaagacttggagctgaagaaaatcagtaaacaagagytggttaacacgcgmttttctcgtttatttkctcattttggacaggaaaaagacggtagttttcttgcccagcgttaccaattttayctcgcycagcagggacaaacactatcgggcgctcatgatctcttggacagcctcattgagcgtgattatracttgtatgctgcgacaaatggcattactgccattcagacaggacgtttggctcaatctggtctagyaccttatttcaatcaagtctttatctcagaacagttgcaaactcaaaagccggatgctctyttttatgaaaagattggccagcaaattgctggatttagtaaagaaaakacgctgatgattggagattctctaacygccgacattcaaggtggcaataatgcggggattgacactatctggtataatcctcatcacctcgaaaatcacacacaagcccagccgacttacgaagtctattcttaccaagacttgctggattgtttagataaaaatattcttgaaaagatcacattttaactaat

SEQ ID NO: 5818 - DNA, 282 bp, Streptococcus pneumoniae
  misc_feature (1)..(282): tiling:Spneumo1:WAN024CGQ; Cluster includes WAN023ME3 3151 06_117||||56870..57151|-|282 bp|EGAD orf prediction|S.pneu moniae|R6|NC_003098.1|ORF|110
ttgttctatattagctcgctaacgctcgcaaaccatacgatcattaacgtattttgtgaatttttatttttctttttgataatggtcttaggtgatrgaggcggaagcaaaccttcggtttcattcctaaactttgagcctamggtctccaagtttccccctgaccagaacattcactgttctggtcttttcaccacgacgaccattatcgtgtttggcgactacggcgcgttattcttatatctttacttaattgccttgcttccgatatctgttcggtag

SEQ ID NO: 5819 - DNA, 358 bp, Streptococcus pneumoniae
  misc_feature (1)..(358): tiling:Spneumo1:WAN024F2Z; Cluster includes WAN0242S8 SP06 34||15900540|NP_345144.1|599322..599663|+|342 bp|conserved domain protein|S.pneumoniae|TIGR4|NC_003028.1|ORF|111
ttgttctcatcttatttcaatccgctatatattatggtatcgaatcttcatcagaatgataaaattaatcaattratatctgattacaaacagaatatgaaagctttttatatcactattgaaaaatttatacgaratgatgaaagycttaagtgttattttayaaaggttatttcaagtcgttccaaggtaacaagtctagatcagattgaagctgataaaacgatacaaagaaaatattcaagtgagctaaaaaaatttattggattttataatgagattatttgtgaggaaaatagtttcctacatgtacgaaagaggtggtcgagttggtttaggtagtcggtgcgtgagttga

SEQ ID NO: 5820 - DNA, 234 bp, Streptococcus pneumoniae
  misc_feature (1)..(234): tiling:Spneumo1:WAN024E2Y; Cluster includes WAN023KJN 3157 50_3382||||1813368..1813601|+|234 bp|EGAD orf prediction|S .pneumoniae|R6|NC_003098.1|ORF|110
ttgttctgcaatccaagttgctggtttaccaacgatgtcagcgttcaattttgcaccagcacagtttttgctgtttgctttgacgccgaagcagaactcttcaagaagagctttttcttttttgtttacaaagtaagtgtggtaagatttgaactctgctacaaattcatcgtaaatttctttatcaatgataactgcttgttcagatgcacagaccataccgttatcaaatga

SEQ ID NO: 5821 - DNA, 258 bp, Streptococcus pneumoniae
  misc_feature (1)..(258): tiling:Spneumo1:WAN024CU3; Cluster includes WAN023LWA 3147 51_1049||||548851..549108|-|258 bp|EGAD orf prediction|S.p neumoniae|R6|NC_003098.1|ORF|110
ttgttctggacttgttccttttggatagcggatgttragggcaatggtattatcagcacttgtttcatcgaagyggaagacgccggcattcatagaaagagcacccatcttttcatccacatgagcaatcttragattttcaccctcatgatcgttcaagagaattttacctgcgatgtcaaggtagtctttggctggaccagcaaagccaaactggctgaggaagagggcaaggtaagttgcgccattgacacctga

SEQ ID NO: 5822 - DNA, 300 bp, Streptococcus pneumoniae
  misc_feature (1)..(300): tiling:Spneumo1:WAN024FCH; Cluster includes WAN023KQ0 3157 30_3073||||1637766..1638065|+|300 bp|EGAD orf prediction|S .pneumoniae|R6|NC_003098.1|ORF|110
ttgttcttaacaaagatattttttaggtcactttcaaaacgatacatatcttcaagggtaaattctgaaccctctatcttatctatacaatttagaatttctattgtccaacctcttgatgacagagagctcttccttaaaaataaaccttgcttaaattcttttgtaactttttctggatctctaacttgtccatcttgcacaagaaatatccttcctttagaaggtacttgtgataaatcaatgttacaaccaatccaacctgctcgtctagcagttggtgcaagtggttttctttga

SEQ ID NO: 5823 - DNA, 240 bp, Streptococcus pneumoniae
  misc_feature (1)..(240): tiling:Spneumo1:WAN024F4J; Cluster includes WAN023M58 3136 17_592||||305320..305559|-|240 bp|EGAD orf prediction|S.pn eumoniae|R6|NC_003098.1|ORF|110
ttgttctttgattttcattgtgtatttaaacacaaaaacaccctgaaacatcagggtgccattcttacatcaaatayaaaattgckagggtcaggagacttgctagaagyccmactccccaaaagaagaagtcaaccttccactcgctccaaggatttcctttaccagacaatcccccaagctcaaaatggtgatgtacaggcgtcatacggaaaatacgtttaccacctgtcagtttga

SEQ ID NO: 5824 - DNA, 780 bp, Streptococcus pneumoniae
  misc_feature (1)..(780): tiling:Spneumo1:WAN024GCV; Cluster includes WAN0244AO spr0 674|sodA|15902718|NP_358268.1|680041..680646|+|606 bp|Mang anese co-factored superoxide dismutase|S.pneumoniae|R6|NC_ 003098.1|ORF|221
ttgttgaaactacaacccgcgtcaggactatcttgtcgtgggtttcttgctgatttgcttattttattagaaagtatgtcagtgatttccttatctataagcaaaaaacttgaaaaaagtgaatgtttgcgttatcattttcatatagaaagaaaaagaggtattacagatggctattatcttaccagaacttccrtaygcrtacgaygckytggaaccatacatcgatgcggaaacaatgcatttgcaccatgacaaacaccatcaaacttatgtcaacaatgccaatgcagytytagaaaaacaccctgaaatyrgtgaagaycttgaagccytgcttgctgatgtagaatctatyccagctgatrtccgtcaagcrcttatyaayaayggtggyggacayttgaaccaygctcttttctgggaattgatgactccygaraaaacagctccwtcagcagaactdryarmagmwatygatgcaacatttggktcayttgwagamttycaagcagccttyactgcrgymgcaacaactcgtttyggttcwgghtgggcatggttrgttgtyaacaargaaggkaarcttgaagtgayttcaacagcaaacchagacacaccawtytcagaaggtaaaaaaccaatcttgggcttggacgtttgggaacatgcttactacgtgaaataccgcaacgtgcgtcctgactayatcaaagctttcttttcagtaatcaactggaataaagtagatgaattgtacgcagctgctaaataactaat

SEQ ID NO: 5825 - DNA, 452 bp, Streptococcus pneumoniae
  misc_feature (1)..(452): tiling:Spneumo1:WAN024DVN; Cluster includes WAN0243AR spr1 970|PTS-EII|15904011|NP_359561.1|1960988..1961434|-|447 bp |Phosphotransferase system sugar-specific EII component|S. pneumoniae|R6|NC_003098.1|ORF|211
ttgttgaaagagaaaatgttyaatagaggaattttagttgccagtcatggtaattttgctagcggagctctcatgaccgcagaaatgtttgttggtgagacaacaaatgatagagttaggacattaggtttgatgcctggagagaatattgtagagtttgarcattattttaaaaatcaagtrratgaactgttagactcaaatcaagaggttatcgttttgactgacttgattggaggaagtcctaataatgtggctttgtcacggtttttaaatttggattcagttgatattgtaacagggtttaatatccctctcctagtggaattaatatcaagttatgattcaaaaatcaatttagaagaaattgttcamaatgctcaaaatagtttgtttaatgttaaacaacaacttaacgtagaggaggaagargatttatgtctatarctaat

SEQ ID NO: 5826 - DNA, 120 bp, Streptococcus pneumoniae
  misc_feature (1)..(120): tiling:Spneumo1:WAN024B2C; Cluster includes WAN023S9V NC_0 03028.1_1981||||1498858..1498977|-|120 bp|Glimmer 2.02 orf prediction|S.pneumoniae|TIGR4|NC_003028.1|ORF|010
ttgttgagaaaacaagagggagagtacctgagagcggagaatgccatcctaaaaaagttaagagaactccgattgaaggaggaaaaagagaaagaagaaagacagaaattgttcaagaat

SEQ ID NO: 5827 - DNA, 129 bp, Streptococcus pneumoniae
  misc_feature (1)..(129): tiling:Spneumo1:WAN024CGA; Cluster includes WAN023S2V cont ig_1628_25||||19286..19414|+|129 bp|Glimmer 2.02 orf predi ction|S.pneumoniae|670|WAN01UD9N|ORF|001
ttgttgagtataaaaagtcatacctcgcaaatttttaaaataaataaaaaacgcatcatatcaggtrttcaaaaacgtgatacaatgcgtttaatagactataaaattagttgtcttttcttctcaaat

SEQ ID NO: 5828 - DNA, 170 bp, Streptococcus pneumoniae
  misc_feature (1)..(170): tiling:Spneumo1:WAN024EU7; Cluster includes WAN0243FU spr1 786||15903828|NP_359378.1|1759587..1759748|+|162 bp|Hypoth etical protein|S.pneumoniae|R6|NC_003098.1|ORF|120
ttgttgatggataaaacttttcttcatagacaactcctcaaaaatttaataaacgtattatacacctatttccaagaaaagaaaagagaaaatttaaaaaaaatcagtgtcactcaaaacactgatttcatagaccttttagtcattgcgaccaaagatacgtarctaat

SEQ ID NO: 5829 - DNA, 579 bp, Streptococcus pneumoniae
  misc_feature (1)..(579): tiling:Spneumo1:WAN024G7Z; Cluster includes WAN023LKJ 3153 43_1705b||||907646..908224|+|579 bp|EGAD orf prediction|S. pneumoniae|R6|NC_003098.1|ORF|110
ttgttgattcgctcttcaatcttgtcgatgttttggtttttaaggactgaaatacggataacgtcttcaggtagtttcgaagtttcaatcgtttctggcaggtcggttttattaagtagaataatgcgattggtatcttggctaatttcaagaagttgtctgtcttgcgcagtcagtggttcactggcatttagcactagtagaaccaagtcggcttccttgagggcttttttcgaacgctcaacaccgatttgttccactatgtcatctgtttcacgaataccggctgtatcaatcaatttgagaggtacaccattgatgttgacgtactcttcgatgacatctcgtgttgtcccagcgatatctgttacgatagccttgtcctcacgcaagaggttgttgagaaggcttgatttcccaacgttgggacgtccaatgatagccgttgaaattccttcacgaaggattttaccacgacgtgctgtcctaaggagtttggttagtaattgctcaaactccattgtcttctctcggacaacagcagtagtggcttcctcaacatcgtcatactcaggatag

SEQ ID NO: 5830 - DNA, 456 bp, Streptococcus pneumoniae
  misc_feature (1)..(456): tiling:Spneumo1:WAN024C99; Cluster includes WAN0244O1 spr0 193||15902237|NP_357787.1|198743..199198|-|456 bp|Hypothet ical protein|S.pneumoniae|R6|NC_003098.1|ORF|210
ttgttgattggtgaagctgaacctttcgcacgtggacggaaacgtttcatagttggtccttcgtttgcgaatgcttcagatactaccaarttagctttatccaaaccaaagttgttttcagcgttagctacagctgagttcaaaactttcaagatgatttcagcagctttgtttggagtgaatgtcaagattgcgattgcatcggctacgcttttaccacggatgttatcaagaacaagacgtgatttacgaggtgaaacacgtactgtacgagccattgctttagctgaagtaatttctgccatttatgttctccttattttctacgtgttttcttgtcgtctgcagcgtgacctttgtaagtacgagttggtgcaaattcaccaagtttgtggcctaccatgtcttcttggatgtaaacaggtacgtgtttacgtccgtcataaactgcaatag

SEQ ID NO: 5831 - DNA, 1557 bp, Streptococcus pneumoniae
  misc_feature (1)..(1557): tiling:Spneumo1:WAN024FC2; Cluster includes WAN0243IV spr1 677|proWX|15903719|NP_359269.1|1648982..1650502|-|1521 bp| ABC transporter membrane-spanning permease - choline trans porter|S.pneumoniae|R6|NC_003098.1|ORF|521
ttgttgcagacttgtttggaggtagtrttcatgactaatttaattgcaacttttcaggatcgttttrgtgattggttgacagcyctatctcaacatttgcagttgtcrcttttgaccttgttactagctattttgcttgcgattcccttggctgtttwtcttcgctatcatgagaagytggcsgaytgggtcttrcagattgcaggkattttccagaccatcccgtctctggccttgttgggrctctttatyccyttgatgggaattgggacyttrccggcwttgacagctctagtgatttatgcgattttycckattttrcaaaatactatyactgggctkaagggaattgatccgaryctkcaagaggctgggattgcctttgggatgaccagatgggarcgtctcaagaartttgaaattccactygccatgcctgttatcatgtctggrattcggacggcagckgtyttgattatcggtacggcwaccttggcgrccttgattggkgcagggggactrggttcctttatyctkttgggaattgaccgtaataatgccagtttgattttgattggggcmctttcttctgcagtgctagcyattgcctttaacttcctactaaaagtratggaaaaagcraaattrcggacgattttctcwggttttgccttgrtggctttattactgggtctgtcttatagtccagcycttttggytcaaaaagagaaggaaaacttgrttattgctgggaaaataggyccagaaccagaaattttggcyaatatgtataarttgctgattgaagaaaataccagcatgactgcgactgttaaaccgaattttgggamgacaagyttcctttatgaagctctgaaaaaaggygatattgacatytatcctgaatttacyggtacggtgactgaaagtttgcttcaaccatcacccaaggtgagtcatgarccagarcaggtttatcargtggcgcgtgatggyattgcyaagcaggatcatctagcctatctcaaaccyatgtcttatcaaaayacctatgctgtagctgttccgaaaaagattgctcaagaatatggcttgaagaccatttcrgayttgaaaaaagtggaagggcagytgaaggcaggytttacrctygagtttaacgaccgtgaagatggaaataagggcttgcaatcaatgtatggtctcaatctcaatgtrgcgacyatksagccagcycttcgytatcaggcwattcaktcaggggatattcaaatcacggatgcctattcgactgatgcggaattggagcgttatgatttacaggtcttggaagatgacaagcaactcttcccacctyatcaaggggctccactcatgaaagaagctcttctcaagaaacacccagagttggaaagagttcttaatacattggctggtaagmtwacwrawagccagatgagccagctcaactaccaagtcggtgttgaaggcaagtcagcaaagcaagtagccaaggagtttctccaagaacaaggtttgttgaagaaaykaactaat

SEQ ID NO: 5832 - DNA, 348 bp, Streptococcus pneumoniae
  misc_feature (1)..(348): tiling:Spneumo1:WAN024DGE; Cluster includes WAN0244CQ spr0 600||15902644|NP_358194.1|612185..612532|+|348 bp|Conserve d hypothetical protein|S.pneumoniae|R6|NC_003098.1|ORF|132
ttgttgcattgttgctcarggtgtgmtttttttgaaagaaaaaataaaatgaaaacgaaaaaacatagattacttgctctagytcttatttcaagytttacattattgggagctgcatcagctgctgtayaatatccagatggaggagtatggacrtatggagaaggttcaggaggtggttrggctttttcaaattactatcatggtaaaaaatatcattattcwtcyvtygyrasyarwtggratrgtcattcwgataaaggakmagcwcctgcwggraaaacytcmkabgcwtggatttggactaaatkkggrgaacaagtadcawtttactrtgaytatgactaa

SEQ ID NO: 5833 - DNA, 230 bp, Streptococcus pneumoniae
  misc_feature (1)..(230): tiling:Spneumo1:WAN024AXX; Cluster includes WAN0243NQ spr1 501||15903544|NP_359094.1|1479757..1479897|-|141 bp|Hypoth etical protein|S.pneumoniae|R6|NC_003098.1|ORF|120
ttgttgggaayagcggtaaacacagctgctacaactcttaatggaggagctactgcaggggctttttcaggtgtwgccttactcttgaatgccttgaagattgcaaatcttgttcttggtatcattgctattgtttactataaaggagataagcgtgtaggtgcagctccgtctgtactaatgattgtttctggtggagttagtctcattctattccgttcttarctaat

SEQ ID NO: 5834 - DNA, 264 bp, Streptococcus pneumoniae
  misc_feature (1)..(264): tiling:Spneumo1:WAN024CRO; Cluster includes WAN023M27 3133 05_759||||393657..393920|-|264 bp|EGAD orf prediction|S.pn eumoniae|R6|NC_003098.1|ORF|110
ttgttggtactgagtcacatcttctcctctaactctacgtctggatacttgtccgcaaaccagcggagggcaaagtcattttcaaagagaaagactggttggtcaaaacggtctttggctaagatattgcgacttgacgacatccgttcatccaagtcctcaggcttgatccaacgaacggtctttttacccattgggytcatracyacttccgcattgtaytcgccttccatrcggtgtttaaagacttcaaactggagttga

SEQ ID NO: 5835 - DNA, 278 bp, Streptococcus pneumoniae
  misc_feature (1)..(278): tiling:Spneumo1:WAN024C8I; Cluster includes WAN0244NJ spr0 211|infA|15902255|NP_357805.1|207771..208043|+|273 bp|Tran slation initiation factor IF-1|S.pneumoniae|R6|NC_003098.1 |ORF|111
ttgttgtctctgtgtctagaggcatcgaatcgaaatttatggaggtgcttttgcgtggcaaaagacgatgtgattgaagttgaaggcaaagtagttgatacaatgccgaatgcaatgtttacggttgaacttgaaaatggacatcagattttagcaacagtttctggtaaaattcgtaaaaactatattcgtattttagcgggagatcgtgttactgtcgaaatgagtccatatgacttgacacgtggacgtatcacttaccgctttaaataactaat

SEQ ID NO: 5836 - DNA, 231 bp, Streptococcus pneumoniae
  misc_feature (1)..(231): tiling:Spneumo1:WAN024GMO; Cluster includes WAN023M1Y 3134 06_775||||401685..401915|-|231 bp|EGAD orf prediction|S.pn eumoniae|R6|NC_003098.1|ORF|110
ttgttgtggcgtagtaatgggcataaagatagtagcaggaattttcatttcattacaagtataggctactccctgcgcatgatttcccgcagaagcgcagactaccccacgttcacgttcttccttgctgagctgggaaatggcataataggcaccacgaattttaaaggagcgaacacgctgggcattttcttttttcaaataaatcttagcaccatacttctccgataa

SEQ ID NO: 5837 - DNA, 588 bp, Streptococcus pneumoniae
  misc_feature (1)..(588): tiling:Spneumo1:WAN024EWW; Cluster includes WAN023KM0 3155 06_3270b||||1750280..1750867|+|588 bp|EGAD orf prediction| S.pneumoniae|R6|NC_003098.1|ORF|110
ttgttgtggtgtcaagacttcattgtcctgaacagacatacgttcacggacattacgttccatacgagaaagtcccaaacgtacttggttggcaagcaattcaccaaccgcacggatacgacgatttccaaggtggtcgatatcatctacacggccaagtccttcagccaagttgaggaagtagctcatctcagcaaggatatctgcaggagtcaccgtacgaaccttgtcatctgggttagcattaccaatgatcgttacgacgcgatctggatcagttggagcaayaaccttgaatttttgaagaacaacaggctcagtcacaacggctgcatcgtttgggatgtagacaatcttgttcaagtcgccatccaaatggctttcaatgctttcaatcacgctacgagtcataatcgtaccagcttctaccaagatttctccagtttcagggtctaccaatggctctgcaatggtttggttgagcaaacgtgttttaacattgagttttttattgattttgtaacgaccaactgctgccaagtcatarcgacgtgggtcaaagaagcgagcyacaagcaagctacgtga

SEQ ID NO: 5838 - DNA, 237 bp, Streptococcus pneumoniae
  misc_feature (1)..(237): tiling:Spneumo1:WAN024DXJ; Cluster includes WAN023KFQ 3150 32_3539||||1900852..1901088|-|237 bp|EGAD orf prediction|S .pneumoniae|R6|NC_003098.1|ORF|110
ttgttgttcagttgcaacaaggaagtctacaaatttttgagaagcttcaaggttcttaacggcttgaggaatgacccaagctttaccaccaccgaatgcagcatattcttttccatttggaagagttgggatagttgcaactccgtagtttactttagcatctttaaaggcttgagctttccaaggtccgtcgatgatagcagctgttttaccttcttggaattgagtttggattaa

SEQ ID NO: 5839 - DNA, 300 bp, Streptococcus pneumoniae
  misc_feature (1)..(300): tiling:Spneumo1:WAN024C9H; Cluster includes WAN023M95 3133 92_371||||197395..197694|-|300 bp|EGAD orf prediction|S.pn eumoniae|R6|NC_003098.1|ORF|110
ttgttgttggtttataaacacgaattcccacgatatttcctccttagattattcagcttcagcagcaaacaactcgattgctttagaatcagctgtaagtgtgatgatagcttttttagttttgttagtaaaaccagtgtaacgtccaacacgtttagcttttggttttacgttgattgtgttaacattggcaactttaacaccttcgaaagcagcttcaacagcttgcttgatcaaaagtttgtgtgcacgagtgtcaacttcaaatacatattttcctgcttcaagttgagccattga

SEQ ID NO: 5840 - DNA, 309 bp, Streptococcus pneumoniae
  misc_feature (1)..(309): tiling:Spneumo1:WAN024C86; Cluster includes WAN023M8C 3155 27_426||||215568..215876|+|309 bp|EGAD orf prediction|S.pn eumoniae|R6|NC_003098.1|ORF|110
ttgttgttgtccaccactgagtttatcgggctttcgatccgcatattgagcaatttgcatgagttcaagatacttgttggtctgttgaatcaattcttcttttggaaccttcttttgcataagaccaaaagcaacgttgtctcggacagtcaaatgtgggaaaatagcgtagttttggaaaaccakcccgatattgcgtttgctgggttccatattattgatttttgtatcatcgaagtaaaattctccaycttygatactgttgaaacctgcaatcatacgaagaagggtcgttttcccacatcctga

SEQ ID NO: 5841 - DNA, 1286 bp, Streptococcus pneumoniae
  misc_feature (1)..(1286): tiling:Spneumo1:WAN024DZK; Cluster includes WAN0243DC spr1 877|MATE transporter|15903918|NP_359468.1|1846457..1847737 |-|1281 bp|Multi antimicrobial extrusion (MATE) family tra nsporter|S.pneumoniae|R6|NC_003098.1|ORF|211
ttgtttaagaaaaataaagacattcttaatattgcattgccagctatgggtgaaaactttttgcagatgctmatgggaatggtggacagttatttggttgctcatttaggattgatagctatttcaggggtttcagtagctggtaatattatcaccatttatcaggcgattttcatcgctctgggagctgctatttccagtgttatttcaaaaagcatagggcagaaagaccagtcgaagttggcctatcatgtgactgaggcgttgaagattaccttactattaagtttccttttaggatttttgtccatcttcgctgggaaagagatgataggacttttggggacggagagggatgtagctgagagtggtggactgtatctatctttggtaggcggatcgattgttctcttaggtttaatgactagtctrggagccttgattcgtgcaacgcataatccacgtctgcytctctatgttagttttttatccaatgccttgaatattcttttttcaagtcyagctatttttgttctggatatggggatagctggtgttgcttgggggacaattstgtctcgtttggttggtcttgtgattttgtggtcacaattaaaactgccttatgggaagccaacttttggtttagataaggaactgttgaccttggctttaccagcagctggagagcgacttatgatgagggctggagatgtagtgatcattgccttggtcgtttcttttgggacggaggcagttgctgggaatgcaatcggagaagtcttgacccagtttaactatatgcctgcctttggcgtcgctacggcaacggtcatgctgttggcccgagcagttggagaggatgattggaaaagagttgctagtttgagtaaacaaaccttttggctttctctgttcctcatgttgcccctgtcctttagtatatatgtcttgggtgtaccattaactcatctctatacgactgattctctagcggtggaggctagtgttctagtgacactgttttcactacttgggacccctatgacgacaggaacagtcatctatacggcagtctggcagggattaggaaatgcacgcctccctttttatgcgacaagtataggmatgtggtgtatccgcattgggacaggatatctgatggggattgtgcttggttggggcttgcctggtatttgggcagggtctctcttggataatggttttcgctggttatttctacgctatcgttaccagcgctatatgarcttgaaaggatarctaat

SEQ ID NO: 5842 - DNA, 432 bp, Streptococcus pneumoniae
  misc_feature (1)..(432): tiling:Spneumo1:WAN024GA9; Cluster includes WAN02447J spr0 787||15902831|NP_358381.1|784604..785035|-|432 bp|Hypothet ical protein|S.pneumoniae|R6|NC_003098.1|ORF|210
ttgtttacgccaccattcccagtcatgggcgacatcatgtccccattcagcaaaccaggctggaatttgtttcttgtcaaaggcttctttgagcttgtaaaaggatggcaaaccatcttgttcccaggctccaagccccgtacacagcacaatctctgcctgacggtaacggtcaataaaccagccgtcgttttggttccaaatataatctactggcgagttttggtaaatagcatcatcgttgtagtaatcaccgacaaagaaacgtgcgtcgtaaacaccactgagagcaatcactttggtaaagacatctggatgctggaggaagaaattgagtgcatgataggctcccatagagcaacctgtcgtcatcatgccatcaaaccaacctgtcttgtgcttgataaaagaatggcctcctcaatcacataa

SEQ ID NO: 5843 - DNA, 225 bp, Streptococcus pneumoniae
  misc_feature (1)..(225): tiling:Spneumo1:WAN024DZI; Cluster includes WAN023KI0 3155 17_3446||||1846841..1847065|+|225 bp|EGAD orf prediction|S .pneumoniae|R6|NC_003098.1|ORF|110
ttgtttactcaaactagcaactcttttccaatcatcctctccaactgctcgggccaacagcatgaccgttgccgtagcgacgccaaaggcaggcatatagttaaactgggtcaagacttctccgattgcattcccagcaactgcctccgtcccaaaagaaacgaccaaggcaatgatcactacatctccagccctcatcataagtcgctctccagctgctggtaa

SEQ ID NO: 5844 - DNA, 333 bp, Streptococcus pneumoniae
  misc_feature (1)..(333): tiling:Spneumo1:WAN024FNF; Cluster includes WAN023L3L 3132 51_2472||||1317722..1318054|+|333 bp|EGAD orf prediction|S .pneumoniae|R6|NC_003098.1|ORF|110
ttgtttactcctttagtttttatatttctttttcaattaatttctgctgaacaaaccaatytaacaagggaaragttttttctgtatttgcccataratgataagaatctaagaccgcttgtacactacctaaattttctaccaacttatctactgtcaaaaagctgcgccagtattcataaaaaatacttgcatagttcttatcataagtcgaagaaccaaaatcattcaatgaatgccaactatacttcttctgaaaaagttctacgagagattgattacaaattttttccgcttgaaattcctcttctgtcaagaaatacttgcgactaa

SEQ ID NO: 5845 - DNA, 273 bp, Streptococcus pneumoniae
  misc_feature (1)..(273): tiling:Spneumo1:WAN024BGL; Cluster includes WAN02445Z spr0 843||15902887|NP_358437.1|841288..841560|+|273 bp|Hypothet ical protein|S.pneumoniae|R6|NC_003098.1|ORF|110
ttgtttacttgcttcatcattcatagaactactataccatattttgtttcgcaggaagtctattggaaagtaagaaatattgaagctgaggctattagaagaaattgtgagcgtggtgctattttttcaggtaaaataaaatatcacgaagattcacagtttaaaggagatcactatgttgaatgttatgctgttttagataatacggttatagcaagagatagaataacagtccctatcgatccgttatgtggaaaagattttatagagtag

SEQ ID NO: 5846 - DNA, 309 bp, Streptococcus pneumoniae
  misc_feature (1)..(309): tiling:Spneumo1:WAN024CBC; Cluster includes WAN023MAG 3134 35_298||||154947..155177|-|231 bp|EGAD orf prediction|S.pn eumoniae|R6|NC_003098.1|ORF|110
ttgtttagacaatttttcaagagttccatctttataaagttctttgatgcgtttgtctacaaacgatttcaactcatcttgaccytgagcaagaagtgggtaaacgtacggttgttggtcgcttggaagttcgataactttcaagttgtccaaaccttggttcttgatcactgtttcaacaccgattttatcaaaaatcttatagtcaaattgtccatcgctcaaacgtaccatgatttgttgsaagtctgccttagtatagttaaggatagttgggttgtccgtgtgttcagcattgtatgcttctaa

SEQ ID NO: 5847 - DNA, 81 bp, Streptococcus pneumoniae
  misc_feature (1)..(81): tiling:Spneumo1:WAN024DOK; Cluster includes WAN023SJF NC_0 03098.1_1627||||1274724..1274804|+|81 bp|Glimmer 2.02 orf prediction|S.pneumoniae|R6|NC_003098.1|ORF|111
ttgtttagtttagttggtttcatatcactattatataatgcttttgraaatgagcctagtataagtcaaaaacgtgttgaa

SEQ ID NO: 5848 - DNA, 404 bp, Streptococcus pneumoniae
  misc_feature (1)..(404): tiling:Spneumo1:WAN024F3K; Cluster includes WAN023M0R 3146 73_838||||446989..447216|-|228 bp|EGAD orf prediction|S.pn eumoniae|R6|NC_003098.1|ORF|220
ttgtttataaaatcttatttttctgtcaaggctgcaagtcctggaagaaccttaccttcaagaagttccattgatgctccaccacccgtactaatccatgagaacttgtctgcacggccaaggttaatcgctgcggcagctgagtcaccaccaccgatgattgatttaactcctggttgtttcacgatagcgtccatcacaccgattgtaccagcttggaaatctgggttttcaaatacacccataggtccgttccatacractgttttggcaccagtcaaagcttcgtcaaatttggcgatagattttggaccgatgtcaagaccaaggaagccttcagaaactgcttcaccttcagtgtcacgcacttcagtgtaaccagcaaatgcgttagcttcttttga

SEQ ID NO: 5849 - DNA, 907 bp, Streptococcus pneumoniae
  misc_feature (1)..(907): tiling:Spneumo1:WAN0249UC; Cluster includes WAN024E5T-rc R 6.IG_1996||||1810790..1811696|-|907 bp|Between spr1836 (pt cA) (+ strand) and spr1837 (adhE) (- strand)|S.pneumoniae| R6|NC_003098.1|IG-rc|130
ttgtttatcagtctagaagcaagacaaaaactcaatttgagggaaagatccagtamtttttctatgataaaaggcatcctatcaaggtttttgaacacctgataggatgcctttttatgatattgaggcctttttgccctttttgaaaaactagaatagaaacaaaatatataatagattgaaactrgaatagtacaywtctgcttctaaaacattgttagaattcgatttgactgtcctgatcgatttgtcctgttcttatttcattttratatataaaaaatatagtatagtagactgaatctaaaatagtacgaaacaattgctaaaacatttatagaaattaattttactttyctgatagagttgttcacatcttatttcaattcactatagtttaatttaagagtagtatttactaaggcccaattaaaatmamagakywaacgakaaaacgatgacaaggtgtgttgctttttgatttctaaagagtataatgatagatctctataaaataagtgcgaaggaaatgagcttttatartcctttcgttttaaaatactatctcagatattcttatatcgacaagaagtttttgagtcattccctcatcatacatattaaataaatagtggctcattcaatttttcactagaataataagctagtatagtaaactgaaataagatataaacaaataaattggagcttaacatctatttccagcaattttttagaaaytrcagtggactattctagattcaayayattataaaaactagagtaaaagaaaaggattggatcttgtgtaatgcaggatccaatcctttcaatcattttgtccaacttttggaggttcctacaatgtagycgtcattaataaagacagatgggaaygacagtgttc

SEQ ID NO: 5850 - DNA, 93 bp, Streptococcus pneumoniae
  misc_feature (1)..(93): tiling:Spneumo1:WAN024DPJ; Cluster includes WAN0242I1 SP10 36||15900907|NP_345511.1|977342..977434|-|93 bp|hypothetic al protein|S.pneumoniae|TIGR4|NC_003028.1|ORF|121
ttgtttattatcagtcctgatctttttaatattgctgttattctctatatcctatttttcattcatgatattcttttackaattttatcttaa

SEQ ID NO: 5851 - DNA, 150 bp, Streptococcus pneumoniae
  misc_feature (1)..(150): tiling:Spneumo1:WAN024BER; Cluster includes WAN023SF1 NC_0 03028.1_500||||382257..382397|-|141 bp|Glimmer 2.02 orf pr ediction|S.pneumoniae|TIGR4|NC_003028.1|ORF|011
ttgtttattkacaaatactcaatgaaaatcaaagaacaaactaggaagctagccgtaggctgcttaaaacagtgttttgaggttgtggatagaactgacgaagtcagctcaaaatactgttttgaggttgcagatggaagcctaactaat

SEQ ID NO: 5852 - DNA, 1219 bp, Streptococcus pneumoniae
  misc_feature (1)..(1219): tiling:Spneumo1:WAN024FLU; Cluster includes WAN0243RQ spr1 357||15903400|NP_358950.1|1339597..1340763|-|1167 bp|Conse rved hypothetical protein|S.pneumoniae|R6|NC_003098.1|ORF| 212
ttgtttcaaaaatggtataatgagagaacaatagaaaggaagtatttatggagcaaaaagagaaacattttagcctatcttggtttttcaagtggtttttarmtaayaaggcaattacggtatttttagtaaccttattattgggactgaatctttttattttaagtaagattagttttctattttcacctgttttagactttttagcagttgtgatgttgccagtcattttrtctggtttgttatattatttgttgaatcctattgttgattggatggagaagcataaggttaatcgtgttatagctatcactattgtctttgttatcatcgctctctttatcatttggggcttggcagtcgccattccaaatctgcaacgtcaggttttgacctttgcaagaaacgttcctgtttacttagaagatatagataggattgttaatggattggtagcccagcacctgccagatgatttcagacctcaattagagcaagttttgaccaatttttctagccaggctacagttttggcaagtaaggtttcatctcaggcagtcaactgggtgagtgcctttattagcggrgcttctcaagtgattgttgccttgattatcgttcctttcatgctcttttatctcttgcgtgatgggaaaggcttgcgtaactatttgacccaattcattccaagaaaattgaaggaacctgttggacaagttytatcagatgtgaatcaacagttgtccaactatgttcgagggcaagtgacagtggctattattgtagcagtaatgtttatcatcttcttcaagattattggtctacgctatgcggttacgctgggggttactgctggtattttaaatctggtcccttatcttggtagctttctagccatgcttcctgctctagtattgggtttgattgctggtccagtcatgcttttgaaagtagtgattgtctttatcgtagaacaaactattgaaggccgttttgtctctccattgattttgggaagtcaattaaacatccaccctattaatgttctctttgttttgttaacttcaggatctatgtttggtatctggggagttttacttggtattccggtttatgcctctgctaaggttgtcatttcagccattttcgaatggtataaggtagtcagtggtctatatgaattagagggtgaggaagtcaagagtgaacaatarctaat

SEQ ID NO: 5853 - DNA, 267 bp, Streptococcus pneumoniae
  misc_feature (1)..(267): tiling:Spneumo1:WAN024FXO; Cluster includes WAN023LA7 3133 95_2188a||||1175990..1176256|-|267 bp|EGAD orf prediction| S.pneumoniae|R6|NC_003098.1|ORF|110
ttgtttcaagayttyytgactcaggataacgcgagcagcaccattttcatccacttccagatggtcgtagatgtagccttgcagtttagcaattttgtagctcatagtgtccattttgcgagtgagagccgcaaagtcaaagttatgttctctcaaataagcagccaggcgaagagtccgtgcagtggtagaagggtagaggaagcgacctgtatcaccgacaattcctgcaaagagcaactcagcatcgcgatctgccaaggctag

SEQ ID NO: 5854 - DNA, 1761 bp, Streptococcus pneumoniae
  misc_feature (1)..(1761): tiling:Spneumo1:WAN024BFS; Cluster includes WAN02449I spr0 716|ezrA|15902760|NP_358310.1|717819..719573|+|1755 bp|Cel l division regulator, negative regulator of FtsZ ring form ation|S.pneumoniae|R6|NC_003098.1|ORF|111
ttgtttcaagtaaaaaaggagtttgatatgtctaatggacaactaatttatttaatggttgcaattgcagtcattttagttctggcttatgtagtggcaatctttctacgtaagcgaaacgaggggagattagaggcgctagaagaaaraaaagaagaactatacaatcttccagtaaatgatgaagtagaagctgtaaaaaatatgcacttgattggacaaagtcaagtggctttccgtgaatggaatcaaaaatgggtcgatttatctctcaactcttttgccgatattgaaaataatctctttgaagcagaaggytataaccattcatttcgttttctcaaggccagtcatcaaattgaccaaattgagagtcaaattactttgattgamraaratattgcggcaattcgcaatgctttggcagacttagagaagcaagaatctaaaaatagtggtcgtgttcttcatgcttyggatttatttgaggaacttcagcataragttgctgaaaattcagaacagtatggtcaagccttggatgaaattgaaaaacaattagaaaatatccaatctgaattttcacaatttgtaaccttgaattcatcgggtgaccctgtggaagccgcagtgattttggataatacagaaaatcacattttggccttaagtcatattgtggatcgtgttccagccttggttacgacgctttctacagaattgccagatcaattacaggatttggaakccggttatcgtaaactaattgatgctaattatcattttgttgaaacggatattgaagcgcgtttccacttgctttatgaagcattcaagaaaaaccaagagaatattcgtcagttggaattggataatgccgaatatgagaatggacaggcacaagaggaaatcaatgccttgtatgatatttttactcgagaaattgctgctcagaaagtagtggaaaatctacttgcaactcttccaacttaycttcaacatatgaaagagaataatactttattgggagaagatattgcacgtttgaacaagacctatttacttcctgagacagctgcaagccatgttcgtcgtattcagacagaattagagagttttgaggcagctattgttgaggtaacttcraatcaagaagaaccaacccaagcttattcagttcttgaagaaaatcttgaggatttacaaactcaactaaaagatattgaagatgagcaaatttcagttagtgagcgcctgacacaaattgagaaagatgatattaatgcacgtcaaaaggccaatgtttatgtcaatcgtctccatactatcaagcgatacatggaaaaacgcaatctgccaggtattccacaaactttcttgaagttattctttacggcaagcaataataccgaggatttaatggttgagttagaacaaaaaatgattaacattgaatctgttacccgagttcttgaaattgcaacgaatgatatggaagctttagaaacggaaacttataatattgtacaatatgcaactttgacagagcaactcttgcaatattctaaccgctatcgctcatttgatgaacgcattcaagaagcatttaacgaagctttagatatttttgaaaaagaatttgattatcacgcttcatttgayaagatttctcaagcattggaagtggcagagcctggtgtaaccaatcgctttgttacctcatatgagaaaacacgtgaaacgattcgttttsyractaat

SEQ ID NO: 5855 - DNA, 329 bp, Streptococcus pneumoniae
  misc_feature (1)..(329): tiling:Spneumo1:WAN024GMF; Cluster includes WAN0243D3 spr1 886|transposase F|15903927|NP_359477.1|1863387..1863701|+| 315 bp|Degenerate transposase|S.pneumoniae|R6|NC_003098.1| ORF|111
ttgtttcaattggtaatgagtttgataacgcataracgttttatctcktgtaatgaaaacatcaaacattacaagaggctcattgacaaggcgraaamatgtgtcaatgacttgatggctgagttmaaytcggtcatcacgacggktactgggattgrgratcgtttaggggcggtcattttagcygagattcraaatattcatgcctttgataatcctgctcaattacaagctttcgctggactggattcttctatttatcagtcagrtcagattgatttagcwggaagaatgrtcaaacggrgttcccctcatctgcggtarctaat

SEQ ID NO: 5856 - DNA, 321 bp, Streptococcus pneumoniae
  misc_feature (1)..(321): tiling:Spneumo1:WAN024CSQ; Cluster includes WAN023L7A 3131 39_2306b||||1239109..1239429|+|321 bp|EGAD orf prediction| S.pneumoniae|R6|NC_003098.1|ORF|110
ttgtttccagttatctgcaaaagtacgaagggcaccggcatcggatacagacacttgactagcaatgtaacgatgaccgttgacttccttaacatctttgaagatatcgcctgcggctgcagctgcggctttttctttcaactcagcattttctttttgaagttgacgaagttgttcttgaagtccttctaccttgtgaggtacttccttgacttgaggtgctttcaaggttgctgcgatagctttaagagcatcctcttgttcacgataggcttcaaaggcttccttaccagtcactgccaagatacggcgagttcctga

SEQ ID NO: 5857 - DNA, 120 bp, Streptococcus pneumoniae
  misc_feature (1)..(120): tiling:Spneumo1:WAN024DR8; Cluster includes WAN0242Z5 SP03 67||15900291|NP_344895.1|341228..341347|+|120 bp|hypotheti cal protein|S.pneumoniae|TIGR4|NC_003028.1|ORF|020
ttgtttcctattgctttctcagctattatttgttatattaaaagtataattattttttatttatcagrgttaagmattgcactttcagaggaaggagtattttttaaaaagaaaatgtaa

SEQ ID NO: 5858 - DNA, 240 bp, Streptococcus pneumoniae
  misc_feature (1)..(240): tiling:Spneumo1:WAN024DYR; Cluster includes WAN023KGU 3135 76_3494a||||1872957..1873196|-|240 bp|EGAD orf prediction| S.pneumoniae|R6|NC_003098.1|ORF|110
ttgtttcggctagrtccttgtattgctgatcctgttgggagactttggtttttaggscagacacatactgagccaaagactttaagtcttcttgccctttttctaaaaagtattcactactggtcaagagaggttggtgcaaggtctcaaaagcaacttcccatttccaaaggcaaaagagccagtagccacctwgtcccaaagaaagggctagaagaaagagaccgatgcctttactga

SEQ ID NO: 5859 - DNA, 351 bp, Streptococcus pneumoniae
  misc_feature (1)..(351): tiling:Spneumo1:WAN024DG2; Cluster includes WAN0244CB spr0 615||15902659|NP_358209.1|625960..626364|+|405 bp|Hypothet ical protein|S.pneumoniae|R6|NC_003098.1|ORF|110
ttgtttctcyytacagttttagctagacagattggarattatgatttaacgtygccrcgttggggttcggatacaactagtgagcttgagaaagaaaackcctctgctggaattaataatartgacagyactggtggcggtaaaasrttaaatacctctattcgtagcgcctatagtgggtcagatattacyccggtatattcattggggtctggctctaggattgtcatgtactataatggaggtggtgacaattatattggttctggtactagattagctatggcgccacaatttggaaatcatgtaagaattcatacttcaggttcttggartccagattcttattaa

SEQ ID NO: 5860 - DNA, 264 bp, Streptococcus pneumoniae
  misc_feature (1)..(264): tiling:Spneumo1:WAN024ERW; Cluster includes WAN023KKA 3144 79_3355||||1799388..1799651|-|264 bp|EGAD orf prediction|S .pneumoniae|R6|NC_003098.1|ORF|110
ttgtttgagaattgctttaatctgcttacatgcgtttcagcatattkcccattttttgcatcaactattctttttctacgatcatggcgatcacgtccaattttgtctctgaaaacaagttcttttctgttgatatttccatcaactagagcccaatattctctagaaatctcttttttctccaataagcgattgagaatgggcaggataaaaggatttttggcaaagagaactaagccactggtttccatgtccagacgatga

SEQ ID NO: 5861 - DNA, 270 bp, Streptococcus pneumoniae
  misc_feature (1)..(270): tiling:Spneumo1:WAN024EYS; Cluster includes WAN023L1O 3131 62_2558||||1364104..1364373|+|270 bp|EGAD orf prediction|S .pneumoniae|R6|NC_003098.1|ORF|110
ttgtttgatagaactaactccttgtatgcctactttatctgttacttccacagtcttatccaagtggattgggaattgaacaccctttgcttcgagttctttcttagcttccgcaaacttagccttggctttctcaggattgtagtaagggtcttgaccatccgcaaagttgataccttgccattccttaccatagttgaccatcttagaggctacaacttcaccaaagtcttttcccttgatactgacaaagtttggaggaaccactag

SEQ ID NO: 5862 - DNA, 255 bp, Streptococcus pneumoniae
  misc_feature (1)..(255): tiling:Spneumo1:WAN024DW3; Cluster includes WAN023KDV 3151 18_3620||||1944490..1944744|-|255 bp|EGAD orf prediction|S .pneumoniae|R6|NC_003098.1|ORF|110
ttgtttgatatattcttccagctgggcaacattcacatgttccaatttttcctggtttggcttgttgtagttaacaaatacataatctacacctgtcaaaacgatgaagaggtctgcatcaaccaattctgccaaacgttgggaagcgaagtctttatcaataaccgcttcgacaccagtcaaatgtccattgttttctttgacgacgggaataccgccaccacctgcagctacgacgacttgaccattatttaa

SEQ ID NO: 5863 - DNA, 81 bp, Streptococcus pneumoniae
  misc_feature (1)..(81): tiling:Spneumo1:WAN024DZC; Cluster includes WAN023YYS AL44 9926.1_162||||118778..118858|+|81 bp|Glimmer 2.02 orf pred iction|S.pneumoniae||AL449926.1|ORF|001
ttgtttgctggagggaaatttggtataatagcaaagtattgtaaaaaagaaaaggagtttcattatgaagaaaaagaatgg

SEQ ID NO: 5864 - DNA, 357 bp, Streptococcus pneumoniae
  misc_feature (1)..(357): tiling:Spneumo1:WAN024FT4; Cluster includes WAN023L6R 3156 39_2325b||||1247649..1248005|+|357 bp|EGAD orf prediction| S.pneumoniae|R6|NC_003098.1|ORF|110
ttgtttggattttgcataagaaaaagaggttcccccctttttatgattttttacaaaagatttccttggttccataggcgaccagaacgagctccagtgctagaatcacttcaaccaagactggatttgtcaaccagcctacttggraaagagatggtgccagatcaaagaaggcatgcaagccataggcwgctaggagataaatccatttcttctggcgaacagcttggtaaacccaaactgtcaaaagtaattggaaaccaagcgccaagattcgctcaaaaccaagcaaataaatctgccagaccgaaastractgaatggtttttaacatattttcagacagtaattgcataa

SEQ ID NO: 5865 - DNA, 327 bp, Streptococcus pneumoniae
  misc_feature (1)..(327): tiling:Spneumo1:WAN024FFU; Cluster includes WAN023KUH 3157 14_2858b||||1526961..1527287|+|327 bp|EGAD orf prediction| S.pneumoniae|R6|NC_003098.1|ORF|110
ttgtttggcacgcgcatgaccatcaacgacacgttcaatcgtgcgtttgatcatagmctgaatttcaggtgccaagtcacgatctgcagtgatgacatcgtaacgttgagcatagataatctcacgttgttcacgcatgacatcatcgtattgaaggacttgtttacgggtatcgtrgttatttccttcgacacgtttctgagctgcttcaacctgacgcgtcaacatgcgagactcaatggcctcttcagacatgttsarrcgttcaaagattcccttcaagcgttcagaaccaaaacgtttcatcaaatcatcttcaagagatag

SEQ ID NO: 5866 - DNA, 246 bp, Streptococcus pneumoniae
  misc_feature (1)..(246): tiling:Spneumo1:WAN024FKP; Cluster includes WAN023L22 3154 57_2542||||1354772..1355017|+|246 bp|EGAD orf prediction|S .pneumoniae|R6|NC_003098.1|ORF|110
ttgtttggcatagtcgttaaaggcattaaaaacatcctcgagacttgtgaaataatctggatggtcaaagtcaatgttggtgataatagagtattctgggtggtaaggcatgaagtgacgctcatattcgtcagattcaaagacaaaatatttggcattrgccgaaccacgacctgtcccatctccaatcaagaarctggtatctgtaatgtgagacaagacatgagacaacatacctgtcgttga

SEQ ID NO: 5867 - DNA, 809 bp, Streptococcus pneumoniae
  misc_feature (1)..(809): tiling:Spneumo1:WAN024DFY; Cluster includes WAN0244C9 spr0 617||15902661|NP_358211.1|627173..627976|+|804 bp|Hypothet ical protein|S.pneumoniae|R6|NC_003098.1|ORF|111
ttgtttggttgtttatggtacattttttctacattcagaggactaygtataatgaaacaatttgttcaattttayaaaaaagatttyttakcagtattggtttattttatattactgctatcctgtgttttatctagtacagtatatttattgcgctgtcgccaatattcaatccatccaaatgtattagaatggatcttagttttacttcaagatatgacgactggagtatattgctttccgttcacatatatattgttctttttttatttgatgaataactattttaataggttggagtgtcgcattcgtctgaaatcaattaagcactttaccagttttagtttcaaattagcagctcttagtacggggatttggacggcgaytttatttttattgatttttctaattgcatttagtaatggttttagcttctctttggagataaaggaggttgattttttaagagaattttatggyataagtattgcaaacaatgctagtttctttataggattttttttctcttatatagcatactatttctttttatccttacttactattagcagtttttcttggtttaaaaaatcaaacatgagcttagtatttctgtttacttttttatttgtagaatccttattctggatttatcagttgracaatgggataattggattattgccaatttttcagtatatggtaaattccaatccgtatgcattgatttattggcttrcattactatctatcataattccattgactgtattttctgttcatagaaactggaggagagtgtaactaat

SEQ ID NO: 5868 - DNA, 905 bp, Streptococcus pneumoniae
  misc_feature (1)..(905): tiling:Spneumo1:WAN024CCA; Cluster includes WAN0244QP spr0 097||15902141|NP_357691.1|104537..104785|-|249 bp|Hypothet ical protein|S.pneumoniae|R6|NC_003098.1|ORF|520
ttgtttgttaacttttttcacgaaaaggagaaaatcatgcgttatgatttcggaaaggtctataaagaaatacgtgagtcaaaggggctgacccaagaagaggtctgtgggggtgttctctcaagaaccagcttatcaaaaatcgaaagtggcaagacaaccccaaaatatgaaaatatggaatttcttctccgtcaaatcaatatgagttttgaagagtttgaatatatctgtcaactttatcaaccaagtcaacgcacagagattatgcaaacctatctcaatatgcgttccattatcgggaccagcgatcttgtcaatttatttcaaaaatgccaagactacctcaagacccaccacgatctccctatagaagaaatcagagatatgcttgaagttgtyatttatmtccgtcaacacggggcaggggaactatcarawcacgcagaacaggttgtcaaaaaactttggaraaaaattgaaaaacaagatacatggtatgagagtgatctaaaaatcctcaataccattcttttcagttttcccattgaatacctccatctcatcactggaaaaatmttgcaacgcytagaagtctataaaaactatcaacrtttatatgacttgcgaatrrcaatyctrytmaacctttccacactctatctatacaatcaagataaaaacatgtgtaagcaaatctgctayactttactrgaggacgccaagaataagaaaagytacgataggctkgctatctgctatgtccsyattgggatttgtasrgayratkckaaacttatccaaaaaggkttctcmctyctrgagctraccgaggaaacttctatgctgtctcatctcaaaaaagaagtagagaycyattaycaascraagraawkataactaat

SEQ ID NO: 5869 - DNA, 678 bp, Streptococcus pneumoniae
  misc_feature (1)..(678): tiling:Spneumo1:WAN024FZZ; Cluster includes WAN023LD8 3137 99_2069||||1116828..1117052|+|225 bp|EGAD orf prediction|S .pneumoniae|R6|NC_003098.1|ORF|220
ttgtttgttgaggctattgatgtcgacttccttgtcctcttccttagcaactgccttggtcacggcaatcaggtcacggatttctttcttgattgtctgtggtacgataccatgytcttcattataggccatctgrattttscgacggcgggcagtttcatcgatagcacgttgcatagactgggtaaccgtrtcygcatacatgatracatgaccttcrctrttacgkgcrgcacgyccaatggtctggatgagtccacgytcgttrcgaaggaaaccttccttgtcagcatcgagaatrgcwacsargctmacytcaggaacgtcaatyccttcacgragsagrttrattccraccaagacatcaaagacacccaagcgsagrtcacggataatctccgtccgttccaaggtcttgatatccgagtgcatgtacttgaccttgatrcccatttccttgaartagtcggtcaartcctctgccattttcttggtcaargtkgtgataaaggtwcgytcattyttttcaacrcgggcattgatttcaccyaagaggtcatcaatctgtcccatagtcggacggacttccacctctggatccaagagtcccgttggacgaatgatttgctcaatcactgtctcggtctgttcattttcatagtcaccaggtgtcgctga

SEQ ID NO: 5870 - DNA, 237 bp, Streptococcus pneumoniae
  misc_feature (1)..(237): tiling:Spneumo1:WAN024DYV; Cluster includes WAN023KH1 3135 78_3485a||||1869147..1869383|-|237 bp|EGAD orf prediction| S.pneumoniae|R6|NC_003098.1|ORF|110
ttgtttrccaatattttggtcagcatagtgttctttttcagtggtaacagcttgcaatacttgagcagaaatggcagatttatcaaggaaaaagttaacgtaaggtcctgttgcgacaactttttcaaaggcttggctgttcattttttcagccagttcagccgcaatcatttgtggtgctttacgttcgacttttgcaagagaaaaagcagggaaagcaatgtctcccatttctga

SEQ ID NO: 5871 - DNA, 151 bp, Streptococcus pneumoniae
  misc_feature (1)..(151): tiling:Spneumo1:WAN024A27; Cluster includes WAN024ECN R6.I G_1366||||1309262..1309394|+|133 bp|Between spr1322 (pdx1) (- strand) and spr1323 (nox) (- strand)|S.pneumoniae|R6|N C_003098.1|IG|110
ttgttttatcctcatcatttgtattggtagctaccttttcattttaagtcagaacagaatgaagcacaagataaaaaaactataattgtatggggacarattagctaaaaactatctgaccttaacttaaggccagatagctcattcattt

SEQ ID NO: 5872 - DNA, 243 bp, Streptococcus pneumoniae
  misc_feature (1)..(243): tiling:Spneumo1:WAN024GOD; Cluster includes WAN023KL2 3132 60_3307||||1768746..1768988|+|243 bp|EGAD orf prediction|S .pneumoniae|R6|NC_003098.1|ORF|110
ttgttttctgagagtttgtactcgctcattgacttctcccttaaagacataggaacctgctacaaaaacagtcgcaccrgcttctttggcttgagcaatagtttggtcatcaatcccaccatccacttcgatttcaaagttcaaacctttttcctcacgaagagcaaccaactcacgraccttatccatggtttctggcagaaaggcttgcccaccaaaacctggattaaccgtcatgactaa

SEQ ID NO: 5873 - DNA, 539 bp, Streptococcus pneumoniae
  misc_feature (1)..(539): tiling:Spneumo1:WAN024FFB; Cluster includes WAN0243M6 spr1 557||15903600|NP_359150.1|1538258..1538791|-|534 bp|Conser ved hypothetical protein|S.pneumoniae|R6|NC_003098.1|ORF|2 11
ttgttttgggaatcgcttaaaaaatggtataatgaaaagaaaacgataaggagggaaaggatgcgttgtccaaaatgtggggctaccaagtcaagtgttatcgatagtcgccaagcagaagaagggaacaccattcgtagaagacgtgagtgcgacgaatgccaacaccgttttacaacctacgaacgagtagaagaaagaaccttagtggttgttaaaaaagatggyacacgggaacaattctccagagataaaatctttaatgggattatccgctcagcccagaaacgtcctgtgtcaagtgatgaaatcaacatggtagtcaatcgtatcgaacagaaactccgtggtcgaaatgaaaatgaaattcaaagtgaggacattggttcactcgtcatggaggagttggctgaattggacgagattacctatgtacgttttgctagtgtctatcgtagttttaaggatgtcagtgagttagagagcttgctccaacaaatcacccagtcctctaaaaagaaaaaggaaagataactaat

SEQ ID NO: 5874 - DNA, 96 bp, Streptococcus pneumoniae
  misc_feature (1)..(96): tiling:Spneumo1:WAN024C42; Cluster includes WAN023PZ8 WO-0 2077021_101||||||96 bp|Glimmer 2.02 orf prediction|S.pneum oniae|TIGR4|AX571766.1|ORF|011
ttgttttgtcatctattatctcctattggtaacattataacacaattatcagaaatcctaacattgctaaatcagattaaatttgcytatcaagac

SEQ ID NO: 5875 - DNA, 873 bp, Streptococcus pneumoniae
  misc_feature (1)..(873): tiling:Spneumo1:WAN024AYC; Cluster includes WAN02402Q |cps 19bH||AAB66519.1|||873 bp|putative rhamnosyl transferase|S .pneumoniae||AF004325|ORF|000
ttgttttgttatattattttacattacaaagtcttagatgaaactatttcttgtgttaaatctataaaagaaggcaattccaatgaaaagcaaatcgttattattgataatttttctaataatggtacaggtgaaaaactacaagagctttatgaatcagatttagagattgatgtattgattaaccacgaaaatgctggatttgctcgaggaaataatgtagcttatcaatttgctaaggaaaagtataaccccgatttcatggttatcatgaataacgatattgagatagaaacagaagattttgaaaaaatcgtgacagatatctatcacaaagaaaaatttcatttgctagggccagacattttttcgacaacatatcagctacatcaaaatcctaaacgcctgacacattatacttatgaagaggtagtggctctcaatgaaaaatttaaaagagggagccaacttagtctaactttaaaaatcaaatgttggttgaaagctagcaaagttcttcgaacagcaatctatcaaaatagacgtaaaaaaggatcagtagaccatagaaaacaggtagaaaacccgattcttcatggttcctttattgtatattcgagagattttattgaaaaagaggagtatgcttttaaccytaataccytcttttactatgaaacagagatattagattatgaagctgagttaaaaggatacaagagaatttatacaccgaagattaaggttttacaccatcaaaatgtggcaacaaatcaggtttatacaaacttagtagaaaaaactttgttttcaaacaaatgcaactttgaatccactagttattttttaactttaatggagaaaaatgaataa

SEQ ID NO: 5876 - DNA, 879 bp, Streptococcus pneumoniae
  misc_feature (1)..(879): tiling:Spneumo1:WAN024AYB; Cluster includes WAN02406T |cps 19fH||AAC44965.1|||879 bp|putative rhamnosyl transferase|S .pneumoniae||U09239|ORF|000
ttgttttgttatattattttgcattacaaagtcttagaagaaactatttcttgtgttaaatctataaaagaaggcaattataatgcaaagcaaatcgttattattgataatttytctaataatggtactggtgaaaaactacaagagctttatgaatcagatttagaaattgatgttttgattaaccatgaaaatgctggttttgctcgtggaaataatgtggcttatcaatttgctaaggaaaagtataaccccgatttcatggttatcatgaataacgatattgagatagaaacagaaaattttgaaaaaattgtgacagatatctatcgtgaggaaaaattccatttgctcgggccagatatcttctcgactacttaccaacttcaccaaaacccaaaacggttgacacattatacttatggagaagttaaagctctaaatgaaaaatttaaaaaagggagccaagttagtctagctttaaaaatcaaatgttggttgaaagctagtaaagttcttcgaacagcaatctatcaaaatagacgtaaaaaaggatcagtagactatagaaaacaggtagaaaacccaattcttcatggttcttttattgtatattcgagagattttatcgaaaaagaggagtatgcttttaaccctaacaccttcttttactatgaaacagagatattagattatgaagctgaattaaaaggatacaagagaatttatacacctaaaattagagttttgcaccatcaaaatgttgcaactaatcaagtttacacgaacttgttagaaaaaaccttgttttcaaataaatgcaactttaaatccaccagttattttttgaagttgatgaaagaaaacgaggatgtttaa

SEQ ID NO: 5877 - DNA, 132 bp, Streptococcus pneumoniae
  misc_feature (1)..(132): tiling:Spneumo1:WAN024CVA; Cluster includes WAN0242WN SP04 65||15900381|NP_344985.1|444675..444806|-|132 bp|hypotheti cal protein|S.pneumoniae|TIGR4|NC_003028.1|ORF|010
ttgtttttaccatttttatcagcatccctttatcttcaaactcatcattttatcgcttttcctaacagacaatcctatctgctaagagaaacgagaaaatctcatttctttctgattcaccatccattttaa

SEQ ID NO: 5878 - DNA, 288 bp, Streptococcus pneumoniae
  misc_feature (1)..(288): tiling:Spneumo1:WAN024G3G; Cluster includes WAN023LEU 3156 17_1995||||1077459..1077746|+|288 bp|EGAD orf prediction|S .pneumoniae|R6|NC_003098.1|ORF|110
ttgtttttcaaggagtttacgcttacgagaaacgtcaccaccataacatttagcaagtacgttcttacgaagggccttgatatcagtacgagcgacaatcttgtgtccaatagccgcttggattggaacttcaaattgttggcgagggatgattttcttgagtttatcaacgatgagtttcccacgttcgtaggcaaagtccttgtgaacgataaagctgagggcatccaccttatctccattgagaagratatccattttcaccagcttagatgggcgatattctga

SEQ ID NO: 5879 - DNA, 921 bp, Streptococcus pneumoniae
  misc_feature (1)..(921): tiling:Spneumo1:WAN024DX3; Cluster includes WAN023KF3 3148 17_3566b||||1912163..1912924|+|762 bp|EGAD orf prediction| S.pneumoniae|R6|NC_003098.1|ORF|220
ttgtttttcaaggatgagaagcaggcgctctacaccaagcccaaaaccaaatccagcagtttcagggcctccaaagtaagcaaccaaaccatcgtagcgaccacccgcacagactgtcaagtcattgccctcaatctctgtgataaactcgaaaatggtgtggttgtagtagtccagaccacgcaccatattggtatcgatgatgtaatctactccaagattttccaacatctgacgcacagcatcaaaatgagyttggctttcttcatcaagaaagtccaagatagacggcgcattctctactgccaccttgtcttctttttccttagagtccaagacacgaagaggattttcctccaagcgacgttggctatccttagacaaggtctccttgagcggtgtcaaatagtcaatcaaggcttggcggtaggctgcacggctctcaggatttccaagagtgttgaggtgcaatttgacaccttgaataccgatttccttcaaaaaatgggctgccatagcgattgtttccacatcggtagctggattgctagagccaaaacactcaacaccaatctggtggaattggcgcaagcgccctgcctgtggacgctcataacggaacataggtcccatrtagtagaacttgcttggcttttgcacttctggggcgaaragtttattttccacataggaacggacaacgggygcagttccttctggacggagggtaatatgacggtcacccttgtcataaaaatcgtacatttccttggttacgatatccgttgtatctccgacagagcgactgataacctcgtaatgctcaaaaataggcgtgcgcacttctgcatagttrtagcgyttgaaaatctcacgggcaaagccctcaacgtactgccacttagcagaytcagcaggtaa

SEQ ID NO: 5880 - DNA, 208 bp, Streptococcus pneumoniae
  misc_feature (1)..(208): tiling:Spneumo1:WAN0249FO; Cluster includes WAN024E4B-rc R 6.IG_2165||||1944898..1945105|-|208 bp|Between spr1958 (ar cC) (+ strand) and spr1959 (+ strand)|S.pneumoniae|R6|NC_0 03098.1|IG-rc|110
ttgtttttcctcctgatgtctaacaaagtgtaaaaaaccaactactttcttaaataaacattcaagaaaacgctttctatttatatttgttttaccatattaaagtctaaaactagtatcttttgaaatattgtacatgttttcaagaataatttctaatttgatataaagatactagaaatagaatacatcttattagtaaaacaac

SEQ ID NO: 5881 - DNA, 264 bp, Streptococcus pneumoniae
  misc_feature (1)..(264): tiling:Spneumo1:WAN024FG8; Cluster includes WAN023KV7 3130 25_2836||||1512151..1512414|+|264 bp|EGAD orf prediction|S .pneumoniae|R6|NC_003098.1|ORF|110
ttgtttttctgcttcttttgctgctttcataggatctgttccatttgtaatgatatcttggaacatttgttcaataatgtgttggttagtcaacataccagcttgtacacttggyccattttcataaccaatagcagtaccttttttaacagcttcagtaattacttcttcagcatgtttaaayttcttacgagtttcattttctttataggctgcagaatcgctaatccccttaatagttggcaacatacctactggagttga

SEQ ID NO: 5882 - DNA, 225 bp, Streptococcus pneumoniae
  misc_feature (1)..(225): tiling:Spneumo1:WAN024D68; Cluster includes WAN023LMK 3136 76_1576||||838790..839014|-|225 bp|EGAD orf prediction|S.p neumoniae|R6|NC_003098.1|ORF|110
ttgtttttcttcccagtcgtggtaggcagcgtagagctgacttttattccactggtaaatcttagcgacttccttgatagcttggtttttcttcacaccttgctggatgcgggtttgaatttctacgaacaagtcttcctcgtccttttcctccacaccctgactggcaccctcaacaatgagaagacattcgcccttgagtggcgtttcagcaatgctttctaa

SEQ ID NO: 5883 - DNA, 261 bp, Streptococcus pneumoniae
  misc_feature (1)..(261): tiling:Spneumo1:WAN024GB3; Cluster includes WAN023LPK 3134 97_1420||||750843..751103|-|261 bp|EGAD orf prediction|S.p neumoniae|R6|NC_003098.1|ORF|110
ttgtttttcttcccatttcggctctcatcacgcgccttacgtgctgcttcacgagcatcacgggccttgatagccttgcggatgaggttagaagctaattccccattttccataaggaaaaaggtcaacttatcagccactattccatccacaactgggcgagctagggggcttcctagtttatccttggtctgtccttcaaactgcaagtgttcttcaggaactaagatagaaagaacggccgctagtccctcacgatag

SEQ ID NO: 5884 - DNA, 111 bp, Streptococcus pneumoniae
  misc_feature (1)..(111): tiling:Spneumo1:WAN024C92; Cluster includes WAN023QXM cont ig_1381_5||||1188..1298|+|111 bp|Glimmer 2.02 orf predicti on|S.pneumoniae|670|WAN01UDZS|ORF|000
ttgycctctaaatacaaaaatagcccttcggataaaatccgaggggctagaaacgttgttaaatcaacggccgaacttttgaatttcatggttcgggataaaatagttcac

SEQ ID NO: 5885 - DNA, 153 bp, Streptococcus pneumoniae
  misc_feature (1)..(153): tiling:Spneumo1:WAN024EVJ; Cluster includes WAN023SKW NC_0 03098.1_1122||||877236..877379|+|144 bp|Glimmer 2.02 orf p rediction|S.pneumoniae|R6|NC_003098.1|ORF|111
ttgytctacaatcctgttgagaagacacgtgttcatatcaaaaaggtattggcaagttgcaatacctttttacraggytctkttrtcttatttttgtttcaactgactatatctcctatggttctagttcagaaggctaggctactaactaat

SEQ ID NO: 5886 - DNA, 264 bp, Streptococcus pneumoniae
  misc_feature (1)..(264): tiling:Spneumo1:WAN024CH9; Cluster includes WAN023MER 3151 08_93||||48488..48751|-|264 bp|EGAD orf prediction|S.pneum oniae|R6|NC_003098.1|ORF|110
ttgyttrtccatacgctcgaaataytcttggtaagagaaacgagccttgraccagttggcaccagcagccaccaaacgagcagttgcttcgataaccgcataagcagcaccgtggtatggagaccattcagctacatatgggttgaaaccttgagcaatgaccgacgcagtatgagtcacaccgtgttgaactggcaatttctgcacagatgcctcagttggtgtgagttggtaacgaccaccaagtgggtgattaaccgttga

SEQ ID NO: 5887 - DNA, 141 bp, Streptococcus pneumoniae
  misc_feature (1)..(141): tiling:Spneumo1:WAN0249M3; Cluster includes WAN024E7R R6.I G_1758.1.2||||1682499..1682639|+|141 bp|Between spr1709 (g tfA) (- strand) and spr1710 (msmG) (- strand)|S.pneumoniae |R6|NC_003098.1|IG|110
tttaaatctctatttatcatcaaactcgtactaatatagactgtgataaacaaagtactactttcttgttttctrcatagaattatcaacaagctraactcttcctctgtgtcaaagactatagattccatgagctcttct

SEQ ID NO: 5888 - DNA, 947 bp, Streptococcus pneumoniae
  misc_feature (1)..(947): tiling:Spneumo1:WAN024E25; Cluster includes WAN0243DQ spr1 863|cglB|15903904|NP_359454.1|1833594..1834685|-|1092 bp|C ompetence protein|S.pneumoniae|R6|NC_003098.1|ORF|222
tttaacaatctcttttctagcggttttcatctggtggagactatctcctttttagataggagtkcyttgttggayaagcagtgtgtgayycagatgcgyryrggcttgtctcaggggaaatcattctcagaaatgatggaaagtttgggatkttcaagtrcyattgtcactcagttatcyctagckgaagtycatggmaatctycacctgagtttgggaaagatagaagartatctrgacaatctkgcyaaggtcaagaaaaarttrattgaagtagcgacctatccyttgattttgctgggttttcttctcttaattatgctgggrctacgkaaytayctrctmccacaactggatagtagcaatattgcyacccraatyatcggyaatctgccmcaaatytttctagkmatggtaggryttgtttcmgtrsktgyccttttagcactmactttttataaaagaagttctaagatgmgygtcttttctatcttagcacgccttccctttmttggaatctttgtgcagacctayttgacagcctattatgcrcgtgaatgggggaatatgatttcrcagggratggagytgacgcagatttttcaratsatgcaggaacaaggttcccarctctttaaagaartcggtcaagatytrgctcaarccctrmaaaatggycgygaattttctcaracsatagsaacctatcctttctttarraaggaattgagtctcatcatagagtatggggaagttaagtccaagctgggtagtgagttggaaatctatgctgaaaaaacttgggaagccttttttacccgagtcaaccgcaccatgaatttggtgcagccactggtttttatctttgtggcactgattatcgttttactttatgcggcaatgctcatgcccatgtatcaaaatatggaggtaaatttttaactaat

SEQ ID NO: 5889 - DNA, 193 bp, Streptococcus pneumoniae
  misc_feature (1)..(193): tiling:Spneumo1:WAN0249UD; Cluster includes WAN024EFK R6.I G_1138.1.1||||1099112..1099304|+|193 bp|Between spr1100 (l dh) (+ strand) and spr1101 (- strand)|S.pneumoniae|R6|NC_0 03098.1|IG|220
tttaactatagacaactccttgaatcatcagggagttgttttttatctatatgatatagtctattgaagttagagtagtacacaactgcttctaagatctggttaaaattgctttcttcagattttatagtkcgttgaatctataacagtacgcatcgactrctaaaacatttctataaatcaattttccttt

SEQ ID NO: 5890 - DNA, 51 bp, Streptococcus pneumoniae
  misc_feature (1)..(51): tiling:Spneumo1:WAN0249NQ; Cluster includes WAN024E8O-rc R 6.IG_1677||||1602292..1602342|-|51 bp|Between spr1628 (pil D) (+ strand) and spr1629 (- strand)|S.pneumoniae|R6|NC_00 3098.1|IG-rc|110
tttaactgtgaaataatttcatgaaggayatatggcagaaattggayttta

SEQ ID NO: 5891 - DNA, 75 bp, Streptococcus pneumoniae
  misc_feature (1)..(75): tiling:Spneumo1:WAN024ALX; Cluster includes WAN024ENH R6.I G_506.2||||485474..485548|+|75 bp|Between spr0482 (rbfA) ( + strand) and spr0483 (+ strand)|S.pneumoniae|R6|NC_003098 .1|IG|110
tttaatataaaaaagggattctgtattttttaatgttatctaattagaaaatgctttttttgtaggaaatataat

SEQ ID NO: 5892 - DNA, 349 bp, Streptococcus pneumoniae
  misc_feature (1)..(349): tiling:Spneumo1:WAN0249KI; Cluster includes WAN024E6U-rc R 6.IG_1882||||1735558..1735906|-|349 bp|Between spr1767 (cy lM) (+ strand) and spr1768 (+ strand)|S.pneumoniae|R6|NC_0 03098.1|IG-rc|110
tttaattcatcctctcaatttgaatttagtagatttttcaagatagtatggtacaaaaacagacttttgttgactcacattattacatatgttttgtattaaaccaaaatcaatactatttttggagtaattttgattttagtttaaaatcatttctataacagtagcatatacctcaagccgtttagcaattagaatagaacttttctttattatattattatctcaacgaaaagctacactattaaaaatattttatagaattacatattaaactagtcaatcttggtatttttatattgcttaatgagtggacacctctattttagaaacaaaactataaattaag

SEQ ID NO: 5893 - DNA, 419 bp, Streptococcus pneumoniae
  misc_feature (1)..(419): tiling:Spneumo1:WAN024E2A; Cluster includes WAN0243DT spr1 859||15903901|NP_359451.1|1832180..1832686|-|507 bp|Conser ved hypothetical protein|S.pneumoniae|R6|NC_003098.1|ORF|3 31
tttaccttgttagaatccctgcttgccctcattgtcatcagtgggggattactcctttttcaarctatgagtcagctcctcatttcagaagttcgctaccagcaacaaagcgagcaaaaggagtggctcttgtttgtggaccaacttgaggyagaattagaccgttcgcagttcgaaaaagtagaaggcaatcgcctatacatgaagcaagatggcaaggacatcgccatcggtaagtcaaagtcagaygatttycgtaaaacsratgctmgtggwcgrggktatcagcctatggtttatggmctcaaatcwgywcrgattacagaggacaatcaactggttcrytttcrtttccagttycaaaaaggcttagaaagggagttcatctatcgtgtggaaaaagaaraaagttaactaat

SEQ ID NO: 5894 - DNA, 118 bp, Streptococcus pneumoniae
  misc_feature (1)..(118): tiling:Spneumo1:WAN0249H7; Cluster includes WAN024E4X R6.I G_2119||||1892354..1892471|+|118 bp|Between spr1912 (- str and) and spr1913 (rrmA) (+ strand)|S.pneumoniae|R6|NC_0030 98.1|IG|110
tttagatataaaagcaatttcattctataaattggagaattagttttatttctactgaatctcccatctacttattcctaaagttgctttcatttgcctcttttgatacacttaaact

SEQ ID NO: 5895 - DNA, 50 bp, Streptococcus pneumoniae
  misc_feature (1)..(50): tiling:Spneumo1:WAN0249KG; Cluster includes WAN024E6T-rc R 6.IG_1886||||1741390..1741439|-|50 bp|Between spr1771 (nis P) (+ strand) and spr1772 (+ strand)|S.pneumoniae|R6|NC_00 3098.1|IG-rc|110
tttagttgaactgtaggacttactttttcagagggctccaaattttattt

SEQ ID NO: 5896 - DNA, 147 bp, Streptococcus pneumoniae
  misc_feature (1)..(147): tiling:Spneumo1:WAN0249W6; Cluster includes WAN024EA9-rc R 6.IG_1562.1||||1493434..1493580|-|147 bp|Between spr1515 ( ddl) (- strand) and spr1516 (recR) (- strand)|S.pneumoniae |R6|NC_003098.1|IG-rc|110
tttataaaaaatcaaagaggctgaaaatcgttcctatcggcctctttttgtatagtgtgatgagtaggctcaggttcaagttttaaaaaaccaagcaaatatgatatactaaagagcgagtattctagtagaattaggacaaataat

SEQ ID NO: 5897 - DNA, 140 bp, Streptococcus pneumoniae
  misc_feature (1)..(140): tiling:Spneumo1:WAN024AKU; Cluster includes WAN024EMX-rc R 6.IG_553||||529312..529451|-|140 bp|Between spr0529 (vncS) (+ strand) and spr0530 (fba) (+ strand)|S.pneumoniae|R6|N C_003098.1|IG-rc|110
tttatcaggcctcctgtatatttttatgggtcatcccatttacattgttcattttatcactttttgccaaaaaaatctagtttttcccgcagtttcgattgattttcttctaactccatctatgtaaaccctttctctcc

SEQ ID NO: 5898 - DNA, 303 bp, Streptococcus pneumoniae
  misc_feature (1)..(303): tiling:Spneumo1:WAN0249PR; Cluster includes WAN024EML R6.I G_580.2.1||||557546..557848|+|303 bp|Between spr0556 (rplA ) (+ strand) and spr0557 (+ strand)|S.pneumoniae|R6|NC_003 098.1|IG|110
tttattagctcactaaattgagggtaaggaaaagtaaaagcagtaagaaaaatgtcttgcattatacagcaaccttttgggaatgagtrgatggattgaataaaatttgattaagagtggatgatttatctgtagattattattggacagttagtcttgaagtagtctaagaattaggttataatcagtagaagccttgctaataatgaggaggttagtttatgtatagtagactgaatctaaaatagtacgaaacaattgctaaaacatttatagaaattaattttactttcccaatcgatt

SEQ ID NO: 5899 - DNA, 118 bp, Streptococcus pneumoniae
  misc_feature (1)..(118): tiling:Spneumo1:WAN024A5D; Cluster includes WAN024EEK R6.I G_1215||||1173838..1173955|+|118 bp|Between spr1171 (rplS) (- strand) and spr1172 (crcB) (- strand)|S.pneumoniae|R6| NC_003098.1|IG|110
tttattctcctatctttgtcaatcttgaggaatcttcctcagcggataaactgtatttttgtgcgtccattacacacaagatatagtttaccaaatttctaaaaaaaagtaaagaaat

SEQ ID NO: 5900 - DNA, 215 bp, Streptococcus pneumoniae
  misc_feature (1)..(215): tiling:Spneumo1:WAN024FI7; Cluster includes WAN02423E SP15 92||15901434|NP_346038.1|1497694..1497897|+|204 bp|conserv ed domain protein|S.pneumoniae|TIGR4|NC_003028.1|ORF|110
tttattttgattaaactatatagcccctatgctttcctttcaaaatatctaggggctattttattgtcatttttctgctattatgctaaagaaattggctgcaataatctaaccctaagtgtctggaatgataacgagggtgctctccgcttttatcaaagacaagggatgaaaccccaagaaacaacaatggaaatgataattgattaactaat

SEQ ID NO: 5901 - DNA, 135 bp, Streptococcus pneumoniae
  misc_feature (1)..(135): tiling:Spneumo1:WAN0249EM; Cluster includes WAN024E3K-rc R 6.IG_2217||||2004534..2004668|-|135 bp|Between spr2010 (- strand) and spr2011 (- strand)|S.pneumoniae|R6|NC_003098.1 |IG-rc|110
tttcaatatgtgtaaaggtaggtttactgaattgtaaactacctttttcttataattgatagaattactgattacacttttaaaaagtcgctttttgaggggtattatggtataatgggtgccaagaggttttga

SEQ ID NO: 5902 - DNA, 130 bp, Streptococcus pneumoniae
  misc_feature (1)..(130): tiling:Spneumo1:WAN024AOE; Cluster includes WAN024EON-rc R 6.IG_439.1||||414438..414567|-|130 bp|Between spr0415 (pfl ) (+ strand) and spr0416 (- strand)|S.pneumoniae|R6|NC_003 098.1|IG-rc|110
tttcagattcggtccactattccttcccaaaaacattgcatattgcgccgaaggaattgctcayactatcccaagcacaaaaccctcagtcgwttgaccgagggttccttttyattattcaaraacttga

SEQ ID NO: 5903 - DNA, 51 bp, Streptococcus pneumoniae
  misc_feature (1)..(51): tiling:Spneumo1:WAN0249XB; Cluster includes WAN024EAY R6.I G_1511.2||||1447104..1447153|+|50 bp|Between spr1464 (ctpE ) (- strand) and spr1465 (+ strand)|S.pneumoniae|R6|NC_003 098.1|IG|110
tttcatccyaaatatgyatctagtcaagggaaaagtttgccagccctcctt

SEQ ID NO: 5904 - DNA, 299 bp, Streptococcus pneumoniae
  misc_feature (1)..(299): tiling:Spneumo1:WAN0249TA; Cluster includes WAN024E3V-rc R 6.IG_2192.1.1||||1977394..1977689|-|296 bp|Between H (tran sposase) (- strand) and spr1986 (+ strand)|S.pneumoniae|R6 |NC_003098.1|IG-rc|120
tttcatgagygctgaaagcgtagtaacaacgaatcatgagaagtcagccgarcccatagtagtgaggaaacttccgtaatggaagtggagcgaaggggtgaatactcaaacagtctggggagagactgtttgaggtctgtcgctagaaagagaaaacgacagatygaagtaatcctacttcacttgtgtctgtaaaaygagwggtctgatagaactggastytgwcacgtawtgactagatgaaggytcaccaatataagatgtccctcaggcaccaaaayaagaaaggaatacgcaca

SEQ ID NO: 5905 - DNA, 174 bp, Streptococcus pneumoniae
  misc_feature (1)..(174): tiling:Spneumo1:WAN024A6C; Cluster includes WAN024EF9-rc R 6.IG_1169||||1132668..1132841|-|174 bp|Between spr1128 (gu aC) (- strand) and spr1129 (- strand)|S.pneumoniae|R6|NC_0 03098.1|IG-rc|110
tttcccctctttcttttatttttaacacaagyaaaayccgaacratatattttaattcataaaataatttgacaaaaactgtactttgrtttataataaattaaggaaacgtcggaaaaggcgtagtgatgcragagcataggtaggtcattacaaaagaaacgagacatcgat

SEQ ID NO: 5906 - DNA, 312 bp, Streptococcus pneumoniae
  misc_feature (1)..(312): tiling:Spneumo1:WAN0249RR; Cluster includes WAN024EQJ R6.I G_276||||257778..258089|+|312 bp|Between spr0255 (+ strand ) and spr0256 (rsuA) (+ strand)|S.pneumoniae|R6|NC_003098. 1|IG|110
tttcctaaatctgatactcaatgaaaatcaaagagcaaactaggaaactagccgcaggttgctcaaagcactgctttgaggttgcagatagaactgacgaagtcagctaaaaacactgttttgaggttgcagatagaactgacgaagtcagctaaaaacactgttttgaggttgcagatagaactgacgaagtcagtaacatatatacggcaaggcgacgttgacgcggtttgaagagatttttgaagagtatgaaacgaaaaggaggttggtcattgtacyagcctccttttgatatgatataatagttct

SEQ ID NO: 5907 - DNA, 250 bp, Streptococcus pneumoniae
  misc_feature (1)..(250): tiling:Spneumo1:WAN024AD6; Cluster includes WAN024EIP R6.I G_900||||856931..857179|+|249 bp|Between spr0864 (lguL) (+ strand) and spr0865 (pyrDII) (+ strand)|S.pneumoniae|R6|N C_003098.1|IG|110
tttcgtgcaagttaagtagaatattcgttttctacttgactttttttagctgaaagagtatactaataaaaattcaacctttaaggggagtccagagagactcacaaggtgtcagataaaagaatrgtgcaattttctagaggagactttttgagtgtgctctcttgtgttgtacgattttaactgaggccttgcactagcaaggtcttttctttatctggtccccttaaaatttaaggaggaaaagtta

SEQ ID NO: 5908 - DNA, 187 bp, Streptococcus pneumoniae
  misc_feature (1)..(187): tiling:Spneumo1:WAN024A7P; Cluster includes WAN024EFW R6.I G_1104||||1064447..1064633|+|187 bp|Between spr1065 (nrdE) (+ strand) and spr1066 (nrdF) (+ strand)|S.pneumoniae|R6| NC_003098.1|IG|110
tttctagcatagaaacaytatttttccctaagcagcactgataaaatcaaatctactatgtcataacataatttatgtaacattttaaaagtcgggcttccgactttttgtgcgatactcctatagaattatggtaaagtagaaataattgtgagttcgcaatactaaacacagaaagagattttaa

SEQ ID NO: 5909 - DNA, 207 bp, Streptococcus pneumoniae
  misc_feature (1)..(207): tiling:Spneumo1:WAN024AKI; Cluster includes WAN024EMO-rc R 6.IG_579||||555175..555381|-|207 bp|Between spr0555 (rplK) (+ strand) and spr0556 (rplA) (+ strand)|S.pneumoniae|R6| NC_003098.1|IG-rc|110
tttctattctccttgtaagtggttcaatcgattttcatctcccacgtcacttctcgaaatgatgaagtcttgcgggttttcagtctactatttttctcttcctacggccttaagctcccttgctgtacccaagtacaagcctcagtcacttgcctagtatgaaaagcaactaatagactgctgtgagattttctactgtgttattga

SEQ ID NO: 5910 - DNA, 188 bp, Streptococcus pneumoniae
  misc_feature (1)..(188): tiling:Spneumo1:WAN024A2E; Cluster includes WAN024ECR-rc R 6.IG_1353.2.1||||1300585..1300642|-|58 bp|Between spr1309 (+ strand) and spr1310 (fms) (+ strand)|S.pneumoniae|R6|NC _003098.1|IG-rc|110
tttctctccttatattatgtttagtgcagttagctactgccaaagcccaagtggtatacttggaataagccactgtggattagttcattttctttcattacctctacatgatatcacaaaatgacaagaattgaaagcattatggcatttaggatttatagaaaatagatrggaagttcaattcaatt

SEQ ID NO: 5911 - DNA, 75 bp, Streptococcus pneumoniae
  misc_feature (1)..(75): tiling:Spneumo1:WAN0249HW; Cluster includes WAN024E5F-rc R 6.IG_2037||||1849283..1849357|-|75 bp|Between spr1878 (thr C) (- strand) and spr1879 (- strand)|S.pneumoniae|R6|NC_00 3098.1|IG-rc|110
tttctcttataaagggagaattttctgaaaaatcatgatataatggacgagactatagataaaggatagagagta

SEQ ID NO: 5912 - DNA, 153 bp, Streptococcus pneumoniae
  misc_feature (1)..(153): tiling:Spneumo1:WAN0249W3; Cluster includes WAN024730 R6.I G_167||||155301..155453|+|153 bp|Between spr0146 (+ strand ) and spr0147 (+ strand)|S.pneumoniae|R6|NC_003098.1|IG|11 0
tttcttgaaatcatccattctgagtaaggtgggtggtttctcagtttttagggatatagttttaaactatatatctgactatctaataacaatttgtgaaatcaaacaaattgtgagatactagtacggtattatttttaaggagaaagaatc

SEQ ID NO: 5913 - DNA, 166 bp, Streptococcus pneumoniae
  misc_feature (1)..(166): tiling:Spneumo1:WAN024A65; Cluster includes WAN024EF4-rc R 6.IG_1182||||1143813..1143960|-|148 bp|Between spr1141 (to pA) (- strand) and spr1142 (- strand)|S.pneumoniae|R6|NC_0 03098.1|IG-rc|110
tttcttgagaatagctggtttctctcgtgagtcttctatgtatatcaaaggaagactgaggttttaagtataaaacttttcttctattatagtagctaagtcttgacagggttcaaaaaatggtttacactttataaagtttattactttgaaaaggtgtgatact

SEQ ID NO: 5914 - DNA, 131 bp, Streptococcus pneumoniae
  misc_feature (1)..(131): tiling:Spneumo1:WAN0249FX; Cluster includes WAN024E4E-rc R 6.IG_2161.1.2||||1940985..1941115|-|131 bp|Between spr1954 (- strand) and spr1955 (+ strand)|S.pneumoniae|R6|NC_0030 98.1|IG-rc|110
tttcttgttcaattgtacaaattatagaatcttttctgagtatttaggaagagataattatcttattgaccctctttttattttttgttatagtckagtcgacgagatgatagtttagaataatcacttat

SEQ ID NO: 5915 - DNA, 110 bp, Streptococcus pneumoniae
  misc_feature (1)..(110): tiling:Spneumo1:WAN0249OH; Cluster includes WAN024E94 R6.I G_1650||||1580518..1580627|+|110 bp|Between spr1604 (aqpZ) (- strand) and spr1605 (- strand)|S.pneumoniae|R6|NC_0030 98.1|IG|110
tttctttctccttttttcaaaaactagatactagtctatcaaaagtaggaaagggtttcaagaaaattgattggaaattttttgaaaatcatagaactattagctaatcc

SEQ ID NO: 5916 - DNA, 111 bp, Streptococcus pneumoniae
  misc_feature (1)..(111): tiling:Spneumo1:WAN024AKR; Cluster includes WAN024EMS R6.I G_563||||540208..540318|+|111 bp|Between spr0539 (estA) (+ strand) and spr0540 (murM) (+ strand)|S.pneumoniae|R6|NC_ 003098.1|IG|110
tttgaacttcagcatagggggagtagaactaaaataaaatatgttttcactagacttttcaaacgaaagtagtagaatagtaataaaatactggaggaaagagagtaggaa

SEQ ID NO: 5917 - DNA, 251 bp, Streptococcus pneumoniae
  misc_feature (1)..(251): tiling:Spneumo1:WAN024A82; Cluster includes WAN024EG5 R6.I G_1096.1||||1052979..1053227|+|249 bp|Between spr1057 (- s trand) and spr1058 (- strand)|S.pneumoniae|R6|NC_003098.1| IG|110
tttgaggttttcctttctgaaaattcattaagaacattatatcataaagcacctcatacaatyaactaatttaatcacttaaaaaaattcgaacactttctatacaactgacagctcaaatctttcagaatagaacaatactaactatcgarcaccccgtmttcataaatatatrtatgtaattctagacctagaattcctataaactaaatgctttcatactcttccaagtaattgattgccttaaattt

SEQ ID NO: 5918 - DNA, 191 bp, Streptococcus pneumoniae
  misc_feature (1)..(191): tiling:Spneumo1:WAN024AJ4; Cluster includes WAN024ELW R6.I G_635.2||||623777..623951|+|175 bp|Between spr0611 (+ stra nd) and spr0612 (- strand)|S.pneumoniae|R6|NC_003098.1|IG| 110
tttgagtgtacgaaaaaagaaaaataacaatagtgctcatactaattgcagaagttttgggtgataagataactgataaattgcaataaaaaatgcaacatttttaaatctcctctataagtgcttcaaaaagtgcttcaaaacctgtcttgtaatccaagtatttttggggacggtgattaataagctag

SEQ ID NO: 5919 - DNA, 61 bp, Streptococcus pneumoniae
  misc_feature (1)..(61): tiling:Spneumo1:WAN024ABG; Cluster includes WAN024EHW R6.I G_966||||913224..913284|+|61 bp|Between spr0927 (+ strand) and spr0928 (glyA) (+ strand)|S.pneumoniae|R6|NC_003098.1 |IG|110
tttgattttcttattgtaaaatcaaactaatggactagtcacacaataaaggagaagacct

SEQ ID NO: 5920 - DNA, 109 bp, Streptococcus pneumoniae
  misc_feature (1)..(109): tiling:Spneumo1:WAN024A7W; Cluster includes WAN024EG2 R6.I G_1098.2.2||||1054129..1054237|+|109 bp|Between spr1059 (- strand) and spr1060 (phpA) (- strand)|S.pneumoniae|R6|NC_ 003098.1|IG|110
tttgcacattttcatraaaaaaatgagaactagaactcacattctgctctcatttttcgttttcccgttctcctatcctgtttttaggagttagaaaatgctgctacct

SEQ ID NO: 5921 - DNA, 59 bp, Streptococcus pneumoniae
  misc_feature (1)..(59): tiling:Spneumo1:WAN024ARW; Cluster includes WAN024EQN-rc R 6.IG_268.2.1||||247424..247482|-|59 bp|Between spr0247 (pu lA) (- strand) and spr0248 (rpsL) (+ strand)|S.pneumoniae| R6|NC_003098.1|IG-rc|110
tttgtcagcacgtccctgtacactcttgagagaccaaaagtaaaaagtaccgtctatta

SEQ ID NO: 5922 - DNA, 290 bp, Streptococcus pneumoniae
  misc_feature (1)..(290): tiling:Spneumo1:WAN0249OD; Cluster includes WAN024E92 R6.I G_1657||||1587055..1587344|+|290 bp|Between spr1611 (- str and) and spr1612 (- strand)|S.pneumoniae|R6|NC_003098.1|IG |110
tttgtcctctttctatgcgactctttaatcgccccgattgctcggaaatatgctaaaatagatactaccatcttaccacaaaattattttatgtcctaattataccatattacctcatttaaacccttggtatcartgattttcttaaaagtctgatttcttcatttctcataaaaatcaatataaaaagccckcgaaagggctaataaatctataaaatcaataggcgagtaactagcacaagtggacgtgcttttttattgactattaccacgataccacgcttaatc

SEQ ID NO: 5923 - DNA, 205 bp, Streptococcus pneumoniae
  misc_feature (1)..(205): tiling:Spneumo1:WAN0249DT; Cluster includes WAN024E38 R6.I G_2241||||2026204..2026408|+|205 bp|Between spr2034 (trpS) (- strand) and spr2035 (+ strand)|S.pneumoniae|R6|NC_0030 98.1|IG|110
tttgttctccttcgatatagtcctttcaattatagcatttttttaatgaaataaccgtaatttatcaaaataaatcagccttgctttttacagatttgtgtaaaggatactgtaaatataatttacacaaaattgacaaataaaaatttgaatatttctgtattttctagtagaataaatatattacacatataggagaaaaaya

SEQ ID NO: 5924 - DNA, 96 bp, Streptococcus pneumoniae
  misc_feature (1)..(96): tiling:Spneumo1:WAN0249FQ; Cluster includes WAN02471I-rc R 6.IG_223.2.2||||202644..202736|-|93 bp|Between spr0202 (rp sN) (+ strand) and spr0203 (rpsH) (+ strand)|S.pneumoniae| R6|NC_003098.1|IG-rc|110
tttgtttttctcctcttactagtagtttgcaagttgcacttgctagttaatacatgatacaaagagcgtaacagcacgagcaaaaatagacaattt

SEQ ID NO: 5925 - DNA, 55 bp, Streptococcus pneumoniae
  misc_feature (1)..(55): tiling:Spneumo1:WAN0249EP; Cluster includes WAN024E3L R6.I G_2208||||1995917..1995971|+|55 bp|Between spr2001 (ctsR) (- strand) and spr2002 (- strand)|S.pneumoniae|R6|NC_00309 8.1|IG|110
ttttaaaagaaaaagggcgctggtaaaggataatcttcaccaactccctattttt

SEQ ID NO: 5926 - DNA, 591 bp, Streptococcus pneumoniae
  misc_feature (1)..(591): tiling:Spneumo1:WAN024AH9; Cluster includes WAN024EKV-rc R 6.IG_705.2||||685891..686481|-|591 bp|Between spr0681 (- s trand) and spr0682 (rpsP) (+ strand)|S.pneumoniae|R6|NC_00 3098.1|IG-rc|120
ttttaaagtctcatttctttaattttttatttcggtgaaatagctgagctatttagcacatgttctattatagcagatttctggcakgtgtcaagaaaaaaacttgacagactataaatttcttaaagtatttagaaatttgttagaataggaaataaatgtttgaaagatgctatccgtgaatactattttagaaaaattttataaagaacaccaagtcaaacccttcatatcgcctgaacgagagttggagagttggatacttggcttctaagttccaaacccgttcccaagcgaaatatggacttattagcagatgattcactagcaagagatatcattttactatggagaatccagtttggtacttttaccactgaaacatgattttaaaaactcccattcgaatatgattcaaaattcgcttagaatcaatgttttcccactttttcaaaaaataaattttcatctaatttaaataactttcaattaagtgtgaattttgcttaaaatcatwaaaaaacaccccatggtgtgaaccatgaagtgttgtaaatgctgtrttgtagctagttcttarcgtttagagaa

SEQ ID NO: 5927 - DNA, 61 bp, Streptococcus pneumoniae
  misc_feature (1)..(61): tiling:Spneumo1:WAN024ABX; Cluster includes WAN024EI6-rc R 6.IG_946||||899812..899872|-|61 bp|Between spr0910 (+ stra nd) and spr0911 (- strand)|S.pneumoniae|R6|NC_003098.1|IG- rc|110
ttttaaagtttaggtgtcaagacctctttttagtgtgcccaaaatttagagaagtaatcaa

SEQ ID NO: 5928 - DNA, 65 bp, Streptococcus pneumoniae
  misc_feature (1)..(65): tiling:Spneumo1:WAN024AQC; Cluster includes WAN024EPO-rc R 6.IG_351||||335616..335680|-|65 bp|Between spr0330 (recU) (- strand) and spr0331 (+ strand)|S.pneumoniae|R6|NC_00309 8.1|IG-rc|110
ttttaaccctttctgtgcaaattatggtataataaagtgatgttattgtaccaataaggagaatt

SEQ ID NO: 5929 - DNA, 134 bp, Streptococcus pneumoniae
  misc_feature (1)..(134): tiling:Spneumo1:WAN024A28; Cluster includes WAN024ECO-rc R 6.IG_1362||||1306541..1306668|-|128 bp|Between spr1318 (- strand) and spr1319 (+ strand)|S.pneumoniae|R6|NC_003098.1 |IG-rc|110
ttttaactcctttttatatagttttgataactagattataaaataacaaaaacacaaagtcaagttttaactgcttgtagaaatacttaaattatgctatgatgggagaaactagtcagaaatgaggaaaaaag

SEQ ID NO: 5930 - DNA, 125 bp, Streptococcus pneumoniae
  misc_feature (1)..(125): tiling:Spneumo1:WAN0249LW; Cluster includes WAN024E7P-rc R 6.IG_1764.1||||1689932..1690017|-|86 bp|Between spr1715 (b irA) (+ strand) and spr1716 (+ strand)|S.pneumoniae|R6|NC_ 003098.1|IG-rc|210
ttttaatgagagtytgtaactctcttttttatttttagagmcaataaarcttcagatccgtaaaacttaattgaattactaatctgaagttatttttatatcgtttatattataattgtgttatt

SEQ ID NO: 5931 - DNA, 60 bp, Streptococcus pneumoniae
  misc_feature (1)..(60): tiling:Spneumo1:WAN024AD3; Cluster includes WAN024EIO-rc R 6.IG_903||||861137..861196|-|60 bp|Between spr0867 (lytB) (+ strand) and spr0868 (flpA) (- strand)|S.pneumoniae|R6|N C_003098.1|IG-rc|110
ttttacttgaaatcaggatttttaacttactattcactcaaatcatattcacttatagta

SEQ ID NO: 5932 - DNA, 164 bp, Streptococcus pneumoniae
  misc_feature (1)..(164): tiling:Spneumo1:WAN0249FT; Cluster includes WAN024E4C R6.I G_2164||||1943786..1943949|+|164 bp|Between spr1957 (arcB) (+ strand) and spr1958 (arcC) (+ strand)|S.pneumoniae|R6| NC_003098.1|IG|110
ttttagataataaaccgtctaccaacagctatgagggctgcgactaatagctttagtccggtcctcttttatrtaatggtaatctattatttcttataaaatatgtgaaaaatcattaaattgaaatctaaacgcattctattgagtgtgataaaggagaattt

SEQ ID NO: 5933 - DNA, 103 bp, Streptococcus pneumoniae
  misc_feature (1)..(103): tiling:Spneumo1:WAN0249H2; Cluster includes WAN02471K-rc R 6.IG_212||||198498..198600|-|103 bp|Between spr0191 (rplB) (+ strand) and spr0192 (rpsS) (+ strand)|S.pneumoniae|R6| NC_003098.1|IG-rc|110
ttttatattttctcctttaaatgttgtaccacagcggcttgcactcctatggagcgctaccgagctggcggatttactagttgcttaagcgactagtttaata

SEQ ID NO: 5934 - DNA, 1319 bp, Streptococcus pneumoniae
  misc_feature (1)..(1319): tiling:Spneumo1:WAN024CIV; Cluster includes WAN0242AE SP13 28||15901182|NP_345786.1|1252105..1253646|-|1542 bp|sodium :solute symporter family protein|S.pneumoniae|TIGR4|NC_003 028.1|ORF|011
ttttatggtttgctcaattagggatggtwgtagctattccactgacaattcgttttatcttacctatctttgcacggatagacatcgatacggcatatgattacttggataaacgttttaattctaaagcacttcgtattatttcagcactcttgtttattatttatcaattgggacgtatgtctatcattatgtacctcccatcagctggtttatcagtattgacaggaattgacatcaatattttgattattttgatgggtgyarttgcaattgtttattcttatactggtggtctaaaatccgtattatggacagactttattcaaggtgtgrttctgattagtggtgtcgttktagctttatttgtactgatkgctaatattaaaggtggctttggtgcagtagcagaaacattagcaaacgggaaattccttgctgcaaatgaaaaacttttcgatcctaacttgctttcaaactccatcttyttaattgtgatgggttcaggctttacaatcttgtcttcctatgcttcatctcaagatttggttcaacgttttactacaacacaaaatattaagaaacttaataaratgttgttcacaaayggtgtyttgtcacttgcaaytgcaacagtcttttacttgatyggtacaggcttgtacgtattctatcaagtacaaaatgcagrtagtgcagctagcaatatccctcaagaccaaatctttatgtactttattgcataccagttaccagtaggtrtcacaggtttgatcttggcagcgatttatgcagcakctcaatcaactrtttcaacaggtttgaactctgttgcaacttcatggacattggatattcaagatgtcatttctaaaaatatgtcagasratcgtcgtacgaaaattgcacaattcgtatctctagcagtaggtttattctcaattgktgtttccattrtcatggctcaytcagatattaaatctgcatacgaatggttcaatagtttcatgggacttgtacttggtctacttggtggtgtattyattcttggwtttgtttctaaaaaagcaaataaacaaggtgcttatgcagcgctgattgtatcaaccatcgtyatggtatttattaaatacttccttcctccaacagctgttagctactgggcatattcattgatttcaatytctgtatcagtagtttcaggttatattgtatctgttcttactgraaataaagtatctgcacctaaatatacaacgattcatgatattwcagaaattaaagcggattcaagttgggaagttcgtcacctaactaat

SEQ ID NO: 5935 - DNA, 152 bp, Streptococcus pneumoniae
  misc_feature (1)..(152): tiling:Spneumo1:WAN0249XP; Cluster includes WAN024EB8 R6.I G_1486.1||||1423525..1423676|+|152 bp|Between spr1439 (cod Y) (- strand) and spr1440 (- strand)|S.pneumoniae|R6|NC_00 3098.1|IG|110
ttttcacctcgaatttaatcgctatcattataacataaaaacgtctctttttcaataattatctgaaaattccttattgacttgcattgacttacaatttaattaaaaaccagaatatttttaattaaattgttccttttctattgacaagt

SEQ ID NO: 5936 - DNA, 56 bp, Streptococcus pneumoniae
  misc_feature (1)..(56): tiling:Spneumo1:WAN024AM8; Cluster includes WAN024ENM-rc R 6.IG_489||||472051..472106|-|56 bp|Between spr0465 (ip) (- strand) and spr0466 (- strand)|S.pneumoniae|R6|NC_003098. 1|IG-rc|110
ttttcagataacactctataactatttattatcttatcaaaaaggagaatcataac

SEQ ID NO: 5937 - DNA, 93 bp, Streptococcus pneumoniae
  misc_feature (1)..(93): tiling:Spneumo1:WAN024APA; Cluster includes WAN024EP5-rc R 6.IG_399||||376547..376639|-|93 bp|Between spr0375 (phaB) (+ strand) and spr0376 (+ strand)|S.pneumoniae|R6|NC_00309 8.1|IG-rc|110
ttttcatatccctccttcttcaaaaaacttttacaatcaaaacatttgacagaaagaattatatcaaaattcaaagaatgatgcaagkatttt

SEQ ID NO: 5938 - DNA, 64 bp, Streptococcus pneumoniae
  misc_feature (1)..(64): tiling:Spneumo1:WAN0249N5; Cluster includes WAN024E8D R6.I G_1704.1||||1628357..1628420|+|64 bp|Between spr1655 (- st rand) and spr1656 (- strand)|S.pneumoniae|R6|NC_003098.1|I G|110
ttttcattataccacaaaatggaaaaggcggtgaaagaaatctgtaatttgaaggatttccttc

SEQ ID NO: 5939 - DNA, 79 bp, Streptococcus pneumoniae
  misc_feature (1)..(79): tiling:Spneumo1:WAN024A8W; Cluster includes WAN024EGM R6.I G_1061||||1002136..1002214|+|79 bp|Between spr1022 (rggD) (+ strand) and spr1023 (+ strand)|S.pneumoniae|R6|NC_00309 8.1|IG|110
ttttcccaaataagggaaaaaataaaaagctcctttcggttttgatacaatagtttcaaaatttgagaggagctttaat

SEQ ID NO: 5940 - DNA, 198 bp, Streptococcus pneumoniae
  misc_feature (1)..(198): tiling:Spneumo1:WAN0249XN; Cluster includes WAN024EB7-rc R 6.IG_1487||||1425363..1425560|-|198 bp|Between spr1440 (- strand) and spr1441 (oxlT) (- strand)|S.pneumoniae|R6|NC_0 03098.1|IG-rc|110
ttttctgtagaaatggggctatcttttgctctggtcttgtgttatactagataggttgcaaagaaaacagtacttttcttttgtggaaaagaagcaacacgattttatatctagttatatgaaaatacgtcataaaaagaaaagtataaactaagccctatagggtggcttcgcaccacctttagaaagaagaataac

SEQ ID NO: 5941 - DNA, 127 bp, Streptococcus pneumoniae
  misc_feature (1)..(127): tiling:Spneumo1:WAN024A9G; Cluster includes WAN024EGX R6.I G_1042||||986926..987052|+|127 bp|Between spr1003 (- stran d) and spr1004 (+ strand)|S.pneumoniae|R6|NC_003098.1|IG|1 10
ttttcttacctttttttatcgttgaaagcggatttatggtataataagcattgtatttattgtatatgaatctggagaaaaaatcaaagatatttttgacggataatatgagaacaagggagaatat

SEQ ID NO: 5942 - DNA, 332 bp, Streptococcus pneumoniae
  misc_feature (1)..(332): tiling:Spneumo1:WAN024A2W; Cluster includes WAN024ED3-rc R 6.IG_1328.2.1||||1279676..1280007|-|332 bp|Between spr1284 (- strand) and spr1285 (+ strand)|S.pneumoniae|R6|NC_0030 98.1|IG-rc|110
ttttctttctaattcggtcatttctatcctcttgttataaataaaattatagctatatctattataacatggtttaataaattctttgagcttttttctttttaaatattgattgtttctaaaarttctagtaatattgctatttctcatttttccaaatatgttattcaacttattagctaygtctctattcatatttgggtataaaacaaaaaatcaattctaacagttttatatcagaataataaataaaaaagcgatattctagactgtatcaatccttttccattataggagcaacagagtgggagtagtcatctaaggactaattt

SEQ ID NO: 5943 - DNA, 314 bp, Streptococcus pneumoniae
  misc_feature (1)..(314): tiling:Spneumo1:WAN0249HJ; Cluster includes WAN024E56-rc R 6.IG_2097||||1870743..1871056|-|314 bp|Between spr1890 (ar gS) (+ strand) and spr1891 (IS1381) (- strand)|S.pneumonia e|R6|NC_003098.1|IG-rc|110
ttttgcaggaagtctattatttggttaggtgaattagtgaagygtttaggcaagtgtctctggttacgacgtcatggmctctaaatcgattatatttaggggtcatgactagtgaagcagttagctagttcgcatataagcggctagcgtctaacaattaggaactttagttccaataactttaagattacgacgttttaggacataaatcgatcatatttatgtcctaaaactagtgaagcgcctagccaaagtccgaataggatttggcgttagttacttagattgctttgcaatcaagtaactttggcgat

SEQ ID NO: 5944 - DNA, 51 bp, Streptococcus pneumoniae
  misc_feature (1)..(51): tiling:Spneumo1:WAN0249G7; Cluster includes WAN024E4I R6.I G_2154||||1929197..1929247|+|51 bp|Between spr1947 (IS1381 ) (+ strand) and spr1948 (- strand)|S.pneumoniae|R6|NC_003 098.1|IG|110
ttttgcaggaagtctattgaaatactaagcctacacagactgatttcaatt

SEQ ID NO: 5945 - DNA, 190 bp, Streptococcus pneumoniae
  misc_feature (1)..(190): tiling:Spneumo1:WAN024A9K; Cluster includes WAN024EGZ R6.I G_1033||||978952..979141|+|190 bp|Between spr0994 (IS1381) (+ strand) and spr0995 (pcrA) (+ strand)|S.pneumoniae|R6| NC_003098.1|IG|110
ttttgcaggaagtctattgaggtattgagctagtttatgaaaaaattgggtgaaaagtcgagtgttttagaaacccacagtgtagtattctagtttcaatccactatattttgctactccccgtaaagtttctattttccctgatttctgatataatagaaatattgacttcaagagtaaggaagagaag

SEQ ID NO: 5946 - DNA, 88 bp, Streptococcus pneumoniae
  misc_feature (1)..(88): tiling:Spneumo1:WAN024AI3; Cluster includes WAN024ELB-rc R 6.IG_678||||660545..660611|-|67 bp|Between spr0654 (comEB) (+ strand) and spr0655 (upp) (+ strand)|S.pneumoniae|R6|N C_003098.1|IG-rc|110
ttttggaattccttctttcaatttattcttcttattataccaaaaaacggtttaaaaatctttctaaaccatttatttttgataattt

SEQ ID NO: 5947 - DNA, 71 bp, Streptococcus pneumoniae
  misc_feature (1)..(71): tiling:Spneumo1:WAN0249XH; Cluster includes WAN024741 R6.I G_164||||152263..152330|+|68 bp|Between spr0143 (+ strand) and spr0144 (+ strand)|S.pneumoniae|R6|NC_003098.1|IG|110
ttttggttgttagtagtatcgcggtctatccttggggaaagattcccatttgaacttaagaaggagttgtg

SEQ ID NO: 5948 - DNA, 129 bp, Streptococcus pneumoniae
  misc_feature (1)..(129): tiling:Spneumo1:WAN0249I9; Cluster includes WAN024E5J R6.I G_2028||||1841674..1841802|+|129 bp|Between spr1869 (tgt) (- strand) and spr1870 (+ strand)|S.pneumoniae|R6|NC_00309 8.1|IG|110
tttttacctccgaagctgggaaagacagtcccagttcatacagtgtgcccaaggacacactgtatgattttatcaaaaaaagtaggaactgtcacgaactatgtataagaactatggtataataagaga

SEQ ID NO: 5949 - DNA, 163 bp, Streptococcus pneumoniae
  misc_feature (1)..(163): tiling:Spneumo1:WAN024A8I; Cluster includes WAN024EGF-rc R 6.IG_1074||||1018159..1018321|-|163 bp|Between spr1035 (- strand) and spr1036 (eno) (+ strand)|S.pneumoniae|R6|NC_00 3098.1|IG-rc|110
tttttactctccttatgagttaaattttttacacctctataataccttaaaacccctcctttttcaagaaaaaacgttatctttgtgcaacttttccttaactttataaagtaatcgctttcttttgtctgttttattctaacttttatgatatactgttttc

SEQ ID NO: 5950 - DNA, 157 bp, Streptococcus pneumoniae
  misc_feature (1)..(157): tiling:Spneumo1:WAN024AQY; Cluster includes WAN024EQ6 R6.I G_306.2||||284947..285102|+|156 bp|Between spr0285 (basA) (- strand) and spr0286 (hysA) (+ strand)|S.pneumoniae|R6|N C_003098.1|IG|110
tttttacttttttcgtcgagtcggatggaagatattgttgaagaataagccytcaatatgatagaaaccgtttacaaataactttaaaaatggtatgatttaattaaaccggtttacttwgttgctataaatctctaatttgagatttagttcctat

SEQ ID NO: 5951 - DNA, 77 bp, Streptococcus pneumoniae
  misc_feature (1)..(77): tiling:Spneumo1:WAN0249GF; Cluster includes WAN02471J R6.I G_220||||201217..201293|+|77 bp|Between spr0199 (rplN) (+ strand) and spr0200 (rplX) (+ strand)|S.pneumoniae|R6|NC_0 03098.1|IG|110
tttttaggaacaaactagtcccctagcttcaagctagggtgcccttatgggcgtaagaaaaatcaaggagaaaccta

SEQ ID NO: 5952 - DNA, 70 bp, Streptococcus pneumoniae
  misc_feature (1)..(70): tiling:Spneumo1:WAN0249X5; Cluster includes WAN024EAV R6.I G_1515.1||||1450629..1450691|+|63 bp|Between spr1468 (- st rand) and spr1469 (+ strand)|S.pneumoniae|R6|NC_003098.1|I G|110
tttttatacctctcttgttgtaattattttagttacagmaattgtgacactcttaataatcaatgtcaat

SEQ ID NO: 5953 - DNA, 111 bp, Streptococcus pneumoniae
  misc_feature (1)..(111): tiling:Spneumo1:WAN024A8R; Cluster includes WAN024EGK-rc R 6.IG_1063||||1005445..1005555|-|111 bp|Between spr1024 (li gA) (+ strand) and spr1025 (pulI) (+ strand)|S.pneumoniae| R6|NC_003098.1|IG-rc|110
tttttatttttcctttttactttgtttctatttcactaataaatttttgtcaatctcgtctcaattaacagacatagtcatattctctaaactctgtttttaaacgatcca

SEQ ID NO: 5954 - DNA, 59 bp, Streptococcus pneumoniae
  misc_feature (1)..(59): tiling:Spneumo1:WAN024A9V; Cluster includes WAN024EH7-rc R 6.IG_1022.1||||969440..969498|-|59 bp|Between spr0983 (+ s trand) and spr0984 (obg) (+ strand)|S.pneumoniae|R6|NC_003 098.1|IG-rc|110
tttttctctccttcgttacattctattttctattatcttagcatgaattgagctagttt

SEQ ID NO: 5955 - DNA, 260 bp, Streptococcus pneumoniae
  misc_feature (1)..(260): tiling:Spneumo1:WAN024F7M; Cluster includes WAN023KTX 3157 17_2889b||||1543182..1543535|+|354 bp|EGAD orf prediction| S.pneumoniae|R6|NC_003098.1|ORF|110
tttttgtccatttttagaagactattgctgtgtaaaatatggcctggagcacttttatactcaatgaaaakcaaagagcraactaggaagctagycgtagrctgctcaaagtacagctttgaggttgcagataaaactgacgaagtcrrctcaaaacactgttttgaggttgtggatagaactgacgaagtcrrtaactatatcyacrgcaaggcgaagctgacgtggtttgaagagattttcgaagagtattarctaat

SEQ ID NO: 5956 - DNA, 152 bp, Streptococcus pneumoniae
  misc_feature (1)..(152): tiling:Spneumo1:WAN024AQJ; Cluster includes WAN024EPU R6.I G_330||||310515..310666|+|152 bp|Between spr0309 (- strand ) and spr0310 (dexB) (+ strand)|S.pneumoniae|R6|NC_003098. 1|IG|110
ttttttacctctgrmctctattataataaaaaattggaagttaggaaactayggagytaaaaaagraatyaaaaagattargcaaacgcttgcacaaaattttaaaaagtgctatcatagactatagattatgaaaataatgaggtaarmag

SEQ ID NO: 5957 - DNA, 352 bp, Streptococcus pneumoniae
  misc_feature (1)..(352): tiling:Spneumo1:WAN024ALK; Cluster includes WAN024ENA R6.I G_530.1.2||||505280..505457|+|178 bp|Between spr0506 (bglH ) (+ strand) and spr0507 (pheS) (+ strand)|S.pneumoniae|R6 |NC_003098.1|IG|110
ttttttattgatgactagctattatcacggttaaggtggcatttcattaaatatggaataaagaagtttggaagacattaaattctaaacttctttattttataggggagtgtcaattaatttaattttgttacaaaaattataaatagttaatttagataaattgtttatataaakttagataagaataagctaacaagcagaagtaagataggtcttgcaagaatggtaaaaatctgataaactaagtrgtaattgaatagraatctgaaagactagtagcccaagggaagtatatcagggaggagagccgtgactgcaagctctctatatgaaagctgggtgaattcac

SEQ ID NO: 5958 - DNA, 208 bp, Streptococcus pneumoniae
  misc_feature (1)..(208): tiling:Spneumo1:WAN024A7N; Cluster includes WAN024EFU R6.I G_1107||||1068444..1068651|+|208 bp|Between spr1069 (lacG) (- strand) and spr1070 (lacE) (- strand)|S.pneumoniae|R6| NC_003098.1|IG|110
ttttttcacctatttcttgatttaaataaagtaaaagtgagaggagaggagtcagtgagccatccttctccatctcacttcttgtaccaagtcaccgaattgtgacatgaggaggtaaaaacgatatctttttaccgacgaattaataataggaaattcgccatagcgatttccgtaacgatrggagactatttcagagtctctagcc

SEQ ID NO: 5959 - DNA, 96 bp, Streptococcus pneumoniae
  misc_feature (1)..(96): tiling:Spneumo1:WAN024DWS; Cluster includes WAN023KEM-3 31 3958_3584||||1924701..1924934|+|234 bp|EGAD orf prediction |S.pneumoniae|R6|NC_003098.1|ORF|110
ttttttcatctttttttgtcaagtaactttactttacaaaaaaaatgtgttatcctagtatggttgatgaaaatcagtagattgaatcgaatataa

SEQ ID NO: 5960 - DNA, 103 bp, Streptococcus pneumoniae
  misc_feature (1)..(103): tiling:Spneumo1:WAN024ARD; Cluster includes WAN024EQC R6.I G_298||||276227..276328|+|102 bp|Between spr0277 (+ strand ) and spr0278 (+ strand)|S.pneumoniae|R6|NC_003098.1|IG|11 0
tttttttccatatcatttaggaaaatgagggaattgtcattggaaacgctttattttataataaaaatagataacaaataagccaacttagcacagctttgat

SEQ ID NO: 5961 - DNA, 93 bp, Streptococcus pneumoniae
  misc_feature (1)..(93): tiling:Spneumo1:WAN0249SQ; Cluster includes WAN024EKF R6.I G_745||||722782..722873|+|92 bp|Between spr0721 (- strand) and A (transposase) (+ strand)|S.pneumoniae|R6|NC_003098. 1|IG|110
tttttttctccgaaagttgggtttgccattgcattttcctcattatctagtatcgttattattatagtraaatgaaccaaaaatagtacacaa

SEQ ID NO: 5962 - DNA, 77 bp, Streptococcus pneumoniae
  misc_feature (1)..(77): tiling:Spneumo1:WAN024ADM; Cluster includes WAN024EIW R6.I G_880||||843140..843216|+|77 bp|Between spr0844 (gidA) (+ strand) and spr0845 (pyrH) (+ strand)|S.pneumoniae|R6|NC_0 03098.1|IG|110
tttttttgaaagaattgctcatgatactataaaaatcttagaaattgtgataaaataggtaggatgaaagaaggaga

SEQ ID NO: 5963 - DNA, 376 bp, Streptococcus pneumoniae
  misc_feature (1)..(376): tiling:Spneumo1:WAN024AA8; Cluster includes WAN0247E1-rc R 6.IG_129||||117583..117727|-|145 bp|Between spr0108 (+ str and) and spr0109 (+ strand)|S.pneumoniae|R6|NC_003098.1|IG -rc|200
twawwttctccttttttattaagcatrgttaggatagtttcctaacaagtgatmgwygactktgtttwtakcacttagytacctagataagatatcyttyctytaycttayttkwttttataggtkacytaakgtttaaaaycaattattgtttgaaacttaacagttctaaaccactagcaataaatgattgcgaactcactaatactatttcaaaatttattttttttgacttagtaacgcaattccaattagcaatacacctaatataaataaaagtatttcccaaaatttattctcagttttaataagtggaataagatacatactgactaatatgcaacttgcccctataatggcaaatattattctggtt

SEQ ID NO: 5964 - DNA, 199 bp, Streptococcus pneumoniae
  misc_feature (1)..(199): tiling:Spneumo1:WAN0249TL; Cluster includes WAN024E79 R6.I G_1860.2.1.2||||1717894..1717998|+|105 bp|Between spr1745 (+ strand) and spr1746 (- strand)|S.pneumoniae|R6|NC_00309 8.1|IG|210
tytactatactaaaaaaccacctgaaacaaatcaagtgactagaggataaaaayraagrctgggmaaaaagtyttkaaaakcwaaaaacgcataatatcaggtstgaaaacttgatattatgcgttttactatgggaagatttacttctttttctcctaaaattgtgtttttgccccacctatctgctatgttgcaaat

SEQ ID NO: 5965 - DNA, 98 bp, Streptococcus pneumoniae
  misc_feature (1)..(98): tiling:Spneumo1:WAN024AQ6; Cluster includes WAN024EPL-rc R 6.IG_360||||341859..341955|-|97 bp|Between spr0336 (csrR) (+ strand) and spr0337 (cbpF) (+ strand)|S.pneumoniae|R6|N C_003098.1|IG-rc|110
tytatatatcctcctaaaacgattgtagyaaaracymgaytgyatgtcaatatataaaaactcctcaaaaaagcagttacacaactgcaactgctttt

SEQ ID NO: 5966 - DNA, 446 bp, Streptococcus pneumoniae
  misc_feature (1)..(446): tiling:Spneumo1:WAN024F3P; Cluster includes WAN0244IK spr0 390|nusB|15902434|NP_357984.1|387424..387864|-|441 bp|Tran scription termination protein|S.pneumoniae|R6|NC_003098.1| ORF|211
wtgacgaggacttcctcaatgactagtccactattagaatctagacgccaactccgtaaatgcgcttttcaagctctcatgagccttgagttcggtacggatgtcgaaactgcttgtcgtttcgcctatactcatgatcgtgaakayacggatgtacaacttccagcctttttgatagacctcgtttctggtgttcaagctaaaaaggaagarctagataagcaaatcactcagcatttaaaagcaggttggaccattgaacgcttaacgctcgtggagagaaacctccttcgcttgggagtctttgaaatcacttcatttgacactcctcagckggttgctgttaatgaagctatcgagcttgcaaaggacttctccgatcaaaaatctgcccgttttatcaatggactgctcagccagtttgtaacagaagaacaataactaat

SEQ ID NO: 5967 - DNA, 531 bp, Streptococcus pneumoniae
  misc_feature (1)..(531): tiling:Spneumo1:WAN024D5P; Cluster includes WAN0244BR spr0 635||15902679|NP_358229.1|642890..643414|+|525 bp|Hypothet ical protein|S.pneumoniae|R6|NC_003098.1|ORF|111
wtgagaaagcaccaaytacaagttcacaaattraccattttatctatgatgaytgcccttgatgtagtccttacacctatctttcgrattgagggaatggcaccgatgtccagtgtagtcaatattctagcrggaatcatgatgggacctgtttatgccttggcyatggctacagtsacagcctttatccgtatgacgactcaagggattccgcctttakctctcacaggagcgacttttggagcccttctagcaggtctcttttataagtacggtcgaaaatttyactwttctgcyytrggagarattktgggaacaggtattattggttcyattgtttcctatcctgttatggtrctctttacaggatcrgctgctaagcttagytggtttatctacackcctcgatttttcggagcaaccttgattggtacagcgatttcctttattgcmtttmgatttttaatcaagcaggaattctttaaaaaagtgcarggatatttctttrstgaaaggatagamykaactaat

SEQ ID NO: 5968 - DNA, 1292 bp, Streptococcus pneumoniae
  misc_feature (1)..(1292): tiling:Spneumo1:WAN024CB3; Cluster includes WAN0244P4 spr0 154|rr07|15902198|NP_357748.1|162537..163823|+|1287 bp|Res ponse regulator|S.pneumoniae|R6|NC_003098.1|ORF|112
wtgtataaagtattaytagtagatgatgagtacatggtgacagaaggtctgaagcgtttgattccctttgataagtgggatatggaggtcgtcgcaacagycrgtcatgccgatgaagctctagaatatgttcaggaaaatcctgtcgatgtcatcatttccgatgtcaatatgccagacaaaacagggcttgatatgattcgggagatgaaagagatcttaccagatgctgcctatatcctgctctcaggttatcaggagtttgattatgtaaaaagagcaatgaaycttagtgtggtggactatttggtcaarcctgttgataaggtagagctgggaaatctgctggagaagattgcaggtcagctcggcgagagagggaagaaaagtcagactcttagtcaagaattagacgaggctggatttgttagttatttaggggataaggagaattggtggataggtctatccaaggaaaaacaaggttccttcaccattccctactatgtcttgggycargmctggcagattttcatttctgrccamcccctagatggtttagtcgttacaccttttgaagctccttatcaagaacaytttgaacgctggaagctgaatgctgagaaaaccctcttttacggttctgtaaatytgcagcagtctgagagtctctttgcctattacgaaccgatttatagggttatcattcagggaaatctcaatcaaatcgtagaagagttaaatctcttggagaaggtagttcttgaaaatacrcckcgwrttycgattactaaacagctttttatycagtttgtcatggatgtyttccatttatttgaacatctcaaagctgatgaymtgacrgacatygtcaaaaccattcatgctattcaatccttcgatgaattggttycttatatcaaggaaactctgaycagctttttcggtcaataccgtatgaatgaaaatgtggycagtgtgctggaagtcattggtcgtgattaccaaaaagagctttccctcaaggatatcagtaaggmyctctttatcaatcctgtctatctagggcagttgattaagcgtgaaaccgattcgacytttgcagagttactaaacaaacaacgtattaaggctgcccarcarctyttgctttcaacyagtgacagyatcgaaratatttgttatgctgttggttacagtaacctyggatatttctataaagttttccgaaaattgtgcggaaaatcgccaaaagcctaccgaaaacaggtagaaactatactataactaat

SEQ ID NO: 5969 - DNA, 992 bp, Streptococcus pneumoniae
  misc_feature (1)..(992): tiling:Spneumo1:WAN024CDP; Cluster includes WAN0244R2 spr0 084||15902128|NP_357678.1|91678..92664|+|987 bp|Conserved hypothetical protein|S.pneumoniae|R6|NC_003098.1|ORF|331
wtgvcaaaagatattcgtgtcttactttactacctttatactccaattgaaaatgcagagcaatttgctgcagaccacttggctttctgtaaatcaatcggccttaaaggccgtatcctagtcgctgacgagggaattaacggaacagtttcaggtgactatgaaacaactcaaaaatacatggactacgttcacagccttccaggaatggaagawctytggttcaagattgacgaagaaartgaacaagccttcaagaagatgtttgttcgctacaagaaagaaattgtccaccttggtttggaagacaacgactttgacaatgacatcaacccacttgaaacaacaggtgcttacttgtctccaaaagagttcaaagaagcgcttcttgataaagataccgttgtccttgacacacgtaacgattatgagtacgacctaggacatttccgtggrgctattcgcccagatattcgcaacttccgtgagtyaccacaatgggtccgtgayaacaargaaaaattcatggacaagcgtgtcgtggtttactgtacaggtggygttcgctgtgagaaattctcaggctggatggtycgtgaaggytacaaagatgtyggccaattgcacggaggaatcgcaacttacggtaaagacccagaagttcaaggtgagctttgggatggraaaatgtacgtmtttgacgagcgtatygccgttgatgtcaaccatgtcaacccaacyatcgtagggaaagactggtttgatggaacaccatgtgaacgttatgtcaactgtggaaatccmttctgtaaccgtcgtatcttgacatcagaagaaaatgaagacaagtaccttcgtggatgctcacacgagtgccgtgttcacccacgtaaccgctatgtttcaaaaaatgaattgacacaagctgaagtkatygagcgcctagccgctatcggtgaaagcttggatcargcagctactgtataactaat

SEQ ID NO: 5970 - DNA, 70 bp, Streptococcus pneumoniae
  misc_feature (1)..(70): tiling:Spneumo1:WAN024AF5; Cluster includes WAN024EJQ-rc R 6.IG_813.2||||774316..774385|-|70 bp|Between () (- strand) and spr0778 (fruR) (+ strand)|S.pneumoniae|R6|NC_003098.1 |IG-rc|110
ygaatcacctcctgttatcgtttacactattcattctatcatactttctttygaagtcaagcatttttta

SEQ ID NO: 5971 - DNA, 102 bp, Streptococcus pneumoniae
  misc_feature (1)..(102): tiling:Spneumo1:WAN024GMD; Cluster includes WAN023S7I NC_0 03028.1_2613||||1984770..1984871|+|102 bp|Glimmer 2.02 orf prediction|S.pneumoniae|TIGR4|NC_003028.1|ORF|010
ytgccacttgtaggtttttattttctgaatcagcatactttctccttaaaaaatagacaaaagggagcgacaatgcgtcagctccttttcattctgtttgtg

SEQ ID NO: 5972 - DNA, 78 bp, Streptococcus pneumoniae
  misc_feature (1)..(78): tiling:Spneumo1:WAN024DTB; Cluster includes WAN023SMY NC_0 03098.1_167||||134234..134311|-|78 bp|Glimmer 2.02 orf pre diction|S.pneumoniae|R6|NC_003098.1|ORF|100
ytggagatgaatcaaagccaagctttgaactcattcgtaagaagccgacgacgtatcattttgatttttgaagagttt

SEQ ID NO: 5973 - DNA, 526 bp, Streptococcus pneumoniae
  misc_feature (1)..(526): tiling:Spneumo1:WAN024BGY; Cluster includes WAN024460 spr0 842|IS1381|15902886|NP_358436.1|840922..841311|-|390 bp|Tr anposase (orf1)|S.pneumoniae|R6|NC_003098.1|ORF|333
  misc_feature (443)..(443): n is a, c, g, or t
ytggwytatracwwattagacttcctrcgaaayaaaayatggtatartagttcyatgaatkatgaagcaagtaaacaactaacygatgyacrattkaarygtyttgttrrygttcarcgyacsayttttgaagagatrytagctgkattaaaaacagcttatcaacttaawcaygcaaaaggtggrckraaacctaaattaaryctagaagacyttcttatrgcbaytcytcamtatgtgcgagaataycsmacttatgaasaaattrcggctgwyyttggtrtycacgaaagcaacttwmtccgtcgragccratgggttgaagtaactcttgttcaaagtrgtkttrcgatttcaagaactcctctyagytctgaggacacgrtaatgattgatgcgacrraagtwmaaatcaaycgccctaaaaaaasaattagcgaatnatwmtggtaawaakaaatkycacgytatgaaggctcaagcgattgtcacaagtcaagggagattgtttctttggatatcactg

SEQ ID NO: 5974 - DNA, 468 bp, Streptococcus pneumoniae
  misc_feature (1)..(468): tiling:Spneumo1:WAN02QE91; Cluster includes WAN02QBNE SPn_ CPS_83_12||||||468 bp|Glimmer 2.13 orf prediction|S.pneumo niae||
atgaaaaatgataggaaagctcaactaataattacaatttttaaatatggtaaaagacatgtaggacggtcaactttttatcataagttaaattataaaatgtatcaaattttaaatgctatatttgtaattggtattttcaatacagaattaccagcatcacaaaatattagtgataatataatattgtttcatccatatgggataatagttaatggcgatgtaactttagggaataatgttgtgataagacagcaggttaccattggtaataaagggatggaaagggacgtgggaaaatctcctattatcgaagcaggtgttgatattggagcaggtgctaaaattataggagggataacgattggtgagggttcaaaagtaggagctaatgctgttgtaacaaaaagctttccacctggttcaattttagtaggagttccagcgaggaatatagcattagagaag

SEQ ID NO: 5975 - DNA, 498 bp, Streptococcus pneumoniae
  misc_feature (1)..(498): tiling:Spneumo1:WAN02QE90; Cluster includes WAN02QBNB SPn_ CPS_83_15||||||498 bp|Glimmer 2.13 orf prediction|S.pneumo niae||
atgctaaatagtttaattagaagatttaatcagattttctatagttatcgggttagaagaaaagctgcagttgctaaaggaagagtgtacacgggtggaaaaacatttgttacttcgaatacctatctttctgagaatgtttcttttaatggcatgtcaatgtttggagaaggtagaatttcgataggaagaaatttccattctggtataaattgccaaattataacgtcatttcatgactatgatacaggaactaagataccatacgacaataagtacatacataaagatgtaattattgatgataatgtgtggattgggaataatgttattatcctcggcggatctcgtatcggagaaggagcagttattcaagcagggagtacagttgtaggggaaatacctccaggagcaatcgcaggtggtcatccagcaagagtatttaaatttaggaatatgaagcattatgaagaattaaagagactagaacaattttat

SEQ ID NO: 5976 - DNA, 477 bp, Streptococcus pneumoniae
  misc_feature (1)..(477): tiling:Spneumo1:WAN02QCQ9; Cluster includes WAN02QBNG SPn_ CPS_83_10||||||477 bp|Glimmer 2.13 orf prediction|S.pneumo niae||
atgatttttgtgacagtaggtactcatgagcaacagtttaatcgacttattaaagaggttgatagattaaaaggtgagggacttattcaggatgaagttattattcagactggtttttcggattatgaaccagtgcactgccaatggaaagctttgatttcttatgatgagatgaatcaatatatggatgaagcagatattgtcattacacatggtggcccagcaacatttatgggagtgatttctaaggggaagagaccgattgtagtacctagacaagaaaaatttggcgagcatgtgaatgatcaccaaatggaattttgcttaaagttactaggcgaaggatacgatctagttgtaatcgatgaaattgataaacttaatgagaatattaaatattcaaaagttcagcaagttagttctcataatagtaagtttactaatgaactgtcagatataattgaaaatatgtttata

SEQ ID NO: 5977 - DNA, 1185 bp, Streptococcus pneumoniae
  misc_feature (1)..(1185): tiling:Spneumo1:WAN02QCQA; Cluster includes WAN02QBNA  SPn _CPS_83_16 ||||||1185 bp|Glimmer 2.13 orf prediction|S.pne umoniae||
atgaatattataagatacttgaaaagaaatggatttcgatatgcattaaatgtcctctatcaatataaaattcaaaagattttagattcaattgttattagatttactaagtttaaaaagttacaaaatattattgtcattgaatgtcacacagactttgataataatggaggagctttttatgattatttgataagaaataattataataagaaatataaaattattttattattaaaaaatcgactagtacgtactcttcctgaaaatgtagattatttttacttgaaaaaacctagtttgaggaagtcatatttgttatcattaagtaaattttttcttttcgataatgatatacttcgtaaatatagaaaagatcaaaaacacttytatttaacacatggatgctttsstttaaaaaatacaataggtaaaataacagttccgrattatgttgattttgttctatctccctcgggcaatgtagataatattatagttaagcagtttggattaacatctaaagagcaatgtcttcacactggatttccgtgtcatgatatcttttattcaaaaccaraacctctagtatttttatctgattatgataaaaaaattatctgggcaccaacttttagaaagggtggwggckataatagaaatgatagtacagctagctatcctttaggtattccrttacttgraacactagatgaacttgcamacctaaayayatatctaagccaacgggatattgtcctgattgtaaagttacatccaatgcaagatatttcagatttggagttgaaacaatttagtcatattaagtttctgacaaatcaagatttgaawcgtaaaaatacaaatstgtatcaattgctgatgaattcagatgctttactcagtgactattctgcaatctcgtatgattatttacaccttgataaaccaatagggtatgttttttcggatctaaatgattataagttggggctttcagttgataatgtagatgattayatagcaggtgataagatamtgtyttttramracttgctgcactttattgataacatttatctagaaattgataaaaataaagaaaaacgcaargaattatttaataaaatatttgaaaaacaggatggagaatcgtgtgaaagattggcmcaaattatggaatta

SEQ ID NO: 5978 - DNA, 1167 bp, Streptococcus pneumoniae
  misc_feature (1)..(1167): tiling:Spneumo1:WAN02QDE8; Cluster includes WAN02QBNL SPn_ CPS_82_16||||||1167 bp|Glimmer 2.13 orf prediction|S.pneum oniae||
atgaaaatatcgctttctaaagtattttttttacaattttgtgcactttatatctttacaattttatatcctagaggtattacattaacttattctccatctgcagatttttttactctgatttataaattttgtttatatttcaccatcgcagccagtataatatatatatttataaaaatattatatcagagactacacctagcatcatatactttttttatattgcagtattatattgtttctatagttattacattgcttttaacaggcacaatagattcgggtttacaatcagtcttttatccgatctgtatatatttattttttaatgagattcaagatagggtattgattataaaaattagtgatatatttttatactgtttaactcttttattctttataaatattttggatcttatgatgaattttaccaatatttatcatataacctttttggggcatgtccaagtgatatcacaatttggaattatagcttttttcatttcttcctattacttaatgataggaaatagaaatcgcaagatagccttcctattacaaattttgactgtgctcaattgtctatatgctgatgtttttttatcaaaggttatagcaatcttcatgattatttacgcattatcatttaacataaagagagtattttggaagagagggattctaatttctttcttgacatttattataactattctgcttcttttcattgatattcaaggttatttgataagatatttacaatattttgattttacttttaatggccgctatcaaatttggcgtattgcttatcaaaaatttttagattcaaaaatatatggctatggagtttttagctttcatttcaatcttccgtggcaagattctggtgctaaggggatcaactatgctcataatcagcttatgcaattagcaatagataatggagtaattggtatcgtctctttctttattatgattttttatatgatatttttaacaaggaagattagaaattttagagtagcttcattgtttttattttcgtacttttgtttgtttatagtaatgtttattgaaagtgtaacctattacccgtattactttattatattgatttttcaaatattatatgaaaggttagagcaggtgggagaatgc

SEQ ID NO: 5979 - DNA, 1110 bp, Streptococcus pneumoniae
  misc_feature (1)..(1110): tiling:Spneumo1:WAN02QDE9; Cluster includes WAN02QBNF SPn_ CPS_83_11||||||1110 bp|Glimmer 2.13 orf prediction|S.pneum oniae||
atgaagattttgcatattccaacaggtggcttattttcagatggaatagggacgtttatctattcttatttagaatgcatgaatctagataaatgggaagtgacagttttagctactaatattccactgttagaagataaagcaaaatttgagaatttaggtatccaggtagtagttctagagcggaaaaaaactgcgattattcactatatgtgtcaattatacaaattaataagagctaataaatatgatataattcatgttcatggtagtagttctttaatgtcaatcgagctatctgttgcaaaaattgcaggggttccagtaaggattgcccatagtcataatactacttgtgaccatagaaaattagataaagtattacggccagtatttcataaattatatacgcaggcgtgggcatgtggtgaaggagctgggaaatggctttttaccaatagagaatatactattattcataatgcaagaaatataaaacgttatcaatttagtgagtccaaacgacaacgatttagaaaaaaactatctcttaaagatacaactcttgctttaggtcatgttggtcgctttaatgttcaaaaaaatcatgaatttcttgtgttattaatggaaaatttagtaatacaaggactagatgttaaattatttttagtaggtgaagggtcaactttatcaaaaattaagaatatggtttctgaaaaatctttagaagatagggtcttctttttaggtcatcttaatgatatgaaatcatttgtgtctgctatggatataatgcttctcccaagcttgtacgaaggtctccctctggtgtcagtagaatggcaaataaatggaatacaatgtatcttatctgatactataacaaaggagtgtatctacactaaacaagtgacttctttaccaattaggacccctctttattgggaaaaagcgataagagatttctgtccagaagatagattgagacaatcaattgagaatcaaagacttgcgagagaagctggttatgatattgaactggaattagttaaattrgatactttatacaataaattgataatgactataaaagataggacaagaaaa

SEQ ID NO: 5980 - DNA, 717 bp, Streptococcus pneumoniae
  misc_feature (1)..(717): tiling:Spneumo1:WAN02QDEA; Cluster includes WANO2QBND SPn_ CPS_83_13||||||717 bp|Glimmer 2.13 orf prediction|S.pneumo niae||
atgattccaaaaaaaatacattattgctggtttggtggaggtccattacctactgatgttaaaaaatgtattgacagctggagaaaattttgtccgaactatgagattattagatgggatgaaagcaatttcattattagtgatcaaaacaattttgttcagactgcatatgaaaacaaagcttgggcatttgttagcgactatgcacggttaagaatcatatatgaaaatggtggcatctatttggatacagatgttgaattgattagaaatcttgatgaattgcttgagcatgcagctttttttggtgctcaccagataaatggattagtagctactggtctaggttttggttcgaaaaaggggacgaagatattaaaagaattattaagactgtatgataatacagattttgatccgtgtaaaaagaatgagttggcatgtcccatacttaattcgtttgtctttactgattttggctatcagccttcttctaacattgttcaaacggagtattttactatctatcctgctgagtattttgatcctatatatgttggagccaatgctagaaatttattatcggagaaaacatattcaattcatcattacagtgcctcttggactcctgtgagagttagaataaaaaataagatcattagatatattggtagggataagattctactattaaagaaaattctagaaaggaaaaga

SEQ ID NO: 5981 - DNA, 193 bp, Streptococcus pneumoniae
  misc_feature (1)..(193): tiling:Spneumo1:WAN02499D; WAN024CO1   TIGR4.IG_641||||655 793..655985|+|193 bp|Between SP0682 (+ strand) and SP0683 (- strand)|S.pneumoniae|TIGR4|NC_003028.1|IG
aaaagagagtttcggctctctttttgctaggaattttacaatagtttgaattgctttttagttaacaccatctcttttacttgtatagtatgaatgggaaaaacttgaataaaattcgttaatggcatctattttatatttggttagtactggttgcatattattttgaaataaaactactatataatattat

SEQ ID NO: 5982 - DNA, 153 bp, Streptococcus pneumoniae
  misc_feature (1)..(153): tiling:Spneumo1:WAN02496L; WAN024B1F-rc   TIGR4.IG_1056||| |1063075..1063227|-|153 bp|Between SP1128 (+ strand) and S P1129 (- strand)|S.pneumoniae|TIGR4|NC_003028.1|IG-rc
aaaataagggtgacccatttccgggctaccctcttactataccaaaaattagtaggggtagtaaaaagggtattaaattataaaaagcactaagggaaagcgccccaaagtgcttatttcaaaggctttatagcctataatcacataaagaga

SEQ ID NO: 5983 - DNA, 64 bp, Streptococcus pneumoniae
  misc_feature (1)..(64): tiling:Spneumo1:WAN02498P; WAN024AN1   TIGR4.IG_1237||||12 43708..1243771|+|64 bp|Between SP1319 (- strand) and SP132 0 (- strand)|S.pneumoniae|TIGR4|NC_003028.1|IG
aaaatacctttctaattttattggaatactccaaatttctaagaaggattaaccaatttcatcc

SEQ ID NO: 5984 - DNA, 50 bp, Streptococcus pneumoniae
  misc_feature (1)..(50): tiling:Spneumo1:WAN0249C4; WAN024EBM   R6.IG_1446.1||||138 0028..1380077|+|50 bp|Between spr1402 (+ strand) and spr14 03 (- strand)|S.pneumoniae|R6|NC_003098.1|IG
aaaatagaaaattttagaaagtctaaatcaattatagccacctaataggg

SEQ ID NO: 5985 - DNA, 93 bp, Streptococcus pneumoniae
  misc_feature (1)..(93): tiling:Spneumo1:WAN0249AG; WAN024E8U-rc   R6.IG_1669.2|||| 1595339..1595431|-|93 bp|Between spr1620 (- strand) and sp r1621 (scrR) (- strand)|S.pneumoniae|R6|NC_003098.1|IG-rc
aaagcgcttgacaattaatgaaagcgctgttataatataatcaacaaatgaaacgtttcaaaaataggctagaagcttgtttaaaaaataaat

SEQ ID NO: 5986 - DNA, 69 bp, Streptococcus pneumoniae
  misc_feature (1)..(69): tiling:Spneumo1:WAN024982; WAN024903   TIGR4.IG_1851.1.1|| ||1843103..1843171|+|69 bp|Between SP1939 (- strand) and S P1940 (- strand)|S.pneumoniae|TIGR4|NC_003028.1|IG
aaagctattatatcagctttccagaggagcgacaagaaacagcaaactatatatagcggaatgaaataa

SEQ ID NO: 5987 - DNA, 81 bp, Streptococcus pneumoniae
  misc_feature (1)..(81): tiling:Spneumo1:WAN024997; WAN024C0M   TIGR4.IG_839||||850 188..850268|+|81 bp|Between SP0895 (+ strand) and SP0896 ( + strand)|S.pneumoniae|TIGR4|NC_003028.1|IG
aaatacggaaaatagaagaattttcaacgtaaatgtggtataatcagtaagaatgttaaaagaaaaaggagcataaccaat

SEQ ID NO: 5988 - DNA, 139 bp, Streptococcus pneumoniae
  misc_feature (1)..(139): tiling:Spneumo1:WAN02497R; WAN024EE1-rc   TIGR4.IG_75||||7 9548..79686|-|139 bp|Between SP0072 (+ strand) and SP0073 (+ strand)|S.pneumoniae|TIGR4|NC_003028.1|IG-rc
aaatatttcctcttttattgtaactttaattattacaactattatataacttccctcaagaaagtcaagccagacaacttgaagcatcccactcagcaaaaaacaatcccagaaaaaatcttctaggattgttttgtat

SEQ ID NO: 5989 - DNA, 50 bp, Streptococcus pneumoniae
  misc_feature (1)..(50): tiling:Spneumo1:WAN0249AP; WAN024EBJ-rc   R6.IG_1448||||13 89621..1389670|-|50 bp|Between spr1404 (+ strand) and spr1 405 (- strand)|S.pneumoniae|R6|NC_003098.1|IG-rc
aaatcagataagagaaaagtcagcacgattatgctgacttttttgataac

SEQ ID NO: 5990 - DNA, 59 bp, Streptococcus pneumoniae
  misc_feature (1)..(59): tiling:Spneumo1:WAN024963; WAN024A00-rc   TIGR4.IG_1522.2. 1||||1522056..1522114|-|59 bp|Between SP1620 (- strand) an d SP1622 (+ strand)|S.pneumoniae|TIGR4|NC_003028.1|IG-rc
aaatgcgaagtatattattttttgaaagcgatataatggattcataaaggaggtgtatc

SEQ ID NO: 5991 - DNA, 129 bp, Streptococcus pneumoniae
  misc_feature (1)..(129): tiling:Spneumo1:WAN0249CR; WAN024EPR   R6.IG_336||||315586 ..315714|+|129 bp|Between spr0315 (cps2H) (+ strand) and s pr0316 (cps2I) (+ strand)|S.pneumoniae|R6|NC_003098.1|IG
aaatggatggggaaattcaaggttgtatgataatgtgcagaaggcatatggaatagttgttttttagatttttaatttattttttaatacataattttctgtttttatctaaaattaaggaaggataat

SEQ ID NO: 5992 - DNA, 298 bp, Streptococcus pneumoniae
  misc_feature (1)..(298): tiling:Spneumo1:WAN0249CS; WAN0247B1   R6.IG_134||||122143 ..122440|+|298 bp|Between spr0113 (+ strand) and spr0114 ( + strand)|S.pneumoniae|R6|NC_003098.1|IG
aaatttgttacatttggattaacaagtgtcctagggattagaaataactctagtatagctagatatttttgagtaactagaaatatcattaggctacccatatgattgccagaaaagatggctgatgaatcttatttatactgttgcagtaggcattgtctaggataaataagctatcttgatgggggaaattggaataattttagtagaaacattaaaggattatggacaagtagcgcaggattaggtgatgcaatgtgctaagttggcttggtgttagcagtagtattatttaaca

SEQ ID NO: 5993 - DNA, 86 bp, Streptococcus pneumoniae
  misc_feature (1)..(86): tiling:Spneumo1:WAN024965; WAN024A02-rc   TIGR4.IG_1516||| |1512786..1512871|-|86 bp|Between SP1611 (+ strand) and SP 1612 (+ strand)|S.pneumoniae|TIGR4|NC_003028.1|IG-rc
aacaaactcctaattattaaaataggctagagacacagcactagcctattccgtaagtaaagctacttattttatataaaatataa

SEQ ID NO: 5994 - DNA, 215 bp, Streptococcus pneumoniae
  misc_feature (1)..(215): tiling:Spneumo1:WAN0249BB; WAN024END-rc   R6.IG_524||||499 247..499461|-|215 bp|Between spr0500 (+ strand) and spr050 1 (+ strand)|S.pneumoniae|R6|NC_003098.1|IG-rc
aacaacatcaaccagtttactcagtcatttcttagccccaccgtactgcccgacatagcctattaccctttcacgacctgatgccgtataacgggtagcttctgcctcttcgaaagtcaaaaaacactttaaacgatccagtcattggtctaagagttgtctattatgaactaggataatggtttttgtcttacgttcagagataagagcagcac

SEQ ID NO: 5995 - DNA, 72 bp, Streptococcus pneumoniae
  misc_feature (1)..(72): tiling:Spneumo1:WAN02496Z; WAN024D0K-rc   TIGR4.IG_540.2.2 .2.2.1||||539761..539832|-|72 bp|Between SP0571 (+ strand) and SP0573 (+ strand)|S.pneumoniae|TIGR4|NC_003028.1|IG-r c
aacgagcagtctataaaattcaaaaaacgcatattatcaagcgacctaaaactttgggctctataatatttg

SEQ ID NO: 5996 - DNA, 197 bp, Streptococcus pneumoniae
  misc_feature (1)..(197): tiling:Spneumo1:WAN0249CO; WAN024EOL   R6.IG_440||||415152 ..415348|+|197 bp|Between spr0416 (- strand) and spr0417 ( - strand)|S.pneumoniae|R6|NC_003098.1|IG
aactcttcgtggatgttaagattaaactgttttcctacacgagcaataatttcattgattttctgattttggtcataaaaagcatcaacatcttgtgtggcacgtaaaccatgatattctaagacataaccataattgttaaagtcagattttcctgaattaatttcttatttagggcttggaagaccggtttcatt

SEQ ID NO: 5997 - DNA, 94 bp, Streptococcus pneumoniae
  misc_feature (1)..(94): tiling:Spneumo1:WAN024984; WAN02491F   TIGR4.IG_1728.2.1|| ||1745280..1745373|+|94 bp|Between SP1833 (- strand) and S P1834 (- strand)|S.pneumoniae|TIGR4|NC_003028.1|IG
aagaaaatattaaaatttatactcttcggaaatctcttcaaactaggtcagtgccgccttgccctaagtctaggttactgacttggtcagttct

SEQ ID NO: 5998 - DNA, 55 bp, Streptococcus pneumoniae
  misc_feature (1)..(55): tiling:Spneumo1:WAN0249B9; WAN024EMM-rc   R6.IG_580.1.2.2| |||556619..556673|-|55 bp|Between spr0556 (rplA) (+ strand ) and spr0557 (+ strand)|S.pneumoniae|R6|NC_003098.1|IG-rc
aagagtattagaaagctcgatggactattccagattcattccactagatttcgaa

SEQ ID NO: 5999 - DNA, 161 bp, Streptococcus pneumoniae
  misc_feature (1)..(161): tiling:Spneumo1:WAN0249AB; WAN024EG0   TIGR4.IG_69||||7198 0..72140|+|161 bp|Between SP0066 (+ strand) and SP0067 (+ strand)|S.pneumoniae|TIGR4|NC_003028.1|IG
aagagtcattgcgcctacttttgggagctaggaataggtacgcagagacaaatagtaggaaaatatgatataactaagcgttgaaagctatctgttaatataatattcaaactacaataaggagtaagaaagaaacgaagaaaattgtatttgctagtgcc

SEQ ID NO: 6000 - DNA, 264 bp, Streptococcus pneumoniae
  misc_feature (1)..(264): tiling:Spneumo1:WAN02499S; WAN024D40   TIGR4.IG_434||||436 038..436301|+|264 bp|Between SP0460 (- strand) and SP0461 (- strand)|S.pneumoniae|TIGR4|NC_003028.1|IG
aagatactttctaatgagttgtttaggcgcttttcattataagtcttatgggacttttttgatactcaaaaagccctataatctccacagtgggatttacccactacagaaattatagagccagaaaaaacacttttgttcactagcagaaactagagagcagaagtgtttttctgttcagatttacccaaaactgggaaatatggggataagaatagagatggcttaggaagcccctttttgtgtgtagacagtacgatgaac

SEQ ID NO: 6001 - DNA, 54 bp, Streptococcus pneumoniae
  misc_feature (1)..(54): tiling:Spneumo1:WAN02495Q; WAN0248K1-rc   TIGR4.IG_1933||| |1915267..1915320|-|54 bp|Between SP2007 (- strand) and SP 2008 (- strand)|S.pneumoniae|TIGR4|NC_003028.1|IG-rc
aagattagtggagttaattacactagaaatcttctatttatgaaaggaaatatc

SEQ ID NO: 6002 - DNA, 54 bp, Streptococcus pneumoniae
  misc_feature (1)..(54): tiling:Spneumo1:WAN0249CA; WAN024EEL   R6.IG_1211||||11733 23..1173376|+|54 bp|Between spr1170 (+ strand) and () (- s trand)|S.pneumoniae|R6|NC_003098.1|IG
aaggaaagaatagactaaaaccgctcagctgagcggtttttgatgtctaattac

SEQ ID NO: 6003 - DNA, 398 bp, Streptococcus pneumoniae
  misc_feature (1)..(398): tiling:Spneumo1:WAN02496A; WAN024AM1-rc   TIGR4.IG_1249||| |1256132..1256529|-|398 bp|Between SP1331 (- strand) and S P1332 (- strand)|S.pneumoniae|TIGR4|NC_003028.1|IG-rc
aataggtgacctgatttatctcataaatctgtagtttttatgggattctcttttaatttagaaataaaatatattacctatataaaataaagaaactagaaatattttttcaatttttttagaaataaaatattatatagaaattccgaaaagaaataataaaaccaaaataaaatattactaaaatattttaatatgaacatattattagtgataaacgttcttacaatacatataattacgataaaaagaataaaaactattatatttttatgtttgttgttctgttatgaaacgaaagaaattggaaactagtttctaatttatgaaaaatattgaaaaaaaaaaaaagtgttaaaataaagaatgtaaacgtttacttcaactaaggagctcat

SEQ ID NO: 6004 - DNA, 297 bp, Streptococcus pneumoniae
  misc_feature (1)..(297): tiling:Spneumo1:WAN024999; WAN024C1E   TIGR4.IG_772.2||||7 77430..777726|+|297 bp|Between SP0826 (+ strand) and SP082 8 (+ strand)|S.pneumoniae|TIGR4|NC_003028.1|IG
aatagttagacaaaaaatgttgataatttgtatcattattcttaattcacaaaaaacgaacgtttagtattcttcttgctaagaaactaaatttgttcgtttttttactcttgtaaatctatttttgttagagttgatttggtttacatccgtacttaaattgatttgttagagctctacttttattaaaaaaattcaatttcaaggataaataagcagtattctaaaggtacttttagatgaaataaaagcctttacatggtataatagaggtagctctttaatggaggtgtttga

SEQ ID NO: 6005 - DNA, 64 bp, Streptococcus pneumoniae
  misc_feature (1)..(64): tiling:Spneumo1:WAN0249AX; WAN024EEB-rc   R6.IG_1237||||11 90774..1190837|-|64 bp|Between spr1193 (appB) (- strand) a nd spr1194 (appA) (- strand)|S.pneumoniae|R6|NC_003098.1|I G-rc
aatcgtttaaaattatcagtgattaagtttgataatcttttaggagtgtagagatgctggttta

SEQ ID NO: 6006 - DNA, 210 bp, Streptococcus pneumoniae
  misc_feature (1)..(210): tiling:Spneumo1:WAN0249BW; WAN024EAN   R6.IG_1531.2.1||||1 461768..1461977|+|210 bp|Between spr1484 (- strand) and sp r1485 (+ strand)|S.pneumoniae|R6|NC_003098.1|IG
aatctaaaaatttatcattttatgacaaacatactatcgttaaatgctgatttaatcgaaattttgagttataaactcctcagtttcgaactcaaaattagtcgtgcaggataggatacccttcataaacttatataactactttaataccttaaaaagctaataaaataaggaatatctaagcaatatacattctaaaatacctgtagg

SEQ ID NO: 6007 - DNA, 309 bp, Streptococcus pneumoniae
  misc_feature (1)..(309): tiling:Spneumo1:WAN02498I; WAN024A03   TIGR4.IG_1515.2|||| 1512372..1512680|+|309 bp|Between SP1610 (- strand) and SP 1611 (+ strand)|S.pneumoniae|TIGR4|NC_003028.1|IG
aatcttcaacttcccagtaatataagcacctctggcgaaagaagtttcaatgtcctaaagtaataagtgaatccaattgaaagattttaaacaatttgcaaaaatgtcaaaaaataaaaaataaacagtttattcagaaaattcttgacatataaaaacacatggtagaatataattagaaagttagaaaaaataaaagtttgactaaaatttgtatttgaaggtggtgttcagataagaaatttagtcagacgaaccacgaatttgctctatgctttctggaatttatcataacaggaggatacagtc

SEQ ID NO: 6008 - DNA, 99 bp, Streptococcus pneumoniae
  misc_feature (1)..(99): tiling:Spneumo1:WAN02499W; WAN024DO1   TIGR4.IG_345||||333 930..334028|+|99 bp|Between SP0358 (+ strand) and SP0359 ( + strand)|S.pneumoniae|TIGR4|NC_003028.1|IG
aatcttttaagatacattaaaattatcaaggatatataatgtatcatgtattgtcgagagagttaactattaaaacagcatataaaataaggagggggc

SEQ ID NO: 6009 - DNA, 197 bp, Streptococcus pneumoniae
  misc_feature (1)..(197): tiling:Spneumo1:WAN0249BD; WAN024EOL-rc   R6.IG_440||||415 152..415348|-|197 bp|Between spr0416 (- strand) and spr041 7 (- strand)|S.pneumoniae|R6|NC_003098.1|IG-rc
aatgaaaccggtcttccaagccctaaataagaaattaattcaggaaaatctgactttaacaattatggttatgtcttagaatatcatggtttacgtgccacacaagatgttgatgctttttatgaccaaaatcagaaaatcaatgaaattattgctcgtgtaggaaaacagtttaatcttaacatccacgaagagtt

SEQ ID NO: 6010 - DNA, 77 bp, Streptococcus pneumoniae
  misc_feature (1)..(77): tiling:Spneumo1:WAN0249BF; WAN024EPQ-rc   R6.IG_340||||320 187..320263|-|77 bp|Between spr0319 (cps2P) (+ strand) and spr0320 (cps2L) (+ strand)|S.pneumoniae|R6|NC_003098.1|IG -rc
aatgaaataacctttcttcgttgttttttaattactaaattcttcctctactacactaagtatccgttcaatcacca

SEQ ID NO: 6011 - DNA, 340 bp, Streptococcus pneumoniae
  misc_feature (1)..(340): tiling:Spneumo1:WAN02499X; WAN024DP0   TIGR4.IG_336||||323 649..323988|+|340 bp|Between SP0349 (+ strand) and SP0350 (+ strand)|S.pneumoniae|TIGR4|NC_003028.1|IG
aatgaatatagtatggaaggggactacaatataactctggcattcttacagagcatacttatcagtttattagcttatgtactgattgcaatttcagaaaccgatatgtcttcaaataatattcggtctatttggaagaataattgaactggaccttctaattcattattgagaactcatatattactgaaacaaataaattttgtttagatggagaaaagttttatctgacgtagaggataaaagaattatatttctgaaaatcattgagtgaccaaatatatattgagtttctgtagttgcatgtactgcctgatttaatttgtcaaatggaaataga

SEQ ID NO: 6012 - DNA, 60 bp, Streptococcus pneumoniae
  misc_feature (1)..(60): tiling:Spneumo1:WAN02498M; WAN024AK0   TIGR4.IG_1270.2|||| 1274423..1274482|+|60 bp|Between SP1352 (- strand) and SP1 353 (- strand)|S.pneumoniae|TIGR4|NC_003028.1|IG
aattacctccgaaacacaaaaaaaggggtagacaatctagtgtctacccccgaaagttta

SEQ ID NO: 6013 - DNA, 149 bp, Streptococcus pneumoniae
  misc_feature (1)..(149): tiling:Spneumo1:WAN0249CX; WAN0247O1   R6.IG_87||||73930.. 74078|+|149 bp|Between spr0066 (+ strand) and spr0067 (+ s trand)|S.pneumoniae|R6|NC_003098.1|IG
aattaggaatttttaataagttataagtattgctagtttgctttttgaacggtctttggtaacagaactgcgtgagctggatgggtgagaattttgacaaagaagctgattagagatataatgaagaaaaatcgagcaaggaaaaagaa

SEQ ID NO: 6014 - DNA, 286 bp, Streptococcus pneumoniae
  misc_feature (1)..(286): tiling:Spneumo1:WAN02496M; WAN024B71-rc   TIGR4.IG_996.2|| ||1000096..1000381|-|286 bp|Between SP1064 (+ strand) and SP1065 (- strand)|S.pneumoniae|TIGR4|NC_003028.1|IG-rc
aattgaggagattattttctaaagcgaattttatcaggaaaatcagttaatcccaataaatagtctgtactgacgtcatagaaatctgagagtttaaccaatacatcagccgtcaacgcatgctcaccccgttcaattttggcataagctgaatttgtaaacgaaagtattgtagctatttgcttttggggcagatcatgatcctccctcaaatctctcaaacgtctgtacatctagctttctcctaagaaaaagtatagaccatatattgtaactatttaggata

SEQ ID NO: 6015 - DNA, 214 bp, Streptococcus pneumoniae
  misc_feature (1)..(214): tiling:Spneumo1:WAN0249BR; WAN024E97   R6.IG_1639||||15716 09..1571822|+|214 bp|Between spr1593 (- strand) and spr159 4 (- strand)|S.pneumoniae|R6|NC_003098.1|IG
aatttctttaaaagagtttctttttatacttttctgaagtggtgacggacgtcagcaaagtccttcggactttcatgactaaaatttgagcctaaggtctcaaattttccgcagttggtacaatcacttgtaccaacttacaccacagcgaaaagtattctctatggggctcgccttgctcgcccaaattcagacaaccctttcctttctgtgc

SEQ ID NO: 6016 - DNA, 58 bp, Streptococcus pneumoniae
  misc_feature (1)..(58): tiling:Spneumo1:WAN0249B2; WAN024EFO-rc   R6.IG_1130.2|||| 1087647..1087704|-|58 bp|Between spr1092 (truB) (- strand) and spr1093 (- strand)|S.pneumoniae|R6|NC_003098.1|IG-rc
aatttgtaaaaaagagaataaaaggtagacgacgcctcagtaaaaattggcccggaaa

SEQ ID NO: 6017 - DNA, 285 bp, Streptococcus pneumoniae
  misc_feature (1)..(285): tiling:Spneumo1:WAN02495P; WAN02481Z-rc   TIGR4.IG_2026.1| |||2000723..2001007|-|285 bp|Between SP2092 (+ strand) and SP2093 (+ strand)|S.pneumoniae|TIGR4|NC_003028.1|IG-rc
accatgactactccaacagttaagtcaaatttaaaattatttattattttggaaccattagaaacaacatagcaaagttaaaataaggctttgtccgtacacaacttgaaaaagtgcgcaccgattcggtgcttttttgttttactatactaatttattctactcttattttaatgaaaaaacaaatacaagtatagcgttttcattagtttttattaaataggtagattcaagtagagaatttacttaatttatgtgtggctaatctttatataaatgattttg

SEQ ID NO: 6018 - DNA, 69 bp, Streptococcus pneumoniae
  misc_feature (1)..(69): tiling:Spneumo1:WAN0249B8; WAN024EM9-rc   R6.IG_605||||597 078..597146|-|69 bp|Between spr0581 (zmpB) (+ strand) and spr0582 (pabB) (+ strand)|S.pneumoniae|R6|NC_003098.1|IG-r c
accttaagtatagcataaaaaggcagatacagacaaagctgatctacctttttacgattttattcatcc

SEQ ID NO: 6019 - DNA, 146 bp, Streptococcus pneumoniae
  misc_feature (1)..(146): tiling:Spneumo1:WAN02499M; WAN024D12   TIGR4.IG_502.2||||5 12236..512381|+|146 bp|Between SP0531 (+ strand) and SP053 2 (+ strand)|S.pneumoniae|TIGR4|NC_003028.1|IG
actaaaaaataggtactgctacctttaagaagatagtagacgtatatacttttttaagaaaatcaaaaagatactataaaaaatctatttgtttattgaatttaagactttggtaacaaattgaaaataaaaaggaggtattcatc

SEQ ID NO: 6020 - DNA, 90 bp, Streptococcus pneumoniae
  misc_feature (1)..(90): tiling:Spneumo1:WAN0249BA; WAN024EMV-rc   R6.IG_560.1||||5 35025..535114|-|90 bp|Between spr0536 (- strand) and spr05 37 (recJ) (+ strand)|S.pneumoniae|R6|NC_003098.1|IG-rc
actatagtgatttttttcagatatggtttgacaagaacattctttcactgtagaatcgtgttataaaatctaaaacaaaggagatctctc

SEQ ID NO: 6021 - DNA, 217 bp, Streptococcus pneumoniae
  misc_feature (1)..(217): tiling:Spneumo1:WAN024972; WAN024D0L-rc   TIGR4.IG_539.2|| ||537318..537534|-|217 bp|Between SP0570 (+ strand) and SP 0571 (+ strand)|S.pneumoniae|TIGR4|NC_003028.1|IG-rc
agaaatatcctttcaattgtttttctgtgtcatcggtaaattgtgaaataggtatggaattggcgaaaattataaaaatccttcacaataggttctatgaaatatatatacttcatcttaatagtgagcaagctaaacttagcatttcatgccctcatatgggatgttctttgactaaataatatgattatcgagatatatctggataaatgaacta

SEQ ID NO: 6022 - DNA, 51 bp, Streptococcus pneumoniae
  misc_feature (1)..(51): tiling:Spneumo1:WAN024975; WAN024D0V-rc   TIGR4.IG_515|||| 517350..517400|-|51 bp|Between SP0544 (+ strand) and SP054 5 (+ strand)|S.pneumoniae|TIGR4|NC_003028.1|IG-rc
agaaatcctccctactatgacctcaccttgtcaggctctactgctgtaaga

SEQ ID NO: 6023 - DNA, 117 bp, Streptococcus pneumoniae
  misc_feature (1)..(117): tiling:Spneumo1:WAN02497K; WAN024E1I-rc   TIGR4.IG_166|||| 165469..165585|-|117 bp|Between SP0171 (+ strand) and SP01 72 (+ strand)|S.pneumoniae|TIGR4|NC_003028.1|IG-rc
agaacaaactagaaagctaggctcctaaaagggagaaagtctatgaaaagattagcggacggcgttttgagcagacttcaattgttgcaggacaagtagacggagagtttatagccc

SEQ ID NO: 6024 - DNA, 382 bp, Streptococcus pneumoniae
  misc_feature (1)..(382): tiling:Spneumo1:WAN0249CF; WAN024EHD   R6.IG_1009||||95300 1..953382|+|382 bp|Between spr0970 (+ strand) and spr0971 (mefE) (+ strand)|S.pneumoniae|R6|NC_003098.1|IG
agagaaactcttcattgccatataacttaagtttcatcgcatgtcagtaatctcataaggaattagttagatattagtgttagctcctaggtttcaactgatctaatgattaatgtaagaattcttaaagtatacatttcgacactgtaattatgacagaagtattttgggatagttggctcaacaaattgaaatcttttcaacttgtgaatttttaggattattttatttgactttatgagtattgtttacgttcaatactttacaataacatattaaggttaaatcatatttatgaatgaactaagatgaggatcataatcattttttgaaaaaatgattattacgataaaagaaaatattcataattaaggagttattc

SEQ ID NO: 6025 - DNA, 54 bp, Streptococcus pneumoniae
  misc_feature (1)..(54): tiling:Spneumo1:WAN0249BJ; WAN0247G1-rc   R6.IG_119||||105 491..105544|-|54 bp|Between spr0098 (+ strand) and spr0099 (+ strand)|S.pneumoniae|R6|NC_003098.1|IG-rc
agagatacctcccgtgaagaaactccctctccaaaaggggagggagaattttaa

SEQ ID NO: 6026 - DNA, 57 bp, Streptococcus pneumoniae
  misc_feature (1)..(57): tiling:Spneumo1:WAN02499C; WAN024CM1   TIGR4.IG_652.1||||6 63613..663669|+|57 bp|Between SP0693 (+ strand) and SP0694 (+ strand)|S.pneumoniae|TIGR4|NC_003028.1|IG
agcaactaataggtcaagaatttaccatatcggacttattagtgttagtagggaaga

SEQ ID NO: 6027 - DNA, 138 bp, Streptococcus pneumoniae
  misc_feature (1)..(138): tiling:Spneumo1:WAN02497P; WAN024E70-rc   TIGR4.IG_112.1|| ||113880..114017|-|138 bp|Between SP0111 (+ strand) and SP 0112 (+ strand)|S.pneumoniae|TIGR4|NC_003028.1|IG-rc
agcctaaattgtaatttttttcaatttaaaacagaaaaacccaggaaaatgacataaaaatatcattcctaggcctatttatgctatttctctctgaaaaatatgagtattcagtcggtcaaatgaagctgaacgaac

SEQ ID NO: 6028 - DNA, 58 bp, Streptococcus pneumoniae
  misc_feature (1)..(58): tiling:Spneumo1:WAN02499B; WAN024CA1   TIGR4.IG_694||||703 917..703974|+|58 bp|Between SP0741 (- strand) and SP0742 ( - strand)|S.pneumoniae|TIGR4|NC_003028.1|IG
agctctattgtaccacaaaaaaacaagagatgatggtcacctcttgtcaagaatgcaa

SEQ ID NO: 6029 - DNA, 57 bp, Streptococcus pneumoniae
  misc_feature (1)..(57): tiling:Spneumo1:WAN02496G; WAN024B1A-rc   TIGR4.IG_1070.1| |||1071086..1071142|-|57 bp|Between SP1142 (+ strand) and SP1143 (+ strand)|S.pneumoniae|TIGR4|NC_003028.1|IG-rc
aggtgtactccttctatactatcccttgtgctttagaatattataccacacaatcaa

SEQ ID NO: 6030 - DNA, 84 bp, Streptococcus pneumoniae
  misc_feature (1)..(84): tiling:Spneumo1:WAN02499K; WAN024D0W   TIGR4.IG_514||||516 867..516950|+|84 bp|Between SP0543 (+ strand) and SP0544 ( + strand)|S.pneumoniae|TIGR4|NC_003028.1|IG
agtattataaaaagtagctttctatccttttctgacaggatatttgagtagaaggctctattaaattgttagtgaaataaatga

SEQ ID NO: 6031 - DNA, 223 bp, Streptococcus pneumoniae
  misc_feature (1)..(223): tiling:Spneumo1:WAN02499Q; WAN024D30   TIGR4.IG_436||||441 008..441230|+|223 bp|Between SP0462 (+ strand) and SP0463 (+ strand)|S.pneumoniae|TIGR4|NC_003028.1|IG
agtgtagaaatgataatatctatgttctgaacgatacttttaagaagtagcactcaagaagagatttaagtttacttggtgaaacctgttttattcgtaagtaaactatcattgaaaggggagatgttttcgaaaacttgcacagaaaaaggattattattgtcatgtgtaattcattacattgctcacagttgattttaagagatatgaataaggagaaatc

SEQ ID NO: 6032 - DNA, 89 bp, Streptococcus pneumoniae
  misc_feature (1)..(89): tiling:Spneumo1:WAN0249A3; WAN024E1M   TIGR4.IG_157||||158 760..158848|+|89 bp|Between SP0161 (- strand) and SP0162 ( + strand)|S.pneumoniae|TIGR4|NC_003028.1|IG
agttttctctccttttcagttatacaaggttgtgatcacttcctgtatatccttattaaacactattttatagcccatggcaaggaacc

SEQ ID NO: 6033 - DNA, 80 bp, Streptococcus pneumoniae
  misc_feature (1)..(80): tiling:Spneumo1:WAN02497O; WAN024E31-rc   TIGR4.IG_120.1.2 ||||124754..124833|-|80 bp|Between SP0120 (+ strand) and S P0121 (- strand)|S.pneumoniae|TIGR4|NC_003028.1|IG-rc
ataaaaatcgaaatcagactagaaggctaagcgaaagcataacttgagttagctcccatagttcgggaaactatgggagg

SEQ ID NO: 6034 - DNA, 339 bp, Streptococcus pneumoniae
  misc_feature (1)..(339): tiling:Spneumo1:WAN0249AU; WAN024EE8-rc   R6.IG_1243.1|||| 1195308..1195646|-|339 bp|Between spr1199 (- strand) and s pr1200 (- strand)|S.pneumoniae|R6|NC_003098.1|IG-rc
ataaaagaatgaaatattccctactgtatttttagacgaagaacgttagttaataatactcaaatttatttcaaactctttgattagtatgaatttagctctacagaaaaataaaaaatgtgataaaaatttcaactactcttatctataataaagctacctgttctttgaaaattgaatccactccgtcttgattagcgtgcctgtgtaagtagggactgagagtatttccctgtgaagggcaactggcacaagacgtgtgtgagaattttctaacagacacggagtttatcgtttccagactcaaacgatgcgacaaactagataaaggagttaatc

SEQ ID NO: 6035 - DNA, 86 bp, Streptococcus pneumoniae
  misc_feature (1)..(86): tiling:Spneumo1:WAN02495Y; WAN024961-rc   TIGR4.IG_1665.1. 2||||1675918..1676003|-|86 bp|Between SP1770 (- strand) an d SP1771 (- strand)|S.pneumoniae|TIGR4|NC_003028.1|IG-rc
ataaaatttctccgttcatcatatatgaaagttgttcaaacatcagagtgctttataaaatataaatagacctaaagatatttaat

SEQ ID NO: 6036 - DNA, 135 bp, Streptococcus pneumoniae
  misc_feature (1)..(135): tiling:Spneumo1:WAN0249AK; WAN024E9O-rc   R6.IG_1596.1|||| 1531844..1531978|-|135 bp|Between spr1549 (- strand) and s pr1550 (+ strand)|S.pneumoniae|R6|NC_003098.1|IG-rc
ataaagaaattagagtctatacataataagtaaaggaggaatttgtatgatataccatcgtttagaataagtctatatttaaaatagaagttataaggaatcttcttgaataaaaaatgaaaggaaacagaaaaa

SEQ ID NO: 6037 - DNA, 78 bp, Streptococcus pneumoniae
  misc_feature (1)..(78): tiling:Spneumo1:WAN02497S; WAN024EF0-rc   TIGR4.IG_74.1||| |79332..79409|-|78 bp|Between SP0071 (+ strand) and SP0072 (+ strand)|S.pneumoniae|TIGR4|NC_003028.1|IG-rc
ataagaaaaaggagtcgatttgtcatctgactcctcatccttacaagaaacactactcaacaatgaaactctacaatc

SEQ ID NO: 6038 - DNA, 193 bp, Streptococcus pneumoniae
  misc_feature (1)..(193): tiling:Spneumo1:WAN02496X; WAN024CO1-rc   TIGR4.IG_641|||| 655793..655985|-|193 bp|Between SP0682 (+ strand) and SP06 83 (- strand)|S.pneumoniae|TIGR4|NC_003028.1|IG-rc
ataatattatatagtagttttatttcaaaataatatgcaaccagtactaaccaaatataaaatagatgccattaacgaattttattcaagtttttcccattcatactatacaagtaaaagagatggtgttaactaaaaagcaattcaaactattgtaaaattcctagcaaaaagagagccgaaactctctttt

SEQ ID NO: 6039 - DNA, 57 bp, Streptococcus pneumoniae
  misc_feature (1)..(57): tiling:Spneumo1:WAN0249BK; WAN0247N1-rc   R6.IG_88.2.1|||| 74741..74797|-|57 bp|Between spr0067 (+ strand) and spr006 8 (+ strand)|S.pneumoniae|R6|NC_003098.1|IG-rc
ataatcaagaggagctgggcaaaaactcaatttcatgagaagatgaagtaatactca

SEQ ID NO: 6040 - DNA, 139 bp, Streptococcus pneumoniae
  misc_feature (1)..(139): tiling:Spneumo1:WAN0249A8; WAN024EE1   TIGR4.IG_75||||7954 8..79686|+|139 bp|Between SP0072 (+ strand) and SP0073 (+ strand)|S.pneumoniae|TIGR4|NC_003028.1|IG
atacaaaacaatcctagaagattttttctgggattgttttttgctgagtgggatgcttcaagttgtctggcttgactttcttgagggaagttatataatagttgtaataattaaagttacaataaaagaggaaatattt

SEQ ID NO: 6041 - DNA, 181 bp, Streptococcus pneumoniae
  misc_feature (1)..(181): tiling:Spneumo1:WAN0249AN; WAN024EAO-rc   R6.IG_1531.1|||| 1461108..1461288|-|181 bp|Between spr1484 (- strand) and s pr1485 (+ strand)|S.pneumoniae|R6|NC_003098.1|IG-rc
atactatcaatattaatgcggagtgtaatgctccgctaaaataaaacctattacgggataaaaacactactttgtttaggatggaaagaggaacgaatgaagatgaaagctagagattcaccattgaattgattttgtttttagaaaaaatcaataattagaaaaaatacgaggtaaaaaa

SEQ ID NO: 6042 - DNA, 108 bp, Streptococcus pneumoniae
  misc_feature (1)..(108): tiling:Spneumo1:WAN0249BL; WAN0247O0-rc   R6.IG_88.1||||74 337..74444|-|108 bp|Between spr0067 (+ strand) and spr0068 (+ strand)|S.pneumoniae|R6|NC_003098.1|IG-rc
atactatgcgttttttaattttaaagattttttacaacttcttttgactcacattaaactattctaatagttaatagacctttgcacatatcgtctcaaaacattcat

SEQ ID NO: 6043 - DNA, 129 bp, Streptococcus pneumoniae
  misc_feature (1)..(129): tiling:Spneumo1:WAN0249AE; WAN024E4A-rc   R6.IG_2167.1|||| 1947971..1948099|-|129 bp|Between spr1960 (+ strand) and s pr1961 (- strand)|S.pneumoniae|R6|NC_003098.1|IG-rc
atagatctgaactttattttcataactcaatttcataataaaacaccccaaaagttagatttattctgtctaacttttggggtgcagttcattaatcggtcgattttttttgtagaaacagttgcctga

SEQ ID NO: 6044 - DNA, 117 bp, Streptococcus pneumoniae
  misc_feature (1)..(117): tiling:Spneumo1:WAN024988; WAN024941   TIGR4.IG_1667.2.2.1 ||||1693522..1693638|+|117 bp|Between SP1772 (- strand) an d SP1774 (+ strand)|S.pneumoniae|TIGR4|NC_003028.1|IG
atagctttattagaccatgcttattttaaactaagcaactatagatagagaaatgaaataaaatctgaattcgaatgtgataaggagttagaaattgaaacaataggattcccccat

SEQ ID NO: 6045 - DNA, 218 bp, Streptococcus pneumoniae
  misc_feature (1)..(218): tiling:Spneumo1:WAN02497B; WAN024D21-rc   TIGR4.IG_438|||| 444457..444674|-|218 bp|Between SP0464 (+ strand) and SP04 65 (- strand)|S.pneumoniae|TIGR4|NC_003028.1|IG-rc
atcagaatcccagtcctgtccattcctaaaatgattaccagaccagtcctatcgttttacaaacaataacccacaatgaggctggcacaatctgcccagcctcatatccgttattgtgattcatgccacatcaccatgattcctgattaacatcacctcagagtactctggtcttcccttcagcctgctatctttttcataatgatgtacattgaata

SEQ ID NO: 6046 - DNA, 90 bp, Streptococcus pneumoniae
  misc_feature (1)..(90): tiling:Spneumo1:WAN024BJA; WAN023OYQ pne66_5||||1156..1245 |-|90 bp|Type 12A1 capsule operon, Glimmer 2.02 orf predic tion|S.pneumoniae||WAN01UCD4|ORF
atgaatgatttgggtttatggctggttaaagctaaaagagaaaacaggagagctaaaccaccaagtaaaaggaataaaaccaagaaaagt

SEQ ID NO: 6047 - DNA, 339 bp, Streptococcus pneumoniae
  misc_feature (1)..(339): tiling:Spneumo1:WAN024BJ9; WAN023OP7 pne79_21||||16196..16 534|+|339 bp|Type 37(2) capsule operon, Glimmer 2.02 orf p rediction|S.pneumoniae||WAN01UCFV|ORF
atgaatgcttatagtaaacaaaagtctggtcgaatcgaatggatagattttggaaagggctctgccatatttttagttttagtgggacatgtattacttggtctgtatcaatcggaaaaatttcccatagcaaacaacatactatcactgttgatagcacaaatctacatatttcacataccagtattttttgctttatcaggatactttttcaaacctgtgtcgaatttgaaagagttctggcaatatgctaagaagaagacgattatttttggcctaccatatattttttattcgatcattcatttttgtcttcaaaaagttgcagggggcgactgt

SEQ ID NO: 6048 - DNA, 108 bp, Streptococcus pneumoniae
  misc_feature (1)..(108): tiling:Spneumo1:WAN0249CW; WAN0247O0   R6.IG_88.1||||74337 ..74444|+|108 bp|Between spr0067 (+ strand) and spr0068 (+ strand)|S.pneumoniae|R6|NC_003098.1|IG
atgaatgttttgagacgatatgtgcaaaggtctattaactattagaatagtttaatgtgagtcaaaagaagttgtaaaaaatctttaaaattaaaaaacgcatagtat

SEQ ID NO: 6049 - DNA, 50 bp, Streptococcus pneumoniae
  misc_feature (1)..(50): tiling:Spneumo1:WAN02497A; WAN024D1Z-rc   TIGR4.IG_445.1|| ||449870..449919|-|50 bp|Between SP0472 (+ strand) and SP0 473 (- strand)|S.pneumoniae|TIGR4|NC_003028.1|IG-rc
atgagattcaaacgaaatatgtcagtgctttggcattcctagccttcata

SEQ ID NO: 6050 - DNA, 67 bp, Streptococcus pneumoniae
  misc_feature (1)..(67): tiling:Spneumo1:WAN0249AT; WAN024ECK-rc   R6.IG_1372.1.2|| ||1316433..1316499|-|67 bp|Between spr1328 (glyS) (- stran d) and spr1329 (glyQ) (- strand)|S.pneumoniae|R6|NC_003098 .1|IG-rc
atgagattgttggaaatcttgataaatttagcattggatttccatacagactcacagagttagttag

SEQ ID NO: 6051 - DNA, 398 bp, Streptococcus pneumoniae
  misc_feature (1)..(398): tiling:Spneumo1:WAN02498N; WAN024AM1   TIGR4.IG_1249||||12 56132..1256529|+|398 bp|Between SP1331 (- strand) and SP13 32 (- strand)|S.pneumoniae|TIGR4|NC_003028.1|IG
atgagctccttagttgaagtaaacgtttacattctttattttaacactttttttttttttcaatatttttcataaattagaaactagtttccaatttctttcgtttcataacagaacaacaaacataaaaatataatagtttttattctttttatcgtaattatatgtattgtaagaacgtttatcactaataatatgttcatattaaaatattttagtaatattttattttggttttattatttcttttcggaatttctatataatattttatttctaaaaaaattgaaaaaatatttctagtttctttattttatataggtaatatattttatttctaaattaaaagagaatcccataaaaactacagatttatgagataaatcaggtcacctatt

SEQ ID NO: 6052 - DNA, 303 bp, Streptococcus pneumoniae
  misc_feature (1)..(303): tiling:Spneumo1:WAN024BJI; WAN023KAB 82297_39b||||18681..1 8983|+|303 bp|EGAD orf prediction|S.pneumoniae|TIGR4|WAN01 UC25|ORF
atgagttttaatctcaaaagaaagcatagagaaaaacagctccgaggacggggctgttttcttgctttattcttcatctggtgtgaggatcatcgggatgatgatcggttcacgttcggtattttcatagaggaaggggcgaatagcgttgacaatggcaccattgacagattgcacgctagcatccttatttttcagtgcgatacgaatggcattgaagaggatacgctggctttggcgaatcaagtcgccagactctctcatgtagacaaagcctcggctgaggatgtctggaccagatag

SEQ ID NO: 6053 - DNA, 50 bp, Streptococcus pneumoniae
  misc_feature (1)..(50): tiling:Spneumo1:WAN0249CN; WAN024EOJ   R6.IG_442||||416196 ..416245|+|50 bp|Between spr0418 (+ strand) and spr0419 (- strand)|S.pneumoniae|R6|NC_003098.1|IG
atgatatgaagactaggaatgccaaaacactgacatatttcgtttaaagc

SEQ ID NO: 6054 - DNA, 234 bp, Streptococcus pneumoniae
  misc_feature (1)..(234): tiling:Spneumo1:WAN024BJK; WAN023KR8 314943_3013||||160502 0..1605253|+|234 bp|EGAD orf prediction|S.pneumoniae|R6|NC _003098.1|ORF
atgatgaccagtggaatctctgtttcaatggttttcaaggtttcaactaaagcctgggtagaggtcccgtgggctaaactgcgcaagccagcttcttcgataacaggtccatctgcaacagggtctgaaaagggaatacccacttcaattgcagagacacccaaatcttctagaaagtggattgtttctcctagtccatccaaacctttctcgtggtcaccagccatgatatag

SEQ ID NO: 6055 - DNA, 297 bp, Streptococcus pneumoniae
  misc_feature (1)..(297): tiling:Spneumo1:WAN024BJH; WAN023K9S 82331_61b||||30438..3 0734|+|297 bp|EGAD orf prediction|S.pneumoniae|TIGR4|WAN01 UC25|ORF
atgctccgcatccggaacttaaacaatattttactaagatatatcaatttccaaaggattttatttaagaatataggggagggaaacatgagattctattgtgaagcttatgaggtaattactgaagagaaaaaagtatcatttttttatgtagatgagaaacccttaaggtatctgttatttgactatatatttctactagttctagctaaaaaaaaatatcccaatcttatgaactgcaccccaaaagttagatttattctgtctaacttttggggtgcagttcattttgcatag

SEQ ID NO: 6056 - DNA, 117 bp, Streptococcus pneumoniae
  misc_feature (1)..(117): tiling:Spneumo1:WAN02495V; WAN024941-rc   TIGR4.IG_1667.2. 2.1||||1693522..1693638|-|117 bp|Between SP1772 (- strand) and SP1774 (+ strand)|S.pneumoniae|TIGR4|NC_003028.1|IG-r c
atgggggaatcctattgtttcaatttctaactccttatcacattcgaattcagattttatttcatttctctatctatagttgcttagtttaaaataagcatggtctaataaagctat

SEQ ID NO: 6057 - DNA, 114 bp, Streptococcus pneumoniae
  misc_feature (1)..(114): tiling:Spneumo1:WAN024BJC; WAN023WI3 AX569435.1_1||||1..11 4|+|114 bp|Glimmer 2.02 orf prediction|S.pneumoniae||AX569 435.1|ORF
atggtaaataagcctctaaaacctctttgtttacgagagtttcctcgtttggaagacattctagaagataggatagatatttctcgctatttaattgatgacgttctaactaat

SEQ ID NO: 6058 - DNA, 105 bp, Streptococcus pneumoniae
  misc_feature (1)..(105): tiling:Spneumo1:WAN0249A7; WAN024EE0   TIGR4.IG_76||||8054 2..80646|+|105 bp|Between SP0073 (+ strand) and SP0074 (+ strand)|S.pneumoniae|TIGR4|NC_003028.1|IG
atggtatgtgatgaaggtagagcatcaattgtagaaagtgctccttattctagtcagatacgtggaaaatttgatatgatagtagggaataaggagaagaataat

SEQ ID NO: 6059 - DNA, 90 bp, Streptococcus pneumoniae
  misc_feature (1)..(90): tiling:Spneumo1:WAN024C2X; WAN023IOE 85935_2766c||||157208 8..1572402|+|315 bp|EGAD orf prediction|S.pneumoniae|TIGR4 |WAN01UC25|ORF
atgtacttgctgaagctgacgcacttgttgatgctgaagctgaagcactggtgcttgctgaggccgaggcactggtgcttgctgaagccg

SEQ ID NO: 6060 - DNA, 86 bp, Streptococcus pneumoniae
  misc_feature (1)..(86): tiling:Spneumo1:WAN02498C; WAN024961   TIGR4.IG_1665.1.2|| ||1675918..1676003|+|86 bp|Between SP1770 (- strand) and S P1771 (- strand)|S.pneumoniae|TIGR4|NC_003028.1|IG
attaaatatctttaggtctatttatattttataaagcactctgatgtttgaacaactttcatatatgatgaacggagaaattttat

SEQ ID NO: 6061 - DNA, 306 bp, Streptococcus pneumoniae
  misc_feature (1)..(306): tiling:Spneumo1:WAN02497T; WAN024EF1-rc   TIGR4.IG_73||||7 3455..73760|-|306 bp|Between SP0070 (+ strand) and SP0071 (+ strand)|S.pneumoniae|TIGR4|NC_003028.1|IG-rc
attaacctcgctttttctatattctttatatcaatctatattttatagcataaaagtataaacataaaaataatatagtatggaattttctgagtacttttcaacaattacttatcattatacaataaatcgatagaaatttctattgaaatatacttaaaaatattctgcatactataaaaaatacagtaaattataacgataaaaaacagagataacatctcaacaagtaagtgtggacttcagactaattacagcattttttaaattagattaccgcttatgcttttaatgggctataaaata

SEQ ID NO: 6062 - DNA, 61 bp, Streptococcus pneumoniae
  misc_feature (1)..(61): tiling:Spneumo1:WAN024985; WAN02491T   TIGR4.IG_1694.1|||| 1716312..1716372|+|61 bp|Between SP1799 (- strand) and SP1 800 (- strand)|S.pneumoniae|TIGR4|NC_003028.1|IG
attatcacctcctttcaatatatagtatcatgcaaatgctttttaagcaactatttctcaa

SEQ ID NO: 6063 - DNA, 129 bp, Streptococcus pneumoniae
  misc_feature (1)..(129): tiling:Spneumo1:WAN0249BG; WAN024EPR-rc   R6.IG_336||||315 586..315714|-|129 bp|Between spr0315 (cps2H) (+ strand) an d spr0316 (cps2I) (+ strand)|S.pneumoniae|R6|NC_003098.1|I G-rc
attatccttccttaattttagataaaaacagaaaattatgtattaaaaaataaattaaaaatctaaaaaacaactattccatatgccttctgcacattatcatacaaccttgaatttccccatccattt

SEQ ID NO: 6064 - DNA, 105 bp, Streptococcus pneumoniae
  misc_feature (1)..(105): tiling:Spneumo1:WAN02497Q; WAN024EE0-rc   TIGR4.IG_76||||8 0542..80646|-|105 bp|Between SP0073 (+ strand) and SP0074 (+ strand)|S.pneumoniae|TIGR4|NC_003028.1|IG-rc
attattcttctccttattccctactatcatatcaaattttccacgtatctgactagaataaggagcactttctacaattgatgctctaccttcatcacataccat

SEQ ID NO: 6065 - DNA, 102 bp, Streptococcus pneumoniae
  misc_feature (1)..(102): tiling:Spneumo1:WAN0249CT; WAN0247G0   R6.IG_121.2||||1084 04..108505|+|102 bp|Between spr0100 (+ strand) and spr0101 (+ strand)|S.pneumoniae|R6|NC_003098.1|IG
attgaaaattttttcaatttaggcttgacaaaggatgagtataggagtattatttatacaataaaaaagaataaacataaagaaggctttgttatgaataag

SEQ ID NO: 6066 - DNA, 166 bp, Streptococcus pneumoniae
  misc_feature (1)..(166): tiling:Spneumo1:WAN02498Q; WAN024AS0   TIGR4.IG_1215||||12 27595..1227760|+|166 bp|Between SP1292 (+ strand) and () ( - strand)|S.pneumoniae|TIGR4|NC_003028.1|IG
attgactatacaaacatttatatactcgatatagtctcaattttatctgatgattgcccaaatttttcaataataaaacgcataatattatggagacaatcccctatattatgcgttcttttaatatcaaagactttttgacaaacttctttgatatctaattaca

SEQ ID NO: 6067 - DNA, 67 bp, Streptococcus pneumoniae
  misc_feature (1)..(67): tiling:Spneumo1:WAN02495T; WAN02491V-rc   TIGR4.IG_1689.1| |||1709982..1710048|-|67 bp|Between SP1794 (- strand) and SP1795 (- strand)|S.pneumoniae|TIGR4|NC_003028.1|IG-rc
attgcccgacttattgcttgaaaaagaatttaaaatatagtatagttaattatagattaacacttgc

SEQ ID NO: 6068 - DNA, 81 bp, Streptococcus pneumoniae
  misc_feature (1)..(81): tiling:Spneumo1:WAN02496R; WAN024C0M-rc   TIGR4.IG_839|||| 850188..850268|-|81 bp|Between SP0895 (+ strand) and SP089 6 (+ strand)|S.pneumoniae|TIGR4|NC_003028.1|IG-rc
attggttatgctcctttttcttttaacattcttactgattataccacatttacgttgaaaattcttctattttccgtattt

SEQ ID NO: 6069 - DNA, 61 bp, Streptococcus pneumoniae
  misc_feature (1)..(61): tiling:Spneumo1:WAN02499V; WAN024DO0   TIGR4.IG_347.1.1.1. 1||||336444..336504|+|61 bp|Between SP0360 (+ strand) and SP0366 (+ strand)|S.pneumoniae|TIGR4|NC_003028.1|IG
attgtatatttttaataaatcaaaacgagatgattaattcttagtagaacaagagtaaaat

SEQ ID NO: 6070 - DNA, 93 bp, Streptococcus pneumoniae
  misc_feature (1)..(93): tiling:Spneumo1:WAN0249AJ; WAN024E9N-rc   R6.IG_1596.2|||| 1532077..1532169|-|93 bp|Between spr1549 (- strand) and sp r1550 (+ strand)|S.pneumoniae|R6|NC_003098.1|IG-rc
attgttcctcctagaaaaatgtgaatattttctacatttataaaaaacgtagaaaaaggtggtattattatatcaaaaaggagggaaaaagtc

SEQ ID NO: 6071 - DNA, 93 bp, Streptococcus pneumoniae
  misc_feature (1)..(93): tiling:Spneumo1:WAN0249BP; WAN024E8U   R6.IG_1669.2||||159 5339..1595431|+|93 bp|Between spr1620 (- strand) and spr16 21 (scrR) (- strand)|S.pneumoniae|R6|NC_003098.1|IG
atttattttttaaacaagcttctagcctatttttgaaacgtttcatttgttgattatattataacagcgctttcattaattgtcaagcgcttt

SEQ ID NO: 6072 - DNA, 148 bp, Streptococcus pneumoniae
  misc_feature (1)..(148): tiling:Spneumo1:WAN0249CC; WAN024EEQ   R6.IG_1202||||11644 98..1164645|+|148 bp|Between spr1161 (+ strand) and spr116 2 (htpX) (- strand)|S.pneumoniae|R6|NC_003098.1|IG
atttgcaacatagcagataggtggggcaaaaacacaattttaggagaaaaagaagtaaatcttcccatagtaaaacgcataatatcaagttttcacacctgatattatgcgtttttcagattttaaagacttttttccagccttcatt

SEQ ID NO: 6073 - DNA, 61 bp, Streptococcus pneumoniae
  misc_feature (1)..(61): tiling:Spneumo1:WAN02497G; WAN024DO0-rc   TIGR4.IG_347.1.1 .1.1||||336444..336504|-|61 bp|Between SP0360 (+ strand) a nd SP0366 (+ strand)|S.pneumoniae|TIGR4|NC_003028.1|IG-rc
attttactcttgttctactaagaattaatcatctcgttttgatttattaaaaatatacaat

SEQ ID NO: 6074 - DNA, 65 bp, Streptococcus pneumoniae
  misc_feature (1)..(65): tiling:Spneumo1:WAN0249CB; WAN024EEO   R6.IG_1205.1||||116 6915..1166979|+|65 bp|Between spr1164 (gidB) (+ strand) an d spr1165 (pyrP) (+ strand)|S.pneumoniae|R6|NC_003098.1|IG
atttttaagtaaaaaaatatttacaaaatcaacctcgctctcttatttttaggctcgggaaaaaa

SEQ ID NO: 6075 - DNA, 285 bp, Streptococcus pneumoniae
  misc_feature (1)..(285): tiling:Spneumo1:WAN02497X; WAN02481Z   TIGR4.IG_2026.1|||| 2000723..2001007|+|285 bp|Between SP2092 (+ strand) and SP 2093 (+ strand)|S.pneumoniae|TIGR4|NC_003028.1|IG
caaaatcatttatataaagattagccacacataaattaagtaaattctctacttgaatctacctatttaataaaaactaatgaaaacgctatacttgtatttgttttttcattaaaataagagtagaataaattagtatagtaaaacaaaaaagcaccgaatcggtgcgcactttttcaagttgtgtacggacaaagccttattttaactttgctatgttgtttctaatggttccaaaataataaataattttaaatttgacttaactgttggagtagtcatggt

SEQ ID NO: 6076 - DNA, 135 bp, Streptococcus pneumoniae
  misc_feature (1)..(135): tiling:Spneumo1:WAN02497J; WAN024E02-rc   TIGR4.IG_288.2|| ||273366..273500|-|135 bp|Between SP0296 (- strand) and SP 0297 (- strand)|S.pneumoniae|TIGR4|NC_003028.1|IG-rc
caaagtttggcatcctcagtaatccagaacaatttgtttttacatatatcgacacaaaaggaaacatcaacaagcctttacatgccgactatctgaacaataaaatgaaaagcattagaaagccgacataaagaa

SEQ ID NO: 6077 - DNA, 72 bp, Streptococcus pneumoniae
  misc_feature (1)..(72): tiling:Spneumo1:WAN02499F; WAN024D0K   TIGR4.IG_540.2.2.2. 2.1||||539761..539832|+|72 bp|Between SP0571 (+ strand) an d SP0573 (+ strand)|S.pneumoniae|TIGR4|NC_003028.1|IG
caaatattatagagcccaaagttttaggtcgcttgataatatgcgttttttgaattttatagactgctcgtt

SEQ ID NO: 6078 - DNA, 99 bp, Streptococcus pneumoniae
  misc_feature (1)..(99): tiling:Spneumo1:WAN02498X; WAN024B1D   TIGR4.IG_1059||||10 65788..1065886|+|99 bp|Between SP1131 (+ strand) and SP113 2 (+ strand)|S.pneumoniae|TIGR4|NC_003028.1|IG
caaggggacaaacccctttgtaaataatctcctcttattttatcaaaattagaggaaaatgacaacttaatttataaaaaggaaaaatggaggatataa

SEQ ID NO: 6079 - DNA, 229 bp, Streptococcus pneumoniae
  misc_feature (1)..(229): tiling:Spneumo1:WAN0249C7; WAN024EE9   R6.IG_1242.2.2||||1 194857..1195085|+|229 bp|Between D (transposase) (+ strand ) and spr1199 (- strand)|S.pneumoniae|R6|NC_003098.1|IG
caccatttgttaagcgttttctacaattcgctattttttgaatcaattttcaaaaatcattatatttctctcctaacctaaaagtactttcagaacattacccatagatttttattatttcctcaatgttttattacataagtttatatctaataatttttcatttaatatatttattataaaatttaataagattccacgtttctaataattatactcgtggtgtcag

SEQ ID NO: 6080 - DNA, 192 bp, Streptococcus pneumoniae
  misc_feature (1)..(192): tiling:Spneumo1:WAN02498T; WAN024B19   TIGR4.IG_1074.1.1|| ||1073318..1073509|+|192 bp|Between SP1146 (+ strand) and SP1148 (- strand)|S.pneumoniae|TIGR4|NC_003028.1|IG
cacccgtaaaggtgctattttcttgcctgctgaactcatcgatttaataccttttttactccccctctagtatattgtaattgtttgtactttacattttagaatgaaaaaggtaaaaagtatattagtaatttagcgtatttaattgaactatttgatattatgataaccttaaaaaataaaatagttcag

SEQ ID NO: 6081 - DNA, 52 bp, Streptococcus pneumoniae
  misc_feature (1)..(52): tiling:Spneumo1:WAN0249BO; WAN024E54   R6.IG_2107.1||||187 8944..1878995|+|52 bp|Between spr1900 (+ strand) and spr19 01 (- strand)|S.pneumoniae|R6|NC_003098.1|IG
cagaataagtcaccttattttaaaaatcgagcatcaaaccaagggaggagtc

SEQ ID NO: 6082 - DNA, 129 bp, Streptococcus pneumoniae
  misc_feature (1)..(129): tiling:Spneumo1:WAN0249BE; WAN024EOM-rc   R6.IG_439.2||||4 14675..414803|-|129 bp|Between spr0415 (pfl) (+ strand) an d spr0416 (- strand)|S.pneumoniae|R6|NC_003098.1|IG-rc
cagtatcaaacaagatgattgtcaattagcccgtcgtcttatttttatgatggaatgaaataaaatcggaacaaatcacttagagaattccagtcaatttctagcactgtttgagacgtttcagcgaac

SEQ ID NO: 6083 - DNA, 85 bp, Streptococcus pneumoniae
  misc_feature (1)..(85): tiling:Spneumo1:WAN024973; WAN024D0M-rc   TIGR4.IG_539.1|| ||537156..537240|-|85 bp|Between SP0570 (+ strand) and SP0 571 (+ strand)|S.pneumoniae|TIGR4|NC_003028.1|IG-rc
cattacctgagaagaaagttgcaatgttgtttttggtgcgggtttgaatttaaaaaatttgttatgtagtacctaatctaaggaa

SEQ ID NO: 6084 - DNA, 50 bp, Streptococcus pneumoniae
  misc_feature (1)..(50): tiling:Spneumo1:WAN0249AS; WAN024EBM-rc   R6.IG_1446.1|||| 1380028..1380077|-|50 bp|Between spr1402 (+ strand) and sp r1403 (- strand)|S.pneumoniae|R6|NC_003098.1|IG-rc
ccctattaggtggctataattgatttagactttctaaaattttctatttt

SEQ ID NO: 6085 - DNA, 210 bp, Streptococcus pneumoniae
  misc_feature (1)..(210): tiling:Spneumo1:WAN0249AM; WAN024EAN-rc   R6.IG_1531.2.1|| ||1461768..1461977|-|210 bp|Between spr1484 (- strand) and spr1485 (+ strand)|S.pneumoniae|R6|NC_003098.1|IG-rc
cctacaggtattttagaatgtatattgcttagatattccttattttattagctttttaaggtattaaagtagttatataagtttatgaagggtatcctatcctgcacgactaattttgagttcgaaactgaggagtttataactcaaaatttcgattaaatcagcatttaacgatagtatgtttgtcataaaatgataaatttttagatt

SEQ ID NO: 6086 - DNA, 80 bp, Streptococcus pneumoniae
  misc_feature (1)..(80): tiling:Spneumo1:WAN0249A5; WAN024E31   TIGR4.IG_120.1.2||| |124754..124833|+|80 bp|Between SP0120 (+ strand) and SP01 21 (- strand)|S.pneumoniae|TIGR4|NC_003028.1|IG
cctcccatagtttcccgaactatgggagctaactcaagttatgctttcgcttagccttctagtctgatttcgatttttat

SEQ ID NO: 6087 - DNA, 117 bp, Streptococcus pneumoniae
  misc_feature (1)..(117): tiling:Spneumo1:WAN02497F; WAN024DK1-rc   TIGR4.IG_359|||| 357985..358101|-|117 bp|Between SP0378 (+ strand) and SP03 79 (- strand)|S.pneumoniae|TIGR4|NC_003028.1|IG-rc
cgaaaaagcatgtgtagatttcacatgcttttaatctccccaatcgtcaggtcaagtacaacaaagtcacttctttgattaagcgagtgttctaatataattataagcgccctgtca

SEQ ID NO: 6088 - DNA, 81 bp, Streptococcus pneumoniae
  misc_feature (1)..(81): tiling:Spneumo1:WAN0249AW; WAN024EEA-rc   R6.IG_1238||||11 92467..1192547|-|81 bp|Between spr1194 (appA) (- strand) a nd spr1195 (- strand)|S.pneumoniae|R6|NC_003098.1|IG-rc
cgaagagtttaaatttttaattactgcaatacttacttaatcacataaataattacttaatacaaataaaggagtattaaa

SEQ ID NO: 6089 - DNA, 102 bp, Streptococcus pneumoniae
  misc_feature (1)..(102): tiling:Spneumo1:WAN0249B5; WAN024EHE-rc   R6.IG_999.2||||9 41791..941892|-|102 bp|Between spr0960 (mutR) (- strand) a nd spr0961 (rffD) (+ strand)|S.pneumoniae|R6|NC_003098.1|I G-rc
cgtatgttaaactttctacgttattttattcataatttagtcataatcaatagaattagctttagatactctaaagacttaggtgtacacctaagcatttta

SEQ ID NO: 6090 - DNA, 70 bp, Streptococcus pneumoniae
  misc_feature (1)..(70): tiling:Spneumo1:WAN024983; WAN024917   TIGR4.IG_1745||||17 58973..1759042|+|70 bp|Between SP1851 (- strand) and SP185 2 (- strand)|S.pneumoniae|TIGR4|NC_003028.1|IG
cgtttcctcctgatatttcaaacgacactatgatactactttttataggactgatgcaaggagaaagctc

SEQ ID NO: 6091 - DNA, 164 bp, Streptococcus pneumoniae
  misc_feature (1)..(164): tiling:Spneumo1:WAN024979; WAN024D17-rc   TIGR4.IG_491.1.2 .1||||501332..501495|-|164 bp|Between SP0519 (+ strand) an d SP0520 (- strand)|S.pneumoniae|TIGR4|NC_003028.1|IG-rc
ctaaatcgaagactttctgccgtaatgaaaacacctgaaacagcttggtttcagctgtccggaaactttaaaacttaggttcaaagtttaggtatggaacttcgaaggaggtcactaccgtccgtcattacttaggaaagtcttaaaaaatctataaagtaaaa

SEQ ID NO: 6092 - DNA, 67 bp, Streptococcus pneumoniae
  misc_feature (1)..(67): tiling:Spneumo1:WAN0249C5; WAN024ECK   R6.IG_1372.1.2||||1 316433..1316499|+|67 bp|Between spr1328 (glyS) (- strand) and spr1329 (glyQ) (- strand)|S.pneumoniae|R6|NC_003098.1| IG
ctaactaactctgtgagtctgtatggaaatccaatgctaaatttatcaagatttccaacaatctcat

SEQ ID NO: 6093 - DNA, 658 bp, Streptococcus pneumoniae
  misc_feature (1)..(658): tiling:Spneumo1:WAN0249B3; WAN024EHC-rc   R6.IG_1010||||95 4595..955252|-|658 bp|Between spr0971 (mefE) (+ strand) an d spr0972 (+ strand)|S.pneumoniae|R6|NC_003098.1|IG-rc
ctagctttctcctgagaaaagtataatatataaaactaagaaatcattcaaagtgtcctaactggacattttgaactaaaattaatttattaaacatatctcataagcatatctattataggtaagacaatattaagaaagacggtcaaaatctattaaccgtctaaaaatgttataagctattaaaaaatcagcagtaatccagtaacaaaagtcacataattttgttaaggaagggattaatgatgtccagattactactaaccagcaaattgaaaaatggtcaacatgatatttctaatatgaatctcttactttcagaacctaaaagttgaataatagccactccctacttatcaataaaattatccgttgcattaacagatgtatataaaccaatccatggatttcaaagcaattaactagactttatttgtcaataaccacaaaattagattagaaaaatcattaaaaattaattggagtcctttatgatgctttttaaataaaagtaatacttctcaatattttaactgaactaaagtaatagcataatgatatcttgattgtattcttctaaaacagattgcccttcacattcaactgtgattgattaaattccaaaaatatattccaaaggcgctctaaattctctata

SEQ ID NO: 6094 - DNA, 154 bp, Streptococcus pneumoniae
  misc_feature (1)..(154): tiling:Spneumo1:WAN02499R; WAN024D31   TIGR4.IG_435.2||||4 38172..438325|+|154 bp|Between SP0461 (- strand) and SP046 2 (+ strand)|S.pneumoniae|TIGR4|NC_003028.1|IG
ctataacgcacttttatacgcttttgctacgtttgttagtgaacggattaactcagtgagataaattttatcagaacataagtaatccgtttcttcgtgtatacagattgaaagtacctatgaatcatagaaggattaacttgttctatgaata

SEQ ID NO: 6095 - DNA, 75 bp, Streptococcus pneumoniae
  misc_feature (1)..(75): tiling:Spneumo1:WAN02496Q; WAN024C0L-rc   TIGR4.IG_841.1.1 ||||852841..852915|-|75 bp|Between SP0897 (+ strand) and S P0899 (+ strand)|S.pneumoniae|TIGR4|NC_003028.1|IG-rc
ctatttcttaccctctatacaaaaagcctatcacacaagctctaaagctggatatgataggtttttatatttttc

SEQ ID NO: 6096 - DNA, 89 bp, Streptococcus pneumoniae
  misc_feature (1)..(89): tiling:Spneumo1:WAN0249BQ; WAN024E8V   R6.IG_1668||||15939 06..1593994|+|89 bp|Between spr1619 (- strand) and spr1620 (- strand)|S.pneumoniae|R6|NC_003098.1|IG
ctcctttaatcatatatatcaaactaggctattaacaagaaaggggaaggtagttccaaacattttccttccaccttcttttttacaga

SEQ ID NO: 6097 - DNA, 192 bp, Streptococcus pneumoniae
  misc_feature (1)..(192): tiling:Spneumo1:WAN02496F; WAN024B19-rc   TIGR4.IG_1074.1. 1||||1073318..1073509|-|192 bp|Between SP1146 (+ strand) a nd SP1148 (- strand)|S.pneumoniae|TIGR4|NC_003028.1|IG-rc
ctgaactattttattttttaaggttatcataatatcaaatagttcaattaaatacgctaaattactaatatactttttacctttttcattctaaaatgtaaagtacaaacaattacaatatactagagggggagtaaaaaaggtattaaatcgatgagttcagcaggcaagaaaatagcacctttacgggtg

SEQ ID NO: 6098 - DNA, 229 bp, Streptococcus pneumoniae
  misc_feature (1)..(229): tiling:Spneumo1:WAN0249AV; WAN024EE9-rc   R6.IG_1242.2.2|| ||1194857..1195085|-|229 bp|Between D (transposase) (+ str and) and spr1199 (- strand)|S.pneumoniae|R6|NC_003098.1|IG -rc
ctgacaccacgagtataattattagaaacgtggaatcttattaaattttataataaatatattaaatgaaaaattattagatataaacttatgtaataaaacattgaggaaataataaaaatctatgggtaatgttctgaaagtacttttaggttaggagagaaatataatgatttttgaaaattgattcaaaaaatagcgaattgtagaaaacgcttaacaaatggtg

SEQ ID NO: 6099 - DNA, 79 bp, Streptococcus pneumoniae
  misc_feature (1)..(79): tiling:Spneumo1:WAN02497N; WAN024E1W-rc   TIGR4.IG_136.2.2 .2.2||||139760..139838|-|79 bp|Between SP0139 (+ strand) a nd SP0141 (+ strand)|S.pneumoniae|TIGR4|NC_003028.1|IG-rc
ctgaccacctcctagcttttgcatattatatcattatttacaatcatttgtcaaaatattctgatagttagaaaaaata

SEQ ID NO: 6100 - DNA, 59 bp, Streptococcus pneumoniae
  misc_feature (1)..(59): tiling:Spneumo1:WAN02496S; WAN024C0R-rc   TIGR4.IG_831|||| 837701..837759|-|59 bp|Between SP0887 (+ strand) and SP088 8 (+ strand)|S.pneumoniae|TIGR4|NC_003028.1|IG-rc
ctgatttcctcctttgaagtattataacaaatcattaccgtaattacaatggcagaata

SEQ ID NO: 6101 - DNA, 114 bp, Streptococcus pneumoniae
  misc_feature (1)..(114): tiling:Spneumo1:WAN024BJJ; WAN023SLW NC_003098.1_629||||49 9321..499434|+|114 bp|Glimmer 2.02 orf prediction|S.pneumo niae|R6|NC_003098.1|ORF
ctggatcgtttaaagtgttttttgactttcgaagaggcagaagctacccgttatacggcatcaggtcgtgaaagggtaataggctatgtcgggcagtacggtggggctaagaaa

SEQ ID NO: 6102 - DNA, 102 bp, Streptococcus pneumoniae
  misc_feature (1)..(102): tiling:Spneumo1:WAN0249BI; WAN0247G0-rc   R6.IG_121.2||||1 08404..108505|-|102 bp|Between spr0100 (+ strand) and spr0 101 (+ strand)|S.pneumoniae|R6|NC_003098.1|IG-rc
cttattcataacaaagccttctttatgtttattcttttttattgtataaataatactcctatactcatcctttgtcaagcctaaattgaaaaaattttcaat

SEQ ID NO: 6103 - DNA, 156 bp, Streptococcus pneumoniae
  misc_feature (1)..(156): tiling:Spneumo1:WAN02496B; WAN024AN0-rc   TIGR4.IG_1242||| |1248099..1248254|-|156 bp|Between SP1324 (- strand) and S P1325 (- strand)|S.pneumoniae|TIGR4|NC_003028.1|IG-rc
cttttgtaaaacagaatagtaaattcttgtcattatataatttctaaagttctgtgatacaactcattgaataaagaaatagagatgggactgggataatgcccagtcccattttttatcaaaaagtaatgagatcaaaaatgtgggagtgttgaa

SEQ ID NO: 6104 - DNA, 75 bp, Streptococcus pneumoniae
  misc_feature (1)..(75): tiling:Spneumo1:WAN024996; WAN024C0L   TIGR4.IG_841.1.1||| |852841..852915|+|75 bp|Between SP0897 (+ strand) and SP08 99 (+ strand)|S.pneumoniae|TIGR4|NC_003028.1|IG
gaaaaatataaaaacctatcatatccagctttagagcttgtgtgataggctttttgtatagagggtaagaaatag

SEQ ID NO: 6105 - DNA, 288 bp, Streptococcus pneumoniae
  misc_feature (1)..(288): tiling:Spneumo1:WAN024964; WAN024A01-rc   TIGR4.IG_1517.1. 2.2.2||||1515297..1515584|-|288 bp|Between SP1612 (+ stran d) and SP1616 (- strand)|S.pneumoniae|TIGR4|NC_003028.1|IG -rc
gaaaccaattacaatgaagatacagctgttgtcagactagcagatgtagtgatagacactaatcagatgattggttatttaaaaactgtaatgaaaatgtaataatttatctacgaaagttatagtagatagtatacacaatagagtataccctgaaacggttgcgaagtacgctaatcactttgctactgatctagatagtttctttaatcaataaacacagcatccacagattgacttaggatattgtaagttttttgaaagctagagagaaggtctctaaaatta

SEQ ID NO: 6106 - DNA, 94 bp, Streptococcus pneumoniae
  misc_feature (1)..(94): tiling:Spneumo1:WAN02495W; WAN024951-rc   TIGR4.IG_1667.1. 1.2||||1692595..1692688|-|94 bp|Between SP1772 (- strand) and SP1774 (+ strand)|S.pneumoniae|TIGR4|NC_003028.1|IG-rc
gaagggtgaatatagagaaacagaccgagtaactcggttcaaattaatcaaatcagggaagcattggctacgggcctcgacttctctttttggc

SEQ ID NO: 6107 - DNA, 382 bp, Streptococcus pneumoniae
  misc_feature (1)..(382): tiling:Spneumo1:WAN0249B4; WAN024EHD-rc   R6.IG_1009||||95 3001..953382|-|382 bp|Between spr0970 (+ strand) and spr09 71 (mefE) (+ strand)|S.pneumoniae|R6|NC_003098.1|IG-rc
gaataactccttaattatgaatattttcttttatcgtaataatcattttttcaaaaaatgattatgatcctcatcttagttcattcataaatatgatttaaccttaatatgttattgtaaagtattgaacgtaaacaatactcataaagtcaaataaaataatcctaaaaattcacaagttgaaaagatttcaatttgttgagccaactatcccaaaatacttctgtcataattacagtgtcgaaatgtatactttaagaattcttacattaatcattagatcagttgaaacctaggagctaacactaatatctaactaattccttatgagattactgacatgcgatgaaacttaagttatatggcaatgaagagtttctct

SEQ ID NO: 6108 - DNA, 68 bp, Streptococcus pneumoniae
  misc_feature (1)..(68): tiling:Spneumo1:WAN024977; WAN024D11-rc   TIGR4.IG_503|||| 512652..512719|-|68 bp|Between SP0532 (+ strand) and SP053 3 (+ strand)|S.pneumoniae|TIGR4|NC_003028.1|IG-rc
gacaaatactccttttttaaaaaactaaaataaatcagaatagaatcctcataattttactataagtc

SEQ ID NO: 6109 - DNA, 54 bp, Streptococcus pneumoniae
  misc_feature (1)..(54): tiling:Spneumo1:WAN02495X; WAN024960-rc   TIGR4.IG_1666||| |1678168..1678221|-|54 bp|Between SP1771 (- strand) and SP 1772 (- strand)|S.pneumoniae|TIGR4|NC_003028.1|IG-rc
gacaacctgtaaagttaggctaaactaactcgcgcacataaatcaaggagaaaa

SEQ ID NO: 6110 - DNA, 94 bp, Streptococcus pneumoniae
  misc_feature (1)..(94): tiling:Spneumo1:WAN0249BY; WAN024EAP   R6.IG_1530||||14607 14..1460807|+|94 bp|Between spr1483 (+ strand) and spr1484 (- strand)|S.pneumoniae|R6|NC_003098.1|IG
gacagctcgttctccagaaatattcattaactttcatttttatacttttcctttcgattttcaaaaacaaggggagggattaacctcccttata

SEQ ID NO: 6111 - DNA, 52 bp, Streptococcus pneumoniae
  misc_feature (1)..(52): tiling:Spneumo1:WAN0249AF; WAN024E54-rc   R6.IG_2107.1|||| 1878944..1878995|-|52 bp|Between spr1900 (+ strand) and sp r1901 (- strand)|S.pneumoniae|R6|NC_003098.1|IG-rc
gactcctcccttggtttgatgctcgatttttaaaataaggtgacttattctg

SEQ ID NO: 6112 - DNA, 309 bp, Streptococcus pneumoniae
  misc_feature (1)..(309): tiling:Spneumo1:WAN024966; WAN024A03-rc   TIGR4.IG_1515.2| |||1512372..1512680|-|309 bp|Between SP1610 (- strand) and SP1611 (+ strand)|S.pneumoniae|TIGR4|NC_003028.1|IG-rc
gactgtatcctcctgttatgataaattccagaaagcatagagcaaattcgtggttcgtctgactaaatttcttatctgaacaccaccttcaaatacaaattttagtcaaacttttattttttctaactttctaattatattctaccatgtgtttttatatgtcaagaattttctgaataaactgtttattttttattttttgacatttttgcaaattgtttaaaatctttcaattggattcacttattactttaggacattgaaacttctttcgccagaggtgcttatattactgggaagttgaagatt

SEQ ID NO: 6113 - DNA, 68 bp, Streptococcus pneumoniae
  misc_feature (1)..(68): tiling:Spneumo1:WAN02499L; WAN024D11   TIGR4.IG_503||||512 652..512719|+|68 bp|Between SP0532 (+ strand) and SP0533 ( + strand)|S.pneumoniae|TIGR4|NC_003028.1|IG
gacttatagtaaaattatgaggattctattctgatttattttagttttttaaaaaaggagtatttgtc

SEQ ID NO: 6114 - DNA, 93 bp, Streptococcus pneumoniae
  misc_feature (1)..(93): tiling:Spneumo1:WAN0249BT; WAN024E9N   R6.IG_1596.2||||153 2077..1532169|+|93 bp|Between spr1549 (- strand) and spr15 50 (+ strand)|S.pneumoniae|R6|NC_003098.1|IG
gactttttccctcctttttgatataataataccacctttttctacgttttttataaatgtagaaaatattcacatttttctaggaggaacaat

SEQ ID NO: 6115 - DNA, 90 bp, Streptococcus pneumoniae
  misc_feature (1)..(90): tiling:Spneumo1:WAN0249CK; WAN024EMV   R6.IG_560.1||||5350 25..535114|+|90 bp|Between spr0536 (- strand) and spr0537 (recJ) (+ strand)|S.pneumoniae|R6|NC_003098.1|IG
gagagatctcctttgttttagattttataacacgattctacagtgaaagaatgttcttgtcaaaccatatctgaaaaaaatcactatagt

SEQ ID NO: 6116 - DNA, 99 bp, Streptococcus pneumoniae
  misc_feature (1)..(99): tiling:Spneumo1:WAN0249AL; WAN024E9P-rc   R6.IG_1592||||15 29251..1529349|-|99 bp|Between spr1545 (- strand) and spr1 546 (- strand)|S.pneumoniae|R6|NC_003098.1|IG-rc
gagatggcttatggcacatctaaaatcatttattacacgctattctaaggtctatattggtttagttctgttgatctggattgctttcttctttcttcc

SEQ ID NO: 6117 - DNA, 303 bp, Streptococcus pneumoniae
  misc_feature (1)..(303): tiling:Spneumo1:WAN024994; WAN024B90   TIGR4.IG_990||||995 105..995407|+|303 bp|Between SP1058 (+ strand) and SP1059 (+ strand)|S.pneumoniae|TIGR4|NC_003028.1|IG
gagattatagtcacttaaaaatcaaaaaattataaaatttttgttttacttaaatagatattttatgatgggcgaagtttttataactagttcctataagtacagaaacctattttaatttactaatttcaaaacaattttttgagatatatgtaattaaatctaaattaagctttaaaaaattatttttagcaatttgattttgaaagtgtcatgcagcaatatgaaagcgtagaatagaggtgtttccaatgtacaagtaagttttgattccaaataaagtaatagaaaaggagctatata

SEQ ID NO: 6118 - DNA, 70 bp, Streptococcus pneumoniae
  misc_feature (1)..(70): tiling:Spneumo1:WAN02495R; WAN024917-rc   TIGR4.IG_1745||| |1758973..1759042|-|70 bp|Between SP1851 (- strand) and SP 1852 (- strand)|S.pneumoniae|TIGR4|NC_003028.1|IG-rc
gagctttctccttgcatcagtcctataaaaagtagtatcatagtgtcgtttgaaatatcaggaggaaacg

SEQ ID NO: 6119 - DNA, 159 bp, Streptococcus pneumoniae
  misc_feature (1)..(159): tiling:Spneumo1:WAN0249B7; WAN024ELD-rc   R6.IG_672||||655 972..656130|-|159 bp|Between transporter (NSS) (- strand) and spr0649 (mta) (+ strand)|S.pneumoniae|R6|NC_003098.1|I G-rc
gagtcctatcttgtcatagtgatgcagggcagggtcttgacagagacacctgaaagctgcgcagcttcttttatatggtacatgatttcctccttacaatgatagtataacccctccccttaggtcagagtcaagcgtttttgagaaaggtgtgaaaac

SEQ ID NO: 6120 - DNA, 59 bp, Streptococcus pneumoniae
  misc_feature (1)..(59): tiling:Spneumo1:WAN02498F; WAN024A00   TIGR4.IG_1522.2.1|| ||1522056..1522114|+|59 bp|Between SP1620 (- strand) and S P1622 (+ strand)|S.pneumoniae|TIGR4|NC_003028.1|IG
gatacacctcctttatgaatccattatatcgctttcaaaaaataatatacttcgcattt

SEQ ID NO: 6121 - DNA, 57 bp, Streptococcus pneumoniae
  misc_feature (1)..(57): tiling:Spneumo1:WAN02496P; WAN024C0C-rc   TIGR4.IG_851|||| 863402..863458|-|57 bp|Between SP0909 (+ strand) and SP091 0 (+ strand)|S.pneumoniae|TIGR4|NC_003028.1|IG-rc
gatatttcctctttctgctaggttagactagtatatcacggataggctcggctttca

SEQ ID NO: 6122 - DNA, 54 bp, Streptococcus pneumoniae
  misc_feature (1)..(54): tiling:Spneumo1:WAN02497Z; WAN0248K1   TIGR4.IG_1933||||19 15267..1915320|+|54 bp|Between SP2007 (- strand) and SP200 8 (- strand)|S.pneumoniae|TIGR4|NC_003028.1|IG
gatatttcctttcataaatagaagatttctagtgtaattaactccactaatctt

SEQ ID NO: 6123 - DNA, 146 bp, Streptococcus pneumoniae
  misc_feature (1)..(146): tiling:Spneumo1:WAN024978; WAN024D12-rc   TIGR4.IG_502.2|| ||512236..512381|-|146 bp|Between SP0531 (+ strand) and SP 0532 (+ strand)|S.pneumoniae|TIGR4|NC_003028.1|IG-rc
gatgaatacctcctttttattttcaatttgttaccaaagtcttaaattcaataaacaaatagattttttatagtatctttttgattttcttaaaaaagtatatacgtctactatcttcttaaaggtagcagtacctattttttagt

SEQ ID NO: 6124 - DNA, 339 bp, Streptococcus pneumoniae
  misc_feature (1)..(339): tiling:Spneumo1:WAN0249C6; WAN024EE8   R6.IG_1243.1||||119 5308..1195646|+|339 bp|Between spr1199 (- strand) and spr1 200 (- strand)|S.pneumoniae|R6|NC_003098.1|IG
gattaactcctttatctagtttgtcgcatcgtttgagtctggaaacgataaactccgtgtctgttagaaaattctcacacacgtcttgtgccagttgcccttcacagggaaatactctcagtccctacttacacaggcacgctaatcaagacggagtggattcaattttcaaagaacaggtagctttattatagataagagtagttgaaatttttatcacattttttatttttctgtagagctaaattcatactaatcaaagagtttgaaataaatttgagtattattaactaacgttcttcgtctaaaaatacagtagggaatatttcattcttttat

SEQ ID NO: 6125 - DNA, 78 bp, Streptococcus pneumoniae
  misc_feature (1)..(78): tiling:Spneumo1:WAN0249A9; WAN024EF0   TIGR4.IG_74.1||||79 332..79409|+|78 bp|Between SP0071 (+ strand) and SP0072 (+ strand)|S.pneumoniae|TIGR4|NC_003028.1|IG
gattgtagagtttcattgttgagtagtgtttcttgtaaggatgaggagtcagatgacaaatcgactcctttttcttat

SEQ ID NO: 6126 - DNA, 223 bp, Streptococcus pneumoniae
  misc_feature (1)..(223): tiling:Spneumo1:WAN02497C; WAN024D30-rc   TIGR4.IG_436|||| 441008..441230|-|223 bp|Between SP0462 (+ strand) and SP04 63 (+ strand)|S.pneumoniae|TIGR4|NC_003028.1|IG-rc
gatttctccttattcatatctcttaaaatcaactgtgagcaatgtaatgaattacacatgacaataataatcctttttctgtgcaagttttcgaaaacatctcccctttcaatgatagtttacttacgaataaaacaggtttcaccaagtaaacttaaatctcttcttgagtgctacttcttaaaagtatcgttcagaacatagatattatcatttctacact

SEQ ID NO: 6127 - DNA, 250 bp, Streptococcus pneumoniae
  misc_feature (1)..(250): tiling:Spneumo1:WAN024987; WAN02491W   TIGR4.IG_1688||||17 09306..1709555|+|250 bp|Between SP1793 (- strand) and SP17 94 (- strand)|S.pneumoniae|TIGR4|NC_003028.1|IG
gatttgtttctccttttctataattcaagttaaaatatttttattatacgttttatactattataactggtggtgctctcaattccatttatctacctctctaacaaatacatcattgattaacactttttagagtaaaaaaatatgtttttgtattcgtctttgattaacacataaggacgaaaaaaatttagaaagattcctttctaagcatattataccgaaatccagataaagtgtcaatacttga

SEQ ID NO: 6128 - DNA, 67 bp, Streptococcus pneumoniae
  misc_feature (1)..(67): tiling:Spneumo1:WAN024986; WAN02491V   TIGR4.IG_1689.1|||| 1709982..1710048|+|67 bp|Between SP1794 (- strand) and SP1 795 (- strand)|S.pneumoniae|TIGR4|NC_003028.1|IG
gcaagtgttaatctataattaactatactatattttaaattctttttcaagcaataagtcgggcaat

SEQ ID NO: 6129 - DNA, 214 bp, Streptococcus pneumoniae
  misc_feature (1)..(214): tiling:Spneumo1:WAN0249AI; WAN024E97-rc   R6.IG_1639||||15 71609..1571822|-|214 bp|Between spr1593 (- strand) and spr 1594 (- strand)|S.pneumoniae|R6|NC_003098.1|IG-rc
gcacagaaaggaaagggttgtctgaatttgggcgagcaaggcgagccccatagagaatacttttcgctgtggtgtaagttggtacaagtgattgtaccaactgcggaaaatttgagaccttaggctcaaattttagtcatgaaagtccgaaggactttgctgacgtccgtcaccacttcagaaaagtataaaaagaaactcttttaaagaaatt

SEQ ID NO: 6130 - DNA, 94 bp, Streptococcus pneumoniae
  misc_feature (1)..(94): tiling:Spneumo1:WAN02498A; WAN024951   TIGR4.IG_1667.1.1.2 ||||1692595..1692688|+|94 bp|Between SP1772 (- strand) and SP1774 (+ strand)|S.pneumoniae|TIGR4|NC_003028.1|IG
gccaaaaagagaagtcgaggcccgtagccaatgcttccctgatttgattaatttgaaccgagttactcggtctgtttctctatattcacccttc

SEQ ID NO: 6131 - DNA, 99 bp, Streptococcus pneumoniae
  misc_feature (1)..(99): tiling:Spneumo1:WAN02497H; WAN024DO1-rc   TIGR4.IG_345|||| 333930..334028|-|99 bp|Between SP0358 (+ strand) and SP035 9 (+ strand)|S.pneumoniae|TIGR4|NC_003028.1|IG-rc
gccccctccttattttatatgctgttttaatagttaactctctcgacaatacatgatacattatatatccttgataattttaatgtatcttaaaagatt

SEQ ID NO: 6132 - DNA, 51 bp, Streptococcus pneumoniae
  misc_feature (1)..(51): tiling:Spneumo1:WAN02496Y; WAN024CS1-rc   TIGR4.IG_619.2|| ||631602..631652|-|51 bp|Between SP0660 (+ strand) and SP0 661 (+ strand)|S.pneumoniae|TIGR4|NC_003028.1|IG-rc
gctctgctcctttaccacttactagtatcagtatagcaaaattctcctcta

SEQ ID NO: 6133 - DNA, 72 bp, Streptococcus pneumoniae
  misc_feature (1)..(72): tiling:Spneumo1:WAN024ASV; WAN023STZ BD003842.1_5||||3305. .3406|-|102 bp|Glimmer 2.02 orf prediction|S.pneumoniae|AT CC55840|BD003842.1|ORF
  misc_feature (52)..(52): n is a, c, g, or t
gctgcgggcagctcaaaacactgttttaaggttgtagatggaactgacgaangtcarctcaaaacactgttt

SEQ ID NO: 6134 - DNA, 50 bp, Streptococcus pneumoniae
  misc_feature (1)..(50): tiling:Spneumo1:WAN0249BC; WAN024EOJ-rc   R6.IG_442||||416 196..416245|-|50 bp|Between spr0418 (+ strand) and spr0419 (- strand)|S.pneumoniae|R6|NC_003098.1|IG-rc
gctttaaacgaaatatgtcagtgttttggcattcctagtcttcatatcat

SEQ ID NO: 6135 - DNA, 99 bp, Streptococcus pneumoniae
  misc_feature (1)..(99): tiling:Spneumo1:WAN0249BV; WAN024E9P   R6.IG_1592||||15292 51..1529349|+|99 bp|Between spr1545 (- strand) and spr1546 (- strand)|S.pneumoniae|R6|NC_003098.1|IG
ggaagaaagaagaaagcaatccagatcaacagaactaaaccaatatagaccttagaatagcgtgtaataaatgattttagatgtgccataagccatctc

SEQ ID NO: 6136 - DNA, 64 bp, Streptococcus pneumoniae
  misc_feature (1)..(64): tiling:Spneumo1:WAN02496C; WAN024AN1-rc   TIGR4.IG_1237||| |1243708..1243771|-|64 bp|Between SP1319 (- strand) and SP 1320 (- strand)|S.pneumoniae|TIGR4|NC_003028.1|IG-rc
ggatgaaattggttaatccttcttagaaatttggagtattccaataaaattagaaaggtatttt

SEQ ID NO: 6137 - DNA, 161 bp, Streptococcus pneumoniae
  misc_feature (1)..(161): tiling:Spneumo1:WAN02497U; WAN024EG0-rc   TIGR4.IG_69||||7 1980..72140|-|161 bp|Between SP0066 (+ strand) and SP0067 (+ strand)|S.pneumoniae|TIGR4|NC_003028.1|IG-rc
ggcactagcaaatacaattttcttcgtttctttcttactccttattgtagtttgaatattatattaacagatagctttcaacgcttagttatatcatattttcctactatttgtctctgcgtacctattcctagctcccaaaagtaggcgcaatgactctt

SEQ ID NO: 6138 - DNA, 117 bp, Streptococcus pneumoniae
  misc_feature (1)..(117): tiling:Spneumo1:WAN02499Z; WAN024E1I   TIGR4.IG_166||||165 469..165585|+|117 bp|Between SP0171 (+ strand) and SP0172 (+ strand)|S.pneumoniae|TIGR4|NC_003028.1|IG
gggctataaactctccgtctacttgtcctgcaacaattgaagtctgctcaaaacgccgtccgctaatcttttcatagactttctcccttttaggagcctagctttctagtttgttct

SEQ ID NO: 6139 - DNA, 89 bp, Streptococcus pneumoniae
  misc_feature (1)..(89): tiling:Spneumo1:WAN02497M; WAN024E1M-rc   TIGR4.IG_157|||| 158760..158848|-|89 bp|Between SP0161 (- strand) and SP016 2 (+ strand)|S.pneumoniae|TIGR4|NC_003028.1|IG-rc
ggttccttgccatgggctataaaatagtgtttaataaggatatacaggaagtgatcacaaccttgtataactgaaaaggagagaaaact

SEQ ID NO: 6140 - DNA, 54 bp, Streptococcus pneumoniae
  misc_feature (1)..(54): tiling:Spneumo1:WAN0249AY; WAN024EEL-rc   R6.IG_1211||||11 73323..1173376|-|54 bp|Between spr1170 (+ strand) and () ( - strand)|S.pneumoniae|R6|NC_003098.1|IG-rc
gtaattagacatcaaaaaccgctcagctgagcggttttagtctattctttcctt

SEQ ID NO: 6141 - DNA, 78 bp, Streptococcus pneumoniae
  misc_feature (1)..(78): tiling:Spneumo1:WAN0249CH; WAN024EKP   R6.IG_723||||700936 ..701013|+|78 bp|Between spr0699 (+ strand) and spr0700 (+ strand)|S.pneumoniae|R6|NC_003098.1|IG
gtagaagaagatgtaaataaatcacagtcaaaaagccgttttaaagcggtttttttgttataatgaaggggagaatta

SEQ ID NO: 6142 - DNA, 65 bp, Streptococcus pneumoniae
  misc_feature (1)..(65): tiling:Spneumo1:WAN02499A; WAN024C1U   TIGR4.IG_742||||746 387..746451|+|65 bp|Between SP0791 (+ strand) and SP0792 ( + strand)|S.pneumoniae|TIGR4|NC_003028.1|IG
gtagtagcaggtttgaataactcacattcaaaaagccgtataaagcggttttttgctataattaa

SEQ ID NO: 6143 - DNA, 148 bp, Streptococcus pneumoniae
  misc_feature (1)..(148): tiling:Spneumo1:WAN02498W; WAN024B1C   TIGR4.IG_1061.2|||| 1066373..1066520|+|148 bp|Between SP1133 (+ strand) and SP 1134 (+ strand)|S.pneumoniae|TIGR4|NC_003028.1|IG
gtcgttataaaggcctctaacacgtttatagagacaagtggtaaataatattaaccactagccaaagccgttttagaggctaaaaaagaggctagaggaggcaattaaaaagtaagctaaccagatttatacaggaggtagaaccgta

SEQ ID NO: 6144 - DNA, 215 bp, Streptococcus pneumoniae
  misc_feature (1)..(215): tiling:Spneumo1:WAN0249CL; WAN024END   R6.IG_524||||499247 ..499461|+|215 bp|Between spr0500 (+ strand) and spr0501 ( + strand)|S.pneumoniae|R6|NC_003098.1|IG
gtgctgctcttatctctgaacgtaagacaaaaaccattatcctagttcataatagacaactcttagaccaatgactggatcgtttaaagtgttttttgactttcgaagaggcagaagctacccgttatacggcatcaggtcgtgaaagggtaataggctatgtcgggcagtacggtggggctaagaaatgactgagtaaactggttgatgttgtt

SEQ ID NO: 6145 - DNA, 81 bp, Streptococcus pneumoniae
  misc_feature (1)..(81): tiling:Spneumo1:WAN024BJ8; WAN023OOT pne80_12||||5482..556 2|+|81 bp|Type 38(1) capsule operon, Glimmer 2.02 orf pred iction|S.pneumoniae||WAN01UCDX|ORF
gtggctaacttcattatagaactttcaaaaaaagaattagcaaattattctggtaaaaagaaatgccgcgctatggaaaaa

SEQ ID NO: 6146 - DNA, 96 bp, Streptococcus pneumoniae
  misc_feature (1)..(96): tiling:Spneumo1:WAN024BJE; WAN023RZ0 contig_1613_1||||11.. 106|+|96 bp|Glimmer 2.02 orf prediction|S.pneumoniae|670|W AN01UDBR|ORF
gtgggattacccactacagaaattatagagccaaaacattccaaagtcttgtctgactctggaatgttttctgttcacagttgttttgtaactgcc

SEQ ID NO: 6147 - DNA, 297 bp, Streptococcus pneumoniae
  misc_feature (1)..(297): tiling:Spneumo1:WAN024BJ7; WAN023OI9 pne88_27||||20822..21 118|+|297 bp|Type 45(1) capsule operon, Glimmer 2.02 orf p rediction|S.pneumoniae||WAN01UCBS|ORF
gtgtcattttctcttctagctcagggtaaagagatgggaattagcatagattatcttggtgttcacaaggatatccagaaaaagaggataggttcgcttttggtgacctttgcacttcgattatctttaactattgactgttggttaccaataaaaggtgttagagttcatgctttagaggatgctgtggaattctatgaaaaactgggttttattgttcctagagatatggtgattaataatagcaaaccggttactatgtattttagtagacttcctgcgaaacaaaatatggta

SEQ ID NO: 6148 - DNA, 282 bp, Streptococcus pneumoniae
  misc_feature (1)..(282): tiling:Spneumo1:WAN024BJM; WAN023LBX 314215_2119a||||11416 58..1141939|-|282 bp|EGAD orf prediction|S.pneumoniae|R6|N C_003098.1|ORF
gtgttgagtgtccaagctgtcatcagggacaaattattgagcgaaaaaccaagcgtaatcgcctattctatggttgcaatcgctatccagaatgtgaatttacctcttgggacaagcctgttggtcgtgactgtccaaaatgtggcaacttcctcatggagaaaaaagtccgtggtggtggcaagcaggttgtttgtagcaaaggcgactacgaggaagaaaagattaaataagaggaggggcccgaaagtaaatttcaggctccttttggttagaacttga

SEQ ID NO: 6149 - DNA, 50 bp, Streptococcus pneumoniae
  misc_feature (1)..(50): tiling:Spneumo1:WAN0249BZ; WAN024EBJ   R6.IG_1448||||13896 21..1389670|+|50 bp|Between spr1404 (+ strand) and spr1405 (- strand)|S.pneumoniae|R6|NC_003098.1|IG
gttatcaaaaaagtcagcataatcgtgctgacttttctcttatctgattt

SEQ ID NO: 6150 - DNA, 264 bp, Streptococcus pneumoniae
  misc_feature (1)..(264): tiling:Spneumo1:WAN02497E; WAN024D40-rc   TIGR4.IG_434|||| 436038..436301|-|264 bp|Between SP0460 (- strand) and SP04 61 (- strand)|S.pneumoniae|TIGR4|NC_003028.1|IG-rc
gttcatcgtactgtctacacacaaaaaggggcttcctaagccatctctattcttatccccatatttcccagttttgggtaaatctgaacagaaaaacacttctgctctctagtttctgctagtgaacaaaagtgttttttctggctctataatttctgtagtgggtaaatcccactgtggagattatagggctttttgagtatcaaaaaagtcccataagacttataatgaaaagcgcctaaacaactcattagaaagtatctt

SEQ ID NO: 6151 - DNA, 129 bp, Streptococcus pneumoniae
  misc_feature (1)..(129): tiling:Spneumo1:WAN0249CP; WAN024EOM   R6.IG_439.2||||4146 75..414803|+|129 bp|Between spr0415 (pfl) (+ strand) and s pr0416 (- strand)|S.pneumoniae|R6|NC_003098.1|IG
gttcgctgaaacgtctcaaacagtgctagaaattgactggaattctctaagtgatttgttccgattttatttcattccatcataaaaataagacgacgggctaattgacaatcatcttgtttgatactg

SEQ ID NO: 6152 - DNA, 138 bp, Streptococcus pneumoniae
  misc_feature (1)..(138): tiling:Spneumo1:WAN0249A6; WAN024E70   TIGR4.IG_112.1||||1 13880..114017|+|138 bp|Between SP0111 (+ strand) and SP011 2 (+ strand)|S.pneumoniae|TIGR4|NC_003028.1|IG
gttcgttcagcttcatttgaccgactgaatactcatatttttcagagagaaatagcataaataggcctaggaatgatatttttatgtcattttcctgggtttttctgttttaaattgaaaaaaattacaatttaggct

SEQ ID NO: 6153 - DNA, 98 bp, Streptococcus pneumoniae
  misc_feature (1)..(98): tiling:Spneumo1:WAN02498J; WAN024A09   TIGR4.IG_1495||||14 94270..1494367|+|98 bp|Between SP1588 (+ strand) and SP158 9 (+ strand)|S.pneumoniae|TIGR4|NC_003028.1|IG
gttgagatttaatcgtatcgaacagccctctttgggctgtttttacttctgcggaatctcaaatctgtctttctcctcttttatgatataatagaaac

SEQ ID NO: 6154 - DNA, 98 bp, Streptococcus pneumoniae
  misc_feature (1)..(98): tiling:Spneumo1:WAN024967; WAN024A09-rc   TIGR4.IG_1495||| |1494270..1494367|-|98 bp|Between SP1588 (+ strand) and SP 1589 (+ strand)|S.pneumoniae|TIGR4|NC_003028.1|IG-rc
gtttctattatatcataaaagaggagaaagacagatttgagattccgcagaagtaaaaacagcccaaagagggctgttcgatacgattaaatctcaac

SEQ ID NO: 6155 - DNA, 119 bp, Streptococcus pneumoniae
  misc_feature (1)..(119): tiling:Spneumo1:WAN02498Y; WAN024B1E   TIGR4.IG_1058||||10 65315..1065433|+|119 bp|Between SP1130 (- strand) and SP11 31 (+ strand)|S.pneumoniae|TIGR4|NC_003028.1|IG
gttttacacctccttaaagaacataataaactttttttaagaaaaagtaaagaaaagtattgactttataaaaataaagttttataatctaggtatgcaaaagtaaaggaggtatagaa

SEQ ID NO: 6156 - DNA, 159 bp, Streptococcus pneumoniae
  misc_feature (1)..(159): tiling:Spneumo1:WAN0249CI; WAN024ELD   R6.IG_672||||655972 ..656130|+|159 bp|Between transporter (NSS) (- strand) and spr0649 (mta) (+ strand)|S.pneumoniae|R6|NC_003098.1|IG
gttttcacacctttctcaaaaacgcttgactctgacctaaggggaggggttatactatcattgtaaggaggaaatcatgtaccatataaaagaagctgcgcagctttcaggtgtctctgtcaagaccctgccctgcatcactatgacaagataggactc

SEQ ID NO: 6157 - DNA, 102 bp, Streptococcus pneumoniae
  misc_feature (1)..(102): tiling:Spneumo1:WAN0249CG; WAN024EHE   R6.IG_999.2||||9417 91..941892|+|102 bp|Between spr0960 (mutR) (- strand) and spr0961 (rffD) (+ strand)|S.pneumoniae|R6|NC_003098.1|IG
taaaatgcttaggtgtacacctaagtctttagagtatctaaagctaattctattgattatgactaaattatgaataaaataacgtagaaagtttaacatacg

SEQ ID NO: 6158 - DNA, 290 bp, Streptococcus pneumoniae
  misc_feature (1)..(290): tiling:Spneumo1:WAN02498E; WAN0249Z1   TIGR4.IG_1522.2.2.2 .1||||1522262..1522551|+|290 bp|Between SP1620 (- strand) and SP1622 (+ strand)|S.pneumoniae|TIGR4|NC_003028.1|IG
taaaccaaacgattttctaataaataacactatgttccatttaacaatagatagcatcttcattttcaaactaccaacctatccgaccatttgttctagcaatagaagagagttaaaattacttcaatctgtcgctttctctttcttacatcaaacttcaaatagtctaactacagatatttgaatctattacctcaatccaagcaggcttgagggtcgctcttgggttcaccgatagatgatcggcacgtaggccttgcacatcagatctacgatagatccatcgtata

SEQ ID NO: 6159 - DNA, 64 bp, Streptococcus pneumoniae
  misc_feature (1)..(64): tiling:Spneumo1:WAN0249C9; WAN024EEB   R6.IG_1237||||11907 74..1190837|+|64 bp|Between spr1193 (appB) (- strand) and spr1194 (appA) (- strand)|S.pneumoniae|R6|NC_003098.1|IG
taaaccagcatctctacactcctaaaagattatcaaacttaatcactgataattttaaacgatt

SEQ ID NO: 6160 - DNA, 60 bp, Streptococcus pneumoniae
  misc_feature (1)..(60): tiling:Spneumo1:WAN024969; WAN024AK0-rc   TIGR4.IG_1270.2| |||1274423..1274482|-|60 bp|Between SP1352 (- strand) and SP1353 (- strand)|S.pneumoniae|TIGR4|NC_003028.1|IG-rc
taaactttcgggggtagacactagattgtctacccctttttttgtgtttcggaggtaatt

SEQ ID NO: 6161 - DNA, 105 bp, Streptococcus pneumoniae
  misc_feature (1)..(105): tiling:Spneumo1:WAN02498D; WAN024970   TIGR4.IG_1665.1.1|| ||1675771..1675875|+|105 bp|Between SP1770 (- strand) and SP1771 (- strand)|S.pneumoniae|TIGR4|NC_003028.1|IG
taacataatttccttataataaatttcgtatcaaacagctataatatagaatcattttcacctaaaaagataattaatcacaccctaatattgtactgaccccaa

SEQ ID NO: 6162 - DNA, 73 bp, Streptococcus pneumoniae
  misc_feature (1)..(73): tiling:Spneumo1:WAN0249C3; WAN024EBL   R6.IG_1446.2||||138 0192..1380264|+|73 bp|Between spr1402 (+ strand) and spr14 03 (- strand)|S.pneumoniae|R6|NC_003098.1|IG
taagaatattctttcattcgagatctatcacttatcatcttctttcgagaaattagtgactgcttttggctga

SEQ ID NO: 6163 - DNA, 187 bp, Streptococcus pneumoniae
  misc_feature (1)..(187): tiling:Spneumo1:WAN0249CM; WAN024ENE   R6.IG_517.2||||4952 73..495459|+|187 bp|Between spr0493 (+ strand) and spr0494 (+ strand)|S.pneumoniae|R6|NC_003098.1|IG
taagatggcgaaatcggtattgaatttatcagtagtgctgattataactcttttattatttacatgaagtatatatatatatatatatcatagaacctattgtgaggactttttatagtttaagccagtttccaaccaatttcgtgatttactggtaatgaagaaaaacaattgaaaggatatttct

SEQ ID NO: 6164 - DNA, 78 bp, Streptococcus pneumoniae
  misc_feature (1)..(78): tiling:Spneumo1:WAN0249B6; WAN024EKP-rc   R6.IG_723||||700 936..701013|-|78 bp|Between spr0699 (+ strand) and spr0700 (+ strand)|S.pneumoniae|R6|NC_003098.1|IG-rc
taattctccccttcattataacaaaaaaaccgctttaaaacggctttttgactgtgatttatttacatcttcttctac

SEQ ID NO: 6165 - DNA, 102 bp, Streptococcus pneumoniae
  misc_feature (1)..(102): tiling:Spneumo1:WAN0249A2; WAN024E1J   TIGR4.IG_161.2||||1 61060..161161|+|102 bp|Between SP0165 (+ strand) and SP016 6 (+ strand)|S.pneumoniae|TIGR4|NC_003028.1|IG
taatttaaacttatggcaatatatgaaaggttactggatgttttaaattatgcaggcagtagccttttattatatacaaatggataaagtaaggataataca

SEQ ID NO: 6166 - DNA, 288 bp, Streptococcus pneumoniae
  misc_feature (1)..(288): tiling:Spneumo1:WAN02498G; WAN024A01   TIGR4.IG_1517.1.2.2 .2||||1515297..1515584|+|288 bp|Between SP1612 (+ strand) and SP1616 (- strand)|S.pneumoniae|TIGR4|NC_003028.1|IG
taattttagagaccttctctctagctttcaaaaaacttacaatatcctaagtcaatctgtggatgctgtgtttattgattaaagaaactatctagatcagtagcaaagtgattagcgtacttcgcaaccgtttcagggtatactctattgtgtatactatctactataactttcgtagataaattattacattttcattacagtttttaaataaccaatcatctgattagtgtctatcactacatctgctagtctgacaacagctgtatcttcattgtaattggtttc

SEQ ID NO: 6167 - DNA, 148 bp, Streptococcus pneumoniae
  misc_feature (1)..(148): tiling:Spneumo1:WAN02496I; WAN024B1C-rc   TIGR4.IG_1061.2| |||1066373..1066520|-|148 bp|Between SP1133 (+ strand) and SP1134 (+ strand)|S.pneumoniae|TIGR4|NC_003028.1|IG-rc
tacggttctacctcctgtataaatctggttagcttactttttaattgcctcctctagcctcttttttagcctctaaaacggctttggctagtggttaatattatttaccacttgtctctataaacgtgttagaggcctttataacgac

SEQ ID NO: 6168 - DNA, 91 bp, Streptococcus pneumoniae
  misc_feature (1)..(91): tiling:Spneumo1:WAN0249AC; WAN024EI1   TIGR4.IG_49.2.1|||| 50742..50832|+|91 bp|Between SP0046 (+ strand) and SP0047 (+ strand)|S.pneumoniae|TIGR4|NC_003028.1|IG
tactgactaaaggcttaagcatttagtcagtagacgctttgtcctataggatcaaagctagagccctgactagtatttttagataaaaaga

SEQ ID NO: 6169 - DNA, 51 bp, Streptococcus pneumoniae
  misc_feature (1)..(51): tiling:Spneumo1:WAN02499E; WAN024CS1   TIGR4.IG_619.2||||6 31602..631652|+|51 bp|Between SP0660 (+ strand) and SP0661 (+ strand)|S.pneumoniae|TIGR4|NC_003028.1|IG
tagaggagaattttgctatactgatactagtaagtggtaaaggagcagagc

SEQ ID NO: 6170 - DNA, 164 bp, Streptococcus pneumoniae
  misc_feature (1)..(164): tiling:Spneumo1:WAN024989; WAN024950   TIGR4.IG_1667.1.2|| ||1692790..1692953|+|164 bp|Between SP1772 (- strand) and SP1774 (+ strand)|S.pneumoniae|TIGR4|NC_003028.1|IG
tagcaagaaacttgaggtatttttgctaaaaaaaaaaagcattttactattttgtatatatatatatatatattataagataagttttttataaagacacgcaaatgagtataaatcagctaatttttggtttatattcctatttttatgcataattattcttt

SEQ ID NO: 6171 - DNA, 81 bp, Streptococcus pneumoniae
  misc_feature (1)..(81): tiling:Spneumo1:WAN024974; WAN024D0N-rc   TIGR4.IG_538.1|| ||535256..535336|-|81 bp|Between SP0568 (+ strand) and SP0 570 (+ strand)|S.pneumoniae|TIGR4|NC_003028.1|IG-rc
tagtattctcctaaagtttctcctttttattataacattatcaaatgtaaaacccaacccgatagggttaggtttttaaca

SEQ ID NO: 6172 - DNA, 218 bp, Streptococcus pneumoniae
  misc_feature (1)..(218): tiling:Spneumo1:WAN02497Y; WAN0248F0   TIGR4.IG_1948.2|||| 1930038..1930255|+|218 bp|Between SP2024 (+ strand) and SP 2025 (+ strand)|S.pneumoniae|TIGR4|NC_003028.1|IG
tagtgaaaaattgaatgagccactatttatttaatatgtatgatgagggaatgactcaaaaacttcttgtcgatataagaatatctgagatagtattttaaaacgaaaggactataaaagctcatttccttcgcacttattttatagagatctatcattatactctttagaaatcaaaaagcaacacaccttgtcatcgttttatcgtaaatctgtta

SEQ ID NO: 6173 - DNA, 217 bp, Streptococcus pneumoniae
  misc_feature (1)..(217): tiling:Spneumo1:WAN02499G; WAN024D0L   TIGR4.IG_539.2||||5 37318..537534|+|217 bp|Between SP0570 (+ strand) and SP057 1 (+ strand)|S.pneumoniae|TIGR4|NC_003028.1|IG
tagttcatttatccagatatatctcgataatcatattatttagtcaaagaacatcccatatgagggcatgaaatgctaagtttagcttgctcactattaagatgaagtatatatatttcatagaacctattgtgaaggatttttataattttcgccaattccatacctatttcacaatttaccgatgacacagaaaaacaattgaaaggatatttct

SEQ ID NO: 6174 - DNA, 94 bp, Streptococcus pneumoniae
  misc_feature (1)..(94): tiling:Spneumo1:WAN0249AO; WAN024EAP-rc   R6.IG_1530||||14 60714..1460807|-|94 bp|Between spr1483 (+ strand) and spr1 484 (- strand)|S.pneumoniae|R6|NC_003098.1|IG-rc
tataagggaggttaatccctccccttgtttttgaaaatcgaaaggaaaagtataaaaatgaaagttaatgaatatttctggagaacgagctgtc

SEQ ID NO: 6175 - DNA, 290 bp, Streptococcus pneumoniae
  misc_feature (1)..(290): tiling:Spneumo1:WAN024962; WAN0249Z1-rc   TIGR4.IG_1522.2. 2.2.1||||1522262..1522551|-|290 bp|Between SP1620 (- stran d) and SP1622 (+ strand)|S.pneumoniae|TIGR4|NC_003028.1|IG -rc
tatacgatggatctatcgtagatctgatgtgcaaggcctacgtgccgatcatctatcggtgaacccaagagcgaccctcaagcctgcttggattgaggtaatagattcaaatatctgtagttagactatttgaagtttgatgtaagaaagagaaagcgacagattgaagtaattttaactctcttctattgctagaacaaatggtcggataggttggtagtttgaaaatgaagatgctatctattgttaaatggaacatagtgttatttattagaaaatcgtttggttta

SEQ ID NO: 6176 - DNA, 658 bp, Streptococcus pneumoniae
  misc_feature (1)..(658): tiling:Spneumo1:WAN0249CE; WAN024EHC   R6.IG_1010||||95459 5..955252|+|658 bp|Between spr0971 (mefE) (+ strand) and s pr0972 (+ strand)|S.pneumoniae|R6|NC_003098.1|IG
tatagagaatttagagcgcctttggaatatatttttggaatttaatcaatcacagttgaatgtgaagggcaatctgttttagaagaatacaatcaagatatcattatgctattactttagttcagttaaaatattgagaagtattacttttatttaaaaagcatcataaaggactccaattaatttttaatgatttttctaatctaattttgtggttattgacaaataaagtctagttaattgctttgaaatccatggattggtttatatacatctgttaatgcaacggataattttattgataagtagggagtggctattattcaacttttaggttctgaaagtaagagattcatattagaaatatcatgttgaccatttttcaatttgctggttagtagtaatctggacatcattaatcccttccttaacaaaattatgtgacttttgttactggattactgctgattttttaatagcttataacatttttagacggttaatagattttgaccgtctttcttaatattgtcttacctataatagatatgcttatgagatatgtttaataaattaattttagttcaaaatgtccagttaggacactttgaatgatttcttagttttatatattatacttttctcaggagaaagctag

SEQ ID NO: 6177 - DNA, 303 bp, Streptococcus pneumoniae
  misc_feature (1)..(303): tiling:Spneumo1:WAN02496O; WAN024B90-rc   TIGR4.IG_990|||| 995105..995407|-|303 bp|Between SP1058 (+ strand) and SP10 59 (+ strand)|S.pneumoniae|TIGR4|NC_003028.1|IG-rc
tatatagctccttttctattactttatttggaatcaaaacttacttgtacattggaaacacctctattctacgctttcatattgctgcatgacactttcaaaatcaaattgctaaaaataattttttaaagcttaatttagatttaattacatatatctcaaaaaattgttttgaaattagtaaattaaaataggtttctgtacttataggaactagttataaaaacttcgcccatcataaaatatctatttaagtaaaacaaaaattttataattttttgatttttaagtgactataatctc

SEQ ID NO: 6178 - DNA, 191 bp, Streptococcus pneumoniae
  misc_feature (1)..(191): tiling:Spneumo1:WAN0249AQ; WAN024EBK-rc   R6.IG_1447||||13 87921..1388111|-|191 bp|Between spr1403 (- strand) and spr 1404 (+ strand)|S.pneumoniae|R6|NC_003098.1|IG-rc
tatatctttttttgtctaagtagtataaaaaaattagagcaagaaaattgtcgttagtaatcggaaaaattagaataatataagtggcttttaagtgcaaaaacagaatatattaattgttcagaaaatattgattaatgcctcaaatagttgtacattgtaaactataaaatactatctaggagtttaaa

SEQ ID NO: 6179 - DNA, 286 bp, Streptococcus pneumoniae
  misc_feature (1)..(286): tiling:Spneumo1:WAN024992; WAN024B71   TIGR4.IG_996.2||||1 000096..1000381|+|286 bp|Between SP1064 (+ strand) and SP1 065 (- strand)|S.pneumoniae|TIGR4|NC_003028.1|IG
tatcctaaatagttacaatatatggtctatactttttcttaggagaaagctagatgtacagacgtttgagagatttgagggaggatcatgatctgccccaaaagcaaatagctacaatactttcgtttacaaattcagcttatgccaaaattgaacggggtgagcatgcgttgacggctgatgtattggttaaactctcagatttctatgacgtcagtacagactatttattgggattaactgattttcctgataaaattcgctttagaaaataatctcctcaatt

SEQ ID NO: 6180 - DNA, 50 bp, Streptococcus pneumoniae
  misc_feature (1)..(50): tiling:Spneumo1:WAN02499O; WAN024D1Z   TIGR4.IG_445.1||||4 49870..449919|+|50 bp|Between SP0472 (+ strand) and SP0473 (- strand)|S.pneumoniae|TIGR4|NC_003028.1|IG
tatgaaggctaggaatgccaaagcactgacatatttcgtttgaatctcat

SEQ ID NO: 6181 - DNA, 218 bp, Streptococcus pneumoniae
  misc_feature (1)..(218): tiling:Spneumo1:WAN02499P; WAN024D21   TIGR4.IG_438||||444 457..444674|+|218 bp|Between SP0464 (+ strand) and SP0465 (- strand)|S.pneumoniae|TIGR4|NC_003028.1|IG
tattcaatgtacatcattatgaaaaagatagcaggctgaagggaagaccagagtactctgaggtgatgttaatcaggaatcatggtgatgtggcatgaatcacaataacggatatgaggctgggcagattgtgccagcctcattgtgggttattgtttgtaaaacgataggactggtctggtaatcattttaggaatggacaggactgggattctgat

SEQ ID NO: 6182 - DNA, 154 bp, Streptococcus pneumoniae
  misc_feature (1)..(154): tiling:Spneumo1:WAN02497D; WAN024D31-rc   TIGR4.IG_435.2|| ||438172..438325|-|154 bp|Between SP0461 (- strand) and SP 0462 (+ strand)|S.pneumoniae|TIGR4|NC_003028.1|IG-rc
tattcatagaacaagttaatccttctatgattcataggtactttcaatctgtatacacgaagaaacggattacttatgttctgataaaatttatctcactgagttaatccgttcactaacaaacgtagcaaaagcgtataaaagtgcgttatag

SEQ ID NO: 6183 - DNA, 59 bp, Streptococcus pneumoniae
  misc_feature (1)..(59): tiling:Spneumo1:WAN024998; WAN024C0R   TIGR4.IG_831||||837 701..837759|+|59 bp|Between SP0887 (+ strand) and SP0888 ( + strand)|S.pneumoniae|TIGR4|NC_003028.1|IG
tattctgccattgtaattacggtaatgatttgttataatacttcaaaggaggaaatcag

SEQ ID NO: 6184 - DNA, 306 bp, Streptococcus pneumoniae
  misc_feature (1)..(306): tiling:Spneumo1:WAN0249AA; WAN024EF1   TIGR4.IG_73||||7345 5..73760|+|306 bp|Between SP0070 (+ strand) and SP0071 (+ strand)|S.pneumoniae|TIGR4|NC_003028.1|IG
tattttatagcccattaaaagcataagcggtaatctaatttaaaaaatgctgtaattagtctgaagtccacacttacttgttgagatgttatctctgttttttatcgttataatttactgtattttttatagtatgcagaatatttttaagtatatttcaatagaaatttctatcgatttattgtataatgataagtaattgttgaaaagtactcagaaaattccatactatattatttttatgtttatacttttatgctataaaatatagattgatataaagaatatagaaaaagcgaggttaat

SEQ ID NO: 6185 - DNA, 79 bp, Streptococcus pneumoniae
  misc_feature (1)..(79): tiling:Spneumo1:WAN0249A4; WAN024E1W   TIGR4.IG_136.2.2.2. 2||||139760..139838|+|79 bp|Between SP0139 (+ strand) and SP0141 (+ strand)|S.pneumoniae|TIGR4|NC_003028.1|IG
tattttttctaactatcagaatattttgacaaatgattgtaaataatgatataatatgcaaaagctaggaggtggtcag

SEQ ID NO: 6186 - DNA, 297 bp, Streptococcus pneumoniae
  misc_feature (1)..(297): tiling:Spneumo1:WAN02496T; WAN024C1E-rc   TIGR4.IG_772.2|| ||777430..777726|-|297 bp|Between SP0826 (+ strand) and SP 0828 (+ strand)|S.pneumoniae|TIGR4|NC_003028.1|IG-rc
tcaaacacctccattaaagagctacctctattataccatgtaaaggcttttatttcatctaaaagtacctttagaatactgcttatttatccttgaaattgaatttttttaataaaagtagagctctaacaaatcaatttaagtacggatgtaaaccaaatcaactctaacaaaaatagatttacaagagtaaaaaaacgaacaaatttagtttcttagcaagaagaatactaaacgttcgttttttgtgaattaagaataatgatacaaattatcaacattttttgtctaactatt

SEQ ID NO: 6187 - DNA, 250 bp, Streptococcus pneumoniae
  misc_feature (1)..(250): tiling:Spneumo1:WAN02495U; WAN02491W-rc   TIGR4.IG_1688||| |1709306..1709555|-|250 bp|Between SP1793 (- strand) and S P1794 (- strand)|S.pneumoniae|TIGR4|NC_003028.1|IG-rc
tcaagtattgacactttatctggatttcggtataatatgcttagaaaggaatctttctaaatttttttcgtccttatgtgttaatcaaagacgaatacaaaaacatatttttttactctaaaaagtgttaatcaatgatgtatttgttagagaggtagataaatggaattgagagcaccaccagttataatagtataaaacgtataataaaaatattttaacttgaattatagaaaaggagaaacaaatc

SEQ ID NO: 6188 - DNA, 58 bp, Streptococcus pneumoniae
  misc_feature (1)..(58): tiling:Spneumo1:WAN02499T; WAN024DG1   TIGR4.IG_378.2||||3 82398..382455|+|58 bp|Between SP0401 (- strand) and SP0402 (- strand)|S.pneumoniae|TIGR4|NC_003028.1|IG
tcacttctcacgatagaagaagaggctgagattggtgattctctgcctcttaggtttc

SEQ ID NO: 6189 - DNA, 73 bp, Streptococcus pneumoniae
  misc_feature (1)..(73): tiling:Spneumo1:WAN0249AR; WAN024EBL-rc   R6.IG_1446.2|||| 1380192..1380264|-|73 bp|Between spr1402 (+ strand) and sp r1403 (- strand)|S.pneumoniae|R6|NC_003098.1|IG-rc
tcagccaaaagcagtcactaatttctcgaaagaagatgataagtgatagatctcgaatgaaagaatattctta

SEQ ID NO: 6190 - DNA, 129 bp, Streptococcus pneumoniae
  misc_feature (1)..(129): tiling:Spneumo1:WAN0249BN; WAN024E4A   R6.IG_2167.1||||194 7971..1948099|+|129 bp|Between spr1960 (+ strand) and spr1 961 (- strand)|S.pneumoniae|R6|NC_003098.1|IG
tcaggcaactgtttctacaaaaaaaatcgaccgattaatgaactgcaccccaaaagttagacagaataaatctaacttttggggtgttttattatgaaattgagttatgaaaataaagttcagatctat

SEQ ID NO: 6191 - DNA, 84 bp, Streptococcus pneumoniae
  misc_feature (1)..(84): tiling:Spneumo1:WAN024976; WAN024D0W-rc   TIGR4.IG_514|||| 516867..516950|-|84 bp|Between SP0543 (+ strand) and SP054 4 (+ strand)|S.pneumoniae|TIGR4|NC_003028.1|IG-rc
tcatttatttcactaacaatttaatagagccttctactcaaatatcctgtcagaaaaggatagaaagctactttttataatact

SEQ ID NO: 6192 - DNA, 95 bp, Streptococcus pneumoniae
  misc_feature (1)..(95): tiling:Spneumo1:WAN02497W; WAN024ER1-rc   TIGR4.IG_1.2|||| 102..196|-|95 bp|Between () ( strand) and SP0001 (+ strand )|S.pneumoniae|TIGR4|NC_003028.1|IG-rc
tcctttctcctcctttactatttaaaagtttaatactagagatattttaccatagatagcaagaattttccacaagctgtgaaaaataatccaca

SEQ ID NO: 6193 - DNA, 340 bp, Streptococcus pneumoniae
  misc_feature (1)..(340): tiling:Spneumo1:WAN02497I; WAN024DP0-rc   TIGR4.IG_336|||| 323649..323988|-|340 bp|Between SP0349 (+ strand) and SP03 50 (+ strand)|S.pneumoniae|TIGR4|NC_003028.1|IG-rc
tctatttccatttgacaaattaaatcaggcagtacatgcaactacagaaactcaatatatatttggtcactcaatgattttcagaaatataattcttttatcctctacgtcagataaaacttttctccatctaaacaaaatttatttgtttcagtaatatatgagttctcaataatgaattagaaggtccagttcaattattcttccaaatagaccgaatattatttgaagacatatcggtttctgaaattgcaatcagtacataagctaataaactgataagtatgctctgtaagaatgccagagttatattgtagtccccttccatactatattcatt

SEQ ID NO: 6194 - DNA, 153 bp, Streptococcus pneumoniae
  misc_feature (1)..(153): tiling:Spneumo1:WAN02498Z; WAN024B1F   TIGR4.IG_1056||||10 63075..1063227|+|153 bp|Between SP1128 (+ strand) and SP11 29 (- strand)|S.pneumoniae|TIGR4|NC_003028.1|IG
tctctttatgtgattataggctataaagcctttgaaataagcactttggggcgctttcccttagtgctttttataatttaataccctttttactacccctactaatttttggtatagtaagagggtagcccggaaatgggtcacccttatttt

SEQ ID NO: 6195 - DNA, 89 bp, Streptococcus pneumoniae
  misc_feature (1)..(89): tiling:Spneumo1:WAN0249AH; WAN024E8V-rc   R6.IG_1668||||15 93906..1593994|-|89 bp|Between spr1619 (- strand) and spr1 620 (- strand)|S.pneumoniae|R6|NC_003098.1|IG-rc
tctgtaaaaaagaaggtggaaggaaaatgtttggaactaccttcccctttcttgttaatagcctagtttgatatatatgattaaaggag

SEQ ID NO: 6196 - DNA, 51 bp, Streptococcus pneumoniae
  misc_feature (1)..(51): tiling:Spneumo1:WAN02499J; WAN024D0V   TIGR4.IG_515||||517 350..517400|+|51 bp|Between SP0544 (+ strand) and SP0545 ( + strand)|S.pneumoniae|TIGR4|NC_003028.1|IG
tcttacagcagtagagcctgacaaggtgaggtcatagtagggaggatttct

SEQ ID NO: 6197 - DNA, 57 bp, Streptococcus pneumoniae
  misc_feature (1)..(57): tiling:Spneumo1:WAN02496W; WAN024CM1-rc   TIGR4.IG_652.1|| ||663613..663669|-|57 bp|Between SP0693 (+ strand) and SP0 694 (+ strand)|S.pneumoniae|TIGR4|NC_003028.1|IG-rc
tcttccctactaacactaataagtccgatatggtaaattcttgacctattagttgct

SEQ ID NO: 6198 - DNA, 219 bp, Streptococcus pneumoniae
  misc_feature (1)..(219): tiling:Spneumo1:WAN02496N; WAN024B81-rc   TIGR4.IG_991|||| 995660..995878|-|219 bp|Between SP1059 (+ strand) and SP10 60 (+ strand)|S.pneumoniae|TIGR4|NC_003028.1|IG-rc
tcttccttaaaaagctcacaataaaattttaaatttctatacaacaatccgagagtagtctcacaatttgaacatttcacatcactcttaatatataaaaaatgaattaatcagaaacctctgactaagatttcctaattaattcactttctatatcatagtaaggaattctattatccctaattgaaaattgaaattttatgttttatatattaacaa

SEQ ID NO: 6199 - DNA, 66 bp, Streptococcus pneumoniae
  misc_feature (1)..(66): tiling:Spneumo1:WAN02498L; WAN024A1U   TIGR4.IG_1355.2.2.2 ||||1362421..1362486|+|66 bp|Between SP1439 (+ strand) and SP1442 (- strand)|S.pneumoniae|TIGR4|NC_003028.1|IG
tcttcttccatgggcttcctctccttatttcctaactttattataactaaaaagaaagtcctcatt

SEQ ID NO: 6200 - DNA, 91 bp, Streptococcus pneumoniae
  misc_feature (1)..(91): tiling:Spneumo1:WAN02497V; WAN024EI1-rc   TIGR4.IG_49.2.1| |||50742..50832|-|91 bp|Between SP0046 (+ strand) and SP00 47 (+ strand)|S.pneumoniae|TIGR4|NC_003028.1|IG-rc
tctttttatctaaaaatactagtcagggctctagctttgatcctataggacaaagcgtctactgactaaatgcttaagcctttagtcagta

SEQ ID NO: 6201 - DNA, 57 bp, Streptococcus pneumoniae
  misc_feature (1)..(57): tiling:Spneumo1:WAN024995; WAN024C0C   TIGR4.IG_851||||863 402..863458|+|57 bp|Between SP0909 (+ strand) and SP0910 ( + strand)|S.pneumoniae|TIGR4|NC_003028.1|IG
tgaaagccgagcctatccgtgatatactagtctaacctagcagaaagaggaaatatc

SEQ ID NO: 6202 - DNA, 117 bp, Streptococcus pneumoniae
  misc_feature (1)..(117): tiling:Spneumo1:WAN02499U; WAN024DK1   TIGR4.IG_359||||357 985..358101|+|117 bp|Between SP0378 (+ strand) and SP0379 (- strand)|S.pneumoniae|TIGR4|NC_003028.1|IG
tgacagggcgcttataattatattagaacactcgcttaatcaaagaagtgactttgttgtacttgacctgacgattggggagattaaaagcatgtgaaatctacacatgctttttcg

SEQ ID NO: 6203 - DNA, 57 bp, Streptococcus pneumoniae
  misc_feature (1)..(57): tiling:Spneumo1:WAN0249CV; WAN0247N1   R6.IG_88.2.1||||747 41..74797|+|57 bp|Between spr0067 (+ strand) and spr0068 ( + strand)|S.pneumoniae|R6|NC_003098.1|IG
tgagtattacttcatcttctcatgaaattgagtttttgcccagctcctcttgattat

SEQ ID NO: 6204 - DNA, 77 bp, Streptococcus pneumoniae
  misc_feature (1)..(77): tiling:Spneumo1:WAN0249CQ; WAN024EPQ   R6.IG_340||||320187 ..320263|+|77 bp|Between spr0319 (cps2P) (+ strand) and sp r0320 (cps2L) (+ strand)|S.pneumoniae|R6|NC_003098.1|IG
tggtgattgaacggatacttagtgtagtagaggaagaatttagtaattaaaaaacaacgaagaaaggttatttcatt

SEQ ID NO: 6205 - DNA, 166 bp, Streptococcus pneumoniae
  misc_feature (1)..(166): tiling:Spneumo1:WAN02496D; WAN024AS0-rc   TIGR4.IG_1215||| |1227595..1227760|-|166 bp|Between SP1292 (+ strand) and ( ) (- strand)|S.pneumoniae|TIGR4|NC_003028.1|IG-rc
tgtaattagatatcaaagaagtttgtcaaaaagtctttgatattaaaagaacgcataatataggggattgtctccataatattatgcgttttattattgaaaaatttgggcaatcatcagataaaattgagactatatcgagtatataaatgtttgtatagtcaat

SEQ ID NO: 6206 - DNA, 102 bp, Streptococcus pneumoniae
  misc_feature (1)..(102): tiling:Spneumo1:WAN02497L; WAN024E1J-rc   TIGR4.IG_161.2|| ||161060..161161|-|102 bp|Between SP0165 (+ strand) and SP 0166 (+ strand)|S.pneumoniae|TIGR4|NC_003028.1|IG-rc
tgtattatccttactttatccatttgtatataataaaaggctactgcctgcataatttaaaacatccagtaacctttcatatattgccataagtttaaatta

SEQ ID NO: 6207 - DNA, 95 bp, Streptococcus pneumoniae
  misc_feature (1)..(95): tiling:Spneumo1:WAN0249AD; WAN024ER1   TIGR4.IG_1.2||||102 ..196|+|95 bp|Between () ( strand) and SP0001 (+ strand)|S .pneumoniae|TIGR4|NC_003028.1|IG
tgtggattatttttcacagcttgtggaaaattcttgctatctatggtaaaatatctctagtattaaacttttaaatagtaaaggaggagaaagga

SEQ ID NO: 6208 - DNA, 81 bp, Streptococcus pneumoniae
  misc_feature (1)..(81): tiling:Spneumo1:WAN02499I; WAN024D0N   TIGR4.IG_538.1||||5 35256..535336|+|81 bp|Between SP0568 (+ strand) and SP0570 (+ strand)|S.pneumoniae|TIGR4|NC_003028.1|IG
tgttaaaaacctaaccctatcgggttgggttttacatttgataatgttataataaaaaggagaaactttaggagaatacta

SEQ ID NO: 6209 - DNA, 298 bp, Streptococcus pneumoniae
  misc_feature (1)..(298): tiling:Spneumo1:WAN0249BH; WAN0247B1-rc   R6.IG_134||||122 143..122440|-|298 bp|Between spr0113 (+ strand) and spr011 4 (+ strand)|S.pneumoniae|R6|NC_003098.1|IG-rc
tgttaaataatactactgctaacaccaagccaacttagcacattgcatcacctaatcctgcgctacttgtccataatcctttaatgtttctactaaaattattccaatttcccccatcaagatagcttatttatcctagacaatgcctactgcaacagtataaataagattcatcagccatcttttctggcaatcatatgggtagcctaatgatatttctagttactcaaaaatatctagctatactagagttatttctaatccctaggacacttgttaatccaaatgtaacaaattt

SEQ ID NO: 6210 - DNA, 54 bp, Streptococcus pneumoniae
  misc_feature (1)..(54): tiling:Spneumo1:WAN0249CU; WAN0247G1   R6.IG_119||||105491 ..105544|+|54 bp|Between spr0098 (+ strand) and spr0099 (+ strand)|S.pneumoniae|R6|NC_003098.1|IG
ttaaaattctccctccccttttggagagggagtttcttcacgggaggtatctct

SEQ ID NO: 6211 - DNA, 65 bp, Streptococcus pneumoniae
  misc_feature (1)..(65): tiling:Spneumo1:WAN02496U; WAN024C1U-rc   TIGR4.IG_742|||| 746387..746451|-|65 bp|Between SP0791 (+ strand) and SP079 2 (+ strand)|S.pneumoniae|TIGR4|NC_003028.1|IG-rc
ttaattatagcaaaaaaccgctttatacggctttttgaatgtgagttattcaaacctgctactac

SEQ ID NO: 6212 - DNA, 59 bp, Streptococcus pneumoniae
  misc_feature (1)..(59): tiling:Spneumo1:WAN02496H; WAN024B1B-rc   TIGR4.IG_1066.1| |||1069088..1069146|-|59 bp|Between SP1138 (- strand) and SP1139 (+ strand)|S.pneumoniae|TIGR4|NC_003028.1|IG-rc
ttagggttcgtatgctaaaatactaccctttttgtgtaccttatggctgacttttcaaa

SEQ ID NO: 6213 - DNA, 99 bp, Streptococcus pneumoniae
  misc_feature (1)..(99): tiling:Spneumo1:WAN02496J; WAN024B1D-rc   TIGR4.IG_1059||| |1065788..1065886|-|99 bp|Between SP1131 (+ strand) and SP 1132 (+ strand)|S.pneumoniae|TIGR4|NC_003028.1|IG-rc
ttatatcctccatttttcctttttataaattaagttgtcattttcctctaattttgataaaataagaggagattatttacaaaggggtttgtccccttg

SEQ ID NO: 6214 - DNA, 86 bp, Streptococcus pneumoniae
  misc_feature (1)..(86): tiling:Spneumo1:WAN02498H; WAN024A02   TIGR4.IG_1516||||15 12786..1512871|+|86 bp|Between SP1611 (+ strand) and SP161 2 (+ strand)|S.pneumoniae|TIGR4|NC_003028.1|IG
ttatattttatataaaataagtagctttacttacggaataggctagtgctgtgtctctagcctattttaataattaggagtttgtt

SEQ ID NO: 6215 - DNA, 156 bp, Streptococcus pneumoniae
  misc_feature (1)..(156): tiling:Spneumo1:WAN02498O; WAN024AN0   TIGR4.IG_1242||||12 48099..1248254|+|156 bp|Between SP1324 (- strand) and SP13 25 (- strand)|S.pneumoniae|TIGR4|NC_003028.1|IG
ttcaacactcccacatttttgatctcattactttttgataaaaaatgggactgggcattatcccagtcccatctctatttctttattcaatgagttgtatcacagaactttagaaattatataatgacaagaatttactattctgttttacaaaag

SEQ ID NO: 6216 - DNA, 85 bp, Streptococcus pneumoniae
  misc_feature (1)..(85): tiling:Spneumo1:WAN02499H; WAN024D0M   TIGR4.IG_539.1||||5 37156..537240|+|85 bp|Between SP0570 (+ strand) and SP0571 (+ strand)|S.pneumoniae|TIGR4|NC_003028.1|IG
ttccttagattaggtactacataacaaattttttaaattcaaacccgcaccaaaaacaacattgcaactttcttctcaggtaatg

SEQ ID NO: 6217 - DNA, 55 bp, Streptococcus pneumoniae
  misc_feature (1)..(55): tiling:Spneumo1:WAN0249CJ; WAN024EMM   R6.IG_580.1.2.2|||| 556619..556673|+|55 bp|Between spr0556 (rplA) (+ strand) a nd spr0557 (+ strand)|S.pneumoniae|R6|NC_003098.1|IG
ttcgaaatctagtggaatgaatctggaatagtccatcgagctttctaatactctt

SEQ ID NO: 6218 - DNA, 119 bp, Streptococcus pneumoniae
  misc_feature (1)..(119): tiling:Spneumo1:WAN02496K; WAN024B1E-rc   TIGR4.IG_1058||| |1065315..1065433|-|119 bp|Between SP1130 (- strand) and S P1131 (+ strand)|S.pneumoniae|TIGR4|NC_003028.1|IG-rc
ttctatacctcctttacttttgcatacctagattataaaactttatttttataaagtcaatacttttctttactttttcttaaaaaaagtttattatgttctttaaggaggtgtaaaac

SEQ ID NO: 6219 - DNA, 135 bp, Streptococcus pneumoniae
  misc_feature (1)..(135): tiling:Spneumo1:WAN02499Y; WAN024E02   TIGR4.IG_288.2||||2 73366..273500|+|135 bp|Between SP0296 (- strand) and SP029 7 (- strand)|S.pneumoniae|TIGR4|NC_003028.1|IG
ttctttatgtcggctttctaatgcttttcattttattgttcagatagtcggcatgtaaaggcttgttgatgtttccttttgtgtcgatatatgtaaaaacaaattgttctggattactgaggatgccaaactttg

SEQ ID NO: 6220 - DNA, 149 bp, Streptococcus pneumoniae
  misc_feature (1)..(149): tiling:Spneumo1:WAN0249BM; WAN0247O1-rc   R6.IG_87||||7393 0..74078|-|149 bp|Between spr0066 (+ strand) and spr0067 ( + strand)|S.pneumoniae|R6|NC_003098.1|IG-rc
ttctttttccttgctcgatttttcttcattatatctctaatcagcttctttgtcaaaattctcacccatccagctcacgcagttctgttaccaaagaccgttcaaaaagcaaactagcaatacttataacttattaaaaattcctaatt

SEQ ID NO: 6221 - DNA, 108 bp, Streptococcus pneumoniae
  misc_feature (1)..(108): tiling:Spneumo1:WAN024F8A; WAN0246O9 208410-71-3_2||||301. .423|+|123 bp|Glimmer 2.02 orf prediction from Patent Sequ ences|S.pneumoniae||WAN0246XJ|ORF|000
ttgacaagtgatttctggattgctgaatattttcttagcaatcaaatcattagttgggctgatgcccggatgtctgagaatcctcctattcctccttctatagtgagt

SEQ ID NO: 6222 - DNA, 61 bp, Streptococcus pneumoniae
  misc_feature (1)..(61): tiling:Spneumo1:WAN02495S; WAN02491T-rc   TIGR4.IG_1694.1| |||1716312..1716372|-|61 bp|Between SP1799 (- strand) and SP1800 (- strand)|S.pneumoniae|TIGR4|NC_003028.1|IG-rc
ttgagaaatagttgcttaaaaagcatttgcatgatactatatattgaaaggaggtgataat

SEQ ID NO: 6223 - DNA, 57 bp, Streptococcus pneumoniae
  misc_feature (1)..(57): tiling:Spneumo1:WAN02498U; WAN024B1A   TIGR4.IG_1070.1|||| 1071086..1071142|+|57 bp|Between SP1142 (+ strand) and SP1 143 (+ strand)|S.pneumoniae|TIGR4|NC_003028.1|IG
ttgattgtgtggtataatattctaaagcacaagggatagtatagaaggagtacacct

SEQ ID NO: 6224 - DNA, 96 bp, Streptococcus pneumoniae
  misc_feature (1)..(96): tiling:Spneumo1:WAN024BJ6; WAN023MYT spn171g11_42||||41133 ..41228|-|96 bp|Glimmer 2.02 orf prediction|S.pneumoniae|2 3F-1|WAN01UCQX|ORF
ttgatttggcaaggtgtcagaaataaaggttgtgtatttggagaggggattaattttaaaaaatccagtcttgtaaaatttagaactatcaatcag

SEQ ID NO: 6225 - DNA, 243 bp, Streptococcus pneumoniae
  misc_feature (1)..(243): tiling:Spneumo1:WAN024BJD; WAN023YMH AL449928.1_69||||5250 0..52742|+|243 bp|Glimmer 2.02 orf prediction|S.pneumoniae ||AL449928.1|ORF
ttgattttcattgagtatgagataacgttgaagaaattcttttgtacggtcttctttaggattagtgaagaggtcttctggtttaccttcttcagcaatcacacccttatccataaagataacacggtgagagacatcacgggcaaattccatttcatgggttacgacaatcatggtcaagccttcctgagccagatcttgcatgattttgaggacctctccaaccatttctggatcgagagc

SEQ ID NO: 6226 - DNA, 246 bp, Streptococcus pneumoniae
  misc_feature (1)..(246): tiling:Spneumo1:WAN024BJF; WAN023JVW 83260_769||||435371.. 435616|-|246 bp|EGAD orf prediction|S.pneumoniae|TIGR4|WAN 01UC25|ORF
ttgcaattgccgtttaaaatccgtttccctcttatcagcagtatggagtatctcaccaattctctgaaaaacaataggctcatgaccattcttacgctcaggcgtagccgtcaaaccgtaaagatacttccctctaaactgagcaacaactttttcaaacatcaaggcagagacatgatgacactcatccacaatcatcatctcatactcatccaaaagactttgactattttccaacttaaatag

SEQ ID NO: 6227 - DNA, 58 bp, Streptococcus pneumoniae
  misc_feature (1)..(58): tiling:Spneumo1:WAN02496V; WAN024CA1-rc   TIGR4.IG_694|||| 703917..703974|-|58 bp|Between SP0741 (- strand) and SP074 2 (- strand)|S.pneumoniae|TIGR4|NC_003028.1|IG-rc
ttgcattcttgacaagaggtgaccatcatctcttgtttttttgtggtacaatagagct

SEQ ID NO: 6228 - DNA, 198 bp, Streptococcus pneumoniae
  misc_feature (1)..(198): tiling:Spneumo1:WAN024F73; WAN0246NE 209200-27-1_2||||741. .989|-|249 bp|Glimmer 2.02 orf prediction from Patent Sequ ences|S.pneumoniae||WAN0246WK|ORF|000
ttggaaggagctattttactggctattgattacttttatactcttcgcaaatctcttcaaaccacgtcagctttgccttgccgtactcaagtactgcctacggctagcttcctagtttgctctttgattttcattgagtattattttctgaaattggagtattgggctgtttttcattttcagtggcaggtttacttg

SEQ ID NO: 6229 - DNA, 123 bp, Streptococcus pneumoniae
  misc_feature (1)..(123): tiling:Spneumo1:WAN024BJ5; WAN023SRY BD003894.1_3||||1841. .1963|-|123 bp|Glimmer 2.02 orf prediction|S.pneumoniae|AT CC55840|BD003894.1|ORF
ttgggcaatgaagctcattttgctctttttgaagctatactcatcccaactcataacttttggcaacttggtccaatcggtttcaaacttaaattccctcagttttcggatgacggtggaagt

SEQ ID NO: 6230 - DNA, 279 bp, Streptococcus pneumoniae
  misc_feature (1)..(279): tiling:Spneumo1:WAN024BJG; WAN023JZL 83014_587||||329396.. 329674|+|279 bp|EGAD orf prediction|S.pneumoniae|TIGR4|WAN 01UC25|ORF
ttgggcaattttctgtctcaccatttccgagatttggcaatttttctgaacgagagttgtttcagctacagtgactttccgacaggacttgcattgaaatcgtctctttttcaaatgaatgaggctagggaaaccaccaatctcgataaaagggattttagaaggcttttggaagtcgtatttgatttgttttcctttacagtgtttacatttaggtgggtgataatcaagtgtagcgaagacttcgatatgggtatcgtgctgaatggctttatttaa

SEQ ID NO: 6231 - DNA, 75 bp, Streptococcus pneumoniae
  misc_feature (1)..(75): tiling:Spneumo1:WAN024F78; WAN0246NF 209199-92-8_2||||125. .322|-|198 bp|Glimmer 2.02 orf prediction from Patent Sequ ences|S.pneumoniae||WAN0246WO|ORF|000
ttgggctgtttttcattttcagtggcaggtttacttgtagcaggtgttattagagtcctgaagttgctggttttc

SEQ ID NO: 6232 - DNA, 105 bp, Streptococcus pneumoniae
  misc_feature (1)..(105): tiling:Spneumo1:WAN02495Z; WAN024970-rc   TIGR4.IG_1665.1. 1||||1675771..1675875|-|105 bp|Between SP1770 (- strand) a nd SP1771 (- strand)|S.pneumoniae|TIGR4|NC_003028.1|IG-rc
ttggggtcagtacaatattagggtgtgattaattatctttttaggtgaaaatgattctatattatagctgtttgatacgaaatttattataaggaaattatgtta

SEQ ID NO: 6233 - DNA, 279 bp, Streptococcus pneumoniae
  misc_feature (1)..(279): tiling:Spneumo1:WAN024BJN; WAN023M3K 315323_693b||||363848 ..364126|+|279 bp|EGAD orf prediction|S.pneumoniae|R6|NC_0 03098.1|ORF
ttggtgattctcggcctcttaggtttcttaaaatgttccgatacgggtgattggccagaagcggaatttagcttcccctgtgatatcttttgctttgaaggtacctacgtggcggctgtcgctcgaaaccaagcggtcatctccgaggagaaggtattctccttctggaacagtaaagctaaagttggtgttgtagttgacatcaactgtgaaggcttgggctttttgagcgatacttctaaagaaagttcctttatttccttcaaagcccttgcctga

SEQ ID NO: 6234 - DNA, 294 bp, Streptococcus pneumoniae
  misc_feature (1)..(294): tiling:Spneumo1:WAN024BJL; WAN023KT4 315481_2918||||155430 5..1554598|+|294 bp|EGAD orf prediction|S.pneumoniae|R6|NC _003098.1|ORF
ttgtgcttgaggatatatcttcatgagcccttgataaccactgtcaaccaagattttaccagcttgtccgatatttctgcgactcattttgaacaacttcatatcatgacaatagttcacagcgatatccaaagaaacaattctcccttgacttgtgacaatcgcttgaggttccatagaatgacatttctattttaccagaataattggctagttgatttttttaggacgatttatttttacctctgttgcatccacaatcaccgtattctcagcactaagatgagtttttga

SEQ ID NO: 6235 - DNA, 219 bp, Streptococcus pneumoniae
  misc_feature (1)..(219): tiling:Spneumo1:WAN024993; WAN024B81   TIGR4.IG_991||||995 660..995878|+|219 bp|Between SP1059 (+ strand) and SP1060 (+ strand)|S.pneumoniae|TIGR4|NC_003028.1|IG
ttgttaatatataaaacataaaatttcaattttcaattagggataatagaattccttactatgatatagaaagtgaattaattaggaaatcttagtcagaggtttctgattaattcattttttatatattaagagtgatgtgaaatgttcaaattgtgagactactctcggattgttgtatagaaatttaaaattttattgtgagctttttaaggaaga

SEQ ID NO: 6236 - DNA, 191 bp, Streptococcus pneumoniae
  misc_feature (1)..(191): tiling:Spneumo1:WAN0249C2; WAN024EBK   R6.IG_1447||||13879 21..1388111|+|191 bp|Between spr1403 (- strand) and spr140 4 (+ strand)|S.pneumoniae|R6|NC_003098.1|IG
tttaaactcctagatagtattttatagtttacaatgtacaactatttgaggcattaatcaatattttctgaacaattaatatattctgtttttgcacttaaaagccacttatattattctaatttttccgattactaacgacaattttcttgctctaatttttttatactacttagacaaaaaaagatata

SEQ ID NO: 6237 - DNA, 117 bp, Streptococcus pneumoniae
  misc_feature (1)..(117): tiling:Spneumo1:WAN02498R; WAN024B0F   TIGR4.IG_1144.1.1|| ||1151036..1151152|+|117 bp|Between SP1220 (+ strand) and SP1221 (- strand)|S.pneumoniae|TIGR4|NC_003028.1|IG
tttaactatagacaactccttgaattatcagggagttgtttttttctgtattatagtaggttgaagttgaaatagccccccattactctaaaacgttgttataaaatgctttaaatt

SEQ ID NO: 6238 - DNA, 81 bp, Streptococcus pneumoniae
  misc_feature (1)..(81): tiling:Spneumo1:WAN0249C8; WAN024EEA   R6.IG_1238||||11924 67..1192547|+|81 bp|Between spr1194 (appA) (- strand) and spr1195 (- strand)|S.pneumoniae|R6|NC_003098.1|IG
tttaatactcctttatttgtattaagtaattatttatgtgattaagtaagtattgcagtaattaaaaatttaaactcttcg

SEQ ID NO: 6239 - DNA, 58 bp, Streptococcus pneumoniae
  misc_feature (1)..(58): tiling:Spneumo1:WAN0249CD; WAN024EFO   R6.IG_1130.2||||108 7647..1087704|+|58 bp|Between spr1092 (truB) (- strand) an d spr1093 (- strand)|S.pneumoniae|R6|NC_003098.1|IG
tttccgggccaatttttactgaggcgtcgtctaccttttattctcttttttacaaatt

SEQ ID NO: 6240 - DNA, 59 bp, Streptococcus pneumoniae
  misc_feature (1)..(59): tiling:Spneumo1:WAN02498V; WAN024B1B   TIGR4.IG_1066.1|||| 1069088..1069146|+|59 bp|Between SP1138 (- strand) and SP1 139 (+ strand)|S.pneumoniae|TIGR4|NC_003028.1|IG
tttgaaaagtcagccataaggtacacaaaaagggtagtattttagcatacgaaccctaa

SEQ ID NO: 6241 - DNA, 221 bp, Streptococcus pneumoniae
  misc_feature (1)..(221): tiling:Spneumo1:WAN0249BS; WAN024E9M   R6.IG_1597||||15330 22..1533242|+|221 bp|Between spr1550 (+ strand) and spr155 1 (- strand)|S.pneumoniae|R6|NC_003098.1|IG
tttgtaataactctcatcattttattatagtagattgtaatagaatgtgaacgaatcaattaggggatctaaagcattttataccaatgttttataagttgtattgtattattccatattcaatccactatacaagatgaatatttctctcaagtttcataatcaaaataaaaatgactgtatctatagctccataaacaaatcatagatacagtcatttt

SEQ ID NO: 6242 - DNA, 164 bp, Streptococcus pneumoniae
  misc_feature (1)..(164): tiling:Spneumo1:WAN02499N; WAN024D17   TIGR4.IG_491.1.2.1| |||501332..501495|+|164 bp|Between SP0519 (+ strand) and S P0520 (- strand)|S.pneumoniae|TIGR4|NC_003028.1|IG
ttttactttatagattttttaagactttcctaagtaatgacggacggtagtgacctccttcgaagttccatacctaaactttgaacctaagttttaaagtttccggacagctgaaaccaagctgtttcaggtgttttcattacggcagaaagtcttcgatttag

SEQ ID NO: 6243 - DNA, 54 bp, Streptococcus pneumoniae
  misc_feature (1)..(54): tiling:Spneumo1:WAN02498B; WAN024960   TIGR4.IG_1666||||16 78168..1678221|+|54 bp|Between SP1771 (- strand) and SP177 2 (- strand)|S.pneumoniae|TIGR4|NC_003028.1|IG
ttttctccttgatttatgtgcgcgagttagtttagcctaactttacaggttgtc

SEQ ID NO: 6244 - DNA, 135 bp, Streptococcus pneumoniae
  misc_feature (1)..(135): tiling:Spneumo1:WAN0249BU; WAN024E9O   R6.IG_1596.1||||153 1844..1531978|+|135 bp|Between spr1549 (- strand) and spr1 550 (+ strand)|S.pneumoniae|R6|NC_003098.1|IG
tttttctgtttcctttcattttttattcaagaagattccttataacttctattttaaatatagacttattctaaacgatggtatatcatacaaattcctcctttacttattatgtatagactctaatttctttat

SEQ ID NO: 6245 - DNA, 181 bp, Streptococcus pneumoniae
  misc_feature (1)..(181): tiling:Spneumo1:WAN0249BX; WAN024EAO   R6.IG_1531.1||||146 1108..1461288|+|181 bp|Between spr1484 (- strand) and spr1 485 (+ strand)|S.pneumoniae|R6|NC_003098.1|IG
ttttttacctcgtattttttctaattattgattttttctaaaaacaaaatcaattcaatggtgaatctctagctttcatcttcattcgttcctctttccatcctaaacaaagtagtgtttttatcccgtaataggttttattttagcggagcattacactccgcattaatattgatagtat

SEQ ID NO: 6246 - DNA, 65 bp, Streptococcus pneumoniae
  misc_feature (1)..(65): tiling:Spneumo1:WAN0249AZ; WAN024EEO-rc   R6.IG_1205.1|||| 1166915..1166979|-|65 bp|Between spr1164 (gidB) (+ strand) and spr1165 (pyrP) (+ strand)|S.pneumoniae|R6|NC_003098.1 |IG-rc
ttttttcccgagcctaaaaataagagagcgaggttgattttgtaaatatttttttacttaaaaat

SEQ ID NO: 6247 - DNA, 111 bp, Streptococcus pneumoniae
  misc_feature (1)..(111): tiling:Spneumo1:WAN024C32; WAN0246V0 274943-59-8||||||111 bp|DNA Streptococcus pneumoniae phage Dp-1 open reading fr ame dp1ORF235|S.pneumoniae||WAN0246V0|ORF
atgaaatcatggacgctatgccaggggtacttgacctggctgccgtatctggaggagatgtggccgcgagctccgaggccatggctagttcacttcgagcctttggattag

SEQ ID NO: 6248 - DNA, 299 bp, Streptococcus pneumoniae
  misc_feature (1)..(299): tiling:Spneumo1:WAN024BRW; WAN0241JC |wzh||AAQ10258.1|||29 9 bp|putative phosphotyrosine protein phosphatase Wzh|S.pn eumoniae|NZSPN00/50 |AF532714|ORF
atgattgacatccattcacacatagtttttgatgtcgatgatgggcctaaaactatagaagatagtcgagcattgcttgaagaagcatatgcacaaggggttcggactattgtttcaacttctcatcgacgaaagggaatgtttgagacgccagaagataagattgctgctaattttaaaatcgttcaggaactgtctaaggagatagctcctgacctaacaatcttatacggtgctgaaatctattttactagcgacatcctagataaattagaaaatcacatcatccctaaactcaa

SEQ ID NO: 6249 - DNA, 495 bp, Streptococcus pneumoniae
  misc_feature (1)..(495): tiling:Spneumo1:WAN024BQV; WAN023ZYN |wzg||AAQ10257.1|||49 5 bp|putative regulatory protein Wzg|S.pneumoniae|NZSPN00/ 50 |AF532714|ORF
ttcttgaaattgatagaccttctgggaggtgtagatgtatacaacgaccaagaattcacgtcacgtcatggcaattatcatttcccagttggaaatgtgcatctagactctgagcaagctttaggttttgttagagaacgttattcattagcaaatggtgatggcgatcgtggtcgtaatcatcaaaaagtgattgctgctattattcaaaaattgacctctgcagaagccttgaaaaattatgatgccattatccaaggtctacagtcttcggttcaaaccaatatgccaccagaaactatggttgggctagtcaattctcaactagcaaatggcggcaaatatactgttacaactcaagatttaaaaggaactggtcgtatggatcttccttcatatgcaatgccagatagtgccttgtatatgttagaagtggatcagaatagtttggaagcaagcaagacagctattaaagatatcatggaagggaaataa

SEQ ID NO: 6250 - DNA, 500 bp, Streptococcus pneumoniae
  misc_feature (1)..(500): tiling:Spneumo1:WAN024DRY; WAN0240RM-con |pspA||AAF68105.1 |||749 bp|PspA|S.pneumoniae||AF255552|ORF|000
aaaaagactagacaaaaagcagaagaagctaaattaaaagaagctgaagttgctaaaaaagtagaagaaacgaaaaaacaagaagaagaagctaaagcaaaattagaagaggctgagaaaaaagctactgaagccaaacaaaaagtggatgctgaagaagtcgctcctcaagctaaaatcgctgaattggaaaatcaagttcatagactagaacaagagctcaaagagattgatgaatctgattcagaagattatatcaaagaaggtttccgtgctcctcttcaatctgaattggataccaaaaaagctaaactattgaaacttgaagagttgagtggtaagattgaagagttagacgctgaaattgcagaacttgaagttcaacttaaagatgctgaaggaaacaataatgtagaagcctactttaaagaaggtttagagaaaactactgctgagaaaaaagctgaattagaaaaagctgaagctgaccttaagaaagc

SEQ ID NO: 6251 - DNA, 336 bp, Streptococcus pneumoniae
  misc_feature (1)..(336): tiling:Spneumo1:WAN024AF7; WAN024EJR-rc R6.IG_807.2||||773 271..773606|-|336 bp|Between spr0777 (+ strand) and () (+ strand)|S.pneumoniae|R6|NC_003098.1|IG-rc|100
aaaagacaataaaaccattataccttatctaactcaaaaatgcaaaaagaaatcacatacctaaaaaagatactattcgagaaatttagcaaactggaagactaactacaactttttcagtgcataactttacgattgtaaatagagcttacgaaatccaattaacacatacctaagatgaagctatctgttttgaagaaattcacgaagagaattattctaaaatactttcagatgagaattttcgtactctctttattttaattcatttgagtttaaaaactataaaatcaatccttatattattcggactacttttcacttattgcaccaaaa

SEQ ID NO: 6252 - DNA, 221 bp, Streptococcus pneumoniae
  misc_feature (1)..(221): tiling:Spneumo1:WAN0249OX; WAN024E9M-rc R6.IG_1597||||1533 022..1533242|-|221 bp|Between spr1550 (+ strand) and spr15 51 (- strand)|S.pneumoniae|R6|NC_003098.1|IG-rc|100
aaaatgactgtatctatgatttgtttatggagctatagatacagtcatttttattttgattatgaaacttgagagaaatattcatcttgtatagtggattgaatatggaataatacaatacaacttataaaacattggtataaaatgctttagatcccctaattgattcgttcacattctattacaatctactataataaaatgatgagagttattacaaa

SEQ ID NO: 6253 - DNA, 345 bp, Streptococcus pneumoniae
  misc_feature (1)..(345): tiling:Spneumo1:WAN024BGH; WAN023PS2 pne15_21||||16278..16 709|+|432 bp|Type 9N capsule operon, Glimmer 2.02 orf pred iction|S.pneumoniae||WAN01UCJT|ORF|000
aaaatgagtcgcagaaatatcggacaagctggtaaaatcttggctgacagtggttatcaagggctcatgaagatatatcctcaagcacaaattccacgtaaatccagcaaactcaagccgctaatagctgaagataaagcctataaccatgcactgtctaaggatagaagcaaggttgagaacatccttgccaaagtaaaaacgtttaaaatgttttcaacaacctatcgaaatcatcgtaaacgcttcggatattttaggcatactatatattttttattcaattattcacttttgtattcaaaaggttgcgggtgcctctgtccgagtacccactatgatatt

SEQ ID NO: 6254 - DNA, 233 bp, Streptococcus pneumoniae
  misc_feature (1)..(233): tiling:Spneumo1:WAN0249PE; WAN024EPE R6.IG_387||||363642.. 363874|+|233 bp|Between spr0363 (recD) (- strand) and spr0 364 (spi) (- strand)|S.pneumoniae|R6|NC_003098.1|IG|100
aaaattcctttgtatgaataggtgagagttgggattgtttttattttatactcttcgaaaatatcttcaaaccacgtcagcttccatctgcaacctcaaaacactgttttaagcagcctacggctagcttcctagtttgttctttgattttcattgagtatttgtcaataaacaatcacttctcacgatagaagaagaggctgagattggtgattctcggcctcttaggtttc

SEQ ID NO: 6255 - DNA, 82 bp, Streptococcus pneumoniae
  misc_feature (1)..(82): tiling:Spneumo1:WAN0249O2; WAN02491X-rc TIGR4.IG_1685||||1 706949..1707030|-|82 bp|Between () (+ strand) and SP1791 ( - strand)|S.pneumoniae|TIGR4|NC_003028.1|IG-rc|010
aaacacggcaaattgcacgacaatttttaaaaggaaagcaaaaaaagccctatattataaggcttttcctgttgtatttata

SEQ ID NO: 6256 - DNA, 164 bp, Streptococcus pneumoniae
  misc_feature (1)..(164): tiling:Spneumo1:WAN024ARQ; WAN024950-rc TIGR4.IG_1667.1.2| |||1692790..1692953|-|164 bp|Between SP1772 (- strand) and SP1774 (+ strand)|S.pneumoniae|TIGR4|NC_003028.1|IG-rc|01 0
aaagaataattatgcataaaaataggaatataaaccaaaaattagctgatttatactcatttgcgtgtctttataaaaaacttatcttataatatatatatatatatatacaaaatagtaaaatgctttttttttttagcaaaaatacctcaagtttcttgcta

SEQ ID NO: 6257 - DNA, 75 bp, Streptococcus pneumoniae
  misc_feature (1)..(75): tiling:Spneumo1:WAN024BIC; WAN0240DR |cpsB||AAD17981.1|||7 5 bp|capsular polysaccharide B|S.pneumoniae||AF106135|ORF| 000
aaatacggagaagcgaaggctcaggaactttttatagacaatcctcgaaaaattataatggatcaactaatttag

SEQ ID NO: 6258 - DNA, 75 bp, Streptococcus pneumoniae
  misc_feature (1)..(75): tiling:Spneumo1:WAN024BI9; WAN0240DV |cpsB||AAD17985.1|||7 5 bp|capsular polysaccharide B|S.pneumoniae||AF106137|ORF| 000
aaatatggagcgaaaaaagcgaaagaactttttgtagataatcccagaaaaattataatggatcaattaatttag

SEQ ID NO: 6259 - DNA, 533 bp, Streptococcus pneumoniae
  misc_feature (1)..(533): tiling:Spneumo1:WAN024FEB-5; WAN024036 |pbp1b||CAA05304.1| ||1600 bp|penicillin-binding protein 1b|S.pneumoniae||AJ00 2293|ORF|000
aaatccatgcaaaatcaattaaatgaattaaaacgaaaaatgctggaatttttccagcgagtaaaatcaaaaataaatcataaaaaatcagagaaagtctcagaagagaagaagtcggatgggacaggtgggagaattctgtctattctagggagcattttagttgctattaagggaattttgaatactctctttattctaggctttatcggtgggctttttggtgctggtctagctcttggttatggagttgctttgtttgacaaggctaaggttccccaatcggaggagttggtcaagcaggttaaaaatatttcttctatctcagaaattgtttatgcagatgggagtgtcattgcttctatcgagagtgatttactgagaacttcgatctcatctgaggaaatatcggacaatctcaaaaaggctatcgttgcaactgaggacgaacatttttttgaacataatggggttgtgccaaaagctgtgattcgggcgactttgggaacctttgcacgtttgggctcatctac

SEQ ID NO: 6260 - DNA, 323 bp, Streptococcus pneumoniae
  misc_feature (1)..(323): tiling:Spneumo1:WAN0249PC; WAN024881-rc TIGR4.IG_1985.1||| |1963307..1963629|-|323 bp|Between SP2062 (- strand) and S P2064 (- strand)|S.pneumoniae|TIGR4|NC_003028.1|IG-rc|010
aacccgacttgataacatcattttgacgaatgagatctagctttcgtgatggaaagcgattctcgttcgttttttctttgtcatactcttcgaaaatctcttcaaaccacgtcagttttatctgaaacttcaaagctgtgctttgagcaacctgcgactagcttcctagtttgctttttgattttcattgagtatcaatttgaatggaaaatggaaagttatcatcttgtaatgagttaagcaacattcttgcaatctattttactttatatcacaattaattagtcaaatattgataaatcaataaaaagagaggggaagaa

SEQ ID NO: 6261 - DNA, 954 bp, Streptococcus pneumoniae
  misc_feature (1)..(954): tiling:Spneumo1:WAN024ALQ; WAN02490U TIGR4.IG_1779.1||||17 89540..1790493|+|954 bp|Between SP1885 (+ strand) and SP18 87 (- strand)|S.pneumoniae|TIGR4|NC_003028.1|IG|010
aagactgagacaccagatctcagcctttttcggctctataatatttgtagtgggtaacccccctatggatattatggagcctattttgtgtagaaaaaaagtcccatatgacctataatgaaaagcgacaaaacaactcattagaaagattcatatggaacaattacattttatcacaaaactgctcgatattaaagacccaaacatcaagattctagacatcatcaatatggatacccacaaagaaattatcgctaagctggattatgaggctccatcttgccctgattgtggaagtctaatgaagaaatatgactttcaaaaaccgtctaagatcccttacctcgaaacaactggtatgcctactagaattctccttagaaagcgtcgtttcaagtgctatcattgttctaaaatgatggtcgctgaaacttctatcgtcaagaagaatcatcaaattcctcgtattatcaaccaaaaaattgcgcaaaagttgattgagaagatttctatgaccgatattgctcatcagctggccatttcaacttcaactgtcattcgaaagctcaatgattctcactttgagcatgatttttcgcgtcttcctgagattatgtcctgggacgttgaaacagtccggggagtgactgtttcaatcgggagatggagatgagctttattgcgcaagattttaacaatttcaatatcatcactgttcttgaaggtagaacacaagctgtcatccgagatcactttcttaaatatgatagagccgtccgatgtcgcgtcaaaatcattactatggctatgtttagcccttactatgacttggctaaacagcttcgctttcaaatttctaggctcaggctgaaacagtctcccaggctgtttcactcccgaatgctaaaatcgttcttgatcgctttcacattgtacaacatcttagccgtgcta

SEQ ID NO: 6262 - DNA, 318 bp, Streptococcus pneumoniae
  misc_feature (1)..(318): tiling:Spneumo1:WAN024A3O; WAN024A90-rc TIGR4.IG_1334.1.1. 1||||1335649..1335966|-|318 bp|Between SP1416 (+ strand) a nd SP1418 (+ strand)|S.pneumoniae|TIGR4|NC_003028.1|IG-rc| 010
aagtagtgaatgattctgaaataactcataatagtctcttgagaggacagataagagtaacaaatatggtgctactcatgtgtcttgcattttgatttacaaacagcgaagaaagtataggaagctgaaataaaatatagatgaatcaatttggagagtcaacgcaatctatggcaatattttcgaagctagggggaagcattttaatttcaatgtactaggcctcttctacagctagctagagtttcaattgtagatgttctttgaaataatatcttagcgatttattggtattagaagatttagagaaattctttc

SEQ ID NO: 6263 - DNA, 206 bp, Streptococcus pneumoniae
  misc_feature (1)..(206): tiling:Spneumo1:WAN024A3P; WAN024EDG-rc R6.IG_1317.1||||12 68222..1268427|-|206 bp|Between spr1273 (queA) (+ strand) and spr1274 (- strand)|S.pneumoniae|R6|NC_003098.1|IG-rc|1 00
aagtagtgaatgattctgaaataactcataatagtctcttgcgaggacagataagagcaacaaatatggtgctactcatgtgtcttgcattttaatttcaatgtactaggcgtcttctacagctagctagagtttcaattgtagatgttctttgaaataatatcttagcgatttattggtattagaagatttagagaaattctttc

SEQ ID NO: 6264 - DNA, 4467 bp, Streptococcus pneumoniae
  misc_feature (1)..(4467): tiling:Spneumo1:WAN024DD8; WAN023NGH-3 spn114d03_26||||219 80..27646|+|5667 bp|Glimmer 2.02 orf prediction|S.pneumoni ae|23F-1|WAN01UCUN|ORF|001
aatacagataaagttgaactcgaaaatcaacttaagattgcacagggaaaaactgaaactgatttcagcatggaatcttggactgttttgagtacagctaaaaataaagctcaggaagtaaaagataacggaacagcgacccaagaacaaataaacgaagcagagaaaagtttgaaaacagcccttgctgacttatctgttgacaaaacagctttgggaagcgctatcgatacagctactaagaaaaataaagagaattatacaaatcaaacatgggcagagttggaaacagcgcttacagcagcaaaatctgtaaatactaacgagtctaaacaaagcgacgttaacgaagctgctgaaaaattaactgcaactatggaaaaattggttgaattgtctgaaaagccacgtttgactctatctattgaaaagagagacatagatcgaaaagctacggtcacgtatactttggaaaatccagcaaatactcaaataaaatcaataactgcaactctgaaaaaaggagaggaagttgttaaggattttgttttaacagaagaaaatcttaaaactaatcatttaactgctttgtttgaaaagctagactactacaaagaatacactctatctacggatatggtatataacagaggaaatgatgatgagacggagagtatttcagaagaactaattcagctgaatcttaagaaactagaattgaaagatatccagacagtctctctgatgaaatttgaaaatggtcaagaaagtcaggttacacacttgtctgataaaccgaccgatttgagtaaattatacttaaaagttacatcatcaacgtctaaggatgctgtgttagccgttagctctatagaagaagagattattgaaaataaaaaaatctttaaaattcatgcagatacaccagaattagtagttcgtaagaaagatggcagtctttctaagggatttgactattacatggagagagttatccctcatgatggtgatatttattatgattttaaagacttgatttcagctatgacatctaatcctacaggtacgtttattttagggagagatatttcctcgcgtaatgtaaaaccggatggaaatggaaaatcttatatcaaaggtgaatttaaaggaaaactacttggtacaaatgataatgttagacactcgatttttgacttagaatatccattgtttgatactataaaatcaggagtcgtgaaagatattgatttcaagcatgtcaatatggtattcccagatagcaatcaaggagataacgtagcaacaattgcaagagtaatcaaagataagacaaaaattgagaatgttaatgttgaaggttatctcgagggtcgagatcatgtagctggtttagttaataatcttgaaggtaattccgaaattgaaaatgtatcctttacaggaaagattaagtctaaaggtggtaattctattacagcaggtattgcaggtagaaatatcttatctcgtgttaaacgtgcctatgtaaatgcagatatagaggtacatcgatcatctaattctagcatgcttgttgcagtaaatggaataaatgcagatgcaagtggtggttggggaacctggggtagacttactgagtcagttgctaaaggaacattagaaaccaagcaaggagggcaagctggaggagcctcttctacagtctggccttatggagcaattgataatgttgtcagctatgcaaaagtgaccaaagggaaagaattatttggatcagatggtgatttaaattatgattggtttatgaaaaaaattagtaatatttttggtgttcaaggcatcagctcaggcgattcgggtagtgattctaaatttacgcgtatttctgaggaagaagcaaatcaaaaagttgcttcttataatattacagctcccaacttgatgagtgactcaagtcttttggtagacagactcaatgaaagttggaaaaatactgatcaatttgaaagtatacaggattatcaagcccaaaaccaattaatttaccagaacttgactaaatttactccttattacaataaagaatttattgttcatgaaggaaatgctctcactcctgaacaggaaatattgaagactaagaaaatcaaatcgattgtagggttgaaaggaacagagttcgttgtagatggcagtgatattgatactatcatgcttcattttgaggatggtagtcagaagcgatataaggtaacctctactggtaagttttcgataactaatttaccggaatatcaggttgaagatttaaatgtggtgtatacatcagaacatatagtacatccactagattcgtcactgataaataaccttgttgaagaattgaaaaaagtagaattgtatacagagtctacttaccaagttctaggtattgataaagataatgctaacaaattgaatagaactaagagattattcttagatgagtcattagatgctgttaaaacacaattgcctacctttgtaaaaacaatgtttgaaaatgagtggttgcacatcaatggagaatctagtggagctgtcgctgctttacgacaaaaaatcatggataataagacggctatattgcttgctttgacttatatcaatcgttattatgatgttaaattctcagactataatattaaaaaactgatgctctttaaaccaactttccatggtgaaaagattgatctattagatcgattaatccgactaggatcatctggagaaaatagattaaaaggttcagaaaatgcagaaacgttcaagcagttatttgctagcgaaacgaagcagaaggatttggtgacttatttagactacaatcgctctttgttgactaattatcaaacaacaggggaatggtttaaagaaacgactaaggattatattcaatttgaggaacgtccatccttagtagaggagattaaagatgccaaatatcgagtttacgataatttaaccgcaccgtattatcaaggatatatcctacctctcttaacgttgaagaatactcatttagcaattttatcgaactatagtactatgacatttgtcagccgtgaaaaacgccctaattggaaaaatgaagattttgataagtgggtgaaatatgtagcaactgctcatagaaaccatgttgatacttggtataagattttacctgataatatcaaaggtaaaatggttaaagagaatgttactgctgtttgggaaggattgagcatcccaggaagtgaatgggtagaccagaatgctgtagatagaaaaggaagagattacgccccagctcgagaattctttaatcttgtaggtggtcctatgggaggttggtatgcttaccatggttatggtgcgcatgctggaggaagaaatcgggttaattatgaggtgtttgatgtattaagtgagtatggtatatcggtctttactcatgaattgactcacgttaatgatacttggatttacttaggagggtatggtagacgtgaaaatatgggacctgaagcttatgctcagggattattccagtctcctgttccaggtcagccgggttggggggcgcttggtctcaatatggcatttgaaagaaaaaatgatggtgatctaatttataatgcctccccaactcaatttgaaaataggaaagagttagatagttatatgaaaaattataacgatactctcatgatggtggactacttggaaggagatgcagttatctctaaaggtaaagaagctattactaaatggtttaaaaaagttgaacctaaggttgttagtcaaacagctcagtatgatacggttcgtcagttgactgctgaagagaaagaaaaactttctgtttctagtgttgatgatttagttgatcaaggattaatgtcagacagagctgtaggaaataatacctataatccagctgattttgaaacaagttatattgcgatagattatatgactggtatttatggtggaggaaagaatagtgtaggttcaccaggtgccttgatgtttaaacataatactttccgtatgtggggctactatggttttgaagaaggtgttctaggatatgcttctaataaatttaagcaagcatctagagatgaaggtcatgctggacttagtgataactttattatttctaagatttccaaaggggaatttttaactatggaagcatttaaaaagggatattttaagaaagtagtagaagagttaaaaactaaaggtattcgtcctgttactatcaatcaaaaaacatatagcacctttgaagaattgcaagaaggatttaagcaggctgttgaaagagatttgaagaaaaatcagttagatgagagggaaacaagaaacttcaaattccaagttttcagacaacttcttcaacaaacagatagctttaaaacttctatctttaga

SEQ ID NO: 6265 - DNA, 141 bp, Streptococcus pneumoniae
  misc_feature (1)..(141): tiling:Spneumo1:WAN024B2W; WAN0240L6 |ddl||CAB64521.1|||14 1 bp|D-alanine--D-alanine ligase|S.pneumoniae||AJ387999|OR F|000
aataccatgccaggtttcacccagtggtctatgtacccactactttgggacaatatggggatcacctacccagatttaatcgagctactggttgaccttgccaaggaaagttttgacaagcgcgaagcgcatttgctataa

SEQ ID NO: 6266 - DNA, 141 bp, Streptococcus pneumoniae
  misc_feature (1)..(141): tiling:Spneumo1:WAN024B2Y; WAN0240LM |ddl||CAB64537.1|||14 1 bp|D-alanine--D-alanine ligase|S.pneumoniae||AJ388007|OR F|000
aataccatgccaggttttacccagtggtcaatgtatccacttctttgggacaatatgggaatcagctatccagacttaatcgagcgattggttgatcttgccaaggaaagttttgacaagcgcgaagcgcatttgctataa

SEQ ID NO: 6267 - DNA, 256 bp, Streptococcus pneumoniae
  misc_feature (1)..(256): tiling:Spneumo1:WAN0249OY; WAN024ENB-rc R6.IG_530.1.1||||5 04996..505251|-|256 bp|Between spr0506 (bglH) (+ strand) a nd spr0507 (pheS) (+ strand)|S.pneumoniae|R6|NC_003098.1|I G-rc|100
aatcgattgggaaagtaaaattaatttctataaatgttttagcaattgtttcgtactattttagattcagtctactatatataaccaatctatcctaagttaactatttataatcggctctctgtaacaaaattaaattaattaatccccctataaaataaagaggtttagaatttgatgtcttccaaacctctttatttcatatttaatgagatgctgccttaaccgtgataatatctaatcatcaataaacaaa

SEQ ID NO: 6268 - DNA, 93 bp, Streptococcus pneumoniae
  misc_feature (1)..(93): tiling:Spneumo1:WAN024BAX; WAN0244UY ||||||93 bp|Incyte or f contig SPN2C0108 236-328|S.pneumoniae|23F|WAN0244UY|ORF| 000
aatctcatactcttcgaaaatctcttcaaaccacgtcagtttccatctgcgacctcaaaacactattttgagcaacctgcggctagctttcta

SEQ ID NO: 6269 - DNA, 66 bp, Streptococcus pneumoniae
  misc_feature (1)..(66): tiling:Spneumo1:WAN0249OW; WAN024A1U-rc TIGR4.IG_1355.2.2. 2||||1362421..1362486|-|66 bp|Between SP1439 (+ strand) an d SP1442 (- strand)|S.pneumoniae|TIGR4|NC_003028.1|IG-rc|0 10
aatgaggactttctttttagttataataaagttaggaaataaggagaggaagcccatggaagaaga

SEQ ID NO: 6270 - DNA, 659 bp, Streptococcus pneumoniae
  misc_feature (1)..(659): tiling:Spneumo1:WAN024CP2; WAN0246KO ||||||659 bp|Incyte o rf contig SPN2C0451 3331-2669|S.pneumoniae|23F|WAN0246KO|O RF|000
aatttaaaaagaaatatatagcagctggatctgttgttatcctttccttaagtctgtgtgtttatgctctgaaccaacatagctaacaggccaatacagataaaaatcgtgtttcatatgtaaacagtaataaagacactaagaagactgaaaatttgactccagactaggttagtcaaaaagaaggaattcaagcaaaacaaattgttattaagattacagatcaaggttatgtaacttctcatggcgatcattatcactactataatggtaaagttccttttgatgcgctctttagtgaagagctattaatgaaagcccccaactatcagccgaaagatcaagatatcgtcagttaggttaagggaggatatattattaaggtagatggaaagtattatgtttaccttaaagatcaagctcatgcagaaaatgtacgaacaaaagatgaaatcaatcgccaaaaacaagaacatggtaaagacgataaaggagctagtgcagaagtatctgtagcaaaattacagggacgttatactaccgatgatggttatatatagtgagttgaatttagaatagcacatcatagtttctaaatcattgttagaaattactttaaaatccccttatcaatttgctcatattctatttcaatctac

SEQ ID NO: 6271 - DNA, 117 bp, Streptococcus pneumoniae
  misc_feature (1)..(117): tiling:Spneumo1:WAN0249P8; WAN024B0F-rc TIGR4.IG_1144.1.1| |||1151036..1151152|-|117 bp|Between SP1220 (+ strand) and SP1221 (- strand)|S.pneumoniae|TIGR4|NC_003028.1|IG-rc|01 0
aatttaaagcattttataacaacgttttagagtaatggggggctatttcaacttcaacctactataatacagaaaaaaacaactccctgataattcaaggagttgtctatagttaaa

SEQ ID NO: 6272 - DNA, 248 bp, Streptococcus pneumoniae
  misc_feature (1)..(248): tiling:Spneumo1:WAN0249EH; WAN02480H TIGR4.IG_2135||||2130 389..2130636|+|248 bp|Between SP2209 (+ strand) and SP2210 (+ strand)|S.pneumoniae|TIGR4|NC_003028.1|IG|010
acaatgaataatacagcgtttcgttgacattctcacaactactttagcgagcaaaataaaaagaggcgtaccaaaatatactagaaaatgaagcaattcaaacgaaacctgatatcgttttccttcacacctatttactagaattagctgaacgcaatcacttgaaaattaatgactttgatctatgatatatagaaatggtatggatagcgttatactaaagatatcttatacaaagaggtattcat

SEQ ID NO: 6273 - DNA, 284 bp, Streptococcus pneumoniae
  misc_feature (1)..(284): tiling:Spneumo1:WAN0249EG; WAN024E3H R6.IG_2221||||2007946 ..2008229|+|284 bp|Between spr2014 (+ strand) and spr2015 (cycK) (+ strand)|S.pneumoniae|R6|NC_003098.1|IG|100
acaatgaataatacagcgtttcgttgacattctcacaactactttagcgagcaaaataaaaagatgcgtaccaaaatatactagaaaatgaagcaattcaaacgaaacctgatatcgttttccttcacacctatttactagaattaactgaacgcaatcacttgaaaattaatgactttgatctatgatatatagaaatcctatcgcttcgataggatttctatattttacaaatggtatggatagcgttatactaaagatatcttatacaaagaggtattcat

SEQ ID NO: 6274 - DNA, 1640 bp, Streptococcus pneumoniae
  misc_feature (1)..(1640): tiling:Spneumo1:WAN024BOF-3; WAN023OCN spn019g01_9||||1093 7..14215|-|3279 bp|Glimmer 2.02 orf prediction|S.pneumonia e|23F-1|WAN01UCLR|ORF
acactgattctttgtctcataacaatgaccaaatcaaagctcgtatctcagcgatggaggcggaatcaacatgggagacatcccagaagaacctgcttgatatcgaacaaaagcgtgctgaaattggcgaacagctaaagcagatagctgaacaacgcaaaaaatggaatgaagaatccaatgttagcgatagtgtccgtaaagaaagactgcaagaactcaacgacaaggaaactgagctaaaaaatactcagacagaattgcaaactgagtacgaaaaaacgtctcaagttcaacaggcggcatctgaagcgatggctgctgctgccgaaaatggatctaatcgacaagttatatcatacgaaggtatgtctaaagctcaacaaaaagcggttgatgatatgcgctctaaatacaatgagttgcttgaaaccacaacgaacatgtttgatcagatacaaatgaagtcagctattagtgtcgatgaaatgattgccaacctccaaaaaaaccaagaggcggttaataattgggcaacaaacctcaatacattggccgaacgtggggtaaacgaggggattttagctaaattgcaagcgatggggcctcaaggtgggttgtacgttcaagaactcgttaatgcatcagacgaaaaattggcaacattgaacgaagtctttactcaaggtggtgagtcagctatgaatggcttaactgctggtatggatacgggtgctttgggtatcacagacaaaatcaagggtattgtacaaagtcaagtttcaagcttacaagaggaaattgcagctgctgacttccctgaaaaagggaaaaatattcctgaaggtgttggtgatggtataaaagctggagctgaaattgcaagtgaagcttctaaaaacatggcaaatgacataaaagaatcctttacaagtgaaatggatatcaattccccatctcgtgttttcaatgagtatggtggttttatcactactggtttagctgagggggtagataaaggtaccaatcaacctgtatcatctgttactaatttagccaatcaaattaagaaaccatttgatagtctgcagagtgatttcacgtacattggtgaaatggcgatgtctggtcttaatgcagggctttggagtggctctggttctgttatggcaacagctaattcaattgctgaaagggtaaaagcgaccatcaagagcgcactagatattcactcgccatctagagcaatgcgtgatgaagtcggacgtttcattcctcaaggtatcgctgttggtattgaagcagatgcaggggttgttgaaaaatcaatgttgcgattaaaagaaagcatgatgattgatactagaccagaaattgcacttggcttaaacaagaaactaggtgctcaagtgactgttaaacaaagtagtaagcagacaatagctgaaaaaatcaaagttactatggacaagtctagcgaactactcgaaaaagccctggatgtagctgagacggccgttagacgaccaaatgaaatgtacttaaacgatggtactttagtcgccagaacaggcgataaatttgctaaatatcaatcggaacaactaagacgagataataggatgaaaggggtattgtca

SEQ ID NO: 6275 - DNA, 4110 bp, Streptococcus pneumoniae
  misc_feature (1)..(4110): tiling:Spneumo1:WAN024DEE; WAN023Z26-3 AL449926.1_24||||21 631..27240|+|5610 bp|Glimmer 2.02 orf prediction|S.pneumon iae||AL449926.1|ORF|000
acagtagaagaaacagttctccaagcacctcaagatgagattatcaaaaaaggcacaaaaggtttagaaaaaccaaccttagaatgggttaaaacagataaagatgtcttgaagaagagtgcgacagccagttatacattgaataaaccagatggggtagaaatcaaatccatcaaagtagctctaaaagataatactggaacagttattaaagaagtaacggtagaagaaaataacttaaacgctactttagacaacttgaaatattatcaaggttatacactatccacaaccatggtctataatcgaggcgaaggcgaagaaactgaaatgttagaagataaagaagttcagttagaccttaaaaaagttgaaatcaaaaacatcaaagaaactagcttgatgagtgtggatgatgctggtgttgaaacagataagagcttacttactgaaaaaccgacagacgttgctccactttacctacgagtgacaactcatgataacaaaacaacaagactggcagtaagttcagttgaagaagttgttgttgatggaaaaacattgtacaaagtggtagctaaagctcctgacttagttcaacgtagagaagatgatacactaagcgaagagtatgtacattactttgaaaaacaattaccaaaagtagataatgtgtactatagctttaacgagttaattacagatatgcaaaaaaatcctactggtacattcaaactaggtgcagatcttaatgcagcgaatactccaactccaagtaaatcatatgtaacaggtgaatttaaaggtaaattatcaagtgttgatggtcaacattatacgattcacaatactgcgcgcccattatttaacaatattgttggtggtaccgttaaaaatattaatcttaacaatgtaaatatcgatatgccttgggctgatcaaattgcatctgtagcaaatgtgatcaaaggtggtagccttattgagaatgttaaagtcaaaggtaatgtgctcggcagaaactgggtatctggtttcattgataaaattgacagtggtggtagattagttaatgttgcatttattggtaatgtaacttctgttggagatggggataagttcttaacaggtattgttggagaaaactggaaaggatatgtcgaaaaagcatacgttgaagctaatattaaaggtaagcgagctaaagctgctggtatatcttattggtcgcaaaatagcggagataataatgctgtcggtagagatggagcaattaagaaatctgtcgttaaaggttcaatagatgtagaaaaaccaattgaagttggtggcgctgttggaagtttaaattatcttggttatatagaagacactgttgctatgatgaaagttaagaacggtgaaattttctacggttcgcatgatatcgataccgatccatattacacaggagaacgagtaaatagaaatttcattgttgacggtgtaagtgaaggtaaatcttcgtatacatactctaaacaacaaaagcgtattaaatcaatatctcaagaggaagcagataagaaaattaaagaattgggtatcacagcagataaatttacaattatcgatccaattgtaaataaacttaacaacatcaaacaaaaagctgatacttataaagatactcaagattacaaagtagaccgtgaacttgcttatcgtaatatcgaaaaacttcaaccattctacaataaagagtggattgtagaccaaggtaataaagttccatcaaattctaaattattaactacagaagtattatctgttacaggtatgaaagatggtcaatttgtgactgacttatcagaaattgataaaattatgattcactatgcggatggtacaaaagaagaaaaatctgtatcacctaagcctacatcaaacgtagaacaagtaaaagaatatggtattacagatttaggagatgtcgtttacacaccaaatatggtggttaaagaccgtgctcaattactaagtgatgttaaagcgaaattagatacgattactcttgaatctcctgaagttcgtgcgataacaggtaatgttggagcattatacttagaagaaagttttgcagaagtaaaaggaaatcttgataaattagtaaaagctcttgttgaaaatgaagatcatcagttaaatagtgatgaggcagccatcaaagcatttcttaagaaagtagaagataataaagctaaaatcatgatggcacttacttacctcaatcgttattatggtattgaatatggtgacttaaacattaagaatataatgatgtttaaaccagatttctatggcaagacaccaagtgttattgatagattaattcgaattggttcgcaagaaaagaacttgaagggtgatagaacccaagatgcatatcgtgaaattattgcaggagatactggtaaaggtgatttacgtagtttcttagattataatatgcgtctcttcacaaatgatacagatcttaatgactggtttatccattcagcgaaaaatgtttatgttgtagaaccagaaacaacaaatccagatttcaaaaataaacgtcatcgtgtttttgatggtctgaataataatatgcatgcacgtatgattttaccattattgaacttgaaaaaagcacatatctttatgatttcaacctataatactatggcttatagttcatttgaaaaatatggtaaaaatacggaagctgaacgtgaagcgttcaaggaacgtatcaattatgtagctaaagctcaacaaacatacttagacttctggtcacgtcttgcacttccaaatgttcgtgatagacttcttaagagtcaaaatatggttcctacacctgtatgggataatcaagcttatgcgggtattaaggatgctaatcgtcgtggatatggtacagatggtaaggtagcgacaccaattcgtgagttatttggtccaacagacagatggcatcaaattaattggaatatgggagctatggctaaagtttatggaaaaccatatgaagatgaacaagttttcttcatggtaacaaatatgttagaggactttggtatttcagcctttacacatgaaacaactcacataaatgaccgtatggcatatcttggtggtcatggacatcgtccaggtacataccttgaagcatatgctcaaggtatgttacaaacacctgataaatcaacatcaaatggtgagtatggagcattaggtattaatatggcttatcatcgtcaaaatgacggaaatcagtggtataacccagatcctgataaattacaaagtcgtgaacaaattgatcactatatgaagaactacaatgatgctcttatgatgttagatcatcttgaggctgatgctgtattaccgcagttaaatggaaatacgagtcgctggttcaagaaaatggatagacaataccgtagtggaaattcaggtcatcagttcgataaaattcgtgagttgacagaggatgagaaaaaagtagcaatcaatacaattgatgatttaattactaataacctaataacgaaacatggtgctcctggtgatggtacttataatccaacggactttaggtctgcttatgttaatatgaacatgatgactggtatttatggtggaaatacaagtacaggtgcaccgggtgcagcatcatttaaacataatacattccgtatgtggggatactttggatatgagaatggatttgttggatatgcttytagcaaatatcaaaatgcagccaataaagaaaataataggatgttaggtgatgacttcattattaagaaagtttcaaatggaagattcactaaccttgaagattggaagaaagagtactataaagaagtgaaggcaaaaggtgaaaaaggatttactgcaattgagattgatggtaaacaaattaccaattatgctgaactaaaagtcttatttgataaggcggttgaggctgatytagcaggtggaggaacagctaaaactgtagaacttaaatcgaaagtctttaaagcacttcttaagaattcagacggattcacaggaaatctttttaaagca

SEQ ID NO: 6276 - DNA, 483 bp, Streptococcus pneumoniae
  misc_feature (1)..(483): tiling:Spneumo1:WAN024GF5; WAN02412T |gki||CAD19618.1|||48 3 bp|glucose kinase|S.pneumoniae||AJ422270|ORF|000
acccttcaaccaatcaaagaaaagattgaaaaagccgtgggtattccattttttatcgataatgatgccaacgtagctgctcttggtgaacgttggatgggtgctggtgataaccaaccagatgttgtctttatgacactcggcacaggtgttggtggcggtatcgtcgcagaaggaaaattgcttcacggtgttgccggtgctgctggtgaacttggccatatcactgtggactttgaccaaccaatcgcatgtacttgtgggaaaaaaggctgtcttgagacagtggcttcagcaacaggtattgtcaacttgactcgtcgttacgcagatgaatacgaaggcgatgcagaattgaaacgtttgatcgacgacggtgaagaagtaacagctaaaactgtctttgacttggcaaaagaaggagacgaccttgccttgatcgtctaccgtaatttctcacgttacttgggtattgcatgtgcc

SEQ ID NO: 6277 - DNA, 234 bp, Streptococcus pneumoniae
  misc_feature (1)..(234): tiling:Spneumo1:WAN0249PD; WAN0249F1 TIGR4.IG_1595||||1600 714..1600947|+|234 bp|Between SP1696 (- strand) and SP1697 (- strand)|S.pneumoniae|TIGR4|NC_003028.1|IG|010
acctaaaaactagcttaatactcttcgaaaatctcttcaaaccacgtcagcgtcgccttaccgtatatatatgttactgacttcgtcagttctatctgccacctcaaaacggtgttttgagctgacttcgtcagtttcatccacaacctcaaaacagtgttttgagcaacctgcggttagcttcctagtttgctctttgattttcattgagtataagttttccttagagaaagc

SEQ ID NO: 6278 - DNA, 60 bp, Streptococcus pneumoniae
  misc_feature (1)..(60): tiling:Spneumo1:WAN024AJT; WAN024CR1-rc TIGR4.IG_623||||64 0500..640559|-|60 bp|Between SP0664 (+ strand) and SP0665 (+ strand)|S.pneumoniae|TIGR4|NC_003028.1|IG-rc|010
accttaagtatagcataaaataagaaaaccctcatccgcaaagcagatgagagatttcaa

SEQ ID NO: 6279 - DNA, 240 bp, Streptococcus pneumoniae
  misc_feature (1)..(240): tiling:Spneumo1:WAN024BJT; WAN01UC8P ||||||240 bp|Incyte o rf contig SPN2C0431 812-573|S.pneumoniae|23F|WAN01UC8P|ORF
acgattatcaaaagtataatgttaaaatgctttattatactaacgttatataaacattatactttcgttatacaaattttaaccctgttaggaactataaaaaatcatgaaaattttaatttgcatgtaactgggcagtgtcttaaaaaatcgacactgaatttgctcaaatttttgtttgtagaattagaatatatttatttggctcatatttgctttttaaaagcttctgtaggtttt

SEQ ID NO: 6280 - DNA, 92 bp, Streptococcus pneumoniae
  misc_feature (1)..(92): tiling:Spneumo1:WAN024B6O; WAN01UENB ||||||141 bp|Incyte o rf contig SPN2C0521 6185-6325|S.pneumoniae|23F|WAN01UENB|O RF|000
acggtgggaaaattgttgaaaaaaataatgcccatcaattctttagtcgtccaagagaagaacgaaccaagcaattttggaacgaattcttt

SEQ ID NO: 6281 - DNA, 91 bp, Streptococcus pneumoniae
  misc_feature (1)..(91): tiling:Spneumo1:WAN0249P6; WAN024D0Z-rc TIGR4.IG_507.1|||| 513935..514025|-|91 bp|Between SP0536 (+ strand) and SP053 7 (+ strand)|S.pneumoniae|TIGR4|NC_003028.1|IG-rc|010
actataccatattttgtttcgcagggaatctattataaaagggtaagtattgcaaaaacacttacccttttcttttatacttcattaagct

SEQ ID NO: 6282 - DNA, 4335 bp, Streptococcus pneumoniae
  misc_feature (1)..(4335): tiling:Spneumo1:WAN024DEC; WAN023Z69-3 AL449925.1_124||||1 15476..120710|-|5235 bp|Glimmer 2.02 orf prediction|S.pneu moniae||AL449925.1|ORF|000
  misc_feature (814)..(814): n is a, c, g, or t
actattcctaaaaccactatagaagaatctgatcctagcaaatttataggcgataattctgttaaacaagttagtgaggatggcgaacgtcaaattgttactagctatgaagagttacatggcaaaaaaatcagcgagtcagttgaaacagtaacaattttgaaagaaatgaagcctgaaattattgtaaaaggtacaaaagaaaaaacggctcctgttttaaccttgaccaaagtaacagaagatgctatgaatcgttctgccaacttaaattatgagcttgataataaagataatgctgaaatatcaagtattgtagctgaaattaaagatggtgatacagtagttaaaagggttgatttatctaaagaaaaattaactgacgctgtacaaaatttggattggtttaaagattataagattgcaacaacaatgatttatgatcgtggtcaaggttctgaaacgtctaaactggatgaaagacctctgcgtttggagttgaaaaaggtcgaaattaaaaatatcgcatctactaatttagtgaaggtaaatgatgatggtactgaaacacctagtgattttatgaatgaaaaaccttcagaagaagatgttaaaaaaatgtacttaaaaatcactagtcgcgataataaggtaactcgtttaactgtagactctattgaagaagtgactgaagaaggtcaaaaactttacaaaataactgctgaagcacaagatttgattcaacacacagacccaacgaaggttcgtaataagtatgtttattatatagaamaaccccatcctaaagaagatnatgtctactataactttaaagatttagtagatgctatgaatactgataaaaatggtacatttaaacttggtgcagatttgaatgccactggtgttccaacacctaagaaatggtatgttgacggcgactttagaggtacattgaagagtgtagaggggaaacattatactatccacaacacggagcgtccgttattccagaatattattggtggtacagtaaccaaagtaaatctgggaaatgtaaatatcaatatgccatgggcagaccgcatcgcaccgattgctgacactattaaaggtggcgctaaaattgaagatgtcaaagtgactggtaacgtattaggtagaaactgggtatctggatttattgataagattgacaaccaaggtacactcagaaatgtagcctttatcggaaatgtgacatctgtaggtgatggtggtcaattcttgaccggtatcgttggtgagaactggaaaggactagtcgaacgtgcgtatgttgacgcaaatcttattggcaagaaagccaaggctgctggtattgcttattggacacaaaacagtggtgacaatcataaagttggtgtcgaaggtgcagtcaagaaaggaattgtgaagggtaccattcaggtagaaagtcctgttgaagtcggcggtgctgttggacgtttgagtcatcatggttatatcggggaagtcgtatctatgatgaaagttaagaagggtgaaattttttatggttctagtgatatgaatgatgacccatattgggtggcgaataatgtacgaggaaattatgtcgttaatggtgtgagtgaaggtacgatatcttatgctcgtgctaaagaacaccatcgtatcaaaccaatttcacagtcagaagcagatactaaaattatgatgttaggtattacagcacaagattttgctatcaacgaacctgtggtcaatcgcttaaaccgtttaaccagaaaagaagatgaatataagtcaacccaagactataaagtagatcgagatctggcttatcgtaatattgagaaacttcaaccattttataacaaagaatggattgtcaaccaaggtaacaaacttgcagaagattcaaacttagctaagaaagaagtcctttctgttacgggtatgaaggatggacagtttgtaactgacttatcagatattgataagattatggttcactatgctgatggtactaaagaagaaatggacgtcactaagaatgctgattctaaagtgaaacaagttcgtgaatataccatcgctggacaaaacgttgtttatacaccaaatatggttgagaaagaccgtaaccaattgattcaagatatcaaagataagttggcgtcagttcaattgatttctcctgaagtacgtgctttgatggatgcacgtaagaaaccagaagaaaatactgatgaacgtaagaatggttatattaaagacctttacttagaagaaagctttgctgaaacgaaagctaatcttgataaattggttaaatccttagttgaaaatgcagatcatcaattaaatagtgacgaaacggctatgaaagcacttgttaagaaggtggatgaaaataaagctaaaatcatgatggctctgacttatctcaatcgttactatgatatcaagtatggggatatgactatcaagaacttgatgatgtttaaacctgatttctatggtaaatcagttgaccttcttgatttcttgattcgaattggatcaagtgagagaaatatcaaaggtgacagaactttggatgcttatcgtgatatgattggtggaactattggtaagtctgaattacatggattcttagattacaatatgcgtctcttcactaacgatactgatttaaatgattggttcatccatgcagctaagaatgtatatgtatcagaacctcaaacaacgaacccagattttgttaataaacgacatcgtgcatttgatggtttgaacaacggtgttcataatcgtatgattctacctctattaactcttaagaatgcacatatgttcttgatttcaacttacaatacaatggcttatagttcttttgagaaatatggtaagtatacagaagaagctagaaatgaattcaaaaaagaaattgataaggttgcacatgctcaacaaacatacttagacttctggtcacgtttagcattgccaagcgtacgtgaccaattactcaagagtgagaatagggtaccaactcctgtgtgggataaccaaaactatagtggtattaaaggaataaaccgtatgggttatgatgagaagaaagtaccaattgcgccaattcgtgagttatatggtccaacttggaaattccataataccaactggaatatgggagctatggcatctattttcccaaatcctaataacaatgaccaagtttatttcatgggaacaaatatgattagtccgtttggtatttcagcctttactcatgaaactacacacgttaatgatagaatgctttacttcggtggtcatagacaccgtcaaggtacagacgtcgaagcctatgctcaaggtatgctacaaactccgtcaagtattggtcaccaaggtgaatatggtgctttaggtttgaacatggcttatcatcgtgaaaatgatggtgaccaatggtataactatgaccctgataagcttcaaactcgtgaagatatcgatcgatatatgaaaaactataatgaagcactgatgatgctagatcatgtagaagcagacgccgtacttccacaattgaatggtgataatagcaagtggttcaagaaaattgatagagaaatgcgcagaaatcttggggatggtttgaataacttagtagcaccgcaccaatgggacaacgttcgtgacttaaatcaagaagagagttctaagaaattatcaagtattaacgatttgattgataataatttcatgaccaaacacggaaatccaggtaacggacgttatagaccagaggattttagaccaaactcagcttacgtaaatgtcaatatgatggcaggaatttacggtgggaatacgagtcaaggtgctcctggttcattatcgttcaaacataatgccttccgtatgtggggttattatggatatgacaaaggtttcactagttatgtatctagcaaatatcaaggtgaagctgataaacaaaaccagggtagattaggtgatgatttcattatcaaaaaagtttcaaacaaccaattctcaaatcttgaagattggaagaaatattggtatcatgatgtgaaatccagagctgaaaaaggattcacagagattacaattgatggacaaaccattcacaactataatgaactgaaagacttattcgacaaagctgtcacagaagacctcaagaaagctggaaactactcaaatactgagaatttgaaatccaaagtcttcaaagctcttcttaaaaacacagacggtttctttaatccattgttcaaaaaagacatt

SEQ ID NO: 6283 - DNA, 84 bp, Streptococcus pneumoniae
  misc_feature (1)..(84): tiling:Spneumo1:WAN024BBT; WAN023NV4 spn066d05_68||||54707 ..54931|-|225 bp|Glimmer 2.02 orf prediction|S.pneumoniae| 23F-1|WAN01UCWR|ORF|001
acttcgtcagttctatccacaacctcaaaacggtgttttgagcagcctgcggctagcttcctagtttgctctttgattttcatt

SEQ ID NO: 6284 - DNA, 187 bp, Streptococcus pneumoniae
  misc_feature (1)..(187): tiling:Spneumo1:WAN024ARR; WAN024ENE-rc R6.IG_517.2||||495 273..495459|-|187 bp|Between spr0493 (+ strand) and spr049 4 (+ strand)|S.pneumoniae|R6|NC_003098.1|IG-rc|100
agaaatatcctttcaattgtttttcttcattaccagtaaatcacgaaattggttggaaactggcttaaactataaaaagtcctcacaataggttctatgatatatatatatatatatacttcatgtaaataataaaagagttataatcagcactactgataaattcaataccgatttcgccatctta

SEQ ID NO: 6285 - DNA, 992 bp, Streptococcus pneumoniae
  misc_feature (1)..(992): tiling:Spneumo1:WAN024ALR; WAN024C11-rc TIGR4.IG_806.2|||| 810003..810994|-|992 bp|Between SP0862 (+ strand) and SP08 64 (+ strand)|S.pneumoniae|TIGR4|NC_003028.1|IG-rc|010
agaactattatatcaaaaaaggagcagagacaaaagaaaaatcccttgtttagtaaacaaaggatttttggctctataatatttgtagtgggtaaatcccttatagatattatggagcctattttattgtagaaaaaaagtcccatatgacctataatgaaaagcgaccaaacaactcattagaaagattcatatggaacaattacattttatcacaaaattactagacattaaagaccctaatatccagattttagacatcatcaataaagatacacacaaggaaatcatcgccaaactggactacgacgccccatcttgccctgagtgcggaaaccaattgaagaaatatgactttcaaaaaccgtctaagattccttaccttgagacaactggtatgcctactagaattctacttagaaagcgtcgtttcaagtgctatcactgttcaaaaatgatggtcgctgaaacttctatcgtcaagaaaaatcaccaaattcctcgtattatcaaccaaaaaattgcgcaaaagttgattgagaagatttctatgaccgatattgctcatcagctggccatttcaacttcaactgtcattcgaaagctcaatgattctcactttgagcatgatttttcgcgtcttcctgagattatgtcctgggacgttgaaacagtccggggagtgactgtttcaatcgggagatgaagatgagctttattgcgcaagattttgacaagctcgatatcatcactgttcttgaaggtagaacacaagctatcatccgagatcactttcttaaatatgatagagccgtccgatgtcgcgtcaaaatcattactatggatatgtttagcccttactatgacttagctagacaacttcgctttcaaatttctaggctcaggctgaaacagtctcccagactgtttcactcccgaatgctaaaatcgttcttgatcgctttcatattgtacaacatcttagccgtgct

SEQ ID NO: 6286 - DNA, 992 bp, Streptococcus pneumoniae
  misc_feature (1)..(992): tiling:Spneumo1:WAN024ALS; WAN024C11 TIGR4.IG_806.2||||810 003..810994|+|992 bp|Between SP0862 (+ strand) and SP0864 (+ strand)|S.pneumoniae|TIGR4|NC_003028.1|IG|010
agcacggctaagatgttgtacaatatgaaagcgatcaagaacgattttagcattcgggagtgaaacagtctgggagactgtttcagcctgagcctagaaatttgaaagcgaagttgtctagctaagtcatagtaagggctaaacatatccatagtaatgattttgacgcgacatcggacggctctatcatatttaagaaagtgatctcggatgatagcttgtgttctaccttcaagaacagtgatgatatcgagcttgtcaaaatcttgcgcaataaagctcatcttcatctcccgattgaaacagtcactccccggactgtttcaacgtcccaggacataatctcaggaagacgcgaaaaatcatgctcaaagtgagaatcattgagctttcgaatgacagttgaagttgaaatggccagctgatgagcaatatcggtcatagaaatcttctcaatcaacttttgcgcaattttttggttgataatacgaggaatttggtgatttttcttgacgatagaagtttcagcgaccatcatttttgaacagtgatagcacttgaaacgacgctttctaagtagaattctagtaggcataccagttgtctcaaggtaaggaatcttagacggtttttgaaagtcatatttcttcaattggtttccgcactcagggcaagatggggcgtcgtagtccagtttggcgatgatttccttgtgtgtatctttattgatgatgtctaaaatctggatattagggtctttaatgtctagtaattttgtgataaaatgtaattgttccatatgaatctttctaatgagttgtttggtcgcttttcattataggtcatatgggactttttttctacaataaaataggctccataatatctataagggatttacccactacaaatattatagagccaaaaatcctttgtttactaaacaagggatttttcttttgtctctgctccttttttgatataatagttct

SEQ ID NO: 6287 - DNA, 132 bp, Streptococcus pneumoniae
  misc_feature (1)..(132): tiling:Spneumo1:WAN024BJW; WAN0244TG ||||||132 bp|Incyte o rf contig SPN2C0007 154-23|S.pneumoniae|23F|WAN0244TG|ORF
agcaggagttatgaccggatgaggcaggagaatggcgtgaacctgggaggcggagcttgcagtgagctgagatcgcgccactgcactccagcttgggtgacagagcgagactccgtcttaaaaaaaaaaaaa

SEQ ID NO: 6288 - DNA, 91 bp, Streptococcus pneumoniae
  misc_feature (1)..(91): tiling:Spneumo1:WAN0249P3; WAN024D0Z TIGR4.IG_507.1||||513 935..514025|+|91 bp|Between SP0536 (+ strand) and SP0537 ( + strand)|S.pneumoniae|TIGR4|NC_003028.1|IG|010
agcttaatgaagtataaaagaaaagggtaagtgtttttgcaatacttacccttttataatagattccctgcgaaacaaaatatggtatagt

SEQ ID NO: 6289 - DNA, 193 bp, Streptococcus pneumoniae
  misc_feature (1)..(193): tiling:Spneumo1:WAN024ASF; WAN024EQW-rc R6.IG_256||||22977 1..229963|-|193 bp|Between spr0235 (leuS) (+ strand) and s pr0236 (+ strand)|S.pneumoniae|R6|NC_003098.1|IG-rc|100
agctttctccttttttcacttttcaaactttatagttgcccatagtataccatactttcataagaagattcaaaaaatcctccagattctactctgaaggattcctaccttatttcacaacgatattaacgagtttagttggctcaaacagtttgggaaactgtttgaggttggaaatcagcaaataaattgg

SEQ ID NO: 6290 - DNA, 332 bp, Streptococcus pneumoniae
  misc_feature (1)..(332): tiling:Spneumo1:WAN024A7J; WAN024B0N TIGR4.IG_1116||||1126 602..1126933|+|332 bp|Between SP1189 (- strand) and SP1190 (- strand)|S.pneumoniae|TIGR4|NC_003028.1|IG|010
aggtaaggctgataagaatattgaaacaatacctagtcctacaactaacgctttaaaactctttttagtagccgtttatcttctccttttataaaacaatgaatgaaatgtgcatctaaatatagtttattctggcaatattgtttccgtatttttccttcctagctcgtaaaataaactatatcctatttttattatacttcatatagttactttctaattcatattaacttgtgatttaagtatagcacaagtaagttattttgtaagcctttacatacaactttttttaaatttttttagattcatgttcctaaactaggaggactttc

SEQ ID NO: 6291 - DNA, 213 bp, Streptococcus pneumoniae
  misc_feature (1)..(213): tiling:Spneumo1:WAN024GNG; WAN01UC9V ||||||213 bp|Incyte o rf contig SPN2C0413 5055-5267|S.pneumoniae|23F|WAN01UC9V|O RF|000
aggtatagtcaattgattgtcagtttgaagaccaagagtcgtaaggcaaaggatatggcagaatccatccaagggtggctggcacaatttctagtgaacctctttaaatctattacgtttgactgtggaaaagagttttcaaaatggaaagatatttccaatcatcacgatagtgagagcttttttgcgaatctaggatgtccaagacagcgg

SEQ ID NO: 6292 - DNA, 135 bp, Streptococcus pneumoniae
  misc_feature (1)..(135): tiling:Spneumo1:WAN024BAF; WAN01UEPA ||||||135 bp|Incyte o rf contig SPN2C0507 5943-6077|S.pneumoniae|23F|WAN01UEPA|O RF|000
ataatactcttcaaaaatttcttcaaaccacgtcagcgtcggcttgtcgtatctacaacctcaaaacagtgttttgagcagcccgtggctagtttcctagtttgctttttgattttcattgaatataaacaaaaa

SEQ ID NO: 6293 - DNA, 198 bp, Streptococcus pneumoniae
  misc_feature (1)..(198): tiling:Spneumo1:WAN024BRE; WAN0240SO |||AAG38038.1|||198 b p|Orf22|S.pneumoniae||AF295925|ORF
atagatgatacgcattttaaggttttggggggtctatggagccaggggacgcacagtgctattgttctggcaacaaagcttattgttgtcgggttacaagaagggattgattgcggctggtgcctttctcagtgtgtggatgcaaccttgcaaccaacattaagatggtggaccaggtgttcggaatgccaatcttga

SEQ ID NO: 6294 - DNA, 98 bp, Streptococcus pneumoniae
  misc_feature (1)..(98): tiling:Spneumo1:WAN0249P7; WAN024E00 TIGR4.IG_290.2||||275 191..275288|+|98 bp|Between SP0298 (- strand) and SP0299 ( + strand)|S.pneumoniae|TIGR4|NC_003028.1|IG|010
atagatgttattttcaaatatttagaaataatatttaatttgttttattatttctaagtgtttagaaatatagtaaaatgaaccaaaaatagtacaca

SEQ ID NO: 6295 - DNA, 1628 bp, Streptococcus pneumoniae
  misc_feature (1)..(1628): tiling:Spneumo1:WAN024BMR-3; WAN023O6Z spn029h04_88||||718 94..75148|-|3255 bp|Glimmer 2.02 orf prediction|S.pneumoni ae|23F-1|WAN01UCO3|ORF
atagggaaatgttattttcaaaagtttggaaaatagtttttgaggataaaaaagtacaaagaatagctagttcagaattcgaatcattattattgggtgatattccattatttcagacaaaaatatctgatagattcttatgttctgaactaacgaaatatcaaaatttctttaatatttcaggaatggaattagcaattcaacaaataaaagacttttgtcagaaggatatggaatttcaattaaatttgattgaaacaactttgaattacgatccttcttataatttagttcaggattcttttgtacctctaaaaccatctgtaaaagtgatacgtaatttaaatcagaaagaaatacaagaaactaaaagtagaattgtacctctaacagaaaaaattgctgactatttatctaaaatttcatatagtggtacttcaggagatatatgctgggtagacatgaacatactgggagagaaaacgaatgattggaatatggttccaatcggatgcgatctgtataatggtatatcaggtattatgttattctatttattcttatatttggagaccaagaaaaaagattatctcatatacttgaaaaaatgttaccgatctctcaagtattatttagattcaagaaagcaatttgctactcactctcaggtactgtttggaggtttttctggagagacccctattatatatgtattattgttactgaagacaaggatgcctgaacactttaattctgatgaactagatgtttatatctatgatattattgatgatttaaaaaaagggtatagatatgatgaaaattttgatgttcttgtaggttctgctggtgcgattatacatttgctaaatgtatttgaagttactagagacgaagaactcttgatattagcgcatgatttatttagtcatttagaaaaaaattctacaaaaattactgttgaagggcaagatggaagagcatggaaaggaacgatggcttccaatcctttagcgggttttgcacacggagtctcaggaattgtgtgggcactgtcaaaacttagtagatatttcccagaagataaaaagcttaaaactattattaaacaaggtataatttttgaaaattctatgtttgatactgaaaaatctaattggtcggattatagagaaaccgaaagtggtatcaaatataaggatattgttgaaaatatccctgtttcgtggtgccatggtgctccaggtatacttataagtagattagaactgtataaaaataatacattgaatgtagagtttcgaagaacaatgaaatctgatatggatgtagcaattgatacaacaataaaatatggttttggaaaaagccactgtctatgtcatggagacttaggaaatctaaacattctattttatgttgctaagaaaatgtcctctgagcatttatacaatgtagtttactcctatcttaatacgattcttgatgatttagaatcagaaaattggaaatgcggtcttccgtataagaattctccaagtctaatgagtgggatagctggaataggattaggcttactaactttgaataatttatcaattccttctgtaattaatctagaaatttgg

SEQ ID NO: 6296 - DNA, 800 bp, Streptococcus pneumoniae
  misc_feature (1)..(800): tiling:Spneumo1:WAN024DS4; WAN024156-con |pspA||AAL92492.1 |||1020 bp|pneumococcal surface protein A|S.pneumoniae||AY 082387|ORF|000
atcttaggggctggttttgttacgtctcaacctacttttgtaagagcagaagaagcgcccgtagctagtcagtctaaagctgagaaagactatgatgcagcagtgaaaaaatatgaagctgctaagaaggaatatgaggacggaaaagctgctcagaaaaagtatgaagatgatcagaagaaaactgaggagaaagcggaagaagaaagaaaagcttctgaagaagaacaagctgcaaatctgaaatatcaacaagagttggttaaatatatacgtgaaaatgatccaacaaaaaaagctgaagctaagaaagcaatggatgaggctgagaaagagtataagaaaaaacaaacggaatttgctgaagttcgtgcaaaggtaattcctagcgcggaagaattaaaaaagactagacaaaaagcagaagaggctaaagcaaaagaagcagaacttactaaaaaagtagaagaagctgagaaaaaagttactgaagccaaacaaaaagtggatgcagaacatgctgaagaagtcgctcctcaagctaaaatcgctgaattggaacatgaagttcagaaactagaaaaagctctcaaagagattgatgagtctgattcagaagattatgttaaagaaggtctccgtgctcctcttcaatttgaattggatgttaagcaagctaaactatcaaaacttgaagagttgagtgataagattgatgagttagacgctgaaattgcaaaacttgaaaaagatgtagaagatttcaaaaactcagacggtgagcaagctggacaatacct

SEQ ID NO: 6297 - DNA, 450 bp, Streptococcus pneumoniae
  misc_feature (1)..(450): tiling:Spneumo1:WAN024DS2; WAN0240RN-con |pspA||AAF70090.1 |||749 bp|PspA|S.pneumoniae||AF255900|ORF|000
atcttaggggmwgrwkytrwdrmagwhkyagmwrctrwwgyaaragcagaagaagctgagaaaaaagctgttgaagccaaacaaaaagtggatgctgaaaaatatgctcttgaagctaaaatcgctgagttggaatatgaagttcagggactagaaaaagagctcaaagagattgatgagtctgactcagaagattatattaaagaaggtctccgtgctcctcttcaatctaaattggatgccaaaaaagctaaactatcaaaacttgaagagttgagtgataagattgatgagttagacgctgaaattgcaaaacttgaaaaagatgtagaagatttcaaaaactcagacggtgagcaagctgaacaatatcttgttgcagctaaaaaagacttagatgctaaaaaagctgaattagaaaatactgaagctgaccttaagaaagcagtt

SEQ ID NO: 6298 - DNA, 472 bp, Streptococcus pneumoniae
  misc_feature (1)..(472): tiling:Spneumo1:WAN024B2F; WAN023ZQE |spi||CAE75673.1|||47 2 bp|signal peptidase 1|S.pneumoniae||AJ608944|ORF|000
atctttttttggagtaatgtccgcgtagaaggacattccatggatcctaccctagcggatggcgaaatcctctttgtcgttaagcaccttcctattgaccgttttgatatcgtggttgcccatgaggaagatggcaataaggacatcgtcaagcgcgtgattggaatgcctggcgacaccatccgttacgaaaacgataaactttacatcaatgacaaagagacagatgagccttacctagcagactacatcaaacgtttcaaggatgacaaactccaaagcacctactcaggcaagggctttgaaggaaataaaggaactttctttagaagtatcgctcaaaaagctcaagccttcacagtcgatgtcaactacaataccaactttagctttacagttccagaaggagaataccttctccttggagacgatcgcttggtttcgagcgacagccgccacgtaggtaccttta

SEQ ID NO: 6299 - DNA, 714 bp, Streptococcus pneumoniae
  misc_feature (1)..(714): tiling:Spneumo1:WAN024F33; WAN023OAB spn026e08_4||||2949.. 3662|+|714 bp|Glimmer 2.02 orf prediction|S.pneumoniae|23F -1|WAN01UCWX|ORF|001
atgaaaaaaagatatgtcattttatctggtttactagcattgacccttgcagcttgttcgcaagaaaaaaccaaagttgaagaaaacactcaaaaaacggagcaaagcagtcaaccggaaggaactgtaggtagcaaatctcaagcttctagtcagaaaaaggcagaagttagcaataaagggagctattatagtatccaagggaaatacgatgagattatcctagctaataaacgttatcctttgtcaaaagattacaatccaggagaaaatccaacagccaaggcagagttgctcaaactaatcgcagctatgcaggctgagggctatccaatcagtgaccaatacagtgggtttaggagttatgaaactcaggctaagctctaccaagactatgtcaatcaagatggtaaggaagcagcagatcgctactcagcacgcccaggttacagtgaacaccagacgggtcttgcttttgatttgattgggacagatggggatttagttactgaagaaaaggcagcccagtggctcttggaccatgcggctgactatggctttgttgttcgctatcttaaaggcaaggaaaaggagactggctacatggcagaagaatggcatctccgctacgttggaaaagaagccaaagaaattgctgcaagtggtctcagtttggaagagtactatggctttgaaggcggcgattatgtcgat

SEQ ID NO: 6300 - DNA, 1089 bp, Streptococcus pneumoniae
  misc_feature (1)..(1089): tiling:Spneumo1:WAN024FM6; WAN023P0V pne62_11||||7391..847 9|+|1089 bp|Type 33C capsule operon, Glimmer 2.02 orf pred iction|S.pneumoniae||WAN01UCG7|ORF|000
atgaaaaaaataggtatagtgagatggcaaatgcatactgctggtggtggagaaaaagtagcaataaatttagcaagtgagttgtcacaaaaatatgaggtccatctagtgtcaatgttttcaaatgctgaagtttttttttcgttgaataattcttttcgttttataaatttattttcaaaaaagctatcaatgagtaagaattttttagaagccgtgaaaaaattgagaacatacattattgaacatgatattgatatcgttttgggcattggagtaagtatgaattgtattggaactgcaagtacattaggaatgaaggcgaaatttgtttcatgtgatcatacaaattcgatcgttgatttagatactagagtaaaaagaattcaaaggtatgtggcatccagatttgcagataagataattacacttactacatcggatagagagaattatataaaaaaatataaattaaatcccctaaaaatagactatatttataactggatggatccacttgtagtagataaattatttgatagaaactctaagaaacttattactgttggacgctttgataaacaaaaaggctatgatttgttatctaaggtagcaattcaagtattattaaataatccagattgggaatgggacatatatggttcgggtaatgatcaaataaaacaaaatttgatcactgcattggataaaggtggtgttttatcacgagttcattttaaagggaatgtaaaaggtacagaaaatatttatccaggacatgctatttatgtaatgacttctcgttatgaaggattacccttagtacttttagaggcaaaacaatatggattaccaattgttagctttgactgtccaacaggtccatctgagataatattagatggtgaaaatggttatttaattgagaattttgatgtaaagcaaatgagtcaaaaaataatagaattaattagaaatgatgaattgagattaagattttcacgaaatgcgatgttagatactgataaatttaataaaaagagaattattgaacaatggattgaattgatagaagaaatgacgggagaa

SEQ ID NO: 6301 - DNA, 522 bp, Streptococcus pneumoniae
  misc_feature (1)..(522): tiling:Spneumo1:WAN024BNL; WAN023OBK spn019g01_53||||34857 ..35378|-|522 bp|Glimmer 2.02 orf prediction|S.pneumoniae| 23F-1|WAN01UCLR|ORF
atgaaaaaaatcgctaccgcaatgaatgtgagtgtttctgatctctttacacaggatacccctattaaaaaaaatagacattcaaccccagtaaatccaaaaatttataaagaatttattgataatgtaaatcaatatcaacgcctgacaggtgcgacgtatgaaaaaatttctaatatcatagggaagtcaaattcatatatttatgacgttatcgataaacagagaaagagtacacttagtataaaaagtaacgccagtttaactaaggggtctatgattttaagacaagaaattgaaaaaatcgagagtggaaagaatcgaattccctctaaattaacctatcaaacaatagatagagatagtgaagtggtgtttagatttaatggtctaataaaatccgttaatgaattatctgataaagaattacagataattgtctcaatatttgatgccttgaaaattccagctaagatttcaaaaattgaaattagagaaactaatgtctttggaggaggaaaa

SEQ ID NO: 6302 - DNA, 933 bp, Streptococcus pneumoniae
  misc_feature (1)..(933): tiling:Spneumo1:WAN024FHD; WAN023ZZD |papA||AAA16798.1|||9 33 bp|adhesion protein|S.pneumoniae||L19055|ORF|000
atgaaaaaaatcgcttctgtcctcgccctctttgtggcgctcttgttcggcctgttggcctgcagcaaaggcacttcttccaagtcctcatccgataaattgaaggtggttaccaccaactccatccttgccgatatcaccaaaaatatcgctggggataaaatcgagctccacagtattgtacctgtcggtcaagatccccacgagtacgaaccgctcccagaagatgtcaaaaaaacttcacaagcagacctgatcttctacaatgggatcaacctcgaaacgggtggcaatgcttggtttaccaaattggtcaaaaatgccaataaagtagaaaacaaggactatttcgctgccagcgatggcgtagaggtcatctacctggaaggccaaaaccaagctggaaaagaagaccctcacgcttggctcaatctcgaaaacgggattatctacgctaaaaacattgccaaacaattaatcgccaaagatccaaaaaataaggacttctacgaaaaaaatctagcagcctacactgaaaaactcagcaagctagaccaagaagccaagcaagcattcaataacatcccagcagagaagaagatgatcgtaaccagcgaaggttgcttcaagtacttctccaaagcctacggcgtcccatctgcctatatctgggaaatcaacactgaagtagaagggacacctgaacaaatcaaaacgctgctagagaaattgcgtcaaaccaaagtaccgtccctctttgtcgaatccagtgtcgatgagcgtcctatgaaaactgtgtctaaggatagcaatatccctatctttgcaaagatctttactgactcgattgccaaagaaggcgaagaaggcgacagctactacagcatgatgaaatggaatttggagaaaatcgcagaaggtttgaacaaataa

SEQ ID NO: 6303 - DNA, 1101 bp, Streptococcus pneumoniae
  misc_feature (1)..(1101): tiling:Spneumo1:WAN024FQH; WAN023OGC pne91_13||||7795..889 5|+|1101 bp|Type 47A1 capsule operon, Glimmer 2.02 orf pre diction|S.pneumoniae||WAN01UCEE|ORF|000
atgaaaaaaatcgctttagtgaaatggattttgaatgattctggcggtggtgagcgagttgctatatccttggcaaacgaacttacaaaaaagtatgaagtccatttgattggaattacaacaaagcaatcggatttattctttaaaatcaattctcaagtaaaatactccaatttttttgaccatcgagtacgcttgtctaagaatcttctaaaaatttcaaaaatgttaaaaaattattttgtagataatgagatagatgttgcctttggaataggaatatcagcaaatatatttttatcattggcaggaataggtatatccaccaaaatagttttgtgcgaccatacgaattcaattacagacaatcgagagttttctcagaaaattcaaagatatattggaacaaaacttgcagacaagattattacccttactcaggaagattgtcaaaactatataaaaaaatatggaattgctgaaggaattatcgattatatctataattggaaagaaaatataccttcagacacgttaagttataataaagaatcaacgaaaattgttacagtgggtcgtttcgattatcaaaagggctatgattatcttgttcaagttgcgaaaaaggttttgtctgagaagtcaggctggagttgggaaatctatggatccggcaatcaagatgaagtagacaaaatcagagatttaatcaacgaaaatgatttgcaagacaggttagtcataaaaggactcgaaaaaaatcaggatgtgatttatggagataaaggaatttatgtcatgacttctcgctatgagggcttacctttagtcctattagaagcacaacaatacaatcttcctattgttagcttcagatgtccaacgggacctagtgagattgttgaagatggagtcaatggatttttgattgattgctatgacgtgtatcagatgagtgagaaattgcttgaattgatgaaaaatgatgatttgcgacaatctttctcagaacatgccaaagacaatatggataaatttgataaaaataaaattcttaatcagtggatatatttaatagaagaaataggagcggataatcgt

SEQ ID NO: 6304 - DNA, 87 bp, Streptococcus pneumoniae
  misc_feature (1)..(87): tiling:Spneumo1:WAN024CUX; WAN023NBT spn143g10_28||||34150 ..34236|-|87 bp|Glimmer 2.02 orf prediction|S.pneumoniae|2 3F-1|WAN01UCOL|ORF|001
atgaaaaaaattaatagatactgttatactaaacttgtcaagtttgtaacaagacaaatattaaaaataaaaaagaggtattcgtta

SEQ ID NO: 6305 - DNA, 996 bp, Streptococcus pneumoniae
  misc_feature (1)..(996): tiling:Spneumo1:WAN024AT8; WAN023PMY pne26_20||||15237..16 232|+|996 bp|Type 13 capsule operon, Glimmer 2.02 orf pred iction|S.pneumoniae||WAN01UCIU|ORF|000
atgaaaaaaattcgaaatattaacttagatttactaaaagtgcttgcatgtgttggagttgttttacttcatacaacaatggccggatttaaagagaccgactcatggaatcttttggcatatttatattatttaagtacctactctattcccctgttttttatggtcaatggttatttattgttaggcaagagggaaataacttatcattacatactccagaaagtaaaatggattttaataacagtgtcatcatggacatttatcgtatggatttttaagcgtgattttacaactaatcctattaaaaaaattgtaggttctttgatacaaagagattatttccctcagttttggtttttcggtgcactaatacttatctatttatgtttaccaattttgagaaaatttctaaattcaaaaagaagctatttatacagtctgtctttattgctgattattggtttgatttttgagttatcaaatatcttacttcagatgccaatacaaacatatgttgtacaaactttcagattatggactgggtttttctattatattttaggtggttttatagcgcaattcactatagaagaaatcgaatcaaggtttaaaaattggatgaaaatagttagcatacttttgttattgatttcaccaataatattatttttcatagcgaagactatataccataatctatttgctgaatacttttatgatactttatttgtaaaagtcagtactctaggaatttttctaactatcctcacgcttactttgaatgaaaaccgaagagaatcgattgtttccctttctaatcaaacaatgggagtttttataatacatacttatattattaaagtgtgggaaaaactatttggttttaattttgtaggagcatatttgctttttgctctatttactttaagtgttagttttattattactggaatgttaatgaagattccttacttcaatcgaattgtcaaatta

SEQ ID NO: 6306 - DNA, 1629 bp, Streptococcus pneumoniae
  misc_feature (1)..(1629): tiling:Spneumo1:WAN024BZR; WAN0243W9 spr1194|appA|15903237 |NP_358787.1|1190838..1192466|-|1629 bp|ABC transporter su bstrate-binding protein - oligopeptide transport|S.pneumon iae|R6|NC_003098.1|ORF
atgaaaaaaattgttaaattagctttaacagctgcagcagttttaatagctgtagtaggattggttgcttgtagttcgggaagcaaaaaatctgatttttcagagtctggaaaagaaaaagtattctatttatcaggttttcttcaaggaactggagatcgtatcccttacgtttggcaaaatggtgatggtttagttccatatttgttataccgtacactgttaatggcagattcaaaatatgaaaaatcaactccagatttagctaaagattggaaaaaatctgatgatgaaaaaacttatgaatttacacttaaagatggattgaaatggtctgatggagaagctttgacagcttccgatgtggaattcagtgttaaattagcattgaaagcttcagtaattaatggaattttcccttcaacattcacaaaaattgaaggagctaaagatttcaaagacgataaagcagataaaatttctggtcttacagttgatggaaataaagtaacatttaaacttactgctccagttggtgactttgagcaaatgatgactcaattctttattcttccaaaacataaattagagtctgaaaatcctcttgaattaaataatagctcattttggacagctcctgttacaagcggtatgtacaaagtaaaagaaattagtgcaggtaatttcttagagtatgacaaaaatgaaaactatgaaaatgaaaaaccaaaatttgataaagtagtattcaactatatttcagatccagttttagcattgcaagatggtaaatcatacttctattcaacaaacaaacctcaagaaattagtcagttggatgctgtatctactttaagtaaaaaaccaattgatatcctattctatcgctactttatcgctaacttagcaggtgtcgaaggtaatggagattccttgattgctaatcctaaagttagagaagctattctatatgcaattaatcgtgatgaattagctaaatctgtatttagtggaattgcagatgttaataatactggtgttccttcaagcttagaagctcatctgaaatcagcaaataaatttgaatataatccagaaaaagcaaaacaacttcttaaagaagctaaatacgataatagcagaaatctaattttagcttattactataaagatcaagcctctcaagatttcatgcaagcagtaagttatcaattgaatgaggttggaatcaagaacgaagttgtccaaattacttctgatgcaacaacaggattgttcaaaacacgtaaatatgacctagcttataaaggattatcatcatttggttatgaaacttggtatggtgaatatagttcaacaaatactaactttaaaaatattacaaatggcgaaacaagttttgatgagttgagcaaaaaattgtctgaaacttctgatgtaaaagaaagaaacaaaattttagcaagtctacaaaaattagaacaagaaaaactattgaagttaaacttattcacatttaaaaacttcttgtatttaaatactgaaaaagttttaattcctgacgatgttcaatttggtaatccattctataaatttgattacaaattcgaaaaatgggatgctaaataa

SEQ ID NO: 6307 - DNA, 1053 bp, Streptococcus pneumoniae
  misc_feature (1)..(1053): tiling:Spneumo1:WAN024BP7; WAN023OK8 pne86_18||||13127..14 179|+|1053 bp|Type 43(2) capsule operon, Glimmer 2.02 orf prediction|S.pneumoniae||WAN01UCFZ|ORF
atgaaaaaagaagaatataattttttaaaagtcctcacaatattattagtagtattaggacatagtacgtattatattattaagatgaattttggtgggattgattattatcactatataaataataatgattcaattatagtaataaattttttcaaaaaaataacagagattatctattactttcatatgcctttatttatggcaatatctggagcatttttcagaattcaagttgaaaaaaataagtggcaaagtcctttagagttattccagaacaaatttagaagactattaatcccatttattatttttacgattttgtatactattcctatgaaatatatttcaaactattttatacaaacgagtatctttaatgcgattattggtcaactgtttttatttgggaacactcatctgtggtatttatatgcattgttcattatttttatgattgcctacttcgttttgaaaaaagatacgggttttggaatgttactgttcctatttgcacttcatttaatgagttacaaaattaatattacgttaataaaaagtgcgtttcaatttttattttattttgcgattggttttaaatttgaacaaaaaagagaagtatacaatcatttattgaatcataccaagaaatttgtatattttcttttaatcggatttgttgtgttaattttcatgaatttgggtattaagagatactcaattattttttcaaagctacttgaagaaattttagcattgtatggaagtttggtaacttatactattgcttattatttatcaagaaacacgaaatggatgaataccagaatataccagtttattttagtcaatggtctaggaatttatattttttcggatactcttaattatttgatattaaagtggggctttattgttgctgaggatttaatgattacacctcatggaattattttgatggtaatttttcgatttttggtaacattaattttaagtttgctgattactttagcatttaaaaaactatttccgaagtataaatggttagtgaat

SEQ ID NO: 6308 - DNA, 966 bp, Streptococcus pneumoniae
  misc_feature (1)..(966): tiling:Spneumo1:WAN024FSY; WAN023P90 pne49_14||||10249..11 214|+|966 bp|Type 23B capsule operon, Glimmer 2.02 orf pre diction|S.pneumoniae||WAN01UCCI|ORF|000
atgaaaaaagtaagtattattctacctgtctacaatgttgaacagtatataaaaaaatgcttagaatcaattcaacaacaaacttatccaaatttggaagtaatcattgttaatgacggagcaaccgataaaagcgttgaatactgtgagcaaatttgtaagatagattctaggttttctgtcactcacaaagaaaatggtggactttccgatgcaagaaatgtcggtatagataaagccaagggagattacctcatttttgttgacagtgatgattttgtctctcaagatatggtatcttatttagtatctagtatggagaacaatgaggcagacattgctatttgcgatcctgctcattattatagtgaccgtcaaaacaatgatcttaatattttttatccggcatcaagcgttaaggtttacgaaaaaacggaagctctatgtgagatgttttatcaaaaatcttttttggtatctgcttgggctaagatatataaaaaggaactatttgatgatatcagattccctgttgggaagttatttgaagatagtgctgttatgtatctgctttttgaaaaatgtgaaaagatagtatattctaatgcgaaattatatgcctatgtgcatagagacaatagtattacaacaaagaagttttcagataaagatttagatattttagacatttcaaatactattcttgatcactatagtgggaactttagagtttataaagcggcagtttcctataaagtttcggcatgttttagaattttgttgaactcatcttcagaaaaaaaatataatcaaatacaaaaagattgtatgacatatattttacgaaattggagaaatatgttatttgataaaaatgtccgattaaagaacaagcttgccttgatttctataactcttttcaatccttttgttaaatttatctatagcaaagtaaacagatgggaa

SEQ ID NO: 6309 - DNA, 1092 bp, Streptococcus pneumoniae
  misc_feature (1)..(1092): tiling:Spneumo1:WAN024CK9; WAN023OQ5 pne78_13||||9379..104 70|+|1092 bp|Type 36(1) capsule operon, Glimmer 2.02 orf p rediction|S.pneumoniae||WAN01UCFT|ORF|000
atgaaaaaagtaatgttagtttttgggacgcgtccagaagcaataaaaatgtgtcctttagtcaatgagttgaagaaaaacaactcgataaaaatacttgtgtgtgtaactggtcaacataaagaaatgttagaacaagttttggatgtctttaaagttgttcctgattatgacttaggaattatgaagacaaatcaaacattatttacaatcacgacaagtattttagataaaattcaagcggttttagagcaggagaaaccagatattgttcttgttcatggagatactacaaccacttttgcaacagctttagctgcattttacatgggaattaaagttggacatgtagaagcaggattgagaacttataatcttcaaagcccatttcctgaggaattcaatcgtcagactacttcaattattgcggatttcaattttgctccgacagaggtggctaaagagaatctcttaaaagagggaagagagaatatctatgttactgggaatacagttattgatgccttgaagacaaccgttcaagattattatgaacatcctattttagagtgggctaaggacagtaaactaatcatgctgacagcccatcggcgtgaaaatcttggccaacctatggaaaatatgtttaacgcagttaatcgtatcctgaatgagtttgaagatgttaaagtcgtgtatcctattcataagaatcctaaagttcgtgagctagcaagtaaagtgtttggtgacaatgaacgtatgcaaatcattgaaccactagaagtcattgatttccataattttatgaatcaaagctatatgattttaacagattcaggtggtgtacaagaagaagcaccttctttaggtaaaccagtattagtaatgcgtgatacaactgaacgtccagaggggattgctgcaggaaccttgaaattagtaggaacagaagatgaaaatatttataggaattttaagcttcttttggaaaatgaagaggaatacaacaagatgagtaaggcaagcaatccttatggggatggaacagcttgtcaacagattgtagaagttatcatgaagggattagta

SEQ ID NO: 6310 - DNA, 1107 bp, Streptococcus pneumoniae
  misc_feature (1)..(1107): tiling:Spneumo1:WAN024BP3; WAN023OIM pne88_14||||9647..107 53|+|1107 bp|Type 45(1) capsule operon, Glimmer 2.02 orf p rediction|S.pneumoniae||WAN01UCBS|ORF
atgaaaaaagtattatttgtaactaatattccatcaccttatcgtgtggatttctataatcaacttgggaaatttgtagatttaactgttgtttttgaagcaacaggagctcaagatattagatttgattaccgagagatttttaaaaattttaccgccatttttttaagtgaaggtaatattgatgagaagaaattaaattcagctatatttcagtatttaattcctaaaaaatatgactatatttttttgactaactattcttatcgaacagaattatttggttatttaaagtgtgttttttctaagataccgtttgtattagaaattgatggtggtaagataccagaaagcgagaattttttaaaataccagtttaaaaaatttattcttacgaaaccctactattattttagcccaagtcagtccagtgatgatttcttagcgcattatcatgtgaataaagaaaatatttatcggtattcatttacttccttatcagagaaagacatacgatatcaaattgtcgatgagaaagaaaaacaatttttaagaaagaaactgggattcagtccaactaagaaaacaattttatttgttggtagaatcatccctggtaaaggtgtggatgttctaatcaaggctgttcagaatttatcagacgatgtacaatgtttaattgtaggcccaagtcccgatagtgaatacaaacaatacttgcttgatcttattggacaagatagccgttttcattttattgattttttacagacatctgaactgaaacaatactacaagctatctgatatatttgttttaccaacaaagtcggatgtttggggacttgttgtaaacgaggcaatgtctcagggacttcctgttatttctacatctgcatgtgttgctgcaattgagcttgtttcgaatggtaacaatggatatattattgatagggttgatgactggaaagctatttttcaaaagttaagcaaagtattacaggatgactcgttacgagttcaattatctcaaaatgctttatctactattaaacactacactattgaaacaatggttaaagagcatttgaaatttatggaggaaaaa

SEQ ID NO: 6311 - DNA, 612 bp, Streptococcus pneumoniae
  misc_feature (1)..(612): tiling:Spneumo1:WAN024DDZ; WAN02447F spr0791|hsdS|15902835 |NP_358385.1|788261..788872|+|612 bp|Type I restriction-mo dification enzyme 1, S subunit|S.pneumoniae|R6|NC_003098.1 |ORF|100
atgaaaaaagtgaagttgggggaagtcttatctctaaaaaaaggcaagaaagccactgtacttgctgaacaaacaactctaagccaacgttatattcaaatagatgatttaagaaataataataatttaaaattcactgaaagtttaaatatgactgaagcactcccagatgatattctgatagcatgggatggagctaatgcaggaacagttggttatggattatcgggagctgttggtagtacaattacggtcttaaaaaagaatgagcgatacaaagaaaaaattatatcagattacttgggagtctttttggaaagtaaatcgcagtatttacgagaacattcaacaggtgcaacaattcctcatttaaacaagaatatattacttgatttacaattagaattgctaggtatcgaagaacaagagaacattatctgtattcttaatacgattaaaaggcttattactaaaagaaaattgcagttagatgaactaaacttgctcgtcaaatcccgatttaacgagatgtttggggatcctttaaataataacaagaaatttgcagtaaaaacgggacaacagtgttttaaattttcaatttgcttgtga

SEQ ID NO: 6312 - DNA, 1056 bp, Streptococcus pneumoniae
  misc_feature (1)..(1056): tiling:Spneumo1:WAN024DE2; WAN023QNE contig_1324_3||||1232 ..2287|+|1056 bp|Glimmer 2.02 orf prediction|S.pneumoniae| 670|WAN01UE8G|ORF|000
atgaaaaaagtgaagttgggggaagtcttatctctaaaaaaaggcaagaaagccactgtacttgctgaacaaacaactctaagccaacgttatattcaaatagatgatttaagaaataataataatttaaaattcactgaaagtttaaatatgactgaagcacttccagatgatattctaatagcatgggatggtgctaatgcaggaacagttggttatggattatcgggagctgttggtagtacaattacggtcttaaaaaagaatgagcgatacaaagaaaaaattatatcagattacttgggagtctttttggaaagtaaatcgcagtatttacgagatcattcaacaggtgcaactattcctcatttaaacaagaatatattacttgatttacaattagaattgctaggtatcgaagaacaagagaacattatctgtattcttaatacgattaaaaggcttattactaaaagaaaatttcagttagatgaactaaacttgctcgtcaaatcccgatttaacgagatgtttggggatgttattctaaatgaaaaagaatggaaagttagcaaatggaacgagattctaacaataagaaatggtaaaaatcaaaaacaggttgaagatgctgatgggaaatttcctatttatggaagtgggggaattatgggatatgctaaagattggatagtgaagaaaaattcagttattattggacgtaaaggaaatataaataaacctattttagttagagaaaatttttggaatgtagatacagcatttggattagagcctgttttagaaaaaataaactcagaatatttattctatttttgtcaattatacaattttgagaagttaaataaggctgtaacaatacctagtttaaccaaatcagatttattaaatatttccatccccctccccccactagccctccaaaatgagttcgcagactttgtagccctggtcgacaaatcacaattggcaatccaaaaatctctggaagaacttgaaactttgaagaaatctctgatgcaggagtattttggc

SEQ ID NO: 6313 - DNA, 1032 bp, Streptococcus pneumoniae
  misc_feature (1)..(1032): tiling:Spneumo1:WAN024BM4; WAN023NP4 spn093a10_59||||43986 ..45017|+|1032 bp|Glimmer 2.02 orf prediction|S.pneumoniae |23F-1|WAN01UCTO|ORF
atgaaaaaatcagatgttcttgatttaataaagtatcattatgagggcagagagacagaatttagaaatcaatccatagcaattgctcggaacttcaataaacatggtgatacacaaatagcacaatatattatggggttaatgtctcaaagtgatagattcatgccacaaatagaaaatcctagtgagtatttgactcctgctaaactagatattggtcctctcccattgcctctttcaattatgaatgatttaaaaggaataataaacgctgtcaatcatcatattggaataaataaatttttatttgtgggatctccaggtactggaaaaactgaaagtgtaaagcaggtggctagacttattggcaaggaattacttgtagtagatttcagtcacttagtagatagtaagctagggcaaacagtcaaaaacttagcaactctttttaatgaaatcaataatcttcctttcaagcaaaattatatcatcctatttgatgaaattgattccatagtgttggatagggttaatcagaatgatttaagagaaatgggacgagtgacttctgcctttttaaaggagttggataggctgtcaccagaaattgtattaattgcaacaacaaatctttttgaaaatcttgataaagcagttacgagaagattcgatgccataattgactttgaccgttatactgatgaagataaagtagaagtagctactattattttaaatgagttattaaagcaatttaagaatgtagctagagatttaaaattatttaaaaaaattatcaatagtgccaatgtaataccgaatcctggtgatttgagaaactcaataagaacgtcattggcatttagtgacccatcagatccgcatgattaccaaaaacgcctgctaagaagtttgcataatggtagaaatttatctatttctaaattatcgaagctaggttttactgttagagaaattgagattttgacaggtatttctaagagtagtgtatcacgagagttaagcgaggat

SEQ ID NO: 6314 - DNA, 87 bp, Streptococcus pneumoniae
  misc_feature (1)..(87): tiling:Spneumo1:WAN024ERM; WAN023PVK pne08_31||||22562..22 648|-|87 bp|Type 7A capsule operon, Glimmer 2.02 orf predi ction|S.pneumoniae||WAN01UCKE|ORF|000
atgaaaaaatcgtgtgacgaaccaagggaggagtctgcccttttgaggaaatctagcgaggaaaaacgatactggaacagcagaaag

SEQ ID NO: 6315 - DNA, 1893 bp, Streptococcus pneumoniae
  misc_feature (1)..(1893): tiling:Spneumo1:WAN024C23; WAN02442M spr0964||15903008|NP_ 358558.1|944613..946505|+|1893 bp|Hypothetical protein|S.p neumoniae|R6|NC_003098.1|ORF
atgaaaaaatgttggcttacaacaaactttgaagactatctaaaagcattaagtacaaacgaattgacattacttgtgaaaaatttagaaattgatttgtcagaaatttcaattttttacgatgtgaagtttgaattttataaaaaggacagattatcaataacagacaaaggaaagactgtagatagcgagtcaatcattatttatattggaagtaacaccaagtgtcagaagattgtagagttatatgcaagcaatagaaagtataattttatttcatataaaagtataaataattttttggatactgagtttgaacagaaatatgcttatgtgacaattgtctgtaactttgatattattgatgacagtattttttataaatgtactaacaaatttaacgtaaataatatttatacttctgtaggtttttttttgtatgatgacatatatgatttaacttatcaggtatttaaaacagtttccttagaaaatacctttagagataattctttattgatcacacacgatgaaaagataaaaaataaaaactattataatttctttgattctgagaagggaaaattcccatatactgatgagatggatattttttcattccatggacacagtcgagaagataaactctttatttataatggatatgtatgttgtacaaataatgataataatgtgatggaaacgagaaatatcaatgatattcctcattgggctaaaaatccagaatactatgagggaaaaaaggacatagtagatattaaagaaataaaatgtaaaattgcctttttaaattcttgtagtggtattcacttaaaaaaaagtctatatcgaaaggaatattggatttctgaaggctttcgtgttagctatccagctgtagtaattgggagtactattattaaagatggtagtagtattgaaaatatattctttatagaattaataaaagctggatatagtgtgggggaatcagttaatgttttgaacaaaatgtcaaaagccttaaagtatgatactggttcgttttgtattttaggtgctcctgaatttaggctgacaactccaaatagtaggtttgagaatacattgcatgaaatccaacaattcactgaaaatcttattgttctgaaaaatcgtttaaaaaaatatttggaaatttttcataaacaaaagagaatagatatttatggtataaaagataaacgaattcaaaatatacaaatgaatgtaggcaatcagctacaatcgcttgtgagaaaaatcaatatttcaaatatacatagatataacttaggtcaattaaatcatgaaatggatagtctagaaagtcaattaacggatttacagaatagaataatttccgatttgagtacgaaaactagaacaggaaattatttattttcagagtattatcatgaactttcagaaatagattatgaagagtttcgagaaaactcttgtcccaattgtaataattccattctgctacagaaattcacagtagtcccagaaaatataaataggtttgtgtataaatgttcaagatgtggtacatcaattgatttacctagtaatgtttttgtagatataaatttaaaaattgaaattaatattgaagaattagagataaaggtattctttgattatcaaaacctcattaagaaaggggaatttacaacaatagattgtgaaatattagaggccgatagatattcaattgaaagagtagtagctaataatcaagataatgtgcagggggagattacttttaaatataatcgccaaaagacaccgatgcaagtatattatttgaaagcatatgtaatgatcgatggtcagttactacataggagtattcctataaatttgtaa

SEQ ID NO: 6316 - DNA, 930 bp, Streptococcus pneumoniae
  misc_feature (1)..(930): tiling:Spneumo1:WAN024AUD; WAN0240OJ |||AAF70667.1|||930 b p|PsaA|S.pneumoniae||AF248233|ORF|000
atgaaaaaattaggtacattactcgttctctttctttccgtcattgctcttgtagcgtgtgctagcggaaaaaaagatgcagcttctggtcaaaaactaaaagttgttgctacaaactcaatcatcgctgatattactaaaaatattgctggtgacaagattgatcttcacagtatcgttcctgttggtcaagacccacacgaatacgaaccacttcctgaagacgttaagaaaacttctcaagctgatttgattttctacaacggtatcaaccttgaaacaggtggcaatgcttggtttacaaaattggtagaaaatgccaagaaaactgaaaacaaagactactttgcagtcagcgaaggcgttgatgttatctaccttgaaggtcaaaacgaaaaaggcaaagaagacccacacgcttggcttaaccttgaaaacggtatgatctttgctaaaaatatcgcaaaacaattgagcgctaaagaccctagcaacaaggaattctacgaaaaaaatctcaaagaatatactgataagctagacaaacttgacaaggaagctaaagagaaatttaacaacatccctgctgagaaaaaactcatcgtaaccagcgaaggatgcttcaaatacttctctaaagcctacggtgtcccaagtgcctacatctgggaaatcaatactgaagaagaaggaactcctgaccaaatcaagaccttggttgaaaaacttcgccaaacaaaaactccttcactctttgtagaatctagtgtggatgaccgtccaatgaagactgtttctcaagacacaaacatcccaatctacgcacaaatctttactgactctatcgcagaacaaggtaaagaaggcgacagctactacaacatgatgaaatacaaccttgacaagattgctgaaggattggcaaaataa

SEQ ID NO: 6317 - DNA, 126 bp, Streptococcus pneumoniae
  misc_feature (1)..(126): tiling:Spneumo1:WAN024ATR; WAN0240NO |comC||CAB39523.1|||1 26 bp||S.pneumoniae||AJ240791|ORF|000
atgaaaaacacagttaaattggaacagtttgtagacttgaaggaaaaagacttgcaggagattcaaggtggggaaagtaggctaccaaaaatcctccttgattttcttttcctacgaaaaaagtaa

SEQ ID NO: 6318 - DNA, 126 bp, Streptococcus pneumoniae
  misc_feature (1)..(126): tiling:Spneumo1:WAN024ATS; WAN0240GV |comC||CAB39486.1|||1 26 bp||S.pneumoniae||AJ240773|ORF|000
atgaaaaacacagttaaattggaacagtttgtagccttgaaggaaaaagacttgcaaaagattaaaggtggggaaatgagacttccaaaaatcctccgtgattttattttcccaagaaaaaagtaa

SEQ ID NO: 6319 - DNA, 498 bp, Streptococcus pneumoniae
  misc_feature (1)..(498): tiling:Spneumo1:WAN024FM8; WAN023MY8 spn172a11_21||||13157 ..13654|-|498 bp|Glimmer 2.02 orf prediction|S.pneumoniae| 23F-1|WAN01UCP9|ORF|001
atgaaaaagaaaatttatattgctttgatctttgtaactggggtactcgccattttcttttttggaaaacaaatgattacaaaagaaaatatcaataagccaacggtagagttaacaatctatacgctttcttctagtgatacagaaaaatggaataaagtgagacaagtagaaacggaagaagctatatacttcataactgtgaaagaagtatcatcttcagaagaagtattttcaaacatcattgcaaatggagctgctacggggttcggagttcgtgaagaagaagtgaagaaattcaataatggtttaggagacaccatagaggactctaagcataataaactaattgaaatagaattttttactttttctgatgatggcgcgggatttgtggtagcaaactttgactacggtaaagaagagttgaattctcagaaaaaagatataaaagaattatataaaaaaatatatgaatcttttaaagaaaagaataaa

SEQ ID NO: 6320 - DNA, 99 bp, Streptococcus pneumoniae
  misc_feature (1)..(99): tiling:Spneumo1:WAN024B6Y; WAN023SMJ NC_003098.1_294||||21 7023..217121|-|99 bp|Glimmer 2.02 orf prediction|S.pneumon iae|R6|NC_003098.1|ORF|100
atgaaaaagaaatggatgtattatgctgcttgttcttctaatgaatctgccgatgacagttcatctgataaaggagacggtggttcgctagtcgtttat

SEQ ID NO: 6321 - DNA, 687 bp, Streptococcus pneumoniae
  misc_feature (1)..(687): tiling:Spneumo1:WAN024AW3; WAN023NEJ spn134d07_2||||475..1 161|-|687 bp|Glimmer 2.02 orf prediction|S.pneumoniae|23F- 1|WAN01UCVE|ORF|001
atgaaaaagtatcaacttctattcaaaataagtgcagttttctcttacttatttttcgtatttggtctttctcagatgacgcttattattcaaaattattggcaattttcttcccagattggcaatttcgtctggattcaaaatttcttgagtttgctatttagcggagtcatgatttggattctggttaagacaggtcatggttatctctttcacattccaagaaaaaaatggctttggtattcgattttgacagtattagtggtagtgctccagatctcttttaacgttcagacagctaaacatgttcagtcaactgctgaaggttgggctgtattgatcggttatagtgggaccaactttgctgagctaggtatctatataactttgttctttctgactccacttatggaagagctaatctatagaggattactgcaacacgccttttttaagcattcgagatttggccttgatttgcttcttccgtcaattttatttgctcttcctcatttttcaagcctgcctagtttgttagatatcttcatctttgcaacatctggcatcatctttgctagtttgacccgctataccaagagcatttatccttcctatgcggtgcatgtgatcaataatattttcgcaacattaccatttttgctgacttttttacatagggtcttgggg

SEQ ID NO: 6322 - DNA, 1170 bp, Streptococcus pneumoniae
  misc_feature (1)..(1170): tiling:Spneumo1:WAN024AUI; WAN023OXR pne67_9||||6546..7715 |+|1170 bp|Type 18F1 capsule operon, Glimmer 2.02 orf pred iction|S.pneumoniae||WAN01UCFB|ORF|000
atgaaaaagtcagtttatatcattggttcaaaaggaattcctgctaagtatggaggatttgaaacttttgttgaaaaattaacagccttccaacaagataaggctatccaatattatgtggcttgtatgcgtgaaaactctgcaaaatcagggactactgaggatgtttttgaacataatggtgctatctgttataacgtcgatgttcctaatattggtccagcgcgagccatagtatatgatatcgcggcaattaacagagctattaaaattgccaaagaaaataaggatgaagatccaatcttctatattctagcttgtcgaatcggtccgttcatccatggaattaagaaaaaaatccaggagataggtgggactcttctagttaatccagatggtcacgagtggttacgagctaagtggagcgctccagttcgtcgttattggaaaatttccgaaggtcttatggtcaaacatgcagatcttttagtgtgtgatagtaagaatattgaaaaatatatccaagaagattataaacagtatcaacctaagacaacctatatcgcttatgggactgatacaacacgctccatattaaagagtagtgacgaaaaagtacgttcttggttcaaaaagaagaatgtttctgaaaacgagtattacctagttgtaggacgttttgttccagaaaataactatgaggctatgatacgtgggtttttagcatctaattctaagaaggactttgtcctaataacaaatgtagaacagaataaattttataatcaactattagcaagtactggctttgataaagatccacgagtgaaatttgttggaacagtctacgatcaagaacttctgaagtatattcgagaaaacacctttgcttacttccatggacatgaagttggaggaaccaatccttcgcttttagaagctctggcatcaactaaactgaatttattgctagatgttggctttaaccgagaagttggggagcaaagtgcaatctattggaaaaaagatgagctttcccaagtaatcgagaaagttgaacaatttgatgcaaaaatgattgatgagttagatagacaatcaaatcagagaattgtggattttttcacttgggaaaagattgtcacagactacgagaaattatttaaaaaa

SEQ ID NO: 6323 - DNA, 1176 bp, Streptococcus pneumoniae
  misc_feature (1)..(1176): tiling:Spneumo1:WAN024DY3; WAN023P9T pne48_9||||6190..7365 |+|1176 bp|Type 23A capsule operon, Glimmer 2.02 orf predi ction|S.pneumoniae||WAN01UCH3|ORF|000
atgaaaaagtcagtttatatcattggttcaaaaggaattcctgctaagtatggaggatttgaaacttttgttgaaaaattaacagccttccaacaagataaggctatccaatattatgtggcttgtatgcgtgaaaactctgcaaaatcagggactactgaggatgtttttgaacataatggtgctatctgttataacgtcgatgttcctaatattggtccagcgcgagccatagtatatgatatcgcggcaattaacagagctattgaaattgccaaagaaaataaggatgaagatccaatcttctatattttagcttgtcgaatcggtccgttcatccatggaattaagaaaaaaatccaggcgataggtgggactcttctagttaatccagatggtcacgagtggttacgagctaagtggagcactccagttcgtcgttattggaaaatttccgaaggtcttatggtcaaacatgcagatttattggtttgtgacagtaaaaatatcgaacagtatatccaagaagattataaacagttccaacctaagaccacctatatcgcttatgggaccgatacaacacgctccatattaaagagtagtgatgaaaaagtacgttcttggttcaaagagaagaatgtttctgagaacgagtattatctagttgtaggacgatttgttccagagaataactatgaatctatgattcttggcttcttggcttctaactctaagaaggactttgttttaattacaaatgtagaacagaataaattttataatcagttgttggcaaaaactggttttgataaagatccacgagtaaaatttgtagggacagtctacaaccaagagcttctaaagtatattcgagaaaatgcttttgcttacttccacgggcatgaagttggtggaacaaatccttcgttacttgaagcattagcatccacaaagttaaacttactactcgatgttggctttaaccgagaagtagctgaggatggtgctgattactgggaaaaagataatcttcataaggttattgaagcgagtgaacaaaaaacacaagaagagataaatgaaaaaaatatactgtcaacaaagcaagtgacggagcgcttctcttgggatttgatagttaatgagtatgagaaactttttacgagaaaaaac

SEQ ID NO: 6324 - DNA, 1296 bp, Streptococcus pneumoniae
  misc_feature (1)..(1296): tiling:Spneumo1:WAN024DBF; WAN02442P spr0961|rffD|15903005 |NP_358555.1|941893..943188|+|1296 bp|UDP-N-acetyl-D-manno saminuronic acid dehydrogenase|S.pneumoniae|R6|NC_003098.1 |ORF|100
atgaaaaataatttcctaagtagaattcaaaataagaaggcaaatattacaatttggggtgcaggatatataggtctatctacagcttaccactttgcattggtaggtttccgcgtcaaaatttttgatactaatcatagattgatacagaatttacttgaaggaaatctgccatttaaaattgatttagatgaagaaatatttagtaagttaatatttaataaatccattttaccagaagttgtagaacatgctgatacatattctgatgagatacaaattatctgtattaatactgaaagaaatggagtacctattagtagaccattaactactgtattagataatataacaacagtatctgaacaactagttattgttgaaagtacaatttctccaaattggattgatacaattataagaccaaagttgaatgatttgcaatatctaacagttgctcctaggagagactggtttttagagactggattaaatttaaaaacacttcctcgagttattggtacattgggatcaaattatcgtatggaggttttgaaattatatgaaatgctttctgatgttgtgattgaggtaactgatgcatatcacgcttgtttagtaaaggcggttgaaaattctatacgctatattaatgttgtatttgctaatgaaatgatgagagcatttccaagatataatatggctgaaatttttgatgctgcttcaactaagtggaatattccttattatcatccgtcaattggaattggagggtactgtcttccgttagctcctaaatatattttggatgcagtcaatgatagtgaggagttacctatgctgagggagtcagttaaatctgatttaaagcagtctgactttattactgacttaatcaaaagctataactgtcaaaaagtaggagtattaggtctaagttatgctccggagactaaaatttggaagaattccccagttgttagtttaatctattctttgttaagaaatggaatagaagtgaaaataaatgatccatatttctctagtgaagaaattcaagaaataacgactgttcaatctttcagtttaaatagtgagtcactacaagaatttgatatactggtaattgctacctcacataaaagctatgatggagaattggagagaatactttttgatttaaataaagaaatgattatttttgataattttggagtgaataagaatctatctaaattaccaaatattcattattttgaaattgggaacttccaatataatgaaagtaggagataa

SEQ ID NO: 6325 - DNA, 678 bp, Streptococcus pneumoniae
  misc_feature (1)..(678): tiling:Spneumo1:WAN024BXZ; WAN023RWI contig_1609_22||||137 00..14377|-|678 bp|Glimmer 2.02 orf prediction|S.pneumonia e|670|WAN01UDCD|ORF
atgaaaaatattcaagcaggagaattgcagattgctattgctggtccaagttttctacaaagtgaaatcataagtattgaaaatatgttacctttaagtggatcatctgtagaaattaactctccggctttttcaactggtttaacggaattagataaacaacaagaactttctgaaatttctatgtatctagatatatctggtatggtagcatcatctcatgaaatggcaatgttaagtatcttaaactcgatgttaactggtattaaagattcattattaggccataagttaaggacacaaaagcaatggatatatagtattgtatcatacccaatattttatagtaatatgactttactaaaaatagtaactataacacctacaatctataagaaaaaattgattaaaacactggagaacaatcttgttaatgaatccgatttatctgatgaactattattttataaggctaaaaaaagagtaatcaatgaattgtacataaattgtgaagttaataaaaatgaatatttaaaaacaatttgtagagaaaaattatttgatattccaagttgggatagtattgctgaagagctggaattgatttctttagatgaattaaaaagtttttcaaaaaaagcaattattcaaaataggaattaccacattgtaataaaa

SEQ ID NO: 6326 - DNA, 228 bp, Streptococcus pneumoniae
  misc_feature (1)..(228): tiling:Spneumo1:WAN024BXY; WAN023RWF contig_1609_26||||165 20..16747|-|228 bp|Glimmer 2.02 orf prediction|S.pneumonia e|670|WAN01UDCD|ORF
atgaaaacacaatatcctatgattccctttcctctcattgtaaaggcaacagatggcgataccgaagcgattaaccagattctacatcattacagagggtacataacgaagcgttccctacgacttatgaaagatgaatatggcaatcaaagtatggtcgttgatgaagtcttacgtggaagaatggaaaccagactgattacaaagattttgtcatttgaaattaag

SEQ ID NO: 6327 - DNA, 159 bp, Streptococcus pneumoniae
  misc_feature (1)..(159): tiling:Spneumo1:WAN024BXA; WAN023RP4 contig_1583_18||||593 1..6089|+|159 bp|Glimmer 2.02 orf prediction|S.pneumoniae| 670|WAN01UDGB|ORF
atgaaaacagtaaaaaagsaatgggagccacggattgtaaacatcatggcagatggttctcaagttgatgatttgacaggctatgtcatccctgctggtcattcgtactatgacattattttaggcatgaacaagcaatctaacgaggagggcgtagct

SEQ ID NO: 6328 - DNA, 585 bp, Streptococcus pneumoniae
  misc_feature (1)..(585): tiling:Spneumo1:WAN024BHP; WAN023RV6 contig_1609_74||||601 20..60704|-|585 bp|Glimmer 2.02 orf prediction|S.pneumonia e|670|WAN01UDCD|ORF|000
atgaaaagaataattccagtttatatattccaacaagcaaatgtcctattggtatctctatacttactgaaaatgctttgtatcggtgagttaactatactacagattctctatggagcgtcgctcatttcttttttatggatgtatggtcaacgaaaacaagtgatcaaggttaatatgaaaactaggataaaatggcttggtattggatttgtcagcctactgattataagtctatgttttagtctgattcatgctcaaggaagcacgaatcaagcaaacttaattggccttcaacatcaagttccttggttttcatttttattgtttttaatcaatgcgagtatggttgaagaatttttgtatcgagaaattttatggaacttggtcaaaaaattagatatcagaattgcgttgacaagtgttttatttgccttagctcatcatccaggaaccattctagcttggtgtttgtatgtttcacttgggatggttttagggatggtgcgctataaatcggacttatggggcagtatggggctacatttggtgtggaacctgctagtttatagtttgctgcttttt

SEQ ID NO: 6329 - DNA, 1113 bp, Streptococcus pneumoniae
  misc_feature (1)..(1113): tiling:Spneumo1:WAN024BQ3; WAN023PBX pne43_13||||9407..105 19|+|1113 bp|Type 20 capsule operon, Glimmer 2.02 orf pred iction|S.pneumoniae||WAN01UCHC|ORF
atgaaaagaattctagtattcggaatgaatgaaaaccctggtggagttgaatcctttataatgaattattttcgtgaatttaatcgcgaaaaattagccttagattttttgtgtaattcaaatgataaaatagcttatgaggatgaacttatttctaaaggagcaagagtttttcacctgacagcgagaagtaaaaatccgatacgttattattgggaaatgtatagattcttcaaagaatatgcatctgattatcaggcaatttgggttaatattaatagcttagcaaatattgactatttaaaatttgcaagatattttggtattccggttcgaattgtacacagccataatagtcaaaatatggataccaaacttcgtgaaaaattacataatcataatagagacaaaattgaaaagtgggcaaccgatttctgggcttgttcgcacgaagctgcaaaatggttttataacgaagaaactattggaaaagttaagattataccaaatgctattaatatgaatgcttctattttttcttctgaggcacgagataaaattcgaattgattatacattagacaataaatttgtgctaggtcatgtaggacgtttgcattttcagaagaatcaagaatttatgataagagttttagctaaattacaggaatttagagacgatgtctgcttagttttagttggtcaaggtgaagatcttaacaaattaaagatactggctgaggagctatctattcaggataaggtctactttgtgggagttcagtcgaatatatcagaatggttgagtacttttgacttattcttttttccgtctaattttgaaggtttaggaatagctgcattagaggctcaagtaaatggtctaccgacactactctcagaagaaggtgtaccaaaggaagtaaaaatcaatgataatacttttttttatccattgaaggaaagtgaagaaagctgggcaaacttccttgatgaaatgattcatacaacaactcgtttaaattatgaatatatacaagaaaattttgagaaatctggctacgatattaagatagctgctcagaatcttgaaaaacaattgctagaattagtt

SEQ ID NO: 6330 - DNA, 390 bp, Streptococcus pneumoniae
  misc_feature (1)..(390): tiling:Spneumo1:WAN024BQL; WAN023PJF pne32_18||||15986..16 375|+|390 bp|Type 16F capsule operon, Glimmer 2.02 orf pre diction|S.pneumoniae||WAN01UCIC|ORF
atgaaaagagtaattacatatggaacgtttgatttacttcatcatggacatatcaatttattgcgacgtgcaaaagaattaggtgactatctagtggtagttgtttcaagtgatgaattcaacctaattgaaaaaaataaagtttgttatttcaattatgagcatagaaaaagtctagttgaagctattagatatgttgaccttgttattcctgaaacgagttgggaacaaaaacgcagtgatgtcaaagagtatcatattgatacttttgtgatgggggatgattggattggagaatttgattatctaaaagaagaaggagttgaagtcgtttacttacctcggacgaaagaaatttcgacaactaaaataaaaaaagatttatcaatg

SEQ ID NO: 6331 - DNA, 1173 bp, Streptococcus pneumoniae
  misc_feature (1)..(1173): tiling:Spneumo1:WAN024BVH; WAN023QHM contig_1298_22||||116 87..12859|-|1173 bp|Glimmer 2.02 orf prediction|S.pneumoni ae|670|WAN01UEBQ|ORF
atgaaaagatataaaactctatttataaagtatcctgattctttccagtttttagtttttaatattctgttttatttatcaatgtcactttctaggagtgttcattcaatttggtttgatttgaatggaagtttactgaattatagtatttcatattcagcaatggctttttcaggaatgtttgctggaattctaggcagaagaattaattattttaatttaagaaatctgataagaataggagtaatactatattctatcggtttattattgagattatttcctaatgattggttgatatcattaatctctggtcttatctcaggtattggagcggcaacaataattcttttattgcgaacatgggctgtcggaataggaaaagaaaaagacagagtagttacgatttccttaaaaagattttccagcagtttaggaacttctattggagggatattgtcaggcattttgctatattgcttaatatatttttttcatagtatggcgtatcctattgttttagcttcggcaagtatgctatgtttagtaactttcttttgtattcctaaaattgacagttttgttgataagagtgaaagagcagaaagaatcttagaatctagtaattacatgaaaaagagaataatcttttttggtatcttctcaggtttaattgctagtatattttctccttatctacccgttattttaagacgtcaagaaatatcagaagtttttattgggcctgttctaactattttaagtctattaacaatttatttctcttccatattttcaagtagaaaagtagataatcataaacaaggatattatattttatccgagttgttgatttcgatacttactttattatttagttttcatttaaaatattatttagtaataacgatattgattattagagtattttttgtaaacctatcatcaattacacaagagttaatggaattatcaatttatccaaaggaaaaaatttcatatttctatggcatttctcaaacttcctattttataggtgatactctgggaggatttattggaggttggctatttaaccaagatatgaaatacagtatttatctgttttctgtgttattattattcaacgctgtgttatttaacagattttacttacggaataataaaaattct

SEQ ID NO: 6332 - DNA, 246 bp, Streptococcus pneumoniae
  misc_feature (1)..(246): tiling:Spneumo1:WAN024D5S; WAN023IC6 86641_3286||||1870420 ..1870665|+|246 bp|EGAD orf prediction|S.pneumoniae|TIGR4| WAN01UC25|ORF|010
atgaaaagatttttccctttaatacctgtttctttttggactgctttaatttgtgggaagatattttctgtcacaaattcatcatctgtcatcgcttcaagttttgctttgaatgcttcaagaactgttggaactgtttcacccgtcatgacttcgcgctctgcttctgtcaattctgggaaatctgagaagaaaagatctgtcaatgggataatctcatctactgatttcatttgtggtttatag

SEQ ID NO: 6333 - DNA, 237 bp, Streptococcus pneumoniae
  misc_feature (1)..(237): tiling:Spneumo1:WAN024BUX; WAN023Q9M contig_1258_18||||816 0..8396|+|237 bp|Glimmer 2.02 orf prediction|S.pneumoniae| 670|WAN01UEG8|ORF
atgaaaagtgattacgaagaagtgaattggtcagagtattgttacaaggaaaacgatgatgataaaacttggtgggttgatacttcatggtatgccaaaggattgatgcttatcacatttgataaaaagaagttctataacctttttgaagattatcctcaaaacatgacttctgaggagattgaaatctttgataaagaaaatccattttgggaagatttcttttcagatagaaaa

SEQ ID NO: 6334 - DNA, 1164 bp, Streptococcus pneumoniae
  misc_feature (1)..(1164): tiling:Spneumo1:WAN024BUA; WAN023Q34 contig_1223_7||||6204 ..7367|-|1164 bp|Glimmer 2.02 orf prediction|S.pneumoniae| 670|WAN01UEKE|ORF
atgaaaataacagaatacaccaaaaaagacgggtctacagtctatcgctctagcgtctaccttggtatcgataccgtaacaggtaagaaagtcaagacgactatatcagggcgaaccaagagagaactcaaagccaaagcgctacaggctcaaatcgactttgaaaaagacgggtctacagtatataaagcagttgagataaagacttacgccgaactggtggagaattggctagaaacgtactgccatacggttaaaaaatcgaccttaatgggtaccaaattcaaaatagataaatatctacttccagctttcggaaattataggctggataaactgacgcccccaatcattcaaaagcaagtcaatcaatgggcaaaagactataatcaactaggcaaagggtttcaagagtatcctctccttcactcgctaaacaaacgcatacttaaatatgccgtatctttgcaagctatcccctttaaccctgcccgtgatgttatcgtgccacgtcgtaaggaaaaagaagggcaaaaactgaaatatctggatgatgataacttaaaaaaattcttgacttacctggagcagctgccaaacacttacaaaaatttctacgatacggtgctatataagacgcttttagcgactggtttgcgtattcgtgagtgtttagccctcaaatggtctgatattgacctaaaaaacggcacactagacgtaaataaaacgttaaatattatcaaagaaatcactggccctaagactaaatcaagtattagggtaattgacttggataataagacggtgctcatgctacggctctataaagcaagacaatcccaaatagggaaagaaatggggttgacctatgagaaagtattctctaatagctttgataagcatatagacgctagaatgcttagtttcaggttagtaaaacatttggaacgtgctggatgccctcgttttacgttccacgccttccgccacactcatgctagtatcttgctcaatgctggactaccttacaaagagatacaaacacggctcggtcatgcaaaactttctatgaccatggatatttatagccacctatccaaagacaatcagaaaaatgctacttcattttatgaaaaagctattgaaaaattaaaaagttcc

SEQ ID NO: 6335 - DNA, 1920 bp, Streptococcus pneumoniae
  misc_feature (1)..(1920): tiling:Spneumo1:WAN024BR3; WAN024025 |tet(O)||CAA69103.1|| |1920 bp||S.pneumoniae||Y07780|ORF
atgaaaataattaacttaggcattctggctcacgttgacgcaggaaagacaacattaacggagagtttattgtataccagtggtgcaattgcagaaccagggagcgtagataaaggcacaacaaggacagatacaatgaatttggagcgtcaaaggggaatcactatccagacagcagtgacatcttttcagtgggaggatgtaaaagtcaacattatagatacgccaggccatatggattttttggcggaagtataccgttctttatccgtattagacggagcagtattattagtttctgcaaaggatggcatacaggcacagacccgtatactgtttcatgcactacagacaatgaagattccgacaatttttttcatcaataaaattgaccaagaggggattgatttgccaatggtatatcaagaaatgaaagcaaagctttcttcggaaattatagtgaagcaaaaggttgggcagcatccccatataaatgtaacggacaatgacgatatggaacagtgggatgcggtaattatgggaaacgatgaactattagagaaatatatgtcagggaaaccgtttaaaatgtcagaactggaacaggaagaaaacaggagattccaaaacggaacgttatttcccgtttatcacggaagtgctaaaaacaatctggggattcggcagcttatagaagtgattgccagtaagttttattcatcaacgcctgaaggtcaatctgaactatgcgggcaggtttttaagattgaatattcagagaaaaggcggcgttttgtttatgtgcgtatatatagcggaacattgcatttgagggatgttattaaaatatctgaaaaagagaaaataaaaatcacagagatgtgtgttccgacaaacggtgaattatattcatccgatacagcctgctctggtgatattgtaattttaccaaatgatgttttgcagctaaacagtattttggggaacgaaatgctgttgccgcagagaaaatttattgaaaatcctctccctatgctccaaacaacgattgcagtaaagaaatctgaacagcgggaaatattgcttggggcacttacagaaatttcagatggcgaccctcttttaaaatattatgtggatactacaacgcatgagattatactttcttttttggggaatgtgcagatggaagtcatttgtgccatccttgaggaaaaataccatgtggaggcagaaataaaagagcctactgttatatatatggaaagaccgcttagaaaagcagaatataccatccacatagaagtcccgccaaatcctttctgggcttctgtcgggttgtccatagagccgctccctattggaagcggagtgcagtatgaaagcagagtttcacttggatatttaaaccaatcgttccaaaatgcggttatggagggggttctttatggctgcgagcaggggctgtatggatggaaagtgacagactgtaaaatctgttttgaatatggattgtattatagtcctgtaagtacccccgcagactttcggctgctttcccctatcgtattggagcaggctttaaaaaaagcagggacagaactattagagccatatctccactttgaaatttatgcaccgcaggaatatctctcacgggcgtatcatgatgccccaaggtattgtgcagatattgtaagtactcaggtaaagaatgacgaggtcattctgaaaggagaaatccctgccagatgtattcaagaatacaggaacgatttaacttatttcacaaatgggcagggagtctgcttgacagagttaaaaggataccagccagctattggtaaatttatttgccaaccccgccgcccgaatagccgtatagataaggttcggcatatgttccacaagttagcttaa

SEQ ID NO: 6336 - DNA, 1212 bp, Streptococcus pneumoniae
  misc_feature (1)..(1212): tiling:Spneumo1:WAN024DJE; WAN02418M |ugd||AAP94614.1|||12 12 bp|UDP-glucose-6-dehydrogenase|S.pneumoniae||AY336008|O RF|000
atgaaaatagcagtagcagggacaggttatgtgggtttatctattgcaattctattagcgcaatatcataaggttatagcggtagatgttattcctgaaaaagtagagcttatcaatcgtcgccaatctcccattaaggatgatgatattgaaacttatttagtggaaaaggaattagacttagttgcaacattagatggtaatgaagcttatcgagatgctgactttgtcataattgctgtcccaactaactatgacagtaaaaaaaattattttgatacatctgttgtggaagcagttattgagcagattattgcggttaatttgaaggcaacaattgtcataaaatccacaattcctgtgggatatacagaaagtctccgaacacgttttgggcaatttaagattctctttagtcctgaatttttacgggagtctaaagcactttatgataatctctatcctagtcgaatcatcgttggagcagatttgagagatacggagcaggtagttcaggctgagcggtttgcaactcttttgcaggaaggttcacttaaacctgatgttgagaccttaattatgggtgtaacagaggcagaagcagtcaaactatttgccaacacctatttggctttgcgggtttcttactttaacgaattggatacctatgcggagataaagggattggacactaaatccatcattgacggagtagggttagatccacgaattggtagccattataacaatccgtcatttggttatggaggttattgtcttcccaaagatagtaagcagttgctggcgaattatcatgatgtaccacaaaatatgatgacagctattgtagaaagtaaccgtactcgcaagtattttattgccgatcgtattttgaaaaatgcgttggagctttcagacggtaatcaaacaatcatagtaggtgtttaccgcttaactatgaagagtggttcggataatttccgtcaatcatcaatccaaggtgttataaaatgtttaaaggccaaaggtgtagaagtaattatctatgaaccaactttggaggatcatagctttttctttggtaatcaggtggttaatgatttggaagtttttaagtctagcagtcaagtgattgttgccaatcggatggaaaaatctttatatgatgtgctagaaaaagtttatacaagagatatttttcagcgagattaa

SEQ ID NO: 6337 - DNA, 1233 bp, Streptococcus pneumoniae
  misc_feature (1)..(1233): tiling:Spneumo1:WAN024DJC; WAN02413W |cap1K||CAB05929.1||| 1233 bp|uridine diphosphate glucose dehydrogenase|S.pneumo niae||Z83335|ORF|000
atgaaaatagcagtagcaggtacaggatatgttggattatttattgcaatcttactggctcaacatcatcaagttgttgccgtagatatcattcctgagaaagttgagttaatcaataaaaagaagtcccctatccaagacgattatatagaaaaatatctcgcggaaaaagaattgaattttgtagctacattgaatgcagaggaagcatatgagaatgcggattttatagttattgcggctccaactaattatgatccgaaaaaaaattttttcgatacatcttcagtcgaggctgtcattgaagcagttatgaaatataatcctgatgcaattataataattaaaagtactgttcctgttggatatacaaagtcagtacggaggaaatttcttacagacaatattatgtttagtcctgagtttttacgggagtcaaaagcgttatatgataacctatatccgagtcgaattattataggtacagataaagatgataaagatttggtaaagtctgctgaaatttttgtaaaaatgcttcaggaaggtgcagtgaaagaaaatattgaaacattgtatatggattttacagaagctgaagcagtaaaactttttgctaatacctatcttgccctccgggtttcctattttaacgagttagatacttattctgagatgaaaggactagatactcaagcgattattgatggagtttgtttagatccgagaataggttctcactacaataatccttcttttggttatgggggttactgtcttcctaaagataccaagcaacttcttgcaaattattctgacgttccacaagaaatgataacagctatagtacaaagtaatcggacaagaaaagattatattgcagatcgtattttagatcttgctggatcttatgtaggcaatgatttctataaaccagataaagaaaaagagattgttgtaggaatttatcgtttaacaatgaaaagtaattcagataattttagacaatcttctattcaaggtattatgaagcgtttgaaagcaaaaggtgttactattattatttacgaaccaactcttgaaagtggtactactttctatggtagtcaagtagttaatgattttgaaatatttaagaaatctagtcaagtgattgttgcaaatcgttttgatgagactttagaagatgtgaggggtaaagtttatactagggatatttttaagagagattaa

SEQ ID NO: 6338 - DNA, 912 bp, Streptococcus pneumoniae
  misc_feature (1)..(912): tiling:Spneumo1:WAN024BU6; WAN023Q2M contig_1220_11||||565 7..6568|-|912 bp|Glimmer 2.02 orf prediction|S.pneumoniae| 670|WAN01UEKO|ORF
atgaaaataggaatgagaaaaccaagtctgaccagaagtttaaaagctagaactactagtaaatggaagagacaggcaaaaaaagcccttatccctggctatggtaagaaagggatgggatgggttaaaaatccaaagaaagctatgtataacaaggtttatcataagacaacctttggactttcggatttgtttaaatcatctaaaaagcgaaaaaagaaagtagtcaacaacaaacagcaatctattcttgcctcgaacggcaaaaagcaacacactccaaaagaatataaagaagctggacttgtctttatggttttaggtgctatattcctatttttatttccacctctcggcttcttcttgtttattactggttttataacttacattattggtcgtttaactgcaaagcgagagaaaaagcagaaagttgaaaattacagtccacagattgatacaattgttttccgagataattttttattaatgggaacaaattatcatcaagaagaagctgagattgcagctgattttctttccaagggtgtccattattttgggaaagataataagagtttgaaatcttatatgcttgaaacatataaacctgtttacaaatacaataaattgaaaacagtagacgttcaactattaccagaaccttcaaatccgcatgataaaaatgctgtcaaagttttagtgaataatatctttgttggatacttaccagctgtgatcgcatcacaaatttcatcctacatttctaatccaaattacagatatgatgcaatccttacaggtagaggaggaccatataaaaccctaaatatcgaaactgagagagtcgtttctcgtaaaagtgacttaacttactatttagatttaacagtatggcgtcttgctaaaaaa

SEQ ID NO: 6339 - DNA, 73 bp, Streptococcus pneumoniae
  misc_feature (1)..(73): tiling:Spneumo1:WAN024B8S; WAN023W0N AX570699.1_1||||1..11 4|+|114 bp|Glimmer 2.02 orf prediction|S.pneumoniae||AX570 699.1|ORF|000
atgaaaatcaaagaacaaactaggaagctagccacaggttgctcaaaacactattttgaggttgcagatagag

SEQ ID NO: 6340 - DNA, 135 bp, Streptococcus pneumoniae
  misc_feature (1)..(135): tiling:Spneumo1:WAN024BB6; WAN023Z6R AL449925.1_104||||961 87..96396|+|210 bp|Glimmer 2.02 orf prediction|S.pneumonia e||AL449925.1|ORF|000
atgaaaatcaaagagaaaactaggaagcaagtcgcaggttgctcaaaacatggttttgaggttgtagatgaaactgacgaagtcagtaaccatacctacggcaaggcgaagctgacgtggtttgaagagattttc

SEQ ID NO: 6341 - DNA, 120 bp, Streptococcus pneumoniae
  misc_feature (1)..(120): tiling:Spneumo1:WAN024BB5; WAN023WW4 AX568388.1_1||||1..12 0|+|120 bp|Glimmer 2.02 orf prediction|S.pneumoniae||AX568 388.1|ORF|000
atgaaaatcaaagagcaaactaagaaactagccgcaggttgctcaaagcactgctttgaggttgtagataagactgacgaagtcagtcacatatataatccaaggcgacgtctaactaat

SEQ ID NO: 6342 - DNA, 84 bp, Streptococcus pneumoniae
  misc_feature (1)..(84): tiling:Spneumo1:WAN024BAV; WAN023S3B contig_1628_9||||4995 ..5078|+|84 bp|Glimmer 2.02 orf prediction|S.pneumoniae|67 0|WAN01UD9N|ORF|000
atgaaaatcaaagagcaaactagaaagctagccgcaggctgttcaaagcactgctttgaggttgcagataaagttgacgcagtt

SEQ ID NO: 6343 - DNA, 75 bp, Streptococcus pneumoniae
  misc_feature (1)..(75): tiling:Spneumo1:WAN024B9K; WAN023NRP spn089a12_29||||20269 ..20343|+|75 bp|Glimmer 2.02 orf prediction|S.pneumoniae|2 3F-1|WAN01UCWH|ORF|001
atgaaaatcaaagagcaaactagaaagctagccgcaggttgttcaaaacagtgttttgaggttgcagatggaaac

SEQ ID NO: 6344 - DNA, 156 bp, Streptococcus pneumoniae
  misc_feature (1)..(156): tiling:Spneumo1:WAN024BB9; WAN023MMU spn191c12_1||||411..5 66|-|156 bp|Glimmer 2.02 orf prediction|S.pneumoniae|23F-1 |WAN01UCQJ|ORF|001
atgaaaatcaaagagcaaactaggaaactagccgcaggttgctcaaatcactgctttgaggttgtagatagaactaacgaagtcagctcaaaacactgttttgaggttgcagatagaactgacgaagtcagtaacatctatacggcaaggcgacgt

SEQ ID NO: 6345 - DNA, 156 bp, Streptococcus pneumoniae
  misc_feature (1)..(156): tiling:Spneumo1:WAN024BB8; WAN023SH4 NC_003098.1_2514||||1 949109..1949264|+|156 bp|Glimmer 2.02 orf prediction|S.pne umoniae|R6|NC_003098.1|ORF|100
atgaaaatcaaagagcaaactaggaaactagctacaggttgctcaaaacaccgttttgaggtagtagataagactgacgaagtcagctcaaaacactgttttgaggttgcagatagaactgacgaagtcagtaacatctatacggcaagacgacgc

SEQ ID NO: 6346 - DNA, 75 bp, Streptococcus pneumoniae
  misc_feature (1)..(75): tiling:Spneumo1:WAN024B9L; WAN023NLB spn103f10_4||||4060.. 4134|+|75 bp|Glimmer 2.02 orf prediction|S.pneumoniae|23F- 1|WAN01UCLB|ORF|001
atgaaaatcaaagagcaaactaggaaactagctgcaggctgctcaaaacactgttttgaggttgcagatggaagc

SEQ ID NO: 6347 - DNA, 138 bp, Streptococcus pneumoniae
  misc_feature (1)..(138): tiling:Spneumo1:WAN024BBE; WAN023YSH AL449927.1_212||||169 909..170046|-|138 bp|Glimmer 2.02 orf prediction|S.pneumon iae||AL449927.1|ORF|000
atgaaaatcaaagagcaaactaggaaactagctgcaggttgctcaaaacagtgttttgaggttgtggatagaactgacgaagtcagtaacaatacctacggcaaggcgacgttgacgtggtttgaagagagtataaaa

SEQ ID NO: 6348 - DNA, 69 bp, Streptococcus pneumoniae
  misc_feature (1)..(69): tiling:Spneumo1:WAN024B8Q; WAN023NSK spn088d02_2||||1993.. 2097|-|105 bp|Glimmer 2.02 orf prediction|S.pneumoniae|23F -1|WAN01UCTG|ORF|001
atgaaaatcaaagagcaaactaggaagctagccacaggttgctcaaaacactgttttgaggttgcagat

SEQ ID NO: 6349 - DNA, 192 bp, Streptococcus pneumoniae
  misc_feature (1)..(192): tiling:Spneumo1:WAN024BBB; WAN023L8M 312503_2257||||121457 8..1214829|-|252 bp|EGAD orf prediction|S.pneumoniae|R6|NC _003098.1|ORF|100
atgaaaatcaaagagcaaactaggaagctagccgcaggctgctcaaaacagtgttttgaggttgtggatagaactgacgacgtcagctcaagacactgttttgaggttgcagatagaactgacgaagtcagtaaccatacctacggtaaggtgacgctgacgtggtttgaagagattttcgaagagtattag

SEQ ID NO: 6350 - DNA, 75 bp, Streptococcus pneumoniae
  misc_feature (1)..(75): tiling:Spneumo1:WAN024B9N; WAN023N5D spn150h11_39||||35834 ..35908|-|75 bp|Glimmer 2.02 orf prediction|S.pneumoniae|2 3F-1|WAN01UCW9|ORF|001
atgaaaatcaaagagcaaactaggaagctagctgcaggctgctcaaaacactgttttgaggttgtagatggaagc

SEQ ID NO: 6351 - DNA, 84 bp, Streptococcus pneumoniae
  misc_feature (1)..(84): tiling:Spneumo1:WAN024BAO; WAN023S47 contig_363_2||||720.. 803|+|84 bp|Glimmer 2.02 orf prediction|S.pneumoniae|670|W AN01UD8W|ORF|000
atgaaaatcaaagagcaaactaggcagctagccgcaggttgctcaaaacactggtttgaggttgcagatagagctgacgtggtt

SEQ ID NO: 6352 - DNA, 108 bp, Streptococcus pneumoniae
  misc_feature (1)..(108): tiling:Spneumo1:WAN024F79; WAN023Z4Q AL449925.1_182||||178 080..178187|+|108 bp|Glimmer 2.02 orf prediction|S.pneumon iae||AL449925.1|ORF|000
atgaaaatcaaagagyaaactaggaagctagccgcaggttgctcaaaacacagttttgaggttgtagataagactgacgaagtcagtgatcatatcgtaaccgtccaa

SEQ ID NO: 6353 - DNA, 120 bp, Streptococcus pneumoniae
  misc_feature (1)..(120): tiling:Spneumo1:WAN024F77; WAN023VNA AX571662.1_2||||1..12 0|+|120 bp|Glimmer 2.02 orf prediction|S.pneumoniae||AX571 662.1|ORF|000
atgaaaatcaaagatcaaactaggaaactagctacgggctgctcaaaacactgttttgaggttgcagatagaactgacgaagtcagtaacatctatacggcaaggcgacgtctaactaat

SEQ ID NO: 6354 - DNA, 156 bp, Streptococcus pneumoniae
  misc_feature (1)..(156): tiling:Spneumo1:WAN024BBD; WAN023NKL spn103h07_8||||4111.. 4266|+|156 bp|Glimmer 2.02 orf prediction|S.pneumoniae|23F -1|WAN01UCQO|ORF|001
atgaaaatcaaagatcaaactaggaaactagctgcgggctgctcaaaacactgttttgaggttgtggatagaactgacgaagtcagctcaaaacactgttttgaggttgcagatagaactgacgaagtcagtaacatctatacggcaaggcgacgt

SEQ ID NO: 6355 - DNA, 117 bp, Streptococcus pneumoniae
  misc_feature (1)..(117): tiling:Spneumo1:WAN024BBK; WAN023SHF NC_003098.1_2473||||1 915855..1915971|+|117 bp|Glimmer 2.02 orf prediction|S.pne umoniae|R6|NC_003098.1|ORF|100
atgaaaatcaaagggcaaactagaaaactagccgcaggttgctcaaaacagtgttttgaagttatggatagaactgacgaagtcagtaaccatacctacggcaaggcgacgttgacg

SEQ ID NO: 6356 - DNA, 1227 bp, Streptococcus pneumoniae
  misc_feature (1)..(1227): tiling:Spneumo1:WAN024FLC; WAN023ORD pne76_10||||6998..822 4|+|1227 bp|Type 35B1 capsule operon, Glimmer 2.02 orf pre diction|S.pneumoniae||WAN01UCDM|ORF|000
atgaaaatcactatcaaaaggtattcactgccagaaattttaggactagcagcattagctatattcctcctattttcgctattggatgtaagtttttacgttcagtatatatctcctatgctatataaagctgcaatctttttgataattatgctaataattttgaaggaatttgtatctgggagtaatagctttgagtctctattgggtttactaggggtttctacgctctattttatcataggtagtgtaacgagctatacttcttttatagtcttagggctatctctgatatatagcttgagggatattcccttttcaaaagtagtcaaagtagcctttatcattagtgttgctatgttgttccttgtgatattgagtagtaagataggttttattcctgattacattgagttttcatctactagagttcgacactatcttggattccgatattcattatttccatcaacgatcatgatgaatattatagctatatcattttttttgaagcaagaaacagtatcgtatcagcgcctttttatattatttttagtttcaatgtacctatatttagaaactgattcacgactgacttttatcagttcgagtttgttactattagctaatttggctatgaagctaatccctactgttattgaaaaatttagtcttttattaaaatttttcacgcttacctattttgttaatgcctatttaagttattggatttcaaaaaattacttaaggacatcaaatgccttgttgaatcatttttttcatcaagcagatcaattcttaggggggcgtatttatttatctaatcgttcgttaagtttatatggttatgggattcttgggcagaaaattgcttgggttggaaacgccttgaatgcgcaaggagaacgaagtacggatgcatatttatatgtagataatctatatattcagattcttcaacattttgggctgatagctttaattattattttaagtttactgactgcgactttagtgaagcttttgagaaagggacaaattgtcttaagtattattatagtttctctgagtttccatgctttgattgacgatttgatattgagtatccattataatattttttggatattattaggtagtttaatctactcaaattatcagttttctgaagaaaggtatggagaagttgagaatgattccttacgtagaactgtaagggaaggttat

SEQ ID NO: 6357 - DNA, 1413 bp, Streptococcus pneumoniae
  misc_feature (1)..(1413): tiling:Spneumo1:WAN024FYC; WAN023PMZ pne26_19||||13820..15 232|+|1413 bp|Type 13 capsule operon, Glimmer 2.02 orf pre diction|S.pneumoniae||WAN01UCIU|ORF|000
atgaaaatcttaaaaaactacgcctacaatctttcttatcaattgttggtgattatactcccaatcattacaactccctatgtgacacgagtcttttcttcgtatgctttagggacttatggttattttaattccatcgttacttattttatcctcttagctactctaggagttgctaactatggtactaaggtaatctctggaaatcgaaaggaaattgaaaaaaacttttggggaatctactccctgcaattgtgtgcggcagttctgtctctgtccttatacgttgttctttgtctaactctttctttgatgcaaaatccagtcgcctatattctaggattgagtgtggtttctaaaggcttagatatttcttggctctttcaagggttagaggattttagaaagataactgttcgaaatatcacggttaaactgataggtgtaatctctatcttcctttttgtcaaatctgaaagtgacctttatctctatatctttttactaaccatatttgaactcttaggacaactaagtatgtggttgcctgctcgagaatttattggtagagatcattttgatatagcatatgttagacatcatttgaaacctgtcatattattattccttcctcaagtagctatttctatgtatattacgttagatcgtaccatgcttggggcattagcttctacaaaagatgtagggatttatgaccaggctctaaagttggtcaatatccttatgaccctggtaacttctttgggaagcgttatgttacctcgtgttgcgcatctgctatccaaaggggaacaaaaagcggttaataaaatgcatgagatatccttcctcatttataatttagtgatttttccagtgatagtagtgattttgattgtgaatgatgattttgttcaatttttccttgggcaagattttcaggatgcgcgttatgcaattgccatcatgatttttcggatgttctttatcggttggactaacatcatgggaattcagatgctgatacctcataatcaaaataaagaattcatgatttcaacaactgctcctgcaattatcagtgtaggtttaaacttgctattcctgccaaagtttggttatatcggggcagccattgtctcggttttaacagaggcatttgtatgggcaatccaattgttctatactcgcagatatttaaaaggagttcctataatcggatcaatggcaaaaattatactagcatctaccattatgtatggacttttactaagttcaaaaacagttatacatttttcaccgactttaaatgttctagcatttgcagcgcttggtggaataatttatctttttgcaattctatctctgaaagtggtagatgtgaaagaattaaaacaaattattaggaaaaat

SEQ ID NO: 6358 - DNA, 111 bp, Streptococcus pneumoniae
  misc_feature (1)..(111): tiling:Spneumo1:WAN024BL5; WAN023N7Q spn147d03_9||||5497.. 5607|-|111 bp|Glimmer 2.02 orf prediction|S.pneumoniae|23F -1|WAN01UCWT|ORF
atgaaaatgctagtcaaatatcttattctatgttatagtgaaagtatggatttttttagtaggatgattcttgatatcttgattgccattacatgtagttttactactcaa

SEQ ID NO: 6359 - DNA, 75 bp, Streptococcus pneumoniae
  misc_feature (1)..(75): tiling:Spneumo1:WAN024B9H; WAN023OSJ pne74_17||||14779..14 853|+|75 bp|Type 35F2 capsule operon, Glimmer 2.02 orf pre diction|S.pneumoniae||WAN01UCCV|ORF|000
atgaaaattaaagagcaaactaggaagctagccgcaggttgctcaaaacactgttttgaggttgcagatggaagc

SEQ ID NO: 6360 - DNA, 513 bp, Streptococcus pneumoniae
  misc_feature (1)..(513): tiling:Spneumo1:WAN024BH4; WAN0246RS 200145-38-6_3||||213. .725|+|513 bp|Glimmer 2.02 orf prediction from Patent Sequ ences|S.pneumoniae||WAN024713|ORF|000
atgaaaattcaagatttattgagaaaagatgtcatgttgctggatttgcaggcaactgaaaagactgctgtcattgaagagatgattaaaagcctaacaggccacggttatgtgacagattttgaaacctttaaagaaggcattttggcgcgtgaagctttaacttctactggtttgggtgatggaatcgctatgcctcacagcaaaaacgctgctgtcaaagaagcgacagttctctttgctaagtcaaacaagggtgttgactatgacagtttggatgggcaggcaactgacctcttcttcatgattgcagctccagaaggtgccaatgatactcacttggcagcattgacagaattgtctcaatacttgatgaaagacggttttgcagacaaacttcgtcaagcaacatctgcagaccaagttatcgaactttttgaccaagcttcagaaaaaactgaggaacttgttcaagcacctgctaatgactctggtgactttatcgtagctaac

SEQ ID NO: 6361 - DNA, 924 bp, Streptococcus pneumoniae
  misc_feature (1)..(924): tiling:Spneumo1:WAN024BZQ; WAN0243W8 spr1195||15903238|NP_ 358788.1|1192548..1193471|-|924 bp|Conserved hypothetical protein|S.pneumoniae|R6|NC_003098.1|ORF
atgaaaattgatgttataaatcatttagactcaccaggattagctgggatgatttgtagacggattaataatagaattttagtttatggaggtagttatttcccaaataacgatcctttaaaaagttcaaaagttcaatcaaataaaattagagtttatgatgagaaatttaatcttctatatgaacaagatggaaaaatttctccagataaaggaataacgattgaagttgaaaatgaaatctattacattctaggctcgagcatttatcgtattacgattggtgaaagtgtagaagaaacctgtatcgggaattttgatttccaactagagagtggttatggttgttattttgatggccacttattctttggatttcaggaaagttatttgttcaatattgagactcaagagctttttaaaaaatctgacttcccagtttctggtagaggccaaggtttgtcagtcaaatatcaaaatgaattgtattatttaggtggagcgaacaatgaagcttatttagatggatacaaatatagtttaaaaaaagataagtgggaaaaacttgagttcgaattaccaagctcagttctaggagcatcaagtatacaaataaatgaaagtggtttattaatacttggtggctttaatgaaattgtttataataaagcagttattgatttagcaacccctggctatagggaagaatatttttctaaagggagagatttctttaattggaatcgtagcatgcgaatactagatttagagacaggtaaggtcaagattattgcaaacgatgagcgttttgctctttgtggggcaggatttttaaaaactgataatggatattacgttgttagtggggaatgtagcccaggaagacgtacttctgacatacttttgttagaggaggaaatgtaa

SEQ ID NO: 6362 - DNA, 720 bp, Streptococcus pneumoniae
  misc_feature (1)..(720): tiling:Spneumo1:WAN024FPB; WAN023PN4 pne26_14||||8567..928 6|+|720 bp|Type 13 capsule operon, Glimmer 2.02 orf predic tion|S.pneumoniae||WAN01UCIU|ORF|000
atgaaaattgcactactgacagcgtcaggaataggaagccgaataaaacaagatataccgaaacaatttatacatgttgacaataagccactcatcattcatacgctagaaaaatttcaaaatcatccaaacattgatgaaatttgtgtagtagtattaaaaggctgggaagaaatgttgaaaacatatgctagacagtttaatattacgaaactaaaatatatagtaaatggcggagaaactggtcagttatctatctataatggtcttaatgaaataaagaaaaataatatagatcggcaagtgactgttttaattcatgatggtaatcgaccgatggtaagcaacgaaatcattgatgatgcgttttcaacgtatagtagatatggaaatgcagtggctgcaattccttgtgttgaggttacttttgtattagataatgagactgaaaatcattctattagttctttaaaaagagagttattgaggagaacgcagacaccacatgtttataatttagatgatatactagaacttcataacagagctttagaaaatggaataactgaggttgcagcttcctgtgaattaatgaagatgttcggaaaagaaacgtatttttctatggggtctgaaaaaaatttaaaaataacgaccttagatgatttagaaatttttaaagctcttctcaaatctaaaaaagaagattggattaaggat

SEQ ID NO: 6363 - DNA, 417 bp, Streptococcus pneumoniae
  misc_feature (1)..(417): tiling:Spneumo1:WAN024DJA; WAN0240NZ |cap3-1||AAA15848.1|| |417 bp|CAP3-1|S.pneumoniae||S62272|ORF|000
atgaaaattgccattgcaggaagtggttatgtaggactgtctttagcggtgctactagctcagcatcatgaagttaaggtcattgatgttataaaggataaggtagagtcgataaacaatagaaaatctccaattaaggatgaggcgattgagaaatacttagttgaaaaagagttgaatcttgaagcctccttagatcctgcacacgtttataaagacgtggagtatgctattattgctactccgactaattatgatgtagacttaaatcagtttgatacatcttcagttgaagctgctatcaagacttgtatggaatataatgatacttgtacaatcgtaatcaaaagtcttcctccaaaatttcgaaacctctctaaaaccttttcccaagctctattactgtattcctcataa

SEQ ID NO: 6364 - DNA, 1179 bp, Streptococcus pneumoniae
  misc_feature (1)..(1179): tiling:Spneumo1:WAN024BON; WAN023OFO pne92_16||||12238..13 416|+|1179 bp|Type 48(1) capsule operon, Glimmer 2.02 orf prediction|S.pneumoniae||WAN01UCEA|ORF
atgaaaatttcaattacaaatttatatatatggatgttgacagtaatgtttatattaatgtggattccaagtgttcctatatttaattatgtagatgaactattaacgttgatgatacttccgtatgtgattatgaattttagagctcttctactaaaaagtagattagtaattataggtgcaattggttttttattaataggattaatatcaacatacctttcagatcttagccgccctttgatagctatagtatcggattttttcacatttattaagtttcctattacctatttatattttagatatttatttacaaaacaaaattcaacttattttttgaatattttatatattcttagtaagtttgttgtggttattgcttttatttgctgtttattaaattatagttttgaactaggcatgacctatgatatccgctttggaataggtagttttcagtttatatataataacccaggattttttctagccttgatggttgtttgttattcacttataaattactctaataattcaggtaattttaaatataaaattttagctattttaaatatggttgcaactctacgatcagtggcatttggagttattgccctactgctagttttgagtgtgtttataggaagaaatttaagattatatcacttatttatattgattccgtcgattatttttgtaggtaatggtgctataagtacatatttcggtgatttggaaacacctagaaaacttctattccagggaggtataaaggtttttcagaaatttttcccattaggggcaggttttgcttcatatgggagcaacgctgcttatgtgtattactctcccctgtattttcaatttggttttcatcatatttggggtcttaatttagaatatgggaatatagctaatgataacttttggccgatgatttttgcacagtttggttttattggttctatattttatatactgatgttcatggctattatgaaggatttattcattaaatctatgtataaaaatcaagtggtatctttatctttaattataggtcatttgttaatttcctcagttggtgcaaatataattactggtgtgttaggtgtaagtatgatatgtgcatatgcctcaatggctcatgttttagatgatgtagaggtaaattat

SEQ ID NO: 6365 - DNA, 1227 bp, Streptococcus pneumoniae
  misc_feature (1)..(1227): tiling:Spneumo1:WAN024CKI; WAN02418T |wciJ||AAP94607.1|||1 227 bp|putative a-1-3-L-Fuc2NAc transferase|S.pneumoniae|| AY336008|ORF|000
atgaaaattttatttgttagtcaacattatagaccagaaccttttagattatcagatatttgtgaggatcttgttgagagaggtcatgaagttactgttttgacaggaattcctaattatcctgaaggtaaaacatatgcggattatcggaataacaaaaatagacgagagactatagaaggagttactgtttttcgttcctatacaattccaaggggaaaaagtactttacataggatattaaattattttagttttgctatcagttcctcgataggggttctactgggacagtataaagcaaaagatggatcagaatttgattgtatttttgtaaatcaatcgtctccagttatgatggcatgggctgctatggcttataaaaataaatataagaaacctatgtttctgtattgtatggatgtttggccagatagtttaactgtaggtggagtgaaacaagatggcttgattttcaagttgtttaaatttatatcgaaaaaagtttatcgagctagtgattatatatttgttactagtccatcatttaagaattattttgtgaaccaatttgacataacagaacaaaagattacttatttgccacaatatgcagaagatctttttatccctgatgaatctagagttaataaagaaagtgttgacctaacttttgctggtaatattggcaaagcacaaaatttggaaactattttgaaagctgccagtttgatagagaagaataccgatctacccaagaaaattcaatttcattttgttggagatggtacggaattgctaagtatgaaagcattagctcatgaattggagttaaagaatgtttccttctatggaagacgttctttggaagaaatgcctaccttctataaaaaatcagatgctatgttagtttctttaataggagactcgatagtttctcgtactatacctgggaaggtacaatcttacatggcggcagggaaaccaattataggtgcaatttcaggagatactaaaacaattgtagaagaagcaaagtgtggttttgtcagtcctgaacaagatgtggaacaattggcacaaaatatttgtaaatttagtatgttgtctacggaagaacaaagagagttaggaaagcaagctcgttgttactatgggaagcacttttctaaagagcagtttatgacacagttagaaaattatttgagagagggcttttcctcatga

SEQ ID NO: 6366 - DNA, 1167 bp, Streptococcus pneumoniae
  misc_feature (1)..(1167): tiling:Spneumo1:WAN024FPJ; WAN023OIO pne88_12||||7370..853 6|+|1167 bp|Type 45(1) capsule operon, Glimmer 2.02 orf pr ediction|S.pneumoniae||WAN01UCBS|ORF|000
atgaaaattttgatgattaatactgtttgtggtattaggagtacaggaagaatttgtacggatatcgcaaccgctttaacaaagaagggtcatgaagttaagattgcatatggacgtgagtatgttcctacacagtatcgaaattacgcggttaagatagggtctagagtggatgtaaataggcatgtcttacaagctcgaatttttgataatgctggttttgtaggtagagcagcaactagaaaatttatcacttgggtgaaagaatatgatcctgatattattcatctgcataatttacatggatactatattcatgtaggagagttattttcctatttgaaaacttgcggaaagaaaattttatggactttacatgattgttgggcttttactggacatggtgcttactttgatactttagaatgtgaaaaaattggacagtgccatcattcgagtcaaaaaaatgattatccaaagtcattaattgatttttcatctagaaattttaaacgtaaaaaaaatttgtttacaggtgttccaaacttgacacttattacaccatcagagtggttggcaaatttggtaagaaattcatttttgaaagaatatcccgtaacagtcattcataatggtattgatactacgatatttaaaccaagggtattagaggctaagaaactgagaaaaaaatttcgcttagaaggaaaacaggtattgcttggtgtggcttctatctgggatcagcgtaaaggattggatgatctattagaattatctgtacagctaaaatcttatcaacaattagttttgataggattatcaaaagaacaattgaataaacttcctaaagagattattggtctgaccacaacagatagtgtagaagaactttctgcttggtacacgttggcagatgtatttatcaacccaacaacacaggataattatcctacaactaacttagaagctattgcctgtggaacaccagttgtgacctacccaactggtgggagtatagaaagtacatatatgtatggtatagtgtgtagtgatagaacagttgtttctatattagagtccctaaaagaagtgagtcaatgtaaaaggagtcctaattttaatttgtcaaaagagtattttgtggaaaatatactcaatttatac

SEQ ID NO: 6367 - DNA, 498 bp, Streptococcus pneumoniae
  misc_feature (1)..(498): tiling:Spneumo1:WAN024B2V; WAN023QP8 contig_1335_14||||839 9..8896|+|498 bp|Glimmer 2.02 orf prediction|S.pneumoniae| 670|WAN01UE7A|ORF|000
atgaaacaaacgattattcttttatatggtggacggagtgcggaacgcgaagtctctgtcctttcagctgagagtgtcatgcgtgcggtcaattacgaccgtttcacagttaagactttctttatcagtcagtcaggtgattttatcaaaacgcaggaatttagtcagactccaggtcaagaggaccgtctcatgaccaatgcgaccattgattgggataagaaggttgcaccaagtgccatctacgaagaagaggcagtggtcttcccagttcttcacggtccgatgggagaagatggttctgttcaaggattcttggaagttttgaaaatgccgtatgtcggctgcaatatcttgtcatccagtcttgccatggataaaatcacgactaagcgtgttttggaatctactggtattgcccaagttccttatgtggccatcgttgaaggcgatgatgtgactgctaaaatcgctgaagttgaagaaaaactaactaat

SEQ ID NO: 6368 - DNA, 783 bp, Streptococcus pneumoniae
  misc_feature (1)..(783): tiling:Spneumo1:WAN024C24; WAN02442N spr0963||15903007|NP_ 358557.1|943808..944590|+|783 bp|Hypothetical protein|S.pn eumoniae|R6|NC_003098.1|ORF
atgaaacaaataatattatccactggaagcactagttctctagggttagataatttagcaacttttgaaaaatttactaaaaataaagtatatgattatgaaatttttttccaatctagattggaattgactgcttctgaaataaaaaaagtaaaagaatattgtagccaaaagggagtaagtgttaattctatacatccttttatggagggatatgaggttccaaatctattctctataaatataaaaaagtatgcagaagccaaagatatattctaccgttttttagagatatgcgtattattaaattcaaaatatttaattatgcacggccctttacaaaattgtgactgggataatagtattgatagaataaagttttttatttctgaggctaaaaagtataatgttgatatagctattgaaaataaagactatacacttttctattgtcctaagcgaattattctcttgaaagaacagctagaaagtgataattggggttttgttctagattttaagtcagcttggaaagcgaatatatctttaatagatatggtagaggccatgggtgataggttattattttctcatgtttcgtttagggatttagaaaatcataaatatggaattccatttcagaaatttgataaaagtgtatatgaaattttttcatacatgaaggaaaaatacaagactcctagatatgttattgaagttgatttagtagagagtgaaattgatattattcggacaatttctcatgtagaggagctgttatga

SEQ ID NO: 6369 - DNA, 1539 bp, Streptococcus pneumoniae
  misc_feature (1)..(1539): tiling:Spneumo1:WAN024BRQ; WAN02418C |amyL||CAB50727.1|||1 539 bp|alpha-amylase|S.pneumoniae||AJ243540|ORF
atgaaacaacaaaaacggctttacgcccgattgctgacgctgttatttgcgctcatcttcttgctgcctcattctgcagcagcggcggcaaatcttaatgggacgctgatgcagtattttgaatggtacatgcccaatgacggccaacattggaagcgtttgcaaaacgactcggcatatttggctgaacacggtattactgccgtctggattcccccggcatataagggaacgagccaagcggatgtgggctacggtgcttacgacctttatgatttaggggagtttcatcaaaaagggacggttcggacaaagtacggcacaaaaggagagctgcaatctgcgatcaaaagtcttcattcccgcgacattaacgtttacggggatgtggtcatcaaccacaaaggcggcgctgatgcgaccgaagatgtaaccgcggttgaagtcgatcccgctgaccgcaaccgcgtaatttcaggagaacacctaattaaagcctggacacattttcattttccggggcgcggcagcacatacagcgattttaaatggcattggtaccattttgacggaaccgattgggacgagtcccgaaagctgaaccgcatctataagtttcaaggaaaggcttgggattgggaagtttccaatgaaaacggcaactatgattatttgatgtatgccgacatcgattatgaccatcctgatgtcgcagcagaaattaagagatggggcacttggtatgccaatgaactgcaattggacggtttccgtcttgatgctgtcaaacacattaaattttcttttttgcgggattgggttaatcatgtcagggaaaaaacggggaaggaaatgtttacggtagctgaatattggcagaatgacttgggcgcgctggaaaactatttgaacaaaacaaattttaatcattcagtgtttgacgtgccgcttcattatcagttccatgctgcatcgacacagggaggcggctatgatatgaggaaattgctgaacggtacggtcgtttccaagcatccgttgaaatcggttacatttgtcgataaccatgatacacagccggggcaatcgcttgagtcgactgtccaaacatggtttaagccgcttgcttacgcttttattctcacaagggaatctggataccctcaggttttctacggggatatgtacgggacgaaaggagactcccagcgcgaaattcctgccttgaaacacaaaattgaaccgatcttaaaagcgagaaaacagtatgcgtacggagcacagcatgattatttcgaccaccatgacattgtcggctggacaagggaaggcgacagctcggttgcaaattcaggtttggcggcattaataacagacggacccggtggggcaaagcgaatgtatgtcggccggcaaaacgccggtgagacatggcatgacattaccggaaaccgttcggagccggttgtcatcaattcggaaggctggggagagtttcacgtaaacggcgggtcggtttcaatttatgttcaaagatag

SEQ ID NO: 6370 - DNA, 336 bp, Streptococcus pneumoniae
  misc_feature (1)..(336): tiling:Spneumo1:WAN024BRX; WAN0241M9 |||AAR22395.1|||336 b p|hypothetical protein|S.pneumoniae||AF376746|ORF
atgaaacaagaaaaaaatacagtacaattttcagaaatccgtagcaaaggatgtaatgatattgaaatgcttgaaagatttttacatggaatcgttgaaacagcaacttcaaaacttcgtcagagaaaactcaaaacaactgaaatatcgatacgactagtacatgctaaatctgaaaaccgattaccattggaatttacatttagcattaagccaacaagctcatctgtgataatctatactgaggtaatcaatcgctttaaagaatgttacacaggtgggggaattcaaggttttacgattcaatttgataaaaatacccttgcctctgcatag

SEQ ID NO: 6371 - DNA, 96 bp, Streptococcus pneumoniae
  misc_feature (1)..(96): tiling:Spneumo1:WAN024B6Q; WAN023SS2 BD003890.1_12||||7244 ..7339|-|96 bp|Glimmer 2.02 orf prediction|S.pneumoniae|AT CC55840|BD003890.1|ORF|000
atgaaacaagaacaggacaaatcgatcaggacagtcaaatcgatttctaacaatattttagaagtagaggcgtactattctagtttcaatctatta

SEQ ID NO: 6372 - DNA, 87 bp, Streptococcus pneumoniae
  misc_feature (1)..(87): tiling:Spneumo1:WAN024F6M; WAN023SR2 BD003914.1_8||||2092. .2178|-|87 bp|Glimmer 2.02 orf prediction|S.pneumoniae|ATC C55840|BD003914.1|ORF|000
atgaaacaagaacaggacaaatcgatttctaacaatgttttagaagtagaggtgtactattctagtttcaatctactatatttcgtc

SEQ ID NO: 6373 - DNA, 102 bp, Streptococcus pneumoniae
  misc_feature (1)..(102): tiling:Spneumo1:WAN024B6R; WAN023STX BD003843.1_7||||6003. .6104|-|102 bp|Glimmer 2.02 orf prediction|S.pneumoniae|AT CC55840|BD003843.1|ORF|000
atgaaacaagaacaggagaaatcgatcaggacagtcaaattgattgctaacaatgttttagaagttgaggtgtactattctagtttcaatctactatacatg

SEQ ID NO: 6374 - DNA, 939 bp, Streptococcus pneumoniae
  misc_feature (1)..(939): tiling:Spneumo1:WAN024FQ8; WAN023ONJ pne81_18||||12485..13 423|+|939 bp|Type 39(1) capsule operon, Glimmer 2.02 orf p rediction|S.pneumoniae||WAN01UCEV|ORF|000
atgaaacaagcttatttaatcatagctcataataaaatagagcaattaaaatttttactttcattattagattatgaaaaaaacgatattttcattttatttgataaaaaagcaacaattactgaaaaacaaaaaaatgaactaactcaaatagtaacgaagtcaggcgtattcttcacaagggaaataccaatttattggggagattattctttagttgaagcagaaatagaactttttgaaaccgcaaataaacaagaaaattacagtatgtatcatttgttatcaggtgtagatttaccattagatactgcagaaaatatatataacttttttgatagcagaaaaggatataattttttaacgatggtttctgatgaattatttattcgaaataaagtctatgagcgtgtagcgtttaaaacaatgtttcctcatttaacggtaagaactataaataataatttcttaaggttgattttaaaaatttatagaaagtttgaagttgaactgcaaagaatatttaaagttgattgttttaaaaagtttaatttagaattgggatatgcttctaattggtgttctcttaataaggaggcggtagatatactgctagaagaaaagcaattgattgctaccatttttaaaaataccaaagtaagtgacgaattattcattcctacagttttacagaaacatcagctattgaataccgtttattcgatagaacctacaaatgataagcctactgattttcaaggtaatcttcgctatattaattggtgggatggaagtccatatacatggactgattcttctgatgatattgatcaattgaaaagaggtaaggttttaggccataagttttctagaaaatttgatttagagagaaatccgaatctaaaagaagaaattctaactatcataaataggacagat

SEQ ID NO: 6375 - DNA, 1800 bp, Streptococcus pneumoniae
  misc_feature (1)..(1800): tiling:Spneumo1:WAN024FJV; WAN023NF7 spn132b05_10||||4558. .9879|-|5322 bp|Glimmer 2.02 orf prediction|S.pneumoniae|2 3F-1|WAN01UCLP|ORF|001
atgaaacattcacataaaaaatcatttgactggtatagcatgcaacaacgttattctattcgtaagtattactttggtgcagttagtgtcttgctcggtaccgctttggtattaggtgcagcagctagtgtccaaacagtacaagcggaagaaaacaaacaagaaactaccaatagtatttctgttggtaggggagaagcagctactaaaccagcagaggtttctgcgtctaataaagagaaaacctatgcagctccaactgtagctaatccagtagaaacgactccagttaaaactggagaagttactaaaccagcagaaaaagttgaagaagcaaaagacaaaaaagaggaagtaacgcatcaagatgctattgacaagtcaaaattgttaacggctctttcgcgtgctaaaaagttagaaagcaagttatatacagaagcaagtgctgctaacttgcaaacaagtatccaagctggtcaaagcttgcttgggaaagcagatgcatctgaagctgaattatcagcagcagagtcatctattcaatcatctattattggtctagaacttcgttctaactctaacaaaggaactgtatcagaaacgcctgtagcaaagaaagctaatatagttgaagcgaaggaagagactaaaccagctgtaacaacgactgaacgttcagctgttgatagcgctattttgccaattagcacagctgctaaagtagaaacaacttcagctccagcatctactaatgaaatcttgaaaccaagtttgagcctttctgatgctcgccaaaatccagctatccgtaaggaagatgttgatagagggtatagtggttttagaacagcaggaagtggctttagagcggctggaagtggttttagagcagctggaccagaaaataaaccaatcttaaatccaaataatactattgcattttctgacatcagtcagggcttacattcatttcgtggtataggacattcacgtggtggtcgtgaaatccattatgatgtaacgacagtacgtagaggtaatagattgaatttcacaattaaatactctggtccaggtgaatttgttaataataattttatcttggataaaggggatggatttggaaatccttcaaatgcaacgatcacaagttcaaatccaagagtaagggagcaatcaaaatctattagtcagggtgccaactacgtatctcactcaggatacagtatgacctctgctacttcaacaaatacggaacaaactatcagatttagtttgcctatcattaatccaaatggtgatttgtctgttcgtttgaaaccagttacttttaacgtggaccaaggtggtggtggtgccgctactagcaatgacccatacagtaactccaactattatcatagagcaaatccactcctcttggatgcaaacccttatggtggtactaataataagactgtttcagaagacattgacttccaaactgtctatcttccaactagtaagttaccagaaggtcaaactagattagttcgagaaggtgaaaaaggacaacgtcaaattacctataaagtacatcgatttggtaacgaaacacttttaggattgccaattagtaatagagttactaaagaagctaagccacgtattatgcaaattggtgtggctaaagagttaatcgatacagtaaaaccacgtgttgatcaaaataaagttggtgatacaaataacctcactttctatcttgataacgatggaaacggtgtttatactgagggcgtagacgaacttgttcaa

SEQ ID NO: 6376 - DNA, 90 bp, Streptococcus pneumoniae
  misc_feature (1)..(90): tiling:Spneumo1:WAN024BG6; WAN023SCX NC_003028.1_1138||||8 55614..855703|+|90 bp|Glimmer 2.02 orf prediction|S.pneumo niae|TIGR4|NC_003028.1|ORF|010
atgaaacatttattggctatgtccaaagatacgatattgatgggaatggctatcaatcattaccgtgtcctcagaactgagaggagttct

SEQ ID NO: 6377 - DNA, 948 bp, Streptococcus pneumoniae
  misc_feature (1)..(948): tiling:Spneumo1:WAN024BN4; WAN023O7L spn029h04_66||||52569 ..53516|-|948 bp|Glimmer 2.02 orf prediction|S.pneumoniae| 23F-1|WAN01UCO3|ORF
atgaaaccacaagaacgacttttaacaatctttttccgtttacaagcaggcgagaggctatcaaaagctcaattaagcgatgaatatgagattgattataggactgtacaaagatatatgagcacattaaaaaattttttgcaagagcagcgtatatcaaatacagagataaaattcgatacttcagataatacctatcgtttgattgctaaaacaacttttaataaaaaggatattttagtaatttcaaaaattcttttggagaatcgtgcactaaacaaatcagaactatattcattactcgaagatcttctatctttactctcaagcgaagaacaaaaagagatagatgcaattattggcagtgagcgttttaactataaatcactgactaatgacaaggacaggattgatacaatttggattttgtcggaagctattcgtagggagcaaatgctcgaaatagaatataaagctccgttaaaagatatcaaaagccacatcatttttcctgtttccctctattatgatgcccactatttttatctagttgcttaccatttgaaacatgaaaattatacaacgtatcgtgttgataggatggagagtctgagtgaatctcatgtaaagaaaccagaaatttcatatgggcgtaagtaccgagatggggaggttcgaaatcaaaaagtagatgcttttgaaggaagaaaaattgatgttactttaatctataaaggaaatactgaaattgttttagatcagtttccagagcgtgaaattctttctgagaatcacgatgaaataaaagtaaaaattaaaactcaagacacaccaggtctcaaacgatggattctaggacaaggtgatgcagtcactcttttatcaccttcaaagttgattgaagaaatacaagaatctcttgaaaacacattaagaaattataaaaaa

SEQ ID NO: 6378 - DNA, 852 bp, Streptococcus pneumoniae
  misc_feature (1)..(852): tiling:Spneumo1:WAN024FWO; WAN0243WB spr1192|appC|15903235 |NP_358785.1|1188910..1189761|-|852 bp|ABC transporter mem brane-spanning permease - oligopeptide transport|S.pneumon iae|R6|NC_003098.1|ORF|100
atgaaacctatgcctttatggaaaagaaatttgaaaaaattctataataacaaattggcctttatcggctttatatgcttcatgctaattctattagcatgtattctagcacctttattgacaacctattctccagatgttgttgatttaggatctatgaaccgtcctccttcagcaaaacacattctgggaacagataaactaggtcgtgacgtatttgctcgaatcctatatggtggtcgagtttcaattcaagtcgggatgtatggagcgatttgtggagcggttattggtactgtacttggtggtattgctggatattttggtgggaaaattgatgctcttctagttcgtctagcagaattattcttaacattcccgaatatgattgtcattctcttgctttcaagtatttttggacaaggtgtattcaatcttatcttcgtattctcagtaatgggttggatgacaacgttccgaatggttcgtaatgagttcatgtctttgaaacaagaaacatatgtggatgtatgtagagcttttggtttttctgacagtcgaattatctttaataatattttaagaaatgctatctcaccagtaattgtatcgttgtctttaaacgttgctggtttcattctcagtgaggcaggtcttagtttcttaggagtaggtgttccttctgatattcctacttggggaaatatcataaatgctgccaaaacagccgatgttattaaaaatagttggtggctgtggttagttccagggtcaatcattactcttttcgttctttctatcaactttattggtgatggattacgagatataatggatccgaaacaacagtag

SEQ ID NO: 6379 - DNA, 99 bp, Streptococcus pneumoniae
  misc_feature (1)..(99): tiling:Spneumo1:WAN024B6X; WAN0241UJ SP1929||15901753|NP_3 46357.1|1836139..1836237|-|99 bp|hypothetical protein|S.pn eumoniae|TIGR4|NC_003028.1|ORF|010
atgaaacgagaacaggacaaattgatcaggacagtcaaatcgatttctaacaatgttttagaagcagaagtgtactattctagtttcaatctactatag

SEQ ID NO: 6380 - DNA, 735 bp, Streptococcus pneumoniae
  misc_feature (1)..(735): tiling:Spneumo1:WAN024AZH; WAN023YCO AL449931.1_5||||3305. .4039|+|735 bp|Glimmer 2.02 orf prediction|S.pneumoniae||A L449931.1|ORF|000
atgaaacgatggatagcacttagtaagatagaatttttattgaccaaacgacaattaatctattatctattgtcggtagggatgccgacggctttctatttatttttttctggtatctatcaggacacaccaggtgaactcgcgaattttatgcgtgattacctcatctccatgactgccttttccatgatgtcgacaactatcctctcatttccagctgttttacataccgataagatgaacaactggcagaaaacattgcgtcatagccctgtaaatatggtagaatattatctatcaaagataacaagtatgctggttgattatttggtctcaattctggttgtttttacagttggacattttgtaagaggtgtagacatgcctctagtaaaatgggttggagctgcgattttgctgattgtggggagtattgcttttgtagcacttggcttgaccttgactctcttaccaactagtcagctgatgtctgttgtgggcaatcttctttatctaggattggctgttttaggcggactctggatgcccatttctttatttccagactggatgcaagcagttggtaagtgtctcccgacctatcaattgatggagttgctcaagaccttcttaaacgagggtggcatcaatctatcagccacagtttatctacttgttttttcagcagttttgtttggtttgaccatttaccttcaaggtcataaggagaatgct

SEQ ID NO: 6381 - DNA, 735 bp, Streptococcus pneumoniae
  misc_feature (1)..(735): tiling:Spneumo1:WAN024AZJ; WAN023O3M spn041h04_34||||25496 ..26311|-|816 bp|Glimmer 2.02 orf prediction|S.pneumoniae| 23F-1|WAN01UCLF|ORF|001
atgaaacgatggctagcacttagtaagatagaatttttattgaccaaacgacaattgatctattatctattgtcagtagggatgccgacagccttctatctattcttttctggcatgtaccaggacacaccaggtggacccgcgaattttatgcgtgattacctcatctccatgactggcttttccatgatgtcgaccgctatcttttcattcccagctgtcttacataccgacaagatgaacaactggcagaaaatattacgtcatagcccagtaaatatggtagaatattatctatcaaagataacaagtatgctggttgattatttggtctcaattctggttgtttttacagttggacattttgtaagaggtgtagacatgcctctagtaaaatgggttggagctgcgattttgctgattttgggaagtattgcttttgtagcacttggcttaaccttgacgctgttaccaactagtcagctgatgtctgtcgtgggcaatcttctttatctaggattggctgttttaggcggactctggatgcccgtctctttatttccagactggatgcaagcaatcgggaagcgtttaccaagttatcagttgatggaattaatcaagaccttcttaaatgagggtggaatcaatctatcagccacagtttatctacttgttttttcagcagttttatttggtttgactatttaccttcaaggtcataaggagaatgct

SEQ ID NO: 6382 - DNA, 2007 bp, Streptococcus pneumoniae
  misc_feature (1)..(2007): tiling:Spneumo1:WAN024BTH; WAN023YW5 AL449927.1_69||||5934 9..61355|-|2007 bp|Glimmer 2.02 orf prediction|S.pneumonia e||AL449927.1|ORF
atgaaacgtttatttatacatttctcgaacctttttattctaatctttctgctttggattgcctttatttcacctaatacggtcatccatcgaagcctacctgtaatagggattcttcaacaagaaagggaagttgtttatgaagagctttcatctagcttagatcagttagcaaaagaaaacaatagtttgattgctcgtcagattcaaaaaacggattctaaagggcaagtcaagttttcgtatgatatctacggagaaggagcacttcctaatggcatcaaaaaagaagagaaagaattcgttgcaaaggaaagtttgcttaccaattactatatactatctgggaatttaacccttgaaaaattagatcaaaaactccacgatcttggtttttcaaaaagtttcatgaataagcccaatcccctgcaaaattttatggtattttttagttcgggttcccaatctctagccttggttatttttatcatcagctttgctgcattgaccattattcaaaaaacacttgaaatgagaagtgcagggattcgttacatttctggaataagacgataccagctctttggacattctctcatggaagacggtaaagaattgtttttagggtgtattggtggaagtgtcctaggagctattctgatttattatttacaattgactccttttgcctattctctcatcatttcagctagtattatttacaatacacttttatttattttatctgctttcctatcctttttctttgcattcagtattcaracagtacacttggttagccttttaaaggggaaaattccattaaaaagagtcttgttttttctctttacatgtcaatttcttgcaatcactgtcattggtctctcaattcatcgtgtcagcatctatggctctatctggcagacttatcaagagggaagtttggcttggtctaaagagacaaattggatacaaattagtttgaatcgggaaaatgttttacaaacgacaaacaaagaaatgcaaattgaacaaatagctaaatggtctaaactgatcgagtctggcattgaaaaaggtggacttttggtccatcatcagcttgccgcatttaattcaaaaggcttcatgaacgatcctagaacagggagagagctttcgatcacagattacgatcctcttgccaacaccctgtatgtaacaccaaattaccttgatatccaaaggatcttagtttcccctgaggaaaaagagcgcttgaatcacttgcaagctggagaatttggactcttgcttcctgaaaagttgaaagggcaagaagaggagttgaaaaaacgctatgaagattatctgactcctagtgatgaacaaggaaagagtcagttgcctatgaaagcacgggtgacctatcttcctaacaaccaaaaacgatttatctatrataatacaccgatgatctatcagcaattcttgacagacccgattttggttgttgttctacctagaagctttggtggctacgataatccttatttctctcatcttaattcttatctttactttgatggtctggaaaaaagcaagaaactagtagttgagaatgggcttgaaaaaaatgttagtcaatatgactatgcggcgtctgtataccagcagatgatccaatccattcaattagagaatctcattaccattgcaggaggaatctttgcaatagctacttccatactactctttaacaccatgaatttcctctattttgaagagtttagaagaccaatcttcttgaagaagattgcaggtctgggatttgtaaagattcaccaaatgattttgctctcagaaagtatcctcttactattaggaagcttcctgacattccttctcactcaagaatggtggattgctcttgtcactctcttgctatttattactaatgcttggtttattctcctgtaccggtctcataaagaagaccacttgttagccactgtactgaaaggagcc

SEQ ID NO: 6383 - DNA, 150 bp, Streptococcus pneumoniae
  misc_feature (1)..(150): tiling:Spneumo1:WAN024AYT; WAN023MMR spn191c12_4||||2093.. 2242|-|150 bp|Glimmer 2.02 orf prediction|S.pneumoniae|23F -1|WAN01UCQJ|ORF|001
atgaaactaagaatttttgcggaagataagccggctgagaaggtatttgaatatcaattggaacttgctgatcaaacaattcttctatcaacagcactcttgtcaggtgctattgctttagcaggattattctctgctttgaaagaaaaa

SEQ ID NO: 6384 - DNA, 105 bp, Streptococcus pneumoniae
  misc_feature (1)..(105): tiling:Spneumo1:WAN024DQI; WAN023SLP NC_003098.1_743||||59 8869..598973|+|105 bp|Glimmer 2.02 orf prediction|S.pneumo niae|R6|NC_003098.1|ORF|100
atgaaactggtatttttacacggtttaggggagtcagcagagtcttggaaagaagttcggaatcaattgaaggataagcccacagagactcttgaattgctgaaa

SEQ ID NO: 6385 - DNA, 168 bp, Streptococcus pneumoniae
  misc_feature (1)..(168): tiling:Spneumo1:WAN024BXI; WAN023RPC contig_1583_10||||355 0..3717|+|168 bp|Glimmer 2.02 orf prediction|S.pneumoniae| 670|WAN01UDGB|ORF
atgaaagaagcagtaaaggaatttctaaaattcaggagccgatttacaaaaatagaatggtttgaaattaaccaagctatcgaagctcgtttaaatcaaaaagccgaccagttgaaactggacgacttagatttagaaatcatttctagcagactagaaaaagttatc

SEQ ID NO: 6386 - DNA, 180 bp, Streptococcus pneumoniae
  misc_feature (1)..(180): tiling:Spneumo1:WAN024C3K; WAN0246QO 203668-57-9_2||||666. .845|-|180 bp|Glimmer 2.02 orf prediction from Patent Sequ ences|S.pneumoniae||WAN02470E|ORF
atgaaagatacgatttctaataaggatttgatttccatgggctatagaccatcaacagcaaatgctattatccatcaggtgagagaattacttgtatcacgaggctatacattttataatcgcaaacgtttgatggttgttccaaaaagtgttgtgaaagagttgttgggaatggaattg

SEQ ID NO: 6387 - DNA, 207 bp, Streptococcus pneumoniae
  misc_feature (1)..(207): tiling:Spneumo1:WAN024BYL; WAN023S12 contig_1623_14||||871 3..8919|+|207 bp|Glimmer 2.02 orf prediction|S.pneumoniae| 670|WAN01UDAF|ORF
atgaaagatattaaatactaccgcacaacgacgaacaatgctcaagtacttcgtttgattgatggtgtcatgcaagtttttgacattgaaaaaaagtgggttaatagcatggattggtttaataaaatcttttttaatgactttacggattttgaagaaatttcagaaaatgatgcatttacttatattgacaggatggtagcggca

SEQ ID NO: 6388 - DNA, 882 bp, Streptococcus pneumoniae
  misc_feature (1)..(882): tiling:Spneumo1:WAN024BKH; WAN023MO2 spn180c09_167||||1344 45..135326|-|882 bp|Glimmer 2.02 orf prediction|S.pneumoni ae|23F-1|WAN01UCXQ|ORF
atgaaagatttaataagtgttatagtaccagtttataacgtagaaccatttatttctagctgcttagacagtttatcgaaacagatttatcaaaattttgaagttttattagtaaatgatggctctacagataattcaggagcaatatgtcgagagtatgctgatcgtgatagtcgttttcactatttcgaaaaagaaaatgctggggtagcggatgcacgtaattttggaatcgagagatctaaaggagattatattacttttgtagactcagatgattgggttactgaagagtatttatcaattcttatagaaactttgaaggagcagcattctgaaattgttgtttcaacttattcaacctataatgagtcagatggcttattctatattcacgtatttgactccgattattatgtgaaaaattataattcaaaacttctaatggaagaacttcctttattagagaggtatgatatgagctttttaacttcttggggaattctatttaaaagggaattatttcaagaagttcagtttccgtttggtcgggtgtgtgagtatataggaaccaattataaattatttatgcaggttgagaaagtaacctatattaataaagttttgtattggtatagggttgggaaagaaggactttctaattcttattcaccgaagatgatgcgtgatgattgtgattttaggttagaacgaattgccgtgctagcgctaaaaggatatgatgtcagtaaatatttagaccagatgaagttctatttgaaatatcgtcatgatattgcaattcaacgagaacttaaggagaatgtggaaacaagacatttagaaatgttagactatttattgaatggtaataaatataac

SEQ ID NO: 6389 - DNA, 78 bp, Streptococcus pneumoniae
  misc_feature (1)..(78): tiling:Spneumo1:WAN024BT4; WAN023YBB AL449931.1_59||||5133 9..51416|+|78 bp|Glimmer 2.02 orf prediction|S.pneumoniae| |AL449931.1|ORF
atgaaagcattttatcaaacatctccattcttatatctatctggtattgttacaagctctcatcagaatacctttctc

SEQ ID NO: 6390 - DNA, 525 bp, Streptococcus pneumoniae
  misc_feature (1)..(525): tiling:Spneumo1:WAN024C3I; WAN0246QI 203668-66-0_1||||18.. 542|-|525 bp|Glimmer 2.02 orf prediction from Patent Seque nces|S.pneumoniae||WAN02470A|ORF
atgaaagctcttatgatgttagattatctggaagcagaatctgttttacctaaattaaaaggtaacaatgatagatggttcaagaaaatggataaacaaatgcgtaaggacggacaacctcaccagtttgacaaaattcgcgatttaaataatgaagagaagaaaattcaattagcttctattgaggatttagttgataataactttatgactaaacacggtgctcctggaaatggtacatataacccatcagattttagttcagcatatgttaatatgaatatgatgactggtgtatacggaggtaactcaagtgatggggctcctggcgctgcttcatttaaacataatactttccgtatgtggggatacttcggatacgaaaatggattcatcggatatgcctctaataaatataaagccgaagccaataaagcaggtcaaactctaagtgataaatatatcatcaataaagtttctggtggtacatttaatacacttgaagcgtggaaagaaagaatggtt

SEQ ID NO: 6391 - DNA, 87 bp, Streptococcus pneumoniae
  misc_feature (1)..(87): tiling:Spneumo1:WAN024C2F; WAN023SKJ NC_003098.1_1213||||9 41704..941790|+|87 bp|Glimmer 2.02 orf prediction|S.pneumo niae|R6|NC_003098.1|ORF
atgaaaggaagtcagagtatgaagaaaatttcaaaatttttaccgattttgtttttggtaatggatattatcattattgttggtgga

SEQ ID NO: 6392 - DNA, 1035 bp, Streptococcus pneumoniae
  misc_feature (1)..(1035): tiling:Spneumo1:WAN024BWI; WAN023R4V contig_1493_1||||130. .1164|+|1035 bp|Glimmer 2.02 orf prediction|S.pneumoniae|6 70|WAN01UDQ4|ORF
atgaaagtaaccgtcacgactcttgaattgaaagacaaaataaccatcgcctcaaaagcgctcgcaaagaaatccgtgaaacccattcttgctggatttcttttcgaagtgaaagatggaaatttctacatctgcgcgaccgatctcgagaccggagtcaaagcaaccgtgaatgccgctgaaatctccggtgaggcacgttttgtggtaccaggagatgtcattcagaagatggtcaaggttctcccagatgagataacggaactttctttagagggggatgctcttgttataagttctggaagcaccgttttcaggatcaccaccatgcccgcggacgaatttccagagataacgcctgccgagtctggaataaccttcgaagttgacacttcgctcctcgaggaaatggttgaaaaggtcatcttcgccgctgccaaagacgagttcatgcgaaatctgaatggagttttctgggaactccacaagaatcttctcaggctggttgcaagtgatggtttcagacttgcacttgctgaagagcagatagaaaacgaggaagaggcgagtttcttgctctctttgaagagcatgaaagaagttcaaaacgtgctggacaacacaacggagccgactataacggtgaggtacgatggaagaagggtttctctgtcgacaaatgatgtagaaacggtgatgagagtggtcgacgctgaatttcccgattacaaaagggtgatccccgaaactttcaaaacgaaagtggtggtttccagaaaagaactcagggaatctttgaagagggtgatggtgattgccagcaagggaagcgagtccgtgaagttcgaaatagaagaaaacgttatgagacttgtgagcaagagcccggattatggagaagtggtcgatgaagttgaagttcaaaaagaaggggaagatctcgtgatcgctttcaacccgaagttcatcgaggacgttttgaagcacattgagactgaagaaatcgaaatgaacttcgttgattctaccagtccc

SEQ ID NO: 6393 - DNA, 978 bp, Streptococcus pneumoniae
  misc_feature (1)..(978): tiling:Spneumo1:WAN024FP6; WAN023ORB pne76_12||||9364..103 41|+|978 bp|Type 35B1 capsule operon, Glimmer 2.02 orf pre diction|S.pneumoniae||WAN01UCDM|ORF|000
atgaaagtaagtgtaataatacctgtttataatgttgaaaaatatttaagaaggtgtttggattccgttgttaatcaaacatacaaagatattgaagtgattttggtaaatgatggttctccagataattcaaaagaaatatgtgaagaatacgttgctaaatattccaatattcaattaataaatcaaaagaatgcagggctaggtgcagcaagaaatactggtctacagtatataacaggaaatgcggtaacttttgtcgattctgatgattggttagagttagatgcaattgaatattatgttgcatctatgaaaaagagtgacgcagatattgtagttactcaaatgattagaaaaaaagaatatttttctaatgaaggaactaatgggacgactataaaagaagaggtcctaaatcaggaacagtttgcaaaaaaatattttaaaatagatggtaataatatagagtattatgcttgtgcaaaactttataagagagagattgctagagaggttaaataccctgttggtttatttgcagaagacgtccctgcagcatttggttatattatacgttcacaaaaaattttttatagtacaaaagtaacgtataattatttctttaatgataatagtttaacggctaaatttacagataaagattttgatttggaaaagatatgggatctagtcgtagaagaagcaaaggtttatgggaacgaggattatattttatatgccaaggtgaatagatatagaatcgattttaatcttttgtgcagaattgctttatcggaaaataaatctgatatagaaaaatatagccaagaaatagtggttctacttggaaaagttaaagaaaataaaaaaattttattaaagtatttaccgttttctaggaaggtgatatttagattgtttatagttgattatacgctaggaagaaatgttttgagaatgtttaagaatattgtg

SEQ ID NO: 6394 - DNA, 1413 bp, Streptococcus pneumoniae
  misc_feature (1)..(1413): tiling:Spneumo1:WAN024FYD; WAN023PBT pne43_17||||13528..14 940|+|1413 bp|Type 20 capsule operon, Glimmer 2.02 orf pre diction|S.pneumoniae||WAN01UCHC|ORF|000
atgaaagtaataaaaaactatgcttacaatctttcatatcaattattggtaattatactccctattattacaacaccttatgtaacacgggtttttagttctaatgatttagggacatacggatactttagttcgatagttacttactttattttgctggctagtcttggcgttgctaactatggtactaaggtaatctctggaaatcgcaaggagattgaaaaaaacttttgggggatttactcattgcaaatgggtgcaacgcttctttctctattcttgtaccttgttctttgtttgacccttccttttatgcaaaatctagtagcctacattcttggattgagtttggtttctaaaggtttagatatttcctggctctttcaaggtttagaggattttcgaaagattactgttcgaaatatcacagtcaaactcgttggtgtcatctccatctttctctttgtcaaatctgcaaacgatctttatctctatgtctttttgttaaccatatttgaactctttggacaactcagtatgtggttgccggctcgagactttatcggcaagtttcatgttgatatagaatacgccagacagcatttgaagccaattattttattgttcctaccacaagtcgcgatttctttgtatgttaccttagatcgtaccatgcttggagcgcttgcttctacaaaagacgttggcatctacgatcaagccctaaaattggtaaatattcttctaacctttgtaacttcattgggaagtgttatgctgccacgagtatctcatctgcttgcgacaggtgaacgtaaggcagtaaacaagatgcatgagatgtcttttttgatttataatttgcttatttttccgattatggcggggattctgatcgtgaatgatgatttcgttcagttatttctaggacaagattttcaagatgcacgctatgcaattgcgattatggttctcaggatgttctttattggttggactaatataatgggaactcagatgttgatcccccataaccaaaataaagaatttatgatttcaacaacagctccagccattattagcgttggattgaatctattattcctacccaagttaggttatataggagcagccattgtctctgttttgacagaggcgctagtttgggtaattcaattattctatactcgcagatatttaaaagaagttcctataatcggatcaatgtcaaaaattatactagcatctgccattatgtatggccttttactaagttcaaaaacagttatacatttttcatcgaccttaaatgttctagcatttgcagcgcttggtggaatcatttatatttttgcaattctatctctgaaagtggtagatgtgaaagaattaaaacaaattattaggaaaaac

SEQ ID NO: 6395 - DNA, 1422 bp, Streptococcus pneumoniae
  misc_feature (1)..(1422): tiling:Spneumo1:WAN024FYB; WAN023ONI pne81_19||||13428..14 849|+|1422 bp|Type 39(1) capsule operon, Glimmer 2.02 orf prediction|S.pneumoniae||WAN01UCEV|ORF|000
atgaaagtactaaaaaattacgcgtataacctctcttatcaattattactcattatacttcccatcattacaactccctatgtgacacgggtattttctgcaaaggatcttggaacatatggatactttaattccattgttagctattttattttgttagctactttgggggtcgctagctatgggactaaggagatttcgagtaatagaaaaaatatcccgaagaatttctgggggatatatactcttcaatttggtgcaacatcattatcaattctcttatacactttattatgtttaggaatttacataatgagaaatcctgttgcgtatatattaggaatgagtttgatttctaaaggattagatatatcctggctttttcaggggttggaagattttcgtaagattatagtcagaaacatattagtgaagctcgttggtgtaatttcaatatttttattgataaaatcagcgaatgatctttatctttatgtctttctcttaacgatatttgagttattgggacaattaagtatgtggttacctgctcgaaagtttattggaaaaccacattttgatatagattatactaaatatcatttaaagccaattcttttattatttctccctcagattgctatatcactatatgcaactttagaccgtacgatgttaggaatgatatcatctacaaatgatgtcgggatctatgatcaagcattaaaattgatcaatattttattaactgtagtaacttcgttaggaagtgtcatgttgccgagagtatctaatctcttggcgacagggaatcataaggcagttaataaaatgcatgagatgtcatttctgatctataatttgattatttttcctattatggcaggaatgctaattgtaaatgatgattttgttaactttttcctcgggaaagattttcaagacgcacgttatgcgatagcaattatgatttttagaatgttctttattggttggagcaatattatgggatttcaaatgctaatcgtacataataagaataaagaatatatgatctcaacaactgtgcctgcaattcttagtgttgccttgaatttgttatttcttcctaaactcggatatataggagcggcaattgtatctgttttaacagaggcggtagtttgggggatacagttattctatactcgttcttatttgagagaagttcctattctaggttcattgtttaaaattatagtttcatcgggatttatgtatgtcaatttattatttgtaaaacatcttctgaacgtatcacctatgataaatgtagggatttatgctgttctgggagcaatgatttatctcatattaattttgatttttagggttataaatccaaatgagttaaaacaacaattattaaaaaataaaggagct

SEQ ID NO: 6396 - DNA, 1413 bp, Streptococcus pneumoniae
  misc_feature (1)..(1413): tiling:Spneumo1:WAN024FYA; WAN023OR8 pne76_15||||12450..13 862|+|1413 bp|Type 35B1 capsule operon, Glimmer 2.02 orf p rediction|S.pneumoniae||WAN01UCDM|ORF|000
atgaaagtacttaaaaactatgcatacaatctatcttatcaattattggtgattatacttccaatcattacgaccccctatgtgacacgggtcttttcttcgaatgatctagggacatatggttattttaactccatcgttacttattttatcctcttagcaacgctaggggttgccaactatgggaccaaggtcatttcagggcatcgcaaagaaattgaaaaaaacttttggggaatctactctctgcaattaggtgcaacagttttttctctaaccttgtattgtcttctttgtctaactcttccctttatgcaaaatccagtagcctacattctaggcttggctttggtttctaaaggattagatatatcctggctttttcaagggctagaggattttcgaaagattactgttcgaaatatcacagtcaagttcgttggtgtaatctctatcttcctctttgtcaaatctgcagatgatctatacctctatgtctttttgctaaccatatttgaactcttggggcagctaagtatgtgggtgcctgctcgtgagtttattggtagacctcattttgatttagaatatgctagacatcatttgaaaccagtcatattattgttccttccgcaagtggcgatttccttgtatgttacgctagatcgtaccatgcttggagcgttagcttctacaaaagatgtagggatttatgaccaggctttaaagttggtaaatatccttctgaccttggtaacttccttgggaagtgtcatgttgcctagagtttcaaatcttttatcctcaggggatcataaagcagttaacaaaatgcatgagatatcatttttaatttataatttggttattttccccattatggcaggaatgctaattgtaaatgatgactttgttacctttttcctcgggcaagattttcaagaggcacgttatgcaatagcaattatgatttttagaatgttctttattggttggaccaatattatggggattcaaattttgatacctcataatcaaaataaagaatttatgctgtcaacaacaattcctgctattgttagtgttggattaaatcttctcttgcttcccaagtttggatatataggagcagcaattgtttctgtcttaacagaggcgctagtatgggctattcaattgtactatattcgtgcatacctaaaagatgttccgattattagaactatgataaagattattctagcctcagctatcatgtatagcgttttgctagtttctaagacatacatacatttttccccaactataaatgttttggtatttgtggtgttaggtggaatcatttatcttttttcagttttatctctaaaagtggtagatgtgatagaattaaaacaagtaattaggaaaaat

SEQ ID NO: 6397 - DNA, 576 bp, Streptococcus pneumoniae
  misc_feature (1)..(576): tiling:Spneumo1:WAN024BSM; WAN023TJK AX676292.1_1||||1..57 6|+|576 bp|Glimmer 2.02 orf prediction|S.pneumoniae||AX676 292.1|ORF
atgaaagtatcaaaaaaaattacactatttagtttgtcttttgcaggttttgttttattgactttacctcaagcaggaaaggcttttgaacttaaagaagactgggcatttaaaggtggcattcgatacgagaatgggaaagtcagcaaaattaataatggatatgaagtaaatattaaagtgttagatttacctagtactagcgcaatcgaatggacagttagattgaatggagaaaagcaaaatactaacttcttagcggaggaaagaactgtatctaaaactgaagataagggacgtttcttgcacttttatatcccctatggatatcgtggggatattgtagtagaggctaagagtggaaacgaagtgaagacttggtctactaaggtagttgacgatgtttattcagattctgctaagagtggctactttattctcgatggggaacaaatcttagaaagttcatgggattccgtaaatgagtcttatattgcaacgcttccaactgtaacatcaggaaaaactgttgttgcttggcgtgaaaaaggaactcttaatttaattctaactaat

SEQ ID NO: 6398 - DNA, 1155 bp, Streptococcus pneumoniae
  misc_feature (1)..(1155): tiling:Spneumo1:WAN024BRI; WAN024140 |cap1G||CAB05925.1||| 1155 bp||S.pneumoniae||Z83335|ORF
atgaaagtatttatagcgactgaatttagatgtacaatctataaaaatgaaatatatttaaaaccgaaagcttattttatttatgagcgctatgctaaagcatttggagagattgtactatgtagtcgttatgagaaggtggaatcataccctgaaggatatcataaagcgaactttattaataaatttatccctatagaaggtctacatcaggttctatttggtcaaaataaaaataagattattgaaggaatgattgatagcgacttaatagttgttcgtattccgtctataattggatcaaaaactgcagactacgcattgaagataggtaagccgtatctgacagaaataatgggggatgcttgggattcttactggtatcatagtttaaagggaaaattattagctccatatatatacgccaaaactaaatcaattgtaaaaaacgctaattattgcatatacgtgacagaaaaatatttacaagatagatatcctaatattaaatctaatatcgttgcttcaaatgttaatattacctctgtagagaatagatctttgaagagccgtctttataagttgaaaaaatttaatcctcaaaaaatttcaataatgacaacagcatctgtgaatgtacgagccaagggccatagatttgtattggaagcaatgaagagattagaaatacaaggtattttgttggattattatttagcaggtgatggtgatcaaagtttcttaaaaaagaaagcagaggaattgggagtagcgaatagaatccattttttaggggaattgactacatcacaaatttatgagtatttggataaagttgatttatatatacaaccaagtttacaagaagggttacctcgtgcggtaattgaagctatgagccgtgcttgcccttgtatagggtctaataaagcaggaattccagagttgctggggccacattgtctatttactccatcctcttcacaagcgattgcgggatctattatagattttattagtatggataaggaaaagatggtgataaaacagtttgaattctcaaaaaaatttctttcgagtgtattaaataaacgcagaagtgactattttgctcaaattagaagagaattaaataattctgatggtttagattaa

SEQ ID NO: 6399 - DNA, 184 bp, Streptococcus pneumoniae
  misc_feature (1)..(184): tiling:Spneumo1:WAN024BXM; WAN023RPG contig_1583_5||||2185 ..2379|-|195 bp|Glimmer 2.02 orf prediction|S.pneumoniae|6 70|WAN01UDGB|ORF
atgaaagtcgaaaataaagaaatttttgccaataatctaagtttttacatggagcaaaaaggggtagacagaaatacattatgtgcagacttggatttaaaatacactacagttcgcgactggctgaaaggaataacttatcctcgtattggtaaaattgaacttttggcaaactattttaata

SEQ ID NO: 6400 - DNA, 1263 bp, Streptococcus pneumoniae
  misc_feature (1)..(1263): tiling:Spneumo1:WAN024BL4; WAN023N7E spn148d07_2||||484..1 746|-|1263 bp|Glimmer 2.02 orf prediction|S.pneumoniae|23F -1|WAN01UCTI|ORF
atgaaagttctcgaactatttgctggagttggcgggtttcgcataggattagaaaatgccgataagcaactctttaaaacaaaatgggcaaaccaatgggaaccatctcgtaaatctcaagacgcatttgaggtctatgattatcacttccccaatagcaaaaacatcaatattagtatctctgatataacagacgaacaattttccaaaatggatgccgatatgattgtcggtggttttccttgccaagattactctgttgctcgtagtaaaaaaaatgagaaaggtattgaaggaaaaaaaggagttttattttgggaaatcattagagcaacggaaatcattaaacccaaatacttaattctagaaaatgtagataggcttttaaaagcgccctcaaaacaaagaggacgtgattttgcaatcatgctcacagcttttaataatctcggatattctgttgagtggagagttattaatgctgctgagtatggaagaagccaacgaagacgtcgtgtattctttttcgtatatcgaaatgatacagtctttgcccaaaaaattgacaatctttacgaaaaaaatgaagaaatctttgaagataataggtatgatgactatattttcaatcaaggtctatttgcaaaacaatttcctattaaacctatagcagttaaaaatcgtcatgtgttttatgagttaccaaatgatatagttgaagtttcagatacttttactggtactgtttggaatacaggaattatgaggcgtggaaagtactattctattgatacagaacctaattacaatggtaatcctatcactctaggagaaattcttcaagatgagtctgaagtacctgaaaaatattttttaactgatcagtcaaaattggaaaaatttcaatatcttagaggacctaaaaaaattgaacgaacatcctctgacggacatcaatacatctattcagaagggggaatgtcaccttatgatgatttaaaccttcctggacgaacaatgcttacatccgaaggaacggttaatcgttctacacatttattatttgtaaataataaatatagattaattacccccattgaagctgaacgacttcaggatttcccagatgattggacagctaaaaagaaattatctgatgattctattgtagagggatctgataaaatgagaatgttttttatgggaaatgctttggttactgagattgtaaaggaaattgctaagtttattaaagaaattgat

SEQ ID NO: 6401 - DNA, 642 bp, Streptococcus pneumoniae
  misc_feature (1)..(642): tiling:Spneumo1:WAN024BWH; WAN023R3Y contig_1463_1||||454. .1095|-|642 bp|Glimmer 2.02 orf prediction|S.pneumoniae|67 0|WAN01UDRY|ORF
atgaaagttgcaagaacgggagacaaggaagcaaagagagaggtagaactcctccagaatcttcgggagtttctctctcagggtaaaaaggcctcgaaatttccaaggcacgacagattcgaggaagaggtgatcgaatccctattcctcctcacagataaacctcagatactggttttcaacgtcgatgaattggacgaagaaaaaagaaaactgatagaagaaatcgtcaaagaaaaggacgaggaatacattataataaacgtgaagctcgaagaagaattgaaatttctcccggaagaagaggcggaagttttcagaagagagtacaaccttttcggtgacaaaaggaaggagtttttcgagaaggttttgaaacttctgaaccttataagatttttgacagcgacacagaacgaggcgagaagctggactataaagaaaggatccactgcctatgaagcggcgggtctgattcattcagacatacagaaagggttcataaaggttgaagttattcctttcgaaagatacgtagagtttggttctctgaaaaaagcacgtgaagctggagctgtggaaccacatggaaaagattacattgtaagagagggggatgtgatccatttcctattccgtgct

SEQ ID NO: 6402 - DNA, 1431 bp, Streptococcus pneumoniae
  misc_feature (1)..(1431): tiling:Spneumo1:WAN024BOQ; WAN023OG5 pne91_20||||13104..14 534|+|1431 bp|Type 47A1 capsule operon, Glimmer 2.02 orf p rediction|S.pneumoniae||WAN01UCEE|ORF
atgaaagttttgaaaaattttttatataatttttcatataaaatcttaacgatgattcttccttttgtaacggttccctatgtaactagagtttttaatccaacattgatgggtgaatataattataccgcctctatagtcgcctatttttcaacatttggtatgttaggaattgttatttatggaagtaaccaaattgcaaaagtaagtcataagggaaaaaaagaaatatctcatgttttttcttcagtctattattttcagttattttcaacaactctaacgatactggtatatctagcctatatttttctttttccaagtcaataccaacaatattttatagtacaaatcttttctctcattgcaataatgtttgatattagttggctatttcaaggattagaagattttaagcgaattgttatgcgaaatacagtagtcaagctaattggtgtcgtttctatatttacattgataaaatcccaatcagatatctatttgtatgtatttattattagtttttctacgttaatttcgcaaggcattatgtggttaagtgtaaagaactatgtcaatttggttcgagttggagtaaaagagatactatcaaactttaaacctaacttatctttctttcttccccaaatttcaatttcgatttacaatacgctagataaaataattttgggctctttaggtagtgtatttgatgttggaatttatacccaagctgtgaatataaactctgttttagttaatttagtagtgactctcagtgctgtacttcaacctagaatgaccaatttgcatgctcaaggtaaaaaggaggaagttcgcagggtaatgtccgcatcaatgttatttaatagcatactaacctttccggtagtagttggaatattacttgttagccaagaatttgttcatatgtttttgggaaaagagtatgctgaaacatttattgctctcaacattgttgttttctctctaattccgattgctttttcagagattgtggggcgtcaaactctgattccgacggataatgttcgatactttacaatttcagtaatgtcaggtgctgtagttagcattttattaaattttattgtcatacctttcggaggatataaaggagcggcgcttgtacatgtactcgttgagattattgtatgcgcattaatgtcatattatgctcgtaaatatttagatattttagctttactcagaatagcaattaaaccactggttacgagtgtagtgactgttattatagtgcatttgatgttttcttatatttggcctatttataatagcttgcttagtttattattaaagataatagtttattcagtaatatatggtattctattattactgacaagaacaataactcagaaagagatttctatgataagaaaaaccccc

SEQ ID NO: 6403 - DNA, 261 bp, Streptococcus pneumoniae
  misc_feature (1)..(261): tiling:Spneumo1:WAN024BYJ; WAN023S10 contig_1623_16||||937 5..9635|+|261 bp|Glimmer 2.02 orf prediction|S.pneumoniae| 670|WAN01UDAF|ORF
atgaaatatcgtaaaaagccagtagtagttgaagccgtgcagtttttagatacagaagaatctatagatgagctatgcgattttggattagatccagtacggattgattacgcagacttaaaaaatcctcttttaaaaatcgaaacgcttgaaggattgatggttgcaacagaaggtgactacattatcaaaggcgtgcaaggagaatattatccatgcaagccggatatttttgcagaaacatacgaaaaaacggaggaa

SEQ ID NO: 6404 - DNA, 489 bp, Streptococcus pneumoniae
  misc_feature (1)..(489): tiling:Spneumo1:WAN024BZT; WAN0243WE spr1189||15903232|NP_ 358782.1|1185003..1185491|-|489 bp|Conserved hypothetical protein|S.pneumoniae|R6|NC_003098.1|ORF
atgaaatatgatttatatgataattgtattgaacttctaaaagaacgcgaagttacaattgaagatatggcagcgttagtaatattttcacaacaaaaatattaccctgaattaactcttgacgacgcttcatatgcaattcaacgtgtactaaaaaaacgtgaagttcagaatgtaattatgacaggaattgagttagataagttagctgaagcacaaaaactatctccagaatttcaaaagattatggagaaagataatccattgtatgggattgatgaagtaatcgtcttatcgatattgaatttatatggttctattgcctttacaaattatggctatttagataaattaaaaccactgattttagaaagattgaatgagaatcacgaaggtgtttgtaatgtatttctagatgatattgttggtgcaatagccgcagcagcatgtagtaaaattgcacacaatcatgctagtgatgaaatataa

SEQ ID NO: 6405 - DNA, 1050 bp, Streptococcus pneumoniae
  misc_feature (1)..(1050): tiling:Spneumo1:WAN024BPG; WAN023OPZ pne78_19||||15476..16 525|+|1050 bp|Type 36(1) capsule operon, Glimmer 2.02 orf prediction|S.pneumoniae||WAN01UCFT|ORF
atgaaatattatctaaaagaagaatttctgacggattctggtgtacgaaatgcgggaaataaggctcgaaacgatgttgaagaaatagtagttcgtgagggctatagtcctttgttattgatggtagatgattggtatcaaatggggactattagagcccaacgacacaaggctaaagcgctatccaaagctatctctaagttgaaggaaggcgatcagctacttattcaatttcctatgcttcatcatagtttctttacgactcatttagtcaaaagaatgcaatgtaaaggagtgaaggttcactttattatccatgatttagaagttttgcgctatgccaatttggatacagtacccttaaagcataaaattcgtgttcatcttcaagagtcaagtcttttgaaacaagctgatggtcttattgctcataatccagttatgaaatcagtgcttgttgataaggggatttctgaaaaaaaaatagttagtttaggcatttttgactatctgatcccgaattatcaggacaaagaagatttatcgaaggaaggggctattattgtagctggaaatttagttcaagaaaaagcaggttatttatatgagttgcctacaagaccggcatataacctctatggtgttggttttgatgaggctagaaaactatccaatgaaacctattttggttcatttcttccagatgaattaccatcagcattagaaggaagctttggtttggtttgggacggtggtagttctaaaacttgtagcggcgtgtttggtgagtatttgagatacaataattcccacaaggcctccctttatttggcttctggttttcctattattgtctgggggcaatctgctttggctaatttcgtcttagaaaaagagtgtggaattagtgttgagagtttacttgatttagaagaagtattggaacatttgtctcaagaagagtatcaggatttggtcaaaaatgctaagtccgtaggtcaaaaaattcgtgaaggttcttatcttctttctgcattacaagctttaaat

SEQ ID NO: 6406 - DNA, 93 bp, Streptococcus pneumoniae
  misc_feature (1)..(93): tiling:Spneumo1:WAN024B3X; WAN023SLE NC_003098.1_910||||72 0109..720201|+|93 bp|Glimmer 2.02 orf prediction|S.pneumon iae|R6|NC_003098.1|ORF|100
atgaaatcaactaaagaagaaatccaaaccatcaaaacacttttaaaagactctcgtacagctaaatatcataaacaccttcaaatcgttcta

SEQ ID NO: 6407 - DNA, 504 bp, Streptococcus pneumoniae
  misc_feature (1)..(504): tiling:Spneumo1:WAN024DM7; WAN0244QQ spr0096||15902140|NP_ 357690.1|103911..104414|+|504 bp|Hypothetical protein|S.pn eumoniae|R6|NC_003098.1|ORF|100
atgaaatcaataactaaaaagattaaagcaactcttgcaggagtagctgccttgtttgcagtatttgctccatcatttgtatctgctcaagaatcatcaacttacactgttaaagaaggtgatacactttcagaaatcgctgaaactcacaacacaacagttgaaaaattggcagaaaacaaccacattgataacattcatttgatttatgttgatcaagagttggttatcgatggccctgtagcgcctgttgcaacaccagcgccagctacttatgcggcaccagccgctcaagatgaaactgtttcagctccagtagcagaaactccagtagtaagtgaaacagttgtttcaactgtaagcggatctgaagcagaagccaaagaatggatcgctcaaaaagaatcaggtggtagctatacagctacaaatggacgttatatcggacgttacggttcatggactgctgctaaaaacttctggcttaacaatggctggtattaa

SEQ ID NO: 6408 - DNA, 1932 bp, Streptococcus pneumoniae
  misc_feature (1)..(1932): tiling:Spneumo1:WAN024CVE; WAN023S28 contig_1627_10||||125 12..14443|+|1932 bp|Glimmer 2.02 orf prediction|S.pneumoni ae|670|WAN01UD9V|ORF|000
atgaaatcaatcaacaaatttttaacaatgcttgctgccttattactgacagcgagtagcctgttttcagctgcaacagtttttgcggcggacaatgttagtacagcaccagatgctgttactaaaactttaacaatccataagttactgctctcagaagatgatttaaagacttgggatacaaacggtcctaaaggatatgatggaactcaatctagtttaaaagatttaactggagttgtagctgaggaaattccaaatgtatactttgaattacaaaagtataatttgactgatggtaaggaaaaagaaaatcttaaagatgatagtaaatggacaacagttcatggtggtttgacaactaaagatggacttaaaattgaaaccagtactcttaaaggtgtgtatcgtattcgtgaggatagaacaaagactacctatgttggtcctaatgggcaagtattaacaggttcaaaagccgtacctgctcttgtaactcttccacttgttaacaataatggtacagtaattgatgcacatgttttccctaaaaattcatataataaaccagttgtagataaaagaattgctgatactttgaattataacgatcaaaatggtctgtctatcggtactaaaatcccatatgttgttaatacaacaattccaagtaatgcaacatttgcaacttcattttggtcagatgaaatgacagaaggtctaacttataatgaagatgtaacaattactttgaataatgtagctatggatcaagctgattatgaagtcactaaaggaaataatggctttaacttaaaattaacagaagcaggtttagctaaaattaatggtaaggatgcagaccaaaaaatccaaattacttactcagctactttgaactcacttgctgttgcagacattcctgaaagtaacgatattacatatcattacggaaatcatcaagatcatgggaatactccaaaaccaactaaacctaataatggtcaaattacagtaactaagacatgggacagtcaacctgctcctgagggggtgaaagcgactgttcaacttgtaaatgccaagactggtgagaaagtcggtgctcctgtagaactttcagaaaataattggacatatacttggagtggtctagataattctattgaatacaaagttgaagaagaatataatggatactcagctgaatacacagtagagagcaaagggaagttgggggtaaaaaactggaaagataataacccagctccaatcaatcctgaagaaccacgtgtaaaaacatacggtaaaaagtttgtcaaagtagaccaaaaagatactcgtctagaaaatgcgcagttcgttgttaaaaaagcagatagcaataaatatattgcctttaagtcaactgcacaacaagctgcagatgaaaaagcagcagcaactgcaaaacaaaaattggatgcagcggtagcagcttacacaaatgctgcagataagcaagccgctcaagctctagtagatcaagcacagcaagaatacaatgtagcttacaaagaagccaaatttggttatgttgaagtagctggaaaagatgaagcaatggttcttacttctaatacggatggtcaattccaaatttcaggtcttgctgctggtacttataaattagaagaaattaaagctccagaaggttttgcgaaaattgatgatgtagaatttgttgttggagcaggttcttggaatcaaggtgagtttaattacttaaaagatgttcaaaagaatgacgctacaaaagtagtcaacaaaaaaatcactatcccacaaacgggtggtattggtacaattatctttgctgtagcgggggctgcgattatgggtattgcagtgtacgcatatgttaaaaacaacaaagatgaggatcaacttgct

SEQ ID NO: 6409 - DNA, 834 bp, Streptococcus pneumoniae
  misc_feature (1)..(834): tiling:Spneumo1:WAN024FKL; WAN023ONP pne81_12||||6318..715 1|+|834 bp|Type 39(1) capsule operon, Glimmer 2.02 orf pre diction|S.pneumoniae||WAN01UCEV|ORF|000
atgaaatcagagatagaaattattcagagtaaaattatagagttgttaaaattatttatagatatctgtgaaaataatgacctgacatattatgccttgggtggaaccttgttaggtgctgtgaggcataagggctttataccttgggatgatgatatcgatttgggtatgccaagagaggattatgaacgatttaaacaaattgctactgaacaaattaatggtaagtatcagtttttgagtgaggatacaccaggatatagaaaagcattttctgtgattcgagatacttcaacaagaatagtgatgaattatagtaatgtcgaacaagaagaaagtttgtggattgatatatttccaatagatggcttacccagcaaaggtataaagaaaaaaattcatgaaaaaaggtatttatatagacgaatgatggttcaattatctcagtttaataatattgtaaatcagaataaaactgatagaccttggcatgaaaaattgataataaaaatagccaatcatttaaaaatagaaaatattctatcatttgaaaaacaacagtacaaatatttaaaaacgataaagaaatattcagtgatggagggttatgcaggtaattttacaggggcatataaactttgtgagttagtgccaagttgttattttggtgaacctgttaaattagattttgaaggaataaaactgaactgtccaaataaatataaagattatctcaaagcaatatatggtgagaattatataacaccacctccaattgaacacagagttcctcatcaatatagagtcataagtttaggagagaatataggtgag

SEQ ID NO: 6410 - DNA, 1026 bp, Streptococcus pneumoniae
  misc_feature (1)..(1026): tiling:Spneumo1:WAN024BTF; WAN023YJY AL449929.1_24||||2481 1..25836|-|1026 bp|Glimmer 2.02 orf prediction|S.pneumonia e||AL449929.1|ORF
atgaaatcattattaataacaggtggagcaggatacataggatcacatacagttttggacttgttagataataattatgaagtaacaatcattgatgatttgagtaactctaagaaaaaagttattgagtctattaagcagatatccaagaagagtagaaatcttcatttttataaaattgatttaaaaaatgaagaaaaattggaaaatgtttttaagagacataattttgatggagtaattcattttgcagggtataaagctgttggagaatccgtggttgaaccattgaagtattatgaaaataatttattatcaactataaatattttaaaactaatgaaaaaatataaggtatttaattttgtgtttagttcatcagctactgtatacgaaagtactcctatcatgccattctatgagactaatccattaaaagcttcaaacccgtatgggagaacaaaacagtatatagaagtacttttaaatgatttgtttatttcgaattcaaattggaaaattgtttgtctgaggtattttaatccattgggtgcacatgaaagtggtgatttaggagargatccaaatggaattccgaataatcttgttccttacattacacaagttgcaattggaaaattaccatatttaaatatattcggagttgattacagtactcctgatgggacttgtataagggactatgttcacgttaacgatttagcatacggacacagaaaagcattagagtatatttttaatacagatgaaggtttatatgaagtaatcaatttaggaagtggtgttggttttagtgtatttgaaatcctacacagcttagagagtgtcataggctcgtatattccatataagataacttcaaggagagcaggagatatggacgtttcaattgcagatatttcaaaagcagaagagctactgggatggaagccaaggtatgatattatgaaaatgtgccaagatacgtggaaatggcaacagaaacatccaaatggatatgatgac

SEQ ID NO: 6411 - DNA, 561 bp, Streptococcus pneumoniae
  misc_feature (1)..(561): tiling:Spneumo1:WAN024BOE; WAN023OCM spn019g01_10||||14211 ..14771|-|561 bp|Glimmer 2.02 orf prediction|S.pneumoniae| 23F-1|WAN01UCLR|ORF
atgaaattaaatgatgccttaatcacaaatttttctattgctgataaagagtacgacatagacctgtcttttaataaagttctagatgtctttgaaatcctaaaagaggatgaaatgacgcgtctagaacaagctcagttgattgtccatttgctaactggccaagaattatacgacatcaaagaggttgtagattgttggatttacataaaagaacactttctagggatcgaaaaagaaactgttcagtatgatttgctaggcaatcccatgccaaaggcaaaaggtgaagaagaacaagaaaaattgattgattttgaacaagatgcagagtacatttatgctagttttttacaagcctacggcatcaatcttttgaaagttcaaaatgagttgacatggacagaatttaaagcacttttgaacgctttgccagataacacaatcatgcaacagattatagaaatccgagcatggaaaccagaatatggtggggataagaataaaatgcgtaaattacaagctaaatatagtttaggaaaggagggagaagataatggc

SEQ ID NO: 6412 - DNA, 207 bp, Streptococcus pneumoniae
  misc_feature (1)..(207): tiling:Spneumo1:WAN024ATV; WAN0240L1 |murF||CAB64518.1|||2 07 bp|D-alanine--D-alanine adding enzyme|S.pneumoniae||AJ3 87997|ORF|000
atgaaattaacaatccatgaagtggcccaagttgtaggagctaaaaatgatgttagtctttttgcagatgctcagttagaaaaggctgagtttgacagtcgtttgattgggactggagatttatttgtgccactcaagggtgcgcgtgatggccatgactttatcgaaagagcttttgaaaatggtgcggcagcaaccttgtctgat

SEQ ID NO: 6413 - DNA, 207 bp, Streptococcus pneumoniae
  misc_feature (1)..(207): tiling:Spneumo1:WAN024ATW; WAN0240LB |murF||CAB64528.1|||2 07 bp|D-alanine--D-alanine adding enzyme|S.pneumoniae||AJ3 88002|ORF|000
atgaaattaacaatccatgaagtggctcaagttgtcggagctaaaaatgatatcagcatctttgaggacacccagttagaaaaggctgagtttgacagtcgtttgattgggactggagatttatttgtgccactcaaaggtgcgcgtgacggtcacgactttatcgaaagagcctttgaaaatggtgcagcagtaaccttgtctgat

SEQ ID NO: 6414 - DNA, 207 bp, Streptococcus pneumoniae
  misc_feature (1)..(207): tiling:Spneumo1:WAN024CQG; WAN0240LL |murF||CAB64538.1|||2 07 bp|D-alanine--D-alanine adding enzyme|S.pneumoniae||AJ3 88007|ORF|000
atgaaattaacaatccatgaagtggctcaagttgtcggagctaaaaatgatatcagcatctttgaggatacccggttagagaaagctgagtttgacagtcgattgattgggactggagatttatttgttcccctcaaaggtgcgcgtgatggccatgactttatcgaaagagcttttgaaaatggcgctgctgtaaccttgtctgat

SEQ ID NO: 6415 - DNA, 201 bp, Streptococcus pneumoniae
  misc_feature (1)..(201): tiling:Spneumo1:WAN024BX9; WAN023RP3 contig_1583_19||||609 2..6292|+|201 bp|Glimmer 2.02 orf prediction|S.pneumoniae| 670|WAN01UDGB|ORF
atgaaattacttaccaagttaaaactcagacttgaagtagttcttaaagcagtcaaccttgactggcgagaggtagcggtcgaactcatgaccgacctatttgaggagcgcaagcgtcgctttgctttcgagcaagaaaattatgacttgaagcaacaattggcaatctacaaagaaaaagaacaaggagaacaatatgtt

SEQ ID NO: 6416 - DNA, 426 bp, Streptococcus pneumoniae
  misc_feature (1)..(426): tiling:Spneumo1:WAN024BY7; WAN023S0K contig_1622_2||||282. .707|+|426 bp|Glimmer 2.02 orf prediction|S.pneumoniae|670 |WAN01UDAK|ORF
atgaaattgaccctgaacattgagcctaaacctcaatcacggccaaggtttgcaagacgtgggagttttaccacagcttacgaagacaaggatatgaaaacatggcgcaatcattgccagctgctcattgctaatcagtacatgggtcagcctatccttgagggagctttgagggcacggcttagattttatatcaaacctcctcagtacatttccaaggtcaagaagaaccagcaggccctcctagatgaaatcatcccagtaggcaaaaagcctgacattgacaactacgaaaaagccctatatgacagtatgtcagggatcgtattccaagacgacggtcagatagctctgcatgatgtaggcaagttctacagcttaaaccctcgcatagaggtagaggtggaggtcatggaatggaacgca

SEQ ID NO: 6417 - DNA, 108 bp, Streptococcus pneumoniae
  misc_feature (1)..(108): tiling:Spneumo1:WAN024BPW; WAN023P92 pne49_12||||9781..988 8|-|108 bp|Type 23B capsule operon, Glimmer 2.02 orf predi ction|S.pneumoniae||WAN01UCCI|ORF
atgaaatttgctagattcgtagtatttaaaaaaattaacaatacccaaaacacgatgagtataggattcactattatttataatgtgtttgaaaaaaaatattataga

SEQ ID NO: 6418 - DNA, 714 bp, Streptococcus pneumoniae
  misc_feature (1)..(714): tiling:Spneumo1:WAN024BL7; WAN023NAW spn143g10_66||||54438 ..55151|+|714 bp|Glimmer 2.02 orf prediction|S.pneumoniae| 23F-1|WAN01UCOL|ORF
atgaaatttgctatcagaatgaattatattgatacaaatgaaatgctatttgttgaaacgcctagaaaagtaattacatccgacgaactcagaaagaaaaatacaaaatacttagaccaaaaagagtttaagttattcatccaaaatttaaaagacgaggccctatgtgattatcgaattacaaagtatatccgaatagctaaagttctttttcttactggcatgaggtatggagagctggcagccttaaactacaaggaagatatagatttttctaaaaagactattcacatcaagcatacatacgatttcagacaaaaagagagaactacaccaaagacaatcaagtccgatagggttataacagcacctcaaaaagtgttagatattatcaaagagcaaataatagagaatgcgacaaatggatttgatacagattttattttcatcaatactctaggagaaccaataacaaatgccagggttatttgtgcattgaaaagacatggtcaaaaaatcggcatagaaaaaaacataactacacatacatttagacattctcacatatccctacttgctgagctgggcattcccttgactgccatcatggacagagtagggcatagtgactcaaagaccacactagagatttattctcacgttactcaaaaaatggtatcagacatatctagcaagttagacaagataaaattt

SEQ ID NO: 6419 - DNA, 81 bp, Streptococcus pneumoniae
  misc_feature (1)..(81): tiling:Spneumo1:WAN024BPI; WAN023OQ3 pne78_15||||11831..11 911|-|81 bp|Type 36(1) capsule operon, Glimmer 2.02 orf pr ediction|S.pneumoniae||WAN01UCFT|ORF
atgaacaaaaatattgaaataacacctatgagtttgacagtgatatttctaacagttatcttcctaaaatcttctagtcct

SEQ ID NO: 6420 - DNA, 2406 bp, Streptococcus pneumoniae
  misc_feature (1)..(2406): tiling:Spneumo1:WAN024CTP-5; WAN02411D |gal||BAB91370.1||| 7218 bp|beta-galactosidase|S.pneumoniae||AB073928|ORF|000
atgaacaaaagactttttgataaacgttgtcattatagcattcgtaaatttgcaataggtgcagcatctgtaatgattggggccagtatatgtggtatttcaactgtacaagctgaggaggtggcttcatccaatactcaaacagaagaaacaattgttcatcaagctcagcctttagataagcttcccgatgatgtggcagctgcaatcgcaaaggctgatgagaatggtgggcgtgagtttgtaaaaccaaaagctgattcgacagaagacaaagtgactaaggatacggaacctactagacctgctaatgagggtagtcatgaattggctagacctaaagtggaaactccaaacaaagaagaaggaaacaaagctgagaacaaacagaaacctgaagagacaaatccaaagcctattgaatctgcagcaacagctggaacagaactgaaagaggattctaaaaaaacttccggaaatgaccaggtaaaagcagatacagagcgcaaaccttcttctgaaaaattgcaagcactgtctggagagtcgaacaaagccgaagttgaaaaagaaaaacagctattatcggagcgaaaacaagattttaataaagattggtattttaaactaaatgcccaaggagatttttcaaaaaaagatgtggatgttcatgattggtctaaattgaatcttcctcatgattggagtatttattttgatttcgatcacaagtctcccgcacgtaatgaaggtggccagttaaatggtggaacagcttggtatcgtaagactttcatattaaatgaagcagacaagaataaggatgttcgtatcaattttgatggggtttacatggattcaaaggtctatgtaaatggtaaatttgtaggacattatccaagtggatataatcatttttcatatgatattacagaatttttaaacaaggatggtagtgaaaattcaattactgttcaagtgaccaataagcaaccaagtagtcgttggtattcaggaagtgggatttatcgtgatgtaactcttagttatcgtgataaagtccatgttgccgaaaatggtaatcatatcactactccaaaacttgctgagcagaaagaagggaatgttgaaacacaggttcaaagtaagattaaaaatacggataagaaggctgctaaagtctttgtggaacaacaaatttttactaaggaaggtaaggttgtttcagaattagtgcgctctgaaacgaagaatttagcagaaaatgaagttgcagatttcagacaaacaatcctagttaataaaccaactctttggacgacaaaaagttatcatcctcaactgtatgtgctgaaaacaaaggtttataaagaaggtcaactagttgatgtaacagaagatacatttggttaccgctatttcaattggactgctaaggatggtttctctctgaatggtgaacgcatgaaattccacggagtaagtattcaccatgacaatggagccttgggtgcagaagagaattataaggctacttatcgtaaattaaaactcttgaaagatatgggggttaactctattcgaacaacccacaatccagctagccctcagttgcttgatgctgcggctagtttaggtcttttggttcaagaggaagcttttgatacttggtatggtggcaagaagacttacgactatggacggttctttgatcaagatgcaacccatcctgaagctaagaagggtgagaagtggtctgattttgatcttagaacaatggtagaacgtgataagaacaatccgtcgatcgtcatgtggtctcttggaaatgaggtagaagaggcaaatggtagtcctcgctctatcgaaactgctaagcgcctgaaggcagttatcaaagcgattgatactgaacgttatgtcaccatgggtgaaaataaatttagtcgtgcagcgacaggtgatttcttgaaacttgcagaaatcatggatgctgtggggatgaactatggtgaacgtttttatgatgcggttcgtagtgctcatccagactggctcatttatggttctgaaacttcttcagctactagaacgcgtgattcttattacaatcctactcaaatccttggacatgataaccgtctaaatcgtcattatgaacaatctgactatggtaatgaccgtgttggatggggaagaacagctactgaatcatggacttttgaccgtgatcgtgctggctatgctggacaatttatctggacaggaattgactatattggagaaccaactccatggcataaccaagataatacacctgtcaagagctcttactttggtatcatcgatacggctggtttaccgaagaatgatttttacctttaccgtagtgaatggtatagtgct

SEQ ID NO: 6421 - DNA, 1236 bp, Streptococcus pneumoniae
  misc_feature (1)..(1236): tiling:Spneumo1:WAN024FSW; WAN023P8Z pne49_15||||11224..12 459|+|1236 bp|Type 23B capsule operon, Glimmer 2.02 orf pr ediction|S.pneumoniae||WAN01UCCI|ORF|000
atgaacaaatatgaagaaagatatcaggaagatttatctaagaatgattttgagaaactaatcaatagaagatacctatcggataaagaactacaagttgaatatgtaaaaaaaggaacagtgttacctcccaaggtctttgaaatgaaactatcaaataaacttggtctacaaaaagctttgcatgggaaaggtggtgttgtagattcaaaggggaattatgttgaactttctgaacaaaaagcagttgggatgagaaatcgagtctatggatcttacaaatttaaccataaaaatttggctatcagaaatgaaaaagttatttacctaaactatttcataaatcagtggggacattttttactagatgttgtggggagattatggtatccattactaaaagatactgatactaaactggattacacatgttatgctggtacagaaacgaaacttgaaggaaactatttagagtttttagaactcctcggtatagataaatcacgcttaattttgataaatcgcccaactcaattctcagagataattatacctgaaagttcaattctgccaggtgaatattatacaaaagaatataaaatgctttttaattctttagtagcaaatgttaaattagataacaatttagaatcaaaaaaaatttattgttcacgagctaggctagatttagcaaaaggtaaagagttcggtgagaatggtattgaaaaggtcttcttaaaaaacggttatactccagtttatatggaaacaatgtctttgaaagaacaaataagaacgctattatcagctacaacaatagtattaactagcggttcgttggctcataatttattgtttataaacaataaaattaatgtttttattttaaataaaacttatagagtaaatcttcaccaatttttaataaataaaatctcagaagctagtgtgagctttgtggatatttatcgttccccgttacctattttatatggatatggtccatttttaatggatattactaaacctttagtgaatttttttgaggacagtggcttcacctatgattcaggaaccattttagataaaactgattattttaaattttatttaaaatggttatggagttataaattctttctatttagactgaatcacattaaagaaggaaacagtgaatttgagaagagttttaaaataattagaagatattataaaatgggacgacagtatgag

SEQ ID NO: 6422 - DNA, 90 bp, Streptococcus pneumoniae
  misc_feature (1)..(90): tiling:Spneumo1:WAN024GNC; WAN023ZC5 AL449924.1_100||||724 50..72539|+|90 bp|Glimmer 2.02 orf prediction|S.pneumoniae ||AL449924.1|ORF|000
atgaacaacaaggcaaacaattggtatacttcccttgaataccaaattattgatgtcaacaagccactgaaaggttttcgtaatactttc

SEQ ID NO: 6423 - DNA, 381 bp, Streptococcus pneumoniae
  misc_feature (1)..(381): tiling:Spneumo1:WAN024BV8; WAN023Q9X contig_1258_7||||1819 ..2199|+|381 bp|Glimmer 2.02 orf prediction|S.pneumoniae|6 70|WAN01UEG8|ORF
atgaacacaatagagaaagtcaaacaatggtttattgaccgtgatttagaaaacggtagggtcgttggattgatggtgctttcgtcaaagaggaggatttataaaatgaaaagactaggaatcattattggggcggtatttgtaatcgttgtatcgccatttgtagttcagtatggatggaatgagattatcacaacaattgttccagttggtaaaattacagtctggcaagcattagggatggatgcactactatctttcatctggcctgtgttatctagcaaaaaagaatctgaagaggattattcgtatgcggtaaagagcagtatttcaaaaatcattacatgtgcatttttgatatggttagctagtttgtttatt

SEQ ID NO: 6424 - DNA, 273 bp, Streptococcus pneumoniae
  misc_feature (1)..(273): tiling:Spneumo1:WAN024BXL; WAN023RPF contig_1583_6||||2541 ..2813|+|273 bp|Glimmer 2.02 orf prediction|S.pneumoniae|6 70|WAN01UDGB|ORF
atgaacacattaaacgagaaagcaatcaacatcttcaaagcagtagctaaggaaactttaatccaaggtacttacgaggaaaacttcctttacagccagcttgaagcattctgtactaactgccgtcaattcgcttttggatggacagagttagcagaggagattgaacgccaagagcgttaccttctcgattctggtttcactcaagaggaaatcgatgacattcgttttgatgtagcatttgcaggaatgcttgataaattaaatgtagcc

SEQ ID NO: 6425 - DNA, 1341 bp, Streptococcus pneumoniae
  misc_feature (1)..(1341): tiling:Spneumo1:WAN024DHS; WAN0244GI spr0464|hk13|15902508 |NP_358058.1|470513..471853|+|1341 bp|Histidine kinase|S.p neumoniae|R6|NC_003098.1|ORF|100
atgaacattgcttggatattgttgtatgcacttgttattaatggactagaaattgtcattttctttaaagtagatggaattggtctcactttcgatagaatttttaaggcctttcttctgaaatttcttctagggatcatttttacgacttttcaatttttggctgtaagtaaatatttgtcctattttatagaacctttgttcggtataggtctatctttcttattgttaagagggcttcctaaaaaaatccttattttttatggtctcttcccaatgatattagtagagctcttttacagaggtgtttcctattttgtgcttccatttttggggcaaggaattgtagatggggatggcaatcctatctttttattgattatgatattcgtttgcttcatagttttagtctttttgaaatggttagactatgatttcactagattgagaagggagtttctagatacaggttttcaaaagtctcttactaagattaactgggcaatgggggcttattatctagtgatgcaaagtctatcttaccttgaatatgaacaaggtattcaatcaacgactgttcgccatctcatcctagtgttttacctactcttttttatggggggtatcaagaaattggatacctatttgaaggaaaaacttcaggaggaactgaaccaagagcagaccttgcgctacagagatatggaacgctatagtcggcatatagaggaactttacaaggaaattcggagttttcgccatgactacactaacctcttaaccagcttacgtttgggcattgaagaggaggatatggagcagataaaagagatctacgactcggtcttaagggattccagtcagaaattgcaggacaataaatatgacctgggcagattggtgaatattcgtgaccgtgccctcaagagtctcctagctggaaaatttataaaagctagagaaaagaacattgtctttaatgttgaagttcctgaggagattcaggttgaggggatgagcctacttgattttctaaccattgtgtctatcctttgtgacaatgctattgaagctagtgcagaggccagtcaacctcatgtttcaatcgcctttttaaaaaatggagcacaggagacttttatcattgaaaactccatcaaagaagagggcatcgatatttctgaaatcttctcctttggagcaagttctaaaggggaggagagaggagttggtctctataccgttatgaaaattgtggaaagtcatcccaataccaatctaaatactacctgccaaaatcaagtctttcgtcaggtacttactgtgatacatgcagaatga

SEQ ID NO: 6426 - DNA, 2436 bp, Streptococcus pneumoniae
  misc_feature (1)..(2436): tiling:Spneumo1:WAN024BLH; WAN023NC9 spn143g10_12||||13988 ..16423|-|2436 bp|Glimmer 2.02 orf prediction|S.pneumoniae |23F-1|WAN01UCOL|ORF
atgaaccagatagtgtgggagagttttaggggagaggggtctaaagaaaaaatgtttgaaaaaattaaaggaattaatataaaatcaggtatttttgaagatgaaacaaaattagaactctttgaaggaaattttgagggaacaaatccagtacaaaacgatagggcaagtttattgtttggaaggaatggttcagggaaaagtaccattgctcgaggaataaatcaattaaaaaatggtgagattggaacagatagagtatcatttattgataaaaataataataatattgtacttagtgatactgaacgaaaatcgatatttgttttcaatgaacactatgttgatcagaaagtcaaaattgctcaagaagggttagatacaattgtaattttaggtgaacaggttgatatcgatgaggaactggatagattaagaacgcagttatcagaatcacaaattgaatctcaagattattatgctgaatatgaagaatatttagatgaaaaaaatgaaaaatctccagatttttggaaaaaggaaatgacagattctttgaaaggagtaggcaactgggccgaaagagatagggagataaaaggaaatcgagctgcatctcccgttcataataatacctttcaaaattttgttgatttacaaccaatcttagataaaaatgagttagaggttgaattcaacaataaaaaagctagatatttttcaataagagattccgcagttactataaataatgaactatctttacctgatattaattttgatagcaatgaattatcaactttattgtctgaaaaaatcgaagaacctgagttgaattctagggataagtatttactgacattattatctgattccacaaaaggtgaacgtcatttgagagaagttaaagatttctttgaagatgaacatcaaaaaaaatgtcctttctgtactcaatcagtatcagaagatgttaaagttgaactcacgaatggcataactaaactactatcaagagcagtcgaagaacaccaatccgcattgagaggtaaaaaaattgatgagattaatcaagatttttctggttatgaacagatagatccaatattaattcagtcttatcaaaatagtattaatgctttgaatgctaaatttaacgaaattaactcaataatcgataagaagattgataatccatataatatagttgagttacctaatataagcttttctcaagaattaagtcaagcagagcatgatattgaaaaaattaaccaagcaattatcaaacataattcagaaatctcgggtattcaaaagttaaaagtagatctccttcaaataaataatgaattagctttttatgaaattcaagatgcatacaaaaagtttcaagagaaaacaaataaaaaagcaatttgtgaaaataattataataacagtagtaaacgagtaaaggattatgagaagcagatttctgatttagaagacaagaaacttaatatagatattgcagttgatgaaattaataaaagtttaaattacatatttttttcaaaaaatcggttagctatacagaatcaaaacggaaaatactatctgttatcaagaggtaagtctgtggtccccagtagggtttccgtaggggaacgaaatgcgctggcattatgttatttctttactgagataattcaacagagagagttagcagatgcttatagtcatgaatattttattgttattgacgatccaatttctagttttgatatggaaaataaagttggaataacctcgtatttaaaatattgtttaactagattttttaaggggaatagtaatactagagttttactaatgacccatgataaacaaacaatatatgactttgatatctttttgaaagagataatggaatcctgtaaagaagaggaaggtggacaaaaatctaaatacaagaagttagaattggtttctggtaaattacaagaattcaaaactagtactcacgattatacagaactacttgaaatagtcttcggttatgcattgggaaatagtacacctacttcggaaagttttgttgggaatgcaatgagaaaaattttagaagcctatggtagttttaattataagaagggaattgccgagctaacaacagatcctttaattgttgaaaaaattgataaagaatacagaacttattttgagaatcttatgtatagactggttttaaacggtgaaagtcattttaaggatccggttaaaactttgagtattgatttctttgataccatttctgatgaagaacgaaaaaaaacagctagagatttactagttttgctttatcttttagatgatttacatgttttaaaacatttagagggtgtatcaaatgcggaaaatagacttgaacaatggaagtgtgagattttagaa

SEQ ID NO: 6427 - DNA, 261 bp, Streptococcus pneumoniae
  misc_feature (1)..(261): tiling:Spneumo1:WAN024CTE; WAN023IHW 86285_3023||||1716591 ..1716851|+|261 bp|EGAD orf prediction|S.pneumoniae|TIGR4| WAN01UC25|ORF|010
atgaaccatgaaacctgtcgcctgttgattggccataatggtcatatctgtaatctgaacacgacgaggttgactagtcacatagactactgtatctgcaatatcctgagcttgcaaagcttctattccttggtaaacggacgcagctcgttctttatcaccatgaaaacgcactgtagaaaaatctgtttcgacaattccaggctgaatggtcgtcaccttgatatccgttgcgatggtatcaattcgcagtccatctga

SEQ ID NO: 6428 - DNA, 120 bp, Streptococcus pneumoniae
  misc_feature (1)..(120): tiling:Spneumo1:WAN024BXK; WAN023RPE contig_1583_8||||2893 ..3012|+|120 bp|Glimmer 2.02 orf prediction|S.pneumoniae|6 70|WAN01UDGB|ORF
atgaacgaactagaaagaacagccctcaatgagatattgaggaccgtgacatatattgctgagaaagtggacgaactagattctaagatttctttgaacgattcacaagttcctgagcaa

SEQ ID NO: 6429 - DNA, 714 bp, Streptococcus pneumoniae
  misc_feature (1)..(714): tiling:Spneumo1:WAN024BXB; WAN023RP5 contig_1583_17||||514 3..5856|+|714 bp|Glimmer 2.02 orf prediction|S.pneumoniae| 670|WAN01UDGB|ORF
atgaacgaactcatcaacgtaaccctgaatgacaatcaggagccagtagtgtcaggaagacaactacatgaggcgctgggtgttaattcaagatatacaacatggtttgaccgtatgaaggaatacggatttacagaaggtcaggactttctcccaaatttgggaaaaagtacaggagggcgacaagctactgaccacatcatcaagctagacatggccaaggaaattgctatgatccagcggacggagagaggcaagcaagtccgacaatactttatccaagtagaaaaagactttaatagccctgagaaaatcatggcaagagcattgctcatggctgatcagaaagtccacaagctagaggctcagattgaggctgaccgtcctaaggtgctatttgcagacgcagtaagtgcaagccatacatctatcttggttggcgaacttgccaagctcattagccaaaacggctacaaaatcggtgccaatcgcctcttttcttggatgcgcgaaaatggctacctgattaagcgcaaaggctcagattggaacgtgccaacccaacgtagcatggacttgaaactctttgaaatcatggaaacaaacgtgcaacacgcagatggacatatcactgtgaacaagacaccaaaggtcacaggcaaaggacaacagtattttatcaataagttccttaatcaggaatacttgacagga

SEQ ID NO: 6430 - DNA, 1041 bp, Streptococcus pneumoniae
  misc_feature (1)..(1041): tiling:Spneumo1:WAN024BRG; WAN02413Y |cap1I||CAB05927.1||| 1041 bp||S.pneumoniae||Z83335|ORF
atgaacttagtaaaaattttttatattttaggtggagttggtttaggtcaggcttactcgacctttaaaaggaatcattctaatgagtatcaaaataaatttgtttttttaacttttattcaaggattattgtttggaataataggtttaataatagttttagctgatgttccgataaattatggtggggtaataatagttttgtccagtctatctattatgaaaacaaatcttactatgattgcagtaatagaaaatagtataaagaggaataagattgtattaggagtaagcgtagtatattccgttatgctagtattgttgttactatttcatttagtttctataaaaatggtatttttggtatatgctattaatgaatttttacgtatcattttatttttatactattacaatatgttcccagtttttgaacatattagtattaaagaatttttcactatatataagtttggatttctttctatgattcttactctattaattacatttaattatagtattgatatcataatgttgaagcaaatgtctagtagttataatgtaggtatatacagtgtcgcagttacgttttctaatatgtttttgatggttccagactcatttaaagagattttatttggtgattcggctaaaagaacttttgagaaaaataaagcaataaatgcaataaaagtatcatttctatttatgattttattaattattggatttctttcttttggagaatttgcgattacgctcctttatggttccagttatataaaggcatttcctataacattagtcatttttttaggaagcttatcgatgattttctttaaaattttacaaccaatttatatatctcagggtaaacagagtgtagctataaaaattttatctgtgtcggctttgataaatataagtttaaactggtacttaattcctaactaccaaattacaggagctgcgatagcatcagcaatctcttatactgtatgtggtttgttttttattatagattatcttagaaattga

SEQ ID NO: 6431 - DNA, 105 bp, Streptococcus pneumoniae
  misc_feature (1)..(105): tiling:Spneumo1:WAN024CYU; WAN023VTN AX571210.1_1||||1..10 5|+|105 bp|Glimmer 2.02 orf prediction|S.pneumoniae||AX571 210.1|ORF|000
atgaacttcaccggactcttttattttgaatttttgcctgctttacgcttttcagcgatttcggctgcctttcgaggcaagacaatttccgttatgctaactaat

SEQ ID NO: 6432 - DNA, 99 bp, Streptococcus pneumoniae
  misc_feature (1)..(99): tiling:Spneumo1:WAN024AX9; WAN023RT1 contig_1602_5||||802. .900|-|99 bp|Glimmer 2.02 orf prediction|S.pneumoniae|670| WAN01UDDM|ORF|000
atgaacttgtttcttataaaaatgttgtctgaaactattcgcctttttccagaagttttagaggaagaaaactttatgaggaaaaaggagttactcaaa

SEQ ID NO: 6433 - DNA, 99 bp, Streptococcus pneumoniae
  misc_feature (1)..(99): tiling:Spneumo1:WAN024AX8; WAN023SIG NC_003098.1_1980||||1 543615..1543713|-|99 bp|Glimmer 2.02 orf prediction|S.pneu moniae|R6|NC_003098.1|ORF|100
atgaacttgtttcttataaaaatgttgtctgaaactattcgcttttttccagaagttttagaggaagaaaactttatgaggaaaaaggagttactcaaa

SEQ ID NO: 6434 - DNA, 159 bp, Streptococcus pneumoniae
  misc_feature (1)..(159): tiling:Spneumo1:WAN024ASX; WAN023NEG spn134d07_5||||2609.. 2767|-|159 bp|Glimmer 2.02 orf prediction|S.pneumoniae|23F -1|WAN01UCVE|ORF|001
atgaagaaaaaaatactgattattttcgttctgtatctgatcatgtccatctttctttatccgcttagggagagtatttggtataatctattttataccatagcctatatgattgcggttatgatctatttttctttaattaaaaagaaagaaaagaaa

SEQ ID NO: 6435 - DNA, 795 bp, Streptococcus pneumoniae
  misc_feature (1)..(795): tiling:Spneumo1:WAN024CD5; WAN023P0W pne62_10||||6597..739 1|+|795 bp|Type 33C capsule operon, Glimmer 2.02 orf predi ction|S.pneumoniae||WAN01UCG7|ORF|000
atgaagaaaaaagaaaaaattttattaaaaattcaagaagaagaattgaaattattaaaagagttcataagaatatgttctcaaaataaaatcagatattttgctctgggagggagcctgttaggagcagtaaggcataaaggtttcattccgtgggatgatgatatggatttaggaattccaagaaatgattttgataagtttaccaatggaatagattttaacaaatataataaaaattatattttagaaaattctgaagtaaatttaggtgtttttcaatataaattaaaatcaggtgttcaagtatttggggaaaaatatgaagtatgtttagatatatttccgttagatggagtaccagtaaatagatttaaaaaattatattttgaaagaaaaattcttttttatagaatgctttataaattttcagttatagatcaagtagttgataaagatagaggaacttttgaaaatttattatttaaaattgccaaatttctcaagcttaataaatttatttcaacttcattgatgaattgcaaacttaagagattaataaaatcttatgattatagtagttcaagatatgtaggtaacattttaggtcgttaccgtagtaaagaaattgtagaaaaggatttttttggagagggagttttattaccctttgaagatatatatattaattgtccagtaaattatgactgttatttaaaaaatatttattgtgattacatgcagttaccaccggttaaagatagaattccacattttgaggagctgaaaaatcaa

SEQ ID NO: 6436 - DNA, 132 bp, Streptococcus pneumoniae
  misc_feature (1)..(132): tiling:Spneumo1:WAN024D2T; WAN023RQL contig_1589_14||||760 3..7734|+|132 bp|Glimmer 2.02 orf prediction|S.pneumoniae| 670|WAN01UDFI|ORF|000
atgaagaaaaatcgtggaattcaaaaattagctatattagtattactaggtgtttttatgtttagtaacacaattccttaccaacagtttattcagaagaatagacaattggagattcgagtgcaatctaac

SEQ ID NO: 6437 - DNA, 1107 bp, Streptococcus pneumoniae
  misc_feature (1)..(1107): tiling:Spneumo1:WAN024FQI; WAN023OKE pne86_12||||7899..900 5|+|1107 bp|Type 43(2) capsule operon, Glimmer 2.02 orf pr ediction|S.pneumoniae||WAN01UCFZ|ORF|000
atgaagaaaatagctttagtgaaatggattttggatgattctggtggtggtgagcgagttgctgtatctttggcaaacgaacttacaaaaaagtatgaagtttatttaattggaattacaacaaagcaatcggatttattctttgaaatcaattctcaagtaaaatactccaatttttttgaccatcgagtacgcttgtctaagaatattctaaagatctcaaaaatgttaaaaaaatattttgtagataatgagatagatattgcctttggaatagggataactgctaatatatttttatctttggcaggaataggaatatccacccaaatagttttgtgtgaccatacaaattcaattacagacaatagagaattttctcagaaagtccaaagatatgttggagcaaaatgtgcagacaagattatcactctcacacaagaagatcgtagaagttatataaaaaaatatggtatttctgaagaaaaaattgattatgtctataattggaaagaagatggtctttccaatgtaccttataatgatgagtcaatgaaaattgttacagtaggtcgtttggattatcaaaaaggctatgattatcttgttcaagttgctaagaaagtactgaaagaaaagactggctggacttgggaaatttatggttctggtaatcaagatgaggtagataaaatcaaggatttaatcatcaaaaatgatttgcaagataagttagtcattaaaggtcttgaaaaaaatcaggctatgatttatggagataaaggaatttatgtcatgacttctcgttatgaaggattacccttggtattgttagaagctcaacaatacaatcttcctattgttagcttcaggtgtccaacgggacctaatgagattgttgaagatggggtcaatggtcatctaatagattgttatgataccgataagatgagtgagagactacttgaattgatggaagattcgaacttgcgaacttccttcgccaatcatgccaaggataatatggataaatttgataaagataaaataattcaacagtggattgatttaattgaggaaatgactggagggaataattttgaaagc

SEQ ID NO: 6438 - DNA, 1089 bp, Streptococcus pneumoniae
  misc_feature (1)..(1089): tiling:Spneumo1:WAN024FM7; WAN023ONN pne81_14||||8126..921 4|+|1089 bp|Type 39(1) capsule operon, Glimmer 2.02 orf pr ediction|S.pneumoniae||WAN01UCEV|ORF|000
atgaagaaaatagctttagttaagtggattatagacggtacagatggtggcttgaaagtttccacagatcttgctaatgaattatcaaaagtgtacgaggtacatctaatttcagtcataagtactgaagaaatattttttccactaaataatgcagttcgttataaaaatttatcttcacaaaagatatcaatgagtaagaacttcgttaaggcggtgaaattactaagaacatatataaaaaaaaataacatagaagttctatttggaatagggatgactatgaatattgtaggcataacaagtacaattggtttaaaaactaaatttatttcttgtgatcacactaattctatcgtagatatagacactactatgaaaaaacttcaaagatatgtgggagctaaactttcagataagataattacactaactactgctgatagaaataattatataaaaaagtataagataaacccaaaaagagttgattacatttataattggatgaattctatagatgcagaaaaaaaatatactcttgattcgaaaaaattaattactgtaggtagatttcacaagcaaaaaggttatgactatttatctaaagttgctatcaagatattatcaatatatcctgaatggcaatgggatatatatggttcgggtgatgagcaaataaaacaagatttgataactgaattggataaaggtggagttttatcacaagttcattttaaggggaatgtcaaaggtacagataatatttatccagaccatactatttatgtaatgacttcccgttatgaaggacttcccttagtacttttagaagcaaaacaatatggactacctattgtcagttttaattgtcctacaggtccagcagaaattgtattggatggagaaaatggttatctaattgagaattttgatataaatcaaatgagtcaaaaaataatagaattaattgaaaataatgaattgagattaggattttcgcaaaatgcgatgttagatactgataaattcaataaaaagaacattactaaacaatggattgaattgatagaaaaaatgacgggagaa

SEQ ID NO: 6439 - DNA, 564 bp, Streptococcus pneumoniae
  misc_feature (1)..(564): tiling:Spneumo1:WAN024BV4; WAN023Q9R contig_1258_13||||404 0..4603|+|564 bp|Glimmer 2.02 orf prediction|S.pneumoniae| 670|WAN01UEG8|ORF
atgaagaaagtagaaccaattcgtgatttagacgatatagaacgaatcaaagattacttgaaaaacaaaagtgatagaaactatgttttattcatgtttggaatctactctggtttaagagtgagcgacatagtacctcttcaagtcaagcaagtaattgctgataggattgaactaaaagagaagaagactggtaagataaggtattttccaatcagcccccctctcagaaaagaaatcaatcgatacattaaagataatcagttagcagagtacgattatctctttccaagtaaaaagaaaaagagaacagatggtgttcgtatcacacacattggaagagtagcagtctatcaaatacttcaagatgcagctaaatatgtaggtttgaatcatataggaactcattcgatgaggaagacatttggatatcatcattacaaaaagaatagtaatgtagctatcctacaaaagatattcaatcattccacaccagacatcacactaggatatatcggttatagtcaagacgaacttgaccagagtatactatcatttgattac

SEQ ID NO: 6440 - DNA, 573 bp, Streptococcus pneumoniae
  misc_feature (1)..(573): tiling:Spneumo1:WAN024DE5; WAN023Z81 AL449925.1_55||||4392 7..44499|+|573 bp|Glimmer 2.02 orf prediction|S.pneumoniae ||AL449925.1|ORF|000
atgaagaaagtgaaattagggcaagtggctacttttatcaatggctatgcttttaaacctcaagattggtcatctgaagggaaagagattatcagaatacagaatctgactaaaacttcaaaagggataaattattattcgggtacgattgataaaaaatacattgttgaagctggtgatattcttatttcgtggtcgggtacattaggggtttttcagtggtgtggaagatccgcagtgttaaatcagcacatttttaaagtggtttttgataagatagatatagataaatcgtattttaaatatgttgttgaaaaaggtttacaagatgctgtaaaacatactcatggttccacaatgaaacatttaactaaaaaatattttgataatattatggtttcatatacaaatttgggagagcaacaaagaattgcaagtgagctggatttgttaagcaagctgattttaaggagacaagaacaacttgaagagcttaatctacttgtaaaatcacaatttgcttgtgagatagctataaaagtgtggagaaatagcttgaaatttagtataata

SEQ ID NO: 6441 - DNA, 879 bp, Streptococcus pneumoniae
  misc_feature (1)..(879): tiling:Spneumo1:WAN024FMW; WAN023OOE pne80_28||||17990..18 868|+|879 bp|Type 38(1) capsule operon, Glimmer 2.02 orf p rediction|S.pneumoniae||WAN01UCDX|ORF|000
atgaagaacattttaaaaaaattgatacaacaattaccggataaactgtttctacaaattaagtatttctacatttttaagaagaaattaaatttaaaaaatcctaagaccttcaatgaaaaattacaatggctaaaattatatgatagaaatcctttttataccattttagcggataagattttagtgaaggactatattgccaagacacttggggaagaatatgttattccgactcttggtgtttatcatcattttgatgagattgattttgatgagcttccaaattcttttgtgatgaaaaccaatcatgatagtggcagtattatcattgtaaaaaacaaagaagacttgaatattcaagaagcaagagaaaagctacaaaaaagtttggaaagagattattttatttttggtcgtgaatggccttataaaaatattgaacgaaaaattattattgaagagtttatgacggatgaatcgaatcaagaattaaaggattataaaatttattgttttaatggtcttcctaagtttgttcatgtagattatgaccgttttacaaatcataagagaaatatttatgatagcaactggaagcagcaagaatttatgtatgcttttccgtccgataaaaataagacgatagagaagcctgctgaactgtctgaaatgattgaacttgtgagaaaattatcaaaagagatgccatttgtgagatgtgatttttatatcgtcaatcacaaaattttgtttggtgagatgactttttgtccaggttcagggtttgaaaaattttatccagaacagtatgatgtagagtttggaaaggatattactttaccggagaagcatgaatggaaacaaaagaaaaacgtt

SEQ ID NO: 6442 - DNA, 1116 bp, Streptococcus pneumoniae
  misc_feature (1)..(1116): tiling:Spneumo1:WAN024DE3; WAN023MWW spn175g07_8||||7267.. 8382|+|1116 bp|Glimmer 2.02 orf prediction|S.pneumoniae|23 F-1|WAN01UCLL|ORF|001
atgaagaaggtgaaattaggtgaagtggctacttttatcaatggctatgcttttaaacctcaagattggtcatctgaagggaaagagattatcagaatacagaatctgactaaaacttcaacagagataaattattattcgggtatgattgataaaaaatacattgttgaagctggtgatattcttatttcgtggtcgggtacattaggggtttttcagtggcgtggaagatccgcagtgttaaatcagcacatttttaaagtggtttttgataagatagatatagataaatcgtattttaaatatgttgttgaaaaaggtttacaagatgctgtaaaacatactcatggttccacaatgaaacatttaactaaaaaatattttgataatattatagttccatatacaaatttgggagagcaacaaagaattgcaagtgagctggatttgttaagcaagctgattttaaggagacaagaacaacttgaagagcttaatctacttgtaaaatcccgatttaacgagatgtttggggaaaataaaatatttgaaagcattgataacttatttgatattatagatggtgataggggcaaaaattatcctaaatcagatgagttgtttagtgaggagtactgtttatttttaaatacaaagaatgttactaaaaacggattttcattcgatacaaagcaatttatcactaaaacaaaggataaattacttcgaaaaggcaaacttgagcgttatgatatagtcttgacaacaagaggtactgttggaaatgtagcgtactacgatgaattaataaaatataaacatttacgtataaattcaggtatggtaatattacgtcccaagacaccaaatctaaatcagaaatttattatccatgttttaaggaataataattatagtcgagtgatatcaggaagtgctcagcctcagttaccaattacaaaattaaaaaaaatacttctcccccttcccccactagccctccaaaatgagttcgcagactttgtagccctggtcgacaaatcacaattggcaatccaaaaatctctggaagaacttgaaactttgaagaaatctctgatgcaggagtattttggc

SEQ ID NO: 6443 - DNA, 1176 bp, Streptococcus pneumoniae
  misc_feature (1)..(1176): tiling:Spneumo1:WAN024DXZ; WAN023P93 pne49_11||||7573..874 8|+|1176 bp|Type 23B capsule operon, Glimmer 2.02 orf pred iction|S.pneumoniae||WAN01UCCI|ORF|000
atgaagaagtcagtttatatcattggttcaaaagggattcccgctaagtatgggggctttgaaacctttgttgagaaattaacagaatatcaaaaagatggtaacatccaatactatgttgcctgcatgcgcgaaaattctgcaaaatcaggatttacagcagatacatttgagtacaatgatgctatttgttacaacattgatgtgcctaatattggtcctgctagagccattgcttatgatattgctgctgtgaataaagcgattgaaatagctaagaaaaacaaagatgaagctcctattttttacattctagcttgtcgtatcgggccttttatagctagacttaagaaaaagattcaagctatcggaggtactctgtttgtcaatccagatggacatgagtggcttcgggctaaatggagcctgccggttcgaaagtattggaaattttcggaacagttgatggtcaaatatgcagatttattggtctgtgatagcaaaaatattgaaaaatatatccagaatgactataagcaatatcaaccaaagacgacttatattgcttacgggacggatacaagtccgtctatcctgaaatccgaagatctaaaaattcgtagttggtatcaggaaaaaggacttagcgaaaatggctattatctagtggtgggacgattcgtccctgaaaacaactacgaaaccatgattcgtgaatttatcaaatctaagtccaagaaggactttgtcctcatcacaaatgtggagcagaataaattttacgaccagttgttacaggagactggttttgacaaagatcctagggttaaatttgtaggtactgtctatgaccaagaattgcttaagtacattcgtgaaaatgcttttgcctatttccatgggcatgaggttggagggaccaacccttctctactagaagctctagcatccacaaaactgaatttgttgctagatgttggttttaaccgtgaggttggtgaagacggggctatttattggagaaaagataatcttcataaggttattgaagagagtgaacaaaaaacaatagaagaaataaaagaaatagatattctatctacagagcaggtagaaaaaagatttacttgggattttattgttaatgaatatgaaaatttatttttactagggaaa

SEQ ID NO: 6444 - DNA, 402 bp, Streptococcus pneumoniae
  misc_feature (1)..(402): tiling:Spneumo1:WAN024BOX; WAN023OIH pne88_19||||15172..15 573|+|402 bp|Type 45(1) capsule operon, Glimmer 2.02 orf p rediction|S.pneumoniae||WAN01UCBS|ORF
atgaagagagtgattacttacgggacttttgatttgcttcattacggtcatatcaatttattgaagcgtgctaaagatttgggagattatttaatagtagctctatctactgatgaatttaatcttcaaaaagataagatttcatatttcaattatcaacagcgtaaaattttgcttgaatctattcgttatgtagatctggtaattcctgagatttcatgggaacaaaaacgagaagatgtaaagaaatattatgctgatatctttgttattggtgatgattgggaaggtaagtttgattttttgaaagatgagggggtagaagtagtatatttacctcgtactaaagaaatttctactacacagataaaagaagacttaaacaagaccaaaggtggaaaa

SEQ ID NO: 6445 - DNA, 1086 bp, Streptococcus pneumoniae
  misc_feature (1)..(1086): tiling:Spneumo1:WAN024AY7; WAN0240FY |cps19CK||AAD19924.1| ||1086 bp|UDP-N-acetyl glucosamine-2-epimerase|S.pneumonia e||AF105116|ORF|000
atgaagataatgctagtttttggtacacgtccagaagcgataaaaatgtgtccattagtgaatgagttgaaaaaacaggcagatatggaaacagttgtttgtgtaactggtcaacacaaggagatggttagccctgttttggaattgtttggagttcaaccagactatgatttagaaataatgaaagctaatcaaaccttgttctctataacaacaagtattttagaaaaaattaaacctgttttagaagaagaacaaccagatattgttctagttcatggtgacactactacaacatatgcagcagctttggcagcattttatcttggaattaaggttggccatgttgaagctgggttacgaacttacaacctgcaaagtcccttcccagaagaatttaatagacaatcgacttctattattgcaaattatcattttgctccaactgaattggctaaagaaaatctcttaaaagagggtagagagaatgtttatgtaactggaaatacagttattgatgcacttacaactacagtacaaaaggattatacacaccctgatttagatttaaacgttaacactcgtcttattctactgactgctcatagacgtgaaaatctcggagaacctatgaaacacatgtttagagctgttaaacgagtcttaaatgaatatgacgatgttaaggtaatttatccaattcataagaatcccttggtgcgtgaaacagctacagaaatttttggagacacagaacgtattcagattattgaacctttggatgttcttgattttcataatttcatgaatcatagttacatgattttaactgattcaggaggagttcaggaagaggctccttctttaggaaaacctgtattggtcatgcgagatacgacagaaagacctgaaggagtagctgccggaacgttgaaattggttggaactgatgaggagactatttatcaaaactttaagatgcttttagacgattccgaagaatataaaaaaatgagtcaagctagtaatccttatggaaaaggtgatgctagtaaacagattgttcatattttaagcggaatttaa

SEQ ID NO: 6446 - DNA, 231 bp, Streptococcus pneumoniae
  misc_feature (1)..(231): tiling:Spneumo1:WAN024AST; WAN023JWC 83235_752||||425213.. 425443|-|231 bp|EGAD orf prediction|S.pneumoniae|TIGR4|WAN 01UC25|ORF
atgaagatggttgaagtcaacagaaccaatgactttatcggttcctttgacgacaatcccatagccagctgggagattttccttttgagtacgctccggaagaatgtgctccagataataaatctcatcttccaagatcttgactggaggaaaacctgctggataggcgacctctggcaaactagcgtaggtatggatatcctcagcatccaccactgtgcggactcgtaa

SEQ ID NO: 6447 - DNA, 468 bp, Streptococcus pneumoniae
  misc_feature (1)..(468): tiling:Spneumo1:WAN024BUT; WAN023Q9I contig_1258_23||||102 22..10689|+|468 bp|Glimmer 2.02 orf prediction|S.pneumonia e|670|WAN01UEG8|ORF
atgaagatgtctgaatttaaaacgattgaaacacaagaagagctagataacatcgtgaaggaacgtctcagacgtgagcgtgaaaaattcggtgattatgatgatctcaagaaacgtgtttcagaactagagtctgaaaatggcgctttgaaagctactgtcgaggaaacaaaacagacaatcgccaaatcagacgctcaaattactgaattgcaggggcaagtgagcaattatgaaactgctagcttacgaactcgtatcgctttacaaaatggcttgccttatgacttggctgaccgtcttcaaggtgctgacgaagaggcgttaagggctgacgctgagcgtctagctggttttatgagaccagcaacccctcaagcaccactaagagatactgagcctgctatcggtgatgacaaaactatgcaaatgaagcaaatgcttcgagatttacaaccaaaaggagaa

SEQ ID NO: 6448 - DNA, 87 bp, Streptococcus pneumoniae
  misc_feature (1)..(87): tiling:Spneumo1:WAN024CS2; WAN0246N7 209200-46-4_4||||732. .818|+|87 bp|Glimmer 2.02 orf prediction from Patent Seque nces|S.pneumoniae||WAN0246WG|ORF|000
atgaagattaagaagagttccaatccagaagccattgtgacgggtcgtgattatttccaagttatttcctacttgggagcgtctaac

SEQ ID NO: 6449 - DNA, 123 bp, Streptococcus pneumoniae
  misc_feature (1)..(123): tiling:Spneumo1:WAN024C6A; WAN023NM2 spn098f07_4||||1628.. 1750|+|123 bp|Glimmer 2.02 orf prediction|S.pneumoniae|23F -1|WAN01UCXN|ORF|001
atgaagcgcaactgttatgaatcttatgactatgttgatccggataatttatataccgatccgggttcttcagttctaagaaataagcaggaaggaaaaaagcacgtgagcttgaatatcgta

SEQ ID NO: 6450 - DNA, 117 bp, Streptococcus pneumoniae
  misc_feature (1)..(117): tiling:Spneumo1:WAN024AYV; WAN023SMZ NC_003098.1_162||||12 8152..128268|+|117 bp|Glimmer 2.02 orf prediction|S.pneumo niae|R6|NC_003098.1|ORF|100
atgaaggaagatgatgctatgtttaaaaagagaattgaaaggggcaaaagtagtatcttttatctatttttgggagtagaagcttatgatatagaaatttgtaacaaaaatgtaata

SEQ ID NO: 6451 - DNA, 105 bp, Streptococcus pneumoniae
  misc_feature (1)..(105): tiling:Spneumo1:WAN024BPQ; WAN023P6Y pne53_27||||16433..16 537|+|105 bp|Type 25F capsule operon, Glimmer 2.02 orf pre diction|S.pneumoniae||WAN01UCCQ|ORF
atgaaggacattttaaaaaagttgatacaacaattaccggataaactatttctacaaattaaatactactacgtttttaaaaaagaaattaaatttacagaatcc

SEQ ID NO: 6452 - DNA, 1032 bp, Streptococcus pneumoniae
  misc_feature (1)..(1032): tiling:Spneumo1:WAN024BWZ; WAN023RLH contig_1573_13||||594 2..6973|+|1032 bp|Glimmer 2.02 orf prediction|S.pneumoniae |670|WAN01UDHG|ORF
atgaaggcagctcgctggcatgcagcgaaagatgttcgtattcaagaaatagaagttcctgaagtacttccgcaccaagtaaaagttgcagttaagttcacaggaatttgtggtactgacctccatgaatttttagatggacctatctttatcccaacagatgagcacgtctattctggtcaaaaagcaccggtaacactgggacatgaattttctggtgaaatcatagaagtcggaagcgatgttacccgtgttaaagttggtgatcgtgttgctgtggaaccaattctagctaaaaataacttagttggtgattataatttggatccaaaccttaattttgtcggtttggctgcagacggtggatttgccaaatattgtgttttagacggtgacttagtacatgtcattccagatagcttgagctatgagcaagctgctcttactgaacccgctgctgttgcagtctatgctgttcgtcaatcttctttgaaggctggcgatacagctgttgtctttggtttaggcccgattggtctattaattgtagaagctcttcgtgcagctggtgcttctaagatttatgctgttgaactatcacctgaacgtcaagcaaaagctgaagagttaggagctatcgttgtccgtccggaagaaggtgaaacagctgttgaagctattcatcgtttaacaaacggtggtgtagatgtttcttatgaagtaacgggtgtgccagtagttttaggacaagccttagctgccgtacataaagcaggtgagtgcatggtggtctctatctgggaacgagaagcaaatattaatccgaatgaatttgcaatccaagaaaagacactaaaaggaatcatcgcttatcgtcatatcttccctaaagtattagaattgatggaacaaggctacttctctgctgaaaaattagttactaagaaaattaaattggaaaatatcgtcgaagaaggctttatcgaattaactcaagataagtcacaaattaaaattttggtagaaccagaa

SEQ ID NO: 6453 - DNA, 210 bp, Streptococcus pneumoniae
  misc_feature (1)..(210): tiling:Spneumo1:WAN024BRN; WAN02414D |pncK||CAC18599.1|||2 10 bp|hypothetical protein|S.pneumoniae||AJ278419|ORF
atgaaggctatattctttattattctcttcgcttttcaaacctatcttatttatctatccataagtatctccgataaaaaacaaaagactattgaattaacatcattgaattgttttgtcatattatttctaatctatgataaattaatttttctctttattgcctatgtttttttgataatttttatattaaacttgttccgtaactga

SEQ ID NO: 6454 - DNA, 1413 bp, Streptococcus pneumoniae
  misc_feature (1)..(1413): tiling:Spneumo1:WAN024FY9; WAN023OQ2 pne78_16||||11445..12 857|+|1413 bp|Type 36(1) capsule operon, Glimmer 2.02 orf prediction|S.pneumoniae||WAN01UCFT|ORF|000
atgaaggttttaaaaaattatgcatataatctctcttaccagctactagtgataattcttcctattataacaacaccttatgtaactagggtatttagttcaaatgatttaggaacttttggctactttaattcgattgttgcttattttatttttttagcaacattaggagtagctaattatgggacaaaagagatttcagctcatagaaataatatccctaataatttttggggtatttatactttgcagtttactgcgacttgtatatcgatatttctatatattggtctgtgcttttcattttcatttatgcaaaatccagtagcttatatattggtattatctctattatctaggggattagatattacttggctttttcaaggactagaagattttaggaagataactgttagaaatatcactgtcaaactcataggtgttatttcaatatttttgttcataaagtctcagaatgatttatatctatatgtctttttattaactatatttgaatttttaggacaattaagtatgtggctgccagctctagaatttataggtaagccacaatttgatttcaattatgccaagaaacatcttaaaccggtgatattactgtttttacctcaaatagcgatatctttatatgttacgttaaataggacaatgcttggcgctttagcatcaacaacagatgttggaatttatgatcaatctttaaagttggtaaatatcctacttactttggtaacttcactaggtagtgttatgctaccacgtgtttcgaatcttttatcaacaggggataagaagtctgtgaatcgcatgaatcaattatctttctttatatacaatcttgtgatttttccaactattgcaggtatgttaattatcaataatgactttgtgaaatttttcttaggaaatgactttcaagaagcaaaatatgctattgcaatcatgatttttaggatgttttttattggttggacgaacattatggggattcaaattttgatacctcataataagaacaaagaatttttgacttcaacaacggttccagcaattattagtgttggtttaaatttgcttttactgcctgaatttggatatattggggctgcgattgtttctgtattaacagaaatatttgtatgggttatccaattgtattttacaagaaaatatttaaaagatgtaccaatttttaaatcaactgttaaaatattttcagcatcaattcttatgtatgttgctctttcatttttgaagtcaattttgacttttacacctattgttaatgttgttgtatgtgctattgtgggggcgatactttatggtttactaattttaatatttaaagtagttagcttaaaggagataaaagagcagctgttaaataat

SEQ ID NO: 6455 - DNA, 207 bp, Streptococcus pneumoniae
  misc_feature (1)..(207): tiling:Spneumo1:WAN024CG4; WAN023Q26 contig_1220_27||||127 92..12998|+|207 bp|Glimmer 2.02 orf prediction|S.pneumonia e|670|WAN01UEKO|ORF|000
atgaagtacgataaacaggctgagattgacggactgaaacgcacgatcgagcaaaacgaagagaagataatcgagtattcgaagccgtgcgatgcacgcaagagacggattagagcgctggagcgcgatttgttgaggaaaaagaataaagaattgagacggaaattggaggagttggaagatgatggaagagttaaagcaaaaagt

SEQ ID NO: 6456 - DNA, 777 bp, Streptococcus pneumoniae
  misc_feature (1)..(777): tiling:Spneumo1:WAN024BPS; WAN023P82 pne52_21||||13384..14 160|+|777 bp|Type 24B capsule operon, Glimmer 2.02 orf pre diction|S.pneumoniae||WAN01UCCM|ORF
atgaagtatcaactcattgtatcaacaatgaatcaacaggataacagtctgatagagaaaatgaatataaaatctgatgcaattatcattaatcaatcaaactcattttcttaccatgagacgaaattgaaaaattcgattgtaaaatggtatgaattcaatgaaagaggtattggtttaagtcgaaacacaggtttcatgagatcggatgctgatattattcaatttgctgatgacgatatgatttttacagatacatattatgaagacgtattattagaatatcaaaaacatccagaagctgatgtaattcttttttcgaataaatgtcttaatgaagatcgaatgccttatcaggttaataattttagacgtataaataggtttgaaggtgttaagtttggtggtgctagaattacagtcaggagagaaaagatattgcataataacataacgttttctcttttatttggggggggagcaaaatacggtgcaggagaggacgtaacatttattcaggactgtatcaaggcaggattacgggtatataaatcacctattattgtttctacaatgaaacaagattcttctacatggtttaaaggatatgatagaaaatattataaagataaaggtgctttattagcagcaaatttcccttctataagtgaggtaggagtatatatacaagctttcaaaaatagggggggaatttatacatttagtgaattacttagattttataaggaaggtgttaacgaatttaaaataaataga

SEQ ID NO: 6457 - DNA, 1308 bp, Streptococcus pneumoniae
  misc_feature (1)..(1308): tiling:Spneumo1:WAN024BL3; WAN023N7D spn148d07_3||||2042.. 3349|+|1308 bp|Glimmer 2.02 orf prediction|S.pneumoniae|23 F-1|WAN01UCTI|ORF
atgaagtcaaaagggcagtatggaaattatattgaaaaatatttctatggttatcagccaaatagtgactcggaagctgactttgaaaaaataggtgtagaattaaaagttactccttttaagataaacaaaaatgggacacttagtgcaaaagaacgacttgtattaacaatactaaactatatggaggaaaatttagaggatttttactccactcatttatggaaaaaatgtgcaaagattttgttattgttttacaatggcttaattcctaatcaaacaatgaaggactatgtcattgaaaaaatatttttatatgaatggtttgaggaagatatggcagtcatccttgaagactatcagaagattacagataaaatcaaaaatggaaaggcacatgaattatcagaatcagatggaaactatttatcaacttgtacaaaaggggcaggtaaaggaaaggatttaagacaacaaccttttagtcatgaattagcaaaacaaagagcttgggaattaaaatcaagttatatgacctatctgataaatcataaaatctttaatcaatcagatcaagaaagtgttctggctaattttaggggtgagaaaaaatcatttactgaggttattgcagagaagattctttcctacaaaggtttttctgaacaagagttatatgatagatttgaagtgaattccaaagcaaaaggtaagaatagtactctgattagaaaaattttaggcttaacaggggatttagataagacaaaagaatttcaaaaagcaaacatgaatttgagagttattcgagtagataagaataatttacctaaggaagactctccatttaaaacttattgttttaaagaactagcagcaacagatagttgggaatcatcacatgtttataatgaaatttataataaacgattccttttcgttatttttaaggaaattgaacctaagctatttgtattagattctatcaagttttggggatttcaggatagacaattagaagaaatccaaagagtatggcaggaaactagacaaattatttctgacggagttaaattaactcaaaacggtaataaagtttcaactaatttccctcaaagtaagataaacaaaattctatttacgaaactacatgctaccaatacttattatgaaattgacaaaggaaaatttgttgggaaaggttcattatctgatacggatgaacttccagatggacgtaggattacaaaacactccttttggatgcctaagaaatttattaaagaaatattagatgggaattgggat

SEQ ID NO: 6458 - DNA, 2253 bp, Streptococcus pneumoniae
  misc_feature (1)..(2253): tiling:Spneumo1:WAN024ATI; WAN0241EW |PBP2X||BAD00903.1||| 2253 bp|penicillin-binding protein 2X|S.pneumoniae||AB1199 15|ORF|000
atgaagtggacaaaaagagtaatccgttatgcgaccaaaaatcggaaatcgccggctgaaaacagacgcagagttggaaaaagtctgagtttattatctgtctttgtttttgccatttttttagtcaattttgcggtcattattgggacaggcactcgctttggaacagatttagcgaaggaagctaagaaggttcatcaaaccacccgtacagttcctgccaaacgtgggactatttatgaccgaaatggagtcccgattgctgaggatgcaacctcctataatgtctatgcggtcattgatgagaactataagtcagcaacgggtaagattctttacgtagaaaaaacacaatttaacaaggttgcagaggtctttcataagtatctggacatggaagaatcctatgtaagagagcaactctcgcaacctaatctcaagcaagtttcctttggagcaaagggaaatgggattacctatgccaatatgatgtctatcaaaaaagaattggaagctgcagaggtcaaggggattgattttacaaccagtcccaatcgtagttacccaaacggacaatttgcttctagttttatcggcctagctcaactccatgaaaatgaagatggaagcaagagcttgctgggaacctctggaatggagagttccttgaacagtattcttgcagggacagacggcattattacctatgaaaaggatcgtctgggtaatattgtacccggaacagaacaagtttcccaacgaacgatggacggtaaggatgtttatacaaccatttccagccccctccagtcctttatggaaacccagatggatgcttttcaagagaaggtaaaaggaaagtacatgacagcgactttggtcagtgctaaaacaggggaaattctggcaacaacgcaacgaccgacctttgatgcagatacaaaagaaggcattacagaggactttgtttggcgtgatatcctttaccaaagtaactatgagccaggttccactatgaaagtgatgatgttggctgctgctattgataataatacctttccaggaggagaagtctttaatagtagtgagttaaaaattgcagatgctactatccgagattgggatgttaatgatggtttgactactggtgggatgatgactttctcacaaggtttcgctcactccagtaatgttggaatgagtctacttgaacaaaaaatgggagatgctacttggttggattatctaaaccgctttaagtttggagtgccgacgcgttttggtctgactgatgagtacacaggtcaattgcctgcagataatattgtcaatattgccatgagtgcatttggtcaggggatttctgtaacgcagacccagatgctacgtgcttttacagccattgccaatgatggcgtcatgctagagcctaaatttataagtgctatttatgatactaacaatcagtctgtacgaaagtctaaaaaagagattgtaggaaaacctgtatctgaagatgcagcaagcttgactcgtactaacatgatattagttgggacggaccctctatatggaactatgtataatcaccacacaggaaagccaattataacagttcctggacaaaatgtagcagttaaatccggtacggctcaaatcgctgatgagaaaaatggaggatacttggttggttctaccaattatattttctcagttgtgactatgaatcctgctgaaaatcctgattttatcttgtatgtaacggttcaacagcctgagcattattcaggtattcagttgggggaatttgccaatcctatcttggaaagagcagtggctatgaaagattcccttaacctccaatctaccgctaaaacgttagatcaggtaaccaatcaaagcgcttatgccatgcctagcatcaaggatatttcacccggtgatttggcggaagctttacgtcgcaatattgtgcaaccaatcgttgtaggaacaggaacaaagattaaagaatcatctgtagaagaaggggccaatcttacacctaaccagcaagtcctgatcttatctgataaagcagaggaagttccagacatgtatggttggacaaaagcgactgctgagacctttgctaagtggctcaatatagaccttgaatttgaaggttcgggctctactgtgcagaagcaagatgttcgtgctaatacagctatcaaggacattaaaaaaattacattaactttaggagactaa

SEQ ID NO: 6459 - DNA, 2253 bp, Streptococcus pneumoniae
  misc_feature (1)..(2253): tiling:Spneumo1:WAN024ATJ; WAN0241FS |PBP2X||BAD00935.1||| 2253 bp|penicillin-binding protein 2X|S.pneumoniae||AB1199 47|ORF|000
atgaagtggacaaaaagagtaatccgttatgcgacgaaaaatcggaaatcgccggctgaaaacagacgcagagttggaaaaagtctgagtttattatctgtctttgtttttgccgtttttttagtcaattttgcggtcattattgggacgggcactcgctttggaacagatttagcgaaggaagctaagaaggttcatcaaaccacccgtacagttcctgccaaacgtgggactatttatgaccgaaatggagtcccgattgctgaggatgcgacatcttataatgtctatgcggtcattgatgagaactataagtcagcaacgggtaagattctttacgtagaaaaaacacaatttaacaaggttgcagaggtctttcataagtatctggacatggaagaatcctatgtaagagagcaactctcgcaacctaatctcaagcaagtttcctttggttcgaagggcaatggtattacctatgccaacatgatgtccataaaaaaggatttggaaacagctaaggttgagggaattgattttacaacaagcccaaatcgaagctatcctaacgggaaatttgcttcatctttcatcggactagcgcagttgcatgaaaatgaggatggttcaaagagtctcattgggacgtctggtgtcgaaagttccttgaatagcttgttagcgggaacagatggtatcattacctatgaaaaagaccgcttaggaaatattgttccaggtacggagcaagttacccgacagactgtaaacgggaaagatgtctatacgaccctatctagtcctttgcagtcctttatggaaagtcaaatggatgccttccaagaaaaactaaaaggcaagtatatgactgcgaccttggttagtgccaagacgggagagattctcgctacaactcaaagaccaacctttgatgctgataccaaagaagggattacagaggactttgtctggcgtgatatcctttatcaaagtaactatgaaccaggatcagccatgaaggttatgacgttagcttcttctattgataataataccttcccaagtggagaatacttcaatagcagtgaattcaaaatagcggatgcgacgactcgagattgggatgttaatgaaggtttgactactggtgggatgatgactttcttacaaggtttcgctcactccagtaatgttggaatgagtctacttgaacaaaaaatgggagatgctacttggttggattatctaaaacgctttaaatttggggttccaactcgctttggcttgacagatgaatacgctggtcaacttccagctgataatattgttagtattgctcaaagctcatttgggcaaggaatttcagtgacacaaacacaaatgcttcgtgcctttacagctattgctaatgatggagttatgctggagccaaaatttataagtgctatttatgatactaacaatcagtctgtacgtaagtcacaaaaagaaatagtaggaaatcctgtttccaaagaggcagcaagcacaactcgaaatcacatgatcttagttgggacggaccctctatatggaactatgtataatcactacacaggaaagccaattataacagttcctggacaaaatgtagcagttaaatccggtacggctcaaatcgctgatgagaaaaatggaggatacttggttggttctaccaattatattttctcagttgtgactatgaatcctgctgaaaatcctgattttatcttgtatgtaacggttcaacagcctgagcattattcaggtatccagttgggagaatttgccaccccaatcttggagcgggcttcagctatgaaagaatctctcaatcttcaatctccagccaaaaatttagataaagttacgacagaatcttcttatgcaatgcctagcatcaaggatatttcacctggtgagttggcggaagccttacgccgaaatattgtgcaaccaatcgttgtaggtactggaacaaagattaaagagacttctgtagaagaagggaccaatcttgcaccaaaccaacaagttctccttttatcggataaggtagaagaaattccagacatgtatggctggaaaaaagagactgccgagacctttgctaaatggttggatattgagctggaatttgaaggttcaggttctgttgttcagaagcaagatgttcggactaatacagctatcaaaaacattaaaaaaattaaattaactttaggagactaa

SEQ ID NO: 6460 - DNA, 708 bp, Streptococcus pneumoniae
  misc_feature (1)..(708): tiling:Spneumo1:WAN024BM2; WAN023NNR spn097d12_33||||29875 ..30582|-|708 bp|Glimmer 2.02 orf prediction|S.pneumoniae| 23F-1|WAN01UCN2|ORF
atgaagttacttaaaaatgaattgattaagagtaaaatatttttatttattattgttgacatctgtattcagattctagtcattctagctataaaaacatatattttagatatttcggcactatactcagagcttgattataataagtattggtatattttacacactttaatatatatgctaatgatttttcctatacaaattttgtatcaaaatctaagagaggcattgattgaagataataataatggttggaatatcatggtgattaacactaataatctcgtgaaaatcatctatataaaagtaacgataaatatcgtgagatgttttatttgttattttgtttatacaattttttctttaattcaattaggtggtatgggaactgatatgttattaaccaatataatatttcccaatataatgtcatttcttttatttttacctatagctatctttatgcaaatttgctgtataagatttgattccattttagcaaaggccttacctaatattttgctgatacttattgttttaatcacgtttcagagtgattggaatatatttatacctgcaacttattattatacagaaattcagtcaactacaaacttaggtattaaattattagtttgtatctggattatgggatttgaatttttccttcttccaaaactaataaaattgaaagaacaaaatctagtt

SEQ ID NO: 6461 - DNA, 105 bp, Streptococcus pneumoniae
  misc_feature (1)..(105): tiling:Spneumo1:WAN024DQ7; WAN023SLH NC_003098.1_865||||68 7243..687347|+|105 bp|Glimmer 2.02 orf prediction|S.pneumo niae|R6|NC_003098.1|ORF|100
atgaagttagtggaggaagtcggagaagtagccgaggttttgaataggcgctctggtcgaaaagaagggataggattcgaacgaggaacttgccagagaactggc

SEQ ID NO: 6462 - DNA, 756 bp, Streptococcus pneumoniae
  misc_feature (1)..(756): tiling:Spneumo1:WAN024BKL; WAN023MP2 spn180c09_130||||1069 85..107740|-|756 bp|Glimmer 2.02 orf prediction|S.pneumoni ae|23F-1|WAN01UCXQ|ORF
atgaagtttaaaaattatctatttgatttatatccttattttcccaaaggtttttcattagataatagagaggatcctgatgtatgtagtaaggcgttgtacgatgatttatgtaagatgttttttgatgatgattcaaaagaaaaacttaaaataacatctgtatgtaataaatgccaaaactatggaaatagagattattatactttatttattgataaggataagtatttattatcaagtgattatataggagcctctatttattgggcacaagaggcaggattaaacgacagaataattttagatcatttgagtatttcaagaacaataggtggacacattcttttccctagaggtggaaaattagaaaccgttaatcaggctagaggtggagaaaaaggatattatgatcgttttgatttaacactatatgctataaaagaatggtttgtggaaaataaaaatacaaaaataggttatgctatagagaattaccatgaatggtttgaactattttctggtgatgataattgtaaaaatggatttgagaactttgtcgagtttttcaagttagaaggatttatatatgagcaaaataaaattatagatttaattaaatcagatttagagaacaatcaggttgtctttttagataaagaagatattttgattgctagcacagaagaagaatatataagatatatgaaaaatcttaatatcattattctagaaagaaccaaaaaaattttatta

SEQ ID NO: 6463 - DNA, 1305 bp, Streptococcus pneumoniae
  misc_feature (1)..(1305): tiling:Spneumo1:WAN024BRH; WAN02413Z |cap1H||CAB05926.1||| 1305 bp||S.pneumoniae||Z83335|ORF
atgaagtttagtctacaatcaaatgatataaaaaataaaataatacttctagtaggtgtagttttttcagggactttaattttatgcagtgaaaataatgatgttacaattccattattttcaatgatttttttaagttttatggcaatgataattgtgaaatttaatatttttcatccctatgtgtggtatagtagcttctttactatttattctatttcttacccgctactctatagaatggagtatataaactatggttatacaaaagatttgattttcatgcaatggctggctttggcaactttgttgttaactctaccttctaaagccattgtgttaagcgaaaggaaaataaacctaaataacaataactatttattatttctcaataatatgaatacgtttatcacaacagtagcaattatatatctattaggaagtggttttagaaataaaggggaaatatattcaggtgccaatattgtgataatgttagtattttctttggtttattttatgattctcattcatacatatcagctatttatacagttgagtactaaaaaatggagactactaaattgtaatactaacacagcgatagttatctgtctcttctctatcgttacaggggaaagagattatatgtttactttattcatccttgatgtgattatattattttactttcacaaaataaaacgtttttatcttgtaatgttagttccgcttgcggcactactgattccgttatctgcagtttttaaatatactttattaagtgggcaagtttcatctataaatacaaataatatttggtttgatttgctagatggtgagtttgtatcagctagtcgtaatttacagattctgatattacataatatgggcaattatttcgaaggtcgttctttttttaatgacatagtaagaattttttataatacggggtattctaatcaaacttggtttatggacaccttttttccaaacgtacattcaaccaaatatggttttactcttgtgggagagggatatgtgaatggaggatactttggaattgtaatgatttttatgctaacaggctttttgatgagatttctttatataaacgctcaaagaaatatatacgggatgctgatatatctgtatatgatacctatttttatttattctactcgtgctgattttgctaacatattatctccattacttaaatatgctatattgggaacattggttattgtttttatcaatagaatggtgttgatatcaccattggatgaaatgggtggtgagtag

SEQ ID NO: 6464 - DNA, 120 bp, Streptococcus pneumoniae
  misc_feature (1)..(120): tiling:Spneumo1:WAN024BWP; WAN023R69 contig_1524_6||||3320 ..3439|-|120 bp|Glimmer 2.02 orf prediction|S.pneumoniae|6 70|WAN01UDNI|ORF
atgaataaaataattgtaacactcatcgttctaactgtcaactatttcgatttggaaataatttttgataattattcacaccaccatactccggctcaactaacttttaacgagagtttc

SEQ ID NO: 6465 - DNA, 876 bp, Streptococcus pneumoniae
  misc_feature (1)..(876): tiling:Spneumo1:WAN024BP9; WAN023OKA pne86_16||||11190..12 065|+|876 bp|Type 43(2) capsule operon, Glimmer 2.02 orf p rediction|S.pneumoniae||WAN01UCFZ|ORF
atgaataaaattaccgtatttacaccaacttttaatagagggtatttaatgaataagttgtttcattcattaaacagtcaaacaaataaacattttgaatggcttattgtagatgatggttcaatagatcagactggtgagcttgttgaaacatttaaggaacaggcaaattttgaaatacgatatttttatcaacaaaatggtggtaagcatagagcaattaatcatggtttggatttagctagaggggagttattcttcatcgttgattccgatgattcattgacagatgatgctattgagaaaatttttaataactattctggaattgcctttaatcatagttttgcaggcatagcatttaatagaggtttctctaaaaaaagaatagttggagagacttttgaaggaacatatatagattgtgacaatttacatcgagctaaacataatattttaggagataaggcagaagtatatcgaacagatattttaaagagtattaagtttccagtggtagatggagaaaactttatgagtgaagttgtcttatggaatgaagttgcaagaaggggttataaattacgttggtttaatgacataatttatttttgtgactatttagaagacggattaaccaaaaatagtgaaaaaattttatttaataacccagttgcacatcaaatgatgaccaaggaattgttacaaattgattttacattaaagagaaaatttgggatgatctataattatcataaaattagaaaccaaagtattaagcaaactgctattaatcttgaacagcctctaattttagtatatatggtagtaatgatggctagaattagaaaaattgttaagggggtgaaaaatgag

SEQ ID NO: 6466 - DNA, 702 bp, Streptococcus pneumoniae
  misc_feature (1)..(702): tiling:Spneumo1:WAN024BMY; WAN023O7H spn029h04_70||||57450 ..58151|-|702 bp|Glimmer 2.02 orf prediction|S.pneumoniae| 23F-1|WAN01UCO3|ORF
atgaataaaccaatagcagctatatttgatatcgacggaacaatttttagagattccttacttttaaagcatatggaaaagtgtgtttcctatgatgtatttccaaatagtgtcaattctgaaattaaatttcacaaaaatgcttgggaaaatagagaactagactatgatgactatctctatattgctgcaacactttatacaaaatatattgcggataaagacatacttgatattgattttgttgccaaaaaagttattgaaaaagaaagtaaaaaactttatcgatacactcgtgatcgaatcaaatggcataaggaacaggggcaccaaattatatttatttcggggtctcctgatttcttagtctcaaaaatggccgaaaaattgggcgcagatatctggtatgcaagcaattatcttcaacttgatagtaagtatactggagaagtgattcctatgtgggattcaacttcaaaattacaagttttaaaaaaattgtttattgatttcgaaaaatcctacgcttatggagatacaactggtgattttacaatgcttcaatctgtaggatttccgacagcaataaatcccaataagaaattattggacaaaattacaatggagaaactagattgtaaaatcattattgagagaaaagatgtgatttataaactagatgaggtcacgcatggaatttat

SEQ ID NO: 6467 - DNA, 87 bp, Streptococcus pneumoniae
  misc_feature (1)..(87): tiling:Spneumo1:WAN024BNB; WAN023O8C spn029h04_39||||28755 ..28841|-|87 bp|Glimmer 2.02 orf prediction|S.pneumoniae|2 3F-1|WAN01UCO3|ORF
atgaataaatccaaaaaatataaagaaagaattcattatgaatacgataatcttactaaatcagagaaaaaattgctgactatattt

SEQ ID NO: 6468 - DNA, 966 bp, Streptococcus pneumoniae
  misc_feature (1)..(966): tiling:Spneumo1:WAN024BPD; WAN023OKF pne86_11||||6921..788 6|+|966 bp|Type 43(2) capsule operon, Glimmer 2.02 orf pre diction|S.pneumoniae||WAN01UCFZ|ORF
atgaataaattaagaaaagctttaaattattatcaagacataagcaaaaaaagatcatattttcctaataatgtactaaattggcaattgttaggaaagtttcttggacaaataccatatcttataggagaaaataatgcgagaaaaatttgtgaaaaaaggcacaatgtaacaagaggatttttggaaaaagaattttatgaatttataataaattatgaatttaacacttgtaatcaaaaaaatagtaaaattatttggacattgtggatgcaaggatatgaaaatgcgccagaattagtaaaaagtacaatcgatagtataagaaaatttgctgaattaaataattttcagtttatattgttagaagagaatacgatagaaaaatatatagtatttcctaagctgataaaggagaaaatggatttaggtgttatagattatactaaaatttcggatatattaagagtttcattgctggcaaaatatggagggacatgggtagatgcgactatatatatgaaagaagagtttgattcatcattattattacagaattattatactataaaaacaggaggaatagaggattattctcctaatatttcgaataataggtggaaaggtttttttttatcaggtaatagttcattatttagctttactcgtgattttttctttgaatattatagcagatacgatatcgctgtagattatttattgatagattatatttttgatatagcttacaaatacgatgagaagattaaaaatcaaatgcttgaattagaaaaatctaatcataatttattttggttagaaagtcatttaggagatgagtttgatcaaaaagtgtgggataatattacagaaactactaaaatattcaaaacaacgtataaattatctgaagaaattaaatcaaataagaataatttttattccaaactaatagatagaaagtta

SEQ ID NO: 6469 - DNA, 300 bp, Streptococcus pneumoniae
  misc_feature (1)..(300): tiling:Spneumo1:WAN024DRO; WAN02407H-con |pspA||AAC62252.1 |||1962 bp|PspA|S.pneumoniae||U89711|ORF|000
atgaataagaaaaaaatgattttaacaagcctagccagcgtcgctatcttaggggctggttttgttgcgtcttcgcctacttttgtaagagcagaagaagctcctgtagctaaccagtctaaagctgagaaagactatgatgcagcagtgaaaaaatctgaagctgctaagaaagattacgaaacggctaaaaagaaagcagaagacgctcagaagaaatatgatgaggatcagaagaaaactgaggcaaaagcggaaaaagaaagaaaagcttctgaaaagatagctgaggcaacaaaa

SEQ ID NO: 6470 - DNA, 1000 bp, Streptococcus pneumoniae
  misc_feature (1)..(1000): tiling:Spneumo1:WAN024DRN; WAN0240R9-con |pspA||AAF27717.1 |||1388 bp|PspA|S.pneumoniae||AF071823|ORF|000
atgaataagaaaaaaatgattttaacaagcctagccagcgttgctgttttaggggctggttttgttgcgtctcagcctgcttcggtgagagcagaaggtgctcaacctgcggcagaaaaagctccaacttacgatgatttactgaagcttttgaaggagtttgaaaatgatgcaattgcagcaattggcaaacgcacagacttaacagatgaacaaaaaggagcaaaacgtaaggaaatcaaagaattcatcaataaagatgaaattttgaaattggtcaaagacgaggttcttacagtggacgatgtcttgacagaactaaacgcagcagctgatggagctagtcaaattggacgatcagttgataaaccttatgttggggaatataaaaacaatgtttgggctaaagataatgctaattcaggttccgaagctcaagacctaacagatgaccaaaaacaagccattaatgaagagttagataaatttgccaagcgtgatgatgtccaaaaagcaagggaagctcttgcagacttggatgagaaagcggaaaaggttagcaaaaagattgagctagcaaaaaaatctcttgagactaagaatgagtcagttttgaagttgaaagctctttatgatgaagcagttaaatcacttggtgagtcaaatgagcttactcgacgcctggcaacagagtattctaataatcatgatgagttccaggcgctctatgagtcaactcaagaacaaatcgaagagttgaaagactacaacgaacaaatctctgaaggagaagaaactcttatccttgcgattcaaaataaaatatcagatctggatgataaaatcgcagaagcggagaaaaagcttgctgactcacaaaatggagagggtgtagaagactattggacttcaggtgatgaggacaaattagaaaagcttcaagcagagcaagatgaacttcaagctgaattggatcaattgttggatgaagttgatggac

SEQ ID NO: 6471 - DNA, 600 bp, Streptococcus pneumoniae
  misc_feature (1)..(600): tiling:Spneumo1:WAN024DRS; WAN0240R7-con |pspA||AAF27715.1 |||1385 bp|PspA|S.pneumoniae||AF071820|ORF|000
atgaataagaaaaaaatgattttaacaagtctagccagcgtcgctatcttagggactggttttgttgcgtcttcgcctacttttgtaagagcagaagaatctccacaagttgtcgaaaaatcttcattagagaagaaatatgaggaagcaaaagcaaaagctgatactgccaagaaagattacgaaacggctaaaaagaaagcagaagacgctcagaagaaatatgatgaggatcagaagaaaactgaggataaggcaaaagcggttaagaaagttgatgaagaacgtcaaaaagcgaatttggcagttcaaaaggcgtatgtagaatatagagaagcgaaagataaagctagcgctgagaaaaagattgaagaagcaaaacgaaaacaaaaagaagcgaacaaaaaatttaatgaggagcaagcaaaagtagttcctgaagcaaaggagttagctgctactaaacaaaaagcggaaaaagctaaaaaagacgccgaagtagctaaggaaaaatatgataaggcagttcaagaggtagaagtagagaaaaataaaatacttgaacaagatgctgaaaacgaaaagaaaattgacgtactt

SEQ ID NO: 6472 - DNA, 900 bp, Streptococcus pneumoniae
  misc_feature (1)..(900): tiling:Spneumo1:WAN024DS7; WAN0240RL-con |pspA||AAF68102.1 |||740 bp|PspA|S.pneumoniae||AF255549|ORF|000
atgaataagaaaaaaatgattttaacaagtctagccagcgtcgctatcttaggggctggtttggttacggctcagcctactttggtaagagcagaagaagcccccgtagctagtcagtctaaagctgagaaagactatgatacagcgaagagagacgctgagaatgcgaaaaaagctttagaagaagcaaaacgtgcgcagaaaaaatatgaggatgatcagaagaaaactgaggagaaagcgaaagaagaaaaacaagcttctgaagcggaacaaaaagcaaatctgcagtatcaactaaagttgcgtgaatatattcagaaaacaggcgacagaagtaagattcagaaagaaatggaggaagctgaaaaaaaacataagaatgcaaaagcagaatttgataaggttagaggaaaggtgattcctagcgcggaagagttaaaagagactagacgaaaagcagaagaggctaaagcaaaagaagcagaacttactaaaaaagtagaagaagctgagaaaaaagttactgaagccaaacaaaaaktggatgcwgaacrtgctraagaagtygctcytcaagcyaaaatcgctgarttggaamatsaagttcakaractagaaamagmwctcaaagagattgrtgartctgactcagaagattatgttaaagaaggtctccgtgyycctcttcaatctgaattggatgytaagcaagctaaactatyaaaacttgaagagttgagtgataagattgatgagttagacgctgaaattgcaaaacttgaaaaagatgtagaagatttcaaaaactcagrsggtgratattctgcattatatcttgaagctgcagaaaaagatttagytgctaaaaaagctgaattagaaaaaactgaagctgac

SEQ ID NO: 6473 - DNA, 993 bp, Streptococcus pneumoniae
  misc_feature (1)..(993): tiling:Spneumo1:WAN024DRU; WAN023ZVB-con |pspA||AAN37734.1 |||621 bp|PspA|S.pneumoniae||AF490266|ORF|000
atgaataagaaaaaaatgattttaacaagtctagccagcgtcgctatcttaggggctggtttggttacgtctcagcctactgttgtaagagcagaagaatctcccgtagccagtcagtctaaagctgagaaagactatgatgcagcagtgaaaaatgctacagctgcaaaaaaagcagcagaagacgctcaaagagctttagatgaagcaaaagctgcgcagaaaaaatatgacgaggatcaaaagaaaactgaggagaaagcgaaagaagtaaaaaaagcttcggaagaagaacaagctgcaaatctgaaatatcaacaagagttggttaaatatattaaatatacacgtgaaaataattcaacaaaaagaactgaagctgagaaagtaatgactgcagctaagaaagagcatgagaaaaaacaaacagaacttgctaaagttctcgcaaaggtaattcctagcgcggaagaattagaaaatactagacaaaaagcagasraagctaaagwaaaagaaccagarcttactaaaaaactagaagaagctaaagcaaaatcagaagaagctgagaaaaaagctactgaagccaaacaaaaagtggatgcagaacatgctraagaagtcgttcctcaagctaaaatcgctgagttggaaaatgaagttyakaractagaaamagawctcaaagrgattgatgaatctgactcagaagattatgttaaagaaggtctccgtgctcctcttcaatctgaattggatgccaaacrarctaaactatcaamacttgaagagttgagtgataagattgatgagttagacgctgaaattgcaaaacttgaaaaaratrtagaakatttcaaamamwcmaaygstgagcaarctgaacaataccktgctgcagctgraraagacttagytgctaaamaagctgaattagaaaaaactgaagctgaccttaagaaagcagttaatgasccagaaaaaccagct

SEQ ID NO: 6474 - DNA, 1000 bp, Streptococcus pneumoniae
  misc_feature (1)..(1000): tiling:Spneumo1:WAN024DRQ; WAN0240R2-con |pspA||AAF27710.1 |||1247 bp|PspA|S.pneumoniae||AF071814|ORF|000
atgaataagaaaaaaatgattttaacaagtctagccagcgtcgctatcttaggggctggtttggttgcgtctcagcctactttggtaagagcagaagaatctcccgtagctagtcagtctaaagctgagaaagactatgatgcagcagtgaaaaaatctgaagctgctaagaaggcttacgaagaagctaaaaaagctttagaggaagcaaaagttgcgcaaaaaaaatatgaagacgatcaaaagaaaactgaagagaaagcagagctagaaaaagaagcttctgaagcgatagctaaggcaacagaagaagttcaacaagcgtacctagcttatcaacgagctagcaacaaagccgaagcagctaagatgatagaagaggctcagagacgcgaaaatgaggcgagagctaaatttactactattcgaacaacaatggtagttcctgaaccagaacagttagctgagactaagaaaaaagcagaagaagctaaagcaaaagaaccaaaacttgctaaaaaagcagcagaagctaaagccaaattagaagaggctgagaaaaaagctactgaagccaaaccccaagtggatgctgaagaagtcgctcctcaagctaaaatcgctgaattggaaaatcaagttcatagactagaacaagagctcaaagagattgatgagtctgaatcagaagattatgctaaagaaggtttccgtgctcctcttcaatctaaattggatgccaaaaaagctaaactatcaaaacttgaggagttaagtgataagattgatgagttagacgctgaaattgcaaaacttgaagatcaactcaaagctgttgaagaaaacaataatgtagaagactactctaccgaaggtttagagaaaactattgctgctaaaaaaactgaattagaaaaaactgaagctgaccttaagaaagcagttaatgagccagaaaaatcagctgaagagccatcgcaaccagagaagccagctgaag

SEQ ID NO: 6475 - DNA, 800 bp, Streptococcus pneumoniae
  misc_feature (1)..(800): tiling:Spneumo1:WAN024DRV; WAN0240R5-con |pspA||AAF27713.1 |||1506 bp|PspA|S.pneumoniae||AF071817|ORF|000
atgaataagaaaaaaatgattttaacaagtctagccagcgtcgctatcttaggggctggttttgttacgtctcagcctacttttgtaagagcagaagaagctccacaagttgtcgaaaaatcttcattagagaagaaatatgaggaagcaaaagcaaaagctgatactgccaagaaagattacgaaacggctaaaaagaaagcagaagacgctcagaagaaatatgatgaggatcagaagaaaactgaggataaggcaaaagcggttaagaaagttgatgaagaacttcaaaaagcaaatttagaacttcaaaaagctcatgtaaaatatcaaaaagcacaaagagaacttagtgaaagtccagacagaagaaaatctgctgctagaaagaaattagctgatgcattatcttatattggagaggtagagttaaaacaaaaagaggcggaagcgaattttaatacggaacaagcaaaagtaattcccaaagaaactgagttagctgttactaaacaaaaagcggaagaagctaaaaaagaagcagaagtagctaagaaaaaatttgataaggcagctcaagaggtagaagtagcgaagaaagaagtagaggctaaggaacttgaaattgaaaaacttcaagatgaaatttctactttggaacaagaagttgctactgctcaacatcaagtagacaatttgaaaaaacttcttgctggtgtggatcctgatgatacagaagctatagaagctaaattaaaaaagggggaagctgagctaaacgctaaacaagctgagttagc

SEQ ID NO: 6476 - DNA, 500 bp, Streptococcus pneumoniae
  misc_feature (1)..(500): tiling:Spneumo1:WAN024DS9; WAN0240R1-con |pspA||AAF27709.1 |||1186 bp|PspA|S.pneumoniae||AF071813|ORF|000
atgaataagaaaaaaatgattttaacaagtctagccagcgtcgctatcttaggggctggttttgttacgtctcagcctacttttgtaagagcagaagaagctccacaagttgtcgaaaaatcttcattagagaagaaatatgaggaagcaaaagcaaaatatgacgctgctaagaaggattacgacgaagctaaaaagaaagcagcagaagctcagaaaaaatatgaggaagatcagaagaaaactgaggagaaagcagagaaagcaaaagcagcttctgaagagatagctaaggcaacagaggaagttcaaaaagcggtcctagattatataactgctatcagaaatcacaacgaaagtgggaaaaaatccgcagaagaagctgagaaaaaagctaaggaacgcgaaactgctgcgaggaagaaatttgatactattcaaacaacaatagtagttcctgaaccagatgagttagctaaaactcagaaaaaagcagaaga

SEQ ID NO: 6477 - DNA, 1000 bp, Streptococcus pneumoniae
  misc_feature (1)..(1000): tiling:Spneumo1:WAN024DRZ; WAN0240QU-con |pspA||AAF27702.1 |||1187 bp|PspA|S.pneumoniae||AF071806|ORF|000
atgaataagaaaaaaatgattttaacaagtctagccagcgtcgctatcttaggggctggttttgttgcgtctcagcctactgttgtaagagcagaagaagcccccgtagctagtcagtctaaagctgagaaagactatgatgcagcgaagagagacgctgagaatgcgaaaaaagctttagaagaagcaaaacgtgcgcagaaaaaatatgaggatgatcagaagaaaactgaggagaaagcgaaagaagaaaaacaagcttctgaagcggaacaaaaagcaaatttgaaatatcaactactgttgcagaagtatgttagcgaaagtgatggaaagaaaaaaaaggagattgagaaacaagcagacgcagctaagaaagaaaatgagataaaaaaagcagaacttaataagattagacaagagatcgtggttcctagttcgcaacagttagaagtaactagacgaaaagcagaagtggctaaagcaaaagaaccaggacttcgtaaaagagtagaagaagctgagaaaaaagttactgaagccaaacaaaaatkggatgctgaacgtgctaaagaagttgctcttcaagccaaaatcgctgagttggaaaatgaagtttatagactagaaacagaactcaaagggattgatgaatctgactcagaagattatgttaaagaaggtctccgtgctcctcttcaatctgaattggatgccaaacgaactaaactatcaacacttgaagagttgagtgataagattgatgagttagacgctgaaattgcaaaacttgaaaaaaatgtagaatatttcaaaaaaaccgatgctgagcaaactgaacaataccttgctgcagctgaaaaagacttagctgataaaaaagctgaattggagaaaactgaagctgaccttaagaaagcagttaatgagccagaaaaaccagctgaagaaactccagctccagcaccaaaaccagagcaaccagctgaacaaccaaaac

SEQ ID NO: 6478 - DNA, 500 bp, Streptococcus pneumoniae
  misc_feature (1)..(500): tiling:Spneumo1:WAN024DS5; WAN0244Q1-con spr0121|pspA|1590 2165|NP_357715.1|128356..130215|+|1860 bp|Surface protein pspA precursor|S.pneumoniae|R6|NC_003098.1|ORF|100
atgaataagaaaaaaatgattttaacaagtctagccagcgtcgctatcttaggggctggttttgttgcgtctcagcctactgttgtaagagcagaagaatctcccgtagccagtcagtctaaagctgagaaagactatgatgcagcgaagaaagatgctaagaatgcgaaaaaagcagtagaagatgctcaaaaggctttagatgatgcaaaagctgctcagaaaaaatatgacgaggatcagaagaaaactgaggagaaagccgcgctagaaaaagcagcgtctgaagagatggataaggcagtggcagcagttcaacaagcgtatctagcctatcaacaagctacagacaaagccgcaaaagacgcagcagataagatgatagatgaagctaagaaacgcgaagaagaggcaaaaactaaatttaatactgttcgagcaatggtagttcctgagccagagcagttggctgagactaagaaaaaatcagaagaagctaa

SEQ ID NO: 6479 - DNA, 600 bp, Streptococcus pneumoniae
  misc_feature (1)..(600): tiling:Spneumo1:WAN024DS8; WAN024159-con |pspA||AAL92495.1 |||321 bp|pneumococcal surface protein A|S.pneumoniae||AY0 82390|ORF|000
atgaataagaaaaaaatgattttaacaagtctagccagcgtcgctatcttaggggctggttttgttgcgtctcagcctactgttgtaagagcagaagccgctccacaagttgtcgaaaaatcttcattagagaagaaatatgaggaagcaaaagcaaaagctgatactgccaagaaagattacgaaacggctaaaaagaaagcagcagaagctcagaaaaagtatgaagatgatcagaagagaactgaggagaaaggcgcgctagaagaagaaacttctaggaaggtaaacgatgctactttagaggtacaaaacgcatatgtagaatatggagaagctaataagaaaaaaggtaaggaccgtgagaaaaaattagcagatgcgcaaaaaaaaatagatgaagcgcaggaaaaactaaccaaagctaaaaatgagtttcaatctgttcgagcaatggtagttcctgagccagagcagttggctgagactaagaaaaaagcagaagaagctaaagcagaagaggcagtggctaaggaaaaatctgataaggcagctaaagaggtagaagtagcgaaaaaaagagtagaggcagaagaagct

SEQ ID NO: 6480 - DNA, 900 bp, Streptococcus pneumoniae
  misc_feature (1)..(900): tiling:Spneumo1:WAN024DS6; WAN0240QY-con |pspA||AAF27706.1 |||1279 bp|PspA|S.pneumoniae||AF071810|ORF|000
atgaataagaaaaaaatgattttaacaagtctagccagcgtcgctatcttaggggctggttttgttgcgtctcagcctactgttgtwagagcagaagaagctcccgtagctagtcagtctaaagctgagaaagactatgatgcagcaatggaaaaatataaagctgctgaggaagacttaraaaaagcagaagctgctcagaggaaatatgacgaggatcagaagaaawctgaggagaamgmgaaagaaacagaagaggcttctgaaagacaacaagctgcaactctgaaatatcaactaaagttgcgtgaatatcttaaatatatacaagaaaaaaataaggaaaaaatagctaaagctgagaaagaaatgaacgaagctaagcaagaggaagacaaagaaaaggcaaaccttaataaagttctcgcaaaagtaattcctagcgatagagaattagaaaaaactagacaagaagcagaaaaggctaaaaaaaatataccagaacttaagaaaaaagtagaagaagccaaacaaaaagtggatgcagccaaacaaaaagtggatgcagaacatgctaaagaagttgctcctcaagctaaaatcgctgaattggaaaatcaagttcataggctagaacaagatctcaaagakattratgagtctgaytcagaagattatgttaaagaaggtytccgtgctcctcttcaatckgaattggataccaaaaaagctaaactattgaaactkgaagagttgagtggtaagattgaagagttagacgctgaaattgcagaacttgaagttcaacttaaagatgctgaaggaaacaataatgtagaagcctactttaaagaaggtttagagaaaactactgctgagaaaaaagctgaattagaaaaa

SEQ ID NO: 6481 - DNA, 450 bp, Streptococcus pneumoniae
  misc_feature (1)..(450): tiling:Spneumo1:WAN024DRW; WAN0240R3-con |pspA||AAF27711.1 |||1224 bp|PspA|S.pneumoniae||AF071815|ORF|000
atgaataagaaaaaaatgattttaacaagtctagccagcgtcgctatcttaggggctggttttgttgcgtctcagcctacttttgtaagagcagaagacgctcccgtagctaaccagtctcaagctgagaaagactacgatgcagcaatgaaaaaatctgaagctgataagaaagaatacgaagacgttaaaaaagttttaggtgaagcagaagctgctcagaaaaaatatgaagacgatcagaagaaaactgaagagaaagcagagaaagcaaacgcagcttctgaagagatagctaaggccaacagaggaagcttcaaaaaagcggtcctagataatataactgttatcagaaattcacaacgaaagtgggaaaaatcccgcagagaagctgagaaaaaagctaaggaacgcgaaactgctgcgaggaagaaatttgatactattcaa

SEQ ID NO: 6482 - DNA, 102 bp, Streptococcus pneumoniae
  misc_feature (1)..(102): tiling:Spneumo1:WAN024BVP; WAN023QKE contig_1309_3||||2117 ..2218|+|102 bp|Glimmer 2.02 orf prediction|S.pneumoniae|6 70|WAN01UEAG|ORF
atgaataagctagcaaaaagagctctaaaatcgagctctgtgaatgaaggtaagaaacttttcattcgattttttcaattattagaaattaagctttcaatg

SEQ ID NO: 6483 - DNA, 1122 bp, Streptococcus pneumoniae
  misc_feature (1)..(1122): tiling:Spneumo1:WAN024FML; WAN023ORC pne76_11||||8239..936 0|+|1122 bp|Type 35B1 capsule operon, Glimmer 2.02 orf pre diction|S.pneumoniae||WAN01UCDM|ORF|000
atgaataatagagatggaaaatattatattggactagtaatgaaaattattactaacccattaaagatattaaagataaaaaaacgccgagttctgctgaaaagttataatgcagagactatttcttgcaatccaaagtatatttataacgaacttaagaaaattaatcgttatgaattagtgtgggtgttgaaggagccagaaaaatatcctgatgtaaaagcagtaaagtatatgtcgttaaaatggttgtattatatagttacttctcaatacgtaatatcaaatacgggatttaacttttggcttcctaaaaagaaaaaacagatatatataaatacatggcatggaggtggagcatacaaagatagtgacaatttaaacaatattagtaaagcgcaggtcaagcaaattaaaaagagtgcagagttggaagattattttatatcgagttgtgcagtctttacaaaggaatatgcaaagaaaagagtaggatttaaaggtaaaatactagagatagggacacctcgaaatgattttttaattcgtaatcaagcagatgatggtctaaaaaatagtataaaaaatcgacttggaatagatgataattgttctatagtaatttatgctccaacatggcgagatgatgcttcagctattgaagagatagattatgaaagcttactagaaagtttaagagagacatatccaaaagtgagtattttagtacgtggtcatcatcttcaaaagaatttgattgatataaagaattcaaatattgttaatgtatctgactatgatgatatgcaagaattattattaatttcagatttattaattactgattactcttcaacaatatgggatatgattcatggagggaaaaaagtattattatatactcctgatttagatgaatatttaaaatatcgaggatttcatgtagatataaaagaatggaacattccatactttaaaactaacgaagagttgattgcatatatctcttcaaattattttaaaaatatggaagaaatgatagagaaccataagattagatttggaagttttgaacacggaaatgcaactcaaaaaatagtggaattattagaagaaggtaat

SEQ ID NO: 6484 - DNA, 234 bp, Streptococcus pneumoniae
  misc_feature (1)..(234): tiling:Spneumo1:WAN024BSV; WAN023XXI AL449942.1_2||||2089. .2322|-|234 bp|Glimmer 2.02 orf prediction|S.pneumoniae||A L449942.1|ORF
atgaataatgttgttactacacaaatttctattcaacttagtcaagagttaaattctttattaaatgctattgttgaagaaaataatacaacaaagactgactttattagacaagctgttatagagaaaattgaagatatgtatgatattaaggtcgctgatgaagcttataaaaaatgggttgaatgtggcaaaaaagctatctcacatgaagaaatgatgagacgctatggc

SEQ ID NO: 6485 - DNA, 342 bp, Streptococcus pneumoniae
  misc_feature (1)..(342): tiling:Spneumo1:WAN024BV3; WAN023Q9Q contig_1258_14||||484 0..5181|+|342 bp|Glimmer 2.02 orf prediction|S.pneumoniae| 670|WAN01UEG8|ORF
atgaataccaaccccctccgagcggaccgtagtggaccccatagagtagcctttgagaagaataagaagattatcttaaagacaagaaacacttgtgggatatgtggccagcctgtagacaaagacctgagatatcctcatccattaagtccagtcattgaccacatcgttccagtaaataagaacggacatccatctgacattgctaacttgcagttggcgcattggcaatgcaatagacagaagtctgacaagctatatgctgatgagaagacaaacggaacaaaggtcattggtaataggaacttaccacaaagtacagattggtttaagtataagggt

SEQ ID NO: 6486 - DNA, 248 bp, Streptococcus pneumoniae
  misc_feature (1)..(248): tiling:Spneumo1:WAN0249EF; WAN02480H-rc TIGR4.IG_2135||||2 130389..2130636|-|248 bp|Between SP2209 (+ strand) and SP2 210 (+ strand)|S.pneumoniae|TIGR4|NC_003028.1|IG-rc|010
atgaatacctctttgtataagatatctttagtataacgctatccataccatttctatatatcatagatcaaagtcattaattttcaagtgattgcgttcagctaattctagtaaataggtgtgaaggaaaacgatatcaggtttcgtttgaattgcttcattttctagtatattttggtacgcctctttttattttgctcgctaaagtagttgtgagaatgtcaacgaaacgctgtattattcattgt

SEQ ID NO: 6487 - DNA, 284 bp, Streptococcus pneumoniae
  misc_feature (1)..(284): tiling:Spneumo1:WAN0249EE; WAN024E3H-rc R6.IG_2221||||2007 946..2008229|-|284 bp|Between spr2014 (+ strand) and spr20 15 (cycK) (+ strand)|S.pneumoniae|R6|NC_003098.1|IG-rc|100
atgaatacctctttgtataagatatctttagtataacgctatccataccatttgtaaaatatagaaatcctatcgaagcgataggatttctatatatcatagatcaaagtcattaattttcaagtgattgcgttcagttaattctagtaaataggtgtgaaggaaaacgatatcaggtttcgtttgaattgcttcattttctagtatattttggtacgcatctttttattttgctcgctaaagtagttgtgagaatgtcaacgaaacgctgtattattcattgt

SEQ ID NO: 6488 - DNA, 1944 bp, Streptococcus pneumoniae
  misc_feature (1)..(1944): tiling:Spneumo1:WAN024BQG; WAN023PHZ pne34_17||||14421..16 364|+|1944 bp|Type 17F capsule operon, Glimmer 2.02 orf pr ediction|S.pneumoniae||WAN01UCHZ|ORF
atgaatagaggtattttggtatcaataattgttcctatctataatcaagaagaatatttaaatatttctttacctactttgaagcagcagacgtataagaatttagaatttatcttagtagatgatggttcgacagatagtagcaaacagataattaacgagtatcttaatgcagacagtagatttaaatatgtgtataaagaaaatggaggcttagtatctgctacaattgcaggggtgaaagaggcttcgggagactatcttgcttttttagatccagatgataagttaggattggactatatagaaaacttcatcaaagaattggattgtgactatgatttcatagcggcaggttttttctatgacgatggtaagttaattaaaccatattacttgaaagagaattcagtcttgactcaatcagatataaagaagttaagaacggactttttgtcggatacaggcgggttagctatttcaaatcgtgtttttatctcaagatggaataaattatataagacaaatcttgtaaaagaaattgtcaaagagtttcgtaaatttgaaatggttagcttgggtgaagatactatttttacatttttacttctacaaaaggctcaattagggaaaaccattgccctatctaattcttatttttataatgtaggtaatcctaactcaatgatgaaggaaggagctattataaactatgttgaaaaatgtaggatagcatatcagagtcttactaagctacttatagaaagaaatttgactaatgaaatgagttgtcaactttactatttcttagtgctttctttcttcaatcgcttagagaaagaagatatggagtctttcaaaaaaatatatgatattttgaaaagggattcactatttttaaaaattctattttcacttcaaaagaaagcaaataaaaaacaaaaacttcagctattgatgattcgtctatgcaaaagtgggaaacagtacttaaacattaaaagagtagtttcaaaactccatgcaaaacttaagttgttctgtcagaattttaagttagtgaggaaacagatttttaggaagaatctagttcaattagcttattttttaaagttccaacaacaacggaaaattggttttgatgatatgaaggtgtttttaccgataattgaagaaagattaaaagaagatttattggaatttcaaaaattagaagtattaccttcaacaattgaaaagaatatttttgttttttggtgggatggctttgatgagatacctgaaatagtaagtatttgcttagcatctttaaaaaagaattatccagagtgtaagttacatctaatttataaagataattatcaagattacactaacattcatccaaatatattgaatgatttcaataaaggaaaaatttctgttcaaactttttcagatgtactccgatttaatctactaaaaaataacggaggaatgtgggttgactccactatatattttactaagaaaatagatttattccaagaattggaaaaatgttcattttcaacattgaatttttcaactagtaaagatttcatgtcctataagggagaagtttgtacatggtctggatttatgattgcttctcataaacagggacgcctagttagtatcatcaatgaactttttgaacgctactatttaaagtataatacattttctacatacttctttatagatattgttttcatgctctgtaaagtttacaaactagatgacaatgtgttagatcaaatcattttgaaggatggaaacatgttccaattagcttcagttttagatcagccgttcaataaatctctattgccatacatagaaaaactcccgcaaaaactatttttgcattacgaggataataatttggataatttttacaaatactttaaagaaatagtgagt

SEQ ID NO: 6489 - DNA, 840 bp, Streptococcus pneumoniae
  misc_feature (1)..(840): tiling:Spneumo1:WAN024BVD; WAN023QDJ contig_1276_2||||1603 ..2442|+|840 bp|Glimmer 2.02 orf prediction|S.pneumoniae|6 70|WAN01UEEO|ORF
atgaatagattagtgaacgatagcaggaagtgtgaaattttattatttaagatttctattattgtagtgtcagttatagtattagtaatgtcaatagtgggtgcatattattttaaaaattgtctttgggacaaggaaagtttaaatttgacactcactttagacactctctttgcagtttttattactttctttagtttttcaaatgataaatcaagcaatatttttggaatatctccaaatgaaattataaggacacagtctgaagtgtatcaatttttatttacaaaatcttttgcaactctattaatagtgacaaatttgttatccattattcattattttggagccaaaaatttaatagtttcttttaatgaaacttatcctcgtattcaatccagtgttggtatcatgtggctaccactgtttggtattctgataatctattttatttggctcttaatagagggattaaaatatatcagaaaaataaattatattattcaaaatagggaaataatctatttttattcgcaggtaaaagttgtagataaacttactgattctgaatcgaaaaaatacggtgaatatattgatttgtacgaatcgtgtcgtcagaacaatttaagtgttctacttaactttcttcaaaattcggatgataaacgaggagttattgctagtaactcagtgagaattatgtttgaatctttggataaagcagaccaaattgcggccctgaatatttgtagaaactatgtagcacgagaaaatgttttaaataaagaagatgcagaaaaattgttaaatgaaattgataaaaaacttgaaattagcaga

SEQ ID NO: 6490 - DNA, 552 bp, Streptococcus pneumoniae
  misc_feature (1)..(552): tiling:Spneumo1:WAN024BRJ; WAN024141 |cap1F||CAB05924.1||| 552 bp|galacturonic acid acetylase|S.pneumoniae||Z83335|OR F
atgaataggattataaaaaatattgttggtttacttcgtgcaaatatttgcttgatattattaaaagtgtgtcgaaacaaggatcttacttttcattattttttaaaatttggaaagaatgtaactgtcgaacaggaatctaatgctaaattaatcttaggaaaaaagattagagtaaacgccgggggagtattgaaagttagaaaaggagcaaaactcaagatttctgatgatgtatttttgagtaataattgtatgatagcttgtcgtaaatacatagatattaaatctggagtaaaatgtggtcctggagtacttatatatgatcatgactatgatgttagtgttccaggtggattgaaagcaaaaaaatttaagacggccccagttatgattggagaaaatgtttggattggagctaacagcattgtcttgaagggagtgagtattggtgagaatagtgtggttgcagcaggaagtgttgtaacaaaggatattccagctgatactatatttattcagaaacgtttatcaagggagatgaaattatga

SEQ ID NO: 6491 - DNA, 300 bp, Streptococcus pneumoniae
  misc_feature (1)..(300): tiling:Spneumo1:WAN024BZP; WAN0243O7 spr1484||15903527|NP_ 359077.1|1460808..1461107|-|300 bp|Hypothetical protein|S. pneumoniae|R6|NC_003098.1|ORF
atgaatagtgatgtattagagtttctgagaacagagaccgctgaaaaaattagtctttatataagcgaggctaatagattggagggcgatgtaactctactcgcacctaattctcaagatttggaagatattaaaaatgctatgctttccaattctaatctcggattaaaagttgcgagactggatgtgatgaagaaaatagcatatgcttctacaagaaatcattatttaacaggggctacgatttttggggatatttcgaaaggaacatacaattgtgatcctaaaagttatgtctaa

SEQ ID NO: 6492 - DNA, 234 bp, Streptococcus pneumoniae
  misc_feature (1)..(234): tiling:Spneumo1:WAN024BR8; WAN0240CV |||AAC98430.1|||234 b p|excisionase|S.pneumoniae||L29324|ORF
atgaatataaaatatatatctgtccgaaaattccattgcagaatggcgtataaaaaaggaattctaaaaagatgggatggtttaaataaatatacattgaacagatggattaaagaaatgcgagaaaacagaacattttccatgtatgtaattaacccaacccataaacttgttttcattaatctagaaggatttgaaagtttcttaagatggaagcaaaagcggacaaaataa

SEQ ID NO: 6493 - DNA, 348 bp, Streptococcus pneumoniae
  misc_feature (1)..(348): tiling:Spneumo1:WAN024BNG; WAN023OBE spn019g01_59||||37664 ..38011|+|348 bp|Glimmer 2.02 orf prediction|S.pneumoniae| 23F-1|WAN01UCLR|ORF
atgaatataattgctattatcataattgttatttttgttggaggtgtcataggtgcagtaattgataaccaaaaaaaatctccagagcagagagaacgtgaacttgaaacatttagagcaaatcaagagaagaaaaagcaagagaaaaagcagaatatcatcacttgccctaattgtaagtctaaagatgtgactttcttacaacaagacaaaaaagccttttctgttggaaaggccgttggtggagctgttttgactggtggagttggtgctttagctggatttgctggcaaaaaaggaaataaacagtggcattgccaaaattgcggaaatttctttgaaacgaaa

SEQ ID NO: 6494 - DNA, 342 bp, Streptococcus pneumoniae
  misc_feature (1)..(342): tiling:Spneumo1:WAN024BOB; WAN023OCH spn019g01_16||||16199 ..16540|-|342 bp|Glimmer 2.02 orf prediction|S.pneumoniae| 23F-1|WAN01UCLR|ORF
atgaatatcgccattaaagttgacttgcagaaagctaaacagaaactttcgaacgaatccatgacaagaggaaagattgcagtcgctagcaaaatcttgctagacaatgagcaatatatccccttgaggggtggagagttgagagcttctggccgaattgttggacaaggtgatgctgttgtctatggaacagtttatgctagagcgcaattttacggatcaaacggcattgtcacctttaggagatataccactccaggtacaggaaaacgatgggatcaagttgctactagtaaacatgctgaagaatgggctagagcttttgtgaaaggaatgggactt

SEQ ID NO: 6495 - DNA, 384 bp, Streptococcus pneumoniae
  misc_feature (1)..(384): tiling:Spneumo1:WAN024CDV; WAN023MCZ 314406_159a||||73210. .73593|-|384 bp|EGAD orf prediction|S.pneumoniae|R6|NC_003 098.1|ORF|100
atgaatatgccccattcttgtaccttctgccaggataaagggctctactctttcccccaactcataaatgtcctgcgccgcaagagcctccgtcactccgataatgcgtccatcttctcgaatatcccatgtggaaactggcttatctcgatagagttcaatgccatttccctccaaatcttccaagtaaatagcttcactgtaaccatggtctgcaccgccgacaagaggaatttgcaaatctgtcaggtgtttcaagacatcagccaaagccttgcgtgtgggcaagagaatggccaaatggtaaagaccataatgttccctcacttctccgctctcttgtgcttgaatcagctgtaccaagacttttccaccaaggcctag

SEQ ID NO: 6496 - DNA, 495 bp, Streptococcus pneumoniae
  misc_feature (1)..(495): tiling:Spneumo1:WAN024CG2; WAN023OBY spn019g01_36||||27550 ..28044|-|495 bp|Glimmer 2.02 orf prediction|S.pneumoniae| 23F-1|WAN01UCLR|ORF|001
atgaatattaaagcattgattaagaagtatgaagaattgtggaatgaacacagccctttttatgaacctgtaccttatacttcaatggttgaactttttttgaaagagttgaaacaactagacgaaccagaaaaagtcaaagttccgcggtttgtggctgaatggattgaggaagctagaaaagcttgtaaagacgtggtagaattattcgaatttgatttcacgaacgatgaagttagaaaatggtttatgcaagaaagaccatttgatttagtagctagagcatggcttgatggctacgaggtcgaggaagagaagcggtatttggtgactttaaaaaataggcagcctttggtcaaatcgcaatcagggagtactctttattttagtcaagatataacagctaggaattataaaggtactcaaaaagaactagaagacgcaaacttcggctgggtgtttgattgtgaaggaattgagattgaggaggtggag

SEQ ID NO: 6497 - DNA, 960 bp, Streptococcus pneumoniae
  misc_feature (1)..(960): tiling:Spneumo1:WAN024FTM; WAN023ONL pne81_16||||10216..11 175|+|960 bp|Type 39(1) capsule operon, Glimmer 2.02 orf p rediction|S.pneumoniae||WAN01UCEV|ORF|000
atgaatattagtgtagttattcctgtatataatgttgaggattaccttcattatgctatagacagtttagtaaatcaaactcataaaaattttgaggttttactaatcaatgatggttctactgataattcaggaaatttatgtgataaatatgctcaagaatatgattggattagggtatttcataaagagaatggtggcttatcagatgcgcgtaattatggtgtattaagagcaactaatgagtggatattctttttggatccggatgattatatagagtactttacatttgaattattgagtctaattcaagagaaatatcaagctgatttgatttcaacaaaagttcaaactacaaatgaatatgaaaaatttagcaaggaacaatttaatttagaatctagtaaaatagttacaaaagaagaagcactagaattaatgttggaagataaagttgctacggtatctgcatgtgcaaaactttataaaaaacaaattttagaaatgagaccatttcctgtaggaaaaatctacgaagacttttttgttgtagctgaacatttaagattagctgaacaaatagttatttcacctgttattacgtatcattactatcgtcgtcctggtagtatcgtacaatctcagtttacagataagcgatttgatttttttgatgcaggtgagtataacagaagtcaaataaaacaattttatgatggtaatagcgtagaaaaggcgttaaatttaaaaattgttcaaggttctttttctatatctgaagctgcagctcttacggacacaaaggctttaagaaatattgttaaaaaaataagttcattatactggagtataatctttaattctaaagtttctataaaatttaaatttaaatataattggtttttacttactcccaatttatactgccgtataaaaaaattgttaaaaaggagtata

SEQ ID NO: 6498 - DNA, 612 bp, Streptococcus pneumoniae
  misc_feature (1)..(612): tiling:Spneumo1:WAN024BQI; WAN023PI1 pne34_15||||12605..13 216|+|612 bp|Type 17F capsule operon, Glimmer 2.02 orf pre diction|S.pneumoniae||WAN01UCHZ|ORF
atgaatattcgttataaacttcaatttcgacgatgtaaaaaagagtggcgaaaaaagaaccttcataatgaaacaacgcctcgaactatgttcccaatagaattggtttcagtaggggaaaaaacctatggtggtttgtatgttttgtccttcaataaagagtcaaaattaaaaattggaaatttctgctccattgcaccagaggttgcttttattctcagtgctgatcattatatcaatcagttctctacgtatccgttcaaatctaaagtatttgatcaaggtgatgaaggggtttcgaaaggggatattatcattgaggatgatgtatggattggttttcgttctacaattctttcgggagttacaattggtcagggagctattgttggagcaggatctgtggtaactaaatcagttcctccttacgctattgtaggtggagttccagcaaaagtgatttcttatcgattcgaaacagagattcgtgaagaaatgaaaaaaattgacttttcggagttcaaattagagaaatttaaaaaggttacggaagagttgtatcagccaatttcgtcaataagacaaattaataacataaatgaaaaattgaaa

SEQ ID NO: 6499 - DNA, 1983 bp, Streptococcus pneumoniae
  misc_feature (1)..(1983): tiling:Spneumo1:WAN024BZS; WAN0243WC spr1191|appD|15903234 |NP_358784.1|1186915..1188897|-|1983 bp|ABC transporter AT P-binding protein - oligopeptide transport|S.pneumoniae|R6 |NC_003098.1|ORF
atgaatcaaacagttttagatgtaaaaaacttaaaaactgaattcatcactgataaaaaagcatttccgattattaaagatgtaaacttcactttggaaagagggaaagttttagggattgttggtgaatctggatgcggtaagagtgtaacagtgaatacagtgttaaacttattacctaaaaatggacgcattgctgaaggtgaaatcacatatttcgatgaagataagccgatagagcttcaaaaattaaagcaatatggtaaagaatttcgaaagttacgtggtgaaaacatatcaatgattttccaagatccaatgtctgcattgaatccagtatatacaattggtaatcaaattactgaagtccttcatgaacattatgacatttctaaagaggaggcaaataaacgtgctatagaaatgttagaaaaacttggaattcataatgctgcagaacgcatgaatgactatccacaccaatttagtggagggcagcgtcaaagaatagtcatagcgattgcaatggtatgtaatccagatattctaattgcagatgaaccaacaactgcccttgatgtaacaatccaagcacaaatacttgatttacttgatgatttacgtaaagagcatggaacttctattatcttaattactcacgatttaggcgttattgctcaaattgcggatgaagttgcagtgatgtatgctggtgaagtcgttgaagttggaactgtagctcagatctttgatcaacctaaacacccgtatactcgttctctattaagatctattcctaatcctgaaaatatggataaaaagctacatgttatccaggggagcgtaccttcaatttctgaaatatctgaaaaaggatgcagattcgcaaatcgtattccatggttagaaaaagaacatcatgaagaagaacctcaattgcatgatttaggtgacggacattttgtaaggtgttcttgctataaacatttctttttcgaagataaggaagaagaaacattagcggaaaaacatgtaggtaatgttgttttagaagtaaaaaatattaaaaagtactactatcctaagaagcaactattcaagccactaggttctccgttgaaagcacttgatgacgtatctctagagttaagaaaaggaactactattggtatcgtaggagagtctggaagcggtaagagtacgattgcgaaatcattaatgaaactccatgatattacagatggtgaaatcaatattgatttgaatgggaaaactcaaaatatttatggaattaaacgtaaggaagatttggatttccgtaagaaagttcaaatggtattccaagatccttatgcatcattgaacccaactaagaaaatttataattcatttgatgaaccgatgattgtccataatattggaaacaaagaggaacgctttgaacgtatgaaagaagccttgaagatggtaaacgtgccagttgagtacttggagcgttatcctcatgaattttcaggcggacaacgtcaacgtttatgtattgctcgtgccctttgtatgaaaccagaaattttaattttagatgaacctgtttcagcattagatctatctgtacaagcgcaagttttgaattatcttgttgaaatccaaaataaagaagatttgacttatgtatttatttctcatgacctaggtgttgtgaaatacatgtgtgactatctatatgttattcataaaggacgtattgtagaagctggttctcgagaagatatctacaataacccaatgcatatttacactaaaaaactattagctgctattccagaagttgattatcacttcaaagaggcattggcaacaaaacgtaaagaaaatgaagttgaatttaaagcacagtaccatgaattttatgatgaagatggtcgtgcttatgatcttaagcaggtttcaccaacacattttgtagcgttaaaaccagaatag

SEQ ID NO: 6500 - DNA, 291 bp, Streptococcus pneumoniae
  misc_feature (1)..(291): tiling:Spneumo1:WAN024BR7; WAN0240CO |||AAC98437.1|||291 b p||S.pneumoniae||L29324|ORF
atgaatcgtaaagaattatatgatgataaattacagctagattatttttcagattcttatttacagtttgagtcagatttttacaagtattcagctttagatataccattaacatttatcacagatgatattttacgcacaatggctatgtctcaaaaacattattttaaacttaacaaaagtaaatctttagacggtcgtgatcattactttgttttttctatcaagatgaacaaagacagtagtggtattagacagtatgaatatcagagacattgttttaatttgtaa

SEQ ID NO: 6501 - DNA, 744 bp, Streptococcus pneumoniae
  misc_feature (1)..(744): tiling:Spneumo1:WAN024GHX; WAN0240FD |cps19aF||AAC78668.1| ||744 bp|putative N-acetyl-mannosamine transferase Cps19aF |S.pneumoniae||AF094575|ORF|000
atgaatgagagaattcaaatattaggaattactatagatccattaacgatgaaagaaacagtggatgctgttgaacagtatgttttaaagaagcaccctttgcacttgatgggagttaacgcggataaaattaatcagtgctatgaagatgagaaaatcaaaaaaatcgttaatgaatcaggaataattaatgccgacggtgcttcagtagttttagcgagtaagtttttaggaacaccagttcctgagcgagttgctggaatagacttgatgaaacatttactagagttgtctaatgaaaaaggatactcggtctacttttttggagcaaaagaagacgttttacaagatatgttaaaaatttttgaagaaagatatccagctctaaatgttgttggctatagaaatggatatttttcgcctgaagatgaaaaacatattcaggaagatattaaagagaaaaaaccagattttgtgtttgtaggaattacttctcctaagaaagaatatattatccaatcattcatggataatggaattaatgctgtgtttatgggggttggtggaagttttgatgtactatcagggcatatcaaacgagctccattatggatgcaaaatgctcacctagagtggttgtttcgtgtggcaaatgagcctaaacgtctctttaagcgttattttgtagggaatgtttcatttataagaaaagttttaagagcgaaaaggggatataaactttga

SEQ ID NO: 6502 - DNA, 132 bp, Streptococcus pneumoniae
  misc_feature (1)..(132): tiling:Spneumo1:WAN024ET7; WAN0243H0 spr1744|IS1381-trunca tion|15903786|NP_359336.1|1716958..1717089|+|132 bp|Degene rate transposase (orf1)|S.pneumoniae|R6|NC_003098.1|ORF|10 0
atgaatgatgaagcaagtaaacaattaactgatacacgatttaagcgtcttgttggtgttcagcgtaccacttttgaagagatgttagctgtattaaaaacagcttatcaaaaaagtcggacaagctggtaa

SEQ ID NO: 6503 - DNA, 294 bp, Streptococcus pneumoniae
  misc_feature (1)..(294): tiling:Spneumo1:WAN024CEN; WAN023RVR contig_1609_53||||391 03..39396|-|294 bp|Glimmer 2.02 orf prediction|S.pneumonia e|670|WAN01UDCD|ORF|000
atgaatgatttactccttatcccagtaatttttttagcagtaggaggaattctcattcttttatggagactctttcttattgccagtggacttttccttattggttttatcagttttcttattttcgtggaggtctatggaatttatctgttctttactgaacctagtttatattttgatgatatcagacaacatggtttaactagttttacggctgtgtactttttcatcaatctgatgttggttctaggatttagttggcgcttcattaactccataaataagcataaaatg

SEQ ID NO: 6504 - DNA, 288 bp, Streptococcus pneumoniae
  misc_feature (1)..(288): tiling:Spneumo1:WAN024CEO; WAN023O6T spn029h04_94||||79470 ..79757|-|288 bp|Glimmer 2.02 orf prediction|S.pneumoniae| 23F-1|WAN01UCO3|ORF|001
atgaatgatttactccttatcccagtaatttttttagcagtaggaggaattctcattcttttatggagactctttcttattgccagtggacttttcttgattggttttgtcagtttccttattttcgtggaggtctatggaatttatcttctctttacagaaactgaactttacacggcagatttagctcaaaatggattatttggttttacgactttctttatcatctttaatttagttttacttgctttagcatgctgggcaggatacaagtggaagaggggatat

SEQ ID NO: 6505 - DNA, 207 bp, Streptococcus pneumoniae
  misc_feature (1)..(207): tiling:Spneumo1:WAN024BSY; WAN023XY2 AL449941.1_23||||2256 2..22768|-|207 bp|Glimmer 2.02 orf prediction|S.pneumoniae ||AL449941.1|ORF
atgaatggtcatcaaaacatcttgaacaataacaagattttcatctatacaaaaatagttatactcaacaacaatcaaactaaagaaccaaataaatatagcttaacatactttttttggatttcaaacaatactgataaaattaataataaatctgtggtagtacttcccatccctactgctttccaattttataatattattaat

SEQ ID NO: 6506 - DNA, 732 bp, Streptococcus pneumoniae
  misc_feature (1)..(732): tiling:Spneumo1:WAN024BU5; WAN023Q2L contig_1220_12||||658 4..7315|-|732 bp|Glimmer 2.02 orf prediction|S.pneumoniae| 670|WAN01UEKO|ORF
atgaatgtcggagaaagaataaaacaacgtcgaaaagcgttgaaaatgtctgcggacgagcttgcagaaagtgtaggtgtctctcgttctactatttttaggtacgaaaaaggagatattgaaaaagttggacctgaagtattaaaaaaaatcgctgacaaattaaatgtatcacctggagacttgatgggatgggaagacaatcaacaagaattgaaaatcccaacctccccgttggttcacaaaattactgaaaaggttgtcaaactatcaactccgagaaaacaaaaggttcttaactacgctaacgaacaattgaaagagcaaaataataaagtaatcacaattgaggaaaagctttttgaatatcgtgtttttgaaaaactttcagctggtactggattctcatacttcaacgatgggaactatgacactgttttttacgacaaagacctagaccacgattttgcttcttgggttttcggagattccatggagcctaagtacatgaatggagaggtcgttctcatcaaagaaacaggttttgactacgatggtgccatttatgcagttgactgggatggtcaaacttatattaaaaaagtctataaagaaaaagacggtcttagactcgtctctatcaataacaaatataaagataaattcgcaccatttgaagaagatccaaggattattgggaaaatagtcggaaacttcatgccaattgaaaat

SEQ ID NO: 6507 - DNA, 114 bp, Streptococcus pneumoniae
  misc_feature (1)..(114): tiling:Spneumo1:WAN024BKT; WAN023MXO spn174d08_17||||14262 ..14375|-|114 bp|Glimmer 2.02 orf prediction|S.pneumoniae| 23F-1|WAN01UCNU|ORF
atgaattccctccttttctatatcattcgtaaaaaagaaaaaagatcaggaaaattcctaatcttcatgtgtgtttacttgattttcttagctagtaaggtcgcaaagcgtagt

SEQ ID NO: 6508 - DNA, 201 bp, Streptococcus pneumoniae
  misc_feature (1)..(201): tiling:Spneumo1:WAN024BR2; WAN02401O |atpC||CAA81447.1|||2 01 bp|Adenosine Triphosphatase|S.pneumoniae||Z26850|ORF
atgaatttaacatttttcggtctttgtcttgcctgtatgggtgtatctcttgcagaaggtatgttgatgaacggtttgttcaaatcagcagctcgccaaccagacatcatcccacaattacgtagcttaatgatcatggggattgcctttattgaaggaacgttcttggttaccctcgtcttttcattcgtcatcaaatag

SEQ ID NO: 6509 - DNA, 1137 bp, Streptococcus pneumoniae
  misc_feature (1)..(1137): tiling:Spneumo1:WAN024BRK; WAN024142 |cap1E||CAB05923.1||| 1137 bp|galacturonosyl transferase|S.pneumoniae||Z83335|OR F
atgaatttacaaaagaaaaaaattatgttaataactaatcatgacgatgatatctattgttttcgaaaagaagttatagagtcactagttgagtatgggtatgaagtgctagtgtcatgtccttatggagataagatagagttgatgaagtctattcaatttgagtatgaagatattactattgatagaagaggaataaaccctttaaaagatattcgtctatttcttagttatataagattattgagaaaatatagaccggatatagacttgacatataccgtgaaaccaaatgtatatgctagcctagctgcaacaattttaggaataaaatatataaataacgtaacaggtttaggtagtgtcttaacaatgggttcttgtgtaagaagcctggtgttattactgtttagaatttcttttaggaaatcaaattgtgttttttttcaaaatgaatataatatgaaaatgttaaaaactcttggcttgattttgggtgactctaagctgatacctgggtcaggagtgaacattgaaaagtatcctgtgcaacagtatccaaatggtggaaatggaattcaaggagaaacaatcgtttttaattttattggtaggatattaaaagaaaaaggtatagatacttatctggctgctgcccaaattattaagagtcgatatcccaaaacagagtttaatattattggctttatagaaccgacagagagtaattatgaacttaaaatttgtgacttagaaaaaaaaggaatcgtttattatttgggacaacaaaaagatgcgatacctcatattacccgttcccatgcaattatccatcccagtgtgtatggtgaaggaatgagcaatgtattactagaaaacgctagttcaggacgtgttttaattacgacagataatccaggttgcaaagaaattgttaaagatagagagacaggctatatatttcaagggggaaatgttgaggaactagtctctatattggaagtttttttaggtctagaaaatgaaaaacgaaaagagatgggacttcaagggagaatgtatatagagcaatatttttctcgtcaaattattatagatgcttatttagataaaataaaaggagctttagatgaatag

SEQ ID NO: 6510 - DNA, 891 bp, Streptococcus pneumoniae
  misc_feature (1)..(891): tiling:Spneumo1:WAN024BMC; WAN023NTV spn068b06_23||||21760 ..22650|+|891 bp|Glimmer 2.02 orf prediction|S.pneumoniae| 23F-1|WAN01UCUD|ORF
atgaattttgtgttatctagtttatcagaaggtttgttgtggtcgattgtggcgattggggactacttgactttccgtattttggatattgcggatatgactgctgagggagcctttcctctgggggcagcagtcgttgtatcacagatacaggcaggggcaaatccttggcttgcgactttacttgctttgctggcaggtatggtagcaggtcttgtatcaggaatgctccacaccaagatgaaaatcccagctctcttgacagggattgtgaccttgacagggctctattcaatcaatattaaaatcatgggcagtgtacccaatctttccttgggagattctgcaaccgtctttaaacagttggcgagcttgggtctgacaaatgaaggagctgttttctcacttagtttggtctgttttttacttgtttgtttggtcttgacccttttgatgaaaacagagattggcttggtcttgcgttcgactggggataatatcccgatgagtgaggccaatggagtcaatgtagacaccatgaagattgttggttacatgatttcaaacggtttgattgctctatgtggttccttgtttgcccaaaatgatggattttcagatgtgacttctgggacaggaaccattgttgttggtttgagctcggtgattattgcggaagtcttgatacacgacttgaccattggaggccgcttattatccatcggaatcggtgctattgtttaccgtttgattattttaaatatctatgaaattccaaatctagatcaaaacttggtacgtctctttaatgcaatcttgctcgctttggttttatttgcaccagaattgcaaaagagattaaagattcgtggtctgaaattgagaaatgaa

SEQ ID NO: 6511 - DNA, 420 bp, Streptococcus pneumoniae
  misc_feature (1)..(420): tiling:Spneumo1:WAN024BY6; WAN023S0J contig_1622_3||||754. .1173|+|420 bp|Glimmer 2.02 orf prediction|S.pneumoniae|67 0|WAN01UDAK|ORF
atgacaaaaactatcgaactaccagactattatgaacccgattggggaaatgcaagatacggaacattagaagaactaaaagagctgttgctctataagcgtatcgtggaatgggataaagattttttactacttgaagatgggacaaaagtcactattgaaatgtctgaaagtgattgctgtgcctcagcaggtggggagtttcaaaatgtttcacttgacgctgtaatcactaatgttgaaattggagaacaggaagaaatccctgaccattggggagcgggttataaaaacaaagtaaccatcttccacaatcaaaatcctgtagctatcgctaactgtgaggcagaacataatggctattattatagcgtgggctctctagtgattggtgatattcatttcccagtagtccatgct

SEQ ID NO: 6512 - DNA, 207 bp, Streptococcus pneumoniae
  misc_feature (1)..(207): tiling:Spneumo1:WAN024BYT; WAN023S1D contig_1623_3||||1101 ..1307|+|207 bp|Glimmer 2.02 orf prediction|S.pneumoniae|6 70|WAN01UDAF|ORF
atgacaaaatttgttaaaatacaatcttgttatagaggaaatactgaagatgagcttatcaacatagatgatattagtcgcatctgtctaggccctaatatcttgtttttaagaacaccttacaatttaggagaacaccatatttctatcactcaaaattcagtagataaacttttgaaagtattggatattattggggaggtggag

SEQ ID NO: 6513 - DNA, 1512 bp, Streptococcus pneumoniae
  misc_feature (1)..(1512): tiling:Spneumo1:WAN024BOG; WAN023OCO spn019g01_8||||9426.. 10937|-|1512 bp|Glimmer 2.02 orf prediction|S.pneumoniae|2 3F-1|WAN01UCLR|ORF
atgacaaagataatgactttcaacggagttgatatgtctaaattctttcgtataacagatattatccgccctatcgggaacaagaggagcgtatcaactgataacgctcccttattgggcgtgaatatccaacaggttaagattggagaaaaagagcatatcataaaatttgacatcaaaaccacaaatgcaattgaaatggaacaattaaagcatgatttggcaggcattctaaacgttttagagccagtaaagattacttatggcgatgagccagacaaatactatatggggttgccggtagatgagattactccagaaaatttgacaagatggttccagcgctcagagttaaaaataataattcctgatggagtggctcacagcacgactttaaaaaattttgatatcgatacaaatgaaacaagcgcaccggataggatagtatttaatttaacaaatacaggaacagagccagcttatccaattattagaattaaacacaactcagagaatggatatattggagttgttaacaacagagcggcgtttgagttaggaaatcgtgaagaggctgatactgaaaaatacagagactctgaaacattgatagattatagagggactaatattctaaaaggatttcaaaatggcactaaaggagtagctgtaacaaatgataataaggagcgtcttgttggcactttgagtacaacaagtatgtgggggcgtaatcatatcgaattatcaaaccgtggtacagttgaaaaaaatcgaaataatgcacaaagtttgacatgggctattcctgttgatagtagtggagaagttggttcattgaatgactatctgctttggagacaagtttttatggcagcagtcgctaatcaatatggtttcataaaggttactgtatcggatacagacggcaatttcttgtatggggtggaaacttacaaacgctatcagacacttgattgtgagtatagttttttcaccactgacggcaaaggtggatacaagtttatcaaatggtggtattttactgggacaggggctcaagtaggcaaacttgatccatttagcgcggaaaagggctggtcagagttaaaaagaaacgatgatagagttcaagtgttttttgatggctctcattatgactttattattccggagataaaagacaaaaaatcagcaaaaatccatatcacgcttggagcactcagagactggcctcttgtatcacatatgtatgttgatgagttcatgtatagaaaagactttgtgacaaagagtagagatattcctaatcgctatccaataggttcaaatgttgtaatcaacagtgaggacgatagtgtgtatattgacgggatatctaaagtaagcgaagttgtagacggttcacattggccagcaattcctccaggaaaatctcaactagagttgtatttttcacgttttgttaagaaaaaaccaactgtaacaatcgaatttgaagaaaggtggata

SEQ ID NO: 6514 - DNA, 318 bp, Streptococcus pneumoniae
  misc_feature (1)..(318): tiling:Spneumo1:WAN024CY9; WAN023JZ3 83050_613||||353085.. 353402|+|318 bp|EGAD orf prediction|S.pneumoniae|TIGR4|WAN 01UC25|ORF|010
atgacaaagtacttgagaatcttatgctgggtatctttgtcaatcaccgttttattaacatggagggtcaaaacacggtggggcgataggattgacaaaatttggtttttggcaatttttgaaaggatgaggcctcgaataatcttgagtccacctgcagttgatccagcagagccaccgattgccatgaggaaaaggaggataaactgggagaagaggggccagttggtaatatctccatatccaaaaccagttgttgtaatgatgttggaaacctggaagaaggtcatttcaaagctctttgaaaaccctgggtag

SEQ ID NO: 6515 - DNA, 81 bp, Streptococcus pneumoniae
  misc_feature (1)..(81): tiling:Spneumo1:WAN024BNM; WAN023OBL spn019g01_51||||34777 ..34857|-|81 bp|Glimmer 2.02 orf prediction|S.pneumoniae|2 3F-1|WAN01UCLR|ORF
atgacaaataccatttacaaaaaattactcaatgtttttaaaggaggaaagaaatatgccaaattgggcagaggggactct

SEQ ID NO: 6516 - DNA, 789 bp, Streptococcus pneumoniae
  misc_feature (1)..(789): tiling:Spneumo1:WAN024FTT; WAN023PC0 pne43_10||||6508..729 6|+|789 bp|Type 20 capsule operon, Glimmer 2.02 orf predic tion|S.pneumoniae||WAN01UCHC|ORF|000
atgacaaatattaaaattatagttgcaactcataagagttttgagatgccgcaaaataaagaattgtatttcccagtccatgtggggtgtgaaggaaaagatgatttgggatatcaaggagataatactggggaaaacatttcccagttaaacccttattactgtgaattaacaggtttatattgggcatggaagaatctagattgcgattatcttggactagttcattaccgccgatatttcacgaagaaaactcaattttataaagaaaatctaaaaattgatgaagtaattttaaatcaggaagaaattgaattgcttttgagaaaaggagatataatagttcctaaaaaaaggaaatattatattgaaactctatgttctcattatgcacacacgctagatgctagccatctagatttggctagaaaagtcattgagaagcaacaacctgaataccttgattcatttgataaagttatgaaacaacgtagtggctatatgtttaatatgtttataatgaaaaaggaattagcaaataattattttgaatggctgtttccgattttagattgtatgtttgatcagattaatctttcagagttaactgcatttgaggcacgtctttttggtcgtgtaagtgaactattattcaacgtatggctagagaagaatttgtattctctagtagaagttccatttatgtatttggaaaaggttaatctagtagaaaaagggaaatcgtttttaatggctaaattttttggtaagaagtatggacagagtttt

SEQ ID NO: 6517 - DNA, 564 bp, Streptococcus pneumoniae
  misc_feature (1)..(564): tiling:Spneumo1:WAN024BMX; WAN023O7G spn029h04_71||||58207 ..58770|-|564 bp|Glimmer 2.02 orf prediction|S.pneumoniae| 23F-1|WAN01UCO3|ORF
atgacaaatgccaaagaattcgcattaactgctcacaaaaatcaaacaagaaaagggaaaatcacaccttattcatttcacttatttttggtcaataatatattagaaaccctaacagaagatcctcatattatagctaccggatggttacatgatactgttgaagataccgatgtcagtcttgaagatattaaacaagaatttaatgatgaaatttattcatatatgtctttggaatctgaagataaatcaattaaagattggcaaactcgtaaagagcttcaattggcaaaatttcgagaagcagcagaagatgagtcgctaagaaaagttttacttgtaactttttctgataaattagcaaatttaatggaactgtatcaagattacttaataattggtggtttactatgggaccgttttaattcaaaggatccgaaaaaacaacgatggtactttaacgagttttataaaatctttaaagataaccaagatttattttcgaaaaacaaagatattttaaataactataaagaaattttaaagcttttattttataacaat

SEQ ID NO: 6518 - DNA, 735 bp, Streptococcus pneumoniae
  misc_feature (1)..(735): tiling:Spneumo1:WAN024BNT; WAN023OBU spn019g01_41||||29264 ..29998|-|735 bp|Glimmer 2.02 orf prediction|S.pneumoniae| 23F-1|WAN01UCLR|ORF
atgacaacagaaaatcttaaatcagcattggaatacgcagtagaactaaatgagcatggtttggaaattttaacagctgcagatggaacagagtattatgatgccaacaaattcaacctcaaagaacttgaccctaaacgctatcctaaaactctggagctatcaaccttgacaagccttgttgactatctcaaaacagacctaaacaatttgaaaaaccaacgcttgattgtagcagttgagaaaaacgatgaggtttgtgtgtggtctgaaaatgatgagatcgaacatcgcacattgcttgttgatgttaaggcacgcatcccagagttatcttttggccgtttcctatcattggaacagttcaatatcatgttgcaatcaaactttattgacgataacgatcgtggcacattgctagaatttgctagcgcattgaaaattgagaatggggctgaaattgaagataatggagtatctcaagtagcaacagttaaaacaggggtggcaagccttgctaaaggcaaagcacctaatccggttacattgcgcccatatcgtacatttagcgaggttgagcaaccggcaagcctatttgtctttaggattgataagcaagccaatatggctttatttgaggcagatggtaagcgttgggtagctgatgcagtaggaaacattgcatcctatctaaaagagcaactagcagaccaaaaacatatcacagtattagca

SEQ ID NO: 6519 - DNA, 2001 bp, Streptococcus pneumoniae
  misc_feature (1)..(2001): tiling:Spneumo1:WAN024BN6-5; WAN023O7N spn029h04_64||||479 85..51986|-|4002 bp|Glimmer 2.02 orf prediction|S.pneumoni ae|23F-1|WAN01UCO3|ORF
atgacaacattagattttaaaactttatttaaagaagaatatgataaacttaataaacaacagaaaaaagcagttgatacggtggaaggacctgttatggttattgctggtcctggaacaggtaaaactcaaattctgtcacgtcgtgtcgcaaatattttaacaaattatcatacaagttcagaagaaattgtctgtttaacatatacagaggctggtgcatcagaaatgttggatagattagaaaaattaattggagaagaagggcgtaaggtaagagtatcaactatccatgctttttgtagtgaattaatcttaagaaactctgaaattttcggtggacaaccaaaaattatctcaacagcagccaaatatgaaatcctaaaagaaattatggatgaatatgttatagaaggaaatcctctttataaaaactctggtaaacgttattctgctaaagaccagctattagaacttttttataaaatgaaacgcgaaaacctgaacaaagaggattttgaaaaagagatagatgaatactttaaaatgattgatttatccatacctggagatgatttgtatagtaaattcaaatatgctagaaattctaagtctaaagacaagaaagttggagattataaagataaggctataaacgaattaaaagaaaatactcaaaagttacttgctggagttgaaattattgaaaagtatagctctgatattagcaatcacaattattttgactttgatgatatgattttatggacaattgaaaagttggaggaaaatgaaggttttcaaagaagtgtatctgatactataagatatttatttgttgatgagtttcaggatacttcagttgttcagaataaacttgtagatttactagtaaaaggaaaagacaatccaaatatttttgttgtaggggatgatgatcaaagtatttatcgtttccaaggagtaagtgcgaataatattcgagattttgataagaagtataaacctacgaaaatagtacttgatgaaaattaccgttcttcccaagctatcattgacgcttcaagacaactaatcagtcataatccaagagaagagaaacttcttattgcagcaggcgctaacaaagattatgactatcaattgccaatcttgaaatcctacgaaaatgcaaaagctgaaatgtttggtgtgcttactgagattaaagagctgattgattcgggtgtttctcctaatgaaataggagtcatttatggaagaaattcttacggagaagagtttgcgaagattcttcgtgataaaggtattttcgttcaaatgaaagaaaataaagatttatttagtgaacctttcttcaaaaaaattgtagctattttaaaatatctttgtaaaccatcaagagatgttagagaacttcgaaaaattgtatattttgatttctttgaggtagtactatcacaaatcgtaatgatacggaatctaaagaaagatgaaaaaatttcaatccccactatagcagaaattgatcaaaaattagaaatcattcgaaaaaaagtaaatcaatcatcaaaatacctatcgcctatgtatgtccttagcgatgtattaaaatctttaagtatcgatgagtatattatgaagtcaaaagagaaatatcatttggtttctgttttaaatgaactttacaagttaatgttgatggaatgccacatccatcctaaattgactgtaaaaggatttttaaatcaattatcagctttagaagaaatgggaattagtctaccaattgaagatatctcaggttctccaagtaactgcgttcaattaatgacagctcatggttccaaaggactcgagtttgatcatgtgtttataatgaaatgcaatgatggaaagaaaaagagtgaagcttggccaggaggtgaaaataattcaggtagattctcttatccaccaagtttaaatggaaaagatgaaaatgaatctcaactaaaagaa

SEQ ID NO: 6520 - DNA, 151 bp, Streptococcus pneumoniae
  misc_feature (1)..(151): tiling:Spneumo1:WAN024BQW; WAN023ZZC |||AAA16799.1|||151 b p||S.pneumoniae||L19055|ORF
atgacaacatttttaggaaaccctgttacctttaccggatctcaacttcaagttggcgatactgctcatgatttttcactgaccactcctaacttggagaaaaaatctttggctgattttgctggcaagaaaaaagtcctcagtgtgatcc

SEQ ID NO: 6521 - DNA, 801 bp, Streptococcus pneumoniae
  misc_feature (1)..(801): tiling:Spneumo1:WAN024BMB; WAN023NTU spn068b06_24||||22666 ..23466|+|801 bp|Glimmer 2.02 orf prediction|S.pneumoniae| 23F-1|WAN01UCUD|ORF
atgacaagtttgttaacacttgaaaatattcacaagacatttgaagcagggacggtcaatgagaaccatgtcctcaaaggattagatttagaggttgaagagggagattttatctctgtgattggtggaaatggagcaggaaaatccactttgatgaatatcttggctggcaatctatcggtggacgaaggggaccttctactggcagggaaatccattaaaaatctgagtgtcagaaagagagccaaggatattgcccgtgtttttcaagatcctaagatgggaacagcttctcgtttgacgattgaggagaatatggctattgccttgagacgcgggcagaagagagggcttggttggggcgtgaaggagaaggatagaatccagttccaagaggccttgaaggagttgaatattggtcttgaaaaccgcttaaaagtagatactcaatatctctcaggaggacaaagacaggctttgactctagtcatgacagatctgatgaaaccaaaacttttacttttggatgaacatactgcggcacttgacccgaaaaccagtcaaatggtgatggacttgacgcaaaagattgtggagcaccatcagtggacgactttgatgattacccatgatatgaatcatgcgattgagtacggcaatcgtctcattatgctctatcaaggcaagatagtggtggatgtcaagggagaagagaaaaagcatctgacagttgaagaccttatgcatctcttccagaaaaatagtggccaaagtctggtcagtgatgaattagttttggga

SEQ ID NO: 6522 - DNA, 267 bp, Streptococcus pneumoniae
  misc_feature (1)..(267): tiling:Spneumo1:WAN024BOK; WAN023OCS spn019g01_4||||1985.. 2251|-|267 bp|Glimmer 2.02 orf prediction|S.pneumoniae|23F -1|WAN01UCLR|ORF
atgacaatgttaaaagtcactaaaacacgtcagctagtaactgaatttttcgcacaagatggcgaccaacaaaaattggtcaaaactactgtaatcaacacagacaataaagctgtttcaacaatatctgaaacgctgcatgacccggatctgtacgctaacaatcgtatcagtatgcgtaagcatgagcaagagttacgagaaatgcgctataagattgaagatgccattttggcagagctggaagcagattctgagcataaggaa

SEQ ID NO: 6523 - DNA, 606 bp, Streptococcus pneumoniae
  misc_feature (1)..(606): tiling:Spneumo1:WAN024BXQ; WAN023RVK contig_1609_60||||470 80..47685|+|606 bp|Glimmer 2.02 orf prediction|S.pneumonia e|670|WAN01UDCD|ORF
atgacaattcaagtaacaccacttaagcaatatcttgaaaatattcaagtgctagctcctgataaaactgagaaacaagttcaggatctatttaaaactatcattttagaaaatgttgatttcaacggtaatgaagagatgttgacttatctatctgataaagctcccaattttgaaaaacaacatcgttctcgtaattttatcgttgaagaaactgaaacaaataacatcataggattctttagtttatctctcaaagttgttgatatttctgatttagagaaatccttaaaaaagaaactcgtcctaaaagggaaaagtcccaaaaatattgattatctccctgtgttacttatcggtcaattcggcaaaaacacaaagctaaataaactatcaggacaagagttatttgaaattgtaattcaaaaaattgaagaatttcgagcaattgtaggaactcagatggtatttttagatagtatcaatcatcctaaagtcattcaattttatgaacagttcggatttgttgcttacagtcaattgattaaagatgatcatcaagtaagttatcagcctatggcattaaatatgtcgctctataaaaaa

SEQ ID NO: 6524 - DNA, 621 bp, Streptococcus pneumoniae
  misc_feature (1)..(621): tiling:Spneumo1:WAN024BKW; WAN023MY7 spn172a11_22||||13654 ..14274|-|621 bp|Glimmer 2.02 orf prediction|S.pneumoniae| 23F-1|WAN01UCP9|ORF
atgacaattgaccttttgaacgtttcaaaaagtttcggctcaaagaagatctttacagacttaaatttaatatttgaatctggaaaaagctatgcattgattggaggttctggctccggtaaaagtacccttcttaatattataggaagattagaaaaaattgacagtgggaatgttttagttgataaacaagatatttggaagataaaagaaagaactttttttaaaaatactgttggatatgtatttcagaattattctttaatagataacaaaacagtgtatgataatctgagccttatcactaaagacaaaaaaacaataactgacgtacttgaaaaagtaggactgtcaagtgactatttacaccaaaaaatatatgaattgtctggagggcaggctcaacgtgtagctattgccagaatgttaatgaaaccacgtaaaattatcttagcagatgaacctacaggagctttagatggtgagattggaaaagaaattattcgtttactattgaatgaaacagctgaagataaatatgtcattatagcgacacatgatccagctgtctataacgaagttgatgtgataattgacatgaaagatatagggtataaggta

SEQ ID NO: 6525 - DNA, 858 bp, Streptococcus pneumoniae
  misc_feature (1)..(858): tiling:Spneumo1:WAN024BVV; WAN023QLX contig_1315_21||||161 08..16965|-|858 bp|Glimmer 2.02 orf prediction|S.pneumonia e|670|WAN01UE9N|ORF
atgacaatttacgaggctagaggtttccagagtaatcttgtctatccatttgataagattgagccgttccagtacattgaacgctttaagcctttggtagtccctgaaagtgctgatccggaggaatacaaaagaacccaggcgccatattgtttaagtggtaaggttatgccggagaaaaacgggagttacaaacgaaacaactccagtctaatctatcgggatttgattttccttgattatgacgatatacaagggacgtctgagagcttcatagaagccgtttctagcgccttgtttggctactcttatatcttatacccgactatcaaacatagcatagaaaagccccgttttcgccttgtggtgaaatctaacaacgtgatgaacgaggcaacctataagcaggtagtaaaagagattgctgacaagattgggctaccctttgacatggccagtttaacctggtcacaactccaagggctaccagtaacaacaggcgacccagcaacttatcaaaagattgtagagcatggacttgattatccagtccccaaggttgaaccaagagtgaagcaagaaactccggagcgttacaagccaaaaccaagcggtcagaaatctatgaccatgagaatcattgacacgcttttcaacggatttggagacgaaggagggcgcaacgtagcgctgacacgctttgtgggattactcttcaataagtgggttgattgtgacctagagaccgcctatgaactgacaaagatagcaaatagcgtgacagttgaaccattgcctattgaagagctagaccgcagttttagtagtatagcacgggctgagtatagaaagagaggt

SEQ ID NO: 6526 - DNA, 225 bp, Streptococcus pneumoniae
  misc_feature (1)..(225): tiling:Spneumo1:WAN024ETL; WAN023JNH 83813_1181||||667942. .668166|-|225 bp|EGAD orf prediction|S.pneumoniae|TIGR4|WA N01UC25|ORF|010
atgacacgatctgccacctcacgggcaaatcccatctcatgtgttacgataaccatggtcattcctgacttggctagatcttgcataacagccagaacttctccaaccatctcaggatctagggctgaagttggctcgtcaaagagcaaaacatctggttccatagccaacccacgcgcgatggcaatccgctgttgctggccacctgacaaactctgtggataa

SEQ ID NO: 6527 - DNA, 375 bp, Streptococcus pneumoniae
  misc_feature (1)..(375): tiling:Spneumo1:WAN024BJP; WAN023HUF ||||||375 bp|Incyte o rf contig SPN2C0529 13351-12977|S.pneumoniae|23F|WAN023HUF |ORF
atgacactcgctaaactctgcgaagaatatcaagtagaactttgtctcttcgacggttcaaactggcacaatagcggtttctacaatccagacacaaacgtgctcgctattgaccacaacttgactcctgaacaacaaatccaagtcgccctacacgaacttggacacaaagaccacacacgctcagagcaccagaacgcccgtctacgctgtgaaaacgaagctgataggaatatgatccatcatctcgtaaaagacgctctagaaaacttagacgaccccacagagtttgattacctcaaattcatgtcttactacaatctaaaaaccatgacaaatgaaatcatggttaaagaagagtatttagcattagta

SEQ ID NO: 6528 - DNA, 258 bp, Streptococcus pneumoniae
  misc_feature (1)..(258): tiling:Spneumo1:WAN024GLL; WAN023M1C 314267_812||||431225. .431482|-|258 bp|EGAD orf prediction|S.pneumoniae|R6|NC_00 3098.1|ORF|100
atgacagggcagaaatgggccaattacggaattcatagagaccacagattttcaaggtttcatagactctcgtttcaatttcctgctcgtccacacctcgcaaacggagtcccagagccacctcatcaaaaatcatattggttgaaatcatttgattgggattttgcagcacatagcctactcgttccgcccgctctgcaacagaatctccttttatatcctgtccttcccaaagatagcggccttcagtctggataa

SEQ ID NO: 6529 - DNA, 408 bp, Streptococcus pneumoniae
  misc_feature (1)..(408): tiling:Spneumo1:WAN024BZU; WAN0243WF spr1188|cdd|15903231| NP_358781.1|1184308..1184715|-|408 bp|Cytidine deaminase|S .pneumoniae|R6|NC_003098.1|ORF
atgacagtaattaataaatttgttttaatggagcaagcaaaaaaagttttaaaaaatgcttactgtccgtattccaaatttcctgtaggtgcagcaattttatttaaagatggtaaagtaattacaggagcaaatatagaaaatgtatcgtttggtgtaactaactgtgcagaacgtagtgctattttttatggggcttctcaaggatatagaaaaggagatattcttgcgattgctgttgcaggtgaaactgaagactacttaccaccatgcaacatttgtcgtcaagttatggtagaattttgtgagcctgataccttagtctttctattaaatggtaagggaaacatacttgaattgcgattagaggaattagtcccatattcgttctcaagtctagaaatgtaa

SEQ ID NO: 6530 - DNA, 375 bp, Streptococcus pneumoniae
  misc_feature (1)..(375): tiling:Spneumo1:WAN024BWA; WAN023R0G contig_1407_4||||1503 ..1877|+|375 bp|Glimmer 2.02 orf prediction|S.pneumoniae|6 70|WAN01UDX7|ORF
atgacatggtgcaaccgcctttctataattcataatttaattatacggttaaaacgtagaaaaagcaagggaaacaaaaaaaaagaaaataaaatcaaaaaaagtgttgacaagttatcggttttaccgtatactgtcattgtatccgatttaaacggatatctaaaagaaaggagtgagggctatttgcgtcttacattgaaagcgttgcgggctaatagcaacatgaaacaatcagaggtagcacaaaaattaggaatttctacaactacttggagtaagtgggaaaatggaaaaagttttcctgatgttgcccaagtaaaagagattgaaaaacttttcggtgttgcttatgacgacattatttttttaagc

SEQ ID NO: 6531 - DNA, 501 bp, Streptococcus pneumoniae
  misc_feature (1)..(501): tiling:Spneumo1:WAN024BVX; WAN023QLZ contig_1315_19||||135 68..14068|-|501 bp|Glimmer 2.02 orf prediction|S.pneumonia e|670|WAN01UE9N|ORF
atgacattaaaaacatttaatttcacttacgaatttaaagacctagatactgctatggtggcaggtcacgcgctactgggatatatgactggaacatattgccagcctgcaatctcattgacctacaagaataaagggacgctagtagctgagtacgtggaggataagaaactaaactatatctttaaacgtatttgtgacagtttcaaagactattacaagcaaccagtgaacgatgaagcatttgaagaacgttataaacgggagcgcgtgcttcaactcaaagagtcagaggactttgagagcttgctgaataaggtcacagactacgagctggaactattagactatgctgaacgcttgctttctgataagtctatccctatggactctatgactgcttttggtacgttggaaatgctgggtaatgaaagtattaacctactccaaaaattggacgtagagggcgaatataaaggccttgctgattattctggtcaa

SEQ ID NO: 6532 - DNA, 1053 bp, Streptococcus pneumoniae
  misc_feature (1)..(1053): tiling:Spneumo1:WAN024FO9; WAN023P87 pne52_16||||9366..104 18|+|1053 bp|Type 24B capsule operon, Glimmer 2.02 orf pre diction|S.pneumoniae||WAN01UCCM|ORF|000
atgacattattattaaataaaatatatagacaagatgtagaatcttctctagaaacaatcgtcaatattaatgacttgaatggcaagtcaattttaattactggagcttctggtttgattggttcaagtgtcattgaccagttattattgctaaatgaaataaggaattttaacattaaaattttttgttgtggaagagagtttgaatcattagaaaaacgatttggtagacaaacagagtatttacactttgtgttctatgatgcgactaaagcacctcactttgattttgcagtggactacattattcatgctgctagtcctgctagtcctgaattatacgttaatcagcctgtagaaacaatggctagtaattttctgggcatgtataatctactggaatacgccaaaaatgctaaagtttcaaatctagtttatatctcatctagtgaagtttatggaattagcactagtaataatcctttggacgaaaattatattggaactgttgatcatcttagcgtacggtcttcttatgccagttcaaaaagagctactgaaacactttgtgttagttttgcttccgagtatggaatcaaaataatgatagtaaggccaggacatatctatggccctagtgccaaggactctgataatcgtgtatcatcattttttatgacagaagcgattgctgggcgtgatattgtcatgaaaagtacaggtagtcagttaagatcctattgttatagtttggattgtgccagtgcaattctaagtgttcttctttcgggtggatcaggacaagcttataatgtttccaatccaaattcaattattactataaaacagatggcaacttgcattgcagatacttcaggagtcagagttctttatgatatacctataactcaagagcgaaaacaggaaaatcctatggtaaatgcaagcttagatagtaagaaaattgagtccttgggatggtcaggtctattttcagctgaagtaggcttccatcacacatttagtattttaaaggagttatcaagtgaaaaa

SEQ ID NO: 6533 - DNA, 246 bp, Streptococcus pneumoniae
  misc_feature (1)..(246): tiling:Spneumo1:WAN024BYR; WAN023S19 contig_1623_7||||2086 ..2331|+|246 bp|Glimmer 2.02 orf prediction|S.pneumoniae|6 70|WAN01UDAF|ORF
atgacattatttgatgaaatgcagcaattaagctcagaaagccacgcaaaatggttcgagcgatattttgagaaatataacctagaacaaaaactaaaaacttctgctcaaaaaggttatacaggttatttaatcaatgtttggtcagttagagacgaatacctcaggaatcgattaggagatgaaagaacgtcggcaacgtctacgaaaatccggagcttttggaggtcaacgagtgagatattt

SEQ ID NO: 6534 - DNA, 1461 bp, Streptococcus pneumoniae
  misc_feature (1)..(1461): tiling:Spneumo1:WAN024BV2; WAN023Q9P contig_1258_15||||532 3..6783|+|1461 bp|Glimmer 2.02 orf prediction|S.pneumoniae |670|WAN01UEG8|ORF
atgacattgaaaggtatgggctatctcaggaagaagctagccaattacaaaatgggtgtagacactagatacaatcagtatgctatgcaacacaatgagatagatgttggtattacgataccacctcaaatcaggcaacaatatcgggcggtcttaggttgggctgctaagggtgttgacagtctagcagatcgtttggtctttcgtgagtttgccaatgacgaatttggagcgaatgaaatctttgctcagaacaatccagatgtattctttgatagcgcgatcctttcagcattgattgggtcgtgttgttttgtctacatctcgcaaggggacgatgatgacgctcctcggttgcaggttatcgaggcaagtaatgcaactggtgttctggatcctatcactggcttgctgacagagggctatgccgttttgaaaagggatgacaatggttatgccgtgcttgaggcttattttactagtgatgtgacttggttctatcctaaagatggaaagccgtttgcaatcggaaatccaacgggtgttcctttgttggtaccagtcattcatagacctgatgcggttcgtccgtttggtcggtcacgaattactcgggctgggatgtactatcagagatatgctaaacgaacgcttgagcgttcagatgtgactgctgagttttattcattccctcagaagtatgtgttgggattgagtcaagatgctgaggcgattgatacttggaaagcgactgtatctagcttgctgacctttacgaaagatgatgaaggggacaagccgaatgtggggcaattcaccacatccagcatgtctccttttactgagcagttacggactgcagctgctggctttgctggggaaatggggttgaccttggatgatcttggttttgtttctgacaatccgtcatccgttgaagccatcaaggctagtcatgagaacttgcgtttagctggtcggaaggctcagcgctctctgggctctggtttgctgaatgtggcttatgtggctacttgtttacgagataagtttccatatttgaggaaacagttcaataaaacggttgtgaagtgggagcctttgttcgaggcggacgctaacatgctgaccttgattggtgatggtgttatcaaactgaatcaagcggtccctggctatatggatgctgaaaccatccgtgacttgactggaatcaaaggcgatatgaacgctactccgaaaattgaggaagtagaacaaaaaagtactaactcagaggataagcaaaaaaatagaatcatttctacatatgagattacctctctactgagtaactatcaaaaaggggtactttcaaaagaaaacggaatactcttactaacctcaactggaatgagtaagcaagaagcggaagctatgattaataagactgaattaattgtgaaggaggctgcagatggt

SEQ ID NO: 6535 - DNA, 288 bp, Streptococcus pneumoniae
  misc_feature (1)..(288): tiling:Spneumo1:WAN024CCB; WAN023KAQ 82275_20||||8833..912 0|-|288 bp|EGAD orf prediction|S.pneumoniae|TIGR4|WAN01UC2 5|ORF|010
atgacatttttttcaaaagtcaatatatctcactttttcaacgacaagaaagaggctgataatctaccaacctcttattctgaacccatcactccatcactttttagcttcattcgctttcttagcgactgcaatctggtattcgacttggtcattccccttaccggtacaaccatgagcaattgtagtcgctcctatctgatgcgctatttcaaccaattttttagaaatcagagggcggctcaaggcagataccaagagatacttttgttcataataggcatgtga

SEQ ID NO: 6536 - DNA, 858 bp, Streptococcus pneumoniae
  misc_feature (1)..(858): tiling:Spneumo1:WAN024BMM; WAN023O6U spn029h04_93||||78524 ..79381|+|858 bp|Glimmer 2.02 orf prediction|S.pneumoniae| 23F-1|WAN01UCO3|ORF
atgaccatattatctgataaactaaaagccaagagaaaagaagaaggattctcacaaaaaacactttccgaaggaatttgtgagcaaagccaaataagcaaaatagaacgtggcaactatatgcctgccgctgatttactctataaacttgcaaatcggcttcaagttcccttagattattttttcgatgaacagattgaaatgacttccaatataacaccgtttaagaaattagcagaaaaattacttgaagatcgtaattacgaggatttagaatacctcttaaacttagaaaaagaaaagtctcagtatctatctactgaggatgaattttatcttctatggattcaatcgattatccttttctacttacatagttccaaagatgaagctatcgccagtctagaaaacgctttgccaaagctttcggtcagctcatctgtgtatcttaaactcctcaatactttatctaatttttatttttctgtagggcgtgatgcagaatacgaagaaaataactcacttcttatcagtttgtatcaggaaaaagatttaaaccaccaagagtatttatttggttatattcgagttaaacataatttcgcctattatttacactctaaagggaaggaattagaagccgtccaagaagccttagaaaccattgacttttgtaaacaaaaagagaccagctatcagctggctcctcttttaactatcgttgcgaatgccggaaaagattttttaaagcacgatgaaattcttgactattatttacaggctcgtgatatctgtaaaatatacgaacacaagctcatgatggctaaaattgaccattttttgaaagataaggatagg

SEQ ID NO: 6537 - DNA, 1308 bp, Streptococcus pneumoniae
  misc_feature (1)..(1308): tiling:Spneumo1:WAN024BO3; WAN023OC9 spn019g01_24||||22119 ..23426|-|1308 bp|Glimmer 2.02 orf prediction|S.pneumoniae |23F-1|WAN01UCLR|ORF
atgacctttaatgtccagaagaacatcaaccctcatttcaaatctgtttggatttctagcttaccttataatgttttgaaaggtgggcgtaactcttttaaatcatcggttattgtacttaaactagcgtatatgatgataaggtatattatcgctggagaggcggccaatatcgttgttatccgtaaggtggccaatactattagagacagtgttttcaataaagtttggtgggcattgaacctttttggtatagctgagcagttcacaaaaacagttagcccgtttaaaatcgtacacaaaacgaccggctcaacattttacttttacggacaagatgactttcaaaaactcaaatcaaacgacattggaaatatcatagcggtttggtatgaagaggctgctgaatttaatgaccaagaggactttgaccaatcaaacgtgacgttcatgaggcagaaacacccacgcgccaagtttgtacaattcttttggagttacaatccacctagaaatccatatagttggatcaatgaatggtttgagagcatcaaaacgaataagaactatttagctcactcaagcacctatcttgatgatgaactcggattcgttactgagcagatgctagaagatatagagcgtatcaaagagaatgactacgattattacagatacttatatctaggtgaggcagtgggattaggtaacaacgtgtataacatgagtatgtttcatgctattgatgctttgcctagcgatgataagctgattggcatatcatttgcgctagatggcggacatcaacagtcagcaaccgcttgttgcgcttttggaataacagctaaaggtaaggttatattactagatacttggtattattcaccagctggacaagtggtaaagaaagcgcctagtcagttatctaaagagatatatgcttatatgcgatcagttattgagaagtacagagtacaagccttgcaatacacaatagatagtgctgagggagcgttaagaaaccagatgtttcttgactttggtttgaaatggcatccagtcgctaaacttagaaaagtgactatgattgacagttttcaatctttgcttgctcaaggtcgcttttactatctcaacaccgaaaacaacaagatatttattgaagaacacaagatgtatcgttgggatgaaaagactatcaaatctgataatcctagcgttatcaaagaagatgaccatacatgcgacacaacacagtattttgtgttagacaatgcaaaattgctcggtttgcgtgttggtaacgtt

SEQ ID NO: 6538 - DNA, 687 bp, Streptococcus pneumoniae
  misc_feature (1)..(687): tiling:Spneumo1:WAN024BX6; WAN023RP0 contig_1583_22||||682 0..7506|+|687 bp|Glimmer 2.02 orf prediction|S.pneumoniae| 670|WAN01UDGB|ORF
atgacgaataatcaaattgtagaagcaaaaggcgactttttaaccaacccacagctacttaatagcggtattatcagaaagtatcttgacccacaaggaaaagctagtgatgaggagcttgcctattttatagctcaagccaaagcccaaaacctcaatccatttacaaaagaaatttattttatcaagtatggaactcagccagcccagatagtcactgccaaatcagcttttgaaaagaaagcagatagtcacccgcaatttgatggcaaagaggcaggcgtaatctatctgatggatggtgaaattaaatactcaaaaggagcatttattcctaaaggtgctgaaattcttggcggttgggctaaggtgtaccgcaaagaccgtacttacccaacggaaacagaagtatcttttgaggagtacgacaattctaaaatacgtgcaagagttaaggaactgacacaacaaggtaaagatgttacttatccagtgatgaactcatacggtaagccaataggtgagaataactgggatactatgccttgtgtcatgatacgaaaagtagctctagtgtcagcttaccgtgaggcgtttcctgccgagcttggagcaagctatgaggctgacgaaattcagctggataacacacctaaagacgtcacacctcaagagagcctaactaat

SEQ ID NO: 6539 - DNA, 258 bp, Streptococcus pneumoniae
  misc_feature (1)..(258): tiling:Spneumo1:WAN024FFK; WAN023KUC 314100_2867||||153226 6..1532523|-|258 bp|EGAD orf prediction|S.pneumoniae|R6|NC _003098.1|ORF|100
atgacgatagatattttgaataggaacatcgtgatgtgtcttaagatatttttgacatttctcagtgagttcaaccatttttctagtatcttgaaaagtagacggattttggctctctacaataatatctcgccttttactaggatggtattcgttgcatatatacttgaattctgccaagctcatatcaatttgttcaagaagaaataccatgttttcaaaactgggaataactttaccgtgttcaatatttgttag

SEQ ID NO: 6540 - DNA, 204 bp, Streptococcus pneumoniae
  misc_feature (1)..(204): tiling:Spneumo1:WAN024BZV; WAN0243WI spr1185||15903228|NP_ 358778.1|1183138..1183341|-|204 bp|Hypothetical protein|S. pneumoniae|R6|NC_003098.1|ORF
atgacgcactacgttgccaatccagaggtggtcattctcgagggtggcatcatgggacaagaagctatcctcaaaccaaagattcgtgcagccttgaaagaagtcttggttccaagtttggctgagaacacaagattagaatttgctcatcatcaaaacactgctggtatgcttggagcctactatcattttaaaataaaataa

SEQ ID NO: 6541 - DNA, 639 bp, Streptococcus pneumoniae
  misc_feature (1)..(639): tiling:Spneumo1:WAN024C8W; WAN023QWX contig_1375_2||||778. .1416|+|639 bp|Glimmer 2.02 orf prediction|S.pneumoniae|67 0|WAN01UE2J|ORF|000
atgacgtatcttgctttgagaacctcctcctttataaacggagtgagcaaacttcacgctgacgtatcgagaaggatgttcaaaaatgtctggaagggagttccggtggaggagatccccattgaaggcatcacgaatggtgtccacatgggaacctggatcaaccgcgagatgagaaaactgttcgacaggtacctcggtagagtctggagggaacacactgacctcgaaggaatatggtacggagttgacagaatacccgatgaagaactctgggaagcgcatctgaacgcaaagaaacgattcatagattacataagagaatccatcaaaaggagaaacgaaaggcttggaatcaacgaaccactgccggagatcagtgaaaacgtgctcatcataggttttgccagaaggttcgcaacttacaagagagccgtcctgctcttcagcgatctggaaagactcaagagaattgtcaataattccgagaggccggtttacattgtgtacgctggaaaggcccacccgagagacgaaggtggaaaggagtttctcagaaggatctacgaagtttcacagatgcccgatttcaagaacaaaatcatcgtactcgaaaactatgacatcggggaatctaac

SEQ ID NO: 6542 - DNA, 507 bp, Streptococcus pneumoniae
  misc_feature (1)..(507): tiling:Spneumo1:WAN024AUQ; WAN02403V |dfr||AAC33869.1|||50 7 bp|dihydrofolate reductase|S.pneumoniae||AF055724|ORF|00 0
atgactaaaaaaatcgtagctatttgggcccaggatgaagagggtgtgattggtaaggacaatcgtctgccctggtatttgccagcagaattgcaacactttaaagaaacaactctgaatcatgctatcttgatggggcgtgtgacctttgatgggatggaacgccgcttgcttccaaaacgtgaaatcttgattttgacacgtaacccggaagaaaagatagatggagttgctacttttcatgatgtccagtctgtcttggactggtatcaggctcaagaaaagaatctctatattcttggtggaaagcagatttttcaggcttttgaaccctatcttgacgaagtgattgtgactcacattcatgctcgggtggagggagatacctatttccctgaagagtttgatttgtctctttttgagacagtttcaagtaaattttacgccaaagatgagaagaatccttatgattttaccatccaataccgcaagagaaaggaagtctaa

SEQ ID NO: 6543 - DNA, 1023 bp, Streptococcus pneumoniae
  misc_feature (1)..(1023): tiling:Spneumo1:WAN024DVK; WAN023OK4 pne86_22||||17790..18 812|+|1023 bp|Type 43(2) capsule operon, Glimmer 2.02 orf prediction|S.pneumoniae||WAN01UCFZ|ORF|000
atgactaaaaatagaataaactggatagattttgggaaagggttcgcaatatttctagtagtcataggtcatgtgtttactggtttatttgattctgggaaatttacaagtgatgccaaatggttatccatagttattgcatttatatatatattccatattccagtattctttgctttatcaggatattttttcaaatctgtagagaattttaaagagtattattattatatgaagaagaaaacgatagtattaggattaccgtatatattttattctataattcattatgtattacagaaaatagcgggaggatcggtacgtgttcccactacattgtttaatttgataaatatttataaagaaccattaggagttgtatggtatttgtatacattatgggcactatatttagtatacggatttttatcaatatttataaagaacaaaaactatctttttatgattagtatactcggatatataattacattagtatatatgtcagaaatattttttataaaaaaagttctagcatggggagtaattttcatgttgggttctgtattaaaaacagttaaatttaatgatattagatttagaaacataattctactaggaatcatatttaatatcgtatatatttatatagtgtatattttatttaatgtatatggtaaaataataacggactataactatcctagatggtggattattggatacacaggtaatgttatcttatcatttataatttttccaaaaatagaaaaaacatcccaaaatatttttaggtattttagtaaatatggggaaattagtatagggattctaattttccattcaccaatttgtagtatgattcgaattctaatgttaaaaatgggaattggttctgtttttcttcatattgttattggtattgtcttgggctggtatttatcaatacttgcaaccaatgtattgaagaaaattccattattgaatattgttttactaccacagagatatattaaactaaaa

SEQ ID NO: 6544 - DNA, 1311 bp, Streptococcus pneumoniae
  misc_feature (1)..(1311): tiling:Spneumo1:WAN024C2Z; WAN0246TT 332427-15-3||||||1311 bp|DNA Streptococcus pneumoniae strain WCUH29 protein yph C gene|S.pneumoniae||WAN0246TT|ORF
atgactaaacctatagtagctattgtaggtaggcctaatgtaggtaaatctacaatttttaatagaatagttggagaacgtgtttcgattgtggaagacacgccaggtgtaacacgagatcgtatttattcttcaggtgaatggttaacacatgatttcaatattattgatacaggtggtattgaaattggtgatgcaccattccaaacacaaattagagcgcaggcagaaatcgccatagatgaagcggatgttattatttttatggttaacgtgcgtgaaggattgacacaaagcgatgaaatggtcgctcaaattttatacaaatctaaaaaaccggtcgtattagcggttaacaaagtagataatatggaaatgcgtacagacgtgtatgatttctattcattaggatttggtgaaccgtatccgatatcagggtcacatggtttaggtcttggtgacttgttagatgcagttgtttctcattttggtgaagaggaagaagatccttatgatgaagatacaattcgactatccattattggacgaccaaacgtaggtaaatcaagtttagtaaatgctattttaggtgaagatcgcgttatcgtttctaatgttgcagggacaacgagagacgctattgatacagagtatagttatgatggacaagattatgttttaatcgatactgctggtatgcgtaaaaaaggaaaagtatatgaatcaactgagaaatattcagtactaagagctttaaaagcgattgaacgttcaaatgttgttttagtggtcattgatgcagaacaaggcatcattgaacaagataaacgtgttgcaggatatgcacatgaacaaggtaaagcagtcgtgattgtcgtaaataaatgggatactgtggaaaaagatagtaaaacgatgaagaaatttgaagatgaagtacgtaaagaattccaatttttagattatgcacaaattgcttttgtgtctgctaaagaacgcacaagattacgtacattattcccttacattaatgaagcaagtgaaaaccataaaaaacgtgttcaaagttcaactttaaatgaagttgttactgatgcaatttccatgaaccctacaccaacagacaaaggtagacgtttgaatgtcttttatgcaacacaagttgctatagaaccaccgacatttgttgtatttgttaatgatgtagaattaatgcatttttcttataaacgctatttagagaatcaaatccgtgccgcttttggttttgaaggtacaccaattcatattatagctcgaaagagaaattaa

SEQ ID NO: 6545 - DNA, 2076 bp, Streptococcus pneumoniae
  misc_feature (1)..(2076): tiling:Spneumo1:WAN024BOJ; WAN023OCR spn019g01_5||||2308.. 4383|-|2076 bp|Glimmer 2.02 orf prediction|S.pneumoniae|23 F-1|WAN01UCLR|ORF
atgactaaatttatcaattctagcggttcactacacttgaatatttacatcgaacaagttagtcaagatatcgctaacaattcctcaagagttagttggaaagctactgttgaccgtgatggagcttaccgcacatatacttatggtaatattagtaacttgtctgtatggttaaatgggtcaagtgtgcatagtagtcatccaaactttgacacatccgggcaagagtttactttagcaagtggggaagtaaccatcccacacagtggtgacggaactaagacttttgcagtatgggcatcgtttgacccaaacaacggagtacatggaaacattaccgtgtcagcaaactatactctttcaagcattcctcgatctagtagtgtaagcgacaatgctctttcaggaaataggcggctcggaagtccccacactctcactattgatcgcaaatctagctcatttactcaccaagtatggtatagagtgtttggtagcaactggattgatttaggaaaaaatcacgcaacaggcgtttctttcgtacctaatattgacctagctagatacaacacaaaagcaaagtctggcacgatggacatatgtgttcgaacatataatggaactactcaagttggaaatgacgtttactcaaatgggtggtattttgaaattccggaaagcgtaaaacctacattttctggaattacattgactgatatgaatactgttgctaggcagctattgagtggaaataactttttacagattatttctgatattcaggtcaactttaataatccatccggggcttatggttcgactatcacaggatatcgtgctgaaatcgtaaacaagaatcaggttacaactgtaaacggtggtaggcttggtatgatgaatttcaatggttcagcaacgattcgagctagtgtggttgatagccgaggcaggcaatcagatactagagatattacaatcaatgttattgaatattttgcaccagcttttagttttacagcttttaggacgcgggaaacacctaacattattcaagttgtcaggaatgctaaaatcgctcctatcactttatcaggtagtcaaaaaaatgtcatgacactatcattcaaagtagctcgactaggtagtacaacttttacagctgatcatggtagagcttctggtatttggacaactcaacacaccttaaataattcagctgctaacatggcaggtaattatgttgcaaccaaatcatttgtggtcataggaactctatctgataagtttacaagcacagaatttacagcaacagttgcaactgaaagtgtggtaatgagttatgacaaagatggccgtgtgggcattggtaaagttgcagagcaaggtggtgcagggtcattggatgtcttgggagatatctacgctagaaataaacctattcaacaatatcaattgactgacaataatggatgtggaaaacttatcaaacaggattttaatacgatgaaagagactggaacgtggtggataaatggtagctctcaaaacaaccccttttctggaacttgggggatgctagaggtattcagacctaatccaggctctcatgaacgtattcaacgcttcactacctcaacaggatatatggcagttagggagaatggttatgataacaactggagaccatggcgctatctggtgcaacaatccaagtctactaataactctgactatgtagctttgctaaaatcagaaagcactccgactccttggcaaaatgccattttacaaaatggatggaatcatcacagggattacggaggtgtccaattttcaaaaacattcgatggtgttgtttgttttaaaggaacatgtaagggcggaaagattgcacgtgagtcaatcatacttactttacctgaacatttcagaccatctacaacattattcaaaactgctttgaataatgattacggttcagccgttataggaatttatccaaatggaaacgtagttgtcaaatctaatgtagatgctacttggcttaattttgataatgtgtttttcaaaata

SEQ ID NO: 6546 - DNA, 507 bp, Streptococcus pneumoniae
  misc_feature (1)..(507): tiling:Spneumo1:WAN024AUR; WAN02403S |dfr||AAC33864.1|||50 7 bp|dihydrofolate reductase|S.pneumoniae||AF055721|ORF|00 0
atgactaagaaaatcgtagctatttgggcccaggatgaagagggtgtgattgggaaagacaatcgtctaccttggcatttaccagcagaactgcaacacttcaaagaaacaactctgaatcatgctatcttgatggggcgggtaacctttgatggaatagggcgtcgcttgcttccacaacgggagactttgattttgacacgtaacctagaagaaacgatagatggggttgctacttttcatgatgtccagtctgtcttggactggtatcaggctcaagaaaagaatctctatattcttggtggaaagcagatttttcaggcttttgaaccctatcttgacgaagtgattgtgactcacattcatgctcgggtggagggagatacctatttccctgaagagtttgatttgtctctttttgagacagtttcaagtaaattttacgccaaagatgagaagaatccttatgattttaccatccaatatcgcaagagaaaggaagtctaa

SEQ ID NO: 6547 - DNA, 507 bp, Streptococcus pneumoniae
  misc_feature (1)..(507): tiling:Spneumo1:WAN024AUP; WAN0240LS |dfr||CAB06418.1|||50 7 bp|dihydrofolate reductase|S.pneumoniae||Z84378|ORF|000
atgactaagaaaatcgtagctatttgggcccaggatgaagagggtgtgattggtaaggacaatcgtctgccttggcatttgccagcagaactgcaacatttcaaggaaacaactctgaatcatgctatcttgatgggacgtgtgacctttgatggaatggggcgtcgcttgcttccacaacgggagaccttgattttgacacgtaatccggaagaaaagatagatggggctgttacttttcaggatgtccagtctgttctcgactggtatcaggctcaagaaaagaatctctacattctcggtgggaagcagatttttcaggcttttgagccctatttagatgaagtaattgtcactcacattcatgctcgggtggagggagatacctattttcctgaggagtttgacttatctctttttgagacagtttcaagcaaattttacgccaaagatgagaagaatccttatgattttaccatccaatatcgcaagagaaaggaagtctaa

SEQ ID NO: 6548 - DNA, 507 bp, Streptococcus pneumoniae
  misc_feature (1)..(507): tiling:Spneumo1:WAN024AUM; WAN0240RQ |dhf||AAD35011.1|||50 7 bp|dihydrofolate reductase|S.pneumoniae||AF144418|ORF|00 0
atgactaagaaaatcgtagctatttgggcccaggatgaagagggtgtgattggtaaggacaatcgtctgccttggtatttgccagcagaattgcaacacttcaaagaaacaactctgaatcatgctatcttgatggggcgcgtgacctttgatggaatgggtcgtcgtttgcttccaaaacgggagaccttgattttgacacgtaattcggaagaaaagatagacggggttactacttttcagaatatccagtctgttctcgactggtatcaggctcaagataagaatctttatattttaggtggaaagcaaatttttcaggcttttgaagcttaccttgatgaagtgattgtcactcacattcatgctcgggtggaaggagatacctatttccctggagagcttgacttgtctctttttgagacagtttcaagcaaattttacgccaaagatgagaagaatccttatgattttaccatccaataccgcaagagaaaggaagtctaa

SEQ ID NO: 6549 - DNA, 507 bp, Streptococcus pneumoniae
  misc_feature (1)..(507): tiling:Spneumo1:WAN024AUN; WAN0240U4 |dhfr||AAG22521.1|||5 07 bp|dihydrofolate reductase|S.pneumoniae||AF288412|ORF|0 00
atgactaagaaaatcgtagctatttgggcccaggatgaagagggtgtgattggtaaggataatcgtctgccttggtatttgccagcagaactgcaacacttcaaagaaacaactctgaatcatgctatcttgatgggacgcgtgacctttgatgggatgggacgtcgcttgcttccaaaacgggagaccttgattttgacgcgtaattctgaagaaaagatagatggggttactactttttatgatgttcagtctgttctcgactggtatcagtctcaagacaagaatctttatattctcggtggaaagcaaatttttcaggcttttgaaccctaccttgacgaagtgattgtgactcacattcatgctcgggtggagggagatacctattttcctgaagagtttgacttgtctctttttgagacagtttcaagcaaatcctatagcaaagatgagaaaaatccttatgattttaccatccaataccgtaagagaaaggaagtctaa

SEQ ID NO: 6550 - DNA, 507 bp, Streptococcus pneumoniae
  misc_feature (1)..(507): tiling:Spneumo1:WAN024AUO; WAN02403X |dfr||AAC33871.1|||50 7 bp|dihydrofolate reductase|S.pneumoniae||AF055726|ORF|00 0
atgactaagaaaattgtagctatttgggcccaggatgaagagggtgtgattggtaaggacaatcgtctgccttggcatttgccagcagaactgcaacacttcaaagaaacaactctgaatcatgctatcttgatggggcgcgtgacctttgatgggatgggccgtcgcctgcttccaaaacgggagaccttgattttgactcgtaacccagaagaaaagatagatggggttactactttttatgatgtccagtctgttctcgactggtatcagggccaagacaagaatctctatattctcggtgggaagcagatttaccaggcttttgaaccctaccttgatgaagtgattgtgactcacattcatgctcgggtggaaggagatacctattttcctgaagagtttgacttgtccctttttgagacagtttcaagcaaatcctatgctaaagatgagaaaaattcttatgattttaccatccaataccgcaagagaaaggaagtctaa

SEQ ID NO: 6551 - DNA, 804 bp, Streptococcus pneumoniae
  misc_feature (1)..(804): tiling:Spneumo1:WAN024BY2; WAN023RWT contig_1609_10||||638 4..7187|-|804 bp|Glimmer 2.02 orf prediction|S.pneumoniae| 670|WAN01UDCD|ORF
atgactacaactaaaaacccttggaatgatattttaacaacaactcacaaaggcaaagaggctattgttgcgcgtgatgattgggaaattattcaaaccatactagaatccgaaaataaaaataactccactgaaagcactgaactacacttgaatttctatcctcaacaatttgtagggaatgttaaaaatgctgatgttatcattttgtcaaaaaatcctagatatactgaaggatatgaagaactttacaacaacaataaagattatcagcaaacctgtttggatagcttacaactgaaaaaagtagttttccacgccttcaaacttgatgaaggtgatgaacttggatacacagcagataaatttaagttctggtttgaagatgcaggtatgggcgaacaatttaaaacaaacaaagattataaagaacatgtagactggtttacaaagcatatagctttagctgagtttttcccctatcattctgataattataatagggaaattagtaaaatagttgaagaaaaaggatatcttcctactcaacaatttttatttaatttgattaaagaaagaattgcggataaaagcaaaccacctgtaactattcttatcgcgcgtggttatgctgaatggactaacgctattcctgaattaaaaacttatgaaaaatgttatcgctctagtaacccaagaaatgccactataagagctaagcacttattaaaaggagatgggaaagctaaaatttatgctacagaagaattttcaaaaactttgagcaaattatttaaagatcta

SEQ ID NO: 6552 - DNA, 786 bp, Streptococcus pneumoniae
  misc_feature (1)..(786): tiling:Spneumo1:WAN024BMT; WAN023O79 spn029h04_78||||64265 ..65050|-|786 bp|Glimmer 2.02 orf prediction|S.pneumoniae| 23F-1|WAN01UCO3|ORF
atgactacaactaaaaatccctggaatcaattatctaacgtcgatataaatggagagcaagctattcttgctaccgaagatgttgaactaatcaaaaaatacacctctacaaaacactacaaaaatctaaaagatgatatctaccgtttacaattaggtttttgtccgcaacaatttgtgggggatattcaaaatgctgatatcattgttttatctaaaaatcctggctacacccctgaatttaaaacactttatgaccacgataaaaactaccaaaagactcttttaaataatctacagctaaaaggaaacctctattttcatgcttttgacctagatacgaatgaatttggttactgggctaaaaagtttaaagtatggtttgatgatgtagacaatttacaggatttaaaagaaaagcttccttggttttcaaaacacgttgctttagctgaatattttccatattactctactaagtacgatgataaattaaatgattttataagcaaagaaggttatttcccaacacaaaagtttttattcaatttaattagagaacgtgttttggatgacaatgatcctgtaatcattatcatcacacgatcttacaataagtggtacgatgcaattcctcaattaaaagagtataaaaattgttatgaaacgagtaatcctagtaatccttctttaaaacctgagaatttattaaaagtcaaacgatattctgctaaaaaagaggttgaaaaagtattagaagattcattgaaaaagctagagcataaa

SEQ ID NO: 6553 - DNA, 231 bp, Streptococcus pneumoniae
  misc_feature (1)..(231): tiling:Spneumo1:WAN024CUF; WAN023JN4 83838_1199||||676228. .676458|-|231 bp|EGAD orf prediction|S.pneumoniae|TIGR4|WA N01UC25|ORF|010
atgactacgaacaacttggtttccatctttatctactggaacttcttcccaagttatggagtagcgggcaatgtaagctccactgtgttgaattgtcaatgttttatccttcacaggagtctgactgattggttgaactggcttagaaacttgtgtcgccgtttcagcattcgtagctataaagcagaaaacttcaacttctgcaagactgagggcattatagccttctag

SEQ ID NO: 6554 - DNA, 231 bp, Streptococcus pneumoniae
  misc_feature (1)..(231): tiling:Spneumo1:WAN024BLB; WAN023NB0 spn143g10_61||||51982 ..52212|+|231 bp|Glimmer 2.02 orf prediction|S.pneumoniae| 23F-1|WAN01UCOL|ORF
atgactatcactatcaacttcacagaaaaaaattcctacattacggactacctaaacaaacacggtatcgacacaacgaccatggattttgacgacttcatggcactcatggaagatatcgaagacgcacgagcagccgaccaagcctatatggagtatttagccgacccagctacttataccatggatgaggtcttggatgaactaggactaactcgagaggatattgct

SEQ ID NO: 6555 - DNA, 1185 bp, Streptococcus pneumoniae
  misc_feature (1)..(1185): tiling:Spneumo1:WAN024FT2; WAN023P91 pne49_13||||9052..102 36|+|1185 bp|Type 23B capsule operon, Glimmer 2.02 orf pre diction|S.pneumoniae||WAN01UCCI|ORF|000
atgactattaaaattaattatatgttttttgtttgtctctcttttttcggtatagttttaagtagttcacaggtaatagtgaatctgggtttgtccagtatagttcagtatatagcttattttttattgttgctatgtatattttttaccttaattaaaaatagtccggatgtaatcgctaatagaattgcttatttttctattatttcatttttgtttatcatagggattaatttacaaaatcttcctttctcaacaaagatttatttatcgttttccatgcttattatttctagtctatcgactttaccgattaaattaataaataatataaatgattttagaagaatatcctattttttattaaatggcatcctattatcaacatttttaggttggctatttaatatttcattagtaactgttgctgttgaggggattggttttgcatatggatttaatggtgggttgacgcataagaatttttatgcaattacaattttagtttcctatatcctattgtttattagtagaaaacatggtacgaagtaccaagttgatagcttagtattatggtttgatctttttttacttttagtatctaacacacggacaatatatataatattagttgttttttggatcgttgttcatagcggatttattaaatatataaagaaaaatcacagaccagtaattataacgacatggttagtaatttctttattatctataatattttttttcaaacacattataaataatagtgaatcctatactcatcgtgttttgggtattgttaatttttttaaatactacgaatctagcaaatttcatttattttttggtgatgctgagttagcctttggtgatatgacgaaaggttatactcacaatataagaagtgttttaggttgggatggaactgtggaaatgccgttgctaagtgttatgataaaaaatggttatgtcggcttaatagggtatggagtagtcttatttaaatttatatcctctgtattatctatggaagatagaagagtaaaaaatattggcttatccattctaatacctctacttctatcagcaatggttgaaaattatatcgttaatattagctttgtattcatgccggtctgtttttgtattttatgctcaataaaaaatatagaatttaaaaataat

SEQ ID NO: 6556 - DNA, 378 bp, Streptococcus pneumoniae
  misc_feature (1)..(378): tiling:Spneumo1:WAN024BNH; WAN023OBF spn019g01_58||||37270 ..37647|+|378 bp|Glimmer 2.02 orf prediction|S.pneumoniae| 23F-1|WAN01UCLR|ORF
atgactgaaaaagaattttctcaaaatctaggcatagatatagagatttttgaagatggtctatttccagatgaagccttttacatcccagccctcaaaactatgtttttgagtgatgctatatctgatgaaaaaagggtacaagtcgctttacatgagataggccatagaaaccacgcgccagatacttatcagctttttagggaaaagtgtgagcttgaggctaataggaatatgatccatcaccttatgaaagctgagttggatatagccgaagatgccactacatttaattacctggtatttatggaaaagtataatttaaaaaccattgccgatgaaatcatggtcaaagaagaatatttagcactacttaat

SEQ ID NO: 6557 - DNA, 351 bp, Streptococcus pneumoniae
  misc_feature (1)..(351): tiling:Spneumo1:WAN024BYY; WAN023S64 contig_466_2||||843.. 1193|+|351 bp|Glimmer 2.02 orf prediction|S.pneumoniae|670 |WAN01UD2A|ORF
atgactgaaacaaacaagaatggcaaggtgattgccattgtcactatgtgcttcatcttcgcgatgatcagctttgtaactaacatgggcgctccctttggcaacatctggggtttcgagtatccttttgccaaagcttggggtaacctgatgaactttgcggcttacctgtttatgggaatacctgcaggtaaaatgcttacgaaatacggatacaaaaagacagccctgattgctctgatcgtgggtatcgttggtttgtgtttccagtatctctcaagcctggtaggcgcaggtacttacgtattcacatacgatagcattcctgtagccctcaacctgctaactaat

SEQ ID NO: 6558 - DNA, 237 bp, Streptococcus pneumoniae
  misc_feature (1)..(237): tiling:Spneumo1:WAN024BXH; WAN023RPB contig_1583_11||||371 6..3952|-|237 bp|Glimmer 2.02 orf prediction|S.pneumoniae| 670|WAN01UDGB|ORF
atgactgaaattcacgcatgtctttgcggaaattgggtgaacctatcagccgacgacgattgtgtaatgggaccaaatatggctaatccttacatttggtgggaagaaaatgcagaactctactcaccaatttctaaacctgaagcaaactcgatgtaccatcaggattatatctacattcactatcgtggcgctgactatcgtatccatccaatgttcattcaaatcgtttctaga

SEQ ID NO: 6559 - DNA, 1047 bp, Streptococcus pneumoniae
  misc_feature (1)..(1047): tiling:Spneumo1:WAN024F8X; WAN0240FO |cps19AN||AAD19915.1| ||1047 bp|dTDP-glucose-4,6-dehydratase|S.pneumoniae||AF105 113|ORF|000
atgactgaatacaaaaaaattatcgtgacaggtggagctggttttatcggttctaactttgtccactatgtttacaataactttccagatgtccatgtgacagtgctggacaagctgacttatgcaggtaatcgtgccaatatcgaggaaattttaggcgaccgtgttgagttggttgttggagatattgctgatgcagccttggtagacaagttggcggctgaagcggatgctatcgttcactatgcggcagaaagccacaatgataactcgctcaatgacccgagtccatttatccacaccaactttatcggaacttacacacttttagaagcggctcgtaaatacgacattcgtttccaccatgtatcgactgatgaagtctatggtgacctgcctctgcgtgaagatttgccaggtcatggggaaggcctaggtgagaaatttaccgctgaaaccaagtacaatccaagctcgccttactcatcaaccaaggctgcttcagacttgatcgttaaagcttgggtgcgctcatttggtgttaaagcaacgatttctaactgttcaaacaactatggtccataccagcatatcgagaagttcattccgcgccagattacgaatatcttgagcggtatcaagccaaaactctacggagaaggtaagaatgtgcgtgactggattcacaccaatgaccattcatcaggcgtttggacgattctgaccaagggtcaaatcggtgaaacttacttgattggtgctgacggtgagaagaacaacaaggaagtgttagagctcattctcaaggagatggggcaacccgctgacgcttatgaccatgtgaccgatcgagctggtcacgacttgcgttatgcgattgatgctagcaagctccgtgatgagttggggtggaagccagagtttaccaactttgaagcaggcctcaaagagaccatcaagtggtacacagataaccaagactggtggaaatctgaaaaagaagcagtagaggctaactatgctaaaacgcaacaagtgattaaataa

SEQ ID NO: 6560 - DNA, 165 bp, Streptococcus pneumoniae
  misc_feature (1)..(165): tiling:Spneumo1:WAN024BW8; WAN023R0D contig_1407_7||||3658 ..3822|+|165 bp|Glimmer 2.02 orf prediction|S.pneumoniae|6 70|WAN01UDX7|ORF
atgactgacaagaaaaaaatgggaagaccgacaactgaccctaaaaacttaaaaatgacaataaggtttaatgatgagcaaagcagaaaaatagaaaattatgctagtcaaaacaatcttactaagtctgaagttattagaaaggcagttgagcaacttccagaa

SEQ ID NO: 6561 - DNA, 261 bp, Streptococcus pneumoniae
  misc_feature (1)..(261): tiling:Spneumo1:WAN024BXS; WAN023RVM contig_1609_58||||465 95..46855|+|261 bp|Glimmer 2.02 orf prediction|S.pneumonia e|670|WAN01UDCD|ORF
atgacttacagaacctgtaagccacctagtcagtcggtttattctggtgtctgccaccgcttggcccttacgtccaagattgctatcggattttgttctggtgtccgccaccgcttggcccttatgtccaagattactatcagattgaccatgagccaactactcatctactccattattctaacgaatatgagctacaaacgcaagagaaaaacttattttggatttatacactataaaaaacatacactatcttcagat

SEQ ID NO: 6562 - DNA, 1335 bp, Streptococcus pneumoniae
  misc_feature (1)..(1335): tiling:Spneumo1:WAN024GHV; WAN0240FA |cps19aI||AAC78671.1| ||1335 bp|polysaccharide polymerase Cps19aI|S.pneumoniae|| AF094575|ORF|000
atgacttatttatttttactctgcctgaccttattcttattaactttcttctatttttttgctttcaatcaagatttgatagctccgccagttgtcatgtctgttatgtttctcattagttctgtatttgcccttattaatgtgcaaaactggaatattgagtatagtggtttagcttatcttttgattattagtggcattattgttttttcaatgcctctcttggctcttaattcgcctagtctaaataccaagattaaagtgacggatcggctcattgatatccaattctggaaaatagctcttactattatagttgacctcattattctatatctttataggagagagattcataatcttgcacttagccatggttatacgggttcaaattttcagtggttctttagaaatgctaccagttatgaaggtgagctaacagtgcgaacttcgattcgggtcctcattcgtatcattgacgtatctgcttatatttttggatatacttttattaataatttcttcatttatagtcataaacgctctaaagatttactgctcttagttccattcttgatttttatttctaaaaccttattatctgggggtagattggatattataaaaattttaattgcgtatgttgtaatggcctatattcagcaaaaacgaaaagttggctgggataaggtcatctcccataaatatatgagacttggttttgtaggcttgatagctgggattcctaccttttactattctttattcttatctggacgttctacgactagaactgtatttgaaagtatttcaacctatttaggaggttcgattcagcattttaatcagtatattcaaaatcctattggagtagctgaggtttttggcgatgagtcatttgtagctattatgaatattttgggtaatcttggctttgtcaattacaatagtaccgttcacttagaatttcggcagttagggattactatgggtaacgtttatactttctttagaagaccctggcatgactttgggttagtcggtatgtatatcttttcctttgttgtcggtgtgttttttgctattttttatttgaaattaagaaagagccgtgctggttttaaattggatattcatacaattatttactcttatttcttttattggatttttttatcgtccattgagcaatactcgtttacaacaatcagtttgtttacacttgtatttatagtcttggtttacctaatggctttcttttattggaatttggatttccacagaggaaaactagtaattaaactctctgacacaagtattaaatcggaaaactga

SEQ ID NO: 6563 - DNA, 390 bp, Streptococcus pneumoniae
  misc_feature (1)..(390): tiling:Spneumo1:WAN024BO9; WAN023OCF spn019g01_18||||16904 ..17293|-|390 bp|Glimmer 2.02 orf prediction|S.pneumoniae| 23F-1|WAN01UCLR|ORF
atgacttatttgacacaagaggagttcgatgagttagattttgatgaagttacagactttgaaaaattggcaaaacgggcaaagatagcgattgacctatacactaacggtatttatcagaaagacattgattttgaaaaagaaattgcctatcgcaaatctgctgtaaagcttgctatggcattccaaatagcctatctcgatgcctctggtattatgtcagccgatgacaaacagctagccaatagtgtctctattggccgtacatcaatctcttatagcacctcacaaagcacattagcaggtcagcgatttaatttgtctatggatgctgaaaatgctttgagacaagccggctttagcctagttgttggagttgcctatgatcga

SEQ ID NO: 6564 - DNA, 315 bp, Streptococcus pneumoniae
  misc_feature (1)..(315): tiling:Spneumo1:WAN024C2O; WAN023L0Q 315167_2596||||138151 3..1381827|+|315 bp|EGAD orf prediction|S.pneumoniae|R6|NC _003098.1|ORF
atgacttccgtctccattatcacgaacagatgcggttggagtacgtccgtcaacaccgtcacgtccattcttaacaacaaactcattcttagttccgtctgggttagtgattgttactgtgtggcttccatctggattttcagtagttgttgctgttgcagctttaccgtctttaccatctttgatgatagcgttggtaacattgccgtctccatctgtaactttaacagtatgagttccatcgttgttatccgttacttcaactttaggagtcttaccgtctttaccgtttttaacaacagtttctttagttga

SEQ ID NO: 6565 - DNA, 75 bp, Streptococcus pneumoniae
  misc_feature (1)..(75): tiling:Spneumo1:WAN024AVB; WAN023SP9 BD003978.1_2||||957.. 1031|+|75 bp|Glimmer 2.02 orf prediction|S.pneumoniae|ATCC 55840|BD003978.1|ORF|000
  misc_feature (20)..(20): n is a, c, g, or t
atgacttgtgattttaaatntgaaactctacaactacatgctggtcaagttgtggctccagctactctaactaat

SEQ ID NO: 6566 - DNA, 1530 bp, Streptococcus pneumoniae
  misc_feature (1)..(1530): tiling:Spneumo1:WAN024BR9; WAN0240E1 |tts||CAB51329.1|||15 30 bp|polysaccharide synthase|S.pneumoniae||AJ131985|ORF
atgagaaaaattagaaccaaatctacaatgtatattacattgttactgtcatggttggcattgctattgcttgtgatgccagcatttattcacaccgttagagacgccagtgagtatcaaggagtattgaggcctttggtattggtattagtcgtattgaatgccttatttattagctatttttggttaaatggtctaaaggatattatatacgtctcgacattttatctcaataattatatacatatatatggaagtagttttaaaaaaagtagttctatttctgaagctaaaaaagtaattttgctatattgtaccgctaatgattttgttccagagtgtttagtagaatcaatgcaacaagattacgcaaattttgaaacagttatattagatgactccaaatcagaggtttataaacagcaggtagatgagtttgctaaaaaatacaatgtttctgttatcagaagagatgatcgaaatggctttaaggctggtaatattaataattatttaaaaaataaaaatgattatgattactttgttttattagacagcgatgagattattccttcaaattttataaaaaaatcattggcttatttcgagaagaatagaaatttaggaattctacaagcgactcatgttgcttctaggaacagaaatcttttcatggataccttagctattggagtagattcgcattggccagtgtatcagaaagtgaagcattactatggttttttatcactattaggtcatggtgctatgattagtaaagactgttaccaagcagctggaggatttccacatgttgtcgctgaagatttgtgtttcagcattgaatccagaattaaaggagattaccatgtaggatttgctgacgatattgtttgtcaggaagaataccctgtagactatttagcctttaaaaaacgacattctaaatggacgcaaggaaatatggaatttattaaaagatatactccaattattttaaaatctaaactaaaatggcaggagaagttagatattgtattatttacatataatttacctctaacggcagtttttgctttttatatcgttatgaatttgattttatttccattattacattttaaattagagtacccagcatggcttttaattccaaccgttatctttttattggctccaatgtctaatgatattattttctatagtagaaaaataaatattttccaacttatattctatgtttttacctcatttatgctatttggttctatgttttatgttagtttggtttcctcatttaaatctatatttggaaagaaagcggttttcttagtgacaccaaaagatacacgaaaaattacagtcttagaagctctgaaattgaattataaagaaatcatttttgcgtgtacgttgatgacgatatccattttgacatcgggcaatattttgccggtaatattgattgctattccaagcttattttctcctgtactaacattatatagtaattatagagtaaaaaaataa

SEQ ID NO: 6567 - DNA, 1083 bp, Streptococcus pneumoniae
  misc_feature (1)..(1083): tiling:Spneumo1:WAN024GHY; WAN023OQ6 pne78_12||||8297..937 9|+|1083 bp|Type 36(1) capsule operon, Glimmer 2.02 orf pr ediction|S.pneumoniae||WAN01UCFT|ORF|000
atgagaaacaaaaaacgaaaaaataatattttacatatttcacgaacaatggatattggtggcgctgagaggattgtgtaccagttgagttctgatttgcaagatgagtttgatagtgtacacattgcttctacaggaggcctttgggaacgagaattagcagcccaaggaattatccatcataaaatccaggatatagacagcaaaaatccttttacagtgttgaagttgattattagtatctatcaaattattaataataatgatatcactctggtccatactcatcatcgaatggctgctttttatattcgtttattaaaactgattaatcccaaattaatccacgtctatactgcccataatgttttcaaagataagttgtctttatatagattttcactgaaaaatgcctacagtattgcagttagtcaagcagttaataaaaatttgaaagatgatgtggggattaccgacagtactgtcatctataacggagtaatcttaaagcagacaaataaacaggttgatgagattatgaagtttgatggaatcaaacttggttgtattgcaagattatctgaacaaaagggcttgaactatcttattgatgcgatgtctctgatttcaaaagaaaatattcatttatttatcgttggtgatggagagcttagaactgaactagaaaataaagttaaagatctcaatctagaagagaaagtaattttttttggctatagacaagatattgttgagtgtattaatagttttgatttttgtgtcttaccctcagtatttgagggatttggcctagttgctattgaagcatttatgaatggaaaaacaatgattgcaacagatatttcaggattaaatgaagttgttacaaaagaaaatggtgtgttggttccgcttaaagatgctagagccttagcttctgctattgaggggctgtcgactgacttgcaacttagaacaaagttagctactcaggctaaaaaagattatgaggagaaatttagttatcctttgtttctagagaattatcgtaaattgtatcaaaaactaatgggagatccaaaa

SEQ ID NO: 6568 - DNA, 933 bp, Streptococcus pneumoniae
  misc_feature (1)..(933): tiling:Spneumo1:WAN024BMO; WAN023O6W spn029h04_91||||77050 ..77982|-|933 bp|Glimmer 2.02 orf prediction|S.pneumoniae| 23F-1|WAN01UCO3|ORF
atgagaaatccagtaatacagacatttaatttatcaaaatcctatgatgggaaaattgtcttagataggatagattttacattaagacagggagaaatctatggcttactaggaagaaatggtactggaaagacaacctttatcaaggctattttaggcttgacagctatggatagtggtgaagtgaatattctatctgaaaaactgttaggcgaattttctaaggatttgctatctcaaatcggtgtggtattggacagtgcttctttttatcctaatttaacgggacctgaaaatctctctatttttgcaagattgagagggatttcgctaaaacaggtggagcaagctttacaagtagtaggattagatggggaaaataaaaaactattcaagcagtattctctgggaatgaagcaaaggttagcaattgctaacgctattatgcaccagccgaaaattctgatattagatgaaccaacaaatggtttagatcctattggtatccttgaaatgcgccgttatctaaaggaactcagtaccaatcatggcatttcgattttaatatccagccacattatttcagaacttgaaaagcttgtagatagagttgggatactgcatgatgcccaccttatggctgaaaagactatgaaggaattaatagatggtgcagataaaaggaaaatccacctaattgtttcggatgctcctcaagctaaggaagtgctttgcaggataaatctgcaagaacagattagtattctttcggatatagaacttgaacttcagggagaatcacctacttttgacattgcagtcgtatctaactccttaaaagacaacggaatagttctaaaagaatattcttataaaaacaatgaaagtttagaggattactttaagcggataacaggaggtgagggaattgct

SEQ ID NO: 6569 - DNA, 1809 bp, Streptococcus pneumoniae
  misc_feature (1)..(1809): tiling:Spneumo1:WAN024BML; WAN023O6Q spn029h04_97||||81185 ..82993|-|1809 bp|Glimmer 2.02 orf prediction|S.pneumoniae |23F-1|WAN01UCO3|ORF
atgagaaatcctcaaaatgtgttaaacaatctaacaaaacacagtaaagataaaaactatcaatttgagcgactgtatcgtttgctttataacaaagaaatgtacttagttgcctatcaaacgatttacgctaacccaggacacttgacacctggagtagacgagttgacgattgatggtatgagtatagctagaattgaccaattgattgattccctgaaagatgaatcctatcagccacacccatcaagacgaacctatattcctaaaaagaatgggaagctacgtccactaggtattccatcatttgatgataagctcttacaacaggttattaaaatgattttggaagctatctacgagggacaatttgaaccctcttcccatggttttcgtccgaataaaagttgccatacagcacttactcagattcagaagacctacactggaacaaaatggtttattgaaggagatatcaagtcattctttgataatatcaatcatgatgtgatgattcacattctccgagaaagaattactgatgagcggttcttacgcttgattcgtaaattcctcaatgcgggatacgtggaagattggaaattctacaaaacctactcaggaactccacaaggagggataatcagtcccattctagccaatatctatttggataagtttgataaatatatgacggattatgtgaagaacttctgccaagggaaataccggaaacgtaccccagaatatcgccaaaatgagatagcgttgggaaaagcaagaagagcattagaatgtgtttcaacggaaaatcaacgacaagaagttatccagcgtattcgtcaattggaaaaggaaagagtgttaattcctcatagtgatcctatggatagtagttttaaacgtctaacctatacccgatacgcagatgattttatctgcggtgtgattggcagtaaagaggacgctcatcgcattaaagcagatattaaggactatttggaagcggttctcaaattggaactctctgtggagaaaaccttgattaccaatgcgagagataaagctaagtttctgggatatcatctgtatattcgccaatcgaatttagctaagcgtgattcggcaggacgattggtaagaaattatacaggtagattagtcctagaggtttctattgaaacgattcgagacagattactgtcttacggagctatgaaaatgacttatcatagaggctacgaagtttggaaaccaacggcccgttatttcatgaaagattgcgatgatttagagattttagaacgctacaatgcagaaataagaggtttttataactattattgtatcgctaataacagctctatccttcatcgctttaagtacatcatggaatatagcatgtataaaacttatgcgactaaatatcgtacgactaaatcccacatcatccgtaaatataaaaaggatggtcaatttagtgtacagtatattggacgtaaaggggatacaatgacccgttatttatataacggaggatttaaacgtcaaaagaaatctttccttgaaaatgataatttgccaaatacggcgaaatattttagtcgaacaaatttaattgatagattaaaagcaagccgttgtgagtattgtcaagcgaccgacagttccctagaaatccatcatgtgagaaaactaaaggatttaaagggaaagactttttgggaacgtttgatgatttctagacaacggaaaacaatagcactgtgtaaagattgccataagaaattacatcatggcaagttagat

SEQ ID NO: 6570 - DNA, 174 bp, Streptococcus pneumoniae
  misc_feature (1)..(174): tiling:Spneumo1:WAN024DKC; WAN023MMQ spn191c12_5||||2241.. 2414|+|174 bp|Glimmer 2.02 orf prediction|S.pneumoniae|23F -1|WAN01UCQJ|ORF|001
atgagaacccccttaaaatttattaaaacaaatcactatgactacctgtcctcagcaaatttaaaatcaattcttccttgtctactttataaaccaaaagccaatctggctggatatggcactcacgaactccttgaaaatgcttggatgccgtcaattgatgatcacgatatc

SEQ ID NO: 6571 - DNA, 288 bp, Streptococcus pneumoniae
  misc_feature (1)..(288): tiling:Spneumo1:WAN024BKI; WAN023MOZ spn180c09_133||||1080 51..108338|-|288 bp|Glimmer 2.02 orf prediction|S.pneumoni ae|23F-1|WAN01UCXQ|ORF
atgagaagaaaagatacaattgagtttcttggtttatggaaaagcttaaataacatgaatttcaattcggtcgaattcgaccgaattaaatcggaagctggatataattcatttacattgtctcctaagaaatgggtagagaaaactggagcaatcggaattatctcaaaaggtggaagatatggtggtgcatttgcacatacagatattgcctttgaatttgctttatgtatttctgctgaatttaagatgtatgtaattcaggattacaaaagacttaagtcagat

SEQ ID NO: 6572 - DNA, 1389 bp, Streptococcus pneumoniae
  misc_feature (1)..(1389): tiling:Spneumo1:WAN024BPX; WAN023P9S pne48_10||||7593..898 1|+|1389 bp|Type 23A capsule operon, Glimmer 2.02 orf pred iction|S.pneumoniae||WAN01UCH3|ORF
atgagaattagttttagtaaaaaaactatgctgtgtggtttattgtatattggtttaattttatccgtagtaacaatacctacaattgtaacatttttatattctttgctattcatcgggattgtaacagtcttaaattataattctattctagcaagtgacgaagatgcgaactctttttttgttgcattacctattattttatcttcttttcaaaatgtatatttgggatttggagcggatcgattaaattctgtcacactacaagttctgctatctattagcattgctattattacaattacagtttttctaggtattatcttaaatagattcaaatcaaaagaatttagttggttagttttaagtattcttgtaattataattcaatcagtaattcttttaatattctttcccactaccttgccagcatatttatcatctatgagaaatatactagccccactactgattttttatttttctatctatgggtttaaaaatattaatttacaaaaattttataaatatatgttcataattatattagttgttctaatttttggatttattgagtatatatacggaaatagtttatggacaagattgaatattaaaaagctttgggctttgaaggggctggcgattgagaatagggttgttcctgggaattggcactcttctgaattaattggcggtaaacaattaaggcgtatggtttcaacatttgccgatcccgtaaatctaggttcgtatctctttgcggcatttatgttagcttggtacaaaaataagaaactacttcaagttttattgctcgcttcttttgtactcagtgtaagtaaagcagcgtttttaagcatgttggtatatataataatttatacctgggttgtggataaaaataaaattttatcgatttttggaataataatttcaactgtattggggttgtatttttataattttagtcaagttagcagttatggtagtataaatgcacatatcgatggtttttttagtgcgttaagtactcccctccattacccatttggtatgggagtagggagtgtgggagttctagcttcaaaattaggttcacaaacagcactttcttcagaggttttagaaacaggaattggaatgataattgctcaattaggattcgtgggtgtgataatatatttgattttctttgtaaaactctccgtaataggaaagaatattaataataaaagagataaaattttatggtttactttaatttatagctttttggctaatgccttttttaacgaggttgcactttctcctaactcatgcaccttatattttttaattttaggactgctttataataaaaataaaattagaagcacagagtttagt

SEQ ID NO: 6573 - DNA, 861 bp, Streptococcus pneumoniae
  misc_feature (1)..(861): tiling:Spneumo1:WAN024BZ2; WAN023S66 contig_468_2||||830.. 1690|+|861 bp|Glimmer 2.02 orf prediction|S.pneumoniae|670 |WAN01UD24|ORF
atgagaattctgtatgaccatcaggctttccagtatcagaaatatggaggtgtttcaaattgttttgttaagttaatagaaaaccttccaccagatatagattacgagatagcaatttgtgagactgataatgaacatttgagaaattctaatttagttgatgtaccaaaagagaggctttcctttagaaactttatctctcataatagctttaaggggaagtctcgtttgtataatacgattacatctattctcccgttttttacaacttcaggaagaaatttgaagaaaagcattgagttgctaaacaaacaggatttcgatgtatttcatccaacatattttgatgggtattttttaccttaccttaagaataagccgtttgttttgacagtacatgatatgattcctgaactcatgttcaagaaagtggatttacaagctagaatgaaacctatattatgtgataaagcggctcatattattgctgtttcagagaaaaccaagaaggacctagtcgacattctaaatgtaccacaacagaagatttctgttatatatcatggcgctcctgataaggaaaacagtcttctttccacgcctattatggaaggaaaatacattttatatgtaggcatgaggcatttatataagaattttattcctatggtaaagtctttggttcctattttacatcgccgaccagatattagtatagtctgtacagggccagattttacagatgaggagaatagattatttaaaactcttcgtgttgaaagaaatatgatacacatgagagcatctgacgaagaacttgtcaatttatatagattcgccctttgtttcatactaactaat

SEQ ID NO: 6574 - DNA, 201 bp, Streptococcus pneumoniae
  misc_feature (1)..(201): tiling:Spneumo1:WAN024BXC; WAN023RP6 contig_1583_16||||491 6..5116|+|201 bp|Glimmer 2.02 orf prediction|S.pneumoniae| 670|WAN01UDGB|ORF
atgagaccaagacgatatccgtatagtgggaaaaaagagtccacctttgtaaaggccgaccctgagttagttgaaaaacttttaagaaacactagttttcttgagtgtttacaaaaaaagcctatcaattttcagatagacttagaagaatttaagcgtcttagctatgaagccattcatgatacttctcaagtaactcaa

SEQ ID NO: 6575 - DNA, 258 bp, Streptococcus pneumoniae
  misc_feature (1)..(258): tiling:Spneumo1:WAN024BVA; WAN023Q9Z contig_1258_5||||1092 ..1349|+|258 bp|Glimmer 2.02 orf prediction|S.pneumoniae|6 70|WAN01UEG8|ORF
atgagacgattcatagctatctggattcttgtctctgccggattgaacatctggcatatggacaggattcgagatttggaagagaaaaagccgatggttgtctataaagctgataacgctggcgctgagatattcgggcgtgtcgttgaaaaaggacggcatgggaagttgtatacagtaactatcagagactatgggattttcgtagttacgaaagagcagtttgagaaaatcagagtaggggatgaggtgttactc

SEQ ID NO: 6576 - DNA, 75 bp, Streptococcus pneumoniae
  misc_feature (1)..(75): tiling:Spneumo1:WAN024CZW; WAN023SPC BD003976.1_1||||284.. 358|+|75 bp|Glimmer 2.02 orf prediction|S.pneumoniae|ATCC5 5840|BD003976.1|ORF|000
atgagagaaccagctgatgaaaagggtgagatattagtagatagagcgccaataacggtggctgttgtgagtaag

SEQ ID NO: 6577 - DNA, 1071 bp, Streptococcus pneumoniae
  misc_feature (1)..(1071): tiling:Spneumo1:WAN024BRF; WAN02413X |cap1J||CAB05928.1||| 1071 bp||S.pneumoniae||Z83335|ORF
atgagaggaaaaacaattctaattacaggagtagctggttttattggatcaaatctggttaggaaattattggaattagaaggaacgatgacaatcattggtttggacaatttgaatgattactatgatattgcacttaaagattatcgattgcttcaacttaataagctaattcaggattatccagaaaaaaactggatatttatcaagggtgatattgcagataaaatgcttattaataagatttttaagagttatcatcctcagattgttgttaatctagctgcccaggcaggagtacgctactccattacaaatccagatgtatatatagaaagtaatatcgttggctttcataatgtgttggaagcttgtcgtcattcgtatgagatatatgatggtggtgtggaacacttagtttatgcatcgtcctcatcggtatatggtggaaataaaaaaatcccgtttgcaacagaagataaggtagacaatcctatttcactatatgctgcgactaaaaaaacaaatgaacttcaagcgtatgcttattcaaagatttacaatattccttcgacaggcttacgcttttttacagtttatggtcctgctgggcgcccagatatggcctattttggatttacagataaattgcgaagtggttccgatattgagatttataatcatggtaattgtaaacgagattttacttatatagatgatatcgttgaggggatagtaagggtcatgcaatcagctccgaagaaactagtgggatctgataatttaccgttagccccatataaagtgtacaatattgggaatagtaaacccgaaaatttgttagattttgtggatgttcttcaacaggagctaatcaaggcaggagttttgccggaaaattatgattttgatagtcataaaaaattagttcctatgcaaccaggcgatgttcctgttacttatgcagatacaagtgatttagagagagattttggttttaaaccaaaaacttctttacgagaaggtttgagaaagtttgcagagtggtataaagactactataatgtataa

SEQ ID NO: 6578 - DNA, 228 bp, Streptococcus pneumoniae
  misc_feature (1)..(228): tiling:Spneumo1:WAN024DWV; WAN023I96 86804_3405||||1935164 ..1935391|+|228 bp|EGAD orf prediction|S.pneumoniae|TIGR4| WAN01UC25|ORF|010
atgagaggcaagctagtaaagccagcaactgataaaatgaccgcaatcatacatgccatatatagagtgtggtgccctgttaaaaaaatatatttaaatcgagtaaaacgagcgattaagatattgaacaccatgcctgcaaacataatcattgcagtagctgagccatatgttgttaaagctacagctacaattgcttcattattcggcacaacgccagataaatga

SEQ ID NO: 6579 - DNA, 188 bp, Streptococcus pneumoniae
  misc_feature (1)..(188): tiling:Spneumo1:WAN024F8K; WAN023IQQ 85804_2664||||1515242 ..1515529|+|288 bp|EGAD orf prediction|S.pneumoniae|TIGR4| WAN01UC25|ORF|010
atgagatgcgttcttcaggcagataaccaatccgagcataggtctcctgacgaatatcctgaccatccagaccgatttctccctgatattctaggaatttcaaaatactatggaaaatcgttgtttttccagcaccattttttccgactagtcccaaaatacgacctggtcgcgcttgaaagtcaata

SEQ ID NO: 6580 - DNA, 174 bp, Streptococcus pneumoniae
  misc_feature (1)..(174): tiling:Spneumo1:WAN024BNQ; WAN023OBP spn019g01_46||||32447 ..32620|-|174 bp|Glimmer 2.02 orf prediction|S.pneumoniae| 23F-1|WAN01UCLR|ORF
atgagatgtttttatgtcagcggtaaaattgcagatcttgatttggggtcagaaatcaatgcagaaaattcatttatggctgctattgagtttgtgaaacgatataccgacttattaaagtttggttcaaatgaaatcaaggtatcagaagtagaggaggtgcaaaatgataaa

SEQ ID NO: 6581 - DNA, 912 bp, Streptococcus pneumoniae
  misc_feature (1)..(912): tiling:Spneumo1:WAN024FQ2; WAN023OPA pne79_18||||14029..14 940|+|912 bp|Type 37(2) capsule operon, Glimmer 2.02 orf p rediction|S.pneumoniae||WAN01UCFV|ORF|000
atgagcaaatttcgaaatattaacttagatttactaaaagtgcttgcatgtgttggagtcgttctacttcatacagctatgggtgggtttaaagagacaggtgcatggaattttttgacatatttatattacttaggaacctattctatccctctattttttatggtcaatggttatttattgttggggaagagagaaattacctattcctacatattgcaaaaaataaaatggctcctaataacagtgtcgtcatggacttttatcgtttggctgtttaaaagagactttacagagaacttaattaaaaaaattataggttctttgatacaaaaggggtatttcttccagttttggttttttggtgcactcatacttatttatatatgtttgcctattttgaaaaatttccttaatttaaaaagaaattatttatacattctatctgtattgctggttattggtttgatttttgagttagcgaatattgtatttcaaatgccagcacaaacatatgttatacaaacctttagattatggacttggtttttttactaccttttaggtggttttatagcgcaatttaacaaggatattatcagaaataggtttaagatatggatgaaagtagctactgtactcttattattaatttcaccattaatattatttttcttagcgaagaccacttaccataatctttttgctgaatatttttatgatattttatttgtaaaagttgtaagtttaggaatttttctaactatattctcacttgcattgaatcaagatatcaacaaatggattatttttctttctaaccaaactatgggtgtctttataatacacacttatattatgaaagtgtgggaaaaactatttggttttagttttgtaggagcatatttactt

SEQ ID NO: 6582 - DNA, 231 bp, Streptococcus pneumoniae
  misc_feature (1)..(231): tiling:Spneumo1:WAN024B55; WAN023IJ3 86218_2972||||1683512 ..1683742|-|231 bp|EGAD orf prediction|S.pneumoniae|TIGR4| WAN01UC25|ORF|010
atgagcaatatcggtcatagaaatcttctcaatcaacttttgcgcaattttttggttgataatacgaggaatttgatgattcttcttgacgatagaagtttcagcgaccatcattttagaacaatgatagcacttgaaacgacgctttctaaggagaattctagtaggcataccagttgtttcgaggtaagggatcttagacggtttttgaaagtcatatttcttcattag

SEQ ID NO: 6583 - DNA, 126 bp, Streptococcus pneumoniae
  misc_feature (1)..(126): tiling:Spneumo1:WAN024D82; WAN023N9F spn145f10_24||||18622 ..18747|+|126 bp|Glimmer 2.02 orf prediction|S.pneumoniae| 23F-1|WAN01UCTX|ORF|001
atgagcagacgtaatcgtcacttcaaatcgatttgtttctttttcaagtcggttcaagcaatctacaagcacatcataaaaaagatttgctctgtgattgtaggccagaacctggataaagttttg

SEQ ID NO: 6584 - DNA, 240 bp, Streptococcus pneumoniae
  misc_feature (1)..(240): tiling:Spneumo1:WAN024BY8; WAN023S0L contig_1622_1||||43.. 282|+|240 bp|Glimmer 2.02 orf prediction|S.pneumoniae|670| WAN01UDAK|ORF
atgagcattagctttgataacaaagacacggctcctacactagatgacaatggtgacctttttgaaccggtctacaagtgcaaagttaaggcaattcccaaaaatgatgtatttttcacctcattaacacgggtcaagagcaacatcaagacgctacaagaggttaaaaaattctttgagttcgtaaacgaaaacagagaaaatctctttgagatggcaggatttaagggggctcttgaa

SEQ ID NO: 6585 - DNA, 1566 bp, Streptococcus pneumoniae
  misc_feature (1)..(1566): tiling:Spneumo1:WAN024BO4; WAN023OCA spn019g01_23||||20538 ..22103|-|1566 bp|Glimmer 2.02 orf prediction|S.pneumoniae |23F-1|WAN01UCLR|ORF
atgagcctatttcaaaaagtaaaagacttttttagtcgagggaggtattacatgcagacatcaaatcttaatagtattttggaacatccaaaaattgcagtgactcaagaggagtatgaccggattaagagaaatctagtctactatcaatcaaaatgggatgatgttcagtacaagaatacggatggagatattaaatcccgtccaatgaatcacttgccaattgcaagaacagcatcgaagaagattgctagcttagtttacaatgaacaggcaactatcacaacaaaaaacgaaattttacagaaatttttggatgacatgctaactaacgaccgattcaataagaattttgagcggtatctagaaagctgtttggcacttggtggcctagctatgcgcccttatattgacggggataaggtcagagtggcatttattcaagcgcctgtgttctttccactagaaagcaacacacaagatgtttcaagtgctgcaatccttactaagactatcaaatctgaggggcgtaagaacgtttactatacccttgttgaatttcacgaatgggtaacagcagacggacaagaaacaggtagcacaaacgataaaaagtattatcgtattacaaatgaactttacaggtcagatgtgaatgatgtgttaggtcaacgtgtgaacttgagtgaactagacaagtacaaaaatttagagcctgtaacagtctttgaaaacctatcaagacctctatttacttatctaaaaactccaggtatgaataacaaagacatcaacagccctcttggattgtctatctttgataacgcaaagacgactattgactttatcaatcgttcttacgatgaatttatgtgggaagtgaggatgggacaaagacgagttattgtgcccgaacatctaacacaaagacaatatcaacgtccagatggaacaatagattttagaccacggtttgatgttgagcagaatgtttatatgcaaattggcggctctagcatggatgccgggggcattacagaccttacctcaccaattcgagcaaatgattatattttggcgatttcagagggattgaaactctttgaaatgcagattggtgtatcaagtggcatgtttacattcgatggtcaaggaatgaaaaccgcaacagaaattgtcagcgagaactcagacacttatcagatgcgaagtagtattgtcgcacttgttgaacaatctatcaaggagctttgtgtttcaatgtgtgagctcggtaaggcggtaggggtttatagcggagaaattccagaacttgatgatatttcagttaatttggatgatggtgtatttactgataggcatgcagaacttgattattgggctaaaatggtagccgcaggattctcaaccaaaaaacgggcaattggtaagacattaaatatttctggtgttgaggcagaaaaagaactcaatgctatcaatagtgagttgctacctatgaatgatgccgaacttgctatttatggtatgcatgaccaaaacgaggagaaagcagatgacaaaggt

SEQ ID NO: 6586 - DNA, 240 bp, Streptococcus pneumoniae
  misc_feature (1)..(240): tiling:Spneumo1:WAN024FP3; WAN023LLP 314507_1625a||||86304 7..863286|-|240 bp|EGAD orf prediction|S.pneumoniae|R6|NC_ 003098.1|ORF|100
atgagccttatcgatagagatgaacaattccccaatataggcatcaaactcagacatcatctctgccaattctggattttcaagcaaatcctcttcgtcaaaggcaatttccaattctggtttatactcaaggctgatgacatctgtcggacggtcggtgtcacggtactccagattaagttcatgactacgctcattggtcacaaaagtgactgccatctccttgtcttcttttcctaa

SEQ ID NO: 6587 - DNA, 312 bp, Streptococcus pneumoniae
  misc_feature (1)..(312): tiling:Spneumo1:WAN024CGN; WAN023I2T 87189_3700a||||210755 3..2107864|-|312 bp|EGAD orf prediction|S.pneumoniae|TIGR4 |WAN01UC25|ORF|010
atgagctcaatcttgttgtccttagccgcttccaagtggctatccaagtcacgacgagcgagaagccctccgtggatatttgggtggagggtcttcacacgaccgtccatcatttctgggaaaccagtcacatcatcgatagcaatggtatccaccccagcattatcaagggcaaccttagttccacctgttgagataatctcccaaccaagttttttgagttcttgggcaaattcaacaatgcccgctttgtctgagacgctgattaagacgcgtttagtcattatattctcctttttaatcattagttaa

SEQ ID NO: 6588 - DNA, 111 bp, Streptococcus pneumoniae
  misc_feature (1)..(111): tiling:Spneumo1:WAN024FHE; WAN023W7L AX570184.1_1||||1..11 1|+|111 bp|Glimmer 2.02 orf prediction|S.pneumoniae||AX570 184.1|ORF|000
atgagctggcgttttttctatgcccatatttccggtcaaatcattggaaaattccgactgtttcagctaaaatggaagaaaaaagattggagtatcctatggctaactaat

SEQ ID NO: 6589 - DNA, 180 bp, Streptococcus pneumoniae
  misc_feature (1)..(180): tiling:Spneumo1:WAN024BYF; WAN023S0W contig_1623_20||||115 62..11741|+|180 bp|Glimmer 2.02 orf prediction|S.pneumonia e|670|WAN01UDAF|ORF
atgagcttattgctacgacgtcattatatccaagaggagcaggttagccagtattctgatttagagaataagactctagaagagttgaagaatctagccaaagaagctggcatagctggcgcctataagttatcaaaagccgaaattgtagaggtgctggaggatttaaaaagtgaaatt

SEQ ID NO: 6590 - DNA, 903 bp, Streptococcus pneumoniae
  misc_feature (1)..(903): tiling:Spneumo1:WAN024FOR; WAN023PJK pne32_13||||9672..105 74|+|903 bp|Type 16F capsule operon, Glimmer 2.02 orf pred iction|S.pneumoniae||WAN01UCIC|ORF|000
atgaggaaagaaattaaagctgtttatgcgatattaaattacaatacttgggaagatactgcgcgtttagcacagaaagttgcaacatttcagcatattcaatctgtgataatagtggataatctatcaacagatgattcataccattatttaaaaagacttgagggagagaaaatttcagtttatcaaacacaaagaaatggtggatattctgttggaaataattttgcagcacgaaaagcttataatatgggagttgatattcttttcatttcaaatccagacgttgatattgatgaaaaagattccttgatgattgcacaaaatttgtataaaaatagttcatatgcactgctatcaggtatagaatataatgctatgaaggagatagatttgccaattgtctggcatgaaaattcctattacgatgacttacttgattgtttgtttttaaccagaaaatggcgaagaaaaaaagaagatatcaatttgtcaatgattaaatcatctataatagatgtagatcttgttaaaggatcgttttttgctgtaagactgtctgattttcatgatgttggttattttgatgaatctgtatttcttttttgtgaagagagaatattagctaaaaagttacaaaaagtaaataaaaaaataggtattctgcctgaagcgaaatattaccacaatcattcaacttctataaatgagagatataaaaagaaaaaagaacagattaatttattatataagtctcgatactactataatgtaaagtataataatattagttttgtcaaaaaactatgtttaaaatctgtcatgatgctatccattttagaatatataatcttagatatgatgaatttattatatacaaagactaactataagaaaattcaa

SEQ ID NO: 6591 - DNA, 87 bp, Streptococcus pneumoniae
  misc_feature (1)..(87): tiling:Spneumo1:WAN024FDJ; WAN023S8S NC_003028.1_2246||||1 705110..1705196|-|87 bp|Glimmer 2.02 orf prediction|S.pneu moniae|TIGR4|NC_003028.1|ORF|010
atgaggagaggtatcagcatgagagatttgattttccttaaagctcaaaataggatagttgagcctaaagaagtggaagtgctgact

SEQ ID NO: 6592 - DNA, 918 bp, Streptococcus pneumoniae
  misc_feature (1)..(918): tiling:Spneumo1:WAN024CD2; WAN023OIL pne88_15||||10753..11 670|+|918 bp|Type 45(1) capsule operon, Glimmer 2.02 orf p rediction|S.pneumoniae||WAN01UCBS|ORF|000
atgaggatatctgttgcgatgacaacctataatggagcagattatttgctagagcagctagaatcgcttcgcactcagagtttaatggctgatgaagttattattgttgatgattgttcaacggataatacagttgagctacttgatatgtatattcagaagtatcatctcgataattgggtattgattagaaactcatctaatataggttggagaaaaaactttagaaaagctcttcaagagacaacaggagatatagtttttctttgtgatcaagatgatatttggaacaaagataaaatttcactgatggtaaaagagtttcataaatcgccgtcaatagaactattggctagtaactatgagattctcgattttggcagaaatgataaaatcaagattagggatgttgagttagataatggtgctgtagttccgttttcgttaaaaaacaagagtatttctgttatgagaccaggatgtacttttgcagttaagcgtgagttaatagttctgttagaaaagtatgatatagatagatttggccatgataatattttatggaatctagctatgataagaggaactctatatctatacttaaaacgcttaatacattttcgtcgccacgagacaagtgcttctgctcctaaccaatctcttaatcgtgaccggcgagttgttgaagtggatacgagtcatcaaattacagttttcttacttgatgcggctcgtagagaacatttagacataaaaataatttctcagcttgaaaatatggaaatggttcttgagagacgtagagatattttaaaatatggtactcttatgcaaatagttcatttccaactgaagtatcatacttattatcctacattccgcaatttattatcggatatattagtgtttttgaaaaaa

SEQ ID NO: 6593 - DNA, 378 bp, Streptococcus pneumoniae
  misc_feature (1)..(378): tiling:Spneumo1:WAN024CHL; WAN023MF4 314416_81a||||41965.. 42342|-|378 bp|EGAD orf prediction|S.pneumoniae|R6|NC_0030 98.1|ORF|100
atgaggcttatagtctggactaggtgccataaaaagagtcactcctgtccattcttcctcaaaacgctcacgtggcagtttagtcaacttcaccccgggatctggatcggcaatatgaatgctatccttatcctgcccagtcaccacatagtagtggagcaatttcccttccttaagcacatgggcaacaaaaggaaaagtcaaatccggcaagtcaaaaagcgtcatatccgccttaatggctcgcgtctcaaaaccaatctcctctgccaccttaaccaagcccaaagccgtcgtcccatccatggtcgtcttagccaattctcgcaagtgagccaaaaaataataactaccatagtagccaaaaaccatggctaa

SEQ ID NO: 6594 - DNA, 186 bp, Streptococcus pneumoniae
  misc_feature (1)..(186): tiling:Spneumo1:WAN024BRY; WAN0241ME |||AAR22392.1|||186 b p||S.pneumoniae||AF376746|ORF
atgagggaatgtaaaatgaaatattttgaggttgagttagaaaatcctgatgaatttttaaaactacaaacagaagattttgtgaaagctaatcgcttgctactaaggaagataatccagagcgttacagtctatgaagaaaacttcgtcatatcctttaaatctggcatcgaattggaagtatga

SEQ ID NO: 6595 - DNA, 1467 bp, Streptococcus pneumoniae
  misc_feature (1)..(1467): tiling:Spneumo1:WAN024BP5; WAN023OK6 pne86_20||||15186..16 652|+|1467 bp|Type 43(2) capsule operon, Glimmer 2.02 orf prediction|S.pneumoniae||WAN01UCFZ|ORF
atgagggataatatgacaagttataaagttaaatctatcaggtataattttataatgaattttattttgactgtttcaaatttcatctttccattgttaacttttccctatgtttctagagtacttcaagttgaggcgaatggtactgtagcatatgtatcatctattgtatcttattttatgatgattgcttcacttggtattccaacgtatggcatacgtgctgcagcaaaagtacgtgatgataaaagaaaattatctaccattgtccaagaactattgattattaatgtaattcttgtattcttagtactcattgcatattttataatgttgtttactttacagtcaatgtacgtctataaagaattattctatatcaatgcaataggtatactattaaatgtcataggagttggttggttttttcaagcaattgaacaatatgattatattactcttagatcgattttcttcagacttttatcattagctatgattttcttacttatccatagtcctgaggattatattatgtatgcaggaatttctgtttttgctagtgtgggatcaaatattttaaattttaaacgattatttgaatatatatcatttaaaaagacagaaacttatcattttaaaccacatataaagccgattttgattttatttgctcagacattggtagtgtcgatttatacgaatcttgataccgttatgctaggaagtatgaaaggaacatatgatgtgggattatatactgcagcaacaaaactaaaggggattctcttgagtgttgttacttcattaggaaatgttttgcttccaagaatgtcctactatgctaataatcaaatgaaagatcggtttttggaaatcataacaaaagctttgaactttacgttattcttatcgcttccattgtcagtattctttatttcagtatcaaaggaaagtattttgctacttgctggggaaggatatttaggtgctgttataggaatgcaatttttaatgtttgcagttattcctaatgcacttacgggtttattaggtattcaagtattaacacctttagaaaaagaaaagtacgtattactttcagtgacttcaggagcgttaatagatttactactaaacttcattttaattccagcttatggtgtaagtggagcagcatttgccactatgattgcagaattcgttgtattatgcgttcagatttactatacgagagatttgctattaaagaggctacatcaaatagttggcattagatatctatgctcggtaggggtgagtactattggaattgttcttgtaaagaaattacaattaagtgattttttgttattatgtgtggaaggaatcattttctttggaagttacggtgtgattctagtgttgttaaaggatgatttcattcttgatttttttaaaattttctataagaaattaaagaaaatt

SEQ ID NO: 6596 - DNA, 99 bp, Streptococcus pneumoniae
  misc_feature (1)..(99): tiling:Spneumo1:WAN024BTP; WAN023ZGS AL449923.1_194||||162 563..162661|+|99 bp|Glimmer 2.02 orf prediction|S.pneumoni ae||AL449923.1|ORF
atgaggggcttggctttaattgtggatgaaaacctttctaatacctcaaatagcataaaaatagtatcttttatgacaaaaacaccttatttagggaaa

SEQ ID NO: 6597 - DNA, 102 bp, Streptococcus pneumoniae
  misc_feature (1)..(102): tiling:Spneumo1:WAN024BAM; WAN023VWE AX571009.1_1||||1..10 2|+|102 bp|Glimmer 2.02 orf prediction|S.pneumoniae||AX571 009.1|ORF|000
atgagggggctagtcttatctgcaatctcaaatcagtgttttgagctgaatggcactcgttttctagtttgctctttgattttaattgggcctctaactaat

SEQ ID NO: 6598 - DNA, 81 bp, Streptococcus pneumoniae
  misc_feature (1)..(81): tiling:Spneumo1:WAN024BKN; WAN023MPZ spn180c09_93||||78497 ..78577|+|81 bp|Glimmer 2.02 orf prediction|S.pneumoniae|2 3F-1|WAN01UCXQ|ORF
atgaggtatcttgcgacacccgattattctttagataagaaaaacggtcaattggcttcatttatctttcctttttctttt

SEQ ID NO: 6599 - DNA, 276 bp, Streptococcus pneumoniae
  misc_feature (1)..(276): tiling:Spneumo1:WAN024BMZ; WAN023O7I spn029h04_69||||57197 ..57472|-|276 bp|Glimmer 2.02 orf prediction|S.pneumoniae| 23F-1|WAN01UCO3|ORF
atgaggtcacgcatggaatttattagagctgcgaatcaatttatagaaaattactatccaagagaagatcttgaccgtattgaaagtatagagataggaataagggattctgaaaattattctcgatattttttagaaattcaaaaacaatctgaagagtttgagtgtgacttctttaattttgataacatagattattatgtagtggatgattctgttcattttaaacagattattaacttagagaatagttcctatgtgttttggaaagattat

SEQ ID NO: 6600 - DNA, 117 bp, Streptococcus pneumoniae
  misc_feature (1)..(117): tiling:Spneumo1:WAN024BMK; WAN023O6C spn029h04_111||||1016 00..101716|+|117 bp|Glimmer 2.02 orf prediction|S.pneumoni ae|23F-1|WAN01UCO3|ORF
atgaggtgtctatttttttacccgattttgaaaggaagtgaacttatgaaaacaaaaaatcaagaatcaaaaggtcgttccccactctttaagaccatcaaacattcattcagccaa

SEQ ID NO: 6601 - DNA, 354 bp, Streptococcus pneumoniae
  misc_feature (1)..(354): tiling:Spneumo1:WAN024BZA; WAN0242FJ SP1131||15900997|NP_3 45601.1|1065434..1065787|+|354 bp|transcriptional regulato r, putative|S.pneumoniae|TIGR4|NC_003028.1|ORF
atgagtaaagaaaacaagatgcgtggatataggaatatgctaggtttaacacaagagaaacttggaaaaaaacttggtatatctaagcagagttattacaacaaagaaagtgggaagacacaattttcagataaagaaaaacttaagattaaaaatcttttaatccctttatttccagatattacaatagaagatatattttttaaacagaagtatgcaaaagtaaagagtgcaaaaaatggaattaaagcgaaaataaaagccgtgtacaggcgaccaaaccaacgtacacggctaaggaaaaataacaaaactcaagcaaaggcaaggcgcgtggttttgttaggtatttag

SEQ ID NO: 6602 - DNA, 1386 bp, Streptococcus pneumoniae
  misc_feature (1)..(1386): tiling:Spneumo1:WAN024FY7; WAN023P8Y pne49_16||||12455..13 840|+|1386 bp|Type 23B capsule operon, Glimmer 2.02 orf pr ediction|S.pneumoniae||WAN01UCCI|ORF|000
atgagtaaatataaggaattagcaaaaaatacaggtacttttgctttagctaatttttcatcaaaaatattaatttttttgttagtacctatatatacaaaagttctaacaacgacagagtatggtttttatgatttggtttatacaacaattcagctccttgtaccaatcctgacattgaatatatctgaagcagttatgagatttttaatgaaagaagatgtttcaaaaaaatcagttttttcgattgcaatacttgatatatttttagggtctattattttttgtttgttactactggtcaatcaaatattttctttatcggagttaatttctcaatatagcatatatatcatggcgatttttgctttttatacacttaataattttttgatacaatactctaaagggattgataaaataggtgtaacggctatctctggagtcataagtgcagcagttatgctttcgatgaatattttattgttagtggtattaaattggggactactaggtttttttatcgcaaatatttgtgggtatgtcattccttgtgtatatataatagtaaaactaaaattatgggatttatttgaacttaaaattgatagatcgttacagtgggaaatgatatattatactttacctttgattttaaatactttaagttggtgggttaataacacttcagataggtatattataacagtaattataggtatacaagctagtgcgattatttcagttgcttataagattccacaaattttttccacaattagcgctatattcattcaatcgtggcaaatatctgcaataaaaattcaggaagaaaaagaaggtaacacctttatatcaaaaatgcttttatattataatgcactcttgctgattatagcgagcggtatcattctatttgtaaaaccaatctctaatatactcttcggagcttcattttattcagcgtggacgcttgtaccgtttttaattattagcagtttgtttaatgcgatttcgggttatataggagcgataatgggcgctaaaatggatactaaaaatattgctaaatctgctttggttggaatgatagctaatgtttttttaaatattgtattaacatttttaatgggactacaggggattacaatctcaactatgatagctagttttcttattttttatatgagaaaagatagtgttgaagaaattgctccagaaacatatagagctatttatctttcgtggtttttgttagtggttgaggctagtcttttggtttatatagattttattattggggctacattagttacattaatcaatttatttttattaaaggatactcttaaaccattatgtttaaaattattaaaaggatttaaa

SEQ ID NO: 6603 - DNA, 1062 bp, Streptococcus pneumoniae
  misc_feature (1)..(1062): tiling:Spneumo1:WAN024BP8; WAN023OK9 pne86_17||||12061..13 122|+|1062 bp|Type 43(2) capsule operon, Glimmer 2.02 orf prediction|S.pneumoniae||WAN01UCFZ|ORF
atgagtaacttatattatattcatgaagagtttggtagtgattcaacggcggctacaaaagcaccaaatgatttacagaaaatatttcaagactgtaaatttaaaccattagtaacattaaaaaaaaatagtaaaatagtaagaatatttgattacgcgtttaaacttttgttgtgtcttattagaattagaagtaatgatattgtgatatttcaatttccttttgctactcatgggaaactaaaaaattttttaatgaaattactacaatataaaaaagctaaaatgatctttttaataaacgatttagagtcgttaagatattcgggaaataaaaaaaatctaatttctaaggaacagtatattaaaaatgctgatgtgattatttgtcataaccaacgaatgaaggagtttttaatagaaaataagattgacagtgaaaaaatagttgtactcggtgtttttgattatttactggataagtttaataaagaaaaagcatcttttgataaaacagttgtaattgcagggaatctttcgcctcaaaaaagtggttatttaactgagttattaaaaaatgaaaatagaataaaatttaatttatatggacctaattttacttcatcgactaacaataatgattgtgtatcatataaaggaagtttttcgcctgaaaaaattccttttatacttgaaggtgattttggattagtttgggatggcgattctatattaacttgttcagggattactggggagtatttgaaatacaataatcctcataaagtgtcgttatttatagcttcaaaaataccagttattatttggaaacaatctgccttgagtgattttgttaaagaaaataatattggaattgtagtaaatgatttaattgaaatgcaagagattattactaatatgactgaagagcaatatgagatttttagagaaaatattgaacagttgtccaaaaaggtaaggcaaggctattttacgaatttagcgattgaaaaatctttaagcataataaaaaataatctcaataattattttgaggaagat

SEQ ID NO: 6604 - DNA, 1515 bp, Streptococcus pneumoniae
  misc_feature (1)..(1515): tiling:Spneumo1:WAN024BQF; WAN023PHY pne34_18||||16370..17 884|+|1515 bp|Type 17F capsule operon, Glimmer 2.02 orf pr ediction|S.pneumoniae||WAN01UCHZ|ORF
atgagtaatagacttgttaatactagaagaaatattgtttggggaacattaaataagcttattgcgattgctttaccatttttagttcgaacaactttgatttatcaattagggatacaatatgtcggtattagtggactttttgcatctattttacaagttcttagtttagctgatttaggtttcgctaatgcaattgtatatagtatgtataaacctcttgcccatggggataatgacactgtcggtgcacttctaggattttataaaaaaatatatcgagtcgtcggggtggtaatattaattgcgggccttttaattgtgccctttataaattacttagtaaagggttcctatcctgcagatatcaatatacaactaatttacttaatttatctggcaaatacagttgttagttactttctttttgcttataaacgctctttattgttagctagtcaacgaaaagatatatttgacaacattgattcagttgctcgcataattttaagtggattacaaattttattattgtttctttttcctgatttctatgtttttgctttagtaattccctgtatgacaatccttaataatgtatttaacgaaatcgtgactaagaaaaattacaattatatcgttgaaaatagtaacttagataaaaaagttaaacaagaaattattgaaaaaacaaagggattatttgtctacaaagtatgtgggattacaagaaattccctcgataacatctttatttctacttttttagggattacgacagtgggaatttatagtaattattattacattatgatatcagtaaaaggttttttggatgtggtttctacaggaatgagtgctagtgttggacatagtgttgctactgaaagtgttgaaaaaaatcatcgtgacttagaaaatcttacatttggtttctcttggttagctacctggtttatgacatgtttattatgtctgttccaaccatttatgcttttgtgggtaggacaagctaatattttaccattttcagtcgttgttgctctctgtttttacttttatgttcttgctgcaggtgatatgcggagccaatatattgacgcctcaggtttatgggataaagaaaaactacggtcaattgcagaaacggtaggtaatgttgttttgaattatattttggttcaatttttaggtgttttaggaatagtgctagctactgcactaacaattttgtttattggaattccatggagtacaaaaattgtgtttgataattattttaaaaatggttataaaaagtatttgtggaatcaagcagtatatgctatagtaactataattgttgctagtattacttatctaatctgtacactagttggtggcaataacatcgtggttttaattataagaggaataatttgtttatttgtccccaatattttatattacttattctttttaaaaaatgaacagacgcgtctgtttttcaaaataatcaagtcgaaattattaaaa

SEQ ID NO: 6605 - DNA, 243 bp, Streptococcus pneumoniae
  misc_feature (1)..(243): tiling:Spneumo1:WAN024C2L; WAN023L0I 315169_2602||||138474 4..1384986|+|243 bp|EGAD orf prediction|S.pneumoniae|R6|NC _003098.1|ORF
atgagtagaaacaagagggcttgcaccatcaaatccatctcttactactgtagtagttataccacctttaccatcgttaattgtaattgtatgcgttccatcttgaccatcagttactttaactgttggggttttcccatcttctccttttggtccttgttcaccatcacgcccttgaagaccttgttcacctttgtcccctttttcacctttagcaccatctgcaattacaacttcttttaa

SEQ ID NO: 6606 - DNA, 97 bp, Streptococcus pneumoniae
  misc_feature (1)..(97): tiling:Spneumo1:WAN024AWB; WAN0240FS |cps19BA||AAD19919.1| ||97 bp|Cps19BA|S.pneumoniae||AF105114|ORF|000
atgagtagacgttttaaaaaatcaagttcacagaaagtgaagcgaagtgttaatatcgttttgctgactatttatttattgttagtttgttttttat

SEQ ID NO: 6607 - DNA, 1149 bp, Streptococcus pneumoniae
  misc_feature (1)..(1149): tiling:Spneumo1:WAN024BQN; WAN023PN0 pne26_18||||12419..13 567|+|1149 bp|Type 13 capsule operon, Glimmer 2.02 orf pre diction|S.pneumoniae||WAN01UCIU|ORF
atgagtagtataaaagtaagtatatatcagttacttttttacgtatcttttattattatagttggttcaaaatatttaagggaaacggtttttgtaaatgcatatcctctgttaagtgaattgataaaagttttaataattatagcatgtatctttttattattaaaatatatattagaaccacatactaaaaagttcattattttttcgatagttattttaacgataggagtagtagtatcttataattcagatagtttttttattttaatgccagtagtagcactaatattaaatatgagtaatatagatataaccaaggttataaaagtttggcttatagagattatagcattaatgatttttctagcaatatgttatagactaaatatagtaggggaagttataaactcagcaattagatcagatgggaaaatacgatatgctctagggtataaatattcaacatttagctcaaattactttttccatgttacgattttctatttatatttaagaaaacatatgattaagtatgtagagataataactttatttcttataaatttgtatctatatgctttaactgatacgagggcagtattctactactctacagcagctattgttatttgtttgttgttaaagatgtttaagataaaaacatatagcattattttgaataaatacagtatgttattttcagcaataatagctggagttttgtcatggagttatcggtatagactaccattttttgatcagttagatttaatattaacaggtagattacgacttggaagtgctgcttttaataattttcacataacattttttggacaaaaaataagatggatttatgaacaaaatatgttttctgaattgatatataattatgtggactcttcatacctaaatattttatttggatttggaataataattttactattaatattagttggatattatattattggagaaaaaaaactaagtagagatacatattatacaatgatgattgtgttcttatcactacattctacatttgatcctcaattaatagacatagtgtataatccagcgattttgtttttgggatatgttatatataatgaagatgagataaaaaatctaaataaaatttac

SEQ ID NO: 6608 - DNA, 1296 bp, Streptococcus pneumoniae
  misc_feature (1)..(1296): tiling:Spneumo1:WAN024BYO; WAN023S15 contig_1623_11||||438 6..5681|+|1296 bp|Glimmer 2.02 orf prediction|S.pneumoniae |670|WAN01UDAF|ORF
atgagtcagacataccagattaaacaaagtgatattgtaatcgacctacctaagacagtaggagctgggtacggacagttctggcgctcaagaaatctttatcgtgttgtaaaaggttcccgtggttcgaagaagtccaagacaaccgctttaaactatgttgtccgtcttttgaaatattcctgggccaacttgcttgttattcgtaggtattcgaatacaaataagcaatcaacttatacggattttaaatgggcgtgtaatgtgttgggggtgactcatttgtttaaattcaatgaatctttgcctgaaataaccataaaagcgactggtcaaaaaatcctattccgtggtttggatgatgaactcaaaattacatctattacagtcgatatcggtagtctttgttgggcatggttcgaggaagcgtaccaaatcgagactgaagacaagttcagcacggttgttgagtctatccgtggtagcttagatgtacctgatttctttaaacaaatcacagtcacatttaacccgtggaatgagaggcattggctcaagcgtgtattcttcgatgaagagacgagacgggctgacacattcgctactacaaccacttataaatgcaatgagtggcttgatggagtcgatatcaaacgctatgaggatttgtatcatacgaaccccagacgtgctagaatcgtttgtgatggtgaatggggagttgctgaaggtttaatctatgagaacgtgaccgtcaaggatttcgataaggatgaattgctacgagattcagctaataagttatgtatcggtcttgactttggttttactcacgatccaaccgctttgtgttgttcgttgataaatgacacgacgaaagagatttatgtctttgatgaggcgtataaagtcggattgataaccaaagaagttgcgaagatgataaaagacaaaggttatcatcgctcacaaatcattgctgatagcgcagagtcacggctgattgaagagctcaggtcagaacatggcatatctagaataaaagagagtcggaaaggtaaggatagtattatggcaggcgtatccaaattgcaaggatacgctatttatgtgcatccagattgtaaaaacatcatggatgaattttatagttactgctaccagcgagataaagaaggcaactggttgaataaaccagaggataaaaacaaccacttgatggacgctttgcgttacagccttcaatgtatcgaaggtgggaaagcaaccgtccgcagacgttctgattatggtcta

SEQ ID NO: 6609 - DNA, 375 bp, Streptococcus pneumoniae
  misc_feature (1)..(375): tiling:Spneumo1:WAN024CBR; WAN023R3E contig_1454_2||||1235 ..1609|-|375 bp|Glimmer 2.02 orf prediction|S.pneumoniae|6 70|WAN01UDT7|ORF|000
atgagtccaggaacttttatagcattgactggagctgcagttttaacaaaaaaactaataaactatattaaggttggaggccttggaggttggcttattggtgcagcagcaggtgtattggctcttatctttttgataaaaatttgtgtagatactacgataaaggttctattaaacagaatctttaaggcaagtaaggtaatgaaaaggaggatattttctctttttgtactagatttgatggtctatatatttttaggttatgttttagtgatacaaaaagacgtatatctgttttcaattctgataattttttctaatttttcagttccctttatcagagaaaaagagtatgaattatttaaaaataagaaa

SEQ ID NO: 6610 - DNA, 474 bp, Streptococcus pneumoniae
  misc_feature (1)..(474): tiling:Spneumo1:WAN024BSQ; WAN023XXD AL449942.1_7||||5650. .6123|-|474 bp|Glimmer 2.02 orf prediction|S.pneumoniae||A L449942.1|ORF
atgagtcgtacttatataaatataagacttgcatacgaaaccaagtattggttagaatgtatacaagaagaggttcaaaaaaaattagatgctttaattaatgaacaagatatagaggagttagaatcaatcatcactaataagttagaaaaaaaagattctctattgggggctgtttccataacaacttttttcaaggtatcttcttcaagcgtgattgaaaaagcctataacgagacaaaaaattacactacttcagaatggcgagaaattgcaaggcaaatgaatttggcaaaagttaagcaaaacatggaaattgggacgttaacacctagattatatttagataataatattatttcagaattagagaagtatcaatttttattcaaaagtgatgatatgataaggcaggtaaggatgagctatgttattaaaatggtcgcatttgcctactataaaaaattgtttgca

SEQ ID NO: 6611 - DNA, 339 bp, Streptococcus pneumoniae
  misc_feature (1)..(339): tiling:Spneumo1:WAN024BVT; WAN023QLV contig_1315_23||||172 30..17568|-|339 bp|Glimmer 2.02 orf prediction|S.pneumonia e|670|WAN01UE9N|ORF
atgagtctatcagagaatgacaagcgagttttaagactaatcaaggtaggggctgagaactccataacagggtcagaaattagcctgacaaccaagctaacagaaagaactgtacgtgacattatcaagcgtctagtagttaagcacaacatccctattgtaggggttagatgcggcgtttttagtgggtactttattccggcgaataaaggcgagttactagatggcgctaaggctttttacaaccaagtacaggaggagagcaagcgcctagcggtgttgatgaatagcgacctagaaagctacaaagaaaccttgaaggaggtgggcggatatgtt

SEQ ID NO: 6612 - DNA, 84 bp, Streptococcus pneumoniae
  misc_feature (1)..(84): tiling:Spneumo1:WAN024BKG; WAN023MKB spn194g09_4||||3206.. 3289|-|84 bp|Glimmer 2.02 orf prediction|S.pneumoniae|23F- 1|WAN01UCP7|ORF
atgagtgaaaattatcaagttggaatgtttgtatctaaatatattagcatgtatttagataagatgtctgcaatcctttatata

SEQ ID NO: 6613 - DNA, 126 bp, Streptococcus pneumoniae
  misc_feature (1)..(126): tiling:Spneumo1:WAN024BGA; WAN023RZV contig_1620_10||||357 6..3701|-|126 bp|Glimmer 2.02 orf prediction|S.pneumoniae| 670|WAN01UDAT|ORF|000
atgagtgaagtaactcttgttcaaagtggttttacgatttcaagaactcctctcagttctgaggacacggtgattgtggatgcaacagaggtaaaaataaatcgtcctaaaaaaagaattagcgaa

SEQ ID NO: 6614 - DNA, 210 bp, Streptococcus pneumoniae
  misc_feature (1)..(210): tiling:Spneumo1:WAN024BJV; WAN0244V4 ||||||210 bp|Incyte o rf contig SPN2C0120 740-949|S.pneumoniae|23F|WAN0244V4|ORF
atgagtgattacaaacaacggatgattgaagaatacaaacaattaaaagagcgcaccaataagttaagtttgatgattagtaactattacgtaggaacacttgattttaaactaaaatgtcctattgagttacttgaaactcaacactatacaatgtgtgcatatctcaagatccttgaacagcgtgcagaaattgaaaacattgagttt

SEQ ID NO: 6615 - DNA, 1374 bp, Streptococcus pneumoniae
  misc_feature (1)..(1374): tiling:Spneumo1:WAN024BQ9; WAN023PH8 pne35_17||||14272..15 645|+|1374 bp|Type 17A capsule operon, Glimmer 2.02 orf pr ediction|S.pneumoniae||WAN01UCHX|ORF
atgagtgcacaggcggtttctttttttgtttctctgattttaacacgaatcttatccccaagtgattacgggattattgcgattattaatatttttatagctattgctgatgtacttttagctagtggtttaaatactgctttgatacagaaaaaaaattcaacgagactagattataatacgattttttggtgtaatattatactgggttgtgttctgtatctagtattatttttagtagcaccagtccttgcagatttttataatatttctatacttacaccagtcattcgaatttttgcactgcggttacccatttcttcttttcaatcaattcaaaacgcatttgtttctaagcatatgcagtttaagaagtttttttacgccacctttttgggttcgctagtatctgctgttgttggaattacaatggcttatacaggttttggtgtatgggcacttgtagcacaatatttagtaaatacggttgttggaacagctacactatttgctatcattagttggcgtccaaaatttgaattttctttggaaagtgccaaacccttagtccaatatggctggaagataatgtttacagaccttacaggtacgattttcaacaatttaggagactttatcattggcgcatactataattcatcttcacttgctttttattctaaagggcgccaattaccctatctaattagaaataatatttttacttctttgataagtgtactcttcccaggaatgtctcaggttaatgatgatattgaacgtattaaatctttttcacgtaagagtgtctcaatcttatcttttttaatttttccaacaatggttggtttaattgtgactgctgaaccactaactatcttaatgtatactgaaaaatggctacctattattcccttcgttgtgattgtatgttcggaagcaattttatcagttataccaacggtaacaatgcagacaattaaagcattaggacgtagtgatttaacactaaaaatagaatttataaaaaagcccatttatctattaacgatttttgtatctttaaactttggaatagtggctattgcctttacattaattattaatgcgattattgaaatgattattaatggtttaattgtacaaagactaatcaagtactctttgtgggaacaatttaatgatatatttggttcattaatgatttcaattatgatgggcttattatcatatttagtgatttttttaaatttaaacatttatctcacattattgttacaagttgttactggtgtctctagttatctcattttagctattgtatttaaaaacgaatcattcattgagttgaaaaatagatttttgagcactgag

SEQ ID NO: 6616 - DNA, 192 bp, Streptococcus pneumoniae
  misc_feature (1)..(192): tiling:Spneumo1:WAN024EUQ; WAN023OK3 pne86_23||||18856..19 047|-|192 bp|Type 43(2) capsule operon, Glimmer 2.02 orf p rediction|S.pneumoniae||WAN01UCFZ|ORF|000
atgagttctctagtctggagatttttcaatagacttcgttattgggcggttacattagaagcgactaataatctcattaaattcctcaaacgcaacgcctttggttttcggaactttgaaaacttcaaaaaacggatttttatcgctctgaatatcaaaaaagaaaggacaaaatttgtcctttctcgagct

SEQ ID NO: 6617 - DNA, 255 bp, Streptococcus pneumoniae
  misc_feature (1)..(255): tiling:Spneumo1:WAN024BGB; WAN023P7E pne53_10||||3725..397 9|+|255 bp|Type 25F capsule operon, Glimmer 2.02 orf predi ction|S.pneumoniae||WAN01UCCQ|ORF|000
atgagttgtttgatcgcttttcatttggccactcttcaatatgtgcgagaatatcgcacttatgaacaaattgcggctgattttggtattcacgaaagcaacttaatccgtcggagccaatgggttgaagtaactcttgttcaaagtggttttacgatttcaagaactcctctcagttctgaggacacggtaatgattgatgcgacggaagtaaaaatcaatcgccctaaaaaaagaattagcaaattattctgg

SEQ ID NO: 6618 - DNA, 873 bp, Streptococcus pneumoniae
  misc_feature (1)..(873): tiling:Spneumo1:WAN024BOS; WAN023OG7 pne91_18||||11092..11 964|+|873 bp|Type 47A1 capsule operon, Glimmer 2.02 orf pr ediction|S.pneumoniae||WAN01UCEE|ORF
atgagtttaaaagttacagtatttacagctacatataataggatgaacttgttaaaaaaattgtatgactctctagtgaagcaaactagtaaagattttgagtggataattgtagatgatggttcaacggatgatacctcaacggtagttcagcaatttttatcagaaaataaattggatataagttatatttatcaagaaaatagtgggaagcatagagcggttaatgagggattggacagagctaagggacagttgttttttatagtcgactcagatgatgctctccttccgaaagctatagccaccgttattgatagattcacaactattcaagataatcccaaatatgcaggcatcgcttttaatcgaggatattcagagacagtaatcgttggggaaacgtttgaaggggaatttatagattgtgataatttgcatcgagtaaaatataatattcttggtgataaagctgaagtctacagaacagaaattttaaaagaaataaaattcccagaaattgagggagaaaattttatgagtgaagtagttttgtggaatgaagtagcaaggagaggacacaaattacgatggttcaatgagattatttacatatctgattacctagaggacggcttgacgaagaatagtacgactatttttaaaaaaaatccaattgctcataaaatgatgacaaaagagttattacagattgattatcctttaaaaaacaaatttggacatatttataagtatcatcagatccaacagaattctgttcaagagacagctagagatttacatatttcatatatagcagtcggtattattgtagcaatgggaaaagtaaaagatttattaaaaaagagtaaa

SEQ ID NO: 6619 - DNA, 1092 bp, Streptococcus pneumoniae
  misc_feature (1)..(1092): tiling:Spneumo1:WAN024BP4; WAN023OIN pne88_13||||8556..964 7|+|1092 bp|Type 45(1) capsule operon, Glimmer 2.02 orf pr ediction|S.pneumoniae||WAN01UCBS|ORF
atgataaaaattttatatgttaacggcgggactatggatagaggtggtgtatctacttttatgatgaatgtttatgaaaaaatgcattctgaaaaaattcaaattgattttttagtccataccttatccgaaggtgtacgcgatgaggatattttaaatcttggaggtaaaatctttagagttcctgctagaggaaagaatcctctaaaaaattatcgccaaattaaacaaattatgttgaatggaaattatgatgtagttcatgcgcatgctgatgcaggaaataggacaattttatctattgcaaaagagtgtgatattcctattcgtatttcacattgccataatacaaactatacaaacaaaagtttattaaagaagtttttgaatgagcaattcaagaagcaaattccgagatatgctactcatctatgggcttgttcagaaaaagcaggagagtggttgtatgggaatcactcttttgaagttattcctaatgctattgatgttcaaaagttcatctatagtccacaattatctaaagatttacgtaaggaattaaatttagaaaataagtttgttattggtcatgtaggacgatttgattatcagaaaaatcatgattttcttcttaaagtttttacggaatttatcaatgaaagagaagatgctcatcttgttctcataggtaagggagaattggaagaggttattaaaaagcaagcaaatcacttaggaatattggataagattagttttttaggcgagtcttctaatgtgaatgaactgattaatgtgtttgatgtaggtgttttcccatctctttttgaaggttttagtatagctatggtagagatgcaagtcaacggtttaccattagtggtttctgataatgttccaagtgagattaatttaactgataatatacgttttttatcactggatgaaacagttaaatattggtgtaaaacgattttggagaccaaaggacgggatactggggcagttgataaaattattgctaagggttataacctgtctgatatggttcataagttaacaaaaacttatgaaagaattgtagataaatca

SEQ ID NO: 6620 - DNA, 558 bp, Streptococcus pneumoniae
  misc_feature (1)..(558): tiling:Spneumo1:WAN024BPR; WAN023P81 pne52_22||||14173..14 730|+|558 bp|Type 24B capsule operon, Glimmer 2.02 orf pre diction|S.pneumoniae||WAN01UCCM|ORF
atgataaagagttttttgattatgccaaaaaataaagtttataatactggcgagacagacattgagttgaaaaataaatacaattatgaaggtagtgagttgaggaaagttcaagttcgtatgattgatatgctttcttttttgaatgatatatgcaaagaaaataacatcacctatttcattgcttttggaactctattaggagctattagacatggaggctttattccatgggatgataatctttatatttatatttatattaatgataaaggtttaaaaaaacttagaaaaataattaataatggaaactatccctatgttattcaagactattctagtgataaaggatttgtaaggtattatagtgttctcagagatactaactctgaatatataaaaaatgaatatcaacataatcagcgtaaatacagaggtgtacaaattgacttattcccttatggttatggtgtaatgaaatggggtgaacgtcttattggaaaaatatatggttttaatgaaaaaatatttttagggaaaataaaatgttggcagcat

SEQ ID NO: 6621 - DNA, 543 bp, Streptococcus pneumoniae
  misc_feature (1)..(543): tiling:Spneumo1:WAN024D7N; WAN023OBQ spn019g01_45||||31912 ..32454|-|543 bp|Glimmer 2.02 orf prediction|S.pneumoniae| 23F-1|WAN01UCLR|ORF|001
atgataaataacgttgttttagtagggcgacttacaagagatgccgaactgagatacacgcaatctaatattgcggttgctacgtttactcttgctgtaaaccgtccatttaagaacgaggctggagagcgtgaggctgattttatcaattgcgttatctggagacagttagctgaaaatcttgctaattgggctaaaaaaggctctcttatcggagttacaggagtaattcaaacacgtagctatgataaccagcaaggtcaacgtgtttatgtcacagaagttgttgccagtaattttcaactgttggaaagccgtaacagtcagcaaaataatcaaggtcatcaagaccatcatggcggttatcagcagcagggctacagtaatcaaggcagttctttccaaaatggaaatagttacgggcaacaaggcagtttcgttgaggggaacacaacaaatctagttcctgatttcacccgtgataacaatccatttggcagacccacaaatccattggatattagtgatgatgatttaccgttt

SEQ ID NO: 6622 - DNA, 255 bp, Streptococcus pneumoniae
  misc_feature (1)..(255): tiling:Spneumo1:WAN024CQZ; WAN023J69 84906_1989||||1133488 ..1133742|+|255 bp|EGAD orf prediction|S.pneumoniae|TIGR4| WAN01UC25|ORF|010
atgataactagaacgtgcatatctttttcaaaagctagatactctgccgcagttaaagcaatgcggggagttgcaatacgctcaattgcaggatcatttgccaagttcataaataaaaccgaacgatcgatcgctcctgtttttctgagttcttccataaaaaactcagcttcttcaaaagtaatacccattgctgcaaatacaaccgcaaaattttcatcagaatttaaaacagtcgcttgtcttgctatctga

SEQ ID NO: 6623 - DNA, 720 bp, Streptococcus pneumoniae
  misc_feature (1)..(720): tiling:Spneumo1:WAN024BTB; WAN023YJU AL449929.1_28||||2814 1..28860|-|720 bp|Glimmer 2.02 orf prediction|S.pneumoniae ||AL449929.1|ORF
atgataacttataggaatgacttgctgtctaaagaattagatatactaatttcattttttaaaaaatgcgaggtaggaaaaatttcactcgttattactggttccttggcaagaggtaatccaagaatcaaggatgggaaattagaatcggatattgatattctagttatagtagacagtattcagcaattaattagtataaaaaagactttagagggaaggtttcactttgtacataaaatttctttgattttttgtttgaaggaaagaataaatcgaagtcgttatcgtggaattattaatagtattagaagtgtagataatcttttagtagataatctgcatataaaaaatcaaataatagaagctttagactcacctaccaatattgtggagcagactcgctctatgattcaggaattttgttattattcatcaaaatatttaatttcaaagaataattatttggaattaaaactagaaaagtattggaaggagattgcaacattaaatcatatcgataaaaagataaaacacctagattttgaaagaatatttgctgttttaaaagaacacaaaatacaaattttggattcaagtgaatattttttccaaaatgtaaaaacttctgagaatatttatttagagatgagggatttagtatctttggaaaatcaaggattagactttgaacattgtattttgagcttgggggaaaga

SEQ ID NO: 6624 - DNA, 669 bp, Streptococcus pneumoniae
  misc_feature (1)..(669): tiling:Spneumo1:WAN024BTE; WAN023YJX AL449929.1_25||||2584 1..26509|-|669 bp|Glimmer 2.02 orf prediction|S.pneumoniae ||AL449929.1|ORF
atgataagattaccaaataaatttaaaggtaataatataactctagaagttaaactaaataaagcagttgatgctagtgtattatacccagatgttaagtctctagatcaagaattgtatcgacaactacaatcagtagaatcattctatcttaccttttctgatatgtattcagaaattaatgaaaataatgaaatcttatatacagaaataatctttaagatacctctttgtattggagaagattattttaattttccggttgtatcatatgtttcaaatccctattcgttaataagaggattttatctaggttttcataaggaattggactgtaactatgtatttgatgatgcagagcttcatttttttagggaagggatttgtgaatttaacttcgaatttaaaaatcaaaattcaatcattacagcagaattaccaagggagtataactatcccttgatcttgtttaataattccaatctggttaatcaatatggaaaatatactttgttagacatagacaaatataaattagagtctagaaagatttttgaatttccagaaatttctatcggtaactttcttggaagtgaagcaaaatcaaatagggtaatttttagccaagataaatttcaaattaatggtataaagaatatggaggtaaat

SEQ ID NO: 6625 - DNA, 960 bp, Streptococcus pneumoniae
  misc_feature (1)..(960): tiling:Spneumo1:WAN024BPY; WAN023PBU pne43_16||||12559..13 518|+|960 bp|Type 20 capsule operon, Glimmer 2.02 orf pred iction|S.pneumoniae||WAN01UCHC|ORF
atgatacataaaattattaatcgattatcacttacgattcaacaatgtagtggcgataaaccatttactatcaaattagttaatgcatatgtagaactattaagaaatacaaaatctagagaattaagaaattatgtaataaagaaacacattaaaaaaaccacgaatatttctcaaattaaggaagtttttctagagaatagtaatactttaatacaaaaaactgaatttcctaaatttatctggactatgtggtggcaaggagaagagaatgcacctgagttagtccaaagtacactctattatattagaaaatttgctgaaactaatggttatacgacagtagttattgataaaaataatatagataagtatctagtagttcctgaattcgtatatgcaaagttggagaagggtagtataggtgttgcaaatttttcagatttaatccgatttatgctaatggaacaatatggaggaatttggttagattcaacgatgtatgtccatccagatttccctattgaaatattagaaagagaattttcttcgataaatcatagggataattccagccaatcaatggatgacaatataacaaataaacgctgggtttcattttgtttgagtggagagaaagggaacattgtttctcgagcaatgcgagcttttttattagatcaaattgaaaataataaagtattacctgattattttataattgactttggtttagattatctatatgatgaatttgaagagataagggaaataataaaaagtatccctagatattctagtcaagaagacatcttttggttgagaatacatagtaaagatagttttaacaaagaagaatggtataatgaaacgaaaaaaaatcaacttttcaaaagtagctataaagaagatgaaacagtgaaagatagttatttcgactatcttgttaaaagaaagtta

SEQ ID NO: 6626 - DNA, 405 bp, Streptococcus pneumoniae
  misc_feature (1)..(405): tiling:Spneumo1:WAN024CFX; WAN023Q9W contig_1258_8||||2214 ..2618|+|405 bp|Glimmer 2.02 orf prediction|S.pneumoniae|6 70|WAN01UEG8|ORF|000
atgataccaaaatttagagggttatccattgacgaaaaaagcaaaggagaatggcaatacggacatttaattgaagatagaggaagagcatttattatcaacgaagtggtagaagccaatgaacaatacattactataggttcttggtgtcctgtaaatccagcaacattaggacaatcaacaggactcagagacaagaacggcaaggaggtattcatcggtgacatcgttaaatgtacaagaggatgtctccatgaagtatatttagaaaaagaatacggtggcacattcataggcggaatgccttccatatatctaaagggattgctaagtgggtatgcgtggactgaagacgaggaaatcatcggaaacgtctatgaaaatccagagcttttggaggataaa

SEQ ID NO: 6627 - DNA, 291 bp, Streptococcus pneumoniae
  misc_feature (1)..(291): tiling:Spneumo1:WAN024BZJ; WAN023IT3 85666_2560||||1452310 ..1452600|+|291 bp|EGAD orf prediction|S.pneumoniae|TIGR4| WAN01UC25|ORF
atgataccaagaacaagatttgcaatcttcaaggcattcaagagtaaggctacacctgaaaaagcccctgcagtagctcctccattaagagttgtagcagctgtgtttaccgctattcccaacaagacaaaaggaccaataagaagtaaaattcctcccacaagaccgacgataccactaattaaagcaagtctttttaattttataataaaatctccttttttatttttttcaaataaaattgtatcatatttgcttttaaaaaaagtatgttctgatattataaaataa

SEQ ID NO: 6628 - DNA, 417 bp, Streptococcus pneumoniae
  misc_feature (1)..(417): tiling:Spneumo1:WAN024CFW; WAN023OC1 spn019g01_33||||26656 ..27072|-|417 bp|Glimmer 2.02 orf prediction|S.pneumoniae| 23F-1|WAN01UCLR|ORF|001
atgataccgaaatttagagtgtggcatcatgaattaggtagactgatgtcagtcaaatgtatgttttttcaggatagcgagattgaagaatttgagttaaacgatactttaaggaatgattacattacagcttatcctgatgaaatcgaactcatgcaatcaacaggactcaaagacaagaacggaaaggaaatctttgaaggcgatattgtacgaactactagatttttgggtagagctgacgaaattggcggtttctatgaatatgagaaagattatgtaggagttgtaaaggttcttgaagggtcttgggttattgatactggcagtgtcgcagtgcgtttgtggtctgaaattgatgaatctgaagtgcttggcaacatctacgaaaatctagagtttttggaggtcaacgag

SEQ ID NO: 6629 - DNA, 393 bp, Streptococcus pneumoniae
  misc_feature (1)..(393): tiling:Spneumo1:WAN024CFY; WAN023S1B contig_1623_5||||1498 ..1890|+|393 bp|Glimmer 2.02 orf prediction|S.pneumoniae|6 70|WAN01UDAF|ORF|000
atgataccgaaatttagagtgtggcattatgaattaggtagactgatgtcagtcaaatgtatgttttttcaggatagcgagattgaagaatttgagttaaacgatgctttaatgaatgattacattacagcttatcctgacgatatcgaactcatgcaatcaacaggacttaaggacaagaacggcaaggaggtattcatcggtgacatcgttaaatgtacaagaggatgtctccatgaagtatatttagaaaaagaatacggtggcacatacataggtggaatgcctgctgtatacctaaaaggatttggagatggatatgcgtggacggaatatgaggaaatcatcggcaacatctacgaaaatccagagcttttggaggtaactcatgaa

SEQ ID NO: 6630 - DNA, 75 bp, Streptococcus pneumoniae
  misc_feature (1)..(75): tiling:Spneumo1:WAN024C3A; WAN0246OB 208410-65-5_2||||805. .879|-|75 bp|Glimmer 2.02 orf prediction from Patent Seque nces|S.pneumoniae||WAN0246XL|ORF
atgatacgtttttctgattttaaagatttttcccaacttcaaacatgcttaggacaagaggaaggtgacttcgtt

SEQ ID NO: 6631 - DNA, 225 bp, Streptococcus pneumoniae
  misc_feature (1)..(225): tiling:Spneumo1:WAN024FXT; WAN023J6S 84873_1962||||1120020 ..1120244|-|225 bp|EGAD orf prediction|S.pneumoniae|TIGR4| WAN01UC25|ORF|010
atgatacttttacagtacccatgttcggatggcatgggcaacgccggattcgtcatttgttttggtgatgtatttggcgatttttttgatttctggatttccattttccatgacaacggggtttccaacgacttccagcatggcacggtcattttcttcatcaccgattgccatggtttcatctttggtcaatccgagtttttcagccaagtgagtaatggctga

SEQ ID NO: 6632 - DNA, 438 bp, Streptococcus pneumoniae
  misc_feature (1)..(438): tiling:Spneumo1:WAN024AWW; WAN0244PS spr0130|rimI|15902174 |NP_357724.1|138565..139002|+|438 bp|Ribosomal protein ala nine acetyltransferase|S.pneumoniae|R6|NC_003098.1|ORF|100
atgatagaaatcaaacgaatccaacagcaacctgacttggctcaagatatctacgctgtcatggcagctgtttacccagtcagtccttggacactagaacaaatccaagcagatctgtcccaagaccagacttggtatgctctggcctatgatggggcagaagtgattggctttctaactgttcaggagactctctttgaagcagaagtcctgcaaatcgctgtcaaaggagcttatcagggtcagggaattgcgtcagccttgtttgctcaattgccgacagacaaggaaattttcctcgaagtcagacagtcaaatcaacgagcgcaagcattttacaagaaagaaaagatggcagttatcgctgagcgaaaggcctactaccatgacccagtcgaggacgccattatcatgaagagagaaatagatgaaggatag

SEQ ID NO: 6633 - DNA, 435 bp, Streptococcus pneumoniae
  misc_feature (1)..(435): tiling:Spneumo1:WAN024AWX; WAN023ZG2 AL449923.1_220||||184 465..184899|+|435 bp|Glimmer 2.02 orf prediction|S.pneumon iae||AL449923.1|ORF|000
atgatagaaatcaaacgaatccaacagcgacctgacttggctcaagccatctacgctgttatggtagctgtttacccagttagtccgtggacgctggaacaaatccaagcagacctgtcccaagaccagacttggtatgttctggcttatgatggggcagaagtgattggctttctagctgttcaggagaatctttttgaggcagaagtcttgcaaatcgctgtcaaagaagcctatcagggtcagggaattgcgtcagccttgtttgctcaattgccgacagacaaggaaattttccttgaagtcagacagtcaaatcatcgagcgcaagcattttacaagaaagaaaaaatggcggtcatcgctgatcgaaaggcctactaccatgacccagtcgaggacgccattatcatgaagagagaaatagatgaagga

SEQ ID NO: 6634 - DNA, 96 bp, Streptococcus pneumoniae
  misc_feature (1)..(96): tiling:Spneumo1:WAN024BL6; WAN023NAS spn143g10_70||||57996 ..58091|-|96 bp|Glimmer 2.02 orf prediction|S.pneumoniae|2 3F-1|WAN01UCOL|ORF
atgatagcacttaaaacggccttttctaagaagaattctagtttgaatttttttatactagaaaatcagaaccataatacctatataaaaatatta

SEQ ID NO: 6635 - DNA, 192 bp, Streptococcus pneumoniae
  misc_feature (1)..(192): tiling:Spneumo1:WAN024BVK; WAN023QHP contig_1298_19||||106 57..10848|+|192 bp|Glimmer 2.02 orf prediction|S.pneumonia e|670|WAN01UEBQ|ORF
atgatatttaaggtgctcttgatccaacatctccataatttatcagatgatgcgatggaatatcaactctttcatcgtctgtcatttcgtcattccacaggttgtgatgaatgtaaagtacatgatgcaaaaaccatctggttgtatagagaacgcttgaccaaatcagagaaagaacaagaattatctgag

SEQ ID NO: 6636 - DNA, 1272 bp, Streptococcus pneumoniae
  misc_feature (1)..(1272): tiling:Spneumo1:WAN024FZC; WAN023MH0 spn_ends-38g02_19|||| 9411..10682|+|1272 bp|Glimmer 2.02 orf prediction|S.pneumo niae|23F-1||ORF|001
atgatcaaactggtcaacaagatactggtgataatgatgcggataactgataatcagcataaaattgctaaagaagactttgtcgcagaatatcccaaactaagtcaagctcttcttgatagaacactggataacctttctagagaggataatatctttatttttccaaatgatttgactcatactcctgatttggataaggaccaaaagatttttgaaacagtcaatcagaaaatcaagacagggaacgtgattggttttcttggatatggtcaggaaagattaacgatttcctcacgattttctgatgagagtaatgaccattttttgcattatctcttaaacaaggttcttcatatcaatctcactagtttagatgttgctttgtctcgtgaagagaggctttatcaacttttgatgtatctcttccccaagtatctacaagctgctattcgaaaaggtctttataaggaatatcatcgattttctcataacgacagtcatgttaagggagtaattgatgtaagaaaccatctcaagaaaaatcttcctttcacgggaaatattgcctacacaacgagagagttcacctatgataatcccctcatgcagttggtccgtcacactattgaatgcattaagaatcagaaaagcattggtcaaggggtactagataatctctcaactagtcgtgaaaacgtatctgaaatcgtgcgtgtaacgccctcttataaactagctgatcgtgctaagattatcagaatgaataaaatcaaacttatccgacacgcctatttcagagagtatagaaaattacaggaactctgcttggtgattctgagtagagaaaagcatggtcttggacctcaagcccaaagggtacatggtattctctttgatgttgcctggctttgggaagagtatgtttacaccttgttgccaaaaggttttgtacatcccagaaataaggataagacggatggaatttcagtattttctgttgggaaacgaaaagtatatccagatttttatgatagagaacgaaagattgttctagatgcaaaatataaaaaactggaattgactgaaaaaggaatcaaccgtgaggacttattccagctgatttcctattcttatattttaaaagctgagaaggctggacttgtttttccgagcaaggacaaggttattgataatgagataggaaacctagcaggttatggtctattcgaatccctcagaatgcctcattctatagtacattttgtaaaa

SEQ ID NO: 6637 - DNA, 414 bp, Streptococcus pneumoniae
  misc_feature (1)..(414): tiling:Spneumo1:WAN024D7M; WAN023Q7E contig_1244_3||||771. .1184|-|414 bp|Glimmer 2.02 orf prediction|S.pneumoniae|67 0|WAN01UEHP|ORF|000
atgatcaataacgtcacactggttgggaggcttgtagcgcctcctgatctacgaaaaacgcctaataatgtatctagtttacagggcacgcttgcagtcaatcgcaatttcaaaaacgaaaatggagagcgtgaggctgattttatcaattttcaagcttggagaggtacagctgacatcattgctcagtattgcagcaagggctcacttattgggatcattgggcgcttacaagttaggtcttacgagaaagacggtcagcgtcgatatgtgactgaagtaatcgctgagagtgtagctctgctagagagtcgcaacagtcagcacggacaaggcaacagtttccaaaatgggaatagctcaccttttaccgatcctaacccctttgacctcccaaatgacggtttgccgttt

SEQ ID NO: 6638 - DNA, 288 bp, Streptococcus pneumoniae
  misc_feature (1)..(288): tiling:Spneumo1:WAN024CHW; WAN023MFP 313303_55a||||31324.. 31611|-|288 bp|EGAD orf prediction|S.pneumoniae|R6|NC_0030 98.1|ORF|100
atgatccagcaactcacgaatgaaaggaaattgctcacgaaactcatcaggagtcttggcccgaccacccttatagtccgcatacatctctgtccggaaggtcgtctttcccgcatcaaaagccaccaaaatatgactcggctcaacccgctccaacaaatgactcaacatcaactgaaaaccataaatcgcattggtatgcaaaccagccgcattcttaaaacggtccaactgctgatacagcgcaaaaaacgcccgaaaagctacagaagacccatcaatcaataa

SEQ ID NO: 6639 - DNA, 276 bp, Streptococcus pneumoniae
  misc_feature (1)..(276): tiling:Spneumo1:WAN024CS9; WAN023JE2 84492_1680a||||965508 ..965783|-|276 bp|EGAD orf prediction|S.pneumoniae|TIGR4|W AN01UC25|ORF|010
atgatccccacggaatgttcttttgataaagtgaataattttcgggcgctattaaaaacttttgaatttttcccgtctgataaggttacagcgctatcagaagccaatacaacaccatttttatttaatattccaatttctgctgtcaaaatatcacctaaactttctaaacctgctcatgctctaatggtacaacagctaaggtcttaccaagacttgccaacacttttaatactgtatcaagttgtgggcttgtctttcctgtttccattctag

SEQ ID NO: 6640 - DNA, 315 bp, Streptococcus pneumoniae
  misc_feature (1)..(315): tiling:Spneumo1:WAN024CT4; WAN023JGG 84314_1553a||||885669 ..885983|-|315 bp|EGAD orf prediction|S.pneumoniae|TIGR4|W AN01UC25|ORF|010
atgatcctctggcgagaaagactgaatgatgtggtgagcgtgtatttttcgttgattttcttccatcctgtcgtggcgaaaatcgtaaagcgtatcgttgctgatgaaattttcatgatacatctgcaccatttcctcatagctaggaaagtccagaaaattcttcatgccatagtccgacaccaaggcaagattattggttttctcaggattgagaatgtacttgataagctttctgcggtaactctttccgtgaatggcaaagtgtttagtgatgaccatggaactcctttagcttctgcgcttgcagattaa

SEQ ID NO: 6641 - DNA, 333 bp, Streptococcus pneumoniae
  misc_feature (1)..(333): tiling:Spneumo1:WAN024BUP; WAN023Q9C contig_1258_29||||127 66..13098|+|333 bp|Glimmer 2.02 orf prediction|S.pneumonia e|670|WAN01UEG8|ORF
atgatcgaattagttataaagaaatttttggacggacagttagatgtaccgtctttttttgaacataaaccgaatatgcctgagagttatgtcattttagaaaagactggaagtggtggaagcgactacgttcattccgctacattcgcttttcaaagttatgcaccatcacttcaaaaggctgctgagctgaatgagaaagtcaagaaagtagttgaggatctcatcacggtcaacgaagtcagcggtgtgcatcacaatagtgactacaactttacagacacggaaacgaagcaatatcgctatcaagcggtatatgacattaattatttt

SEQ ID NO: 6642 - DNA, 882 bp, Streptococcus pneumoniae
  misc_feature (1)..(882): tiling:Spneumo1:WAN024BRT; WAN02418Q |||AAP94610.1|||882 b p|putative glucosyltransferase|S.pneumoniae||AY336008|ORF
atgatctctatcattatgccagcttataatgaagaaaaaaatatcggagcagttattgccggtattcaacagcaaacctatgcggactttcagttgattatcgtcaatgatggatctacagatgatacggcagctattgtacaggaaaaaatcatgggagatgagcgaattgtctttttgaatcctggaaagattggcaaggtaccagcttataacttggcttcacagtatgtaaaaggagactggatatattttatgggagcggatgaccagttgccattggatgcctttgaaaagtggaacaaggaggctcaaaagtggaatcctgctgaaaaggtggctttaagagctcgcatgcggatggtttctgactctcacaagtatgatggattggtattaccaaagaaaaatacagttcgcaattttagtggacctcttaccttgctttcaaaagagatgcaccgttttatccttcctatacctgaggcctatccgaacgaagatatttggtgggggctatgtattgagtatttcggagatcgtgtttcgttgattgaggatgttgtggtttattatcgtgttcatgaggggaattctatatcccgaacctcaacttttgaaccttttaacgagaaatatcatatccgtcagattatccgtcgtgattttttagagagatttagcaatcacttaacagcagaccagaagactaaacttcagcgtgaattgaaactagaagaagcacgctataaaggaaatagattgccaattcttctgatgccaggtatttctgcagtacacagacttcgattactttttttatcgggtaggcgttcatatgtacttaaagtcaaattggatcgctttttcttaggacattag

SEQ ID NO: 6643 - DNA, 855 bp, Streptococcus pneumoniae
  misc_feature (1)..(855): tiling:Spneumo1:WAN024BRA; WAN0240FN |cps19AO||AAD19916.1| ||855 bp|dTDP-L-rhamnose synthase|S.pneumoniae||AF105113|O RF
atgatcttaattacaggtgcaaatggtcaacttggtaccgaactacgttatttactaaatgagcgaaatgtggactatgttgcagtggatgtgaccgaaatggatatcactaattctgaaatggttgaaaaagtctttgctgaggttaagccaactctagtctatcattgtgcagcctacactgctgttgatgcagccgaagatgaagggaaagaactggattttgccatcaacgtaactggaactgaaaatgtagccaagggctctgagaaatacggagctattctggtctatatctcaacagactacgtctttgatggaaagaaaccagtaggacaagagtgggaagtcgatgacatacctgatccgcaaacagagtacggacgtaccaagcgaatgggagaagaacttgttgagaaccttacgtcacagcattacatcattcgtactgcttgggtttttggaaattatggaaggaactttgtctttaccatgcaaagcctagccgaaacccataaaacgctcacagtggtcagcgaccaatacggtcgcccaacttggacacggaccttggccgagttcatgacctatgtgactgaaaatcaaaaagagtatggctactatcacttatcgaatgacgcagctgaggacaccacttggtatgactttgctagcgagattcttaaggagagtgatgttgaactattgccagtagactctagcaagttccccgctaaggctaaacgacctctcaactcaactatgagtttggcaaaggcaaaggcaacaggtttcgtcatcccaacctggcaagatgcccttaaagagttttataaacaagaagtaagaaaataa

SEQ ID NO: 6644 - DNA, 288 bp, Streptococcus pneumoniae
  misc_feature (1)..(288): tiling:Spneumo1:WAN024CVP; WAN023K2F 82839_450||||252965.. 253252|+|288 bp|EGAD orf prediction|S.pneumoniae|TIGR4|WAN 01UC25|ORF|010
atgatgaaaaacagctgtttagcagcaactgtctatatatgttgtttgtccaaaataatttcatacttttctccttatgtctgcacatcgaatgggaatttattatttaatagacaccaatataccccatgcttcctattccgaagtcaaacaaatctgctttaccactatctccttgaaacatcagtaaaccgtgatcatctcgttcagaacatgctaaaattacctgttggatttttttcatcagtaatttgttttgattgtagacagtggtttgtagtaagctag

SEQ ID NO: 6645 - DNA, 657 bp, Streptococcus pneumoniae
  misc_feature (1)..(657): tiling:Spneumo1:WAN024BRD; WAN0240Q7 |||AAG12995.1|||657 b p||S.pneumoniae||AF227520|ORF
atgatgaagaggaaaattagaatgacaacaatttttttaacaagaacaagctgcagcaattgtggaaaacaaagtacatttgaaagatttgatagggtttatgcggcgaagactcctgagattatttctgctattttagactgggatttctttaagtttacttgccataactgtaaccacaaggtgctaattgattacccaacagtcgtagtagatgaagaacaaaaaacaattattcagtattgtgcagatggtaatgttgatgtactttcaatgcaaatatgctctttgatttcagagggtgtcaatctcagtgagtatagaattcgagtagtttcggatatagagtctttcgttgagaaggtacagattgtttcagtagggtatgatgatagagcaattgagcttatgaagtatatgaatagtcctcttgaggatggtgatattcagtttaactatgaacatatggttttcaccaaggttggacatgaaaactatcaatttatgtttattaataaccagattgcagtagcatctctcgacttttctcaagaacaatatgagtactaccttgctgatgttgaagacctagaaactaacacatattacatagactctagatgggcggaatcattctttcgtaccagtttggcataa

SEQ ID NO: 6646 - DNA, 231 bp, Streptococcus pneumoniae
  misc_feature (1)..(231): tiling:Spneumo1:WAN024BV7; WAN023Q9U contig_1258_10||||301 6..3246|+|231 bp|Glimmer 2.02 orf prediction|S.pneumoniae| 670|WAN01UEG8|ORF
atgatgaatgataaattaaatccaagacaagcaagtaggtttgctttcttgctaaagcaaaaacgtaaggaaaggaagctgtcacaagaaaagttagcagctaaactaggctatagtcgctacctaattgctcaatgggagaaggaggaaagtgtaccggatatttataatgtagaagatatctgtacttactttgcttttcctgctgatattattctcgggagtagggca

SEQ ID NO: 6647 - DNA, 1680 bp, Streptococcus pneumoniae
  misc_feature (1)..(1680): tiling:Spneumo1:WAN024BLX; WAN023NNN-5 spn097d12_37||||322 73..34396|-|2124 bp|Glimmer 2.02 orf prediction|S.pneumoni ae|23F-1|WAN01UCN2|ORF
atgatgactagaaaagtacctaatattgagcaaatgtctcaaatagaatgtggtttatgttgctgcttgtccatactacatttctataaaagcaaagagacattactagatttaagacgtgatatagaaaaagggagagatggttatagtataggtgacttgaaacagttattgaataaacgaaattttgatactggctcatatcaagttaaagatgtaaataaaattagtgaacttccgttaccattaatagcattctgggataatcaacattatgtagttatttacaaagtaaaaaagaataaggtctatataatggatccttctaaaggatatataaattatgagtttaaggagttttcaaaacattttagtaatatagtactgctatcatttcctaacgaaaattatcaatctttgaagtcgcagtttccttctccatggataagagtattctctagtttttcaaaggtaaaaggtcgattgattttgacgttactattttcaataataagttacttaataatactttccgtaccagtaatgacttcaaagtttattaattctgcattagggaatacattttcttttcaaacctcgtttttaattttattttctctactttgtttgtatcttatttctatcttggctaggagtatgggaattctattttctaatatattttttagtagagatattgaaagttttacatttaagcatttgcttaaactaccatatagtttttttgaactcagggcaaaaggagatattttatacagaatttctagtcttagtggttttagggagctatttactaaccaagttgttgggggagtagtagatatcgggactattctaagtgttgtaatatatatgtttcttagttcaaaaacattatcaattatagctcttatattgagtttaatcaattttttgtttctgtttagtactagaaaaataatgtatgatacggttaatagagaattacaagaacaatcattgatttactcagtagaaacagaagcattaaatactatttcttcaataaaaatatcgggattagaagatgaaatatatgaaaactggtctaagtatttaaaaaacgtattgacaaagtataaaaaacgaagtattgtgcatattttatacaattcagctactaatgtatttcaattgttcgctcctataattatattgatttttggacttgataatgttttaaatggaaaaattttattgggtgaggttgtcgcatttcaaaccatggcatcaattttatttagttcagaaatctcaatatttaatgcttatacgcagtatattttggcagcaggatacttaaatagagtaaatgatatctggcttgaaaatgaagagaatgttgaaaatggtcttaaaaagtgttctttagaaggtagaatagatattaaggacctatctttctcttattccaaagactcagctcctgtaatagaaaatttaaatttgactattgagccaggacagagaattgcactagtcggtcaatcggggtcaggaaaaagtacgttatcaaaaatactatcaggattatataagattgatacaggaaaaattttatttgatggtgtaaatattaatcaaatagataaaaaaatattaagtcaaaatttaggagtagttccacaggattcattttta

SEQ ID NO: 6648 - DNA, 252 bp, Streptococcus pneumoniae
  misc_feature (1)..(252): tiling:Spneumo1:WAN024AV6; WAN023O5P spn029h04_134||||1203 12..120563|-|252 bp|Glimmer 2.02 orf prediction|S.pneumoni ae|23F-1|WAN01UCO3|ORF|001
atgatgagctattcttcagattgtttcgagtttttatctcccaatttattacgttttaagaatcgagataacctaaaattaacagatttcatcgaaatgatattaaaaaatcctgaactaaccatcagacttcctcttgcggtttcaaataagcgagtttatccaaatttgaatctggaggaggctagagctttattgccaagagatacgaaacaattgatttacatggcacaaacacattatttatctaac

SEQ ID NO: 6649 - DNA, 99 bp, Streptococcus pneumoniae
  misc_feature (1)..(99): tiling:Spneumo1:WAN024G72; WAN023NNL spn097d12_39||||35019 ..35117|+|99 bp|Glimmer 2.02 orf prediction|S.pneumoniae|2 3F-1|WAN01UCN2|ORF|001
atgatgataatatccatcaccaaaaccaaaatcggtaaaaattttgaaattttcttcatacttggacttcctttccgtttttatttattgtacaataaa

SEQ ID NO: 6650 - DNA, 327 bp, Streptococcus pneumoniae
  misc_feature (1)..(327): tiling:Spneumo1:WAN024CV6; WAN023JZ9 83035_601||||340281.. 340607|-|327 bp|EGAD orf prediction|S.pneumoniae|TIGR4|WAN 01UC25|ORF|010
atgatgataatctgctcccaaataaaccggctccatgatttccaaacttggaatagacaagtaaccatagactgcatcagggtcgtcagacacttggtaattgacctcatatccctccgccaaaaaaggatctacaatgcgattttgcgaagccaagcgttgattgtaggcgagagaatggttctgttgttcttggtacatttcagttgtcatggatttcacaaatgtagcatgacctttcacctgtccaagagactgcaacaccatctgtccaaaacaataaataggaatcaaacaggctaccaacatcaacaagtatcccaataa

SEQ ID NO: 6651 - DNA, 321 bp, Streptococcus pneumoniae
  misc_feature (1)..(321): tiling:Spneumo1:WAN024AVM; WAN023NDE spn140a09_7||||4571.. 4891|+|321 bp|Glimmer 2.02 orf prediction|S.pneumoniae|23F -1|WAN01UCRH|ORF|001
atgatgattcaactaagtgatttaggtcaagttcaccttgtttgtggcaagacagatatgatacaaggaatcgattcactggcttatctcgttaaaacccactttgaattggatcctttctccggtcaagtctttctcttttgtggtggacgtaaagaccgctttaaagccctttactgggatggtcaaggattttggatactatataaacgctttgagaacggaaaactgacttggcccagtacagaaaaggatgtcaaagctctcgcacctgaacaagtagactggcttatgaagggcttttctatcactccccaaata

SEQ ID NO: 6652 - DNA, 279 bp, Streptococcus pneumoniae
  misc_feature (1)..(279): tiling:Spneumo1:WAN024BWQ; WAN023R8H contig_1535_22||||151 10..15388|+|279 bp|Glimmer 2.02 orf prediction|S.pneumonia e|670|WAN01UDMI|ORF
atgatggagaaagtagcttctcttggagttccgatgtgtaaaccaattagcattgaactctgcgatgacgaagtacattctttacacgaatggatagacggaagagatgcaatagatagcattttaacttattcagaaaaccaacaatacacatatggtgtagaagcaggaaagatacttagaaagattcatacaattcctgctacagaagtttgtgaagattgggaaatcttttttaatctaaaaattgatgataaaatctccaacgaaatgatatgg

SEQ ID NO: 6653 - DNA, 315 bp, Streptococcus pneumoniae
  misc_feature (1)..(315): tiling:Spneumo1:WAN024BT8; WAN023YJC AL449929.1_46||||4389 5..44209|-|315 bp|Glimmer 2.02 orf prediction|S.pneumoniae ||AL449929.1|ORF
atgatggcaagtaaaagattaagtattgaagaacagattgaaaagaaagaagaaagcattaagcaattacaaaatcaaaaaagacagttgaagaaaaaacttaatgaacaagaaagaaaagcaagaaacaaaagacttatagaaaaaggtgcagtgtttgaaagtatttttgaagaaagtattgatttaacaaaagatgaattttataagttaataaaaacgttraatgatgaagaaataagattaaacataatggaaattttagaagaaagaatagatgataatgtagaaaaatcatctaaagatgaaataaca

SEQ ID NO: 6654 - DNA, 93 bp, Streptococcus pneumoniae
  misc_feature (1)..(93): tiling:Spneumo1:WAN024B57; WAN023O3F spn041h04_41||||35148 ..35240|+|93 bp|Glimmer 2.02 orf prediction|S.pneumoniae|2 3F-1|WAN01UCLF|ORF|001
atgatgggcgctgaaacttctatcgtcaagaagaatcaccaaatccctcgtatcatcaaccaaaaaattgcttcaaagttaattctaactaat

SEQ ID NO: 6655 - DNA, 102 bp, Streptococcus pneumoniae
  misc_feature (1)..(102): tiling:Spneumo1:WAN024ETE; WAN023SWU BD003793.1_11||||9833 ..9934|-|102 bp|Glimmer 2.02 orf prediction|S.pneumoniae|A TCC55840|BD003793.1|ORF|000
atgatggttaagagtaaaatttctgtggtccaaaaaaataatttatttctacgaaacatgagttacctcccttactttattttaccatattttcaaaaagct

SEQ ID NO: 6656 - DNA, 288 bp, Streptococcus pneumoniae
  misc_feature (1)..(288): tiling:Spneumo1:WAN024COB; WAN023IOH 85926_2762||||1570181 ..1570468|+|288 bp|EGAD orf prediction|S.pneumoniae|TIGR4| WAN01UC25|ORF|010
atgatggttttgtcccaattctgtccattcaagcccatgatagtaccaccaaacttcacgataggtttgggccgccaaatctttccacggtttccgatgagaaagatagtgaataatagcaggataatcctgaccctcaggcaattgataatcagcaaactgtttatgaatgacaatatgattataatcaaagtccaattccaaccatttatgttcaaaaagcatattcaagatgctctgatctgcctgatccaccttatcatgccattcattggttacatcaattaa

SEQ ID NO: 6657 - DNA, 1155 bp, Streptococcus pneumoniae
  misc_feature (1)..(1155): tiling:Spneumo1:WAN024BQB; WAN023PHA pne35_15||||13044..14 198|+|1155 bp|Type 17A capsule operon, Glimmer 2.02 orf pr ediction|S.pneumoniae||WAN01UCHX|ORF
atgattaaagtgtctaaacagaatgctatattattcttattactgctcccgttttttatgccaacttattttgaaattttaccatttggatacttgttgtatagattaggcatgatgtttagcataggatatatttctttatcttacctaatattaaagaaaaatttttcttccatcacctggttgattgttatctatgagatattagtagtttctttaacaattttacaaaaaggtgaaatctatactgcaatatggaatgcagaaaaaattattggactggttttattagtagattactaccaagaaaatattattagcttcttaaaagttgtactggtacattttgagtggttgatttatatcaattttattacaattttattattttcagagcgctttttttctagattcacttctgcttatggttttacccaagaatggtttctaggttccgtcaataactttattttctggttttttccagctcttgtagtagcgtggttgtattattttttgtcaggtaaaatttttagaacgtgtagtttaacagttgttattgctttaacagaattaattagaggctcagcaacggggaggattgcagtatttctatttatcttatttgttacctcgtcttggttacgtaagattatttcgccaaagttagtatttataggtgttactgtcctaggaatttttgttgtatttctccaaaatgtagacttcttagagcctattgtggtacagttacttggtaaaaaaatgacatttagcaatcgtacctatatctggtcgaatgctgtgacagtaattcaaaagaatttcgttggtctaggtttacaatcatctgattatgtcattcgattgcttggaaatattaatggttatttacaacctacggtaacccacgcccataatgagtttttacaagttgcttttcaaacaggaattttaggatttattctttattgttggatatatattaaagtcttgatcaatgcagtaaagttgagtggaccaatagcgcaaactgttatgctgttttttgctgtttataatgttattgctataacagaaacgttagaactgagtcaaatatatatgttatttcctttgatttattttgtaatgcaatatactgcagaaagaaag

SEQ ID NO: 6658 - DNA, 99 bp, Streptococcus pneumoniae
  misc_feature (1)..(99): tiling:Spneumo1:WAN024BBR; WAN023S5F contig_421_1||||783.. 881|-|99 bp|Glimmer 2.02 orf prediction|S.pneumoniae|670|W AN01UD56|ORF|000
atgattaaattgattgatcgttacggaatagagttcgtcaaaaaagggaaaaatcgttactattctcctgatttaaaacaagaaatgattaataaagtc

SEQ ID NO: 6659 - DNA, 921 bp, Streptococcus pneumoniae
  misc_feature (1)..(921): tiling:Spneumo1:WAN024BPT; WAN023P83 pne52_20||||12445..13 365|+|921 bp|Type 24B capsule operon, Glimmer 2.02 orf pre diction|S.pneumoniae||WAN01UCCM|ORF
atgattaagagattagcaatacttatggccacatataatggcgaaaaatatataaaagagcaaattgaaagtattctcaaccaagatacagattttgattttactctaattattagagatgacggttcaacagataatactaaaaatataattagagaatatgttgatagtgggaaaattatttttatagaaggccagaataaaggggcggcaagaggatttatttctttgttatgtgataatcctggatatgattactatgctttctcggatcaagatgatgtttggaatcataataaattacagaaaggtatatggagtctttccaaatatactgggccagcactttattgttctaattgtgaattagttgattcagagttaaatagtataggtcgtaatacacataggaagagaccgaactatactcttgaatctattctttgtcttgctagttgtgcacaaggatgtacatctgtatttaataaagagctagcttcgataattcaggagaatgatgtgcctgatacttttattatgcatgattctttgattacttgtttatgtgcactgataggtggaaagataatttacgacgaaattccatcaatgaaatatagaatgcatgatgataatatatttggaatggtgtcagctaagcaaaatgtactaaatgttataaaagatcgtattagtgaaataacaaaaaagcgaacgattagtatgtacgatcaagcagagtgtttactaaaggtttataaaaaatatatagattctaacaatcaagatatatgtagaattgttattgattctaaagtatcgctaaaggcaagacttaagctgatttttaataaaaatttgcagcatactacattaaataaaaccataacaaaaaaattagagatattatttggcaatgac

SEQ ID NO: 6660 - DNA, 366 bp, Streptococcus pneumoniae
  misc_feature (1)..(366): tiling:Spneumo1:WAN024BYA; WAN023S0R contig_1623_25||||130 41..13406|+|366 bp|Glimmer 2.02 orf prediction|S.pneumonia e|670|WAN01UDAF|ORF
atgattaatatcaagcctgttatttataaagaattgcaaaaggtcgcagataatgtgactgatacttatcctagcgattgggagactttcccagtcgttatttttttagaagaacaaaacaagccgggtgattggtttgatgaccaggaacaaaaatcatctatccgctataaggtggatatctttgatgataccagcactagtgagttagctgttaaaatcaatcagatttttgagtctttaggtttgcgaagaaccgactgccaagacgtgccagacccgtctcatttgagacataaggtcatgcgctttgaaggtgtcgttgatttagactcagagcttgtttttcaatttagaatggagaat

SEQ ID NO: 6661 - DNA, 852 bp, Streptococcus pneumoniae
  misc_feature (1)..(852): tiling:Spneumo1:WAN024BOY; WAN023OII pne88_18||||14321..15 172|+|852 bp|Type 45(1) capsule operon, Glimmer 2.02 orf p rediction|S.pneumoniae||WAN01UCBS|ORF
atgattaattacagcgcagatgaattagacatgattcagaagcttgaactcaaaatattaaaagaaattattcgaatatgtaaaaaagaaaagatagagtattttttaattggtggaagtgctcttggagcaatacgtcatgaaggatttataccatgggatgacgatattgatgttggtatgacacgtgagaattatgataactttttgagagtagctgaacagtatttaggagaagagttttatttacaatcaccctcctctgatagaaaatcaccctattcttacagtaaactaatgttaaaagagactttgttcttagagtatgcccaaaggaatttaaaaacacaaagtggtatttatgtagatatttttccatttgatgaggttccagataatgagtcagaaaatgagagacagtttaaagcggtacagttttataaaaagttatatgtgatgaggatgttgccaactgtttctaaggctcctgagaatttgattcaaggtttaaaagctattctaaggagatgcattcattatagtttaagattaatccctaaaagtttaatactcaaaaaaattgatcaattttctagattatataatggaacaaatcaatctgcattggcttgtttagattttccggtaagaaatgtagagtatgttctaaaaacaacactatatcccttaattgaacataaatttgaagaaatcacaattttattacctggtgattttcatcaatacttgactacacattatggtgagtacatgaagttgccacctttagaagaacgtgttgggcatagaccatatttgattgatttaggaacatatggaaaggaagaaaaa

SEQ ID NO: 6662 - DNA, 1260 bp, Streptococcus pneumoniae
  misc_feature (1)..(1260): tiling:Spneumo1:WAN024BPM; WAN023OW2 pne69_13||||8928..101 87|+|1260 bp|Type 31(1) capsule operon, Glimmer 2.02 orf p rediction|S.pneumoniae||WAN01UCDA|ORF
atgattaattcgtctaagtatcttaaatttgtcttatattatcagataatatcattttattttttaggtattttttataggctatctacttttaatcaatatttatatgtaatagcagatatagtttttatatcagtatacttattgatatttgagcgtaaaatcgcttatactaatataaaactatttattatctttattttattctatctatttggaagttttcaaggatatgatagtggtggtgcatttattatatttttactaatttatttaaaatatattttattcaaatttataattataaatataccgcaatccaatttaataagagcatttacaaacataggtattttaaatacggtcattttattagcagaagttttaagtcacggacatattaatttatttgtgaatcattatactttggcgcagaaaatagaaaccttaaataaggttgggacaaaccttgcggttttacgtggggggtttgaaaatcccttagtgacatctgtaatgctatcttctacattattattttttatgactattgagaaggctctcttacgtaatatactaattatgtctaacttatttttgattatggcaacagaaaaaagaacaggaattctaattagtatcgcgttgttgttctgttactatttcagaaaaaatttaaaaacaaagagtgttagtaagtttataataaaattcttgggaggattgtttttcttgggatttgctttattagccataaatatgataacaatttctggtcgtagcatttctcagatgataatagagaggttttcatcattaagtagtggttcagacttttctgctatacataggtcaatggcttttaaaataggcatagaaataatttggagtaggaatatattgaatatattattcggtaatggtttctactttttgccaacttttatgtacaataataatattacgattacaaagttgggttttttagtaatagataattcttatttatcttttttagccgattttggcatgatgcctttaataagtataatgttttatcttatagggggtatctttaagaatcttgtttcgaatgagactgataatatttcagaagtagttatgtttagcttaattgcattgcttttatcggcgagtgtgttcgatattttaaactggtatcagagtactcttttaacatgcttttttgttgcttatttaagtgtatatcatgattctagcaaaaggaaagggaataaa

SEQ ID NO: 6663 - DNA, 1371 bp, Streptococcus pneumoniae
  misc_feature (1)..(1371): tiling:Spneumo1:WAN024AWG; WAN023YIU AL449929.1_65||||5988 7..61257|+|1371 bp|Glimmer 2.02 orf prediction|S.pneumonia e||AL449929.1|ORF|000
atgattacacgtgaatttgataccatcgctgctatctctactccactaggtgaaggggctattggtattgtccgcctgagcggaacaaacagttttgctattgcgcaaaagattttcaaaggaaaagacttgagtcaggttgctagccatacacttaactacggtcacatcgttgaccctctgactggtaaagtcatggacgaggtcatgattggggctatgaaatctccaaaaaccttcactcgtgaagatattatcgagattaacacccacggtgggattgcggtgactaatgaaattctccagctagctatccgtgaaggagctcgattggctgaacctggtgaatttactaaacgtgccttcctaaatggacgtgttgacttgactcaggctgaggcagtaatggatatcatccgtgctaagacagataaagccatgaacattgcggtcaaacaactagatggttctctttctgacctcattaacaatacccgtcaagaaatcctcaatacacttgcccaagtcgaagttaatatcgactatcctgagtatgatgatgttgaggaagcgactactgctgttgtccgcgagaaaactatggaatttgaacaattgctaaccaatctccttaggacagcccgtcgcggtaaaatccttcgtgaaggaatttccactgccatcatcggacgtcccaacgttgggaaatctagcctcctcaacaatctcttgcgtgaggacaaggctatcgttacagatattgctggtaccacacgtgatgtcatcgaagagtacgtcaacatcaatggtgtacctctcaaattgattgatacagccggtattcgtgaaacagatgacatagtggaacaaatcggtgttgagcgttcgaaaaaagccctcaaggaagccgacttggttctactagtgctaaatgccagtgaaccactgactgcgcaagacagacaacttcttgaaattagccaagataccaatcgcattattctacttaataaaaccgacctgccagaaacgattgaaacttcgaaactacctgaagacgttatccgtatttcagtccttaaaaaccaaaacatcgacaagattgaagagcgaatcaacaacctcttctttgaaaatgctggcttggtcgagcaagatgctacctacttgtcaaacgcccgtcacatttccctgattgaaaaagcagttgaaagcctacaagccgttaatcaaggtcttgagctggggatgccagttgatttgcttcaagttgacttgactcgtacttgggaaatcctcggagaaatcactggggatgctgctccagatgaacttattacccaactctttagccaattctgtttaggaaaa

SEQ ID NO: 6664 - DNA, 837 bp, Streptococcus pneumoniae
  misc_feature (1)..(837): tiling:Spneumo1:WAN024BQX; WAN023ZZE |||AAA16797.1|||837 b p||S.pneumoniae||L19055|ORF
atgattacagaatttatcgatggattacagcaattccacttcttacaaaatgccctgattacagctattgccatcgggattgtcgctggagctgtcggatgcttcattattttgcggggcatgtctctcatgggagatgccatctcgcacgcggtccttcctggggtagctctgtcctttatcctgggcatcaatttctttattggcgccattgcctttgggcttttagcttccatcctcatcacctatatcaagagcaactccatcatcaagagcgacacggcgatgggatacctttctcttcctcgccctaggagtcattctgatcgggtcgctaaaagttctaccgacctcttccacatcctctttggaaatatcctggccgtgcaagaccaggatatgtgggtgaccatcggtgttggagtggcagtcttactggtgattgtcctgctctttcgtcccctactgctcacttcttttgatcctgttctggctcaatccatgggcgtccgggtcaaactctatcactacctgctcatggttctcttgaccttggtttctgtcactgctatgcagagtgtcgggaccattctcatcgctgccatgctcatcacacccgctgcgacagcctatctctatgccaatagcctctggtccatgatgctcctttcatccggattaggtgccctagcctctatcctaggactctttatcggctacagtttcaacatcgccgtcgggtcttgtatcgtcctcacttctgccatcttctttctcatcagcttctttatcgctcctaagcagagaaagaataagcacgctctttcacctcattaa

SEQ ID NO: 6665 - DNA, 93 bp, Streptococcus pneumoniae
  misc_feature (1)..(93): tiling:Spneumo1:WAN024BWJ; WAN023R4X contig_1497_2||||758. .850|-|93 bp|Glimmer 2.02 orf prediction|S.pneumoniae|670| WAN01UDPJ|ORF
atgattacgccacatcataaaaagaataaaaaatatcgatttatgtcgagtctatgcaaaaatgatatggattaccggattgcgagagagcgc

SEQ ID NO: 6666 - DNA, 414 bp, Streptococcus pneumoniae
  misc_feature (1)..(414): tiling:Spneumo1:WAN024AWR; WAN023QDH contig_1276_4||||3208 ..3621|+|414 bp|Glimmer 2.02 orf prediction|S.pneumoniae|6 70|WAN01UEEO|ORF|000
atgattactattaaaaagcaagaaattgtcaagctagaggatgttttgcatctctatcaggctgtcggttggacaaattatacccatcaaccagagatgctggagcatgccttatcgcattcattagtaatttatctggcacttgatggtgatgctgtggtgggcttgattcgtttggttggagatggattctcatcagtttttgtacaggatttgattgttttaccaatctatcagcgtcaagggattggtagtgccctaatgaaagaggccttaaaagattacaaagatgcttatcaagtccagctggtgacagaagagacagaaaaaaacgtgggattttatcgttctatgggctttgaaatcttatccacctataattgtatagggatgacttgggcgaatcgagaaaaa

SEQ ID NO: 6667 - DNA, 630 bp, Streptococcus pneumoniae
  misc_feature (1)..(630): tiling:Spneumo1:WAN024BTI; WAN023YW6 AL449927.1_68||||5871 5..59344|-|630 bp|Glimmer 2.02 orf prediction|S.pneumoniae ||AL449927.1|ORF
atgattagcatagaacatttaaccaaatcatttggccaacgaacggtctttcaagatttgagcttgcaatttacagaaggtaaggtctatgctctgatcggaaatagcgggtgtggtaaaacaaccttgcttaatatcttggcaaagttagagccttatgaaaagggaagtatcagctatcaagggcaagaattgaaacaaatcaaacagcatcacttctttaagcatgaattaggctatctctttcaaaactttggcctacttgaaaatgagactatcgctacaaatttagatttgggattgattgggcaaaaattaacgaaaaaagagaagaagcagcaagaagaagaagtgctcaaaaaagtaggattggcttaccttgctctggatcaaaagatttttgaattatctgggggagaggcgcaacgtgtcgcattagctaaagttattttaaaagatccacctttaattttggcagatgaactaactgcagcactggatccagaaacctcacaagaggtgatggacttgctcttaatgttaaagaatcaagagcgtataatcattattgcaacccataatcccgatatttggaatcaagcagatgaagttataaatttaaatcaatta

SEQ ID NO: 6668 - DNA, 93 bp, Streptococcus pneumoniae
  misc_feature (1)..(93): tiling:Spneumo1:WAN024BTK; WAN023YX3 AL449927.1_35||||2856 3..28655|-|93 bp|Glimmer 2.02 orf prediction|S.pneumoniae| |AL449927.1|ORF
atgattatcaagaaaaattctaattttagaattatattttctattagttcagaatctgtttttatttttaaatgttataatagtgttatcaag

SEQ ID NO: 6669 - DNA, 594 bp, Streptococcus pneumoniae
  misc_feature (1)..(594): tiling:Spneumo1:WAN024CZX; WAN0240T3 |||AAC97122.1|||594 b p||S.pneumoniae||U66846|ORF|000
atgattcatttaataatgattagcgccattgctctagccattggaattggttaccgcaccaaaatcaatattgacctgctggctattgctttttcttacctcatcgcaaccactctcatgggattaagccccaaagaacttcttcatttttggccaacctcactcttttttaccatttttagcgtctctctcttttataactttgcaataactaacggtactcttgatgttttggctcaacacattctctaccgcacacgcacctaccctaacgccctctacatgattttatacctgatggcaacccttttgtctgctttaggtgctggatttttcactactatggccgtttgctgtcctctagcgattaccctctgtcaaaaagtgtacaaacaccctttgattggagctcaagccgtcaattggggagcttcaggaggggctaatttgataaccaaaggaataaaatattatgtattttatcgtttccaccaactcaatatactgacctcttttgaaaaaatctttaccataaccacaaaatttttactttgtgacaaggctgtagggtttggtgatacagatcccgattga

SEQ ID NO: 6670 - DNA, 78 bp, Streptococcus pneumoniae
  misc_feature (1)..(78): tiling:Spneumo1:WAN024D4D; WAN0246RA 203667-17-8_2||||1108 ..1185|+|78 bp|Glimmer 2.02 orf prediction from Patent Seq uences|S.pneumoniae||WAN02470O|ORF|000
atgattcgttccattgtcatttccctttcagttctaattcgagttcgtggcgactgtatgaaaaatccccacgcaaaa

SEQ ID NO: 6671 - DNA, 165 bp, Streptococcus pneumoniae
  misc_feature (1)..(165): tiling:Spneumo1:WAN024DVL; WAN023PTU pne12_17||||13468..13 632|+|165 bp|Type 8 capsule operon, Glimmer 2.02 orf predi ction|S.pneumoniae||WAN01UCK9|ORF|000
atgattctaattctgatgttgaaagtgggaattagctctactttacttcatattgttatcggaattgttttgggctggcatttatccatcctagcaacctatatattgaaaaaaattccatttttgaatattgttttattaccacagaagtatattaaattaaaa

SEQ ID NO: 6672 - DNA, 183 bp, Streptococcus pneumoniae
  misc_feature (1)..(183): tiling:Spneumo1:WAN024BOU; WAN023OGA pne91_15||||9579..976 1|-|183 bp|Type 47A1 capsule operon, Glimmer 2.02 orf pred iction|S.pneumoniae||WAN01UCEE|ORF
atgattctgaaattgagctttgaatcagccctttgctttgtcttatataggagtatgggttactttgaaaaccgactaattgaatgtaattttgctcacctagaatctcaatctgattttgcagtgtttgccgtagctctccttcacccaaaattaataaatgaaattcaggatatttttttc

SEQ ID NO: 6673 - DNA, 162 bp, Streptococcus pneumoniae
  misc_feature (1)..(162): tiling:Spneumo1:WAN024BRP; WAN02414G |pncB||CAC18588.1|||1 62 bp|hypothetical protein|S.pneumoniae||AJ278419|ORF
atgattcttaaatatagtattattatcgctattaatttactgtcttatttacttacttacaaaatatcaaagttatctaagaatgatgagaataagatagttagcaaaattttaattatattatcaatcgtttatgtaatcgttgatgctttacttagttga

SEQ ID NO: 6674 - DNA, 240 bp, Streptococcus pneumoniae
  misc_feature (1)..(240): tiling:Spneumo1:WAN024B56; WAN023JEZ 84412_1620b||||928834 ..929073|+|240 bp|EGAD orf prediction|S.pneumoniae|TIGR4|W AN01UC25|ORF|010
atgattcttcttgacgatagaagtttcagcaaccataattttagaacaatgatagcacttgaaacgacgctttctaaggagaattctagtaggcataccagttgtttcaagataaggaattttagaaggtttttgaaagtcatatttcttcatttgacttccgcactcaggacaagatggagcttcatagtccagtttggcgatgatttccttgtgtgtatccttattgacgatgtctaa

SEQ ID NO: 6675 - DNA, 108 bp, Streptococcus pneumoniae
  misc_feature (1)..(108): tiling:Spneumo1:WAN024DNL; WAN023MOL spn180c09_148||||1176 29..117736|-|108 bp|Glimmer 2.02 orf prediction|S.pneumoni ae|23F-1|WAN01UCXQ|ORF|001
atgattcttttcataataatctcctttttgtgtagtgattatgattatagtataaatgatagacaaaatcaagaattttctgtctattttttgaatatttatggagaa

SEQ ID NO: 6676 - DNA, 90 bp, Streptococcus pneumoniae
  misc_feature (1)..(90): tiling:Spneumo1:WAN024BXF; WAN023RP9 contig_1583_13||||426 1..4350|+|90 bp|Glimmer 2.02 orf prediction|S.pneumoniae|6 70|WAN01UDGB|ORF
atgattgaaaataagtggagagaaaggggattaaatatgaggtatgcagtatataatcaggaatactcatgggaattacacatctttgaa

SEQ ID NO: 6677 - DNA, 1248 bp, Streptococcus pneumoniae
  misc_feature (1)..(1248): tiling:Spneumo1:WAN024BPU; WAN023P84 pne52_19||||11156..12 403|+|1248 bp|Type 24B capsule operon, Glimmer 2.02 orf pr ediction|S.pneumoniae||WAN01UCCM|ORF
atgattgacggagattttatgaatagaagacttgtaataaaaaagaaaagtataatgtttttcatgcttatgttatgtgttacggcattttatgggacaaattattggtatacaaatatatatatatatgattttatgattataacatcatgcttattatcaataatagtatttgtatgtaatggtattagaattgataaaacatattataaagggacaataatactgggtattgtaatgtggttttcaggacttattgctgcacaaggaaaagggctccctgctattgtaatctttaaagagagtttatatactattactccaataatgatatttttagctttccgacctatgataaagtcaataaaagacacttcattattccttcgtactatttctgctgccggtgttatatgtaatttaattgcttgtattgaaatgttctttgccaaaagaggatttgattttctaaatataagtgtatttgaaaaacttagaaatggtactcctagatttacaattggagaaacaataatagttcttagtttttttatctcctgtagtgttgtttttagtaaagggggaaagagaaatagacgcattttccatgttctaaatatagctctcacagctataaatttagtgtatattattaaaacaaggacactgaatttatatattttatcaacacttatgatggtgcctgttttaaaaaaaaatgtaaagaaacaacttaagttttggattgtgtttttgatatctataattcttacttttgtttctgcagaatattttattccaatagtcaaaaatttaattcatagtgatcatgggattcaaattagattcttgacgatagaatactatatagagtattttaaaaatcattacttatttggagcgggatatatttcttctagtccatattttgaaacttattctattgttaccggtccattaggacgttattatccaagcgatgtaggtttgattggacttatgtttagaagtgggattatcgggctaatttggttaataagttggttttatacaagcttgaagataattaaagataatacgattagaattccagctcattatgacttattaatgaagctagttatagtttttttgatgttttcttgtattaatttgataatcactgatgcacctagattcccatatattgcattagctatgttactttttgaatcaagttataccttgagttatgaaaacagttctaat

SEQ ID NO: 6678 - DNA, 411 bp, Streptococcus pneumoniae
  misc_feature (1)..(411): tiling:Spneumo1:WAN024BYK; WAN023S11 contig_1623_15||||891 9..9329|+|411 bp|Glimmer 2.02 orf prediction|S.pneumoniae| 670|WAN01UDAF|ORF
atgattgatattgccttggctatcgctaaaaaagcacatgcagggcaggtagataaagcgggtgttgattacatacagcatcctctctatgtggccagtcaagtcaacactgaacaagaaaaagctgtcgctcttttacatgatgtgattgaggatagcgatataactgctgccgatttattcgcgtctggcttgtcaaatgaagttgttacagcggtacaaattttgacaaagaaaaaaggtcaaagttatcaagaatatcttgggaaagtaaaatcaaataatttagcaagagttgtaaaacttgcagatttgaaacataactcagatttatcacgtttgaaatctgttaccaatacagactacgagcgtgttaaaaaatataaaaatgcaatttattacttaagcacc

SEQ ID NO: 6679 - DNA, 237 bp, Streptococcus pneumoniae
  misc_feature (1)..(237): tiling:Spneumo1:WAN024FNQ; WAN023L3S 314118_2461||||131248 0..1312716|-|237 bp|EGAD orf prediction|S.pneumoniae|R6|NC _003098.1|ORF|100
atgattgatcgtagtttgatccaacaagtccaacaaatttcattctttcggtctcctatcttacaaattttcccagtcaaagtcttcagcatctttgcgaagcaattcttgcgcattgcgcaatttctcagtaatcttcacgaagatacggaagtcatcaaagatggcatccaatttcttgataacatcaaggtcaaccaagtcgccacttgggttaaatgcttgaagagagtgtga

SEQ ID NO: 6680 - DNA, 369 bp, Streptococcus pneumoniae
  misc_feature (1)..(369): tiling:Spneumo1:WAN024AVZ; WAN0240Q1 |||AAG13001.1|||369 b p||S.pneumoniae||AF227520|ORF|000
atgattgatcgttcatacttgccatttcagtcagcaagagagtaccaggatactaagatgcaaaaatggatgggctttttcctatctgagcatacatcagcactcactgacgatgcaaacaaagtaacgtatatgtcagatttgtcactggagaagaaattattactcctcagtcaggtgtatgctgggcaactgaacacgcgcattcatgttgttaaaaaaaacaatcaagtttcctatactggaacaataccaagtctgaccaaagatttcattttgataaaaactacaacaggtcacattaatttgaaattgaaagacattgttagtattgaacttgtagaggaggtgctctatgaatcagcttga

SEQ ID NO: 6681 - DNA, 378 bp, Streptococcus pneumoniae
  misc_feature (1)..(378): tiling:Spneumo1:WAN024AV5; WAN023YW0 AL449927.1_74||||6458 0..64957|-|378 bp|Glimmer 2.02 orf prediction|S.pneumoniae ||AL449927.1|ORF|000
atgattgatctctatctaagtaaaaataaccatagaaatcaaattcttttagatttctttcaaaactacggaatagaggtatcttgtcattcgatttctgaaatgacaaaggacaaattaattgagatgatgagctattcttcagattgttttgagtttttatctcctaatttattacgatttaagaaccgtgacaatctaagattaacggatttcatcgaaatgatattaaaaaatcctgaactaagcatcagacttcctcttgcagtttcaaataagagagtttatccaartctgaatttggaagaggctagagctctattgccaagagatacgaaacaattgatttacatggcacaaacacattatttatctaac

SEQ ID NO: 6682 - DNA, 384 bp, Streptococcus pneumoniae
  misc_feature (1)..(384): tiling:Spneumo1:WAN024BUM; WAN023Q99 contig_1258_32||||140 18..14401|+|384 bp|Glimmer 2.02 orf prediction|S.pneumonia e|670|WAN01UEG8|ORF
atgattgccttagacgaggatgctcttatctgtgatttagcggaaacctaccaaatatacgactataaacagctacctttaaatcaggtggctgtttttgcgtatgggttgcgtgatgattcgcggataaagcagatgatgtctgaccaaatcgtccctcttgaaacgacgttacttgcaagtatcgtagacagactgtctctttctttgtggttgaaaacaaaagatgggcaaaagggtgttaatcgtcctgcatcaattgctgaattacttacaaagaataacaaagaagagggagatgaaagggattatctcgtctttgaatctggtgaggactttgaaaactatcgcaaggctttgcttgcaaaaacaggaggtgaggat

SEQ ID NO: 6683 - DNA, 123 bp, Streptococcus pneumoniae
  misc_feature (1)..(123): tiling:Spneumo1:WAN024C69; WAN023RFD contig_1556_18||||904 0..9162|+|123 bp|Glimmer 2.02 orf prediction|S.pneumoniae| 670|WAN01UDJM|ORF|000
atgattgctagtaagagtttgaaattatttatcaatcctatcttagaaaagttgacaagtgataactctttaataaactcttggtttgttaaaagatattttgtccactacatttttttcaat

SEQ ID NO: 6684 - DNA, 210 bp, Streptococcus pneumoniae
  misc_feature (1)..(210): tiling:Spneumo1:WAN024BVN; WAN023QI7 contig_1299_7||||3311 ..3520|+|210 bp|Glimmer 2.02 orf prediction|S.pneumoniae|6 70|WAN01UEBN|ORF
atgattggtgaagctggtaaagaggcggtcgtaccacttgaaaatacaggatttatccaaacacttggacgagtagtcagcagtgcggtagtaaatgccatggctggtattagtccacaaggtggtttttctagcgacggcgacatcgttattcaaatcgcaggccatgagttcggacgggtagctatccaaggaaatcaacaaggaaca

SEQ ID NO: 6685 - DNA, 99 bp, Streptococcus pneumoniae
  misc_feature (1)..(99): tiling:Spneumo1:WAN024C2D; WAN023SJU NC_003098.1_1467||||1 166979..1167077|+|99 bp|Glimmer 2.02 orf prediction|S.pneu moniae|R6|NC_003098.1|ORF
atgatttacaaaatcagcctcgctcttttatttctaggctcgggaaaaaatgatttacaaaatcagcctcgctcttttatttctaggctcgggaaaaaa

SEQ ID NO: 6686 - DNA, 141 bp, Streptococcus pneumoniae
  misc_feature (1)..(141): tiling:Spneumo1:WAN024B8F; WAN0246P4 208200-79-7_5||||2100 ..2240|-|141 bp|Glimmer 2.02 orf prediction from Patent Se quences|S.pneumoniae||WAN0246Z6|ORF|000
atgatttatctgcttgcttggggggcacttcaaaaaacttccttctcacatgcgcccaacatccaacaagtgcagcttcttccagttgacgataagcttctagctgttcgcagtttaccaagcttagcgtcgccttactcc

SEQ ID NO: 6687 - DNA, 1000 bp, Streptococcus pneumoniae
  misc_feature (1)..(1000): tiling:Spneumo1:WAN024C2Y; WAN023Q96 contig_1258_35||||175 64..20002|+|2439 bp|Glimmer 2.02 orf prediction|S.pneumoni ae|670|WAN01UEG8|ORF
atgatttatcttactgaaggcaatacacctttaaatgaggcctacaatgatgaaattgtccatttggggaacaatacctatcaactgacctttcgttttcctacatcggataccaagtgggaattactgaaagaggaaacttttctgactgcagatgacctgcatggtgagcaggatttttatatttttgaggttgaaaagcaacaaggatatattcaagtctatgccaatcaggttatcagtttgttaaataattacatcgttagctctatcgaggttgaccgtgtcagtgggacaagggtgttgagtgcttttgctggtagtattaccagagccaatcctttttctttcttctctgatattgatgataggcatacgctcaatatcaaggataagaatgccatggaggtcttggccaaaggcaagcattctatccttggtcagtggggcggagatatggtgcgaaacggctacaatttacgcttgttgaagaatggcggttctgaaaatgaatcgctttttatgtacaagaaaaacttgtccagctaccagcataagacctcaacgaagtctttaaaaactcggataacctttaaaacgactgttaagggcgagggagaaaatgcggttgaccatgattatatggtggtgattgacagccccttacttgggaactacagccaaatctacgaagatgtggtggaagtcaatgaccaagacgtgacagatgaggctagcttgattgaatacggtaagcagtattttcggacaagtatgtgcgacatgctagaagataaccttgaaatctcggttgtcggtcagagtgatgttgcggtgcagatgtttgatgtggtcagtttctaccatgagtggtacggtcttgatgttcgtaagaaaatcaccaaatatacctattcgccaatggcaaaactcctaaaatcaataggttttggaaccttccagtccagtcttgcaaatgcgatcggtgggattgtaaatg

SEQ ID NO: 6688 - DNA, 225 bp, Streptococcus pneumoniae
  misc_feature (1)..(225): tiling:Spneumo1:WAN024BZN; WAN023KAV 82266_14||||4267..449 1|-|225 bp|EGAD orf prediction|S.pneumoniae|TIGR4|WAN01UC2 5|ORF
atgatttatttctcctattatcgagagctgttccgtaaaaacagctatagtaatttatcaacaagtatcgtagtccattggactcaccttccttctatctcatttcattttttaacaacgaacttactcttaaccgggagaatggtgcgcttctgtatcaggtccttgaacaaccagagtagtattaagcaaactctaactattactcaagaatcagtccaataa

SEQ ID NO: 6689 - DNA, 1086 bp, Streptococcus pneumoniae
  misc_feature (1)..(1086): tiling:Spneumo1:WAN024BOZ; WAN023OIJ pne88_17||||13125..14 210|+|1086 bp|Type 45(1) capsule operon, Glimmer 2.02 orf prediction|S.pneumoniae||WAN01UCBS|ORF
atgatttcagctttattttatataagttttttaacaaatctattagtcgttgtcaataggatgcgtataaattccctagcatttttatcttggttaattttgttttttatctatgcaggaaatatccgagaaggattttcagatttaattcattatcgtgcaagatatgctgtagggaaaagtagtctgtatttttcagaccatgcgtataatttttttgcagattggttttcacatcactccatctcttttcaagtttttttagcatgtatttttctattctcctcagcatgtttctattttgttgctaaaaaattgcattgtaattataatcttctgattttattattatctcttttttatttcttttatactttagaagttctaaggttctttttagcaactagtgtagcacttatagcacactattatctttcacaaaatcatcgattcatattcataggattgatgttcatagcgtttctgtttcacggatctatcatttatttcttaccatttattattttttatagacaaaaaaatactagtaagatgctatgggcattggtatttatatctatggtgttaattgtgacaaatctattggtaggtaataattctagctacttgactaaaatatttgaactgctagggagcgaggtcactaaaagtcgtgttatgtattatacagcgaaatcgactcgtcttggttttatattgtatgatagttactatattttcaacctactaattagtattaaccttaaaaagattgcaaaaacagtttcaaatgcacctcaggaagtgaccaattttataaatctggtgtatcaacatagtttttttagtacaatttttttaccactaattatgtttagtacagcatttactcgctatttaatttttactgttgttttaaattttatagctattgcagctttacaaccatttatgcaacaatcatttataaaattaaagagtgggctttatattattttcggagttttaggtgctacttgtttttggtggtatctaagagaaaatgtcctttatttttatgaggcacttttgccaaatttatttaac

SEQ ID NO: 6690 - DNA, 987 bp, Streptococcus pneumoniae
  misc_feature (1)..(987): tiling:Spneumo1:WAN024BQO; WAN023PN1 pne26_17||||11418..12 404|+|987 bp|Type 13 capsule operon, Glimmer 2.02 orf pred iction|S.pneumoniae||WAN01UCIU|ORF
atgattttaagtattgttgttccaacatataatatagaaaaatatatagagaggaatatagagtcttttctcaatgtagaggatgagttgaagagtttgtttgaaattttgattattaatgatggaagcacagataagactcttcaagtagtaacagaattaatatcaaaaatagattgtttaaatataagagtaataaacaagagtaatggtggacatggttcagcagtaaatagagggatagaggaagctaaaggaaagtattttaagatagtagatggagatgattgggtaaaaaaatcagattttgaagagtacttaaaaagattagaaaaaaccaatgtagatatggttgtgacgaattttagtaagcagtatacttatgaaaatagagtggaattagaaaaggtaatcaatgttgaagattattataaaagtaataaaattcccaaaatttttccaatgcatagtgttacatacaaaacatgtatcctaaaagaaaataatatcaaattgacagaaaaaatcttttatgtagatattcagtatatagtatttcctctgaaatatattagcgattgggaatactggaatttagatgtgtatcagtatttcttgggtagacctgatcaaagtatgactatagaaaatagaatgaaaaatattgagcatagtagaaaagttacagaaagtatattggaattttatagcacgttgggagatgtatattttaaagatatagtgaattctcttttgaaaggtttacttaacacgagatatttattggcattcttatcagatgatagagaacgattattaaaggaaactacagattatattagaaaatataaaataaaatatacctacgactctcgtatgaagacaagctatttattatatctaaatgagatacataatagaagatattcatttatagtgtatcctatagttggttttaaattaaataggttaagcaaatacggtata

SEQ ID NO: 6691 - DNA, 219 bp, Streptococcus pneumoniae
  misc_feature (1)..(219): tiling:Spneumo1:WAN024AVH; WAN023R7C contig_1532_15||||141 40..14358|+|219 bp|Glimmer 2.02 orf prediction|S.pneumonia e|670|WAN01UDMU|ORF|000
atgattttaatgacaaaaaatataaatctaacaaatgaagaattagagctgatacaaggtggagcagatccctatggtaaagaacctaatggttattatccttggcaaatggaaccagtattaactatgccggttcatggattttgtcccagaggaaccgatgatttaggatatattggaggaggtaatcatctttgcaaaggaagtgctgcgagattt

SEQ ID NO: 6692 - DNA, 108 bp, Streptococcus pneumoniae
  misc_feature (1)..(108): tiling:Spneumo1:WAN024F8W; WAN023PUB pne11_24||||19926..20 033|+|108 bp|Type 7F capsule operon, Glimmer 2.02 orf pred iction|S.pneumoniae||WAN01UCCA|ORF|000
atgattttaattacaggggcaaatggccaattaggaacggaacttcgctatttattggatgaacgtaatgaagaatacgcggcagtcaaagctcaagacctaactaat

SEQ ID NO: 6693 - DNA, 726 bp, Streptococcus pneumoniae
  misc_feature (1)..(726): tiling:Spneumo1:WAN024C3H; WAN0246QH 203668-66-0_2||||542. .1267|-|726 bp|Glimmer 2.02 orf prediction from Patent Seq uences|S.pneumoniae||WAN02470A|ORF
atgattttacctcttcttaacttgaaaaatgcacatttatttatgatttcaacatacaacactatctcgtttagttcgtttgaaaaatatggcaaagacacagatgaaaaacgtgaaaagtttaagagtgagatcaataaacgtgctaaagagcaggttaattacttagatttttggtcacgtcttgctactgataatgtccgtgataaacttcttaagagtcaaaatgtagttccaactcctgtatgggataatcataatagcccgaacggatgggctagtagacatggtcatatagatgggaaaccggattatgctccaattcgtgagttctttgggcgaatcaataagtatcatggttacaaatatggatatggcgcatatgcatatatttttgcagcacctcaaccgatggatgcagtttatttcgttatgacagatttaattagtgactttggaacatctgcatttacacatgaaactactcacattaatgatcgtatggcttactatggtggtcattggcatcgtgaaggtacggatcttgaagcatttgctcaggggatgttacaaacgccatcggtatcaaatccaaacggagaatatggcgcattaggtctaaatatggcgtatgaacgtcaaaatgatggaaatcaatggtataatccaaatcctaacaaacttaaatctcgcgctgaaattgatcactacatgaaagaactacaa

SEQ ID NO: 6694 - DNA, 471 bp, Streptococcus pneumoniae
  misc_feature (1)..(471): tiling:Spneumo1:WAN024FUG; WAN023PN6 pne26_12||||6944..741 4|+|471 bp|Type 13 capsule operon, Glimmer 2.02 orf predic tion|S.pneumoniae||WAN01UCIU|ORF|000
atgatttttgtgactgtaggtacacatgaacaacaatttgatcgattgattaaagaagttgatcgtttaaaaaaagaaaatcttattcaagatgaagtatttattcaaacaggatattccaaatatattccgaaatattgtgagtgggaaaagataatttcttatgaaaaaatgaatcaattgattgagaaatcagatattgtcattactcatggtggaccagcgacgtttatgggggttattgctaaaggaaaaattccgatagttgttcctagacaaaaaaaatttgaagagcatgtgaatgaccatcagttagaattctgtaataaagtaaagcagacttacccaattattgtaattaatgatataaaaaatctagttataaatttaagaaataataaatcaaaggaaactataaatagtaataataaggagttttgtagaaaattggaagaaagaataggtagtttg

SEQ ID NO: 6695 - DNA, 81 bp, Streptococcus pneumoniae
  misc_feature (1)..(81): tiling:Spneumo1:WAN024DBX; WAN023NMQ spn097d12_70||||54187 ..54267|+|81 bp|Glimmer 2.02 orf prediction|S.pneumoniae|2 3F-1|WAN01UCN2|ORF|001
atgcaaaagaccgctgcaatagatgaagaacttgtgacaccgattatatcaggacttgcaagaggatttcttaacatagtt

SEQ ID NO: 6696 - DNA, 114 bp, Streptococcus pneumoniae
  misc_feature (1)..(114): tiling:Spneumo1:WAN024BUH; WAN023Q7D contig_1244_4||||1184 ..1297|-|114 bp|Glimmer 2.02 orf prediction|S.pneumoniae|6 70|WAN01UEHP|ORF
atgcaaaggagagaaataatgaatgattttatcaaagagattgggatggctatcctatggatgtttttagggtatctcttgggagagcgtagcactagaggaggacaaatcaga

SEQ ID NO: 6697 - DNA, 330 bp, Streptococcus pneumoniae
  misc_feature (1)..(330): tiling:Spneumo1:WAN024CCL; WAN023OCT spn019g01_3||||1223.. 1552|-|330 bp|Glimmer 2.02 orf prediction|S.pneumoniae|23F -1|WAN01UCLR|ORF|001
atgcaacaaattactgaaatcatcattgcttttgcgacaagctttttaacagtagcagtaggcggtattgtaaaagcagtaaaagattatcttttgcgtaaaggcggagagaaagcggtgatcatcgctgaaattctagctaaaaatgcagttcatgccgttgagcaagtagcttcagagactggctataagggcgaagaaaagctggagcaggctcgtgctaaagtccgtgctgagcttacaaaatacaatattagtatgactgacaaagacttagacaccttcgtagagtcagcagtgaagcagatgaatgacgcatggaaaggacga

SEQ ID NO: 6698 - DNA, 333 bp, Streptococcus pneumoniae
  misc_feature (1)..(333): tiling:Spneumo1:WAN024CCM; WAN023RM4 contig_1575_9||||2422 ..2754|-|333 bp|Glimmer 2.02 orf prediction|S.pneumoniae|6 70|WAN01UDHA|ORF|000
atgcaacaaattactgaaatcattactaatggagcaatcagcatccttgttattttggctggtatcgcagtcaaggcagtcaaggaatacctcgtcaaaaaaggtggagaaaagactatcaagattgttgaaatcttggctaagaacgcagttaatgccgtggagcaggtagctgctgaaactggctacaagggagatgaaaaactggcacaggctcgtgctaaagtccgtgctgagcttacaaaatacaatatcagtatgacggacaaggacttagacacctttgtggagtcagccgtgaagcagatgaacgacgcttggaaaggacaagag

SEQ ID NO: 6699 - DNA, 96 bp, Streptococcus pneumoniae
  misc_feature (1)..(96): tiling:Spneumo1:WAN024CA9; WAN023NAJ spn145c07_3||||1269.. 1364|-|96 bp|Glimmer 2.02 orf prediction|S.pneumoniae|23F- 1|WAN01UCWM|ORF|001
atgcaacatgaggtggttcatggttgtatccgagaagccaagaaaaattttttgtttgataaccttttggagttggtcattttcaaaaagataagg

SEQ ID NO: 6700 - DNA, 180 bp, Streptococcus pneumoniae
  misc_feature (1)..(180): tiling:Spneumo1:WAN024DQF; WAN023SLN NC_003098.1_766||||61 1850..612029|-|180 bp|Glimmer 2.02 orf prediction|S.pneumo niae|R6|NC_003098.1|ORF|100
atgcaaccagtactaaccaaatataaaatagatgccattaaagaattttattcaagtttttcccattcatattatccaaacaaaagagatggtgataactcaaaaataaattgcaatcttgtaaaattcctagcaaaaaagagagccaaaactctcttttttatcttcttttactttttt

SEQ ID NO: 6701 - DNA, 1095 bp, Streptococcus pneumoniae
  misc_feature (1)..(1095): tiling:Spneumo1:WAN024BO5; WAN023OCB spn019g01_22||||19184 ..20278|-|1095 bp|Glimmer 2.02 orf prediction|S.pneumoniae |23F-1|WAN01UCLR|ORF
atgcaaggcgttggggatatttacgaaaaattacagattgatatctttgaccgtatgataaaacgcttaaaagagcgtgggtctattgatttaatgagaaacccttatatctggcagttagagaaactaaatgatatgcacatgctcaatgaacagaatctaaagcttatttcagagcgtacaggaattgctgaaagattgttgcgtgatgtaattgagaatgaaggtttgaaagtctataaggacactaaacagcaacttgaagaagatttgaataaaatacctgagggagagatttcaaatggcgtaacggacagcttagaggcttattcgaggcaagcagttagtgatttaaaccttatcaatacaacattacctaagagcttgcaagtagcttataaatcgattgtggaggagacagtcgcacaggtagttgcaggaactaaaacaagcgatgttgctttgcatgataccatcatgaaatggcagaagaacgcttttacgggctttgtcgataaaggtgggaggcattggaaagctgatagctatgcgagggctattatcaagagcacaacatacaaagtttataacgaaatgcgtactagacctgctgaggagttaggagtagatactttttactattcgatgaaagcaatggctagaccagcttgtagtccgttacaagggcagatagttacaaaagggactggtagggagatagatgggataactatctattcattattggattatgggtatggaacagcagcaggatgtttaggaatccattgtggtcattatctgacaccgtttattgttggagttcatgagttaccgaacttaccagactatctgaagaatctaacaccagaacaagctgaagaaaatgcacgcattgaagcaggtcaaagaggccttgagagacttatcaagacacataaagagcggttgcattacgctcataccttgcaagatgacaagatgatacaagctgagcgtttgaaagttagagggtatcaaactaagatccgcaacttgataaatcagcatgatttcttaacaagagattacagacgagagaaattatatatttca

SEQ ID NO: 6702 - DNA, 513 bp, Streptococcus pneumoniae
  misc_feature (1)..(513): tiling:Spneumo1:WAN024D86; WAN0246S0 173329-91-4_3||||1153 ..1665|-|513 bp|Glimmer 2.02 orf prediction from Patent Se quences|S.pneumoniae||WAN02471C|ORF|000
atgcacaaatcgtccttgatagatttcatatcatccagcaccctaagccgtgagatgatgacaaccagaattgtcatcatgaagaattttgacaagcaatcactttcctatcgcgccatgaaaaatcactggcgaattttccaaaaggatagccgaaaactgtctgataaggccttctactcaagaacttttagacagacactgacacctccagaaatcgtcaataaaaccttagctttctcagatgagctccactattatgacgatctttaccagctcctgcttttccacctgcaagaaaagaatgccgaccatttctttgacttgttaactgaggcttttccccaactcaatcaagcctttagaactgctcttagcacgctggtgcgctacagaaaatacgtgacaaatgccatccagatgccctattctaactccaagctggaggcaatcaataaactcatcagctttcttcaaacccaaacatgtaggttatgtttttcttcaaattct

SEQ ID NO: 6703 - DNA, 225 bp, Streptococcus pneumoniae
  misc_feature (1)..(225): tiling:Spneumo1:WAN024CSO; WAN023JE7 84467_1661||||957779. .958003|+|225 bp|EGAD orf prediction|S.pneumoniae|TIGR4|WA N01UC25|ORF|010
atgcactctaaccaatccctccatggattggcgagtatttggcttaactgtattcttgtaactatcccaccaaacttttacaagctcattatatgttgtaattgtcggcttgtctttaactgtatagccattagcagcaaaagtattgatcgcatcacgcgcttttactttaacgccctttttagtggttgctgtaacagttgtacgggcttttttgcccgttag

SEQ ID NO: 6704 - DNA, 120 bp, Streptococcus pneumoniae
  misc_feature (1)..(120): tiling:Spneumo1:WAN024C7S; WAN023MKQ spn193e05_48||||29044 ..29163|-|120 bp|Glimmer 2.02 orf prediction|S.pneumoniae| 23F-1|WAN01UCMQ|ORF|001
atgcagagtatcctgcaacacgaacaattaagtctctgtgtttttcaggatgtttctgagcgtcaatcaacgtctctctggaaacaacattgtattgaatatggtacccatgtaaacgat

SEQ ID NO: 6705 - DNA, 606 bp, Streptococcus pneumoniae
  misc_feature (1)..(606): tiling:Spneumo1:WAN024BNA; WAN023O8B spn029h04_40||||28948 ..29553|+|606 bp|Glimmer 2.02 orf prediction|S.pneumoniae| 23F-1|WAN01UCO3|ORF
atgcagataaaatttattgataaagtttcaaatcttataatgttaaatctactctatgtagcgtcagtagtaacagttattgctatcggatcaggtgaaagtgccctaatagcaactctaataaaaattgtacgacacgaggaatcctatccctatagagacttcgcaaacagtttttttaaagattattggaaaaatttaggagcagcattaatatctaatttaccaattttaatcttattattcagtttgttcttcctaccctacataccattacctatatatatcatttctatcttacgacatattggagtaatatatatcatacttcatttaatagcaacaacatttctaattcctttaatcggtagatataataacactttaaaaaattctctacacaattcaatcatgttagcctataaacatttttttattgccgttcttattagaattattgaaattatcccagttctactcttctttatattacagaatcaattactagtttggataactttaatgatttttatacttccctcaataacaaaatatgctaatgcatttttatataactttatattctcgaagtatgaaaaattaaac

SEQ ID NO: 6706 - DNA, 87 bp, Streptococcus pneumoniae
  misc_feature (1)..(87): tiling:Spneumo1:WAN024CWC; WAN0246PU 203669-14-1_3||||761. .847|+|87 bp|Glimmer 2.02 orf prediction from Patent Seque nces|S.pneumoniae||WAN0246ZO|ORF|000
  misc_feature (34)..(34): n is a, c, g, or t
  misc_feature (51)..(51): n is a, c, g, or t
atgcaggcttctcagccaatggatcgacttttanttggggatgttggtttnggaagaactgaaattgctttgcgtgcactaactaat

SEQ ID NO: 6707 - DNA, 84 bp, Streptococcus pneumoniae
  misc_feature (1)..(84): tiling:Spneumo1:WAN024BZH; WAN023SFA NC_003028.1_392||||28 4142..284225|-|84 bp|Glimmer 2.02 orf prediction|S.pneumon iae|TIGR4|NC_003028.1|ORF
atgcagtggacaaaatatcttttaacaaaccaagagtttattaaagagttatcacttttcaacttttctaagcttatgcagttg

SEQ ID NO: 6708 - DNA, 969 bp, Streptococcus pneumoniae
  misc_feature (1)..(969): tiling:Spneumo1:WAN024BOO; WAN023OFP pne92_15||||11258..12 226|+|969 bp|Type 48(1) capsule operon, Glimmer 2.02 orf p rediction|S.pneumoniae||WAN01UCEA|ORF
atgcataaaaagttagctctaataatagcatattttggtgaattacctgaatactctaaagttttttttaattctttaaattataatcctgagattgatttatttctagtgacggatcaatgtgtaaatataaacatagataatttaattgttataaaaaaaacgttctctgaatttaaaaatgatgttcaaaatttatttgatttcaaaatagttttagatactccttataaattatgtgattacaagcctatatatgggatgctttttaaagatattttatatgaatatccattttggggatattgtgatttggatatggtgctgggagatgtgttttcgtttttacctgaaaatatattggataattacagcaaaatatatgaatatggtcatttaactatttataaaaatgaccctgaaaataatcgacgtttcatgtatgaagttggaatgaattaccaagacgtttttacaactaaagttattaaagtatttgatgagacagaaggaattcagagaaaatatgaattaatgggaattcctacatatacaccaagagattgtgctgatataaacccttggaagtatcagttaaatagagtagaaacaggtatttccaaagaaaaattaaattcatttaatcataaaaagcagttgtttttctgggaaaatggtaagatttttagaggatttatcaacccatatacacataaaatagagtacgattctttcaattatcttcattttcaaaaaagagaaatgaagataacctttccttttaattctagtacaaaagcattttttattactaatcaagggattgtagagaagaagcaggggtttaatataaaaaaagaagattttaaaaaatataataactataacttaataagagaaatatcgaaaggtttacaacgatattatttcatctggaaaaggagattattaaaatatatatttaggaga

SEQ ID NO: 6709 - DNA, 1242 bp, Streptococcus pneumoniae
  misc_feature (1)..(1242): tiling:Spneumo1:WAN024BTG; WAN023YJZ AL449929.1_23||||2354 3..24784|-|1242 bp|Glimmer 2.02 orf prediction|S.pneumonia e||AL449929.1|ORF
atgcatatagtattatttagatattctgcacgggttgttaaactaaaatatctgtataacagaaatgtagtaattattgcacctgaggttcaaagaaaaaaatatgaagattatctagctgaaggaaataatctacctaaggtcatttttttagaagattttattctaccaaatatcatcttagaaattagaaggataagtcaaaatacagaagttgagagtattacaaccttgagtgaggaagacatggatatagtaggttttttgaatgatcattttgtagaaaaaaatactcactctgtgtctaatttattatttaaagacaaatacttcatgcgttcatttttagttggagtagtaaatcaaccgtattttaggcttttagaatcagaaaatgatttacgtgttttttggaataattgtaaatcttctgctgcaattttaaaacctagaaatgaagcaggaagtaatggaataaaaaaagtttaccctaacgagaaaattgattcagtgtattttgaaaaaaactatattatagaggaatacattgatatcgataacatgataacatgtgatggttattcaattggaagtgagattaagcgattttatgttcacgaatatgaggaactattgttcaataccttaagttctagtggatattatcttgtaaggactagttcgttatataatgatagtgaaaaaattgaatacatagaaaaagcattggaagaatgtcgcaaagttttgaatgttttttctatcaattctgaaataaccccttttcattttgaatggttccttgaattatcaactggtaaaatagtcttttgtgaagttggaaaaagatttggagggggagatattccccagttaattgaggatagtcatggagttgatgtaattaaagaatattgggatattttgactaattcacaaggattgaaaaaaataaatttttctaaagtgatttctagacctgctaatatctcagcaacgtttgctttatatasaaagcaaggtaaggttatcgaggtacctgatgaaaaagaattggcttgggcaaaaaaagtgtacatatttattaaaacaaatacttactataaagtatctgaaaatgtagtcgaaaattcaatgttggtccaatttaattgcaaaaatagttgtgaatttgagaaaaggttagatgaacttaagcacatatcacaaaagtttaaatatgtgattactgattcgggagaa

SEQ ID NO: 6710 - DNA, 438 bp, Streptococcus pneumoniae
  misc_feature (1)..(438): tiling:Spneumo1:WAN024F2R; WAN0243WJ spr1184||15903227|NP_ 358777.1|1182410..1182847|+|438 bp|Hypothetical protein|S. pneumoniae|R6|NC_003098.1|ORF|100
atgcatattcactataacacaaatcaaacaactttaccactagaaatcagttctttcttgccgcaagaccatctcgtctttactattgaaaaagtggtgaataccgatgaaaaggaggtaaaccatctgattaaatatgccatgtttgataaggaacaaaagagaggctataaacagtcagctagaaacttagcgaattggcactataatgacaaggaggatagctatacacatcctgatggctggtattatcgttttcaccataccaaatatcagaaaacacagacagactttcaacaagaaatcaaggtttactacgccgacgaacctgaatcagcccctcaaaagggactgtatatgaacgaacgctatcaaaacttgaaagctaaagaagcctttatctgcccaaagacagattttcgctcaacgcaagattga

SEQ ID NO: 6711 - DNA, 420 bp, Streptococcus pneumoniae
  misc_feature (1)..(420): tiling:Spneumo1:WAN024G93; WAN023JJD 84087_1389||||787186. .787605|-|420 bp|EGAD orf prediction|S.pneumoniae|TIGR4|WA N01UC25|ORF|010
atgcatcacaccataacggacaaactccgcattttcaagacccggaatcatttggaagacacgcttttgttctccccatttgaggtgggtctggaaaccaacaatattgtagaggctaccagctgcattatcctgacgaagttgcacaaccgcataaggtgttttaaattctccatcacgaggtcctgtatagtcgtctgggtactcaagaccgactggcttcatagggccataaagcatagttttaatgccacgtttggccatgacttcgataggcatacatccttcaaagtacttttctttttcaaaagaactaagcggtgcttcttctgcattgaccaaagcttcatggaaatccataaattcttgcttggtcataggggcattgaggtaggccgcttctcccttatcataacgtga

SEQ ID NO: 6712 - DNA, 396 bp, Streptococcus pneumoniae
  misc_feature (1)..(396): tiling:Spneumo1:WAN024F6B; WAN023LZQ 314538_877a||||465537 ..465932|-|396 bp|EGAD orf prediction|S.pneumoniae|R6|NC_0 03098.1|ORF|100
atgcatcataatttaggtaactcatactcaataaaaatcaaaaagcaaactagaaagctaggcgcagactgctcaaaacaccgttttaaggttgtggatagaactgacgaagtcagtaaccatacccatggcaagccgacgctgacgtggtttgaagagattttcgaagagtattattctccatcaaaggcatctttaatatggtcaaagaagccttttttctttggatttactttcaagtcaccagcagccgcgaattctttcaaggctactttttggcggtcgttcaagcctgtcggtgttacgacattaacagtaacgtattggtcaccaactgcaccgccacgaaggctcggtgcccccttactacgtaggcggaatttcttaccagtctga

SEQ ID NO: 6713 - DNA, 1059 bp, Streptococcus pneumoniae
  misc_feature (1)..(1059): tiling:Spneumo1:WAN024BQH; WAN023PI0 pne34_16||||13367..14 425|+|1059 bp|Type 17F capsule operon, Glimmer 2.02 orf pr ediction|S.pneumoniae||WAN01UCHZ|ORF
atgcatgtaggaattatgtttgtgacgttttcgtacatttcaaaaaaacggtttccaaaattttttgtatggctagttcttctatataactcttggcttacttttttaactattcaaaataacggagatataaaaagggcgatatttcaactcttgctgtttacaggctttgtatctatgatagacatattctctgaaaatatgcaggatttaatagaatcattgttattcacttttgagatggttgtgtatctaaactttgtcactgtactatttttcccagatggttttttccatcgtgtaaatgatgcatacggaataacaaaagaatggtttttgggagctgataataattttctatttaccttgtttcctgcaacacttatagctttattgtataagaatttaggtggagtaaaaatcagagcatattcattgatttcaatcattttagctactcaattgattaaaggatcgggaacggcaaaggttgggattgttgcgttgatactatttgatttagtacctcttgtcaaatacatacttaccccttacagaggtttggttatatcgtctacgttgagttttctaattgtagttactggtaaagtggaatttttaagagggattgttgaaggtattctagaaaaagatttgacgttcacttcccgaacttttatttgggataacgctatgtcagcaattcgagagaagccatttggttacggaatgatgatgttcactgataacgtccatatattagggaattttcctggttggatttggaaaggagccacccatgctcataataactttcttcaagttttatttcagggaggatatttaggatttggtgtttattttttaataattctaaagggagcaatgctatgtcgcaaatattgggatgatagaaatgcgagactactcttttatggactttttatttttacaataatatctataacagaaaacttagagatgcagatgatgtatttggtgattatactaccgtttttattgcctaatatattggttaaagaaaggggaaaaaatgaa

SEQ ID NO: 6714 - DNA, 285 bp, Streptococcus pneumoniae
  misc_feature (1)..(285): tiling:Spneumo1:WAN024FXU; WAN023LAD 314211_2177a||||11725 55..1172839|-|285 bp|EGAD orf prediction|S.pneumoniae|R6|N C_003098.1|ORF|100
atgcatgtggacaccgagcttgcgactgaggaattccatatccagataatcctcataggtcaaggattcgctgataatctcatggccagtagcagtttcttggacaagggcaccattgaaggtcaccacatagtcaccttggtctctcaactgcaagtcgtccagaagtttggcaacacctgcgatggggcggccagttgcaatcacgactttgacaccagcttctttggcatcttggatggcagaaaagacttcaggagtgatttccttttggctgttgactag

SEQ ID NO: 6715 - DNA, 81 bp, Streptococcus pneumoniae
  misc_feature (1)..(81): tiling:Spneumo1:WAN024CLQ; WAN023S9R NC_003028.1_2018||||1 522181..1522261|+|81 bp|Glimmer 2.02 orf prediction|S.pneu moniae|TIGR4|NC_003028.1|ORF|010
atgccaaaatcattttaccttttcttcataacatctattttagttgaaatatttaagttgcttttcgtatttgataagaaa

SEQ ID NO: 6716 - DNA, 552 bp, Streptococcus pneumoniae
  misc_feature (1)..(552): tiling:Spneumo1:WAN024BSR; WAN023XXE AL449942.1_6||||4925. .5476|-|552 bp|Glimmer 2.02 orf prediction|S.pneumoniae||A L449942.1|ORF
atgccaaaattattagagactgaaaaatacagtttagatagcattatagatggagggaagcttagaatgatttctaagttttgcccagacttacatggcttgaggtacgaattcaaaacatcagactcaattactaaagaatattgtaaaaaaatacgtcaagctttaagagattctgatccagaaggaaagagtggaaaaaaatgtatgatgagatatacaatagatattttaaatgtatggaacacgctatgtagaacacgagattttataacggggagtttaaaagcggatgatgttatagatgggaagacagggatatacttctttgatgttaatacgtctaatgtaattacggatgatgttatagaaaatgttaaaattaatcacaaaagcttagtacgaaatgttgatgaagraaatatagaaagtatttcaaaagaaattcctaaaggcactgatatgtattattatgttttgtatagattagggttgaataggattaagtataattatttagtcaaggctctggcaggcgcaatacagaaggat

SEQ ID NO: 6717 - DNA, 75 bp, Streptococcus pneumoniae
  misc_feature (1)..(75): tiling:Spneumo1:WAN024BKR; WAN023MTY spn177f01_16||||9885. .9959|+|75 bp|Glimmer 2.02 orf prediction|S.pneumoniae|23F -1|WAN01UCN4|ORF
atgccaaaggttgccttgatgtcgtctggagatgacttgtcatttaaggtcatgaaaccgccattgctttccaaa

SEQ ID NO: 6718 - DNA, 450 bp, Streptococcus pneumoniae
  misc_feature (1)..(450): tiling:Spneumo1:WAN024BNN; WAN023OBM spn019g01_50||||34353 ..34802|-|450 bp|Glimmer 2.02 orf prediction|S.pneumoniae| 23F-1|WAN01UCLR|ORF
atgccaaattgggcagaggggactcttaaattaagaggcagacgcgaaaacgttgcatcagctttaaaagaaatgctattaggaaataaaggcgcaacacttgaagaagaatacgatggcactctactaatatttaaaaacgagtatgattatttttatataaacggtacaaggcgtgcgtttatttctagtaaagatattgaaatttggttggatgatgattttgtgattatcgaacttgaagatttcgaacaagcatgggcagcattagctgacaattacacagaaatttctagtaagtttgatgttgatattaaaattttcacttttgaaatgggtatggaatttacacaggaaattgaaatttcaaaaggtgaaatcatcaagaatattgtaaacgaaaactttactaactattcatgggatgtgccttttagtagacttggagga

SEQ ID NO: 6719 - DNA, 681 bp, Streptococcus pneumoniae
  misc_feature (1)..(681): tiling:Spneumo1:WAN024BPO; WAN023OXT pne67_6||||4449..5129 |+|681 bp|Type 18F1 capsule operon, Glimmer 2.02 orf predi ction|S.pneumoniae||WAN01UCFB|ORF
atgccaacgttagaaatctcacaggtgaaattagaacttgcgaaaaaggcagaggaatattataatgctttgtgcacgaacctacagttaagtggagatgatttgaaagtattttctatcacttctgtgaaagcaggagaaggaaaaacaacgacttccaccaatatcgcttgggcttttgcgcgtgcaggttacaaaacgctgctgattgatgcagacatgcgtaactccgttatgtcaggtgtctttaaatcaagggaaaggattactggactaacagaatttctatcagggacaacagacctgtcacaggggctttgcgataccaatattgagaatctctttgtgattcaggctggctctgtgtcaccaaatccgacagcccttcttcaaagtaagaatttcagcacaatgcttggaaccttgcgtaaatattttgattatatcattgttgatacaccacctattggaattgttattgatgcggcaattatcactcaaaagtgtgatgcgtccatcttgataacagcaacaggtgaggtgaataaacgtgatgtccaaaaagcgaaacaacaattagaacaaacagggaaactgttcctgggagttgttttaaataaattggatatctcggttgataagtatggagcttacggttcctatggaaattatggcaaaaaa

SEQ ID NO: 6720 - DNA, 879 bp, Streptococcus pneumoniae
  misc_feature (1)..(879): tiling:Spneumo1:WAN024BO7; WAN023OCD spn019g01_20||||17583 ..18461|-|879 bp|Glimmer 2.02 orf prediction|S.pneumoniae| 23F-1|WAN01UCLR|ORF
atgccaagtaatcaaaacaacgcagtgcgccgctatgagaaacaatatgcgggcattcttgagacagtttttggagtgcgggcagcattttcaaacgctctagcacctattcagattttggatggggtacaagaaaactctaaggctttctcagttaaaacaaacaacacaccagttgtaatcggtgagtacaaaaccggtgaaaatgatggtggttttggtgataactcaggggctcagtcacgctttggtggtgtgacagaagttaaatatgaaaatacagatgtcaactatgactatacccttacaatccatgagggtcttgaccgttacacagtaaacaatgatcttaacgctgctgttgccgaccgcttgaagttgcaatccgaggcacaaactcgaacagtgaacaagcgaattggtaaatacttgtctgacaacgctactaagacggaagcccttgctgattttacagatgacaaagtaaaagctttattcaataagttgtcggctttttacacaaacaacgaagttacagcgccgattactgtttacttgcgttctgaattttacaacgccatcgtagatatggcatcagttacaagcgccaaaggggcaactatctcccttgatgaaaacgggctaccaaaatataagggctttaccttggaagaaacgccagcacaatactttgagacaggagttatcgctatcttctcaccaaacggtattatcattccgtttgttggtatctcaacagcccgtgtaattgaggctgaaaactttgatggtgtgaaattgcaagctgctgctaagggtggtacttacactcttgatgacaataagaaagcaatttacaaagttacaggaactattgta

SEQ ID NO: 6721 - DNA, 207 bp, Streptococcus pneumoniae
  misc_feature (1)..(207): tiling:Spneumo1:WAN024C2E; WAN023SJV NC_003098.1_1462||||1 162669..1162875|-|207 bp|Glimmer 2.02 orf prediction|S.pne umoniae|R6|NC_003098.1|ORF
atgccagaaaaagagcataaaagagcacacaaaaagagacaaaaacaagatctactaaataaaggttctttatttgatagacttagctgttcatgtctcccttacctccgagtattagtatctttatactatacctttaaggaaattttgtcaacagaaaactggaaattctatgctctaaaatccaaaaacaggtccatagagact

SEQ ID NO: 6722 - DNA, 60 bp, Streptococcus pneumoniae
  misc_feature (1)..(60): tiling:Spneumo1:WAN024BLK; WAN023NEP spn132b05_28||||28359 ..28493|-|135 bp|Glimmer 2.02 orf prediction|S.pneumoniae| 23F-1|WAN01UCLP|ORF
atgccagaaaatggtataataggacgaaagtgttttgatagggaggatatcagggatgaa

SEQ ID NO: 6723 - DNA, 189 bp, Streptococcus pneumoniae
  misc_feature (1)..(189): tiling:Spneumo1:WAN024FJO; WAN023OBH spn019g01_56||||36401 ..36589|-|189 bp|Glimmer 2.02 orf prediction|S.pneumoniae| 23F-1|WAN01UCLR|ORF|001
atgccagatatcacaaatggtcgtgagaaagtcaatgattttctgaaagacaaaggtattaaaaaaacaagtctagcgattgcttatggctttaaacgacaggaagtaacaaacattctgagtgggacgacgaagggaccacgagcgaacagtttcattcttcaagtgattgaagattatgggattgag

SEQ ID NO: 6724 - DNA, 465 bp, Streptococcus pneumoniae
  misc_feature (1)..(465): tiling:Spneumo1:WAN024FWD; WAN02413O |orf2||CAA87402.1|||4 65 bp||S.pneumoniae||Z47210|ORF|000
atgccgacattagaaatagcacaaaaaaaactggagttcattaagaaggcagaagaatattacaatgccttgtgtacaaatatacagttgagcggagataaactaaaagtaatttccgttacttctgttaaccctggggaaggaaaaacaactacttccgtaaatatagcaaggtcgtttgcgcgtgcaggctataaaactcttttgatcgatggtgatactcgaaattcagttatgtcaggattttttaaatctcgtgaaaaaattacagagctaacagaatttttatctgggacagctgatttatctcacggtttatgtgatacaaatattgaaaatttatttgtagttcaatcgggatctgtatcaccaaaccctacagccttgttacaaagtaaaaattttgtggttatggtaaagattttttcaaaagaggtcagtatattgagttggtggaaacgataa

SEQ ID NO: 6725 - DNA, 675 bp, Streptococcus pneumoniae
  misc_feature (1)..(675): tiling:Spneumo1:WAN024BHZ; WAN02418V |wze||AAP94605.1|||67 5 bp|putative autophosphorylating protein tyrosine kinase| S.pneumoniae||AY336008|ORF|000
atgccgacattagaaatagtacaaaaaaaactggagttcattaagaagacagaggaatattacaatgccttgtgtacaaacatacagttgagcggagataaactaaaagtgatttccgttacttctgttaaccctggagaagggaaaacaactacttctataaatatagcatggtcttttgcgcgtgcaggatataaaactcttttgatagatggcgatatccgaaattcggtgatgtcaggagtttttaaatctcgtgaaaaaattacaggcttaacagaatttttatctggtacaactgatttatctcacggtttatgtgatacaaatattgaaaatttatttgtagttcaatcgggagctgtatcaccaaaccctacagccttgttacaaagtaaaaattttaatgatatgattgaaaccttgcgtaaatattttgattatatcattgttgatacagcacctattggagttgttattgattcggcaattatcactcaaaagtgtgatgcgtctatcttggtaacggcaacgggtgaggtgaataaacgtgatgtcccaaaagcgaaacaacaattagaacaaacagggaaactatttttaggtgtcgttctcaataaatttaatgttcaacatgaaaaatatggttcttacggtaattatggtaaaagataa

SEQ ID NO: 6726 - DNA, 673 bp, Streptococcus pneumoniae
  misc_feature (1)..(673): tiling:Spneumo1:WAN024AZM; WAN0240IR |trpA||AAD41125.1|||6 73 bp|tryptophan synthase alpha chain|S.pneumoniae||AF1578 26|ORF|000
atgcctaagacactaacagaaaaattgaatgctataaaagcaactggaaaaggaattttcgttccttatatcatggctggtgaccacgaaaaaggtttggacggtcttgctgaaacaattcactttttagaagatttgggtgtctctgcaattgaagtgggcattcccttttcagatcctgtcgcagatggacctgttatagaagaagctggcttgcgtagtttagcccacgggacttctacccaggctttggttgaaaccttgaaaaccattgaaacagaggttccgctggtcatcatgacctacttcaaccccctctttcagtacggtgtggagaactttgtcaaagatttggtagatacagcggttaagggcttgattatcccagacctgcctcatgaacatgccaactttgtagaaccatttttggcagatacagacattgccttgatacccctagttagtttgacaacaggacttgagcgccagaaagagttgattgaaggagcagaaggatttgtctatgctgttgccatcaatggggtgacagggaaatcaggcaattaccgcgcagatttggataagcacttggcacaattgcatcaagtggctgacatcccagtcttgacaggatttggggtatctagtcaagctgatgtagaacgctttaatg

SEQ ID NO: 6727 - DNA, 238 bp, Streptococcus pneumoniae
  misc_feature (1)..(238): tiling:Spneumo1:WAN024BHG; WAN02403O |||AAC33863.1|||238 b p||S.pneumoniae||AF055720|ORF|000
atgcctacaactaggaataatgatatgatggtttattgctcattttgtggcaaaagccaagaagaagtacaaaaaataatcgctgggaacaacgcctttatctgtaatgaatgtgtagagttagcccaggaaatcattcgggaagagttggcggaagaagtcttggcagacttgtctgaggtaccaaaaccaattgaactcctccatatcttgaaccactatgtaatcggtcaagatc

SEQ ID NO: 6728 - DNA, 1044 bp, Streptococcus pneumoniae
  misc_feature (1)..(1044): tiling:Spneumo1:WAN024FV9; WAN023OXO pne67_12||||9694..107 37|+|1044 bp|Type 18F1 capsule operon, Glimmer 2.02 orf pr ediction|S.pneumoniae||WAN01UCFB|ORF|000
atgcctacatttagtgtagttgttccagtttataatgtagagaattatttatcgcaatgtttaaatgctcttgtaaatcagtcttttaaagattttgaacttatcttggtaaatgatggttctactgacacatctggaagtctttgtgaagaatggggaaaaaaagatcatcggataaaagtaatacataaaaccaatgaaggtcttggttttgcacgtaacacaggtattgaaaactgtacaggagattatattgtctttgttgattcggatgattatgtctcatatgagatgcttgaaatttatgatacatacttacaacgttttaatgcagacgtgatttatagtgaaaatttttatcgagtggataataaaggaaatattatagaaccacttgatcagagcctagattccattttttataaaaatgattcaattttcacagaacttttaccagatgtaatatcttcaccaccagaatttattggagatggaaagataggtgtttcagtgtggaaaggggtatataaacgttctttgtttaaggataaggggctattatttcattcagaaagagaattcatttcagaagatgctatttttcaaattgattgtttaaaattagcaatatctgcccttgttatcccagatattttatattactatcgtgaaaactttggttctttaagtatgaaatataaagaagatcggtttgagttgaataaaatcttgtataacgagcaattaaaaagagttgaggggttacctaatcaagaaattttggaagaaagaattgagagaattttaattgctaatattcgtttatgtatctttcaggaatccttatataaaaattctagaattcataaacgtttgcaaagaattagacagatttgtaaggacccaatatcaaaatcagtattacgtcattatccaatccgtcgtttacctttttctaaacgcttgatctgcgtattagctaagtataatatgccgttgatgcttttagttttaaccttattaaaatatcggaatcggagcgta

SEQ ID NO: 6729 - DNA, 255 bp, Streptococcus pneumoniae
  misc_feature (1)..(255): tiling:Spneumo1:WAN024BVI; WAN023QHN contig_1298_21||||123 93..12647|+|255 bp|Glimmer 2.02 orf prediction|S.pneumonia e|670|WAN01UEBQ|ORF
atgcctgacaatatccctccaatagaagttcctaaactgctggaaaatctttttaaggaaatcgtaactactctgtctttttcttttcctattccgacagcccatgttcgcaataaaagaattattgttgccgctccaatacctgagataagaccagagattaatgatatcaaccaatcattaggaaataatctcaataataaaccgatagaatatagtattactcctattcttatcagatttcttaaattaaaa

SEQ ID NO: 6730 - DNA, 246 bp, Streptococcus pneumoniae
  misc_feature (1)..(246): tiling:Spneumo1:WAN024GIH; WAN023LYN 314535_931||||487305. .487550|-|246 bp|EGAD orf prediction|S.pneumoniae|R6|NC_00 3098.1|ORF|100
atgcgaatcaaagctgcacggagggccaaattttcttccttaaagacacgaactgggtgcccagggtgttcggtatctaaaacttcgacacctttgatagcatttttaaaaagattggcatggacatcacagagttccataacatcttcaaaagtgacgcccgaatccgagttcatcagctcgtgctccataagggaaatctcgatggctgacacgcccgtaaaggtcgcatcaaagcgatcttga

SEQ ID NO: 6731 - DNA, 159 bp, Streptococcus pneumoniae
  misc_feature (1)..(159): tiling:Spneumo1:WAN024CUN; WAN0246P0 208409-46-5_2||||264. .422|+|159 bp|Glimmer 2.02 orf prediction from Patent Sequ ences|S.pneumoniae||WAN0246Y7|ORF|000
  misc_feature (109)..(109): n is a, c, g, or t
atgcgaattggtttatttacagatacctattttcctcaggtttctggtgttgcgaccaatatcccaaccttgaaaacccaccttgaaaacacggacttgcctgcatttntatctcatacaatccaccgaatttcgatgtccccctccctacaacctaac

SEQ ID NO: 6732 - DNA, 84 bp, Streptococcus pneumoniae
  misc_feature (1)..(84): tiling:Spneumo1:WAN024BK9; WAN023T1S BD003725.1_16||||1131 0..11393|+|84 bp|Glimmer 2.02 orf prediction|S.pneumoniae| ATCC55840|BD003725.1|ORF
atgcgcaaatcgattaaggaatttaatctaatttctaacaatgtcttagaaatcaaagtgtactattttaactccctaactaat

SEQ ID NO: 6733 - DNA, 81 bp, Streptococcus pneumoniae
  misc_feature (1)..(81): tiling:Spneumo1:WAN024F68; WAN023SMB NC_003098.1_409||||32 3731..323811|-|81 bp|Glimmer 2.02 orf prediction|S.pneumon iae|R6|NC_003098.1|ORF|100
atgcgccaaagagaccagcaccaacaacaagataatcgtacatctgaagctcctttggagttcattatctgcctcttttat

SEQ ID NO: 6734 - DNA, 123 bp, Streptococcus pneumoniae
  misc_feature (1)..(123): tiling:Spneumo1:WAN024BNU; WAN023OBV spn019g01_39||||28577 ..28699|+|123 bp|Glimmer 2.02 orf prediction|S.pneumoniae| 23F-1|WAN01UCLR|ORF
atgcgcttcaaaattatcgaattttatattaacttcaatcactttaaacctcctctatatcaaactctaatctataatgccctttttcctcgcttaatccaccataaacaaaggataactttt

SEQ ID NO: 6735 - DNA, 354 bp, Streptococcus pneumoniae
  misc_feature (1)..(354): tiling:Spneumo1:WAN024CTQ; WAN023JT2 83433_900a||||515256. .515609|-|354 bp|EGAD orf prediction|S.pneumoniae|TIGR4|WA N01UC25|ORF|010
atgcggtctgtcggaacttctaccacttcacggagtttttcttccttacttccatcaggattaatcgctgtaaagatacgttcttttccaacttttccttcttgttctacacgagtttcacctagatacagtgttgaatcttttttctcaactgtcttgtatgccaaatctttttcaacaaattcgatttttggaagatcttcttgtacagcagcaactgtcttctcagaaactggtttttccttagtcaagtggatacggtattccttgacttgttttccactttctgaaacgaggcgaacaagtactggaaagctatcttctccactatctaccacagttgaagctacttga

SEQ ID NO: 6736 - DNA, 231 bp, Streptococcus pneumoniae
  misc_feature (1)..(231): tiling:Spneumo1:WAN024BC6; WAN023KZX 315174_2623||||139864 9..1398879|+|231 bp|EGAD orf prediction|S.pneumoniae|R6|NC _003098.1|ORF|100
atgcgtcgaacgtgggaaaaggaactgctccagcaactctgcaatcgaagtcgtagaaccgccactggtcttgacctcctctgccacttcctgcaggtaattgataactctcttgctttcatccaaaccctcaatttgctgagagaaataggcgatgcgaacagtttccccaatcacaacttgtcctttagttggctcaagacttcctgcaatcaagttgagcagggttga

SEQ ID NO: 6737 - DNA, 225 bp, Streptococcus pneumoniae
  misc_feature (1)..(225): tiling:Spneumo1:WAN024BC7; WAN023IWR 85449_2398||||1356882 ..1357106|+|225 bp|EGAD orf prediction|S.pneumoniae|TIGR4| WAN01UC25|ORF|010
atgcgtcgaacgtgggaagaggaattgctccagcaactcagcgatggaagtcgtagaaccaccactggtcttgacctcctctgccacttcctgcaggtaattgatcacacgcttgctttcatccaaaccctcaatttgttgagagaaataggcgatgcgaacagtttccccaatcacaacttgtcctgctgtcggctcaagacttcctgcaatcaggttaagtag

SEQ ID NO: 6738 - DNA, 81 bp, Streptococcus pneumoniae
  misc_feature (1)..(81): tiling:Spneumo1:WAN024BWV; WAN023RH3 contig_1559_4||||844. .924|+|81 bp|Glimmer 2.02 orf prediction|S.pneumoniae|670| WAN01UDJA|ORF
atgcgttatcaaactcatgaccaattgaaacaaaaagctgtggttagatcctttcggaaattgtcaagcgattggaggaaa

SEQ ID NO: 6739 - DNA, 363 bp, Streptococcus pneumoniae
  misc_feature (1)..(363): tiling:Spneumo1:WAN024C2K; WAN023KX9 314446_2748a||||14612 88..1461650|-|363 bp|EGAD orf prediction|S.pneumoniae|R6|N C_003098.1|ORF
atgcgtttagcgtctgaatccagacagatattagataagcttaaagatgatgtttacaataaattaggctatgaagtaagctattccagtattgttagtcaagctgttagagaatacgttcctaaaaaagaacgtatagattggataaaattaaaagagacagctatacccttttcatcgttaaaacagagcaataattgggagtaccagacatcacttatgttagaggaagatgtattaatcttactgtctgaactacaaaattttttcttagatgtcttccaagcgaaacgtatacatagggcattttgtgtacgcctatgcttgaaagcacaatttttattaagtaataatgattcttaa

SEQ ID NO: 6740 - DNA, 417 bp, Streptococcus pneumoniae
  misc_feature (1)..(417): tiling:Spneumo1:WAN024BRB; WAN0240Q5 |||AAG12997.1|||417 b p||S.pneumoniae||AF227520|ORF
atgcgttttaaagattttaatcttgaagttgttaatgttgaacgttactcatcagattatagcatgacggtgaacaagaactttgttacatttagtaaaggaattgtccaagctttagaatacccagcacatgtactggttgcctttaataaggatacaaaggtaatgggtatacaagtttgtcgtgcaaaaactaggggagcattttctttttcaaaacctgttggggagcaaaaaggtattgttcaggtaggtcataaaactttaaaagaaacactcttaacaatcatgagtgaatggaaatctgataagcgttatagagtagaggggattcacattcctgaagataaagcttttgtttttgaattgaaggactttgatgaactatctgattttcgtaaaaacgacaatagatag

SEQ ID NO: 6741 - DNA, 420 bp, Streptococcus pneumoniae
  misc_feature (1)..(420): tiling:Spneumo1:WAN024BT7; WAN023YE6 AL449930.1_157||||127 399..127818|-|420 bp|Glimmer 2.02 orf prediction|S.pneumon iae||AL449930.1|ORF
atgcgttttattgtggaaacatttcccattttctctatttctaatgacttacttcaacttctgacttcatggaaaaaacaacaaaaatatgaactggcaaagtttggtatcatcagtaatccagaacaattcatctttacttacatagataccaaaggcaatatcaataaacctttacattctgactatctcaataataagatgaaaactatcagaaaacgacacccagagcttacacacgctacgccacacaaactacgtcataccggagcaacgctcgctaaacaagcaggaatgagcttagaaaccatttctgaagctctaatacatagcgacacaggtacaacacagatttatgtcaatacttctaatgtagtccctatggccgtcggtgaatttgccttacagtctctaaaacaa

SEQ ID NO: 6742 - DNA, 75 bp, Streptococcus pneumoniae
  misc_feature (1)..(75): tiling:Spneumo1:WAN024BTJ; WAN023YWZ AL449927.1_39||||3189 7..31971|-|75 bp|Glimmer 2.02 orf prediction|S.pneumoniae| |AL449927.1|ORF
atgcgttttcttgtgggaagatttactccattttcttcaggaattgagattttgcccatctcttttcattatatt

SEQ ID NO: 6743 - DNA, 117 bp, Streptococcus pneumoniae
  misc_feature (1)..(117): tiling:Spneumo1:WAN024F6K; WAN023Z9F AL449925.1_2||||331.. 447|-|117 bp|Glimmer 2.02 orf prediction|S.pneumoniae||AL4 49925.1|ORF|000
atgcgtttttcttatttgaaagactttttactcaacctctttatgctcaatgaaaatcagactagaaagctagccgcaggctgctcaaaacagtgttttgaggttgcagatggaaac

SEQ ID NO: 6744 - DNA, 78 bp, Streptococcus pneumoniae
  misc_feature (1)..(78): tiling:Spneumo1:WAN024EVM; WAN023NG4 spn122d07_8||||3777.. 3854|+|78 bp|Glimmer 2.02 orf prediction|S.pneumoniae|23F- 1|WAN01UCM3|ORF|001
atgcgtttttcttttttaggctctataatatttgtagtgggtaaatcccctatggatattatggagcttatttttgtg

SEQ ID NO: 6745 - DNA, 117 bp, Streptococcus pneumoniae
  misc_feature (1)..(117): tiling:Spneumo1:WAN024CD8; WAN023VM8 AX571760.1_2||||113.. 229|-|117 bp|Glimmer 2.02 orf prediction|S.pneumoniae||AX5 71760.1|ORF|000
atgcgtttttcttttttattcaatgtgggttgtttgattagcaaaggcgataatagcttgcttcaactcatctccactgagagtgcggaactctccaatcttttgattgatggattc

SEQ ID NO: 6746 - DNA, 996 bp, Streptococcus pneumoniae
  misc_feature (1)..(996): tiling:Spneumo1:WAN024BOR; WAN023OG6 pne91_19||||12109..13 104|+|996 bp|Type 47A1 capsule operon, Glimmer 2.02 orf pr ediction|S.pneumoniae||WAN01UCEE|ORF
atgctaaagttttctgtcattgtacctatttacaatgttgaaaagtatattgaggaatgtgtatattctgtattgagacagacatataataattttgaacttattttggtgaatgatgcctctccagatcattcgcttgatattattacaaaaatagctgaaaaggattcacgcattgtaattatagacaaagagaagaatgaaggtgtggcgttagcaagatcatctggcttagcaaatgctaaaggagattacgttgtttatttggatggagatgatcaactaattccagaagcgttaaaaattttagctactaaaattgattcacaaaatccagacattgtaatttttcctaaaattaaggagagaaacggtgtgaaacatgtgaatccatacttctcaaaggaaatgctctttgaggaagataaaaaagaactatataaaggctttttaagttatagttactttgtaattggatgcgctgctattaatagagagttagctgtgcaatatgacattgctcatgaattgaaagagatttggcttggtgaggatttattgcaaagccttcctttgttgacacatgcaaaaaggattttatacattatagagggaatctatataatggtttacaatcctgattcagcaacaaggagtaaagcattaagaaaagatagatatctccaagcaattgaaaatcataaggtaattgaccaatatatacaactatggggtgaggaagaactacaaaatgattttcatgaacatattatgaatgatgttatttcttatgcattcgcagggtgtaggggtgcaagctctgttagagagggcagtgagtatcttcaaacaattggtagtgatgcaggattccgcagagcctactcattcggatatcctaaaaaattgttacataaaatactagcgttttttctaaagcatgagtcatatgtcgttgcgtattatttaattaaaatgaaagaaaggttatcatca

SEQ ID NO: 6747 - DNA, 234 bp, Streptococcus pneumoniae
  misc_feature (1)..(234): tiling:Spneumo1:WAN024CSZ; WAN023JGE 84322_1558||||889907. .890140|-|234 bp|EGAD orf prediction|S.pneumoniae|TIGR4|WA N01UC25|ORF|010
atgctaaccaaaattttgaaatttatcttcttctctctagaaaatataaaatcaaagaattttttagcaaccaaattagcatttaatattgaagcgctcaggtgtattttaaatcccttagattgggtgatattagacggcaaattatataaccaatgttcatcactaaaattatcactaattttatattctaataataaattatggtatgcgtcttctatttcagtttcatag

SEQ ID NO: 6748 - DNA, 327 bp, Streptococcus pneumoniae
  misc_feature (1)..(327): tiling:Spneumo1:WAN024CW4; WAN023K3G 82780_408a||||222439. .222765|-|327 bp|EGAD orf prediction|S.pneumoniae|TIGR4|WA N01UC25|ORF|010
atgctactaggcacaacagttacagcagaagctactgttaggctggtcagtcccgactctgaaaatacttcccctagtatattctttacaaaatctaatgaagaaaaggaatcaaataagtatatacctatagtattcaagtcgaaacggtgccccctaataacaactaatacatttaatagaaatacagttactattaaaaatacaagtactcttttcttcgaaaaagtaatccctaaagattgtgtgtatactaaaaccaacgccaagattgaaaacacctggattttacgacttcctgttaggatcattatcaaaattaggtaa

SEQ ID NO: 6749 - DNA, 246 bp, Streptococcus pneumoniae
  misc_feature (1)..(246): tiling:Spneumo1:WAN024BSP; WAN023XXC AL449942.1_8||||6283. .6528|+|246 bp|Glimmer 2.02 orf prediction|S.pneumoniae||A L449942.1|ORF
atgctatattggatatcagtcaattatgaaattactgaagacgaagactttgagaccgtcaaaacgagagtgatatcagattttgaaagctatttgaagcttctaaatggcaagtttgaagaaagtctcaagaaagttattaagtcttttacctttagtaaactcattggagaaaaactatgtaatggtgaagacctaaaaaatttaagtaaagaaataaggcatcaaatccaagataggaattcc

SEQ ID NO: 6750 - DNA, 411 bp, Streptococcus pneumoniae
  misc_feature (1)..(411): tiling:Spneumo1:WAN024EW7; WAN023IF7 86448_3143||||1787759 ..1788169|+|411 bp|EGAD orf prediction|S.pneumoniae|TIGR4| WAN01UC25|ORF|010
atgctcaattcccagagaacgccccttggtcttggacttgggaacagcttcatctcgcttgagaaaggcatgctgaactgttggaatgaccatcatgatcatgcgccgaatccgttccccattaaaatctgggtctgtaaagacaatgactccatgacgttggtgcaggcgctgaatccgctctatatcctgagcattgatggcagaacctcgagtctcataggtctccacatcgaaataacgtttgagattgaccgtatcatcacgcccttcaaccacgataacttgagaaattttctctttcattacttgctgtccagtccaaaaattcgttctgcatttgcagtcgttgctaccgccagctcttctgtcgtcataccacgcaagtcagcgataaagtcgaccacatag

SEQ ID NO: 6751 - DNA, 225 bp, Streptococcus pneumoniae
  misc_feature (1)..(225): tiling:Spneumo1:WAN024CIP; WAN023MGC 313356_2||||2635..285 9|-|225 bp|EGAD orf prediction|S.pneumoniae|R6|NC_003098.1 |ORF|100
atgctcacaattactgcattttattttgatatctgctcctacacgtgtaatttcccaacgattagcctttttaccagtcgacttgattgtacaagcgtgtggttttttcatctcaacaaaatttccaacttgatacatactactctccttttcttttccgattatatcataaaagaggcgagccaggctcaacctctttcacttaatttgtacgaactggtgtaa

SEQ ID NO: 6752 - DNA, 231 bp, Streptococcus pneumoniae
  misc_feature (1)..(231): tiling:Spneumo1:WAN024FC8; WAN023IK6 86145_2915||||1654955 ..1655185|+|231 bp|EGAD orf prediction|S.pneumoniae|TIGR4| WAN01UC25|ORF|010
atgctcagccacgactcctgtcaagagttccaaggatgcagaagaagacaagccagcaccatttggaatatttccataaacataaaaatcaaaacctttgtcaatcacgtgcccagcttcttgcaagaaatgaaggacaccttttggataattggtccagttgtgctctttttcaaacttgaggtcagcgagaggcacttcgataatgcccttgtcctcaaagttagctga

SEQ ID NO: 6753 - DNA, 279 bp, Streptococcus pneumoniae
  misc_feature (1)..(279): tiling:Spneumo1:WAN024CW2; WAN023K3E 82790_413a||||226782. .227060|-|279 bp|EGAD orf prediction|S.pneumoniae|TIGR4|WA N01UC25|ORF|010
atgctcaggatttaccgtcctggacttagcaacagcaatcttttccatcatagccttggatgttcccatagcattgacaggataagccgccttatctgtagaaagacagataacttgctttacaccagcttcgatagccgcagtgaggacattctccgttcccaaaatgttagtttttaccgcttctacagggaaaaattcacaagaaggtacttgtttaagagcagcagcgtgaaaaacataatccacaccatgcatagcattttttaccgaagctaa

SEQ ID NO: 6754 - DNA, 156 bp, Streptococcus pneumoniae
  misc_feature (1)..(156): tiling:Spneumo1:WAN024DT5; WAN023XGE AX566924.1_1||||1..15 6|+|156 bp|Glimmer 2.02 orf prediction|S.pneumoniae||AX566 924.1|ORF|000
atgctccaagagttgattgatgtgatctacttttttagcctctcttttatagagaatagcccagatgatgagatagacaatcgcaaactcgataatgagctggaggtagaaaatccagtggaaagggaaccaaccagcaagagttgcctaactaat

SEQ ID NO: 6755 - DNA, 255 bp, Streptococcus pneumoniae
  misc_feature (1)..(255): tiling:Spneumo1:WAN024ERB; WAN023IUF 85583_2500||||1413527 ..1413781|+|255 bp|EGAD orf prediction|S.pneumoniae|TIGR4| WAN01UC25|ORF|010
atgctccctagcagcttctgtatcatcaccaactgcaaagagtacaattactttgacccctttcccatcaatggtctcccaaggaatctcattgtgatttatagctatgactacccccgccttctccacagcagaactcttgctatggggaatagcaatataattcccaataccggtctgtccttctgcctctctctgataaagaccttcgataaattggtctctatcagacacataacccgtctcaaccaatag

SEQ ID NO: 6756 - DNA, 75 bp, Streptococcus pneumoniae
  misc_feature (1)..(75): tiling:Spneumo1:WAN024BLS; WAN023NL5 spn103f10_10||||10503 ..10577|-|75 bp|Glimmer 2.02 orf prediction|S.pneumoniae|2 3F-1|WAN01UCLB|ORF
atgctcctttttcttttaacattcttcttgattatatcacatttgattttaaaattcttctattttccgtatttt

SEQ ID NO: 6757 - DNA, 120 bp, Streptococcus pneumoniae
  misc_feature (1)..(120): tiling:Spneumo1:WAN024BLJ; WAN023ND7 spn140a09_14||||14303 ..14422|-|120 bp|Glimmer 2.02 orf prediction|S.pneumoniae| 23F-1|WAN01UCRH|ORF
atgctctattcgatgggatttctaagaaaagtagtgttcttgagtttgaaaattatcctatgtttgcaggtgccaaatggccctttttttggtataattttttataatgaaaacgattgg

SEQ ID NO: 6758 - DNA, 231 bp, Streptococcus pneumoniae
  misc_feature (1)..(231): tiling:Spneumo1:WAN024C2Q; WAN023L9J 313813_2216||||118729 8..1187528|+|231 bp|EGAD orf prediction|S.pneumoniae|R6|NC _003098.1|ORF
atgctgaaacaggttcatctaaaattaaaatttctggtttcatacaaagggcacgagcaatacataaacgttgacgttgtccgcctgaaaattcatgaggataacgctccaagtactcaactggcacgtttaccatcttcaaggcttctttcatacgttcaaagcgttcctctttgtttccaatattatggacaatcatcggttcatcaaatgaattataaattttcttag

SEQ ID NO: 6759 - DNA, 96 bp, Streptococcus pneumoniae
  misc_feature (1)..(96): tiling:Spneumo1:WAN024BK5; WAN023SVX BD003809.1_17||||8315 ..8410|+|96 bp|Glimmer 2.02 orf prediction|S.pneumoniae|AT CC55840|BD003809.1|ORF
atgctgatacctctcctcattaaattaaatagtaaaaaagattctatctcactccctgattattacaaaaccattgaaatatcacaactaataggc

SEQ ID NO: 6760 - DNA, 75 bp, Streptococcus pneumoniae
  misc_feature (1)..(75): tiling:Spneumo1:WAN024BMI; WAN023O2V spn047b01_21||||16759 ..16833|+|75 bp|Glimmer 2.02 orf prediction|S.pneumoniae|2 3F-1|WAN01UCNY|ORF
atgctgatttcctggtccattatcctgaaaatcagtaaacacacggctccccctttgggcatttttatgctaaaa

SEQ ID NO: 6761 - DNA, 663 bp, Streptococcus pneumoniae
  misc_feature (1)..(663): tiling:Spneumo1:WAN024BUE; WAN023Q7A contig_1244_7||||2101 ..2763|-|663 bp|Glimmer 2.02 orf prediction|S.pneumoniae|6 70|WAN01UEHP|ORF
atgctggatcctcgtctctttgatgaaaaggcccttgagtatgtcaaagctagcgattttatggcagatggcgtgacgcttaaaaaagccactatgaagtcacttgatgacatggtcacatttgaatttcagaaacaacaagaatttgaaaaagccaagtcagctatttcagggttatgtgctgagtatggcatgactgactcaccttacattagacagctgaaagacttgactcttgctgaagtctttggacaaatcaaagctgattatgagtttgaaaagcaaaaggaagaaatcagacaggctcaagaacgagcagagcgagaaagtcaggaacttttagcagcccaacaaaccaaacagcaagaacaggctccaaaatcaacggaaaccccaaattttgacccagaaacgggcaaaatcttggacggtggacaaatcctccaaaatgagcctaacgctcttagaggagctgaaaatgacctaaaacgatatgcccaaaaaatgactttagaggtgtattttgtagacacagccgaaaaagactgtttcaaggctggtctaagtaaactcggatttgattttaaaaagaactatcaagtcagcggttatcaacgtatcgatccattaactcaggctgagctaaatgaacaatgtgggtgg

SEQ ID NO: 6762 - DNA, 2670 bp, Streptococcus pneumoniae
  misc_feature (1)..(2670): tiling:Spneumo1:WAN024G5F; WAN023S29 contig_1627_9||||9607 ..12276|+|2670 bp|Glimmer 2.02 orf prediction|S.pneumoniae |670|WAN01UD9V|ORF|000
atgcttaacagggagacacacatgaaaaaagtaagaaagatatttcagaaggcagttgcaggactgtgctgtatatctcagttgacagctttttcttcgatagttgctttagcagaaacgcctgaaaccagtccagcgataggaaaagtagtgattaaggagacaggcgaaggaggagcgcttctaggagatgccgtctttgagttgaaaaacaatacggatggcacaactgtttcgcaaaggacagaggcgcaaacaggagaagcgatattttcaaacataaaacctgggacatacaccttgacagaagcccaacctccagttggttataaaccctctactaaacaatggactgttgaagttgagaagaatggtcggacgactgtccaaggtgaacaggtagaaaatcgagaagaggctctatctgaccagtatccacaaacagggacttatccagatgttcaaacaccttatcagattattaaggtagatggttcggaaaaaaacggacagcacaaggcgttgaatccgaatccatatgaacgtgtgattccagaaggtacactttcaaagagaatttatcaagtgaataatttggatgataaccaatatggaatcgagttgacggttagtggtaaaacgacggttgaaacgaaagaagcctctactccgctagatgttgttattctattagataactccaatagtatgagtaatattcgacataatcatgcccatcgagcggaaaaagcgggagaagcgacacgagcccttgtagataagattacctccaatccagataatcgagtagcacttgtgacttatggctcaactatctttgacggttcagaagctactgtggaaaaaggggtagcagatgcgaacggaaaaatattgaatgactcagctttatggacgttcgatcgtacgacgtttacagctaaaacttataattatagctttttaaatctcacatcagatcctactgatattcaaactattaaggataggattccatcagatgcagaggaattgaacaaagacaaattgatgtatcaattcggcgcgacttttacccagaaggctttgatgaccgctgatgatatcttgacaaagcaggcaagaccaaacagtaaaaaggttattttccacattacagatggtgttccgactatgtcatatccaattaattttaaatatacaggaacgacgcaatcgtacagaactcagctgaataattttaaagcaaaaactccaaatagtagcgggatattactggaggactttgttacatggtcagcagatggtgaacataagattgttcgtggagatggtgaaagttatcagatgtttacgaagaaacctgtaacagaccaatacggagttcatcaaatactttcaatcacctccatggagcagagagctaaattagtttcagcgggatataggttctatggaactgacttgtatttatattggcgtgatagtattctagcctatccatttaactctagtaccgattggattaccaaccatggtgaccctacgacttggtattataacggaaatatggctcaggatggctatgatgtcttcactgttggggttggtgtaaacggggatcctggtacggatgaagcaacggctactagatttatgcagagcatctctagttctcctgacaactacactaacgtagcagatccatctcagattttacaagaattgaatcgctacttctatactatcgtcaatgagaagaaatctatcgaaaatggtacgattacagacccgatgggtgaactaattgatttccaattgggagcagatggaaggtttgatccagcggattacactttaactgcaaacgatggtagttcgttggtgaataatgtccctactgggggaccacaaaatgatggtggcttgctaaaaaatgcaaaagtgttctatgatacgactgagaaaaggattcgtgtaacaggtttgtaccttggaacgggtgaaaaagttacattgacttataatgttcgcttgaatgaccaatttgtaagcaataaattctatgacacgaatggtcgaacaaccctacaccctaaggaagtagaaaagaacacagtgcgcgacttcccgattcctaagattcgtgatgtacgaaagtatccagaaatcacaattccaaaagagaaaaaacttggtgaaattgagtttattaagatcaataagaatgataaaaaaccactgagagatgcggtctttagtcttcaaaaacaacatccggattatccagatatttatggagctattgatcaaaatggcacttatcaaaatgtgagaacaggtgaagatggtaagttgacctttaaaaatctgtcagatgggaaatatcgattatttgaaaattctgaaccagctggttataaacccgttcaaaataagcctatcgttgccttccaaatagtaaatggagaagtcagagatgtgacttcaatcgttccacaagatataccagcgggttacgagtttacgaatgataagcactatatcacaaatgagccaattcctccaaaaagagaatatcctcgaactggtggtatcggaatgttgccattctatctgataggttgcatgatgatgggaggagttctattatacacacggaaacatccg

SEQ ID NO: 6763 - DNA, 117 bp, Streptococcus pneumoniae
  misc_feature (1)..(117): tiling:Spneumo1:WAN024BKC; WAN023MHT spn198f01_5||||4787.. 4903|-|117 bp|Glimmer 2.02 orf prediction|S.pneumoniae|23F -1|WAN01UCPR|ORF
atgcttaataagaatggagaattcctatggggattgtattactctgaactttcgaataccttagttctcgtgattttgagctattctaggtttagaatccttcagaatgtaaaattt

SEQ ID NO: 6764 - DNA, 111 bp, Streptococcus pneumoniae
  misc_feature (1)..(111): tiling:Spneumo1:WAN024C33; WAN0246V1 274943-58-7||||||111 bp|DNA Streptococcus pneumoniae phage Dp-1 open reading fr ame dp1ORF234|S.pneumoniae||WAN0246V1|ORF
atgcttacgagtacagcgactcaactgttcgaaaggtttataagtttcaacccgctttgggaggcgatagcttacctaacccaggaagacctactcgacaatttagagtag

SEQ ID NO: 6765 - DNA, 87 bp, Streptococcus pneumoniae
  misc_feature (1)..(87): tiling:Spneumo1:WAN024C28; WAN023SI5 NC_003098.1_2135||||1 655800..1655886|+|87 bp|Glimmer 2.02 orf prediction|S.pneu moniae|R6|NC_003098.1|ORF
atgcttcaaaagctaaacaatatcttgattggacggctagctactccctcgaagatattattttatcagattaaggtaaaaacattt

SEQ ID NO: 6766 - DNA, 84 bp, Streptococcus pneumoniae
  misc_feature (1)..(84): tiling:Spneumo1:WAN024BOV; WAN023OGF pne91_10||||5851..593 4|-|84 bp|Type 47A1 capsule operon, Glimmer 2.02 orf predi ction|S.pneumoniae||WAN01UCEE|ORF
atgcttcctttacttgaaaaaatgaatacgaatacccaagaaacgttattcgtattccacttcatctttctatctattttttgc

SEQ ID NO: 6767 - DNA, 108 bp, Streptococcus pneumoniae
  misc_feature (1)..(108): tiling:Spneumo1:WAN024BB2; WAN023YSI AL449927.1_211||||169 894..170001|+|108 bp|Glimmer 2.02 orf prediction|S.pneumon iae||AL449927.1|ORF|000
atgcttctccttctattttatactctcttcaaaccacgtcaacgtcgccttgccgtaggtattgttactgacttcgtcagttctatccacaacctcaaaacactgttt

SEQ ID NO: 6768 - DNA, 1095 bp, Streptococcus pneumoniae
  misc_feature (1)..(1095): tiling:Spneumo1:WAN024D25; WAN023YCN AL449931.1_7||||4042. .5136|+|1095 bp|Glimmer 2.02 orf prediction|S.pneumoniae|| AL449931.1|ORF|000
atgcttgaaagactgaaaagcatacactatatgttttgggcaagtttaatttttatgattttccccatcctacctgtagtgactggggagcttcctgcttggcatttattggttgatattctatttgtagtgacgtatttgggtgttttaataactaagaaccagcgcatatcatggcttttctgggggatcatgctggtctatgtagctgggaataccgcctttgttgctgggaattatatctggtttttctttttcctttccaatctcttaatttatcattttggcgtacgtagtttaaagtctttacatgtatggacatttctccttgctcaagtccttgttgtggggcgacttttgatttttcagagaatcgaagttgagtttctagtctatatgcttgtaattcttacttttgtcgatttgatgactttgggctcggttcgaattcgccttgtcgaggatttgaaagaagctcaggtcaagcaaaatacccagataaatctattgctagcagaaaatgagcgcaatcgtatcggtcaggatttgcatgatagtctgggacatacctttgctatgcttagtgtcaagacagatctagccttgcagctatttcaaatgcaggcttatccacaagtggaaaaggaattaagagaaatacagcaaattagcaaagaatcaatgcgtgaagttcgaaccattgtggaaaatcttaagtctagaactttgacatccgaactagagactgtgaaaaagatgttagaaattgctggaattgaggtggaaacggataaccaactagatactgctagccttactcaagaattggagtcaatggcttctatgattttgcttgagttggtgaccaatatcatcaaacatgccaaagcgtctaaagcttacttaaaattagaacggacagagaaggaactcattttaacagtaagtgatgatggctgcggctttgcttttctaaaaggagatgagctccatacaatccgagatcgtgtttttccattttcaggagaagtaagtgtaatcagtcagaaacatccaacggaagtgcaagttcgactaccttataaggagagaaac

SEQ ID NO: 6769 - DNA, 75 bp, Streptococcus pneumoniae
  misc_feature (1)..(75): tiling:Spneumo1:WAN024AZE; WAN023R3C contig_1454_4||||2100 ..2174|-|75 bp|Glimmer 2.02 orf prediction|S.pneumoniae|67 0|WAN01UDT7|ORF|000
atgcttggaaagatatcaagaacaaagaatgatacgattgaaactaaactgattcaagaactactgggcagtgat

SEQ ID NO: 6770 - DNA, 75 bp, Streptococcus pneumoniae
  misc_feature (1)..(75): tiling:Spneumo1:WAN024AZF; WAN023SN2 NC_003098.1_141||||11 3421..113495|+|75 bp|Glimmer 2.02 orf prediction|S.pneumon iae|R6|NC_003098.1|ORF|100
atgcttggaaagatatcaagaacaaagaatgatacggttgaaaataaattaattcaagaactactgggcagtgat

SEQ ID NO: 6771 - DNA, 261 bp, Streptococcus pneumoniae
  misc_feature (1)..(261): tiling:Spneumo1:WAN024CSL; WAN023JE6 84475_1669a||||961223 ..961483|-|261 bp|EGAD orf prediction|S.pneumoniae|TIGR4|W AN01UC25|ORF|010
atgctttacctgtctcagctcgcttcatattcaacaagtcgtctatttccacactggttacttttttatttacaaaatcagaaatcagttgaaaaatgtttggactttgtagctggatttcagccattacctcatcaaattctgcttgtgtcatgttgtctaaatctagtgtcattgcattgcctcctcaaacttctctataagacaacttttatttgctttctgagttccatttttagagttaaaaagaatatcttttaa

SEQ ID NO: 6772 - DNA, 171 bp, Streptococcus pneumoniae
  misc_feature (1)..(171): tiling:Spneumo1:WAN024BRO; WAN02414F |pncC||CAC18589.1|||1 71 bp|hypothetical protein|S.pneumoniae||AJ278419|ORF
atgctttacttagttgatggattggtaggaataaaaaacttaactataaactattatttactaatattttttgctttctgcaagttaataaatagtatagtaaaactttttattgcaaggagaataacgaaattaagatattttagatactcaagattattgaaatcttag

SEQ ID NO: 6773 - DNA, 1368 bp, Streptococcus pneumoniae
  misc_feature (1)..(1368): tiling:Spneumo1:WAN024BPK; WAN023OT7 pne73_10||||7299..866 6|+|1368 bp|Type 34(2) capsule operon, Glimmer 2.02 orf pr ediction|S.pneumoniae||WAN01UCF4|ORF
atgctttatatattattttatttattattattattttttattataaattatgcttttgtaagaggagattattttcacccaacaattatctttaactttacttttttgatagcaacactgttttgcattttaaatgctcaagagtatgctattgagttcaatggaggtacagtttttattgtgacgatttcaatgctcgtttttacaataataacagtattatcaaagaaaatatttaagactaatactttcacctttaagaataaattaaaatatctatatgtcagtaaaagtctaatttttacaataattattattcagattttaaatcttattttcttttatcgatacgaacaagctttattcagcgcttatgttggcggtcgtggaagtttctcgcaaataattaataactatgaccaattagtaaagttttttactgaagacttagtcggattgggggtcaggtctccgtttttttatagagtgtttaatagcttcatatctcctatttcttacgtgattatatacattatttgtcacaattatgtggcaacaagaagaatagataaatttcaactcctagttccttgtttatttgcaattcaaatttttatgactggtagtagagggtccttgtttaaaattttgacttttatattagttgttttttatattttactactgcgtaataaaggacttagtaaattgagttctcgctttgcttttaaggtccttattgttgtagtggcagttgctcctctatttgtactttatttaaatgcaacggggcgttccggtggagtaggtcaagatgggattattgaagctcttaatcgagaactattcaagtacattggcgctccgttattaaattttaacaattttattgctggatatgatccgtatagaagtgactcagtatattggggagaacagactttttatggcttttataaattcttgtatagtaaactacacttgatagattttaatattaaaagtattattggtagtgattcttttgtgaagagtaccaatggattgcctacagggaatgtctttacaactttttatacgtttttttatgacttcacttatttcggcattattccattagtatctgtaattgcattatattttgttccaacttatagtaggatattgggtacagaatattgtgcaaaaaaatatttatttgattataagttatttatctatgcttatttgtttaatgatgttataatgttgattttttcaaatcgattttttgaaagtatattaacagttggttttttacgttttttaataactagtgccattttagtctggataataaaacaaaatattgtttttaagtataaaaaa

SEQ ID NO: 6774 - DNA, 84 bp, Streptococcus pneumoniae
  misc_feature (1)..(84): tiling:Spneumo1:WAN024BJU; WAN0244WG ||||||84 bp|Incyte or f contig SPN2C0213 1122-1205|S.pneumoniae|23F|WAN0244WG|OR F
atgctttgtatgcctatggttatgcataacaatcccagtgataagagtatttatcactgggatttttatgcccttttgggtttt

SEQ ID NO: 6775 - DNA, 753 bp, Streptococcus pneumoniae
  misc_feature (1)..(753): tiling:Spneumo1:WAN024EUO; WAN0240CH |pnpR||AAD22036.1|||7 53 bp|response regulator PnpR|S.pneumoniae||AF118229|ORF|0 00
atgcttttatcgggatttttggtcaaaatggctctattaaccaattcttggaatttatcggaattggttcacaacagttgctscattctgaatttgcttgactaccatttaagtaaggaaggcttttctactcaattggtgacaaatggacggaaggccttagctttggcagaaacagaaccctttgattttatcttgcttgatatcatgttaccacaattagatggcatggaagtttgtaagcggctgagagccaaaggcgtcaaaactccaattatgatggtttctgcgaaaagtgatgaatttgataaggttttggccttggaattaggggctgatgactacctgaccaagccttttagccctagagaattgctggcgcgtgtcaaggctgtcctcaggcgaactaaaggagaacaagaaggagatgattcagataatatcgctgacgattcttggctatttgggaccttgaaagtataccctgagcgtcatgaagtctacaaggcgaataagttactgagtttgaccccaaaagaatttgaactcttgctctatcttatgaaacatcccaacatgacactgactagagagcgtcttttggaacgtatctgggggtatgactttgggcaggaaacacgtttggtggacgttcatattggtaagttgagggaaaaaattgaagacaatcctaaagcccctcaatttattcgaaccattcggggttatggttataagttcaaggagttatag

SEQ ID NO: 6776 - DNA, 1800 bp, Streptococcus pneumoniae
  misc_feature (1)..(1800): tiling:Spneumo1:WAN024BOI; WAN023OCQ-5 spn019g01_6||||4397 ..9421|-|5025 bp|Glimmer 2.02 orf prediction|S.pneumoniae| 23F-1|WAN01UCLR|ORF
atgcttttgacaatccatgatgcaaatttacaaaaggtagcatttattgataacgaaaaacaaggtacgttaaattattacgatgatacttggacaagaagtcttgcaacaggttcgtcaacgtttgagtttacggtatttaaaaaggctgtaaagtctgatttacctcttgctaaagcctatcatcatttgaatgagcatgcatttgtctcatttaagtacaagggtaaaagctttgtgtttaatatcattattgttgaagaaaatgagcagacaatcaaatgttattgtgaaaatctcaatcttgagttaatcaatgagcttgcgaacccttataaatctaacaaagcgatgactttcaaagagtattgtgaggcgatggatcttttaaattatactcacctttctattggtatcaatgaaatatcagattataagcgtactctggaatgggaggggcaagaaaccaaactagcccgtctattaagcctagccaaacgatttgatgctgagattgaatttgatacacagttaaatgctgatagcactatcaaaaagtttagtgttaatgtttatcatgaaaacgatgacaaccatcaaggggtgggacgtgtaagaaatgatgtcattgttaaatacggaaaaaacatccactctattacaagaaaagtggataagactggtattttcaatacaatcagaccgactggtaaaatgccaacggttgaagaagaactgagcggagataagggctccaaaagcgaaactgtaaaaaatgcagatggttcaacgacgaaaaccacaatctctacagcctcagatgggactaagagcaaaactattgtccacactaaagttacaaagttagcggacaagacacggatcacaacgaccacaacgactcgttctgatggttccatagaacaaactgttacaaccagcaaaaaaggcggagcatcaacgtctgaaacaaaagtcttgaaaaaaccaaatccaaaagaaaaaacaaatacaactgaggatgttttgacgattgagggattggatgaatgggaagtaaagaacgagaaagggatagttgaattttatcaaagagggcaagcactgtatgcgcctatttcaatgcaactatatccctcaacctttactcattcaacaggggagcttgaccagtggacaagaaaagattttcattttgaaacagatgagccaaacgagttaagacgtttaggttatctcaaattgaaaaagtattgttatccagctatcacttatgaagttgatggctttgtcgatgctgatattggagatactgttaaagtccatgatgacggttttgcccctctattgatgattcaagcacgggttactgatcaaaaaatcagtttcacaaatccagtgagaaataagacaatatttgacaatttcaaggcacttgaaaacaaactatcagctgatatccagtcagcctttgagagattgtttgaagctgctaaaccatatactatcaaattatcaacggacaatggtgttatctttaaaaatcagatcggccagagtctagtaaccccaaccttatacaagggaggaaaaccagtcgttgttggtgttacttggcgatgggcacttgatggagaagtaacaacagggatgacttacttagttagaggctcaaatgtaactgatacagttactctgacagttgcagcttacattggaaataaagaggttgctgttgatgagatatcgcttgttaatgttgctgatggaaaacttggtacacctggaactccagggcga

SEQ ID NO: 6777 - DNA, 201 bp, Streptococcus pneumoniae
  misc_feature (1)..(201): tiling:Spneumo1:WAN024BW5; WAN023QPL contig_1336_14||||993 9..10139|+|201 bp|Glimmer 2.02 orf prediction|S.pneumoniae |670|WAN01UE74|ORF
atggaaaaaattgattatattactttgaatgaagtagaattagagacgattagtggtggagatgactgttttattggagatatcggatgtatcggctgggggcttttgaagagtatcggagggatgataaaacctgctccatatgttcctccagtatgcattccaaaaagttcgtggaatcctgcacctccagttccatgt

SEQ ID NO: 6778 - DNA, 957 bp, Streptococcus pneumoniae
  misc_feature (1)..(957): tiling:Spneumo1:WAN024FP7; WAN023PN2 pne26_16||||10421..11 377|+|957 bp|Type 13 capsule operon, Glimmer 2.02 orf pred iction|S.pneumoniae||WAN01UCIU|ORF|000
atggaaaaagtttcagtaatagttccaatatataatgttgaaaaatatttaaaatatagcataggaggtattctaaaacaaagttataaaaatttagaaattattttagtaaatgatggttcccaggataattctcttgctatatgtgaagaatattctaagatagataatagaattaaaataatttcagttgagaatggaggacaaggaaaagctagaaatattggattgcaacattcaacttctgactggattttatttttagatgcagatgattattatgataataatgcggtagaatatcttgtagaactggctgaacgatatggatcggatttagtagtaaccccattgagagtagtaagagatcatattcaaggtggaaatgcatcctcaatcaagaatgaaaaaatacttaacttgaataaagatagattgatagaagaaatgtattacggaagactcttaggggctacaccatgtggtaaattatataaaagggaaatattagaaaaatggcctttcccagatcaactttttgaagatttggctatagcttataaacatttaatgagtgctaagaaggtagctgtatcaaatcaatattattataattattatcaacgtgttggaagtacaacgaagagtagatatacatcaaaattagaagatttttatagagctatagaaaaaaactataaatatttagaagaagattttccaaataataaagaattatctattgctttgaaaaccagaatgtttacaggaggttttcaagtagtgaactctatgattgaatctggaatgactaaagaagtaaaagataagtctttagagtataggaaagatctactcatgataattttcaatagtagaatcactaaaaaccataaaataaagcatatactattcagcatcaatcctaaattatatacttttgttctaaaaagtata

SEQ ID NO: 6779 - DNA, 1218 bp, Streptococcus pneumoniae
  misc_feature (1)..(1218): tiling:Spneumo1:WAN024GFR; WAN0240Q4 |mefA||AAG12998.1|||1 218 bp|macrolide-efflux protein A|S.pneumoniae||AF227520|O RF|000
atggaaaaatacaacaattggaaacttaagttttatacaatatgggcagggcaagcagtatcattaatcactagtgccatcttgcaaatggcgattattttttaccttacagaaaaaactggatccgcgatggtcttgtctatggcttcactattaggttttttaccctatgcggtctttggacctgcaattggtgtgctagtggatcgtcatgataggaagaagataatgattggtgctgatttaattatcgcagcagctggttcggtgcttactattgttgcattctatatggagctacctgtctggatggttatgatagtattgtttatccgtagcattggaacagcttttcacaccccggctctcaatgcggttacgccacttttagtaccagaagaacagcttacgaaatgtgcaggctatagtcagtctttgcagtctataagctatattgttagtccggcggttgcagcactcttatactccgtttgggaactaaatgctattattgccatcgatgtattgggtgctgtgattgcatctattacggtagcaattgtacgtattcctaagctgggtgatcgcgtgcaaagtttggacccaaatttcataagagaaatgcaagaaggaatggctgtactacggcaaaataaaggattatttgctttattactcgttggaacattatatatgtttgtttatatgccaattaatgcactattccctttaattagcatggattactttaatggaacacctgtgcatatttctattacggaaatttcctttgcatctggaatgttgatagggggtctattattagggttatttgggaattaccaaaagcgaatcttattaataacggcatccatttttatgatggggataagcttaaccatttcaggattacttccccaaagtggatttttcatttttgtagtctgctgtgcaataatggggctttctgttccgttttacagcggtgtgcaaacagctctttttcaggagaaaattaagcctgaatatttaggacgtgtattttctttaactggaagtatcatgtctcttgctatgccaattggattaattctttctgcactctttgctgatagaatcggtgtaaatcattggtttttactatcaggtactttaattatttgcattgcaatagtttgcccaatgataaatgagattagaaaattagatttaaaataa

SEQ ID NO: 6780 - DNA, 96 bp, Streptococcus pneumoniae
  misc_feature (1)..(96): tiling:Spneumo1:WAN024BKQ; WAN023MRG spn180c09_36||||36495 ..36590|+|96 bp|Glimmer 2.02 orf prediction|S.pneumoniae|2 3F-1|WAN01UCXQ|ORF
atggaaaagaaagaagctttttttcgtttttacagtaagatacgtttttatttatccatccctatattatatgttataatgaatgtaaaagttcaa

SEQ ID NO: 6781 - DNA, 75 bp, Streptococcus pneumoniae
  misc_feature (1)..(75): tiling:Spneumo1:WAN024B2K; WAN023SOY BD003997.1_1||||23..9 7|+|75 bp|Glimmer 2.02 orf prediction|S.pneumoniae|ATCC558 40|BD003997.1|ORF|000
atggaaaagtgctacacagatgtgacagaatttgccattccagcagtactcaaaaactttacttatcaccagttt

SEQ ID NO: 6782 - DNA, 363 bp, Streptococcus pneumoniae
  misc_feature (1)..(363): tiling:Spneumo1:WAN024CT6; WAN023RIE contig_1565_8||||6971 ..7333|+|363 bp|Glimmer 2.02 orf prediction|S.pneumoniae|6 70|WAN01UDIJ|ORF|000
atggaaaatcgttaccgaactaagctaaagaaagttttcctatctgatagcgaattgagtcagttgaaacattgcatcgatcaaagcggttgtcaatctttttcagaatatgctcgacgaaccctacttgaccctggtatgaatttcatcaccattgatacaactggttatcaagatttgatatttgagttgaagaggattggtaataacatcaaccagattgcccgaagtgttaatcaatctcagttgatttcaagtgaagaattgcaagacttgaaaaagggaatcgctgacttgataagtgaggtagagaaagagtttagtgttcaagcaaaaaagttgagggagttttatggtcatcac

SEQ ID NO: 6783 - DNA, 1428 bp, Streptococcus pneumoniae
  misc_feature (1)..(1428): tiling:Spneumo1:WAN024BQY; WAN02400W |gadA||CAA88924.1|||1 428 bp|glutamate decarboxylase|S.pneumoniae||Z49109|ORF
atggaaaattttggattactaaacttagaaaataaggaatattttgagagggaattaatgtctttaattagttctcttattgattggaaaattgataactctatcgttagacgctctaatgatagacatgagattattgagattgccccattacctaaatcaggacaaagattaaatgattctattaggtatattttgaatacaattgatagaaatataaatttttcgagtaataaatttatgggttttccagacgcaggaaattcattagcgggattggcagcagcaataattgaagtttttctccagcagaatcttataaataaggatatttgctcacctatgggaagtgaaattgaagcagaagttattatttggctgagacaaattttgggttattcttttgatgataaaatatatgacgttactaaattaggaggagcagtcacaactggtggagtaatgtcaaatacctatgctcttatggcagctaaacgaaaatatcctaataaaagaattgtaatacttccagataatatagggcactactcattaagctatgcaactgaatggcttaatcttggagttgaggttatatactgtaagactgagaaatataagattaaccagtcggaattatcaaaattgcttcaaaaatatggtgaaaatgtactttttataggtgtttatgcatgcgattcaatgacatcgacttgtgaagatttggaaggaatctacaaaatcgtaaataattatagtacggatatttggctgcacgcagatgcatgccatggatttgtattggttttttcagaacactacaaaaatagaatagaatatctaaagtatttcgatagttgtacgatggatccacataaagtcctctggataccatatacacttagtattatcttaatgaaaaatacagatgattttgcaagtctttcaagatctaatgcattaattatggatgatccattatcctttggaaaaacaactccttttattggaagtaaatcttatgatagtttaaaattgtggatggttatgaagacacttggaactcagaaaataggtgaaatggtggagagcaggattgaaaatgcaaagaaattttataatattctgagtgaaaataatgcatttattatggcaaatacagatatattattttctgttatctttcagtacactcctagattggatatatcgattaatcaaatgaacactttgaatagaaaaatatatgataaaatgttacttgatggtaaattctattttcatggttttgaaattaatgtaaatggtgtcaatagattcgttcttcgatacaatagtggtaatattaatattaccgaagtagagttggaagatgctgtaaaatatattgaaaagattgggaaagaggtatctaatgaacaaaattga

SEQ ID NO: 6784 - DNA, 264 bp, Streptococcus pneumoniae
  misc_feature (1)..(264): tiling:Spneumo1:WAN024BNK; WAN023OBJ spn019g01_54||||35462 ..35725|-|264 bp|Glimmer 2.02 orf prediction|S.pneumoniae| 23F-1|WAN01UCLR|ORF
atggaaacagttcaaatcgtgagaattaaagatgtgatcatcgagaagatttctgcaaacgatgaagaactagagcgcatctttggatgttcaaaacggcaagcgggagatatgaggcgagagatgaaaaaattgcctagtcagcaaaaataccttagaaacgatggtcagcttgtcacaatcaaaggttttgatgcttatctgcaatatcgaggcagtcaatcatggaagaaagaaatggctaaaaccgttaagatgacacga

SEQ ID NO: 6785 - DNA, 687 bp, Streptococcus pneumoniae
  misc_feature (1)..(687): tiling:Spneumo1:WAN024CIT; WAN023O8G spn029h04_35||||25187 ..25873|-|687 bp|Glimmer 2.02 orf prediction|S.pneumoniae| 23F-1|WAN01UCO3|ORF|001
atggaaactaaaaaaattaaaaatttaaaaggtcaaataattgtttcctgccaagcgttagaaggagagccactttatactccaaatggaggagtgatgccgttattagcaaaagccgcctttcaagcaggcgctaaaggtattcgtgctaattctgtccgcgatatttcagaaataaaagaagaagttgacttaccaattataggtatcataaaaagagattacgatggctttgaaccttttatttcagcaactatgaaagagattgatgaattagttagtgaaggagtagacattttagctttggattgtactaatcgttcaagaccaggttatgataatattactgactttattcatgatattaaagtcaagtatccaaaccaattattaatggctgatatttctacttttgaagaagggaaagtagctgctgaatcgggagtagattttgtgggtacgacattatctggttatacaccatatagccctaaaaaagataatcctgattttgagttagttgaaagattggtaaaagagcttgacgtaccagttattgctgaaggaagaataagtactccggaacaagctagaaaaatgttagatttaggtgcttacgcagtggttgttggaggagctatcactcgtccaaaagaaattgctcagcgatttattaatgtcatcaaa

SEQ ID NO: 6786 - DNA, 84 bp, Streptococcus pneumoniae
  misc_feature (1)..(84): tiling:Spneumo1:WAN024AVR; WAN023SZ9 BD003756.1_4||||948.. 1031|-|84 bp|Glimmer 2.02 orf prediction|S.pneumoniae|ATCC 55840|BD003756.1|ORF|000
atggaaagaagggaaaaccttatggtattagattatttctttgacaaaaaccttgtgttttgcttagaagcggataatcaagaa

SEQ ID NO: 6787 - DNA, 768 bp, Streptococcus pneumoniae
  misc_feature (1)..(768): tiling:Spneumo1:WAN024F93; WAN0240XV |lytA||AAL76047.1|||7 68 bp|mutant LytA|S.pneumoniae||AF467249|ORF|000
atggaaattaatgtgagtaaattaagaacagatttgcctcaagtcggcgtgcaaccatataggcaagtacacgcacactcaactgggaatccgcattcaaccgtacagaatgaagcggattatcactggcggaaagacccagaattaggttttttctcgcacattgttgggaacggttgcatcatgcaggtaggacctgttgataatggtgcctgggacgttgggggcggttggaatgctgagacctatgcagcggttgaactgattgaaagccattcaaccaaagaagagttcatgacggactaccgcctttatatcgaactcttacgcaatctagcagatgaagcaggtttgccgaaaacgcttgatacagggagtttagctggaattaaaacgcacgagtattgcacgaataaccaaccaaacaaccactcagaccacgttgacccttatccatatcttgctaaatggggcattagccgtgagcagtttaagcatgatattgagaacggcttgacgattgaaacaggctggaagaaaatcgctgataagtggtactatttcaacgaagaaggtgccatgaagacaggctgggtcaagtacaaggacacttggtactacttagacgctaaagaaggcgccatggtatcaaatgcctttatccagtcagcggacggaacaggctggtactacctcaaaccagacggaacactggcagacaggccagaattcacagtagagccagatggcttgattacagtaaaataa

SEQ ID NO: 6788 - DNA, 1068 bp, Streptococcus pneumoniae
  misc_feature (1)..(1068): tiling:Spneumo1:WAN024BL9; WAN023NAY spn143g10_63||||52888 ..53955|+|1068 bp|Glimmer 2.02 orf prediction|S.pneumoniae |23F-1|WAN01UCOL|ORF
atggaaattgataaagtaaaagccgatttaaaacaagtcggcaaacgtgtagcagacctcagccaaagcattacgaatgaagaacaaacaaagaatgccttcattatgccgttcttccaagcgcttggatatgatatcttcaatccacttgaatttgtcccggaatttactgccgacgtgggcattaaaaaaggcgaaaaagtcgactatgcgatcattttggatggcgagcctcaaatcctaattgaatgtaaatcaattacagaaaaccttactaagcacgactctcaactattcagatatttcgtaactactaaatcaaaattcggtatcttgacaaatggtagagaatataaattctttactgatttagatgagccaaataaaatggacacaactccattcttaacaatcgatgtgactgatatcaaagaaaatcaatttactgaaatcatcaaattccacaaagagaattttgatattgataatattgtttcatcagcttctgaattgaaatacctcaacaatcttaaagcgttccttactgaaaatatcactacaccgtcagatagcttcctcagatatctaacttctgaaatctatgaagggcgtgttactcaaaatatcttaacgacattttctcccattattgtgaaagggtttaatcaattcatcacagagcgagttaatgaaaaattaagtgctgcacttaatacaagcgttgaaaccaaagtaacaaccgatattccaaaagttgaagctgaagctgaagagattgtcgaagtaactgacgaaattatcacaactcctgctgaattagaagtttatactgttgttaaaatgcttgctagggatgtagtttctccagaacgtgtattttacagagataaccgtagctatttcaatgttttggttgacgataacatcaaaaaatgggtattacgttatcgttcaaattcaaaaaaaagcactatcgaaatccgtgataaaggcatcttcccggtgtctacccctctcgaagtcgcaaattatgccaatgaaattttagaagtaatcaagaaattctca

SEQ ID NO: 6789 - DNA, 144 bp, Streptococcus pneumoniae
  misc_feature (1)..(144): tiling:Spneumo1:WAN024BW6; WAN023R0B contig_1407_9||||4413 ..4556|+|144 bp|Glimmer 2.02 orf prediction|S.pneumoniae|6 70|WAN01UDX7|ORF
atggaacaatacacaaaaagagcaagcgccttgattataacttttaatcgtggggttatatctcaagatgagtttattgaagaatttacaaaactaagagaaaaggtagtaaaagcagtaagtgaggcaaagaatgacaaatta

SEQ ID NO: 6790 - DNA, 438 bp, Streptococcus pneumoniae
  misc_feature (1)..(438): tiling:Spneumo1:WAN024EUS; WAN0243HS spr1716|IS1167-trunca tion|15903758|NP_359308.1|1690139..1690576|+|438 bp|Degene rate transposase (fusion of orf1 and orf2)|S.pneumoniae|R6 |NC_003098.1|ORF|100
atggaacaattacattttatcacaaaactgctcgatattaaagacccaaacatcaagattctagatatcatcaatatggatacccacaaagaaattatcgctaagctggattatgaggctccatcttgccctgattgtggaagtctaatgaagaataaggaaccagagaaatttttcgggcttattgaggacaatctgaagcaggttcatcctatttttcagactgtctttaaaaccttcctcaaagataaagaaaagattgtcaacgcccttcaactacactattctaacgccaaactggaagcgacaaataatctcatcaaacttatcaaacgaaacgcctttggatttcggaactttgaaaacttcaaaaaaaggatttttatcgctttgaacatcaaaaaagaaaggacaaaatttgtcctttctcgagcttag

SEQ ID NO: 6791 - DNA, 87 bp, Streptococcus pneumoniae
  misc_feature (1)..(87): tiling:Spneumo1:WAN024CZ5; WAN023N2R spn161d05_11||||9834. .9920|-|87 bp|Glimmer 2.02 orf prediction|S.pneumoniae|23F -1|WAN01UCNH|ORF|001
atggaacagggagtatcagatttatctggcagattgtatcaaataaggcttgaaactgttttgaataggcgtatagacttgagaatt

SEQ ID NO: 6792 - DNA, 363 bp, Streptococcus pneumoniae
  misc_feature (1)..(363): tiling:Spneumo1:WAN024CT7; WAN023YX8 AL449927.1_30||||2202 7..22389|-|363 bp|Glimmer 2.02 orf prediction|S.pneumoniae ||AL449927.1|ORF|000
atggaacatcgttaccgaatcaatctcaagaaagtgtttttgtctgatattgagttgaaccaactaaatagaaatatcgaccaaagtagctgccaatctttttctgaatatgcgagacgcaccctacttgaccctggaatgaatttcatcaccattgatacaaatggctaccaagacttagtgtttgagttgaagaggattggcaataacatcaatcagattgctcgaagtgtgaaccaatctcagttgatttctagcgaagaattgcaagagttgaaaaagggaatcgctgaattgataaaagaagttgagaaagaatttacaatacaagctcaaaagctgagggagttccatggtcatcac

SEQ ID NO: 6793 - DNA, 675 bp, Streptococcus pneumoniae
  misc_feature (1)..(675): tiling:Spneumo1:WAN024BWD; WAN023R14 contig_1420_1||||274. .948|+|675 bp|Glimmer 2.02 orf prediction|S.pneumoniae|670 |WAN01UDWM|ORF
atggaaccagatattttcatcatcacaaaactcttatcagacccttctcggatgcacattttagatattctaatggatggaaaagctcacacggttaacgaaattgccagctttaccaaaatcaagcaacatactgtcagctatcacctcaaattacttaccgaagcgcaggtaaccactctacaaacctatggacgttttcattattattctttaaaaagtgctgccattgcagaaatgctggaatttctcagcttctactctcctcagcgtgatgtcaaaagttataaacaacacattcacaaaaaggaattaaaggtcgctcgcacctgctatgaccatattgctggtgagcttggcatttccattaccaattatctcttgcaagaaaatctcctcagcgaatcagaaaaagacttccaactcactgaagctgggaagtcttatttccaaagaaaattacacattgatacggatgaattgaaaaagaaaaaacggaaattttgccctaaatgtttggattggagcgaacgtaaaaatcatgtcggcggagctctcggcaatgctcttttagaatttttcagtgaaaaacaattggtcatccctgcacaaacgccacgttcacttaccattacagagaagggcaaagaattcctcgaaaaggaatgggggatt

SEQ ID NO: 6794 - DNA, 624 bp, Streptococcus pneumoniae
  misc_feature (1)..(624): tiling:Spneumo1:WAN024CJA; WAN023R0E contig_1407_6||||2755 ..3378|+|624 bp|Glimmer 2.02 orf prediction|S.pneumoniae|6 70|WAN01UDX7|ORF|000
atggaactagtctatatggacggcaagaaagagccgtacacattaagcagcattgttgcagaatgtgcagaaatcaagcacagacatttaaagattttactgaataagcacagagaggactttgagagcttcggaaaggtgcaatttaaaatttcaccttcagagagtgggcaaaatgtacgagattatattttgaacgagcaacaagctactttgttaatcacttacttacgaaatacagaaccagttcgtaaattcaaaatgaacctggtcaaagctttctttgaaatgcgtgatgaactttctaagtttcgtatgcagagggcgctagaaaagccaaaaagaaaaaccttgcatgacagtattgagaactgggaacaagcacccaagcacgcgcatagcactatgaacaacctgctactaaaagcagtaaccgacaggaacgctaagcagttaagggaagaacgtggaggctataatggcatagatagcttgaccagtgacgagctggagcaatatcaagcctttgaagacatggtaatagccatgatgggcttgaatatgagttatcaggaaatcaaggctatggcattcagaaataaaaaaacacgccaaagaagcgcg

SEQ ID NO: 6795 - DNA, 852 bp, Streptococcus pneumoniae
  misc_feature (1)..(852): tiling:Spneumo1:WAN024BU9; WAN023Q33 contig_1223_8||||7535 ..8386|-|852 bp|Glimmer 2.02 orf prediction|S.pneumoniae|6 70|WAN01UEKE|ORF
atggaactccaacagtacgatgaattaacttttgaaaatatcaaacacatagacgaaaatggagtagaattttggtacgctcgggacttacaaaagacccttgagtatacagaatggagaaactttcttctagtaattgataaggcaaagatagcttgcgataccgctaaaaaccccattgtagagcattttgttgacgtcaacaagtcaattccaaacggttataacacaacaagagatatcaaagattttaaacttacccgttacgcttgttaccttattgtccaaaatggtgacccacgaaaagaagttatagcacttggccaaacctatttcgcgttgaaaactcgtcaacaagagctacaagaaaactttgacaatcttaccgaagaacagaaacgccttgctatccgtgacgaaattaaacatcacaataaatcattatctgagtctgctggcaatgctggcgttaagaactttggaagatttcacaactcaggatacaaggggttatatggtgggctaactatgcaggatattcataacctcaaagaactaaacgaaggggagcatattctggattttatggggagtgctgaattagctgctaatttattccgtgccactcagaccgacgaagttctacgacgtagaaacataaaaggcgaagatctcgcaaatgatacccatttcaacgtaggccgaaccattagaaataccatgaaagaacttggaacaaccatgccggagaatctccctgctcctcgtgaaagtatacaagagttgaaaagcaaacagaaagaacttgaaaaacaagatgataataaccaactttcgctctttgatgatatg

SEQ ID NO: 6796 - DNA, 585 bp, Streptococcus pneumoniae
  misc_feature (1)..(585): tiling:Spneumo1:WAN024B4P; WAN023OB5 spn019g01_68||||42566 ..43150|-|585 bp|Glimmer 2.02 orf prediction|S.pneumoniae| 23F-1|WAN01UCLR|ORF|001
atggaactgaatacacacaatgctgaaatcttgctcagtgcggctaataagtcccactatccgcaggatgaactgccagagatcgctcttgcagggcgttcaaatgttggcaagtctagctttatcaataccatgctgaaccgtaagaatctggctcgtacgtcagggaaacccgggaaaacccagcttctcaacttctttaacattgacgacaagatgcgctttgtagatgtgcctggttatggttatgcccgtgtttccaaaaaggaacgtgaaaagtgggggcgcatgattgaggagtacctaacgactcgggaaaatctccgtgcggtagtcagtttagttgaccttcgtcatgacccgtcagcagatgatgtacagatgtacgaatttctcaagtattatgagattccggttattatcgttgcgaccaaggcggacaagattcctcgtggtaaatggaacaagcacgaatcagcaatcaaaaagaaattaaactttgacccaagtgacgactttatcctcttttcatctgtcagcaaggcagggatggatgaggcttgggatgcaatcttagaaaaattg

SEQ ID NO: 6797 - DNA, 2745 bp, Streptococcus pneumoniae
  misc_feature (1)..(2745): tiling:Spneumo1:WAN024BTO; WAN023ZDN AL449924.1_43||||3305 6..35800|-|2745 bp|Glimmer 2.02 orf prediction|S.pneumonia e||AL449924.1|ORF
atggaagaaaattataatttatctataactcaaataaagaattctattaaagaaaattccttagttttgtttgttggtgcaggaatatcagctaattctaatctaccaacttggggagaattgattcaatcattaaaaaaagaattgaacataccagaagaaagaacagatagtccactgagaattgctcagtattattatgatacttttgggaaaaatcagtacacaaagaagatagaagaaattttctttaagaagggattgagtaaaccaaatgagttacataaattaatagaaaaaattgcaccaaaacatattattacgacaaactatgattcacttctggagagtcaatttgaaagtggcttgttaaagtacaatgtagtcgctgaggataaagacatcccttatacgagttcggaaagatacttgattaaaatgcatggtgacttcagtaagaaaaatattgttttgaaagaagatgattatttagactatcatttgaacttcccaatgatttctactttaatccagtcattgataatgaatcatactctattgtttgtggggtattctctaagtgattcgacttttaattcaatttttagaatgattcaaaatacatttaaattggatgctaaaaatgcttatttttatactcccgaggaaccgtctatgatcattcgagagtattataagaagcaaggaattttcattatctctaatgaagagaatctaggtcaggagacatcagaaaaacagaacaaattgtattgcaggacaaaagattttttagaggttctatcagaaaaccgaagtcaagatgtaaataatgctgatgatttatggaatcaactggcttttttagatagacttagttttattgatgcgaaagatttttctagatattctgatttaaagaaaagggctttaaactgggatgatgagtattgctggtttggaaatgatcaattaagatttgaaattgatggtcatgaagaattacgaattatggtatctaaaaaatctttattaaatcgctttctagatatggagattggtgagcctagggatttaaaggggaatcgattcttaagtaaggcttttaagttgtatgaagaaaaacaatattctttagcaaaagcaaaatttagagaactagctaatatagcatttcgtcagaaagactattttaatttcttagtttgtgaatttaattttcagcaaattcaaataattgatagatacgaaaaaacacctagttatgcagagccactttatgatggagaattaagcgaattaacagaacaaattcttaactcggttacaggagatgagaaaaagattatagaattttttagagattcaatccttaacttcaattttttatatagaaaattagaaactattaatgaattatttgatgaaattcgtgaagagcatgaaagctatagaagaggaggatggtctgctaataatcatctatttratgcggagtttacagtaaaaaatctttatwactttttaaaattaaattgtttatgtgttgaacattataagatttataaatcaatcattaatagatatttagaaatattattactcagttatgataattcatatgtaaatcctgactcaagtattttcgatagaacatcttcttggcttaaaaatcttgatttggatgatgttcaattaattcttccgaatatagattttaaggttgtaaatttatattttagaaactattcatttggtaaaataaaagttactgaggaagcgaaagactacttgttgaatcgaattacttatcttcaagaaagacttgaaattactgaagatgaaaatcttcgagagcttaaaaatatgctaatttttcttcctcttgttgatgatattgacatagaaaaagtaatagaaattttaaataatcaaacactgtattataattggagagaggaatttaggagaattattaaaattgtcctcgataatatggatgttattgataaagattcattgaaatctaagataattgggattgtaaataaacatttaaatgaaattttggagaaaaatttttctttatataattcagtgtatccactctattcacagttactagaatactgctcaactgatcaggaaactgcaataatagtactcgaaaaatttaatacagatattttaagaataaaatataaaaatgatgatataaaaaatatcatagaatattctgacttgatatgccacttatttaagtatttcgaaaaggatattaaagatgacattctagatactctaaaagtttatgaagaatcagaaaatattatttaccataaagtaattgatttgatgagttataatgtctatgattttcctcagatacaaaataaaatctaccattatttgattaaaagaattaatgataaaagagttgagggggttaaaactttcccagacccaagagaaaagtctgtatcagatttatacaacttaagtagaaaaggatatttttctgattttgagattttaaaagatattgaagaagatattcgaggactttatcctgaagtagattggacctggttccatgatagaagtgatgatgttatccatcgtctactagaacatagaactcccaataatattaaaacttatttttcaaaaaatgaagaagataataaattgattaatgagtatattttaaaagctttcgatgaggataaattaatacttaagaaa

SEQ ID NO: 6798 - DNA, 114 bp, Streptococcus pneumoniae
  misc_feature (1)..(114): tiling:Spneumo1:WAN024BYU; WAN023S4M contig_387_1||||265.. 378|+|114 bp|Glimmer 2.02 orf prediction|S.pneumoniae|670| WAN01UD7K|ORF
atggaagaaacaacatacgatattatcgctaaaagcttggatagaattagtatggaattacaccaagctgacgaaaataacgattttctagaatatgggttttatcaggacaat

SEQ ID NO: 6799 - DNA, 717 bp, Streptococcus pneumoniae
  misc_feature (1)..(717): tiling:Spneumo1:WAN024FKX; WAN02401N |atpA||CAA81448.1|||7 17 bp|Adenosine Triphosphatase|S.pneumoniae||Z26850|ORF|00 0
atggaagaaagtatcaatccaaccatcaatattggtcctgttacctttgatttaaccatgttagccatgaccttgttgattgtgggagttgtttttggctttatctattgggcaagtcgcaatatgactttgaaacccaaaggaaagcaaaatgtacttgagtatttctatgacttcgttattggatttacagaacctaacattggtaaaagctacatgaaagactgctcgctctttttcctttgtctatttctatttatggtactggcaaataacctcggtttgatggccaaacttcaaactacagatgggacaaacctttggacatcgccaactgcaaatctccagtttgacttggccttgtcatttggaattatcctgatgacccatattgaagggattcgtcgccgtgggattaaaaaatatctaaaagcctatatcacacctggctttatgactcccatgaatatcttagaagagtttaccaactttttatcacttgccttgcgggtgttcggaaatatctttgctggagaagtgatggctagtttgctaatcactctatctcatcaagctctatattggtatccagttgcttttggtgctaacttggcttggacagccttttctgtctttatttcctgcatccaagcctatgtgtttaccatgttgtcttctatgtacttaggaaataagataaatgatggagaagagtag

SEQ ID NO: 6800 - DNA, 273 bp, Streptococcus pneumoniae
  misc_feature (1)..(273): tiling:Spneumo1:WAN024BUN; WAN023Q9A contig_1258_31||||137 31..14003|+|273 bp|Glimmer 2.02 orf prediction|S.pneumonia e|670|WAN01UEG8|ORF
atggaagaaatcttaaaaggaaaaacagagtcagggtttgagtacaaaatccctaaaaaacgattgagaaacttttatctcatgcgcgaagcttccaaaatggagaagggggattttgaagctgctgaaaaattgctgaatcttctctttggtaaaaaacaagcggaagagtttttatctcatttagatgatggagacgacttcatcgatactgaggtactgttcgcagatatcaagagtatctttgagtccaacaaagacctaaaaaaatct

SEQ ID NO: 6801 - DNA, 1368 bp, Streptococcus pneumoniae
  misc_feature (1)..(1368): tiling:Spneumo1:WAN024FWC; WAN023PC1 pne43_9||||5130..6497 |+|1368 bp|Type 20 capsule operon, Glimmer 2.02 orf predic tion|S.pneumoniae||WAN01UCHC|ORF|000
atggaaggaaggggtttctacaatataactctggcattcttacagagtatacttgttagtctattagcttatatactgattgcaatttcagaaaccgacattgctttaaatacagtattcgtcctgttttttcttcactttgtagccttttatattagtggttatggtaaagattttttcaaaagaggtcagtatattgagttggtagaaacgataaaatacataatattttattccttgttgatcagcttttcaagtttgttcttaaaagaaaaatttgttatttctagacgaggaatgctctacttgcttttcctatatggtgttttgaattatctactcaatttctttttgaaaagttattggagaaaattcacctataatttaaagcgcagtcgcaagattttattggttacggcaacatcacgcgtcgaaagagtaatggattgcctgttacttgcgaacgatgttcaagggaaattggttgctgttagtgttttagataagccagaatttactcatgaaaagctccttgttgtaccaaaagaagagttgatttcctacgctacccatgaagtagtagatgaagtttttgtcaatcttccaagtgaggactatgatattggagccattatttctcagtttgaaacaatgggggttgatgtaacagtcaatctcaatgcttttgataaaaacttaagccgaaataaacgaatccatgaaatggcaggattgaatgtagtgaccttctctacgaatttttacaagcctagtcatgtcattactaagaggattcttgatatttgtggagctatcgttggtctttttatctgtggaattgctagtatattcatagttcctcagattcgaaaagatggtgggtctgcaatcttttcacaaactcgtgtaggaaaaaatggtcgtcactttaccttttataaattccgctcgatgcgagtcgatgcagaagcgatcaaggaacagttgatggatcaaaatacgatgcaaggtggtatgtttaagatcgataacgatcctcgagtgacaaagattggaaaatttatccgaaaaactagcttggatgaattgccacaattttggaatgttttaattggagacatgagtctagtaggtacgcgcccaccaactgtagatgagtacgaaaaatacacacctgaacaaaaacgtcgcctaagctttaaacctggtattacaggtttgtggcaaattagtggtcgaagtgaaattacaaacttcgatgaggttgttaagttggatgtggcttatatcgatgattggaccatttggaaagattttgaaatattgttaaaaactgtaaaagttgtgttgatgagagatggagcgaag

SEQ ID NO: 6802 - DNA, 93 bp, Streptococcus pneumoniae
  misc_feature (1)..(93): tiling:Spneumo1:WAN024BUC; WAN023Q67 contig_1239_8||||3153 ..3245|+|93 bp|Glimmer 2.02 orf prediction|S.pneumoniae|67 0|WAN01UEIG|ORF
atggaaggttactttgagaaggttacggtaggtcagatttttttagaaaaaccattttataaatattcacatagtctcctatatctaactaat

SEQ ID NO: 6803 - DNA, 252 bp, Streptococcus pneumoniae
  misc_feature (1)..(252): tiling:Spneumo1:WAN024BN7; WAN023O7O spn029h04_63||||47665 ..47916|-|252 bp|Glimmer 2.02 orf prediction|S.pneumoniae| 23F-1|WAN01UCO3|ORF
atggaatatgttgaggctgttaatcaatttatagagagacattataaagagaaggatattggtcatatagagatagatttttggggtaacaaaaatcatcctcatagcttgtacatatacaaacgttctaaaaaaattgagtatgattattttttctttgattctattgattattatgaagagccagattttttagagtttaagtatatcgttcatttagaaaatattacgtatatattttggcaggaagat

SEQ ID NO: 6804 - DNA, 1107 bp, Streptococcus pneumoniae
  misc_feature (1)..(1107): tiling:Spneumo1:WAN024C22; WAN02442L spr0965||15903009|NP_ 358559.1|946534..947640|+|1107 bp|Hypothetical protein|S.p neumoniae|R6|NC_003098.1|ORF
atggaatcaaaaatttcaattttagatagactatattcatggatttatattaagaaattaaaaaaactaggtgcaattatagaagagaatgttgtgatttgctttggtgcaaagctttttttcaatgaagaatgcttaattcagaaggatacggtcatcggtagatttgtactaatagaagcaaataggataacaattgggaataattgcttatttttcccacgaactttaatttattccaaggaaacatttagtttgggaacacgaggaaaaattagtaaagattgtatatttagggcgaataaaataaatattggaagagaattttggtgcaatgaggcagtaagaattggagaaggcggttggaatcaaaaaagtgcaaatattaaaattggtgattatcaattcataggaccacgagctcaaattaatgtaagtgattctgtggaactcatgggatatggtggtctaggaatcgagacgatgatctttacgcatggtgcgggacatggccaatcagcaactgatggattttatgctgaacaaaataaagttattattcaaaaaaatgtctcaattttaacaagagctattattctaccaggtgttatagtcagtcaaggcaccactgtagcggcaaatgctatcgtaaccaagagttttccaaagcactcgttaataggaggagtaccggctaggtatattggtcagagtaataaagaaatttctgtgaaagagcaaaaaaatattattgttgacatattaaaagaaggattaggaacagaaccagtgataaaaaacaatagcttttgttttgagaaatttaatgaaaatattacttttcaatatgatttagaaaaaattgaatcaacagacaatattagtcaaagagatattattatattttatcaaggtacaaataaatgtcataaaaattatagcacctgtattgatttgaagtctaaaacaatttcaggtagagcaagtaaggcttcagaatttttaagagataaatttagaagaaaaggaataatcttaaattataaaaattatagtccattttcattgaattatgattatttaataattaataagattgaagtttag

SEQ ID NO: 6805 - DNA, 1206 bp, Streptococcus pneumoniae
  misc_feature (1)..(1206): tiling:Spneumo1:WAN024BRV; WAN02418S |wzy||AAP94608.1|||12 06 bp|putative repeating unit polymerase|S.pneumoniae||AY3 36008|ORF
atggaatcccgaaagaaatttgtttgttttcccaatagtagtttgcgtttttatattttgcaggcagcgattgccttatctattttatcgcagactccctatatctggaagtttagtgggatacctacacaacttctgattatgcctttgtggatcctgttgggagtagtgtctattttttctagaattgacatggaacgatcattcctattttttttattaacaataggttgtttaattagcactattgctttgttagatatagttacgggagtatcttatgtctttaatggtttgtctcagcaactctatttggctgtgggaattctagttttaggctactggaatgctgatgtgattgttcattattggaaaatcatcaccatgacttttttgggagcatgtttgctgatttcagtggatatttattttcactactttcaaggacatactttttcaaatattgattatgtttatcgagctaagaattcagcggcatctatctttttatcggcagttattctcaacttgtctctatataatcgcaagtgggcactgtggagaaaagtattgttattagctagtagcggattgctgatttacatgtgcatccttatgcggtcacgagcagttctgttagcagctgcagtacttccgctagtttatatatggtttcaggagacgtctttggggcataagattggacggacattaggagtttcaacagtagtaggtgcgtttttgctcaattcagctatttatgatttttttatcaataatctatttttaagggtcacatctgaatatcgaccatctagtctgactttggactacgtttcctccaaccgttttgtgtattttgagatctttgctaaagaaatttcaggacatgaattaacagggattggttattattatatggataatttttttctagagagttttctcaattatggttatatagtagggactgcttttgttttaatagccttgtctcccatgatttatgccctcttgcaacgttcttcttctcatcgtttccgcatgctttttttagcccttgctttttcttatactgtcaatgccttatttgaaggttacgcgccatttggtcccggtgccaagagttttattctttggttagtttttggttgccttctgaatacacgaattggaaaggttggtgaacattctgaaacaagttag

SEQ ID NO: 6806 - DNA, 504 bp, Streptococcus pneumoniae
  misc_feature (1)..(504): tiling:Spneumo1:WAN024DKX; WAN023QA6 contig_1259_3||||1096 ..1599|-|504 bp|Glimmer 2.02 orf prediction|S.pneumoniae|6 70|WAN01UEG3|ORF|000
atggaattacgcagaccaagattagcggataagaaagctgttttagatatgatgacagagtttgaaaagagccaatcagcccatgatggaggattttgggatgttgaggatttttcttacgaggagtggctagaaggtaaccgtaataaagaaatgggaatatggctacctgaaaatcgcgttccatcgatacagttcgtattgtttggtgaatcaggttgtgctctaggatttttgaatctgcgattgagactgaatgaggggttactgaattatgctggccacattggctactccattcgtccatctgaaagaggcaagggttatgcaaaagagactctccgtcagggcttgcaagttgctaaggaaaagaacatcaagaaagctctggtgacctgtagcgtgaataatcctgctagcagagcagtcattctagcaaatggtggaatatttgaggatgctcgcaatggagtcgagcgttattggatagaggtagcgaatgaa

SEQ ID NO: 6807 - DNA, 1311 bp, Streptococcus pneumoniae
  misc_feature (1)..(1311): tiling:Spneumo1:WAN024BZZ; WAN02442K spr0966||15903010|NP_ 358560.1|947648..948958|+|1311 bp|Conserved hypothetical p rotein|S.pneumoniae|R6|NC_003098.1|ORF
atggaattgtcggaaatgattaataatgtgtttgaaagttgtatacatcctgaatatcattttattgatttatcaaagataaaagagaataggatagcaattataggaggaaataaatctgagtatttaaatttaatcttaaatcttatgctacaaggtaaggttgttatccctattaatccgatccaaactaattctcaaatagaaacacttttgaatttgtctgatgttgaagcagtattaacagataatagctttcaatgtaaaagtgagaaaaaaacgtatctattttgtgaatttaaacatatttataataatcatgaaagagagatttcggacactcctttagtgtttttttcatcaggtacaacaggagtgcctaagccggtaatgattaataaattagcttttacagaattaattaatctgatgatagcacagttagaaatatctagtgatgatgtgttgtatctcccctcccacattgctttcattcaatctctctgggctgcgatgatagtaattttttcggggggaagagtaatttttaaagataggattacatataaaacattttttaaggaacttcaactaaacgatgcaacaataacggttatggtacctactacgatgaataaacttgttaatttatatacaaatactctccaagagtgtaaaaaattaagatgtattattgtaggtggagagattataaataaggatagtgcaaactttttattaaataaattgaaaaacacaaacatagcaaatgcatatggtatggtagagacaaccgcagtttgttgtctacaatatggacgtgatttaaaaaatattaactctgttggtacaactctaccgggggttgaagttgaagtaaagaatatagataatgatggtaatggcgatatctggataaagacaaatcgctttatgagcggatattacccgagtaaatacactggtgaatggttatatacaggagatagaggatataaaaataaggaaggacttttatttgtaacaggccgtgaaagtttgtcaattaataagggaggtataaaaattaatcctattgaaattgaacagattattcttcaattgccagatattcaactttgtaaagttgaaaaaattagtgataatatttacggagaaaattatatattagaagttatttctgaaattaaagataaaaatagaataacaggacagattttaaaaagcttaggtaaatattatttacctgattcaataaaatttgttgagtctatcgaaacaacttctagtggaaaattgaagagaaattag

SEQ ID NO: 6808 - DNA, 111 bp, Streptococcus pneumoniae
  misc_feature (1)..(111): tiling:Spneumo1:WAN024DHF; WAN023NVV spn066d05_39||||25785 ..25895|-|111 bp|Glimmer 2.02 orf prediction|S.pneumoniae| 23F-1|WAN01UCWR|ORF|001
atggaatttgataacggtcataatatctatttaaaattatacgtagtccaattggatcaatttgccatccccactcagaagactctaaataaggatttactaaaccaccaa

SEQ ID NO: 6809 - DNA, 75 bp, Streptococcus pneumoniae
  misc_feature (1)..(75): tiling:Spneumo1:WAN024BYW; WAN023S62 contig_464_2||||717.. 791|+|75 bp|Glimmer 2.02 orf prediction|S.pneumoniae|670|W AN01UD2E|ORF
atggaattttctgctgcgaaaaacaaatatcttctttcttgttatgtaaaaattttggctaaaaatttggaagtt

SEQ ID NO: 6810 - DNA, 228 bp, Streptococcus pneumoniae
  misc_feature (1)..(228): tiling:Spneumo1:WAN024C53; WAN023M4T 314282_613||||316991. .317218|-|228 bp|EGAD orf prediction|S.pneumoniae|R6|NC_00 3098.1|ORF|100
atggaattttctttaagtaatgggaatatattaaagatattattgaaaataattcctaatactacaactaagaaaccttttattataatattccagccaattgaatatactatactactgtcatttttttcatctaatgcaaatcgaagaaccccttcagaaatattaattgaaataattggaattagcaatgagattgtcgtattaaataaatcatatgttccataa

SEQ ID NO: 6811 - DNA, 165 bp, Streptococcus pneumoniae
  misc_feature (1)..(165): tiling:Spneumo1:WAN024BVL; WAN023QHQ contig_1298_18||||104 93..10657|+|165 bp|Glimmer 2.02 orf prediction|S.pneumonia e|670|WAN01UEBQ|ORF
atggaattttttatagatgatgaacaaacactatcaaaattgagttcaatgggcaatccattggaaggcttagataaggcaatggattgggagcaaattagacctattcttgagcagatttttagaaaccatcaaaaggcggactccctccgcatgattttttca

SEQ ID NO: 6812 - DNA, 273 bp, Streptococcus pneumoniae
  misc_feature (1)..(273): tiling:Spneumo1:WAN024D7Z; WAN02401L |atpX||CAA81450.1|||2 73 bp|putative protein|S.pneumoniae||Z26850|ORF|000
atggacaagaaaacagcaaaggtaattgaaaaatacagcatgccttttgtccaattagtgattgaaaaaggagaagaggaccggattttttcagacttggatcaaatcaagcaagtcgcagaagaaacgggcttaccttcttttttagctcaggtggcagttgatgagtctgataaggaaaaaacagttggtttctttcaagactctgtctcacctttaatgcaaaactttattcaggttctgatttacaatcacagagcaaatcttttttat

SEQ ID NO: 6813 - DNA, 255 bp, Streptococcus pneumoniae
  misc_feature (1)..(255): tiling:Spneumo1:WAN024BU2; WAN023Q2I contig_1220_15||||844 7..8701|+|255 bp|Glimmer 2.02 orf prediction|S.pneumoniae| 670|WAN01UEKO|ORF
atggacaatgttctactttcactatctgaatggattaaatctattatcaaggacacaatcacaaggctagtcgaaatagaaaaagatagtgatcactatccagagttgatggatgtgaacactacctgcgaatttctaggaattaagtatgccacattttcagataattatcgttacttaaagggatttccaaaggaattacctggtaagaaatggtcaaaaagagccatcaaagaatggctctctaatcaaata

SEQ ID NO: 6814 - DNA, 81 bp, Streptococcus pneumoniae
  misc_feature (1)..(81): tiling:Spneumo1:WAN024DKI; WAN023SQV BD003922.1_2||||1619. .1699|-|81 bp|Glimmer 2.02 orf prediction|S.pneumoniae|ATC C55840|BD003922.1|ORF|000
atggacagcgcagaggacatccttttaaaaaaacagttgtacgaatacccggaccgtcatgaattgaaaagtgttgaatat

SEQ ID NO: 6815 - DNA, 600 bp, Streptococcus pneumoniae
  misc_feature (1)..(600): tiling:Spneumo1:WAN024AUG; WAN0242IF SP1022||15900893|NP_3 45497.1|965354..965953|+|600 bp|Sua5/YciO/YrdC family prot ein|S.pneumoniae|TIGR4|NC_003028.1|ORF|010
atggacaggattagacaagagttggaaaatggtggagctgtcgttttgcctacagagacagtttacggtctctttgctaaggcgctagacgaaaaagcagttgaccatgtttaccagcttaaacgtcgacgtagagacaaggcgctcaatctcaatgttgcctctttagaggacatcttgtacttttcaaagaatcagccaacttatcttcaaaaacttgtagagatctttttaccaggtcccttgaccattattctcgaagctaatgaccgagttccctattgggtcaattctggccttgcaactgttggatttcggatgcctagtcatcccattacccttgatttgattcgagagacaggtcccttgattgggccgtctgccaatatctcaggtcaggcgagtggagtgacctttaatcaaattctagaggattttgaccaagaggttctgggtctggaagacgatgcttttctaactggacaggattcaactattttgaatttgtcgggagacaaggtgaaaatcttacgtcaaggggccattaagcgagaagatattcttgctcggttgccaaagatttcttttgaggaggaatga

SEQ ID NO: 6816 - DNA, 81 bp, Streptococcus pneumoniae
  misc_feature (1)..(81): tiling:Spneumo1:WAN024E2I; WAN023PZ9 WO-02077021_36||||||8 1 bp|Glimmer 2.02 orf prediction|S.pneumoniae|TIGR4|AX5717 66.1|ORF|010
atggaccaaatgcttattatggtcaaaagtaagaacgatgaaggaggagaaaaagataaatttagctcctctttttacatt

SEQ ID NO: 6817 - DNA, 693 bp, Streptococcus pneumoniae
  misc_feature (1)..(693): tiling:Spneumo1:WAN024B4K; WAN02418W |wzd||AAP94604.1|||69 3 bp|putative chain length regulator|S.pneumoniae||AY33600 8|ORF|000
atggagaaacaaaacactttggaaatcgatgtattgcaactattcagatctttatggaaaagaaagttggtcattttattagtggcaattataacttcttcagttgcttttgcctacagtacttttgttatcaaacctgagtttactagtacgactcggatttatgtagttagccgtgatcagggagagaagtctggtttaaccaatcaagacttgcaggcaggatcgtacttgactaaagactatcgtgaaattatcctatcgcaggatgttttggaggaagttgtttctgatttgaaactagatttgacgccaaaaggtttggctaataaaattaaagtggcagtaccagttgatacccgtatcgtgtctatttcggttaatgatcaagttcctgaaggggcaagccgtatcgctaactctttgagagaagtggcggctcaaaaaattatcagtattactcgtgtttctgatgtgacaacactggaggaggcaagaccagcgatatcaccgtcttcgccaaatattaaactcaatacactaattggttttttggtaggattgattgtcataaatgttacagttcttcttcttgaacttttggacacacgagtgaaacgtccggaagatatcgaagatgcactacagatgacacttttgggggttgtaccaaacttggataagttgaaatag

SEQ ID NO: 6818 - DNA, 897 bp, Streptococcus pneumoniae
  misc_feature (1)..(897): tiling:Spneumo1:WAN024FO6; WAN023PHE pne35_11||||8435..933 1|+|897 bp|Type 17A capsule operon, Glimmer 2.02 orf predi ction|S.pneumoniae||WAN01UCHX|ORF|000
atggagaatatcttgaataaaaaaataggaattgttattttaaattatcttaattgggaggatactttagattgcataagtagtttgcgattgcaaagtaatcaaaactttgaagctgtcatagtagaaaatggttctcccaatgaatccgtttctaggattagagattttataaaaaatgacaagaatattcatctttatgtagtagagaataacttaggttatgcaaatggaaataatatgggcatcctctacttaaaaaataaatactctataaatagaattatattaactaataatgatgttatatttgatgataaaaattatataagtaaattaatagacattgaatatgatgggaatattggagctattggaacaaaaattattggttctgatggtttaaaccaaaatccagcttattttccaatttcttttagttctagtataaaatcacttattattaatttattggcattttctaaagttattgcttctatcaaaaagcgttttctatcttcatgggcgaaaaaagctaatgatttttcaagtccaaagactagtaaacaaaaatactttctacatggatcggttatttttcttacggaaaattatttagataagtttatggggttgtatggtgggacttttctttactatgaagaagtaatcctaggtattatatttgaaaaggcaggtcttgatatgctgtatatacctgagttttcaatttaccataaagaggaccaatcttcaattcgaagctttaataatgatgacttagtacgacgtcgttatttgttgaatagcatttggtctagttttaaagtttatcttgctaaccaggaagaactcccgaatattgttagtgactctatatataaacatattaaggaa

SEQ ID NO: 6819 - DNA, 891 bp, Streptococcus pneumoniae
  misc_feature (1)..(891): tiling:Spneumo1:WAN024FO5; WAN023OW3 pne69_12||||8038..892 8|+|891 bp|Type 31(1) capsule operon, Glimmer 2.02 orf pre diction|S.pneumoniae||WAN01UCDA|ORF|000
atggagaatgtcttgaataaaaaaataggaattgttattttaaattatcttaattgggaggacactttagaatgcataaatagtttgcgctcacaaagtgatcaagattttgaagctgtcatagtagaaaatggttctccaaatgaatctgtttctaggattagagattatataaaaaacgacaagaatattcatatttgtgtagtggataataacttaggttatgcaaatggaaataatatgggcatcctctacttaaaaaatagatactctataaatagaattctattaactaataatgatgttgtttttgatgatgaagactacataaaaaaattagaagatattaagtatagtaatactattggagcgattggaacaaaaattattggttctgatggcttagatcaaaatccagcctattttccaatatcttttaaatcaagtattaaattgttgattatcaatttattagctttttctaaagcttttacttttattaaaagacgttatctatcttcatgggcgaaaaaagttaatgatttttcggctccaagatacaacaatcaaaaatattgtttacatggatcagttatctttcttaccgagaattatttagataaatttatgggattgtatggtggaacttttctttactatgaagaagtgattttaggtattatatttgaaaaagcaggtctcgatatgttgtatatacctaacttctcaatctatcataaagaagatcaatcgtcgctacaaagttttaataatgatgacttagtgcgacgtcgttatttgttgcaaagtatttggtctagtatgcgaatatatagaagctcaatagataacctatctaatattatagaaaattcaatcaaggaaaaatta

SEQ ID NO: 6820 - DNA, 1542 bp, Streptococcus pneumoniae
  misc_feature (1)..(1542): tiling:Spneumo1:WAN024ATH; WAN023XRJ AX110314.1_1||||158.. 1699|+|1542 bp|Glimmer 2.02 orf prediction|S.pneumoniae||A X110314.1|ORF|000
atggagagttccttgaacagtattcttgcagggacagacggcattattacctatgaaaaggatcgtctgggtaatattgtacccggaacagaacaagtttcccaacaaacggtagatggcaaggatgtttacacaaccatttccagccccctccagtcctttatggaaacccagatggatgcttttcaagagaaggtaaaaggaaagtacacgacagcgactttggtcagtgctaaaacaggggaaattctggcaacaacgcaacgaccgacctttgatgcagatacaaaagaaggcattacagaggactttgtttggcgtgatatcctttaccaaagtaactatgagccaggttcccctatgaaagtgatgatgttggctgctgctattgataataatacctttccagggggagaagtcttcaatagtagtgagttaaaaattgcagatgtcacgattcgagattgggacgtcaatgaaggattgactggtggcagaatgatgaccttttctcaagggttcgctcactcaagtaacgttgggatgacgcttcttgagcaaaagatgggagatgctacatggcttgattatctaaatcgctttaaatttggtgttccgactcgttttggcttgacggatgaatatgcaggccaacttccagctgacaatatcgtaaatattgctcagagttcatttggacaagggatttcagcgacccagacgcaaatgattcgtgccttcacggctattgccaacgatggagtcatgttagaacctaaatttatcagtgccatttatgatccaaatgatcaaactgctcggaaatcacaaaaagaagttgtgggaaatcctgtgtctaaagatgcagcgagcttgacgcgaacgcatatggttttagtcggtaccgatccagtatatggaactatgtataatcataagacagggaaaccaactgtaactgttcctgggcaaaatgtagccctcaagtctggtacggctcagattgccgatgagaaaaatggaggttacttagttggtacgaccaattacattttttcggctgtatcgatgaaccctgctgaaaatcctgattttattctctatgtgacggttcaacagcctgagcattattcaggtattcagttgggggaatttgccaatcctatcttggaaagggcagtggctatgaaagattcccttaacctccaatctaccgctaaaacgttaaatcaggtaaccaatcaaagcgcttatgccatgcctagcatcaaggacatttcacctggcgatttggcggaagccttacgtcgcaatattgtgcaaccaatcgttgtaggaacaggaacaaaaattaaagaatcatctgtagaagaagggacggatcttgcacctaaccagcaagttcttctcttatctgataaagcagaggaagttccagatatgtatggttggacaaaagagactgctgagacctttgctaagtggctcaatatagaacttgaatttgaaggttcgggctctactgtgcagaagctaactaat

SEQ ID NO: 6821 - DNA, 894 bp, Streptococcus pneumoniae
  misc_feature (1)..(894): tiling:Spneumo1:WAN024CFH; WAN023RWJ contig_1609_21||||128 38..13731|+|894 bp|Glimmer 2.02 orf prediction|S.pneumonia e|670|WAN01UDCD|ORF|000
atggagataaatatgattataggtgaaacttatagaaaaatacgagaaggaaaaggtatttctatttcttcattagcaggtgcagaaatttcaaagtctcaaatatctagatttgaattaggagagacagaaatctcattttttaaattattatatctacttgaaaaaataggtgtaacactagaggagtttttgctttcatgtaataattatcagccttcagacttcaataccttgatacgcttagttcaacaggctgcatacaatcaagaaatcaaatcattacttaatatggtaagcaaagagatggaactgtttagagaaaccaaatctcattatcataagttaaacgctattttcattgaaagtattatctatggaattgataatactcatcaattgagtaatcaagacacctcttatcttactaattatttattttctgttgaaaactggggatattacgaaattcttattcttggaaattgttgtcgagcaatattaccaaatttattatttagatatgccaaagaggcgcttaaaaaaggaaagttgtatagttctatacctagaaataaacaagctctcgttcaattacttcttaattcacttcttattatgattgaaaacagcttatatgaggaagctttatttttagaacaagctactaagaatatattatctaattccacagatttttttgaacaaactattcttttgtatttagaaggattttttgaacttaaatttcatcataatcaaaaatcaattttaaaaatagaagatgctttaaaaatttttgaattattcaataaaacattatacaaaaattataaagattactacaaaaaaaatattatcattttattacaatgtggtaattcctattttgaa

SEQ ID NO: 6822 - DNA, 873 bp, Streptococcus pneumoniae
  misc_feature (1)..(873): tiling:Spneumo1:WAN024CFI; WAN023YWM AL449927.1_52||||3761 7..38489|+|873 bp|Glimmer 2.02 orf prediction|S.pneumoniae ||AL449927.1|ORF|000
atggagataagtatgattttaggtgaaacttataggaaaataagagaagaaaaggggatttctatttcttcattagcaggtgctgaaatttcaaaatctcaaatatctaggtttgaattaggagaaacagagatttctgtctttaagttattgtatcttcttgaaagaataggagtaacactagaagaatttctgcttatctgtaatcattatcaaccttcggattttaataccttaatagcttctgttaaacaggccgcatataatgaagatactcaaacattactagatatggtagagaaagaaatggaactttttcgtgggacaaattctcattaccataaattaaatgctattttcattgaaagtattgtttcgggaatggataagaatcatcaattgagtcgtcaggacgcctcttatcttacaaattatttattttctgttgaaaactggggttattacgaaacgctcatccttggaaattgctgtcgtgttctatctccagatttattatttagatataccaaagaggcgctcaaaaaagggaagttgtatagtcctatacctagaaatagacaatctctcattcaactacttctcaattctttgattataatgattgagaacgacttatatgaggaatctttatttttaaaacaggctacgaagaatatattagcggattccacagatttttttgaacaaactattttgctatatttagatggatatttggaactgaaattctatcataatcaaaaatcacttttaaaaatcaaagaagctttaaaaattttcgaactcttcaataaaacaatctacaaaaattacaaacaatactttgagaaacacatcattcatttagtagac

SEQ ID NO: 6823 - DNA, 291 bp, Streptococcus pneumoniae
  misc_feature (1)..(291): tiling:Spneumo1:WAN024B53; WAN023NUJ spn067g02_20||||18980 ..19270|+|291 bp|Glimmer 2.02 orf prediction|S.pneumoniae| 23F-1|WAN01UCXT|ORF|001
atggagatgagctttattgcgcaagattttgaaaagctcaatatcatcactgttcttgaaggtagaacacaagctatcatccgagatcactttcttaaatatgatagagccgttcgttgtcaagtgaaaatcattactatggatatgtttagtccttactatgacttagctagacaacttcgctttcaaatttctaggctcaggctgaaacagtctcccagactgtttcactcccgaatgctaaaatcgttcttgatcgctttcatattgtacaacatcttagccgtgcta

SEQ ID NO: 6824 - DNA, 1092 bp, Streptococcus pneumoniae
  misc_feature (1)..(1092): tiling:Spneumo1:WAN024BNY; WAN023OC6 spn019g01_27||||24805 ..25896|-|1092 bp|Glimmer 2.02 orf prediction|S.pneumoniae |23F-1|WAN01UCLR|ORF
atggagatgttacagattgaatatgtagatataaaatccattaaaccatatcacaaaaacgctaggcataatgacggagaggcaacagagaaagttgctgcatccataaaagcttttggttttcagcaacctatcttagtagatgataataacatcattattacaggacatactaggctaaaggctgctctttctttaggtatagacacaatacctatcgctcacgctgtaaacctcacagatgagcagataaaagcttatagactagcagataatcgagttgctgagtattcaacgtgggactcagaattattaaatattgagctttctcaatttgaaacaatagatatggctcagtttggttttgagttatcagttacagggttcaactttggtaacgaggaggagcagcaagaggaaactgaaaacgaggaggaagatgctgaggattttcatagagataccacaataaaccaatacaacctttttaattatgacgatacaagggttgagggtttttataacatgcctaaaatcgagggcgtggatcatattcctaaagattttcaaggctttaattatgttttaaataaaccagattacagctcatgcgtgcattttttcctagatgattatcaatttgaaagaatatggcaaagaccagacttttacattgaaaagctgctagaatttgatagcgccttagctccggattttagcttatatcttgatatgcctatcgctatgcaagtatggaacatttacaggtcaaggctgataggtcagattatgcaagattacggccttacagttatccctactgtatcgtgggctagtgaggaaagctttgatttttgttttgacggcttgcctaaaaactcaacgctagcaatcagtacaataggcgtaaagcaaaacaaagagcagtttgaggtatggaaaaatggagttactgagatgataaaaaggttgactccaaaaagaattgtagtatatggcggaaaagtggaatacgattataaagatatagaggttgtatattttgaaaatgcaacaacggaaaggatgaaagaaagtggcacaaaaactaac

SEQ ID NO: 6825 - DNA, 120 bp, Streptococcus pneumoniae
  misc_feature (1)..(120): tiling:Spneumo1:WAN024BLR; WAN023NL1 spn103f10_14||||13435 ..13554|-|120 bp|Glimmer 2.02 orf prediction|S.pneumoniae| 23F-1|WAN01UCLB|ORF
atggagcaagctactttggaggttttaaataccatatcattaaatcgaaaatatatcagatcgaatctagacaagtacattacgattgctaaaacatttgtagaaattcatttgactttc

SEQ ID NO: 6826 - DNA, 75 bp, Streptococcus pneumoniae
  misc_feature (1)..(75): tiling:Spneumo1:WAN024BK6; WAN023SY1 BD003774.1_6||||8130. .8204|+|75 bp|Glimmer 2.02 orf prediction|S.pneumoniae|ATC C55840|BD003774.1|ORF
atggagcatattttatggagaagtaacctttcgtgttacttctcttttttagaaaaacgtaacagactaactaat

SEQ ID NO: 6827 - DNA, 804 bp, Streptococcus pneumoniae
  misc_feature (1)..(804): tiling:Spneumo1:WAN024FTV; WAN023OLQ pne84_8||||6531..7334 |+|804 bp|Type 41A1 capsule operon, Glimmer 2.02 orf predi ction|S.pneumoniae||WAN01UCES|ORF|000
atggagcgaagtagattgatagatgtaaaaatcattgtggcaacacataaagaagttaaaatgcctcaagacaatagtctttaccttccaatacatgttgggagagacggtaaatcagatattggttttatcggtgataatactggcgataatatatcctctctaaatccatattattgtgaattgacgggactttattgggcatggaagaatcttgattataattacttaggtttagttcattaccgtcgttattttacaaaaaaatcacaaagatattcagattatatcagtatggatgaagttgttttatctcgaggtgatttagataatcttctttcccaaaatgacgttttagttcctaagaagaggcgatactatattgaaacgctctattcacactacgctcatactttggatggaagtcatcttgatgttgctcgtgatgtaattaaacagttaagttcagaatatttaacgaccttcgataaggtcatgaagcaacgtagtggttacatgttcaatatgtttattatgaaaaaagatttggcaaatcagtatttttcttggttatttcctattttagacaagatgtatgagcaaatagatgtatcccagttaacaccctttgaagctagactattcggtcgtgttagtgaattattatttaatgtgtggttaaaacataaggacattaaaccaaaagagctaccatttatgtatatggaaaaagtagatttgtttgaaaaagggaaatccttcttaatggccaaattcttcgggaaaaaatatggacagagtttt

SEQ ID NO: 6828 - DNA, 96 bp, Streptococcus pneumoniae
  misc_feature (1)..(96): tiling:Spneumo1:WAN024CWT; WAN023T2B BD003720.1_4||||3367. .3462|-|96 bp|Glimmer 2.02 orf prediction|S.pneumoniae|ATC C55840|BD003720.1|ORF|000
atggagctagccattactgaaataaacactagactcattatcacccaaaatgatatttggtttaataataataaaaatattacagccactgctaat

SEQ ID NO: 6829 - DNA, 390 bp, Streptococcus pneumoniae
  misc_feature (1)..(390): tiling:Spneumo1:WAN024BVY; WAN023QM2 contig_1315_16||||114 26..11815|-|390 bp|Glimmer 2.02 orf prediction|S.pneumonia e|670|WAN01UE9N|ORF
atggagctggataagtttaaaacgatgatgaacgtcagagagcggatgacctactttctacgtttccagaggatggcaggaagtgaaaaccaagttacgatagatgaagaggcttggaaacttgtcttaccttatcggtgggatttgagcggtgagcatgaaaaagcaatccgtgaggggttggagatattcgcccaagacatcaacagtatagagaacaaacgagccagaaaatactttattatccattattgttacatgagaaagaaaacaatgagcgaatgcgtagaaatggcagctactagctccactagctaccaccgatataaacaaatagccgtcttaaattttgcgagaatccaccagaacggagagctagaagtgtataag

SEQ ID NO: 6830 - DNA, 951 bp, Streptococcus pneumoniae
  misc_feature (1)..(951): tiling:Spneumo1:WAN024BZX; WAN02442I spr0968||15903012|NP_ 358562.1|950173..951123|+|951 bp|Hypothetical protein|S.pn eumoniae|R6|NC_003098.1|ORF
atggaggataatcaagtgcgaaggaaattatattacggaatcagttcagcggctggatggtcttggggagtttcttttttagtgacgtatacattaattcatgaaaaaggggtaatcccttttgcagtgtgggcttttttcaattctttagctattccaatttttggggtactttttaaaaaattatcaagactaaaggaaattatggtaaataatctctggttagtatactttatggctatagttcaatgcttttcgattattattaatttacaggcaatgttccaaatgggaactttaattggtctctcttcaagtatgtcaacgttaatttctttatttgctggggggatattcataataagtgtcatcaagaatggctataaaactgtactatatagtaatgttatacagtggttgataagtatattagctattataatacttatttttataggtttctcaggtaataaagaagtttctctacgtgcatacacggacgtaaattcaatttattggtcactttatgctggaattttattactctttagcccgtttgttgatatgcaaggatgggttagagctattgaaataaagaaaaatcgcgattttgaagcctttggattgtcagggatattttttgcaatttatatgttattaattttagtgttatcccaattcgaattatcagttcatatgggaataattttattatttttagttattatgatctctacatctacaattcaaccgaatgctcatgcattaaatgttaattttaaatacggttggattggagcattaatagcttgtcttctttggcctctattaagtagatttggaatacttacgttatggacatatcttgctagttttagagcaattgtagtggcattagtatttatgtatatgggatacgagaagataagagaattagttatttttaaataa

SEQ ID NO: 6831 - DNA, 402 bp, Streptococcus pneumoniae
  misc_feature (1)..(402): tiling:Spneumo1:WAN024BKU; WAN023MY5 spn172a11_24||||16322 ..16723|-|402 bp|Glimmer 2.02 orf prediction|S.pneumoniae| 23F-1|WAN01UCP9|ORF
atggagggactaaaaagagactattatttaatcttcatcaaatatttaaattcaaggagaagtaaaatgaaaaaaagaattaataagaaagcatctgtttttctagttgcaagtgttttcagttttagctttgctactacagctagtgtcgttaacgcagtaacggcacaccctgctccaagtcccattattgatgtatgggaatatggtgtaaatgataactatggttattcgaattactttgttagttctccaagtaatattggatcaaaatcttcagtaacgaatttttggggaacagttaaagctcaggataaaaaagattatggatgggcatattcaagtgcaacaaaatcttggaacgatgttcgcttaaatgcatattgggattattatagattt

SEQ ID NO: 6832 - DNA, 1110 bp, Streptococcus pneumoniae
  misc_feature (1)..(1110): tiling:Spneumo1:WAN024F4H; WAN023P0Q pne62_16||||13261..14 370|+|1110 bp|Type 33C capsule operon, Glimmer 2.02 orf pr ediction|S.pneumoniae||WAN01UCG7|ORF|000
atggagttaactatgtacgattatcttatcgtcggtgctggtttgtctggagcaatctttgcacacgaagctacaaaacgcggtaaaaaagtaaaagtgattgacaagcgtgatcacatcggtggaaatatctactgtgaaaatgttgagggcatcaatgtccacaagtatggtgcccacattttccatacttccaataaaaaagtatgggactatgttaaccaattcactgagtttaacaactatatcaactcgccagtggctaactacaaggggagtctttacaatcttcctttcaatatgaataccttctacgctatgtggggaactaagacaccacaagaagtcaagaacaagattgcccagcaaacggctaatatgaaagatgttgagcccaagaacttggaagaacaagccatcaagttgattggtccagatatctatgaaaagttgatcaagggctatactgaaaaacaatggggacgttctgcaacagaccttccgccatttattatcaagcgcctcccagtgcgtttgacctttgataacaactactttaacgaccgttaccaaggtattccaatcggtggctataacgtcatcattgaaaacatgcttggcgatgtagaagtagagcttggtgttgatttctttgccaatcgtgaagagctagaagcatcagctgaaaaagttgtctttacagggatgattgaccagtactttgactacaaacacggggagttagaataccgtagccttcgttttgaacatgaagccttggatgaagaaaattatcaagggaatgctgtggtcaactatacagaacgtgagattccttatactcgtatcattgagcacaagcatttcgagtatggtactcaaccaaagacggttatcactcgtgagtatccagctgattggaaacgtggagatgagccatattatccaatcaatgatgagagaaacaatgccatgtttgctaagtatcaagaagaagcagccaaaaatgacaaggttatcttctgtggacgcctagctgactataaatactacgacatgcatgtggtcattgaacgtgccttagaagtcgtattaagtgagttaggaaag

SEQ ID NO: 6833 - DNA, 432 bp, Streptococcus pneumoniae
  misc_feature (1)..(432): tiling:Spneumo1:WAN024BNS; WAN023OBT spn019g01_42||||30003 ..30434|-|432 bp|Glimmer 2.02 orf prediction|S.pneumoniae| 23F-1|WAN01UCLR|ORF
atggataaaaaacttattgggttagatctaacccacattgcagatggaggattacaggagaaactagacaaagagcttgaaaaagtctttgataacatccttgacctaaatacagatgcgaaagcaaaacgaaaagtgactatcacacttacaatgtcagcaaatgaagagcgtacagttgttgatactaccatggaggtgaaatcaaaatttgcgcctcaaaatggagtagctacaacaattcttattgggcgtgattttgatacaggacaagtacatgctaacgagctgaaaagtacagtacctggtcaaatgtattttgatgaaaacggagaaattctgacggatattgggcaaccagtggcagaaattgaacaacaagcagaaacaaaatcagatattattgatttcaacaaaaagaaagtaggtaac

SEQ ID NO: 6834 - DNA, 180 bp, Streptococcus pneumoniae
  misc_feature (1)..(180): tiling:Spneumo1:WAN024BRM; WAN02414B |pncM||CAC18601.1|||1 80 bp|hypothetical protein|S.pneumoniae||AJ278419|ORF
atggataagaaaaagatagtttcgactataatatgtatagtatttcttgtagtgtcagtagataatttttttagagacttaaccccgttactgttcattttaaatattattggcctgtcttgcttttcagtgctaacatacattaaaataaaagagatactcttaaatataagtaaatga

SEQ ID NO: 6835 - DNA, 156 bp, Streptococcus pneumoniae
  misc_feature (1)..(156): tiling:Spneumo1:WAN024AZC; WAN0240QE |iP||CAC10162.1|||156 bp|bacteriocin-like peptide, double glycin clevage motif| S.pneumoniae||AJ278294|ORF|000
atggataagaaacaaaacctaacttcatttcaagaactaacaactaccgaactcaaccaaattacaggtggaggactgtgggaagatatcttatacagccttaatataattaagcataacaatacgaaaggacttcatcatccaatacaactataa

SEQ ID NO: 6836 - DNA, 156 bp, Streptococcus pneumoniae
  misc_feature (1)..(156): tiling:Spneumo1:WAN024DHQ; WAN0244GH spr0465|ip|15902509|N P_358059.1|471895..472050|-|156 bp|Bacteriocin-like peptid e, double glycine cleavage type|S.pneumoniae|R6|NC_003098. 1|ORF|100
atggataagaaacaaaacctaacttcatttcaagaactaacaactaccgaactcaaccaaattacaggtggaggatggtgggaagaactcttacatgaaacaattttaagtaaatttaaaatcacaaaagcacttgaactacctattcagctataa

SEQ ID NO: 6837 - DNA, 1119 bp, Streptococcus pneumoniae
  misc_feature (1)..(1119): tiling:Spneumo1:WAN024BXV; WAN023RVU contig_1609_50||||357 45..36863|-|1119 bp|Glimmer 2.02 orf prediction|S.pneumoni ae|670|WAN01UDCD|ORF
atggataattatttcccaaaatggaaccaggatagaatcgtttaccaatggaagaacgacagattaagaattggagctgatgatgttgatgtattagaaattacaggatactcagatttttggtcagatttaatttcttgttgcaatggaattaatagctttgaagaaattaaagatttattaagaaaaaaatatgatatatccgaaaatattatagaaaaatatatatctaaattttctgatcgtaatttattagaaatattagatagacctgtaaatcaaattgatcactatttaattaatgaatcactagaaacttattattctagtgaaggtattggtgggattaaattacttgaaaaattgagtaatttaaaagttaccatactaggatgtggagccggtggttctcatatcgcattacaattagcccaattaggggtagggcgacttcatttagtcgatgatgatattgttaaagaaaataatataaataggcaatctatgtttacctttaacgatattggtaaatataaagttgactgtgtaaaagattgtattctaaaacgtaattatcagtgtgtagtcacaaaaagaaaattaaaaatgagcactgttgatgctgtaaaaaaagaaatttctgaaagtgactgggtattttgttgtatggatgaacctccttatatagcacaaagattagtaaatagagcatgctatttatttaatatccctagtatatactgttttagccaacgtagcgcaggtaaactcttattttgtaatcctaatattcaaaatataggctgtgttgattgtttactttatgaacaagatagtgataactttcaaaatttagttaaaaaattttcaaactatgatggaaaattaataactgcaaatattttaactaatattctattattgtcatcatgggttgtgaagaaatggttagattgtgtaacagagaaaaatagtaatgtttggaatactttatttagatttgatttttatagttttagggaagatgaattcaagcacttctctaagcaatctcattgtcctacatgtggtcatgatttcgataaaagtaaactctgggagattctaaaaattgatgaa

SEQ ID NO: 6838 - DNA, 246 bp, Streptococcus pneumoniae
  misc_feature (1)..(246): tiling:Spneumo1:WAN024GKV; WAN023NEC spn134d07_9||||3683.. 3928|-|246 bp|Glimmer 2.02 orf prediction|S.pneumoniae|23F -1|WAN01UCVE|ORF|001
atggatacaaaaatgatgtcacaattttctgttatggatactgaaatgcttgcttgcgttgaaggtggcggatgcaattggggagattttgccaaagcaggtgttggaggagcagctgtagttgctgctttaggttgtgcagcgggtggagtgaaatatgggaaaattctaggaccatggggcgctgcaataggaggaattggaggagcagtggtttgtggatatttagcctataccgctacatca

SEQ ID NO: 6839 - DNA, 435 bp, Streptococcus pneumoniae
  misc_feature (1)..(435): tiling:Spneumo1:WAN024BSU; WAN023XXH AL449942.1_3||||2541. .2975|-|435 bp|Glimmer 2.02 orf prediction|S.pneumoniae||A L449942.1|ORF
atggatacatcacaagtaataaaagcacatgaagtagctaaaaaagcacactttggacaaattgatagagcaggaattgactacattaaacaccctgaaacagtagctagttttgtcgcaactgatgaagagaaagctgtcgcctatctacatgatgtaattgaagatacttcactaaccctactagacctaaaaaaggaaggtttttcaaaaaacattatagaagccgtcgatatactcacaaagaaaaaaggacaagattatcaatcttatctcaatctagtaaagaaaaatgaactcgctagagttgtaaagttggcggatttacggcataattcagatttaacaagactaccattaattactgaaaaagacttagagagaaataagaaatacagttctgctattagatttttaagagcaaagaaaaaaagt

SEQ ID NO: 6840 - DNA, 111 bp, Streptococcus pneumoniae
  misc_feature (1)..(111): tiling:Spneumo1:WAN024D2P; WAN023VYI AX570851.1_1||||1..11 1|+|111 bp|Glimmer 2.02 orf prediction|S.pneumoniae||AX570 851.1|ORF|000
atggatagaacaatgaaatatcctatatccccagttaaaccaaatgtggtcttagataaagaaacagatggcggaattgcagataacattttattgtacagtctaactaat

SEQ ID NO: 6841 - DNA, 336 bp, Streptococcus pneumoniae
  misc_feature (1)..(336): tiling:Spneumo1:WAN024BZ5; WAN023S69 contig_470_2||||689.. 1024|-|336 bp|Glimmer 2.02 orf prediction|S.pneumoniae|670 |WAN01UCZY|ORF
atggatatatatttgaaagaatgttatttggaaaaaactaaccagttccaggcactagaggttttaaaggaaataaaagaattaggaacaaattttcttttcaaattggatgttaatgaagacgggaaggaagtgtcactttacactcaagctcaaaatccggaggatgcaaaaaaaattggcgttctgaataaaaatgatgcgatagacattaagaagtttttagaggcaggatggaatgataataagttgttcctatgtaaagtctgtcgttttgatgaaaaagctgatgaaaataaacgaatcagtgtggcaatctatgtgaaggagaatttg

SEQ ID NO: 6842 - DNA, 231 bp, Streptococcus pneumoniae
  misc_feature (1)..(231): tiling:Spneumo1:WAN024CV9; WAN023JZB 83032_599a||||339252. .339482|-|231 bp|EGAD orf prediction|S.pneumoniae|TIGR4|WA N01UC25|ORF|010
atggatatatcgcaacggcgaatcctactaagaaaatcagaagaaggatcagcggatgtttcttcttttttgtgcctttttttcgtgaacgtctactgttgtccatcctccaccttcacttccttccttgctgctttcagcgccttcaaagccttttccggttgttttttcttcttgcgcaagcgtcgaataatccataaaagaatcacaatcaaaccaactgccacataa

SEQ ID NO: 6843 - DNA, 1365 bp, Streptococcus pneumoniae
  misc_feature (1)..(1365): tiling:Spneumo1:WAN024B3F; WAN023PVC pne10_9||||5442..6806 |+|1365 bp|Type 7C capsule operon, Glimmer 2.02 orf predic tion|S.pneumoniae||WAN01UCKC|ORF|000
atggatgaaaaaggattgaaaatttttctggcagtattacagagtattattgtcattttatcggtttattttcttagctttgttagagagacagaacttgaacgttcttcgatggttatactataccttctccacttttttgtattctattttagttcctatggtaacaatttttttaaaagagggtacctagttgagtttaataatactataagatatatttttttctttgcaatagctataagtgtattaaacttttttatagcggaacggtttagtatctctagaagaggaatggtatacttcttaactttagaagggatatccttatacttgttaaatttcttagtaaagaaatattggaagcatgtgttttttaatctaaaaaatagcaagaaaattttactgttaacagtaacgaaaaatatggaaaaagttcttgataaattgctagaatctgatgaactttcatggaaattggtagcagtaagtgttttggataaatctgattttcaacatgataaaatacctgtaattgaaaaggaaaaaattattgaatttacaacgcatgaagttgtggatgaggtgtttgtcaatcttccaggagagaactacgatattggagaaattatctctaggtttgagacaatggggatagatgtaactgtaaatcttaaagcatttgataagaatttgggtcgcaataaacaaattcatgagatggtaggattgaatgtagtcactttctctacaaatttttataaaactagtcatgtgatttcaaagagaattctcgatatttgtggtgccactattggccttattctttttgctatagctagtctagttttagttccattgattcgtaaagatggcggaccagctatttttgctcaaactcgtatagggaaaaatggtcgacattttaccttttataaattccgttcaatgcgaatcgatgctgaagctatcaaagaacagttgatggatcaaaatacgatgcaaggtggaatgtttaagattgaaaatgatccacgcgtgacaaagattggacactttattagaaaaacgagtctagatgaattgccacaattttggaatgttctaaaaggggatatgagtttagttggtactagaccaccgactatagatgagtatatgaagtatacgccggaacaaaaacgtcgtctaagttttaaacctggaattacaggactttggcagattagtggtagaagtaatattaaaaactttgatgatgtagtaaaattagacgttacttatttagatggttggacaatttggaaagatattgaaattttattgaagactataaaagttgtagtaatgaaagatggagcgaag

SEQ ID NO: 6844 - DNA, 456 bp, Streptococcus pneumoniae
  misc_feature (1)..(456): tiling:Spneumo1:WAN024BV9; WAN023Q9Y contig_1258_6||||1352 ..1807|+|456 bp|Glimmer 2.02 orf prediction|S.pneumoniae|6 70|WAN01UEG8|ORF
atggatgatattttacaagctttagcaaaaatgctaaatatgactgttgatgaagtaagttctttgcttacaacatttaaagggaatgcaccacagatttatgaaatgttcgttaaagaaaagatgttttatgatctcttcagtctttttcaaatcatgtcaattgtaatatttagtatttctgcagtagttttagcagttttaactctcatatattttacatacgatggtggttttgtttattcctatgatatacgtacaggaaaaaccgaggaagaaattaaattagaacgcattgaacggaaaagaaaggacttaaaaataccactaaaaattagttgcatttcatcaagcgcaagtttgataacattagttattgcaattgttttaaaagcaactcttgcacctaattatatattcatcgtgaatgagattttaccaaaattaacgaagaga

SEQ ID NO: 6845 - DNA, 75 bp, Streptococcus pneumoniae
  misc_feature (1)..(75): tiling:Spneumo1:WAN024BG2; WAN023SKI NC_003098.1_1227||||9 55922..955996|+|75 bp|Glimmer 2.02 orf prediction|S.pneumo niae|R6|NC_003098.1|ORF|100
atggatgatgaagcaagtaaacaattaagcgatagccgtttcaagagccttgtaggtgttcagcgcacgagatgt

SEQ ID NO: 6846 - DNA, 111 bp, Streptococcus pneumoniae
  misc_feature (1)..(111): tiling:Spneumo1:WAN024BMA; WAN023NST spn087f01_1||||154..2 64|+|111 bp|Glimmer 2.02 orf prediction|S.pneumoniae|23F-1 |WAN01UCL9|ORF
atggatggaaaaattaaaaattttagtaagatgtttggaattattttattggtattaaattggaatttggttggtaaagttttattttatgtagaattatttttaaatatt

SEQ ID NO: 6847 - DNA, 426 bp, Streptococcus pneumoniae
  misc_feature (1)..(426): tiling:Spneumo1:WAN024BWR; WAN023R8J contig_1535_20||||137 67..14192|+|426 bp|Glimmer 2.02 orf prediction|S.pneumonia e|670|WAN01UDMI|ORF
atggatggaataacaaaagattttataaaaacggctaaactaatgaaacaattatggccccaattgaccgataaagaagctattgatgaagtaaaaaaatatacgaatggcaaaaatactgcaatctttactgaagttgaaggtgacacaattgtaggtctagcactatgttcactcagatttgattatgttgaaggttgtaaatatagtcctgttggattcttagaagggattattgttgacgaggaatatcgtttaaaggatattgctaaaaatctctgtacaaaatgtgaggaatgggcgaaaaataaaggatgtaaggaatttgcaagtgactgtactttaacgaatacggattctataagatttcatctcaatattggatttcaggaggcaaatagaattattcattttaagaaaaaatta

SEQ ID NO: 6848 - DNA, 972 bp, Streptococcus pneumoniae
  misc_feature (1)..(972): tiling:Spneumo1:WAN024BOP; WAN023OFQ pne92_14||||10291..11 262|+|972 bp|Type 48(1) capsule operon, Glimmer 2.02 orf p rediction|S.pneumoniae||WAN01UCEA|ORF
atggatggtaaattaggttcttttttgaaattattaaaaaaagtagatggcttaaggattttaaaacagtattttaagtctggggtactattttttgctatttttcaaatactatctcaaggtttttcaaaaaagtctttagaaattgttcgtaattcagtagataataaaatattagctaaattgaggaaaaaatacctttcctatatagttgaaaataaagatagaattttacgggaatcggctgaacgtcaatcttctagtaaggtgtggatattgtggttacaggggatgaacaatgctcctgagatcgtaaagttatgttataattctgtggttcaaaatctccctgataaagaggcagttcttttaacggaagatacttatagaaattatgtaatctttccaaatcatgttcaacagaagattgataaaggaatcatttctaaaacacacctgtctgatttgttgagattagaactgctaactctgtatggaggtatttggattgatgcgactgtttttatatcttccgataaaatccctgattatatgttgttttctgaattatttttattccaaaaattgaaaccagggttagatggaaatcctaagagaatttcaagttggtatatttgtgcgaagtctaatcatccaatacttgttcttaccaaggagttgttgtatcaatattggtcggaacacaattatatgatggactactttttaatgcatgattttatggaattatcaattgagacatatccacaagaatggaataaagtgattccattctctagttctccttcccatatactgctattaagattatttgaaacatttgataagaggatgctagaatatgtttatcaacaaatttctatacataaactaacttataaatatgatactgatatctgttatactgaaacctacttgaataaaatactaagtgaaggagagattgatgca

SEQ ID NO: 6849 - DNA, 81 bp, Streptococcus pneumoniae
  misc_feature (1)..(81): tiling:Spneumo1:WAN024DNZ; WAN023N6J spn149h02_10||||7149. .7229|+|81 bp|Glimmer 2.02 orf prediction|S.pneumoniae|23F -1|WAN01UCSK|ORF|001
atggattattatagcatgattgtgagatttttcaaggattttgtgaaagttttttgtttttcattttttgtagaatatgct

SEQ ID NO: 6850 - DNA, 78 bp, Streptococcus pneumoniae
  misc_feature (1)..(78): tiling:Spneumo1:WAN024BX5; WAN023RNK contig_1579_14||||111 37..11214|+|78 bp|Glimmer 2.02 orf prediction|S.pneumoniae |670|WAN01UDGX|ORF
atggattctatcaacaattctaatagtaatgataatgctagaaaatcaaactgttcattttcaaaggaagattatttt

SEQ ID NO: 6851 - DNA, 84 bp, Streptococcus pneumoniae
  misc_feature (1)..(84): tiling:Spneumo1:WAN024BPL; WAN023OW0 pne69_15||||11367..11 450|-|84 bp|Type 31(1) capsule operon, Glimmer 2.02 orf pr ediction|S.pneumoniae||WAN01UCDA|ORF
atggatttccttttcacaatcacacctcgctatgctgaaattgtaaatgtcctccaattttatctacaattgtatcaagctggc

SEQ ID NO: 6852 - DNA, 165 bp, Streptococcus pneumoniae
  misc_feature (1)..(165): tiling:Spneumo1:WAN024BLD; WAN023NB4 spn143g10_56||||50303 ..50467|+|165 bp|Glimmer 2.02 orf prediction|S.pneumoniae| 23F-1|WAN01UCOL|ORF
atggcaaatactccaataaaacctggaacagataatcagaaacctggtcgctatgtagaggtaggacctcgtggcggaaaagttactaatggtcataccgcaactatcggaaaaggtgatcggctccctccgacatctgctaaaggcaacggttggaaaaaagtc

SEQ ID NO: 6853 - DNA, 615 bp, Streptococcus pneumoniae
  misc_feature (1)..(615): tiling:Spneumo1:WAN024BMV; WAN023O7E spn029h04_73||||59179 ..59793|-|615 bp|Glimmer 2.02 orf prediction|S.pneumoniae| 23F-1|WAN01UCO3|ORF
atggcaaattcatcagaagcacatggcagagtttacattaaagcatcaaatcttaaaactattgaggattttctgttaattcaagaagaaagaaataagtatgtttattatccaactgatattatagatagccaatctaacatatcagatatagtctcctcaagaacaactcaagaaaatggttattatatatgcaacatgtggtttactgctgagggtagatggtgttttgagaataatatagatgacttttttgattgtactttatttcaagatacagatgatgttcttataagacaaatgaaggaatatgtttgtagtcaagatattcaaatcaaatttgagtatgtagatgctgaagctagtcagaattttgttaaggaacaagaagcaacaattacatataattcaaaaacaaaagatataagtatagatgttaaaaccataaaggacctaccttacacagcagaaaacctaatagtttatggatactatgaatgtgatgaaattgtttccgttcaatttttgcttgattactatgatgattatttaagaggaaatgaattttatttaaaacataaagatggaattgtccctattttagaaaggcaacaa

SEQ ID NO: 6854 - DNA, 510 bp, Streptococcus pneumoniae
  misc_feature (1)..(510): tiling:Spneumo1:WAN024DBV; WAN023YJF AL449929.1_43||||4034 6..40855|-|510 bp|Glimmer 2.02 orf prediction|S.pneumoniae ||AL449929.1|ORF|000
atggcaacaaacaaaagatactattggataaaattaaaagaagaatttttcacagacaaaaggataaaaaggttaaggagaatatctggaggagatacctatacgataatctacctaaaacttctactactaagcctaaaagatgagggcaaactctattatgacggagtagaaagtgattttataaaagagttagcactaaccatagatgaaacagacgatgatgtaatggtaacagtaaattatttaatcaatcaaggcttattagaagttgtaacagaaaatgatgaatactacctaactgaaataccaaacttaatcggatcagaaacagcctgggcagagaaaaaaagaagatacagacwaaataracrgaggacattgtccttaatgagtccaacccatgtccgacaagagatagagatagagaaagatatagagatagataaagagagagagggagagatagataaaaagtccacccccattttttatggagaattcaaaatg

SEQ ID NO: 6855 - DNA, 96 bp, Streptococcus pneumoniae
  misc_feature (1)..(96): tiling:Spneumo1:WAN024AZ8; WAN023R3F contig_1454_1||||398. .493|-|96 bp|Glimmer 2.02 orf prediction|S.pneumoniae|670| WAN01UDT7|ORF|000
atggcaactattactaatgctcttaatattgcgactactgttgctgaagtcttctcattaggaggagccattgcatatggtttagatataataaaa

SEQ ID NO: 6856 - DNA, 318 bp, Streptococcus pneumoniae
  misc_feature (1)..(318): tiling:Spneumo1:WAN024GNT; WAN023M3F 314276_700||||367364. .367681|-|318 bp|EGAD orf prediction|S.pneumoniae|R6|NC_00 3098.1|ORF|100
atggcaagggctgctccctcttggggatcagtaccagcccccaactcatccaaaagtaagagtgaatgttggttgaccttaccaagaatatccacgatattggtcatatggctagagaaggtagacaagctctgctcaatagactgctcatctccaatatcagcaaagatttcttcaaaaataccaacacgacttcccttgtctgctaaaatcggcaatcctgactgggccatgacctgtgtcaagcccagagttttgagcatgatggtcttcccacctgtattgggacctgtaatgacaatagctgttaaatcttga

SEQ ID NO: 6857 - DNA, 234 bp, Streptococcus pneumoniae
  misc_feature (1)..(234): tiling:Spneumo1:WAN024EXM; WAN023J61 84922_2003b||||114261 2..1142845|+|234 bp|EGAD orf prediction|S.pneumoniae|TIGR4 |WAN01UC25|ORF|010
atggcaataaagaactttaccgattttaccttgagtaatcaattctttagcatggtgtacaccgttaaagaagttcatgatgtgaccagccataaagatgacattattttctttacatgcgtcaaccatggctttacaatcttcataagacaatgcaattggcttttcacaaaatacgtgtttgccatgttgagcagctttcacaactggttcacggtgaaggtagctaggtga

SEQ ID NO: 6858 - DNA, 1131 bp, Streptococcus pneumoniae
  misc_feature (1)..(1131): tiling:Spneumo1:WAN024BST; WAN023XXG AL449942.1_4||||3019. .4149|-|1131 bp|Glimmer 2.02 orf prediction|S.pneumoniae|| AL449942.1|ORF
atggcaattagaaaaggtaaagacggtaattgggtagttgatattagcaacggttttgacccaataacactaaagcaacgtagacttgtcagaaagggctataagacgaaaaaagaagctattgaagcagaacrctacttacgaagtgtagagttaaaagaacgcttctatggggctaaaataactatctccatactatatgaactacttaaggaagaagatagcataaatcatcgaaaagcaagctatatcaatacacaagataataattacaacaaacacatcaaagattatttttctatggtcgataatgtcggaaaactaacctatgaagacatctaccaatttagagaacatcttaggcaaaaagtagctaaaaattctgataaaccgttaagcacaaatactattaacaaaatcatgattttactcaaaaaaatttttgatgttggtttgcgaaaaggctattactcctccaatccagcaaaattgataaaaaagttgccaattgaaaaaacaaaaatgcaattttggacagtcaaagaatttcagaagtttttgacactatttgaacccgaagaatacaatatcaaactactctttactgttctattctttacaggattaagacttggggaagctcttgccctaacatggcaagacatcgacttttcaagtaatacaattcatatcacgaaatctgtctatgttaataaaggagtaactcatatcagcacaacaaaaactaaagcaggaacaagaagaattgttatcaataaaaaattaagccaagaattacaagattgggaaaagcgacaaaaacatctattagagcaatttaccaacaatagcctaacattacaagtgtttcaaaatagtcctatcacaattacgaaaaatgctattgaaaagcagtacaagaaaatcattgaacgtgatagcacactaaaaaagatacgcatacacgattttaggcactcacacgcttccctgctgattaaccaaggggaagattatctagttgtaaaagagcgactaggacatgcttctataacaaccacgattgatacctactctcacttgtacccaagtaagcaaaaggatttagctgataaactagatgatttacta

SEQ ID NO: 6859 - DNA, 348 bp, Streptococcus pneumoniae
  misc_feature (1)..(348): tiling:Spneumo1:WAN024BVM; WAN023QI6 contig_1299_8||||3563 ..3910|+|348 bp|Glimmer 2.02 orf prediction|S.pneumoniae|6 70|WAN01UEBN|ORF
atggcacaattgacaatcaatggggtggctgtgaagcctcccaaatcttttcaagtcggtattcaagatatcgatggagagacagggcgtaatgccaatggcgacatggtgcgtgaccgtatcacgaccaaacgcaaactagactgtgaatggggtatgatgactcagggagaaataagtcagcttttacatgctgtatcatctaaattttttgaggtatcttatccagaccccatggatggccaagtcacaaagactttctatgtcggtgataggacagctcctagctatacctttactgagaagcttaaaccttggtctggcgctaaatttaatctggtagagagg

SEQ ID NO: 6860 - DNA, 270 bp, Streptococcus pneumoniae
  misc_feature (1)..(270): tiling:Spneumo1:WAN024DFF; WAN023JPP 83670_1069||||607975. .608244|-|270 bp|EGAD orf prediction|S.pneumoniae|TIGR4|WA N01UC25|ORF|010
atggcacgatctctatttccatactgggtacgatctactgttgattggacaacaattccagttggaatgtgggttaaacgtacacctgttgaaaccttattgacgttttgtccaccggcaccacctgaacggaaggtatccatcttgatatcatcttcacggatttccacttcaatagtatcatccaattctggcatcacttctacagatgtgaaagaggtatggcgacgtttggcagagtcaaatggtgagattcgcactaagcggtga

SEQ ID NO: 6861 - DNA, 231 bp, Streptococcus pneumoniae
  misc_feature (1)..(231): tiling:Spneumo1:WAN024BO8; WAN023OCE spn019g01_19||||17339 ..17569|-|231 bp|Glimmer 2.02 orf prediction|S.pneumoniae| 23F-1|WAN01UCLR|ORF
atggcactttacaaagcaacaaaaaatcttttctttgagcaactcaacatggatgtgattgtcgatgacattattgaacttgatgaagattatgctaaagaagtcaacaagaaactaaaaaatgcttttccagatgtgaaaaatgttttagaacttgttgacaaaaatggaacgcttgaaccagaagatgccccatctgtagatgatgcatctcaggcaactgttgaagat

SEQ ID NO: 6862 - DNA, 894 bp, Streptococcus pneumoniae
  misc_feature (1)..(894): tiling:Spneumo1:WAN024BUS; WAN023Q9H contig_1258_24||||106 99..11592|+|894 bp|Glimmer 2.02 orf prediction|S.pneumonia e|670|WAN01UEG8|ORF
atggcagataatgcaacgaaagctggaacactttttaaaccagaactagtaaaagaattaatcagcaaagtacaaggacgttctgttcttgctaaactctcatctcagaccccgattccatttaatggagtggagcaatttatcttcaaccttgaaggaaatgctcaaatcgttggagaaggtgaacaaaaacaagctggtaaagctaaaatcacttctaaagtaatcaaaccacttaaatttgtttatcaagctcgtatcacagatgagttcaaatacgcttcagaagaaaaacaaatgaacttcttgtcagcatatatggacggattcgctaagaagattgcagaagcctttgaccttgctgctcttcatggtttagagccaaaaacaatgacggatgcttctttccgtacgacaaactcattcgatggattgattactggtaacattgttaactatactgaagaacatatcgatgataatattgatgctgcagttcaaacgattgtagcgaaaggtggcgaagtaacaggtattgccttatcaccaacagctggtcaagcgttggcgaaagttaaggtaaacggagttgttcaatatcctgagttccgctttggtcaaaatcctgattcattctacggtatgaaatcagatatcaacaagaaccttactgtgactggtggcactgctgaaacagaccacgctattgtaggggatttccaaaaccgctttaaatggggctatgctgaaaatattccgatggaaatcattgaatacggtgatccagacggtgctggtcgtgaccttaaagcctataatgaaatctgtttgcgtgcggaagcctttattggctggggtatccttgatgaagatgccttcgctcgtgtgaaagcg

SEQ ID NO: 6863 - DNA, 255 bp, Streptococcus pneumoniae
  misc_feature (1)..(255): tiling:Spneumo1:WAN024GDY; WAN023LT6 314327_1207||||639520 ..639774|-|255 bp|EGAD orf prediction|S.pneumoniae|R6|NC_0 03098.1|ORF|100
atggcagcaatgggcgcagccatacaccagagaccgaagaggatttcattggcaaaggcctgcaaaccaagaggtgttaagagtagactgaaaatattatacacatatcctgaaccaacgaaaaccccaccaaaaaagatagacaagaaagcaagcaagataacatcttttaactgccattttttcaacataaaaaactccttttttaaagaaaagtgggacactcaagaagaccgacctaaatactttgtatag

SEQ ID NO: 6864 - DNA, 171 bp, Streptococcus pneumoniae
  misc_feature (1)..(171): tiling:Spneumo1:WAN024FNY; WAN023OID pne88_23||||19344..19 514|+|171 bp|Type 45(1) capsule operon, Glimmer 2.02 orf p rediction|S.pneumoniae||WAN01UCBS|ORF|000
atggcagtaatttttaaagatgtacttattgaagagaagactgaagaagaaaaacaacatattttatctattttaaatggtgagtataacttatctgatgatgtaagtcgtagattaagacgactgaatgaggaaagtaaacgcttgaaagtgtttagtaaggagacgcac

SEQ ID NO: 6865 - DNA, 1230 bp, Streptococcus pneumoniae
  misc_feature (1)..(1230): tiling:Spneumo1:WAN024FM3; WAN023P0S pne62_14||||10441..11 670|+|1230 bp|Type 33C capsule operon, Glimmer 2.02 orf pr ediction|S.pneumoniae||WAN01UCG7|ORF|000
atggcagttagaaaactatctttagtaaatatactagattatgtatggttaacattaattattttacagtgttattctatatacaccgtaaagtctgaacctcttactttaatcgtgccattattaattacaaccgtaacgttgttgttattcaatttattacgttttactttatcattaaattttatacataaatttatctatatgttagggctgtattttacagcaatagttacattttttttaactaacattggtgctaatgttactatcttaaatattacgaagtactttatattgttccctttattttttttaataaatagcatgtatatgaatagaaagattcttccagcattactttctaaatttgtaaatgtggtagtaattttagcaatgttttccttatttttttggatatttgggacacttctgaatgttgtacatcctacctcgacagtaattaatcagtggtctggtggtcgattaataaatagctactataacctatattttgaaacccaacagatgactttttttgggatccatataatacgaaattcaggaatatttgctgaatctcctatttgggggttaatactaagtatcgcttatgttattgatttacttattttaaaatctgataaaaataataagcgtaatataattattctaacaatgttaagcacgatttcaacggcaggtataagtattatcgggttagctatattatataaaatagctacgaatcgtcataaggcaaaacttttactattccctgtcacagtaggtttaggcttctctttgttactcctattgactgagaaatcagagacagtttcagcaaatcttagagttgatgattataatattggttttatagtatggaagacaagtttgtggataggacacggattgaataatggtatattagcaattcaatcacatattccaacgtttataagaggtgtaggctatagtaacacattatttgttattttggctcagggaggattatttctatttctaatctatttttctcctatgatcctattattatttaagaaaaaaattaattttgattttaaatttgcgattatcctatttttaattttagtaacaacaattatttttgagggaacgtacttatttttctggattttagcattatcttatagctatttgttctttatgattttagataaaaacagtattcaaaatagacaatta

SEQ ID NO: 6866 - DNA, 240 bp, Streptococcus pneumoniae
  misc_feature (1)..(240): tiling:Spneumo1:WAN024G8F; WAN023IR1 85785_2649||||1507096 ..1507335|+|240 bp|EGAD orf prediction|S.pneumoniae|TIGR4| WAN01UC25|ORF|010
atggcatcacgagttgttccagcaacaggactagcaataacacggtcttctcccaagatagcattgatcaagcttgattttccaacgttaggacgaccaatcaagctaaacttaatgacatctggattttcttcctcatattcatttggaagattttctacgatcgcatctagcacatcccctgtaccgattccatggacagatgagataggcaatggttcacccaaaccgagagcatag

SEQ ID NO: 6867 - DNA, 561 bp, Streptococcus pneumoniae
  misc_feature (1)..(561): tiling:Spneumo1:WAN024BO6; WAN023OCC spn019g01_21||||18482 ..19042|-|561 bp|Glimmer 2.02 orf prediction|S.pneumoniae| 23F-1|WAN01UCLR|ORF
atggcatttacaactgaagaactactcaatcttgggttgacagaagaacaggctaagtcagtctttgctttgcgaggaaaagagctgaatgaggacaaatcagccttagaaactatcaaacaagagcgagatagtctcaaatcacagttgcaaaaagcagaggagcaagttgaacacttgaaatcacttgagaatatcagcgctgaacaaaaagatgcgattgataaattgcaagctgaatatgacaagtataaaaacgaagctgcagctgaacttgcacagacaaaaaaggttagtgctatcagtctagctctgaaagatacaaatgctttcaatccagacaaattgatgaaattcattgatgttgatgctatccagttagacgacaacgggaaacctcagattgatgaagtaatcaacggtttaaaagaaagtgatccatatctgttcaaagctgaagaaagtaagcctagccccaatattttacctcaaggtaatccggcaggagagggtacaagtgatgttgatccgttccaagcgattattgacgggtatggcaaa

SEQ ID NO: 6868 - DNA, 726 bp, Streptococcus pneumoniae
  misc_feature (1)..(726): tiling:Spneumo1:WAN024BWK; WAN023R4Y contig_1497_1||||30.. 755|-|726 bp|Glimmer 2.02 orf prediction|S.pneumoniae|670| WAN01UDPJ|ORF
atggccgccgttaacttacgtcatattgaaatttttcatgcggtaatgaccgccggaagcctgactgaggcggcacacctgctacacacctcacagccaaccgtcagccgcgaacttgcgcgctttgagaaggtgatcgggctgaaattgtttgagcgcgtacgtgggcgattacatcctaccgtgcaaggactgcgtctgtttgaagaagtgcaacgatcctggtacggactggatcgcattgtcagcgccgcagaaagtctgcgcgagtttcgccagggagaactgtctattgcctgcctgccggtcttttcgcaatcttttttaccgcagctcctgcaaccctttctggcacgttatcccgatgtcagcttaaatatcgtgccccaggaatcaccgctacttgaagagtggctctcggcccagcgtcatgatttaggactcactgaaacgctccatacgcctgcgggaacagaacgtaccgaattactctctttagatgaagtgtgtgtgttacctccgggtcatccgctggcggtaaaaaaggtattaacgccggatgattttcagggtgagaactacatcagcctttcccgtactgacagctatcgccagttgctggatcagctatttactgaacatcaggttaaacgacgcatgatcgtagaaacccacagcgccgcgtcagtctgcgcaatggtacgggcgggggtaggtattcggggt

SEQ ID NO: 6869 - DNA, 231 bp, Streptococcus pneumoniae
  misc_feature (1)..(231): tiling:Spneumo1:WAN024ASW; WAN023LYJ 314346_938||||490216. .490446|-|231 bp|EGAD orf prediction|S.pneumoniae|R6|NC_00 3098.1|ORF
atggcgatggttgaaatcgacagagccaacgatcttatccgttcctttgacgacaatcccgtagcctgctgggagattttccttttgattacgctccggaagaatgtgctccagataataaatctcatcttccaaggtcttgactggaggaaaacctgctggataggcgacctctggcaaactagcatagtcaaagatatcctcagcatccgccacagtacggactcgtaa

SEQ ID NO: 6870 - DNA, 267 bp, Streptococcus pneumoniae
  misc_feature (1)..(267): tiling:Spneumo1:WAN024DUN; WAN023I6H 86946_3512||||2003235 ..2003501|-|267 bp|EGAD orf prediction|S.pneumoniae|TIGR4| WAN01UC25|ORF|010
atggcggcattcaagaggctctttaagagagttacgggttttaaactattaagccttctccaattgcaagagggtttcaatctctgccagggtgctggcttgcgaaatggctccacggagtttggcagcgccagatgttccacggagatagtgaggagcgagaccgcggaattcacgaactgcgacgttttctcctttgaggttaatcaatcgtttcaagtgttcgtaggcgatcttcatcttgtcttcaaaggtcaaatcaggtag

SEQ ID NO: 6871 - DNA, 1635 bp, Streptococcus pneumoniae
  misc_feature (1)..(1635): tiling:Spneumo1:WAN024C37; WAN0246MX 230964-75-7_1||||12.. 1646|+|1635 bp|Glimmer 2.02 orf prediction from Patent Seq uences|S.pneumoniae||WAN0246W3|ORF
atggcggctaaagacgtaaaattcggtaacgacgctcgtgtgaaaatgctgcgcggcgtaaacgtactggcagatgcagtgaaagttaccctcggcccaaaaggccgtaacgtagttctggataaatctttcggtgcaccgaccatcactaaagatggtgtttccgtagcacgtgaaatcgaactggaagacaagttcgaaaacatgggtgcgcagatggtgaaagaagttgcctctaaagcgaacgacgctgcaggtgacggtaccaccaccgcaaccgtactggctcagtccatcatcactgaaggcctgaaagccgttgctgcgggcatgaacccgatggatctgaaacgtggtatcgacaaagctgtcgctgctgctgttgaagaactgaaagcactgtccgtaccgtgctccgactctaaagctattgctcaggttggtaccatctccgctaactccgacgaaaccgtaggtaaactgatcgctgaagcgatggacaaagtcggtaaagaaggcgtgatcaccgttgaagacggtaccggtctgcaggacgaactggacgtggttgaaggtatgcagttcgaccgtggctacctgtctccttacttcatcaacaagccggaaactggcgcagtagaattggaaagcccgttcatcctgctggctgacaagaaaatctccaacatccgcgaaatgctgccggttctggaagctgtagcgaaagcaggcaaaccgctgctgatcatcgctgaagatgttgaaggcgaagcgctggcaactctggttgttaacaccatgcgcggtatcgtaaaagtcgctgcggttaaagcacctggcttcggcgatcgtcgtaaagcaatgctgcaggatatcgctaccctgaccggtggtaccgttatctctgaagagatcggtatggagctggaaaaagcaactctggaagatctgggccaggcgaaacgcgttgttatcaacaaagataccaccaccatcatcgatggcgtgggcgacgaagctgcaatccagggtcgcgtgactcagattcgtcagcagatcgaagaagcaacttccgactatgaccgtgaaaaactgcaggagcgcgtagcgaaactggcaggcggcgttgcggttatcaaagttggtgctgcgactgaagttgaaatgaaagagaagaaagcccgcgttgaagatgccctgcacgctacccgtgctgcggtagaagaaggcgtggttgctggtggtggcgttgcgctgattcgcgtagcgtctaaaattgccggcctgaaaggtcagaacgaagaccagaacgtaggtatcaaagttgcgctgcgcgcaatggaatccccactgcgtcaaatcgtactgaactgcggcgaagagccgtctgtagtggctaacaccgtgaaagccggtgacggtaactacggttacaacgctgcaactgaagaatacggcaacatgatcgacatgggtatcctggatccaaccaaagtaactcgttctgctctgcagtacgcggcttctgttgcgggtctgatgatcaccaccgagtgcatggttaccgacctgccgaaaggcgatgcacctgacttaggtgctgctggtggtatgggcggcatgggcggaatgatg

SEQ ID NO: 6872 - DNA, 690 bp, Streptococcus pneumoniae
  misc_feature (1)..(690): tiling:Spneumo1:WAN024BSO; WAN023XMZ AX194109.1_1||||1..69 0|+|690 bp|Glimmer 2.02 orf prediction|S.pneumoniae||AX194 109.1|ORF
atggcgtataaatatttagtgattgtagaatcacctgcaaaagccaagacaattgagaaatatcttggacgaaactataaagtaatggccagtgttggccatataagagatttaccgaaaagtaaaatgggtatcgattttgaaaacaattatgaaccccattatatttctatacgcggaaaaggcgatgtcatcaaaagcctgaaagccgcagcaaaaaaagctcaaaaagtttacttggcaagtgacccggatagagaaggagaagcgattgcttggcatttagcgtacctacttgggttggatctgaaagaaaaaaatcgggtggtcttcaatgaaatcacaaaagacgcagtcaaagcagcttttaaggaaccaagaacgatcgatgtagatttagtagatgcacagcaagctcgtcgtaccttagacagaatcgttggttattcgatcagtcctattctctggcgtaaggtcaagaaagggttaagtgcaggacgtgtccaatctgtcgctttaaaaattattattgaccgtgaaaaagagatccgagaatttgttccagaagaatattggagcatcgacggtaattttaaaaaagctcgcaagaaattcaaagcaaatttctggggaatcgacggtaagaaaaagaaattaccagatgcacaaagtgtaaaaagaagtcactgc

SEQ ID NO: 6873 - DNA, 93 bp, Streptococcus pneumoniae
  misc_feature (1)..(93): tiling:Spneumo1:WAN024DOB; WAN023T0V BD003737.1_4||||1536. .1628|+|93 bp|Glimmer 2.02 orf prediction|S.pneumoniae|ATC C55840|BD003737.1|ORF|000
atggcgttcttcaagcgagcttgggatagtgggagccaagtagggcaaaataaagggctggcgctttctgtagtattttcaaaaacaatgaag

SEQ ID NO: 6874 - DNA, 303 bp, Streptococcus pneumoniae
  misc_feature (1)..(303): tiling:Spneumo1:WAN024BTS; WAN023Q28 contig_1220_25||||122 42..12544|+|303 bp|Glimmer 2.02 orf prediction|S.pneumonia e|670|WAN01UEKO|ORF
atggctaaaaatattttaatggatctagcatttgagaatcttcacaaatgtatgggaatttctgattggaaagaatctgatgaagtaattcttgttagttcagctaataaagaacaaattgagtcagatgaaagttaccattcagccggaaaatgtaattatcttggcaaacgaatttgtatcttctgtgaacaagtgaagagaaataattacatcactctacataaatctatgttagaaaaaattattaagacaatggaatcatttacagatgcagaacaaatgaagggagaagaaaatgat

SEQ ID NO: 6875 - DNA, 81 bp, Streptococcus pneumoniae
  misc_feature (1)..(81): tiling:Spneumo1:WAN024BQZ; WAN02400X |||CAA29083.1|||81 bp ||S.pneumoniae||X05577|ORF
atggctaaaatgagaatatcaccggaattgaaaaaactgatcgaaaaataccgctgcgtaaaagatacggaaggaatgtct

SEQ ID NO: 6876 - DNA, 729 bp, Streptococcus pneumoniae
  misc_feature (1)..(729): tiling:Spneumo1:WAN024BSW; WAN023XXJ AL449942.1_1||||1365. .2093|-|729 bp|Glimmer 2.02 orf prediction|S.pneumoniae||A L449942.1|ORF
atggctaaattatacgcaatatctgatatacatggatacttggatgaattcagagacgctctcaataaagtaaatttaaacgataaagataatcgcctatttttactaggagattatcttgataatggacttcaatcttttcaagtcatttccaaaataatcgaacttgaggaagtttatcctaatcaaattattactcttctagggaatcatgaagaatggttttatgattggttgattttagataagcctactgcttcagcatttccagaaacaataaaaagcttcttctctccagaggaattgaactatatttttaaatcgaatgctaacaactttgaaacaggtgttagaaatgaaattaaaaataatatcaaattcaatccatttataaactggtttaaaaaacgatatagggataaacgctattatgaaactgatacccaaatttttgttcatgctggcattgatgaagaagccggaaagctttggaaagaactaacgagttcagagatatttacaaacaaatttcctattaccactggtagatttcataaagctattatttcgggccatattgcttcttgggaagtagctaaagatagaagatacctgggtaagatttactatgatagtaaaagtcattattttattgatggagatgtaacgaatagcaaaacaatacctattctttgctatgatacaattacccaaaaatatcactttcta

SEQ ID NO: 6877 - DNA, 1392 bp, Streptococcus pneumoniae
  misc_feature (1)..(1392): tiling:Spneumo1:WAN024CCC; WAN0244QJ spr0103|argH|15902147 |NP_357697.1|110545..111936|+|1392 bp|Arginine succinate l yase|S.pneumoniae|R6|NC_003098.1|ORF|100
atggctaagaatacaaaattatggggtggtcgctttgaaggtactgtcgaagactgggtagagcgctttggtgcgagtatatcttttgaccagaaattagctaaatttgatgtgattggttctttagcccacgttcagatgttgggtcagacgggcattttgagtttggaggagtcagaaaagattcaagtaggcttgaaagagcttttagaagagctagaggcaggtcaacttgactttgatatcgcaaacgaagatattcatatgaatatggaagtgttgctgacagaaaaaattggtccccttgcagggaagttacatacggctcgttctcgaaatgaccaagttgcgacagatatgcacttgtatctcaaggaacaactaggctatgtcctagataaactggctcatcttaagggtgttttattagacttggcggaaaatcatgtggcgacgatcatgccgggctatacccatctgcaacatgcccagcctattagttttgcctaccacctgatggcttactacaatatgtttcaaagagacagtgaacgttttgaatttaaccagaagcatacagacctatgccctttaggtgcggcagctttggcaggaacgactttccccattgatcgccaattgtctagcgatttgctggagtttaagcaaccttatacaaattctttggatgctgttagtgaccgcgattttatcttagaatttctatcaaatgccagcatactcatgatgcatatgagtcgtttttgcgaagaaatgattaattggtgtagttttgagtaccaattcattaccttgtcagatacgtttacaataggttcctctattatgccccaaaagaaaaatccagatatggctgagttgattcgaggaaagactggcagagtttatgggcatttgtttggactgttgacagtcatgaagtccttgcctttagcttataataaggatttgcaagaagataaggaaggaatgtttgatacggtcgaaacgattttaaattccctcgatgtgttggcaggtatgttatctagtttgcaggtaaacaaggaaaaaatgcaagaatcaacagagaaggacttttcaaatgcaactgagttggcagattatttggcagggaaaggcttgccatttagagaagctcatgaggttgtgggaagattagtgctagactctatcaagtctgctaaaaatcttcaagattggactttggaggaattacaaacctatcattctctcattaccgaggatatctatgtctacttgcaacctaaaactgctgttcaaagacgaaattccttgggaggcacagggtttgaccaagtcgaataccagattgcagtcgctaagaaagcgaatgaagctaaaaagtga

SEQ ID NO: 6878 - DNA, 162 bp, Streptococcus pneumoniae
  misc_feature (1)..(162): tiling:Spneumo1:WAN024BXR; WAN023RVL contig_1609_59||||469 14..47075|+|162 bp|Glimmer 2.02 orf prediction|S.pneumonia e|670|WAN01UDCD|ORF
atggctacaatcagtttaacacgtgatataaaactaacaaacgaagatgctctaaaaattcttaatcataaaccatctaaaaagctacaagccgtcttgaaatctattgaatcacaggacgctaccgctccaacgaaaaataaactcatttcaaagtatctg

SEQ ID NO: 6879 - DNA, 1410 bp, Streptococcus pneumoniae
  misc_feature (1)..(1410): tiling:Spneumo1:WAN024BUU; WAN023Q9J contig_1258_22||||873 3..10142|+|1410 bp|Glimmer 2.02 orf prediction|S.pneumonia e|670|WAN01UEG8|ORF
atggctagaaagaaacttggcaatcagaatcctactcaatcggtaattttaaagtacgtcaagaaaaattctaaggcgaaagaagcgatagaaatctacgagcggactggtctttcttgctacgcttggcaaatcaacttgttgacatccattatggctgttgataaggacggtttgtgggtgcatcaaaaatttggctactctattcctcgtcgtaatgggaagtccgaactcttgtacctttttgaactttggggcctgcataatggactaaatatcctacacacggcccaccgaatatctacctctcattcctcttttgaaaaggttaaacgttaccttgaaaaaatgggatatgtggacggtgagcactttagctctatacgagccaagggacaagagcggattgaactgtttgacggcggtgggattgtacaattccgtaccagaacatccaatggtggtttaggggaaggttttgaccttcttgtaatcgatgaggctcaggaatatacgactgagcaggaatcggctttgaaatatacggtaacggatagtagcaatccgatcacaatcatgtgtgggacgcctcctacacctgtttcaaatgggacggtattcacaaactaccgtaagacttgcctatttgggaaaggaaaatactcaggttgggcagaatggtcggtttctgaggaaaaagagattgatgatgtcgaagcctggtataactccaatccctcaatgggttaccatttgaatgagcggaagatagaagctgaacttggtgatgataagctagaccataatgttcaacgtttgggttattggcctgaatacaaccagaaatctgctatttcggaaacggaatggaatgagttgtgtgtggactctatgcctgatttatcaggtaagttgtttgtcggagttaaatatggtcaagatggcgcaaacgtggcgttaagtattgctgttcgtacggtagatgagaggatttttgttgagacgattgactgtcagtcagtccgtaacgggaatgactggatcttggattttgtcaagcgtgccgatgtggctactatcgtagtcgatggggcaagtggtcagaaaatccttgatgaagagttgaaaaaggaacgcatgaagagcgtgatattgcctacggttaaagaaatcatcgtggctaactctatgtgggaacaagggatttatcaaaaaaccttgtgccatgctggtcaaccgtctttaaagaaaatcacaaccaactgtgagaagcggaacatcggttcaaacggtgggtttggctatcgctcgcattttgcggatatggatatttctttgatggatagcgccttgcttgcgcattgggcttgtatgacaactaagcctaagaaaaagcaaaaaatcagttat

SEQ ID NO: 6880 - DNA, 306 bp, Streptococcus pneumoniae
  misc_feature (1)..(306): tiling:Spneumo1:WAN024FBX; WAN023IJU 86164_2930||||1662071 ..1662376|+|306 bp|EGAD orf prediction|S.pneumoniae|TIGR4| WAN01UC25|ORF|010
atggctagcactgcagaagaaagtgccccaatcaaaatcaaactggcattattacggtcaattcccaaaagaataaaggaacctagtccccctgcaccaatcaaggccgccaaggttgccgtaccgataatcaaaacagctgccgtccgaatcccagacatgataacaggcatggcgagtggaatttcaaatttcttgagacgttcccatctggtcatcccaaaggcaatcccagcctcttgcaggttcggatcaattcccttcagcccagtgatagtattttgcaaaatagggaaaatcgcataa

SEQ ID NO: 6881 - DNA, 726 bp, Streptococcus pneumoniae
  misc_feature (1)..(726): tiling:Spneumo1:WAN024BLY; WAN023NNP spn097d12_35||||31328 ..32053|-|726 bp|Glimmer 2.02 orf prediction|S.pneumoniae| 23F-1|WAN01UCN2|ORF
atggctatagttgaaattataaatctaacaaaaagctttaaagatattgaagttattcataacacttcattttatttaaataagggaaaagtatatggttttgttggaccaaatggggctggaaaaactacaattatcaaaatgattctagggattttaaaaccagattctgggaaaataactatttttaatcaaaccgtagaacagaattccgaaaatatattatctaggataggattagttttgggaccttcattttatggtcatcttgatgcttataaaaatttgaagttaatagcaaatatgaaagggcttagtttagatactgaaagacttaatgaatatctatcaatggtaggattaaaagatgttaaaaagaaaaaagtgaaaaatttttcaatgggcatgaaacaacgtctaagtatagctgcatcattgttaggtagtccagaaatattaatttgggatgaaccaatcaatggacttgatccacagggtgtaattgaaattagaagtttaatccgttttctacaggagaaaaaaggtattacatttttaatatcaagtcatattcttagtgaactggataaagtgatatctgatattataattataaattatgggaaagttgaattttttggttcttgccactaccttttacaaaagtataattgtcgaaatctggaagaagcctacttagcttgtttagctggaggtgaatatgat

SEQ ID NO: 6882 - DNA, 231 bp, Streptococcus pneumoniae
  misc_feature (1)..(231): tiling:Spneumo1:WAN024D53; WAN023K9F 82359_84||||44032..44 262|-|231 bp|EGAD orf prediction|S.pneumoniae|TIGR4|WAN01U C25|ORF|010
atggctcaatttcttagtcaagaaatctcccaagaattggattgcaaagataatcaaaatgataataatggttgccaagatggtcacatcgtgattgtagcggttaaatccataagcgatggctacgttaccgataccaccagctccaaccgcaccggccatagctgtttccccaacaagggaaatcaaggtcacagtcgtcacacggatcaaatctggaagaccttctga

SEQ ID NO: 6883 - DNA, 81 bp, Streptococcus pneumoniae
  misc_feature (1)..(81): tiling:Spneumo1:WAN024C2W; WAN023O2H spn047b01_36||||30665 ..30745|-|81 bp|Glimmer 2.02 orf prediction|S.pneumoniae|2 3F-1|WAN01UCNY|ORF
atggctcgtggtattatctgggtctgttcaggggcaatgaaaacaggctggtaccaggtctctggtaagtggtattattct

SEQ ID NO: 6884 - DNA, 720 bp, Streptococcus pneumoniae
  misc_feature (1)..(720): tiling:Spneumo1:WAN024BMU; WAN023O7D spn029h04_74||||60118 ..60837|-|720 bp|Glimmer 2.02 orf prediction|S.pneumoniae| 23F-1|WAN01UCO3|ORF
atggctgaatcggcattaattaatcttatcaatttttcaaaagagaatgaagaattaacaaatttagttagtggacatgcgtcaaaaagagaaaaagcaacaatctccaaagatggactgattcaggctagatcaattgagaactttattgataactatgccttatctgattttgatttttcaacgattaaagaaaaatgtgtattcattaaaatcaataatagctttcaagctgatgacactacagaagatatttatcacaatgtacgtggtgtttggaatatttctgaatcacgtaaaaaagacttagagtatgctcttgccttataccgtggtgtttgtgttggtgtttataaaattcaaggttggaagaaagcttacgaacattcctcagagtatcctttcccaacaaggaaagaagggggtaaaatagaaactagtgaagaaactattgtgaaatattctaatatagaggatttaaaaaaagattatccagaattatataaacgcagtttctctaattcagaatttccccagaaatctttagataaatggagaaatagaagtttcttttatggcaactgggatggatcagatgtacctcaacaccttgctcaatgtctaaataagcgaattattaacatccctaaattcactaaatctgttaaagaatttaaatctattgataatcaagcatctgttatctataatgatcttaaa

SEQ ID NO: 6885 - DNA, 1640 bp, Streptococcus pneumoniae
  misc_feature (1)..(1640): tiling:Spneumo1:WAN024BOF-5; WAN023OCN spn019g01_9||||1093 7..14215|-|3279 bp|Glimmer 2.02 orf prediction|S.pneumonia e|23F-1|WAN01UCLR|ORF
atggctgatggaaaagtgaccatcgttgtcgatgtggatggtaataaagtcaaggttctaaacgatgagttagataaagcggcacagaaaggtgacagagggagcgattctctaaagaagtttgcgattggtggtgctgcttttaaactggcatctaaagcggtagatcttctaacagattccttgggcggagcgattcaacgttttgatactcttgaaagttatccaagagtgatgcaagctatggggcatagtacagaagatgtcacgcgctcaactaagaaactagcggcaggtattgagggtttgcctacgactttaaatgaagtggtaggcacagctcaacgccttacctcgattactggcgatataaacaaatcaacagatttaacacttgctcttaataatgcctttcttgcctctggatcttctagtgctgatgcaagccgtggtttacaacagttcagtcagatgttatcagctggtaaggttgacatgcaaagttggaaaacgttacaggaaaccatgccttatgctttgcaaaagactgctgattcattcggttttgctggccaatctgctcagaatgatttctattctgcattaaaagaggggcgtatcactttcaaccaattttcaaagaaattagttgagctaaacggtggcgtgggtggtttcgctgagcttgcaaaatcaaacagtaaagggatccagacatcttttgggaacttaaagaatgcggttgttaaaggtgtagctaatactatcaaggctcttgacgatttaacaaaggcagcaacaggtaagacgattgctgagaacttcgatgcattgaaagtaatcatcaatgcggcttttggtgttattgtcaacgtaattaaagctagcacacctgtttttcagactttgtttagtattttgggtactggagcttctgtaatctcatctttgacaccagttattattagtttggtttctgctttggtggctatgcgtgccgctaatgaagctataacagcaacaaaaaacttaattaattcctggcagacattcaaaacaacagccacaggagcgattcagatcatcaatctaatgacagctgcccaagctacttgtggctcagtaacaaaggctcaactggttgctaacttggccaataacggagctttgacagcatccaatttgctttatggggttctaactggctctatcagcttacagactgctgctactattgctgcgactgctgcaactactgcatttaaagcagcactgaccgctttaactggcccgattggtttggttgttgctggtgtaggtcttgctgttggggcattggtagggttgtggcaatggctaactgccgagagtgaggagaccaaacgcctcaaatcagaacaagaggagttagtcaagagtacggatcaattaacggattctgttaaacaaagcgcaaaagaacgtcaaaaaaatcttgagtctgtaaaaggtaatacagaatcttaccaaaaattggctgacgaaattgtccagttatcacaaaagacaaataagacagcagcagacaagaaaaatctcaagaaaaagattgatgctttaaatgcctctgttagtggattgaatctagtctatgacaaaaa

SEQ ID NO: 6886 - DNA, 705 bp, Streptococcus pneumoniae
  misc_feature (1)..(705): tiling:Spneumo1:WAN024BNO; WAN023OBN spn019g01_49||||33640 ..34344|-|705 bp|Glimmer 2.02 orf prediction|S.pneumoniae| 23F-1|WAN01UCLR|ORF
atggctgatttaacatttgcagaattacagcgaaaaatgcaaatcgaaaaacaaacgaaacagggagtgaaatatccgtttagaaccgcagaggacataaataataaatttaagtctttggatagcggttggagtgtatcatttccagaagatgacatcattcaaaaaggtgacaaactgtattataaagcggtagctgttgttaaaagagaaagtgatggcacgattgaaaaagctattggatgggctagagaagaagatgtaccaatttttcacacacaaaaaggggatgtgaaacagatgcaagatccacaatggacaggtgcggttggttcttatgctagaaaatatgctttacaaggtttatttgccattggaggtgaggatgttgatgagtatccagtagaagaaagccaagagcaaggacagaataatcagcaacagaaaccaaacaatcagcaagcccaaggacaaaatcaagtaaggtatattgacaacactcaatatcaagaaattaacgaccttataaatgatattgcaaaaattaaagggatgccgttcgatacgcttgctaactatgtactatctgaaaaattaaaaggtttacaagattttcatagagtacaagttggtgactacgaggtattgaaaaactatttaactgaacaactagcaaaggcaaaagcaaaagcaaagagaggtaat

SEQ ID NO: 6887 - DNA, 495 bp, Streptococcus pneumoniae
  misc_feature (1)..(495): tiling:Spneumo1:WAN024C3L; WAN0246QP 203668-57-9_1||||167. .661|-|495 bp|Glimmer 2.02 orf prediction from Patent Sequ ences|S.pneumoniae||WAN02470E|ORF
atggcttatatcgagtataaacagcgtgggaagaaaaggctttggtcgttttctatacgtgagaggagcaagagcctactccataaaagcggatttaaaacaaaacgagaagctaaaatagaagcggagaaagttcttcataagttaaatactgggagtgtcttaagctctagtatgactttatcggagctttataatgaatggcttgatttaaaaattttacctagcaatagaagtgtagttactaaaaaaaaatatcttatgagaaagaaggtcatcgaaaggttatttggaaataagcctgtatcacaaattaagcctagcgagtatcaaaaaattatgaatgagtatggagagactgtatcgagaaatttcttaggaagattgaattctagtattcaggcaagtatacagatggctattgctgataaggtgataatagaggattttactgcttatgttgagttgttctcttctaagagtggacacaaaggt

SEQ ID NO: 6888 - DNA, 129 bp, Streptococcus pneumoniae
  misc_feature (1)..(129): tiling:Spneumo1:WAN024EWF; WAN023NU0 spn068b06_18||||20112 ..20240|-|129 bp|Glimmer 2.02 orf prediction|S.pneumoniae| 23F-1|WAN01UCUD|ORF|001
atggcttatcagtctcatagtcgtgttgacttggatcgtaaaccttcaagaccttcttacgttccaaaattggatctgggattggtaccgctgaaagcaaggcttgagtatatgggtgaattggattgt

SEQ ID NO: 6889 - DNA, 210 bp, Streptococcus pneumoniae
  misc_feature (1)..(210): tiling:Spneumo1:WAN024BUR; WAN023Q9G contig_1258_25||||116 01..11810|+|210 bp|Glimmer 2.02 orf prediction|S.pneumonia e|670|WAN01UEG8|ORF
atggctttataccgtgatacgaaaacgggcgtgattatctctgctgagagtgttcttggcggagattgggtgcctgttgaagatacggcgccaagcggagcggatttgaccgtagcggaattgaagtctagtttggatgaattgggcgttgattacgataagggttcaaaaaaatccgatttggtagccttgtacgaggaaaataagagt

SEQ ID NO: 6890 - DNA, 861 bp, Streptococcus pneumoniae
  misc_feature (1)..(861): tiling:Spneumo1:WAN024G6Z; WAN023YJS AL449929.1_30||||2996 1..30821|+|861 bp|Glimmer 2.02 orf prediction|S.pneumoniae ||AL449929.1|ORF|000
atgggaaaaactatgaaatcaaaacttggcatcacacttagaaaagttcgtaaaggcaaacaaatcagtctatgctctgttgctgatgagcatctttcaaaatygcaaatatcccgatttgaacgtggagagtcagagatatcatgtatccsactgatcaatattttagacmaattacacattactttggatgagtttcttattttacacgatgaagactatacaaaaactgagtcatttgccaacttaatacagtatatccgtaaacaatattcattacaaaacatcaataatatacaatctctactttcggattcctcaaattacactttagattcttttgaaaaaacaatggtaaaatccattttacacacaatggattcaagaatcattccatcagatgatgaattacttcaactagcagattatctctttaaagttgaaaaatggggttattatgagattattttattaggtaactgtgtacgaacaattaactacaactcctacttcttattaactaaagaaatgttaaataattatatttactcatctctaaataaaacaaataagcggattgtcactcagctagctataaattgtttcattctcagcatagataaagaagaattttctaattgctcttatttaattaatgagataaagggattgttagagaatgaattaaacttttatgaacagacagtttttctctatgcaaccggttactatgaatttaaacgtcaattaagtagtggtattgaaacaatgaaacaagctatacaagttctcgatattttaggagaagacaagttaaaattacactatactagccattttgataaacttgtaaacaataaa

SEQ ID NO: 6891 - DNA, 228 bp, Streptococcus pneumoniae
  misc_feature (1)..(228): tiling:Spneumo1:WAN024BUW; WAN023Q9L contig_1258_20||||845 2..8679|+|228 bp|Glimmer 2.02 orf prediction|S.pneumoniae| 670|WAN01UEG8|ORF
atgggaaacacgatttattttttagagaaaaagtctagtctggagcgcggtgcttccgtgaaagaaattttggaggaaaatcttgaggctagtcatgactacacttcggtgttggtagtttctttggataaagatggtgagataaatcttggctatagctgggatagtagtttgcaggcattgggaatgctagatgttgctaaaaactatattttaaacgtaatcaat

SEQ ID NO: 6892 - DNA, 426 bp, Streptococcus pneumoniae
  misc_feature (1)..(426): tiling:Spneumo1:WAN024BW7; WAN023R0C contig_1407_8||||3981 ..4406|+|426 bp|Glimmer 2.02 orf prediction|S.pneumoniae|6 70|WAN01UDX7|ORF
atgggaaagaaacatcaagtagtaaaatttaaagatatagctgaaaaattgccagaattagagggtaagcgtctagaagaaattactaaagtattaggttaccgtaacctagagagttgcagaaccaacctctgcaagctgaaacaaaacaatcgcctagattttacactagaaaaaggagtttatagcaagttcgcactcttggacggtacggtaaaagaggaattggaagataaagaattgtcagaacgtgggcgctatttgaagagcgtagaccgctacaaggcaatgctgaatgctttttctatcgcctttgatagtacggtcaaggcggaaaccagacaaaaagcagaacacgacggcttgaaagccttggacagaatcccagataaacattacgccctactttatgacatgatggagggg

SEQ ID NO: 6893 - DNA, 87 bp, Streptococcus pneumoniae
  misc_feature (1)..(87): tiling:Spneumo1:WAN024BM3; WAN023NNS spn097d12_31||||29570 ..29656|+|87 bp|Glimmer 2.02 orf prediction|S.pneumoniae|2 3F-1|WAN01UCN2|ORF
atgggaatctatagcttttttgtgactgagaactattttatctcagacttcttcaacacaccttattattgggcacttacggaaggt

SEQ ID NO: 6894 - DNA, 96 bp, Streptococcus pneumoniae
  misc_feature (1)..(96): tiling:Spneumo1:WAN024BQT; WAN023PTV pne12_16||||13283..13 378|+|96 bp|Type 8 capsule operon, Glimmer 2.02 orf predic tion|S.pneumoniae||WAN01UCK9|ORF
atgggacgcttagcagattatacatattacgatatgcatgttgtgattgaacgagcgctcgaagttatagaaaaagagtttgaaaatgacaaaaat

SEQ ID NO: 6895 - DNA, 183 bp, Streptococcus pneumoniae
  misc_feature (1)..(183): tiling:Spneumo1:WAN024GIM; WAN0244FY spr0484||15902528|NP_ 358078.1|486366..486548|+|183 bp|Hypothetical protein|S.pn eumoniae|R6|NC_003098.1|ORF|100
atgggactcataaaaactctagctaaaatttatggtaattactttttgaccgtgcaaggtgtaaaagtaatgaaaacgataaagaaagatgataatgccgttgtcggtctggggaaactttttattgccgacaagttaatggatacggctcggtggctcattaagccagaggagagagaatga

SEQ ID NO: 6896 - DNA, 195 bp, Streptococcus pneumoniae
  misc_feature (1)..(195): tiling:Spneumo1:WAN024EVK; WAN023U87 AX571764.1_297||||233 066..233260|+|195 bp|Glimmer 2.02 orf prediction|S.pneumon iae||AX571764.1|ORF|000
atgggactttttttctacaataaaataggctccataatatctatagtggatttacccactacaaatattatagaacctttattttcagggttttatttctatcattttattttactttcatttggtgggagaatatttgaaaaaaagaaaggtagtttaacctatgaaaaaatcactaaaaatttttgctacatc

SEQ ID NO: 6897 - DNA, 393 bp, Streptococcus pneumoniae
  misc_feature (1)..(393): tiling:Spneumo1:WAN024C36; WAN0246MS 330028-56-3_1||||150. .542|-|393 bp|Glimmer 2.02 orf prediction from Patent Sequ ences|S.pneumoniae||WAN0246MK|ORF
atgggagatgtccatgaagcaccagtgtcgctgtggctacctgcagctttgccgggctttatgtctctgccgctggtatttgtgctcgggctctttgatgccccgatcgatgatgcagtggctgccgtgggattggagcatcattcgcaccttgccctctggcacgggctcaacgttcctttccttatctcgctagtggtcctcatcctcggtattgccggtatctttgcccgcaagaagatgtgggcaagctttgaagcccacgagttcatgccgcgcagcggcaatgatttgctgtactccttgatgaagggctgctcccagttggggcgcgtcctaggcaagatgtccgactcgcataatccatcccgcacatgctgccgattgtcattt

SEQ ID NO: 6898 - DNA, 105 bp, Streptococcus pneumoniae
  misc_feature (1)..(105): tiling:Spneumo1:WAN024B7D; WAN023S3S contig_1629_2||||2472 ..2576|-|105 bp|Glimmer 2.02 orf prediction|S.pneumoniae|6 70|WAN01UD9I|ORF|000
atgggcccatatcaaaaagcacctcaaaaaggtattaccaagttgttgcaataccttttacgaggctcttttgtcctgctcttgtttcaattgactatagcagat

SEQ ID NO: 6899 - DNA, 360 bp, Streptococcus pneumoniae
  misc_feature (1)..(360): tiling:Spneumo1:WAN024DKS; WAN023K63 82598_266||||139986.. 140345|+|360 bp|EGAD orf prediction|S.pneumoniae|TIGR4|WAN 01UC25|ORF|010
atgggctcttctgccttagtttcagttgttactggactagtagaagtagttggctcacttgaacgatcttgtccagtttgtggtgctggatcggctgggcttgcagcaggtttttcttctgttttctctagggaagcgtttgcatttccaggtgaagaaatatcactttcgttcttaccagagccagctgctgtatcagtaagaggttgggcaagggtggttgtatttctgttgttgggttcgttagtggttggtgtactttcgtcggatgagatagttggtgtagccatggcaagcaagacaaggcttgcgccgataaggacagaaccagttccatttttgagggaacggatgctgtag

SEQ ID NO: 6900 - DNA, 315 bp, Streptococcus pneumoniae
  misc_feature (1)..(315): tiling:Spneumo1:WAN024DKR; WAN023M75 313923_481||||246792. .247106|+|315 bp|EGAD orf prediction|S.pneumoniae|R6|NC_00 3098.1|ORF|100
atgggctcttctgccttagtttcagttgttactgggctagtagaagtagttggctctgttgcaggtttttcttctgttttctctagggaagcgtttgcatttctaggtgaagaaatatcactttcgttcttaccagagtcagctgctgtatcagtaagaggttgggcaagggtggttgtatttctgttgttgggttcgttagtggttggtgtactttcgtcggatgagatagttggtgtagccatggcaagcaagacaaggcttgcgccgataaggacagaaccagttccatttttgagggaacggatgctgtag

SEQ ID NO: 6901 - DNA, 276 bp, Streptococcus pneumoniae
  misc_feature (1)..(276): tiling:Spneumo1:WAN024BQA; WAN023PH9 pne35_16||||15033..15 308|-|276 bp|Type 17A capsule operon, Glimmer 2.02 orf pre diction|S.pneumoniae||WAN01UCHX|ORF
atgggcttttttataaattctatttttagtgttaaatcactacgtcctaatgctttaattgtctgcattgttaccgttggtataactgataaaattgcttccgaacatacaatcacaacgaagggaataataggtagccatttttcagtatacattaagatagttagtggttcagcagtcacaattaaaccaaccattgttggaaaaattaaaaaagataagattgagacactcttacgtgaaaaagatttaatacgttcaatatcatcattaacc

SEQ ID NO: 6902 - DNA, 963 bp, Streptococcus pneumoniae
  misc_feature (1)..(963): tiling:Spneumo1:WAN024FTU; WAN023OQ4 pne78_14||||10473..11 435|+|963 bp|Type 36(1) capsule operon, Glimmer 2.02 orf p rediction|S.pneumoniae||WAN01UCFT|ORF|000
atggggaaagtttcgattgttgttccagtatacaacgttgaagattatttgaaatattgtattgatagcttaattaatcaatcgtacaaggatattgagattattttggtagatgatggctctactgatgattctggaagaatatgtgataagtatgcccaagaagatgaccgtattagagtcttgcatattgagaatggaggcctttctaatgctcgaaatacgggtgtaaagtttgcttctgctgagtggataattttcattgattctgatgattactatgatcgtagaactgttgagtatttagtgcaacttcaaaagaagtatgctgttgatcttgtggcaacttccgtcatcgaagttagggacttccaaagtgaggattttttaggttcattaactaacatagattctttgaaattagatcgctatacagctttgaaggagatgttttatggaaatatagttggaactcatccagggggaaaactatacaaaaaagaaatcttgatgaagtttccttttccagagggtatgctctatgaagatttggctgtctcttttgagcatatcggagcatgcaatgaaattgccgtaggatgtatcaatttatacaaatattatcgaagacctggaagtattgtcaattcttcttatagtgataaatttttagacttctataaggctatagagatgaatagagaatttgttcagagagattatcctaatgataaggaaatgaataaagcacttactgtacgttatgtctttaaggggttacatgtagtacatgctatgcttagttcagagatgtattcggatgtcaataaaatcagaaaagaatacactagatacttcaacgatattattcctaatccaaatataacagggaaaaataaagtgaaatacctgatgcttttggtttctccaaaactgtatgaaaaaattagagagaagatgggt

SEQ ID NO: 6903 - DNA, 306 bp, Streptococcus pneumoniae
  misc_feature (1)..(306): tiling:Spneumo1:WAN024BVS; WAN023QLU contig_1315_25||||175 52..17857|-|306 bp|Glimmer 2.02 orf prediction|S.pneumonia e|670|WAN01UE9N|ORF
atggggagggatggaatgaattacatagtgaagatataccttgatagtgaaaaaataccagatgaaccttattttactaaagagatttttctagctacgtgtatgggcaatgcaacaaagttagctgtaactatgggcttattgacaaaacaagcgttggatttagaaactgagacagctatcttgaaaacccttgatacaatcatagagactcaaaaagctattttgcaaggggtagcgagcggacaaataacctttgtaaataaaagcaaaggagaggaggaactggatgagtctatcagagaa

SEQ ID NO: 6904 - DNA, 81 bp, Streptococcus pneumoniae
  misc_feature (1)..(81): tiling:Spneumo1:WAN024BI3; WAN023P0Z pne62_7||||4746..4826 |+|81 bp|Type 33C capsule operon, Glimmer 2.02 orf predict ion|S.pneumoniae||WAN01UCG7|ORF|000
atgggggctatgggaactatggaaataaatagtcttgtagtaccaagattatttgagatgattattatgggagggggagtt

SEQ ID NO: 6905 - DNA, 156 bp, Streptococcus pneumoniae
  misc_feature (1)..(156): tiling:Spneumo1:WAN024BTX; WAN023Q2D contig_1220_20||||102 09..10364|+|156 bp|Glimmer 2.02 orf prediction|S.pneumonia e|670|WAN01UEKO|ORF
atgggggtactagaactaattgaacaattcgagattgactattatccgttaagctacgagaagaaaactcttttagcagaccaaccaattcatcaagtggttgcctgcttgtctgaaatggctagctggcatgaatgcggaggtcggctagtatgg

SEQ ID NO: 6906 - DNA, 183 bp, Streptococcus pneumoniae
  misc_feature (1)..(183): tiling:Spneumo1:WAN024CBS; WAN0244Q6 spr0116||15902160|NP_ 357710.1|124191..124373|+|183 bp|Hypothetical protein|S.pn eumoniae|R6|NC_003098.1|ORF|100
atgggtattaaaatggaaaaaatttttgttattattttttttgtatgtctatttatatcatccataacttttttagcctatgattttgttagcgaagaaataaaaaagttgattatttggatgaatgtcgtttttttgattttaatcatagcaatgataatttatccaaaattaagaaaatga

SEQ ID NO: 6907 - DNA, 693 bp, Streptococcus pneumoniae
  misc_feature (1)..(693): tiling:Spneumo1:WAN024BYZ; WAN023S65 contig_466_1||||111.. 803|+|693 bp|Glimmer 2.02 orf prediction|S.pneumoniae|670| WAN01UD2A|ORF
atgggtcctcgctctttggctctgcaccgtatctcttcttatggtgaggaaggtttcacaggcgagctggatgtaacagtagaatttacctttaccgacaacaacgaactggtaatcgagtacctggctactaccaacaagaagacaatcgttaatctgacacaccacgccttcttctcactggctggtactgccgatccaacaccaagtatcgacgatcagatttgcgagatcaatgccgacttctatctgcctaccgacgctactgctatcccaacaggtgagatcctgaaggttgagggcactccattcgacttccgcaagccaaaggcattcggacaggacatcaacgccgatcacgagcagattaagttcggacacggtttcgaccacaactacgtactgaacaagcaggaagagggcgagctctcattcgctgccaaggttaccgacccaaagagcggccgtactatggaggtttacaccaccgagccaggcctgcagctttacacaggtaacttcctgagcggctataagggcgctaatggttgcaccttcccacatcgttcagctgtctgcttcgaggcccagcacttccccgattcacctaaccgtccatacttcccaagtgtggttctgaatccaggacagcgctacaagcagaagaccgtataccgctttggagtggtagag

SEQ ID NO: 6908 - DNA, 360 bp, Streptococcus pneumoniae
  misc_feature (1)..(360): tiling:Spneumo1:WAN024GFM; WAN023JSX 83442_906||||517525.. 517884|-|360 bp|EGAD orf prediction|S.pneumoniae|TIGR4|WAN 01UC25|ORF|010
atgggtgttggtaaaattttgaaaataaaccagatacttccgaacatccggccacttgcggtgcataaagtcaatttccttataaaattgctcacggataggcgcatccggtgccacaatggcatctccagaaccagaaaccgtacaaaaagtacagcccccatgagccacagtcccatcacgattgggacaatcaaatcccgcatcaatagggactttaaaagtcttttctccaaagagttttcgataataatcattcaaggtattataagatttcatgactttcattataacaaaaatcacccacaatctcaaaagcctgactttcctataaattcctctgtttctcgtttccattag

SEQ ID NO: 6909 - DNA, 990 bp, Streptococcus pneumoniae
  misc_feature (1)..(990): tiling:Spneumo1:WAN024BNP; WAN023OBO spn019g01_47||||32645 ..33634|-|990 bp|Glimmer 2.02 orf prediction|S.pneumoniae| 23F-1|WAN01UCLR|ORF
atggtaaaagatgtaactaatagcttgacagaaatcaaggtggattttcaacctgcagtaattaatgttgaccgtgaggcgatcgaggcacaagtagccgcagccattgcacagtatagcggtcgcgaggttactgttgataattacaaagaagtttatgaagagcgaacccgctttaataagctgattgggggcttagacactcaacgcaaagattttaaccgacaaatcaatgagccggcaaaagactttgataagtgggtcaaagaaaaagtcatcaagcctattgaggccgtaacagatgctatgtcagcaggacttaatgcgattgatgaacatgaacgattgatgcgcgtggatgtcgtgcgtgctacatttgaggataagtgtatggtcgcagggattgaaaaatccacattcgctgacaaatacgatgagtacagcctcaagaaatattttaaaacaggcaagtatgagctgaaaaagacaacacttgatgaaatggatggcttagtactttcagaatttgatgccctggaagaatacaaggctaacaagcaagctatccaagagcaagctcaagagtacgatttgccagctgatagctatatcagacatcttgaagatggtaagagtcttgttgatattctcaagatgatgaaaactgatcgagatgctgagattgcacgcaaggagcagaaagaaatccaagaaaaagcaaaagctgaacgacttgaagaaattgctcaatcggccaagaaaaatgctaatgcgaatatcaaggcttacgatgccgaaacaggcgagattttggaacagggtacaattacaccagaacctcaaaacaatgcgcgagaggtggcaaaatttgagcctagcgagcctttggtcaaattagtacgtcttgaattgcacggtggtttagaacagtgggaaaatacacaagaatattttgaggataactttatcggttttgaaactttggaggat

SEQ ID NO: 6910 - DNA, 153 bp, Streptococcus pneumoniae
  misc_feature (1)..(153): tiling:Spneumo1:WAN024BGE; WAN023PKZ pne29_25||||18087..18 239|-|153 bp|Type 15A capsule operon, Glimmer 2.02 orf pre diction|S.pneumoniae||WAN01UCIP|ORF|000
atggtaaataagcctctaaaacctctttgtttacgagagtttcctcgtttggaagacattctagaagatagaatagatatttctcgctatgaaggctcagacgattgtcacaagtcaagggagaattatttctttggatatcactgtgaacta

SEQ ID NO: 6911 - DNA, 213 bp, Streptococcus pneumoniae
  misc_feature (1)..(213): tiling:Spneumo1:WAN024BU4; WAN023Q2K contig_1220_13||||748 1..7693|+|213 bp|Glimmer 2.02 orf prediction|S.pneumoniae| 670|WAN01UEKO|ORF
atggtaaatgtatcgaaattaaaaggaaaaattatcgaacgcaatactactcaagaggctttagcaaaagatattgggattgataagagtacgttctatagaaaaatgaaacaaaatggtagtttctctatacaagaagtaaacttgattgtttcttccctcggtctttcaaaagacgaagctttatctattttttttagcgaaacagtcgca

SEQ ID NO: 6912 - DNA, 1113 bp, Streptococcus pneumoniae
  misc_feature (1)..(1113): tiling:Spneumo1:WAN024BRC; WAN0240Q6 |||AAG12996.1|||1113 bp||S.pneumoniae||AF227520|ORF
atggtaagacggaattctaaaattacccgtcaacagaagaaaattcgagatgcatttgtatctgagagaactgttgaaattattcctgcaaagcgagagttcactgatgttaaaactaagaagttacgtgttgctgcatattgtcgagtaagtacttttgacgaatctcagtcaggtagttttgaacttcaaaaacaaacctatactgaaagaatcaatagtaatcctgattggataatggctggaatctatgctgaccaaggtgcatcaggaacatcaatcaaacgacgtgaacaattccaacagatgcttcatgattgtagatgtgggaagattgacttgataatcgttaagagtgttagcaggtttgctcgtaatcagctagatttcattagtatttaccgagagttgaaggcactatcccctccagttggaatatatatcgaagatataaatttgaatacacttgatacgaatagtgaattcattcttggtattatggccatagtagctcaaggtgagagtgaacaaaaaagtgcgtcaattacatggtctgtcattgaacgctttaaaagagggataccaatgattcctacccataaccttcttgggtatacgaaagaccagtatggtcgagtagtgatagatgagacagaagcaaaaattgttcgcctaatatatgattcgtacatcgaaggtatgactgcaagtgagattgcctctactttaatgaccaatcatataccaacagttactggtttggagcgttggacaagtttagctgtttataatattctcagaaacgagaaatataaaggcgaaatcatcatgcagaagacatatactgttgattgttttagtcataaaacacggaaaaataatggtgaaaagccaaaatatcgattaaaaaatggaattccctctatcataccagaatcaagatgggatttagtacaagaattactcaagcaacctagaagaaaatcgaaatctacttctgagatatttgtacctaaactctacatcaagaaactcaaatctggtaagttgagggattttgttgtacttgatcctagttggaaatcggaagacattcacgaagtttttaaataa

SEQ ID NO: 6913 - DNA, 291 bp, Streptococcus pneumoniae
  misc_feature (1)..(291): tiling:Spneumo1:WAN024COY; WAN023JHO 84218_1482||||838294. .838584|-|291 bp|EGAD orf prediction|S.pneumoniae|TIGR4|WA N01UC25|ORF|010
atggtaatggtcgccgtgaggaacgatataagcatcacccgtgtcctcaatgatatcagatgcattgaagatataaccatcatccgttgtatagcgtccttgggctctggctgcaactactgcttgatcgttagaaccacccccgtgattatgactgtgttcctgcttctgacgtttaatctcttcttttgtccgaatattatccgcatgagctgcatccttaaggtaaacatagtattttccatctaccttgataacataaccacccttgatttcattgacaatgtctga

SEQ ID NO: 6914 - DNA, 675 bp, Streptococcus pneumoniae
  misc_feature (1)..(675): tiling:Spneumo1:WAN024BZ6; WAN023S6A contig_470_1||||7..68 1|+|675 bp|Glimmer 2.02 orf prediction|S.pneumoniae|670|WA N01UCZY|ORF
atggtactacaagatttgccagaccgtattgagaagactgtatatattgaacttaacgaatccgaacgaatcaaatataaacaggtgcatgccactatactccaagcattcgcttcaggaataagtggccgtattagtagtttggccttagagggccttcttcgtttacgccaggcttgcatcgctcctaagtaccaaacagttatcgactatattgagacgtttcgttctgaggggcgcaaggttttacttttctctcaatttgtcagcgcacttcacgagttagaggcacgtttgtcatcagcagacattcactttgtaactctatatggagacacccgtaatcgcgacatccctgtacgccagttccaaagcgattcttctatcactgtattccttatcagccttaaggctggtggtttcggcctcaatctcacctctgccgatcgagttattcttttagacgactggtggaatcctgcagtcgaagaccaagccatggcacgtgctcatcgcatcggccagaagaacaatgttcttgttctccgattagtctgcaaagacactgtcgaagaaaaaattcttcaacttcaagctcaaaagcgccaaaccgtcgatctcttcaacaacacctcagagaagctaactttagaagagattcaagccctgattacc

SEQ ID NO: 6915 - DNA, 768 bp, Streptococcus pneumoniae
  misc_feature (1)..(768): tiling:Spneumo1:WAN024BTW; WAN023Q2C contig_1220_21||||103 61..11128|+|768 bp|Glimmer 2.02 orf prediction|S.pneumonia e|670|WAN01UEKO|ORF
atggtagacaatgtgtttgaggaaatcgccttatcttatcgtaggaatacagaacaacaagaagagttctgcgaaaagcataacatccctttgataaagatattgaggaccgagagtgttgtatgtcgcatgtgtgaatctgagcggattcatgaggaaaatcaagcaagagtgaatgaattggccgacgctgagaatgagcgagagaggaaatactatcttgagaagttttctctttatgatgaggttttgaaaaatgcgactttggacaattttgaaacaccaactgaaaaagaagcagaaaagctagtttttgcaaagaggatttgtcgtgagtggtctgagggtgctaggaacaacatcgtgttacaaggagaagctggaacaggtaagagccatttggcctttgcgatggttaaggctctatctgagtacacgaaagagattgctatcttcatcaacgtgacggacttgttgatgaagattaaagctgattttagtcaggaggagtttctggtcaataaaattgccagtgctaagttcttggttttggatgatttgggaatggaaaaggatagcgaatggtcgtttactattctctacaatatcctgaataagcgttcaaatacaatcattaccaccaatttgacttctgctgatattcagaaaagatatggcagaccctttatgtccagactgatgaagggtgtggataaagaccatttaatggttttcaacgacttgacaaacaagcggaagcaatatttt

SEQ ID NO: 6916 - DNA, 246 bp, Streptococcus pneumoniae
  misc_feature (1)..(246): tiling:Spneumo1:WAN024D5Z; WAN023ISF 85710_2596||||1473094 ..1473339|+|246 bp|EGAD orf prediction|S.pneumoniae|TIGR4| WAN01UC25|ORF|010
atggtagagtattatcaaagctttacaaaaaaacaattcatcctatttttaatcaatcaaaattttaaagagatattttcgaaccttttcttccatgcctgcataaccatttggctgatgtggctcacctgggaagaaaatcgcaaaattgtgataacccaacaagagtgggtagtgttcatgacaatgaacaaagccaatgtcactcgcttcgtcgaatgctactgcctcgtctttgatacgtga

SEQ ID NO: 6917 - DNA, 126 bp, Streptococcus pneumoniae
  misc_feature (1)..(126): tiling:Spneumo1:WAN024CYC; WAN023Q1D contig_1216_13||||153 33..15458|-|126 bp|Glimmer 2.02 orf prediction|S.pneumonia e|670|WAN01UEKW|ORF|000
atggtagatggagaaatcacacattccacaggttccccatctggatatttcaatgtgcttgaaatcaaatctgccacacttttagccatgttcattgtttgtacttcaagtgattcgcgtacacct

SEQ ID NO: 6918 - DNA, 249 bp, Streptococcus pneumoniae
  misc_feature (1)..(249): tiling:Spneumo1:WAN024DM5; WAN0244QO spr0098||15902142|NP_ 357692.1|105242..105490|+|249 bp|Hypothetical protein|S.pn eumoniae|R6|NC_003098.1|ORF|100
atggtatgtagtatacttgcttctacaagtgttttggcagtatgggttgatggtggtcaatggaactatggagtaggatggtcaggaaattttggttattctgattatttacattctactcgctctcatacagcaactgttaaagatggaaataaattctctaaggatcgtgcagaagctgaggcatgggctcgggcttcaatcttcaaattcccaccaacgggaatggaatatttctatggattttaa

SEQ ID NO: 6919 - DNA, 1098 bp, Streptococcus pneumoniae
  misc_feature (1)..(1098): tiling:Spneumo1:WAN024BQE; WAN023PHD pne35_12||||9343..104 40|+|1098 bp|Type 17A capsule operon, Glimmer 2.02 orf pre diction|S.pneumoniae||WAN01UCHX|ORF
atggtcaaaaaaattgctttctatcttcctcagtttcataccattccagaaaacgataagtggtggggaaaagattttactgaatggactaatgtgaagaaatctcagccccaatacagaggacatattcagcctgaagttccattaaatgaagaatactataacctcttagatacagaagttcaagaaaaacaagcaaaattagctttagagtacggtattgatggtttttgctattatcattattggtttgatggaaagctccttctggagaaacctatggagaatatgctgcaaaatgagaatataactttacccttttgtatttgttgggctaatgagagctggtcgagaacttgggatggtgctgaaagtaaggtcttaattatgcaaaattactcagatactttggatggatggaagaggcattttgattatcttttacccttttttaaagatgaacgttatatcaaggttgatgaaaaaccaatgatgattatttacaagcctcaactaattgagaacttagaagagatgactgtttattggaaccaattggctaaacaaaatggttttaagggtattcattttggacatcagcatgtttcatcttttgaagattcaaaagtaatagaaaactttgattttggtattgaatttgaaccaatctatacggtatctgagatgcataaaagtacaagaagtaagtcagaaaaattaaagcgggcaataaaaaatcctaaatggttttcaagaaatatcagccataaatattttggccgttcgctcttatttgactatgatgaagtatggtcagctattttacggcgtgaaggaagaaaaaatatttcaccaggtgcctttgtgtcatgggataatactccgagacgcgggaaccgctctctagtatttgatggtgcaaatcctaaaaagtttgagaaatattttgctaagcaagtacaacgtgcgaaagaagaatatcattctgatttcatatttattaacgcttggaatgaatgggcagaaggggctcatttagagcctgatgagcagtatggttacggttatttagaagcggtgagagctgtaaaggaggaa

SEQ ID NO: 6920 - DNA, 1200 bp, Streptococcus pneumoniae
  misc_feature (1)..(1200): tiling:Spneumo1:WAN024G6V; WAN02442H spr0969|nikS|15903013 |NP_358563.1|951138..952337|+|1200 bp|Nikkomycin biosynthe sis protein, carboxylase|S.pneumoniae|R6|NC_003098.1|ORF|1 00
atggtcaaaatagcaatcatcaatcaattttcacctagagtttgtgattataaagcgattaaagaattagaagataaaaaatatgaaattgaaattttcacaaaagctagatttaaatcttactatgaggattcaaagtttaaatgttatttctatgataatcttttggataaccaaaattatatatttgatattatagattcacattcaaaaaaaccatttacctacatagttgcaactcatgaatttgatatagttttggctgcaaagataagaaagttattgggaatatctggacaaaacattgatagtgctaatggctttagagataaatatataatgaaaaaatatttagaaaaagcagtatcgttaccaaaatatgctgaaattaatgattgtgtagatttaattgaatttactgataacaaaaaatatccatttgtagtgaaacctagacttggtgcaggatcaattggtgtaacaataatacaaaataaatctgaattaaaagattttattagtagtcctctaagtcaaaatttaatggttgaaactttcacaaatggggagatgtaccatgtggatggtttatttaaagataatgaaatgctgttatattctgtttcaaaatatttcaatgattgtttatcgtttaaaactaatacaccgctaggctcatatatgattgatgatagcaatcccctttcgagaaaattatatgatgcaacattaaaggtattaactaaaataccgactcctaatcatacaattccttttcatgctgaattttttgtagatggtgagaaggttactttttgcgaaattgcttctagagtaggaggagggctgataaatgattccttcaaattactaactaatattgatttacaaaaaacattcgtaaaaagtcaaataggaattgattatttaaatataataaaatctgataagagaacagcttggataacaattcctcctaaagaaggagaattactatctgttaatttgtataaagattcatgggttgagaaagtgaattttgatgagacctctattgggagaagatatagtggcggtgattatagcgcttctgctcttatagcatatttgattagtggaactgatgaagacgatttgaagaataaaattttacatattattgagtggcaagataaaaatacaatatataaagagaaataa

SEQ ID NO: 6921 - DNA, 216 bp, Streptococcus pneumoniae
  misc_feature (1)..(216): tiling:Spneumo1:WAN024BCD; WAN023YI5 AL449930.1_10||||7800 ..8120|+|321 bp|Glimmer 2.02 orf prediction|S.pneumoniae|| AL449930.1|ORF|000
atggtcagtaagtatcttttattagcagttattttctctggcttggtgacttggattctccgtatgattcccttcatcttagtcaagtataagggcttgcctgcaatcgttgagcgttttttgaagttcttgcccgtttccattatctttgccttgattctttcaagcgtagtgacaggtaaggttgggagccttcctcaaattaaatggctagac

SEQ ID NO: 6922 - DNA, 207 bp, Streptococcus pneumoniae
  misc_feature (1)..(207): tiling:Spneumo1:WAN024BCB; WAN023RPV contig_1585_6||||2551 ..2757|+|207 bp|Glimmer 2.02 orf prediction|S.pneumoniae|6 70|WAN01UDG5|ORF|000
atggtcagtaagtatcttttattagcggttattttctctggtcttgtgacctggattccccgtatgattcccttcatcttggtcaagtataagggcctgcctacgattgttgagcgttttttgaagtttttgcctgtttccattatctttgccttgattctttcaagtgtagtgacaggtaaggttgggaaccttcctccaatcaaa

SEQ ID NO: 6923 - DNA, 1335 bp, Streptococcus pneumoniae
  misc_feature (1)..(1335): tiling:Spneumo1:WAN024CT3; WAN023YX9 AL449927.1_28||||2070 3..22037|-|1335 bp|Glimmer 2.02 orf prediction|S.pneumonia e||AL449927.1|ORF|000
atggtcatcactaagcattttgccattcatggaaagagttatcgcagaaagctcatcaagtatattctcaatcctgataaaacaaaaaatcttaccttagtgtcggattatgatatgaggaattttctggactttcctagctatgaggaaatggtgcagatgtatcatgaaaattttatcaacaatgacacgctttacaattttcgacacgataggctggaggagaaacaacgacaaatccatgctcaccatattattcagtccttttcgccagaggacaatctcactcctgaacaaatcaatcagattggttatgagaccatgaaagaattgactagtggaaagtttcgctttatcgttgcgacccacgttgataaagaccatctgcataatcacatcattataaactcggttgacagcaattctgacaaaaaacttaagtgggattataaagtggagcgaaatcttcgaatgatttcagatagattttctaaaattgcaggggcgaaaattatagagaatcgctattctcaccagcagtatgaagtttatcgcaagaccaatcacaagtatgaactcaagcagcgactctattttttgatggaacattctagagactttgaggatttcaaaaagaatgctccactactacatgtagaaatggattttagccacaagcatgcgaccttttttatgacggactcatccatgaaacaggtggtgcgtggcaataaactcaatcgcaagcaaccttatacagaagaattttttaagaattactttgccaaaagggaaatggaagaactcatggaatttctcttatcaaaggctgagaatatagatgacttgattgaaactgcgaaactttttgatctaactatcattcccaaacaaaagcatgtgtatttccagttggcaggagtggaggtgaaagagacagaactagaccagaaaaatctttatggtgtagaatttttccaagattattttgagagtagaaaagattggcaaaatccagaaattgaggatttggttcaattttatcaagaagaaaaattttccaaagaaaaagaactcccaagagatgagaagttctgggaattctatcaagagttcaagagcaacagagatgccgttcatgagtttgaggtagagttgtcactcaatcaaattgaaaaagtagtagatgatggtatttacatcaaggtcaagtttggtattcgtcaggaggggcttatctttgtgccgaatatgcagctcgatattgaagaggagaaggtgaaagtttttattagagaaactagctcctactatgtctatcataaagacgatgcc

SEQ ID NO: 6924 - DNA, 285 bp, Streptococcus pneumoniae
  misc_feature (1)..(285): tiling:Spneumo1:WAN024B6I; WAN0244FG spr0502||15902546|NP_ 358096.1|499631..499915|+|285 bp|Hypothetical protein|S.pn eumoniae|R6|NC_003098.1|ORF|100
atggtcatgaacctattgtttttcagagaaattgaaaagaccaaagcaagtaattttatacagctcagtgattggattgctacagactcagcgaggaatcagttgattctcaaggatattctagcccaagtggcagaaggacggaatatcttggttttagttaatcgaattcaacagatagatgtctttgaaaagttattgaaagagaaagaggttgatgactgttacattattagcggaaaaaccaaagtccgagaaagagaacgagtttactggagacgttag

SEQ ID NO: 6925 - DNA, 987 bp, Streptococcus pneumoniae
  misc_feature (1)..(987): tiling:Spneumo1:WAN024BQ2; WAN023PBW pne43_14||||10533..11 519|+|987 bp|Type 20 capsule operon, Glimmer 2.02 orf pred iction|S.pneumoniae||WAN01UCHC|ORF
atggttaataatattgattttgtagttacatgggttaatggaaatgatccagtgtggcgtgaggaaaaaaagaaatacgaagttctagatggtaggccgactttaaatgatgaaacaagatatagagatatggatttgtttcaatattggtttcgagcggtagaaaaacatgcgccctgggttaataatatttatttcattacatatgggcatttacctgaatggctggatgcaaatcaccctaaattgaagatagtaaaacatgaagattatattccaaaagaatacttaccgacttttagttcaaatgtaattgaactaaatctttttaggattaaggaattgagtgagcagttcgttctgtttagtgatgatgtttttattaacacatttttaaaagaagaagatttgtttaaaaataacttacctcgattgttgagtatatatagaccattaattccaactaaagaatttgattatattaatttcaatcatttattaataatgaatagatactttcatgataaaaaaacattatcacaacataagggtaaattttttaatgtaggttatggaaagtttaatctgtataatctatttagcattttttattcagggattattggttatcatgatgctcatgtcgctatgcctcatttgaaaagtacttttgcagagatttggaataaggaaggggtacttctagatcgagtttgtaaaaacaaatttcgttcaactaaagatgttaaccattggttgatgagctattggaatattgaaacaaattcatttatgccacagactcttcgtgtgggtgaatatgtgcctctggcttattcaggtaaaattgaatctattattcacaaacaaaagaataagtttttgtgtataaacgacgatgaacataccgaaaacttcattaacgaagttaactttgttcgtaaaatatttgagaaaaaatttcctgaaaagtctaaatttgaaaag

SEQ ID NO: 6926 - DNA, 735 bp, Streptococcus pneumoniae
  misc_feature (1)..(735): tiling:Spneumo1:WAN024BZ3; WAN023S67 contig_468_1||||92..8 26|+|735 bp|Glimmer 2.02 orf prediction|S.pneumoniae|670|W AN01UD24|ORF
atggttaatggagcttttgctattgccaatcaaatagagaattttgttattcaatttgttaacaaccttaatactgctgcaacacctcagattacccaatattattcttcaaatgataaaaatcgtgcttttgcccttgttgaaaaagtttcaaagtatagcatttatgtgatgttacttattgtctttcctgtctggatagaattggaatttttattaaaattatggttgggaactataccagaccaaacacttgtattatgtcagtggacactattgagtatatttataagatcgattgcagcaggtatagatccaataattcaagcgacaggtcaaatcaagtggtatcaattatctgctagctcattgttactgataggattaccaatatctttctgcctctttgcaataggcttcagaccctatgctataattcttgcatttattctgacagatgttgtttataaagcagttcaattctatttcctggctaaacttacaacatatagaataagttcttttgtaaaaaatgtctacaacccatcactaagaatcgttttagttttatctctttattgttgtgtgtataatatgttgcttactaaagctgatttcgttattcatgtcgtcgggcttattttgacagttctgtttactattgctactttatatgttttggggttgacgagaaatgagcagtttgcattatgttcgagattaaaaaagaaattt

SEQ ID NO: 6927 - DNA, 1224 bp, Streptococcus pneumoniae
  misc_feature (1)..(1224): tiling:Spneumo1:WAN024BZY; WAN02442J spr0967||15903011|NP_ 358561.1|948960..950183|+|1224 bp|Conserved hypothetical p rotein|S.pneumoniae|R6|NC_003098.1|ORF
atggttagaaatggaaatattaagttagattatccgaaaggcttttttgatcttgatgaaatgcaatttaagaagtattgtgacatagaaaatcatttaaggagcatagcctctataaatggttttgaattgatcaaagtgtcatctgctgtttatagtcgtttaaatgaatacacccatgcatccataggaagatattatcaagttaaagatgaaaaaaatagaaatatcggactaagctcggatggttctatgtctatactaagatatttttataataataagcaggggtacagtagttataaggtttgttccaatgcaacaatttatcgaaaaaataaaaaactacgggagttttcacaattttgctacgaaatttttaatgcttcctcaatcgatgagttacagtttaattatatcaatttaattcttgagattcttgattcacttgagctagaaagtgtagttatattaactaatttcaatatttggaaaataattttatcacgatacaataattataaggatgtactatatgagttgagaaagagtaaagacatattaggtatgataaattcattaaatattgatccaagttatgtaaaatttttatcgaaatttcataagaggaattttacaatatatgatttattaaactattgtagggttcataaactattcgaactaattgatgaactttgtcaaatgcagaaatatatagagtatatacaacatcgcattacttttcaaattaatttgttcgactttagaggatctgaaatttttgaaggtatttattataaatgtgtagataaatatgagagaccatttttagatgctggaacttactctaatttaatatttgaagtaactaaaaagaacattctcagtggtggtttggcggtctgtatagaagctattttagatagaattcatatttcacaaaaacctaaaaaagtttttgtgaaatatgttggtggagagaatttcaaaatcgatgatttttataatattttgactctcatccgaaaggaaaaattaaaaaatcattttgttaaagaagaagttagttcgttggctatagctaaagctaagaggagggcctacattcagaaatacgatttatttatagctattggtgaaagggaaaaaaacagtcatgaatttatgattgaagaattaaaaacaggattaagaagaatattaatattaaatggaggataa

SEQ ID NO: 6928 - DNA, 1185 bp, Streptococcus pneumoniae
  misc_feature (1)..(1185): tiling:Spneumo1:WAN024BN8; WAN023O7U spn029h04_57||||42710 ..43894|-|1185 bp|Glimmer 2.02 orf prediction|S.pneumoniae |23F-1|WAN01UCO3|ORF
atggttatatcaaagacaaagaaatataaaggtgtatacaaagattcaaaaggaaaaatttattttcaaattgaattaggagttgatccaataactgggaaaagaattcaaaagaaaggaaggaaaaatcaacagggactaccgtttaattcttttaaggaagcatatgaagagatacttcgtttaaaacatgaatttgtgaactctactattaataatagttttttaacttttagagagtttatggaagagatttatttaaaatattatcaacaaaaagttcaatttgtaacttatcagaccgctttaccacatcatcagttatttattaagcaatttggtagtaaaaaattatcagatattagtactattgactgtgaaagatttcgcttagctattatagacaagtattctagtaactacgctaaaaatatgtggtctagatttaaagcatgtctgggctatgcagaaagattgggttatattgatagagttccttttaaaggattagataatcctagaggaaagcaccctgatacaaaattttggacatttgatgaatttaagaagataataaactcttttgatattagtgagtatgagggactccataattacatgacgatctggttatattttatgactggcttaagagttagtgagggtattgcacttaaatgggaagatattgattttgaacgtaaatggattcatgttcattcgacaattgagaaagacaaaaacggtgtatggtatgctaaacaacaaacaaagacagtagcagggaatcgtaaaattgatttagatgattttacgattacaatacttaaaaaatggcgagaagttcaaatcaagaatgatgataaagattatgtaatatcacgttttggtgcccctttgtgtaagtctacaatttctaggataataaagaggcatgctaagattactggtgtaccagaaattacggggaaaggattaagacatagtcatgcatcttatcttataaatgtgttacataaggatactttatatgtttcatatcgattaggacacgctgataagtcaaccacgttgaatacatatagtcattggtattattcaggtgattcaacaatttcagaagagattacaaacagtttagataatcttggattatcaatttacctaccaaattcctgccagagt

SEQ ID NO: 6929 - DNA, 228 bp, Streptococcus pneumoniae
  misc_feature (1)..(228): tiling:Spneumo1:WAN024CC2; WAN023MBL 314767_233||||118089. .118316|+|228 bp|EGAD orf prediction|S.pneumoniae|R6|NC_00 3098.1|ORF|100
atggttatatttttgcttaaaatgaaacatttttttgcaggaattggtgaaataaactttgtaagttatttattgtatatatgtgtaggaatagcccctttttttcacgtatatataataggttctgaaatgaattttgtgaaaatagtgttatctattttgggaattatatttgtttgtattttaactattgctcgaatttataggacttttttctataaagaatag

SEQ ID NO: 6930 - DNA, 1473 bp, Streptococcus pneumoniae
  misc_feature (1)..(1473): tiling:Spneumo1:WAN024BM6; WAN023NPV spn093a10_31||||23925 ..25397|+|1473 bp|Glimmer 2.02 orf prediction|S.pneumoniae |23F-1|WAN01UCTO|ORF
atggttcagacaaaacagccaaatattattttgattgttgtagatcaaatgagagcagacgccttatccttgaatagtaaggataagctagttagcactccaacattagatatgatggctagtgtaggttataattttgaaaatgcctattctccagttccttcttgcgttcctgctagggcagctttattgactggcttagaccaagataaaagtggacgagttggttatcaagatgaggtgccttggaattttactaatactcttccaaaagtctttaaagatatgggttatcaaacagagtgtattggtaagatgcatgtttttccttccagacagagacttgggtttgatcatgtcttacttcacgatgggtatctacatgttgatagaaagtatgataaggcttatggaagtcaatttgattatgctagtgactatctagcctttttaaagggtaaagttggttatgatgttgatttgattgatgacggaatggattgtaattcttgggaagctagaccttgggataaagatgagaagttacatccaacaaactgggttgtgagtgagtccatttcatttttacaaagaagagatccaacggttcctttttttctcaaaatgtcttttgaaaaaccacatgctccattaaatcccccaaaatactattttgatatatatatggaacgcttgcctcaatttctcgatttgcatatcgggaattgggaagtattagaaaagcaaattccgtctatttatgctttaagagggaaattaaaggaagatgatcaaagaagaatggttgctgcttattttggattgattactcatatagaccatcaaattagtcgctttttgactgccctaaaagaatttcgtcatgataaagatacgattatctggtttgtttcggatcatggagatcagcttggtgaacattatctgtttagaaagggatatccttatcagggaagtatccacattccttcgtttatttacgatccggctggattgatagctggtaataggggaacaatcaagcaattagtgaaaattcaagatatttttccttcactcgtggatttggcaggaggaactactacagatgaactagatggacggagtgttaagaatttattatttggacagtacgaggggtggcgaacagaatttcatggtgaacatgctttaggaaaagattctagtcaatatattttgacagaccagtggaaatttatctggtttcctgttttaaatcattatcagttatttgatatgaaaaaagatccgcatgaaatgaatgatttgtatccaagtgaaaaatatcaacctattgttcgtcagatgaagaaaaaattagtagactttcttagatatagagaagaaggttttgttgtggatgaagagttagttcctgttgaactttctaaaataacgccaactctaacgaaaacgggggatagtcaatca

SEQ ID NO: 6931 - DNA, 240 bp, Streptococcus pneumoniae
  misc_feature (1)..(240): tiling:Spneumo1:WAN024BHQ; WAN023RV9 contig_1609_71||||588 96..59135|-|240 bp|Glimmer 2.02 orf prediction|S.pneumonia e|670|WAN01UDCD|ORF|000
atggttgaagaatttttgtgtcgagaaattttatggaacttggtcagaaaattagatatcagaattgcgttgacaagtgttttgttcgctttggctcatcatccaggaaccattctagcttggtgtttgtatgtttcattgggaatgtttttagggatggtgcgctataaatctgatttatggggcagtatggggctacatttggtgtggaacctactagtttatagttttctgcttttt

SEQ ID NO: 6932 - DNA, 1389 bp, Streptococcus pneumoniae
  misc_feature (1)..(1389): tiling:Spneumo1:WAN024BUY; WAN023Q9N contig_1258_17||||677 9..8167|+|1389 bp|Glimmer 2.02 orf prediction|S.pneumoniae |670|WAN01UEG8|ORF
atggttgaggatatcgttccgagcctgctcaagaaaatcaagtctgagtttgaaggtgctaggctagacagcgaggtcttgaaagacttgctgtctaaactacaacacagcaaggcaagttatttggacgctaatcaatatgctattgaaattggggagatactttctaaggctctgggagcctctctaacgaacgaaacgctaccagacggtaaaatgtattacaatatcgctcaacgtgtgctgacggacgttctggggcgaaattacgagcttgtgagtgattatactgagcaagttcagaagaatttgaactctgaggctaaaattgggttaactgctcaggttcctgaattgaatcaagaccgaattgatggtctggttaatcgtttagccagtgaggaaagttttgatgatgttcgttggctattagaagaacctgttgtgaattttactcaatcaataattgatgatagcatccagaaaaatgcggagtttcaacataaatctggattgcaacctgagattgtaagaaaatcagcttatcactgttgtgaatggtgtcaggaggttcaaggtacttacaaatacccaagagttccaaaggatatttatcgaagacatcaacgttgtagatgcactgttgattatgatcctaaaagtggaaaggtccaaaatgtttggagtaaggcgtggagtaaaagtgataaaagtgataaaatagaagcaagaaagaacatcggaatacaatctgaagtcagtcaggttagaaaacttgctcttcaaataggtataacttcaaaccctataacgaaaagccttaaaaaattaaccgaagaagaaattattcaagcgattagtggtggagataagacgaaagggtcttgttcatccttagcatttgcttacataggaaataaagcgggatatacagttctagattttagaggtggaaagagttgcgttttttttggtagtattgataaaatcaatatgattggaagccttccaggtgttaagatgcatgtagccaaaaacacaaatgacttcaaagcggtcaaagaattgttggaaaaggcagaaaatggaaaagaatactatttggcaacaggtagacatgctgcaatcattaggaaaaatgataatctagttgaatatttggagcttcaatcaaaatttgtaaatgggtttaagccatttgatgacactgttttgaaaaaaagatttaaggctaagaaatctcatgctgtaaggggacataaatatgatgtagatagctatcttattgatgcaaattcattaaaagacaaccctgaatttcataacatattgagtttccttaacacagctgaatctaaacaaatgaaaggtattacaggatatgaaaag

SEQ ID NO: 6933 - DNA, 165 bp, Streptococcus pneumoniae
  misc_feature (1)..(165): tiling:Spneumo1:WAN024BTR; WAN023Q27 contig_1220_26||||126 38..12802|+|165 bp|Glimmer 2.02 orf prediction|S.pneumonia e|670|WAN01UEKO|ORF
atggttggagtaacctatcaggaaattcatctctttgttgagtttttgaaaaagcagtatgggcaagggcgtccagactatattgaagccctgaacgacttagacggtctggtggaagtctcctacagagaagctattgaaagatttttagaagatgaagtacga

SEQ ID NO: 6934 - DNA, 132 bp, Streptococcus pneumoniae
  misc_feature (1)..(132): tiling:Spneumo1:WAN024BSC; WAN023TH3 BD140031.1_1||||870.. 1001|+|132 bp|Glimmer 2.02 orf prediction|S.pneumoniae||BD 140031.1|ORF
atggtttatgaggtttaccacacctactataggcatgtgtttagaacagtcgggaagcgcgactcttctttattatctgattatgagaagcttttagagaagtttgatgcagtcgcagcagaacggcatatc

SEQ ID NO: 6935 - DNA, 75 bp, Streptococcus pneumoniae
  misc_feature (1)..(75): tiling:Spneumo1:WAN024DUZ; WAN023SH2 NC_003098.1_2539||||1 973979..1974053|+|75 bp|Glimmer 2.02 orf prediction|S.pneu moniae|R6|NC_003098.1|ORF|100
atggtttcaatcatatctgctattggtttatttgacacaatagggattctccttcaagttaaaattcattataga

SEQ ID NO: 6936 - DNA, 675 bp, Streptococcus pneumoniae
  misc_feature (1)..(675): tiling:Spneumo1:WAN024BR4; WAN0240CL |||AAC98440.1|||675 b p|UmuD MucA homolog|S.pneumoniae||L29324|ORF
  misc_feature (201)..(201): n is a, c, g, or t
atggtttcacctactaaattaacaggaaaaaagagaaggccaaggattatctcaatctcacttgcatccagttgggaaataatagatcttcaactatttaaacctttcacaaaccctaatcaaaataatctaagcaaattgagtgagattttgaatgtagaccctcgatattttgaatcagagtatgaaatagtacaaacntatctcaaactaacggaaaggaatcaagaagcaacacttcattatgctacagaactattgaacaaacagaatgcgaaggttgtagaaattcctgagcgttttgcttataaagtttacgaaaaattatcagctggtacaggaacagcttattttgatgatggtaattacgatacagtttattttaatcatcaatttgattatgactttgcatcatgggtgtttggaaattcaatggaaccgacatatgaagatggttctgtagcccttattaagcaaacgggatttgattatgacggggctatctatgccatagattgggatggtcaaacatatattaagaaagtgtatcgtgaagaaaatgggcttcgtttagtttcactcaatcggaactattcagataagtttgcgccttatgatgagaatcctcgcattatagggaaaatagttgggaactttatgcctttagaggactaa

SEQ ID NO: 6937 - DNA, 783 bp, Streptococcus pneumoniae
  misc_feature (1)..(783): tiling:Spneumo1:WAN024BYG; WAN023S0X contig_1623_19||||107 65..11547|+|783 bp|Glimmer 2.02 orf prediction|S.pneumonia e|670|WAN01UDAF|ORF
atggtttccgctaaactacctaaattgattaaatttactccacttgcttatgtggaaacagcactccaaggacaaccagggaatactctaacagttccagcatgggagtatgcaggagatgcgacagaggttggagaaggtcaagctatttctccagaccaattgactactaaaaagaccactatgaccatcaaaaaggctgctaaaggttatgaaattaccgatgaagctcttttgtcaggtcttggcgacccactaggtcaagctacttatcagcttggtttggctattgctaacaagattgatgatgatttggtcgcagtagctaaaactgcaacacaacatattacagaaactcctacaactcttgcagcaattgataaagctcttgagatttttgaggacgaagaagatgcgcaatatgttgctatcatcaaccctaaagatgctatcaagctaaaaactgacgtagcaaaagaatggactaaaggttcagagcttggtgcagatatggttgtatccggaacgttcggtgaagttgccggtgtgcaaatcgtccgttctaaaaaagttgatgaaggtaaaggctttatcgtcaaagtctctcctagccaaactcagacagacgatgccaacaaatatggtgcgtttgttatcatgctaaaacgtgatgtggctatcgaaacagaccgtgacatccttaaaaagacaacggttatcactggcgatgaacactatggtgtttacctatacgaccctacacgagttgtaaaattcggtgag

SEQ ID NO: 6938 - DNA, 306 bp, Streptococcus pneumoniae
  misc_feature (1)..(306): tiling:Spneumo1:WAN024BMD; WAN023NTW spn068b06_22||||21440 ..21745|+|306 bp|Glimmer 2.02 orf prediction|S.pneumoniae| 23F-1|WAN01UCUD|ORF
atggtttttgtcccaactgataatatcattttgtcaaccatggaaacagttaagcaggtttctattaaacacaaggttccagtattcggtggttcaacagaaatgattgctgttggtggcttgtataactacggaaccaattatgaagaattgggaagacagacagctcgcatgctgattcgtgttttaaaaggtgaggaaccagaaaatatagcagttgagttgcctgaaaaactggaattgcataccaatcaagaaatggcagatgcattgggaattgatattagtaagttagaaggcaaggaa

SEQ ID NO: 6939 - DNA, 246 bp, Streptococcus pneumoniae
  misc_feature (1)..(246): tiling:Spneumo1:WAN024DKU; WAN023K8G 82448_151||||86023..8 6268|-|246 bp|EGAD orf prediction|S.pneumoniae|TIGR4|WAN01 UC25|ORF|010
atggttttttcaaagagttccttgggtagaaagccaacagacatcccttcgacaatcaaaattggtttggctccagacaagacctcactagccttccaaggttcttcaattgtcaagacatccatacccgcctgcaagcaaggatatctctctgcaaactctccagttcatgcgccactggcagactggctgtcaccttttgattcggcgcgtccttgggtactaccagatggcgtcctgaggtga

SEQ ID NO: 6940 - DNA, 87 bp, Streptococcus pneumoniae
  misc_feature (1)..(87): tiling:Spneumo1:WAN024DBT; WAN023R8U contig_1535_9||||6469 ..6555|-|87 bp|Glimmer 2.02 orf prediction|S.pneumoniae|67 0|WAN01UDMI|ORF|000
atgtacacttatgacctcttatcatctgcctatgtttacaaccatagtaataaaaatctttatactttgtgccatctttctttttct

SEQ ID NO: 6941 - DNA, 1164 bp, Streptococcus pneumoniae
  misc_feature (1)..(1164): tiling:Spneumo1:WAN024FOM; WAN023PJI pne32_15||||12510..13 673|+|1164 bp|Type 16F capsule operon, Glimmer 2.02 orf pr ediction|S.pneumoniae||WAN01UCIC|ORF|000
atgtacatgaaattgattaaattattgaaaaaatatataaatttatacattagtagttcggtgcctaagacaaataaattgttaatttttggatcatggttaggtgaaaaatatgcagacaatccaagatatttgtttgagtatgtgattaagaatcgtcccgatttaaaagctatatggattacaagtaatcaagatgtttttaaagaattacagaagaaacaatatctcgtgatgatggcagaggcacctgaaactcggaaaattgttaaaaaagcaaagtatatttttacagcaactggtatttttgatattggagaacaaaatgctaacttcgttggaggtgcctatctaattaatctatggcatggcattcctttgaaaaaaatcatgtatgatgataaacattcagcacttcacaaacgtagtaaactagtgacttgggtagaaaaaattcctcttcgaaactattttgttatttctactagtacggcaataactcaaatttatcagtctgcttttcgcgtaaagaaatctaatatattagaacttggtcaacctaggaatgactatttttatgataagtctaatccagtgagttcattaatacaggaattaaaaagtaaaaatattatcttatatatgccgacacatcgcaatgaaggaaagaaacaaatagatctagataagttaatggatttagaacacttaaataattggtgtgaagaaacaaagtcaatttttgtaattaaaaagcatttctatcattcaaaagaaaaaactatcgataagaaatattcttcgataattgacgtgacaaatgagaaggtggatgttcaagaattactcaaatgttcaaatgttttaataactgactactcaagctgctatattgactacttattgttgaatcgtccaattatattttttaattatgattatgatgattacttgcgggtggatcgttcgctatattttccatatgagaatgttactccaggggagaaatgtcaaaactttgatgaattattagtgactttgcaaaatctatatgtaggaaaagatgattatagagaagaacgtgaaaatatcaaaactttcttttattctagtgaaactcagaagtcagtttctgaaaaaataattaatcacgtactaaatcta

SEQ ID NO: 6942 - DNA, 1292 bp, Streptococcus pneumoniae
  misc_feature (1)..(1292): tiling:Spneumo1:WAN024BYN; WAN023S14 contig_1623_12||||569 6..7162|+|1467 bp|Glimmer 2.02 orf prediction|S.pneumoniae |670|WAN01UDAF|ORF
atgtaccaatatttaacctatccacgggatggatatgatgagggttctttgaagaaagacctgatttacaaattgataacgatacatagcactgaaggctcgcatttgaagaagcttaaaagctactatttgggtgagcatgctatcttagaacacacgagacgcaacgtgaacgcacctaattacaagacggtagccaatcatgccaaggatatcgcagacacggctacgggctattttatgggcaatcctatcaagtataacaatactgctgacggtgatatcgatgaattgcttacagcatttgacggggctgagattgaccaagtagatgctcagaatgctttgaacatggctatctatggtcgtgcttacgagtacatctatgctaaagagggtatggctgagttggattcaactagtattgatccggagaatactttcatggtctacgatgatagtattgagcggaagcctttgtttgcggtctattactatgaagtaaaagacgatacgaaagacactaccaagcaccaggctgaggtctttaccgaaaatctgcactatcacatggtgctgagaagtacagattcaggaacaactcagagcgaggaggcaacacctcacaaccttggtcaaatcccaattatcgaatatcgcaacaatcactttgcaattggtgactatgagcaacaaattagcttgatagacgcttataattccttgatggggaatcgtgtcaatgataaggaacaggctgtagagtctatccttgtcttgtatggcacgcagttagcagacactccagaagacgctaaggtagcgatgaagattctttctgaagaaggtcttttggaattaccgggcgatagtgcaagagctgagttcttgaagaacacgttggacgaaagtgctactgaaatcttgcgtacagctcttaaagaggacatctacacatttagccatgtgcctaatttgactgatgagaatttcgcagggaatacatcaggcgtagccatggaatttaagctgatgggccttgagatgattactaagaccaaggaagcgaactataagcgaggattgcgtcagcgtattgcgatttttgctcattacttaggcatgaagcagattgctttagagtctcattcaatcgttccacaattcagtcgtggtttgcctaagaacttactagaaatctctcagatcgtgaacaaccttgaaggtaaagtgacgaatagacagcttatttctctcttgccgtttgtggaagaccctgatgctgagctaga

SEQ ID NO: 6943 - DNA, 1221 bp, Streptococcus pneumoniae
  misc_feature (1)..(1221): tiling:Spneumo1:WAN024DGW; WAN0240RV |murM||AAG34917.1|||1 221 bp|MurM|S.pneumoniae||AF281136|ORF|000
atgtaccgttatcaaattggcattcccacattagaatatgatcagtttgtcaaagaacatgaattagctaatgtattacaaagcagtgcttgggaaaaagtgaaatctgattggaatcatgagaaatttggtgtctatgaagaggggaagttactggctgtggctagtattctcataaaatctctgcctttaggctataaaatgttttatattccaagaggtcctatattggattacagggatatagaacttttaaagtttgtcctgcagtccattaagtcttatgctcgcagtaagagagcggtttttgtgactttcgatccaagtatttgtctatctcaatatttggtcaatcaagataagatagaatatcctgaaaatcttgctattgttgagattttagggcaattaggagtgaaatggtctgggcggacaaccgagatggatgacaccattcagcctcgtattcaggcgaaaatatataaggaaaattttgaagaagataaactttctaaatcaacgaggcaagctatccgaacagcacgaaataaagggcttgagattcaatatggtggactggaactattagattcattttcggagttgatgaaaaaaactgagaagcgaaaagagattcatttaagaaatgaaacctattataaaaaattattagataactttaaagaagattcttatatcacgctaacgagtttggatgtttctaagcgtttaagagaattagaggaacagttagaaaaaaatagagtagttgcagaaaaatttaatgatgccaccaaaccttcaaaaattcaggaaaatataaaagaaaaagaacgtttagaagaggaaatagatttcttgcagggatatatgaatatgggaaaatcaaacattcccttagcggctactttgagtttggaatttggtattacctctgtcaatctatatgctggtatggatgatgattttaaacgttacaatgcaccaattttaacttggtatgaaacggctcgctatgcctttgagcgaggtatgttgtggcaaaatttaggtggtgttgaaaactctctcaatggtggactttatcattttaaggaaaaatttaatccaacgattgaagaatatttgggtgaatttacaatgcctatccatcctctctatcctctgttaagacttgctcttgatttccgtaaaacattaagaaaaaaacatagaaagtaa

SEQ ID NO: 6944 - DNA, 81 bp, Streptococcus pneumoniae
  misc_feature (1)..(81): tiling:Spneumo1:WAN024DT3; WAN023NHC spn112a10_3||||4129.. 4209|-|81 bp|Glimmer 2.02 orf prediction|S.pneumoniae|23F- 1|WAN01UCU6|ORF|001
atgtacctacccctttcgctacatgttactatcagtttagtctattataccataaaaaacatccgacttgcgacctatttt

SEQ ID NO: 6945 - DNA, 840 bp, Streptococcus pneumoniae
  misc_feature (1)..(840): tiling:Spneumo1:WAN024AXK; WAN023OP9 pne79_19||||15025..15 864|+|840 bp|Type 37(2) capsule operon, Glimmer 2.02 orf p rediction|S.pneumoniae||WAN01UCFV|ORF|000
atgtacgactatctaatcgtcggtgcgggtttgtctggagctatttttgctcacgaagctacaaaacgtggaaaaaaagtaaaagtgattgataaacgcgatcacattggagggaacatctactgtgaaaatgtagaaggtatcaatgtccataaatatggtgcccatatcttccatacctcaaacaaaaaagtttgggactatgtcaatcaattcgctgaatttaacaactatatcaattcacctgtcgcgaactataaaggaagtctttataatcttcctttcaatatgaatactttctatgctatgtgggggacaaaaactccacaggaagtgaaagataagattgctgagcagacggctgatacgaaggatgttgagccaaaaaatctggaagaacaagctatcaagttgattggtccggatatctatgaaaagttgatcaagggctatactgaaaagcaatggggacgctcagcaacggaacttcctccatttatcattaaacgtcttccagttcgtctaacatttgataataactattttaacgaccgttaccaaggaattcctattggtggttataatgtgattatcgaaaacatgcttaaagacgttgaagttgagcttggtgttgatttctttgctcaccgtgaagagttagaagcatcagctgaaaaagttgtcttcacaggaatgatcgaccagtattttgactacaaacacggggagttagaataccgtagccttcgctttgagcatgaaattttggacgaggaaaattatcaagggaatgctgtagtgaactatacagagcgtgagatcccttatactcgtatcatc

SEQ ID NO: 6946 - DNA, 1101 bp, Streptococcus pneumoniae
  misc_feature (1)..(1101): tiling:Spneumo1:WAN024F4D; WAN023OK5 pne86_21||||16694..17 794|+|1101 bp|Type 43(2) capsule operon, Glimmer 2.02 orf prediction|S.pneumoniae||WAN01UCFZ|ORF|000
atgtacgattatcttattgtcggagctggattgtcaggtgcaatctttgctcatgaagcaacaaaacaaggaaaaaaagtaaaagtaatagataaacgtgaccacattggtgggaacatctattgtgagaacgttgaaggaatcaatatccataagtatggtgcccatatcttccatacctctaataaaaaagtttgggactatgtcaatcaattcgctgagtttaacaactatgtcaactcacctgtcgcaaactacaaaggaagtctttataatcttcctttcaatatgaataccttctatgcgatgtgggggacaaaaactcctcaagaagtcaaggataagattgctgatcaaacggctcacatgaaggacgttgaacctaaaaacttggaagaacaggctatcaagttgatcggtccagatatctatgaaaagttgatcaaaggctacactgaaaagcaatggggacgttctgcgactgaccttccaccgtttatcatcaaacgtctaccagttcgtttgacttttgataataactacttcaatgaccgttaccaaggaattccaatcggtggttataatgtcattatcgaaaatatgttgaaggatgtggaagtagaacttggagttgacttttttgccaatcgtcaagaattagaggcttctgctgaaaaggttgtctttacaggaatgattgaccaatactttgattataaacatggtgagttagaataccgtagtcttcgttttgagcatgaagttcttgatgaagagaactatcaaggaaatgcagttgtaaactatacagaacgagaaattccttatactcgcattattgagcataaacattttgagtatggtacgcaagataaaacggttattactcgtgaatacccagctgattggaaacgtggagatgaaccatactacccaatcaacgacgctaaaaataatgaaatgtatcaaagatatttagaagaagcaaaaggtaaagatgttatcttctgtggtcgtcttgcagattataaatattatgatatgcacgtagtaatcgaaagagctcttaatgtagtaagagaggaattaggtaataatgac

SEQ ID NO: 6947 - DNA, 384 bp, Streptococcus pneumoniae
  misc_feature (1)..(384): tiling:Spneumo1:WAN024BN5; WAN023O7M spn029h04_65||||52111 ..52494|-|384 bp|Glimmer 2.02 orf prediction|S.pneumoniae| 23F-1|WAN01UCO3|ORF
atgtataaatgtgaaataagagaagattttgaaacagcatggttagaaaatataatggaagtaatagagtttcatgggaggtatgttacaggtgatatgatttcgctaactttatctgatctaagacacttagcagaggggaaatttcttgcttggaatgtagaggatgtgtattcacaagtactatatcttgatgaagatgctaaggaaatgttattaagtgtagagagtcatttatataatttccaagaaatttcccaaaaaataatgtcaggaagattaactcgacaaaactactatcttcttggaaagttgattgatgaatttcatgcagttaaagcggcaatgagagttattgaaacaaaacgtaatgattttaatatt

SEQ ID NO: 6948 - DNA, 594 bp, Streptococcus pneumoniae
  misc_feature (1)..(594): tiling:Spneumo1:WAN024CKL; WAN02418U |wciI||AAP94606.1|||5 94 bp|putative glycosyl-1-phosphate transferase|S.pneumoni ae||AY336008|ORF|000
atgtatagtatattaaaacggttaggagatatatctatatctttaatagttataacgttattttgtccattttttatcctaattgcaattgcgattaagtttgattcaaaaggacctgtaatatttaaacaaaaacgttttggaattcacaaaaaaactttttatgtttttaaatttcggactatgaaagtggagacaccaaaaaatgtggcaactcgagatttacaaaatccagagcagtggatcactagagtgggaactttcttaaggaaaacatctctagatgaattgcctcaattatgtaatattcttgttggtgatatgagtattgtaggaccaagacctgccctttggaatcaatttgatttgattgaagaaagagacaaatatggagcaaatgatattttacctggtttaacaggttgggcacaaatcaatggtcgtgataatctatcaatagatatgaaagctgaattggatggatactatgtgacacataaatcgttgctaatggacattagatgtatagtaagaacaataccttatgtgctgaaacgcaaaggaattgtagagggaagtcaaaaagagagttaa

SEQ ID NO: 6949 - DNA, 261 bp, Streptococcus pneumoniae
  misc_feature (1)..(261): tiling:Spneumo1:WAN024BLA; WAN023NAZ spn143g10_62||||52215 ..52475|+|261 bp|Glimmer 2.02 orf prediction|S.pneumoniae| 23F-1|WAN01UCOL|ORF
atgtatcggctagatattgataaaaaagctctcaagcaacttaaaaaactagataccccaaccagaaaacaaatcctatcctggcttgctaaaaacattgaaaacacgaccaatccacgacaacacggaaaagcactaaaagccaaccttgcaggttactggcgatacagagtagagaattaccgcatcatctgtgatatccaagacgataaactagtcgtcctagccgtggaaatcgcccaccgcagagatgtctataaa

SEQ ID NO: 6950 - DNA, 534 bp, Streptococcus pneumoniae
  misc_feature (1)..(534): tiling:Spneumo1:WAN024C3J; WAN0246QN 203668-57-9_3||||864. .1397|-|534 bp|Glimmer 2.02 orf prediction from Patent Seq uences|S.pneumoniae||WAN02470E|ORF
atgtatcgtcctatttataaggggatgaaacttgagactatggattttggtgctcctaaaggtaattatcatctaactgcttataataaacttaaagaacgtatggatagtggagatatggcagaaatagacatttatcagcaatatgataatctatggaggattgagtataaattctacaatgaaggcaacataaaaatagaattaaaaaatggattaccattcttagctaaaattccagtgtatattgaaaatttcaaaggcttagaatttaataatttaggagttaatgagaagatttatcttttcgctcttcgtaataaacctgaattatttgcagaatctgataaacgaacggtagctaagtataaaaaacttgccgaaagtatctctgaagttaatttgaatgtcttttttcaaaatgctttagattttgttgaaatctttaatcaagagccttgtctgataaatttttttgagtttatgaattctatgttacaaggcgatattccaaagttaacaataaaccaagaa

SEQ ID NO: 6951 - DNA, 1098 bp, Streptococcus pneumoniae
  misc_feature (1)..(1098): tiling:Spneumo1:WAN024AXL; WAN023OLG pne84_18||||16189..17 286|+|1098 bp|Type 41A1 capsule operon, Glimmer 2.02 orf p rediction|S.pneumoniae||WAN01UCES|ORF|000
atgtatgattatttaatcattggagctggtttgtctggtgcaatctttgcgcacgaagctacaaaacgtggaaaaaaagtaaaagtgattgataaacgtgatcacatcggtgggaacatctattgtgagaatgtagaaggtatcaatgttcataaatatggtgcccatattttccatacttctaataaaaaagtttgggactatatcaatcaattcgctgagtttaacaactatatcaactcacctgtcgcaaactacaaaggaagtctttacaatcttcctttcaatatgaataccttctatgctatgtggggcacaaaaactccacaggaagtaaaagataagattgctgagcagacagctgatatgaaggatgttgagcctaaaaatctggaagaacaggctatcaagttgattggtccagatatctatgaaaagttgattaagggttatactgaaaagcagtgggggcgctcagcaacggaacttcctccatttatcattaagcgtcttccagttcgtttaacatttgataataactattttaacgaccgttaccaaggaattcctattggtggttacaatgtcattatcgaaaacatgcttaaagacgttgaagttgagcttggtattgatttctttgctcaccgtgaagagttagaagcatcagctgaaaaagttgtcttcacaggaatgatcgaccggtattttgactacaagcacggagagttagaataccgtagccttcgttttgagcatgagattttagacgaggaaaattatcaagggaatgctgtagtgaactatacagagcgtgagatcccttatactcgtatcatcgaacacaaacattttgaatatggaatgcagccaaagacagttatcacgcatgaatatccagctgactggaagcgtggggacgagccctactatcctattaacgatgagaaaaataatgctatgtttgctaaataccaagaagaagcagcgcagaatgataaagttatcttttgtgggcgtttagcagactataaatattacgatatgcatgtggtgattgaacgggcgcttgaggttgtggagaaagaatttagtaat

SEQ ID NO: 6952 - DNA, 1098 bp, Streptococcus pneumoniae
  misc_feature (1)..(1098): tiling:Spneumo1:WAN024F4F; WAN023PH6 pne35_19||||17102..18 199|+|1098 bp|Type 17A capsule operon, Glimmer 2.02 orf pr ediction|S.pneumoniae||WAN01UCHX|ORF|000
atgtatgattatttaatcgttggtgctggtttgtcgggagcaatttttgcttatgaagcaaccaagcgtgggaaaaaagtaaaagtgattgataagcgtaatcatattggtggtaatatctactgtgaggacgttgaaggtatcaacgttcacaagtacggtgcccacattttccatacttcaaacaaaaaagtctgggattatgtaaatcaatttgctgaatttaacaactatatcaactcgcctatagccaattacaagggcagtctttacaatcttccttttaacatgaatactttctatgctatgtggggaaccaagactcctcaagaagtgaaagataagatagctgaacaaacggctcatatgaaagatgttgagcctaaaaacttggaagaacaagctattaagttgattggtccggatatctatgaaaagttgattaagggatatactgaaaaacaatggggacgttctgcgacagacctcccaccatttatcattaaacgtctaccagttcgtttaacctttgataataattattttaatgaccgttatcaagggattccaattgggggttacaacgttatcatcgaaaatatgctgaaggatgtagaagtagaacttggcgttgacttttttgccaatcgtcaagaattagagacttctgctgaaaaagttgtcttcacagggatgattgaccaatactttgattataagcatggtgagttagaataccgtagtcttcgttttgagcatgagattttagacgaggaaaattatcaagggaatgctgtagtgaactatacagagcgtgagatcccttatactcgtatcatcgaacacaaacattttgaatatggaatgcagccaaagacagttatcacgcatgaatatccagctgactggaagcgtggggacgagccctactatcctattaacgatgagaaaaataatgctatgtttgctaaataccaagaagaagcagcgcagaatgataaagttatcttttgtgggcgtttagcagactataaatattacgatatgcatgtggtgattgaacgggcgcttgaggttgtggagaaagaatttagtaat

SEQ ID NO: 6953 - DNA, 123 bp, Streptococcus pneumoniae
  misc_feature (1)..(123): tiling:Spneumo1:WAN024DHT; WAN023QPS contig_1336_7||||5224 ..5346|-|123 bp|Glimmer 2.02 orf prediction|S.pneumoniae|6 70|WAN01UE74|ORF|000
atgtattacagtaagtacctgacgaaaaacgtgatcttggcaggtggtattgagactggtattgggatgactttccacaattttcataacggtatagagaccaactcctctctcctccccttt

SEQ ID NO: 6954 - DNA, 321 bp, Streptococcus pneumoniae
  misc_feature (1)..(321): tiling:Spneumo1:WAN024GJE; WAN023LZA 314351_906||||479620. .479940|-|321 bp|EGAD orf prediction|S.pneumoniae|R6|NC_00 3098.1|ORF|100
atgtattttccaaccgctccagcgacggcatccttggttttcaaaggacgttccaagcctggactggtaatttctaggaaatattgttctgggaagggatctggcttgatggtgtctaggacaggactgataatttctgtcaagtctgccgtgtcgttcaaggtaattccttcgggtttatctacaaaaatactgagaatcatgtcactgccaatctttccatactcgatatccacgagttcaaaaggagcttctatgacaggttctacaacttctctgactaattctacgattgttgcgattgcgtccacctcctcataa

SEQ ID NO: 6955 - DNA, 78 bp, Streptococcus pneumoniae
  misc_feature (1)..(78): tiling:Spneumo1:WAN024BKF; WAN023MJY spn194g09_18||||12535 ..12612|-|78 bp|Glimmer 2.02 orf prediction|S.pneumoniae|2 3F-1|WAN01UCP7|ORF
atgtatttttacgagtcagtatcttgggatactggtttttacttttttagactttttgactacttgttaaaactgggg

SEQ ID NO: 6956 - DNA, 1143 bp, Streptococcus pneumoniae
  misc_feature (1)..(1143): tiling:Spneumo1:WAN024BQJ; WAN023PI2 pne34_14||||11451..12 593|+|1143 bp|Type 17F capsule operon, Glimmer 2.02 orf pr ediction|S.pneumoniae||WAN01UCHZ|ORF
atgtcaaaaaaagaaatcaaaccaatttgtttttacttaccgcaatttcatcccatcccagagaatgatgaggctcatggagaaggatttactgaatggactaatgtaaagaaagcctatccactttatgacgggcataatcaaccacgagttccatacaataataattattatagtctattagataaagaagtcttgattcaacaggcagaattggctaaaaagtatggaatttacggattttgttattatcattactggtttaaaaatggtaaaaaactattagaaaaaccagtagaaatgatgctagaaaacaaggatgttgatatacctttttgtttgagttgggcaaatgaaaactggactaggcgttgggatggagggaatcatgaaatcattgttgaacaaaactatgacgacttaaatgatttggagaaacatgtggattatctgtgtcaattttttaaagatgaccgatatattaagattgacgggaaaccgctcttgttgatttataagccagagctaattccaaatttagtaaagacaatggaaattatcagaaatcgtgctcgaaagaatggctttaaggatttagagattattgtacagtttccaaagttcttgttaaataatcatcagcttgagttatttgatggatttgcagaattccaaccgatttttgagattcatatggaaaagcacgagagaaaaaatccagtttaccgatctgtgaaatcttttctacttaaagttggggctcgaaatttagtacaaaaacttgagattagaggtgaaaaaaaggtgcataataaagctctcttagataggagagattatgatgcaacatggactaatattattaatcgcccgattaaggataataagatgattgctggtgcttttgttgattgggataataccgctagaaataagaatgggcgagttttcgatggagctaatccagaaaaatttgaaggttacatgcgacaactaattgaaaaaattcaaaaagagtatcaatcagaaattgtttttataaacgcatggaatgaatgggcggaaggagcataccttgagcctgataaaaaacatggatatggctatctagaggccttgaagacagttatagacgagacaagg

SEQ ID NO: 6957 - DNA, 792 bp, Streptococcus pneumoniae
  misc_feature (1)..(792): tiling:Spneumo1:WAN024BHU; WAN023OW5 pne69_10||||6060..685 1|+|792 bp|Type 31(1) capsule operon, Glimmer 2.02 orf pre diction|S.pneumoniae||WAN01UCDA|ORF|000
atgtcaaaaaagtataaaattatagtagcgactcataaaagatttcaaatgccagaagataaggacttatatgttcctgttcaggttggcagtgaaggaaaggaaaatttaggctaccaacgagataatcaaggtaatcatatttcatatcttaatccttattattgtgagttgacaggattatactgggcttggaaaaatttagactgtgattatctaggattagttcattaccgacgttattttacagataagaaccgaccttatcatgataagattaacatgaatgaagttatcctatcggctgatcaagttaaggagctcatgtctgaagtagatgtcgttgttcccaaaaagagaaaatattatatagaaactctctattctcattatgctcacactcatgattccagtcatttagatgtaacacgagaaattataaaagaggtttcgccagaatatttagcaacatttgacaaggtgatggcctatcgtagcggctacatgttcaatatgtttatcatgtccaaagaaaatgtatcatcttattgtgagtggttgttccctatcattgatgagttgtacagaagattggacataacagggtactctgcttttgatgcaagactatttggacgtgttagtgaacgtctctttaatgtttggttagattaccaaaatctacatgttaaagaacttccgtttatgtatatggaaaaggtggatttgcttgaaaaagggaaatccttcttaatggcaaaatttttcggaaagaagtatggtcagagtttt

SEQ ID NO: 6958 - DNA, 792 bp, Streptococcus pneumoniae
  misc_feature (1)..(792): tiling:Spneumo1:WAN024BHV; WAN023OGE pne91_11||||6048..683 9|+|792 bp|Type 47A1 capsule operon, Glimmer 2.02 orf pred iction|S.pneumoniae||WAN01UCEE|ORF|000
atgtcaaaaaagtataaaattatagtagcgactcataaaagatttcaaatgccagaagataaggacttatatgttcctgttcaggttggcagtgaaggaaaggaaaatttaggttaccaacgagataatcaaggtaatcatatctcacacctcaatccgtattattgtgaattgacaggattatactgggcttggaaaaatttagactgtgattacctaggattagttcattaccgacgttattttacagataagaaccgaccttatcatgataagattaacatgaatgaagttatcctatcggcagatcaagttaaggaatttatgtctgaagcggacgtcgttgttcctaaaaagagaaaatattatatagagactctctattcacattatgcacatactcatgattctagtcatttagatacaacgcgtgaaatcataaaagaaatcgcaccagagtatctagaaacatttgataaggtgatggactgtcgtagtggctatatgttcaatatgtttatcatgtccaaagaaaatgtatcatcttattgcgagtggttattccctatcattgatgagttgtacagaagattggatatatcaaggtactctgcttttgatgcaagactatttggacgtgttagtgagcgtctctttaatgtttggttaaactaccaaaatctacgtgttaaagaagttccgtttatgtatatggaaaaagttaatttatttgagaagggcaaatccttcttgaaagccaagtatttcggaaaaaaatatggacagagtttt

SEQ ID NO: 6959 - DNA, 504 bp, Streptococcus pneumoniae
  misc_feature (1)..(504): tiling:Spneumo1:WAN024BUI; WAN023Q7F contig_1244_2||||255. .758|-|504 bp|Glimmer 2.02 orf prediction|S.pneumoniae|670 |WAN01UEHP|ORF
atgtcaaaaattaaaattcttgacgcttgctgtggcagtcgtatgttttggtttgataaaaacgaaagtcacacaatttttatggacattaggcaagaaacatttgagatacatgacaaaaaggtcaatgtagaccctgatattatcggtgattttcgtgacatgccttttgaagacaacacatttaatctagttgtgtttgatccaccacatctaaaatgggctggacctaattcgataatgaaagctcagtatggacagctggacaaagttacctggtcggaagatttggccaagggttttgaagaatgtctgagagttctaaaagttggcggcacactagtctttaaatggtctgaccgtcagataaatgtaaagaaattactagaggtgataccattcaagcccttatttggtcagcaaagaggcaccacacactggctaacgtttgtaaagtttgaggaggacaagaatggagtggacggattgggtggattggaaacc

SEQ ID NO: 6960 - DNA, 1086 bp, Streptococcus pneumoniae
  misc_feature (1)..(1086): tiling:Spneumo1:WAN024BRS; WAN02418P |||AAP94611.1|||1086 bp|putative glycosyltransferase|S.pneumoniae||AY336008|ORF
atgtcaaagaaaaaaatttcttatgttacaaataatattgctccttttagggttatgttattagatgagttagccaagcatgcagaagtgactcttttttatgtgcacgaaattgaggcgggggtaaaggctgagtatgtcaagctacgacctgttcgtaccaagctccaatcaatcacagaactaggtttatttcagacgtttcaaatgttgaaagagatggatatggtcttctttgatggctatactgggtgggaaaagatgttcttgatgagcagtatgtggctaacaagacggcagtacgctatttctgttgatggtataataaatcatagtaatatctcacttaagcagagactgttggattttattaagtctgttgctctaagcaaagcggagtttgtgcttagcaccaataccccaacagatgcttatatacagcaattagctcccaaggcaaagattaaacgacacatattttcaactctttcacaagatgatttcaaaaacatgatagaggttgcctcggatacggttttcacaagatatagtattcgaaaatctgagaaaaatctgctttttgtgggacagtttatcaatagaaaaggagtcgatgagcttttggcttttatgaaagagcacgaagctgatacttcgttgcagttaattatggtcggaggtacaagagaagaattgtcagtttttgaaacagagattccttctaatatacatataattccttttctagaaaaaactgatatcctagagttgatgcgggtggcagatgtctttgttttgcccactcgagaagatatttggggactggttattatagaggcgctatcaatgggcattcctattgtttctacggatcgttgtaacgcagccttggagtttgttagggatggcgaaaatggttatctgatgcaggaagtgactgcggtagaattggctaacaagcttaaggctacctttaaactagatgctgagcatgttgctcgctatgatcaaaaactgatgcaagactataatctggaaggttcagcaaaaaatattatggacatcttggagggaattcatgtttaa

SEQ ID NO: 6961 - DNA, 261 bp, Streptococcus pneumoniae
  misc_feature (1)..(261): tiling:Spneumo1:WAN024AWP; WAN023MMO spn191c12_8||||2536.. 2796|-|261 bp|Glimmer 2.02 orf prediction|S.pneumoniae|23F -1|WAN01UCQJ|ORF|001
atgtcaaagacgagtatgagcatccgtctggatagtgaggttaaggagcaggctcaacaggtgtttagtaatctgggaatggatatgacaacggctgttaatattttccttcgtcaagctattcaatatcagggattgccttttgatgttagactagacgaaaataggaagttgcttcaagtgttaacggatttagaccaaaatcgtaatatgagtcaatcttttgaatcagtctcagacttgatggaggacttgcgtgct

SEQ ID NO: 6962 - DNA, 90 bp, Streptococcus pneumoniae
  misc_feature (1)..(90): tiling:Spneumo1:WAN024BQR; WAN023PP0 pne20_22||||17765..17 854|-|90 bp|Type 11A capsule operon, Glimmer 2.02 orf pred iction|S.pneumoniae||WAN01UCJ5|ORF
atgtcaacagaattttcagaatttttgaaaattatttttcaaacggtaacttctcaaagtaacttccacttgcctaaccaaagtggaaat

SEQ ID NO: 6963 - DNA, 456 bp, Streptococcus pneumoniae
  misc_feature (1)..(456): tiling:Spneumo1:WAN024DE4; WAN023MWQ spn175g07_15||||10140 ..10595|+|456 bp|Glimmer 2.02 orf prediction|S.pneumoniae| 23F-1|WAN01UCLL|ORF|001
atgtcaagcattcacaccaaaaattcatctcttaaaagcaaatcccgatttaacgagatgtttggggatcctttaaataataacaagaaatttgcagtaaaaacgggacaacagtgttttaaattttcaagtggaaaatttcttgataaacatgatagagtttttgaaggttatcctgcctatggtggaaatggcattgcttggaaaagtcgaaaatatttaattgataatcctactatcatcattggtcgtgtaggtgcatattgtggtaatgtaagaactacccacggtaaggtatggataagtgacaatgctatatatataaaagaatttaagaattccgatttcaatcttgtatttttattagaattaatgaaagtaattgattttagtaaatttgctgatttctcaggtcaaccaaagataactcaaaaaccattagaaaatctaactaat

SEQ ID NO: 6964 - DNA, 582 bp, Streptococcus pneumoniae
  misc_feature (1)..(582): tiling:Spneumo1:WAN024BYH; WAN023S0Y contig_1623_18||||101 18..10699|+|582 bp|Glimmer 2.02 orf prediction|S.pneumonia e|670|WAN01UDAF|ORF
atgtcagaagaaatcaatgcaactgtatctactgaatcaactgagaccgtcgacactcaaggaaatgttgatacagtgcaagaagaaaagcacgaacgaactttcactcgtgctgaaatcggtaagatgctatctgccgagcgctctaaatgggaagctgagcaagaagccaaggaaaatgaagctaagaaacttgccaagatgaacgctgacgagaaacagaaatatcagttggatcagcgtgagcaagaactagctgaccgtgaaaaggctattgctcgtaaagaattgaccgcagaagctaaagcaatgctaagtgaacgtgacttacctgttgagttagtgaacgtggttgatttgacaagcgcagagacggtatcgcagtctgtcgctgtattgcagaaatcatgggagcaagccgtgcaaaaaggcgtacaagaaaagctaaaaggcggagccccaatgaaacaagcgccagtcgatagtgacggtatcacaaaagaagaatttgctcgtatgggttatcagagtcgaaatgaactctatcaaaagaacccagaactctataagaaattgaaaggt

SEQ ID NO: 6965 - DNA, 594 bp, Streptococcus pneumoniae
  misc_feature (1)..(594): tiling:Spneumo1:WAN024CCU; WAN0240FP |cps19AM||AAD19914.1| ||594 bp|dTDP-4-keto-6-deoxyglucose-3,5-epimerase|S.pneumo niae||AF105113|ORF|000
atgtcagataatttttttggaaagacacttgtggtacgcaagattgatgctataccaggactgctagagtttgacattcccgttcatggagacaatcgtggttggtttaaggaaaatttccagaaggaaaagatgctaccgcttggttttcctgaaagcttctttgctgcagggaaactgcaaaataacgtcagcttttctcgcaaaaatgttcttcgaggactccatgctgaaccttgggacaagtatatctctgttgcagacgatgggaaggttttaggatcttgggtagatttgcgtgaaggcgagacctttggaaatgtttaccagacagagattgatgctagcaagggaatttttgtccctcgtggcgtagccaacggttttcaagtcctctcagatacagtttcctatagctatctggtcaatgactactgggctcttgaactcaaacccaaatatgcctttgttaactatgctgacccagcattgggaattgagtgggaaaacctaccggaagctgaggtttcagaggcagacaaacaccatcctctattaagggatgtcaaaccacttacgaaagacgagttgtaa

SEQ ID NO: 6966 - DNA, 1116 bp, Streptococcus pneumoniae
  misc_feature (1)..(1116): tiling:Spneumo1:WAN024BN3; WAN023O7K spn029h04_67||||53604 ..54719|-|1116 bp|Glimmer 2.02 orf prediction|S.pneumoniae |23F-1|WAN01UCO3|ORF
atgtcagtacagaaaacaaaaaatacattaaatgaacctttaaaaacattgcttgatgaatatcatgataaagtgggaaaaattaacaactcttcagaactattcgatatatatagcccgtggaataattttaatatagaaaaaatgatagaatcttttaataaggctttacaatctaatagtaataatttttcttggttagatattgaggaagatttacctaaaagtacagatgttgatatcaagtatggattacctaatcacataaaaggaaatattgatgaagcaacattatttttatgtttagtgaatccaaatattgatgaagtaaaaaccgagaagaaggatgttggaattcacacatattataaaaaagcaagagaaatggagagtggagacgactcattaaacatcttaaatgataaaggcaaattgagaatagatcctaaagtatatatcaaagaacatatcttggatgtaagagaaacgagcagtattttatacaatgaattacaaattgtaaaacaaactcgctcttataaagatacttactatctaggacattacttgccacactttataaaagaatttttaaataaaaaaggctcttttaagaatgttattcacaatttgactgatgagtgggatgagttagaaaaaatgtcaaaaaaaatagctaatttagaggctttcccatttagaagccaaaatccaaattacacttataaaagtaataaaagagcaacaaactttacaaatctactgattgaatcagatagtaaagttaatttgttaagtgcaagagtgattatttggagaatcgttaagcatttagagtcatctcaacataaacccgcctttatattgagaaggtttaatactttttggttacctactatatctaaagttttagaacaagacttgaattttacaaaagaagaaataaatcaaatcataaacgcactagatgaagaatacttttttactgttaggaaaaaagattataacggtcaatcaggatattttgggcgaaatttttgtaaaaataatgaaagaattagtaatagtagttttaaacacttagttcaggaaaccttaggggaatatgtgaaaaaa

SEQ ID NO: 6967 - DNA, 249 bp, Streptococcus pneumoniae
  misc_feature (1)..(249): tiling:Spneumo1:WAN024BJR; WAN01UC8H ||||||249 bp|Incyte o rf contig SPN2C0434 4121-3873|S.pneumoniae|23F|WAN01UC8H|O RF
atgtcagtctgcttcataaaatcctcctttccaaatcacttatttggatttcataaaagttgttttaccagcaatcgaacagctttagcaaagctcacgggagttccacccctgcatggttctcatgtagccatactcattgcctgcgacggttttatcacgctcggactattgactgtatgggagtatcattatcacgataagaatgtcgttgcaggcaatcctgctaaagattgcttctcggatcac

SEQ ID NO: 6968 - DNA, 738 bp, Streptococcus pneumoniae
  misc_feature (1)..(738): tiling:Spneumo1:WAN024DDU; WAN023R0H contig_1407_3||||772. .1509|-|738 bp|Glimmer 2.02 orf prediction|S.pneumoniae|67 0|WAN01UDX7|ORF|000
atgtcattaggaaataagcaaataatggcggacaatatcaaaagacttttaagtgcaaaaggtttaaaccctcgtcaattagctattgcattagattttaagtatacaaccgtcaacgattgggtaaatgctaaaacttacccacgtatagataaaatcgaaatgctggctaattttttcaacgtttcaaagtctgacttagtagaaaataaaaacgcagaaacacctaccacttcccccatccaatccatctatgaccaactcactccaccaagacaagaaaaagccttgacttatcttaaaaagcagctgctggagcagaaaaacgaaaacatagtatcagaaaacattatcagtctggacgactacagagaaagcaagacgctccctgttatcggagttgtaaccgccggaaacgggataacccaagacgataacctaaacatggaaaaatgcttttatactgatgaaataccagacgactacgacgctatcgcttatgttgtcggcaactctatggagccaaagataaagaatggcgactacctatttatcaagaatacacctcaagttgactataacactatcggtatcttccaagtagacggcgctaactacgtcaagaaactgcgtcaagggtatttagaaagccttaaccctgattgtgctgatattcaactagacgaaagcaacgatatacgcaccatcggcgaagtcgtgagtatatatagagagaat

SEQ ID NO: 6969 - DNA, 546 bp, Streptococcus pneumoniae
  misc_feature (1)..(546): tiling:Spneumo1:WAN024BLW; WAN023NNM spn097d12_38||||34389 ..34934|-|546 bp|Glimmer 2.02 orf prediction|S.pneumoniae| 23F-1|WAN01UCN2|ORF
atgtcattatcatattattatgaaattaatcctagtacagatatattaaaatgtatagaggaattactatataaagaagataaatgtttcaataatatattaaaaaattggaaagacataagaagaaatcataatgattcctttcctaatttttggtgttatggagctccgggcattttattagctagaaaagaaattttcgataaaactaatattgggaataatgatttatcaataattaaaaatgtattaactaatgtagaaaaaataagagaattgaatttatgtcacggttctgtaggtactatcagttgtcttgatgcaatattgaaagatgaagaaaacctattaataaaagaatctatagatttttattttgataatgtcgtttctcaggtcatcaaaccagaattaagtacggatttgaatactatgaatacattttcttttatgctaggagtatctggagttgtctatgaaatatctcgaaaacaagatgatagattacttaatgttttattactggagttaagaggacatgatgac

SEQ ID NO: 6970 - DNA, 971 bp, Streptococcus pneumoniae
  misc_feature (1)..(971): tiling:Spneumo1:WAN024B9G; WAN023NBN spn143g10_35||||38002 ..39072|+|1071 bp|Glimmer 2.02 orf prediction|S.pneumoniae |23F-1|WAN01UCOL|ORF|001
atgtcatttctatcaaaaaatggagcaggcatcttggtctgccttctcatttctatcgtatcttggtacttaggaggattcttccctgtgattggcgcgcccgtttttgcgatttttatgggcatgctcctacatccctttctctcgtcttataaacaactggatgttggattgacctttagttccaagaaattgctccagtatgccgttatcttgcttggttttggtctcaatatctctcaagtcttcgcagttgggcaatcttcactccctgtcatcctttccaccatttcaatagccttgattgttgcctacctcttccagcgcttctttgccctggatacaaaactggctaccttgattggagtaggttcttctatctgtgggggttctgccattgcagcgacagcgcctgttatccatgctaaggaaaaggaagtagcccaagccatctccgttatctttttcttcaatgtcttggctgcgctcatctttccaaccctcggcacctggcttcatctatccagtgacggcttcgccctctttgcaggaactgcggtcaatgatacttcctctgtaaccgccacagctagcgcttgggacagtctctaccagaccaataccctcgaatccgcaaccattgtcaaactcacgcgaaccctagctatcatccccatcactctctttctctcctactggcaaagtcgcgagcaaaaaaataagcaaggcttacaactgaaaaaagtcttcccactttttatccttcacttcatccttgcatcgctcctaaccacccttctgacttctctcggtgtgtctagtagtttctttacccctctcaaacaactctctaaattcctcattatcatggccatgagtgccatcggtctcaaaactaatctggtcgctatggtcaaatccagtggaaaaatccattgttctcggagccgtctgctggattgccatcatcc

SEQ ID NO: 6971 - DNA, 96 bp, Streptococcus pneumoniae
  misc_feature (1)..(96): tiling:Spneumo1:WAN024BKX; WAN023N19 spn167f04_20||||18030 ..18125|-|96 bp|Glimmer 2.02 orf prediction|S.pneumoniae|2 3F-1|WAN01UCN6|ORF
atgtccaaaaaaccacatgctcctaagacaagagccaacagactggccatcaataatagtattgttcttttttatcattactccttaactagtgtt

SEQ ID NO: 6972 - DNA, 141 bp, Streptococcus pneumoniae
  misc_feature (1)..(141): tiling:Spneumo1:WAN024CQK; WAN023RV1 contig_1609_79||||626 17..62757|+|141 bp|Glimmer 2.02 orf prediction|S.pneumonia e|670|WAN01UDCD|ORF|000
atgtccgataataaacaccctctctctgttttggggaacgccaaaatccttactgttaagcacctgccactcaacatcaaaccccaattcatcaagcgtggtaaggattgtggtgaacgtccgtcccttatcgtgattgag

SEQ ID NO: 6973 - DNA, 267 bp, Streptococcus pneumoniae
  misc_feature (1)..(267): tiling:Spneumo1:WAN024CVO; WAN023K2I 82838_449||||252456.. 252722|+|267 bp|EGAD orf prediction|S.pneumoniae|TIGR4|WAN 01UC25|ORF|010
atgtcgaataacatacaggcccaaaaaggcaatgacaaaagtcagagtgttgataagggaaatagtttgaatacttataacattgataaggaatgcgccagccagattggcgacaatacggacaaccctcatcagagactgcctgaaccccatggcatcatgcaggtcgtccttaattacactgatgtagagggcgttcatcatgtaggcagacaggtagctcaaggtgtcagagatgaggttgatgatgacaatcataatgactga

SEQ ID NO: 6974 - DNA, 150 bp, Streptococcus pneumoniae
  misc_feature (1)..(150): tiling:Spneumo1:WAN024EVL; WAN023RU1 contig_1607_17||||103 98..10547|+|150 bp|Glimmer 2.02 orf prediction|S.pneumonia e|670|WAN01UDCV|ORF|000
atgtcgagaaaatcaactaatttctcaagtcccctaccaaccctgaaagttttattttcagggttttatttctatcattttattttactttcatttggtggtagaatatttgaaaaaaatgggagagtatttgaaaaaagaaaggtagtt

SEQ ID NO: 6975 - DNA, 99 bp, Streptococcus pneumoniae
  misc_feature (1)..(99): tiling:Spneumo1:WAN024CE9; WAN023O5M spn029h04_137||||1224 73..122571|-|99 bp|Glimmer 2.02 orf prediction|S.pneumonia e|23F-1|WAN01UCO3|ORF|001
atgtcgccaatcgagtggatattagttatgctcattgtcatttcaagtggtgtgacactttggacattgatagttgatcagaaaggggtaatcaagaaa

SEQ ID NO: 6976 - DNA, 99 bp, Streptococcus pneumoniae
  misc_feature (1)..(99): tiling:Spneumo1:WAN024CEA; WAN023RUZ contig_1609_81||||631 17..63215|-|99 bp|Glimmer 2.02 orf prediction|S.pneumoniae |670|WAN01UDCD|ORF|000
atgtcgccaatcgagtggatattagttatgcttattgtcatttcaagtggagtgacagttttgacaatggtagtcgataagaaaggggtgataaagaaa

SEQ ID NO: 6977 - DNA, 297 bp, Streptococcus pneumoniae
  misc_feature (1)..(297): tiling:Spneumo1:WAN024FJN; WAN023NB3 spn143g10_57||||50854 ..51150|-|297 bp|Glimmer 2.02 orf prediction|S.pneumoniae| 23F-1|WAN01UCOL|ORF|001
atgtcgcgtttgcttgctttgagtaaatattctttaaaagtcataaggttaactcctttctgcttatattatagcagaaaaagaagaaagaaaaagaaaggagaaaatatgccagatatcgcaaacggtcgcgaaagagttattgctttcttgaaagagaaaggcattaaaaaagcaactctagcggttgcttacggctttaaacgacaggaagtgacaaacattctaagtggaacgactaaaggtccacgagcgaacagtttcattcttcaggttattgaagattatgggattgag

SEQ ID NO: 6978 - DNA, 126 bp, Streptococcus pneumoniae
  misc_feature (1)..(126): tiling:Spneumo1:WAN024DDW; WAN023NL0 spn103f10_15||||13966 ..14091|+|126 bp|Glimmer 2.02 orf prediction|S.pneumoniae| 23F-1|WAN01UCLB|ORF|001
atgtcggagtattcgggattgagtttttttgaggtagccttggcggagtttcttgacatagttagtgccgtctacttggaagatgccgatggtattatagtcaatctgtggggtattcttgataaa

SEQ ID NO: 6979 - DNA, 234 bp, Streptococcus pneumoniae
  misc_feature (1)..(234): tiling:Spneumo1:WAN024C2V; WAN023MBM 314310_230||||116630. .116863|-|234 bp|EGAD orf prediction|S.pneumoniae|R6|NC_00 3098.1|ORF
atgtcgtatctgataaggaaggggagtctccttgctgttgaagttgaatcaattcattttgtagagtttgcaagtcggcatctaactgatttctttcagctgttattttattcaacttcgtatattcatcctgaatctttgaatactgggtaccattattataattttccgaatttaactgagataggtagtattcaactttcccataatattcctgttcttcaccagaattag

SEQ ID NO: 6980 - DNA, 1230 bp, Streptococcus pneumoniae
  misc_feature (1)..(1230): tiling:Spneumo1:WAN024BHF; WAN023OB4 spn019g01_69||||43162 ..44391|-|1230 bp|Glimmer 2.02 orf prediction|S.pneumoniae |23F-1|WAN01UCLR|ORF|001
atgtctacaaatagaaaaaatgatatgatggtttattgctcattttgtggcaaaagccaagaagaagtacaaaaaataatcgctggcaacaatgcctttatttgtaatgaatgcgtggagctagctcaagaaattattcgagaagaattggttgaggaagtcttggcagacttgtctgaggtaccaaaaccaatcgaactcctccatatcttgaaccactatgtaatcggtcaagatcgtgccaagcgtgccttggcagtggcggtttataatcattacaaacgcatcaatttccacgatacacgcgaagagtcagaagatgtggatttgcagaagtcaaacatcttgatgattggcccaactggttcagggaaaactttccttgctcagaccttggctaagagcttgaatgtaccttttgcgattgcggatgcgacagctctgacggaggctggttatgtaggtgaggatgtggaaaatatcctcctcaaactcttgcaggctgctgactttaacattgagcgtgcagaacgtgggattatctacgtggatgaaattgacaagattgctaaaaagagcgagaatgtatcgatcacacgtgatgtttctggtgaaggggtgcaacaagccctcctcaagattatcgagggaaccgtcgcaagcgtacctcctcaaggtggtcgcaagcatccacaacaagagatgattcaagtggatactaaaaatatcctctttatcgtgggtggtgcctttgatggcattgaagaaatcgtcaaacaacgtcttggagaaaaagtcatcggatttggtcaaaataacaaggcgattgatgaaaacagctcttacatgcaagaaatcatcgcagaggatattcaaaaatttggtattatccctgagttaattggacgcttgcctgtttttgctgctcttgagcaattgacggtcgatgacttggttcgcatcttgaaagagccaagaaatgccttggtcaaacagtaccaaaccttgctttcttatgatgatgtcgagttggaatttgacgacgaagccctacaagagattgctaataaagccatcgaacggaagacaggggcgcgtggacttcgctctattatcgaagaaacaatgctagatgtcatgtttgaagtaccgagtcaggaaaatgtgaaattggtccgcatcactaaagaagctgttgatggaacggataaaccaatcctagaaacagcc

SEQ ID NO: 6981 - DNA, 309 bp, Streptococcus pneumoniae
  misc_feature (1)..(309): tiling:Spneumo1:WAN024BYD; WAN023S0U contig_1623_22||||119 24..12232|+|309 bp|Glimmer 2.02 orf prediction|S.pneumonia e|670|WAN01UDAF|ORF
atgtctatagagttgctgaagaaattaacaggcgaagaagatactcagcttctcatgttgctccaaacaagagctacaaatcttatcttgtcagagactaatcgaacatctttgacacctgctttaagtctcttaatacctgaggttgctatcgaactccacaaccgctcaggagcggaaggagagcattcaaggaccgaaggtggtatagcagtagtctacggagaaaacggcctgtctacgggccttttacagcgtatacgtatgcatagactagcaagggtggcaggccatgtttttgaagcagag

SEQ ID NO: 6982 - DNA, 510 bp, Streptococcus pneumoniae
  misc_feature (1)..(510): tiling:Spneumo1:WAN024CT5; WAN023YXA AL449927.1_27||||2021 6..20725|-|510 bp|Glimmer 2.02 orf prediction|S.pneumoniae ||AL449927.1|ORF|000
atgtctatcataaagacgatgcctgagaagaatcgctacatgaaaggtcgaaccttgattagacagttcagctctgaaaatcaaacgattccattccgcagaaaaacgacagtcgatatgattaaagagaagattgaggaagtgtatactttacttgagctggatatggataagcactcttatattacaattaaagatgatttaattcatgaattggcagcttcagaattgagaatcaatgctttgcaagaacgagtgacaaccttaaatcaagtagcagaatatttactggcttcagttgaaaataagcaaaaaatgaaattgaatctttcaaaattgaatataactgataaaattggcattgatgttgttgagaaggaattgaatgagttaggtatccagatagaattagagagcaatagatatgagaatatcgtatttaaagtgaataagtttatcaatcgtttgagtaagaaaatttcaaaagaagaagggatatgttttcaaaaa

SEQ ID NO: 6983 - DNA, 153 bp, Streptococcus pneumoniae
  misc_feature (1)..(153): tiling:Spneumo1:WAN024BZD; WAN023S7C NC_003028.1_2653||||2 015527..2015679|-|153 bp|Glimmer 2.02 orf prediction|S.pne umoniae|TIGR4|NC_003028.1|ORF
atgtctattactcacccaaagcagtcctacaaagcaggaattttctgttacttttttggaaatagtaacgtttatacagctttgacacttcgtatcaaagcgccaaacacactccgaggggtttacagaaagcagaaaaggaatgatctggta

SEQ ID NO: 6984 - DNA, 819 bp, Streptococcus pneumoniae
  misc_feature (1)..(819): tiling:Spneumo1:WAN024FKM; WAN023OKG pne86_10||||6093..691 1|+|819 bp|Type 43(2) capsule operon, Glimmer 2.02 orf pre diction|S.pneumoniae||WAN01UCFZ|ORF|000
atgtctgagataaaaataattcaaaataaaattttagaaatacttaaaatttttatcgaaacatgcgaagaaaataacttgacgtattatgcactaggtggaacattattaggagccgttaggcatggtggattcattccttgggatgatgatatagacattggtatgcccagagaagattatgagaaatttaaaaaaatagctagcaaaaaatttaatgatagatatctatttttgagtgaagatactccaggttataaaaaagctttttctgtaattcgagatacttcaacaaagattgttatgaattatagtaatatagagcaagaggagagtttgtggatagatatatttcctattgatggtctacctgaaaaaggtgtgaagagaaaactacacgagaaacagtacctatttagaagaatgatggtacagttatctcaattcaattcaatagtgaatcaaaataaaaccaacagaccttggcaagagaaagtaataattaaaattgcagggattttaaaaattgaaaatttactgtcttttgaaaaagcgcaacaaaagtatctagctactataaagaaatacagtataacagagggttatgcaggtaattttacaggggcatataaacttcgtgagttagtgccaagttgttattttggtgaacctgttaaattagattttgaaggaataaaactgaactgtccaaataaatataaagattatctcaaagcaatatatggtgataattatatgacattacctccaattgaacaaagacttccccatcaatatgaaattgttagtttaggagaa

SEQ ID NO: 6985 - DNA, 213 bp, Streptococcus pneumoniae
  misc_feature (1)..(213): tiling:Spneumo1:WAN024BJQ; WAN01UEOA ||||||213 bp|Incyte o rf contig SPN2C0515 2977-3189|S.pneumoniae|23F|WAN01UEOA|O RF
atgtctgattggaaaaaacctatttacgaatcactaagtacagaaggtaatccagctggggatatcttgcgtgaacttagcgatagcgagatggatcaagctatggctggcggaacagccagatcttattgcgcatgttattcaggagagcattcttgtggtcgtggttgtactatcaccacagagtgtcctttcttaacattcatttgttgt

SEQ ID NO: 6986 - DNA, 246 bp, Streptococcus pneumoniae
  misc_feature (1)..(246): tiling:Spneumo1:WAN024CSC; WAN023LP1 314515_1451||||766783 ..767028|-|246 bp|EGAD orf prediction|S.pneumoniae|R6|NC_0 03098.1|ORF|100
atgtcttctggatcaacttgtccgatagacgctgcgtgtcctgcagtgacatcattttcatcaatcaaaagaattgggttagcatctgaacgcgcttggtctgaaagcatgagaacacggctctcttgttgcgcatctgctcccttagcacccttgatgatgtggccgataccattgaaagtcaaagttgctttttcaaggataaccccatgttgtagaatgtttccgattgagttgcagccatag

SEQ ID NO: 6987 - DNA, 228 bp, Streptococcus pneumoniae
  misc_feature (1)..(228): tiling:Spneumo1:WAN024D4V; WAN023IM1 86036_2831||||1606509 ..1606736|+|228 bp|EGAD orf prediction|S.pneumoniae|TIGR4| WAN01UC25|ORF|010
atgtgcccatcaggtgctgtcatcaaggccttgtactctggtttctcatccaaaattttcttaagatttggcatgtatttatcaatcaaatcttcaactggaataataacaccttttttagcccagttcatcaagtccacatctgaagctccgtcgttgtggatagcatctggtaaatcaccactagaaatatccaagttacgtttttctgcaaagtcggattggtag

SEQ ID NO: 6988 - DNA, 228 bp, Streptococcus pneumoniae
  misc_feature (1)..(228): tiling:Spneumo1:WAN024COL; WAN023IOW 85903_2743||||1552592 ..1552819|+|228 bp|EGAD orf prediction|S.pneumoniae|TIGR4| WAN01UC25|ORF|010
atgtgctgtctgtgcttcctcaaacacaacctgtccaatacctgtctccctatcgagaatgaccaaatcagacttattcaaattcaaagatttcataaaggcacgcacaaaagcttgctttccatagaaaatcttatccttgaaatgataaacttcttccttcccttgattcatcaagatatcatagactggagtcccgtcttcattataaaaagttcgttggtataa

SEQ ID NO: 6989 - DNA, 459 bp, Streptococcus pneumoniae
  misc_feature (1)..(459): tiling:Spneumo1:WAN024GG9; WAN023OAC spn026e08_3||||2470.. 2928|+|459 bp|Glimmer 2.02 orf prediction|S.pneumoniae|23F -1|WAN01UCWX|ORF|001
atgtgcttaatctgtcagagaatcgaactcattaaagctgggcaaaatccctactttgtaaaagaactagaaacaggctatgttgttattggtgactaccaatactttaagggctataccttatttttagcaaaagatcatgtcacagaactccatcatatggaaacttctgtaaaacttcgctttttagaggaaatgagtttagtccaagaagcagtcgccaaagcatttgaggctgaaaagatgaatattgaactcctaggaaatggcgatgcccacgctcattggcatctttttccccgaagagcaggtgatatgaagagtcacggtttgaatggccgtggcccagtctggtgggtgccctgggaagaaatggcggcagaagattgccaagtacaatcgccagagctggaagagatgattaaaatcttatctcatgaattggagaagtatttggcc

SEQ ID NO: 6990 - DNA, 459 bp, Streptococcus pneumoniae
  misc_feature (1)..(459): tiling:Spneumo1:WAN024GG8; WAN023Z4B AL449925.1_200||||194 718..195176|-|459 bp|Glimmer 2.02 orf prediction|S.pneumon iae||AL449925.1|ORF|000
atgtgcttgatttgtcaaagaattgaatggatcaaggcaggggaaaatccctactttgtaaaagaactagaaacaggctatgttgttattggagaccaccaatactttaagggctataccttatttctagcaaaagagcatgtcacagaactccatcatatggagacttctgtaaaacttcgttttctagaggaaatgagtttggtccaagaagctgttgccaaaacgtttaaagctgaaaagatgaacattgaacttctaggaaatggagatgcccacgctcactggcatctctttccaagacggtcaggtgatatgaggggtcatggattgaatggccgtggtccagtctggtgggtgccctgggaagaaatggcggcagaagattgccaagtgaaatcccatgagttggaacaaatgattaaagccttatccgatgaattagagaagtacacggtc

SEQ ID NO: 6991 - DNA, 351 bp, Streptococcus pneumoniae
  misc_feature (1)..(351): tiling:Spneumo1:WAN024BL8; WAN023NAX spn143g10_65||||54013 ..54363|+|351 bp|Glimmer 2.02 orf prediction|S.pneumoniae| 23F-1|WAN01UCOL|ORF
atgtggatggaagaattgccaaacggcaaatataaattttttgagagatacaaagatccatatactgagaaattaaaaaaagtctcagtaacgatggagaaaaaaactccccaagcaagaaatcaagctgcgattttacttcaggaaaagataaaacaaaagttaggagaaaaacaacattctgtttctaatataacttttgaaaaactatatgaagaatttgaggagaattggaaacacggcgtaaaaaactcaaccgtctacgcttcaaagaatgtaaaaaaagagattttaaagcagatagagggcgactacctagttagaaatttgatagacgtttattacaaaaag

SEQ ID NO: 6992 - DNA, 645 bp, Streptococcus pneumoniae
  misc_feature (1)..(645): tiling:Spneumo1:WAN024BZW; WAN02442G spr0970||15903014|NP_ 358564.1|952356..953000|+|645 bp|Conserved hypothetical pr otein|S.pneumoniae|R6|NC_003098.1|ORF
atgtgggtaaaggatatgtttatactaggttcaggagatcaaggattggcggtattgtcaatttatgaaggtgaagttgagggattggtagatatttttgaggaaggtcgctttattggttgcaaaatcttagataaaactgttttagggggattaaaatggtttgaaagtttactcttaacacttgataggaagcctagagcaattgttgcatttggtgataattttaagcgcgaagaaatattttgttcatataaaaataaggtggagtacattaatgttatatgtaattccgcgagaatttttaaacattcttttttaggaaaaggaaattttattggtaccaatgtgactattcaagcacttgtagaaatcggtgacaacaatattataaattctggtagtattgtttcatgtaattgtaaaattggtaataatgtaaatatttccccaggtgttatattatctggaaatgttaaaattgatgataacgtttttattggtgcaggagcaacaattagagatgcggtaagcattggctttggtgctataattggtgcaggtgctaccgtaatacataacgtaccggaaaatgctgtggtagtaggaacaccagggaaaataataaaatatagatcagtttga

SEQ ID NO: 6993 - DNA, 501 bp, Streptococcus pneumoniae
  misc_feature (1)..(501): tiling:Spneumo1:WAN024BUF; WAN023Q7B contig_1244_6||||1610 ..2110|-|501 bp|Glimmer 2.02 orf prediction|S.pneumoniae|6 70|WAN01UEHP|ORF
atgtgggtggtaagtatgacagaaattgaaaaaatttcagaagaattggctgaatatggggtgcctgatgagttaataggaaaaatagaggacctattagcgactctgtatggcgaaaaaaggaaattggagatagaaaaatcttgggatatttctccagagtcaatggggagggtaaccatggacatcagaaaaatatctgacagcgtagccatctactcggacggcaagaaattgcaggttatccacaacctaggggatgagtttatccttgatttcaatgtgggagaggatagcgtctggaacctcaatggccaagtcgtagaaattattgacatgattgagcctgtctttaaagttttcagcttttgctcaaaatctggagagggtatgcaacgcttaaaacatgctatcgtccactttgaaaaatttgagcagtacatcagagataatcaggaagacctgatgatctggtggcacaatccaggaggggaatatgat

SEQ ID NO: 6994 - DNA, 75 bp, Streptococcus pneumoniae
  misc_feature (1)..(75): tiling:Spneumo1:WAN024BND; WAN023OAA spn026e08_5||||3718.. 3792|+|75 bp|Glimmer 2.02 orf prediction|S.pneumoniae|23F- 1|WAN01UCWX|ORF
atgtgtaaagcatacttgtgggaggtaaaaatctctaattaccgccaaaaccacaaaggaggatttaaaaatggc

SEQ ID NO: 6995 - DNA, 225 bp, Streptococcus pneumoniae
  misc_feature (1)..(225): tiling:Spneumo1:WAN024G6X; WAN023LJS 313976_1763||||941472 ..941696|+|225 bp|EGAD orf prediction|S.pneumoniae|R6|NC_0 03098.1|ORF|100
atgtgtaatttgtctaaaatattgatcagtcgaatacaagatatttctgattccccacgttcaaaacgagagatttgcgattttgaaagatgctcatcagctacagaacatagactaatttgtttgcccttacgaatttttctaagtgtgacaccaagttttgatttcatagttttcccattttcccaacaaaaattaacttatttcttatttattgtacaataa

SEQ ID NO: 6996 - DNA, 363 bp, Streptococcus pneumoniae
  misc_feature (1)..(363): tiling:Spneumo1:WAN024B6U; WAN023MKZ spn193e05_39||||20295 ..20657|-|363 bp|Glimmer 2.02 orf prediction|S.pneumoniae| 23F-1|WAN01UCMQ|ORF|001
atgtgtactattctagtttcaatatactataaaatcggttcaagttcatctggtgtctataaagcagtcgctgatggagaaatgactgttggtctctcttatgaagatccagcagttaaactcttaaatgacggagctaacattaaggtagtctatccaaaagaaggaaccgtcttcctaccttctagtgctgctatcgttaaaaaatctaaaaatatggaaaatgccaagaaatttatcgattttattatctctcaagaagtacaagatactcttggtacaaccattactaaccgtcctgttcgtaaaaatgctaaaacaagcgaaaacatgaaaccaattgacaaaatcaaaacactcact

SEQ ID NO: 6997 - DNA, 801 bp, Streptococcus pneumoniae
  misc_feature (1)..(801): tiling:Spneumo1:WAN024C8X; WAN023QWY contig_1375_1||||36.. 836|+|801 bp|Glimmer 2.02 orf prediction|S.pneumoniae|670| WAN01UE2J|ORF|000
atgtgtatggaatacggactgacgaaagcacttccgatctactctggaggactcggtatccttgccggagaccacctcaaatcagccagtgatcttggccttcctctcatagccgtaggtcttctttacaaacacgggtatttcactcaacagatagacagtgacggaagacagatcgagatctttccagaatacgacatcgaagaactcccgatgaaacctctcagggatgaagacggaaaccaggtgatcgtagaagtacccatagacaacgatactgtaaaagcgcgtgtgttcgaggtacaggtcggaagggtgaaactgtatcttctcgacactgacttcgaggaaaacgaggatagattcagaaagatctgcgactatctctacaatcccgagcctgatgtgagagtttcccaggaaattctgctcggcattggtggaatgaaactcctgaagactctcaagataaaacctggagtcatccacctgaacgaaggtcatcccgctttttcatccctcgaaaggataaagagctacatggaagaaggatattccttcaccgaggcccttgagatcgtcagacagaccacagttttcacgacacacacccccgtccccgcaggtcacgacaggttcccgttcgatttcgtggaaaagaagctgacaaagttcttcgaaggattcgaatccaaagaactgcttatgaacctttggaaaagacgaagacggaaatttcaacatgacgtatcttgctttgagaacctcctcctttataaacggagtgagcaaacttcacgc

SEQ ID NO: 6998 - DNA, 963 bp, Streptococcus pneumoniae
  misc_feature (1)..(963): tiling:Spneumo1:WAN024BP6; WAN023OK7 pne86_19||||14220..15 182|+|963 bp|Type 43(2) capsule operon, Glimmer 2.02 orf p rediction|S.pneumoniae||WAN01UCFZ|ORF
atgtgtattaaaaagtttcttaaaaagagtcatctgaccaaaggaatttatcaacaattacaaagaaaaaagaatcaatatcgcttagaaaaaaaatttaaatatacagggaaatttattgaccgtaaaaaagatagtaaagatttatgtatcatattagcggggtataaagaatttttatatgacgatgtgctaggaagagtaaagacatttgcaccagaaacaatggatatttgtgtcctatcttctggcatctattcagaaaaattaaaccaaatttgtgaagaaaataattggtcgtatttgagtacggaacagaacaatatatctttaattcaaaacgtagctattaatctacatcctcaagcaaaatatatttataaaattgatgaagatatttttattacagaacattattttgaaaatttaaaagaagcatatatttttgcacaagaaggggattatgcacccggtgtagtagcaccactcattccggttaatggttatggacataaaagaatcttacaaaaattaggcttggaagatgtttattatgaaaaatttggagaaaaatcgaaatatatagctggacagcctcgttttatagagagtaatcccgaagtagcgaagtttttctggagcgatggagaagtaattcctactatagatacaatgaatgcacaattttcaaaagaagagaaaaaagtgaatccgtgtgcaattcgcttcagtatcggtgcaattttatttgagagaagcttatgggaactgatggattattttaatgttgagtttgagggagctggacttggagtggatgaagtccaaatttgtaatttttgcatcttaaattcaaaaccattgatggtcagtgaaaatgtggttgtgggacatttatcgtttggtcctcagaataaggctatgttcgaatattataaagaacatccagaaaaattttctatt

SEQ ID NO: 6999 - DNA, 327 bp, Streptococcus pneumoniae
  misc_feature (1)..(327): tiling:Spneumo1:WAN024CCD; WAN023MBQ 314404_223a||||111781 ..112107|-|327 bp|EGAD orf prediction|S.pneumoniae|R6|NC_0 03098.1|ORF|100
atgtgtccatgtcaccatgaatcgccgaacgatttaacgagaaagtatgacttttacgtttatcccaactcaattatgacatttttttcaaaagtcaatatatctcactttttcaacgacaagaaagaggctgccaatcgaccaacctcttattctgaacccatcactccatcactttttagcttcattcgctttcttagcgactgcaatctggtattcgacttggtcaaaccctgtgcctcccaaggaatttcgtctttgaacagcagttttaggttgcaagtagacatagatatcctcggtaatgagagaatgataggtttgtaa

SEQ ID NO: 7000 - DNA, 294 bp, Streptococcus pneumoniae
  misc_feature (1)..(294): tiling:Spneumo1:WAN024BT5; WAN023YBC AL449931.1_58||||5083 9..51132|-|294 bp|Glimmer 2.02 orf prediction|S.pneumoniae ||AL449931.1|ORF
atgttaaaatttagaaaagtagttgcatcatcccttgccgttttggcatttagtttggctcttcctgttttggcagtttctcaccgtggtggcgagtggacctatggaggccatcatgatccatataattggggagcattttcgaattattatcatggttcacagtatcactgggcctatgttggaagtaatgaacgtgacaatcaaaaaacagtttatgcaggagcacatagtgcggcctatgcgtttgttaatacaaatttgggggagcgaattacatttgatgcgggatgg

SEQ ID NO: 7001 - DNA, 195 bp, Streptococcus pneumoniae
  misc_feature (1)..(195): tiling:Spneumo1:WAN024DLG; WAN023RYN contig_1613_14||||911 7..9311|+|195 bp|Glimmer 2.02 orf prediction|S.pneumoniae| 670|WAN01UDBR|ORF|000
atgttaaatttacaatttgcagaaacaatggaattgacagaagctgagttggagacagtttatggaggggaatttgggaataatgctgttatcccagccggtgcttggggaggtttaggaacgtcttggtcaatcactaatttctggaagaaatattttaaccatgattcttccactgttaatcgtcgccattat

SEQ ID NO: 7002 - DNA, 198 bp, Streptococcus pneumoniae
  misc_feature (1)..(198): tiling:Spneumo1:WAN024DLH; WAN023NYY spn047f12_25||||18407 ..18604|+|198 bp|Glimmer 2.02 orf prediction|S.pneumoniae| 23F-1|WAN01UCXY|ORF|001
atgttaaatttacaatttgcagaaacaatggaattgacagaagctgagttggagatagtttatggaggggaatttgggaataatgctgttatcccagccggtgcttggggagggttcgggacaccttggtcaatcactaatttctggaagaaaaattttaacgatagacctgactttgattctgaccgccgtcgttat

SEQ ID NO: 7003 - DNA, 102 bp, Streptococcus pneumoniae
  misc_feature (1)..(102): tiling:Spneumo1:WAN024BPC; WAN023OKD pne86_13||||9453..955 4|-|102 bp|Type 43(2) capsule operon, Glimmer 2.02 orf pre diction|S.pneumoniae||WAN01UCFZ|ORF
atgttaagcaagttagggattacttctaaatttgtctttggaaaaatctcctcaaaggattctttttgtggagtagaaacagctaagattgaattaaacttt

SEQ ID NO: 7004 - DNA, 2262 bp, Streptococcus pneumoniae
  misc_feature (1)..(2262): tiling:Spneumo1:WAN024DCY; WAN02403A |celB||AAC23742.1|||2 262 bp|competence protein|S.pneumoniae||AF052208|ORF|000
atgttacagtggattaagaatttctctattcccctaatttacctgagttttctattactttggctttattacgctattttctcagcatcctatcttgctttgttgggctttgtttttctgctagtctgtctctttatccaatttccgtggaaatctgctggtaaagttctaataatttgcggaatctttggattttggtttgtttttcaaaattggcaacagagtcaagcgagtcaaaatctggcggattctgttgaaagggtacggattctgcctgacactgttaaggtcaatggtgatagtctgtcctttcgcggcaaggctgatggacgcatttttcaagtctattataaactccagtccgaggaggagaaagaagcctttcaagctttaaccgacctgcatgagataggactagaagggaagctttcggagccagaagggcagagaaattttggtggctttaattaccaagcctatctgaagactcagggaatttaccagactctcaatatcaaaaaaatccagtcacttcaaaagattggcagttgggatataggagaaaacttgtccagtttacgtcgaaaggctgtggtttggattaagacgcactttccagaccctatgcgcaattacatgacaggactcttgctgggacatctggacaccgactttgaggagatgaatgagctttattccagtctaggaattatccacctctttgccctatctggcatgcaggtaggttttttcatgaatggatttaagaaacttctcttgcgattgggcttgacccaagaaaagttgaaatggctgacttatcccttttcccttatctatgcgggactaactggattttcagcatcggttattcgcagtctcttgcaaaagctactggctcaacatggggttaagggcttggataattgtgccttgacggtgcttgtcctctttattgtcatgccaaactttttctttacagcaggaggagtcttgtcctgcgcttatgcttttatcctgaccatgcccagcaaagaaggggaggggctcaaggctgttgctagtgaaagtctagtcatctccttgggcatattgcccattctatccttctattttgcggaatttcaaccttggtctatccttttgacctttgtcttttcctttctatttgacttgaccttcttaccgctcttgtctattttatttgtcctttcctttctctatccagtcattcagctgaactttatctttgaatggttggagggcattattcgcttggtgtcacaggtgacaagtagacctctggtctttggacaacccaatacatggcttttaatcctattgttaatttctttggctttggtctatgatttgaggaaaaacattaaaaagctaacggtattgtgcttattgattacagggctctttctcctgaccaagcatccactggaaaatgaaatcaccatgctggatgtggggcaaggagaaagtattttcctacgggatgtaactgggaaaaccattctcatagatgtaggtggtaaggcagaatcttataagaaaatcaaaaaatggcaagaaaagatgacgaccagcaatgcccagcgaagcttgataccctatctcaaaagtcgaggagtagctaagattgaccagctaattttgactaacacggacaaggagcatgttggagatttgtcagagatgaccaaggctttccatgtaggggagattctagtatcaaaagacagtctgaaacagaaggaatttgtggcagaactacaggcgactcaaacaaaggtgcgtagtatgatagtaggggagaacttgcccatttttggaagtcagttagaagttctatctccaaggaaaatgggagatggaggacacgatgataccctagttctgtatgggaaattcttggataagcaatttctcttcacgggaaatttggaggagaaaggagagaaggacttgctgaagcactatccagacttgaaagtaaatgttttgaaagctagccaacatggcaataaaaaatcatcaagtccagcctttctagaaaaactcaaaccagagcttactcttatctcagttggaaagagcaatcggatttcttctgccaattctccaagtcctgatccaaggattagaccgaactcaggggctgcaattcccttttctttcaggaaagtagcagtttcatggattttgtttaaaaatgtcattgtgtgtctcctttattatttttttagcatttga

SEQ ID NO: 7005 - DNA, 96 bp, Streptococcus pneumoniae
  misc_feature (1)..(96): tiling:Spneumo1:WAN024BMH; WAN023O1A spn047b01_79||||70051 ..70146|-|96 bp|Glimmer 2.02 orf prediction|S.pneumoniae|2 3F-1|WAN01UCNY|ORF
atgttaccaaactttatccacaggttggggataaaagaagaaattattgatttattaagctttttatcgaaaaacatagtggataaccttgtgaga

SEQ ID NO: 7006 - DNA, 135 bp, Streptococcus pneumoniae
  misc_feature (1)..(135): tiling:Spneumo1:WAN024B8P; WAN023Z73 AL449925.1_92||||8300 2..83136|+|135 bp|Glimmer 2.02 orf prediction|S.pneumoniae ||AL449925.1|ORF|000
atgttactgacttcgtcagttctatctacaacctcaaaacagtgttttgagcagcctgcagctagcttcctagtttgctctttgattttcattgagtataaggagaattgtaaaaacaaaaatggggatttcata

SEQ ID NO: 7007 - DNA, 249 bp, Streptococcus pneumoniae
  misc_feature (1)..(249): tiling:Spneumo1:WAN024BYI; WAN023S0Z contig_1623_17||||964 0..9888|+|249 bp|Glimmer 2.02 orf prediction|S.pneumoniae| 670|WAN01UDAF|ORF
atgttagaaaaagcaaaacaattggcatcgcaagaattttcacgcttatcaggtcgtgaaatcaaagcagaagactgctttgtagtttggtttagcaagaccctgcaaaactggaaagctcttgttagtacgaacgcaattacatcaagcgaaccttgtggagattatgcagaaattacgcataacggagataagaatgagacttatgtggatgtttacgccaaggtttcaaatcgtgccattaaagat

SEQ ID NO: 7008 - DNA, 339 bp, Streptococcus pneumoniae
  misc_feature (1)..(339): tiling:Spneumo1:WAN024B2I; WAN023O89 spn029h04_42||||29794 ..30630|-|837 bp|Glimmer 2.02 orf prediction|S.pneumoniae| 23F-1|WAN01UCO3|ORF|001
atgttagaacaggcctttacagagaaatactatgagaatacgattctccatagtgaccaaggctggcaataccaacacgattcttatcatcggttcctagagagtaaggaaattcaagcatccatgtcacgcaagggcaacagcccagacaacggcatgatggaatctttctttggcattttaaaatccgaaatgttttatggctatgagaagaactttagatctttagaaaaccttgaacaagctattgtggactacattgattactacaacaacaaacgaattaaggtaaaactaaaaggacttagttctgtgcagtacagaactaaatcctttgga

SEQ ID NO: 7009 - DNA, 1170 bp, Streptococcus pneumoniae
  misc_feature (1)..(1170): tiling:Spneumo1:WAN024BS3; WAN023TGP BD217207.1_1||||1..11 70|+|1170 bp|Glimmer 2.02 orf prediction|S.pneumoniae||BD2 17207.1|ORF
atgttagaatttgaacaaggatttaatcatttagcgactttaaaggtcattggtgtaggtggtggcggtaacaacgccgtaaaccgaatgattgaccacggaatgaataatgttgaatttatcgctatcaacacagacggtcaagctttaaacttatctaaagctgaatctaaaatccaaatcggtgaaaaattaacacgtggtttaggagcaggagctaatcctgaaatcggtaaaaaagctgcagaggaatctcgtgaacaaattgaagatgcaatccaaggtgcagacatggtatttgttacttctggtatgggtggcggaactggtactggtgcagcaccagtcgttgctaaaattgcaaaagaaatgggcgcattaactgttggtgttgtaactcgtccatttagttttgaaggacgtaaacgtcaaactcaagctgctgctggagtagaagctatgaaagctgcagtagatacattaatcgttataccaaatgaccgtttattagatatcgttgacaaatctacgccaatgatggaagcatttaaagaagctgacaacgtgttacgccaaggtgtacaaggtatctcagacttaatcgctgtttctggtgaagtaaacttagactttgcagacgttaagacaattatgtctaaccaaggttctgcattaatgggtattggtgtttcttctggtgaaaatagagcggtagaagctgctaaaaaagcaatctcttctccattacttgaaacatctatcgttggtgcacaaggtgtgcttatgaatattactggtggcgagtcattgtcattatttgaagcacaagaggctgctgatattgtccaagatgctgcagatgaagacgttaatatgattttcggtacagttattaatcctgaattacaagatgagattgttgtaacagttattgcaactggttttgatgacaaaccaacatcacatggtcgtaaatctggtagcactggattcggaacaagcgtaaatacttctagcaatgcaacttctaaagatgaatcattcacttcaaattcatcaaatgcacaagcaactgatagtgtaagtgaaagaacacatacaactaaagaagatgatattcctagcttcattagaaatagagaagaaagacgttcaagaagaacaagacgt

SEQ ID NO: 7010 - DNA, 411 bp, Streptococcus pneumoniae
  misc_feature (1)..(411): tiling:Spneumo1:WAN024BY9; WAN023S0Q contig_1623_26||||134 12..13822|+|411 bp|Glimmer 2.02 orf prediction|S.pneumonia e|670|WAN01UDAF|ORF
atgttagcaaatggaattacgctatcttatggcgaagctaaaggaacttatactaaacttgttggattgaaagaagtgccagagtttggtattgaactcgaaaaagtagaaaatactactcttgaagatacagtgaagaagtacgagtttggtattggggacataggagaacttgagtacaagttctcttataataattcaagcgcaactgctccttatcgtgtattgcgtaaggcagcagacgacaagaagaaactctacttcgagcaagcatacccagacggtactaaggtcaattttgaaggtcaagtatctgttaagttaggcggtggcggtgtcaatgccgttatcgggttcacacttaagattgccttgcagtcagagttggaatttacagacggtgttggaggt

SEQ ID NO: 7011 - DNA, 246 bp, Streptococcus pneumoniae
  misc_feature (1)..(246): tiling:Spneumo1:WAN024ERC; WAN023IUK 85577_2495b||||141208 1..1412326|+|246 bp|EGAD orf prediction|S.pneumoniae|TIGR4 |WAN01UC25|ORF|010
atgttagctaacaaggcacaaataccagctactggacgagtcatggttggtaacataagcactccaccaaatggcacagcagaatcagcacccattgtcaaagaaacagcaccaccaacagcaccaccgatacctgttgcaatgagacctggaaccaagttattcataacaatcggaattacaccttcaacaatattgacaatccccataggaacagccgatttcaatgtttcgatttcctcttga

SEQ ID NO: 7012 - DNA, 228 bp, Streptococcus pneumoniae
  misc_feature (1)..(228): tiling:Spneumo1:WAN024DKA; WAN023MMT spn191c12_2||||590..8 17|-|228 bp|Glimmer 2.02 orf prediction|S.pneumoniae|23F-1 |WAN01UCQJ|ORF|001
atgttaggaagtatgttcgttggtctcctagtgggatttttagcaggtactctgaccaatcgtggagaacacatgggatgttttggaaaaatgtttctcggatggattggtgcctttataggccatttgctttttgggacttggggaccgataatagcaggaactgccattattccggcagtactaggttccatgattgttttagctattttttggagacgaggaagt

SEQ ID NO: 7013 - DNA, 222 bp, Streptococcus pneumoniae
  misc_feature (1)..(222): tiling:Spneumo1:WAN024B96; WAN023HUY ||||||222 bp|Incyte o rf contig SPN2C0569 217-438|S.pneumoniae|23F|WAN023HUY|ORF |000
atgttatcgttgctaatacagtggaagagatgctcagcaagtatgccaataaaaacagaccttgatattgacaatgcaacgacagacagcatcaagggagtagtagcagacctcaaatcagctgttatcaagggcgacaccgtctacttctataaagttgatggcaagattttcaagggtaaagcctcaatatccgatggacttccttaccctgaaaaatgg

SEQ ID NO: 7014 - DNA, 1194 bp, Streptococcus pneumoniae
  misc_feature (1)..(1194): tiling:Spneumo1:WAN024BPH; WAN023OQ1 pne78_17||||12996..14 189|+|1194 bp|Type 36(1) capsule operon, Glimmer 2.02 orf prediction|S.pneumoniae||WAN01UCFT|ORF
atgttcattctatattattctttactaaataataatatgataaaaattaaatttgaaaatctactggttagtattgttgtatctgtagtgatattttttaatactatatctactacaatgctggatagaactttttttcaagctaaagcaaattatcttttattagtagttttgttattaggtcttcgttttatgtttccaacacgtatttcatttaaatatctaatattttcttctttgctattattatcaggaattttagtatattttcagactggaaaacttaattttcttgtctattcagcccttctggttttattagttaatgtagatatgaaagtagttttgaaaacgtatctcattgtagcgggcattcttgtactaagtgtatttcttttatctctcttaggtgcagttcccaatttacaatataatcgcgaaggagttattcggaattcatttggatttatttatcctacagattttgcatcccactgtttctatcttttcttggctttttcttatttattaaaagataaatttatatggattaggtctctaataggtgtacttttatctttctttattataaaatattgtgatgcacgtttaaatgccttatcaattattttagcaacaattatttttatatttttctactttaatgaagataagaaattccggatctattcaatttccccttattctgtagttctatgttcgtcaataatgatgtatttatcttatattttctcttggggatctccatttttagtatctatcaataaattaattacaggtagattagctttggggaaaaatgcatttaatacttttgatgtacatctatttggaactagagacgtattatttaaggggtcaggaggtaaaacggaggctgttattgattataactacgtagattcatcgtatgttcaaatgttatttacatatggtgttatacctcttgtactgcttatatgtatgtatgttgtaatttcgagagaacagtataaacagggtcaatatttatatgtagtaatattatctttagtggctctaaactgcatgattgaagctttttggtttgtccctacttacaatatattcatgtttttgttattcacaaaaaatacttttcttaataagtcgttgaataattttaatcctttggataaaacggaattgttgaac

SEQ ID NO: 7015 - DNA, 234 bp, Streptococcus pneumoniae
  misc_feature (1)..(234): tiling:Spneumo1:WAN024G75; WAN023LJU 314018_1760a||||94033 1..940564|-|234 bp|EGAD orf prediction|S.pneumoniae|R6|NC_ 003098.1|ORF|100
atgttcatttggtcaaaatcatacttagctaattttctaccgatctcatcttcactcttcaaattgataaggacttccgccatcttgtttaaggtggcgattttttcttgggtttcttctagcttcatatcaatctctgcaatttctaatacaagctcatctttgatttcttggtattgtttgttcgtgttagatagttcaatcataagattaatttcagaaatcttctcttga

SEQ ID NO: 7016 - DNA, 441 bp, Streptococcus pneumoniae
  misc_feature (1)..(441): tiling:Spneumo1:WAN024C35; WAN0246VR 206368-03-8||||||441 bp|DNA Streptococcus pneumoniae strain 0100993 deoxyribonu cleate|S.pneumoniae||WAN0246VR|ORF
atgttcgttgaagccgaactgaagccgaccggtctggagcgagccgaagcccaggccatcgccgacgcggtgcgcaaccagaccggcaccgtcaccgaagaagccaagcccagcacgcaggccagcccgttgctgtacgacctgaccacgctgcaacgcgaagccaactcgcgcttcggcttcagcgccaagaccacgctgtcgctggcacaggcgctatacgaaaaacacaaggcgctgacctacccgcggaccgattcacgcgccctgcctgaagactacctgggcgtggtcaagcagaccgtcggcgtgctggccgagggcgacctgcccggcccgctgaaggctttgtcggctcacgccgaaaaggcgctgaaagagggttacatcaaacccaacaagcgcgtgttcgacaacgccaaggtgtcggaccacttcgcc

SEQ ID NO: 7017 - DNA, 423 bp, Streptococcus pneumoniae
  misc_feature (1)..(423): tiling:Spneumo1:WAN024D4U; WAN023IM2 86033_2829||||1605269 ..1605691|+|423 bp|EGAD orf prediction|S.pneumoniae|TIGR4| WAN01UC25|ORF|010
atgttcttcaggcttatattgagtattaacgagatgtttattttctgctataaaacgattggctttttctactgtgtatttcttatctcccataatcaacctctagtttttgtttgcttggtattggtcgtagtatttttgtttaatagcgaggtaatcagaaagtccgtatttttcaagttctttcttgtaatcatcccactcagtatcaatattgccatttacaatccattcagcacgtttacggtagatatagtcattcatatctgcttcgatatgggcaatcttgtccaaatcttcctgtgtcataaagactcttggatagttattgacattgctcatgtaaggaacataatattctttgataagatccaaacgccatttggcatcatcaggcatggttgttactttaccatagtatga

SEQ ID NO: 7018 - DNA, 222 bp, Streptococcus pneumoniae
  misc_feature (1)..(222): tiling:Spneumo1:WAN024ATD; WAN023O7S spn029h04_59||||44411 ..44632|-|222 bp|Glimmer 2.02 orf prediction|S.pneumoniae| 23F-1|WAN01UCO3|ORF|001
atgttgaaaaggattagagatttacgagaagatgatgatttgacacaagaatatattgcgaaaatcgttttgaattgtacaagatcatcttattctaaaatggaagctggtagcaggctaatctctataaatgaccttatcaaacttgcagatttttataaggtgagtctagactaccttgtaggtcgagtggataataaagaagaccattactccaaaaag

SEQ ID NO: 7019 - DNA, 228 bp, Streptococcus pneumoniae
  misc_feature (1)..(228): tiling:Spneumo1:WAN024ATC; WAN0240CT |||AAC98432.1|||228 b p|repressor protein|S.pneumoniae||L29324|ORF|000
atgttgaaaaggattagagatttacgcgaggatgatgatttgacacaagaatatgttgcaaaaacaatcttaaattgtacaagatcagcgtattctaaaatggaatcaggtaccaggttaatctctatagatgaccttatcaaacttgcagatttttataatgtaagtttagattaccttgtaggtcgagtggataataaagaagaccattactccaaaaagtattag

SEQ ID NO: 7020 - DNA, 726 bp, Streptococcus pneumoniae
  misc_feature (1)..(726): tiling:Spneumo1:WAN024BMQ; WAN023O6Y spn029h04_89||||75588 ..76313|-|726 bp|Glimmer 2.02 orf prediction|S.pneumoniae| 23F-1|WAN01UCO3|ORF
atgttgatgctagaatttactaaactaagaaggcgaaagatactgtatatgattccctttgtagccatcctgctctttttgttggagtttatgattggtcatcagatttatcaagggcattcgtacggtagtgtgaatggctggtatgtagaaaatggtttcttctttttgaactactattttctcctcccttttgcgagcatgattttagtggatttgataagaatagaacaagtgtctaaaacgatttcaaatctcagactgattcctgtcgatttgaaacaattactccaagcgaaatttatgcttgctttgttgattaatctactagtcagtgaattcacttttttggctatgctggtcctagagttaatggatggtgattttgctttctctagtcttgcaatgttatcttggggagttgtttatggagcaattgcttttgcttatacactgtctgctggtattattgtcctcttcttaggaaaatatcggaaggaacttatccttgccctaccacttgcctttttattgtcatttgcaggtttgtttgctttaacaacggttgttgggcggtattatctggcaaatttactactaatcatcatggagcaatttacggctttaacagtttctgtatatgccatttggttggttaccttggtggcatgtctcctttatttgttggcagataaacgcatgatgaacattatttttgcttataaa

SEQ ID NO: 7021 - DNA, 213 bp, Streptococcus pneumoniae
  misc_feature (1)..(213): tiling:Spneumo1:WAN024C25; WAN0244QA spr0112||15902156|NP_ 357706.1|120067..120279|+|213 bp|Hypothetical protein|S.pn eumoniae|R6|NC_003098.1|ORF
atgttgattgttttaatttcagttattgttgcattcctgtatcataaaattacagagtatgtcaacaacaggaaaattgatattgttatttttctatcattgctgatttctcattttatttggaattactattttttaccaattgaaatattgatagcaatcagtggagcaaatttactattaagttttttaaaaaaattacagactaaataa

SEQ ID NO: 7022 - DNA, 615 bp, Streptococcus pneumoniae
  misc_feature (1)..(615): tiling:Spneumo1:WAN024FVY; WAN023P80 pne52_23||||14718..15 332|+|615 bp|Type 24B capsule operon, Glimmer 2.02 orf pre diction|S.pneumoniae||WAN01UCCM|ORF|000
atgttggcagcattaattttttatttaactaaagaagttataattccatttctgaaagtaattagtaagattaacggaagaaagaaagtaatttattggttgctgacaattttgggactgtggatgattactctaacacctatttttgaaaatattgttggagctattttaaaagtagatggagtaggtagaggaagtgattcattgactattcgagcaattggacgacagttatattgggaacaattgaatgagacaactttaaaacttctttttggaacaggataccctaattataattatgctttagcctttcaacgtacaggttttttcaagcaatatttttttaacagacaatggttttatgatatatatatatttggtattgtgggttcctcaattatgggattattatttttaaaatatcttaaaaattcaataaagtatgatagacaatctgcagatatgattccgttgatgtatattatttctttactaattgtagcctataatattattctttggtattggaatgcggacggtacttttatattagtaatcatgatttgcgcattggagcatggagaacaattattacatcagaagaatggagtg

SEQ ID NO: 7023 - DNA, 78 bp, Streptococcus pneumoniae
  misc_feature (1)..(78): tiling:Spneumo1:WAN024FNZ; WAN023OXG pne67_20||||17129..17 206|-|78 bp|Type 18F1 capsule operon, Glimmer 2.02 orf pre diction|S.pneumoniae||WAN01UCFB|ORF|000
atgttgtttttcttcatcagttttctcttcaacaagtacatctttaaaaattactaccattattcacacctcattggt

SEQ ID NO: 7024 - DNA, 252 bp, Streptococcus pneumoniae
  misc_feature (1)..(252): tiling:Spneumo1:WAN024BX8; WAN023RP2 contig_1583_20||||628 8..6539|+|252 bp|Glimmer 2.02 orf prediction|S.pneumoniae| 670|WAN01UDGB|ORF
atgtttaaagcactaaaaacaatcaaaaaaatcaaacaacttcagaaagaaatgcacgctttcagccttgcctttctagctctacaagatatgggcttgatgccagaaactgaaagaagtaaggcaaaggctcaaacaatgcacgatgtaagccacatgctcaaggacgtcctgggcggcaagtcggtagatgaagccatgaaacgtctaaatagcgaagtgaaaattgaagatgtggagcaggaagatgac

SEQ ID NO: 7025 - DNA, 1100 bp, Streptococcus pneumoniae
  misc_feature (1)..(1100): tiling:Spneumo1:WAN024DS3; WAN0240ZO-con |pspC||AAF73803.1 |||2292 bp|surface protein PspC|S.pneumoniae||AF154033|ORF |000
atgtttaaatcaaatcatgagcgaagaatgcgttattccattcgtaaatttagtgtaggagtagctagcgtagctgttgccagtctttttatgggaagtgttgtacatgcgacagagagagagggaagtacccaagcagccacttcttctaagatggcaaatgaaagtcagatagaacgtaggaaagctgctgaacaagctatcgttagtttgtctggttatatgactagtcttctaaatgatggattagatacttctgattctagatttgaagagcttctcaagcgagctaagggaattgtagaagagtaccggaagaaaattgatggagcttctgatagagaaaaaatagagaaactgcagcaagagggacaaacgaagctagatgaattggtagacaaatttaaaaaagggttgtccagctctgagcaaaatggtcatgctactcctaaggatccctctcgaaatgatggtgtacagggagatgattcttcagtagggcaaggagaacagccaggcgcatctaatcaaaaaaatccagaatctgtaccaccaacagcatctggtgagacggattcccctacaaaaccaaagacttcgaatgattcagtgaattctctggagagagagcttaaagaagttaaagaaactgctaaaacaactttgaacacttatatgcttactcgtttaaaacaggagaatccaggagttttttggtttgcagatcttttaagagaatccaaagaatctgtagagaagtataaaaggatgtgtgatgaggcttcgagtaaagaaaacgtggaaaacttggtaaaagaagctaaacaggagatagaagctctagtcgttaaacataaggggcgaggaattgacttagaacgaacgaaagcaaaaaccgtaattgctaaatatttaacaggattattagatgacatcaagaaaaatttaaaaaaagagcaacatatcaatactgtagagctaattaaaaagctgggagacattaagcgaacgtatttgtataaattagatgaatcaacccaaaaagcccamctacaggaactggtcmcagaaagtcaatcaaaactagatgaagctttttc

SEQ ID NO: 7026 - DNA, 762 bp, Streptococcus pneumoniae
  misc_feature (1)..(762): tiling:Spneumo1:WAN024BWT; WAN023REZ contig_1553_2||||460. .1221|+|762 bp|Glimmer 2.02 orf prediction|S.pneumoniae|67 0|WAN01UDJZ|ORF
atgtttaagttatcatttcagtccatcggacacgttgtggtacgcaactacatgagttttagaaatttatttaaaatttcaattgtccccaaccttatcgaccccctcttttatcttttagcaatgggatttggagttggtgcctatttgacgcatgttaacggtatgctctaccgtgattttgtcattacaggtttaattgctgcgactgccatgtctgcggccaccgcagaaacaacggtcaatgcctttatccagtataagattgaaaagacttatgatgctatgttgatgacgccaatcaatacgagtgatattgtggtgggtcaggctatctgggcaggtattcgtgcagtgattttcggtgggattttttggctgatttccatgcttatcacagcgcattttcatgtcttgatgttattgattcctctgattttatttatagtgggttatttgtttggtgttttaggactaatctttacctacttggcgccgtctagggaatttctgaattactacaatgttttggcaatccgtcctctttatatgttttcagataccttctttcccattacttccttgcccccaatacttggtgatttgacttggttttctcccttgtatcacgctacccgcatgattcgtattatatggggaggtgaggtgacaggtttgtatcttcatcttatctggttgatagccttggcgctcttgataacggtgcttcctatgtatatgttacatcgtagatattataga

SEQ ID NO: 7027 - DNA, 807 bp, Streptococcus pneumoniae
  misc_feature (1)..(807): tiling:Spneumo1:WAN024BRR; WAN02418O |||AAP94612.1|||807 b p|hypothetical protein|S.pneumoniae||AY336008|ORF
atgtttaattcatcttgtgctttatttattgttagttgcgagactaatcagcaggtagtcaatctcctcatccagtccatgcgtcagcagatttctcatatggtatccatttatgtatcatcagatggcccattgttaatcacggatcctagcgtaagggttttgattggtcaggaagaagtttttggagatcgtgttgcaactgctttggaacaagttactgaagagcgagtcattgttttttgtgatgactttatcgtagaaaaaccagctaaaattgaagaattagaagaactactgtctctaatggaagaggatacaagtattgctagtattgccctgtcacaaatatctggagggaatacacctgagcgtattgctgagcattatataagacgcacgaaatatgccccctataagacaactcttcaatgcgctatttggaagaagtctagtttgattcaattcatgaaggggagtccctctccttgggaatttgagatttatcataactttaaaacttacctgacgaaagagaaattttatgctttagaggatgatatgttccaacctatcccttataatagaggaaagttgattattcgaggtaaagttgttaaacctgaaaaagaacgtttggaggaacttttgggttattcattagatttatcggatttcccagaaacggagtcttttatccagggggaaaatcttactgtaggctatcggttgaagagaaagattaaattgttagaaaaagaaattatttatcgtttgaaatctaaaataaagaataagaaaaaatag

SEQ ID NO: 7028 - DNA, 270 bp, Streptococcus pneumoniae
  misc_feature (1)..(270): tiling:Spneumo1:WAN024BHI; WAN023O76 spn029h04_81||||66833 ..67102|-|270 bp|Glimmer 2.02 orf prediction|S.pneumoniae| 23F-1|WAN01UCO3|ORF|001
atgtttacaaaactttttaagaaaaaccaagacaatagtgatgtatttaagaagctaattcatagactatctgatatgtctatccaagatcttaaaaaaatagatcgactgttagatatcattttcactccagatcaaggatcagaacaactaaaaacagaagcaacttatagagaagaaactttggacgacacattaaaggaagccaagaatcaacttcatatggaacaattggagaagaatttagagaggtttaggaaaaatagtcaa

SEQ ID NO: 7029 - DNA, 1038 bp, Streptococcus pneumoniae
  misc_feature (1)..(1038): tiling:Spneumo1:WAN024CVZ; WAN02418N |fnlA||AAP94613.1|||1 038 bp|trifunctional UDP-D-GlcNAc 4,6-dehdratase/5-epimera se/3-epimerase|S.pneumoniae||AY336008|ORF|000
atgtttacaaagaaaactctccttattacaggggggacaggttcattcgggaatgcagttctcaaacgatttttgggaacagatatttcggaggtacgtatcttttcaagagatgagaagaaacaggatgatatgcgtcatgaatttcaagcaaaaatgccagaagtagctgataagatacgtttttacttaggagatgtgcgtgatttagcttctgttaaaaatgctatgatcggtgtggattacgtatttcatgctgctgcattaaaacaagtcccttcttgtgaatttttccctgtggaagcagtcaaaactaacgttctaggaactgaaaatattctcactgcagctatagaagctggagtaaaacaagtcatctgcctttctacagataaggcagcctatcctgttaatgcgatgggaacctctaaggctatgatggaaaagattgctgttgctaagtcaaggacggtagaagaagatcagacaaaagtctgtgtaactcgctacggcaatgttctatgtagtcgtggttctgtgattcccctatggattgatcaaataaagcaagggaatcctataacgattacggaacctagtatgactcgttttattatgtccttagaagaagcggtagacctagttctgtttgcttttgaaaaaggaaaaacaggagatatcctagtacagaaagcaccagcatgtaccattgaagtgttggcgcaagctgttacggaactttttgcacctaatcaagatattaaagtaatcgggattcgccacggtgaaaagatgtatgaaacgttgttgactactgaagaatgtacgaatgccattgatttaggcggcttttatcgtgtgcctagcgataatcgagatcttaactatgataagtatttcaacgaaggggatgccaaacgcaatcccttaatagagtttaacagtagtaatacagaactctggaatgtcgagcaggttaaggaaaaactcttacttttgccctatattagggaagaattagcatctttaaatcagtga

SEQ ID NO: 7030 - DNA, 237 bp, Streptococcus pneumoniae
  misc_feature (1)..(237): tiling:Spneumo1:WAN024BVB; WAN023QA0 contig_1258_4||||851. .1087|+|237 bp|Glimmer 2.02 orf prediction|S.pneumoniae|67 0|WAN01UEG8|ORF
atgtttagagttgctatgaactgggattttgatcaagacactacgtacaacatcgctgatgttttagataacattcaacgcggtatctctgaactagaacggtaccctgaaaagtatgtgcagtatgaacctgaaaatagatggggaacagttagcgttgcattggaggttttaaagtcactgaaagagtgtattttagaacaagatattgatacgaaatatttatatatgaggtgg

SEQ ID NO: 7031 - DNA, 270 bp, Streptococcus pneumoniae
  misc_feature (1)..(270): tiling:Spneumo1:WAN024BVU; WAN023QLW contig_1315_22||||169 65..17234|-|270 bp|Glimmer 2.02 orf prediction|S.pneumonia e|670|WAN01UE9N|ORF
atgtttagcctaagccgagaaagcgagcaagacctagcgcatggcattctggaggtagtggaaagatacctggaagcgcgtgagaaagtaccgccaagattgaccaagttaataaatagagttgaactcaaagaggaattgaaaattagtgacaacacgctgaataagtgggaaagtcagggtttaagacgctatcaaccgccggacgatggttcaagaatgatttactatttagtaactgacatctggaagtttctgggggtggatgaa

SEQ ID NO: 7032 - DNA, 231 bp, Streptococcus pneumoniae
  misc_feature (1)..(231): tiling:Spneumo1:WAN024CQR; WAN023J5Z 84926_2005b||||114464 7..1144877|+|231 bp|EGAD orf prediction|S.pneumoniae|TIGR4 |WAN01UC25|ORF|010
atgtttaggaaattatccactttcttttctactacttttgtaccatttgcgtataaagaatatgtttttttgactgaatctgctactactgcaacagtgttagtcacagcctcttgtttgtacttaccccaaactgaagcaggtctggatactaggttatttttattggaagaagtatcacgcgcttccatccccaactcaccattgtctctaaggaacacatctacataa

SEQ ID NO: 7033 - DNA, 105 bp, Streptococcus pneumoniae
  misc_feature (1)..(105): tiling:Spneumo1:WAN024BKD; WAN023MJ8 spn194g09_45||||33565 ..33669|-|105 bp|Glimmer 2.02 orf prediction|S.pneumoniae| 23F-1|WAN01UCP7|ORF
atgtttagtgcagttagctactgccaaagcccaagtggtatacttggaataagccactgtggattagttcatttcctctacatgatatcacaaaatgacaagaat

SEQ ID NO: 7034 - DNA, 330 bp, Streptococcus pneumoniae
  misc_feature (1)..(330): tiling:Spneumo1:WAN024FQT; WAN023L4Y 314196_2404||||128731 1..1287640|-|330 bp|EGAD orf prediction|S.pneumoniae|R6|NC _003098.1|ORF|100
atgtttatgctatgcataacagttaagcctgtgataaatacgactaatatcttagagatcggattgggattaaagggagcatttgaagaaaaagtaggcattatacaatgcctgctttttcaaagtgttttttcaatagagccttgcctatatatgctccaagaattcctcctaagaaagcacctaaggctactaaagccatgtgaggataagttattaacttttctaatacatcaacataatcttttcccatcgtcatcaaagaccactccatatatttttcttttgctaaaagcatttgcattaaagagctacatatccatgtgctga

SEQ ID NO: 7035 - DNA, 192 bp, Streptococcus pneumoniae
  misc_feature (1)..(192): tiling:Spneumo1:WAN024BTV; WAN023Q2B contig_1220_22||||111 46..11337|+|192 bp|Glimmer 2.02 orf prediction|S.pneumonia e|670|WAN01UEKO|ORF
atgtttattttaagacatgggacaagagaggataagccgtttctgaggtccgtagttattggtgtgactggcttggacatttcatgttcagaggagaagaaagccatgcggtttgtttctcgtggggcagccgtacaggttggtaaggctttgaggggttcctttgggaatttttatcccgttgaggtggag

SEQ ID NO: 7036 - DNA, 93 bp, Streptococcus pneumoniae
  misc_feature (1)..(93): tiling:Spneumo1:WAN024CXC; WAN023O1Q spn047b01_63||||54453 ..54545|-|93 bp|Glimmer 2.02 orf prediction|S.pneumoniae|2 3F-1|WAN01UCNY|ORF|001
atgtttcatctattttttgatctgattttaggtaagtgtttctttgctttaggatgtggttataattggttaagtcagataagtagattggct

SEQ ID NO: 7037 - DNA, 318 bp, Streptococcus pneumoniae
  misc_feature (1)..(318): tiling:Spneumo1:WAN024BTZ; WAN023Q2H contig_1220_16||||879 0..9107|+|318 bp|Glimmer 2.02 orf prediction|S.pneumoniae| 670|WAN01UEKO|ORF
atgtttgaaccaccgattttagaccagctgatgggggttggagccttactgcttggatttgcaggggcttgccgtcatatcaaattgcaggaacaacgcaaggaagaagaaagacgagaagagcaagaatttgcgtctatgattattcgaggctataaccatgcttacgaacgtggtagagaggctgaacgtcaagaaatccgcaagaatattcgtcgtccgttcaagggctttacctacgacaatgaaccgcctataggcttgcgtcctgagccgttagctttgccagaacctaaacagtctgcaatcagatttttg

SEQ ID NO: 7038 - DNA, 114 bp, Streptococcus pneumoniae
  misc_feature (1)..(114): tiling:Spneumo1:WAN024BIL; WAN023Z5G AL449925.1_155||||161 314..161427|+|114 bp|Glimmer 2.02 orf prediction|S.pneumon iae||AL449925.1|ORF|000
atgtttgaagaatttcctaaactccctgatttgaagcaagtcactttccctgatgacaaaaaaagccaaagcagtaaagaaaaactagatgactgctttccaacaacttccaty

SEQ ID NO: 7039 - DNA, 360 bp, Streptococcus pneumoniae
  misc_feature (1)..(360): tiling:Spneumo1:WAN024BNI; WAN023OBG spn019g01_57||||36886 ..37245|+|360 bp|Glimmer 2.02 orf prediction|S.pneumoniae| 23F-1|WAN01UCLR|ORF
atgtttgagacattcgaaaaaattaaaagtttagctaaaaaacagggaatttctctaaacactttagaagatagggttggtttggggaaaaattacatttacagtcttaaaaataaaaagactccatctgctgaacatatatccaaaatcgctgactacttcaatgtatctacagactacttacttggtcgcacagataatcctaccatcgctaataaaaaagaacaattctttttcgaaggcaaagaagtcgatgttgaggaacttgcctctactgctatgcgcttcaatggtaaaccactaactgaagaagataaaaaagcaattcaaaacataatagagatttatctcagaaaacaa

SEQ ID NO: 7040 - DNA, 366 bp, Streptococcus pneumoniae
  misc_feature (1)..(366): tiling:Spneumo1:WAN024FQR; WAN023NB1 spn143g10_60||||51614 ..51979|+|366 bp|Glimmer 2.02 orf prediction|S.pneumoniae| 23F-1|WAN01UCOL|ORF|001
atgtttgagacatttgaaaaaataaaagaattggcaaaaaagcgtggaaaagctcttggacaagtagaagaagacttaggttatggtagaaatacactctataagataaaaaattctacgccaaacgctgaacgtatcgcagaaattgctaattatttcaacgtatccaccgactacctgctcggacgaacagataaccctgctatcgctgggagtgatgaatttgcccaagtaaacggacaaatcatagacttacgcaaagcagcagccaacaccatgttatttgacgggaaaccactaaatgaagatgatatcgacttcattacatccgtcctatccgcccacttcaaaagcaaaggagaacgc

SEQ ID NO: 7041 - DNA, 400 bp, Streptococcus pneumoniae
  misc_feature (1)..(400): tiling:Spneumo1:WAN024DRR; WAN0240ZD-con |pspC||AAF73790.1 |||2130 bp|surface protein PspC|S.pneumoniae||AF154021|ORF |000
atgtttgcatcaaaaaacgaaagaaaagtacattattcaattcgtaaatttagtattggagtagctagtgtagctgttgccagtctttttatgggaagtgtggttcatgcgacggcagaaggaggtaactacccaagtagcccctgttcgtctagtgaggcaaataaaagtcagacagaacatatgaaagctgctgaacaaggaaaacaacatagagaaatcgatttagaccgaaataaggcaaagaaagcgatcgatgaatatatagaaaaaatgttgagtgagatccaattagataaaagaaaacatacccaaaatttcgccttaaacctaaagttgagcagaattaaaacggagtatttgtatggattaagtgttttaaaagagaagtcggaagctg

SEQ ID NO: 7042 - DNA, 500 bp, Streptococcus pneumoniae
  misc_feature (1)..(500): tiling:Spneumo1:WAN024DRM; WAN02410C-con |pspC||AAF73795.1 |||2259 bp|surface protein PspC|S.pneumoniae||AF154026|ORF |000
atgtttgcatcaaaaaaggaaagaaaagtacattattcaattcgtaaatttagtattggagtagctagcgtagttgttgccagtctttttatgggaagtgttgtacatgcgacagagagaggggkaastaccccagtagccacttcttctaataaggcaaataaaagtcagacagaacatatgaaagctgctgaacaagtcgatgaatatrtaaacaaaatgatccaattagataaaagaaaacatacccaaaatctcgccttaaacataaagttgagcgcaattaaaacgaagtatttgcgtgaattaaatgttttagaaragaagtcgaaaaaagaagagttgacgtcaaaaacaaaaaaagagatagacgcagcttttgagcagtttaamaaagatacattgaaaccaggagaaaaggttgaagaagctcagaagaaggttgaagaagctgagaaaaaagccaaggatcaaaaagaagaagatcgtcgtaactaccc

SEQ ID NO: 7043 - DNA, 500 bp, Streptococcus pneumoniae
  misc_feature (1)..(500): tiling:Spneumo1:WAN024DRX; WAN0240Z1-con |pspC||AAF73777.1 |||1968 bp|surface protein PspC|S.pneumoniae||AF154010|ORF |000
atgtttgcatcaaaaagcgaaagaaaagtacattattcaattcgtaaatttagtattggagtagctagtgtagcagttgccagcttgttcttaggaggagtagtccatgcagaaggggttggtggtaggaatacctccacggttacatctagtgggcaagatacatcgaagaagtatgctgatgaagtcaagtcgcattatcaaagtatattggagaaggtcagaaaaagtttggaaaaagatcgacatacccaaaatgtcggcttaatcacaaagttgagcgaaattaaaaagaagtatttgtatgaattagaagttaatgttttattagaagagaagtcgaaagctgagttgccgtcaaaagctaaagcagagttagacgcagcttttgagcagtttaaaaaagaaccagaacttactaaaaaagtagcagaagctcagaagaaggttgaagaagctaagaaaaaagccgaggatcaaaaagaagaagatttccgtaa

SEQ ID NO: 7044 - DNA, 500 bp, Streptococcus pneumoniae
  misc_feature (1)..(500): tiling:Spneumo1:WAN024DRT; WAN0240Z2-con |pspC||AAF73778.1 |||2037 bp|surface protein PspC|S.pneumoniae||AF154011|ORF |000
atgtttgcatcaaaaagcgaaagaaaagtacattattcaattcgtaaatttagtattggagtagctagtgtagtagttgctagcttgttcttaggaggagtagttcatgcagaagacgttggtggtaggaatacccccacggttacatctagtgggcaagatatatcgaagaagtatgctgatgaagtcaagtcgcatctagaagaaatgttgagtgggatccaattaaatagaagaaaacatacccaaaatttcaactttaacctaaagttgagcaaaattcaaacgaagtatttgcgtgaattaagtgttttaaagtcgaaatctgagttgacgttagaaacaaaaaaagagttgctgtcaaaaaccaaagcagagttagacgcagcttttgagcagtttaaaaaagatacattgaaactaggagaaaaggtagcagaagctgagaagaaggttgaagaagctgagaaaaaagccaaggctcaaaaagaaaaagatcg

SEQ ID NO: 7045 - DNA, 700 bp, Streptococcus pneumoniae
  misc_feature (1)..(700): tiling:Spneumo1:WAN024DRJ; WAN0241NR-con SP2190||15901997| NP_346601.1|2110010..2112091|-|2082 bp|choline binding pro tein A|S.pneumoniae|TIGR4|NC_003028.1|ORF|010
atgtttgcatcaaaaagcgaaagaaaagtacattattcaattcgtaaatttagtrttggagtakctagtgtaktwgttgccagtcttgttatgggaagtgtggttcatgcgacagagaasgarggagctacccaagtacccacttcttctaatagggcaaatgaaagtcaggcagaacaaggagaacaacctaaaaaactcgattcagaacgagataaggcaaggaaagaggtcgaggaatatgtaaaaaaaatagtgggtgagagctatgcaaaatcaactaaaaagcgacatacaattactgtagctctagttaacgagttgaacaacattaagaacgagtatttgaataaaatagttgaatcaacctcagaaagccaactacagatactgatgatggagagtcgatcaaaagtagatgaagctgtgtctaagtttgaaaaggactcatcttcttcgtcaagttcagactcttccactaaaccggaagcttcagatacagcgaagccaaacaagccgacagaaccaggagaaaaggtagcagaagctaagaagaaggttgaagaagctgagaaaaaagccaaggatcaaaaagaagaagatcgtcgtaactacccaaccattacttacaaaacgcttgaacttgaaattgctgagtccgatgtggaagttaaaaaagcggagcttgaactagtaaaag

SEQ ID NO: 7046 - DNA, 500 bp, Streptococcus pneumoniae
  misc_feature (1)..(500): tiling:Spneumo1:WAN024DRP; WAN0240I3-con |pspC||AAF13455.1 |||1464 bp||S.pneumoniae||AF068645|ORF|000
atgtttgcatcyaaaagcgaaagaaaagtacattattcaattcgtaaatttagtattggagtagctagtgtagctgttgctagcttgttcttaggaggagtagtccatgcagaaggggttagaagtgagaatacccccaaggttacatctagtggggatgaagtcgatgaatatataaaaaaaatgttgagtgagatccaattagataaaagaaaacatacccacaatttcgccttaaacctaaagttgagcagaattaaaacggagtatttgtataaattaaaagttaatgttttagaagaaaagtcaaaagctgagttgacgtcaaaaacaaaaaaagaggtagacgcagcttttgagaagtttaaaaaagatacattgaaactaggagaaaaggtagcagaagctcagaagaaggttgaagaagctaagaaaaaagccaaggatcaaaaagaagaagatcaccgtaactacccaaccaatacttacaaaacgcttga

SEQ ID NO: 7047 - DNA, 138 bp, Streptococcus pneumoniae
  misc_feature (1)..(138): tiling:Spneumo1:WAN024F4C; WAN023OP8 pne79_20||||15985..16 122|+|138 bp|Type 37(2) capsule operon, Glimmer 2.02 orf p rediction|S.pneumoniae||WAN01UCFV|ORF|000
atgtttgctaagtatcaagaggaagcttcaaagaatgataaggttatcttctgtgggcgcttagcagattataaatattatgatatgcatgtggtgattgaacgagctcttgaagttgtagagaaagagttaggtaac

SEQ ID NO: 7048 - DNA, 696 bp, Streptococcus pneumoniae
  misc_feature (1)..(696): tiling:Spneumo1:WAN024BUK; WAN023Q97 contig_1258_34||||168 69..17564|+|696 bp|Glimmer 2.02 orf prediction|S.pneumonia e|670|WAN01UEG8|ORF
atgttttatatgattatcaatgggtttaatacatcaactatccctcactgcgtggtgacggattttggtcaggtggaggcagctaaacctagggtggctgaagatgctaacctctacggagccaacggaagttatcgagtgctggatggtggctatgagagttatgaacggactttttcgttctatattcctaagttactggatgtttctactatcgtggagaaatttcagcctaaggacaatgtgctagagtttagctaccagttggggtctgtattttatgcggattttattggtgcaacctatagccctcatgggatgcatgcctggaaactagaaatcaagttgaacatgcaaccgttccgttatcagaaaaatgttgctcctcttatctttaccgcaagtggaaatatcaacaatccaggctctgtctatagcgagcctgtgattgagattgagggagacggtgatatttctttgactatcggaaggacaactatgcacttgaccgttagacgaaaagtgaccattgattgtaggcataagaaacagaatatctataatgcagatggcgcggttcaaaatactttacgtaaacgtggaggcttctttgagttggcagttggtaataacagtctggtctttactggttcggttcgcaaggtcacggttcggccgaattggaggtatatctta

SEQ ID NO: 7049 - DNA, 1092 bp, Streptococcus pneumoniae
  misc_feature (1)..(1092): tiling:Spneumo1:WAN024BTD; WAN023YJW AL449929.1_26||||2651 5..27606|-|1092 bp|Glimmer 2.02 orf prediction|S.pneumonia e||AL449929.1|ORF
atgttttctgaaattattaagaaatatgatattgttacactgaaagatagtggttttttgagaggtgattggttcataggttcagcgttaatggctcatgactatgaaagccttaaggaagggatatatttctatccccaggaaacaatttggacaagaatcttggatttagaatatataaatccgtattgggaaatatataatcaaacttataatttcttattagttaataaacaagattcattagcaatgaattttttaactagtcttctaagagaaatagaagttatttcgtctaaaacattagattttgttgttattacttcaaacgaacacctaattaggaatttaattgatagagactattatattattacaaaagagattccattttttattgaaaacycaaaakttggaaattattttaaaatttttgtgaaaaatggaggacagtttattcctataattgactgtacggaatttaagattcagtctaagaaatattttgagataaatattaataaattytacctgaaacttttggattactttyttcatggagagattccagaaaaatttaaattttttggaaatacctctaatttcaatatagaaagcttgtttctagaatttattgatagccaagaaaatattcgagtagtttccttgttggattgtcttattcaattatcctctaaaaatattgaaatttcaggaaattataaagggcacacagtgaaaaaaatactaaaaaaattcgctttatactcagtaattaccaaacttgatataacgaaagtaaatcatttattgagaaatgattatatctactttttaatgaaggaaattgacaatattactaaaaaatatccaaagttaattcaaaagtaccctagagatatcttgagtgataggtatggaataacaaatgaagtatatagatacttaatcggagagaatttacatataaaaattaatcataaattagatgaggtkagatattttacagatattccatttattgatacttcactttctattgaagagtttgacaaaatagtttctaaaatattaaaaattaaagtgggaggg

SEQ ID NO: 7050 - DNA, 249 bp, Streptococcus pneumoniae
  misc_feature (1)..(249): tiling:Spneumo1:WAN024DQJ; WAN023JS7 83491_936||||536479.. 536727|-|249 bp|EGAD orf prediction|S.pneumoniae|TIGR4|WAN 01UC25|ORF|010
atgttttcttccgccaaaactgattgtgaaaacaaggctaaaattggcaacgtcaccagactcatttttgaaaatagacgtttattcatttctttctcccataattatgatatcgatttcaatattattttatcaaacttatttcagcaattcaaggaaacttctggtcttttctacaaactcctttggttttgccttattcaagacatgagggccatcaggaatgatctgaaactgcgaatctgttaa

SEQ ID NO: 7051 - DNA, 1275 bp, Streptococcus pneumoniae
  misc_feature (1)..(1275): tiling:Spneumo1:WAN024BPE; WAN023ONK pne81_17||||11178..12 452|+|1275 bp|Type 39(1) capsule operon, Glimmer 2.02 orf prediction|S.pneumoniae||WAN01UCEV|ORF
atgtttttagtttttttactgttttttggtgtatttctattatttccaattataactacaccagtcttattactcccaatagtttatagatttagatatagcagatattatttaatgttatttgttataggtatttccttaattgcgctaaggtatattccgtattttactgatgatggagcctatcattataaagcagcttatttatttcagttttatgataatgtttttgattggtttgggaacttgatgtctaaaaatattccgacggaagagtatggttattataattatcccttatttgccttattgctatatatattcagtaagacaggtacctattcactagttagttttacagtcattctgattgtttatttcttatatactaaaataatatatgaaatctatcgggaatataatatctcaaaatttttatttttattagctttattaacaatggttgcaatcgtaaatgttcgttttacaactagtggtatgaggtatcatttagcaggggccattattgttttcttattctataaagaaataaagaatggatttgaactaaataaaactttattttattatcttattccaatattaatccattctagtgcagtaatatttgtagcgactagattaatatttccatggtttaaagatgcgagtttttttaagaaaataattattctattttctttaccaatttttacgctcttatctccattgttgcaaactctcaatgttgaatatttatcatttttattagagaagtttaatgcttatcaaaaaacagaaatatttataaaattatatagtacatctgatttaataaatgtatatttaggtgttcttatttctttattatatatttttttataccatacaacatttcgttttcagaagaatcttaatatgaaactttttttatcttttgttttgtacatttgtttattaactttatcagtactcccatttttaacaatattagatcgttttgtttggtttgtttatcctttagttgccatttcgatgattttacatattggctacaataaaacccatattgaaagagtacaatacattagaaataattatttaccatttttcattgtattaaccctatgctttattggtggagttatcggaaataggagatttttagattttttaagattggtagatttcaatacaatggagatactcactaaaaatgtatttgattatttttctgatttgcaccatttctctttgagtgaagttttaagacga

SEQ ID NO: 7052 - DNA, 336 bp, Streptococcus pneumoniae
  misc_feature (1)..(336): tiling:Spneumo1:WAN024BYC; WAN023S0T contig_1623_23||||122 16..12551|+|336 bp|Glimmer 2.02 orf prediction|S.pneumonia e|670|WAN01UDAF|ORF
atgtttttgaagcagagtagactgaaaccttatccaatgcgacggtttgaaaagactgtcactgaggaaggtgtcgcaaaagaaggatatgtcaaggaagctgagacaatccgtcttgagttgtggccagctagtagtaaactacagtctgaattgtatggcgagcgtgtcaatgatattttgaacgcaaatgccaacaagtcagctacaatcaaagtgaaagatggtgtgtgtatcgatagccagacagaagtgactcacagggttatttctaaaaaggtctacacacatcatcaagttttggagttagagcgtgtcagggctactaggggcaga

SEQ ID NO: 7053 - DNA, 99 bp, Streptococcus pneumoniae
  misc_feature (1)..(99): tiling:Spneumo1:WAN024BLO; WAN023NIG spn111e04_37||||25674 ..25772|+|99 bp|Glimmer 2.02 orf prediction|S.pneumoniae|2 3F-1|WAN01UCND|ORF
atgttttttttattgacaaaagtagtaaaaacgtatacaattaaatattataaagaagaaaataggagaaaaacatggctaagtcaaactttgaaaaag

SEQ ID NO: 7054 - DNA, 1323 bp, Streptococcus pneumoniae
  misc_feature (1)..(1323): tiling:Spneumo1:WAN024BR5; WAN0240CM |||AAC98439.1|||1323 bp|UmuC MucB homolog|S.pneumoniae||L29324|ORF
attacaccccacttaagacttcggctttgtgttatgagtcgtgcagataattctgcgggtttaatccttgcttcctctcctatgtttaaaaaggtctttggaaagtcgaacgttggacgttcctatgatttaccatttgatgtaaagactcgcaaattctcttattataatgctaagaagcaaggtttaccgacaacgatagactatgtccgctatatagaggaatgggcaaaatcaaccgtgattgttccccgagaatggatacttaccattgctgtcaacatggagattcaaaaaatctttcaagattttgcagcaccagatgatatttatccctactcaattgatgaaggatttattgatttaacaagttcattaaattattttgtaccagataaaagtattagtaggaaagataaattagatattatttcggctgctattcaaaaaaagatttggagaaaaactggaatctattcaactgtaggcatgtctaatgccaatcccttattagctaagctggcacttgataatgaagctaaaaagactccgacaatgagagccaattggtcctatgaggatgtcgaaaagaaagtatggactattcctaaaatgacagatttctggggaattggaaatcgcatggagaaaagattacataatttaggtatcttttcgattaaagaattggctcaggctaatcctgacttgattaaaaaagagcttggtatcatgggtctagagttatggttccatgccaatgggattgatgaaagtaatgttcataaaccttataagccaaagtcaaaagggatagggaactctcaagttttaccaaaagattatattaaacaaagagatattgagatcatacttcgtgagatggcagaacaagttgcagttagattgagaagatctggtaaaaaagcaacagtagtttctatacatctaggctactctaaagtggaacaaaagcgttctatcaatactcaaatgaaaattgaaccaactaatcaaacagcactactgacaaactacgttttaaagttatttcacactaaatatacttcaggagctatcaggaatgttgcggttaactattctggtttagtggatgaatcctttggattgatttcattatttgatgatattgagaaaatagaaaaagaagaaaggctccagtccgcaatcgatgctattcgaacagaatttgggttcacttcactattgaaaggtaatgccctagatcaagcttctagaacaattgctagaagcaaactcattggtggtcattcagctggaggattagatggactaaaataa

SEQ ID NO: 7055 - DNA, 186 bp, Streptococcus pneumoniae
  misc_feature (1)..(186): tiling:Spneumo1:WAN024BJS; WAN01UC8N ||||||186 bp|Incyte o rf contig SPN2C0434 1889-2074|S.pneumoniae|23F|WAN01UC8N|O RF
attataaactacaagtggatattgtgtcctgtatgtggaaataaaacacgattaaagataagggaagatactgaattaaaaaaattccccctctattgtccgaaatgcagacaagaaaatttaattgaaataaagcagttcaaagtaactgtgattacagagccagacgcaaagacgcagagccga

SEQ ID NO: 7056 - DNA, 318 bp, Streptococcus pneumoniae
  misc_feature (1)..(318): tiling:Spneumo1:WAN024EU3; WAN0244YB ||||||318 bp|Incyte o rf contig SPN2C0320 10-327|S.pneumoniae|23F|WAN0244YB|ORF| 000
attattttttcagcaaaagatatttttgaacaagagtttggacgtgaagttcgtgggtatagcaaggtagaagttgatgagtttttagacgatgtcatcaaggactatgaaacctatgctaccttggttaagtcacttcgtcaggagattgcggatttgaaggaagaattaactcgtaaaccgcaagtgagttcggctccaagtcctagtcacccagatccaattgatgtggctgcttcatcttctatgacgaattttgatattttgaaacgcttgaatcgtcttgaaaaagaagtattcggtaaacaaattttagac

SEQ ID NO: 7057 - DNA, 1236 bp, Streptococcus pneumoniae
  misc_feature (1)..(1236): tiling:Spneumo1:WAN024CPP; WAN0246VE 220449-37-6||||||1236 bp|DNA Streptococcus pneumoniae strain 0100993 gene ampS plus flanks|S.pneumoniae||WAN0246VE|ORF|000
attgggtacgggcccccctcgaggtcgacggtatcgataagcttgattgcgaacggaattaacgtgcaacctggtcacactttggctctctctattgatgtggagcaacgtgaattggcacatctaatcgtgaaagaagcttatgccttgggtgcgcatgaggtcatcgttcagtggacagatgatgtgattaaccgtgagaaattcctccatgccccgatggagcgtttggacaatgtgccagaatacaagattgctgagatgaactatctcttggagaacaaggctagccgtcttggagttcgttcatctgatccaggtgccttgaacggagtggacgctgacaagctttcagcttctgctaaagctatgggacttgccatgaagccaatgcgaatcgcaactcaatctaacaaggttagctggactgtagcagccgctgctggacttgaatgggctaagaaagtcttcccaaatgctacgagcgatgaagaagcagtcgatctcctttgggaccaaattttcaaaacttgccgtgtctacgaagcagatcctgttaaggcctgggaagagcatgcagctatcttgaagagcaaggccgatatgcttaataaggagcaattttcagcccttcactacacagcgccaggaacagatttaacacttggtttgccaaagaaccacgtttgggaatcagctggtgctgtcaatgcacagggcgaaggattcttgccaaatatgccgacagaagaggtcttcacagcgcctgacttccgtcgtgcagatggttatgtcacttctacaaaaccgcttagctacaacggaaatatcatcgaaggtattaaggtaacctttaaggatggacaaatcgtagatatcactgctgagaagggtgatcaggttatgaaagaccttgtctttgaaaatgcgggtgcgcgtgccttgggtgaatgtgccttggtaccagatccaagtccaatttctcagtcaggcattaccttctttaacacccttttcgatgaaaatgcgtcaaaccacttggctattggtgcagcctatgcgactagcgttgttgatggagcggagatgagcgaagaggagcttgaagctgcagggcttaaccgttcagatgttcacgtagactttatgattggttctaaccaaatggatatcgatggtattcgtgaggatggaacgcgagtacttcttttccgtaatgggaattgggcaaattaa

SEQ ID NO: 7058 - DNA, 290 bp, Streptococcus pneumoniae
  misc_feature (1)..(290): tiling:Spneumo1:WAN024AJZ; WAN024EED-rc R6.IG_1228||||1182 848..1183137|-|290 bp|Between spr1184 (+ strand) and spr11 85 (- strand)|S.pneumoniae|R6|NC_003098.1|IG-rc|100
atttaatatttactttactaaattagtgtattcttcctactttaattagagaatgatttaagttctctttaaaaatcaaaagagtctaggacaaaatagttctcaatcacaaaaaagctaaagatttccaattgtggaactctagctttttaattttgagtcgttctcttattgtattttaggaggttattggccataagtaccaatcccatgtcaattctcacttgcccctcagattacatctcttgtaacccaaagaagcctttatctgcccaaagacaggttccaca

SEQ ID NO: 7059 - DNA, 225 bp, Streptococcus pneumoniae
  misc_feature (1)..(225): tiling:Spneumo1:WAN024AF8; WAN024C0W-rc TIGR4.IG_816.1.2|| ||821703..821927|-|225 bp|Between SP0873 (+ strand) and SP 0874 (- strand)|S.pneumoniae|TIGR4|NC_003028.1|IG-rc|010
caaaagacaataaaatcattataccttatctaactcaaaaatgcaaaaagaaatcacatacctaagatgaagctatctgttttgaagaaattcacgaagagaattattctaaaatactttcagatgagaattttcgtactctctttatttcaattcatttgagtttaaaaactataaaatcaatccttatattattcggactacttttcacttattgcaccaaaa

SEQ ID NO: 7060 - DNA, 505 bp, Streptococcus pneumoniae
  misc_feature (1)..(505): tiling:Spneumo1:WAN024CQ2; WAN0246VL 208202-14-6||||||505 bp|DNA Streptococcus pneumoniae strain 7/87 14.8.91 505-nu cleotide fragment|S.pneumoniae||WAN0246VL|ORF|000
caacaagtgcctcggcttcagcatgcacaagtgcttcagcttcagcatgtacctgagcgtctgaatcagcatcaacgtgtgcgtccgcttcagcatgtactgctgcctcagcatcagcgtcaacawgtgcttcggcttcagcgtcaacgagtgcgtctgagtcagcatcaacgagtacgtcagcctcagcaagcacatcagcttctgaatctgcatcaaccagtgcgtcagcctcagcatcgacaagcgcctcagcttcagcaagtaccagtgcgtcagcctcagcaagtaccagtgcttcagcctcagcgtcgacaagtgcgtcggcctcaaccagtgcatctgaatcggcatcaaccagtgcgtcagcctcagcaagtactagcgcctcagcctcagcatcaacgagtgcgtccgcttcagcaagtactagtgcatcagcatcagcatcaacgagtgcatcggcttcagcaagtaccagcgcctcagcttcagcaagcaccgg

SEQ ID NO: 7061 - DNA, 71 bp, Streptococcus pneumoniae
  misc_feature (1)..(71): tiling:Spneumo1:WAN024BAR; WAN023HWF ||||||71 bp|Incyte or f contig SPN2C0300 1099-1173|S.pneumoniae|23F|WAN023HWF|OR F|000
caatctcaaaacactgttttgagcaacctgtggctagctacctagtttgatctttgattttcattgagtat

SEQ ID NO: 7062 - DNA, 193 bp, Streptococcus pneumoniae
  misc_feature (1)..(193): tiling:Spneumo1:WAN024ASG; WAN024EQW R6.IG_256||||229771.. 229963|+|193 bp|Between spr0235 (leuS) (+ strand) and spr0 236 (+ strand)|S.pneumoniae|R6|NC_003098.1|IG|100
ccaatttatttgctgatttccaacctcaaacagtttcccaaactgtttgagccaactaaactcgttaatatcgttgtgaaataaggtaggaatccttcagagtagaatctggaggattttttgaatcttcttatgaaagtatggtatactatgggcaactataaagtttgaaaagtgaaaaaaggagaaagct

SEQ ID NO: 7063 - DNA, 278 bp, Streptococcus pneumoniae
  misc_feature (1)..(278): tiling:Spneumo1:WAN0249PA; WAN024B0Q-rc TIGR4.IG_1109||||1 120586..1120863|-|278 bp|Between SP1182 (+ strand) and SP1 183 (- strand)|S.pneumoniae|TIGR4|NC_003028.1|IG-rc|010
ccaatttctcaaaaaagttaaatcttatatttagtactctgtaaaactcttatctaatcacgttgcttatactcaatgaaaatcaaagagcaactttaaactaggaagcgagtcgcagatttctcaatgcatagctttgaggaattgggcaaaaagtctttgatatagaaaaacgcatagtatcaggtgtttcaacacctgatactatgcgttttattgtgggaagatttactttttttcttctgaaattgagttgttacccaggctctttcagttta

SEQ ID NO: 7064 - DNA, 174 bp, Streptococcus pneumoniae
  misc_feature (1)..(174): tiling:Spneumo1:WAN0249D8; WAN024E0T TIGR4.IG_237||||21491 9..215092|+|174 bp|Between SP0244 (- strand) and SP0245 (- strand)|S.pneumoniae|TIGR4|NC_003028.1|IG|010
ccgctacctccttggaaggtttttttgtgataagtatagcagtttaaaaattctagagcaaggtaaaatagaaaaggtttggctaaaattttttagctaaaccttttgaaaagttaagtatgtattatagatgcttgttatctgcaaatagctagagcatttcaaggaaataaa

SEQ ID NO: 7065 - DNA, 533 bp, Streptococcus pneumoniae
  misc_feature (1)..(533): tiling:Spneumo1:WAN024FEB-M; WAN024036 |pbp1b||CAA05304.1| ||1600 bp|penicillin-binding protein 1b|S.pneumoniae||AJ00 2293|ORF|000
ccgggggctctaccttgacccaacagttaatcaaacaacaagtggttggagatgctccgactttggctcgtaaggctacagaaattgttgatgcccttgccttggaacgcagcatgagtaaggatgaaatcttgactacttatctcaatgttgctccctttggtcgaaatcataaaggacagaatattgcaggtgcccagcaagctgctgaaggaattttcggtattgatgccaacaagttgagtattcctcaagcagccttcctagcaggtttgccccagagtccgattacttattccccttatgaaaatactggagagttaaagagtgatgaagacttagagcttggtttgaagcgggccaaggatgttctctacaacatgtaccgtacgggtgctctgactcaggaagaatacgatcagtacaaggattataatctcaaacaagatttcttgccatcaggaactgtcaatgttgtttcgagggattatctttactttacagctatggctgaagcgacagatcgcatgtat

SEQ ID NO: 7066 - DNA, 110 bp, Streptococcus pneumoniae
  misc_feature (1)..(110): tiling:Spneumo1:WAN024BCX; WAN023HW7 ||||||272 bp|Incyte o rf contig SPN2C0267 1314-1589|S.pneumoniae|23F|WAN023HW7|O RF|000
cctcaaaacggtgttttgagcagcctgcggctagcttcctagtttgctctttgattttcattgagtataaacagccactctccagttcaattggagagttttttgatgag

SEQ ID NO: 7067 - DNA, 119 bp, Streptococcus pneumoniae
  misc_feature (1)..(119): tiling:Spneumo1:WAN0249P9; WAN024E0N-rc TIGR4.IG_249.1.1.2 ||||228672..228790|-|119 bp|Between SP0256 (+ strand) and SP0258 (- strand)|S.pneumoniae|TIGR4|NC_003028.1|IG-rc|010
cctctccctgctacctcacgatagtcaggctgaggacttacacctcagatatacgacatgcccgtcgtaccgcaaaaaagccacctgattgggtggcttcattaggagattgtgatgaa

SEQ ID NO: 7068 - DNA, 131 bp, Streptococcus pneumoniae
  misc_feature (1)..(131): tiling:Spneumo1:WAN024BAD; WAN023HW3 ||||||131 bp|Incyte o rf contig SPN2C0241 1072-1206|S.pneumoniae|23F|WAN023HW3|O RF|000
ccttactgtatgtatggttactgacttcgtcagtttcatctacaacctcaaaattgtgttttgagtaacctgcggctagcttcctagtttgctctttgattttcattgagtattagaacagaaaaatgctt

SEQ ID NO: 7069 - DNA, 194 bp, Streptococcus pneumoniae
  misc_feature (1)..(194): tiling:Spneumo1:WAN024ASH; WAN024E0O TIGR4.IG_247||||22725 3..227446|+|194 bp|Between SP0254 (+ strand) and SP0255 (+ strand)|S.pneumoniae|TIGR4|NC_003028.1|IG|010
cgagtttattagctctatctgccaccttcaatagtccactggactattgaagccaactaaattagttaacattgttgtgaaataagataggagtccttcagagtagaatctggaggattttttgaatcttcttatgaaagtatgatatactatgggcaactataaagtttgaaaagtgaaataaggagaataag

SEQ ID NO: 7070 - DNA, 288 bp, Streptococcus pneumoniae
  misc_feature (1)..(288): tiling:Spneumo1:WAN024FCQ; WAN024002 |||AAA26884.1|||288 b p|Exp8|S.pneumoniae||L20562|ORF|000
cgattaagttgggtaacgccagggttttcccagtcacgacgttgtaaaacgacggccagtgaattcgagctcggtaccctgagaaaaaacatcggtttggttttacaggaacccttcctctatcatggaactattaagtccaatatcgccatgtaccaagaaatcagtgatgagcaggttcaggctgcggcagcctttgtggatgcagattcctttattcaagaacttcctcaggggtacgactcccctgtttccgagcgtggttcgagcttctctactgggcagcgc

SEQ ID NO: 7071 - DNA, 642 bp, Streptococcus pneumoniae
  misc_feature (1)..(642): tiling:Spneumo1:WAN024C34; WAN0246VQ 208201-48-3||||||642 bp|DNA Streptococcus pneumoniae strain 7/87 14.8.91 643-nu cleotide fragment|S.pneumoniae||WAN0246VQ|ORF
cgcccggccaccgctgcctatcctcgggagagggtcacctggagtgaacctagaacgatagacacggtgcggtacgacctcgtactactttcgccgacggcctcgtccgttgtcatccacgaactgatcggacatgggtgcgaacacttcagagaaaaaatcgttggactgcgtgtcgggcctgaggaactacgggtggtggcttttccgaagaacggctccgggtttgatgacgagggtacaccctccgaagagattgtacttgtggagaacggcattgtgaggcacgctgtcagggatcgggcgactggaggaatggcgcctttttccggtttgaccaaagtggcatcacatggtgtcaaacctggctcaagatgtacgcatctcaaggcggaaggggaatcgtcacaggaaggagttaccggagtacccgccgaacgcaccgtttggatagagcatttttctgcagcgaactaccattcaggtcgagcctttttcaggtctggccttgcctgggtaggcagccgagaagaactcttatatcccttaatgcctttcaccatgtcaattgatatctacgaactggccagcttattgtggcatttagacggtcaaacggaacgagcacgtagggtactgtgc

SEQ ID NO: 7072 - DNA, 116 bp, Streptococcus pneumoniae
  misc_feature (1)..(116): tiling:Spneumo1:WAN024F6W; WAN0246KT ||||||116 bp|Incyte o rf contig SPN2C0461 3874-3755|S.pneumoniae|23F|WAN0246KT|O RF|000
cgccttgccgtatgtgtaggatactaactacgtcagttccatccacaatctcaaaacagtgttttgagcagcccgcagctagtttcctagtttgatctttgattttcattgagtat

SEQ ID NO: 7073 - DNA, 380 bp, Streptococcus pneumoniae
  misc_feature (1)..(380): tiling:Spneumo1:WAN024FCC; WAN0246LR ||||||380 bp|Incyte o rf contig SPN2C0595 386-3|S.pneumoniae|23F|WAN0246LR|ORF|0 00
cgctagccgattagaatttccaagtaacgcgcccatattcagagtctaatgtgcagactttggcaaattcagacgggacaccggatcaaaccatcacaacaatagcgcgtaagcgttattgacagtttgagttggaattggtcttgcgagacaatcagacttcagcagagcatcctgatggcatctatcatccccacaaggatgtccaacatatcaagaaggaaaatatcggcttgattgaggtcatgggcttggcaatcttgccaccacgtctgaaagaagaagtggagcaagtcgcgagctatcttgtaggagaagctgttacagttgccgattatcatcaggagtgggcagaccaactcaaatcccaacatccagac

SEQ ID NO: 7074 - DNA, 142 bp, Streptococcus pneumoniae
  misc_feature (1)..(142): tiling:Spneumo1:WAN024ASA; WAN024E0J-rc TIGR4.IG_249.2.2.2 .1.1||||230856..230997|-|142 bp|Between SP0256 (+ strand) and SP0258 (- strand)|S.pneumoniae|TIGR4|NC_003028.1|IG-rc |010
ctaaaaaaatccccgccaaaatctcaaaaagtccccgccaattccccgaccaaaatccgaaaaataccgaaaaatatcgaaaaattatttttagaatagtcccaaaaatcctgaaatagagctaaaaaactccacctgattc

SEQ ID NO: 7075 - DNA, 261 bp, Streptococcus pneumoniae
  misc_feature (1)..(261): tiling:Spneumo1:WAN0249LB; WAN02490A-rc TIGR4.IG_1840.1.1| |||1835729..1835989|-|261 bp|Between SP1928 (+ strand) and SP1929 (- strand)|S.pneumoniae|TIGR4|NC_003028.1|IG-rc|01 0
ctaggaaatgctgctcatagtcctttgctgaggctagggtgtttcaacattcaacactcaactggttgatctagttgataggaagggagttactataaaatactcaggcttccatcatattttttgaaacgattgtgtaatcaaaatgtaccaatattgtagtattggtacagaagatgttgtgaatggataaatatatcataactgctatctcaaaaagatttcatatgtctgtgcatatataatagacttcctgcaaaa

SEQ ID NO: 7076 - DNA, 84 bp, Streptococcus pneumoniae
  misc_feature (1)..(84): tiling:Spneumo1:WAN024BWW; WAN023RIF contig_1565_7||||6993 ..7076|-|84 bp|Glimmer 2.02 orf prediction|S.pneumoniae|67 0|WAN01UDIJ|ORF
ctgaaaaagattgacaaccgctttgatcgatgcaatgtttcaactgactcaattcgctatcagataggaaaactttctttagct

SEQ ID NO: 7077 - DNA, 90 bp, Streptococcus pneumoniae
  misc_feature (1)..(90): tiling:Spneumo1:WAN024BWY; WAN023RIK contig_1565_1||||1011 ..1100|-|90 bp|Glimmer 2.02 orf prediction|S.pneumoniae|67 0|WAN01UDIJ|ORF
ctgaaactaattcacacaaccattcctgtcccaccttctacatctcttcctcaaccctactctattacccaaaaaggcattattgaagag

SEQ ID NO: 7078 - DNA, 129 bp, Streptococcus pneumoniae
  misc_feature (1)..(129): tiling:Spneumo1:WAN024DIN; WAN023YMX AL449928.1_53||||4145 8..41586|+|129 bp|Glimmer 2.02 orf prediction|S.pneumoniae ||AL449928.1|ORF|000
ctgaaaggttatcgtctcccctttgagggactttcatatgatgatttttatacacataattttaattctggtgttctgttaatcaacaatggcatgtggagagcagaaaatgtcacgcaagacctgatt

SEQ ID NO: 7079 - DNA, 678 bp, Streptococcus pneumoniae
  misc_feature (1)..(678): tiling:Spneumo1:WAN024CFO; WAN023RWX contig_1609_6||||2643 ..3320|-|678 bp|Glimmer 2.02 orf prediction|S.pneumoniae|6 70|WAN01UDCD|ORF|000
ctgaaatacttgatttctttgttttttctcagtatacttttccatgttataacacataaaaacaacttagttttcacaaactatgacaataaaaaaagttgctttttcccctttctatgtatgttttttactagtcatttaaaacgatacattaataggtacgaaaaagcaactttttttgcgcttaaaaccagtcataccaataacttaagggtaactagcctcgccggcaatagttacccctattatcaaggtgaaatcttacttgatcatctccctgttcatcaactctggggcaaatttggtatgattttgcaacaggagcacacctttatctcatcttatgaaaataatgtcactattttcaagacttttgaggctaattttagggatgaaaagtttgaaaagataccaccccagtccctgtcaggtggtcagcaacagcacatgtatctcaatcgggagaaaaatcgtcatagtccgctaattatcatggatgagcctttttctgctttggatgccagccaatttcaaaaggaattagacaaggtacttagcttgtcaagtgctgtcgtccttacacttcaccgtcaagaagagatgctatcacgctttgatcagatttgggaaatcaaggatggggagttggttgtcgtgaaaagagttctaaaacatgac

SEQ ID NO: 7080 - DNA, 258 bp, Streptococcus pneumoniae
  misc_feature (1)..(258): tiling:Spneumo1:WAN024BVR; WAN023QLT contig_1315_26||||178 42..18099|-|258 bp|Glimmer 2.02 orf prediction|S.pneumonia e|670|WAN01UE9N|ORF
ctgaacaagtggaatatattaagaattatcaagcgagggcatgacatgaatgagctagatataagtaacacacaggctgctgtcttaatcgtgattttgattggcttactgctttatttaaaccaccgagaccgcaaaaaaagcgcccaaattgagcgagaaaaccaacagacgatagaaacacctagcgaggatttaaaccctgaatatgggcgatatatccagcttgcaggcgtcaacgtatggggagggatggaa

SEQ ID NO: 7081 - DNA, 780 bp, Streptococcus pneumoniae
  misc_feature (1)..(780): tiling:Spneumo1:WAN024GI2; WAN023OQ7 pne78_11||||7540..831 9|+|780 bp|Type 36(1) capsule operon, Glimmer 2.02 orf pre diction|S.pneumoniae||WAN01UCFT|ORF|000
ctgaacgtaagggccacttcgagtctacatggggagattaatttgaatagttttgatttaatgggggtcaggattgaccccttaacaatggatgaaacagtagaggcggttgagaattttgtcattgaaaaacgtcctcttcatttaatgggcgtaaacgctgataagattaatcaatgtcaattagatgacgtcattaaaaaaatagttaacgattctgaaattatcaatgcagatggtgcatcagtagttctagcctctcgatttttgggctaccaagttccagagcgagttgctggaattgatttaatgcaaagattattaaaattagcggatgagaaatcttattctgtgtatttctttggtgctaaagaagaagttttgcaggatatgttacaaaatttcaaagaagagtatccaaatctacgagttgctggacatcgtaatggttatttttcggaggaagatgagcaagatattcaggaagatattcgtgaaaagaaccctgactttgtatttgttggaatcacctctccgaaaaaagaatacatcattcaaaaatttatgggcaatgaagtaaattccatttttatgggtgtaggtggtagttttgacgtattgtccggtcatattcaacgagcaccactttggatgcaaaaatcaaatctagagtggttgtttcgagtcgctaatgaaccaaagcgtctctttaaacgatattttgtggggaatattacctttattaagcgagttttagatgagaaacaaaaaacgaaaaaa

SEQ ID NO: 7082 - DNA, 123 bp, Streptococcus pneumoniae
  misc_feature (1)..(123): tiling:Spneumo1:WAN024DVD; WAN023MYW spn171g11_39||||39517 ..39639|+|123 bp|Glimmer 2.02 orf prediction|S.pneumoniae| 23F-1|WAN01UCQX|ORF|001
ctgaaggattcggtagtaagaatcggtgaagtaagttccactccaaccaaagaccaagtacctgatgaaataaataaactaccttctgtcttaggtactgagacaatcgcacttgctgtatca

SEQ ID NO: 7083 - DNA, 123 bp, Streptococcus pneumoniae
  misc_feature (1)..(123): tiling:Spneumo1:WAN024BK3; WAN023SSL BD003876.1_2||||56..1 78|-|123 bp|Glimmer 2.02 orf prediction|S.pneumoniae|ATCC5 5840|BD003876.1|ORF
ctgaagtccgagaactctagtcaccgtgcagtgatggttctggcttctaccctctctttcattttatatcaaatcgtcgcgcttgtcaaaactttccttggcaaggtcaaccaaacgctcgat

SEQ ID NO: 7084 - DNA, 690 bp, Streptococcus pneumoniae
  misc_feature (1)..(690): tiling:Spneumo1:WAN024DST; WAN023SWN-con BD003796.1_4||||2 124..2813|-|690 bp|Glimmer 2.02 orf prediction|S.pneumonia e|ATCC55840|BD003796.1|ORF|000
ctgaatacaagttttgttcatgctgctgatgggattcaatatgtcagagatgatactagagataaagaagagggaatagagtatgatgacgctgacaatggggatattattgtaaaagtagcgactaaacctaaggtagtaaccaagaaaatttcaagtacgcgaattcgttatgaaaaagatgaaacaaaagaccgtagtgaaaatcctgttacaattgatggagaggatggctatgtaactacgacaaggacctacgatgttaatccagagactggtyatgttaccgaacaggttactgttgatagaaaagaagccacggatacagttatcaaagttccagctaaaagcaaggttgaagaagttyttgttccatttgctactaaatatgaagcagacaatgacctttctgcaggacaggagcaagagattactctaggaaagaatgggaaaacagttacaacgataacttatratgtagatggaaagagtggacaagtaactgagagtactttaagtcaaaaaraagactctcaaacaagagttgttaaaaaargaaccaagccccaagttcttgtccaagaaattycaatcgaaacagaatatctcgatggcccaactcttgataaaagtcaagaagtagaagaagtaggagaaattggtaaattactcttactacaatctatactg

SEQ ID NO: 7085 - DNA, 132 bp, Streptococcus pneumoniae
  misc_feature (1)..(132): tiling:Spneumo1:WAN024GJL; WAN023SST BD003870.1_1||||151.. 282|-|132 bp|Glimmer 2.02 orf prediction|S.pneumoniae|ATCC 55840|BD003870.1|ORF|000
ctgaatggaggcaatgacactgtaggggcgatttctccttgggaagtaacagtaatttcttttgtggcaacaagggagaaaatcaagatgaaagtaaatagtaatgaaagaggtataattaacactgtcgca

SEQ ID NO: 7086 - DNA, 132 bp, Streptococcus pneumoniae
  misc_feature (1)..(132): tiling:Spneumo1:WAN024C38; WAN0246NG 209199-88-2_2||||934. .1065|-|132 bp|Glimmer 2.02 orf prediction from Patent Seq uences|S.pneumoniae||WAN0246WP|ORF
ctgaccaagatttctggaaggattttacaaatagctgtgaatgtagctgatgtatatggtaattttgcctacaatattgctgcagcttgggatgcacatgataaaatccctaacaatggtcgtataaacttt

SEQ ID NO: 7087 - DNA, 87 bp, Streptococcus pneumoniae
  misc_feature (1)..(87): tiling:Spneumo1:WAN024BBY; WAN023T3E BD003709.1_4||||1711. .1797|-|87 bp|Glimmer 2.02 orf prediction|S.pneumoniae|ATC C55840|BD003709.1|ORF|000
ctgacgaagtcagtaacatatacctacggcaaggtgaagctgacctggtttgaagagattttcgaagagtatcatttcatctcactc

SEQ ID NO: 7088 - DNA, 96 bp, Streptococcus pneumoniae
  misc_feature (1)..(96): tiling:Spneumo1:WAN024GJX; WAN023Q5G contig_1236_9||||4453 ..4548|-|96 bp|Glimmer 2.02 orf prediction|S.pneumoniae|67 0|WAN01UEIO|ORF|000
ctgacggcgtcgccacttaagaagagtatcaaaaagaaaaatagaaaattaactamcaaggagaaaaacacatgtctaaaattatcggtattgact

SEQ ID NO: 7089 - DNA, 102 bp, Streptococcus pneumoniae
  misc_feature (1)..(102): tiling:Spneumo1:WAN024BLQ; WAN023NKC spn107b03_3||||5645.. 5746|+|102 bp|Glimmer 2.02 orf prediction|S.pneumoniae|23F -1|WAN01UCO7|ORF
ctgacgtctaaaaaatattttgaaatttcctttcgagtattattttcatgtatggatataaataaattaccatactataattatagaatagggaacccaaaa

SEQ ID NO: 7090 - DNA, 93 bp, Streptococcus pneumoniae
  misc_feature (1)..(93): tiling:Spneumo1:WAN024BAE; WAN023NBW spn143g10_25||||33225 ..33317|-|93 bp|Glimmer 2.02 orf prediction|S.pneumoniae|2 3F-1|WAN01UCOL|ORF|001
ctgacttcgtcagtcctatctacaacctcaaaacagtgttttgagcagcctgcggctagtttcctagtttgctctttgattttcattgagtat

SEQ ID NO: 7091 - DNA, 110 bp, Streptococcus pneumoniae
  misc_feature (1)..(110): tiling:Spneumo1:WAN024BAB; WAN023TMW-5 AX571766.1_322||||2 89106..289372|-|267 bp|Glimmer 2.02 orf prediction|S.pneum oniae||AX571766.1|ORF|000
ctgacttcgtcagtcgtatctacaacctcaaaacagtgttttgagctgacttcgtcagttctatctgcaacctcaaaacagtgttttgagcagcccgtggctagtttcct

SEQ ID NO: 7092 - DNA, 93 bp, Streptococcus pneumoniae
  misc_feature (1)..(93): tiling:Spneumo1:WAN024BBA; WAN023V5P AX571761.1_242||||206 128..206220|+|93 bp|Glimmer 2.02 orf prediction|S.pneumoni ae||AX571761.1|ORF|000
ctgacttcgtcagtcttatctacaacctcaaaacagtgttttgagcaacctgcgactagcttcctagtttactctttgattttcattgaatat

SEQ ID NO: 7093 - DNA, 93 bp, Streptococcus pneumoniae
  misc_feature (1)..(93): tiling:Spneumo1:WAN024BCP; WAN023Z4R AL449925.1_181||||178 073..178165|-|93 bp|Glimmer 2.02 orf prediction|S.pneumoni ae||AL449925.1|ORF|000
ctgacttcgtcagtcttatctacaacctcaaaactgtgttttgagcaacctgcggctagcttcctagtttrctctttgattttcattgagtat

SEQ ID NO: 7094 - DNA, 99 bp, Streptococcus pneumoniae
  misc_feature (1)..(99): tiling:Spneumo1:WAN024BCK; WAN01UC8V ||||||99 bp|Incyte or f contig SPN2C0426 1290-1388|S.pneumoniae|23F|WAN01UC8V|OR F|000
ctgacttcgtcagtcttatctacaacctcaaagcagtgctttgagcaacctgcggctagtttcctagtttgctctttgattttcattgagtataagaac

SEQ ID NO: 7095 - DNA, 76 bp, Streptococcus pneumoniae
  misc_feature (1)..(76): tiling:Spneumo1:WAN024B9U; WAN023NQF spn093a10_9||||7442.. 7537|-|96 bp|Glimmer 2.02 orf prediction|S.pneumoniae|23F- 1|WAN01UCTO|ORF|001
ctgacttcgtcagttctatccacaacctcaaaacagtgttttgagcaacctgcggctagtttcctagtttactctt

SEQ ID NO: 7096 - DNA, 102 bp, Streptococcus pneumoniae
  misc_feature (1)..(102): tiling:Spneumo1:WAN024BAJ; WAN023U6H AX571764.1_367||||292 646..292747|-|102 bp|Glimmer 2.02 orf prediction|S.pneumon iae||AX571764.1|ORF|000
ctgacttcgtcagttctatccacaacctcaaaacagtgttttgagcatcatgcggctagcttcttagtttgctctttgattttcattgagtataaaaacaga

SEQ ID NO: 7097 - DNA, 213 bp, Streptococcus pneumoniae
  misc_feature (1)..(213): tiling:Spneumo1:WAN024F72; WAN023Z0Y AL449926.1_73||||6291 3..63125|+|213 bp|Glimmer 2.02 orf prediction|S.pneumoniae ||AL449926.1|ORF|000
ctgacttcgtcagttctatccacaacctcaaaacagtgttttgagctgacttcgtcagtcttatctacaggttcaaagcagtgttttgagcaatctgcggttagcttcctagtttgctctttgattttcattgagtataaatcattcaacgtaaatgaaaaaaatttcttaacgaaagatagagataaatcgaaatcagtagatcgtataaag

SEQ ID NO: 7098 - DNA, 153 bp, Streptococcus pneumoniae
  misc_feature (1)..(153): tiling:Spneumo1:WAN024BAA; WAN023REU contig_1552_5||||2802 ..2954|+|153 bp|Glimmer 2.02 orf prediction|S.pneumoniae|6 70|WAN01UDKA|ORF|000
ctgacttcgtcagttctatccacaacctcaaaacagtgttttgagctgacttcgtcagttccatctacaaccttaaaacagtgtttagagcagcccgcagctagtttcctagtttgctatttgattttcattgagtattacttcattttcttc

SEQ ID NO: 7099 - DNA, 99 bp, Streptococcus pneumoniae
  misc_feature (1)..(99): tiling:Spneumo1:WAN024BAK; WAN023SRU BD003894.1_16||||8222 ..8320|-|99 bp|Glimmer 2.02 orf prediction|S.pneumoniae|AT CC55840|BD003894.1|ORF|000
ctgacttcgtcagttctatctacaacctcaaagcagtgctttgagcaacctacggctagcttcctagtttgctctttgattttcattgagtatgagttt

SEQ ID NO: 7100 - DNA, 131 bp, Streptococcus pneumoniae
  misc_feature (1)..(131): tiling:Spneumo1:WAN024B8U; WAN023RB4 contig_1541_8||||2497 ..2664|+|168 bp|Glimmer 2.02 orf prediction|S.pneumoniae|6 70|WAN01UDLS|ORF|000
ctgacttcgtcagttctatctacaacctcaaagcagtgctttgagcagcctgcggctagtttcctagtttgctctttgattttcattgagtattggcctcaggtttccatttgcaatcagaaagggatttt

SEQ ID NO: 7101 - DNA, 99 bp, Streptococcus pneumoniae
  misc_feature (1)..(99): tiling:Spneumo1:WAN024BCT; WAN023YEQ AL449930.1_136||||111 615..111713|-|99 bp|Glimmer 2.02 orf prediction|S.pneumoni ae||AL449930.1|ORF|000
ctgacttcgtcagttctatctgcaacctcaaagcagtgctttgagcaacctgcggctagtttcctagtttgctctttgattttcattgagtatcagatt

SEQ ID NO: 7102 - DNA, 159 bp, Streptococcus pneumoniae
  misc_feature (1)..(159): tiling:Spneumo1:WAN024F6Y; WAN023SDU NC_003028.1_833||||63 1443..631601|+|159 bp|Glimmer 2.02 orf prediction|S.pneumo niae|TIGR4|NC_003028.1|ORF|010
ctgacttcgtcagttttatctacaacctcaaagctatactttgagctgacttcgtcagttttatttacaacctcaaagcggtactttgagaaacctgtggctatcttcctagtttactttttgatttttattgagtataagaggtctttcctaagcagt

SEQ ID NO: 7103 - DNA, 78 bp, Streptococcus pneumoniae
  misc_feature (1)..(78): tiling:Spneumo1:WAN024EVY; WAN023ODP spn015g06_13||||10259 ..10336|-|78 bp|Glimmer 2.02 orf prediction|S.pneumoniae|2 3F-1|WAN01UCTZ|ORF|001
ctgacttttaaagactggcaaacttttctgatgattttcatgaagagcctgcgcttttatggtaaaatagtaacagaa

SEQ ID NO: 7104 - DNA, 519 bp, Streptococcus pneumoniae
  misc_feature (1)..(519): tiling:Spneumo1:WAN024BWG; WAN023R23 contig_1433_1||||35.. 553|-|519 bp|Glimmer 2.02 orf prediction|S.pneumoniae|670| WAN01UDVD|ORF
ctgagaacaccacctgtcgtcaaagatatggtcaccaccgatggttctctcagcgactggggaagcaagatcaaggaagacgcagcagatgattccaaatggggagctgacaacgagcttttgaaggcaggtttgctcttcgatggtgcaaacatctacatcgccggtgaatatgtgataggaggcgatggaaacgttaatgtctttcttgttttgatcgatcttgtcggtgtgaccggagctcagacagtctcctacacgggtttgaacgatggaaacagaaacttcacaaaccccaacggcgacatagatctcatcgttgaagtgaatcagagcaacgaatacaaagtctggagagtgtctcaggatggaagcctcacagatatcaccgaccaagtgaccgcccagtttggaactggatctacaatagcagaactcaagatcccaatctccgaacaagttaaccaggtgaaagctgtcttcgccatcagcggtggaacgggtggcggaaatcagtgg

SEQ ID NO: 7105 - DNA, 1542 bp, Streptococcus pneumoniae
  misc_feature (1)..(1542): tiling:Spneumo1:WAN024BVW; WAN023QLY contig_1315_20||||145 86..16127|-|1542 bp|Glimmer 2.02 orf prediction|S.pneumoni ae|670|WAN01UE9N|ORF
ctgagtatagaaagagaggttagaaccatagaactagaagaattagcaaacctaaaaagtgaaatcatggaggtcagagagcaagaacaacctcctagaacgatgaaggagcttgaaaatcgtatctttaaagctggtgaagaatggcgggcagaacataccgaaactaaggtaaatgagaccacaggggacgttaccgaaaaggttgccatacctcagacattcactgtagctaaaatactgagcgagattgtcacgtttacttttatcagcaagagcaatatagctgattatagtctactctatatctacgatttagacgagggtatctatacagctagtaatgatctatttaatctattgtgtaagacttttgatgtgagaattaaacccagagagtggccgcagattaagttaatggttagaacactaacaaagatacgaaaacctttagaaagttccaacctcattcccgtacagaacggaattatcaacttagaaactaaggagctattcccctttagtcctaagtatgtaattacaagcaagataagcacggcataccacgcgcctaaacgagtcccaacagatagagagggaaaaacttttgatgattggctaaactcaatcgcttgtaatgatagtgagctagtgacactgttttggcaaattatccttgaagctatcaactctaaccatacccgaaataagtttgctatcttctacggggacggtaacaacggtaagggaacatttcagcgcttccttatcaacctgataggggaaagcaatatatcagccttaaaacctgcacagtttgctgaaaagcataacttagaaaccctggtaggtaaagtttgtaatatcggagatgaagccccaaatgaatacttgaaaaatccgtctgatttaatgagtatcactagtggcgatacagtactggtcaaccccaaaggacgcccagcctttgaggctactttcaagttattcaatatcttttcagggaattatatccccaatggtggcaacaagacaaaaggctggtatcgtagaattatgattgtcccttttaatgctgactttaacggggagaaggaaaagccttggattaaaaatgaatttttggccaatgatgaagtattagagtacgcactttacaaagctatcaatcaagagccttttacacactttatcgaacccaaagcagtcaaaggccttctagaagaataccaggaagaaaatgactacttgctttcatgggttaaacatgaatacatggaaagaggttggcatgagctggacgtggtacctgtttttatactgaccagaacactgaagcattatgctgaggacatggggatagccaagcctaatgtttatggggcaggaaaagatactatcagacacctacaacagttaacacctaataagtatcagcttaaaaaggcccgtgttaggattgaagattatgacaaactggacccgtatggttttgagagacaaaaactgggtcgagtaaatcatgctgtaactaaaacagag

SEQ ID NO: 7106 - DNA, 1167 bp, Streptococcus pneumoniae
  misc_feature (1)..(1167): tiling:Spneumo1:WAN024BU8; WAN023Q2O contig_1220_9||||4337 ..5503|-|1167 bp|Glimmer 2.02 orf prediction|S.pneumoniae| 670|WAN01UEKO|ORF
ctgataaacaaggagaatacaatgaaatataataaaacaaaatacccaaatatctattactatgaaactgccaaaggcaagcgatactatgtcagacgttcttttttcttccgaggtaaaaaaagagaaaaaagtaaaagtggtctcacaacccttccacaagctcgtgcagccttagtagagcttgagcaacaaatccaagaacaagaattaggtatcaatacgaatctgacacttgatcaatattgggatatttattctgaaaagagattgtcaacagggcgctggaatgacacttcctactacctcaatgataatctctacaagaaccatatcaaggcaaagtttggttctaccctgcttaaaaatttggatagaaatgagtatgaactctttatcgctgaaaagttgcagaaccataccagatacactgttcaaaccctcaattccagcttcatggcattgctgaatgatgccgtcaaaaatggaaatctgctctcaaatcgcttgaaaggtgttttcatcggccagagtgatatccctgctgcaaacaagaaagtgactctcaaagagttcaagacttggatagcaaaggcagaagagattatgccaaaacaattctacgctctgacctatctgacaatttttggattgagaagaggagaagtctttggattgcgtccaatggacatcactcagaacgacagcggacgggctatactgcatcttagagacagtcgaagcaaccagaccttaaaagggaaaggagggcttaaaacgaaggattcagagcgatatgtctgccttgatgatatcggaacagacctgatctattatctgatagctgaagcttctaagattaagcgaaagttaggaattatcaaggaacagcacaaggattatataactatcaacgagaaaggtggtctcatcaatccaaatcagctaaatagaaacttcaatctagtgaatgaagcaacaggattgcatgtaacacctcacatgatgcgccacttcttcacgactcaaagcattattgcaggggttccgcttgaacaattaagccaggcgctggggcatacaaaggtttatatgacggatcgttacaatcaagtagaggacgaacttgctgaagcgacaacagacctatttcttagtcatattcgc

SEQ ID NO: 7107 - DNA, 579 bp, Streptococcus pneumoniae
  misc_feature (1)..(579): tiling:Spneumo1:WAN024BWE; WAN023R21 contig_1433_3||||623. .1201|-|579 bp|Glimmer 2.02 orf prediction|S.pneumoniae|67 0|WAN01UDVD|ORF
ctgatattcacactgaaaggatctcctgttatctactacggcggtgaaattggaacgagaggtttcaagtggcacggtcctgtatatgacgagccggtgagagagccgatgcagtggtacgcaagcggtacaggagaaggtcaaaccttctggacaaaggaagtctacaaaaacgcggggataacctttggaaacgctgatgttgacggatgtatctatgacgatccttacgatggcttttctgtcgaagaacaggaaagcgatccgaagagtcttttgaatttcatcagattcattctcaacttcagaaaagatcacgacgccattttgaatggagatcaaacgatcttcagggactggaaaaacctcatagcgttctacagagaatcctccaacgaaaagctgttggtggtcttgaatccggatccagtctggcaaaacagcttcacttttgaagaaaacatgacgatgattctcgaggtagattttgaaaacttcatctggaacgagtcaaacgtgtctttttcagcgggtgaatccttcactgtggatcccatgaaagcgtacattttcaaaaag

SEQ ID NO: 7108 - DNA, 645 bp, Streptococcus pneumoniae
  misc_feature (1)..(645): tiling:Spneumo1:WAN024BZ8; WAN023S6C contig_476_2||||455.. 1099|-|645 bp|Glimmer 2.02 orf prediction|S.pneumoniae|670 |WAN01UCZL|ORF
ctgatgaaaaatcttgtcggacttctcgaaccgacccgcggcgagattctgtacgacggtcgtaattttgtaagcatgagcaaacacgaaaaggtaatgatgcgtcgcgagatgggtatgatattccaaagcgctgccctcttcgactccatgacggttctcgagaacgtgatgttcccgctcgacatgttctcgtcaatgaccttacgtgaacgtatccgccgtgcacaggactgcttggaccgtgtaaacctgactggtgccgacgaaaaattccctggcgagatatccggaggtatgcaaaaacgtgttgccatcgcccgtgccatcgccctcaatcccaaatatctgttttgcgacgagccaaactctggtctcgaccccaaaacatcgcttgttatcgatgagctgttacactccatcactcaggaatacaacatgaccaccatcataaacacccacgacatgaactcggtcatgggcatcggcgaaaatatcatttttatttacgaaggaaataaggaatggcaaggtgtaagcagtcaggttatgggtgccgaaaatccccgattaaccgactttatcttcgccagcgatctgctcaaaaatatgcgacgaatcgttatcgacaacggactctcatta

SEQ ID NO: 7109 - DNA, 78 bp, Streptococcus pneumoniae
  misc_feature (1)..(78): tiling:Spneumo1:WAN024GEO; WAN023MUO spn177c06_69||||46476 ..46553|-|78 bp|Glimmer 2.02 orf prediction|S.pneumoniae|2 3F-1|WAN01UCTU|ORF|001
ctgatggagggacttgcagatagaatctctagttttgcgggtttacagacagtaccatctaaaaagacaattcccttt

SEQ ID NO: 7110 - DNA, 156 bp, Streptococcus pneumoniae
  misc_feature (1)..(156): tiling:Spneumo1:WAN024BZ9; WAN023S6D contig_476_1||||299.. 454|+|156 bp|Glimmer 2.02 orf prediction|S.pneumoniae|670| WAN01UCZL|ORF
ctgattcttaatcttaatttctttcttcatataaaaatgctaaaattggatgttataattcgaattattgctgcaaaagtaagtaaaaaatctgaatcgaacaaacttttaagaaaaatttatttaataataaggtgttttttcttgaaacactta

SEQ ID NO: 7111 - DNA, 171 bp, Streptococcus pneumoniae
  misc_feature (1)..(171): tiling:Spneumo1:WAN024BLE; WAN023NB6 spn143g10_54||||49682 ..49852|-|171 bp|Glimmer 2.02 orf prediction|S.pneumoniae| 23F-1|WAN01UCOL|ORF
ctgattcttcaaaaaagcgttttcttgaagaatagggaggaggaatggcagggtattattgccaaaaacgccattttgttaataatagctcctttttattttttgattattgtcaaaaacggtgttttgtcaaaaataaaaacagtgaccgaaatcactgcttatcagttg

SEQ ID NO: 7112 - DNA, 78 bp, Streptococcus pneumoniae
  misc_feature (1)..(78): tiling:Spneumo1:WAN024BUV; WAN023Q9K contig_1258_21||||868 2..8759|-|78 bp|Glimmer 2.02 orf prediction|S.pneumoniae|6 70|WAN01UEG8|ORF
ctgattgccaagtttctttctagccatccactgctcctttcaatcgtaccgcatgataaccctatcgctgggatgatt

SEQ ID NO: 7113 - DNA, 99 bp, Streptococcus pneumoniae
  misc_feature (1)..(99): tiling:Spneumo1:WAN024DYH; WAN023N2P spn161d05_13||||10463 ..10561|+|99 bp|Glimmer 2.02 orf prediction|S.pneumoniae|2 3F-1|WAN01UCNH|ORF|001
ctgatttttttagccaaacgtaatcttttaattttttcgccaaactctcgcaacctacaagaacttcctgagttgtttacctctattataagcatatac

SEQ ID NO: 7114 - DNA, 441 bp, Streptococcus pneumoniae
  misc_feature (1)..(441): tiling:Spneumo1:WAN024F4E; WAN023OFM pne92_18||||14860..15 300|+|441 bp|Type 48(1) capsule operon, Glimmer 2.02 orf p rediction|S.pneumoniae||WAN01UCEA|ORF|000
ctgcaaataattgcaaataaagttgtcttcactggaatgattgaccagtactttgattacaaacacggggagttagaataccgtagccttcgttttgaacacgaagtcttggatgaagaaaattatcaagggaatgcagtagtaaactatacagaacgtgagattccttacactcgtatcattgagcacaagcactgtgagtatggtacacaaccgaagacggttatcactcgtgagtacccagctgattggaaacgtggagatgaaccatattatccgatcaacgatgaaaagaacaacactatgtttgctaagtatcaagaagaagcagcaaaaaatgacaaggttatcttctgtgggcgcctagctgactataaatactacgacatgcatgttgttattgaacgtgcacttagtgtagtaacgaatgagtttggttac

SEQ ID NO: 7115 - DNA, 504 bp, Streptococcus pneumoniae
  misc_feature (1)..(504): tiling:Spneumo1:WAN024BTC; WAN023YJV AL449929.1_27||||2761 3..28116|-|504 bp|Glimmer 2.02 orf prediction|S.pneumoniae ||AL449929.1|ORF
ctgcaacagattgttttttatgcaataaatcgtataaaattaaaagtagatgtgattgtactgtatgatagttttgatagtatagttaattgctttgataaattaaaagggcaatatatattattatctgtagctttcgagagtagtattaaaaattatagttggaaagatttcaactttgaatatcataagcggattgaaattgtggattcttttcactcttttactaagggaatggttctaatcgagaattgtaattataaaattaatagggcgattatccaacctgcaactgagattttgatgttaaactatttaaagaaaaaaagtatggatctgaggatagattttacccatagtaaagttatggcaaataaaaaatttctggaagaaggttatcgtttttcaatagtaagtcaagaaacgataattaataatgatgatattattatttgtgaaactttctctccagaaatgatttggtgcttatatrgagtgaaagga

SEQ ID NO: 7116 - DNA, 81 bp, Streptococcus pneumoniae
  misc_feature (1)..(81): tiling:Spneumo1:WAN024CHI; WAN023SNF NC_003098.1_61||||453 94..45474|-|81 bp|Glimmer 2.02 orf prediction|S.pneumoniae |R6|NC_003098.1|ORF|100
ctgcaagaagaatctttctcacagtttaaaaattatttaactctaaaaacacgaacattactctttgttcaaaaattgatc

SEQ ID NO: 7117 - DNA, 93 bp, Streptococcus pneumoniae
  misc_feature (1)..(93): tiling:Spneumo1:WAN024AWZ; WAN023NKA spn107b03_5||||6588.. 6680|-|93 bp|Glimmer 2.02 orf prediction|S.pneumoniae|23F- 1|WAN01UCO7|ORF|001
ctgcgtcacaagatgattgcgcatgcaataattatactacttttcaagaatgctggcaagctctgttttttagtggttttatttttgtgtgaa

SEQ ID NO: 7118 - DNA, 108 bp, Streptococcus pneumoniae
  misc_feature (1)..(108): tiling:Spneumo1:WAN024C3M; WAN0246RT 200145-35-3_1||||29.. 136|+|108 bp|Glimmer 2.02 orf prediction from Patent Seque nces|S.pneumoniae||WAN024714|ORF
  misc_feature (61)..(61): n is a, c, g, or t
ctgcgtttcgcgagaaaactcttgttagaccagatagggattagccaaaatccttctatgngcttatatccaaatggagatgcaaacttctgcccaactcttgaccaa

SEQ ID NO: 7119 - DNA, 78 bp, Streptococcus pneumoniae
  misc_feature (1)..(78): tiling:Spneumo1:WAN024C29; WAN023SJ0 NC_003098.1_1777||||1 380088..1380165|-|78 bp|Glimmer 2.02 orf prediction|S.pneu moniae|R6|NC_003098.1|ORF
ctgctaaaaaccttgagtggtaacgctcaaggttttttttggatggctgatgtttgtctgaaaatcttgattgagaaa

SEQ ID NO: 7120 - DNA, 78 bp, Streptococcus pneumoniae
  misc_feature (1)..(78): tiling:Spneumo1:WAN024G9Z; WAN023NL9 spn103f10_6||||6281.. 6358|+|78 bp|Glimmer 2.02 orf prediction|S.pneumoniae|23F- 1|WAN01UCLB|ORF|001
ctgctacaagctcagcttgaccttggggttggacgagatttagttgaggttcctctagctcaatcttgtgaggaagct

SEQ ID NO: 7121 - DNA, 75 bp, Streptococcus pneumoniae
  misc_feature (1)..(75): tiling:Spneumo1:WAN024BX2; WAN023RLQ contig_1573_2||||625. .699|+|75 bp|Glimmer 2.02 orf prediction|S.pneumoniae|670| WAN01UDHG|ORF
ctgctacgacggaaaaatccacaaatcaataccattcgtggatttttcctagtgaagcgtttaggtaagccgcca

SEQ ID NO: 7122 - DNA, 153 bp, Streptococcus pneumoniae
  misc_feature (1)..(153): tiling:Spneumo1:WAN024BSE; WAN023TH5 BD140023.1_4||||1225. .1377|-|153 bp|Glimmer 2.02 orf prediction|S.pneumoniae||B D140023.1|ORF
ctgctcgttcaagcgaccgtcttatctgtcttcgtggtgaaagtaattgctattgtatcgactgaagtccctttagaaagtcttgaaggcgatgttttcgaagtgaaagtgctgaccggcaaggtaaaggttaccgttattagagatgtggca

SEQ ID NO: 7123 - DNA, 93 bp, Streptococcus pneumoniae
  misc_feature (1)..(93): tiling:Spneumo1:WAN024GO2; WAN023QJ8 contig_1303_2||||97.. 189|-|93 bp|Glimmer 2.02 orf prediction|S.pneumoniae|670|W AN01UEB8|ORF|000
ctgctgaaccttgtcttcttcgatcaggtaggagagctcttggggcaactkggctggggtctagttccacgggacgggaagactcaaggagag

SEQ ID NO: 7124 - DNA, 84 bp, Streptococcus pneumoniae
  misc_feature (1)..(84): tiling:Spneumo1:WAN024C2A; WAN023SJ4 NC_003098.1_1709||||1 328961..1329044|+|84 bp|Glimmer 2.02 orf prediction|S.pneu moniae|R6|NC_003098.1|ORF
ctgctggagaggagtttgtttagagtttctttcatttccctaaaaaatcaaaaagagagaaccagtctgatcctctcttactta

SEQ ID NO: 7125 - DNA, 84 bp, Streptococcus pneumoniae
  misc_feature (1)..(84): tiling:Spneumo1:WAN024CVL; WAN023T1K BD003728.1_30||||1893 1..19014|+|84 bp|Glimmer 2.02 orf prediction|S.pneumoniae| ATCC55840|BD003728.1|ORF|000
ctgcttcaagaaagcctagttgcttggcaaaacgaagcttggattcaagtttatctgcgtgactacgcaggcacccagcatgga

SEQ ID NO: 7126 - DNA, 141 bp, Streptococcus pneumoniae
  misc_feature (1)..(141): tiling:Spneumo1:WAN024BMF; WAN023NTY spn068b06_20||||20362 ..20502|-|141 bp|Glimmer 2.02 orf prediction|S.pneumoniae| 23F-1|WAN01UCUD|ORF
ctgctttcttttttgatgcttcctatcctatcacctttttcatcacctgtcaataatatttcagaattttttaaaatttttcgaaaattctttcaggaagctttcaaagtttttcaaatcagtccaacaaaaaaagtttta

SEQ ID NO: 7127 - DNA, 90 bp, Streptococcus pneumoniae
  misc_feature (1)..(90): tiling:Spneumo1:WAN024BY3; WAN023RYI contig_1612_4||||354. .443|+|90 bp|Glimmer 2.02 orf prediction|S.pneumoniae|670| WAN01UDBY|ORF
ctggaaagagatgaacaaatcaaatacataaaagataaactcatttttattcgtttggtaaaaataaaatgcatatttttaaagaaagat

SEQ ID NO: 7128 - DNA, 78 bp, Streptococcus pneumoniae
  misc_feature (1)..(78): tiling:Spneumo1:WAN024FSE; WAN023N7N spn147d03_12||||6896. .6973|+|78 bp|Glimmer 2.02 orf prediction|S.pneumoniae|23F -1|WAN01UCWT|ORF|001
ctggaaattgcatttaagttcttttcctttcgtaaatataggactgaatttcctcctgcatctcaagaggcaccatca

SEQ ID NO: 7129 - DNA, 102 bp, Streptococcus pneumoniae
  misc_feature (1)..(102): tiling:Spneumo1:WAN024B6W; WAN023XTN AL449947.1_8||||6921. .7022|-|102 bp|Glimmer 2.02 orf prediction|S.pneumoniae||A L449947.1|ORF|000
ctggaagaagatatcagaggatttcttttggttgcaggtctaacaaatggtgagttaatcgctcccaatgacttacgaagagatgatgacgagcgacttttt

SEQ ID NO: 7130 - DNA, 81 bp, Streptococcus pneumoniae
  misc_feature (1)..(81): tiling:Spneumo1:WAN024BSA; WAN023TH1 BD140037.1_1||||711.. 791|-|81 bp|Glimmer 2.02 orf prediction|S.pneumoniae||BD14 0037.1|ORF
ctggacattaaaagaaaaatagacattattcttagcaaggtcgcggatcttttgggtgtggactatattgaactcgaggat

SEQ ID NO: 7131 - DNA, 183 bp, Streptococcus pneumoniae
  misc_feature (1)..(183): tiling:Spneumo1:WAN024BG4; WAN023XTW AL449946.1_35||||2095 8..21140|+|183 bp|Glimmer 2.02 orf prediction|S.pneumoniae ||AL449946.1|ORF|000
ctggactataacttattagacttcctgcgaaataaaatatggtatagtagttctatgaatgatgaagcaagtaaacaactaactgatgcacgatttaagcgtcttgttggtgttcagcgtaccacttttgaagagatgttagctggattaaaaacagcttatcaaaaaagtcggacaagctgg

SEQ ID NO: 7132 - DNA, 111 bp, Streptococcus pneumoniae
  misc_feature (1)..(111): tiling:Spneumo1:WAN024B9T; WAN023NYR spn047f12_32||||21946 ..22056|+|111 bp|Glimmer 2.02 orf prediction|S.pneumoniae| 23F-1|WAN01UCXY|ORF|001
ctggacttcttagcagtctttccaacagcttgggtagcttttcgctaccgcaatctagtcggtacggttctctttggagtagtcttgattgccgtcttgcgtttggtcttt

SEQ ID NO: 7133 - DNA, 99 bp, Streptococcus pneumoniae
  misc_feature (1)..(99): tiling:Spneumo1:WAN024DLL; WAN023N4U spn154d04_8||||9545.. 9643|+|99 bp|Glimmer 2.02 orf prediction|S.pneumoniae|23F- 1|WAN01UCPK|ORF|001
ctggagctgggtcttgatgtgcagggtgagaagcttcattttgatgttcaggcttggaaggggttgagtctggtttctcttctgcagttgactcatggc

SEQ ID NO: 7134 - DNA, 747 bp, Streptococcus pneumoniae
  misc_feature (1)..(747): tiling:Spneumo1:WAN024BLZ; WAN023NNQ spn097d12_34||||30598 ..31344|-|747 bp|Glimmer 2.02 orf prediction|S.pneumoniae| 23F-1|WAN01UCN2|ORF
ctggaggtgaatatgattaaattagagtttctaaagcagaaaaaaagcatcttatggtttgttcttatttttccaataattctgaatgttttgttatatatagacttaacttttaggtatcgaggttatttattggtgcatcaaaatgaacttgctttatctaattggcagttaatttttaaagaacaaacaatattttatttttctgaactattttatttagttctatctttaataatttacgaagtgtttgcagtagaatttaaaaatgatgcatggttaaccgtaatttcattgccatttagaaacaagtacacaataaattctaaattactcattacagtggtttacacatttactttttggttgtctgattatattagcttatacgttattgggaaggctattgataacagtttagagattggtttgattttctttttaaaaacatttaccattcaattaatttcctcgttgatgataatgttattatattttctaactttagtacttataaggaaaatttctggaataataccaattggtattataatgatgattttaacaattagcatatactacaacgattataattttaagatttacttaccatttacttatctttctcatgcttttagagtgactgaaagtcaattttatatgattttactatctaatataataatcatcgtacttttttatatattaattcgtaaattgaacgaaagaagttttgagatgaaactt

SEQ ID NO: 7135 - DNA, 1497 bp, Streptococcus pneumoniae
  misc_feature (1)..(1497): tiling:Spneumo1:WAN024BVG; WAN023QHL contig_1298_23||||128 59..14355|-|1497 bp|Glimmer 2.02 orf prediction|S.pneumoni ae|670|WAN01UEBQ|ORF
ctggataattattgtatcgagtatgaatattttgaaaaaaagaagaattttatgtatttggagaagaaaatgcaaatattaatttctgaagtaaatgtaactagttttggaattacaagagaaattttaaagaaaatggattttaatttctcaaaaatgggtagcgaagaagctaaatttttaatttttccagagttacctagaggaggtgagctaagtttaactgctcgtcaaagttatgatagccagttaaggtattcgatgttacctagagttgaggacatcatgaagaaaattgtaaatcaacttagagaacatttaaaaattttagacattgagctaagtgatttaagttatttatcagagggtgatcaattcatattaaaggaactatcaagtcatgtaaaaataaatattaaaattactccaataaaaaaaatacgttatgtatatgaagatatctttctcaatcaatcagcagaggaattacatgaattaggattaaaatatttatcagcaggtgatttatgggcttctaaaaaaatatttacttacttagtaaataaatatgataatagacgagatgttttcaaattagctacaacttataatatgttattggaaacagaaaaagcagaatactactacaacctatacaaacatgatggaaaagttgaccatattgtggcagcaaactatatgcttgcaatgctctatgcacgccatcatcctaaataccttcaagatgatcaaaaagctattgtattattgaatgaagcgtatgatttaattaaagataaagtgacattagagagtatttttaatcgaaatgggtatgccctactattatttaaaatgggcaaagtagaggaaacaatcatattattaaaacgttgtttaaatcaaataaaacaattagataactctagttcttcggttgttcttcatgaaagtgtactttggtttaatttatatcagtgctatgtcactataggtgacaatactaattctcggaaaactttttatattttgaaaaatatggatccgctttttattgagtactatctagaatattctagaaatcttttagagacagatgtcgaaaattttctagaatttatagagagtatgccacatcattctaataattttgctgaaaaatattcgctcctaggctactattttagaggtactgcgaaatcattagaatattttagtaaagcttttgaattgtcaaatagaacgttttctttttggtacgatataacttatgaactaacggagtttaatctttacaatgaagcatacaataatttacctttattgaataataaattgtatgagctgaatgatgaagacttactaaattatattttaatttcggcagaaattttttataatttagacaggttggatgaatttaaacgaactatagaaattgggtatagaatttttcctgattcagaaagtattaaagaaattatagagaatgccgaa

SEQ ID NO: 7136 - DNA, 84 bp, Streptococcus pneumoniae
  misc_feature (1)..(84): tiling:Spneumo1:WAN024CEK; WAN023YWI AL449927.1_56||||4372 7..43810|+|84 bp|Glimmer 2.02 orf prediction|S.pneumoniae| |AL449927.1|ORF|000
ctggataccgtgagacaaagtcttgaaagagttcttgtaaatgctgctcttttgctcttagaacagaggttttttccaaatctg

SEQ ID NO: 7137 - DNA, 75 bp, Streptococcus pneumoniae
  misc_feature (1)..(75): tiling:Spneumo1:WAN024CXB; WAN023QGY contig_1295_22||||207 58..20832|-|75 bp|Glimmer 2.02 orf prediction|S.pneumoniae |670|WAN01UEBW|ORF|000
ctggatctacttttttctaaagcaattttgaaagattcggataagttttgtttgtcagttatattgacagaagat

SEQ ID NO: 7138 - DNA, 96 bp, Streptococcus pneumoniae
  misc_feature (1)..(96): tiling:Spneumo1:WAN024AZI; WAN023O3N spn041h04_33||||25596 ..25691|-|96 bp|Glimmer 2.02 orf prediction|S.pneumoniae|2 3F-1|WAN01UCLF|ORF|001
ctggatgcccgtctctttatttccagactggatgcaagcaatcgggaagcgtttaccaagttatcagttgatggaattaatcaagaccttcttaaa

SEQ ID NO: 7139 - DNA, 144 bp, Streptococcus pneumoniae
  misc_feature (1)..(144): tiling:Spneumo1:WAN024GK6; WAN023N8L spn146g03_2||||557..7 00|+|144 bp|Glimmer 2.02 orf prediction|S.pneumoniae|23F-1 |WAN01UCSD|ORF|001
ctggattaccaacagctaatcaatcaaatcaatgtggtcaaccgtgttttgaccatgaagttgacagatttttaccgctacctcagcagtactcatcagcattttctatcaaaaataattccccatttatcctgttttcaagcc

SEQ ID NO: 7140 - DNA, 81 bp, Streptococcus pneumoniae
  misc_feature (1)..(81): tiling:Spneumo1:WAN024F6U; WAN023NOR spn095f09_7||||2802.. 2882|-|81 bp|Glimmer 2.02 orf prediction|S.pneumoniae|23F- 1|WAN01UCSI|ORF|001
ctggcaataagaataatactctttgaaaatctcttcaaaccacgtcaacgtcgccttatctacaacctcaaaaccgtgttt

SEQ ID NO: 7141 - DNA, 93 bp, Streptococcus pneumoniae
  misc_feature (1)..(93): tiling:Spneumo1:WAN024CX7; WAN023QMG contig_1315_2||||938. .1030|+|93 bp|Glimmer 2.02 orf prediction|S.pneumoniae|670 |WAN01UE9N|ORF|000
ctggcaggaactaatttgctagtaacatctccttgtatctctgttaatccacttgacaatcctatcaaagaagtagaagtaataggtgatact

SEQ ID NO: 7142 - DNA, 225 bp, Streptococcus pneumoniae
  misc_feature (1)..(225): tiling:Spneumo1:WAN024EUR; WAN023SNM BD004064.1_2||||114.. 338|-|225 bp|Glimmer 2.02 orf prediction|S.pneumoniae|ATCC 55840|BD004064.1|ORF|000
ctggcgcgtgtcaaggctgtcctcaggcgaactaaaggagaacaagaaggagatgattcagataatatcgctgacgattcttggctatttgggaccttgaaagtataccctgagcgtcatgaagtctacaaggcgaataagttactgagtttgaccccaaaagaatttgaaagcgataaaaatccgttttttgaagttttcaaagtttcgaaagtaaccgcccaa

SEQ ID NO: 7143 - DNA, 129 bp, Streptococcus pneumoniae
  misc_feature (1)..(129): tiling:Spneumo1:WAN024AVD; WAN023RCU contig_1545_6||||4953 ..5081|-|129 bp|Glimmer 2.02 orf prediction|S.pneumoniae|6 70|WAN01UDLC|ORF|000
ctggctaaaagaacctggctaacagctcacttgtatagaaaatttgataaatattttcacgaaacaagacctcctatcaaagtttttgaacatttgataggaggtctttttattatgaagacttttacc

SEQ ID NO: 7144 - DNA, 294 bp, Streptococcus pneumoniae
  misc_feature (1)..(294): tiling:Spneumo1:WAN024BWL; WAN023R57 contig_1504_2||||664. .957|-|294 bp|Glimmer 2.02 orf prediction|S.pneumoniae|670 |WAN01UDP2|ORF
ctggctgacgaagctgatgaaaaactgaactccattgtaggagctgtggagagaataaacgagatgcttcagaatatagcagcggcgatagaagaacagacagcagctgtggacgagatcacaaccgctatgacagaaaacgcgaaaaacgcagaagaaattacaaacagtgtcaaggaagtgaacgcaaggcttcaggaaatcagtgcctcgacagaagaagttacgagcagagtacagaccatcagggaaaatgtacagatgctcaaagaaatcgtcgcaagatacaaaata

SEQ ID NO: 7145 - DNA, 105 bp, Streptococcus pneumoniae
  misc_feature (1)..(105): tiling:Spneumo1:WAN024BLU; WAN023NLV spn098f07_11||||10812 ..10916|+|105 bp|Glimmer 2.02 orf prediction|S.pneumoniae| 23F-1|WAN01UCXN|ORF
ctggctgatactcgtatgcttacgatcgtagaaaacttcactttgacgacaaccaaagccgttctccaaatagtagaggccgattcgatcgccaagccgacagat

SEQ ID NO: 7146 - DNA, 141 bp, Streptococcus pneumoniae
  misc_feature (1)..(141): tiling:Spneumo1:WAN024DQ8; WAN023YZ4 AL449926.1_150||||112 967..113107|+|141 bp|Glimmer 2.02 orf prediction|S.pneumon iae||AL449926.1|ORF|000
ctggctgatatcattctctacaccgtcgctattgctgctatcaagcatattgacctaactagaaccatctttgagaaagacaaaaccgcagccgttaattaccaacataaacatgatttggaaggattcttgaagggaaag

SEQ ID NO: 7147 - DNA, 666 bp, Streptococcus pneumoniae
  misc_feature (1)..(666): tiling:Spneumo1:WAN024BWF; WAN023R22 contig_1433_2||||8..6 73|+|666 bp|Glimmer 2.02 orf prediction|S.pneumoniae|670|W AN01UDVD|ORF
ctggctgatttggatagaagtctcctaccactgatttccgccacccgttccaccgctgatggcgaagacagctttcacctggttaacttgttcggagattgggatcttgagttctgctattgtagatccagttccaaactgggcggtcacttggtcggtgatatctgtgaggcttccatcctgagacactctccagactttgtattcgttgctctgattcacttcaacgatgagatctatgtcgccgttggggtttgtgaagtttctgtttccatcgttcaaacccgtgtaggagactgtctgagctccggtcacaccgacaagatcgatcaaaacaagaaagacattaacgtttccatcgcctcctatcacatattcaccggcgatgtagatgtttgcaccatcgaagagcaaacctgccttcaaaagctcgttgtcagctccccatttggaatcatctgctgcgtcttccttgatcttgcttccccagtcgctgagagaaccatcggtggtgaccatatctttgacgacaggtggtgttctcagacatccgtaaagaacaagagattagaccgccaaaaccaggaagagttttttcattttcgcacctcctcactttttgaaaatgtacgctttcatgggatccacagtgaaggattcacccgc

SEQ ID NO: 7148 - DNA, 288 bp, Streptococcus pneumoniae
  misc_feature (1)..(288): tiling:Spneumo1:WAN024BNJ; WAN023OBI spn019g01_55||||35960 ..36247|-|288 bp|Glimmer 2.02 orf prediction|S.pneumoniae| 23F-1|WAN01UCLR|ORF
ctggggtttacagcggtaggtattatgatggttgttctagctaaccacccaaactggcaagtctatccagatgagatagctaaacgaaaaggtgtcggccgtgacatgattgatcgtcatctaaaaaagttagaggatgctggttatatgcgtgtgatcaaaaaaagccttggtagaggtcgaggtgttcagactttcagattcttctcagatacaaagataactgactttcaatttgaaatcatgttacaacggcttgatgaagcaatagaaaagttatccacagtt

SEQ ID NO: 7149 - DNA, 144 bp, Streptococcus pneumoniae
  misc_feature (1)..(144): tiling:Spneumo1:WAN024BS8; WAN023TGZ BD140039.1_2||||411.. 554|-|144 bp|Glimmer 2.02 orf prediction|S.pneumoniae||BD1 40039.1|ORF
ctgggtcttggagaaccagttttaggaagtcttaaacaagtttccaatgtggtgaacggactggactctataaccgtctgccgggttagttccctggacagagagcttaatttaggtcacactatcccactgacccgtaggctt

SEQ ID NO: 7150 - DNA, 114 bp, Streptococcus pneumoniae
  misc_feature (1)..(114): tiling:Spneumo1:WAN024BPN; WAN023OXE pne67_22||||17578..17 691|+|114 bp|Type 18F1 capsule operon, Glimmer 2.02 orf pr ediction|S.pneumoniae||WAN01UCFB|ORF
ctgggttttattgaccctagagatatagtgatttataatggcaaaccggttactatatattttagtattgaaaaactaagaaatggtgaaaattattcctctcacacagttatt

SEQ ID NO: 7151 - DNA, 87 bp, Streptococcus pneumoniae
  misc_feature (1)..(87): tiling:Spneumo1:WAN024C39; WAN0246NH 209199-62-2_3||||1465 ..1551|+|87 bp|Glimmer 2.02 orf prediction from Patent Seq uences|S.pneumoniae||WAN0246WQ|ORF
ctggtaattccaaagtctcaatcttggtcaaaaagctttttgacggaaatcagccaaccaagcttggttccagcggtgcattctaac

SEQ ID NO: 7152 - DNA, 456 bp, Streptococcus pneumoniae
  misc_feature (1)..(456): tiling:Spneumo1:WAN024BJ4; WAN0243U1-con spr1274|spsA-trun cation|15903317|NP_358867.1|1268770..1269159|-|390 bp|Chol ine binding protein|S.pneumoniae|R6|NC_003098.1|ORF
ctggtagatgaacgtgatggaacaattgaagaaactacttctcgtcaaattactaaagagatggtaaaaagacgtataaggagagggacgagagaacctgaaaaagttgttgttcctgagcaatcatctattccttcgtatcctgtatctgttacatctaaccaaggaacagatgtagcagtagaaccagctaaagcagttgctccaacaacagrctggaaacaagaaaatggtatgtggtatttttataataytgatggttccatggcaacaggttgggtacaagttaatrrttcatggtactayctcaacagcaacggttctatgaaagtcaatcaatggttccaagttggtggtaaatggtattatgtaaatrcatcgggtgagttagcggtcaatacaagtatagatggctatagagtyaatgataatggtgaatgggtgcgtctaactaat

SEQ ID NO: 7153 - DNA, 810 bp, Streptococcus pneumoniae
  misc_feature (1)..(810): tiling:Spneumo1:WAN024BW9; WAN023R0F contig_1407_5||||1952 ..2761|+|810 bp|Glimmer 2.02 orf prediction|S.pneumoniae|6 70|WAN01UDX7|ORF
ctggtgctttaccactggggattgacgaaaggcaggcaagcaatgaagaggaactatacaagggtcatcgatgaaatgcaaaccactcacgggatgaacttggtaactattggccaacggataggcataaacccccgaacagttggcaaatgggcacagggcaaacataagcccaacaagaaaagcagaaaaagactaaatcagttatacagagaggttaagcaagacatgacaacacagcaaaaagatttatgtgatttttttgggaacttctaccccaaaggagaaacacacaacaaaaaggaagttttggaagttgtaacaactcaacgatttggatctaaacactttgatgtttatggagacattcaaaatccgttatttgtagcggtagaggttgctgagatgattgaaatccaaaacaccacggatttactaaaacgggtagatgatgatgaaaagctgacctatgtaatatctagggcaggtcaaaaaagagaaatgaatatgttgacagagttcggagtctatgaagttttatcgcagtcacgcaaaccactagcaaaagagtttaaaaaagttgttaagcacattctgaaagaaatccgactaaatggctactacatggctggggaattggtggaagaaccacagaccactataaaagcccctggcacgttggcagaggcagagcggtattatatcgatacactagccaaagccattgcagaggctcagaatatggacgagaagagccgtctgacaagcaagctaaccagattcatgcaggaggtagaaccacaatggaac

SEQ ID NO: 7154 - DNA, 180 bp, Streptococcus pneumoniae
  misc_feature (1)..(180): tiling:Spneumo1:WAN024DOY; WAN023SK5 NC_003098.1_1337||||1 059456..1059635|+|180 bp|Glimmer 2.02 orf prediction|S.pne umoniae|R6|NC_003098.1|ORF|100
ctggttaatagtttactcctaaatctccaacttgtcaagaattttatgaaccatttaagtattttttgttctgaccactactttttcaaggttggactttttataagaaagattttcttgaaaattctttttaaaatatcaaaaaaagtccctgtaactgagttgcagggacttttcgat

SEQ ID NO: 7155 - DNA, 117 bp, Streptococcus pneumoniae
  misc_feature (1)..(117): tiling:Spneumo1:WAN024BSF; WAN023TH6 BD140023.1_3||||1105. .1221|-|117 bp|Glimmer 2.02 orf prediction|S.pneumoniae||B D140023.1|ORF
ctggttaatttagacgatttagaaagaaccgaagaagctaaactgctcgactacgaccaaattgtcctatttattggactcaacagtcgtaaaaaggacaacgtaggtgctgtcgat

SEQ ID NO: 7156 - DNA, 135 bp, Streptococcus pneumoniae
  misc_feature (1)..(135): tiling:Spneumo1:WAN024F6O; WAN023MX6 spn174h06_2||||491..6 25|-|135 bp|Glimmer 2.02 orf prediction|S.pneumoniae|23F-1 |WAN01UCQT|ORF|001
ctggttgatgagactgtgaaaagagcacaaagaccagcttgcaagctggtcatactcttcgaaaatctcttcaaaccacgtcagcttcatctacaacctcaaagcagtgctttgagcaacctacggctagcttcc

SEQ ID NO: 7157 - DNA, 126 bp, Streptococcus pneumoniae
  misc_feature (1)..(126): tiling:Spneumo1:WAN024CM6; WAN023MUU spn177c06_63||||43477 ..43602|-|126 bp|Glimmer 2.02 orf prediction|S.pneumoniae| 23F-1|WAN01UCTU|ORF|001
ctggttgcatattattttgaaataaaactactatataatattattcatagaggtaatatagtaaaatatctaaaaaattcgattttttccttgacaacaaataataaaaatgttattcttatcaca

SEQ ID NO: 7158 - DNA, 204 bp, Streptococcus pneumoniae
  misc_feature (1)..(204): tiling:Spneumo1:WAN024BQ7; WAN023PCL pne42_24||||20155..20 358|-|204 bp|Type 19C capsule operon, Glimmer 2.02 orf pre diction|S.pneumoniae||WAN01UCFI|ORF
ctgtacgaaaaattgaaaaacaattcttcaccagctagtgaaatagctctacaaagaattcttattttcaaagatccactttctgcaccactagttatatctgaaatttatgcagatattgttctattcaatgatgctaagagattctgttctttgtgtattctggtagttgcaaacaactcacaaggttcggaaaaaaatgaa

SEQ ID NO: 7159 - DNA, 75 bp, Streptococcus pneumoniae
  misc_feature (1)..(75): tiling:Spneumo1:WAN024BK7; WAN023SZD BD003754.1_4||||4941. .5015|+|75 bp|Glimmer 2.02 orf prediction|S.pneumoniae|ATC C55840|BD003754.1|ORF
ctgtacttcaatttgaaaaattattctaacacgaatcttgagtacaagcaaccgatttgctcattagaaaaagcc

SEQ ID NO: 7160 - DNA, 90 bp, Streptococcus pneumoniae
  misc_feature (1)..(90): tiling:Spneumo1:WAN024BJY; WAN023SQZ BD003918.1_2||||824.. 913|+|90 bp|Glimmer 2.02 orf prediction|S.pneumoniae|ATCC5 5840|BD003918.1|ORF
  misc_feature (51)..(51): n is a, c, g, or t
ctgtatagagcaaaatctccaccttcaggtttggaaagcggagattgtttnttattttttccagggtttgtagtcgtgggactaactaat

SEQ ID NO: 7161 - DNA, 78 bp, Streptococcus pneumoniae
  misc_feature (1)..(78): tiling:Spneumo1:WAN024DIH; WAN023NIK spn111e04_33||||23249 ..23326|-|78 bp|Glimmer 2.02 orf prediction|S.pneumoniae|2 3F-1|WAN01UCND|ORF|001
ctgtcaattctcccaattgtaaatccaactgaaaaaatagtttttgcagttgcctatcagtttcatcacatcctgtct

SEQ ID NO: 7162 - DNA, 138 bp, Streptococcus pneumoniae
  misc_feature (1)..(138): tiling:Spneumo1:WAN024BY5; WAN023S04 contig_1621_17||||860 0..8737|+|138 bp|Glimmer 2.02 orf prediction|S.pneumoniae| 670|WAN01UDAQ|ORF
ctgtcactagaaaatatgacaaatgtcataaaaaattctgttcaaaacaagcaagatacactatacaataaaacacaatcagaaaaatctaaggcaacttcctcaaaagagatatcaaactcaattcacaccataatg

SEQ ID NO: 7163 - DNA, 129 bp, Streptococcus pneumoniae
  misc_feature (1)..(129): tiling:Spneumo1:WAN024D5V; WAN023MQP spn180c09_66||||58603 ..58731|+|129 bp|Glimmer 2.02 orf prediction|S.pneumoniae| 23F-1|WAN01UCXQ|ORF|001
ctgtcgaaaaaaactgtcaaaagtagttcaacttgtctttttctctgcttttttgtcttgaatgccttaaatatcatattattccccttttctaagcttcaatcccttctctctatctgttatttcgca

SEQ ID NO: 7164 - DNA, 78 bp, Streptococcus pneumoniae
  misc_feature (1)..(78): tiling:Spneumo1:WAN024E2N; WAN023SOG BD004027.1_3||||528.. 605|+|78 bp|Glimmer 2.02 orf prediction|S.pneumoniae|ATCC5 5840|BD004027.1|ORF|000
ctgtctcatcagcaccgttcactgggagagttaccaagcaagtacggtcaaatgattctactgcatgaactaactaat

SEQ ID NO: 7165 - DNA, 153 bp, Streptococcus pneumoniae
  misc_feature (1)..(153): tiling:Spneumo1:WAN024DFN; WAN023Z0C AL449926.1_98||||7890 4..79056|-|153 bp|Glimmer 2.02 orf prediction|S.pneumoniae ||AL449926.1|ORF|000
ctgtctgatttttctcccctcattatagcaaaaaaagagttcgaattgaactcttttttacatcttataaagcagggagaagattttataaaaatagtaaacaaatgtgctctactcgatgcttacaccattgctataaatgacatgtaccaa

SEQ ID NO: 7166 - DNA, 114 bp, Streptococcus pneumoniae
  misc_feature (1)..(114): tiling:Spneumo1:WAN024BYS; WAN023S1A contig_1623_6||||1962 ..2075|+|114 bp|Glimmer 2.02 orf prediction|S.pneumoniae|6 70|WAN01UDAF|ORF
ctgtctgcgatagcgaagctggtttattcgacagatattttaatacgtacggtttctgctctgaatattgtggttatgaatactatggaatttcaagattataaaataaaggat

SEQ ID NO: 7167 - DNA, 81 bp, Streptococcus pneumoniae
  misc_feature (1)..(81): tiling:Spneumo1:WAN024BVF; WAN023QHK contig_1298_24||||147 28..14808|-|81 bp|Glimmer 2.02 orf prediction|S.pneumoniae |670|WAN01UEBQ|ORF
ctgttagggattgcgagaacaccccaagttcataagatagctagagggattgatccaggtccagcgaatgggcaagctctc

SEQ ID NO: 7168 - DNA, 90 bp, Streptococcus pneumoniae
  misc_feature (1)..(90): tiling:Spneumo1:WAN024DKN; WAN023MLH spn193e05_20||||9057. .9146|-|90 bp|Glimmer 2.02 orf prediction|S.pneumoniae|23F -1|WAN01UCMQ|ORF|001
ctgttcaatttgccaagtccaagtgctacaacagttttacgttgtgatggaatgcgtccgattggagacttagtcaaagtaattttaatt

SEQ ID NO: 7169 - DNA, 135 bp, Streptococcus pneumoniae
  misc_feature (1)..(135): tiling:Spneumo1:WAN024BS9; WAN023TH0 BD140039.1_1||||111.. 245|+|135 bp|Glimmer 2.02 orf prediction|S.pneumoniae||BD1 40039.1|ORF
ctgttctcaaccttttcccacctcgacagcaagatggatgtctctgacaaataccagaaaaaaggttccggaatctactttttcgtcaactggtacaaatggttgagtttgcagcaggatctctattccgtgagt

SEQ ID NO: 7170 - DNA, 87 bp, Streptococcus pneumoniae
  misc_feature (1)..(87): tiling:Spneumo1:WAN024BBI; WAN023SZ8 BD003756.1_5||||1234. .1320|-|87 bp|Glimmer 2.02 orf prediction|S.pneumoniae|ATC C55840|BD003756.1|ORF|000
ctgttgcttcgtcagtttcatctacaacctcaaaaccatgttttgagtgacttcgtcagtttcatctacaacctcaaaactgtgttt

SEQ ID NO: 7171 - DNA, 78 bp, Streptococcus pneumoniae
  misc_feature (1)..(78): tiling:Spneumo1:WAN024D28; WAN0246QU 203667-92-9_1||||19.. 96|-|78 bp|Glimmer 2.02 orf prediction from Patent Sequenc es|S.pneumoniae||WAN02470H|ORF|000
ctgttggtttatggggtgattcaagaacagcctgaaagtgctgcacctgagcagtccaagactacaggcttgccagct

SEQ ID NO: 7172 - DNA, 99 bp, Streptococcus pneumoniae
  misc_feature (1)..(99): tiling:Spneumo1:WAN024BYV; WAN023S58 contig_415_1||||443.. 541|-|99 bp|Glimmer 2.02 orf prediction|S.pneumoniae|670|W AN01UD5M|ORF
ctgttgttagaccctttcggaaatcgtcaagcgattggaggaaatgaactaatccacagtggcttattccaagtataccacttgggctttggcagtagc

SEQ ID NO: 7173 - DNA, 90 bp, Streptococcus pneumoniae
  misc_feature (1)..(90): tiling:Spneumo1:WAN024BZI; WAN023SFF NC_003028.1_368||||26 7438..267527|+|90 bp|Glimmer 2.02 orf prediction|S.pneumon iae|TIGR4|NC_003028.1|ORF
ctgtttaaaagtttttatgtaggaaccgacctctttctaccagggaaagatgaatgcaatcgtgtccatctttttctttttatggtaaaa

SEQ ID NO: 7174 - DNA, 78 bp, Streptococcus pneumoniae
  misc_feature (1)..(78): tiling:Spneumo1:WAN024DQZ; WAN023NIR spn111e04_26||||19152 ..19229|+|78 bp|Glimmer 2.02 orf prediction|S.pneumoniae|2 3F-1|WAN01UCND|ORF|001
ctgtttacccatacctatttagtgtggaataagattaatgaaggactgagaaatcagttcttttttctttttagtaaa

SEQ ID NO: 7175 - DNA, 102 bp, Streptococcus pneumoniae
  misc_feature (1)..(102): tiling:Spneumo1:WAN024F6P; WAN023OJZ pne86_27||||20625..20 726|+|102 bp|Type 43(2) capsule operon, Glimmer 2.02 orf p rediction|S.pneumoniae||WAN01UCFZ|ORF|000
ctgtttcaactgggaacatctccatctttctcagatggagactcttcctcaaaaaggttgagttgtccagaagggcaaacacttttctcagaggattttcca

SEQ ID NO: 7176 - DNA, 84 bp, Streptococcus pneumoniae
  misc_feature (1)..(84): tiling:Spneumo1:WAN024BTN; WAN023ZBX AL449924.1_108||||770 81..77164|+|84 bp|Glimmer 2.02 orf prediction|S.pneumoniae ||AL449924.1|ORF
ctgttttctgaaaatcagaattctgttttgttcgctttctttatatttggaattatactcctatctcccctttttcataatgta

SEQ ID NO: 7177 - DNA, 194 bp, Streptococcus pneumoniae
  misc_feature (1)..(194): tiling:Spneumo1:WAN024ASE; WAN024E0O-rc TIGR4.IG_247||||22 7253..227446|-|194 bp|Between SP0254 (+ strand) and SP0255 (+ strand)|S.pneumoniae|TIGR4|NC_003028.1|IG-rc|010
cttattctccttatttcacttttcaaactttatagttgcccatagtatatcatactttcataagaagattcaaaaaatcctccagattctactctgaaggactcctatcttatttcacaacaatgttaactaatttagttggcttcaatagtccagtggactattgaaggtggcagatagagctaataaactcg

SEQ ID NO: 7178 - DNA, 134 bp, Streptococcus pneumoniae
  misc_feature (1)..(134): tiling:Spneumo1:WAN024BAW; WAN0246KN ||||||134 bp|Incyte o rf contig SPN2C0450 5130-4993|S.pneumoniae|23F|WAN0246KN|O RF|000
cttcgtcagttctatccacaacctcaaaacagtgttttgagctgacttcgtcagttctatccacaacctcaaagcagtgctttgagtaacccgcggctagttacctagtttgttctttgattttcattgagtat

SEQ ID NO: 7179 - DNA, 179 bp, Streptococcus pneumoniae
  misc_feature (1)..(179): tiling:Spneumo1:WAN024BA8; WAN0246LG ||||||179 bp|Incyte o rf contig SPN2C0519 487-305|S.pneumoniae|23F|WAN0246LG|ORF |000
cttcgtcagtttcatctacaacctcaaaaccatgttttgagctgacttcgtcagtttcatctacaacctcaaaaccatgttttgagctgacttcgtcagtcttatctacaacctcaaaactgtgtttttagcaacctgcggctagtttcctagtttgctctttgattttcattgagttt

SEQ ID NO: 7180 - DNA, 228 bp, Streptococcus pneumoniae
  misc_feature (1)..(228): tiling:Spneumo1:WAN024AZX; WAN023OK0 pne86_26||||19933..20 241|-|309 bp|Type 43(2) capsule operon, Glimmer 2.02 orf p rediction|S.pneumoniae||WAN01UCFZ|ORF|000
cttttacgagaaaagttgttagaacaagctcttcttcatgcagatgaaacctcttatcgggttctagagagtcatagccatctgacctactattggacctttttgtctgggaaagttgagaatcaagcaatcacgctgtaccatcatgatcagagtcggagtggttcggtagtacaagaattcctaggagattattctggctatgttcattgtgatatgttgcggcag

SEQ ID NO: 7181 - DNA, 3555 bp, Streptococcus pneumoniae
  misc_feature (1)..(3555): tiling:Spneumo1:WAN024DDK; WAN023Z68-3 AL449925.1_125||||1 20757..126591|-|5835 bp|Glimmer 2.02 orf prediction 3' var iable region iga|S.pneumoniae||AL449925.1|ORF|000
gaaactggcgtctatacatcatttaaaaatttagttgatgcaatgaatagtgaccctaatggaacattccatttaggtgcaactatggatgctcgtgaagttgaacttccggatgatcaagaaagttatgtaaaaaatgaattttacggaaaattaataggtgaaaataatggtaagtattatgctatttataacttgaaaaaacctttatttaaaactctaaacaccgctactattcasaatctttcaataaaagaagcgaatgtttcttctaaagaagatgctgctacwatatcgaaagaagcaaaatacaatactcttatagatawtgttcattctgatggtattatagctggtgaacgtggaattggtggattggtttcaaaagtagataactcgagaatttctaatagtagttttacaggcagaataactaacacatatgatacaactgtagggtatgaaattggtggtttagtaggtaaactttctggttcgcttgcttctatagagaaatcaatagcatcgattgacatagcctctaatgcaaaatcaggagatcaaattgttggtggtatagccggagttgttgagaaaagtgcgacaattaagtatagctatgttgaaggaaatgttaacaatgtgcgacactttggtaaagttgggggagttgcaggtaatctttgggatagagattcacaagatgtaagtaaatcaggtaaactatcatatgttttaagtgatgttaatgtaacaaatggtaatgctatatcgggtgataattttgataatatgaaagaagatcatgcttatagtagtaaaggcaataaagtagtaaatgtagtccaagtagatgatgaacttgtgactaaagattcagatgtacaaagaggtacggtattagatgctgataaagtaaaagagaaaaaggcagaattggtttccaaacacagcactaaagtagaagattttgatttcacttcaagatacactactatttacaatgaagtaacaggttatcaaaagtcgagagaacaagtatataaaaatattgaaaaactattaccgttctataatcgagagacaattgttaaatatggtaatttagtagatgaaagcagcgagctatttactaaagaacttctatcagttgttcctatgaagaataatgaagtaataactgatattaataaaaataaacaagaaataaacaaattgttattacattttgaaggtaataaatcacaagtattaaatattgcatataagaatgatttctctaaagttgctgagtatagtatagagtatcaaggattattatatactcccaatactctattgcatgactacagtaatattgtagataatgttttaactgacttgaattctgtacaatatgattcaaatgcaattaagaaaatattagatatctcagataaagttaaaaatacggaattatacttagatgagcaatttgttaaaacaaaagcaaatataaaagatactttatcaaaacttctgtcagcggatgcagcaatcgctgagaatagtaattcgataattgataattatgttattcagaaaatcaaacagaataaagaagctttattgttaggattaacatacttagagcgttggtacaattttaaatatggtgaaacgaaagcaaaagatttagttatgtatcacttggatttcttcggtaaatctaatagttctgcattagataatgttattcaattaggtaaatctggatttaacaatttactagcaaaaaataatgtaattacttacaatgtattattatctaaaaattatggaactgaaagtttatttaaagcattagaaggatatagaaaagtattcttaccaacaacttctaacaatgagtggtttaaagctcaaactaaagcatatattgttgaagaaaaatcttctattccagaagtaagtaaaaaacaatcagaacaaggaactaagtattctataggaatttatgatagattaactagtccgtcatggaaatatcaaagtatggtcttaccactattaactttacctgaagaaaaaacagtatttatgatagcgaatatttcaacaataggatttggtgcttatgatagatatagaagtaaagtccatcctaaaggagataacttaaataaatttgtagaagacaatgtaagagaagctgcaaaaagatttagagatcattatgattattggtataaaatattagagcctgagaatagagagaaactttatagaagtttattagtatacgatgcatttaaatttggtcgagataatactgaagataaagtaacttatcaagctgattttgaaactgatcatccagctataaaatacttctttggacctgcggggaataatgttgttcataatggacacggagcatatgctaccggagatgcattctattatatggcatatcgtatgttggataaagatggagctgtaacatatactcatgaaatgacacataactctgatagagaaatttatcttggaggatatggaagaagaagcggattagggcctgagttttatgctaagggcttattacaagcacctgaccacccatatgatccaacaataacaattaactctgtgttgaaatatgatgattcagaaaattcaacaagacttcaagtagctgatccaactcaacgatttaatagtgcagaagacctacataattatatgcataatatgtttgatttaatatatactcttgaaatattagaaggtcgtgctgtagctaaattagattataatgcgaaaaatgatttattaagaaaaattgagaataaatataagcaagatccagatggtaattctgtttatgcgacaaatgttgttcgcagattaacgatggatgaagttaataaattaaattcttttgatagtttaattgaaaatgatattattactagcagagggtacaaagaccaagaatataagagaaatggttattatacaattgatttattttcaccgatttattcagctcttagtggagagaaagggactcctggtgatttaatgggacgtcgtatagcattcgaattattagctgcaaaaggatataaagagggcatggtaccttatatctcaaatcaatatgaaaaagatgcaaaagctgcgggaagtaagattaaatcttatggtaaagaagtaggtttagttacagataaattagtacttgaaaaggtatttaataatcgttactcatcttgggtagaatttaaaaaagcaatgtataatgagcgaatagctaaatttaataatctaataagtgttagctttaataatccaaatgtaagttggggaagaactaatagaataacaataactagcatagccaaccttcaaaatatgataaatacggctgtcaatgaagatgctgaagattttagagcacaattataccctgatacaaatagtagagttcttaaactgaaaaaagcaatatataaagcctatcttgaccaaacaaatgattttagaagatcaatttttgagaataaaaaa

SEQ ID NO: 7182 - DNA, 206 bp, Streptococcus pneumoniae
  misc_feature (1)..(206): tiling:Spneumo1:WAN024A3Q; WAN024EDG R6.IG_1317.1||||12682 22..1268427|+|206 bp|Between spr1273 (queA) (+ strand) and spr1274 (- strand)|S.pneumoniae|R6|NC_003098.1|IG|100
gaaagaatttctctaaatcttctaataccaataaatcgctaagatattatttcaaagaacatctacaattgaaactctagctagctgtagaagacgcctagtacattgaaattaaaatgcaagacacatgagtagcaccatatttgttgctcttatctgtcctcgcaagagactattatgagttatttcagaatcattcactactt

SEQ ID NO: 7183 - DNA, 318 bp, Streptococcus pneumoniae
  misc_feature (1)..(318): tiling:Spneumo1:WAN024A3R; WAN024A90 TIGR4.IG_1334.1.1.1|| ||1335649..1335966|+|318 bp|Between SP1416 (+ strand) and SP1418 (+ strand)|S.pneumoniae|TIGR4|NC_003028.1|IG|010
gaaagaatttctctaaatcttctaataccaataaatcgctaagatattatttcaaagaacatctacaattgaaactctagctagctgtagaagaggcctagtacattgaaattaaaatgcttccccctagcttcgaaaatattgccatagattgcgttgactctccaaattgattcatctatattttatttcagcttcctatactttcttcgctgtttgtaaatcaaaatgcaagacacatgagtagcaccatatttgttactcttatctgtcctctcaagagactattatgagttatttcagaatcattcactactt

SEQ ID NO: 7184 - DNA, 332 bp, Streptococcus pneumoniae
  misc_feature (1)..(332): tiling:Spneumo1:WAN024A7I; WAN024B0N-rc TIGR4.IG_1116||||1 126602..1126933|-|332 bp|Between SP1189 (- strand) and SP1 190 (- strand)|S.pneumoniae|TIGR4|NC_003028.1|IG-rc|010
gaaagtcctcctagtttaggaacatgaatctaaaaaaatttaaaaaaagttgtatgtaaaggcttacaaaataacttacttgtgctatacttaaatcacaagttaatatgaattagaaagtaactatatgaagtataataaaaataggatatagtttattttacgagctaggaaggaaaaatacggaaacaatattgccagaataaactatatttagatgcacatttcattcattgttttataaaaggagaagataaacggctactaaaaagagttttaaagcgttagttgtaggactaggtattgtttcaatattcttatcagccttacct

SEQ ID NO: 7185 - DNA, 1455 bp, Streptococcus pneumoniae
  misc_feature (1)..(1455): tiling:Spneumo1:WAN024BYM; WAN023S13 contig_1623_13||||707 4..8708|+|1635 bp|Glimmer 2.02 orf prediction|S.pneumoniae |670|WAN01UDAF|ORF
gaagctagacaagtcttgaagaacatgaaagacaagaaaaatctgaatgaacttcgtaaagtacttgaagcgagaccgaatgatccaaatatccaaagactactggctgacttagatagtccggcttattctttccgtatgaagcgtctagaacgtttgagtgatgatttagaccgtatgcgtgaatctatctatcattcagaaaagacaggctcagacgccttttatagcgacctgatgaaggatagttactacaaggctacctttgacctgcagcagcagacaggactagcatacggcttttctgggcttcctgagagcgagattaaacatctacagtcttttagttgggtaggagatggaagtacgtattcaacaaacatctggaagaatacagggaagcttacatcaagcataaaagatgaattactcataagccttatgacaggccgagatacacgagaaactgcacaagcaattgctgagcggttcaatgtggggcagaacgatgcaaggcgtttggttcggacagaatcagccttttttcataaccaaatggagctactcaactatgaggaagcggatatagagaagtatatctttgtggccgtcttagacaagcgtacatcacgcatttgtcaggagcatgacaatcaggtctatgatagggataaggctgtccctggtgtcaattgtccgcctatgcacccttggtgtaggtctactactgtcggatacgatgaggacgcagactacagcaagttgaagcgcagagcaaggaatccagagacaggtaaagttgagtacgtgcctgccgatatgacttataaagagtggtatagcgaatatgttgcgaaaagaaaacaaaaggggtataatcaaggtacaagggaaactaaagcaagattctatagtgagcaactgttgtccaagatttcgaaagccgagccaaaaatcacaagcgatatgcaacgtattgctggtgaaaataaactcgctggtcttgaatttcggaagaaaacagctgagtcattagctcgtaaaattacaacagatagccaagctgaaaatataagtttatcaaaggctacaagtaaaattaacgatgctttgcggtatacaactattttcgatcctgatactttcgcaaaagagtatttaaagatgaaacaggagcttattgcagagggttataaaattgtaaaagtaaaaaacacttggctagtagatggaccatacaaaggtgtgaatacagtcgttgaaaaagatggtatcaactttgaaatgcagtatcatactcaggaaagtttcgacttaaaaaatggttcattacatgaactctatgagaagtatcgtgatacgaatacatctgatctagaacgcatgaaattatttaaggaaatgcttgatttaagcaatgggcttgagattcctaaaaatatagagagggtgaag

SEQ ID NO: 7186 - DNA, 142 bp, Streptococcus pneumoniae
  misc_feature (1)..(142): tiling:Spneumo1:WAN024ASB; WAN024E0J TIGR4.IG_249.2.2.2.1. 1||||230856..230997|+|142 bp|Between SP0256 (+ strand) and SP0258 (- strand)|S.pneumoniae|TIGR4|NC_003028.1|IG|010
gaatcaggtggagttttttagctctatttcaggatttttgggactattctaaaaataatttttcgatatttttcggtatttttcggattttggtcggggaattggcggggactttttgagattttggcggggatttttttag

SEQ ID NO: 7187 - DNA, 4311 bp, Streptococcus pneumoniae
  misc_feature (1)..(4311): tiling:Spneumo1:WAN024DED; WAN023N0O-3 spn167f04_42||||359 40..41150|-|5211 bp|Glimmer 2.02 orf prediction|S.pneumoni ae|23F-1|WAN01UCN6|ORF|001
gaatctgatcctagcaaatttataggcgatgattctgttagacaagttggtgaggatggcgaacgtcaaattgttactagctatgaagagttacatggcaaaaaaatcagtgacccagttgaaacagtaactattttgaaagaaatgaagcctaaaattcttgtaaaaggtaccaaagaaaaacctaaagaaaaaacggctcctgttttgaccttagatagaacaaatacaaatgtattaaaccgatccgcaactctttcttatcatttagttaatacagatggagtcacaatcaataaaattactgcgacaattaaagatggaaatgaaattgtcaaaacagtagatttgacttcagagcaattagataagcaggtagaagatttaaaattctacaaggactataagatagagaccactatgacctatgaccgtggcaagggagaagaaactgcaacattagaagagaaaccacttcgcttggatttgaaaaaagttgaaattaaaaatatcgcatctactaatttagtgaaggtaaatgacgatggtactgaaacacctagtgattttatgactgaaaaaccttcagatgaagatgtgaagaaaatgtacttaaaaattactagtcgtgataataaagtaacacgtttagcagttgataaaattgaagaagtgactgaagaaggtaagaaactttataaaatcactgccgaagctcaagatttgattcaacatacagacccaacgaaggttcgtaacaagtatgttcattatattgaaaaaccagttccaaaagttgatgacgtttattataactttaaagagttagtagatgccatgaatgctgataaaaatggtacatttaaaatcggagcagatttgaatgcaacgaatgtaccaacacctaacaaacaatatgttccaggtacgtttaagggacatctatcaagtgttgatggtaaacaatatacaattcataacattgcccgtcccttatttgaccgtgttgaaaatggttctgtgaaaaatattaatttaggtaatgtggatatcaatatgccttgggctgacggaatagcacctgttgccaatatggtgaaaaatgcaactgttgaagatgttaaggtaactggtaatgtagttgctaataacaatattgcgggtatcgtcaataaaatcgatagtggtggtcagttgacaaatgtagccttcatcggtaatcttacaggtgttggtgataaaggtcaatatatggctggcattgccggtgagatttggagaggtaatcttgcaaaagcatatgtcgaggctgatattgttgctaacagagcccgtataggtggtttagttgctaaaacagataatggtaacgactctatgggaattggtaaatacggttcaattcgtaaatcagtcaccaaaggaaccattaagactaaagttttgtttgaaacaggtggatttatcaatagcaatcttccttttggtaaacttgaagataatatttcaatgatgagagttgaaaatggtgaagagttctttggttcttccgatttggactacgatggtggttatttcacaaatggctggttagagcgtaactttgttgtcaaaggtgtcagttcaggtaagcattcatacaaacgttctcgtgacaaaattaaagaaattagtcaagatgaagctaataagagaattgcaaattttggacttactgctgataaatacgaaatcaacgaacctgtggtcaatcgcttaaatcgtttaaccagaagagaagatgaatataagtcaactcaagactacaaatccgaacgtgatttagcttatcgtaatattgagaaacttcaaccattttataataaagaatggattgtcaaccaaggtaacaaacttgcagaagattcaaacttagctaagaaagaagtcctttctgttacggggatgaaggatggtcaattcgtgaccgatttatcagatattgataagattatggttcactatgctgatggtactaaggaagaaatggatgttactaagaatactgattctaaagtccaacaagtgcgtgaatatagtgtatctggtcttggtgatgttgtttatacaccgaatatggttgttaaaaatcgtgataaattgattgctgatgttaaatctcaattatcaagtgtggaattgatttcacaagaagtaagagatttaatgagtagacgtgataaacctgcagagaatacggatgaacgtaagaatggttatattaaagatctatacttagaagaaagctttgccgaagtgaagcaaaatctagataagttagtcaaatccttggtcgaaaatgaagaccatcaattgaatggtgatgaagctgcgataaaatcacttctcaagaaagtggaaaccaataaagctaaaatcatgatggctctgacttatctcaatcgttactatgatatcaaatacggtgacataagtataaaaaacatcatgatgttcaaacctgatttttatggtaaaacaccaagtgttattgacagactcatcaacatcggttcaagtgaaaagaacttgaaaggggatcggactcaggatgcttaccgtgaaatcatcgcaggtaatactggtaaaagtaatttgcgtaacttcttagaatacaacatgcgtctgtttacagaggataaagacatcaatgattggtttatccactcagctaagaatgtttatgtttcagaacctaagacaacaaatacagagttgaaagataaacgtcatcgtgtgttcgatggtttagataacggtgttcatggtcgtatgattttaccacttctaacgcttaaagatgcccatatgttcttaatttcaacatataacacgatggcgtacagttcatttgagaaatatggaaaacatacagaagaagctcgtaatgagttcaaaactaagattgatgaagttgcacatgctcaacaaacttatttagatttctggtccagattagctctgcctaatgttcgtgatagacttcttaagagtcaaaatatggtaccgacaccagtttgggataaccagacctacaatggttctcctgtaggtcgtcgaggatttgacagtaaaggtaaccctatagctccaattcgtgaattatatggtccaacatggcgacaccatgatagagactggcgtatgggcgctatggcatcaatattccctaatccaaataatgatgacaaggtcttgtttatggtgacggatatgattagcccatttggtatttcagcctttactcacgaaacaacacacgtaaacgatagaatgctttacttcggtggtcataagcatcgtcaaggtacagacgttgaagcctatgctcaaggtatgttgcaaacacctgacagctcaacgactaatggtgaatacggcgcacttggaattaacatggcttaccatcgtccaaatgatggtaaccaatggtacaacccagatcctgacaaattaaagacacgtgatgacattgaccgctacatgagaaactacaatgaagctatgatgttgcttgatcatgtagaagctgatgctgtacttcctaaaattaaaggagacaatagtaagtggttcaagaagattgacaaagaaatgcgctctaagattcagtataatgatcttttaggtccaaaccaatgggatagtatccgtgatttgaaagatgaagaaaaggtaatgactttatctagcgtcaatgatttagtggataataacttcatgacaaaacatggaaatccaggtaatggacgttatagaccagaagattttacaccaaactcagcttacgtaaatgtcaatatgatggcaggaatttacggtgggaatacgagtcaaggtgctcctggttcattatcatttaagcacaatgctttccgtatgtggggctattatggttatgaaaatggctttattagttatgtatcaaataaatacaaagcagaagcagataaaaacaaccacggtttactaagcgataagctaataattaataaagtatcgaaaggaaactttaatactcttgaagagtggaagagacattggtacggggaagttcttgctaaagctaagaaaggttttgaggctatcgatattgatggcgtccatatcagtaactatgatgagttaaggcctttatttgataaagcagttgaagaagatttgaagaaaccagatgacttctctcacactgttgctcttaaatctaaggtcttcaaagcccttcttaaaaacacagacggtttctttaataaactgtttaaagaagacatt

SEQ ID NO: 7188 - DNA, 149 bp, Streptococcus pneumoniae
  misc_feature (1)..(149): tiling:Spneumo1:WAN024AMO; WAN024D0Y-rc TIGR4.IG_509||||51 4942..515090|-|149 bp|Between SP0538 (+ strand) and SP0539 (+ strand)|S.pneumoniae|TIGR4|NC_003028.1|IG-rc|010
gacaaatactcttttttatttttaatttttgtcttgttgtaactttgacaagtttagtatatcatcgttttttaaaatttttcatccagattttgaatagtcatcgaaacgtcttgaattgcaaaaattacattagacttcctgcaaaa

SEQ ID NO: 7189 - DNA, 141 bp, Streptococcus pneumoniae
  misc_feature (1)..(141): tiling:Spneumo1:WAN024BCN; WAN023MC5 314312_203||||101153. .101413|-|261 bp|EGAD orf prediction|S.pneumoniae|R6|NC_00 3098.1|ORF|100
gacgaagtcagctcaaaacactgttttaaggttgtggatggaactgacgaagtcagctcaaaacactgttttaaggttgcagatagaactgacgaaatcagtaacatatacatacggcaaggcgacgttgacgtggtttga

SEQ ID NO: 7190 - DNA, 3717 bp, Streptococcus pneumoniae
  misc_feature (1)..(3717): tiling:Spneumo1:WAN024DDM; WAN023N0M-3 spn167f04_44||||411 97..47673|-|6477 bp|Glimmer 2.02 orf prediction 3' variabl e region iga|S.pneumoniae|23F-1|WAN01UCN6|ORF|001
gagaactttaaagatgtgatgctaccagttacaagcattactaatgatactaaagataatagagatgtttataagatagtagcaagtgcaaatagtctgatacaacatgaaaataataatgtactagaaaattatacatactatttaccaaaaactcagcaaagtgaaactggggtatatacatcatttaaaaatttagtagatgcaatgaatagcaatcctaatggcacattccgtttaggagcaactatggatgctcgtgaagttgaacttccagatggtcaagaaagttatgtgaataatgtattccatggaatattagtaggaacaaataatgagaaatattatgctatttataatttgaaaaaaccattatttggggaattaaatggtgctacagtagaaaaactttcactaaaagatgttaatatttccgcaaaggacgatactgcaacacttgcgaaagaagcaaataacaatactcatattgataacgttcatgctgatggagcgatagctggggaacgtagcataggaggattagtatcacaagttaataattctactatttctaacagtagctatacaggtagaataactaatacatataaaacagttgctagttatcaaatcggaggtttagtaggcaaactttctggtccgaggggattaatagataagtcgttcgcatcaatcgatttatcttcaaatgcaacacaaggagaccagtctattggtggaatagttggtgcagtagaaaatagtgcgcttattagtaatagttatgctgaaggaaatctaaataatgttcaacgttttgcaaacgttggtggagtagttggtaatctttgggatccggttggaggattagaaaaatccggtcgactttctaatgtactaagcgatgttaatgtaacgaatggtaatgctattgcaggttataattttaatggtataaaagcaaatggcacatacagtaataaaaataataaggttgtgaacgtagtacaagaagatgatgaaatcttaactaaggattctactgttcaaagaggagaagtattagaagatgcacaaataaaagagaaaaaagctacttttgtatctaaaaatactattaaaacagaagattttaatttctcttctagatatgtaactgactataaaaatcttgagaatgctgattcatcaaaagaaaaagtatataaaaatattgaaaaactattaccgttttataatagagaaacaattgttaagtacggaaatttagtagagacaagtagtaatctttataataaagaattattgtcagtagtccctatgaaagataaagaagtaattagtgatattaacaaaaataaatcaagtataaataaactattactatattacgcggataatacatcagagacacttaatgtaaattatcaaactgatttttcaaatgtagcagagtatagaataggcggtacaaacttaatttatacaccgaatacattacttcgcaattatcaaaatattttagatgaagtattaccagcattaaatagtgtagaatataaatcagaggcaattagaaaagtattagatgtttctaaggatgttagtttaacggagttatatttagaagaacaattcaataccacaaaaactaatttgaaagatagtttgacaaaacttcttactgcagatgctgcaatagctgaaaataacaataaggtaatagataattatgtaatcgagaaaattaaaaataataaagaagctttacttctaggattaacatacttagagcgttggtacgacttcaaatatcgtgatacaaaagcgaaagatttagtcatgtaccacttggatttcttcggtaaatcaaatagttcagcgttagataatgttatcgaactaggtaaatcgggatataataacttactagcaaaaaataatgttataacttataatgttttattagcgaaaaattataagactaataatttatttgatgcattagagaaatatagaaaagcatttgtaccagataaaacaaataatgagtggtttaaagaacaaactaaagcatatattgtagaagaaaaatctactattaaagaggtaagtgataagcaatcaatagctggtagtccatattcaattggagtatatgatagattaactagcccatcttggaaatatccaagtatggtgttgccgctattaacattacctgaaaaatcggtgtttattatagccaacatttcgactataggtttcggtgcttatgatagatatagaagtaaagaacatccagcaggaactgatttaaatgactatgttgagaaaaaagctaaagaagcggctgttagatttagagatcactatgattattggtatagaatactagatgataaaaataaagaaaaattatatagaagtgttctagtctatgatgcatttagatttggtacagatgaaaaagaagataaagatacatatcaagcaacttttgaaactaatcatccagctataaaacatttcttcggtccagcgggaaataatgttgttcataattctaatggagcatatgctacaggggatgcattctattatatggcatatcgcatgcttgataaagatggtgcggtaacttatacacacgaaatgacacataactcagatagagaaatttatcttggaggctatggaagacgaaatggacttggaccagagttttatgctaaaggactgctacaagctcctgatcatcctaatgatccaacagtcactattaattccatattaaaatatgatcaatcagaagaatcaacaaggcttcaagtagcagatccaactcaacgatttggaagtgttgatgatctaaataagtatatgcataatatgtttgatgtaatatacatgcttgaaatactagaaggtaaagctgtagctaaattagatacaaatcaaaaatatgatttattaagaaaaatagaaaatgaatataaacctgatcctgatggaaattctgtttatgcaacgaatgttgtacgtagattaaaaccagaagaacttactaaattaactacatttaacagtttgatagaacatgatattataacaagaagaggttatgtagatgaagcaacttataagcggaatggctactatacaattaatctattctcaccaatttattcagcattgagcagtaaaataggaacaccaggagatttaatgggacgacgtattgcatttgagttattggcagccaaggggtacaaagacggtatggttccatatatttctaatcagtatgaaaaagaagcgaaagctcaaggaaaagttattacatcatatggtaaacaaataggtttagttactgatgaaattgttctttcaaaagtatttaataaccagtataattcttggatagatttcaagaaagatatgtataaagaaagagaagataaatttggaaagttaaataaagttagttttatcgatccaaacggttcttgggctcgacaacagaaagtgactattgataatattaatagacttgaaaaaatgattgaagatgcagtaaaatttgatgctgaggatgaagttgccaaattatatcctgagacaaatagtagagttcttaaactgaaaaaagcaatctttaaagcttatcttgaccaaaccggtgattttagaagttcaatttttgagaataaaaaa

SEQ ID NO: 7191 - DNA, 2001 bp, Streptococcus pneumoniae
  misc_feature (1)..(2001): tiling:Spneumo1:WAN024BN6-3; WAN023O7N spn029h04_64||||479 85..51986|-|4002 bp|Glimmer 2.02 orf prediction|S.pneumoni ae|23F-1|WAN01UCO3|ORF
gaggagaaccgtcgcttgttttatgttgctatgactcgggcaaagaaggtgctccatctctcttatgctaatgattctactaaaacccacttaattaatgaatttgaggaatttattgatgaggtagacgtgacagaatcttttgaggattgtcaatctgtagataaagtggtaatgccgaaattttctaacaatgttatcaatgaaatttttgacgaattgagtttaagcgttagtacattaaattcttttcttaaatgtcctttgagtttttatttcaataagggattaaaattaccatctgaaacaaacgaagctatggtattcggtagcattattcacgaagtcttagaaaaaatatatatttctgtagatggttcacaaagttcagaattaactgcaaaaacagtactttctctagaagaagctttaaaattatttgagacagtctttgaagaaaaatcttatcaattgacttcaaataaaataaagaaagatgactatgctagagggaaaaagattattgaaaatctttacaagaaatctggatacctcaaagatggtgtagttgcagttgaggtacctattcaaggtattcgactaggcgatattttaaataccaccgtagacctatcggaagtatctaatatcgagataaacggaaaaattgataaaattgagtgcgacggcaatatagtgtgtctagtcgactataaaacaggaaattttgaaaatgctaaaaagaaattagtagctccgagtgaaaaagaaccccttggtggtgattattggcgtcaggctgtattctattatatcctcttcaaaaatgccggtatcgatatttctgacaaagaaatacttgttaaatatgttttggttgagaattcaactaatgaagatggtttttctgaaactgaagatatacgaatcactcaaaaagaagttgatatagtgcttaatcagattaaagaatctattatgaaaattaaacaaggcgattttaactgtggttgtggagtattgaaaaaggacagagataattacccatgcgactactgtctccaagtatcagctaacacaacacctaaatttgataatactgaagccttagaagttgcgacttatcaacaaacacggggaaactataagagtttaagcgttagcaaattgaatcgttacctgcgttgtccgaagagtatctactttgaagatgttttacagttatctcaagcagctggattatcagcaggagcaaaagaaaaatctacaaaaataacaatcaatcatgcccccacaggtcccgtatttgggactgcaattcatgaaacaatggaaaaaatctataaagaagatttacaattagaggacgcaattgaattctatgatagttcattgtactctcatcaagaggaaatcattgatacaatgtctgtagaagaattaaaagaatatggacataacttgttgactaatctttttgaacattttattcctaatagtttaaaaggggagcatgtttccttagaaaaagaacttcgtgttaaattaggagataattactcaatcaatgggattatcgataagcttgaatttgataatgatcttattcgagttgtagattataagacaggttctgctcaaagaggtgttgaggaactagaagttggacatgattattggcgtcaagcagtcttctataatcttttattagaaaattcttctgaaatagatacgactgataaacgaattgaaactcagtatatttttcttgatgataatagtactgaaagtggctattcaattcacactatacaagttacgaaagaggatttagacttagttacatcacaaattcaaaacttctggtctcatatgaatacagctgattttactggtagttgtggtaaaaacgattgtgattattgtcgattagctgagtttgttgattttgaattattaaaagaaactatagaatccggaaaagaaagtaatttagttaat

SEQ ID NO: 7192 - DNA, 123 bp, Streptococcus pneumoniae
  misc_feature (1)..(123): tiling:Spneumo1:WAN024F69; WAN023RBO contig_1542_4||||2250 ..2438|+|189 bp|Glimmer 2.02 orf prediction|S.pneumoniae|6 70|WAN01UDLO|ORF|000
gataagactgacgaagtcagctcaaaacatggttttgaggttgtagatgaaactgacgaagtcagtaatcatatctacggcaaggcgacactgacgaagtttgaattggattttcgcagagtg

SEQ ID NO: 7193 - DNA, 669 bp, Streptococcus pneumoniae
  misc_feature (1)..(669): tiling:Spneumo1:WAN024FWY; WAN024183 |||AAO37750.1|||669 b p|aminoglycoside adenylyltransferase|S.pneumoniae||AY16696 5|ORF|000
gatgaattgcaagactatgacgtggtctatattgtggatgatttggataatctgacgagtgacctttcttggttggcctatttcggagaacgaattatagagcaagaggttgttcttgaccatcgtcgtctttatctcatgctctttgaagatggtaatcgtattgatttgactctctgccccaaaaaccacatccaagagtgggtggatagtgaggcaggattcactgttttagaagatccagaacatttatttgaaccctattctcaaaatctagagcgttactggacaagcccagctactgaaacgaattttgtaaaatcctgcaatgaattttggtgggtatcggcctacgtggttaaaggaatctgtcgtaagcaagtcatctacgcgacttaccatctctacggtatttgccaacaagcactcttgaaggtaatggcttggcaagtggtaagtgataggggaaaagttgacatcggtaagaactacaagtatctctttaactatttacctgctgagaaagaaaagaagttcttaaatttacttgatttctccagtttagacaaaatcactcattctttgtttgccacgatgcaacttttccacaaagaagctcaatctcttgctcaaaagctgggcttttactacgataaggaagtggcggag

SEQ ID NO: 7194 - DNA, 2406 bp, Streptococcus pneumoniae
  misc_feature (1)..(2406): tiling:Spneumo1:WAN024CTP-3; WAN02411D |gal||BAB91370.1||| 7218 bp|beta-galactosidase|S.pneumoniae||AB073928|ORF|000
gatggagcaattggtcttccaaaagaatatgtagttgaatattatgtaggtaaagaaattccagatttaccaagtgatgtcagcaatgctcagcgtgatagcaatcatccatttaataatccagaaaattggaaagcagttgaaaacttgcatgctccaagtcagctatctgcaactcaaacaaatcatttcacatttgacaaggtagaaacttatgctgttcgtattcgtatgaagaaagcagatggaacttcaggtgttggtctgacagaactaactgtccttggaaataaggtagtaagctctacaagttcagagatttctatcagggtagatggcaaggatcttgaacactttaatccatctaagactgattactatattcctcaatctagcaaacaaatcactgcaacagctagcaataatggtttggtaacagttgtgcctgcaactagtccaaaaggtgcaacacgtctcatcttaaaagcagaagatggtacggtattgaaagaatatcgaatcttccgcaatgatgagagagaaactagtcaaccgcttgctgcagaaaatggtgctaaaatcttgaatgttggagacaatcttcaacttccttcagaggtagacgtttattacccaacttcaactacttggactacagaaaaacttgcagtgaagtgggatgctattcctgaacatgcgacagagcatgagggaacatttgaagttaccggtcatgtcattggtacaaatctaaccactaaaatgcaggtgacagttgtttctaaaggcaatcaagtcatttcagaaaatccaaacaacaatgaaactgattctaaagcctttgcttcgataacgaacgatacacaagcagcttcacatgatagaattttctatatcaatgatggaaaatacaatgaagatgggcgttggacaaactggactcgtactccgaaaaatcaagaaacttctgtcggactactctttaagaaggatggaaaaattacttctcaatctattggaaaagtagccattcagttctttaaagatagtggcacagatgccccagagaaaatggttctagaaagatatattggtcctgcctttacagagccaagtacgatttctcgttatgaagaaaatgctgaccatccattcaacaaggcagaaaattgggcaccaattccttacaagtcttctggagaattagtggctggtaaaccaatcgagtttaactttgatccagttcaaacaacagctattcgtgcgcgtatgactcgtaaggctactactaatggtctagcacttgtagaatttacagcctactctgcaggcaagggagcagaagtcgaaacaccatcagcgactatttcgattgatggaaaagcattggaaaactttgatccaaatgtgacagagtacaccctaacaacaatgggatccaaaccaaaagtcactgcgacaactagtggacatggagtagtcacagttgtggatcatggaaatacaaatcttccaacacttgttcgtcttatttccaaagatggaaatctggtgaaagaatatcgtttacactttaagtctaccttccaaacaacaccaacagaaggcgttaagaacttagttgcagaagctccaagtttggaaattgaaaagactccacttccgtttaaagaagttgttcgtgaaacccctgcgcttgctcaaggtaaacgtcgtgtagtttctgaaggacaagatggagaaaaagttgactatattcaagtatcaggaactaccagaactcttgttcatactgaacaaagaaaagctcaagatcgtattattgaggtaggagtaaaaccatctatttcaaatagtaagggtgaggaacctgcgccagtcaacgaagttccagaattcaaaggcggagttaactttgtagaagcagcagtaaacgaagttccagaatacacaggaattcttgccactgtaggcgaccaagccgctccgacagtagagaagcctgagttcaagggtggagtcaactctgttatggccttgaaacacgaactcccagagtacacaggtccggtatcaaccgtaggcgaccaaccagcaccgacagtagagaaacctgaatttaagggtggcgttaatgctgtaatggctctagaacataaacttccagagtaccgtggtgttctagctacagtaggcaatcaaccagcaccgacagtagaaaaaccagagtttaaactaagttcggtagaaaaatctcagaatccagaagcaccagttcaagttgccaaggaaggaaagagattaccagaaactggtgaaaaacagtcagaaacagctattttcttggcaagtgttaccttggccttgtcagcagccttattaactgcaaaacgcaaagaggattag

SEQ ID NO: 7195 - DNA, 168 bp, Streptococcus pneumoniae
  misc_feature (1)..(168): tiling:Spneumo1:WAN024AU9; WAN023HUK ||||||168 bp|Incyte o rf contig SPN2C0534 373-540|S.pneumoniae|23F|WAN023HUK|ORF |000
gattttgctaagtatcttcaaagaatgattgctcttacagatactggactaacctttacagaggatccgtttgaccgtgagcgctacgaagacttgcgaagtctgttatctgaaatgttgaatcaggtatcagaccttgatgcagacgaagtggcagaactcttgaaa

SEQ ID NO: 7196 - DNA, 441 bp, Streptococcus pneumoniae
  misc_feature (1)..(441): tiling:Spneumo1:WAN024B33; WAN0240KM |ddl||CAB64497.1|||44 1 bp|D-alanine--D-alanine ligase|S.pneumoniae||AJ387984|OR F|000
gctaaaatcgctgaagtggaagaaaaattgacttatccagtcttcactaagccgtcaaacatgggttcaagtgtcggtatttctaagtctgaaaatcaagaagaactccgtcaagctttgaaacttgcctttcaatatgacagccgtgtcttggttgagcaaggagtgaatgcccgggaaatcgaggttggactcttggggaattacgatgtcaagagcacccttccaggagaagtagtcaaggatgttgccttttatgactacgatgcaaagtatattgacaacaagattaccatggatatcccagccaaaatcggtgatgatgtggtagctgtcatgcgtcagaatgcagaaacggccttccgtgccattggtggtttaggtctatctcgttgcgatttcttctatacagataagggagagatattcctaaacgagctt

SEQ ID NO: 7197 - DNA, 441 bp, Streptococcus pneumoniae
  misc_feature (1)..(441): tiling:Spneumo1:WAN024B2U; WAN0240KN |ddl||CAB64498.1|||44 1 bp|D-alanine--D-alanine ligase|S.pneumoniae||AJ387985|OR F|000
gctaaaatcgctgaagtggaagaaaaattgacttatccagtcttcactaagccgtcaaacatgggttctagtgtcggtatttctaagtctgaaaatcaagaagaacttcgtcaggctttggaacttgccttccgatatgacagccgagttttggtagagcaaggagtaaatgcccgtgaaatcgaggttggtctcttggggaactacgatgtcaaaagcacccttccaggagaagtagtcaaggatgttgccttttatgactatgacgccaagtatatcgataacaagattactatggatattccagccaaaatcagtgatgatgtggtagctgtcatgcgtcaaaatgcagaaacggccttccgtgccattggaggcctcggtctctctcgttgcgatttcttctatacagataagggagagatcttcctaaatgagctt

SEQ ID NO: 7198 - DNA, 439 bp, Streptococcus pneumoniae
  misc_feature (1)..(439): tiling:Spneumo1:WAN024B32; WAN0240JG |ddlA||CAA13581.1|||4 39 bp|D-alanine D-alanine ligase|S.pneumoniae||AJ233888|OR F|000
gctaaaatcgctgaagtggaagaaaaattggcttatccagtcttcactaagccgtcaaacatgggttctagtgtcggtatttctaaatctgaaaatcaagaagaactccgccaagctttggaacttgccttccgatatgacagtcgtgtcttggtagagcaaggggtaaatgcccgtgaaatcgaggttggtctcttgggcaactacgatgtcaagagcacccttccaggagaagtagtcaaggatgttgccttttatgactacgatgcaaagtatattgacaacaagattaccatggatatcccagccaaaatcagtgatgatgtggtagctgtcatgcgtcagaatgcagaaacggcctttcgtgccattggtgggctcggtctatctcgttgcgatttcttctatacagataagggagagatcttcctcaacgagc

SEQ ID NO: 7199 - DNA, 441 bp, Streptococcus pneumoniae
  misc_feature (1)..(441): tiling:Spneumo1:WAN024B2X; WAN02409B |ddlA||CAA13253.1|||4 41 bp|D-alanine D-alanine ligase|S.pneumoniae||AJ232250|OR F|000
gctaaaatcgctgaagttgaagaaaaattgacttatccagtcttcacaaaaccatctaacatggggtctagtgtgggtatttccaaatctgaaaatcaagaagaactccgtcaagccttgaaacttgccttccaatatgacagccgtgtcttggtagagcaaggggtaaatgcccgtgaaatcgaggttggtctattgggcaactacgatgtcaaaagcacccttccaggagaagtagtcaaggatgttgccttctatgactatgacgccaagtatattgataataagattagcatggatattccagctaacatcagtgatgaggtgatagctgtcatgcgtcgaaatgcagaaactgccttccgtgccattggtggtcttggtctctctcgttgcgatttcttctatacagatacgggagagatttttctaaacgagctt

SEQ ID NO: 7200 - DNA, 3984 bp, Streptococcus pneumoniae
  misc_feature (1)..(3984): tiling:Spneumo1:WAN024DDL; WAN024023-3 |iga||CAA64396.1||| 5784 bp|IgA1 protease|S.pneumoniae||X94909|ORF|000
ggaaattcaactgaggatgtttcaaccaaatcaaacacatccaattcaaatggaaacgaagaaattaaacaagaaaatgaactagaccccgataaaaaggtagaagatccagagaaaacacttgaattaagaaatgtttccgacctagagttatacagtttgtcaaatggtacttataaacaacacatttcgttagagcaagttccaagcaatccaaatagctactttgttaaagtgaaatcttcttcattcaaagatgtatacctaccagtagcatcaatatcagagggaagaaaaaatgataaaatcctttataaaatcacagcaaaagtagagaagcttcagcaggagatagaaagcagatataaagataattttaccttctatctagctaagaagggaacagaagaaacaacaaactttacttcctttagtaatctggtcaaagctataaaccaaaatctctctggaacctatcatttaggagctagcctgaatgctaacgaagtggagcttagtactgatgataaatcctatatcaagggaacctttactggtcagttgattggtgaaaaagatggtaagcattatgctatttacaacttgaaaaagcctctttttgaaaacttgagtggtgctacagtagaaaaactgagtctaaaaaatgttgctatttcagggaaaaatgatattggttcactggcaaatgaagctacgaatggcacaaagattaaacaagttcatgttgatggtgttcttgctggagaacgtggtgtcggtggtttgttggctaaggcagaccaatcaagcatcgcagagagcagtttcaagggaagaattgtcaatacctatgaaacgactgattcctacaatattggcggtctggtcggtcatttaacaggaaaaaatgcgtctattgctaaatccaaagcgacagtaaccatttcgtcaaacaccaataggtcagatcagactgtcggtggtcttgcaggtctagtagaccgagatgcacagatccaagatagctatgctgaaggtgatatcaacaatgtcaagcactttggtagagtcgctggagtggcaggcaatttgtgggatcgaacttctggtgatgttaggcatgctggaagtttgaccaatgttctcagcgatgttaatgtaacaaacggaaatgccatcactggataccactatacaggaatgaaggtagctaatacatttagtagtaaggctaatagagttttcaatgtcactttagagaagaatgaggtcgtcagcaaagaatccttcgaggaaagaggaacaatgctagatgcttctcaaattgcaagcaaaaaagcagaaatcaatcttatcactccaccaatagtggaacccctctcaacaagcggtaagaaagacagtgatttttctaagatagcccattatcaagccaaccgtgctttggtttataagaacattgaaaaattgttacctttctataacaaggcgaccatcgtgaaatacggaaacctggttaaggagaacagtatcttatatcaaaaagaactcttgtctgcagttatgatgaaggatgaccaagtaatcacagatattatttccaacaaacagactgcaaacaaactcttgcttcactacaaggaccattcatctgaaaagtttgatctcaggtaccaggctgattttgccaatttggcagaatatagcattggagatagtgggcttctctatacgccaaatcaattcttgtatcatcaagattctattattaaccaagtgctgcctgaattgaatcgagtaaattatcaatcagatgctgttagaaatacacttggaatttcaccagaagtgaagctaacggagttatatcttgaagaacaatttaccaaaacgaaagagcatctagcagagaacttgaaaaaacttttatcatctgatgcaggtttagtaacagacaatgaagttatgacaggatatataatagataaaattaaacggaataaggaagccttacttcttggaatgagttatttagaacgttggtataactttagctatggtcaagtgaatgtcaaagacctagttatgtatcatccggacttctttggtaaaggaaatacttcaccattagatactctgattgagttaggtaaatctggctttaacaatcttcttgctaaaaacaatgtcgatacttatgctatcagccttgccagccatcatggaacgacagatttgtttagcacgttggaaaattaccgaaaagtctttctaccagataaaaccaataatgactggtttaaatcacagactaaggcttacattgtcgaagaaaaatccaatatcgaagaggtgaaaacgaagcaaggactagttggcactaagtattctattggtgtctatgaccgtatcactagtgccacatggaaataccgtaatatggtactacctctacttaccttgccagaaagatccgtatttgtcatttcaaccatatctagtctaggttttggtgcttatgatcgctatcgtaataaagaacatcaagcaaatggtgatcttaatagctttgttgaaaagagtgctcacgaaacagcagagcgtcaacgagatcactatgattattggtatcgtattctagatgaaaaagggcgtgaaaagctttatcgaaatatcttgctttatgatgcctataaatttggaactaatcatactgaaggaaaggctacagaagtagcagattttgatagtccaaatcctgcaatgaaacatttctttggacctgttggaaataaggttggacataatggacatggtgcttatgctacaggggatgcagtatattatatggggtatcgcatgctagataaggatggagctattacgtatactcatgagatgacgcataattcagatcaagatatttatcttggtggttatggaagaagaagtggacttggacctgagttctttgctaaaggcttactacaagcaccagaccaaccaagtgatgcaacgattactatcaattctatattgaaacattcaaaatctgatagtaaagaaggagaacgattacaagtacttgatccaactacgagatttaaagacgcaacagatcttcaaaaatacgtccacaatatgtttgatgttgtttatatgttggaatatctcgaaggtaaatctattgttaagaaattaaatgtatatcagaaaatagaagctctcagaaaaatcgagaaccaatatctaacagatcctgctgatggaaatgatgtttatgctactaatgttgtgaaaaatttgactgaagatgaagctaaaaaattgacgagctttgatagtttgattgacaataacattctttcggctcgtgagtataaggctggcacttatgagagaaatggctactttactataaaactctttgcaccaatcttttcagcattgagcggtgagaaaggaactccaggtgaccttatgggacgaaggatagcttttgaacttctagctgctaaaggatttaaagatggtatggtaccatatatttccaaccaatacgaagaagatgctaaacaacaagggcaaactatcaatctttatggtaaagaacggggcttggtgaccgatgagcttgttttgaaaaaggtatttgatggtaagtataaaacttgggcagaatttaagacagctatgtaccaagaacgggtggatcagtttggaaacttgaagcaggtgacctttaaagatccgacaaaaccatggccaagatatggcacaaagactatcaataatgtggatgaattgcagaaactaatggatgaagctgttttgcaggatgcaaaagaacgtaattattattattggaataactataatccagaaacggacagtgccgtccataagttgaagagagcaatctttaaagcctatcttgaccaaacaaatgattttagaagatcaatttttgagaataaaaaatag

SEQ ID NO: 7201 - DNA, 69 bp, Streptococcus pneumoniae
  misc_feature (1)..(69): tiling:Spneumo1:WAN024AJS; WAN024EM9 R6.IG_605||||597078.. 597146|+|69 bp|Between spr0581 (zmpB) (+ strand) and spr05 82 (pabB) (+ strand)|S.pneumoniae|R6|NC_003098.1|IG|100
ggatgaataaaatcgtaaaaaggtagatcagctttgtctgtatctgcctttttatgctatacttaaggt

SEQ ID NO: 7202 - DNA, 74 bp, Streptococcus pneumoniae
  misc_feature (1)..(74): tiling:Spneumo1:WAN0249D9; WAN024ER3 R6.IG_246||||217537.. 217610|+|74 bp|Between spr0225 (- strand) and spr0226 (pfl E) (- strand)|S.pneumoniae|R6|NC_003098.1|IG|100
ggggaagtcttctttgataaccttatatagatgcttgttatctgcaaatagctagagcatttcaaggaaataaa

SEQ ID NO: 7203 - DNA, 594 bp, Streptococcus pneumoniae
  misc_feature (1)..(594): tiling:Spneumo1:WAN024DY2; WAN0240SL |galU||CAC11049.1|||5 94 bp|UTP-glucose-1-phosphate uridylyltransferase|S.pneumo niae||AJ286779|ORF|000
ggtattgaagatattctggttgtcactggtaaatcaaaacgttctattgaagaccactttgactcaaactttgagcttgagtacaacctcaaagaaaaaggcaaacatgacttgctaaaattggtagacgaaacaactggcattcgccttcactttatccgtcaaagccatcctcgtggtcttggcgatgctgtcttacaagcaaaagcttttgttgcgaatgaacccttcgttgtcatgcttggtgacgacctaatggatatcacagatgacaacgctgtacctttgacaaaacaattgatgaatgattacgagtcgactcacgcatcaacaattgctgttatgcctgtccctcatgaagaagtttcagcatatggagttatcgctcctcagggtgaagggattaatggtctctacagtgtcgaaactttcgttgaaaaaccagctccagaggatgctccaagtgatttagcaattatcgggcgctatctgctcacaccagaaatttttgagatcctcgaaaatcaagctcctggcgctggaaatgaaatccagcttaccgacgctattgatacgcttaataaaacacaacgt

SEQ ID NO: 7204 - DNA, 594 bp, Streptococcus pneumoniae
  misc_feature (1)..(594): tiling:Spneumo1:WAN024DY4; WAN0240SK |galU||CAC11048.1|||5 94 bp|UTP-glucose-1-phosphate uridylyltransferase|S.pneumo niae||AJ286778|ORF|000
ggtattgaagatattctggttgtcactggtaaatcaaaacgttctattgaagatcactttgactcaaactttgaacttgagtacaatctcaaagaaaaaggcaaaacggatttgttaaaattggtagatgaagcaactggtatgcgccttcatttcatccgccaaactcaccctcgcggtcttggagacgctgtcctacaagccaaagcttttgtggggaatgaacccttcgttgttatgctgggcgatgaccttatggacattactaacgacaaggctatcccattgacaaaacaactgatgaatgattacgaaaagacacacgcatcaaccattgctgttatgcccgtaccacacgaagacgtttcatcatatggagttatcgctcctcaaggtgaagggattaatggtctctacagtgtcgaaactttcgttgaaaaaccagctccagaggaggctccaagtgatctagctattatcggtcgttatctgctcacaccagaaatttttgagatcctcgaaaatcaagctcccggtgctggaaatgagattcagcttacggatgcaatcgatactctcaataaaacacaacgt

SEQ ID NO: 7205 - DNA, 369 bp, Streptococcus pneumoniae
  misc_feature (1)..(369): tiling:Spneumo1:WAN024FCL; WAN0240YW |xpt||AAL84632.1|||36 9 bp|xanthine phosphoribosyltransferase|S.pneumoniae||AF47 4331|ORF|000
ggtgataacatcctcaaggtagattcctttttaacccaccaagttgactttagcttgatgcgagagattggtaaggtttttgcggaaaaatttgctactactggcattaccaaggtcgtaaccattgaagcgtcgggtattgccccagccgtttttacagctgaagccttaaacgttcccatgattttcgccaaaaaagctaagaacatcaccatgaacgaaggcatcttaactgctaaaggcttgattcaaatcatcgaacaggccggtgccacagtccaagctatcggtatcgtgattgagaaatccttccaagatggtcgtgatttgcttgaaaaagcaggctaccctgtcctatcacttgctcgt

SEQ ID NO: 7206 - DNA, 780 bp, Streptococcus pneumoniae
  misc_feature (1)..(780): tiling:Spneumo1:WAN024G3A; WAN0244DT-M spr0561|prtA|159026 05|NP_358155.1|562418..568852|+|6435 bp|Cell wall-associat ed serine proteinase precursor PrtA variable region|S.pneu moniae|R6|NC_003098.1|ORF|100
ggttctagcaatttcacaaagattcatagaattaaatttgctgatcaggctgatgaaaaggggatgatttcttattacctagtagatcctgacaaagatgcttctaaatatgaaaaacttggtgaaatttctgaagataaactcaaaaatgcaaagagcccagaggaaaataccaataataatcaagctaaggatgaagattcaaaaccagatgaaaaaagttcagttgagggagaagctagccttgaaataaataaaactatttcaacaattagagagtttgaaaataaagacctaaagaaactcattaaaaagaaatttagagaagttaatgattttacaagtgaaactggtaagagaatagaggaatacgattataaatacgatgataagggaaatattattgcttatgacgatggtagtgccttacaatatgaaactgaaaaatttgacgaaataaaatcaaaaatttatggtgttctaagcccatctaaagatggacactttgaaattcttggaaagataagcaatgtttctaaaaatgccaaggtatattatggaaatagctataaatcgatagaaatcaaagcgactaagtatgattcacattcaaaaacgatgatatttgatttatacgctaatattaatgatattgtagatggattagcttttgctggagatatgagattatttgttaaagatgacaatcaaataaaagctgaaactaagattagaatgcctgaaaaaaataaggaaactaaagcagaatatccctatgta

SEQ ID NO: 7207 - DNA, 1063 bp, Streptococcus pneumoniae
  misc_feature (1)..(1063): tiling:Spneumo1:WAN024C5G; WAN0240PO |pbp2X||BAA75526.1||| 1063 bp|penicillin binding protein 2X|S.pneumoniae||AB0112 03|ORF|000
gtagacggaaaggatgtttataccactctttcaagtcctttgcagtccttcatggaaacccagatggatgcttttcaagaaaaggtaaaaggaaagtacatgacggctaccttggtcagtgctaagacaggtgaaatcctcgccacaactcaacgacctacctttaatgccgatactaaggatggcattacaaaagactttgtctggcgcgatatcctttatcaaagtaactacgagccagggtcaaccatgaaggtgatgatgttggcagcagctattgataataagactttccctggtggagaatactttaacagtagcgagttgaaactggcagatgccaccattcgagactgggacgttaacgaaggtttgacgagtggtggaaccatgaccttttctcaaggttttgctcactctagtaatatcgggatgaccttgctcgagcagaaaatgggagatgcaacttggctcgattatctcaatcgctttaagtttggagtgccgacgcgttttggtctgactgatgagtacacaggtcaattgcctgcagataatattgtcaatattgccatgagtgcatttggtcaggggatttctgtaacgcagacccagatgctacgtgcttttacagccattgccaatgatggtgttatgttagagccgaaatttatcagtgcactttatgatcctaatgatcaatctgttcgtaagtctcaaaaagaggttgttggaaatcctgtatcgaaagaagcggcatcagttacgcgtgaccacatggttatggttggaacagatcctacatatggaactatgtataatcatagtacaggcaaggcaactgtcaatgttccaggtcagaatgtggcccttaaatcagggactgcacagattgcggatgagaaaaatggtggttatcttacaggttcaacaaactatattttctcagttgtctctatgcacccagcggaaaatcctgactttattctctatgtgacggttcaacaacctgagcattattcaggtattcaacttggagagtttgccaatcctatcttggagc

SEQ ID NO: 7208 - DNA, 1998 bp, Streptococcus pneumoniae
  misc_feature (1)..(1998): tiling:Spneumo1:WAN024ATE; WAN023ZQI |pbpX||CAA46264.1|||1 998 bp|penicillin binding protein 2x|S.pneumoniae||X65134| ORF|000
gtcccaattgctgaggatgcaacctcctataatgtctatgcggttattgatgagaactataagtcagcaacgggtaagattctttacgtagaaaaaacacaatttaacaaagttgcagaggtctttcataagtatctggacatggaagaatcctatgtaagagagcaactctcgcaacctaatctcaagcaagtttcctttggttcgaagggcaatggaattacctatgccaatatgatggctatcaaaaaagagttggaaactgcagaggtcaaggggattgattttacaaccagtcccaatcgtagttacccaaacggacaatttgcttctagttttattgggttagcccaactccatgaaaatgaagatggcagcaagagcttgctgggaacttctggaatggagagttccttgaacagtattcttgcagggacagacggcattattacctatgaaaaggatcgtctgggtaatattgtacccggaacagaacaagtttcccaacaaacggtagatggcaaggatgtttacacaaccatttccagccccctccagtcctttatggaaacccagatggatgcttttcaagagaaggtaaaaggaaagtacatgacagcgactttggtcagtgctaaaacaggggaaattctggcaacaacgcaacgaccgacctttgatgcagatacaaaagaaggcattacagaggactttgtttggcgtgatatcctttaccaaagtaactatgagccaggttcccctatgaaagtgatgatgttggctgctgctattgataataatacctttccagggggagaagtcttcaatagtagtgagttaaaaattgcagatgccacgattcgagattgggacgtcaatgaaggattgactggtggcagaatgatgaccttttctcaagggttcgctcactcaagtaacgttgggatgacgcttcttgagcaaaagatgggagatgctacatggcttgattatctaaatcgctttaaatttggtgttccgactcgttttggcttgacggatgaatatgcaggccaacttccagctgacaatatcgtaaatattgctcagagttcatttggacaagggatttcagcgacccagacgcaaatgattcgtgctttcacggctattgccaacgatggagtcatgttagaacctaaatttattagtgccatttatgatccaaatgatcaaactgctcggaaatctcaaaaagaaattgtgggaaatcccgtttcgaaagatgcagctagccaaactcgtactcacatggtcttggtagggacggatccggtttatggaaccatgtataaccacagcacaggtaagccaactgtaactgttcctggtcaaaatgtagccctcaagtccggtacggccgagattgccgatgagaaaaatggaggttacttagttggtacgaccaattacattttttcggctgtatcgatgaaccctgctgaaaatcctgattttatcctctatgtaacggttcaacaacctgaacattattcaggaattccgcttggggagtttactaatccaatccttgagagagcttcagctatgaaagaatctctcaatcttcaatctccagctaagaatttagaccaagtgacgacagaatcttcttatacaatgcctagtatcaaggacatatcccctggagatttagcagaagaactacgtcgcaatattgtgcaaccaatcgttgtgggaacaggaacaaagattaaagaatcatctgtagaagaagggaccagtcttgcacctaaccagcaagttctcctcttatctgataaagcagaggaagttccagatatgtatggttggacaaaagcaaccgcagaagctttttctaagtggttaaatatagaacttgaatttgaaggttcgggctctactgtgcagaagcaggatgttcgtgctaatacagccatcaaggacattaaaaaaattacattaactttaggagac

SEQ ID NO: 7209 - DNA, 1998 bp, Streptococcus pneumoniae
  misc_feature (1)..(1998): tiling:Spneumo1:WAN024ATG; WAN023ZUL |pbp2x||CAB65445.1||| 1998 bp|penicillin binding protein 2x|S.pneumoniae||AJ2385 84|ORF|000
gtcccgattgctgaggatgcaacctcctataatgtctatgcggtcattgatgagaactataagtcagcaacgggtaagattctttacgtagaaagaacacaatttaacaaggtggcagaggtctttcacaagtatctggacatggaagaatcctatgtaagagagcaactctcgcaacctaatctcaagcaagtttcctttggttcgaagggaaatgggattacctatgccaatatgatggctatgaaaaaagagttggaaactgcagaggtcaaggggattgattttacaaccagtcccaatcgtagttacccaaacggacaatttgcttctagttttatcggactagctcagctccatgaaaatgaagatggcagcaagagcttgctgggaacctctggaatggagagttccttgaacagtattcttgcagggacagacggcattattacctatgaaaaggatcgtctgggaaatattgtccccggaacggaacaagtttcccaacaaactgtggatggcaaggatgtttatacaacattatctagcccgctccaatctttcatggaaactcagatggatgcctttctagaaaaagtaaaaggtaagtatatgaccgcgaccttggtcagtgcaaagaccggtgaaatccttgctaccacccaacgacctacctttaatgcagatactaaggatggtatcaccaaagactttgtttggcgtgatattctttatcaaagtaattacgaaccaggatcagccatgaaggtcatgacgctagcagcatctattgataataatactttcccaggtggagaatacttcaatagcagcgaattaaaaatagcggatgcgacgattcgagattgggatgttaatgatggtttgactactggtgggatgatgactttctcacaaggtttcgctcactccagtaatgttggaatgagtctacttgaacaaaaaatgggagatactacttggttggattatctaaaccgctttaagtttggggtgccgacgcgttttggtctgactgatgagtattcaggtcaattgcctgcagataatattgttaatattgccatgagtgcatttggtcaggggatttctgtaacgcagacccagatgctacgtgcttttacagccattgccaacgatggagttatgctggagccaaaatttataagtgctatttatgatactaacaatcagtctgtacgaaagtctcaaaaagagattgtaggaaaacctgtatcagaagatgcagcaagcttgactcggactaacatgatattagttgggacggaccctctatatggaactatgtataatcattacacaggaaagccaattataacagttccaggtcaaaatgtagccctcaagtctggtacagcagaaatcgctgatgagaaaaatggaggatacttggttggttctaccaattatattttcccagttgtgactatgaatcctgctgaaaatcctgattttatcttgtatgtaacggttcaacagcctgaacattattcaggtatccagttgggagaatttgccaacccaattcttgaaagagcttcagctatgaaagaatctctcaatcttcaatctcctgctaagaatttagatcaagtgacgacagagtcttcttatgcaatgcctagcatcaaggatatttcacctggtgatttggcggaagccttacgccgaaatattgtgcaaccaatcgttgtaggtactggaacaaagattaaagaatcatctgtagaagaagggaccaatcttgcaccaaaccaacaagttatccttttatcggataaggtagaagaaattccagacatgtatggctggaaaaaagagactgctgagacctttgctaagtggctcaatatagaacttgaatttgaaggttcgggctctactgtgcagaagcaagatgttcgtgctaacacagctatcaaggacattaaaaaaattacattaactttaggaggc

SEQ ID NO: 7210 - DNA, 81 bp, Streptococcus pneumoniae
  misc_feature (1)..(81): tiling:Spneumo1:WAN024AXV; WAN023SIP NC_003098.1_1899||||1 479904..1480017|-|114 bp|Glimmer 2.02 orf prediction|S.pne umoniae|R6|NC_003098.1|ORF|100
gtcttgttgggaatagcggtaaacacagctgctacaactcttaatggaggagctactgcaggggctttttcaggtgtagcc

SEQ ID NO: 7211 - DNA, 963 bp, Streptococcus pneumoniae
  misc_feature (1)..(963): tiling:Spneumo1:WAN024FN2; WAN023OOF pne80_27||||17028..17 990|+|963 bp|Type 38(1) capsule operon, Glimmer 2.02 orf p rediction|S.pneumoniae||WAN01UCDX|ORF|000
gtgaaaaaaatagtatttttgtgtccatactttgggactttaccaccccatacgcagttatggctaaattcttgtaaaatgaatccgtctgtgacatggtatctttttacagatgacaagagaaaatttgactatccagaaaatgtgcaagtattttatacgactttggaagaaacaaaggcgttgtatcaaaagaaatttgattttgagatttctttagagggggcttataaactcggagattataaacctttatttggttatctttatgaggaaatgatacaagagtttgatgcttggggacatattgatgtttatgatgaaatctatggagatattcgtgcatttgtaacagatgaattactagaaaaatacgataaattgatgatttttgggcatatggggatttataaaaattctcccgaagtcaatcgtagatttgaattgtcgtctgatttgaatcgtacttatcaagaaatattttcttcatcacaattttataattttgaagaatatgttgcaggaagtattactcgtatctatcagaaaaatggattccccattggaaaattagatgaggtgattgcggatctttctggtacaagttatcattttcgacgagggtacatttcagatgattttgaaacatttacttatttaccatatgagcctatgattttttcatgggaagaggggaaaacgtattgttattcggttaagaatcatcaagtgcaaaaagatgagtttatgtatgttcactttaagcgtcgaaaaatgattcaagatataccagatgatgcttctacttatttaatcgtcccaagtggttttgccttgatgcctgaagagataacggttgatttgattcgaaaatatagtcagaaaaaattattttatccagtttattttgaagaaaagtggaaaggtttcaaacgattatggaataaaatttggaggtcggaa

SEQ ID NO: 7212 - DNA, 393 bp, Streptococcus pneumoniae
  misc_feature (1)..(393): tiling:Spneumo1:WAN024C3E; WAN0246Q3 203669-02-7_2||||452. .844|-|393 bp|Glimmer 2.02 orf prediction from Patent Sequ ences|S.pneumoniae||WAN0246ZV|ORF
gtgaaaaaaggattaaaaatgaagatggaacgtggtgaattggttggctttcaagggtgcctagggtatgattatgatgtagaaaccaagcagatttcaattaataaaaaagaatccaaaattgttcgttacatttttgaaaggtatctagaaggtattggaggaaaagtaattgcaagagaacttgatgaacttggttataaatcgccaagaggattagaacattggaatgatacaacagttctaggaatcataaagaatgaaaaatataaaggtgatattttaataggaaaaacttttacagttgacccaataagcaagagaaggttgagtaattttggagaagaagataagtactatatcaaagataatcatgaacctataatatctaaa

SEQ ID NO: 7213 - DNA, 108 bp, Streptococcus pneumoniae
  misc_feature (1)..(108): tiling:Spneumo1:WAN024BPV; WAN023P86 pne52_17||||10411..10 518|+|108 bp|Type 24B capsule operon, Glimmer 2.02 orf pre diction|S.pneumoniae||WAN01UCCM|ORF
gtgaaaaatgatagtattttaattatgatgacaacatacaatggagaagaatttatacgtgaacagttggagagtatcctttttcaaaccattacagcatggaaacta

SEQ ID NO: 7214 - DNA, 981 bp, Streptococcus pneumoniae
  misc_feature (1)..(981): tiling:Spneumo1:WAN024BQK; WAN023PI3 pne34_13||||10372..11 352|+|981 bp|Type 17F capsule operon, Glimmer 2.02 orf pre diction|S.pneumoniae||WAN01UCHZ|ORF
gtgaaaagtgatagcattttaatcatgatggctacctacaacggagaagaatttcttcgtgaacagttggatagtatcctttgtcaaaccatctcaacttgggaactactgattcgtgatgataattccaatgatcaaacaagagcaattattaaagaatacgaagaaaaagatagacggattaaattgattgaaaacatatcggaatatcatggagcctattataatttttgggggttattaaacgatgttagacaaaacgaaaatccatttgatttctatatgtttgctgatcaggatgatatctgggatgtggacaaattagaacgtttaattagttattactatagaaaagttaaaacagaagaaccggtattgatttacgctgatatgcggattatagatgctaacggtaaagtgatagctaatagtatggatcaattgatgggaattcggtataccaatcctatctcaacttttatggctcataaggtttatggatgtaatacgttatttaatcatgaattatttgaaatcttacccctccttccatgttatgctccagaattagccttcctatcacatgataactttacaacaaaaattgctgcattgaaagggcatgtgtatttttatgatgagcctactatgagttatagacgatatgggcataatgttacaagtaaacatgagtataactttacattgaagcgaatcttaaaacgtatctcgaaaattgatgaattagctaaagatcatgccttgacttacaagcagaccttagtcgctacaaatttgttacatcaacaaacaagtattgacactgaactcctatttttagataaggtagaaaaaataatcaaaaaaggtggattaaatgctgtaaaaatggtttggaaagaaaaaattgattggggaaatcgtgttaagactataagcaggtctctgattttagcgtcaaaattatataagaaatattta

SEQ ID NO: 7215 - DNA, 1218 bp, Streptococcus pneumoniae
  misc_feature (1)..(1218): tiling:Spneumo1:WAN024DJD; WAN023PH7 pne35_18||||15869..17 086|+|1218 bp|Type 17A capsule operon, Glimmer 2.02 orf pr ediction|S.pneumoniae||WAN01UCHX|ORF|000
gtgaaacttgcagttgttggaaccggatacgttggattgtctatctcagttctattatctcagcatcatgaggtggtggctgtcgatattattccagaaaaagttaatctaattaatgaagggaagtcccctattaaagatgattatattgaagaatatttagcaaataagtctcttaatttggtagcgacgttagatgcatctaaggcatatactgatgctgattttgtaattattgcagcgccaacaaattatgattcggaaaagaacttttttgatacatctgctgtagagaaagttattgaaacagtgttagagataaatcctaacgctgttatggttattaaaagtacagttcctgtaggatatactcaatgggttcgtaataaatataaaacaaataatattttatttagtccagaatttctgcgtgaatcaaaggctttatatgacaatttatatcctagccgtataattgttggacttgatatggacgatgcatatttgagggagagggccgaaacttttgcaaaactgcttcaagaaggagctattaaagaggctatagaaactctttatatgggatttacagaagctgaagcagttaaactctttgcaaatacatacttggccttacgagtttcgtatttcaatgagttggatacttatgcagaagttaaagggttagataccaaagctattattgagggtattggcttagatccacgtatcggaaaccaatataataatccttcttttggatatgggggatattgccttccaaaagatagcaaacaattactggcaaactataaagatgttccacagaatatgataacagctattgttgagagtaatcgtactagaaaagattttattgcagagcagattttgaaatttgcagaagtgtcaagtaatggggacattcatacaaaagatgtaataataggtctttatcggttaactatgaagagtaattccgataattttcgtcaatcttctattcaaggtgttatgaaacgattaaaggcagaaggtgtaaatgtcataatttatgaaccaaccctcagtgacaatgagacattttggggtagtaagattgtaaacgatttggagtattttaaatcaattagtaatgttatcgtggcaaatcgttatgatgatttgcttaaagatgtgagtgacaaggtttatagtcgtgatatttttaagagagat

SEQ ID NO: 7216 - DNA, 84 bp, Streptococcus pneumoniae
  misc_feature (1)..(84): tiling:Spneumo1:WAN024F8J; WAN023RT4 contig_1602_1||||350. .433|-|84 bp|Glimmer 2.02 orf prediction|S.pneumoniae|670| WAN01UDDM|ORF|000
gtgaaagaaatttcggaggtgaaagatgctagaagtaagaagtctagagaaaagttttggatccaagcaagttttgtttggtat

SEQ ID NO: 7217 - DNA, 132 bp, Streptococcus pneumoniae
  misc_feature (1)..(132): tiling:Spneumo1:WAN024CVI; WAN023YV1 AL449927.1_111||||969 27..97058|+|132 bp|Glimmer 2.02 orf prediction|S.pneumonia e||AL449927.1|ORF|000
gtgaaagaagttgaaaaggccagcaccagtaaaatagcaaccatcgtactaaaaaaacttggcatttcctcaaaaggaaaacgaaaggctatatttataaacatgaaaagcatcaagagactagaaaaaatg

SEQ ID NO: 7218 - DNA, 78 bp, Streptococcus pneumoniae
  misc_feature (1)..(78): tiling:Spneumo1:WAN024BLG; WAN023NBA spn143g10_50||||49101 ..49178|-|78 bp|Glimmer 2.02 orf prediction|S.pneumoniae|2 3F-1|WAN01UCOL|ORF
gtgaaagtcaagcgatttgatgaagtttttttgaaaaacaaaggggcaaaaaaggggcaaaagtgtcgtaaacctctg

SEQ ID NO: 7219 - DNA, 1086 bp, Streptococcus pneumoniae
  misc_feature (1)..(1086): tiling:Spneumo1:WAN024BOT; WAN023OG8 pne91_17||||10004..11 089|+|1086 bp|Type 47A1 capsule operon, Glimmer 2.02 orf p rediction|S.pneumoniae||WAN01UCEE|ORF
gtgaaatatgatagagtatataatctgatttttaatatattgttctccgtgtcaacagttttgtatatgctgaaatttgtaaatattgcgaaaagtggtagtttaaatatcttaattttagctagttcagtatttttattgctacttcacacagtgatttacggctttaataaattgaagctattttgtctatccttcgtattatttttatgttttctaatttattttcaaggattagtttatctggaattgcttaatttttttctgatttactcaactctaagagtgagtaatattcaatttaacaagactcattggtcagtgttttttattttttttatattagtagttttatttgctaatgcaggaattattaaaagtgtattcatttttcgaactggagggttagtaagaggatcattagggtttgtccatccgaattcactaggtctcatggcttatgcaattacattaaatacattgtacgtctttaaccccaatagatacaaaattattttctactgcggtcttcttatatttaattattttatatttgccataacggactctagaacttctttctcaataagtttattgattattttaagttgttttatttttgattttagaggtattctatacaaggttgttaaaaattcatttatttatatagtaattgtagtaagttcgctatttattattttagcaactacctattttgaagtgagggaacctttcatttttttgaataaactttttaccaatagaatttacagtggtaatgtttttgtagctgaatatggatataatctttttgggaattttatagagggaacactacctactttagcaggagatgtaattattgatagtggttatgtgggtttaattcttcgtttaggtgtattattttttataggctacttgttgtttatgttgttaagaataaaacaaaatatttttttattgaaggaagcaatcttgattagcagtgcctttatttcattaatgtttgaatcctatgggttttctggttttattttcccagttttatttgtggattttgtgggtagaagaaaggaatta

SEQ ID NO: 7220 - DNA, 1953 bp, Streptococcus pneumoniae
  misc_feature (1)..(1953): tiling:Spneumo1:WAN024BQC; WAN023PHB pne35_14||||11084..13 036|+|1953 bp|Type 17A capsule operon, Glimmer 2.02 orf pr ediction|S.pneumoniae||WAN01UCHX|ORF
gtgaaatctgaaattaaagtttctgtagtaattccaatatataatcaagagatttacttaaggaagtcaatacattcagtactgactcagagttatcaaaatttggaaattatagccgttaatgacggttcaattgattcaagtcaacaaattatggaagaatttgcaaatcaggatagcaggatttttctttatgaaaaatcaaatggtggattagttgatgcaacaatatatggtgtagaaaaggctacgggggattatatagtctttcttgatccagatgattacattggggaaaattatattcaaaagtttgtatcttacctcgaccatgactatgattttgtagctatgggattttattatgatgataacgataaggttactccatacagattaaaagagaatctaattctaaataagactcatatagaagtattaaaatcaaccttcttaactaattttgatttagggactatttcgaatcagatatttatttcaagatggaataaactttaccgctgtgatattgtcaaaagtgttatttcggagtttaagtcatataagaatgtaactctcggagaagatacaatttttgctgctctgttacttaaatattctcagtcagctaaaattttgcaacaagctaatacttatttctataatattgcaaatcagaattctatgatgaaaagtagcgatttagataagtatttgaacaaatgttatcaagtatttatgagttttagtaaattacttgaagagcaagaattagataaaactcaagcttactatctgtattttttcttaactaatactctttttaacagattaaggactaatgatccaaaacagttttatggtttatttgataaacttaagagagaaccagtatatataaaaacattaaatatggttcgaaaaaatacgaaaagtaagtttataagtttcgatctgtttttaagactctatacgacttgttcacaatatatatatataaaggatagtattgaacgtactaagacctttgtacggaattttaaatattttagtcggcaagtcagaaaaaataatattattaaggcctatcagctattgaatttttttaggagtcgtcaaaatgctttttatgagttaaaaaatcaacttcctaagattgagggagaaataaataacattttacttcaacatgatagtaatgaatttaatgaagaagaaggcatagaagaaaagatttttgttttttggtgggatggatttaatgatttaccagaaattgttgcagaatgttttaagtctttgaagaagcagtatcaggaatatcagattattcctatttctaaagacaattttgaagagtatacggatattcatcctgtgttgttaaaagagtttaaagctggtaaaatttctatacagactttttctgatattttgaggtttaatttattgaaaaataatggtggtatgtgggtagatgcaacaatctactttacgaggaaagttgatttgttttcacagttagaaagacaatcatttgctacaataagtttttccacaagcaaagattttttggagtataaaggagagttttgcagttggacaggctattttattgcttcacggaaaaatggccgctttgttcaaatgatggatatgttatttagagagtattatctcaaatacagaaattttcaaatttatttttttattgatgcattgtttatgatttgtaaagttaataaaattgatagtggtgttttggataatccattatatattgaagggaatatgtggacgctgtcaaacttactaaaatcaaaatatgatgatcaattattaactttgattaaaaaaattccccaaaagttagcttggttttttgaaccacttagcgatagcacggatactttctataatcaattaatttcagaaaaaatcaagcaaaaggag

SEQ ID NO: 7221 - DNA, 93 bp, Streptococcus pneumoniae
  misc_feature (1)..(93): tiling:Spneumo1:WAN024GIN; WAN023NWJ spn066d05_13||||7627. .7719|+|93 bp|Glimmer 2.02 orf prediction|S.pneumoniae|23F -1|WAN01UCWR|ORF|001
gtgaaattcttttggatgatcatttcctttgcagttcaattgctgttttacaagatattatttaagatattggattggctctttaaacttatc

SEQ ID NO: 7222 - DNA, 186 bp, Streptococcus pneumoniae
  misc_feature (1)..(186): tiling:Spneumo1:WAN024BYE; WAN023S0V contig_1623_21||||117 34..11919|+|186 bp|Glimmer 2.02 orf prediction|S.pneumonia e|670|WAN01UDAF|ORF
gtgaaatttaaaatcaaacaagatttctatgattgggaatcaaatgtgaaacgactggcaggaggggaacttgagattactgaggagcgctatgttgagctggctgacaatattgccagcaacggcgttgctatctcagatgttcttgagaaaatcctccctgaacctgagttcttagaagaggat

SEQ ID NO: 7223 - DNA, 420 bp, Streptococcus pneumoniae
  misc_feature (1)..(420): tiling:Spneumo1:WAN024DAN; WAN023S17 contig_1623_9||||3073 ..3492|+|420 bp|Glimmer 2.02 orf prediction|S.pneumoniae|6 70|WAN01UDAF|ORF|000
gtgaacaaggctaaagaactattgaaagagttgcagaatctggacatggacattcaaagccgtatagatgaaattaacgagcttgaggcaggtttgctctcaagccccaagtggattgacgtcaaagtccaaggtggtcaagctagaaaagttgatgatgtctatactcagcttgtcgtgatgaaagaggccatagaacaggatactaaagaggttatcaacagaaagcttgagcttggtaggttgattaacaagctgaaaaatccaaagagcaggtctattctcagggtgacttacattactaagatgtatgttgatgatatttgtgacaaaatggaaatcagcagaacaactttctacacttggcggaatatggctatctctgaactgaatgaggttttggagagaatggaactaaat

SEQ ID NO: 7224 - DNA, 246 bp, Streptococcus pneumoniae
  misc_feature (1)..(246): tiling:Spneumo1:WAN024GM3; WAN023JZO 83011_584||||326166.. 326411|-|246 bp|EGAD orf prediction|S.pneumoniae|TIGR4|WAN 01UC25|ORF|010
gtgaacagctgggtctggttcgtatccattttctttcaaagtagtttcagccatacggataccaccttttggcatgaagttcaatttgaagagttcatcgttttggataccgaagataacttcattttctttgtcgataaatccagcagggatatcagcgatagatgttggacgagtgtccattgggaaacgagtttcttcgtagtgtgctttagtttcttctacaattttcttgatgtgaagtga

SEQ ID NO: 7225 - DNA, 399 bp, Streptococcus pneumoniae
  misc_feature (1)..(399): tiling:Spneumo1:WAN024BRU; WAN02418R |||AAP94609.1|||399 b p|putative repeating unit transporter|S.pneumoniae||AY3360 08|ORF
gtgaacattctgaaacaagttagtctaaagtggaactatgtgtttaatcttgccaataaactattttctctaactattccacttattgttactccctatgtcactcgagtcttttcttcagatcattttgggatttatacttataccaatacagttgcttcttactttgttacctttacattgatggggataagtatgtatggaagtaagaaaatttctcttaaaagacatgatgagatagcagtcaatgatgaatatgcttccttactgactgtccagctgcttaatgtaggtctagccacgttaacttactttctctatgtgaccttttttgtcaataataatcaagttatttattggatccagatgttgtatgtgatttctgctgttttgatatga

SEQ ID NO: 7226 - DNA, 237 bp, Streptococcus pneumoniae
  misc_feature (1)..(237): tiling:Spneumo1:WAN024DG8; WAN023JR6 83557_981||||558838.. 559074|-|237 bp|EGAD orf prediction|S.pneumoniae|TIGR4|WAN 01UC25|ORF|010
gtgaactgcccaatagcagataaaaaagctactcctcctgataataagcaaaaacaaactgaacgaataaatgttttcgctctaatattgttatctttcactttattatttttttacaaattggacattctccgttttccagaacatatttttcttgacttagagcatgatttctcatattataaacgtaagcgttatctattaggatttcattataacatcccagaaatattttaa

SEQ ID NO: 7227 - DNA, 309 bp, Streptococcus pneumoniae
  misc_feature (1)..(309): tiling:Spneumo1:WAN024CN6; WAN023I1G 87262_3754||||2135471 ..2135779|-|309 bp|EGAD orf prediction|S.pneumoniae|TIGR4| WAN01UC25|ORF|010
gtgaactgggtaaaaaatgatgaaacctacaaaaaagaaacaaccccagctgttcctttttacttctatttaacaggtatttccttaatcacgcgcgcaggattgccagctaggacaacgttgtcgccaaaagatttggtaattactgcccctgctcctgcaacgacattatttcccagtgtcactccaggaaggacaatgacgccaccaccagtccagaaattatctccgattgtgataggctttccgtactcgatacctgaattgcgttcctgtggatctagtggatggaggggtgtcaaaaactga

SEQ ID NO: 7228 - DNA, 1086 bp, Streptococcus pneumoniae
  misc_feature (1)..(1086): tiling:Spneumo1:WAN024BQP; WAN023PN3 pne26_15||||9293..103 78|+|1086 bp|Type 13 capsule operon, Glimmer 2.02 orf pred iction|S.pneumoniae||WAN01UCIU|ORF
gtgaacttatttgacataagtctatataaggattatgtagacaaatctataaaaaatatagttggcgttgagactttaaaggataaatcaattcttattacgggatcgacaggtcttatttgttcgactgttattgatcaattgattatactgaataagaatcatcaattcggagttaaaatttatgcttgtgcaaggagtgaagaaggactaaaaagacgatttggaaattatgtagatgatgaaaatattatttatgttccatatgatgctaataaagatattgattttaatttcactgtagattatataattcacggagctagtaatgccagtccagatttatacattagtaatcctgtagatacaatgcttagtaattttttaggtatgaaaaatttactagattatgctttgaaaaaatcagtaagttctatagtttatgtttcgtccagtgaagtatatggaaaaacagaaaatcatactccgtatcaagaagatgagtatgggtatgtaaacattttagatgttagagcttcctattcaagttcaaagcgagcaacagagacattgtgtaaaagttattctgaacaatatgacgtatctataaaaattgttcgtccaggtcatatttatggtcctagcttaaaaataacagataaaaggatttcatctgcttttatgtatgatgcaatcaggggacaaaatttagtaatgaaaagtaaaggagaacaactacgatcatattgtcatagtttggactgtgcaagtgcaattttgacagttcttttgaaaggtcagtctggcgatgcatacaatatttcaaataaaaaatctattatttcaataagagagatggcctctataatagctgaagtagctggagtagaattactgtttgaattacctaatgaagtagaagaaaaacaaaaaaatcctatggataattctagcttagatagtacaaaattggaagagttaggatgggtaggtatgtttgaagctaaggaaggattagaaagtacatataaagttttagatataagtaaaattcaaaagatatctaagaatatatacaatatagat

SEQ ID NO: 7229 - DNA, 102 bp, Streptococcus pneumoniae
  misc_feature (1)..(102): tiling:Spneumo1:WAN024BKK; WAN023MP1 spn180c09_131||||1077 59..107860|-|102 bp|Glimmer 2.02 orf prediction|S.pneumoni ae|23F-1|WAN01UCXQ|ORF
gtgaagaaaataggaacaattagtacaacacttgtagtagttgcgggagtaagtgcgggtgtgcttggaggaaaatttgactttaaatttcctaaaaagatt

SEQ ID NO: 7230 - DNA, 105 bp, Streptococcus pneumoniae
  misc_feature (1)..(105): tiling:Spneumo1:WAN024BPP; WAN023P6X pne53_28||||16620..16 724|+|105 bp|Type 25F capsule operon, Glimmer 2.02 orf pre diction|S.pneumoniae||WAN01UCCQ|ORF
gtgaagaactatattgcccatatacttggggaagaaaatattattccgactctgggtgtttataatcgttttgatgagattcattttgtttcgcaggaagtctat

SEQ ID NO: 7231 - DNA, 363 bp, Streptococcus pneumoniae
  misc_feature (1)..(363): tiling:Spneumo1:WAN024F5H; WAN023LYA 314344_946||||493399. .493761|-|363 bp|EGAD orf prediction|S.pneumoniae|R6|NC_00 3098.1|ORF|100
gtgaaggagacgaaggattttatccagcgtatagaggagaacagatcgagtaattaccttatcgtcttcattgtcgctgtaaagaacttccttggtcaactcaacataccagttggcaaattcttcccaaatgaagttgtaaaggatatgaccagccacaccaaactcgaacttatcaaagttttcagtaacttttgcaatggtttcgttgagattgtggagaatccagcggtccgtcacattaccagcctcacctgttgcaacttttgtgacattgtcatgcgccacatccagcgtcaaacctccattgttcatgaggatatagcgagaaatgttccaaatcttgttaataaagttccatga

SEQ ID NO: 7232 - DNA, 225 bp, Streptococcus pneumoniae
  misc_feature (1)..(225): tiling:Spneumo1:WAN024CQ6; WAN023I42 87126_3655a||||209122 0..2091444|-|225 bp|EGAD orf prediction|S.pneumoniae|TIGR4 |WAN01UC25|ORF|010
gtgaaggtcgcaggagcgaaaatcagccccaaacgccaacctgtcatggcatgcgatttagacaaaccattgataataatagcctggtctctcaacatcgttcctagagacacatggcttcgcctgtgtaggtcaattctgagtaaacctcatcacagacaacaaaaatttcgtacttgcgtaaaacagctgccaaggcctctaactgctctcgactgtaggtaa

SEQ ID NO: 7233 - DNA, 225 bp, Streptococcus pneumoniae
  misc_feature (1)..(225): tiling:Spneumo1:WAN024DW6; WAN023I88 86852_3444||||1956478 ..1956702|-|225 bp|EGAD orf prediction|S.pneumoniae|TIGR4| WAN01UC25|ORF|010
gtgaaggtcgccttcgatttctgggtgaatagtgaacttgtcatagtctaccatagtgaagacagtatccaagtgcatgaatttacggttgttagcaaattcaaaggccaaaactttcttgaagccaacatttttcttgaagatgttgaccaaaagtttttcgatagaagctgcgtctgtacgttgagagatacctactgcaaggacgtctttagaaagaactaa

SEQ ID NO: 7234 - DNA, 185 bp, Streptococcus pneumoniae
  misc_feature (1)..(185): tiling:Spneumo1:WAN024B78; WAN0246KJ ||||||185 bp|Incyte o rf contig SPN2C0436 2820-3008|S.pneumoniae|23F|WAN0246KJ|O RF|000
gtgaattaatcgctccaatgacttacgaagagatgatgacgagcgacttttttgaagtatggtttcagaagtttctcttaccaacattaaccacaccatcggttattatagtaaaatgaaataagaacaggacaaatcgatcaggacagtaaaatcgaattctaacaatgttttagaagtccata

SEQ ID NO: 7235 - DNA, 243 bp, Streptococcus pneumoniae
  misc_feature (1)..(243): tiling:Spneumo1:WAN024C2T; WAN023LJR 314017_1767||||945500 ..945742|-|243 bp|EGAD orf prediction|S.pneumoniae|R6|NC_0 03098.1|ORF
gtgaattgttggatttcatgcaatgtattctcaaacctactatttggagttgtcagcctaaattcaggagcacctaaaatacaaaacgaaccagtatcatactttaaggcttttgacattttgttcaaaacattaactgattcccccacactatatccagcttttattaattctataaagaatatattttcaatactactaccatctttaataatagtactcccaattactacagctggatag

SEQ ID NO: 7236 - DNA, 243 bp, Streptococcus pneumoniae
  misc_feature (1)..(243): tiling:Spneumo1:WAN024EY7; WAN023KXY 314924_2714||||144458 6..1444828|+|243 bp|EGAD orf prediction|S.pneumoniae|R6|NC _003098.1|ORF|100
gtgacacaaaggaagctaccaattctaatctctttgaaatcatcttctctcactttccaaaactctattacctcttattataccacatttcggctggcaatcttgtacctaaaaaaactgcaatccacagattgcagtctttctttattttctagcttgatagcgactagtcaggatgaaaatcactgtaaagaccaacatcatgacaccataaacaggcaacgtttgttctgtcaaggttga

SEQ ID NO: 7237 - DNA, 105 bp, Streptococcus pneumoniae
  misc_feature (1)..(105): tiling:Spneumo1:WAN024BVQ; WAN023QLS contig_1315_27||||181 54..18258|-|105 bp|Glimmer 2.02 orf prediction|S.pneumonia e|670|WAN01UE9N|ORF
gtgacactagacctaggcaaaatgacacaagcagaatttgatgaagtaatggctggacatccaaggcaagaaatccaaacctattacagttcatcactgattttt

SEQ ID NO: 7238 - DNA, 225 bp, Streptococcus pneumoniae
  misc_feature (1)..(225): tiling:Spneumo1:WAN024C2R; WAN023LJO 314646_1777||||953739 ..953963|-|225 bp|EGAD orf prediction|S.pneumoniae|R6|NC_0 03098.1|ORF
gtgaccacttcgtcattaacgggtacaataaaggaaatcagtgatgcagcaattagaaatgagaatccatccaatagtaaaacaccatgtatcccaagtagcttatataataaaattgctaccattggtattgttactttaattatagtacttgttatctctagcaatgaattaagttgtgatatactatccttttttacaatttcttttgtaaatgctttatag

SEQ ID NO: 7239 - DNA, 297 bp, Streptococcus pneumoniae
  misc_feature (1)..(297): tiling:Spneumo1:WAN024ERZ; WAN023KKE 315217_3338||||178791 7..1788213|+|297 bp|EGAD orf prediction|S.pneumoniae|R6|NC _003098.1|ORF|100
gtgaccagtttatctccaagcaaacaatctaagagtgttgtctttccggcaccatttggaccaattaaggcaacacattcaccatcgttgatttcaaaggagatgttccgcaaaatttccttgtcttttattttcttactcaatttttcaactttaaccacagtcatgagactctcctttcaaccactccattcccatagggaaaacgacgaaaatcataaatccaaaccccaaagcaccacaaatgaattggcgaagcaaggcttgatcaaaccaatcagtaaacatttccactaa

SEQ ID NO: 7240 - DNA, 234 bp, Streptococcus pneumoniae
  misc_feature (1)..(234): tiling:Spneumo1:WAN024CQP; WAN023J5W 84929_2008||||1145492 ..1145725|+|234 bp|EGAD orf prediction|S.pneumoniae|TIGR4| WAN01UC25|ORF|010
gtgactgggcacgaactggggaagttactgccattttttcagtattttcaacaacaatatgaatatctaaatatttcttatgagtttcaaaaatatctcctggaactccatcagctagataagtcatacaatttgcaaaaacattttccccgtcaatatcaatttttccatcaactaaatctgtcaaatttgtattttctaaaaaatcacagacttttgaaaaatatttattga

SEQ ID NO: 7241 - DNA, 261 bp, Streptococcus pneumoniae
  misc_feature (1)..(261): tiling:Spneumo1:WAN024FEN; WAN023KSS 313869_2932||||156135 3..1561613|+|261 bp|EGAD orf prediction|S.pneumoniae|R6|NC _003098.1|ORF|100
gtgagaaagggtaataccaatcgtgaaatagtaaggtggatagccgagttgtcgtctgattcccatttcataggcataaaagccttcgtaatcttgatccttggcaaatcgaatagcatagtgctgcggattgtaggactgtatcaagacttgacctgctttttcagcccgacctgctcgacctgccacctgagtcaagagctggaaggttctctcagaagaacggaaatcaggcagattcaaggccgtatccgcatttag

SEQ ID NO: 7242 - DNA, 318 bp, Streptococcus pneumoniae
  misc_feature (1)..(318): tiling:Spneumo1:WAN024BYQ; WAN023S18 contig_1623_8||||2321 ..2638|+|318 bp|Glimmer 2.02 orf prediction|S.pneumoniae|6 70|WAN01UDAF|ORF
gtgagatattttaaaatcctatgtattgttttattcgcatccttactcgtagcatgtcaccagatttcgagtgggacagtggtagataagtacattgatgaacctcacacaacgttcatacctgttataaatggtaaaagttcggtacttgtgccaaccagaaccaaaagaaaatacattctggtcgtttcaggatttacaggtaataagcaagttgaagaaaggtttgaagtgacagcaaatgaatacaagcactatgaaattggcaatacttttatacaggatgccgttttagaaaataaggaggaggataaggaa

SEQ ID NO: 7243 - DNA, 969 bp, Streptococcus pneumoniae
  misc_feature (1)..(969): tiling:Spneumo1:WAN024FTL; WAN023P0T pne62_13||||9469..104 37|+|969 bp|Type 33C capsule operon, Glimmer 2.02 orf pred iction|S.pneumoniae||WAN01UCG7|ORF|000
gtgagatggatgaatattagtgtagttattcctgtgtataatgttgaggcttaccttcattatgctatagaaagtttagtaaatcaaactcataaaaattttgaggtcttactaatcaatgatggttcaactgataactcaggaaaattatgtgataaatacgctcaagaatatgattggattagagtatttcacaaagagaatggtggcttatctgatgcgcgtaattatggagtgctaaaagcaactaatgagtggatattctttttggatccggatgattacatagagccttttacatttgaattattgtctcttattcaagagaaatatcaagctgatttgatatcaacaaaggttcaaactacaaatgaatatgaaaagtttagcaagaaacaatttaatttagaaactgctaaaaaagttacaaaagaagaagcacttgagctaatgctccaagataaagttgcaacagtatcagcttgcgcaaaactatatcataagagtattttagagaaagcccccttccctattggaaaaatttatgaggatttttatgttgtcgctgaacatttagcactagcaaatagaattgtgattagtccttataaaacttacaattactattgtcgaccaggaagtattgttcgatctaagtttactgtaaagagatttaacttttttgaagctgctgaaaataatcgtagtattattaaagaacattacaattcaaaagaacttgaagaacttttgaatatcaaaatagttcaaggttccttttcaatttcttcatcagctgctgaatcagatgtggagtccttactctcaattaggagaaaattgagctcattttattggagtgtttttttctctccaaaagcttcttttaaattgaaagtgcaatatacgttatttttactttttcctaagcaatatttcaaattgaaaaatataataaagagagtagat

SEQ ID NO: 7244 - DNA, 747 bp, Streptococcus pneumoniae
  misc_feature (1)..(747): tiling:Spneumo1:WAN024BMP; WAN023O6X spn029h04_90||||76317 ..77063|-|747 bp|Glimmer 2.02 orf prediction|S.pneumoniae| 23F-1|WAN01UCO3|ORF
gtgagggaattgcttgatttagtgaagattgaatttctcaaacaaaggcatcaaaaactgaattttgtcgtatatggtgttgtttccctctacctagctctcatctgttattatgtaaatgatgcgagaggcttgtttgactcctttccctttgtctataaattctctttgtcttatttaaactttttgattctccctttgtattgtgtttcctatacaatacaggcatttggtttagaatatcgctatcgcatcatgaacaacttgaaactcgcttcagcaaatctaatgaagacattctgggctaagattttgtatatagaaatcaacgctctgtgtatcatgttattcacctatatttcggtttccttattcgcactactatcccgcttttcttcgacagtcagtttgtctttattattaagattcttctatctttgtatgagtagtggtatcttaattcccatgggagtatttcctttagttgctttggtcatgataaaagtcagaggcaaggagatagttgggaatttggtcggtgtcatgtatgttttagtgtcattttttttagcaaggacgagtccaaatatcagtccagtaacaagtgctaacagtttaatctgggaaggaaacagagaaggagtggtgcttcaacagccagctatcttatcgattgttgtactaggtttatctttacttgttttgtctttcttgtccattaaatcttggttaagaaaggtggatgaa

SEQ ID NO: 7245 - DNA, 171 bp, Streptococcus pneumoniae
  misc_feature (1)..(171): tiling:Spneumo1:WAN024BVZ; WAN023QM3 contig_1315_15||||112 14..11384|-|171 bp|Glimmer 2.02 orf prediction|S.pneumonia e|670|WAN01UE9N|ORF
gtgaggggggatgacatgattgaagattttttgattgatttggagaatatccaattagaggatatggagatagattttaacatggatatagacatcgatttaaacatagattttgaaatagatgttgaccttgatgatttagatttaaccttactacaagaattagaagcg

SEQ ID NO: 7246 - DNA, 75 bp, Streptococcus pneumoniae
  misc_feature (1)..(75): tiling:Spneumo1:WAN024BZE; WAN023S92 NC_003028.1_2187||||1 650227..1650301|-|75 bp|Glimmer 2.02 orf prediction|S.pneu moniae|TIGR4|NC_003028.1|ORF
gtgaggtcaggaaatccatttttcaaagatgaaatctttggaaaattagttccgaccgtccctcaccacctaaaa

SEQ ID NO: 7247 - DNA, 1260 bp, Streptococcus pneumoniae
  misc_feature (1)..(1260): tiling:Spneumo1:WAN024BQM; WAN023PJJ pne32_14||||11267..12 526|+|1260 bp|Type 16F capsule operon, Glimmer 2.02 orf pr ediction|S.pneumoniae||WAN01UCIC|ORF
gtgagtaaattaatattgaacttgaaattaaattcttttttatttgttataattttacttttagttgttgttactccgactcataccttaatttttgatgcactaattccaacgaaaattgataatttatggagagagtttcttctagtaatttcttttctatgtattctaaagataaatgcaggaaaaattaaaattggaaagctagggggcccaataattgttatgggaggaattggtttagtttatactatctgttcagataggccatttacagctttaaatctttttagaatttatatgtttcctgctgtaatatattttataataataaattgtaattttcgcaaggagagattactgatattgaagcaagcgcatgtatatactgcttgcatattagctttatggggaatttttcaggcgtgggtgttaaaagatcagtttttgattaaaataggatatccttcccaaggaaattttctaaagagtacagctttttatattggtggttttttcggtcaacaacgagttactagcactttttctgctcctaatttagctggagtttattttggaatatctttgatcattttactctctatatttgatactataaagagtaatagattggtattgttttcaattgtagcagcttttgttcttacatttagccgtagtgctattataagtactcttgtaggaatcgtattctttcaacgtaagaaattgttttcaacgacgaagattaatgttatgaccttggtaatcttccccttaatttttttgattgttttagttatattttatctttatcctgagaatgttattataaatatgctctatagcagttattcttcaacacttaatttgacagattcttcagcggttaagcatttggaagacttatggcttcctcttctaaaagttattgattatcctttgggacttggatttggtaataatggcccaattgttctgtcactctatcactcagcaaatttagtagaatcttctatttatcttcttgcatatgattttggtattttaggaatgttcatatatttgttcccttatttttatacgatttttgtatataaaaaatatttgcttagcggtgctatatgctgcttagttcttataacttatctatttcttccaaatgtagaaaattttgaaatcatattttttatttaccttttcattgggatggatgaactagcactatatacaaaaggaatgaatgtacatgaaattgat

SEQ ID NO: 7248 - DNA, 1647 bp, Streptococcus pneumoniae
  misc_feature (1)..(1647): tiling:Spneumo1:WAN024BT9; WAN023YJD AL449929.1_45||||4194 5..43591|-|1647 bp|Glimmer 2.02 orf prediction|S.pneumonia e||AL449929.1|ORF
gtgataaaaatggcagacagttttcatttttcagtaaacataatatcaagaggaaaaggcaaaagtgcagtagcaagtgcagcatatataagtggagaaaaaataaaaaatgaatgggacggagtaacccatgactacacaagaaaagaaaaaatattagtaaaaaatataatattgcctgatcatataccaaaagaatttaatgataggtctaccttatggaataaagtagaaatggcagaaaaaaattctaatgcacaactagcaagacaattcataataggactaccaaaagagttatctttaagtgaaaataaaaacctggttgaaagatatataaaagaaaatttaacatcacaaggaatgatagtagattatgcaattcatgatgagagtcaagataaaaatggaaatatccattgtcatataatgaccataatgcgaccaataaacgaaaaaggagagttcttagccmagtcaaaaaaagaatatatcctagatgaaaaaggagaaaaagtattaaacaaaaatggaaaaccaaagacaagaaaagtagaactaacaacctggaacgatacaggcaatgtagaaaaatggagagaaaatttttcagatctttgtaacaaatatttagaaagagcaggagcagaaaaaagagtagaccataggagttttaaaagacaaaattcagattatctaccgacaatccatttaggatcagcagcaagtgcaatggaaagaaagggaatagaaactgacaagggaaactataatagagaaataagaaaatataatcaacttgtaaaaacaataaaagaagagataaaaacattaaagggttggataggaaatttattagataacttatctactgcttatgaaaaatttaaggatatagaaagagataaggtaatagacaaccctaaactttttaatctaacaaattatctattaacttattcagaaattcaaaaagaaaaaagtaaatatctaaaaggatatgcaaaaactaataaagaaaaatatgacttcaaaaagctaacaagtgcatatagttatttaagaaaaaacaacatagaaaccataggtcagttacaaacaaaaatagaaactttaaagtctaatagttataggctaaataaaaaagcaaagacaatccataaagaaatggaagatgtagaaaagaaaattctatactatgaaatctacaaagccaaaaaagaagtttatgaagaatatcaaaagaaaaatatattcacaaaagaagcattttataacwaacataagaaagatatagaccgatataaagtagtaagtgggaaattaaaaaaactcctatcagataaggaaaaactaagtcctaaaaagtggaatgaagaaaaaattcttttaatgtcaaatcttgaagaaataaataaagaaaaagacaagataaaagatgaataccaggaaattaatcatataaaatattcagtagattttgtaaacaaagaacttggtatagatttatccatagaaatagataagctaataaaacagggagaaaaaccaagtgtaatagcacagattaaaaagttccaagaccaagtcaataaagataatgaatacagagaaatgatgaaaaacaagaaaatggatcaagaaaga

SEQ ID NO: 7249 - DNA, 123 bp, Streptococcus pneumoniae
  misc_feature (1)..(123): tiling:Spneumo1:WAN024DN2; WAN023OD8 spn015g06_31||||19924 ..20046|-|123 bp|Glimmer 2.02 orf prediction|S.pneumoniae| 23F-1|WAN01UCTZ|ORF|001
gtgataaatatcctctattttctcataattctgacaatttggcaagtttttgatgaattttctgaaaaatatgataaaatgaagaaaattgaaagttctataatgaagttagccaccttacct

SEQ ID NO: 7250 - DNA, 96 bp, Streptococcus pneumoniae
  misc_feature (1)..(96): tiling:Spneumo1:WAN024C3B; WAN0246OJ 208410-32-6_2||||1440 ..1535|+|96 bp|Glimmer 2.02 orf prediction from Patent Seq uences|S.pneumoniae||WAN0246XR|ORF
gtgataataaagttgtttcccctcccagttgaaaaaattgaagaggtgactgaggaaggtccaccactttacaaagtccctgctaaggccctaatt

SEQ ID NO: 7251 - DNA, 258 bp, Streptococcus pneumoniae
  misc_feature (1)..(258): tiling:Spneumo1:WAN024G7U; WAN023LK8 314020_1720||||914762 ..915019|-|258 bp|EGAD orf prediction|S.pneumoniae|R6|NC_0 03098.1|ORF|100
gtgatacttgcgactctgaagattgaccaccaaggcctcgtcagcacccgttccaaatccaggcaggttattctgagtcagcttgattggattatcaacttctcctccgaggtgggtcaaggtctcccgcagggcaattcgcaagaaagcgaaatgttctacaccttctttagaaaattgaacaaaaatcaagtcattggtcttgagattttcagaaatgctaaactcctctttccagagattagccagcgttactga

SEQ ID NO: 7252 - DNA, 1071 bp, Streptococcus pneumoniae
  misc_feature (1)..(1071): tiling:Spneumo1:WAN024FMJ; WAN023ORA pne76_13||||10365..11 435|+|1071 bp|Type 35B1 capsule operon, Glimmer 2.02 orf p rediction|S.pneumoniae||WAN01UCDM|ORF|000
gtgatagaaatgtattattttataaaagtagagaaagatttaaaaaatacagccgggattaaagcgcctgatgatatagaaaaaatttcagaagaattgggaatgaaagaaatacgctttcccaagtttccttttgaaaaaaataaagttatacaaaaactctggcttttttgtgttgtaggttataattggataagtctgttgtggagacttaaaaagaatgatgtagttatttaccaacatccaatgtacggagtgcgtgttgcaaattttgcaattcctttattgaaaaagtataaaaatataaaatttatttcagtaatacatgatttagaatcgttaagaaaaggaatccaaggagtcattgaagataatgaaacaacaaatgctattgcagacaaagagttgttgtcaaaatttgataaagtgatttcccataatccgaaaatgacagaatatttagaagggatagggataaaaaaagaaaatttagttgaattgcaaatattcgactacctagatccatcagaaatagaagaaaagattgaagatggagtggttatagcggggaatctagcaaaaggaaaaagttcatatatatataagttgttagaaaatgaactgaacttcaaattaaatctttttgggccaaattttattaacgaagagctaccagaaaacgttgagtattttggtagtttacctccaaataaattgcctcaaaagctagtaggtaagtttggtttggtttgggacggtgatagtctagaaacttgtagtggaaatactggtaactatttgaagtataataatccacataaaacctcattatatcttgcttcaggaatacctgtaattatctggaaagaagctgcgttagcacagtttattgaagaaaataatgttggtattactgtaaataatttgtcagaaattgagtttgtgatgcaaaatatatctgagggcgaatatttatcaataaaaagaaatacaatgcaattgggtgaaaaattaagaaatggatatttttatcgtcaggcgatatctaagtgcaaaaatgatttcatgaag

SEQ ID NO: 7253 - DNA, 717 bp, Streptococcus pneumoniae
  misc_feature (1)..(717): tiling:Spneumo1:WAN024AWJ; WAN023R1V contig_1431_6||||3608 ..4324|-|717 bp|Glimmer 2.02 orf prediction|S.pneumoniae|6 70|WAN01UDVG|ORF|000
gtgatcaaagcgattcgcaaggaaagtgatgtccttatttctatcgatacttggaagagtcaggtggcagaggctgctttggctgctggtgccaatctagtcaatgatatcactggtcttatgggtgatgaaaaaatggcccatgtggttgctaaggctggagcgaaagtggtcatcatgtttaatccagtcatggcgcgacctcagcaccctagctcgctcatatttcctcattttggttttggacaagcttttacaggggaagagttagctgactttgaaacaaggtcaatcgaagacttgatggagactttctttgaacgagcactagcgagagcagaggaagctgggattgctcaagaaaacatcctgctggatccgggaatcggctttggtctgactaagaaagaaaatttgcttcttttacgggacctggataaactccatcagaagggctatccaatctttctcggagtgtcgcgcaagcggtttgtcatcaatattcttgaagaaaatggttttgaagtcaatcctgagacagaacttggtttccgcaatcgagatacggcttcggctcatgtaaccagtatcgctgcaagacagggtgtagaagtggtgcgcgtgcatgacgtagctagtcacaggatggcagttgaaattgcctctgccattcgtctggctgatgaagcggaaaatttagatttaaaacaatataaa

SEQ ID NO: 7254 - DNA, 672 bp, Streptococcus pneumoniae
  misc_feature (1)..(672): tiling:Spneumo1:WAN024BWN; WAN023R5L contig_1515_2||||222. .893|+|672 bp|Glimmer 2.02 orf prediction|S.pneumoniae|670 |WAN01UDOK|ORF
gtgatctacgacatgagcggtatatacctttcttctcttacaggaataagaaataattccagctcttcgagtaattctctagacaaggaagcttttctcagactccttcttcaagaactggaaatgcaggatccactggagcccatggaaacgaaggacatgatctctcagctttctcagctcacgagccttgaacagatcacgaacctcaccagtgcggtgaaggatttcgtcgaagctcaaacgagtgtgagcccagcccagctcgcttctctgataggaaagtacgtcgtggtgagaaacaacacggtgaatcttgtaggcggtcagtcggacagcatcatattcaacgtggatgaagatgcacatgttgtggttcaaatacttgacgaaaacgggaaattggtgagaacagaagatttaggaactgttcaggtgggagttcacgcctggcagtgggatggaagggatgacaacgggatcagtgttgaagatggcagttacacttaccgcgtttataaactcacatcgagcggactggaggaaatagggggaatggaaggcggagtggtggaagccgttcagataaaggatggaaagggattcgttcttgtgaacggttcactctatcctgttgattctatcctggagatttctcaggagggtgatgcg

SEQ ID NO: 7255 - DNA, 129 bp, Streptococcus pneumoniae
  misc_feature (1)..(129): tiling:Spneumo1:WAN024BUJ; WAN023Q7S contig_1255_8||||2859 ..2987|-|129 bp|Glimmer 2.02 orf prediction|S.pneumoniae|6 70|WAN01UEGK|ORF
gtgatgaagttgaacaaagaagattggctcaggttacttgaaaaggcaatagacaatattcctgaaacggtaactgctatcgcaagtctagtgaccgcaataaccggtcgcaaggcaaaacaaaaagcg

SEQ ID NO: 7256 - DNA, 675 bp, Streptococcus pneumoniae
  misc_feature (1)..(675): tiling:Spneumo1:WAN024BTU; WAN023Q2A contig_1220_23||||113 37..12011|+|675 bp|Glimmer 2.02 orf prediction|S.pneumonia e|670|WAN01UEKO|ORF
gtgatgatgaaattcttaaatggtgactgcatggacatcatgaaacaatatcctgataattactttgacctagctattgttgatccaccatatttttctggtccagaaaaaaggaaattttacgggcggaaaatcagtccaataggtgtaagcagactctatggcgaaatctcagagtggaaaattccaaacagagattattttgatgaacttttcagggtatctaaaaatcaaattatttggggtgtgaactacttcgactattcttttggttctggccgtattgtgtgggacaaagttaatggtcaatcaagtttttcagattgtgagatagcgtactgcagttatcatgatagtactcggctatttcgttacatgtggaatggtatgatgcaaggtaaatcaatctctgaaggtcatatacaacaaggaaataaggcattgaatgaggttagaatccatccgacacaaaaaccagtcaacctttacctttggttattgcaaacttacgcaaaagaaggcgataaaatacttgatactcacgtcggttcagcaagtagcttgattgcttgcggagagctaggatttgactatgttggatgcgagattgataaaagtattttcaacctcgctcaacagagacttgatgcttatgagaagcagttgaagttattt

SEQ ID NO: 7257 - DNA, 144 bp, Streptococcus pneumoniae
  misc_feature (1)..(144): tiling:Spneumo1:WAN024FVV; WAN023O5J spn029h04_140||||1234 97..123640|+|144 bp|Glimmer 2.02 orf prediction|S.pneumoni ae|23F-1|WAN01UCO3|ORF|001
gtgatgattgtaattcttttgtcatttttcctccagaaaataaaaaaaggagaacaatattcaactgttctccaaaatatttttattaaaaagaaaaaccctgccaaattaatttttggtagggtttttggcaggaaactaaat

SEQ ID NO: 7258 - DNA, 111 bp, Streptococcus pneumoniae
  misc_feature (1)..(111): tiling:Spneumo1:WAN024F6V; WAN023NSA spn089a12_6||||3432.. 3542|-|111 bp|Glimmer 2.02 orf prediction|S.pneumoniae|23F -1|WAN01UCWH|ORF|001
gtgatgctctttatactcttcgaaaatctcttcaaaccacgtcaacgtcgccttgccgtacgtatgattactgacttcgtcagttttatctgcaacctcaaagctgtactt

SEQ ID NO: 7259 - DNA, 189 bp, Streptococcus pneumoniae
  misc_feature (1)..(189): tiling:Spneumo1:WAN024BVC; WAN023QA1 contig_1258_3||||564. .752|+|189 bp|Glimmer 2.02 orf prediction|S.pneumoniae|670 |WAN01UEG8|ORF
gtgatgtcatgtagtgaaaatttaaaaaaagaaaaagaattgactgctgctatttcaaatttcaagatagaagtcttacaaaatgatgataaattgagcagtctatcattaagcaacatcaaaaggcaagcaagggatctatatgaatgcttagtatggttgcagtataatgcggaggaatcaggtaga

SEQ ID NO: 7260 - DNA, 666 bp, Streptococcus pneumoniae
  misc_feature (1)..(666): tiling:Spneumo1:WAN024BU3; WAN023Q2J contig_1220_14||||776 6..8431|+|666 bp|Glimmer 2.02 orf prediction|S.pneumoniae| 670|WAN01UEKO|ORF
gtgatgtttgatgacgaaccgtggtttgtcgggaaagatatagcagagattcttggatatgtaaattctagagatgctctggcaaaacacgttgatgaagatgataagctaacgtcgcaaatcgcgacggcaggtcagatgagaaatcagacagtcatcaacgaatcaggtctctactctcttatcttatcaagcaagttgcctcaagctaaggagttcaagcgttgggtgacatcagaggttttgccagctattcgcaagcagggtggttttatccgtgaggacttggacgaggatgcctttatcgctctttttactggccagaagaaattgcgggagcaacagactagcatgctggaagatatcgactacctcaagagcgagcaaccgattcatccaagctatgctcagtcgctcctgaagaagcgcaaagctcgtgtcgtggcttgcttaggtggtattgatagtcctgcttatgctgataagattttcgctcagtcggtatttagacaagctgagattgatttcaaggatcattttaatatcagtcgctatgacttactacccaagaagcatgcggatgccgctcttgcttattggatgacgtgggagccaagcactaataccaagatgaaaatcatgaaattgaactcatttgacgaaggg

SEQ ID NO: 7261 - DNA, 111 bp, Streptococcus pneumoniae
  misc_feature (1)..(111): tiling:Spneumo1:WAN024BOD; WAN023OCL spn019g01_11||||14746 ..14856|+|111 bp|Glimmer 2.02 orf prediction|S.pneumoniae| 23F-1|WAN01UCLR|ORF
gtgattaaggcatcatttaatttcatagacatattttttacctgctatttctttttgttctttttttgtttcttgttgttcttgattggagtgacttttcccttgtttaaa

SEQ ID NO: 7262 - DNA, 111 bp, Streptococcus pneumoniae
  misc_feature (1)..(111): tiling:Spneumo1:WAN024BNE; WAN023OAH spn025g04_17||||10624 ..10734|-|111 bp|Glimmer 2.02 orf prediction|S.pneumoniae| 23F-1|WAN01UCXC|ORF
gtgattattgaatcacacattctattttactattatatgaaaattatccgtatcatgcaacatacggataacctccaaagaatatttttatattatagcaaagctttaaat

SEQ ID NO: 7263 - DNA, 141 bp, Streptococcus pneumoniae
  misc_feature (1)..(141): tiling:Spneumo1:WAN024BS4; WAN023TGV BD140051.1_1||||1169. .1309|+|141 bp|Glimmer 2.02 orf prediction|S.pneumoniae||B D140051.1|ORF
gtgattcttaagactaatactatgctaaagattctatcggttcctacaaatactccaagattttactcccttggtctaaaaaatttagtaaaagagttcttccctataaagtttttcgtacgattccgccaactaactaat

SEQ ID NO: 7264 - DNA, 204 bp, Streptococcus pneumoniae
  misc_feature (1)..(204): tiling:Spneumo1:WAN024BNV; WAN023OBW spn019g01_38||||28415 ..28618|-|204 bp|Glimmer 2.02 orf prediction|S.pneumoniae| 23F-1|WAN01UCLR|ORF
gtgattgaagttaatataaaattcgataattttgaagcgcatggcttttaccaagatgatactaaactaggaaaaattagagatgcaatcatatctcaaatgaataatgggcatgtggttgttttaggggaagatagaggtattctattaaatcctaaagttataaaaagtgtacaatttaaggttgtagaagataaccagatc

SEQ ID NO: 7265 - DNA, 246 bp, Streptococcus pneumoniae
  misc_feature (1)..(246): tiling:Spneumo1:WAN024EXN; WAN023J62 84920_2002||||1141947 ..1142192|+|246 bp|EGAD orf prediction|S.pneumoniae|TIGR4| WAN01UC25|ORF|010
gtgatttctgaaagacttacttttcgatcttctttaactgataaagtacatgcatcagcggtagcgattgattctaaagcagctacaccattgagaagtttttcaaattcttctgtaatttctccacctttaatgatgtcatgtagatattccatttctttatcaatacatgtttgcaaccataatgggcaacgtactcctggtttaccgtacgcaattgctccatccataccacgaccggtatag

SEQ ID NO: 7266 - DNA, 117 bp, Streptococcus pneumoniae
  misc_feature (1)..(117): tiling:Spneumo1:WAN024BV5; WAN023Q9S contig_1258_12||||374 7..3863|+|117 bp|Glimmer 2.02 orf prediction|S.pneumoniae| 670|WAN01UEG8|ORF
gtgatttctgggaaaatcttgggaaaaatctgggaaaatcttgggagaattggagcggaaaaaggtgctaaaatagtattatccaatgattgggcaacgtacagtcatgaggactcc

SEQ ID NO: 7267 - DNA, 1833 bp, Streptococcus pneumoniae
  misc_feature (1)..(1833): tiling:Spneumo1:WAN024BN2; WAN023O7J spn029h04_68||||54984 ..56816|-|1833 bp|Glimmer 2.02 orf prediction|S.pneumoniae |23F-1|WAN01UCO3|ORF
gtgatttgtcttatttttatatttatgaaaggattgcttatgagtggctcattttctgatagtcctacccatgatgacaaatttagcattgagaactatattaatggtttatcaaattttattattgagtgtgaaacacccttaacggttgccattcaaggagactggggtactggaaaaaccagtattatgtaccaagttgaaaaaagattaaatcctgaaaaacaagataaaaaaattcaaactatttttttcaacacttggcaatactcacagtttgatatgggaaataatttagcagtagcattaattacagatttaattagtgagttgaatgtagaagattcaaaaaagaaacagttttttaaaaaagcaaaaggtgcgctatctaaaggcttagaatatgtaaatttagactttggcatactaaatggagaaaaattaactgaaaaatttcaagatttaatcataggttttggcgagagaactgatgatattaagcatttaaaagaaaacttacaagacattattaatgatgccattaaggaaaataaaagtgatcgaatagttatttttattgacgatctggatcgattagttcctgaaaaggccatagaactcttagaggttttaaaattatttttagactgtgaacattgcgtctttgtattggctatagattataatgttgttgttagaggtgcaaaaagtaaatatggtaaagatttagatgatgaaaaggggaaagctttctttgaaaaaattattcaagttccatttacagtaccagtagcaaattatgatttgcagaattttattgaatcctcacttaaaaaacttgatttttgttttgataaaaataataaagaaagaaatcagttagaaacaattactcaattaattagatattctataggaaataatcctcgtagcattaatagactttttaattcagtcagcctcttaatgtatatcaataatggagacaaagtagatcatgatgaaaaattgatgatattagcaatggtatgtttccaattaagattcgaggaagcatacaactatttattgacagcatataataatagtcccgaagatagcgatgatatagaatcttacttgatagatttattagaaaattcttttgaattattagatgatgaagtttattataattcattagtatcgcttcttggaaaatttacatttaaagataagaaggatagagatgattttaccaatttctatagaactttgaaggaattacttggatataatgaacaaggattaaccatggaacaatttaacaaactaattgaaaaaatgacattctcaaatgctgtttcaattggaaatacagatacaattacagcagataagaaaaaacagaatcatgctccaaacgaagatgtgcagtttgtaattcgtaaactatttaatactttagttggtgatgaaaattactttgatcttaaaaagccagagttattcggtaaagaaacacgagaaaaacgagaagctcctttatctgaggaatttatttcgattccaaatgaatttgatagaatcagattaacaagaggaaaaggacaaggtttaaatatatactcttcacataataaatcaaattttatttatatttcaggggatacgcacggtcgaatgcttaatgatggaatggcaattgttgttaataacaatttggtagaaaagataaaagataatattttagctagtgacttgcgaagtgaagaactttatcacgaatttgagatgaattttagagataacttaaataaactattatctaaggcaagtaaaatattaaataat

SEQ ID NO: 7268 - DNA, 81 bp, Streptococcus pneumoniae
  misc_feature (1)..(81): tiling:Spneumo1:WAN024C2H; WAN023SL8 NC_003098.1_942||||73 7752..737832|+|81 bp|Glimmer 2.02 orf prediction|S.pneumon iae|R6|NC_003098.1|ORF
gtgattttcattttctaccttttcctatttggagacaaaaaaacagcctctatggactgtttcttatttagcaagtttagc

SEQ ID NO: 7269 - DNA, 240 bp, Streptococcus pneumoniae
  misc_feature (1)..(240): tiling:Spneumo1:WAN024FVE; WAN023L8F 313814_2266||||121785 0..1218089|+|240 bp|EGAD orf prediction|S.pneumoniae|R6|NC _003098.1|ORF|100
gtgatttttaaagttgtatcactaatttgtttcattttcattgctagtaacctcatactttcagttctatctattatactagatttttacgattttatcaaaagaaaatttctgcagacagatagaaaaagccttcaaaatcggctcttagccgactttgaagaccttatacatcagaatacttataatttaaaggttgctacaccgaggatagaacgatttaagtttctgagaatttga

SEQ ID NO: 7270 - DNA, 426 bp, Streptococcus pneumoniae
  misc_feature (1)..(426): tiling:Spneumo1:WAN024BV6; WAN023Q9T contig_1258_11||||332 2..3747|+|426 bp|Glimmer 2.02 orf prediction|S.pneumoniae| 670|WAN01UEG8|ORF
gtgcaaatagagttattagatatcatcgacgaaaagaaaaccagaaaggaagctatcaaagtactaaaaaaatacagtcgtctgagacggatagctggagaagaatacgcccccaaaataacaatatcctactcacttgaaccaaggtcatcaagtggtcagacaagtaagcaagtagaaagcatggtcgtgcgtagagtgtcagctcagcaggatttagaactaatcgctaaagcaatcaacaatctttctgatatgggatacacacgtatcctaatcgaacgatattgcaggaagaaaaggagggaagactacagcatttattcagaactaggctactcatctagtgagtattatcggatattgaacaaagctctactagagttcgcggagtcttatcaagcgagcaaccttttagtttataag

SEQ ID NO: 7271 - DNA, 213 bp, Streptococcus pneumoniae
  misc_feature (1)..(213): tiling:Spneumo1:WAN024C3C; WAN0246OL 208410-30-4_1||||54.. 266|+|213 bp|Glimmer 2.02 orf prediction from Patent Seque nces|S.pneumoniae||WAN0246XS|ORF
gtgcaacctacacaagctgagcaaccaagtacaccaaaagaatcatcacaacaagaaaatcctaaagaagataggggagcggaagagactccgaaacaagaagatgaacagccagcagaagcccaagaaatcaaggttgaagaaccagtagaatctatagaggagactgtcattcaacctgttgaacaaccaaaagtggaaacgcctgctgtt

SEQ ID NO: 7272 - DNA, 180 bp, Streptococcus pneumoniae
  misc_feature (1)..(180): tiling:Spneumo1:WAN024ERV; WAN023R4N contig_1483_1||||44.. 223|+|180 bp|Glimmer 2.02 orf prediction|S.pneumoniae|670| WAN01UDQR|ORF|000
gtgcacctttcgcatcataacttccctattttgggcgaccctctctataacagcaattcaaagacaagtcggcttatgcttcatgcctttcgactttcctttacccatccacttacattagaaaaattaaacttcactgccctctcaaatacttttgaaacagaattaaaaaagaatgga

SEQ ID NO: 7273 - DNA, 99 bp, Streptococcus pneumoniae
  misc_feature (1)..(99): tiling:Spneumo1:WAN024B8Z; WAN023SIW NC_003098.1_1835||||1 433355..1433453|+|99 bp|Glimmer 2.02 orf prediction|S.pneu moniae|R6|NC_003098.1|ORF|100
gtgcagttcatcatttcaacatcctatattatgcgtttttcttatttgaaatactttttactcaacctctttatactcaatgaaaatcaaagtgcaaac

SEQ ID NO: 7274 - DNA, 228 bp, Streptococcus pneumoniae
  misc_feature (1)..(228): tiling:Spneumo1:WAN024CGP; WAN023ME9 314317_112||||54713.. 54940|-|228 bp|EGAD orf prediction|S.pneumoniae|R6|NC_0030 98.1|ORF|100
gtgcatcttctcagctgtcgcagcatccacctcacggttaagaacagcgataccaccaaagatagacactgggtcagactcataagcataatcccaagccgtctcgatgtcatccgcctggccgataccacatggattcatatgcttgagagccacaacggttggacggtctttgaagtcacggataatacgaatggcagcatctgcatcgcggatattgttgaatga

SEQ ID NO: 7275 - DNA, 228 bp, Streptococcus pneumoniae
  misc_feature (1)..(228): tiling:Spneumo1:WAN024CGO; WAN023I2R 87191_3701||||2108319 ..2108546|-|228 bp|EGAD orf prediction|S.pneumoniae|TIGR4| WAN01UC25|ORF|010
gtgcatcttctcagctgtcgcagcatccacctcacggttgaggacgacaatcccaccaaagatagacactgggtcagactcataagcgtagtcccaagcagtctcgatgtcatcagcttgaccaattccacatggattcatgtgtttgagagccacaacggttggactatctttgaagtcacggatgatacggatagcagcatctgcatcacggatattattaaatga

SEQ ID NO: 7276 - DNA, 78 bp, Streptococcus pneumoniae
  misc_feature (1)..(78): tiling:Spneumo1:WAN024BW2; WAN023QN3 contig_1321_4||||3287 ..3364|-|78 bp|Glimmer 2.02 orf prediction|S.pneumoniae|67 0|WAN01UE94|ORF
gtgcatgtgtcttttctcctttttaaaattattgtttctacctattgtatcacaaacttgggcaatagcctagcagaa

SEQ ID NO: 7277 - DNA, 81 bp, Streptococcus pneumoniae
  misc_feature (1)..(81): tiling:Spneumo1:WAN024D9C; WAN023SB0 NC_003028.1_1665||||1 261298..1261378|+|81 bp|Glimmer 2.02 orf prediction|S.pneu moniae|TIGR4|NC_003028.1|ORF|010
gtgcatttttttgatatcaaaataatcaatctcctttatgagctaattcttctctacaagctctttggagcagaacaactg

SEQ ID NO: 7278 - DNA, 354 bp, Streptococcus pneumoniae
  misc_feature (1)..(354): tiling:Spneumo1:WAN024BWX; WAN023RIG contig_1565_5||||6610 ..6963|+|354 bp|Glimmer 2.02 orf prediction|S.pneumoniae|6 70|WAN01UDIJ|ORF
gtgccagaacaatacagagacattcgcaaagaggttaatttgactgcaaatgaattagaaatgattgacataatgatgaaaaataaaggatttgaacacttttcttcatttgccagaaacaagttactggagaatgagttagaaatgactgctgaaaagtggttcaccttctggcattctcaaaagctggaacaaatcagtcgtgatgtttatgagattttaatcttatcaagggcagaacatcaagtcacccaagaacatgtatccattctcttaacctgtgttcaggaattgattcaagaaatagggaactccattcctcttagtcaagacttccgtaaaaaatacatgagg

SEQ ID NO: 7279 - DNA, 96 bp, Streptococcus pneumoniae
  misc_feature (1)..(96): tiling:Spneumo1:WAN024BM7; WAN023NQK spn093a10_4||||2941.. 3036|-|96 bp|Glimmer 2.02 orf prediction|S.pneumoniae|23F- 1|WAN01UCTO|ORF
gtgccctctgagattttagaacacgatgtacagcatcaagggaaaattctcctccttttacaaatacattcactactagatcaaagtttggataaa

SEQ ID NO: 7280 - DNA, 243 bp, Streptococcus pneumoniae
  misc_feature (1)..(243): tiling:Spneumo1:WAN024C2N; WAN023L0L 314915_2599||||138369 8..1383940|+|243 bp|EGAD orf prediction|S.pneumoniae|R6|NC _003098.1|ORF
gtgccgttttgcccctcagttattgttactgttggagttttcccatcagcacccttttgtccatcctctacaaatgttgtttgtggacgaccttctactggtgtaattgttactaatacaccatttttaacagcaattagagattttccatctttacctggagttcctggattaccttgttctccttttggtccttgtggtcccgctggtcctctttgtccatctgctccttttggtccttga

SEQ ID NO: 7281 - DNA, 75 bp, Streptococcus pneumoniae
  misc_feature (1)..(75): tiling:Spneumo1:WAN024BGC; WAN023PS4 pne15_19||||16045..16 119|+|75 bp|Type 9N capsule operon, Glimmer 2.02 orf predi ction|S.pneumoniae||WAN01UCJT|ORF|000
gtgcgagaataccgcacttatgaacaaattgcggctgattttggtattcacgaaagcaacttaatccgtcggagc

SEQ ID NO: 7282 - DNA, 201 bp, Streptococcus pneumoniae
  misc_feature (1)..(201): tiling:Spneumo1:WAN024BGD; WAN0243LQ spr1574|IS1381-trunca tion|15903616|NP_359166.1|1554515..1554715|-|201 bp|Degene rate transposase (orf1)|S.pneumoniae|R6|NC_003098.1|ORF|10 0
gtgcgagaataccgcacttatgaagaaattacggctgattttggtatccacgaaagcaacttaatccgtcggagccaatgggttgaagtaactcttgttcaaagtggtgttacgatttcaaaaactcatcttagtgctgagaatacggtgattgtggatgcaacagaggtaaaaataaatcgtcctaaaaaaatcaactag

SEQ ID NO: 7283 - DNA, 117 bp, Streptococcus pneumoniae
  misc_feature (1)..(117): tiling:Spneumo1:WAN024BXE; WAN023RP8 contig_1583_14||||436 6..4482|-|117 bp|Glimmer 2.02 orf prediction|S.pneumoniae| 670|WAN01UDGB|ORF
gtgcgcctgcttattcctagacgtcgtgcaatctcgtcaggatacacaacccaatcagacttattcatcaagattactgtaaggatacctatcgttgttgcctttaaacgtttgtct

SEQ ID NO: 7284 - DNA, 96 bp, Streptococcus pneumoniae
  misc_feature (1)..(96): tiling:Spneumo1:WAN024DUM; WAN023O2U spn047b01_22||||16826 ..16921|-|96 bp|Glimmer 2.02 orf prediction|S.pneumoniae|2 3F-1|WAN01UCNY|ORF|001
gtgcggacggtttcagtgctatcaaggacaaaagcacgaaaggctccgctttctgatatagttttaataattttatccatagctactattttagca

SEQ ID NO: 7285 - DNA, 291 bp, Streptococcus pneumoniae
  misc_feature (1)..(291): tiling:Spneumo1:WAN024GIC; WAN023JWD 83233_750||||424936.. 425226|-|291 bp|EGAD orf prediction|S.pneumoniae|TIGR4|WAN 01UC25|ORF|010
gtgcggactcgtaaaacgagacgttctgtttcgattttatctggcagctcagttcttgccatccttcttcctcgcttttttgatgaaactgcccttcatatctacacgcttgtccagatagcgataaacgcgctgatatccatctcccatgaaataggttggggcaaacagttgatttttaaaatgtcccttttcatccaggagttctggggcaacaagtcgctcaagaatcttggcaaagatgtggcaaataccgtcttcctcaacaatcctatctacccgacaatctaa

SEQ ID NO: 7286 - DNA, 63 bp, Streptococcus pneumoniae
  misc_feature (1)..(63): tiling:Spneumo1:WAN024BZO; WAN0243GP spr1755||15903797|NP_ 359347.1|1723091..1723153|-|63 bp|Hypothetical protein|S.p neumoniae|R6|NC_003098.1|ORF
gtgcgttttgaagttctatctacaagcctaatcgtgactaagattgtcttctttgtaaggtag

SEQ ID NO: 7287 - DNA, 468 bp, Streptococcus pneumoniae
  misc_feature (1)..(468): tiling:Spneumo1:WAN024DDV; WAN023RPH contig_1583_4||||1614 ..2081|-|468 bp|Glimmer 2.02 orf prediction|S.pneumoniae|6 70|WAN01UDGB|ORF|000
gtgctacggacatctgaggagcttctggagagtcaagaaaacgaagaagaaacgaagataaacgaagtatcggagaacatcatcagactggacgactacagacagactacttaccgacgtgttactggggttgtctctgctggtagtggttcgatacaggacgacgatttagatatggaggtttcgttctatgaggatgaaatcccagacgactacgacgctatcgcttatgtcgtcggcaactctatggagccaaagataaagaatggtgactatctttttataaagaatacccaacaggttgattataacactatcggcatcttccaagtagacggcgctaactatgttaagaaactgcgtcagggatatctggaaagcttgaatccagattatgaggatatacacctagacgaaagcaacgacatccgaactattggggaagttgtcagtgtgtatagggagaaa

SEQ ID NO: 7288 - DNA, 267 bp, Streptococcus pneumoniae
  misc_feature (1)..(267): tiling:Spneumo1:WAN024ASU; WAN023Z39 AL449925.1_239||||232 787..233053|+|267 bp|Glimmer 2.02 orf prediction|S.pneumon iae||AL449925.1|ORF
gtgctaggaagcttatcttttttcctaagaaatgagaccaaaattcaattactcaagatgctaagccgtcaagcaactcaaaggaaaataggaaatcgaacgacggagcgactgctcctaggcagatttatctttttccacagagttgtaggcgtgttcagttttcaagatacatcattagaaagatttaatattaaagtatctaaacctttcacgccaatcgctatcgggcgattagctaaatgctttactaactctttcgtcaaa

SEQ ID NO: 7289 - DNA, 282 bp, Streptococcus pneumoniae
  misc_feature (1)..(282): tiling:Spneumo1:WAN024EWN; WAN023ILL 86066_2853||||1620248 ..1620529|+|282 bp|EGAD orf prediction|S.pneumoniae|TIGR4| WAN01UC25|ORF|010
gtgctagtccagtcgtatccagttgaccccaatcaaagggctggccacttcctgccacaggggcatcaaagagtagataatctgcctgagaattggggacatgcccatttccatctacctgcacagcctgaatactggcacaaggcaaattctcaaataaatcatctgccacctgaccgtgaacttgaaccaagtccaagccaactttgtcaatcgcttccagcagttctacccgacttggtgaaacaaatactccaacctttttcacatctgcaggaataa

SEQ ID NO: 7290 - DNA, 813 bp, Streptococcus pneumoniae
  misc_feature (1)..(813): tiling:Spneumo1:WAN024BTY; WAN023Q2E contig_1220_19||||940 6..10218|+|813 bp|Glimmer 2.02 orf prediction|S.pneumoniae |670|WAN01UEKO|ORF
gtgctcggtatgtctgaaattaagtggataaaaatcacaaccgatatttttgacgatgaaaagatttgcctgattgatgccttgcctgatcctgatgccatcttagtgatatggttcaagattttgacacttgctggaaaacataacagtaatggtttgttgatgatgactgataaggttcactatacagatgaaatgttagctactatttttcgtagaccattgaatacagtaagaatggctattggagtttttgaacagtttgggatgattgagattatcgatggtattattagcttgccaaattgggaaaaacatcaaaacgttgacggaatggagaaaatcaaggaacagacacgtaaccgtgtagccaaataccgtaaaaaacaaaaaaatcttgctcttggtaacgttacaggtaacgttacagtaacggacggtaacgcactagaagaagataaagataagaataagaatagattagataaagataagaataagaaaagaataactactactagtagtggtagtgaagaaaatatcttagaactttttcaatctgagtttcgtagactcttatctggatttgaaattgaagaaatcaaccatctactaaatgagaataatgtggatttggtgaaagaagcattgaagactgctattaactcaggaaagccgaacatcaaatatattggtgggattttaagaaattggcagatgaacaatgttaccactgttgaacaggttcgtcaatcggaaaagaagaacaaggataagaaagaagaacaggaggccaaggacgaatgggggtac

SEQ ID NO: 7291 - DNA, 78 bp, Streptococcus pneumoniae
  misc_feature (1)..(78): tiling:Spneumo1:WAN024CJZ; WAN023OA2 spn026e08_15||||9930. .10007|-|78 bp|Glimmer 2.02 orf prediction|S.pneumoniae|23 F-1|WAN01UCWX|ORF|001
gtgctttctgggattccaaaccattctggcaaatccttcaaaacctcaacgacaactgccttttttgattttcatcct

SEQ ID NO: 7292 - DNA, 141 bp, Streptococcus pneumoniae
  misc_feature (1)..(141): tiling:Spneumo1:WAN024BLI; WAN023NCC spn143g10_9||||8304.. 8444|+|141 bp|Glimmer 2.02 orf prediction|S.pneumoniae|23F -1|WAN01UCOL|ORF
gtggaatattttatagaaatagaaccaaaaattatactagatatatatatgtattttttcgaccaatctgaaatcttaagtttaaattttatatttttttatacttattatagttttttgtcatctcctcttgactctcgt

SEQ ID NO: 7293 - DNA, 261 bp, Streptococcus pneumoniae
  misc_feature (1)..(261): tiling:Spneumo1:WAN024BZL; WAN023JZK 83018_590b||||331605. .331865|+|261 bp|EGAD orf prediction|S.pneumoniae|TIGR4|WA N01UC25|ORF
gtggaatttccgactttattgataaaacagcatgtaataaaaggcattttaaagatagtaatgagtattggtggagttttatggcttattttttttattagaaaatatttttttatcaaatattgtcgttctataaaaaaatatgtgataaaaatatctattgtgatggaagttgttttaatttatactaggatagttaatagtaatactatactatactatattgtatacaagtgtgtcattgccaggttgagaagatag

SEQ ID NO: 7294 - DNA, 204 bp, Streptococcus pneumoniae
  misc_feature (1)..(204): tiling:Spneumo1:WAN024DHL; WAN023XV3 AL449945.1_11||||6828 ..7031|+|204 bp|Glimmer 2.02 orf prediction|S.pneumoniae|| AL449945.1|ORF|000
gtggacttctcagcgccgccactttctgtaaaatgtgggattcaaaacacctctaatggctctattgtagcaagtttttctcggaaatgcaaggctcaagaaaaattacttgaacttgatgccattttctttcaatttcttgatggtagctgggccgattcctttcaaggcaaggagttctttttcagtccagtttttgaaatc

SEQ ID NO: 7295 - DNA, 429 bp, Streptococcus pneumoniae
  misc_feature (1)..(429): tiling:Spneumo1:WAN024CSD; WAN0246NL 209199-23-5_9||||3224 ..3652|-|429 bp|Glimmer 2.02 orf prediction from Patent Se quences|S.pneumoniae||WAN0246WW|ORF|000
gtggaggggctgtattcggaagccattccaaatgtgcaagttcaaaatggaaaagtcctggacatcaatcttcagggtggagattcgtggaagaagcagcctatctttcttatggaaaccattcgtggggctggtggtttgccagttggaacttcaggtaaagggatgctcatgttgtcaggagggattgactcacctgtagcaggttatcttgctcttaagcgtggggtggatatcgaggcagttcactttgctagtccaccatatactagtcctggtgccctcaagaaagcgcaggacttgacccgtaaattgaccaagtttggcggaaatatcacttgtcttagtccagagaaatggcggtgctgcgagccatctaagctaggaagtcatgctactcaatcatacaattgcataagaacaagagaa

SEQ ID NO: 7296 - DNA, 240 bp, Streptococcus pneumoniae
  misc_feature (1)..(240): tiling:Spneumo1:WAN024ETU; WAN023KLL 313900_3287||||176095 5..1761194|+|240 bp|EGAD orf prediction|S.pneumoniae|R6|NC _003098.1|ORF|100
gtggagtctgagaatccgccaaatctagcaaaatatcctctgaaatccagacagtttgcggaaaagcagctaactgatctcgataattttctagggcaaagattttctcaatcgtcactccagcttggacagcttcttcaaacaagtgccagccttcaatcaaataggcagacttgcggtattttttttggtgtaatttcttggcattttttaccacagaattggcttttgaggttataa

SEQ ID NO: 7297 - DNA, 120 bp, Streptococcus pneumoniae
  misc_feature (1)..(120): tiling:Spneumo1:WAN024BBW; WAN023REV contig_1552_4||||2705 ..2824|-|120 bp|Glimmer 2.02 orf prediction|S.pneumoniae|6 70|WAN01UDKA|ORF|000
gtggatagaactgacgaagtcagtaaccatacctacggcaaggcgacgttgacgtggtttgaagagattttcgaagagtataagtctctacataataaaacgcatattaccaaggttgtg

SEQ ID NO: 7298 - DNA, 516 bp, Streptococcus pneumoniae
  misc_feature (1)..(516): tiling:Spneumo1:WAN024BYX; WAN023S63 contig_464_1||||20..5 35|+|516 bp|Glimmer 2.02 orf prediction|S.pneumoniae|670|W AN01UD2E|ORF
gtggatatcgacttcagtcgtaagttcaccgagggagcttatggtgaaatctctcgtgagtttaatattggtaagaaaggttttgctgcccacgtagagtatgatggtggtctgaaccgtttcggttcgttccagcaggccgcattggttggtgctgcgtggaatggtcataatgctgacttctcaaagacctattctgtacagttgatgtataagcgcttctttaagagctacgacaataccagcgcctataattcggtacagctcactggtgtatggggcctgaacttcgctaacaagaagggtaccttctctggtttcattgatttctggcgtggcgaaaaggccgacggtcacggtcagctggttctcttgaccgagccgcagctctggtacaatgccaccgagcatttcagtgtaggtaccgaggttgaggttagcaacaacttcatttataacacctataacgataaaaagttcttcattaacccaactttggctgttaagtggaacttc

SEQ ID NO: 7299 - DNA, 384 bp, Streptococcus pneumoniae
  misc_feature (1)..(384): tiling:Spneumo1:WAN024BME; WAN023NTX spn068b06_21||||20939 ..21322|+|384 bp|Glimmer 2.02 orf prediction|S.pneumoniae| 23F-1|WAN01UCUD|ORF
gtggatgagctggccaaacaaggctatgttgagggggaaaatattgagattgatttgcaaaatgcacagggagaacaaagaaatctaaaaacgatttcccagcaactagcagaatccagcgatgtcgttctagccatcgcaaggccttctgctcagagcttggccaatacgacgcaaacgacaccagttatcttttcagctgtaacagacccagtcagtgccaagttggttgagtcaagagaacatcctgggggcaatgtaactgggacaagcgatcagtcatcagatgccatttcaacccaaatcaatttgataaagaaagtgttgctaaaggctaaaacgattggaatcctctatactcagagcgagcccaattcggttgtt

SEQ ID NO: 7300 - DNA, 1063 bp, Streptococcus pneumoniae
  misc_feature (1)..(1063): tiling:Spneumo1:WAN024ATF; WAN0240PR |pbp2X||BAA75529.1||| 1063 bp|penicillin binding protein 2X|S.pneumoniae||AB0112 06|ORF|000
gtggatggcaaggatgtttatacaacattgtctagtccgctacaatctttcatggaaactcagatggatgcctttctagaaaaagtaaaaggtaagtatatgaccgcgaccttggtcagtgcaaagactggtgaaatccttgctaccacccaacgacctacctttaatgcagatactaaggaaggacttaccaaggactttgtttggcgtgatatcctctatcaaagtaactatgagccggggtcaaccatgaaggttatgacgctcgctgctgctattgataataatacctttccaggaggagaagtcttcgatagtagtgagttaaaaattgcagatgtcacgattcgagattgggacgtcaatgaaggattgactggtggcagaatgatgactttttctcaaggttttgcactctcaagtaacgttgggatgaccctccttgagcaaaagatgggagatgctacctggcttgattatcttaatcgctttaaatttggtgttccgacccgtttcggtttgacggatgagtatgctgggcaacttcctgcggataatattgtcaacattgctcaaagctcatttgggcaaggaatttcagtgacacaaacacaaatgcttcgtgcctttacagctattgctaatgatggagttatgctggagccaaaatttataagtgctatttatgatactaacaatcagtctgtacgtaagtcacaaaaagaaatagtaggaaatcctgtttccaaagaggcagcaagcacaactcgaaatcacatgatcttagttgggacggaccctctatatggaactatgtataatcactacacaggaaagccaattataacagttcctggacaaaatgtagcagttaaatccggtacggctcaaatcgctgatgagaaaaatggaggatacttggttggttctaccaattatattttctcagttgtgactatgaatcctgctgaaaatcctgattttatcttgtatgtaacggttcaacagcctgagcattattcaggtatccagttgggagaatttgccaccccaatcttggagc

SEQ ID NO: 7301 - DNA, 90 bp, Streptococcus pneumoniae
  misc_feature (1)..(90): tiling:Spneumo1:WAN024BWS; WAN023RCW contig_1545_4||||4667 ..4756|-|90 bp|Glimmer 2.02 orf prediction|S.pneumoniae|67 0|WAN01UDLC|ORF
gtggatttttttatttttattgagtatactttgaaaaatcaagcttgtgaaaataatctcaaaaattttgcaaaaagggttgttattttc

SEQ ID NO: 7302 - DNA, 744 bp, Streptococcus pneumoniae
  misc_feature (1)..(744): tiling:Spneumo1:WAN024BNZ; WAN023OC7 spn019g01_26||||24078 ..24821|-|744 bp|Glimmer 2.02 orf prediction|S.pneumoniae| 23F-1|WAN01UCLR|ORF
gtggcacaaaaactaactaaactaaaagatatttttaaacatgtttcaagtattgatctaggtaaagagattttatttgaagatcttgagctttacaataaagaaacagaaacaagcaaacaataccaatctatcgaggaggcagaaaatgacctatatttgatggaaaaagtaaataaaatcaatttcactctaggcggtggacgtggtgcaaattttgagaaagggaaagacggtaagtatccgggttttagaggtgctggtggtgcaagagatagtgggagctcaaaagccttacatccagcatctttaaacaatcaagggcgcttttcaagtgttgagggagctattcagggatttattaaaaaacacggtggctctagaacagaatacagtacagcagttgactctcaaggctttgctcataattatgtacacggtgggaaaaacagcgtacaaattttgcctatctctggtggatttacagcaatacataaccatccgaatggcagcaatttctcaagtacagatttacatagctttgcagcattaaaaggtatgaatacactagttgcaacgaatagctctaaagcgtatcgaattacaaaaggggctaactttgatgctaaaggctttgataaagctgtgagcaagtcacgttttactacaaaagattacaataaaggagctgacctatggctcaagaaaaacgctaagaaatacgggtacacttactcatacgag

SEQ ID NO: 7303 - DNA, 312 bp, Streptococcus pneumoniae
  misc_feature (1)..(312): tiling:Spneumo1:WAN024BR6; WAN0240CN |||AAC98438.1|||312 b p||S.pneumoniae||L29324|ORF
gtggcatggctaagtggatgcttctttttatcagaacattccagttctctttgggcagaaaaaaataaagaagatatctccatttccctatcattggaagagaaagttctatttgttcgtcaactttatacgaatgtattccctgcaacttttgtttttaagttttctaatcaaagaaaagtagtatcaggtattgttaaagagattggaaaagagtttatatctataaaatcagacactggttttcttcgattaaaatgggaagatatactcgatatacagatagaaggggaggaattacatgaatcgtaa

SEQ ID NO: 7304 - DNA, 2463 bp, Streptococcus pneumoniae
  misc_feature (1)..(2463): tiling:Spneumo1:WAN024BUL; WAN023Q98 contig_1258_33||||144 04..16866|+|2463 bp|Glimmer 2.02 orf prediction|S.pneumoni ae|670|WAN01UEG8|ORF
gtggcgaccgaattaggaaaagcctatgtacaaatcattccatctgctaaaggcattagtggcatgattcaaaaggaaatgggtggtgaagttgcctcagctggcgttagcgcaggcgaatccctcggttctaaaatgatgggggctgtttcaggagttattgctgcagctggaattggtaaagcaatcggagcatcgataaacgaaggggcagcacttcaacaatctcttggaggggttgaaaccttatttaaagactcagctgataaggtcaaaggatttgcgaacgaggcttacaagacaacaggtctctcagccaatgcctatatggaaaatgttacaggtttctcagcaagcttgctacaatctcttggtggagatacagataaagcagcagaaacagctaacatggccatgattgatatgtcggataatgccaataagatggggacatctatggaaagcattcaactggcttatcaaggttttgccaagcaaaattatacgatgctagacaaccttaaattgggttatggtggtacgaagcaagaaatgcaacgacttttggcggatgctgaaaaattgacaggtgttaaatatgacatcaataatctatcagacgtttatagcgccattcacactatacaagagaatttggacatcactggtacgacagctagagaggcagcaactacatttacaggttcatttgaatcgatgaaatcagctgctcagaatgtgcttggaaagttgtctttaggtgaagatattcaacctgcactacaagctttgatggaaacgacatcaacatttcttttcggaaacctaattccaatgattggaaatattctgaaacaaattcctatccttattttgggagggataaagggtgttttcagtggaatctttggtgaaggtctaggaagtatcatgggtagtatcgttaccgctcttggttctgcatttttagcgtttaaagcattttcgacagtctcgggattgctatctggaatacctgctgtcttaacgacaattaaaacagcagtcacgggtctatttactgtaatgagtgccaatcctattggaattgccatcgcagcgattgcaggactaactgcaggtttggtttatttcttcactcaaactgaaacaggtagacaaatctggtcatcttttgtagcttggatcaaacaggcttggcaggggattgctgatttctttgtaaacctttggtctggcatctctgaaggtgctagcacattgtgggatggagttgttacagcctggaatgctgttgtaacattcttttctgacttgtgggtaaggattcaagaagctgcatctgtggcatggacagctatcacaacagcagtgatggctattgttcaaccgttcattgatggattcatgaatatttggaacaatatttcagatggtcttacccaaatttgggaagggattaagatgattttccaaggcgtttgggaattcatcaagtctattttcttgggtgctattctcatcatcatcaaccttgtgacagggaattttaaccagctgggggctgatctttctctaatctggaaagggattaaaaatagtatctctatgatttgggaagggattaaaacatacttctctggagtcgtggatgttatcgtaggttatggtattgctatttttgaaaacttttctaccactcttagtacaatttggaaagggttgtctgctgcaggtaaagctatctttgatagttttgctcagatattatctaacatctggaatacaatcaaatctgtagcaagcagtgcttgggaagggttgaaatcaaccgtcttaggtctgattgacggacttgtccaaggagctaaaaatgcatgggaaagcatgaaacaaggtgttcgtgaccttgtaagtaatgttacgagtatctttgatggcattcgaaacattgacctatggtcagcaggtaaggctatccttgatggattcctaggcggtttgaagtctgcttggggagcagtaactgacttcgttggtggtattgctagctggattcgtgaccacaaaggtccgattgagtatgaccgcaagctcttgattcctgctggtaatgcgattatgcaaggtttggatagagggttgcaggaccgtttcaaagatgttaagaaatctgtcagtggaatggctggcgaaatttcaaacgcattttcaaacgatgattttggcttgagtggaacaccgactattgccaaaaatattgaagcaagtttggccatgccaagcgctcaaatcgaggcgaaagacagtcaaaccgtgtctgagatagcgattctgagagcaagtatggagaaaatccttactgctatccttgaaaagccgtcagatacttacctagacgctgataaaatttcaatgagcgtctaccaacgtcaaggtgcgatttatgctagggagggaatg

SEQ ID NO: 7305 - DNA, 108 bp, Streptococcus pneumoniae
  misc_feature (1)..(108): tiling:Spneumo1:WAN024C2G; WAN023SKM NC_003098.1_1204||||9 37834..937941|-|108 bp|Glimmer 2.02 orf prediction|S.pneum oniae|R6|NC_003098.1|ORF
gtggctccgcccccaaaccccaaggtaaaattcttagttggatttttaaaagttgagaaaagtatagcagaagaaatttggggaagttatcacaaatcaagtaaggac

SEQ ID NO: 7306 - DNA, 225 bp, Streptococcus pneumoniae
  misc_feature (1)..(225): tiling:Spneumo1:WAN024FEM; WAN023KSR 313870_2933||||156183 6..1562060|+|225 bp|EGAD orf prediction|S.pneumoniae|R6|NC _003098.1|ORF|100
gtggctcttacagttaggacagacctgaggaatatccttcgagaaaccacaataatggcagttcatagtcttggtatccatatgcaaggtcagagaaatatcacagttgggacaagtatccaccgtcccacactcccgacacatgacaaagctagaataaccacggcgattgagcatgagaaccatctgctcttttttaaccagacggtcttggatagcctctag

SEQ ID NO: 7307 - DNA, 123 bp, Streptococcus pneumoniae
  misc_feature (1)..(123): tiling:Spneumo1:WAN024BLV; WAN023NNC spn097d12_48||||38331 ..38453|+|123 bp|Glimmer 2.02 orf prediction|S.pneumoniae| 23F-1|WAN01UCN2|ORF
gtggctgtacttgattcacttctgcaatcaattcttgaacgcaagtcaataagattgagacgtgctcttgagtcacttgatgattttctcttgcgacaaccagaacttcatacacatctcgac

SEQ ID NO: 7308 - DNA, 114 bp, Streptococcus pneumoniae
  misc_feature (1)..(114): tiling:Spneumo1:WAN024BLM; WAN023NF9 spn132b05_8||||4368.. 4481|+|114 bp|Glimmer 2.02 orf prediction|S.pneumoniae|23F -1|WAN01UCLP|ORF
gtggctttttatttctcaatcaagattttcagacaaacatcagccatccaaaaaaaccttgagcgttaccactcaaggtttttagcagtcttttccatcataggaaaatcattc

SEQ ID NO: 7309 - DNA, 477 bp, Streptococcus pneumoniae
  misc_feature (1)..(477): tiling:Spneumo1:WAN024BYP; WAN023S16 contig_1623_10||||392 9..4405|+|477 bp|Glimmer 2.02 orf prediction|S.pneumoniae| 670|WAN01UDAF|ORF
gtggctttttttgattattcgaagggtggtgatggaaaattgagtggattgagaataaaacaaaagagatttgcagatgagtacatcatctcaggtaatgcgacggaagcctataagaaagcaggttatcgtgtttctagtgatagagtggcaggcgttgaaggacataagttactaaagaatcctaagattaaaagttatatagatgaacggttgaaacagcttgattctgaaaaaatcgcagaccagcaagaagtccttagttatctaacctcggtaatgcgaggagagacacaagaacagactttgataagcatcggagaattgggtcaaacgattacggatattaatgttggagcaaaagacagaatcaaggcagccgaactattaggaaaacgtcataggctttggacagacaaagtagaggcagacgtttctgggacggtggtgtttgcaaatgagtcagacataccagat

SEQ ID NO: 7310 - DNA, 84 bp, Streptococcus pneumoniae
  misc_feature (1)..(84): tiling:Spneumo1:WAN024BXP; WAN023RV7 contig_1609_73||||597 94..59877|-|84 bp|Glimmer 2.02 orf prediction|S.pneumoniae |670|WAN01UDCD|ORF
gtgggagagaaggaagcaggagcttccttctcttttttaggagaaaattcaaatgacttatactttggaatggctaaagacttt

SEQ ID NO: 7311 - DNA, 204 bp, Streptococcus pneumoniae
  misc_feature (1)..(204): tiling:Spneumo1:WAN024BVO; WAN023QI8 contig_1299_6||||3115 ..3318|+|204 bp|Glimmer 2.02 orf prediction|S.pneumoniae|6 70|WAN01UEBN|ORF
gtgggagcgtttaagagtgcggtcaatgcggttcttggaacgattgaaaatgtagtcaatggcttcatcggaatgattaatggagttttaggcgttgtcagaaacttacctggtctaggatgggttggtagtgtaagcacagttagcctccctcgtcttgcccgtggtggtatcgtcgatagttccaacaatcgccatgattgg

SEQ ID NO: 7312 - DNA, 120 bp, Streptococcus pneumoniae
  misc_feature (1)..(120): tiling:Spneumo1:WAN024DR5; WAN023SYT BD003762.1_20||||1581 9..15938|+|120 bp|Glimmer 2.02 orf prediction|S.pneumoniae |ATCC55840|BD003762.1|ORF|000
gtggggaatcgtttgattttccatgactgtaaatggacggaactctggagagaccgtaaaggcaccgaagggcaaggcaggcaactgctcaaactctcaggtaaaaggacagagctagga

SEQ ID NO: 7313 - DNA, 96 bp, Streptococcus pneumoniae
  misc_feature (1)..(96): tiling:Spneumo1:WAN024BXO; WAN023RV3 contig_1609_77||||616 07..61702|+|96 bp|Glimmer 2.02 orf prediction|S.pneumoniae |670|WAN01UDCD|ORF
gtgggtaattatgttttttatggtaataatctaaaaattttacttcaaactcacatggataattgggcatcaaaaatatttgttcatccagctgtc

SEQ ID NO: 7314 - DNA, 216 bp, Streptococcus pneumoniae
  misc_feature (1)..(216): tiling:Spneumo1:WAN024DOF; WAN0243T2 spr1309||15903352|NP_ 358902.1|1300224..1300439|+|216 bp|Hypothetical protein|S. pneumoniae|R6|NC_003098.1|ORF|100
gtggtagagcaaatccccgtgggccataattctggcagttttttcctcttcctactcctgagacttttgcttagtcccctcttgagaaatagtatctcgtttttgactagtcaagggattccttggaagctttcaaacaacaagaccaagcccattgataaaccaactgctagcaagagtatcgccacaaatcccttattgctccacttgcgataa

SEQ ID NO: 7315 - DNA, 1935 bp, Streptococcus pneumoniae
  misc_feature (1)..(1935): tiling:Spneumo1:WAN024C26; WAN0244QG spr0106|Transporter-t runcation|15902150|NP_357700.1|113839..115773|+|1935 bp|Tr ansporter, truncation|S.pneumoniae|R6|NC_003098.1|ORF
gtggtattacatagtatcaaaaggaatagtaagttctacgtagcagaccctgctagtggcatacgcaagatgtcaagtgacgaactgggagaaatttatcaaggtattactctttttatggttccaaattcggattttgaaagagggaaactaaagggaaaaggacttcttgatttatttggaaggttaatttttaatcaaaaaggattgattagtacagtcatattagcttcctttgttttaagtatcattggtattttatcgagtctcttttcaaaagttatcatggacgaggtgattccatatgctttaaaaaatagtctgtatatgtttttgatagtatttggaatagtgtcgttcttacagactcttctatctgcatttcgtcagcacgttcttttgtttctatctcgaaaaattgatataccggttttaatgggatattatgaccatattattcatcttccttatagtttttttggaagtcgtagagttggtgatgttttaacaagatttcaagatgcgatgacgataaagaatgtgtttacgtcagtctctatttcattagtcatggatatcaccttgtcagttattagtgcggttgtcctttggactattaatcaatctttatttctgatattagtttttatggttattgttaacatcattcttatatactgttttaaaaagccttataaaaaaattaatcatgaacaaatggaagcaaatggacttcttaattcacagttaattgaatctattcgtaacattgataccattaagtctcagcatgatgaggaacaacgtttaaacaaaattgaagaaaaatttgttcatactttagaaattggttataaagagggtgttttgcagaatattcaatctacaatatcttcaatgacctcaaccatgggtgggttattatttatgggagtgggcgccttatttatcattgatggaaaaatgactattggggacctcttggtttttcagacattaagtcaatattttacagaacctattcagaatttagttggtttgcagttaacctttcaagaggtacaggttgcggttagtcgacttcaagaattgatggaagtagatcgtgaagacattgccttggattatagtattagagacttcaccttatgtgatgatatcgagtttaaagatgtaacatttgcctatggttcgcgcccacctgttatcaagaactttaatttgcgaattaaacaaggagaaaaaatagcttttgttggtgaaagtggagcaggaaaaagtacgctagttcgtttattattaagatttataaatccgaatgaggggaaaatttgtataggagcaaatgacttatcagatcttgactatggtaaactacgtaagaaaatttcctacattccacagaccatagaactctttacagggacaattattgataatctaaaaattggtaatccttctgttacatatgaggatatggtgagagtttgtcgtattgttggtattcatgatacgattcaacgccttcaaaatcgttatggctcctttgtagaagaaggcggtcaaaatttctcgggtggagagaaacaacgattggctattgcaagagcactactgagtaaagctgatttgtatatatttgatgaggcaacctctaacttagattcatttagtgaacagattattcaggatttaatctttaataaaataatggataagacaacaattgtagtagcccacaggctgtctacaattcttcgatgtgataagatatgctttttagaaaatgggactattgtggaatatgggactcatgaagaactaatggcgaaaaatggaaagtatgctagaatggttggtttgcagagcgttcaagtgaatcaacaaattcagtcacaggctgtgttagatacagaggaggttacttatggctaa

SEQ ID NO: 7316 - DNA, 234 bp, Streptococcus pneumoniae
  misc_feature (1)..(234): tiling:Spneumo1:WAN024F4G; WAN023M4S 315427_616||||319890. .320123|-|234 bp|EGAD orf prediction|S.pneumoniae|R6|NC_00 3098.1|ORF|100
gtggtatttagaaaagatagcattatttttctcatcattaattggataatatggttcatctccacgtttccagtcagctggatattcatgcgttatgactgtcttaggctgcagaccatactcaaattttttatgctcaatgatacgagtataaggaatctcacgatctgtatagttcactacagcatttccttggtgattttcctcatcaagcacttcgtgcttaaaacgtaa

SEQ ID NO: 7317 - DNA, 285 bp, Streptococcus pneumoniae
  misc_feature (1)..(285): tiling:Spneumo1:WAN024F6T; WAN023I7K 86890_3474||||1979243 ..1979527|-|285 bp|EGAD orf prediction|S.pneumoniae|TIGR4| WAN01UC25|ORF|010
gtggtgaatatttgtaaatcagtcagcagacagaacgatactcttcgaaaatctcttcacatcatgtcagcttcgtctttccgtatatatgtgactgacttcatcagttctatctacaacctcaaaacagtgtttcgagctgacttgatcaattttcaaatctgtactttgagcaagctgagactagcttcctatttgattttcattgaatatcagaaacccattctccatcaaataattcgactgcgtctaataatttttgatctggcacggtgtctgaaataa

SEQ ID NO: 7318 - DNA, 102 bp, Streptococcus pneumoniae
  misc_feature (1)..(102): tiling:Spneumo1:WAN024BSJ; WAN023THA BD140013.1_2||||1703. .1804|+|102 bp|Glimmer 2.02 orf prediction|S.pneumoniae||B D140013.1|ORF
gtggtgcatgtccagacctactattcaataatctatgataagaatgaatacatggtcttttttaccaaatataaagaacattacaaagctggaaccgagcac

SEQ ID NO: 7319 - DNA, 180 bp, Streptococcus pneumoniae
  misc_feature (1)..(180): tiling:Spneumo1:WAN024BMN; WAN023O6V spn029h04_92||||78163 ..78342|-|180 bp|Glimmer 2.02 orf prediction|S.pneumoniae| 23F-1|WAN01UCO3|ORF
gtggttaatatgagtattttagcaaagtttcgtaaaatcatttttatgttgtcctttttaggattgtttggaagcggtttctttttcaaggaacctgtaaatcaatcacaatatacctgggaatcgagaattatacaacaagctgtaacaactaatgaagttgatctgggactggcggat

SEQ ID NO: 7320 - DNA, 111 bp, Streptococcus pneumoniae
  misc_feature (1)..(111): tiling:Spneumo1:WAN024BS6; WAN023TGX BD140043.1_1||||31..1 41|-|111 bp|Glimmer 2.02 orf prediction|S.pneumoniae||BD14 0043.1|ORF
gtggttccagttaaccaaaaccaagatgagaaagaagtcggtattataggaaagaaagaagtaaagattattaagtattctgttttctttgaacagaatgacaaaaagaac

SEQ ID NO: 7321 - DNA, 105 bp, Streptococcus pneumoniae
  misc_feature (1)..(105): tiling:Spneumo1:WAN024EZM; WAN023T5D BD003683.1_21||||1676 0..16864|-|105 bp|Glimmer 2.02 orf prediction|S.pneumoniae |ATCC55840|BD003683.1|ORF|000
gtggttctaaagaatgttctaatcacaccatctctcagttcaaccatttgtgcttctgctgttgcatttttaaacggaattgaagctgaggatttcttccatgtt

SEQ ID NO: 7322 - DNA, 78 bp, Streptococcus pneumoniae
  misc_feature (1)..(78): tiling:Spneumo1:WAN024BSD; WAN023TH4 BD140023.1_5||||1495. .1572|-|78 bp|Glimmer 2.02 orf prediction|S.pneumoniae||BD 140023.1|ORF
gtggttgaaccaattggtgacatagctgttgtttcaggtctgagagtctatcaaagaagactgactgtagcacaacca

SEQ ID NO: 7323 - DNA, 381 bp, Streptococcus pneumoniae
  misc_feature (1)..(381): tiling:Spneumo1:WAN024FTC; WAN023J3R 85048_2098a||||119906 8..1199448|-|381 bp|EGAD orf prediction|S.pneumoniae|TIGR4 |WAN01UC25|ORF|010
gtggttgtcgacaaaagtcacagccttgtcaggcttgagttcaaccaggctatctgtgaaaatgccacgaaggtcatagtttgcgccagcttgactggcttcaaagagattctggtggagacgaacatcgacaaggtcaaagtgttcttccgttttttcgagatagtccagattggcttccttgtctgggttccaaaattcaccaaaaacatagaaatcgtcaccgtatttttccttcatatcgcggatgaagttgcgcataaagaaagagtcaatatgcttaacggcatccaaacggaaaccagctacaccagtcgtttccatgaaccaatcagcccagtcatagatgttttggatgacttcaggatgtttaaagtctag

SEQ ID NO: 7324 - DNA, 87 bp, Streptococcus pneumoniae
  misc_feature (1)..(87): tiling:Spneumo1:WAN024C3F; WAN0246Q4 203669-02-7_1||||241. .327|-|87 bp|Glimmer 2.02 orf prediction from Patent Seque nces|S.pneumoniae||WAN0246ZV|ORF
gtggtttttgtggttcaatattatctagaagaagttgtcactgccgttcagattatcgcaaggttgtgtggcactgtgttacatcga

SEQ ID NO: 7325 - DNA, 75 bp, Streptococcus pneumoniae
  misc_feature (1)..(75): tiling:Spneumo1:WAN024BQU; WAN023PXL pne06_4||||1038..1112 |-|75 bp|Type 6A capsule operon, Glimmer 2.02 orf predicti on|S.pneumoniae||WAN01UCKJ|ORF
gtgtactattctagagggctatttttgtatttagaggacaaaaaaggggcaaaactttttaaaaaatctttttca

SEQ ID NO: 7326 - DNA, 126 bp, Streptococcus pneumoniae
  misc_feature (1)..(126): tiling:Spneumo1:WAN024D8M; WAN023MJU spn194g09_22||||15662 ..15787|+|126 bp|Glimmer 2.02 orf prediction|S.pneumoniae| 23F-1|WAN01UCP7|ORF|001
gtgtcaattactatacttatccattcatttgcctttgctttaaagaaaaaatcagcggcaggagcgtccatcttacaatttaatatttccattgccactctttctaaggcctttgtaagtattatt

SEQ ID NO: 7327 - DNA, 513 bp, Streptococcus pneumoniae
  misc_feature (1)..(513): tiling:Spneumo1:WAN024BYB; WAN023S0S contig_1623_24||||125 29..13041|+|513 bp|Glimmer 2.02 orf prediction|S.pneumonia e|670|WAN01UDAF|ORF
gtgtcagggctactaggggcagataggctcatagctaaatgtagacgattggctagtaaaaaaactggcgaggatatcgtcttacgtgcggtacacaatgctactataaaggttgtccaagcagatgcaagaagactcgcaccagcgagagatggagagcttataactagtatcaaaactagggcaaaaatggacggagataaggctataggcgaggtttacaccaatcttaaatacgctccttacgttgagtttgggacagggccaataggacaagctagccattcgggtatctctccagaggtcagcgtcacttataagtctagtccgtggtatgtgcatgaagaccaaatcaatgtaggaccttaccattttcaaaaaattggggagttctacaagatgtatggtcaacctgcccagccttatctttatccagctttgagagacaatcaagagcgtgtgtctaagaatatttcgaattatgtccgtagaaagataagagaacaaataaaa

SEQ ID NO: 7328 - DNA, 84 bp, Streptococcus pneumoniae
  misc_feature (1)..(84): tiling:Spneumo1:WAN024BG3; WAN023OJ2 pne87_28||||22916..22 999|-|84 bp|Type 44(1) capsule operon, Glimmer 2.02 orf pr ediction|S.pneumoniae||WAN01UCE7|ORF|000
gtgtcctcagaactgagaggagttcttgaaatcgtaacaccacctttgaacaagagttacttcaacccattggctccgacggat

SEQ ID NO: 7329 - DNA, 204 bp, Streptococcus pneumoniae
  misc_feature (1)..(204): tiling:Spneumo1:WAN024BXG; WAN023RPA contig_1583_12||||402 5..4228|+|204 bp|Glimmer 2.02 orf prediction|S.pneumoniae| 670|WAN01UDGB|ORF
gtgtcgaaaatgacattaaaaacactaagaacactcaaaaactggagacaaagtgatgcggcagcagctgtgaatgtatcagttgatacatgggggcattgggaacgtgggataacagagcctagtgtttcgaaagcatatcaaatcgctagtgttttcgatgtatcagtagatgatattatttttttacctgatattgcggtt

SEQ ID NO: 7330 - DNA, 624 bp, Streptococcus pneumoniae
  misc_feature (1)..(624): tiling:Spneumo1:WAN024BQD; WAN023PHC pne35_13||||10445..11 068|+|624 bp|Type 17A capsule operon, Glimmer 2.02 orf pre diction|S.pneumoniae||WAN01UCHX|ORF
gtgttaattggtcgtctgaaacaaaggctgaagattgaaaaatttaggagatcatggcgagaaaaaaatacgcataatactacaatggcgagtagtatttttgatatagataaagtttcagtgggaaattacacttatggaaatatcgatatcctagattttggaactaatgaaaaacttagtataggaagtttttgttcaatagcgccgaatgttaaatttattctgaatgctgaccactgcaccaattacttcactacctttccattaaaggtaaaagttctacaaaatcaagataaagaaggaatttcaaagggtgatattatcgtgggtgatgatgtatggttggggcttaatgcagtcattctttcaggtgtaacgattggacaaggagctataattgcggcaggagcagtggtaaccaaaaatgttccaccttatgctatcgtcggtggcaatccagcacgaataataaagtatagatttgaagctgaaataattgataaactgttaaaagttaatttttcaaaattatctaagtatgatatagaaaaacatataaaacaaatgtatataccattagttgaggtaaaacaactagattggatagacgacttattacat

SEQ ID NO: 7331 - DNA, 96 bp, Streptococcus pneumoniae
  misc_feature (1)..(96): tiling:Spneumo1:WAN024BL2; WAN023N6Z spn148d07_17||||15253 ..15348|+|96 bp|Glimmer 2.02 orf prediction|S.pneumoniae|2 3F-1|WAN01UCTI|ORF
gtgttattccttgacaattcaatttggaaaatatatgataaagataatgacagcggtgtcattctatctattttaagaaaagtaataatcaattgt

SEQ ID NO: 7332 - DNA, 120 bp, Streptococcus pneumoniae
  misc_feature (1)..(120): tiling:Spneumo1:WAN024BSK; WAN023THB BD140013.1_1||||1379. .1498|-|120 bp|Glimmer 2.02 orf prediction|S.pneumoniae||B D140013.1|ORF
gtgttattcgcagttagtttaccagaagaaatagttgtaggtcgcgaaaatgacgaagcgatatctcctgaagacaaacgagtcctaaatcaactatttttcgagctcccctatcacttt

SEQ ID NO: 7333 - DNA, 135 bp, Streptococcus pneumoniae
  misc_feature (1)..(135): tiling:Spneumo1:WAN024F6S; WAN023O00 spn047c01_33||||23230 ..23364|+|135 bp|Glimmer 2.02 orf prediction|S.pneumoniae| 23F-1|WAN01UCX2|ORF|001
gtgttcaaattagaacacgcgctctacctttctgtttatactcttcgaaaatctcttcaaaccacgtcaacgtcgccttggattatatatgtgactgacttcgtcagtcttatctacaacctcaaagcagtgctt

SEQ ID NO: 7334 - DNA, 186 bp, Streptococcus pneumoniae
  misc_feature (1)..(186): tiling:Spneumo1:WAN024FVN; WAN0243VQ spr1213||15903256|NP_ 358806.1|1208270..1208455|+|186 bp|Hypothetical protein|S. pneumoniae|R6|NC_003098.1|ORF|100
gtgttcacctccgtaattattttgcttggggaatttttcaaaaagaaaaacgcgcccaaacctagacacgaaagtacaatacgcttctttttacatgatacgtcttgtcctcggcaggatatttatgagtcgagctcccctactgtcttaggcagtttttttaaaccgtatataagtatagcatag

SEQ ID NO: 7335 - DNA, 228 bp, Streptococcus pneumoniae
  misc_feature (1)..(228): tiling:Spneumo1:WAN024CQU; WAN023J64 84915_1997||||1138347 ..1138574|+|228 bp|EGAD orf prediction|S.pneumoniae|TIGR4| WAN01UC25|ORF|010
gtgttccgggcaataattgcaatatcaaagctgaggcaaacttttcaggctgttctttcagtaaagctgcggcagattgcccagccttaccaactccataagcagaccccataccgcttaatccaaccgccaatacaattcccaatgcagcgaagaaagctcctccataggttgaaaaataagttgctaaatgttccattatatatatcctccattaattctttgtaa

SEQ ID NO: 7336 - DNA, 285 bp, Streptococcus pneumoniae
  misc_feature (1)..(285): tiling:Spneumo1:WAN024F5F; WAN023LY9 314343_947||||493762. .494046|-|285 bp|EGAD orf prediction|S.pneumoniae|R6|NC_00 3098.1|ORF|100
gtgttctggatttgtaaagcgtttgatgtagttgacattgctgttaaagaaggcttccaagtcactatcgctagtcttaacaaggatggtgataggtttgcttggtgctacatttacttccgcacgcgcattacgaacggcacggatcaagtctttgagactttccacaccagtgtgggcagcaaggtcctcaaaggctgggttgacagttgggtatgctgctgtcacgatagagccttcagcgtactgaccaaagatttcttctgtcacgaacggcattattga

SEQ ID NO: 7337 - DNA, 117 bp, Streptococcus pneumoniae
  misc_feature (1)..(117): tiling:Spneumo1:WAN024DYN; WAN023VUO AX571135.1_1||||1..11 7|+|117 bp|Glimmer 2.02 orf prediction|S.pneumoniae||AX571 135.1|ORF|000
gtgttggcttgtatattccgtggtttcggttttagcttcaataaatttattatctgtgaccacttgttgaccttgtttggagtggataaagctgataaaatcttgaccctaactaat

SEQ ID NO: 7338 - DNA, 273 bp, Streptococcus pneumoniae
  misc_feature (1)..(273): tiling:Spneumo1:WAN024CUU; WAN023JWA 83239_754||||425891.. 426163|-|273 bp|EGAD orf prediction|S.pneumoniae|TIGR4|WAN 01UC25|ORF|010
gtgtttcagcggtctctaaaatttctctttcagatacctcaatatgtcgttttaagggtttgtgctttaatcgattctccgttcgatttcgacgtatgcactcttcaagacttgtttccaattcaacaaacagaatctcttgatgaaagttatccaataaatcctgaatttgctttaaatacatcagctggtactgatttgaaaaatcaattacgtctgttaaaattactgatcgctgatttcttgcacttgctccaaggaaagaaaaggtaa

SEQ ID NO: 7339 - DNA, 135 bp, Streptococcus pneumoniae
  misc_feature (1)..(135): tiling:Spneumo1:WAN024EVN; WAN023SM7 NC_003098.1_490||||38 7280..387414|-|135 bp|Glimmer 2.02 orf prediction|S.pneumo niae|R6|NC_003098.1|ORF|100
gtgtttgatatctatcaaacactttttctttgcctcccactatctaaaaaaatgataatagatataattgtaaacaaaaatccagataggttttgcatgattgagaaagttaaaaaaactatggcagagaatcgt

SEQ ID NO: 7340 - DNA, 285 bp, Streptococcus pneumoniae
  misc_feature (1)..(285): tiling:Spneumo1:WAN024CFN; WAN01UC8S ||||||285 bp|Incyte o rf contig SPN2C0431 1848-2132|S.pneumoniae|23F|WAN01UC8S|O RF|000
gttataacacataaaaacaacttagttttcacaaactatgacaataaaaaaagttgctttttcccctttctatgtatgttttttactagtcatttaaaacgatacattaataggtacgaaaaagcaactttttttgcgcttaaaaccagtcataccaataacttaagggtaactagcctcgccggcaatagttacccctattatcaagataagaaagaaaaggatttttcgctacgctcaaatcctttaaaaaaacacaaaagaccacattttttaatgtggtct

SEQ ID NO: 7341 - DNA, 4131 bp, Streptococcus pneumoniae
  misc_feature (1)..(4131): tiling:Spneumo1:WAN024DEG; WAN0244D9-3 spr0581|zmpB|159026 25|NP_358175.1|591447..597077|+|5631 bp|Zinc metalloprotea se|S.pneumoniae|R6|NC_003098.1|ORF|100
gttctccaagcacctcaagatgagattatcaaaaaaggtacaaaagggttagaaaaaccaacactacaatgggctaatactgaaaaagatgtcttgaagaagagtgctacagctagttatacattgactaaaccagctggtgtagaaattaaatcaattaaattagcgctaaaagataaagatggacaacttgttaaagaagtaacggtagctgaaaataatttaaatgctactttagataaattgaaatattatcaaggttacaccctatctactacaatggtttatgatcgtggagaaggtgaagaaactgagaaattagaagataaacaaattcaattagaccttaaaaaagttgaaatcaaaaacattaaagaaacaagcttaatgaatgttgatgctgagggtaacgaaactgataagagcttattatctgaaaaaccgacagatgtttcccaattgtatttacgtgtgacaactcatgacaacaaagtgacaagacttgcggtaagttcagttgaagaagttgttgttgatggaaaaacattgtacaaagttgtagccaaagctccagacttagttcaacgtagagctgatgatacactgagtgaagaatatgttcattattttgaaaaacaattaccaaaagtaaataatgtatactacaacttcaatgaacttgtaaaagatatgcaagctaatccaatgggtgagtttaaacttggtgcagatttgaatgcagttaacgttaagccagcaggtaaagcttatgttatggctaaatttagaggtactttatcaagtgtagagaatcatcagtacacgattcataacttagaaagacctttgtttaatgaggctgaaggtgctacactcaaaaactttaacttaggtaatgtaaatataaacatgccttgggctgataaagttgcacctattggtaatatgtttaagaagtctacacttgagaatatcaaagtagtgggttcagtaacaggaaataacgatgtaaccggtgctgttaataagttagacgaagctaatatgcgcaatgtagcttttattggcaagattaacagtcttggagataaaggctggtggtctggtggacttgtcagcgaaagttggcgaagtaacacggatagtgtttattttgacggtgatattgtaggtaacaattctaagtttggtggtttagtagctaaagtcaatcacggaagtaatcagtgggatgttaaacaaaaaggtcgtttgacaaattctgttgttaaaggtactatgactctgaaaaatcatggtcaaagtggtggtttagttcacgaaaactatgactggggttgggttgagaataatattagtatgatgaaagtcaataacggtgaaattatgtatggttcaggttctattgacggtgacccatactttggttttgactacttcaaaaataattattatgtaaaagatgttgctactggagaaagtacctacaagcgttcgaaacagattcagtctatctctcaagccgaagcagacgccaaaatcgctaatatggggattactgcgaataccttcgctattcaagatccagttgtaaacaagttaaatcgtatcattgatagagattctgaatataaagcgattcaggactaccaagaaacaagaaacctagcttatcgaaacttggaaaaacttcaaccgttctataataaagagtggattgtaaaccaagggaataagttaacagatgagtccaatcttgttaagaaaaccgttctgtctgtaacgggtatgaaatcagggcaatttgttactgatttatcaagtgtggataaaatcatgattcactatgccgatggaaccaaagaagaatttggggtatctgcgatttcggactctagggtaaaacaagtcaaagaatataatgtagatgatttaggtgtagtttacactcctaatatggttgataagaacagagattctttgattacgaaagttaaagagaagttgagttctgttgctttagactctgctgaggttaaatctattacaaataaccctgcatctctatacctagaagaaagtttcgctgaggttagagagacgttagataagttagtgaagtccttgttagaaaatgaagatcatcaactgaacagtgatgaagtggctgagaaggcgcttctcaagaaagttgaagataataaagctaagattatattagccttgacttatctaaatcgttattatggtatcgactatgatggcttgaactttaagcatttgatgatgtttaaaccagacttttatggtaaaacaccaagtattttagatttcttgattcgtataggttcagcagaaaagaatttaaaaggagatagaagtttagaagcttatcgtgaagttattggtggtactattggaaaaggggaattaaatggcttgttaggttataacatgcgtttattcactaagtacactgacttaaatgattggtttattcatgctgcaaagaacgtttatgtttctgagcctgagacgactacagaggatttcaaagacaagcgccatcgtatctatgacggtttgaataatgatgttcacggtcgtatgattttaccgttattgaatttgaaaaaagcgcatatttttgtgatttcgacttacaatacaatagcctttagttcctttgaaaaatatggtaagaatacagaagaagagcggaacgcttataaagctgagattgatagggttgcaaaagcacaacaacgttacttagacttctggtctcgtttagctttaccgaaagttcgcaatcaacttttgaagagtcaaaactctgtaccaactcctgtttgggataatcaagtttatgtaggtttaggtggtgcaaaccgtatgggttacggtgatgggggtcgagtagtaactccagttcgtgaattattcggcccgactgatcgttggcaccaaataaactggaatatgggagcgatggcgaagatttatgaacgtccttggaaagatgatcaagtttatttcatggttacaaatatgatggagccgttcggtatctcagcctttacccatgaaactactcacgtcaatgatagaatggcttactacggtggagattggcaccgtgaaggtacggatttagaagcctttgctcaaggcatgttgcaaacacctgataagtcaacaaccaatggtgaatacggtgctctcggtatcaatatggcttatgagcgtaaaaatgatggtgaacagctttacaattatgaccctgagaagttagatagtagagagaaaattgatagttacatgaagaactacaatgagtctatgatgatgcttgactacttagaagctagtgcagttattcgtcaaaatttgtctgataattctaagtggttcaagaagatggataaagagtggcgcactaatgcagatagaaaccgtttaattggagaaccgcatcagtgggataaattacgtgatttaacagaagaagagaagaagttacctattgacagtattgacaagttggtagagaataactttgtaactcttcatggtatgccgaagaacggtcgttaccgcacagaaggttttgatagctcttatcaacctgtaaacatgatggcaggtgtctttggagggaatacaagtaaaagcaccgtagggtctatttcatttaaacataatgctttccgtatgtggggatactatggatatgaaaatggctttattccttatgtttctaacaagttaaaaggtgctgcaaataaagagaataaagggcttttaggtgatgatttcattatcaagaaagtttctaagaatcaattccaaaatctcgaagagtggaagaagcattggtatcatgaagtttatgataaagcacaaaaaggctttgttgagattgaggtagacggagtgaaaatttcaacgtatgctcagttacaatccttatttgaagaagctgttagcaaagatcttgcaggtatggatgataagaacattaagaatcattaccaatatacagagaatctcaagtggaaaatatacaaacaactccttaaaaacacagacggtttctctagtgatctatttactgcaccacaagcatag

SEQ ID NO: 7342 - DNA, 168 bp, Streptococcus pneumoniae
  misc_feature (1)..(168): tiling:Spneumo1:WAN0249OZ; WAN024EFV R6.IG_1106.1.1||||106 6540..1066707|+|168 bp|Between spr1067 (lacR) (+ strand) a nd spr1069 (lacG) (- strand)|S.pneumoniae|R6|NC_003098.1|I G|100
taaactgaaagagcctgggtaacaactcaatttcagaagaaaaaaagtaaatcttcccacaataaaaagcatagtatcaggtgtttcaacacctgatactatgcttttttctatgattttcattgagtataagcaacgtgattagataagagttttacagagtactaa

SEQ ID NO: 7343 - DNA, 278 bp, Streptococcus pneumoniae
  misc_feature (1)..(278): tiling:Spneumo1:WAN0249OV; WAN024B0Q TIGR4.IG_1109||||1120 586..1120863|+|278 bp|Between SP1182 (+ strand) and SP1183 (- strand)|S.pneumoniae|TIGR4|NC_003028.1|IG|010
taaactgaaagagcctgggtaacaactcaatttcagaagaaaaaaagtaaatcttcccacaataaaacgcatagtatcaggtgttgaaacacctgatactatgcgtttttctatatcaaagactttttgcccaattcctcaaagctatgcattgagaaatctgcgactcgcttcctagtttaaagttgctctttgattttcattgagtataagcaacgtgattagataagagttttacagagtactaaatataagatttaacttttttgagaaattgg

SEQ ID NO: 7344 - DNA, 2406 bp, Streptococcus pneumoniae
  misc_feature (1)..(2406): tiling:Spneumo1:WAN024CTP-M; WAN02411D |gal||BAB91370.1||| 7218 bp|beta-galactosidase|S.pneumoniae||AB073928|ORF|000
taaagaaaagccaactgttcgcattttaccacattggaactggactgaagagacccttaaggatcgcaagatgcgggttgatggaaaggttccggttcgtaccttctcaaatgctgcaagcgtcgaattgttcttaaatggagagtcacttggtaaaaaggaatttactaagaaaacgacagaagacggacgtccatatcatgagggggctaaaccaagtgaattgtatcttgaatggcttgtgaaataccaaccaggcacactgactgcgattgctcgagatgaaaaaggcaacgaaattgcgcgtgatagtgtgacaactgctggggagccagcaagggttcgtctgactaaagaagagcatgttatcactgcagatggaaaagacctatcctacatccattacgaaattgttgatagcgaagggaatgtggttccgacagcgaataatcttgttcatttcaatcttcatggtcaaggacaaatagttggtgtggataatggagaacaagctagccgtgagcgctacaaagctcaagcagatggaacatggcaaagacgtgctttcaatggtaaaggagttgtcattgtaaaatcaacagaaaaagaaggtaaatttactctttatgcagattctgctggtttaacttctgatagcgcaacggtcgcaactgtgtctggtaagaaagaaaaccgtcactttgtagcctttgctcctgtaaaagcaacaactgatgtgactacaaatcctgaattgcctcaaacagtaacagctatttatagcgacggtagtgttgaggaaaagactgtaacatgggatgtgccagctgacttgcttacaagcgcaggtgagaaaaaagtatctggacgtgtagaaggtttggaaaccaaagctgaggcacttgtgaaagtgattgctttagatagatggttaccaaaagttgctacagtaccggttggtacaactgcagctgatttggataaaacggtcacagctgttctgacagatggtagtttgattgatacagatgttgtttcttggactttaaaagatcctgctgctttaaccaaggaagggggacgtacggaggctactggtaaattggtagatgacgatcgtgaagtaactgcaacctttatcgcaagcagtaaggaaacaacaagtagcattacaggacttactgttggggataaagctcttgagaacttcgagtctggcaagacttattaccgtgtatcccttccttacactggaacaattccaagtgttggagctcagactactggttatcaagtaactgttcagcaagcttctgctgataatggttatcaggcttcggtcttcttgagtgatcaaaagggtgacttggttcaaacttatttaattcagtttgtgaaggaagctcctgccttgaaacgtttggaagtagttgtggaaggaaaagaaactgctactgaagatcaagtcttaacttatcgtgtcattggtagttatgaggatggttcacaaacagaattctcagcatcagatattcacttagaagctaaatcatctgatggtgggcatcttgaggtaaatggtcagaatctattactctatactaagggaagagtggctttgacacctcgaatcgataatcaaacagagaaaacagaatctgtaactactgaagtggtgattaaagaaaataaagtcagcaagaagattgtgaaacttcatcctgtatctgtttctatagacattaatcagcaaccgaatctacctaaagaagttggagcagaatttgataagggattaccacgcaaagtatctgtaacttgggacaaggtagatgaaaaagaattggggcattatcatagctttacgcttaaaggacgtgtagaaggtacagatattgaagctcaagcgactgtaacagttgaaggattgcaagttgcagaggaaatcagccttactcttcctaagggtgagacagttcaattgccagctaatgtgcgtgcttaccattctaacggaacaactgtctacaaagatgtggtttgggatcaggttccagccaactttagtcaaactgaaggagtctatgaaatcaatggtcgcttaataggtagcaatttgaccactaaagcccatgttcgagtgtctagccaagttgttgctggaaataatatctctaaacaatggacaggttcgcaattgccagctgccattgtatccaatacaggaggagatgactcagctaataccttgaacgacctgactgtgtcaagaacgccaacagacgctaaaaatagatggactacttggagaacaaatactgataatgactgggcttctatcttgtttggtaattcaggagatttgacgaaacgttttgtcaacaatttatcagttgatttctatac

SEQ ID NO: 7345 - DNA, 159 bp, Streptococcus pneumoniae
  misc_feature (1)..(159): tiling:Spneumo1:WAN024A6U; WAN0247C0 R6.IG_133.2||||120925 ..121083|+|159 bp|Between spr0112 (+ strand) and spr0113 ( + strand)|S.pneumoniae|R6|NC_003098.1|IG|100
taaagtttttatcaataatttgggctccttgtcaactgtagtgggttgaataaaagctgacgtctggggaagggtttaaagctttgctttatcaaatattgacttacagaattgctctattgtactgatgtattcttagtaaataatatggtgttttga

SEQ ID NO: 7346 - DNA, 2038 bp, Streptococcus pneumoniae
  misc_feature (1)..(2038): tiling:Spneumo1:WAN024FP2-3; WAN023PMF pne27_16||||14075.. 18151|+|4077 bp|Type 14 capsule operon, Glimmer 2.02 orf p rediction|S.pneumoniae||WAN01UCIR|ORF|000
taagcttgcgacaactgtagaagttgacggaacaaaagctgatgcacagaaagagcttgagttgtcagttgcaacagataaagttacgaagacagtaaaagatactgttgtgtacgaaaatctgttagctggcgaaacctacaaactaacaggtcagttgatgaagattacagctgacaaagaagaggaagtagcaacgaaagaaacaactttcgtcgcagatgcctcaggcaacggtacaaccagcctagagtttgaagatgtgagccttgaagcaggcgttaagtatgtagtatatgaaactgcagagagcgaaaaagaaattgacttcaaagaaggcaaagaaaagcacaaggtagaacacaaagacaaagatgacaaagctcagactgtagttgttacgaaagaaaaaccaacaaaaccatcaggtaagcttgcgacaactgtagaagttgacggaacaaaagctgatgcacagaaagagcttgagttgtcagttgcaacagataaagttacgaagacagtaaaagatactgttgtgtacgaaaatctgttagctggcgaaacctacaaactaacaggtcagttgatgaagattacagctgacaaagaagaggaagtagcaacgaaagaaacaactttcgtcgcagatgcctcaggcaacggtacaaccagcctagagtttgaagatgtgagccttgaagcaggcgttaagtatgtagtatatgaaactgcagagagcgaaaaagaaattgacttcaaagaaggcaaagaaaagcacaaggtagaacacaaagacaaagatgacaaagctcagactgtagttgttacgaaagaaaaaccaacaaaaccatcaggtaagcttgcgacaactgtagaagttgacggaacaaaagctgatgcacagaaagagcttgagttgtcagttgcaacagataaagttacgaagacagtaaaagatactgttgtgtacgaaaatctgttagctggcgaaacctacaaactaacaggtcagttgatgaagattacagctgacaaagaagaggaagtagcaacgaaagaaacaactttcgtcgcagatgcctcaggcaacggtacaaccagcctagagtttgaagatgtgagccttgaagcaggcgttaagtatgtagtatatgaaactgcagagagcgaaaaagaaattgacttcaaagaaggcaaagaaaagcacaaggtagaacacaaagacaaagatgacaaagctcagactgtagttgtatctaaaattaagccagagccaggagcacaagaagttcactttagtaaagtcaatgtaggcggagaagaaattgcaggtgcggaaattcacatcaagcaaggcgacactgtcgtggcaagctgggtatcagaagccggtaagacacatacattgaaactaaaaccaggtcactatatcttccatgaagcagtagctccaggtggctatctagcagtaacagatattcactttagtgtagatgaaactggtcaagtgacagtaactgatgtaaatggaaatacagctgtagcggaaggcaacaagcttacggttacagaccaaaccaaaccagtaaccccaccaagcccagaagagccaggagcacaagaagttcactttagtaaagtcaatgtaggcggagaagaaattgcaggtgcggaaattcacatcaagcaaggcgacactgtcgtggcaagctgggtatcagaagccggtaagacacatacattgaaactaaaaccaggtcactatatcttccatgaagcagtagctccaggtggctatctagcagtaacagatattcactttagtgtagatgaaactggtcaagtgacagtaactgatgtaaatggaaatacagctgtagcggaaggcaacaagcttacggttacagaccaaagtgctgataaagataagcaagataagttgccaaatacaggagaaacaacaggaacttatttgtcaatacttggtatgattactgcagtttttgcaagcctattgtaccgtagtaagaaaaaa

SEQ ID NO: 7347 - DNA, 374 bp, Streptococcus pneumoniae
  misc_feature (1)..(374): tiling:Spneumo1:WAN024AA6; WAN0247C1-rc R6.IG_133.1.1||||1 20280..120653|-|374 bp|Between spr0112 (+ strand) and spr0 113 (+ strand)|S.pneumoniae|R6|NC_003098.1|IG-rc|100
tactaactccaccaatatatcttgttatagcacttagttacctagataagatatcctttagcttgcttccaaaatttaagtctacacctataatatgagttcatattagtactgctaaatcctatctatagtaatgtcaaacacctaaataaagtcatctctccaattcattcaagaaatgaagaaaggcaaaaaatctttaaaataagaaaagtgcatattatcagatgttcaaaaatcttgataatatgcgttatatagatagaaagatttactcaatctcactttcaaattgagttttttcccaacctcatttttaatttatatcttcaatagaatctaatgaccgagctactgtattacacagattaata

SEQ ID NO: 7348 - DNA, 116 bp, Streptococcus pneumoniae
  misc_feature (1)..(116): tiling:Spneumo1:WAN024BC9; WAN023HWD ||||||116 bp|Incyte o rf contig SPN2C0295 970-1089|S.pneumoniae|23F|WAN023HWD|OR F|000
tactcttcgaaaatctcttcaaaccacgttagtttccatctgcaacctcaaaacactgttttgagcaacctgcggctagctttctagtttgctttttgatttttattgagtatgag

SEQ ID NO: 7349 - DNA, 125 bp, Streptococcus pneumoniae
  misc_feature (1)..(125): tiling:Spneumo1:WAN024AA4; WAN0247A1 R6.IG_140.1||||126429 ..126553|+|125 bp|Between spr0119 (+ strand) and spr0120 ( + strand)|S.pneumoniae|R6|NC_003098.1|IG|100
tagaaacataggttaaatcttagaacggcttaaaatcagatatgataaagggaaatagtcttatctaggtaactaagtgctacaaacacagtcgaggatcacttgttaggattacattttaatca

SEQ ID NO: 7350 - DNA, 954 bp, Streptococcus pneumoniae
  misc_feature (1)..(954): tiling:Spneumo1:WAN024ALT; WAN02490U-rc TIGR4.IG_1779.1||| |1789540..1790493|-|954 bp|Between SP1885 (+ strand) and S P1887 (- strand)|S.pneumoniae|TIGR4|NC_003028.1|IG-rc|010
tagcacggctaagatgttgtacaatgtgaaagcgatcaagaacgattttagcattcgggagtgaaacagcctgggagactgtttcagcctgagcctagaaatttgaaagcgaagctgtttagccaagtcatagtaagggctaaacatagccatagtaatgattttgacgcgacatcggacggctctatcatatttaagaaagtgatctcggatgacagcttgtgttctaccttcaagaacagtgatgatattgaaattgttaaaatcttgcgcaataaagctcatctccatctcccgattgaaacagtcactccccggactgtttcaacgtcccaggacataatctcaggaagacgcgaaaaatcatgctcaaagtgagaatcattgagctttcgaatgacagttgaagttgaaatggccagctgatgagcaatatcggtcatagaaatcttctcaatcaacttttgcgcaattttttggttgataatacgaggaatttgatgattcttcttgacgatagaagtttcagcgaccatcattttagaacaatgatagcacttgaaacgacgctttctaaggagaattctagtaggcataccagttgtttcgaggtaagggatcttagacggtttttgaaagtcatatttcttcattagacttccacaatcagggcaagatggagcctcataatccagcttagcgataatttctttgtgggtatccatattgatgatgtctagaatcttgatgtttgggtctttaatatcgagcagttttgtgataaaatgtaattgttccatatgaatctttctaatgagttgttttgtcgcttttcattataggtcatatgggactttttttctacacaaaataggctccataatatccataggggggttacccactacaaatattatagagccgaaaaaggctgagatctggtgtctcagtctt

SEQ ID NO: 7351 - DNA, 131 bp, Streptococcus pneumoniae
  misc_feature (1)..(131): tiling:Spneumo1:WAN024F6Z; WAN0246L1 ||||||131 bp|Incyte o rf contig SPN2C0489 5797-5663|S.pneumoniae|23F|WAN0246L1|O RF|000
tagttacttcatgttttcctaattcttttcgaaactctttttaaaccacgtcagttttatcagtaatctcaaaacagtgttttgagctaattttgccagttttgtctgtaacatcgaagttgtgttttacc

SEQ ID NO: 7352 - DNA, 82 bp, Streptococcus pneumoniae
  misc_feature (1)..(82): tiling:Spneumo1:WAN0249O3; WAN02491X TIGR4.IG_1685||||1706 949..1707030|+|82 bp|Between () (+ strand) and SP1791 (- s trand)|S.pneumoniae|TIGR4|NC_003028.1|IG|010
tataaatacaacaggaaaagccttataatatagggctttttttgctttccttttaaaaattgtcgtgcaatttgccgtgttt

SEQ ID NO: 7353 - DNA, 366 bp, Streptococcus pneumoniae
  misc_feature (1)..(366): tiling:Spneumo1:WAN024DJB; WAN023ZO2 |||AAA15849.1|||366 b p||S.pneumoniae||S62272|ORF|000
tatcgaggatttctaattgataataaacttgttattgatgaggagataagatacgaggataaattatttttgagtgaaagtaagatagagtctgctcttgaaagttacagtaatcaatctgaaaactttgacttagaaaatgattatagagacgtcgttaataggctaattattaacatatttacaaccaaagtaaaaatatttgatgataatggaaattatgaggaatacagtaatagagcttgggaaaaggttttagagaggtttcgaaattttggaggaagacttttgattacgattgtacaagtatcattatattccatacaagtcttgatagcagcttcaactgaagatgtatcaaactga

SEQ ID NO: 7354 - DNA, 1202 bp, Streptococcus pneumoniae
  misc_feature (1)..(1202): tiling:Spneumo1:WAN024CPZ; WAN023HVD ||||||1202 bp|Incyte orf contig SPN2C0525 217-1419|S.pneumoniae|23F|WAN023HVD|O RF|000
tatctgcaagcacatcagcatctgaatccgcatcaacaagtgcctcagcctcagcatcaacaagtgcatcggcttcagcatcaacaagtgcatcagcctcagcaagcacatcagcttctgagtcagcgtcaaccagtgcgtcagcctcagcaagcacaagtgcatcagcttcagcaagtacaagtgcgtcagcctcagcaagcacaagtgcatcagcttcagcaagtacaagtgcgtcacctcagcatcaacgagtgcgtcagcttccgcatcaacgagtgcgtcacttcagcgtcaaccagtgcgtcggcctcagcaagcacatcagcttctgaatccgcatcaacaagtgcaagtacgtcagcttcagcaagtacaagtgcgtcagcctcagcatcaacaagtgcctcagcttccgcatcaacgagtgcgtcagtctcagcatcaacgagtgcctcagcttcagcaagtacaagtgcctcagcctcaacgagtgcgtcggcttcagcaagcacctcagcgtctgaatctgcatcaacgtctgcctcagcctcagcatcaacgagtgcgtcagcttcagcgtcaaccagtgcgtcggcctcagcaagcacatcagcttctgaatccgcatcaacaagtgcaagtacgtcagcttcagcaagtacaagtgcgtcagcctcagcatcaaccagtgcttcggcttcagcgtcgacaagtgcctctgaatcggcatcaaccagtgcgtcagcctcagcaagcacctcagcatctgaatcagcgtcaaccagtgcgtctgagtcagcatcaacgagtgcctcagcttcagcgtcaaccagcgcctcggcctcagcatcaacgagtgcgtcggcttcagcgtcaaccagtgcgtcagcttcagcaagtaccagcgcctcagcttcagcgtcaacgagtgcctcagcctcagcatcgacaagtgcctcagcttcagcaagtacaagtgcgtcagctcagcatcaaccagtgcttcggcttcagcgtcgacaagtgcctctgaatcggcatcaacaagtgcgtcagcctcagcaagcacctcagcatctgaatcagcatcaacgagtgcttcagcttcagcaagtacctcagcttctgaatcggcctcaacgagtgcatcagcttcagcaagcacctcagcgtctgaatcggcctcaacgagtgcttca

SEQ ID NO: 7355 - DNA, 374 bp, Streptococcus pneumoniae
  misc_feature (1)..(374): tiling:Spneumo1:WAN024AA5; WAN0247C1 R6.IG_133.1.1||||1202 80..120653|+|374 bp|Between spr0112 (+ strand) and spr0113 (+ strand)|S.pneumoniae|R6|NC_003098.1|IG|100
tattaatctgtgtaatacagtagctcggtcattagattctattgaagatataaattaaaaatgaggttgggaaaaaactcaatttgaaagtgagattgagtaaatctttctatctatataacgcatattatcaagatttttgaacatctgataatatgcacttttcttattttaaagattttttgcctttcttcatttcttgaatgaattggagagatgactttatttaggtgtttgacattactatagataggatttagcagtactaatatgaactcatattataggtgtagacttaaattttggaagcaagctaaaggatatcttatctaggtaactaagtgctataacaagatatattggtggagttagta

SEQ ID NO: 7356 - DNA, 238 bp, Streptococcus pneumoniae
  misc_feature (1)..(238): tiling:Spneumo1:WAN024AZ6; WAN023S55-3 contig_413_3||||973 ..1452|-|480 bp|Glimmer 2.02 orf prediction|S.pneumoniae|6 70|WAN01UD5S|ORF|000
tatttagatgtcatcttatcaggccttatctttgggcttagtcatttgatactatctcacagagatccaattagtttattatattatagtttgattggtttcttttttgcccttgtttatcgttctaccgacaatctgagattaacgattctctgccatagttttttaactttctcaatcatgcaaaacctatctggatttttgtttacaattatatctattatcatttttttagata

SEQ ID NO: 7357 - DNA, 159 bp, Streptococcus pneumoniae
  misc_feature (1)..(159): tiling:Spneumo1:WAN024A6V; WAN0247C0-rc R6.IG_133.2||||120 925..121083|-|159 bp|Between spr0112 (+ strand) and spr011 3 (+ strand)|S.pneumoniae|R6|NC_003098.1|IG-rc|100
tcaaaacaccatattatttactaagaatacatcagtacaatagagcaattctgtaagtcaatatttgataaagcaaagctttaaacccttccccagacgtcagcttttattcaacccactacagttgacaaggagcccaaattattgataaaaacttta

SEQ ID NO: 7358 - DNA, 90 bp, Streptococcus pneumoniae
  misc_feature (1)..(90): tiling:Spneumo1:WAN024BBN; WAN0244UG ||||||120 bp|Incyte o rf contig SPN2C0067 3-122|S.pneumoniae|23F|WAN0244UG|ORF|0 00
tcaaaacggtgttttgagctgacttcgtcagttctatctacaacctcaaaacagtgttttgagcagcccgaggctagtttcctagtttgc

SEQ ID NO: 7359 - DNA, 441 bp, Streptococcus pneumoniae
  misc_feature (1)..(441): tiling:Spneumo1:WAN024B2Z; WAN0240KK |ddl||CAB64495.1|||44 1 bp|D-alanine--D-alanine ligase|S.pneumoniae||AJ387982|OR F|000
tctaaaatcgctgaagtggaaggaaaattgacttatccagtcttcacaaaaccgtcaaacatgggttcaagtgttggtatttccaaatctgaaaatcaagaagaactccgccaagctttggaacttgcctttcaatatgacagtcgtatcttggtagagcaaggggtaaatgcccgtgaaatcgaggttggtctactgggcaactatgatgtcaagagtacgcttccaggagaagtagtcaaggatgttgccttttatgactacgatgccaagtatattgataacaagattaccatggatattccagccaaaatcagtgatgatgtggtagctgtcatgcgtcaaaatgcagaaacggccttccgtgccattggaggcctcggtctctctcgttgcgatttcttctatacagataagggagagatcttcctaaatgagctt

SEQ ID NO: 7360 - DNA, 75 bp, Streptococcus pneumoniae
  misc_feature (1)..(75): tiling:Spneumo1:WAN024B9R; WAN0244TI ||||||75 bp|Incyte or f contig SPN2C0009 5-79|S.pneumoniae|23F|WAN0244TI|ORF|000
tctacaacctcaaagctgtgctttgagcaacctacggctagcttcctagtttgctctttgattttcattgagtat

SEQ ID NO: 7361 - DNA, 103 bp, Streptococcus pneumoniae
  misc_feature (1)..(103): tiling:Spneumo1:WAN0249PB; WAN024ECV R6.IG_1341.1||||12916 17..1291719|+|103 bp|Between spr1297 (- strand) and E (tra nsposase) (- strand)|S.pneumoniae|R6|NC_003098.1|IG|100
tcttctcccatagactttcctccttatttcctaactttattatatagtgtattgaatctataacagtacaccttgactgctaaaatatttctataaattaatt

SEQ ID NO: 7362 - DNA, 125 bp, Streptococcus pneumoniae
  misc_feature (1)..(125): tiling:Spneumo1:WAN024AA3; WAN0247A1-rc R6.IG_140.1||||126 429..126553|-|125 bp|Between spr0119 (+ strand) and spr012 0 (+ strand)|S.pneumoniae|R6|NC_003098.1|IG-rc|100
tgattaaaatgtaatcctaacaagtgatcctcgactgtgtttgtagcacttagttacctagataagactatttccctttatcatatctgattttaagccgttctaagatttaacctatgtttcta

SEQ ID NO: 7363 - DNA, 110 bp, Streptococcus pneumoniae
  misc_feature (1)..(110): tiling:Spneumo1:WAN024BCH; WAN023HVR ||||||110 bp|Incyte o rf contig SPN2C0129 801-688|S.pneumoniae|23F|WAN023HVR|ORF |000
tgccgtaggtataggtaacgacttcgtcagtcttatctacaacctcaaaactgtgtttttagcagcctgcggctagcttcctagtttgcactttgattttcattgagtat

SEQ ID NO: 7364 - DNA, 185 bp, Streptococcus pneumoniae
  misc_feature (1)..(185): tiling:Spneumo1:WAN024DMK; WAN023I0C ||||24631..24815|+|18 5 bp||S.pneumoniae|R6|NC_003098.1|RNA|100
tggagcaacagttctgcgtgaagcgggtcaggggaggaatccagcagccctaagcgatttgaattgtgtgctctttttttcgtgctttttccgaataaataagatagaataatctagaataaatgataatagaaaagagaaaattatgaaaattcgtggttttgaattggtttcgagttttacag

SEQ ID NO: 7365 - DNA, 291 bp, Streptococcus pneumoniae
  misc_feature (1)..(291): tiling:Spneumo1:WAN0249LA; WAN024E7A-rc R6.IG_1860.1.1|||| 1717358..1717648|-|291 bp|Between spr1745 (+ strand) and s pr1746 (- strand)|S.pneumoniae|R6|NC_003098.1|IG-rc|100
tggctaggaaatgctgatcatagtcctttgctgaggctagggtgtttcaacattcaacactcaactggttgatctagttgataggaagggaattactataaaatactcagtcttccatcatattttttgaaacgattgtgtaatcaaaatgtaccaattattgtagtattggtacagaagatgttgtgaatggataaatatatcataactgctgtctctctatgtaaaaagaaggctgtatcaaaaagatttcatatgtctgtgcatatatataatagacttcctgcaaaa

SEQ ID NO: 7366 - DNA, 735 bp, Streptococcus pneumoniae
  misc_feature (1)..(735): tiling:Spneumo1:WAN024B6T; WAN023PSM-3 pne14_20||||16539.. 17393|+|855 bp|Type 9L capsule operon, Glimmer 2.02 orf pr ediction|S.pneumoniae||WAN01UCJV|ORF|000
tgtattcaaaaggttgcgggtgcctctgtccgagtacccactacgatatttaacctattgaatatctataaatttcctctgggagtttcatggtatctatatacgttatggtcgatattgatagtttatggtttactatctgctgttttcaaaaatcgtagaatgttatttttgataagtgttttcgcttattgtttaaccctatttgttcaaacagatatttatattattcaaagaacgctagtttgggggctttgtttctttcttggcagtgtattgagtgaaattcactttgataaaattaatttgaaaaaatttctttttttctttgtgctatttgattttatttatatgttcgcttggttcttgttttatgaagtagagtctaagaaggattatgtaagctatagtaacccaggtttgtgggggattgcttttattgtctgtgtattagttgcttttgcgatttttcctaaaatggagaaaaattttcctaaaactttcctatatttcactaaatacgggaaagatagtttagggatctatattcttcatgcaccaatttgtagcatgattcggattctaatgttgaaagtgggaataaactcagtttttcttcacgttgttgttgggattgtgctaggctggtatttatccatactagcaacttatatattgaaaaaaattccatttttgaatattgttttattaccacaaaagtatattaaattaaaa

SEQ ID NO: 7367 - DNA, 290 bp, Streptococcus pneumoniae
  misc_feature (1)..(290): tiling:Spneumo1:WAN024AJY; WAN024EED R6.IG_1228||||1182848 ..1183137|+|290 bp|Between spr1184 (+ strand) and spr1185 (- strand)|S.pneumoniae|R6|NC_003098.1|IG|100
tgtggaacctgtctttgggcagataaaggcttctttgggttacaagagatgtaatctgaggggcaagtgagaattgacatgggattggtacttatggccaataacctcctaaaatacaataagagaacgactcaaaattaaaaagctagagttccacaattggaaatctttagcttttttgtgattgagaactattttgtcctagactcttttgatttttaaagagaacttaaatcattctctaattaaagtaggaagaatacactaatttagtaaagtaaatattaaat

SEQ ID NO: 7368 - DNA, 98 bp, Streptococcus pneumoniae
  misc_feature (1)..(98): tiling:Spneumo1:WAN0249PG; WAN024E00-rc TIGR4.IG_290.2|||| 275191..275288|-|98 bp|Between SP0298 (- strand) and SP029 9 (+ strand)|S.pneumoniae|TIGR4|NC_003028.1|IG-rc|010
tgtgtactatttttggttcattttactatatttctaaacacttagaaataataaaacaaattaaatattatttctaaatatttgaaaataacatctat

SEQ ID NO: 7369 - DNA, 287 bp, Streptococcus pneumoniae
  misc_feature (1)..(287): tiling:Spneumo1:WAN0249P4; WAN024EEC R6.IG_1232||||1184716 ..1185002|+|287 bp|Between spr1188 (cdd) (- strand) and sp r1189 (- strand)|S.pneumoniae|R6|NC_003098.1|IG|100
tgttttaactcctttattattatattttactcacactaaattatagtaaaatgaaataagaacagtacaaatcaatcaggacagtcaaatcgatttctaacaatgttttagaagtagagatgcactattctagttttaatccactatacaattgtaaaaaagtgagatatataatccctcattttatgcggaaaatatatttggtttctagatttatcattatccaatttgaatgacaataatctagaaaccaaacgctttattatttacgatactaaattcaatag

SEQ ID NO: 7370 - DNA, 234 bp, Streptococcus pneumoniae
  misc_feature (1)..(234): tiling:Spneumo1:WAN024G2O; WAN023JAL 84666_1809||||1036415 ..1036717|+|303 bp|EGAD orf prediction|S.pneumoniae|TIGR4| WAN01UC25|ORF|010
ttaataataccgttcatttttgctttctactcccccttcagtgcttcgaacttcgctttcattgttggatttttccgggtcaattttttaacagagacatcttccaatttgttgttagctaaacggagttggttttcagatgtggtcaggaatttcttaacctcttccatgcgtttgatggccttgtcgatttcatcaatagcttttccaaagttagtcgaagctgaattatag

SEQ ID NO: 7371 - DNA, 533 bp, Streptococcus pneumoniae
  misc_feature (1)..(533): tiling:Spneumo1:WAN024FEB-3; WAN024036 |pbp1b||CAA05304.1| ||1600 bp|penicillin-binding protein 1b|S.pneumoniae||AJ00 2293|ORF|000
ttacttagttcgacaggacaatgtttttagtcaagagttgaaaaacgagtcgattcaaaaggcctatcatgagcgagcggagcaggaactaagtaacggtggctataaaatcactacaacgatcaataaaaaaatccataacgccatgcaaaatgcagttgctaactacggtcatttggtagatgatgcgactggtcagcctgaagtagggaatgttttgatggacaataaaacgggggctgttctaggctttgttggtggtcgtaattaccagactaaccaaaacaatcatgccttcgacactaagcgctcgccagcctctacaaccaagcctttgttggcctacggtattgccattgaccaaggtttgatgggtagcgctagtatcttgtcaaattatccgacaaaattctctaatggaaatcctatcatgtatgtgaacagtccaggtacaggcatgatgaccttgggagaagccttgaactattcatggaatatcccagcttactggacctatcgtatgctccgtgaaa

SEQ ID NO: 7372 - DNA, 168 bp, Streptococcus pneumoniae
  misc_feature (1)..(168): tiling:Spneumo1:WAN0249OU; WAN024EFV-rc R6.IG_1106.1.1|||| 1066540..1066707|-|168 bp|Between spr1067 (lacR) (+ strand ) and spr1069 (lacG) (- strand)|S.pneumoniae|R6|NC_003098. 1|IG-rc|100
ttagtactctgtaaaactcttatctaatcacgttgcttatactcaatgaaaatcatagaaaaaagcatagtatcaggtgttgaaacacctgatactatgctttttattgtgggaagatttactttttttcttctgaaattgagttgttacccaggctctttcagttta

SEQ ID NO: 7373 - DNA, 119 bp, Streptococcus pneumoniae
  misc_feature (1)..(119): tiling:Spneumo1:WAN0249P5; WAN024E0N TIGR4.IG_249.1.1.2||| |228672..228790|+|119 bp|Between SP0256 (+ strand) and SP0 258 (- strand)|S.pneumoniae|TIGR4|NC_003028.1|IG|010
ttcatcacaatctcctaatgaagccacccaatcaggtggcttttttgcggtacgacgggcatgtcgtatatctgaggtgtaagtcctcagcctgactatcgtgaggtagcagggagagg

SEQ ID NO: 7374 - DNA, 62 bp, Streptococcus pneumoniae
  misc_feature (1)..(62): tiling:Spneumo1:WAN024BRL; WAN024147 |cap1E||CAB06814.1||| 62 bp|galacturonosyl transferase|S.pneumoniae||Z86112|ORF
ttcttacacaagaacccattgttaagacactacctaaacctgttacgttatttatatattag

SEQ ID NO: 7375 - DNA, 323 bp, Streptococcus pneumoniae
  misc_feature (1)..(323): tiling:Spneumo1:WAN0249PF; WAN024881 TIGR4.IG_1985.1||||19 63307..1963629|+|323 bp|Between SP2062 (- strand) and SP20 64 (- strand)|S.pneumoniae|TIGR4|NC_003028.1|IG|010
ttcttcccctctctttttattgatttatcaatatttgactaattaattgtgatataaagtaaaatagattgcaagaatgttgcttaactcattacaagatgataactttccattttccattcaaattgatactcaatgaaaatcaaaaagcaaactaggaagctagtcgcaggttgctcaaagcacagctttgaagtttcagataaaactgacgtggtttgaagagattttcgaagagtatgacaaagaaaaaacgaacgagaatcgctttccatcacgaaagctagatctcattcgtcaaaatgatgttatcaagtcgggtt

SEQ ID NO: 7376 - DNA, 963 bp, Streptococcus pneumoniae
  misc_feature (1)..(963): tiling:Spneumo1:WAN024FMZ; WAN023P6Z pne53_26||||15471..16 433|+|963 bp|Type 25F capsule operon, Glimmer 2.02 orf pre diction|S.pneumoniae||WAN01UCCQ|ORF|000
ttgaaaaaaatagtatttttgtgtccctattttgggactttaccaccccatacgcagttatggttgaattcttgtaaaatgaatccgtctgtaacatggtatctatttacagatgacaagaggacatttgattatccggaaaatgtgcaagttttctatactactttggaagaaacaaaggcgttgtatcaaagaaaatttgactttgagatttctttagagggtgcttataaactaggagattataagcctttattcggctatctttatgaggaaatgatacaagagtttgatgcttggggacatattgatgtttatgatgaaatctatggagatattcgtgcatttgtaacagatgagttattagataaatacgataaattgatgttttttggacatatgggtatttatagaaattctcctgaagttaatcgcagatttaaattatcgtctgatttggatcgtacttatcaagaaatattttcttcatcacaattttataattttgaagaatatgttgcaggaagtatcactcgtgtttatcaaaaaaatggattcccaataggaagattagataaagtgattgcagatctttctggtttaagttatcatttccgacgtgggtattattcagatgattttgagacatttacctatttaccaaatctacctatgattttttcttgggaagatggaaaaacttattgttattcggtacaaaacaatcaagtgcaaaaaaatgagttcttgtatgtacactttaagcgtagaaaaatgattcagtctatttcaaatgatgtttctgcttatttaatcgttccaaatggttttgttgagatgcctaaagagataactgttgatttgattcaaaaatatagtcagaaaaaattattttatccagtctattttcaggaaaagtggaaaggtgtcaaacgattattgaagaaaatagggaggtcagaa

SEQ ID NO: 7377 - DNA, 1002 bp, Streptococcus pneumoniae
  misc_feature (1)..(1002): tiling:Spneumo1:WAN024BPZ; WAN023PBV pne43_15||||11535..12 536|+|1002 bp|Type 20 capsule operon, Glimmer 2.02 orf pre diction|S.pneumoniae||WAN01UCHC|ORF
ttgaaaaaacaaaaaatacttagcgtggtaattccatcctacaatgcggctccatttttgatggaaactattccgactctagtttctattagcagcagaaatgatattgaggttttgattgtaaatgatgggtctaaagatgagacacttcaagtggctcagaaactggaaaaagagtattctggcatagttagtataattgataaagaaaatggcggtcatggatctacaattaatgctgggataagggaagctaaagggaagtactttaaagttgttgatgctgatgattgggtagatagtgaaaactttgaaaagcttgtacaatttcttcataaaacagatgccgatgaaattatctctccatatacagacgtttttgaagatgatggtacaaaggtagaaaataactattttaaagattgttcattaaaaccataccaggattatgattatgtgaattttttagaacggattcaaattttacctagaatgcattctataacaataaaaacctctattttaagagataataacataaaaattgatgagaatatgttctacgttgacatggagtatattgtttttccaactccatttatcaaaacaataacttatacgcctgactctgtttatcagtatcgtagaggttacgagggacagagtacgagtattcagaactatataaaaaatagaaaaatggtaaatcatgtcacattcgctttgcttgacttttataataaacacactttatctaatattctggaaaaactagttaaagagacaattgctagatgtgttactattatgacaaatgtttgtctatcaatggaagatactaaacaaggtaaaaaggaacttcttgattttgatcagaaattaaaatcaataaattctgagttctattatcataaacaagggaaaaaagctaaagttctaagatattcaaattacttcttgtttgacttgttgtctagctactctaagaagtctaaaaaagta

SEQ ID NO: 7378 - DNA, 102 bp, Streptococcus pneumoniae
  misc_feature (1)..(102): tiling:Spneumo1:WAN024BNC; WAN023O9E spn029d10_24||||14956 ..15057|+|102 bp|Glimmer 2.02 orf prediction|S.pneumoniae| 23F-1|WAN01UCV9|ORF
ttgaaaaaacataataaaaataaagatgagacaaagtttgagctgaggagaaatcaagtaagttttgacacaatagaacgcatattatcaggtataaaaact

SEQ ID NO: 7379 - DNA, 84 bp, Streptococcus pneumoniae
  misc_feature (1)..(84): tiling:Spneumo1:WAN024DA6; WAN023SBF NC_003028.1_1532||||1 164276..1164359|+|84 bp|Glimmer 2.02 orf prediction|S.pneu moniae|TIGR4|NC_003028.1|ORF|010
ttgaaaaaattcaagcctatcattcttagaaaggaaaactatggcaaacattctcttggctgtaacgggttcaatcgcctctta

SEQ ID NO: 7380 - DNA, 87 bp, Streptococcus pneumoniae
  misc_feature (1)..(87): tiling:Spneumo1:WAN024BT3; WAN023YAY AL449931.1_72||||6134 7..61433|+|87 bp|Glimmer 2.02 orf prediction|S.pneumoniae| |AL449931.1|ORF
ttgaaaaagcttaatagtatgcgttttcttgtggagatatttccttcaatttttgctactatattaaacaaaaatcaaaaagcaaac

SEQ ID NO: 7381 - DNA, 2121 bp, Streptococcus pneumoniae
  misc_feature (1)..(2121): tiling:Spneumo1:WAN024BMS; WAN023O70 spn029h04_87||||69764 ..71884|-|2121 bp|Glimmer 2.02 orf prediction|S.pneumoniae |23F-1|WAN01UCO3|ORF
ttgaaaaaggtaaaattcatacaacaattatctgagaccagttgtggtttagcatgcatggcaatgattttagattattatgggcatgaggcaaacttatatgaattatgctgtgattttgagaattcaagggatggattatccattagagagattaaagatatagcttcttattttggattggattcaaaggcgactgagatcttaaatattaaaaaatttttggggaacaaatttgtagaaccttatatagctttaactcaaaatgctcattatattgtggtggaaaaacataatgagcatagtgtagtattcattgatccagaacgaggtagaattacagaagatatatcaaactttgcgaataatatatctggtattgtaattttcttctcaccaaataggaaattcactaaaaaaaagaagcatagtaatttttttaaaatattgaagataggtaaaattgatattaaaaggctatgttatatttctttaatatcaattttggtacagagtctcaccttattattacctttgctaacaaggtttattattgataatgtaattagcaaaggagaaatgtatcgtttagggatgcttttttcaatcttttctttaataacattttatgcattatttagctttatacgaactaaattaattattacagttgaaaagagatacatatttacattaaaagataaaattgttggcaaaattttcactctacctatgaaattttttgatagtagatcttcaggtgaaattgtaactcgaatcaataatttagattctttagagaaaataatttcaagtggaatatcaagtttgttaattgatctatctacaattattatcgcttttatagctatggcaatgatttcattatatttcacacttataatcacatgttttgctatatttttgtttattgttttatattttttgttaaaaaaattggaagaaaagaactcaaactttatcagttctaaagaattgactcaaggttatttgatggaaattttttctaatttattatttttgaaagtctcagcaaaaggagatgtttcatatactaagtggaaagaaatgtttagtaatgagcttaaatttgatgtagagcgtgaaaattatctaaatatttttcagacttttatttctatttatagactcgtaccaaacttactaattttaattttgggaggactagaagtacagcagcatatgatgtctctggggagtttaatgtcatttttatcattggtatctttgcttctttcacctattactctaatcgtacaaaactgttttcaatttcaattttgttttacaattttagatagagtgtttgatatcatttatactccagaagaaaaaaatcaattttctatttctaaactacccccatttgaaatgatgactttcagaaatttgagttttgcttatagtagtgcctgtaaagttatttatgatatatcattaactattaagaaaggtgaacgtattgctatagtggggaggacaggttgcggaaaaactacacttattaaattattgctacggctgtatgatgtagagaaaaatacgattttatataatggtaatgatattaatttatttgatttaaatagttataggaagagtttcggagttgttttacaaaatgatgtaatgtttaacgacactgtgatttccaatatagatttaactcatagccattctatggaggatgtcatttctgcagcaagtttagctgaattagatatagagattaataatatgcctatgggatactatactagtattggggataatggtaacaatttatcaggtgggcaaaggcaacgcttagcaatagctcgagccattttgcaaaatccagagattataatttttgatgaaggtactggtcaattggacactataacagagaagaaaataatggataatttaaaacataaaggaattacccaaatttttataactcatagactatctaacgctcaggaatacgataatattattgttatggataacggtaaaatcatagatagcggaaaacatgatgagttatgtggtaaagaaggtatgtataaaaggctttttgaaacctcatataat

SEQ ID NO: 7382 - DNA, 81 bp, Streptococcus pneumoniae
  misc_feature (1)..(81): tiling:Spneumo1:WAN024CWB; WAN0246PW 203669-14-1_1||||187. .267|-|81 bp|Glimmer 2.02 orf prediction from Patent Seque nces|S.pneumoniae||WAN0246ZO|ORF|000
ttgaaaaatctcatgttcagttatcagagtgaaaatcttttcatctacaaaatgaaaggcatgtctgagattaccctctat

SEQ ID NO: 7383 - DNA, 87 bp, Streptococcus pneumoniae
  misc_feature (1)..(87): tiling:Spneumo1:WAN024BZF; WAN023SAB NC_003028.1_1847||||1 396361..1396447|-|87 bp|Glimmer 2.02 orf prediction|S.pneu moniae|TIGR4|NC_003028.1|ORF
ttgaaaacagatgagtataaaattgaattgcttataaaaaagctccatacactggatgtgtatagagcaatggggctttatttgata

SEQ ID NO: 7384 - DNA, 96 bp, Streptococcus pneumoniae
  misc_feature (1)..(96): tiling:Spneumo1:WAN024BSL; WAN023THC BD140009.1_1||||136.. 231|-|96 bp|Glimmer 2.02 orf prediction|S.pneumoniae||BD14 0009.1|ORF
ttgaaaaccggttctaaggtaattggaactaagatggaaatagacgatgaaggaaacgctgacatgctgcgaactattaagcgctatgaaaattta

SEQ ID NO: 7385 - DNA, 93 bp, Streptococcus pneumoniae
  misc_feature (1)..(93): tiling:Spneumo1:WAN024BMJ; WAN023O3U spn041h04_26||||19069 ..19161|+|93 bp|Glimmer 2.02 orf prediction|S.pneumoniae|2 3F-1|WAN01UCLF|ORF
ttgaaaagagtttttcatcattctcccttccttcacttctttcctgctatcctttcttttattttatcatatatttatatagattttaagccc

SEQ ID NO: 7386 - DNA, 219 bp, Streptococcus pneumoniae
  misc_feature (1)..(219): tiling:Spneumo1:WAN024BNR; WAN023OBS spn019g01_43||||30491 ..30709|-|219 bp|Glimmer 2.02 orf prediction|S.pneumoniae| 23F-1|WAN01UCLR|ORF
ttgaaaaggaaacagaaaatgacaaaaattgaaatcgttatggtacttacaactttgatgtctatcacatgggcagcgattgttacaattcacactatgcaagctatcaaaaagcacaaggcaaaagtggattattatcagaaaccacaagtgcaatgtgagattgcacgtcatgtacttaaaaacaaatggtactcagatggtggggaggtgtttaga

SEQ ID NO: 7387 - DNA, 81 bp, Streptococcus pneumoniae
  misc_feature (1)..(81): tiling:Spneumo1:WAN024BT2; WAN023Y2Y AL449935.1_55||||4356 0..43640|-|81 bp|Glimmer 2.02 orf prediction|S.pneumoniae| |AL449935.1|ORF
ttgaaaagtctaggcaaaattcaatttgagaagaaaagacaactaattttatggtctattaaacgcattgtatcacgtttt

SEQ ID NO: 7388 - DNA, 1212 bp, Streptococcus pneumoniae
  misc_feature (1)..(1212): tiling:Spneumo1:WAN024DBD; WAN02442F spr0971|mefE|15903015 |NP_358565.1|953383..954594|+|1212 bp|ABC transporter memb rane-spanning permease - macrolide efflux|S.pneumoniae|R6| NC_003098.1|ORF|100
ttgaaaatagataaaaaaaacgaggctttccttattgtaagtagaggcatatctcgaattggagatattatgtttgactttgcgaataatacctttcttgcaggattaaatccaacatctttatcattggttgcagtatatcagtcactagaaagtgtgataggtgttctttttaatttatttggtggagtcattgcagatagtttcaagcggaaaaaaattattattgttgcaaatatcttatgtggtattgcttgtataattctttcattcatatcacaagagcagtggatggtctttgcaattgtcatcactaatattatcttggcatttatgagtgctttttctggaccgtcctataaagcatttacaaaagaaattgtaaaaaaggatagtatatcacaacttaattcattgctagagataacaagtactataattaaagtaacaataccaatggtagcaattttattatataagctacttgggatacatggtgttttactattggatggattctcatttctaattgctgcatcactgatttcctttattgtacccgttaatgacgaagtggtcacaaaggataaaatgacaataggaggagttttaaatgacttaaaaatagggtttaagtatatttatagtcataagacaatatttatgattattattctctctgcttttgttaatttttttctagcagcttataatttattgttaccttatagtaatcaaatgtttggagaaatttcagatgggctttatggtgtttttctaactgcggaagcaattggaggatttattggagcgatattaagtggtgttataaataaaaccttgtcaagcaaacgtttaatggtcttcttatcatgttcaggattgatgttaatgctatcaacgccactctattttttgtttcaaaacttcattattctagccttttctccggcattatttagtctatttatttctatttttaatattcaatttttctctattgttcaaagagaagttgatactgagtttctcggtagagtctttggaatcatctttacggtagctattctttttatgccagttgggtctggatttttctcagtagttttaaatcctaacaatacttttaatctttttattattggtgtatctattacgatattatcgctaatattcagcacgctattgaagaggtatgataaaaatagctga

SEQ ID NO: 7389 - DNA, 102 bp, Streptococcus pneumoniae
  misc_feature (1)..(102): tiling:Spneumo1:WAN024DP5; WAN023SKA NC_003098.1_1294||||1 010073..1010174|-|102 bp|Glimmer 2.02 orf prediction|S.pne umoniae|R6|NC_003098.1|ORF|100
ttgaaaatctacaacaagttcacttactcgttcaattgtaaatcaatattttttcaaaaaattgcgaaaacgcctttctttttctactatagtgaaatgaaa

SEQ ID NO: 7390 - DNA, 90 bp, Streptococcus pneumoniae
  misc_feature (1)..(90): tiling:Spneumo1:WAN024BCL; WAN023SJQ NC_003098.1_1491||||1 181035..1181124|-|90 bp|Glimmer 2.02 orf prediction|S.pneu moniae|R6|NC_003098.1|ORF|100
ttgaaaatctcttcaaaccacgtcagctttgccttgccgtactcaagtacagcctgcgactcgcttcctagtttgctctttgattttcat

SEQ ID NO: 7391 - DNA, 1628 bp, Streptococcus pneumoniae
  misc_feature (1)..(1628): tiling:Spneumo1:WAN024BMR-5; WAN023O6Z spn029h04_88||||718 94..75148|-|3255 bp|Glimmer 2.02 orf prediction|S.pneumoni ae|23F-1|WAN01UCO3|ORF
ttgaaaatgaatcgaaaattaaacataacagattttaaagatgcttcttatttctctgaaagaaaaatttctagtcatgatttaggggatggtttgaaatcaagaaaaagaaaagagtattgggataattttattggagaaggttctaatgaattttggaaatatttacaagaaaaaaatgatttttctaaacatgatttagatatttttttggaagaacatacatatgatgtgaaagatatagattcattttcacatatggacgaatttatagagttcttttttaagagaaatgattatacattaccagagttttatatagttgacagtgagggaaaacgaaaacctattttcagtaattttgtcataccatttttaaaatttgccgcctataaacttgaagataatttgagtagtcagaatttgaaagtcactagagacgtcttgaatagtttattaattgcgttattccaacaaattttgaatatttcttacagaacattgatattagaattacaagttctgaaagaacaaaatatgttaaaaggtgaaactggagaaaaaagatttaaatatttttcagaaatatacttatcagaccatttttgggatatattaaaagaatatcctgttatgtttcgattaattattgaaaatattcaaaattgggttactaataatgtagaatttttaacaaacctaaaagaagataaagcattattacaggaacatttttctatcaatggggagttaacaaagattgaatctggtgtgtcagattttcataatcatggaaaatcagtatatctcctttggtttggaacaaataagttagtatataaaccaagagatttaatattggatgtgaagtttcaaaacttgcttagctggtacaacctgaaattcaataaaaatctatatgtaacaaatattttgaatcgtggaaattatggatgggtagagtacatagaacacttaccatgcacatatgaatctgattttattcagttttatacacatctaggatacttgttattcttattatttgctatgaggggaaacgatattcattttgaaaatatcatagctaagggtaatagaccagttcttgtcgatattgaaacattatttcataatacaacggaatacagaaaggaatacgaaacggcagataaactaatattctctttattagaaaaatctgtgaaaagagtaggtattttacctaatatagtttggggtaaagatgggaactctggggtggatattagcggtctaagttcaagcgcaggagagatgattccgattgaacgtgcaagtatcatgcatagtatgacggatgaaatgaaaattggttatgaacaatccgcattgcaaagtaaagataatcagccttttattcaatcgggcaaggatgttgatttgaattcatataaaaattacgtttctgctggctttaaagaagcttatgaaattatttcaaaagatccttcatcaatagaagagtttctggttgagatagaaaaatttaataatgcgtattctagacaaataatgaggcccacacaattttattctaatttaatacaaacatcttatcatcctagttttttaaggagtggtctaga

SEQ ID NO: 7392 - DNA, 129 bp, Streptococcus pneumoniae
  misc_feature (1)..(129): tiling:Spneumo1:WAN024BKZ; WAN023N6A spn150h11_6||||10735. .10863|-|129 bp|Glimmer 2.02 orf prediction|S.pneumoniae|2 3F-1|WAN01UCW9|ORF
ttgaaacaagaacaggacaaaagaaccttttgtgccatatttttctcctttcgctttacaattggcttgaacacctttattgtatcgcgtttggagtttttttggtataaccttcgacgcgcacccgca

SEQ ID NO: 7393 - DNA, 867 bp, Streptococcus pneumoniae
  misc_feature (1)..(867): tiling:Spneumo1:WAN024BTA; WAN023YJT AL449929.1_29||||2885 0..29716|-|867 bp|Glimmer 2.02 orf prediction|S.pneumoniae ||AL449929.1|ORF
ttgaaacataaaaaagtattaattatagggtatggtataatgactcggggtatattaaaaatcctgaaacagtcgaaaaaatataatatatacctatatagtaggcatctaaattcaacaataaatggaataatatttattagagaagatgaattacctgatgctataaatcaggttgattttataatcacttgttttagtaatcatattgaaacggataatttcattaatgagtttttattaaatatacaatcacttcgtaaaaccatagtaattgattttacaacctccaggattgattgcgttgaaaaatttaaaaaaactgttgaaattaaagggggatactatatagaggctcctttcacaggaggtaagttaggaagtaatagtggtcaactatcaatttttttacatattgatgaaggtgtaaactataataaaaaggagttaatggaattattaaaattaatttcaaaaaaaatatacttttttgaaaagagtacggaaccaacaaaattcaagttaatttataactcgtggggagcgtatttgctttactctattaagctattcaaccctttacagtatgatttttcaccaaagtctctagaggtagcgaatacaatcgtatgtaatgatggttggatgagtttagtatgcaactccaaattagaacagatcaatgatcaagattttgatgacatacactttagagtagaatatatggtaaaaaatttagaatatgctaatttttcagtctttcatgatgaagtgaaagaaataaattatttattacagcaatatagggattgcttagtaactgatagtggaaaagattatacggtaataggaaagtatgataactta

SEQ ID NO: 7394 - DNA, 84 bp, Streptococcus pneumoniae
  misc_feature (1)..(84): tiling:Spneumo1:WAN024B54; WAN023O3G spn041h04_40||||35075 ..35158|+|84 bp|Glimmer 2.02 orf prediction|S.pneumoniae|2 3F-1|WAN01UCLF|ORF|001
ttgaaacgactggtaatgcctactagaattctccttagaaagcgtcgattcaagtggctatcactgttcaaaaatgatgggcgc

SEQ ID NO: 7395 - DNA, 105 bp, Streptococcus pneumoniae
  misc_feature (1)..(105): tiling:Spneumo1:WAN024BXT; WAN023RVN contig_1609_57||||465 07..46611|+|105 bp|Glimmer 2.02 orf prediction|S.pneumonia e|670|WAN01UDCD|ORF
ttgaaagaagtatcacaacaaaaaaagagaacgagccaaaacctcgttctccttaaaatgataaaacgttactatcaaagtaaaaaagatgacttacagaacctg

SEQ ID NO: 7396 - DNA, 225 bp, Streptococcus pneumoniae
  misc_feature (1)..(225): tiling:Spneumo1:WAN024CWU; WAN023K9B 82385_101||||57681..5 7905|-|225 bp|EGAD orf prediction|S.pneumoniae|TIGR4|WAN01 UC25|ORF|010
ttgaaagagaagttttctatattcgcattgctagttctaaattttaacaacaacaatataaatagagcaagtaaaaatatgcctatatctatcttaaccaataaaataaatcctactgccacctgtaaaaatgatgcgaatgaattaaaaatagaatctaatactttatacgaaatactaaaaagagaatttgcaaatacaatcttatcatattctaccacttga

SEQ ID NO: 7397 - DNA, 123 bp, Streptococcus pneumoniae
  misc_feature (1)..(123): tiling:Spneumo1:WAN024BWC; WAN023R0J contig_1407_1||||102. .224|+|123 bp|Glimmer 2.02 orf prediction|S.pneumoniae|670 |WAN01UDX7|ORF
ttgaaagagtcccaactcaacagtaaccagacctttctgcttccaatctctcaagatgctactaattgcctgaatctttcccgttatttcagttcaggcgatattagacaagtcagcagcagc

SEQ ID NO: 7398 - DNA, 75 bp, Streptococcus pneumoniae
  misc_feature (1)..(75): tiling:Spneumo1:WAN024DCV; WAN023T3T BD003702.1_43||||2752 3..27597|+|75 bp|Glimmer 2.02 orf prediction|S.pneumoniae| ATCC55840|BD003702.1|ORF|000
ttgaaagatggggaagttcacagaaaaaagaattttttaatagattctagctttcctataggtagggaaaataag

SEQ ID NO: 7399 - DNA, 285 bp, Streptococcus pneumoniae
  misc_feature (1)..(285): tiling:Spneumo1:WAN024EUP; WAN023II9 86271_3015a||||171301 9..1713303|-|285 bp|EGAD orf prediction|S.pneumoniae|TIGR4 |WAN01UC25|ORF|010
ttgaaagcgaagctgtttagccaagtcatagtaaggactaaacatatccatcgtaatgattttcacttgacaacgaacggctctatcgtagcgaagaaagtgatttcggatgacagcttgtgttctgccttcaagaacagtgataatattaagattatcaaaatcttgcgcaatgaaactcatctttcccttagtgaaggcatactcatcccaagacataatctttggaagccgagaaaaatcatgctcaaagtgaaagtcattgagcttgcgaatgacagttga

SEQ ID NO: 7400 - DNA, 276 bp, Streptococcus pneumoniae
  misc_feature (1)..(276): tiling:Spneumo1:WAN024B4Z; WAN023IJ2 86220_2974a||||168379 0..1684065|-|276 bp|EGAD orf prediction|S.pneumoniae|TIGR4 |WAN01UC25|ORF|010
ttgaaagcgaagctgtttagccaagtcatagtaagggctaaacatagccatagtaatgattttgacgcgacatcggacggctctatcatatttaagaaagtgatctcggatgacagcttgtgttctaccttcaagaacagtgatgatattgaaattgttaaaatcttgcgcaataaagctcatctccatctcccgattgaaacagtcactccccggactgtttcaacgtcccaggacataatctcaggaagacgcgaaaaatcatgctcaaagtga

SEQ ID NO: 7401 - DNA, 324 bp, Streptococcus pneumoniae
  misc_feature (1)..(324): tiling:Spneumo1:WAN024B52; WAN023JF1 84409_1618b||||928436 ..928759|+|324 bp|EGAD orf prediction|S.pneumoniae|TIGR4|W AN01UC25|ORF|010
ttgaaagcgaagctgtttagccaagtcatagtaagggctaaacatatccatagtaatgattttgacgcgacatcggacggctctatcatatttaagaaagtgatctcggatgacagcttgtgttctaccttcaagaacagtgatgatattgagattgttaaaatcttgcgcaataaagctcatctccatctcccgattgaaacagtcactccccggactgtttcaacgtcccaagacataatcttaggcagatttctaaaattacactcaaagtggaagtcattgagctttcgaatgacagttgaagttgagatggaaagctga

SEQ ID NO: 7402 - DNA, 1122 bp, Streptococcus pneumoniae
  misc_feature (1)..(1122): tiling:Spneumo1:WAN024BPB; WAN023OKC pne86_14||||8998..101 19|+|1122 bp|Type 43(2) capsule operon, Glimmer 2.02 orf p rediction|S.pneumoniae||WAN01UCFZ|ORF
ttgaaagctaaaatgttaatttgtataactagtttaacaggtggaggagctgaaaaatcacttgttaactttattcaagaatttgaaagtatgtttgaaattagcattctagtatatacggaaaaaaataatttttatggctcaaaattaagtcatttaaggattgattattttattagaaagaatacaccagctattattgaaaaaatagtgaataagcttgttaagttattaccaccgtcatttgtgaatagatggattatacagagaagtatttttaaaaatgaaaaatttgattatgaatttgcatatatggaaggaaaacctacaaaaatcatagcgggatcatcgaatgaagatagcttaaaactggcttatatccattgcgatttctcaaaaaattggtattcaaaacgatcgtttaaaaattttaaagaggaattgacttgttatcaaaagtttaattcaatcttagctgtttctactccacaaaaagaatcctttgaggagatttttccaaagacaaatttagaagtaatccctaacttgcttaacattgatgaaataaaaaatttaagtaaagaggaaatagaattagaaaatattccttatttttgtgcgataggaagattagaacttgttaaaaattttgaattattaataaatgcttttcatttatttagaaaaaagtattcacaatatcatttaattattttgggagatggtagtttatatgatcatttaaagaatcaaattaacaatctaggagagagccaatatataaaattattaggttttcaatctaatccatataaatatataaagaatagtgtgggattaattcaaagttcagtatcagagtcttttagttatgtattagcagaagcagctgctttaggcattcctagtatttcaacaaaaactcaaggttctgaggttatgtcagaatatttcgaagtaatccaggtagagcatacgagtaacgaattagcaaaagggctagagaaagtcattgcgaacaactttgttaacgttcattttaattttaatgaagaagcttattacaaatttttagagatatttaagaaaggaagtagaagttttgaaattcgaagagaaata

SEQ ID NO: 7403 - DNA, 222 bp, Streptococcus pneumoniae
  misc_feature (1)..(222): tiling:Spneumo1:WAN024BMW; WAN023O7F spn029h04_72||||58866 ..59087|-|222 bp|Glimmer 2.02 orf prediction|S.pneumoniae| 23F-1|WAN01UCO3|ORF
ttgaaagctattgtaaaaaatccaaaaagactatttgaacttttgagattatattttgttccagtaaaaggtaggaaagtagttcatgtaccagcttatgcttataaagaagatgaaaatgaaaagatttatctccataacaatgaacttcatttatctaaaaagatgtttgaatttctagtaaatcaaggtttagatttagtagaatgtcttccagaagag

SEQ ID NO: 7404 - DNA, 471 bp, Streptococcus pneumoniae
  misc_feature (1)..(471): tiling:Spneumo1:WAN024BO2; WAN023OC8 spn019g01_25||||23419 ..23889|-|471 bp|Glimmer 2.02 orf prediction|S.pneumoniae| 23F-1|WAN01UCLR|ORF
ttgaaaggagggtggaaattgcctagagatggaactaaaaatttaaaaccagttacagaacgaaccaaagatgaagcaagagctattagctcaaaaggaggtaaagcatctggcatagcaagaagaaaaaaagctgatctcaaaaaagcatttgaaaccctcttatctttggatgtgacggatagtaaaatcaagaaacaacttgaggagatgggtatggctggcaataacgaggctttgctagcctttgcaacctttcagcaagctgtaaaaggcaatcagaaagcgactgagaacataatcaagctgacaaatactaaagataaatacgatatacaagaacagaaagagcgtattaaagcactcaaatatgaaaatagagagcgtgctgaagctgagaaaggctcaagtgaaactatcgagatagtggatgcatgggctgaagatgtgaggggggcaacggatgacctt

SEQ ID NO: 7405 - DNA, 255 bp, Streptococcus pneumoniae
  misc_feature (1)..(255): tiling:Spneumo1:WAN024DX9; WAN023KF8 313061_3560b||||19104 28..1910682|+|255 bp|EGAD orf prediction|S.pneumoniae|R6|N C_003098.1|ORF|100
ttgaaagtcaaaaacatactaatgaaacctatcagtaaacaaatagctgatatccatggcatcaaggcttttacatctaaaataatttcgtgggattcgacacgtgccttaaacatccctacaaacatgcccaagaacccccccaagacaatagacatcaaaaataacaatctacgtttctttttcatattcattctcctttttcacttgctagatttttggatttcttttcaatccattcaattactgggatga

SEQ ID NO: 7406 - DNA, 231 bp, Streptococcus pneumoniae
  misc_feature (1)..(231): tiling:Spneumo1:WAN024C7J; WAN023M7T 313424_455||||234726. .234956|-|231 bp|EGAD orf prediction|S.pneumoniae|R6|NC_00 3098.1|ORF|100
ttgaaatcaaaacactataggcaaccacattcccatcaactggcaaaaaagtcaggtaattctccaagggaatggttaatgcaaaggttgcaaagagagtcaagaggccctccatcgtcatggtcgctagacctcttatcttcaaaagttcatgcatggctagcatggctacgattccgattgctatctgaagcaagaggcccccaatcattaaaattggtaggaaaatag

SEQ ID NO: 7407 - DNA, 60 bp, Streptococcus pneumoniae
  misc_feature (1)..(60): tiling:Spneumo1:WAN024AJR; WAN024CR1 TIGR4.IG_623||||64050 0..640559|+|60 bp|Between SP0664 (+ strand) and SP0665 (+ strand)|S.pneumoniae|TIGR4|NC_003028.1|IG|010
ttgaaatctctcatctgctttgcggatgagggttttcttattttatgctatacttaaggt

SEQ ID NO: 7408 - DNA, 84 bp, Streptococcus pneumoniae
  misc_feature (1)..(84): tiling:Spneumo1:WAN024BN9; WAN023O8A spn029h04_41||||29528 ..29611|-|84 bp|Glimmer 2.02 orf prediction|S.pneumoniae|2 3F-1|WAN01UCO3|ORF
ttgaaattagttaaaaatttttataaaatcaagatgcaaggctatgagatgttctctagtttaatttttcatacttcgagaata

SEQ ID NO: 7409 - DNA, 1416 bp, Streptococcus pneumoniae
  misc_feature (1)..(1416): tiling:Spneumo1:WAN024BOM; WAN023OFN pne92_17||||13416..14 831|+|1416 bp|Type 48(1) capsule operon, Glimmer 2.02 orf prediction|S.pneumoniae||WAN01UCEA|ORF
ttgaaattattaaaaaactacatatataatttggtttatcaaatagtagctattattttaccattggtgaccattccatatgcttctagggtcttaggtgcagaaataattggtattaattcatatacaaatacaattatttcttactttgttctgattgcaaatgttggattaactacttatgggaatagaacgatttcgtatactagagattctgttttaaaaagaagtcaaaaattctgggaaatctttgtcataaaaattattatggctttgttttcattgtcactgttttttacctttacatttatttatagagagtatacaactttcttatatatacagtctattcaaatccttgcaacagcaatagatatttcttggttttttacaggaatggaatattttaaaagaacagtcactagaaatatattgacaaagatattatctgcaatttgtattattggatttgttaaaagtagggaagatttatggttatatatattaattttagttctctcaacttttttagggaatttaactttatggacatatgtttttgatgcgattgaagtaattaattttaaaagcttgcaacttaaagagcatattaaacctgtatttgtgttatttatacctcaattggcaacaactctttttctcacattaaacaaattgttgttaggaaacttatcaacattatctcaatctggctattttgatagtgcagacaaagtgatacgaattttactgacatttatcacagctattgggacagtaatttttccaagactggcgaatagctttaatagaggagaaaaaagaaatgtcgaagaattattaaaactatcttttggtgctattaatattattgctttcccaatgattgttggtattatggtaatcggaaggccattttcaatccttttttttggaagtgaatttgaaggaattgaaattgttttggggatattatcaatagaattggtttttatgggctggtcatcagtcttaggtaaccaatttttagtagctgttaataagacgaagggcttaactgtttcagtgtttattgcttcattaatcttgctcatatcctctttcatattgattcctatgttaggagcttctggagcttcaatttcatcagttataggagaggcgacaatagctttggtgcagttatattatgtttcaaaacatactagattatgtttattatttagtgatatttctaaaattttagtttctagtctcataatgggaacgacttgtttggtaattgggagttgtttttatgatggtattatgaaactctgtgttcaaggaacagttggtttaatggtatattgtataatgatttggtatagcaggactgaaattgtaaatactatacttaaaaaaataaagatacag

SEQ ID NO: 7410 - DNA, 1095 bp, Streptococcus pneumoniae
  misc_feature (1)..(1095): tiling:Spneumo1:WAN024BPA; WAN023OKB pne86_15||||10100..11 194|+|1095 bp|Type 43(2) capsule operon, Glimmer 2.02 orf prediction|S.pneumoniae||WAN01UCFZ|ORF
ttgaaattcgaagagaaatataacacattgttcaatataattttttctctgttaacaatattgtatctactgaaatttgtaaatattgacagaattgatggaatttctattgtaatccttatatgtatattattcctgtttgtgatgcatagtcttaaatatggaataaatagattaaaactaacttccttaatattgttttttttaacatttattttgaatctttttaatggttctacatttctagaaataacgtacttcttcttattatatacaattatattaaaagataataaaaaatttttcaaaatacattttattacacttacagtattcgtgttaacaattatattattgtcccatattggctatattagtaattttgtgatatatagatcaaatggtggtattaggaatagtttaggatttgtacacccgaattcattagggttaatgatctattccttaaccgtttgtagtttaaatctttttgaaataaaaagattcaaattcttcttctatttatttttattattgatgaatttatggatattacagttagcagactctagaacatcaggatatataagtattttagtaattgtcttttgttacttttttgataaaataggtaagttaaatagaccgttgagtagtttttttattaatttggctattacaatgtctgttttgtttataactttaatgtcaattaattttgaagccagtcatattttccaattcttaaataaattgttcactaatcgaatttttagtagttatgtattttttagagaatatggggttactctatttggcaaaagaattgatggaattgtctcattagttcaaggaacagtcataattgacagtggttatataggattgctattacaaaaaggaattattttttttgtgttatttttgctatttattttttctagaataaaagaatactcatttacactaagagaaggtattctactgattagtgtatttatttctcttatgtttgagagctatggttacaccgtatttctattcccaatattattttttgattatttaggaaaaaggaaggaaagtattaatgaa

SEQ ID NO: 7411 - DNA, 651 bp, Streptococcus pneumoniae
  misc_feature (1)..(651): tiling:Spneumo1:WAN024DBG; WAN02442O spr0962||15903006|NP_ 358556.1|943148..943798|+|651 bp|Conserved hypothetical pr otein|S.pneumoniae|R6|NC_003098.1|ORF|100
ttgaaattgggaacttccaatataatgaaagtaggagataaagtgaaaaaagcattaataattactgcccatccagatgatgctgaaatttctatgggtggacatataattaatatggttaataatggttattatgtcaaactactggttttatcagttccagaagataaaacgaggattttagaagcaggaaagtctgcagaatttctagggatagaattaaaaatagttggtgacaaatctcaagtttctcagtttagttcaagtgaattagtttcaattattgataacgaaattgaggaatttgatccatcttatgtttttacacattgggaaaatgatgcccataaagatcatcgaataatatttaaagctgtgcagtcctctagtaggtgtcattcgtttacttttctatcgttttctcctcctaatatatatgttagcaatgctttgcagtttgttccaaatatttttgtagaaatcaatattgagaaaaagttgagggctattgaattccatagaagtcaagtgaatcaaaagtcatatccaatagatggacctaaagttcaatctgtcttatttggtaaacatataggagtagattatgcagagggatttatactgattagacacatagatagaaagtgttaa

SEQ ID NO: 7412 - DNA, 108 bp, Streptococcus pneumoniae
  misc_feature (1)..(108): tiling:Spneumo1:WAN024F87; WAN023O5F spn029h04_144||||1256 32..125739|+|108 bp|Glimmer 2.02 orf prediction|S.pneumoni ae|23F-1|WAN01UCO3|ORF|001
ttgaaatttggatttttatattttaagatttcgtctatgatggatcgagttctgcttatagtctcagcagttgcttctgtctctgaagaaaagagagtcggagaaaaa

SEQ ID NO: 7413 - DNA, 96 bp, Streptococcus pneumoniae
  misc_feature (1)..(96): tiling:Spneumo1:WAN024G6Y; WAN023NNK spn097d12_40||||35062 ..35157|+|96 bp|Glimmer 2.02 orf prediction|S.pneumoniae|2 3F-1|WAN01UCN2|ORF|001
ttgaaattttcttcatacttggacttcctttccgtttttatttattgtacaataaataaaaacggatttaatttttgttgggaaaatgggaaatta

SEQ ID NO: 7414 - DNA, 84 bp, Streptococcus pneumoniae
  misc_feature (1)..(84): tiling:Spneumo1:WAN024AT5; WAN023RNE contig_1578_1||||38.. 121|-|84 bp|Glimmer 2.02 orf prediction|S.pneumoniae|670|W AN01UDGZ|ORF|000
ttgaacaagaatctttacactgctagtatagcactcattttgaccttggattactcaaatcatgaatggtcatcaaaacatctt

SEQ ID NO: 7415 - DNA, 288 bp, Streptococcus pneumoniae
  misc_feature (1)..(288): tiling:Spneumo1:WAN024FXJ; WAN023L9Y 314762_2197||||117943 6..1179723|-|288 bp|EGAD orf prediction|S.pneumoniae|R6|NC _003098.1|ORF|100
ttgaacacggtagccgcggtttacttgaacttttccatcacggtcaacccaaggaacacggaaagaaatcacgcgctcaggctcagtaatacgtgccaagatattttcttcgatatactcagggtgtttttcaaatacaggttccaaagtgttgaaaaattcttcaacagcttggaggaattcagcctcgtgcccgttacgagcttttacagtttcaaacacgctttggatatattctttagcagatgtcatatcgttctccttttattgtcatattttattacataa

SEQ ID NO: 7416 - DNA, 285 bp, Streptococcus pneumoniae
  misc_feature (1)..(285): tiling:Spneumo1:WAN024GKE; WAN023M09 313340_859||||456898. .457182|+|285 bp|EGAD orf prediction|S.pneumoniae|R6|NC_00 3098.1|ORF|100
ttgaacagtagaattaagaatggtaacctgcttgtctgtaacgatatatttttctactgggtcaccttcctcacttacgaaaccgggcgtagaaccactgactgttttcgcacctgtttccagcaccttcactggatcaccatcaaaatcagggtcagcaaacaaattggtaacatttcgaaaatcaataatcgtaaaaaattctttccccttttgaggataaagacgtgtgccacgaccaataatttgtttaaattcagtcatggattggatattagagtctaa

SEQ ID NO: 7417 - DNA, 243 bp, Streptococcus pneumoniae
  misc_feature (1)..(243): tiling:Spneumo1:WAN024F6H; WAN023K9L 82348_73||||38043..38 285|-|243 bp|EGAD orf prediction|S.pneumoniae|TIGR4|WAN01U C25|ORF|010
ttgaaccacaatcagtgccaacatggcaaactgggcactcccagcataaacaaagagactcatcaagcccatctcaacaggtgtcacatagggcgcaccgataattccacaggccaggccgatactgacatagccaagagccgttggcatggctgcctgcgccccctcctaaaatcctttttctttcatctttctcctcatattgtcttaataatactcaatgaaaatcaaagagcaaactag

SEQ ID NO: 7418 - DNA, 237 bp, Streptococcus pneumoniae
  misc_feature (1)..(237): tiling:Spneumo1:WAN024DMB; WAN023I15 87287_3773||||2148895 ..2149131|-|237 bp|EGAD orf prediction|S.pneumoniae|TIGR4| WAN01UC25|ORF|010
ttgaaccagtcattccagaaaccaagagctgttaagagcgtgatggttgcgatacctggtagtgacaatggcaaacagatttggaagaaaatccgggcctcactggcaccatcgatacgagccgattctagaatggcttctggaatggtcttcttgaagaaggaacgcatcaagatgatgttaaatggtgagagaagcattggaacaatcaaggcccaaacagtgtcaccaagctga

SEQ ID NO: 7419 - DNA, 75 bp, Streptococcus pneumoniae
  misc_feature (1)..(75): tiling:Spneumo1:WAN024AZO; WAN023VMJ AX571724.1_1||||121.. 195|+|75 bp|Glimmer 2.02 orf prediction|S.pneumoniae||AX57 1724.1|ORF|000
ttgaactacaagtcccccagagaagacttctggatgactaacttgaacttgaaatttagcaataatctaactaat

SEQ ID NO: 7420 - DNA, 81 bp, Streptococcus pneumoniae
  misc_feature (1)..(81): tiling:Spneumo1:WAN024D8L; WAN023SOO BD004010.1_3||||1269. .1349|+|81 bp|Glimmer 2.02 orf prediction|S.pneumoniae|ATC C55840|BD004010.1|ORF|000
ttgaactacttcctctttgatataaaaatcatgtatatcgataatgaagatgcctccttcataaaaccggtactaactaat

SEQ ID NO: 7421 - DNA, 78 bp, Streptococcus pneumoniae
  misc_feature (1)..(78): tiling:Spneumo1:WAN024BLP; WAN023NIN spn111e04_30||||21552 ..21629|-|78 bp|Glimmer 2.02 orf prediction|S.pneumoniae|2 3F-1|WAN01UCND|ORF
ttgaactgtcatagcttttctctcttttctattatttattgccttttaagctggtttaacaaatttaagttggatttt

SEQ ID NO: 7422 - DNA, 150 bp, Streptococcus pneumoniae
  misc_feature (1)..(150): tiling:Spneumo1:WAN024BX7; WAN023RP1 contig_1583_21||||654 5..6694|+|150 bp|Glimmer 2.02 orf prediction|S.pneumoniae| 670|WAN01UDGB|ORF
ttgaacttgaaaacccgtgtatggcttttggctaatcatgaagaaaaaaaacgaattgctggatcttgggctaacgtcaaagaccagatatgtgaagcgagttctggaactaggaaaggtgtatgctcatgtttgattacgacagagaca

SEQ ID NO: 7423 - DNA, 111 bp, Streptococcus pneumoniae
  misc_feature (1)..(111): tiling:Spneumo1:WAN024FCW; WAN023SI7 NC_003098.1_2090||||1 618972..1619082|-|111 bp|Glimmer 2.02 orf prediction|S.pne umoniae|R6|NC_003098.1|ORF|100
ttgaagacatgtgtagagatacatggaattagcaatcaaaaaatcccaatggctataattgatgatactgtctatatgagtgctgtattttggaaaaattacttaaccttt

SEQ ID NO: 7424 - DNA, 81 bp, Streptococcus pneumoniae
  misc_feature (1)..(81): tiling:Spneumo1:WAN024ETA; WAN023YK3 AL449929.1_19||||1926 0..19340|+|81 bp|Glimmer 2.02 orf prediction|S.pneumoniae| |AL449929.1|ORF|000
ttgaagagacataaactatcctttctttatcctacttcaacagaaggttcattggttgattttccaattctcggtacaact

SEQ ID NO: 7425 - DNA, 93 bp, Streptococcus pneumoniae
  misc_feature (1)..(93): tiling:Spneumo1:WAN024D36; WAN0246R0 203667-64-5_3||||1678 ..1770|+|93 bp|Glimmer 2.02 orf prediction from Patent Seq uences|S.pneumoniae||WAN02470J|ORF|000
ttgaagatagaaagtagatttgagaaaaacgagatcctagccccaagtaatttccaattgatagctggcaaagggatgcccctcttgattttg

SEQ ID NO: 7426 - DNA, 93 bp, Streptococcus pneumoniae
  misc_feature (1)..(93): tiling:Spneumo1:WAN024BH3; WAN023NUZ spn067g02_3||||1525.. 1617|-|93 bp|Glimmer 2.02 orf prediction|S.pneumoniae|23F- 1|WAN01UCXT|ORF|001
ttgaagtgcccaactccgatattgccactgtatctttccgagaactatgggaacaatcgcaaacgaaagcagaaaatttcttggaaattcctt

SEQ ID NO: 7427 - DNA, 243 bp, Streptococcus pneumoniae
  misc_feature (1)..(243): tiling:Spneumo1:WAN024BUQ; WAN023Q9D contig_1258_28||||125 24..12766|+|243 bp|Glimmer 2.02 orf prediction|S.pneumonia e|670|WAN01UEG8|ORF
ttgaagtttatgagtgatatgaaatttcaattgaactcggctggggtgtctgccttgctacgttcttccgaaatgcagggtattttgagggagaaagggcaagggattgctgaaagagctggtgaggggtttgaattgactgtatcgccagggcaaaagcgtgccaatgcaaagattagtacgactgatatcaagagcatggctagaaataaaaaacataatattttactgaaggctatgaga

SEQ ID NO: 7428 - DNA, 180 bp, Streptococcus pneumoniae
  misc_feature (1)..(180): tiling:Spneumo1:WAN024BKJ; WAN023MP0 spn180c09_132||||1078 41..108020|-|180 bp|Glimmer 2.02 orf prediction|S.pneumoni ae|23F-1|WAN01UCXQ|ORF
ttgaatagagaaatttctaagattaactacaaaattcatacagatgcaatcaaagaatatctcttaaaagatcttaccaacgaacagttgtcttacaagtatgtaagtgaagcagatatgatcaatgttgttttatttaacaaaagagctaaacagtggcgtgaagaaaataggaacaat

SEQ ID NO: 7429 - DNA, 291 bp, Streptococcus pneumoniae
  misc_feature (1)..(291): tiling:Spneumo1:WAN024CQN; WAN023J5V 84932_2011||||1147590 ..1147880|+|291 bp|EGAD orf prediction|S.pneumoniae|TIGR4| WAN01UC25|ORF|010
ttgaatcaaactttccaatttcaagaacaaatctggcataacgccataagtaccaccaataccagcttctgctcccatcaagcgaccaccaagatattgttcatctggaccattgaatacaatgtaatcttctccacctgcagctacaaacatttgaatatcttgtacaggcatagaagaatttttaactccaatcacacgaggattttgacgcattgttgcatacaaactaccagtcaacgcaacccctgccaattgtggaatattatagataataaaatctgtatttga

SEQ ID NO: 7430 - DNA, 174 bp, Streptococcus pneumoniae
  misc_feature (1)..(174): tiling:Spneumo1:WAN024CTI; WAN023O17 spn047b01_82||||71575 ..71748|+|174 bp|Glimmer 2.02 orf prediction|S.pneumoniae| 23F-1|WAN01UCNY|ORF|001
ttgaatcaatcaaaaagaaaatcaaataatttgtggataacttttagttttttatcttttttatccacattttttaaacaagctaaaaaacttgatatgacttgtttaaaggctgttttccacagatttcacagactctattattactattatctttctaatactaaaaataaa

SEQ ID NO: 7431 - DNA, 90 bp, Streptococcus pneumoniae
  misc_feature (1)..(90): tiling:Spneumo1:WAN024BX4; WAN023RN6 contig_1578_9||||2574 ..2663|-|90 bp|Glimmer 2.02 orf prediction|S.pneumoniae|67 0|WAN01UDGZ|ORF
ttgaatccagacgaaattgccaatctgggaagaaaattgccaataattttggacgataagcgtcagctgagaaagaccaaatacgaaaaa

SEQ ID NO: 7432 - DNA, 78 bp, Streptococcus pneumoniae
  misc_feature (1)..(78): tiling:Spneumo1:WAN024C2B; WAN023SJO NC_003098.1_1502||||1 184944..1185021|+|78 bp|Glimmer 2.02 orf prediction|S.pneu moniae|R6|NC_003098.1|ORF
ttgaatgacaataatctagaaaccaaacgctttattatttacgatactaaattcaatagttatatttcatcactagca

SEQ ID NO: 7433 - DNA, 81 bp, Streptococcus pneumoniae
  misc_feature (1)..(81): tiling:Spneumo1:WAN024C2I; WAN023SML NC_003098.1_269||||20 2563..202643|-|81 bp|Glimmer 2.02 orf prediction|S.pneumon iae|R6|NC_003098.1|ORF
ttgaatgcagaagcaatgctccaaagcaaattggtcttttttgccaaagctgtagctcgtgttcaaattggcaagcccaat

SEQ ID NO: 7434 - DNA, 78 bp, Streptococcus pneumoniae
  misc_feature (1)..(78): tiling:Spneumo1:WAN024BNF; WAN023OBB spn019g01_62||||39253 ..39330|-|78 bp|Glimmer 2.02 orf prediction|S.pneumoniae|2 3F-1|WAN01UCLR|ORF
ttgaattatcaatatcttcaaggggttttgttgtgttatgaaatcaaaaaggggcaaccaaggggcagaattaaaaaa

SEQ ID NO: 7435 - DNA, 96 bp, Streptococcus pneumoniae
  misc_feature (1)..(96): tiling:Spneumo1:WAN024DX5; WAN023YA1 AL449931.1_109||||834 57..83552|-|96 bp|Glimmer 2.02 orf prediction|S.pneumoniae ||AL449931.1|ORF|000
ttgaattcattgyaacatatctttttcttttttgacaattatagttttcaaaaagtttatgatttttgtcattttgcaaaaraaaaaggtcaggag

SEQ ID NO: 7436 - DNA, 924 bp, Streptococcus pneumoniae
  misc_feature (1)..(924): tiling:Spneumo1:WAN024BQQ; WAN023PN5 pne26_13||||7629..855 2|+|924 bp|Type 13 capsule operon, Glimmer 2.02 orf predic tion|S.pneumoniae||WAN01UCIU|ORF
ttgaattcgaaatataataatctaaaaaatgtatattttataaacggcattaatggggtattaaaatactttacaagtagctttgtattttactcttttgggaaaattcctattatcccttctaatcaacgcgtagtacaattgtggcatggtatgttctttaaagatattgataaatatcagaaaaagattgtcaaaaaagaaaaatactacactgatgtaattgttacaagcgagatgtttaaagaactagctactaaagttcattcttgtgatatcggagttgttaaaatctgtggtcaaagtagaacagatgttttttttaatgaagacaaaaaagttacttccaaatacattgtctggttgccaacatttaggcaatctgagaaattaggatatagtgataccaattcggaagaaattttgataggagattattcgtttgaagaattaaaaaaagtaaatagtctcttaaaagaagacaatctaaatatgatagtgaagcttcatccgcttcaaacacttcctgctaatatgcctaactatagtaatattcagatactgtcagaagaaaagagtaggaaaaagaatataaagttatatgaattgttaagagacagtatagcattaataacagattattcttcagttttttacgattattatttattagataaaccaatagctttttgtataagagattttgaggattacaataaaaatagaggatttatagtagagaatccgatggactacctaaagggaaataaaatcaaatcattagatgatatgtgtaattttataaatgaaattacacataatgtggataaatttaaagaagaacgaaggggatttaatgaaaaagtaaataaatatagagatgggaataatagtaaaagattgctagaaaaaattggaattaac

SEQ ID NO: 7437 - DNA, 150 bp, Streptococcus pneumoniae
  misc_feature (1)..(150): tiling:Spneumo1:WAN024FPT; WAN023SU2 BD003839.1_11||||5773 ..5922|-|150 bp|Glimmer 2.02 orf prediction|S.pneumoniae|A TCC55840|BD003839.1|ORF|000
ttgaattttatcttgaaaataattagattaccacgcaaaaactctctgtcacggacaaagagtcttttttatttttctaagaataaatctttcaaagaaatcaaagttacagcaaacaatatcattgccataccaagaaaatcaatggga

SEQ ID NO: 7438 - DNA, 84 bp, Streptococcus pneumoniae
  misc_feature (1)..(84): tiling:Spneumo1:WAN024DGN; WAN023NGU spn114d03_13||||12238 ..12321|-|84 bp|Glimmer 2.02 orf prediction|S.pneumoniae|2 3F-1|WAN01UCUN|ORF|001
ttgacaagtaagccacatagcttttctaatgcctcaatcgttgtctgcggtcgggtgatgacagacttatcagctgacggcaaa

SEQ ID NO: 7439 - DNA, 123 bp, Streptococcus pneumoniae
  misc_feature (1)..(123): tiling:Spneumo1:WAN024GJH; WAN023SEB NC_003028.1_661||||50 9838..509960|+|123 bp|Glimmer 2.02 orf prediction|S.pneumo niae|TIGR4|NC_003028.1|ORF|010
ttgacaatcattttggctaaagttgttttaccagaaccactaactccaactaggctaaccttatctccttgtttaatcgtgagattaatatctgttaaggtatctcatccaaaaccatactta

SEQ ID NO: 7440 - DNA, 279 bp, Streptococcus pneumoniae
  misc_feature (1)..(279): tiling:Spneumo1:WAN024FJP; WAN023L0K 312558_2600||||138408 2..1384360|+|279 bp|EGAD orf prediction|S.pneumoniae|R6|NC _003098.1|ORF|100
ttgacaccttgcgctccagtcaggccgcgttctccttgggctcctttttcacccttggcaccatctgcacctttgtcacctttcggtcctttgatgtttcctgctggttcccaagtgttacctttcttaacgaatacatctcctgtttgtgtatttacgaatgtgtctccatctttaccttctgttgttgggtctacttttccgtttaatacttcttttccatcacgtccagatgctcctgcagctccgtcttgtccgtctttaactactgttgtttga

SEQ ID NO: 7441 - DNA, 144 bp, Streptococcus pneumoniae
  misc_feature (1)..(144): tiling:Spneumo1:WAN024BLN; WAN023NGA spn122d07_2||||1055.. 1198|+|144 bp|Glimmer 2.02 orf prediction|S.pneumoniae|23F -1|WAN01UCM3|ORF
ttgacacttttatgtagaaatattacaaaattattttttatttccctaaataaggtgttttttgtcataaaagatactatttttatgctatttgaggtattagaaaggttttcatccacaattaaagccaagcccctcattctt

SEQ ID NO: 7442 - DNA, 87 bp, Streptococcus pneumoniae
  misc_feature (1)..(87): tiling:Spneumo1:WAN024BW3; WAN023QOM contig_1331_1||||73.. 159|+|87 bp|Glimmer 2.02 orf prediction|S.pneumoniae|670|W AN01UE7V|ORF
ttgacagtaaaatttgaagagcattggaagcctgttgatgtagaggtcgagtttagatgcaagttcaaggagcgaaaggtggatggg

SEQ ID NO: 7443 - DNA, 90 bp, Streptococcus pneumoniae
  misc_feature (1)..(90): tiling:Spneumo1:WAN024BS5; WAN023TGW BD140049.1_1||||1308. .1397|-|90 bp|Glimmer 2.02 orf prediction|S.pneumoniae||BD 140049.1|ORF
ttgacagttaggcaaccggtttgctcaagctatttggaaaagaaaatgtcgacctatcataaaaagaagtttttgttggaaacagtaaga

SEQ ID NO: 7444 - DNA, 234 bp, Streptococcus pneumoniae
  misc_feature (1)..(234): tiling:Spneumo1:WAN024CAM; WAN023JE4 84481_1673||||963456. .963689|-|234 bp|EGAD orf prediction|S.pneumoniae|TIGR4|WA N01UC25|ORF|010
ttgacatgctttgtctatcgttggctcggtaagcatggcatctatgaatttaatttgcttggacgtaaggttatcattttcatttcctgccatctattacctcctcattatcaaaataaagggttgcccctttatttccctatgctagataattctgcaattctgcatccattgcctctgaattgccctcaacaatcatttcatgctgtactaaatcaatcttatctccgttaa

SEQ ID NO: 7445 - DNA, 102 bp, Streptococcus pneumoniae
  misc_feature (1)..(102): tiling:Spneumo1:WAN024CJM; WAN023MWU spn175g07_11||||8833. .8934|-|102 bp|Glimmer 2.02 orf prediction|S.pneumoniae|23 F-1|WAN01UCLL|ORF|001
ttgaccaaaacgaagaaagcagttcttttattagcattagcaaaaacatgcttctttatcaattggacaaatagtatcgttgctttatcaaaaattgttgga

SEQ ID NO: 7446 - DNA, 519 bp, Streptococcus pneumoniae
  misc_feature (1)..(519): tiling:Spneumo1:WAN024DL5; WAN0244OF spr0179||15902223|NP_ 357773.1|187066..187584|+|519 bp|Hypothetical protein|S.pn eumoniae|R6|NC_003098.1|ORF|100
ttgacccccttttttgaacttgttatactaggggaattgctggttagagaaaatttctctaaattggtagcagaaaggaaattcatcatgaaattaaaaagattcacactttctcttgcttctctagcaagttttagtctcttagtagcttgttcacaaagagctcaacaggttcaacagcctgctcaacagaataccaatactgcaaatgcaggaggtaaccaaaatcaagcggctccagtacaaaaccaacctgttgctcaaccgaccgatattgatgggacttatactggtcaggatgacggagaccgtatcactttagtggtaactggaacgactggtacatggactgagctcgaatctgacggggatcagaaagtcaaacaggttacatttgattcagcaaatcaacgcatgattattggcgatgatgtcaaaatttacactgtaaacggtaatcaaatcgtcgtagatgatatggatagagacccatcggaccaaatcgttttaactaaataa

SEQ ID NO: 7447 - DNA, 189 bp, Streptococcus pneumoniae
  misc_feature (1)..(189): tiling:Spneumo1:WAN024BAQ; WAN023SWP BD003796.1_2||||1334. .1522|+|189 bp|Glimmer 2.02 orf prediction|S.pneumoniae|AT CC55840|BD003796.1|ORF|000
ttgaccctgactctccttagtctcaaaatcaaagacttatactcttcaaaaatctcttcaaaccgcgtcaacgtcaccttggattatatatgtgatctgacttcgtcagttctatctacaacctcaaagcagtactttgagcaacctgcgactagttttctagtttgctctttgattttcattgagtat

SEQ ID NO: 7448 - DNA, 234 bp, Streptococcus pneumoniae
  misc_feature (1)..(234): tiling:Spneumo1:WAN024FSI; WAN023J2T 85102_2137||||1217430 ..1217663|+|234 bp|EGAD orf prediction|S.pneumoniae|TIGR4| WAN01UC25|ORF|010
ttgaccgtttttccaacatggatcgtgccaaattcatctgccgctacttcaaccaagggttgcaaggcagttgagccaacagccgttatggattctccacgatcaatccagctagcacagcctactaaacaagccgtcagccaaaaagcgataagagacagagcaagcttttttctttttttcactgtttttctcctcgaaaataattatgaatactgtgaattttttaagtag

SEQ ID NO: 7449 - DNA, 99 bp, Streptococcus pneumoniae
  misc_feature (1)..(99): tiling:Spneumo1:WAN024B4G; WAN0241UG SP1932||15901756|NP_3 46360.1|1837326..1837424|-|99 bp|hypothetical protein|S.pn eumoniae|TIGR4|NC_003028.1|ORF|010
ttgaccttaaaagatgatgatgacccacgtatagaggaagagagtgaagcactagaaaatatgatattacagtatctgggagaagatgatgccagctaa

SEQ ID NO: 7450 - DNA, 75 bp, Streptococcus pneumoniae
  misc_feature (1)..(75): tiling:Spneumo1:WAN024BSI; WAN023TH9 BD140019.1_1||||87..1 61|+|75 bp|Glimmer 2.02 orf prediction|S.pneumoniae||BD140 019.1|ORF
ttgaccttggatacagcgcgcacagaacctggcttgactgataccaatgaagttgagtcagctgtgataaaacag

SEQ ID NO: 7451 - DNA, 606 bp, Streptococcus pneumoniae
  misc_feature (1)..(606): tiling:Spneumo1:WAN024BUO; WAN023Q9B contig_1258_30||||131 17..13722|+|606 bp|Glimmer 2.02 orf prediction|S.pneumonia e|670|WAN01UEG8|ORF
ttgacgacagaagcaagaagacaaaatacagaatcaacaggaggaaagaatatgacgactgcatcagcatcaaatgtaacggctgctaagccgaaaattggaggggcagtttctactgctccagctggaacaactcttccaacgaatgccaaaacagatttggatgcagcatttgaaacgctagggtacatttcagatgatggattgaccaatgcgaactcgccagaaagcaaagcaatcaaagcgtggggtggacaaacagtcttgtcttctcaaactgaaaagaaagataccttcaaatacaaattaattgaaggtctgaacattaaagtcttgaaagaagtctatggaccagataacgtctcaggaacgcttgaaacaggtatcactgtaaaagccaacggtaaagagttgccagaacattgcttggttattgatactttgctgaaaaatggctatgtgaaacgcgttgtcattcctcgtggtaaggttagcgaaattggcgaaatcagctataaagacggcgaacctatcggctatgaattgacgatcactgcattaccagacaacagtgaaaacactcactacgaatacattcaaggagcg

SEQ ID NO: 7452 - DNA, 117 bp, Streptococcus pneumoniae
  misc_feature (1)..(117): tiling:Spneumo1:WAN024BUB; WAN023Q5K contig_1236_5||||1940 ..2056|+|117 bp|Glimmer 2.02 orf prediction|S.pneumoniae|6 70|WAN01UEIO|ORF
ttgacgacggacgcttacgtcctagaaaaaactatctttttggcacagtccgtagcccgtgttcagttacgaacacccttattcctttctattgatgttctgaatcgaaccaccatt

SEQ ID NO: 7453 - DNA, 111 bp, Streptococcus pneumoniae
  misc_feature (1)..(111): tiling:Spneumo1:WAN024ER9; WAN023U8P AX571764.1_278||||214 227..214337|+|111 bp|Glimmer 2.02 orf prediction|S.pneumon iae||AX571764.1|ORF|000
ttgacgattttgaacagatatatccataaggacaagcgaaagattattcatagtttatctcctgaatttttgcttgaagacgttgtttatcaccctcggttagaaaaacac

SEQ ID NO: 7454 - DNA, 102 bp, Streptococcus pneumoniae
  misc_feature (1)..(102): tiling:Spneumo1:WAN024C45; WAN023RHT contig_1562_2||||1118 ..1219|+|102 bp|Glimmer 2.02 orf prediction|S.pneumoniae|6 70|WAN01UDIV|ORF|000
ttgacggattttttcaatcaattcagccttgtcttcttcaaagttgaggcagctggttttggaagcaccttgctagcatgtaccacgttcttctttgtaaag

SEQ ID NO: 7455 - DNA, 2038 bp, Streptococcus pneumoniae
  misc_feature (1)..(2038): tiling:Spneumo1:WAN024FP2-5; WAN023PMF pne27_16||||14075.. 18151|+|4077 bp|Type 14 capsule operon, Glimmer 2.02 orf p rediction|S.pneumoniae||WAN01UCIR|ORF|000
ttgacggtgattacatctgatacacacgagaactctgataattttgccttttgtttagcgaatggaaaaaggtttccatcatttactgatgagaaacctaaaggaatctacaccttggttaaagatattaataaggagcagtatactaagttactaaaagagaaccataaatggtcatcaattccaaatcttaatcaagcatgggatactttctcaagattatcttatatgtatttgaaagatcccactgatattgttaaaagagcctggggaaccgatttaaatacagctcgaacttattttcatcaggttatacagtacgaaatatggagatatacggatggtatgagagtatctagtgatacaaacgtctatatatacgaaaaattttctccgcaacaaaaaaaggccttggaaatgattcgtactgacttatataattttacagtcccatatgaaaatcttgaatatagattttataagccagattgggtatttggtttaggatttcaagctttagcaacagttagatggaaaattgaaccagctaccattactgttactaaaaaatgggaaaatgtaaaagaaggagctgaaaagcctgaggtctggattcaattgctcaaagatgacaaacctgaaggggatcgaaaacgtatagagccagataagggtcggactacatttgaaattccaaataaggatgagattaacaaatattctgtaaaagaagttgataaagaaggtcgcgattggaaacataaagactttacagcaggtcaacctgtaaacaaaggaaatggtcactttgaaattaccaatactaaaaaagagaaacctaaaataaaagttacatttaaaaagattgcaggcgacacaaataaagatttggcaggcgcacatcttgtcttaaagaaaatctttgatgatggtaatggtttgctgataaaacaatgggatacaattggacagcctgttgatatcgacctggatgcaggctcctatacattaacagaagaaaaagcaccagatggctacatgctagctgcacccgtatctttctatgtggaagaagatggacaaattatcctaccaaaaggtgaggatttagaagctcagaatgataagaccatcacgatggtggatgaaaagattaaagaaaaaccaacaaaaccatcaggtaagcttgcgacaactgtagaagttgacggaacaaaagctgatgcacagaaagagcttgagttgtcagttgcaacagataaagttacgaagacagtaaaagatactgttgtgtacgaaaatctgttagctggcgaaacctacaaactaacaggtcagttgatgaagattacagctgacaaagaagaggaagtagcaacgaaagaaacaactttcgtcgcagatgcctcaggcaacggtacaaccagcctagagtttgaagatgtgagccttgaagcaggcgttaagtatgtagtatatgaaactgcagagagcgaaaaagaaattgacttcaaagaaggcaaagaaaagcacaaggtagaacacaaagacaaagatgacaaagctcagactgtagttgttacgaaagaaaaaccaacaaaaccatcaggtaagcttgcgacaactgtagaagttgacggaacaaaagctgatgcacagaaagagcttgagttgtcagttgcaacagataaagttacgaagacagtaaaagatactgttgtgtacgaaaatctgttagctggcgaaacctacaaactaacaggtcagttgatgaagattacagctgacaaagaagaggaagtagcaacgaaagaaacaactttcgtcgcagatgcctcaggcaacggtacaaccagcctagagtttgaagatgtgagccttgaagcaggcgttaagtatgtagtatatgaaactgcagagagcgaaaaagaaattgacttcaaagaaggcaaagaaaagcacaaggtagaacacaaagacaaagatgacaaagctcagactgtagttgttacgaaagaaaaaccaacaaaaccatcag

SEQ ID NO: 7456 - DNA, 165 bp, Streptococcus pneumoniae
  misc_feature (1)..(165): tiling:Spneumo1:WAN024F6D; WAN0244M9 spr0257||15902301|NP_ 357851.1|258893..259057|+|165 bp|Hypothetical protein|S.pn eumoniae|R6|NC_003098.1|ORF|100
ttgacgtggtttgaagagattttcgaagagtataaattcgaaaaaggtgagggacaatgtcctcgccttttatgttttttagttgcttcctttgtgaaaagagttataatagactgtagaataaaaggaggaatctatgaacgcgattcaagaatcatttactga

SEQ ID NO: 7457 - DNA, 78 bp, Streptococcus pneumoniae
  misc_feature (1)..(78): tiling:Spneumo1:WAN024BLC; WAN023NB2 spn143g10_59||||51476 ..51553|-|78 bp|Glimmer 2.02 orf prediction|S.pneumoniae|2 3F-1|WAN01UCOL|ORF
ttgactaattatcccaaaaggtgtaaaatgttttttgtaagtgataaacaactaaaaaaacaactaagaaataaatta

SEQ ID NO: 7458 - DNA, 99 bp, Streptococcus pneumoniae
  misc_feature (1)..(99): tiling:Spneumo1:WAN024BX3; WAN023RM7 contig_1575_6||||1291 ..1389|-|99 bp|Glimmer 2.02 orf prediction|S.pneumoniae|67 0|WAN01UDHA|ORF
ttgacttgttggcgtcaacaaatagtattaaatcgcttggttgccaattttgttgacattaacaaaattgctctgaaagtactgtctgaattaaaaaag

SEQ ID NO: 7459 - DNA, 228 bp, Streptococcus pneumoniae
  misc_feature (1)..(228): tiling:Spneumo1:WAN024C2M; WAN023L0J 312559_2601||||138445 7..1384684|+|228 bp|EGAD orf prediction|S.pneumoniae|R6|NC _003098.1|ORF
ttgacttttggtgtttttccatcttcaccgtttttaacgattgttgttaatgatggtctgttgtctggttgtgtgattgtgatggtgtgtgttccgttattgttatctgtaactgttacttctggtgtgaatccatcttttccgttatcacctttgtcaccttttggtccttgttttccatctgcgataacaacttctttaagttttgtatctccttcatcaaattga

SEQ ID NO: 7460 - DNA, 381 bp, Streptococcus pneumoniae
  misc_feature (1)..(381): tiling:Spneumo1:WAN024EUN; WAN02418J |||AAP94617.1|||381 b p|IS66 family element|S.pneumoniae||AY336008|ORF|000
ttgagaaaggacaaatttcgtcctttcttttttgatgttcagagcgatgaaaatccgttttttgaagttttcaaagttccgaaaaccaaaggcattgcgcttgataagtgtaagcgcgtcataacaaggtatctatcattcatggagctcctcctgtatactattagtaaagtaaaactattggaggatattttaatgccacaacctattgttcctgtagagattccacaatctcgtcgttttgattctaaaaagagaaatgatattctacttaaaattcgtattggcaagcttgaagtaagtttttttcaatctctcaatctcgaaatgatagaacagcttttggataaggtgttgctctatgacaattcatctatctag

SEQ ID NO: 7461 - DNA, 237 bp, Streptococcus pneumoniae
  misc_feature (1)..(237): tiling:Spneumo1:WAN024EUM; WAN023JZM 83013_586||||328469.. 328705|+|237 bp|EGAD orf prediction|S.pneumoniae|TIGR4|WAN 01UC25|ORF|010
ttgagaaaggacaaatttcgtcctttcttttttgatgttcagggcgataaaaatccgttttttgaagttttcaaagttccgaaaaccaaaggcattgcgcttgatgtctttgatgagtttgttagtggcctcaagtttagcgttagaataaggcaattcaatggcgttagtgatgtagtttttatagcaaataaatgtgctcaaagtggttttaaaggtgcggttgagatgaggtaa

SEQ ID NO: 7462 - DNA, 249 bp, Streptococcus pneumoniae
  misc_feature (1)..(249): tiling:Spneumo1:WAN024G82; WAN023JHG 84238_1498a||||851946 ..852194|-|249 bp|EGAD orf prediction|S.pneumoniae|TIGR4|W AN01UC25|ORF|010
ttgagaaggtttgttgtagtaaggaacaatagcaagcccagctgcgaaaccaccaaattccgctacttctttgacaaactcaatagagtcacgcgtatcattagtacctacacccgcaatcaaaggaacgcgtccattgacaaccttttgtacagccgcaaacaactccaactcctcatcgtgggtcaaagttggactctcagcagtcgttcctgcgagaagaattccatccgtatgatgggccaataa

SEQ ID NO: 7463 - DNA, 84 bp, Streptococcus pneumoniae
  misc_feature (1)..(84): tiling:Spneumo1:WAN024BGF; WAN023PSM-5 pne14_20||||16539.. 17393|+|855 bp|Type 9L capsule operon, Glimmer 2.02 orf pr ediction|S.pneumoniae||WAN01UCJV|ORF|000
ttgagaatatctttgccaaagcaaaaacgtttaaaatgttttcaacaacctatcgaaatcatcgtaaacgcttcggatatttta

SEQ ID NO: 7464 - DNA, 105 bp, Streptococcus pneumoniae
  misc_feature (1)..(105): tiling:Spneumo1:WAN024C27; WAN023SGZ NC_003098.1_2612||||2 035449..2035553|-|105 bp|Glimmer 2.02 orf prediction|S.pne umoniae|R6|NC_003098.1|ORF
ttgagagaattttatctaaaacgaaattccattttgtataatggtttttgtaagttagcttacaagaaaaaacattttaggagattttattatgaaaaacacagt

SEQ ID NO: 7465 - DNA, 132 bp, Streptococcus pneumoniae
  misc_feature (1)..(132): tiling:Spneumo1:WAN024F6E; WAN023YB9 AL449931.1_61||||5275 2..52883|-|132 bp|Glimmer 2.02 orf prediction|S.pneumoniae ||AL449931.1|ORF|000
ttgagattgcagatagagctgacgtggtttgaagagattttcgaagaatataaatttgaaatcatgaaaatccgtcaaacgggtggttgttttgtctcgcacctcacggagcgagacggactcagagtcaca

SEQ ID NO: 7466 - DNA, 1437 bp, Streptococcus pneumoniae
  misc_feature (1)..(1437): tiling:Spneumo1:WAN024BP2; WAN023OIK pne88_16||||11689..13 125|+|1437 bp|Type 45(1) capsule operon, Glimmer 2.02 orf prediction|S.pneumoniae||WAN01UCBS|ORF
ttgagcaaaatttctaaaaattatctatataacttaatttatcaagtggtagttttaatattgccactattgattactccatatgttgctagaatattaggcgcacaccagttaggaatttatgattatgtcaattcaatcgttactttgatttacactttaggtttattaggtattggtcactatggaaatcgcgaatgtgcctatactagagatgataaagaggaactatcagagacattttggagtattttagctattcagattattctaggatttttttcactgttattcttgtatattttttctaacataaattcaaattatcaagtttactttcagcttttctctatttggctttttgggtctattcttgattgtacttggctctatcgtggcttagaggaaatgcagtatgttgtgttaaaaaatattattgctaagttattatttacgatagcgaccttcttatttgtaaaaagtgaaacagatttaactctatatgtgctcatatatggtctctctgttttagtagccaatttatcaacttatagtcaactaaggatgtttattagtagaccaaagataaatattaatcgttttacggagattattttagggagtctcaaactatttttaccaagtatcatcacgcaaattatgttatctgctgataaaattgttctagggtctttaagttctggaatcagcaatgtttcttactatagtaatgcagagaagattatacagataccactctctttaatagtagtattaaattctgttatgatgccccgaatagcaaatgaatttcgtaatagacggttagaaaatatgaaaaagtatctgacaactgcagctgaattttctttgttcttagctgttccattgtcgattggcctttatgctattgcagatacttttgttccgtggtttttaggcgaaagttttatgccatctatggatgctcttaaatggcttgctcctattgctgttggcaatgctttgctaggagtctcaggtagtcagtattttgttgcagttaataaaacaaaagtcttatttttttctaatactttagctgcaattttaaatattctattagatttgttacttgctccaatgtttggagtagtaggggtttgtttagcaactatagtatcacttacctcttctgttatagtgcaatactatataatgtcaaaggatatacctattatacctattttgaagtcattatttaaatatctcatttattctatgataatgggaatgattattattgtttcattcagaggatatccagcaaattatagaacaactattaagcaaatcgttcttgggatagtagtttactttggtttgaacttgttgacacgagatgtatttgtttttcaaacattagattttgtaaagaaaggattcaaaaaaagtaga

SEQ ID NO: 7467 - DNA, 225 bp, Streptococcus pneumoniae
  misc_feature (1)..(225): tiling:Spneumo1:WAN024G57; WAN023LHU 313709_1880||||101629 4..1016518|-|225 bp|EGAD orf prediction|S.pneumoniae|R6|NC _003098.1|ORF|100
ttgagcacttctttggcacaaaaggcgattcctaactccgccgacttcaacattaatagattattaaccccatcaccgattgccacccttctttctttagaaagttttagtttctttctccatttttccagagtcttttttttgacctggggacttataatttgtccaactaattttcctgttaaaagaccttctttgacttcaagctggttggcagtgaaatag

SEQ ID NO: 7468 - DNA, 84 bp, Streptococcus pneumoniae
  misc_feature (1)..(84): tiling:Spneumo1:WAN024F76; WAN023SNR BD004059.1_3||||301.. 384|-|84 bp|Glimmer 2.02 orf prediction|S.pneumoniae|ATCC5 5840|BD004059.1|ORF|000
ttgagcmgtgcggctagcttcctagtttgctctttgattttcattgagtataaaaaagaaaacttcagaccaatccacaaaagg

SEQ ID NO: 7469 - DNA, 360 bp, Streptococcus pneumoniae
  misc_feature (1)..(360): tiling:Spneumo1:WAN024F36; WAN023JVO 83274_780||||444328.. 444687|-|360 bp|EGAD orf prediction|S.pneumoniae|TIGR4|WAN 01UC25|ORF|010
ttgagctgtgaactcaactgctttttcaggagttgtcagagcataggtgatgatttctgtcaaacctgctccttcagcaatggtacgaacttgacggcggagtttttgtatcacagtcaattcaccagctgtaccatcgtcttttggaaggctggttggcaagcggtcatatccatagatacgagcgatttcttcaaagagatcagcttcgattgtgatatcccaacgacgacgtggtacgctgactgtaaagctgtctgcatttccagaaagaccaaagccaagacgacggaagacgtcttctacatcagcataagacagctcagttccgaggacacggttaacatcagcaagggttga

SEQ ID NO: 7470 - DNA, 105 bp, Streptococcus pneumoniae
  misc_feature (1)..(105): tiling:Spneumo1:WAN024BNW; WAN023OC4 spn019g01_29||||26275 ..26379|-|105 bp|Glimmer 2.02 orf prediction|S.pneumoniae| 23F-1|WAN01UCLR|ORF
ttgaggagatggataaagaaggaagatgacgaagaaaaaaatagagcgcttgtcagttatccatcgcagggaaatcaattggctaaagtggtattttttgaggga

SEQ ID NO: 7471 - DNA, 381 bp, Streptococcus pneumoniae
  misc_feature (1)..(381): tiling:Spneumo1:WAN024BZM; WAN023K6X 82557_234a||||121374. .121754|-|381 bp|EGAD orf prediction|S.pneumoniae|TIGR4|WA N01UC25|ORF
ttgaggccagtccttatcaatcatagacaaccaatccgtatctcttgtacgccccttataaaccactgcctgacggaaggttccttcataaataaatcccaaacgttccgctgctcgtctggatggcaggttaagagcatcgcatttccactcatagcgacgatagttaagctcctcaaagacatagcaagccaagagatactgggcttctgttcctatccgtgtccccctgagctctggagaaaaagtgacagctcccacttctattactcggttattctgatcaattcgcatgagggaaaaagttcccaaagccttaccagttgccttgtctatgattgcataataaaaacggtccttacgagccaacatctgatttaa

SEQ ID NO: 7472 - DNA, 318 bp, Streptococcus pneumoniae
  misc_feature (1)..(318): tiling:Spneumo1:WAN024BNX; WAN023OC5 spn019g01_28||||25965 ..26282|-|318 bp|Glimmer 2.02 orf prediction|S.pneumoniae| 23F-1|WAN01UCLR|ORF
ttgagggataagaaaaatccaaagagaaccattttggagcaaaagattatagtttctcatatcaaaactgataggcttgaagctaagtttttaagcaacttaaaaaaatcaactgaagattttatagataagtctgatcctaaatatttgcgggcaataaaagaggtttatgtttacgaaaacatgaatgtcattggagcttgtcaaaaaatactattttatagtccgactcaagcctatgtattacttaatgcgtggtttaacgattattttcgtgcgacttacacagaattactagaaaacgccatcttagataaa

SEQ ID NO: 7473 - DNA, 96 bp, Streptococcus pneumoniae
  misc_feature (1)..(96): tiling:Spneumo1:WAN024BXJ; WAN023RPD contig_1583_9||||2826 ..2921|-|96 bp|Glimmer 2.02 orf prediction|S.pneumoniae|67 0|WAN01UDGB|ORF
ttgagggctgttctttctagttcgttcatcttcccacctccttgtcttttttattttgctcttggagcaacaacctgccaaggattcgaaccttgg

SEQ ID NO: 7474 - DNA, 171 bp, Streptococcus pneumoniae
  misc_feature (1)..(171): tiling:Spneumo1:WAN024FMV; WAN023P6W pne53_29||||16980..17 150|+|171 bp|Type 25F capsule operon, Glimmer 2.02 orf pre diction|S.pneumoniae||WAN01UCCQ|ORF|000
ttgaggtgcgatttttatattgtgaatgataaaatattatttgaagagattacgttttttccagaatcaggttttggaaaatttagtccagagcattataatttagagtttggaaaggatattactttactggagaagcaagatggaaacaaaagaaaaacgtttagtgaa

SEQ ID NO: 7475 - DNA, 84 bp, Streptococcus pneumoniae
  misc_feature (1)..(84): tiling:Spneumo1:WAN024F6A; WAN023T3R BD003703.1_5||||3790. .3873|+|84 bp|Glimmer 2.02 orf prediction|S.pneumoniae|ATC C55840|BD003703.1|ORF|000
ttgaggttgcggatggggctgacatggtttgaagagattttcgaagagtataatttacgtgttcccaagatggagaagttagac

SEQ ID NO: 7476 - DNA, 81 bp, Streptococcus pneumoniae
  misc_feature (1)..(81): tiling:Spneumo1:WAN024BM9; WAN023NSJ spn088d02_3||||2076.. 2156|+|81 bp|Glimmer 2.02 orf prediction|S.pneumoniae|23F- 1|WAN01UCTG|ORF
ttgagtataattgaaatagcacaaatagggacggaagactgcttcctcccttttatcagaaaaggagaaacagatgacact

SEQ ID NO: 7477 - DNA, 120 bp, Streptococcus pneumoniae
  misc_feature (1)..(120): tiling:Spneumo1:WAN024FDK; WAN023QC3 contig_1271_7||||4781 ..4900|-|120 bp|Glimmer 2.02 orf prediction|S.pneumoniae|6 70|WAN01UEFD|ORF|000
ttgagtatgattaactctcaagtcttcgaaatcaggattttcaacagttattacaaggatgcgatttactacttcaaaaacatcaattattctatttttcatattttttcaacccattat

SEQ ID NO: 7478 - DNA, 366 bp, Streptococcus pneumoniae
  misc_feature (1)..(366): tiling:Spneumo1:WAN024BVJ; WAN023QHO contig_1298_20||||111 82..11547|+|366 bp|Glimmer 2.02 orf prediction|S.pneumonia e|670|WAN01UEBQ|ORF
ttgagtattagtatcgaccaaaaatcaaaactaatcaagaaatttgaaattacttctgctaatattcacgattctcgcgtcttggaagagttgtgtgagagtaaggagccgatctttgatgatagtgcttttcgaaataaaaccttgactgatttggataagcgtatcaatcagtctatttctcgtatccgctgtcgtgtggaacatgtttttggtgttattaaaaatacgatgaaaggaagtcattttagaggaattggattagcgcgtacaaaaacgaatgtgattttgacaaatttgttgtataatatctgtcgtttcgaacaaatccaacgattagggttgaaaacatgggggagtataccc

SEQ ID NO: 7479 - DNA, 99 bp, Streptococcus pneumoniae
  misc_feature (1)..(99): tiling:Spneumo1:WAN024BZB; WAN0242QL SP0699||15900599|NP_3 45203.1|667414..667512|+|99 bp|hypothetical protein|S.pneu moniae|TIGR4|NC_003028.1|ORF
ttgagttattttaatgattataaacacaagtgggaaggaaaaaatgaactgatctttttgacagcaattctacagaatagtcttattgctatattttga

SEQ ID NO: 7480 - DNA, 378 bp, Streptococcus pneumoniae
  misc_feature (1)..(378): tiling:Spneumo1:WAN024BA3; WAN023NYQ spn049c08_1||||91..46 8|+|378 bp|Glimmer 2.02 orf prediction|S.pneumoniae|23F-1| WAN01UCY5|ORF|001
ttgagttttaatctcaaaagaaagcatagagaaaaacagctccgaagacggggctgttttgttgacttgtactcaatgaaaatcaaagagcaaactaggaagctagccgtaggttgctcaaagcactgctttgaggttgtagatagaactgacgaagtcagctcaaaacaccgttttgagtcacttcgtcaggagattgcggatttgaaggaagaattaactcgtaacccgcaagtgagttcggctccaagtcctagtcacccagatccaattgatgtggctgcttcatcttctatgacgaattttgatattttgaaacgcttgaatcgtcttgaaaaagaagtattcggtaaacaaattttagacaatactgatttg

SEQ ID NO: 7481 - DNA, 102 bp, Streptococcus pneumoniae
  misc_feature (1)..(102): tiling:Spneumo1:WAN024BW4; WAN023QP7 contig_1334_1||||6..1 07|-|102 bp|Glimmer 2.02 orf prediction|S.pneumoniae|670|W AN01UE7C|ORF
ttgataaaaaactttgtaaatcatatagttcctttctatttacaggtcagcttattccaaacttttagcagatatttgcttgatttcattccattttgtgtc

SEQ ID NO: 7482 - DNA, 297 bp, Streptococcus pneumoniae
  misc_feature (1)..(297): tiling:Spneumo1:WAN024EXC; WAN023KTA 313032_2910b||||15521 20..1552416|+|297 bp|EGAD orf prediction|S.pneumoniae|R6|N C_003098.1|ORF|100
ttgataaagggctacctgcccaatcatctggcgctgatggacttgtgcagtaaaaccacctgcacgcttgatgattttgctggcatagctggccgccgcaaccacagagggttcttctgtcacatagggaacggtgtattcctgaccgttgacaagtacctccggaaccagcgaataaggcagagaaaaagttcccaccacattctcactcagctggtctgccacagtcacactcatctgttcatccttctccagactagcttgtctctcaggactaaggagcgcctgagcttttag

SEQ ID NO: 7483 - DNA, 84 bp, Streptococcus pneumoniae
  misc_feature (1)..(84): tiling:Spneumo1:WAN024BLT; WAN023NLC spn103f10_3||||3919.. 4002|+|84 bp|Glimmer 2.02 orf prediction|S.pneumoniae|23F- 1|WAN01UCLB|ORF
ttgataaatttcaaagtagatacttgtaccacgatgtttgttgatcgagttattaacaaaagagctactttgattttaaagaaa

SEQ ID NO: 7484 - DNA, 228 bp, Streptococcus pneumoniae
  misc_feature (1)..(228): tiling:Spneumo1:WAN024DEA; WAN023JLS 83923_1265||||713604. .713831|+|228 bp|EGAD orf prediction|S.pneumoniae|TIGR4|WA N01UC25|ORF|010
ttgataaggataatcagaaatatctacaggagtggagagggtaatacttccgttttccaaagcttcatagaccagataaacagtaatcaattttgttatggaagcaatttcgacaggttgcgttgcatccttctcatagagaattttaccagtatttgcctcaacagcaatcgcatgtttagcggcaatggtaaaatcttgagcaacagcagtagaagcaccccctaa

SEQ ID NO: 7485 - DNA, 225 bp, Streptococcus pneumoniae
  misc_feature (1)..(225): tiling:Spneumo1:WAN024G6H; WAN023LJC 313478_1791||||963192 ..963416|-|225 bp|EGAD orf prediction|S.pneumoniae|R6|NC_0 03098.1|ORF|100
ttgataataatcagagattttcatttttgctttttcttcttgtttcaaatcttggataacccgtccttctttcatgacaatcaagcgattgccatatttgagagcatcttccatatgatgggtaatcataagggctgtcaattgatctttcttaacaaattcatctgtcaattccatcaaagcaacactagtctttggatccagggcagcagtatgctcgtctaa

SEQ ID NO: 7486 - DNA, 1083 bp, Streptococcus pneumoniae
  misc_feature (1)..(1083): tiling:Spneumo1:WAN024C6V; WAN023QIA contig_1299_4||||1463 ..2545|+|1083 bp|Glimmer 2.02 orf prediction|S.pneumoniae| 670|WAN01UEBN|ORF|000
ttgataatgttgggtaacctttccgaggcagtaggaaacatagctcaggacttttctagtgctttctacgacgtcattacctcaactggtgcggttcgtatcggtagcgctattgtgtcaactctgttgagtttgacatctaccattgttgaagttggtagtaaattagcaggaagtttgtttaaaggttttgaaaaagtcgttgtgacaagcgctcctaaaatttcatcagtcttccaaagtttattagatactgttgcgcctgtatttgagagcattgaaaggtctgttaacaaatttggcgatggcttaagtcgtgtttatgatgaacatgtagtccctgctattaactctattgctaatgcttttaatgggctaattgacattattcagattctctgggagaattcctggcaaccttttgctgagtttttatcaggagtattcggtgttagtattgaaggaatttcagatttattaggaggtggccttttagccactttgggactattggcggatgctattaagttagtggcagatggtttcaccgttttttctgactggtgtaaagaaaacaaagaacctatcttggctttgataacaacttggcaaacgattaatttcttatcatgggctgaacaagccgggggacttgcaggagcattcagcttgttaggtagtaaggtctctttgattgttggagggattaagaatctaggtcttgctattaaagcattgacatttgataagttggtcagttttggtgaaacaatctatttgaacaccttatatgcaaaagattttgtggtcaattcaggtaaaacaattgcacagctaggaaaaactgctttagaacttggtaaatcagctctagcatggactgctcatgcagcgaaaatgggattagcaaccgcggcggaatttgcacattctgttgcagcaggagtcgctacagctgcaacatgggcttttaatgcagcgttagcagtttgtagagcaagtccaakmacaatggattattgcagcaatcgcagctttgattgctatcggtgtcttgctctaccaaaactgggacactgttgt

SEQ ID NO: 7487 - DNA, 105 bp, Streptococcus pneumoniae
  misc_feature (1)..(105): tiling:Spneumo1:WAN024BSN; WAN023UO9 AX571763.1_81||||6482 9..64933|+|105 bp|Glimmer 2.02 orf prediction|S.pneumoniae ||AX571763.1|ORF
ttgatagaggtagccacggtgcgaatccgtgtcattgtgctagcatctaggaaactaggtgctttttattttaataacttaaaagtatttacaaacaataacttt

SEQ ID NO: 7488 - DNA, 270 bp, Streptococcus pneumoniae
  misc_feature (1)..(270): tiling:Spneumo1:WAN024G7M; WAN023JGW 84274_1524||||864722. .864991|-|270 bp|EGAD orf prediction|S.pneumoniae|TIGR4|WA N01UC25|ORF|010
ttgatagagtttctccgccatttcagtattgacttggtaaaaggctgggccagcgatttggaagtcatttcccaacatctggtccgtaatatagtcttgaccataaagagtgcgccactccttaccaaaaatcgcattggtattctggtcgttgatattttgcatgacagacacaatctctgggaactgcttgataacttgttcaatcaattggtcaacacgaaaaacttttggacgagttgtcaccaaaacgaccatgatttgtcctga

SEQ ID NO: 7489 - DNA, 393 bp, Streptococcus pneumoniae
  misc_feature (1)..(393): tiling:Spneumo1:WAN024FX3; WAN023L9K 315419_2214b||||11856 31..1186023|+|393 bp|EGAD orf prediction|S.pneumoniae|R6|N C_003098.1|ORF|100
ttgatagcgaccatcttctattttttcaagggaagctgtaatttccattggagtgtgattattctcgaacaattcaattgttacaaagcctccagctgcaatatctgcatcaaggtaaacttgatcattgaggaaaataaatccattggtatacaaaacacctggatattctggacgtttagtatcccaatatgcaaagtgatctttctcaatataagcacgagacaagcttgtttcacggaagtttgtatgttgtccatttcctcccatgtagtagaaataagtacggtcaccgatagtaactggtgcagaagaatagatgcatccacagtcaaattctccatcaccatattgacctttaccacgaggaataagtggagtatcagtgtttag

SEQ ID NO: 7490 - DNA, 75 bp, Streptococcus pneumoniae
  misc_feature (1)..(75): tiling:Spneumo1:WAN024CJQ; WAN023NZQ spn047c01_44||||29904 ..29978|+|75 bp|Glimmer 2.02 orf prediction|S.pneumoniae|2 3F-1|WAN01UCX2|ORF|001
ttgatcaatcactttcatcgttcttcctcaactatcctttatctgattgttttaaaacaacttgatagactttct

SEQ ID NO: 7491 - DNA, 75 bp, Streptococcus pneumoniae
  misc_feature (1)..(75): tiling:Spneumo1:WAN024BM5; WAN023NPL spn093a10_41||||30223 ..30297|+|75 bp|Glimmer 2.02 orf prediction|S.pneumoniae|2 3F-1|WAN01UCTO|ORF
ttgatcacaacactgcctaccctccttttttattttaatatcaaaaaatcaatttctttgattaatactattata

SEQ ID NO: 7492 - DNA, 225 bp, Streptococcus pneumoniae
  misc_feature (1)..(225): tiling:Spneumo1:WAN024FDI; WAN023KRR 315723_2988||||158863 8..1588862|+|225 bp|EGAD orf prediction|S.pneumoniae|R6|NC _003098.1|ORF|100
ttgatcactaagaatccaatgacgaatttgttttgtaaaaatcaaaatttcctgacttggtccatcatttccattgcttatcacctctcttttcattatagttcatacaatgacattcagcaatattatttctcaagtcagcacttccacttctttaggctcaactatcctattttgagctttaaggaaaatcaaatctctcatgctgatacctctcctcattaa

SEQ ID NO: 7493 - DNA, 123 bp, Streptococcus pneumoniae
  misc_feature (1)..(123): tiling:Spneumo1:WAN024BXU; WAN023RVT contig_1609_51||||370 25..37147|-|123 bp|Glimmer 2.02 orf prediction|S.pneumonia e|670|WAN01UDCD|ORF
ttgatcagattattgttttataatagaaaggaggtgatgatcatgattatggaagatttcaacattttggagttagaatttgaagaaattcgtgaagaagatacaactaattggtactttatc

SEQ ID NO: 7494 - DNA, 258 bp, Streptococcus pneumoniae
  misc_feature (1)..(258): tiling:Spneumo1:WAN024GJV; WAN023LZV 314758_874||||463957. .464214|-|258 bp|EGAD orf prediction|S.pneumoniae|R6|NC_00 3098.1|ORF|100
ttgatcataagaaatacaactactgtccaaatcataccaattatgaacggtattacaaatttatatgtttgtatttctaatgatatcatagctggtaccatcgccgatacaaatgcagacaacaatactgaggtaacaaaattccttaccgcttcatcatttttgatacaactatcatgttcagctaatataatttctctatatctagctaaatattctattggaatattatcaataaaatcttttgatgttctatag

SEQ ID NO: 7495 - DNA, 246 bp, Streptococcus pneumoniae
  misc_feature (1)..(246): tiling:Spneumo1:WAN024CQH; WAN023KW9 315472_2798||||149105 6..1491301|+|246 bp|EGAD orf prediction|S.pneumoniae|R6|NC _003098.1|ORF|100
ttgatcctggtcttctgttttcttgaagtagtaaacgtggccgattgggaacatttgactggccaattgagccaactgagcaatatcttctccatagaaaataacgatatcaagcacatctggggagaggctcaaaatcatctgattatgaagttgaacagactggtcaccaagctccttcatatccgccaacactgcaattttcttgccaccttcattggctggaatggcagagaaagtctctaa

SEQ ID NO: 7496 - DNA, 117 bp, Streptococcus pneumoniae
  misc_feature (1)..(117): tiling:Spneumo1:WAN024BKS; WAN023MVI spn177c06_38||||24217 ..24333|+|117 bp|Glimmer 2.02 orf prediction|S.pneumoniae| 23F-1|WAN01UCTU|ORF
ttgatccttttaaaacacatcgagagtatttgcagagagctaactaaacaagcctatccagtttatataaacaaaaaactccaattacaatcaagaattagagttgacttacaagat

SEQ ID NO: 7497 - DNA, 186 bp, Streptococcus pneumoniae
  misc_feature (1)..(186): tiling:Spneumo1:WAN024BWO; WAN023R5M contig_1515_1||||37.. 222|+|186 bp|Glimmer 2.02 orf prediction|S.pneumoniae|670| WAN01UDOK|ORF
ttgatcgagagattcaacgaaaagggattcgatgtgcaggtctacgtcgaaaaacaggaggaagactacctgtatcaggagaatcagaacaaagagggaaatcaaagacagcaaagagaaagcaaaaaccacaaacgtgaaacttcgggcagtctatttgaggagttcatccaggaggtgaaaacg

SEQ ID NO: 7498 - DNA, 102 bp, Streptococcus pneumoniae
  misc_feature (1)..(102): tiling:Spneumo1:WAN024B6V; WAN023SPU BD003957.1_1||||83..1 84|+|102 bp|Glimmer 2.02 orf prediction|S.pneumoniae|ATCC5 5840|BD003957.1|ORF|000
ttgatcgggacagtcaaatcgatttctaacaatgttttagaagtagaggtgtactattctagtttcaatctactatattttcgtacaggtgcttcaaccatt

SEQ ID NO: 7499 - DNA, 237 bp, Streptococcus pneumoniae
  misc_feature (1)..(237): tiling:Spneumo1:WAN024CTN; WAN023ICF 86619_3269||||1860877 ..1861113|+|237 bp|EGAD orf prediction|S.pneumoniae|TIGR4| WAN01UC25|ORF|010
ttgatctctgctgccgtttcttcctcagtcgcatattcagctgcaaagaggtccaaaatctctgcatcaaagtctgtcaacttatattgtccttgcgtgttcaaggcattcataagttcagttgtcttttcagcattatttcccaaaagatggaaaatcaagcgctccaagtttgaagataccaagatatccatagatgggctggttgttaccttaaactcacgttttttgtcatag

SEQ ID NO: 7500 - DNA, 78 bp, Streptococcus pneumoniae
  misc_feature (1)..(78): tiling:Spneumo1:WAN024BPJ; WAN023OT3 pne73_14||||11657..11 734|+|78 bp|Type 34(2) capsule operon, Glimmer 2.02 orf pr ediction|S.pneumoniae||WAN01UCF4|ORF
ttgatgaaatatgccagagagcaaaataaagcatcaatttcttctgagggtatttatgaatcgattaagtattctgct

SEQ ID NO: 7501 - DNA, 507 bp, Streptococcus pneumoniae
  misc_feature (1)..(507): tiling:Spneumo1:WAN024BXW; WAN023RVV contig_1609_49||||352 46..35752|-|507 bp|Glimmer 2.02 orf prediction|S.pneumonia e|670|WAN01UDCD|ORF
ttgatgaataagaaaattatatttaaaaaaaatcaagcaagtaaatttgcatatttttcattgatgtttgttgcaggtactagtattgagcaagtaaatgaattaggattttcacatcttattgaacatttactaatacgagcagggaatgaacaatcactaaatgaattgtttgatatgaatggtgcagctattaaaggagagacatctagagattatattaatttaagtggttactgtctagctgaagatttcaataaaatttttaaaatactgataagtaggattttcaatctttctattactgaagatgaactattgagggaaaagaaaatagtcttaattgaattaaatcagtatgaaaatagtaaaaaatctattaatgataatcgagtaatttttaaaaatagttcttggtcaatagatattattggtactagaggtaatattgagtatgttagtttagaaactatatataaattttatataaaaaatagcataaaaatc

SEQ ID NO: 7502 - DNA, 105 bp, Streptococcus pneumoniae
  misc_feature (1)..(105): tiling:Spneumo1:WAN024BK4; WAN023SVO BD003815.1_7||||3518. .3622|+|105 bp|Glimmer 2.02 orf prediction|S.pneumoniae|AT CC55840|BD003815.1|ORF
ttgatgacttttgggagtaaaaaggtccgggggacctttttagcttcttgccctgaaattaaaaagcaagaaaaacctccactggaggttttcagcctctcatct

SEQ ID NO: 7503 - DNA, 93 bp, Streptococcus pneumoniae
  misc_feature (1)..(93): tiling:Spneumo1:WAN024CI9; WAN023MO6 spn180c09_163||||1310 26..131118|-|93 bp|Glimmer 2.02 orf prediction|S.pneumonia e|23F-1|WAN01UCXQ|ORF|001
ttgatgcagaacaaagaaatggtaaaagttgaaataaaagaattgttatttaccatatcacaaacaatgaaggtgaggggcgtgttttatgac

SEQ ID NO: 7504 - DNA, 408 bp, Streptococcus pneumoniae
  misc_feature (1)..(408): tiling:Spneumo1:WAN024BOC; WAN023OCI spn019g01_14||||15792 ..16199|-|408 bp|Glimmer 2.02 orf prediction|S.pneumoniae| 23F-1|WAN01UCLR|ORF
ttgatgcgagagaatgactttcaaaatgtacttttaaagcatatcaagactttaaatttaccagttgaaccacgctttgattactttgaggatgacaaagatgatctggttatcaatcagataccaggcgggaaagtggatagagagtatatggatggcacacaagaagtttctttgccgtttgaaatcgccgtaaaggcaaaaaagaactcagtagccaatgacactatttggttagtcacctcagaactagcaaagatagacttagttttaccaagtgacaataattcttatgaatatatgggaatggaagtcagcaggcctgccatgaaaggcaaggatgagcaaggctattattattacacaattgaaattgtggcgaaaatcgtaatagagaggaacaaacaa

SEQ ID NO: 7505 - DNA, 255 bp, Streptococcus pneumoniae
  misc_feature (1)..(255): tiling:Spneumo1:WAN024FJU; WAN023L0E 313163_2605b||||13875 55..1387809|+|255 bp|EGAD orf prediction|S.pneumoniae|R6|N C_003098.1|ORF|100
ttgatgcgttacttcctcttttttgtcttttgcttcttcaactttttctgctggtttagtaacttcttcagttttaactggagtcgtttctactggattagctacagttggagctgcataggttttctctttattagacgcagaaacctctgctggtttagtagctgcttctcccctaccaacagaaatactattggtagtttcttgtttgttttcttccgcttgtactgtttggacactagctgctgcacctaa

SEQ ID NO: 7506 - DNA, 138 bp, Streptococcus pneumoniae
  misc_feature (1)..(138): tiling:Spneumo1:WAN024CBZ; WAN023SN0 NC_003098.1_152||||12 0756..120893|+|138 bp|Glimmer 2.02 orf prediction|S.pneumo niae|R6|NC_003098.1|ORF|100
ttgatggatatttatgggcgtaaaactatagctatgaaacatttttttgcaggaattggtgaaattcattttttgttattttattattatagctcttggtatgatattggcattaattttggtattatcaagagtgta

SEQ ID NO: 7507 - DNA, 246 bp, Streptococcus pneumoniae
  misc_feature (1)..(246): tiling:Spneumo1:WAN024CC3; WAN023ZGM AL449923.1_200||||166 404..166649|+|246 bp|Glimmer 2.02 orf prediction|S.pneumon iae||AL449923.1|ORF|000
ttgatggatatttatgggcgtaaaactatagctatgaaacatttttttgcaggaattggtgaaattcattttttgttatttttattatatctaagcatgtctgctagtccaattattggactagtgattggatatactaaaataaatctaataaattctattattatagctcttggtatgatattggcattaattttggtattatcaagagtgtatagaaaatatttttatagagacgatgatgac

SEQ ID NO: 7508 - DNA, 219 bp, Streptococcus pneumoniae
  misc_feature (1)..(219): tiling:Spneumo1:WAN024BTT; WAN023Q29 contig_1220_24||||120 21..12239|+|219 bp|Glimmer 2.02 orf prediction|S.pneumonia e|670|WAN01UEKO|ORF
ttgatgttaaatctttacttcgtctacaacgggcactgtaagttttaccttgggacgttttacaatgtcgatgatctcattgagcagatggaagaccatcagtggtctttctcggctatcactcatccaagatttcagaagcacattggtcagcggacgacacgatttgactacggttctaaggattgttactatttagcgactttttcaggaggagaa

SEQ ID NO: 7509 - DNA, 369 bp, Streptococcus pneumoniae
  misc_feature (1)..(369): tiling:Spneumo1:WAN024CMB; WAN023NEH spn134d07_4||||2228.. 2596|-|369 bp|Glimmer 2.02 orf prediction|S.pneumoniae|23F -1|WAN01UCVE|ORF|001
ttgattaaaaagaatcatattctttgtgagattgttcctgggtcagttgcctttgcttgtttctacttatctatttctatttcgtcagttttccaatttcttttagtagttattaacttgacttctattttggttactgtttatcttactagggaaatgagattaagagagtttgaagatgatgatttggttagtcctagaaccaatcaactcatgtttatcggcttgacaggctttatgtctattatttgtttgtatagaggtatcacagcaggagaatcttatcaacaactaatcgcttatattggtgctattctttgcttgatcatcatgcttctactcatttggggtttgaagtattataaaaag

SEQ ID NO: 7510 - DNA, 105 bp, Streptococcus pneumoniae
  misc_feature (1)..(105): tiling:Spneumo1:WAN024BKE; WAN023MJG spn194g09_37||||29356 ..29460|+|105 bp|Glimmer 2.02 orf prediction|S.pneumoniae| 23F-1|WAN01UCP7|ORF
ttgattaaaaattctttccaaaataaagcccaacagcaaaaaatggacatccgaataaagaaaggctggctgacttcgtctgttgagatgaaacatcgcttcctt

SEQ ID NO: 7511 - DNA, 246 bp, Streptococcus pneumoniae
  misc_feature (1)..(246): tiling:Spneumo1:WAN024FTJ; WAN023J3Z 85036_2091||||1194924 ..1195169|+|246 bp|EGAD orf prediction|S.pneumoniae|TIGR4| WAN01UC25|ORF|010
ttgattaaagagacgaaaggcagttgtcaaatcatcttgatagtaggcgtttctcttttctttggcttttctaaacaacgtttcaaagaaagcttgattgaaggccaccttgtctttgctgataaaccagcccaagcccttgttttgctgagaaaggtaggcagtcccaagaaagtttccttcctgaccctgcacctctacttcctgatccttaagattgacattctcaagatcactggcttctag

SEQ ID NO: 7512 - DNA, 324 bp, Streptococcus pneumoniae
  misc_feature (1)..(324): tiling:Spneumo1:WAN024F6G; WAN023NV0 spn067g02_1||||23..34 6|+|324 bp|Glimmer 2.02 orf prediction|S.pneumoniae|23F-1| WAN01UCXT|ORF|001
ttgattaccgcgggtatcacgatcatgaacgccttggataataataataaaaatactaaaaaagaacctacgacaagccagacgacaacctttgtcaaagaaattcaaaaagaatcccctcaggaaaatactactccaaataaggaaaataacacttctcaagaaaaaacacaacaagaagaaacgccaaaatctagcgtcaaggaagagaaaaaagaagatcagaaaacagcaactcaggactctactacacctgctacaagtaaacctgccactgaaaatgaaaaacagcccaatactccaacttcagaaaataatactcaa

SEQ ID NO: 7513 - DNA, 1026 bp, Streptococcus pneumoniae
  misc_feature (1)..(1026): tiling:Spneumo1:WAN024BQ4; WAN023PBY pne43_12||||8379..940 4|+|1026 bp|Type 20 capsule operon, Glimmer 2.02 orf predi ction|S.pneumoniae||WAN01UCHC|ORF
ttgattatgaaacaaatattaatttctattattattccattacataatggagaagatacgattattagagcagtaaaaagtgttataaatagcagattatatggagatttgattgaaattattattgttgaaaatggttcaacagatcaatcatttaaaatttctcaaaaattagcgaccgaaaactcaaatatacgagtcttgaaatcagataaaggaaccagttttgccagaaacgtaggaatcgaaaaatctaaaggaaagtggcttatttttttagatgcagatgattatttatttgaatcggatttagacgttattgttgaaaatttaataaccaataatacagatttatgcgtttataactacgaaaaagggcttaagaaaatagaacttttttcagaagaggtagagttgatagatgaccttgattcttttatagttcaatctctttctgaacccactaaatatatgacagtatggggaaaagcgtttaataaaaatttgattgatgagtacggtttgaagtttaatacgaatttgagagtttcagaagatagtgatttttatctcagatttcttttgctgattcacagtttaactttaacttctcaaacgctataccattattcaattgattcaccttcaacgatgaggacattttcttcagataaattagaaggttatattgtttccttgaatgaaagctcaaaagtattaggaaatgttgataatactattcaagaagcctttgagttatataagttggcgcattttaatttaataatggttagagaagtgttctattttgataattcaaaaagtttcagagaaaagataaaggaaatgattagactttataagatgcctatgttttttgagcctatacaaaatctatctgtatctagtgttagcaatttatcgctagtacctctattttttttgaaaatacatttgtatcatttagcggcattggtttacattattcgagtagggcaaaacaaattcaaagaaggaagaaaaagt

SEQ ID NO: 7514 - DNA, 96 bp, Streptococcus pneumoniae
  misc_feature (1)..(96): tiling:Spneumo1:WAN024BUG; WAN023Q7C contig_1244_5||||1331 ..1426|+|96 bp|Glimmer 2.02 orf prediction|S.pneumoniae|67 0|WAN01UEHP|ORF
ttgattattgataagctaccacatttctcacagctgattatgaaacctaaaccatttgaattaatactgcttatattgttctctgagggaactttg

SEQ ID NO: 7515 - DNA, 81 bp, Streptococcus pneumoniae
  misc_feature (1)..(81): tiling:Spneumo1:WAN024DBR; WAN023NN0 spn097d12_60||||47678 ..47758|-|81 bp|Glimmer 2.02 orf prediction|S.pneumoniae|2 3F-1|WAN01UCN2|ORF|001
ttgattatttcgatgatattatgggggctatttactcaaaaaaataagagcaaaattgctattattttttacaaattggtg

SEQ ID NO: 7516 - DNA, 213 bp, Streptococcus pneumoniae
  misc_feature (1)..(213): tiling:Spneumo1:WAN024AZW; WAN0243TG spr1295|transposase G |15903338|NP_358888.1|1290909..1291121|-|213 bp|Transposas e, uncharacterized, truncation|S.pneumoniae|R6|NC_003098.1 |ORF|100
ttgattcagcccttacttcatgcagatgaaacctcctatcgggttctagagaatgatagccatctgacctactattggacctttttgtctgggaaagctgagaatcaagcaatcacgctgtaccaccatgatcagcgtcggagtggttcggtcgtgcaagaattcctaggagattattctggctatgtgcattgtgatatgttgcggcagtaa

SEQ ID NO: 7517 - DNA, 114 bp, Streptococcus pneumoniae
  misc_feature (1)..(114): tiling:Spneumo1:WAN024DMZ; WAN023SHH NC_003098.1_2468||||1 915337..1915450|+|114 bp|Glimmer 2.02 orf prediction|S.pne umoniae|R6|NC_003098.1|ORF|100
ttgattccgtattttcttcattttatcatatttttcagaaaattcatcaaaaacttgccaaattgtcagaattatgagaaaatagaggatatttatcacgtggagggactgcta

SEQ ID NO: 7518 - DNA, 102 bp, Streptococcus pneumoniae
  misc_feature (1)..(102): tiling:Spneumo1:WAN024CBP; WAN023ZGI AL449923.1_204||||170 586..170687|-|102 bp|Glimmer 2.02 orf prediction|S.pneumon iae||AL449923.1|ORF|000
ttgattgaaaagaaattccgtcttattaaaaacgagatgattgatatccattatattccaaaaaaatattgtagtaagcataatgatgacaaaaggaatttt

SEQ ID NO: 7519 - DNA, 84 bp, Streptococcus pneumoniae
  misc_feature (1)..(84): tiling:Spneumo1:WAN024DUB; WAN023O28 spn047b01_45||||37584 ..37667|+|84 bp|Glimmer 2.02 orf prediction|S.pneumoniae|2 3F-1|WAN01UCNY|ORF|001
ttgattgaagcatttaacccatcatggaagaaaagcaaatctcctgtcggtctatccatgcttcgtccaactcgtccaccaatc

SEQ ID NO: 7520 - DNA, 90 bp, Streptococcus pneumoniae
  misc_feature (1)..(90): tiling:Spneumo1:WAN024GLN; WAN023T0C BD003746.1_9||||10634 ..10723|-|90 bp|Glimmer 2.02 orf prediction|S.pneumoniae|A TCC55840|BD003746.1|ORF|000
ttgattgacgaaatccaactagaacgaattgcccagctaatcgaagatgctgagygtaaagatsggttgcccaattctcacatctgcaaa

SEQ ID NO: 7521 - DNA, 234 bp, Streptococcus pneumoniae
  misc_feature (1)..(234): tiling:Spneumo1:WAN024G6W; WAN023LJQ 313479_1772||||950931 ..951164|-|234 bp|EGAD orf prediction|S.pneumoniae|R6|NC_0 03098.1|ORF|100
ttgattgatgattgctattttgaccataacgcacctccatattatttaaaaataactaattctcttatcttctcgtatcccatatacataaatactaatgccactacaattgctctaaaactagcaagatatgtccataacgtaagtattccaaatctacttaatagaggccaaagaagacaagctattaatgctccaatccaaccgtatttaaaattaacatttaatgcatga

SEQ ID NO: 7522 - DNA, 87 bp, Streptococcus pneumoniae
  misc_feature (1)..(87): tiling:Spneumo1:WAN024CBO; WAN023R5U contig_1519_4||||2895 ..2981|+|87 bp|Glimmer 2.02 orf prediction|S.pneumoniae|67 0|WAN01UDNY|ORF|000
ttgattgattctgatgaggtgtatcctaattttatcaaccttgttggaccagttgttattgttactaatagacatttcatacatcag

SEQ ID NO: 7523 - DNA, 627 bp, Streptococcus pneumoniae
  misc_feature (1)..(627): tiling:Spneumo1:WAN024C6W; WAN023QI9 contig_1299_5||||2499 ..3125|+|627 bp|Glimmer 2.02 orf prediction|S.pneumoniae|6 70|WAN01UEBN|ORF|000
ttgattgctatcggtgtcttgctctaccaaaactgggacactgttgttgagtttgctaaaactgcatggcaaggactatgtgattttattagtggtatttgtcgagctattggcgaatttttcagtggtctatggacaaaactacaagaaatctttgagccgataggtcaatggtttggcgagaagttccagcaagcatgggatgccattgtcaacatcttctctggtatcggagagtggttctctggtgtattccaaggtgcatggramgctatcgttaatatcttcactccaatcggctcatggtttggacaacgttgggcagatgtgactagtgctttggctaatatcggggcatggtttactgacatattccaaaaagcatggactggtctaacaaacatctttagcaaactaggtttatggtttggmgagagatgggcagatgttacaagtgttcttgcgaatgtatcttcttggtttgggaatatgtttactagtgcttataatgcagtcaagaacgcgtttagttcaattggtggcttcttcagcggtgtatggtcaacggttcaaagcatatttgtcaatgctggacaaaaggttggtagcgctgtaggtgggagcgtt

SEQ ID NO: 7524 - DNA, 111 bp, Streptococcus pneumoniae
  misc_feature (1)..(111): tiling:Spneumo1:WAN024EUE; WAN023PXM pne06_3||||910..1020| -|111 bp|Type 6A capsule operon, Glimmer 2.02 orf predicti on|S.pneumoniae||WAN01UCKJ|ORF|000
ttgattgcttcatctttcatgttcttttttcaatctaattatgaacaagacccagaaaaagtagccttatttcttaagaattttaatagattaaagcacctagcacctgtt

SEQ ID NO: 7525 - DNA, 78 bp, Streptococcus pneumoniae
  misc_feature (1)..(78): tiling:Spneumo1:WAN024CXM; WAN023T4H BD003695.1_4||||4920. .4997|+|78 bp|Glimmer 2.02 orf prediction|S.pneumoniae|ATC C55840|BD003695.1|ORF|000
ttgattgtaagtaaaaatcgctctatgactgacttcaactccctctttacaccaaagttgacaatcttgacactttgt

SEQ ID NO: 7526 - DNA, 102 bp, Streptococcus pneumoniae
  misc_feature (1)..(102): tiling:Spneumo1:WAN024BSX; WAN023XY1 AL449941.1_24||||2269 1..22792|+|102 bp|Glimmer 2.02 orf prediction|S.pneumoniae ||AL449941.1|ORF
ttgattgttgttgagtataactatttttgtatagatgaaaatcttgttattgttcaagatgttttgatgaccattcatgatttgagtaatccaaggtcaaaa

SEQ ID NO: 7527 - DNA, 96 bp, Streptococcus pneumoniae
  misc_feature (1)..(96): tiling:Spneumo1:WAN024BKM; WAN023MPM spn180c09_108||||8877 4..88869|+|96 bp|Glimmer 2.02 orf prediction|S.pneumoniae| 23F-1|WAN01UCXQ|ORF
ttgattgtttttgactgtttcatcaggaatttcttgaaaaataagtttgaaaccttggttaaaaagtcttttatttcattatctttcacattttcg

SEQ ID NO: 7528 - DNA, 1065 bp, Streptococcus pneumoniae
  misc_feature (1)..(1065): tiling:Spneumo1:WAN024BQ5; WAN023PBZ pne43_11||||7311..837 5|+|1065 bp|Type 20 capsule operon, Glimmer 2.02 orf predi ction|S.pneumoniae||WAN01UCHC|ORF
ttgatttacattggtacgatgcttctctcaatgttgataattacttttatcaagtattttagaatatcaaaaaaatggaaagaggcagtttatttttggggttttattcctcttatcttgataggagcacttagagcttatgtaggaatagattataccacatatagtttggatcagataccggctgtattagctggtagtcagacagtcaaatttgaattgttagataaattagtagtgtacataggttactatctagctaatcagcagcattatttctatatttttgcaatatttcacattatcctgatgtggtttctgtataaatatattgttcaacagtcgtctaatgtaatgttgagtgtgttttttcttctaaccactgttttttttactttttctttatcaggaatacgccaatcaatagctacagcgattgttttttatgcgttgaagtatattaaacaaaaaaaaagtttacattatataatttatttagggattgcttgtttatttcattctagtgcagtaatctatatactttttttagttttagggaaaattaatattaataggttcgttggctttgcattaccgatgattgcatcattattttctttttctgggtctgaatttgtatctcgaataatactacatttaaatttttattcagaatacgttggttctcgttattatacaggagcatatgataaacaacaccaactattcacaatcgttatgtgtttatcggtatttctattatattatattgttccgaaaaaagagtgggttaatttaaaattatatctgaatattaattttgtgctattactagttgcaataatcatgccaatacttcctactccatcaagaactatttatatgtttgttcttgtacatgttattctaattcctaagttgatttcagttattaaagattataggtctaaggtaatcataacaatgttctttgttttaggttattttatattcttttctataacggttctacagaggaatgcatatgaaacactaccgtaccacacaatctttgagtatttatgg

SEQ ID NO: 7529 - DNA, 225 bp, Streptococcus pneumoniae
  misc_feature (1)..(225): tiling:Spneumo1:WAN024BG5; WAN023RNB contig_1578_4||||545. .769|+|225 bp|Glimmer 2.02 orf prediction|S.pneumoniae|670 |WAN01UDGZ|ORF|000
ttgatttatcctgttcttatttcattttactatagttctatgaattatgaaggaagtaaacaactaactgatgcacgatttaaatgtcttgttggtgttcaacgcacgacttttgaagagatgttagctgtattaaaaacagcttatcaacttaaacacgcaaaaggtggacgaaaacctaaattaagcctagaagaccttcttatgggcactcttcaatatgtg

SEQ ID NO: 7530 - DNA, 408 bp, Streptococcus pneumoniae
  misc_feature (1)..(408): tiling:Spneumo1:WAN024CJU; WAN023KC1 315670_3699||||199770 9..1998116|+|408 bp|EGAD orf prediction|S.pneumoniae|R6|NC _003098.1|ORF|100
ttgatttcctcttttctttttcaaaaacgctctattttaagtacgtttccatttaatcacatatttttcactgatatcgaccagcttcatacccaaaagactgataatcgacaccagaataataatggcaaacatggtatcatactgaaacagttttttagactgaatcatataaacaccaagaccttcaaaacctcccaaccactcagataccacagttgtgataaaggcgtaggagacactgaccctcagacctgcataaaagtaaggcaggctaaccgggattttaaaatgccacaggatttgccaagggtttgctcgcatcagactaaacaaagtcagcatatccttgtcacaatgcctaaaaccgtccaaaatactaacgatgatgggaaaggttgttgttaa

SEQ ID NO: 7531 - DNA, 81 bp, Streptococcus pneumoniae
  misc_feature (1)..(81): tiling:Spneumo1:WAN024B7C; WAN023SLQ NC_003098.1_719||||57 8946..579026|-|81 bp|Glimmer 2.02 orf prediction|S.pneumon iae|R6|NC_003098.1|ORF|100
ttgatttctaacaatgttttagaagtagaagtgtactattctagtttcaatctactatacaataagagaacgactcaaaat

SEQ ID NO: 7532 - DNA, 279 bp, Streptococcus pneumoniae
  misc_feature (1)..(279): tiling:Spneumo1:WAN024COH; WAN023IOT 85911_2749b||||155800 4..1558282|+|279 bp|EGAD orf prediction|S.pneumoniae|TIGR4 |WAN01UC25|ORF|010
ttgattttcttccagaggattttctgcatcaccataatcaatcgcctttcccagattttcggattgaatgttttcttggatgaaagactcaacaatcccttcaacctcattcatttgctcctgactagcagcaaaggctccaaaaatcacctcagtatccttattttcagcgacaaaggacaagacttgaagcagagcttgattatcaatcccctgctcaaaatccagttgaaaataaatgatggattctttcttagtttggcttcgtcccaatcgtaa

SEQ ID NO: 7533 - DNA, 240 bp, Streptococcus pneumoniae
  misc_feature (1)..(240): tiling:Spneumo1:WAN024C2P; WAN023L9D 315290_2221||||119221 4..1192453|+|240 bp|EGAD orf prediction|S.pneumoniae|R6|NC _003098.1|ORF
ttgatttttcatattttgaatctgccattaacagtgtacggtataacaaatatggaactaaaccatcaccattttgccaaacgtaagggatacgatctccagttccttgaagaaaacctgataaatagaatactttttcttttccagactctgaaaaatcagattttttgcttcccgaactacaagcaaccaatcctactacagctattaaaactgctgcagctgttaaagctaatttaa

SEQ ID NO: 7534 - DNA, 294 bp, Streptococcus pneumoniae
  misc_feature (1)..(294): tiling:Spneumo1:WAN024CR9; WAN023KAE 82294_37||||17612..17 905|-|294 bp|EGAD orf prediction|S.pneumoniae|TIGR4|WAN01U C25|ORF|010
ttgatttttcttgatttcaaaacgagcccagcgttcatcgtccacaaggccaatctcgcgtcccatctcagtcaagcgcatatcagcattgtcatgacgaagaatgagacggtattcagcacgactggtcaagagacggtagggttcaatggttcccttggtcaccaagtcgtcgatcatcaccccgatataaccatcactgcgcttcaaaatcaattcaggcttgccttggattttcagagccgcattgatacccgcgataatcccttggcctgctgcctcttcgtaacctga

SEQ ID NO: 7535 - DNA, 108 bp, Streptococcus pneumoniae
  misc_feature (1)..(108): tiling:Spneumo1:WAN024BLF; WAN023NB9 spn143g10_51||||49080 ..49187|+|108 bp|Glimmer 2.02 orf prediction|S.pneumoniae| 23F-1|WAN01UCOL|ORF
ttgattttttacatcgttttacagaggtttacgacacttttgccccttttttgcccctttgtttttcaaaaaaacttcatcaaatcgcttgactttcacggtttaccg

SEQ ID NO: 7536 - DNA, 93 bp, Streptococcus pneumoniae
  misc_feature (1)..(93): tiling:Spneumo1:WAN024AYH; WAN023YQY AL449927.1_272||||214 065..214157|-|93 bp|Glimmer 2.02 orf prediction|S.pneumoni ae||AL449927.1|ORF|000
ttgattttttggaaaaaacaattgactaaacaaaccaagagttgtataataaaacaaatatttaaagcaggaggttctggaaatgaaaaagtc

SEQ ID NO: 7537 - DNA, 93 bp, Streptococcus pneumoniae
  misc_feature (1)..(93): tiling:Spneumo1:WAN024AYI; WAN023SJ2 NC_003098.1_1754||||1 365458..1365550|-|93 bp|Glimmer 2.02 orf prediction|S.pneu moniae|R6|NC_003098.1|ORF|100
ttgattttttggaaaaaacaattgactaaacaaacccagagttgtataataaaacaaatatttaaagcaggaggttctggaaatgaaaaagtc

SEQ ID NO: 7538 - DNA, 141 bp, Streptococcus pneumoniae
  misc_feature (1)..(141): tiling:Spneumo1:WAN024CMC; WAN023RNC contig_1578_3||||283. .423|-|141 bp|Glimmer 2.02 orf prediction|S.pneumoniae|670 |WAN01UDGZ|ORF|000
ttgcaaaaacacttacccttttatacttcattaacttctactttttataatacttcaacccccaaacgaaaggaagatgttccgttttttagcaagaaaagttttcatttctttgctcctttctttttagttaaagcaaaa

SEQ ID NO: 7539 - DNA, 81 bp, Streptococcus pneumoniae
  misc_feature (1)..(81): tiling:Spneumo1:WAN024FIQ; WAN023NSF spn089a12_1||||564..6 44|+|81 bp|Glimmer 2.02 orf prediction|S.pneumoniae|23F-1| WAN01UCWH|ORF|001
ttgcaaatagaaaaattgccaaaccagaaaatcgtcgctagaaggaaagagttccttaaaatgcaagagcagggcactcgg

SEQ ID NO: 7540 - DNA, 81 bp, Streptococcus pneumoniae
  misc_feature (1)..(81): tiling:Spneumo1:WAN024DON; WAN023MTR spn177f01_24||||15371 ..15451|-|81 bp|Glimmer 2.02 orf prediction|S.pneumoniae|2 3F-1|WAN01UCN4|ORF|001
ttgcaaatttttaagaagggaggtgatcttgcatggactttgaatatttttataacagagaagcgaaaagatttaacttct

SEQ ID NO: 7541 - DNA, 264 bp, Streptococcus pneumoniae
  misc_feature (1)..(264): tiling:Spneumo1:WAN024FNU; WAN023J0G 85241_2245||||1274408 ..1274671|+|264 bp|EGAD orf prediction|S.pneumoniae|TIGR4| WAN01UC25|ORF|010
ttgcaacacctccagcagcgaaatttacaactggcaattttccatgttcatgaacatattggaccaattctacagggacttgcaaatccttggcagcaacataaagctcgtcctcacgtaagttttgaatgcggcgaatttcctgattcatcatacgcatatgacgaacagcttggacgatatcccctgtccctggttctcctttggtacgaatcatggaagcaccttcagcgatacgacgcaaggcttcacccaaatccttag

SEQ ID NO: 7542 - DNA, 252 bp, Streptococcus pneumoniae
  misc_feature (1)..(252): tiling:Spneumo1:WAN024FBH; WAN023KOY 315733_3118||||166112 4..1661375|+|252 bp|EGAD orf prediction|S.pneumoniae|R6|NC _003098.1|ORF|100
ttgcaactttgccaaggctccactcgagttaaccccacggatggcatcaatttctatccgcgtaatcggctgtttgtaggcaataatggacaaggtctcaagggcagcccgagacaagctctggttgataggcgccttagagtattccttcaaaatctctgcaaattgaggcttggtcaccaatctataagcaccacttgtctcaatcaaagccaaactggaatctgggtccttttcatacttctgggctaa

SEQ ID NO: 7543 - DNA, 81 bp, Streptococcus pneumoniae
  misc_feature (1)..(81): tiling:Spneumo1:WAN024BSH; WAN023TH8 BD140023.1_1||||88..1 68|+|81 bp|Glimmer 2.02 orf prediction|S.pneumoniae||BD140 023.1|ORF
ttgcaagatgctcaattaaactttgcaaatcgaacaccatattatctaaatacctattttttatacttttttagagagtcc

SEQ ID NO: 7544 - DNA, 246 bp, Streptococcus pneumoniae
  misc_feature (1)..(246): tiling:Spneumo1:WAN024FCB; WAN023IKC 86139_2911||||1652846 ..1653091|+|246 bp|EGAD orf prediction|S.pneumoniae|TIGR4| WAN01UC25|ORF|010
ttgcaagggctttttctttatccgttagtctggatgttgggatttgagttggtctgcccactcctgatgataatcggcaactgtaacagcttctcctacaagatagctagcgacttgctccacttcttctttcagacgtggtggcaagattgccaagcccatgacctcaatcaagccgatattttccttcttgatatgttggacatccttgtggggatgatagataccatcaggatactctgctga

SEQ ID NO: 7545 - DNA, 240 bp, Streptococcus pneumoniae
  misc_feature (1)..(240): tiling:Spneumo1:WAN024CHV; WAN023MFL 313566_58||||32938..3 3177|-|240 bp|EGAD orf prediction|S.pneumoniae|R6|NC_00309 8.1|ORF|100
ttgcaagtttggatccacactagacaaacgcccggtctgggtcaaatcctgcacatagcgagtatgaatctttccatcagccaaaatccagtcctgcaagccaattacataagtagattgaatcttagcaatttgacggtaatccaggattttcttaacaatcggagcaataggagcgagacgctccaaaacatccactgctgtcgaataacctgtcttggttttcttagtgtattctag

SEQ ID NO: 7546 - DNA, 225 bp, Streptococcus pneumoniae
  misc_feature (1)..(225): tiling:Spneumo1:WAN024ERL; WAN023J1D 85187_2202||||1253498 ..1253722|-|225 bp|EGAD orf prediction|S.pneumoniae|TIGR4| WAN01UC25|ORF|010
ttgcacataacagatgctattgcaagcctttgcttttgccctcctgataaactcatcggatgcctttcaataaattcgtccaggcataaatcttttaacccaaatcattcatacctctctcaactagatgtaacttacaaaacccctgacctcatgagccactttcttcctcctcatgaggtcagttttactttctgctgttccagtatcgtttttcctcgctag

SEQ ID NO: 7547 - DNA, 372 bp, Streptococcus pneumoniae
  misc_feature (1)..(372): tiling:Spneumo1:WAN024CAN; WAN023JE3 84484_1675||||963810. .964181|-|372 bp|EGAD orf prediction|S.pneumoniae|TIGR4|WA N01UC25|ORF|010
ttgcaccaatcatcaataataactggcacttcccactcacgccattttttaaggttttctaaaagttcattatcactaaatagctcgccatctatttggaaaaattcccctaagtcattgtttccttcaacaataataaactctggcatatttctattacttaataactccttgagttcttgtaactctttgatttcctttagatacttcctcaatttccaacctcaattcttcaatctgccttactactccaaaaatttcatgggtcttataagattgttcaagtatagcctttgctgcttgagttcttataaacgggttgaccttactgtccatcataatatcattgagtacagaaacagcgttagatga

SEQ ID NO: 7548 - DNA, 258 bp, Streptococcus pneumoniae
  misc_feature (1)..(258): tiling:Spneumo1:WAN024FRT; WAN023L5T 313141_2365||||126496 3..1265220|+|258 bp|EGAD orf prediction|S.pneumoniae|R6|NC _003098.1|ORF|100
ttgcacctcatttcgagcgatgagacttgtcagtcgttcgtcgaacaaacgggtcgcatcaaagcccatttccttggcacgataattcatggcagctgcctcaatcacaacagagatattacgacctgttttaactggaatacgaatacgaggaatggctacgccagaaacttcaagttcctctgcattgtttccaagacgatcaaaggtcttatgcgtatcgtaattttccaaatagacagcaagctgaacctgtga

SEQ ID NO: 7549 - DNA, 225 bp, Streptococcus pneumoniae
  misc_feature (1)..(225): tiling:Spneumo1:WAN024BZK; WAN023JR5 83558_982||||559334.. 559558|-|225 bp|EGAD orf prediction|S.pneumoniae|TIGR4|WAN 01UC25|ORF
ttgcacctcctttatattctacatttttacttaacatctatttacttatctttatcaaataaacgtcttaaaaaaaacaataacattaagcatataaccgttagcaagattgtttcaatattattgataatacgatacattctcaagcagtataaaataattatatatatgcaaatgctcattatacctatttttttaaacatactaagcctccttgctaaataa

SEQ ID NO: 7550 - DNA, 78 bp, Streptococcus pneumoniae
  misc_feature (1)..(78): tiling:Spneumo1:WAN024C5X; WAN023OC2 spn019g01_32||||26539 ..26616|+|78 bp|Glimmer 2.02 orf prediction|S.pneumoniae|2 3F-1|WAN01UCLR|ORF|001
ttgcaccttggtagtggcttggtttgtttatattgtcaattatttctgggttcattatttatcctcctccttattttc

SEQ ID NO: 7551 - DNA, 264 bp, Streptococcus pneumoniae
  misc_feature (1)..(264): tiling:Spneumo1:WAN024CQX; WAN023J65 84909_1992||||1135440 ..1135703|+|264 bp|EGAD orf prediction|S.pneumoniae|TIGR4| WAN01UC25|ORF|010
ttgcataagcgttcctttatagaaactaccgtccaatttttttatttcatatacaacttcatcaattgtaaaatcgccagatgcaatagaaacgacttctccagatactccataaggaaccataattttatgattaactacctcggtttccttgacagttccaagaatatcacccgtactcactttttgaccaattgctatagtggaatcaaaatgccacttaatatctctatccaaacttggaacttctaccccacgaactag

SEQ ID NO: 7552 - DNA, 270 bp, Streptococcus pneumoniae
  misc_feature (1)..(270): tiling:Spneumo1:WAN024GM6; WAN023M1R 313606_783||||407725. .407994|-|270 bp|EGAD orf prediction|S.pneumoniae|R6|NC_00 3098.1|ORF|100
ttgcatagaccaagagacgattccaaacaacaatactttccaattcagccttatccagtcgtgcaatctcacgtaacatattttcaaaactggtccagagatagtagacctcagctcccgcttcatttagaacaccatcacgattatctagtcgaagcttccaataatagaaaacagacaaaactaaccctagaaaaccaagtattggcaaagggaggtaaagatagccatgaacgtctaaactgtacaagaacaaaccaaatccgataa

SEQ ID NO: 7553 - DNA, 264 bp, Streptococcus pneumoniae
  misc_feature (1)..(264): tiling:Spneumo1:WAN024CPL; WAN023M4X 315079_603||||311621. .311884|-|264 bp|EGAD orf prediction|S.pneumoniae|R6|NC_00 3098.1|ORF|100
ttgcataggggtacgggcattgtcacgtccaataacacggatactgtccatgatttcttcaatcggaacacctttttcaagagcctcacgcgcatagttgagagattcaatatcttctacttgatccagtgtttcaaacggatagttggtcatcccaatctcctcaccttggtagatataaggagttcctctcataagatgaagcaagattgcaaaggctttggcagatttttcgcggtattcttggtcatttccccagattga

SEQ ID NO: 7554 - DNA, 102 bp, Streptococcus pneumoniae
  misc_feature (1)..(102): tiling:Spneumo1:WAN024BOH; WAN023OCP spn019g01_7||||9397.. 9498|+|102 bp|Glimmer 2.02 orf prediction|S.pneumoniae|23F -1|WAN01UCLR|ORF
ttgcatcatggattgtcaaaagcatcttatatccacctttcttcaaattcgattgttacagttggttttttcttaacaaaacgtgaaaaatacaactctagt

SEQ ID NO: 7555 - DNA, 231 bp, Streptococcus pneumoniae
  misc_feature (1)..(231): tiling:Spneumo1:WAN024GCB; WAN023JOB 83764_1146||||648840. .649070|-|231 bp|EGAD orf prediction|S.pneumoniae|TIGR4|WA N01UC25|ORF|010
ttgcatcttccttctctcaacgaatcatgtattttatctaaccatgtcaggatcgtagtcataaaatcctgtatcaaggaaacggtttttagggtgaagtttacgaacttcttcatccagcaagaaggcttgagcatgactaaagttgccctcttgaatcaagctacgcgcttggataaagagttttgcaatctcaacaaagttctgaccaggagtgtagagcccttctag

SEQ ID NO: 7556 - DNA, 246 bp, Streptococcus pneumoniae
  misc_feature (1)..(246): tiling:Spneumo1:WAN024CQI; WAN023KW6 315473_2800||||149169 5..1491940|+|246 bp|EGAD orf prediction|S.pneumoniae|R6|NC _003098.1|ORF|100
ttgcatttttcctttagcaatctcagaacgatctttgaaaaaggccaaatgagcttctccaaccaaggtcacgatggctgtttttggacgagccaattcagacaagagatgaatatctcccaagtgatcctgtcccatctccaaaaccaacttttctgttccttcaggcatatgaagaactgtgtaaggaaggccaatctcattattgtaattgccttgtgttttgtaggtcttgtatcttgttga

SEQ ID NO: 7557 - DNA, 252 bp, Streptococcus pneumoniae
  misc_feature (1)..(252): tiling:Spneumo1:WAN024FFP; WAN023KUF 315476_2861||||152905 4..1529305|+|252 bp|EGAD orf prediction|S.pneumoniae|R6|NC _003098.1|ORF|100
ttgccaagaatcggcaaaatagcaaataggataaataagttaatccaaagagaaagacagcagatcaatccaaaaacaaagagactgactttcttggacagcaaggccatcaaaatggacagaatgccaaaaactagcaagactttctgtatgatgaagaggtcaatcttcccccccccagaatcggactgccccaaggaagaaagaagaaagcaatccagatcaacagaactaaaccaatatagaccttag

SEQ ID NO: 7558 - DNA, 129 bp, Streptococcus pneumoniae
  misc_feature (1)..(129): tiling:Spneumo1:WAN024C65; WAN023NLY spn098f07_8||||8179.. 8307|-|129 bp|Glimmer 2.02 orf prediction|S.pneumoniae|23F -1|WAN01UCXN|ORF|001
ttgccaagattgactgaccttctcctgtctgagggagattcttttgatccgaatggttcttttcctcttcagatttttccttttcttttgaattctgtacttgtggctgagctgcttgctctagctttt

SEQ ID NO: 7559 - DNA, 234 bp, Streptococcus pneumoniae
  misc_feature (1)..(234): tiling:Spneumo1:WAN024FIR; WAN023IVT 85497_2435||||1374165 ..1374398|+|234 bp|EGAD orf prediction|S.pneumoniae|TIGR4| WAN01UC25|ORF|010
ttgccaagcctagtaaacagatacttgctaatccaatttttgttttcaatctttctctcctataaaaaatgtaacagacatctgaatgctgttccacctagcttttgctacttactgattattttacaaagtcaagcaaagccaagaagctttcagcttcaagtgacgcaccacctacaagggcaccgtcaacgtctgggcaagccatgtatgaagcaacattttcaggtttaa

SEQ ID NO: 7560 - DNA, 243 bp, Streptococcus pneumoniae
  misc_feature (1)..(243): tiling:Spneumo1:WAN024DEF; WAN023LUO 312797_1123a||||59377 4..594016|-|243 bp|EGAD orf prediction|S.pneumoniae|R6|NC_ 003098.1|ORF|100
ttgccaataaaagctacattgcgcatattagcttcgtctaacttattaacagcaccggttacatcgttatttcctgttactgaacccactactttgatattctcaagtgtagacttcttaaacatattaccaataggtgcaactttatcagcccaaggcatgtttatatttacattacctaagttaaagtttttgagtgtagcaccttcagcctcattaaacaaaggtctttctaagttatga

SEQ ID NO: 7561 - DNA, 267 bp, Streptococcus pneumoniae
  misc_feature (1)..(267): tiling:Spneumo1:WAN024COG; WAN023IOQ 85912_2750||||1558676 ..1558942|+|267 bp|EGAD orf prediction|S.pneumoniae|TIGR4| WAN01UC25|ORF|010
ttgccactctcccttgaggttcagatattcttgataggctgcttgcccatcttcaaaaaagataatgctcgatacaaacccacgatcatccacgatatggtgcatatgtatttgaccatttggttcaaaatactgtatatcactgatgaagccttcaactccatgttcaaccttagcaaatttcttcccatttttttgaacgataatcgtaaagggactataaataaattcacagtcatcatcccactcaatatctctaatgcttaa

SEQ ID NO: 7562 - DNA, 123 bp, Streptococcus pneumoniae
  misc_feature (1)..(123): tiling:Spneumo1:WAN024BZC; WAN0242UF SP0548||15900461|NP_3 45065.1|519221..519343|-|123 bp|hypothetical protein|S.pne umoniae|TIGR4|NC_003028.1|ORF
ttgccacttttcccaggtatgggagtcagtgttagctcattatcacccaaatccatttctttcctccgtataaagtttccttactattctactagtttttggcctattcgtcaaccactctaa

SEQ ID NO: 7563 - DNA, 93 bp, Streptococcus pneumoniae
  misc_feature (1)..(93): tiling:Spneumo1:WAN024BJO; WAN0246O2 209197-90-0_3||||371. .463|+|93 bp|Glimmer 2.02 orf prediction from Patent Seque nces|S.pneumoniae||WAN0246X6|ORF
ttgccagatcaattacagggatttggaaccggttatcgtaaactaattgatgctaattatcattttgttgaaacggatatggaactaactaat

SEQ ID NO: 7564 - DNA, 261 bp, Streptococcus pneumoniae
  misc_feature (1)..(261): tiling:Spneumo1:WAN024GJP; WAN023JXF 83156_692||||397697.. 397957|-|261 bp|EGAD orf prediction|S.pneumoniae|TIGR4|WAN 01UC25|ORF|010
ttgccccttgtccagcggaaagagttgggtcaaatactggtagtcaaaggcatgatagagggccagcaactggaagagcaagaggtagttaaagagaactaccactgctgtcgcaatccaagcttgctcgataaaaacctgcgccagcaaggaaagcaagagaagacgaagactgagagcaaagaggtcgccatttcgcagataagaacgcagatagagattttgccaaatcttcccaggcaccttctgaacagcctttaa

SEQ ID NO: 7565 - DNA, 114 bp, Streptococcus pneumoniae
  misc_feature (1)..(114): tiling:Spneumo1:WAN024BJZ; WAN023SSA BD003880.1_5||||5164. .5277|-|114 bp|Glimmer 2.02 orf prediction|S.pneumoniae|AT CC55840|BD003880.1|ORF
ttgccgggcaacgccccaccaacaaactcaaaaaactcatttaaacgttacaaaacaccagaaaatcaagaacatctaagcaacatatctcctacaatccctgtagggggcatc

SEQ ID NO: 7566 - DNA, 123 bp, Streptococcus pneumoniae
  misc_feature (1)..(123): tiling:Spneumo1:WAN024BAN; WAN023YYX AL449926.1_157||||116 313..116435|+|123 bp|Glimmer 2.02 orf prediction|S.pneumon iae||AL449926.1|ORF|000
ttgccgtatgtatggttactgacttcgtcagtttcatctacaacctcaaaacagtgttttgagcagcctgcggctagcttcctagtttgctctttgattttcattgagtataagttttcaaaa

SEQ ID NO: 7567 - DNA, 138 bp, Streptococcus pneumoniae
  misc_feature (1)..(138): tiling:Spneumo1:WAN024FIJ; WAN02423L SP1585||15901427|NP_3 46031.1|1489649..1489786|+|138 bp|hypothetical protein|S.p neumoniae|TIGR4|NC_003028.1|ORF|010
ttgcctatttttgtgtatcataatattataaaagataatataataattttatttgtcttttcacattcggtctccttatataaaaaagcgattcattttgaaccgctttttcttatttatcgcctttgttacgaataa

SEQ ID NO: 7568 - DNA, 198 bp, Streptococcus pneumoniae
  misc_feature (1)..(198): tiling:Spneumo1:WAN024BOW; WAN023OIC pne88_24||||19518..19 715|+|198 bp|Type 45(1) capsule operon, Glimmer 2.02 orf p rediction|S.pneumoniae||WAN01UCBS|ORF
ttgcctgtcttgtattttattgatgaattgaaattaatcagtacttcatcatctattttaaatgatgggaatgttagaacttttgattgtggatatcaagaattgaatgacatttttttagatatttacaacaaatacaatgaagaatcaggctatgtattggctattgtaatactcatctgttttcaaaaagcattc

SEQ ID NO: 7569 - DNA, 75 bp, Streptococcus pneumoniae
  misc_feature (1)..(75): tiling:Spneumo1:WAN024BKA; WAN023T25 BD003721.1_15||||8382 ..8456|+|75 bp|Glimmer 2.02 orf prediction|S.pneumoniae|AT CC55840|BD003721.1|ORF
ttgccttgcagtctgtatcttactgaccaagctagtgatggatttagaataggtgatttggagcgtcctattagc

SEQ ID NO: 7570 - DNA, 78 bp, Streptococcus pneumoniae
  misc_feature (1)..(78): tiling:Spneumo1:WAN024BA2; WAN023XTL AL449948.1_2||||1055. .1132|-|78 bp|Glimmer 2.02 orf prediction|S.pneumoniae||AL 449948.1|ORF|000
ttgccttgccgtaatcaagtacagcctgcggctcgcttcctagttkgctctttgattttcattgagtataaaaagggt

SEQ ID NO: 7571 - DNA, 78 bp, Streptococcus pneumoniae
  misc_feature (1)..(78): tiling:Spneumo1:WAN024B9W; WAN023SJR NC_003098.1_1490||||1 181019..1181096|-|78 bp|Glimmer 2.02 orf prediction|S.pneu moniae|R6|NC_003098.1|ORF|100
ttgccttgccgtactcaagtacagcctgcgactcgcttcctagtttgctctttgattttcattgagtataaaaagggt

SEQ ID NO: 7572 - DNA, 78 bp, Streptococcus pneumoniae
  misc_feature (1)..(78): tiling:Spneumo1:WAN024B9X; WAN023RKR contig_1571_12||||578 8..5865|-|78 bp|Glimmer 2.02 orf prediction|S.pneumoniae|6 70|WAN01UDHP|ORF|000
ttgccttgccgtactcaagtacagcctgcggctcgcttcctagtttgctctttgattttcattgagtataaaaagggt

SEQ ID NO: 7573 - DNA, 87 bp, Streptococcus pneumoniae
  misc_feature (1)..(87): tiling:Spneumo1:WAN024BZ7; WAN023S6B contig_474_1||||8..94 |+|87 bp|Glimmer 2.02 orf prediction|S.pneumoniae|670|WAN0 1UCZO|ORF
ttgcggagcagggataccattgtatataacaacggtattattacttctggaaaaccttctgtcaagagccatttgcttctcgccatt

SEQ ID NO: 7574 - DNA, 279 bp, Streptococcus pneumoniae
  misc_feature (1)..(279): tiling:Spneumo1:WAN024BS2; WAN023TE2 BD228602.1_1||||969.. 1247|-|279 bp|Glimmer 2.02 orf prediction|S.pneumoniae||BD 228602.1|ORF
ttgcgtccattcttttcacgtactcaagaagaagtaactgtttctactgtttccaaccaccaaaccaacggtgaacccagcgtatcttttagaactctgcaaaaggaaacagacagccacaacccaactaccgttaccgtaggtactactgtagcaagttctgtcgactaccttatgcacataaaactgaaagcgactaaacgaattagtagagtccttcaaacacctctgcaacgaaccaatttcgactatgtttctattagccacgcattccgtcca

SEQ ID NO: 7575 - DNA, 81 bp, Streptococcus pneumoniae
  misc_feature (1)..(81): tiling:Spneumo1:WAN024C3D; WAN0246P3 208202-12-4_1||||13.. 93|+|81 bp|Glimmer 2.02 orf prediction from Patent Sequenc es|S.pneumoniae||WAN0246YC|ORF
ttgcgtcggcttcatcaagcaccagcgcgtttgaatccgcatcaaccagtgcttcagcttcagccaagttacctcagcatc

SEQ ID NO: 7576 - DNA, 324 bp, Streptococcus pneumoniae
  misc_feature (1)..(324): tiling:Spneumo1:WAN024F3A; WAN023LY1 315229_958||||497732. .498055|-|324 bp|EGAD orf prediction|S.pneumoniae|R6|NC_00 3098.1|ORF|100
ttgcgtcgtcaagcgactactttgaagttggaacatctcctcgaactgagagcgttccataacaaactgactcttgtctttaagacgtttacacaagaaaaactcactatccccattaaaagaagaaaagacatcaagtacttctaccacaattccatccaaagacacaaaaacagccataagagtcacctccttgattcctataggctgattataacaagaatagctgaaattgtacacgaaaataaaatcctaatagtactcattttgtatgtggctaatattccgtctcgctccggaatgtacgaggtaaatagagtttaa

SEQ ID NO: 7577 - DNA, 147 bp, Streptococcus pneumoniae
  misc_feature (1)..(147): tiling:Spneumo1:WAN024BU7; WAN023Q2N contig_1220_10||||552 1..5667|-|147 bp|Glimmer 2.02 orf prediction|S.pneumoniae| 670|WAN01UEKO|ORF
ttgctaaaaaataaaaaaaacccacaatctccctcgccaaagtttgattgtgaagctcacccttataaaaaatcagccattaaaaaggcctcttttctataccctattttacaccatgaaaggggtgatgtcaatattctcaatgtt

SEQ ID NO: 7578 - DNA, 294 bp, Streptococcus pneumoniae
  misc_feature (1)..(294): tiling:Spneumo1:WAN024ER8; WAN023IUH 85578_2496||||1412955 ..1413248|+|294 bp|EGAD orf prediction|S.pneumoniae|TIGR4| WAN01UC25|ORF|010
ttgctaaaccaatggcaactaagaatcctgcaccacaaacaattggaatcatataggaaatggctgtcaataagtgaccttttaagtttaagtgtttcaacatatattttctccttaaatattttcagttatttcgtaacaatctcaacagctttagcaatcagtttattgggagatttgactgccacttctgttggaaccttgataatctttttaccctcaaagcgttccataccagaaatcttaacatcaactgctaaaataactacatccgctgcatcaatctgctcttga

SEQ ID NO: 7579 - DNA, 246 bp, Streptococcus pneumoniae
  misc_feature (1)..(246): tiling:Spneumo1:WAN024DEK; WAN023JMB 83894_1243||||698752. .698997|-|246 bp|EGAD orf prediction|S.pneumoniae|TIGR4|WA N01UC25|ORF|010
ttgctaaattcttttcccaaaatctccaaaaattcaacgagagaaacacctgaaactaaagctgtaaccaaaccagctaagactactgttgcaattgtatcaaattttaaaataaaacccacaacaatgattgctattcctattaatctaatccactccatatcaaactcctttatattcaaaatgacagtatttttaaaattttatcaagatcaataccattccttatttaatgtgtttttctag

SEQ ID NO: 7580 - DNA, 99 bp, Streptococcus pneumoniae
  misc_feature (1)..(99): tiling:Spneumo1:WAN024BOL; WAN023OEC spn015f04_2||||1003.. 1101|-|99 bp|Glimmer 2.02 orf prediction|S.pneumoniae|23F- 1|WAN01UCV3|ORF
ttgctaagagggctctattctagtttcatggaaatgattttactaaaggttcgtatgctttgtttgcaaacatgttacatctatctatttttggataaa

SEQ ID NO: 7581 - DNA, 87 bp, Streptococcus pneumoniae
  misc_feature (1)..(87): tiling:Spneumo1:WAN024FOB; WAN023SU4 BD003837.1_4||||1185. .1271|-|87 bp|Glimmer 2.02 orf prediction|S.pneumoniae|ATC C55840|BD003837.1|ORF|000
ttgctacggtcagatacagactttgtctacctactagtttatcatactttgaaacagggaagttatatattttatctatcaaagaga

SEQ ID NO: 7582 - DNA, 102 bp, Streptococcus pneumoniae
  misc_feature (1)..(102): tiling:Spneumo1:WAN024BB3; WAN023WBM AX569892.1_1||||27..1 28|+|102 bp|Glimmer 2.02 orf prediction|S.pneumoniae||AX56 9892.1|ORF|000
ttgctactcttcgaaaatctcttcaaaccacgtcagcgtcgccttgccgtatgtatggttactgactttgtcagtttcatctacaacctcaaaacagtgttt

SEQ ID NO: 7583 - DNA, 792 bp, Streptococcus pneumoniae
  misc_feature (1)..(792): tiling:Spneumo1:WAN024DBE; WAN023YK0 AL449929.1_22||||2233 0..23121|-|792 bp|Glimmer 2.02 orf prediction|S.pneumoniae ||AL449929.1|ORF|000
ttgctagaaacaacaagtactgtgattaaagtaacaattcctatgattgcaattttcttatataagttacttggaatacatggtgtgttattactagatggattatcgtttttaattgctgcctcactaattttcttcattactcctgtaaatgaggaggtggatacaaaagagaatatgacgataagaggaatctttgatgatttaaaaataggatttacgtatgtatatagtcataaacaaattctcactataattgccctttcagcacttgttaactttttcctagcagcctataatttgttgctgccatacagtaatcaaatgtttggaagtatttcaagtgggctatatggaacctttttaacagccgaagcgattggtggctttattggtgcgatattaagtggatttatcaataaatccttgtcaagcaaacgtttaatgctctttttagcatattcaggtttgatgttaatgctaacagcgccgatctattatatgttccgcaacgtcattattttagcctttactccagcattatttagtctatttctttccatttttaatatccaatttttctctattgttcaaagagacgtagataatgagtttcttggcagagtatttggaatcatctttacggtagctattctttttatgccactaggtactgtttttttctcagtagttttaaatcctaacaatacttttaatttttttattattggtgtatctattacgatattatcgctaatatttagcacgctattgaagaggtatgatagaagt

SEQ ID NO: 7584 - DNA, 84 bp, Streptococcus pneumoniae
  misc_feature (1)..(84): tiling:Spneumo1:WAN024BTM; WAN023Z4O AL449925.1_184||||185 009..185092|+|84 bp|Glimmer 2.02 orf prediction|S.pneumoni ae||AL449925.1|ORF
ttgctagcctttgttataaaaagttttactaagtattatctaggaaatggagtagtacatttatatataattgttatctctcca

SEQ ID NO: 7585 - DNA, 678 bp, Streptococcus pneumoniae
  misc_feature (1)..(678): tiling:Spneumo1:WAN024GHZ; WAN023OQ8 pne78_10||||6900..757 7|+|678 bp|Type 36(1) capsule operon, Glimmer 2.02 orf pre diction|S.pneumoniae||WAN01UCFT|ORF|000
ttgctaggagtaattcgtcataaaggatttattccttgggatgatgatatggatttaggaatgcctcgaaaagattatgaaaaatttttgtctatttgtaacaaggaacttccagaacatgttgttttgagacttcatgatgataatttaggtaatacctctattatggatacatccttacaaattccatttggagatgaactatgtagtccattcatagatattttccctttggatggttatccagatgatcgttttcattattttattcatacaaacaaaattaaattctatcgtgcactttctaaaatttcggtaatcgatcgtctacatgacagagatcggggaagttttgaaaatgcaattgtgagtatatcaaaagttttgaaattaaataaacttttaaaaacagccactattaacaacaaattacaaaatctaattaaacaatatgattttgaaactagttcaatagtagggaatgtactaggttcatacagagaacgtgaacttgctagaaaagaagtattcggtgaaccacaattactagagtttgagaacttagaaataagttgccatgctaacccagatgaatatttaataaaaatatacggtgattacatgaagttaccaaaagaagctgaacgtaagggccacttcgagtctacatggggagat

SEQ ID NO: 7586 - DNA, 84 bp, Streptococcus pneumoniae
  misc_feature (1)..(84): tiling:Spneumo1:WAN024F6Q; WAN023SUV BD003821.1_18||||1276 1..12844|+|84 bp|Glimmer 2.02 orf prediction|S.pneumoniae| ATCC55840|BD003821.1|ORF|000
ttgctatcgtcaggcttgtctgtaggtgttaatacttttcaaaaatctcttcaaaccacgtcagcttcgccttgcctaactaat

SEQ ID NO: 7587 - DNA, 279 bp, Streptococcus pneumoniae
  misc_feature (1)..(279): tiling:Spneumo1:WAN024C3G; WAN0246QD 203668-79-5_2||||991. .1269|-|279 bp|Glimmer 2.02 orf prediction from Patent Seq uences|S.pneumoniae||WAN024707|ORF
ttgctatcttcgcaaaaaatgcttacggagtttgatcgtgcagtttttgaaagtattgttgagaaaattattgtaggtggagttaatagcaacggagaaattgatcctgcaatgttaaccataatattcaaaacaggtgaaactcaaaacaaggatggtaaacaatttaaaagtaaacgtaaaaatgctaaactagaaacagataaattgtgtcctcaaaacagtgacgaggataaaaaattgtattctcaagggaacagacaacacacgtggagtgtg

SEQ ID NO: 7588 - DNA, 273 bp, Streptococcus pneumoniae
  misc_feature (1)..(273): tiling:Spneumo1:WAN024BSS; WAN023XXF AL449942.1_5||||4266. .4538|-|273 bp|Glimmer 2.02 orf prediction|S.pneumoniae||A L449942.1|ORF
ttgctattcagtgttccctatattccacataagcaattattagaactttgggggcatggagcaaataaagttgacgttgacagcaaagaaaatcgcggtcgatatgtcacaaagtattttgaaaaaggtattggacaagaattgttggaaaacttcggaaagcaagcctatttttcatcacgcaacttgaaaaagcctgatgaagataaattttacacttatgaagattttaactatgatagttcagtcgtactatatgaaacggaatacaac

SEQ ID NO: 7589 - DNA, 288 bp, Streptococcus pneumoniae
  misc_feature (1)..(288): tiling:Spneumo1:WAN024DSU; WAN023L5I-con 313142_2376||||12 69097..1269384|+|288 bp|EGAD orf prediction|S.pneumoniae|R 6|NC_003098.1|ORF|100
ttgctcaggaacaacaactttttcaggttctctcgtccctctccttatacgtctttttaccatctctttagtaatttgacgagaagtagtttcttcaattgttccatcacgttcatctacagcatagattgtagtaagagtaattttaccaatttctcctacttcttgacctttatcaagagttgggtcatcgagatattctgtttcgattggaatttcttggacaagaacttggggcttggttccttttttaacaactcttgtttgagagtcttctttttgacttaa

SEQ ID NO: 7590 - DNA, 456 bp, Streptococcus pneumoniae
  misc_feature (1)..(456): tiling:Spneumo1:WAN024C55; WAN023O3E spn044a06_1||||449..9 04|-|456 bp|Glimmer 2.02 orf prediction|S.pneumoniae|23F-1 |WAN01UCPH|ORF|001
ttgctcatgaacgacctcggtatcacacctgcagaccgtaaggttgctgtcgttgcgcgccaaaaagcagaagaaactggtggaccagccctagcctttgaattgccaaatggggaaatcgtcactggtaagaactcagaactctttgggcctacagccgctgccttgatcaacgccatcaaaaaatcagctgacatcgctaaagaagtaaaactaatcgagcctgaagttgttaagccaatccaaggtcttaaaatcgatcatctcggtagccgcaatccacgccttcattcaaatgaaatcctgattgcacttgctatcacagctacagaaaatcctgatgctgcccgcgctatggaagaactcggcaacctcaaaggaagcgaagcccactcaagactgcaccatgggtcttggccaaggatgaagctcttcgtgaccaattggcaagtgtca

SEQ ID NO: 7591 - DNA, 273 bp, Streptococcus pneumoniae
  misc_feature (1)..(273): tiling:Spneumo1:WAN024BJ3; WAN023L5H-con 313143_2377||||12 69472..1269744|+|273 bp|EGAD orf prediction|S.pneumoniae|R 6|NC_003098.1|ORF
ttgctcctgtcctgcagaaaggtcattgtctgcttcatatttagtagyaaatggaacaagaacttcttcaaccttgcttttagctggaactttgataactgtatccgtggcttcttttctatcaacagtaacctkttcggtaacatraccagtctctggattaacatcgtaggtccttgtcgtagttacatagccatcctctccatcaattgtaacaggattttcactacggtcttttgtttcatctttttcataacgaattcgcgtacttga

SEQ ID NO: 7592 - DNA, 96 bp, Streptococcus pneumoniae
  misc_feature (1)..(96): tiling:Spneumo1:WAN024BSG; WAN023TH7 BD140023.1_2||||421.. 516|-|96 bp|Glimmer 2.02 orf prediction|S.pneumoniae||BD14 0023.1|ORF
ttgctcgttctcctttctcaggtcgaagtgcccgttaccaacggaaccatgctgcgaaaaggaatattccttctatctcaagaagttgcagacgat

SEQ ID NO: 7593 - DNA, 84 bp, Streptococcus pneumoniae
  misc_feature (1)..(84): tiling:Spneumo1:WAN024GJM; WAN023QPQ contig_1336_9||||5764 ..5847|+|84 bp|Glimmer 2.02 orf prediction|S.pneumoniae|67 0|WAN01UE74|ORF|000
ttgctctgttctggtaggagtttgatcaatactctgaagttggccgatgatggtggtgccgtgatttccaatcttctccagttt

SEQ ID NO: 7594 - DNA, 75 bp, Streptococcus pneumoniae
  misc_feature (1)..(75): tiling:Spneumo1:WAN024BKY; WAN023N44 spn156h05_5||||2973.. 3047|+|75 bp|Glimmer 2.02 orf prediction|S.pneumoniae|23F- 1|WAN01UCQ5|ORF
ttgctggaaatagatgttaagctccaatttatttgtttatatcttatttcagtttactatactagcttattattc

SEQ ID NO: 7595 - DNA, 96 bp, Streptococcus pneumoniae
  misc_feature (1)..(96): tiling:Spneumo1:WAN024AXT; WAN023N6G spn149h02_13||||7622. .7717|-|96 bp|Glimmer 2.02 orf prediction|S.pneumoniae|23F -1|WAN01UCSK|ORF|001
ttgcttaattattatcaaaatatttctaccaagaaaactaaccatgattctagtgaaaaaaaaatcttctttgccaacaaatttactttcttgttt

SEQ ID NO: 7596 - DNA, 1986 bp, Streptococcus pneumoniae
  misc_feature (1)..(1986): tiling:Spneumo1:WAN024BKV; WAN023MY6 spn172a11_23||||14274 ..16259|-|1986 bp|Glimmer 2.02 orf prediction|S.pneumoniae |23F-1|WAN01UCP9|ORF
ttgcttatgaaattaaaattatgtatcattggattcttcttttgtttgattgctacaattggtctggtcactattagtgataccgaaatccccatacctttaccaattgatggagctttttctatccaaggaaaaagtaatctttctaataacgaaatatacgaaatggttcgtgacttatcaaaaacggaaaaggttaccatttacaagccaatcgttcagagttcgggtcagttgaagtatgtaaattttgatgatgtaaataatgaacaattaaagtcagcaccaatagtagggatgtattacacacttgggaaaatggatgtagacagtttgaaaccacttacgatgacgggactacaaacagtctatatggcttatccttggtatataggaggaatattacaattcactggaactttaagaatactgttaatgggttcaatttatttaactttattagttgttttatttgttgttaggacgaggcagatcaaagaaggagtgatacgacgttctttgggcttgcctatatacgacttaagaagagagtatggcatttctcttatttttgaactgattatgatggctttattgatgatttcttacagttcttttttgggtaatggtttcttcacctatagttctaagttatttttctctctgcttttaacgaattttatactatttcaaatcattgatcttattacttttgttttattttggttgacgattcagattgaaaagcctattgaaattattaaaaacaaggcaaaaaacaagcttatttttgtcgtatggcttgctattatttcgattatcatccttgtctcaggagtttttttacaagaaacaaagagtagtcaatctagtattaacatacagatacagaatttagtaccatgggatacagtaaaagactggagaaggattgagttccttggaattgaaagtaactctactaaaaatagagaagttaatgattcagatggtcagtatctacagatagttgctgccttaaaaaacttagatttcttatatatagaacggtcttcagcatatgttccagatttcatgaaaacttcacatgttatagaaaatttttctaaacaattagaaaatgacgggataacgaatccagaaataaataaagagttaatttatatcaaccaaacaggtgctaacctacaaaataaagtgaatggaacaaactatcatcttttagataataagatagcaaccatctatattcctgagaagtggaaagaaaaccagaaatctattgagaatacagttgtagcagaacaatttattggaacaaactatacaagagaacagcttgcagttcaaataattcctgatggggaaaaaattttttattttaatgaggatgctgataataatcttaaaatgaaagatattttaccgctggcaaatgtagcagatagcaaagataatatagttgttgtgttagatacggacaaaatgatggaaaataataagttttctttggctagtaacatactatataaatctctttttagtcctgaagcggtaaaaaaaataaatgagatgactgtcctgttgaatttctcaatgaatccagtagatgtttaccaaattgtgaaattaaagattcaatccttagagcaccaaattttactttcacaaatcttgcagaagataatttacagtattgtctttatactcatttatcaatatgtccaactttttattactctaaaacagaatgaatatgtgaaaaaaatcattttgggtctgtcaaaaacatatatagcaatttcaagtctcaaatattttatgatgactattacaatggttattctatttacatttcttatgacagggcaaatagagttgctatatattggagcggcttctctgctagttttgatgttgtcaatcataatgagttttagaaaattatctgaaagctacactaaaattttaaaaggagatgaatca

SEQ ID NO: 7597 - DNA, 177 bp, Streptococcus pneumoniae
  misc_feature (1)..(177): tiling:Spneumo1:WAN024F74; WAN023POC pne24_24||||21489..21 665|+|177 bp|Type 12B capsule operon, Glimmer 2.02 orf pre diction|S.pneumoniae||WAN01UCJ2|ORF|000
ttgcttgattctcaactttcccagacaaaaaggtccaatagtaggtcagatggctatgactctctagaacccgataagaagtttcatccgcatgaagtaagggctgagtcaatagtctctctcgcaagaggttataaaggggctttaggaataggagctttcacaagcttatccaga

SEQ ID NO: 7598 - DNA, 162 bp, Streptococcus pneumoniae
  misc_feature (1)..(162): tiling:Spneumo1:WAN024B8H; WAN023RKH contig_1571_23||||833 0..8491|+|162 bp|Glimmer 2.02 orf prediction|S.pneumoniae| 670|WAN01UDHP|ORF|000
ttgcttgggggggcgcttcaaaaaacttccttctcacatgcgcccaacatccaacaagttcagcttcttccagttgacgataagcagacgagcggttcgaagtttaccaagcttagcgtcgccttgctcctaaaccttggactgctatcgcataggcagaac

SEQ ID NO: 7599 - DNA, 123 bp, Streptococcus pneumoniae
  misc_feature (1)..(123): tiling:Spneumo1:WAN024GH3; WAN023X38 AX567882.1_1||||1..12 3|+|123 bp|Glimmer 2.02 orf prediction|S.pneumoniae||AX567 882.1|ORF|000
ttgctttctactgttttgttggacttcatcagagtcaaacaggctgaaattccggccaataagaccaataaaatcagaaataaaataaaacttctcagtcgctttctgctgacactaactaat

SEQ ID NO: 7600 - DNA, 84 bp, Streptococcus pneumoniae
  misc_feature (1)..(84): tiling:Spneumo1:WAN024BSZ; WAN023Y1T AL449935.1_101||||823 36..82419|+|84 bp|Glimmer 2.02 orf prediction|S.pneumoniae ||AL449935.1|ORF
ttgctttctgaaaaaaattattttaagcaatttgacaaatctagcaacaaaaaattctataaatataatagattgaaactagaa

SEQ ID NO: 7601 - DNA, 78 bp, Streptococcus pneumoniae
  misc_feature (1)..(78): tiling:Spneumo1:WAN024BXD; WAN023RP7 contig_1583_15||||467 5..4752|+|78 bp|Glimmer 2.02 orf prediction|S.pneumoniae|6 70|WAN01UDGB|ORF
ttggaaaatattgccatgtgtaaaattgccatgtgtaaaattgccatgtgtaaaattgccatgtgtaaaattgccctc

SEQ ID NO: 7602 - DNA, 258 bp, Streptococcus pneumoniae
  misc_feature (1)..(258): tiling:Spneumo1:WAN024F92; WAN023RM5 contig_1575_8||||2180 ..2437|-|258 bp|Glimmer 2.02 orf prediction|S.pneumoniae|6 70|WAN01UDHA|ORF|000
ttggaaaggacaagagtaatggatatcgatagaaacagactacgaacaggcttgccacaggttggggtgcagccttatcgacaagtacacgcccactcaacaggcaaccgtaactcaacagctcaaaatgaggctgattaccactatagaaaggaccctgaactagggttcttttcacatgttgtcggaaatggccgtgtcatgcaagtaggtcctgtgaacaacggaaagttgggatgttgggggcggttggaatac

SEQ ID NO: 7603 - DNA, 234 bp, Streptococcus pneumoniae
  misc_feature (1)..(234): tiling:Spneumo1:WAN024FKF; WAN023IXZ 85382_2349||||1330536 ..1330769|+|234 bp|EGAD orf prediction|S.pneumoniae|TIGR4| WAN01UC25|ORF|010
ttggaaaggggcaagataataaacatcatacaaggaagagtgatgaataaaagtagagaaagattccaatcaagactaaataagactacaatggaaccaagtaccataactaaactcagaataatatttgggaaagtcgtaattaaaaactcacgaatgacactcgtgtcattgacaatggcagaagtcaactccccactttggctcttatcaaagaaggatttctctacataa

SEQ ID NO: 7604 - DNA, 219 bp, Streptococcus pneumoniae
  misc_feature (1)..(219): tiling:Spneumo1:WAN024BH2; WAN0246NC 209199-92-8_4||||1174 ..1392|-|219 bp|Glimmer 2.02 orf prediction from Patent Se quences|S.pneumoniae||WAN0246WO|ORF|000
  misc_feature (128)..(128): n is a, c, g, or t
ttggaaattcctttagggaaggctgttaatggaaccgcaagagcttttgacctttttaaaatgccccacttgctagttgcaggttcaacgggttcagggaagtcagtagcagttaacggcattattgntagcattctcatgaaggcgagaccagatcaagttaaatttactgaggatgggtggtcgatcccaaagatggttgagttatctgttctacag

SEQ ID NO: 7605 - DNA, 150 bp, Streptococcus pneumoniae
  misc_feature (1)..(150): tiling:Spneumo1:WAN024BUZ; WAN023Q9O contig_1258_16||||723 3..7382|-|150 bp|Glimmer 2.02 orf prediction|S.pneumoniae| 670|WAN01UEG8|ORF
ttggaactcttgggtatttgtaagtaccttgaacctcctgacaccattcacaacagtgataagctgattttcttacaatctcaggttgcaatccagatttatgttgaaactccgcatttttctggatgctatcatcaattattgattgag

SEQ ID NO: 7606 - DNA, 126 bp, Streptococcus pneumoniae
  misc_feature (1)..(126): tiling:Spneumo1:WAN024BKB; WAN023MGN spn_ends-38g02_33|||| 24020..24145|-|126 bp|Glimmer 2.02 orf prediction|S.pneumo niae|23F-1||ORF
ttggaagtctttaaatattcgtttgttcttcatatccccgtcctcttttcttctatatatactattattatagcactttttaatagcaattcaagaaagaaaaggaaaaaccaatgttatattttc

SEQ ID NO: 7607 - DNA, 195 bp, Streptococcus pneumoniae
  misc_feature (1)..(195): tiling:Spneumo1:WAN024FHN; WAN0243OD spr1478||15903521|NP_ 359071.1|1457631..1457825|+|195 bp|Hypothetical protein|S. pneumoniae|R6|NC_003098.1|ORF|100
ttggaatttgcatcctcttctcctttttacgaggctaccctgcctctactcttctttttctattattataccctttttagttgtaatgtcaatcgttaccacttttcaaccagtcgtctaactcccgatcgcaaccctctttctgagccaattctctcaaaaattcctgatgatgagtatggtggatcccattga

SEQ ID NO: 7608 - DNA, 249 bp, Streptococcus pneumoniae
  misc_feature (1)..(249): tiling:Spneumo1:WAN024G44; WAN023JTT 83402_878||||497637.. 497885|-|249 bp|EGAD orf prediction|S.pneumoniae|TIGR4|WAN 01UC25|ORF|010
ttggaattttcttctttgatttttgcttcttcattgctagtgttattgtctatcacaggatttttactaacaacttctttttccttaatgactgctgttttcttctctttaaaatcctgtgaagtttccatagcactatggatattttcatgtttctctttattttctgctactttttctttatcagagatgtttaaagcatcttcagagctagatgtgtctgctaagactacctcattaggggcatag

SEQ ID NO: 7609 - DNA, 243 bp, Streptococcus pneumoniae
  misc_feature (1)..(243): tiling:Spneumo1:WAN024ESZ; WAN023J92 84750_1874||||1070538 ..1070780|+|243 bp|EGAD orf prediction|S.pneumoniae|TIGR4| WAN01UC25|ORF|010
ttggacaccaacatcactcataatcagcagttcttccagttcctcgaaaaattcttcgtcaacagagcggaagttagcaaagaaggcattcaagcgggcaccgaaacctgtgcgagttttcttaagactgcggtcatatttttcctgaacagtttcttctgtttgaggagcttctggttcaagcacttcagaattattttcttctacagttccttcgtgctcaagcttctcttcctctggtaa

SEQ ID NO: 7610 - DNA, 93 bp, Streptococcus pneumoniae
  misc_feature (1)..(93): tiling:Spneumo1:WAN024BUD; WAN023Q6A contig_1239_5||||1436 ..1528|-|93 bp|Glimmer 2.02 orf prediction|S.pneumoniae|67 0|WAN01UEIG|ORF
ttggaccaatcttttcttttgctagtcaaggcggatcttatcccccaaaatagccaaaaagcaacgacagggattactcatcgctgccttttg

SEQ ID NO: 7611 - DNA, 75 bp, Streptococcus pneumoniae
  misc_feature (1)..(75): tiling:Spneumo1:WAN024ERO; WAN023XTO AL449947.1_7||||6539. .6613|-|75 bp|Glimmer 2.02 orf prediction|S.pneumoniae||AL 449947.1|ORF|000
ttggagagtccttttgggatgaacatgtcaaatattactatagatgggcaagaaaagatgggcaagaaatggatc

SEQ ID NO: 7612 - DNA, 99 bp, Streptococcus pneumoniae
  misc_feature (1)..(99): tiling:Spneumo1:WAN024DLB; WAN023NYW spn047f12_27||||19966 ..20064|-|99 bp|Glimmer 2.02 orf prediction|S.pneumoniae|2 3F-1|WAN01UCXY|ORF|001
ttggagcaaatgctggcaaaaggattttacagagagtccttcttgatagctaatcgttttttctactttcaagaggtcagtttttatgaagaggatacc

SEQ ID NO: 7613 - DNA, 75 bp, Streptococcus pneumoniae
  misc_feature (1)..(75): tiling:Spneumo1:WAN024C2C; WAN023SJP NC_003098.1_1494||||1 182204..1182278|-|75 bp|Glimmer 2.02 orf prediction|S.pneu moniae|R6|NC_003098.1|ORF
ttggaggatacgatgaaagatagttattggttaaattattttccggagtatagtttagaaacgtttgaagtagaa

SEQ ID NO: 7614 - DNA, 753 bp, Streptococcus pneumoniae
  misc_feature (1)..(753): tiling:Spneumo1:WAN024FDT; WAN023R12 contig_1420_4||||2821 ..3573|-|753 bp|Glimmer 2.02 orf prediction|S.pneumoniae|6 70|WAN01UDWM|ORF|000
ttggaggctaggatgcaacagtattttgtcaaggggagtgcagtctctcctgtcaccatcgaggacagggaaaccagcaagcatatgtttcaggttatgcgcttgaaagaagatgatgaggttactttggtctttgatgatggaattaagcgcttggcgcgtgtgctggatgtggaagctcgtcagtttgaattggtagaagaactagatgacaatgtggaactgcccgttcaagtgaccatttcatctggttttcccaagggagataagttggagtttatcactcaaaaggtgacggaactaggtgccagccagatttgggccttccctgccgattggtccgttgctaagtgggatggcaagaaattgggtaaaaaggttgaaaaactagaaaaaattgctcttggagcagcagagcaaagtaagcgtaatgttgttccaagtatccatcttttcgagaataaagcagactttctagcccaacttgaccagtttgaccgcatcttagtagcctatgaagaggcggccaaagaaggagaagccgctgctcttataaaagcagttactggactcgagaaaggagccaaattgctctttatctttggtccagaaggtggtctgtcacctgcggaaattgaaaattttgaagctaagggagctgttttggcaggacttggccctcgcattctaagagcagaaacagcaccgctttatgccttatcagcccttagtgttttattagaattagagaaa

SEQ ID NO: 7615 - DNA, 999 bp, Streptococcus pneumoniae
  misc_feature (1)..(999): tiling:Spneumo1:WAN024CIL; WAN023QWC contig_1369_1||||37.. 1035|+|999 bp|Glimmer 2.02 orf prediction|S.pneumoniae|670 |WAN01UE3E|ORF|000
ttggagggacctccggggacaggtaagactttgcttgctaaggcagtcgctggagaagcaggtgttccattctttagtatctcaggttctgactttgtagaaatgtttgtcggagttggagctagtcgtgttcgctctctttttgaggatgccaaaaaagcagcaccagctatcatctttatcgatgaaattgatgctgttggacgtcaacgtggagtcggtctcggcggaggtaatgacgaacgtgaacaaaccttgaaccaacttttgattgagatggatggttttgagggaaatgaagggattatcgtcatcgctgcgacaaaccgttcagatgtacttgatcctgcccttttgcgtccaggacgttttgatagaaaagtattggttggccgtcctgatgttaaaggtcgtgaagcaatcttgaaagttcacgctaagaacaagcctttagcagaagatgttgatttgaaattagtggctcaacaaactccaggctttgttggtgctgatttagttcgggtggctattggcattaatccagaaaacttttcttggaagttagcccctgaggaatactttgaaacaccggtagctttagtgactcattcagatcagggattaactggtattagtcatgaaagtcagaattttgtactgaagcacattattctaagtgaattttctaaaaaagaacgtccaattctaatcaataactgggaagctacttactttgactttcagagagaaaaactgttagagttagcagatgaagctaagaaagttggcattgaactttttgtattagatgatggttggtttggcaatcgttttgatgataatcgtgctttaggtgattgggttgttaatgaggaaaaactgggtggaagtctagaaagtctgatttcagctatccatgaaagaggtttgcagtttggactttggttagaacccgaaatgatttctgtagatagtgatttgtatcgtcaactaactaat

SEQ ID NO: 7616 - DNA, 81 bp, Streptococcus pneumoniae
  misc_feature (1)..(81): tiling:Spneumo1:WAN024BK2; WAN023SSH BD003879.1_2||||712.. 792|+|81 bp|Glimmer 2.02 orf prediction|S.pneumoniae|ATCC5 5840|BD003879.1|ORF
ttggagttattaatggacttagtttatataactaatgaattgattgaaagggttagtattgacaatattggtcatattgac

SEQ ID NO: 7617 - DNA, 93 bp, Streptococcus pneumoniae
  misc_feature (1)..(93): tiling:Spneumo1:WAN024CC9; WAN023R3B contig_1454_5||||3182 ..3274|-|93 bp|Glimmer 2.02 orf prediction|S.pneumoniae|67 0|WAN01UDT7|ORF|000
ttggataagtttcgcatcatccctacaaatcccaatgcggacatagcagatagccagcctatcgtagcttttcttattcttggcgtcctcyag

SEQ ID NO: 7618 - DNA, 267 bp, Streptococcus pneumoniae
  misc_feature (1)..(267): tiling:Spneumo1:WAN024COZ; WAN023JCD 84574_1737||||1002070 ..1002336|+|267 bp|EGAD orf prediction|S.pneumoniae|TIGR4| WAN01UC25|ORF|010
ttggatcctggatttttccaagtaaatcttcagcctctctcagtttttcttcaaccttttcagtctcgacctgaggttcttctgattcctctggtgattcttctggttcctctgttggttttggagactctggtttctcgctttgcggtttctcttctcgaggggtttcttcctcaggtttttctgtctgaggtttctcctcgcttggtttttccgtttgattggtatcagcttgaccatttttgtttctttgaacatggtcgctag

SEQ ID NO: 7619 - DNA, 114 bp, Streptococcus pneumoniae
  misc_feature (1)..(114): tiling:Spneumo1:WAN024EYX; WAN023RKX contig_1571_5||||2121 ..2234|+|114 bp|Glimmer 2.02 orf prediction|S.pneumoniae|6 70|WAN01UDHP|ORF|000
ttggatgcatctgtgattttcacaaagaaaaaactcaagctttcttgggcacctgctggggaaagaattaaaaatgacaaagctaaaactagtaaccagcttttagccttccaa

SEQ ID NO: 7620 - DNA, 783 bp, Streptococcus pneumoniae
  misc_feature (1)..(783): tiling:Spneumo1:WAN024ASS; WAN0240FC |cps19aG||AAC78669.1| ||783 bp|Cps19aG|S.pneumoniae||AF094575|ORF
ttggatgctataaaagagtttcaaaaaatttgtaaagagaacaatatagatttcttccttcgtggggggagtgtacttggggcagtcaaatatgatggctttattccatgggatgatgacatggatattgctgtgcctcgtgaaggctacgataaacttccaggtatctttaaggatagaattatcgcaggcaaatatcaggttcttgcttatcaatattgcgatactttacattgctactttcctcgcttattccttttagaagatgaaagaaaacgtttgggattgccacgaaataccaatttaggtttgcatttgattgatatcattcctttggatggtgccccaaatcattcatttttaagaaagctttacttcggtaaagtatactggtatcgttttttagcaagtttaggaactacctatgttggagaccatgtggatatgcattccgctaagcaaaaactaatcattggtttctttaaaaagctaggatttgcaaaactattccctcaaaattatgtgtacagacgcttggataatctctataaaaagtatgattggaaaaagcagaagtatgctgggacaattaatgcatctctgtttgccaaagaagtcatgccagtagagatttggggagaaggagtagagaagccttttgaggatgccttctttaaagttcccacggagtatgaccgctatctgaaaagactttacggagaaaactatcttcacgaagagcctagtgatgatgaaaagaaatcgcatttaggaggacaataa

SEQ ID NO: 7621 - DNA, 387 bp, Streptococcus pneumoniae
  misc_feature (1)..(387): tiling:Spneumo1:WAN024BWU; WAN023RF0 contig_1553_1||||78.. 464|+|387 bp|Glimmer 2.02 orf prediction|S.pneumoniae|670| WAN01UDJZ|ORF
ttggattttgttcaactgagcaaacatgcgcaaaagatggtgaatcagctgtcgagtgggatgcgacgacgtcttgtcttggcaagagctctcatcaatcgacctgatattatcattttagatgaaccgacagttggtttagacattcaatcccgcaatattatttgggataaacttttggagttgaaggaattaggtgtttccatcattattacttcccactatatgaatgagattgaatatttgacagatagggtgctgatgctccaccaagggactatcaaagaagaaggaactgtagaagacttgctcatcaagtatgatgctgacaaccttgagacgctttttttggggttgactgggacagagaaggaggacttgcatgtt

SEQ ID NO: 7622 - DNA, 111 bp, Streptococcus pneumoniae
  misc_feature (1)..(111): tiling:Spneumo1:WAN024BGG; WAN023OJ1 pne87_29||||23256..23 366|-|111 bp|Type 44(1) capsule operon, Glimmer 2.02 orf p rediction|S.pneumoniae||WAN01UCE7|ORF|000
ttggcaaagatgttctcaaccttgcttctatccttagatagtgcatggttacaggctttatctttagctgttagcggattgagtttgctggatttacgtggagtttgtgct

SEQ ID NO: 7623 - DNA, 87 bp, Streptococcus pneumoniae
  misc_feature (1)..(87): tiling:Spneumo1:WAN024C4H; WAN023Q1L contig_1216_5||||4236 ..4322|+|87 bp|Glimmer 2.02 orf prediction|S.pneumoniae|67 0|WAN01UEKW|ORF|000
ttggcactgccaactgagcttgattttacttatatagttgaaaaaaaggagtttgtttatggcacaaaaaattatgagcctacaaaa

SEQ ID NO: 7624 - DNA, 147 bp, Streptococcus pneumoniae
  misc_feature (1)..(147): tiling:Spneumo1:WAN024CZ3; WAN023NXD spn062g12_8||||8293.. 8439|-|147 bp|Glimmer 2.02 orf prediction|S.pneumoniae|23F -1|WAN01UCVH|ORF|001
ttggcaggtgagaagatatcaagcagaatatccatgttagcgtcttttataggaagtcgtgccaagtcgccaacaaaccaattgactgcccagttgggttcacttttagcagcgatttggactgaatctttggagatgtcaaaggca

SEQ ID NO: 7625 - DNA, 189 bp, Streptococcus pneumoniae
  misc_feature (1)..(189): tiling:Spneumo1:WAN024EUG; WAN023SRW BD003894.1_5||||2333. .2521|-|189 bp|Glimmer 2.02 orf prediction|S.pneumoniae|AT CC55840|BD003894.1|ORF|000
ttggcagttcttgctcaatcaatccaaagaaatggtcggcattcttctcttgaaaatgaaagagcaggagttgatagagttcgtagtgaacctgtaatccctcagagtaagaaagcagcttatctcgtacttcccgatgggttaagtgcattcgaaacgtgggctgatagaatcgtttctgacagagct

SEQ ID NO: 7626 - DNA, 585 bp, Streptococcus pneumoniae
  misc_feature (1)..(585): tiling:Spneumo1:WAN024B9F; WAN0246RF 203666-91-5_1||||4..5 88|+|585 bp|Glimmer 2.02 orf prediction from Patent Sequen ces|S.pneumoniae||WAN02470Q|ORF|000
ttggccaatgatccaaaaatcttgatttcagacgagtcgcttcaaatttcggcccctggacccttaagaccaacccaagcagattttggcccttggttgcaagatttgaaccaaaaattaggcttgactgttgtcctgattacgcatgaaatgcagattgtcaaagacattgccaaccgtgttgcagttatgcaggatgggcatttgattgaagagagtagtgtgcttgaaatcttctcagaccctaaacaacctttgactcaagactttatctcaacagctacaggtattgacgaagccatggtcaaaatcgagaagcaagaaatcgtggaacacttgtctgaaaacagtctcttggtgcaactcaagtacgctggatcttcaacagacgagccacttttgaatgaattgtacaagcattatcaagtaatggctaatattctctatgggaatatcgaaatcctcgatggtactcctgttggagaattggtggtggtcttgtcaggtgaaaaagcagcgctggcaggtgctcaagaagccattcgtcaagcaggcgtacagttaaaagtattgaagggaggacag

SEQ ID NO: 7627 - DNA, 391 bp, Streptococcus pneumoniae
  misc_feature (1)..(391): tiling:Spneumo1:WAN024G2R; WAN023JAM 84665_1808||||1036018 ..1036482|+|465 bp|EGAD orf prediction|S.pneumoniae|TIGR4| WAN01UC25|ORF|010
ttggccatcataagaaatcggacttgttcgctcaaattgataaatggtcacctgacgttctggacgctccacttcctgaccagcacgcgcatactcatagagcttgcgaccattaaccttaactgccgaatacatagggggaatctgagtaataggcccagtcaagctagcaatcgcttcatcaacaagcttttcatccaagagagacaaaacaggggtttctgcgaccacttccccactagcatcctcagtcttcgtggaatagcccagagtgatttccccctcatagatcttaccctcgtcctgcataaactcgaccatgcgtgtcgccttgccaaccgcaatcggcaaaacacccaccacatccggatccaaggttccaccatgacca

SEQ ID NO: 7628 - DNA, 78 bp, Streptococcus pneumoniae
  misc_feature (1)..(78): tiling:Spneumo1:WAN024BKO; WAN023MQT spn180c09_61||||54725 ..54802|+|78 bp|Glimmer 2.02 orf prediction|S.pneumoniae|2 3F-1|WAN01UCXQ|ORF
ttggctaaatctcctttctacatctcgtttcaccaaaaacttttaagagagaaatactctatatttcattctctaaat

SEQ ID NO: 7629 - DNA, 90 bp, Streptococcus pneumoniae
  misc_feature (1)..(90): tiling:Spneumo1:WAN024F6F; WAN023RLG contig_1573_14||||715 9..7248|-|90 bp|Glimmer 2.02 orf prediction|S.pneumoniae|6 70|WAN01UDHG|ORF|000
ttggctagtcaggtggagtggttaatgttaaagagtatccactatatttcttctcatactcaatggaaatcaaagagcaaactaggaagc

SEQ ID NO: 7630 - DNA, 285 bp, Streptococcus pneumoniae
  misc_feature (1)..(285): tiling:Spneumo1:WAN024C2U; WAN023M67 315085_526||||268025. .268309|-|285 bp|EGAD orf prediction|S.pneumoniae|R6|NC_00 3098.1|ORF
ttggctcttccaagtatcaatagagatgaggacatcactttccttgcgaatcgctttgatcactggaacaacacgctggatttcctcttctatctcaacatagctactgcccggccgagtcgattctccgccgatatcgagcatactggctccttctgctatcaatttacgagcctgctggagtgcctgctcaagagcaaaaaattgaccaccgtccgaaaaggagtctggggttacattgataattccgcaaataactgtctttgcatgattggctttacttga

SEQ ID NO: 7631 - DNA, 105 bp, Streptococcus pneumoniae
  misc_feature (1)..(105): tiling:Spneumo1:WAN024DAM; WAN023N14 spn167f04_25||||21066 ..21170|-|105 bp|Glimmer 2.02 orf prediction|S.pneumoniae| 23F-1|WAN01UCN6|ORF|001
ttggctcttgtcctgtctcttttaagaatgcattggccttggaaaagggcttggaaccccaaaatcctctataaaccgacaaaggacttggatgggctgattcga

SEQ ID NO: 7632 - DNA, 324 bp, Streptococcus pneumoniae
  misc_feature (1)..(324): tiling:Spneumo1:WAN024FJW; WAN023L0G 315463_2604||||138705 5..1387378|+|324 bp|EGAD orf prediction|S.pneumoniae|R6|NC _003098.1|ORF|100
ttggctggattgctagccgctctaaaaccactataccctctattaacatcttccttacggatagctggattttggcgagcatcagaaaggctcaaacctagtttcaagatttcattaatagatgctggagctgaagttgtttctactttgtcagctgtgctagttggcaaaatagcgctatcaacagctgaacgttcagttgttgcagctggtttagccccttcttttgattcaactgcatcagctttcttcgctacaggcgtttctgatacagtttctttattagagttagaacgaagttctagaccaataataaatgattga

SEQ ID NO: 7633 - DNA, 312 bp, Streptococcus pneumoniae
  misc_feature (1)..(312): tiling:Spneumo1:WAN024BRZ; WAN023TE1 BD228606.1_1||||956.. 1267|-|312 bp|Glimmer 2.02 orf prediction|S.pneumoniae||BD 228606.1|ORF
ttggcttgcgcagagactaagccaaaagatttttggcaagcatactttttacgtagtcaaggcctagcaaatgtttgtgttgcttcgaaccgccgaaatggctgtgaactcagcgtatcatttaaaagtttgctcttggcaatactcagccacagcctaagtaacggtgtcgcaggtactactgtagtaaattctgcaaacaaacttgagcttcacttactaaaagtgatcgaaactattagcgtccgtagtctcatacctaggcaaaaaagcaattccgtctgtatttatcctaaccgcgtattaggtctt

SEQ ID NO: 7634 - DNA, 93 bp, Streptococcus pneumoniae
  misc_feature (1)..(93): tiling:Spneumo1:WAN024DN3; WAN023ODA spn015g06_29||||18638 ..18730|-|93 bp|Glimmer 2.02 orf prediction|S.pneumoniae|2 3F-1|WAN01UCTZ|ORF|001
ttgggaaatgaagaaaatacggaatcaaggggaagtctatggagcagattggaaaagtctttagacaattacgagagtcaagaaatatctcac

SEQ ID NO: 7635 - DNA, 78 bp, Streptococcus pneumoniae
  misc_feature (1)..(78): tiling:Spneumo1:WAN024F6N; WAN023N53 spn150h11_49||||41154 ..41231|+|78 bp|Glimmer 2.02 orf prediction|S.pneumoniae|2 3F-1|WAN01UCW9|ORF|001
ttgggaacacgtaaattatactcttcgaaaatctcttcaaaccaggtcagccctatccgcaacctcaaaacagtgttt

SEQ ID NO: 7636 - DNA, 546 bp, Streptococcus pneumoniae
  misc_feature (1)..(546): tiling:Spneumo1:WAN024BPF; WAN023ONO pne81_13||||7248..779 3|+|546 bp|Type 39(1) capsule operon, Glimmer 2.02 orf pre diction|S.pneumoniae||WAN01UCEV|ORF
ttgggacaagtaccaaatgtgataggtgaaaaccaggcaagatttttttgtgaaaaacgtcaccagaaaactaaaggatttttattacaatattttaatgaatttgtagaaaattataattttactaaagataatctagaaaatagtaagattgtttggacattgtggtggcaaggttatgataacgctcctgaaattgtaaagtattgtttagataatatgaaaaaattagctcatgaaaatggttttgagttttattgtttagatgaatcctcctttgagcgctatgttaaaattcctgaatatctaaaattaaaaattaaaaaaggctatatttcaattgcaaatatttcagatatgatacgtgtttgtcttcttttgcagtatggtgggacttggattgattcaactgtgtttattcattcgtcttttaaatgggataacttttctaaatcttattttacaataaagactggtgagatgacagattattctccaaatgtttccaagaatcgatggaagacatttttattatcagggaatagt

SEQ ID NO: 7637 - DNA, 288 bp, Streptococcus pneumoniae
  misc_feature (1)..(288): tiling:Spneumo1:WAN024E2R; WAN023IUM 85572_2492||||1410156 ..1410443|+|288 bp|EGAD orf prediction|S.pneumoniae|TIGR4| WAN01UC25|ORF|010
ttgggacgaattacgagttgcttgagagaagccattctcatagacagggaagtctttttcagtaatggttacaggggattttccagctacaatagcgtcaatctcactagcaacttcgggataagcaaccttgtaatcagacaccaaactagcccaagcatcgtatgcctcctgaccacgatccgctacatttgtcttgaaatcagaatatacttcctctggtacttcaaatggatcgtaatcccatcccaaaaacttacgagttgctcctgtttcttctgctcctag

SEQ ID NO: 7638 - DNA, 321 bp, Streptococcus pneumoniae
  misc_feature (1)..(321): tiling:Spneumo1:WAN024GNB; WAN023ZC6 AL449924.1_99||||7212 2..72442|-|321 bp|Glimmer 2.02 orf prediction|S.pneumoniae ||AL449924.1|ORF|000
ttgggagtgaatatcgctaagatttacaaggttgatacagtttctgctggtttggtatcacttgcttcgtttgtcatttcgattggaagtacagttacaaagagtttccctttggcaaatgtaggagatgtgaaattagatcaaatcttacaaggaattgataatctagcatttgatggtaaaaatctgatggtaactattgggaacgtgattccaggaaaccatattaatgccagaggcagaaagggagggatatcctcatcctgctggggctccgtggtggttacaagttccgaacgcttgctggaaacatccctacgg

SEQ ID NO: 7639 - DNA, 93 bp, Streptococcus pneumoniae
  misc_feature (1)..(93): tiling:Spneumo1:WAN024DR3; WAN023T51 BD003687.1_10||||6092 ..6184|-|93 bp|Glimmer 2.02 orf prediction|S.pneumoniae|AT CC55840|BD003687.1|ORF|000
ttgggagttggtagagaagaaaaaaccaaccttagggctggttttgttctgtctagttttctttcaacttcgccaattcctgtgcaagtagtt

SEQ ID NO: 7640 - DNA, 243 bp, Streptococcus pneumoniae
  misc_feature (1)..(243): tiling:Spneumo1:WAN024ES2; WAN023IEP 86481_3166b||||180062 6..1800868|+|243 bp|EGAD orf prediction|S.pneumoniae|TIGR4 |WAN01UC25|ORF|010
ttgggcccaatcaaggcgacgcattcaccttcagctacctcaaaggaaatacccttcaaaatagccttgcccttgatgtttttatttaggctttctaccttaatcatattcatgatattctcctttcaaccactccattctcataaggaaaacgacgaaaatcataaatccaaaccccaaagcaccacgaatgaattggcgaagcaaggtttggtcaaaccaacctgtaaacatttccactaa

SEQ ID NO: 7641 - DNA, 231 bp, Streptococcus pneumoniae
  misc_feature (1)..(231): tiling:Spneumo1:WAN024G7L; WAN023JGU 84275_1525||||865070. .865300|-|231 bp|EGAD orf prediction|S.pneumoniae|TIGR4|WA N01UC25|ORF|010
ttgggcgcttgctttgataaagctttctgtcaagcccttgcgtggaggatcaaccaagataacggttggttgaataccttccttgagccatttcttcatggcattttcagccgtgtcacagacatagtgggcattagtaatcttgttcaaagaagcattcttctggctattctctactgcttctggaatcagttcaacaccgtagacttctttgacatgcttggcgactga

SEQ ID NO: 7642 - DNA, 201 bp, Streptococcus pneumoniae
  misc_feature (1)..(201): tiling:Spneumo1:WAN024FFQ; WAN0243MI spr1545||15903588|NP_ 359138.1|1529050..1529250|-|201 bp|Hypothetical protein|S. pneumoniae|R6|NC_003098.1|ORF|100
ttggggcagtccgattctgggggggggaagattgacctcttcatcatacagaaagtcttgctagtttttggcattctgtccattttgatggccttgctgtccaagaaagtcagtctctttgtttttggattgatctgctgtctttctctttggattaacttatttatcctatttgctattttgccgattcttggcaattaa

SEQ ID NO: 7643 - DNA, 153 bp, Streptococcus pneumoniae
  misc_feature (1)..(153): tiling:Spneumo1:WAN024BWB; WAN023R0I contig_1407_2||||198. .350|-|153 bp|Glimmer 2.02 orf prediction|S.pneumoniae|670 |WAN01UDX7|ORF
ttgggtaacctgctatcagttaagggcttttatattttacaaaaaaatcagtgtatcggcttatatatgttggtacacttttctttttactacactagttttctacaacaaaaaaaagacaagctagctgctgctgacttgtctaatatcgcc

SEQ ID NO: 7644 - DNA, 264 bp, Streptococcus pneumoniae
  misc_feature (1)..(264): tiling:Spneumo1:WAN024GGM; WAN023LWM 315223_1032||||538508 ..538771|-|264 bp|EGAD orf prediction|S.pneumoniae|R6|NC_0 03098.1|ORF|100
ttgggtaatcaatttgacaaccccacctgcctgataaatcatattttccacacgcgcaacaaaggcttctttagcaatagacggagccgtagcaatatagaccaggtccccatccttgatttctacataacgatggcgaccaatcgacatcttacgaagtccattgataggttcacccatacgacctgtctcaagaataatcaactcatggtcttcaaagcgagacatatctttaggcttaatcaagagaatttcgttggctaa

SEQ ID NO: 7645 - DNA, 84 bp, Streptococcus pneumoniae
  misc_feature (1)..(84): tiling:Spneumo1:WAN024BS7; WAN023TGY BD140039.1_3||||940.. 1023|-|84 bp|Glimmer 2.02 orf prediction|S.pneumoniae||BD1 40039.1|ORF
ttgggtattggtgtagaaaaccgaagaacaaggttgggaacatcatttgaaaatggctatggaactggaacgcgaactccactt

SEQ ID NO: 7646 - DNA, 243 bp, Streptococcus pneumoniae
  misc_feature (1)..(243): tiling:Spneumo1:WAN024ES6; WAN023IET 86471_3159||||1794301 ..1794543|-|243 bp|EGAD orf prediction|S.pneumoniae|TIGR4| WAN01UC25|ORF|010
ttgggtttgatatggggacttggaaggttaaaaaagtccaaggcgtggacttggattccttcaagtgggttggacacatggttcatgggattatctgaactcgtcacaacagcgccagaagcatcggcctgcatggaaatagttccacccgtatgtaaaacaaggattttcttaggcatgatttactcactctttctgaaatgtggtataatcattgtatcacaaaaggggagattgggatag

SEQ ID NO: 7647 - DNA, 78 bp, Streptococcus pneumoniae
  misc_feature (1)..(78): tiling:Spneumo1:WAN024B8I; WAN023YCT AL449930.1_208||||175 868..175945|+|78 bp|Glimmer 2.02 orf prediction|S.pneumoni ae||AL449930.1|ORF|000
ttggtaaactgcgaaccgctagaagcttatcgtcaactggaagaagctgaacttgttggatgttgggcactaactaat

SEQ ID NO: 7648 - DNA, 132 bp, Streptococcus pneumoniae
  misc_feature (1)..(132): tiling:Spneumo1:WAN024DHJ; WAN023NWA spn066d05_24||||12246 ..12377|-|132 bp|Glimmer 2.02 orf prediction|S.pneumoniae| 23F-1|WAN01UCWR|ORF|001
ttggtaagtcagtatgttgcgaataatttctcaaagaatggcaaaatcgataagcaaaattggtatcatactgatagcttgcaaaaccatgtatacaatcaaactcctcactatctttggaatatttttgtt

SEQ ID NO: 7649 - DNA, 318 bp, Streptococcus pneumoniae
  misc_feature (1)..(318): tiling:Spneumo1:WAN024G32; WAN023LEH 315619_2009b||||10825 68..1082885|+|318 bp|EGAD orf prediction|S.pneumoniae|R6|N C_003098.1|ORF|100
ttggtaccaacatcgactgcaaagaccaacttggcactattctgtagcatgacatcggtaaaacctccagtagaggccccgatatcaatcgtagtcgcgccatccaccgacaaatcaaagacctgcaaggccttttccagtttcaaaccaccacggctgacatacttgagtttctcccccttgagttttaattcggtgtcatctggaattttctctcctggcttgtcaaaccgttctccattaaggactgctacgactagaccagccatcacacctcgcttggcctgctctctcgtttcaaacaacccctgtttataa

SEQ ID NO: 7650 - DNA, 285 bp, Streptococcus pneumoniae
  misc_feature (1)..(285): tiling:Spneumo1:WAN024C2S; WAN023LJP 313718_1775||||952418 ..952702|-|285 bp|EGAD orf prediction|S.pneumoniae|R6|NC_0 03098.1|ORF
ttggtaccaataaaatttccttttcctaaaaaagaatgtttaaaaattctcgcggaattacatataacattaatgtactccaccttatttttatatgaacaaaatatttcttcgcgcttaaaattatcaccaaatgcaacaattgctctaggcttcctatcaagtgttaagagtaaactttcaaaccattttaatccccctaaaacagttttatctaagattttgcaaccaataaagcgaccttcctcaaaaatatctaccaatccctcaacttcaccttcataa

SEQ ID NO: 7651 - DNA, 102 bp, Streptococcus pneumoniae
  misc_feature (1)..(102): tiling:Spneumo1:WAN024CUH; WAN023MY3 spn174d08_2||||644..7 45|-|102 bp|Glimmer 2.02 orf prediction|S.pneumoniae|23F-1 |WAN01UCNU|ORF|001
ttggtacttttagaacacaggcataagcaagctcccttcccacaagccatacgagtttccagagataaaaaggctcttggggtgatcaatcaaagggttgat

SEQ ID NO: 7652 - DNA, 81 bp, Streptococcus pneumoniae
  misc_feature (1)..(81): tiling:Spneumo1:WAN024BSB; WAN023TH2 BD140035.1_1||||398.. 478|-|81 bp|Glimmer 2.02 orf prediction|S.pneumoniae||BD14 0035.1|ORF
ttggtgagagagctactcgtgagtctgatcggagacgttgaagagctttttgttcaagacataaaagaaaatgtaagtaaa

SEQ ID NO: 7653 - DNA, 111 bp, Streptococcus pneumoniae
  misc_feature (1)..(111): tiling:Spneumo1:WAN024D5H; WAN0246RI 203666-30-2_6||||1656 ..1766|+|111 bp|Glimmer 2.02 orf prediction from Patent Se quences|S.pneumoniae||WAN02470T|ORF|000
ttggtgctttctcaagtttctattcttctcctttttctaaagactgtaaatcgctcttccatgtctggtgttggtaagccatctcccaaaacttggcttccatatgaacac

SEQ ID NO: 7654 - DNA, 84 bp, Streptococcus pneumoniae
  misc_feature (1)..(84): tiling:Spneumo1:WAN024BMG; WAN023NWM spn066d05_10||||6356. .6439|+|84 bp|Glimmer 2.02 orf prediction|S.pneumoniae|23F -1|WAN01UCWR|ORF
ttggtggaggaaaataggttgaatttgaaatggaaaaatattcttttaaaatatattgaaactagaatagtacgcctctacttc

SEQ ID NO: 7655 - DNA, 126 bp, Streptococcus pneumoniae
  misc_feature (1)..(126): tiling:Spneumo1:WAN024DQK; WAN023RUT contig_1608_3||||1946 ..2071|+|126 bp|Glimmer 2.02 orf prediction|S.pneumoniae|6 70|WAN01UDCO|ORF|000
ttggtgtttacttttgatgagatatcatatttgtgttataatgtaaccgtaaacaatagaaatttaaaggagatttttgatgaaatcaaaaatagttttgggagcttcgctagcgatcgcaacact

SEQ ID NO: 7656 - DNA, 78 bp, Streptococcus pneumoniae
  misc_feature (1)..(78): tiling:Spneumo1:WAN024BK8; WAN023SZX BD003750.1_15||||8222 ..8299|-|78 bp|Glimmer 2.02 orf prediction|S.pneumoniae|AT CC55840|BD003750.1|ORF
ttggttaagattgctgagatactggtcgataaagtgggaagccacgaggggtatgacacttttaatgaccgtcgtcgc

SEQ ID NO: 7657 - DNA, 276 bp, Streptococcus pneumoniae
  misc_feature (1)..(276): tiling:Spneumo1:WAN024F8V; WAN023M4Q 315078_621||||322442. .322717|-|276 bp|EGAD orf prediction|S.pneumoniae|R6|NC_00 3098.1|ORF|100
ttggttatctgtataccacttgattgttgccttgagcccagcttcaaagttggtaaattcaggtttccaccccaactcatcacggagcttgctagcatcaatcgcatagcgaaggtcatgtcctgcacggtcagtcacatgatcataggcatccgcagcttgtcccatttccttaaggataagctccaaaacttccttattgttcttctcaccatcagccccaatcaagtaggtttcaccgatttgcccttttgtcaagattgtccaaactcctga

SEQ ID NO: 7658 - DNA, 105 bp, Streptococcus pneumoniae
  misc_feature (1)..(105): tiling:Spneumo1:WAN024BT6; WAN023YCS AL449931.1_1||||1515. .1619|+|105 bp|Glimmer 2.02 orf prediction|S.pneumoniae||A L449931.1|ORF
ttggttctctcttttttgattttcagtaattcattttggcagcgtatactttttgtctccagtcttttcaataaataccgtagtttagatatacacattgaaatt

SEQ ID NO: 7659 - DNA, 138 bp, Streptococcus pneumoniae
  misc_feature (1)..(138): tiling:Spneumo1:WAN024B77; WAN023PGV pne36_3||||766..903|- |138 bp|Type 18A capsule operon, Glimmer 2.02 orf predicti on|S.pneumoniae||WAN01UCHT|ORF|000
ttggttgcagggctaacaaatggtgagttaattgctccaatgacttacgaagagacgatgacgagcgacttttttgaagcttggtttcagaagtttttcttaccaacattaaccataccatcggttattatagtaaaa

SEQ ID NO: 7660 - DNA, 81 bp, Streptococcus pneumoniae
  misc_feature (1)..(81): tiling:Spneumo1:WAN024B6H; WAN023PTR pne13_3||||717..797|- |81 bp|Type 9A capsule operon, Glimmer 2.02 orf prediction |S.pneumoniae||WAN01UCJY|ORF|000
ttggttgcaggtctaacaaatggtgaattaatcgctccaatgacttacgaagagacgatgacgagcgacttttttgaagct

SEQ ID NO: 7661 - DNA, 261 bp, Streptococcus pneumoniae
  misc_feature (1)..(261): tiling:Spneumo1:WAN024DMY; WAN023I9D 86789_3393||||1928896 ..1929156|+|261 bp|EGAD orf prediction|S.pneumoniae|TIGR4| WAN01UC25|ORF|010
ttggtttgcagatattcaagaatcgggagtttttctatagtattcggcagatttattacagccaagcatctcaaaaatacggacagcatcctccatctttttctggccttccttgactctaccttgcttgctatcaaggagaccttctgcccacagataaacaattcggaaataggtctcattttccttgtagaaatgctcttcgataacacgtttaaaataataggcattggtaaattcttcacactcaatactagctaa

SEQ ID NO: 7662 - DNA, 336 bp, Streptococcus pneumoniae
  misc_feature (1)..(336): tiling:Spneumo1:WAN024AV9; WAN023MHD spn_ends-38g02_5||||2 046..2381|+|336 bp|Glimmer 2.02 orf prediction|S.pneumonia e|23F-1||ORF|001
ttggttttttatgcactggccttggctattgttggggttgttttacccttgttgcctacaacacctttccttttgttgtctattgcttgtttctccagaagttccaagcgattcgaagactggctttatcataccaagctctatcaaacatatgtagctgattttcgcgagactaagtctattacgcgtgaacgaaagaaaaaaatcatcgtatccatttacattttgatggggatttctatttattttgcccctctcttaccagtcaaaatcggtctgggtgctttgaccatctttatcacttattatctcttcaaggtcattccagacaaagaa

SEQ ID NO: 7663 - DNA, 84 bp, Streptococcus pneumoniae
  misc_feature (1)..(84): tiling:Spneumo1:WAN024F8O; WAN023N3U spn158g11_6||||3103.. 3186|-|84 bp|Glimmer 2.02 orf prediction|S.pneumoniae|23F- 1|WAN01UCMG|ORF|001
ttggttttttcgatttccataacttttattataccaaaaattagcctaatctaccacactaggaagccgatccaagaagataga

SEQ ID NO: 7664 - DNA, 240 bp, Streptococcus pneumoniae
  misc_feature (1)..(240): tiling:Spneumo1:WAN024CBN; WAN023MBI 315099_241||||124352. .124591|-|240 bp|EGAD orf prediction|S.pneumoniae|R6|NC_00 3098.1|ORF|100
ttgtacaaatctttcaatgcgtatagtatgtctaaaactatttttgataatatcaaaacaaaaaaagcaagactcatactaatcacaaaatcaaggggagattctagattcaatagtaagttattcactaggacatgcaactctagccacaagacaaaaagagggagcattaataaaaaaatgattagtttacgtatcataattttacagtgtccttatcattttcttaattttggataa

SEQ ID NO: 7665 - DNA, 282 bp, Streptococcus pneumoniae
  misc_feature (1)..(282): tiling:Spneumo1:WAN024CVD; WAN023JZF 83024_594||||335780.. 336061|-|282 bp|EGAD orf prediction|S.pneumoniae|TIGR4|WAN 01UC25|ORF|010
ttgtacaactttaccagtctgagcattaaccaaatcgaacgttgcttcagctccagccggaattggtgcacctgtagcatcaacccatgtcttggtcaatgtcaaatcgccgttttcatttggcttattcggctttggagtattcccgtgatctggattattaccatagttaaatgttacatcattagattctggtacttctacaattgctttgtcattcaatgttgccgaataagtgattttcacagttttttcagcgttttggtcattcactttagctaa

SEQ ID NO: 7666 - DNA, 78 bp, Streptococcus pneumoniae
  misc_feature (1)..(78): tiling:Spneumo1:WAN024CF3; WAN023YXK AL449927.1_17||||1247 1..12548|-|78 bp|Glimmer 2.02 orf prediction|S.pneumoniae| |AL449927.1|ORF|000
ttgtacaaggtggaagcgatcaataatgatattggcattagggaaaaggcgatagataaaactttgatattgagcatt

SEQ ID NO: 7667 - DNA, 96 bp, Streptococcus pneumoniae
  misc_feature (1)..(96): tiling:Spneumo1:WAN024BJX; WAN023SQY BD003919.1_2||||799.. 894|-|96 bp|Glimmer 2.02 orf prediction|S.pneumoniae|ATCC5 5840|BD003919.1|ORF
ttgtaccttacttttctggtaagaaaaaccagagcttacgccctgatttttaggattatttcaagtttcgaacaacttttacaagattttctacag

SEQ ID NO: 7668 - DNA, 282 bp, Streptococcus pneumoniae
  misc_feature (1)..(282): tiling:Spneumo1:WAN024CQS; WAN023J5X 84927_2006||||1144947 ..1145228|+|282 bp|EGAD orf prediction|S.pneumoniae|TIGR4| WAN01UC25|ORF|010
ttgtacttaatcactacagtaaagtcaccgctagtaaatttatcctttaactctttagtaacattttctccgccccctgttaaagtaacattatttttttctaagacaggagtttcttccgctgtagaagatggatccttaacagtagtttcaactgttcgaggttgtacagtaacttccgaagagttatccgatgtaggttgtacttccgaaatcggagtcgttggtgcaacaggttgcaccaactttggtgttgatacttcagaagtttcagtctcctga

SEQ ID NO: 7669 - DNA, 249 bp, Streptococcus pneumoniae
  misc_feature (1)..(249): tiling:Spneumo1:WAN024FJB; WAN023IWF 85468_2413a||||136554 0..1365788|-|249 bp|EGAD orf prediction|S.pneumoniae|TIGR4 |WAN01UC25|ORF|010
ttgtactttttgttcagggtcaatgtagttgatagcgttgttgacagcagttggagcttctccgaggcctgtcgcaatcagatcaatttttccgtcatagtagcagcagtcaccgatagcatagatacctgcttggctggattcctgtttgctgttgacgataatcttgtgacggttgaggtcgagcccccagtttttaaggttaccgacagaagatttgaaaccatagttgacaaagaggtggtctag

SEQ ID NO: 7670 - DNA, 102 bp, Streptococcus pneumoniae
  misc_feature (1)..(102): tiling:Spneumo1:WAN024BXN; WAN023RR4 contig_1591_3||||3178 ..3279|-|102 bp|Glimmer 2.02 orf prediction|S.pneumoniae|6 70|WAN01UDFA|ORF
ttgtatacacgaggaaagatgtacgacttatcccgtgaggtctatcactataaagagaaaacgacagatagaagtgatcctgagtcacggttatctttaaaa

SEQ ID NO: 7671 - DNA, 99 bp, Streptococcus pneumoniae
  misc_feature (1)..(99): tiling:Spneumo1:WAN024AVE; WAN023SC0 NC_003028.1_1399||||1 051375..1051473|+|99 bp|Glimmer 2.02 orf prediction|S.pneu moniae|TIGR4|NC_003028.1|ORF|010
ttgtatagaaaatttgataaatattttcacaaaacaagacctcctatcaaagtttttgaacacttgataggaggtctttttattatgaagacttttacc

SEQ ID NO: 7672 - DNA, 99 bp, Streptococcus pneumoniae
  misc_feature (1)..(99): tiling:Spneumo1:WAN024BY4; WAN023RYP contig_1613_12||||781 7..7915|-|99 bp|Glimmer 2.02 orf prediction|S.pneumoniae|6 70|WAN01UDBR|ORF
ttgtcaaaacattctgacactttggtgattgaaaaagccagccttaagctgactctaaaaggaccgagccttgtacaatacagaactcaatcctcgttc

SEQ ID NO: 7673 - DNA, 270 bp, Streptococcus pneumoniae
  misc_feature (1)..(270): tiling:Spneumo1:WAN024EUC; WAN023K8L 82429_136||||76007..7 6276|-|270 bp|EGAD orf prediction|S.pneumoniae|TIGR4|WAN01 UC25|ORF|010
ttgtcaagcgttcatcctgatagtctactggtaaaccaaaaaactcttctagctttgctccgtagcttgactagcttctacgcgcggtccacttgtattgttcatgtttttaggcaagcccactacaaatcgttccaccttgtaagtatcaaccaattccttaacgcggtcaaaaccaaattggccttgttcttcatttatctggatgatttcaagcccttgagctgtaaaaccaagcggatcgctaatcgccacccctaccgtttttga

SEQ ID NO: 7674 - DNA, 342 bp, Streptococcus pneumoniae
  misc_feature (1)..(342): tiling:Spneumo1:WAN024EYW; WAN023LA1 315418_2192b||||11770 00..1177341|+|342 bp|EGAD orf prediction|S.pneumoniae|R6|N C_003098.1|ORF|100
ttgtcacgaaccacactttcattgatggtccaagtggaattcattttcttaaaagcttctcggactttttccaaatctttggaggcaatggcctgttctaaggtttcaaaacgaggacttagacggtttaccaatttttccttttccgcatctaggtcaacaggattttgttctttttcaaaagctaatagagctgaggaaatttcggtgagtttggcttcagtaatatctccagatagagctaacttttccttaacaatcttaccaacctcagaatccttattttctactctttcgaagtctgatgccatcttcgtaacgagtttctgggtctcagtctga

SEQ ID NO: 7675 - DNA, 390 bp, Streptococcus pneumoniae
  misc_feature (1)..(390): tiling:Spneumo1:WAN024FHL; WAN023KXA 315057_2744||||145965 2..1460041|-|390 bp|EGAD orf prediction|S.pneumoniae|R6|NC _003098.1|ORF|100
ttgtcagctgaacgaaattgtaaatcaaccaaaagccccactgtccctcattgccaatgcattcaaagcattggcaatgagggacagtgcaaaggcaatagttgttacgtaggcaaggagattcatcttgccctcatatccgatatagttggtcacaaaggcaaagaggaaggcgatgatggaaatgatgatggccgccaattttacctgtttttggctcatttggttgggtctgccttcttgcgaagctttccatttctttatagcaaaggtataaatgaggaaggtgacgggataggtaatgatggccgccttatttccaaggatataatcaatagcaccggacaaaatggtattaacaataccaaagtaatttccccatttgcttaa

SEQ ID NO: 7676 - DNA, 390 bp, Streptococcus pneumoniae
  misc_feature (1)..(390): tiling:Spneumo1:WAN024CJI; WAN023YX7 AL449927.1_31||||2239 7..22786|-|390 bp|Glimmer 2.02 orf prediction|S.pneumoniae ||AL449927.1|ORF|000
ttgtcagtacaggtattttggaaaggaagtagtagtatgaaacgagacgtgcgtgatattcgaaaacaatttcgcctaacagatgaagaggaaaagcaaattttagctttgatgagagagcagggagatactaatttttcagattttctccgtaaaagtttactctcctctgatttacaaaaacagatagagatatggttcaccctttggcaatctcaaaaactagaacaaatcagccgtgatgttcatgagattttaatttcgatccagtcagaacgtcaagtcacccaggaacatgtatctattctcttaacctgcgtacaggaattgattaaagaagttggcaactccattcctctcagtcaagacttccaagacaaatatatgagg

SEQ ID NO: 7677 - DNA, 111 bp, Streptococcus pneumoniae
  misc_feature (1)..(111): tiling:Spneumo1:WAN024BLL; WAN023NF8 spn132b05_9||||4907.. 5017|+|111 bp|Glimmer 2.02 orf prediction|S.pneumoniae|23F -1|WAN01UCLP|ORF
ttgtcatttgatggtgttactggtttgtcttggcatccacattttccatctttaccgtctttaatcaccatttctgtcttacttccatctggattagtgattgtaacaacg

SEQ ID NO: 7678 - DNA, 99 bp, Streptococcus pneumoniae
  misc_feature (1)..(99): tiling:Spneumo1:WAN024DW7; WAN023VSH AX571292.1_1||||1..99 |+|99 bp|Glimmer 2.02 orf prediction|S.pneumoniae||AX57129 2.1|ORF|000
ttgtcattttattatttcctctttctattttttacattttctattgacgaatatcgaacagcgattacacttcttcacgttcaaatggcactaactaat

SEQ ID NO: 7679 - DNA, 78 bp, Streptococcus pneumoniae
  misc_feature (1)..(78): tiling:Spneumo1:WAN024E23; WAN023T1G BD003729.1_9||||7615. .7692|-|78 bp|Glimmer 2.02 orf prediction|S.pneumoniae|ATC C55840|BD003729.1|ORF|000
ttgtccaaatccatggtcatcaaagatggtgaaaattcaattcttgacatcgttaccctcttacaaaatttcaatatc

SEQ ID NO: 7680 - DNA, 291 bp, Streptococcus pneumoniae
  misc_feature (1)..(291): tiling:Spneumo1:WAN024CSX; WAN023JGD 84326_1562||||893493. .893783|-|291 bp|EGAD orf prediction|S.pneumoniae|TIGR4|WA N01UC25|ORF|010
ttgtccaaatcggacaacaggaattttaccatcctttatatagacttttatttttatgtatcaagttttttaaatcaaaaccaccagtgtgaactggtggtttgttctgcggctataagccgcttctaccggccagggccaaaggcccaccgaaatagcttcctcgcgcaccactttcccgagcaggtgctaaagcaccttagttacttcctcttatttatttcgccagtaaacggatctactgactcgaataacgtgagctggtctgctactctgtcttcttgtaattga

SEQ ID NO: 7681 - DNA, 267 bp, Streptococcus pneumoniae
  misc_feature (1)..(267): tiling:Spneumo1:WAN024ERA; WAN023IUG 85580_2498||||1413271 ..1413537|+|267 bp|EGAD orf prediction|S.pneumoniae|TIGR4| WAN01UC25|ORF|010
ttgtcccctgagtctcaacatgaatcacatgtccagctacctttgcggcattctctaatttttcctgtgcaatataagtgtgggcaattcccacagtacaagctgcaacaccaacaattttcatacggataccctccaaaattttttcttattaacaaaaagctgcaatcacatcatcagatgtctgagcccgaactaatttggcaacaacttcgtcattaccaagttttcgagcaaagagtgataaggtcttcaaatgctccctag

SEQ ID NO: 7682 - DNA, 225 bp, Streptococcus pneumoniae
  misc_feature (1)..(225): tiling:Spneumo1:WAN024CQW; WAN023J66 84908_1991||||1135158 ..1135382|+|225 bp|EGAD orf prediction|S.pneumoniae|TIGR4| WAN01UC25|ORF|010
ttgtccggtattagggtcaatcaactcaggaaactcattcagtacatccgtcatttcatttccacgttctccacaaccgacataaataacaatatcaacattggcaaatttagctacttggtgttgtacaactgtctttcctgctccaaacggtccaggaactgctgcagctccccctttggttactggaaagaatgcatcaataactcgttgacctgtgattaa

SEQ ID NO: 7683 - DNA, 258 bp, Streptococcus pneumoniae
  misc_feature (1)..(258): tiling:Spneumo1:WAN024BBJ; WAN023L0D 313227_2610||||139064 7..1390904|+|258 bp|EGAD orf prediction|S.pneumoniae|R6|NC _003098.1|ORF|100
ttgtcctccattaggcttaatttaccttattataacatatatttattaaataaaccttttttatactcaatgaaaatcaaagagcaaactaggaaactagccgcaggctgctcaaaacactgttttgaggttgcagatagagctagagattttcgaagagtattattgtactttaaaggtcttgagataattgtcttttcctacttgaccttcgaaggttttaccattttcaaggtaaggaaggtcatcggatactga

SEQ ID NO: 7684 - DNA, 240 bp, Streptococcus pneumoniae
  misc_feature (1)..(240): tiling:Spneumo1:WAN024F6J; WAN023K4T 82697_343||||185003.. 185242|-|240 bp|EGAD orf prediction|S.pneumoniae|TIGR4|WAN 01UC25|ORF|010
ttgtcctgttcttatttcattttactatatatcatactttactcgttctcaaattttcatactcatgaagaaatcatccactcgataatttctttaatcttgactatatttcttaattgtggcttcattaagccctactggacttacataataaccttcctcccagaaatgccgattcccaaacttgtacttgagattggcgtgtttgtcaaacatcatgagtgcacttttgccttttaa

SEQ ID NO: 7685 - DNA, 177 bp, Streptococcus pneumoniae
  misc_feature (1)..(177): tiling:Spneumo1:WAN024BTQ; WAN023PZA WO-02077021_18||||||1 77 bp|Glimmer 2.02 orf prediction|S.pneumoniae|TIGR4|AX571 766.1|ORF
ttgtcctttcagttagaatatggaaataggttggcaattttggcgctcaaaagaccacctgtttcctattggtacttgactattatacacaaaaaaaatacaattgtcttgacaattgtcttgacacttgttagaattaaaaatgaggtattcaggcttgtgatttcctatggaagt

SEQ ID NO: 7686 - DNA, 99 bp, Streptococcus pneumoniae
  misc_feature (1)..(99): tiling:Spneumo1:WAN024BQS; WAN023PPU pne19_16||||10546..10 644|+|99 bp|Type 10C capsule operon, Glimmer 2.02 orf pred iction|S.pneumoniae||WAN01UCJ7|ORF
ttgtctaacttaaattataggactagctttgctttgggaataaattttaatccgatttggaataaatactctaaaaaaaaagaaaaagagagaggtgtt

SEQ ID NO: 7687 - DNA, 144 bp, Streptococcus pneumoniae
  misc_feature (1)..(144): tiling:Spneumo1:WAN024F6X; WAN023NY2 spn053f04_24||||17008 ..17151|+|144 bp|Glimmer 2.02 orf prediction|S.pneumoniae| 23F-1|WAN01UCX9|ORF|001
ttgtctaacttttggggggcagtacagaaaaaccttgatactatgcgttttttgattgtgaagacttttatccacctattatacaaagttaagtatccatcacagtttacaattagccttcattacttaacccattcaccatta

SEQ ID NO: 7688 - DNA, 123 bp, Streptococcus pneumoniae
  misc_feature (1)..(123): tiling:Spneumo1:WAN024CBL; WAN023MHU spn198f01_4||||3488.. 3610|+|123 bp|Glimmer 2.02 orf prediction|S.pneumoniae|23F -1|WAN01UCPR|ORF|001
ttgtctcttcgtaaacctaaaactgcggatcttttatttttatcctcaaaaaatatgacgtccaatttcatagtatttttagataaatcgctagctacgatgcaacaacttattattttagaa

SEQ ID NO: 7689 - DNA, 303 bp, Streptococcus pneumoniae
  misc_feature (1)..(303): tiling:Spneumo1:WAN024CNF; WAN023IAT 86713_3338||||1894681 ..1894983|-|303 bp|EGAD orf prediction|S.pneumoniae|TIGR4| WAN01UC25|ORF|010
ttgtctgatttgctatctttttctaattgtacaatttttgcttgttgttctgcttgttgttggttatatgaataccatccaaaccctaataccaatacaacaccaactgcaactgatgaaatgattacttttttattgttttcgataaattctacaaatttgttctccataatctttttctttgatagtgtccgcaattactttaaaattaaaattacacctatctttctcccttattatatttttattaatagcttccacaaaattaaacaacttatgttcggctcggttgatttaatttaa

SEQ ID NO: 7690 - DNA, 300 bp, Streptococcus pneumoniae
  misc_feature (1)..(300): tiling:Spneumo1:WAN024CQ3; WAN023MNT spn180c09_176||||1433 95..147600|+|4206 bp|Glimmer 2.02 orf prediction surface p rotein|S.pneumoniae|23F-1|WAN01UCXQ|ORF|001
ttgtcttactcttcttcatcacgtttacggcgtttcgcaaccaatccaatacctgtaacagctgctagaactccaagtaacacagatccaattgacgactcagtacctgtattaggcaattctttttgggatttacctgtcgatccagaagtatttccaacttgtgagttcgaatggtttgctgaatttgaaactgatgtacttgctgaagctgaggcgcttgtgcttgctaaagctgaggctgaggcacttgttgatgcggattcagatgctgatgtgcttgcagatactgaagccgaa

SEQ ID NO: 7691 - DNA, 102 bp, Streptococcus pneumoniae
  misc_feature (1)..(102): tiling:Spneumo1:WAN024F3D; WAN023X4T AX567774.1_1||||1..10 2|+|102 bp|Glimmer 2.02 orf prediction|S.pneumoniae||AX567 774.1|ORF|000
ttgtcttcttccaaaatgcggaaggcctctagcatttctttactcatgttttcttcacttttgaatcctcaaaagctatcctttctttttctactaactaat

SEQ ID NO: 7692 - DNA, 99 bp, Streptococcus pneumoniae
  misc_feature (1)..(99): tiling:Spneumo1:WAN024BM8; WAN023NS8 spn089a12_8||||4825.. 4923|+|99 bp|Glimmer 2.02 orf prediction|S.pneumoniae|23F- 1|WAN01UCWH|ORF
ttgtcttttgataattatattatagatgaaaacgctttatatttctatggcaagatgaccaaaaaaataaaaaagttctgtgcaacttgcacaaaactt

SEQ ID NO: 7693 - DNA, 258 bp, Streptococcus pneumoniae
  misc_feature (1)..(258): tiling:Spneumo1:WAN024GD9; WAN023LSA 314741_1260||||667504 ..667761|-|258 bp|EGAD orf prediction|S.pneumoniae|R6|NC_0 03098.1|ORF|100
ttgtgcaatggttccctcagtcaccaaaccaaccaattgatcattttcgataacaggcaagcgatgcaattcttgctctctcatcaaatctgctgcatgagatactgttgtatctggactaatataaactaccttgcgggtcataaaatctttaactgccatgagacttctccttttctattcttatccccattatacaatctttttgtaaatctatcaaacgcttacatttctttttcgaaattcaaaaaagtatga

SEQ ID NO: 7694 - DNA, 636 bp, Streptococcus pneumoniae
  misc_feature (1)..(636): tiling:Spneumo1:WAN024BWM; WAN023R58 contig_1504_1||||2..6 37|+|636 bp|Glimmer 2.02 orf prediction|S.pneumoniae|670|W AN01UDP2|ORF
ttgtggctgggaaagtgtgtttctcattgggccctcactttagatgacgcctacagactcgcgaacatcacccagagaaagctgatcatgatgttctcgagtccaacctgttactactgtaatctgttcaaaaaagaagtattcccgaaagaagatttccaggaaattctgattccaaacttcgtcttcgttgagctgtacgccacagatgaaaaaaccacactctttgcgaaggaagttctgggagaggaatcggttagctacagagatctcttcgctggattcggtgtgagaggaacgcctacgtttttcttttttaagggaaaagaaggtctgggataccttcctggctatgtggacaaagacaacttcataaagattctgaaatacgttgctcaggagttgaaagaagacttccagacctacctgaagaaagacgatccgttcgtgggcgaaccgttgatcatcgaaattttcaaagaagacgcagattttgttctggaaaaagacgaaaacgccgtgaaagtggataccgtaccgaacgaagtgagaagagacaggatatacgtgacggattcaccagatgttgcaaagacccttcaggaaaaaggcgctctccgggttctgctcgctaaa

SEQ ID NO: 7695 - DNA, 174 bp, Streptococcus pneumoniae
  misc_feature (1)..(174): tiling:Spneumo1:WAN024BXX; WAN023RWD contig_1609_28||||171 39..17312|+|174 bp|Glimmer 2.02 orf prediction|S.pneumonia e|670|WAN01UDCD|ORF
ttgtggtctgaaaagaagatggtttcatgtttctcaccccctttctgtctaggaaaggaagtgagccttgctcgtttatctcctttcactcttagtcccaatgtgaaagggggatttgttgcattactgataaataaactttgtaaaaaagttctgaatagccaaaaaagcata

SEQ ID NO: 7696 - DNA, 81 bp, Streptococcus pneumoniae
  misc_feature (1)..(81): tiling:Spneumo1:WAN024EZL; WAN023SZN BD003752.1_6||||4567. .4647|+|81 bp|Glimmer 2.02 orf prediction|S.pneumoniae|ATC C55840|BD003752.1|ORF|000
ttgtggttgaacaacaagtataacacagaggtgttttcttatgcctacaagagctatcggctagttgaaccatctaatttt

SEQ ID NO: 7697 - DNA, 78 bp, Streptococcus pneumoniae
  misc_feature (1)..(78): tiling:Spneumo1:WAN024DMD; WAN023T3K BD003708.1_1||||12..8 9|-|78 bp|Glimmer 2.02 orf prediction|S.pneumoniae|ATCC558 40|BD003708.1|ORF|000
ttgtgtactatttttggttcattgactcgcttgccagaacgcgacgaaatcaacccagaaatcaacgaagcattgtcg

SEQ ID NO: 7698 - DNA, 105 bp, Streptococcus pneumoniae
  misc_feature (1)..(105): tiling:Spneumo1:WAN024BQ6; WAN023PCK pne42_25||||20399..20 503|+|105 bp|Type 19C capsule operon, Glimmer 2.02 orf pre diction|S.pneumoniae||WAN01UCFI|ORF
ttgtgtttgatgaatagagatgcacgtatcgaaattcaagatagtggtgatatcgcttgcttaatctcttctccagtatttgtagtagaattaagtgttcttgat

SEQ ID NO: 7699 - DNA, 87 bp, Streptococcus pneumoniae
  misc_feature (1)..(87): tiling:Spneumo1:WAN024C2J; WAN023SN4 NC_003098.1_139||||11 3132..113218|+|87 bp|Glimmer 2.02 orf prediction|S.pneumon iae|R6|NC_003098.1|ORF
ttgttaaaaatattgtatcatagcaatgtaaaaagtaaaaaagaaagtcgaaataaatttgtgaaaaaagttaacgtaattttaaaa

SEQ ID NO: 7700 - DNA, 330 bp, Streptococcus pneumoniae
  misc_feature (1)..(330): tiling:Spneumo1:WAN024BOA; WAN023OCG spn019g01_17||||16543 ..16872|-|330 bp|Glimmer 2.02 orf prediction|S.pneumoniae| 23F-1|WAN01UCLR|ORF
ttgttaaaggatgtcctaaccataaaaaaagtagctgataaaaacgattatggggatgaagtatattcagaaccgttgactattaaaaatgtacgttttgatagatcagtggggggatctggtaatcgtaattcaaaaactggtacaggaaattcaaaatcaaggcaaaaacaaggggttatatacctctatccctcgctatcttttgtgacagttgataacagttggatgggtgcaaaagtaaacgatgggataggagattacacaattaatggatttcaaactaactattatgatggtgagatattcagtcaagaaattgaggtgatc

SEQ ID NO: 7701 - DNA, 90 bp, Streptococcus pneumoniae
  misc_feature (1)..(90): tiling:Spneumo1:WAN024FET; WAN023MPF spn180c09_116||||9496 8..95057|+|90 bp|Glimmer 2.02 orf prediction|S.pneumoniae| 23F-1|WAN01UCXQ|ORF|001
ttgttaatttatttatctcatttttcagaaaattcttttatttctgtaaagtctacgatactcgatgtgtttttatataatgatacagtc

SEQ ID NO: 7702 - DNA, 252 bp, Streptococcus pneumoniae
  misc_feature (1)..(252): tiling:Spneumo1:WAN024B6B; WAN023MAK 315391_288b||||146305 ..146556|+|252 bp|EGAD orf prediction|S.pneumoniae|R6|NC_0 03098.1|ORF|100
ttgttacccatgctccgcatccggaacttaaacaatattttactaagatatatcaatttccaaaggattttatttaagaatataggggagggaaacatgagattctattgtgaagcttatgaggtaattactgaagagaaaaaagtatactttaatgatattgagttagaagttaagtattcctctgtcgaagaattgtttataatatgtgagaaattattagataagaaaaaagtatcattttttatgtag

SEQ ID NO: 7703 - DNA, 330 bp, Streptococcus pneumoniae
  misc_feature (1)..(330): tiling:Spneumo1:WAN024BZ4; WAN023S68 contig_470_3||||1039. .1368|-|330 bp|Glimmer 2.02 orf prediction|S.pneumoniae|67 0|WAN01UCZY|ORF
ttgttagaaaagattgaaaataggcatattgccatcgaatgcaatccttcatccaactacaagattggcgagatagaacgttacgatgaacatcctatagtgaagttttttaactatgggctttctacaccttatcctcgtcacgatattgcagtgtccattaatactgatgatcagggcgtgttttcaacatctttggaaagagaatattctttattagcattggctttagaatggaatcagacagagaatcataagaattcacccagggctatcgttgactggcttgatcgtgtacgtcaaatgtcattagagcaaaggtttaaacat

SEQ ID NO: 7704 - DNA, 186 bp, Streptococcus pneumoniae
  misc_feature (1)..(186): tiling:Spneumo1:WAN024F6C; WAN0244KW spr0306||15902350|NP_ 357900.1|305635..305820|+|186 bp|Hypothetical protein|S.pn eumoniae|R6|NC_003098.1|ORF|100
ttgttagaaatcgatttgactgtcctgaacgatttatcctgttcttatttcattttactatacagtttcgaggttgtagataaggcgaagctgatgtggtttgaagagattttcgaagagataaaaaatattggtcaattaaagtcaaaatacttgaccttttctgaccaatgtagtatattatga

SEQ ID NO: 7705 - DNA, 102 bp, Streptococcus pneumoniae
  misc_feature (1)..(102): tiling:Spneumo1:WAN024B6K; WAN023WCN AX569826.1_1||||1..10 2|+|102 bp|Glimmer 2.02 orf prediction|S.pneumoniae||AX569 826.1|ORF|000
ttgttagaaatcgatttgactgtcctgaacgatttgccctattcttgtttcattttactatataaaccagagactgtttacattttcagcaagctaactaat

SEQ ID NO: 7706 - DNA, 96 bp, Streptococcus pneumoniae
  misc_feature (1)..(96): tiling:Spneumo1:WAN024F6I; WAN023MQM spn180c09_69||||59553 ..59648|+|96 bp|Glimmer 2.02 orf prediction|S.pneumoniae|2 3F-1|WAN01UCXQ|ORF|001
ttgttagaaatcgatttgactgtcctgatcgttttgtcctattcttgtttcattttactatatttccatgataaaacgcatagtatcaagtttttt

SEQ ID NO: 7707 - DNA, 84 bp, Streptococcus pneumoniae
  misc_feature (1)..(84): tiling:Spneumo1:WAN024F75; WAN023SD1 NC_003028.1_1103||||8 21641..821724|+|84 bp|Glimmer 2.02 orf prediction|S.pneumo niae|TIGR4|NC_003028.1|ORF|010
ttgttagaaatcgatttgactgtcctgatctattcgttctattcttatttcattttactatattttggtgcaataagtgaaaag

SEQ ID NO: 7708 - DNA, 342 bp, Streptococcus pneumoniae
  misc_feature (1)..(342): tiling:Spneumo1:WAN024B74; WAN0244FI spr0500||15902544|NP_ 358094.1|498905..499246|+|342 bp|Hypothetical protein|S.pn eumoniae|R6|NC_003098.1|ORF|100
ttgttagaaatcgatttgactttcctgatcgatttgtcctgttattatttcattttattatatttaaagcaggctatgcgacagccaacctatcaaattcctgagcgaatgtatttatttggagaatccgattattatttatggctgccaagaggcttgttatatccattgcaagataaatttaagcaggtagttgtggaggataggagaaaagtacaaaggtctattagagtagcatttaagggagagcttactttggagcaagaattagccctgtcagatatgaattctaaagaaaatggtttacttcatgcgggacaggttttggaaagatcgttttag

SEQ ID NO: 7709 - DNA, 114 bp, Streptococcus pneumoniae
  misc_feature (1)..(114): tiling:Spneumo1:WAN024DLE; WAN023XGX AX566886.1_1||||1..11 4|+|114 bp|Glimmer 2.02 orf prediction|S.pneumoniae||AX566 886.1|ORF|000
ttgttagatttgcccacacgaacaataagaaaaaagaaagaaggaaaacacccaggtaagaccaacgaaactggaaacgaccacactctttccaatgttcactttctaactaat

SEQ ID NO: 7710 - DNA, 195 bp, Streptococcus pneumoniae
  misc_feature (1)..(195): tiling:Spneumo1:WAN024BKP; WAN023MRA spn180c09_43||||40442 ..40636|+|195 bp|Glimmer 2.02 orf prediction|S.pneumoniae| 23F-1|WAN01UCXQ|ORF
ttgttagggattttatcatgtgcatcccaagctacagcaatattgttggcaaaattaccatatacatcagctgcgagcacagctattcgtaaaatccatccaaaaatcttagtcaataatcctactcttgctgccgcagttgcagctgccctacttaagatcgagcgcgccatactaataccatacttaactgca

SEQ ID NO: 7711 - DNA, 117 bp, Streptococcus pneumoniae
  misc_feature (1)..(117): tiling:Spneumo1:WAN024F6R; WAN023NBV spn143g10_26||||33277 ..33393|-|117 bp|Glimmer 2.02 orf prediction|S.pneumoniae| 23F-1|WAN01UCOL|ORF|001
ttgttatcagatgagtttatactcttcgaaaatcaaattcaaaccacgtcaacgtcgccttgccgtatatatgtgactgacttcgtcagtcctatctacaacctcaaaacagtgttt

SEQ ID NO: 7712 - DNA, 249 bp, Streptococcus pneumoniae
  misc_feature (1)..(249): tiling:Spneumo1:WAN024F86; WAN023J55 84975_2044||||1169815 ..1170063|+|249 bp|EGAD orf prediction|S.pneumoniae|TIGR4| WAN01UC25|ORF|010
ttgttattggaagcaaccgagtcagtcgcaattccgactgctactcccgctttttggagctggataattggagcaattcctgatgccagtttgaggttactgataggattgtgggcgatagcacttgagaagatgccaagcgttcaatttctctctcgtttaattcgaccccgtgagcaaatacggacggatgatctaaataacccagttcttcaagaaaagcaagggggcgtttgccgtatcgtttga

SEQ ID NO: 7713 - DNA, 249 bp, Streptococcus pneumoniae
  misc_feature (1)..(249): tiling:Spneumo1:WAN024CN9; WAN023I1L 87253_3749||||2131624 ..2131872|-|249 bp|EGAD orf prediction|S.pneumoniae|TIGR4| WAN01UC25|ORF|010
ttgttatttttgattttctcacttacgtattcaactacaccgtctcctgtagtattgattgatttatccatcgctaatacttttcttaggtgttctgctatattagctttaacttcttcaaattgtctatctaagtataggttatctaaggctgcatcattcgctgctcctagtacttttttagtagcttctgagttaagtgttacattttgcaagtcgcttagtacgttattcgttatcgctgtatag

SEQ ID NO: 7714 - DNA, 273 bp, Streptococcus pneumoniae
  misc_feature (1)..(273): tiling:Spneumo1:WAN024CUW; WAN023JX3 83173_705||||405162.. 405434|-|273 bp|EGAD orf prediction|S.pneumoniae|TIGR4|WAN 01UC25|ORF|010
ttgttccatcatttttgtattcatgacaaatactccttttttctttttttatttttgtcttgttgtaactttgataagtttagtatatcatcgttttttaaaatttttcatccagatcttgaattgtcatcgaaacgtcttgaattagcttttttatttcaagccacctctaaatgtttaaaaaaaataatttctaatcacttttttaccattcaggaagttttaatgactattcaagatttcataaaatatgaacttagttttatgacataa

SEQ ID NO: 7715 - DNA, 276 bp, Streptococcus pneumoniae
  misc_feature (1)..(276): tiling:Spneumo1:WAN024F5G; WAN023LYH 314755_942||||491818. .492093|-|276 bp|EGAD orf prediction|S.pneumoniae|R6|NC_00 3098.1|ORF|100
ttgttccttgatggtagtggcatattcgtctttccattcccagactttcgtcaagaaagactcacgaccaaggtcatagcgggaaatgccctcaccacgcaagcgctcctcaaccttagcctgagtggcaatccctgcgtggtccatcccaggaagccaaagggtatcaaaaccttgcatgcgtttttgacggatgataatatcttgcaaagttgtatcccaagcgtgaccaaggtgaagtttacctgtaacgtttggtggtggaataacgattga

SEQ ID NO: 7716 - DNA, 225 bp, Streptococcus pneumoniae
  misc_feature (1)..(225): tiling:Spneumo1:WAN024CU7; WAN023JOS 83726_1116||||630529. .630753|+|225 bp|EGAD orf prediction|S.pneumoniae|TIGR4|WA N01UC25|ORF|010
ttgttgattcgaaaatcattaaaaaagaagcagacatatttatatcagcttcttttgtttcgattaacgcatggttacaaattcttcagatgcagttgggtgaattgccacagttgcatcaaagtcagccttggttgctcccattttgatagcaacggcaaatccctgaatcatttcatcaacgccgtagccaattccatgaagtccgacaactttttcttctga

SEQ ID NO: 7717 - DNA, 270 bp, Streptococcus pneumoniae
  misc_feature (1)..(270): tiling:Spneumo1:WAN024BTL; WAN023YXB AL449927.1_26||||1976 4..20033|-|270 bp|Glimmer 2.02 orf prediction|S.pneumoniae ||AL449927.1|ORF
ttgttggataaattcaactgctcaatggttttatcttatcgtttactcttatttatcatttttcttttcaatctctttgccaagatgaacctgacttcaactatcaaactggagcaggtggagaaagaaatcgaagaaaatcaaagatttatgactaaatggatagatgattacgaatataaggttaggagattagagaattttatcaatatacttgataatacaagaaatcaaaatgttaccaaattagaacgggaaacaaaatcagta

SEQ ID NO: 7718 - DNA, 120 bp, Streptococcus pneumoniae
  misc_feature (1)..(120): tiling:Spneumo1:WAN024BVE; WAN023QFP contig_1290_14||||104 77..10596|-|120 bp|Glimmer 2.02 orf prediction|S.pneumonia e|670|WAN01UECD|ORF
ttgttggctagtactaagaagttagttagtagaataattacatcttcaatcgaaaaagagactggaaaaagtcttaaaaatcagaaaaacgctcaaatcctttggcgctctaagcttttc

SEQ ID NO: 7719 - DNA, 159 bp, Streptococcus pneumoniae
  misc_feature (1)..(159): tiling:Spneumo1:WAN024CTC; WAN023NOW spn095f09_2||||475..6 33|+|159 bp|Glimmer 2.02 orf prediction|S.pneumoniae|23F-1 |WAN01UCSI|ORF|001
ttgttggttttgtgcaattctggtgtagacgttaaacgtccaatcaagataactttattatacatattttcttcctcctacttatctattcgtaggaaatcaaaaaaagttacagaaatttgtaacttttcgagaaaattttttattttttatgaacca

SEQ ID NO: 7720 - DNA, 270 bp, Streptococcus pneumoniae
  misc_feature (1)..(270): tiling:Spneumo1:WAN024DIM; WAN023K09 82974_557||||307762.. 308031|-|270 bp|EGAD orf prediction|S.pneumoniae|TIGR4|WAN 01UC25|ORF|010
ttgttgtttcaactttatccatataagcattatctgcacctaagacaatcgcttttttctcttctttcactttttatctcatttctttttattcccatcatattattcccatcatatgtttcccatcatatgtttctacgtaaccattattttcgcctattcgttcgtaaaaccataccagtggagattttagatgaagtcccattacggtttacaatttttacattacgacacggagttttacaaatcgatttcatttgccaaacgtag

SEQ ID NO: 7721 - DNA, 99 bp, Streptococcus pneumoniae
  misc_feature (1)..(99): tiling:Spneumo1:WAN024F6L; WAN023N1H spn167f04_12||||8884. .8982|+|99 bp|Glimmer 2.02 orf prediction|S.pneumoniae|23F -1|WAN01UCN6|ORF|001
ttgttgtttctagtttactttttgatggttaagagtggtggagaattatactcaatgaaaatcaaagagcaaactaggaagctagccgcaggctgtact

SEQ ID NO: 7722 - DNA, 90 bp, Streptococcus pneumoniae
  misc_feature (1)..(90): tiling:Spneumo1:WAN024BQ8; WAN023PGD pne36_22||||16545..16 634|+|90 bp|Type 18A capsule operon, Glimmer 2.02 orf pred iction|S.pneumoniae||WAN01UCHT|ORF
ttgtttcgcaggaagtctattgaaaaattaagaaatggtgaaattattcctcacacacagttatttgaaacatccttagaaaatgatttt

SEQ ID NO: 7723 - DNA, 78 bp, Streptococcus pneumoniae
  misc_feature (1)..(78): tiling:Spneumo1:WAN024GJG; WAN023T4A BD003697.1_16||||7381 ..7458|-|78 bp|Glimmer 2.02 orf prediction|S.pneumoniae|AT CC55840|BD003697.1|ORF|000
ttgtttgaaaatcagaggaaggaagcttgcttagtagaccattctttttatctttatggggttgatagctgggtttgg

SEQ ID NO: 7724 - DNA, 165 bp, Streptococcus pneumoniae
  misc_feature (1)..(165): tiling:Spneumo1:WAN024F2Q; WAN023Z2M AL449926.1_7||||10066 ..10230|+|165 bp|Glimmer 2.02 orf prediction|S.pneumoniae| |AL449926.1|ORF|000
ttgtttgatttgtgttatagtgaatatgcatgggatagcctttctaaatggtttattgtgcaattctattttaccaagactatcgcaaccatgcaaaaaagcaacggcaaatccgttgctttttttggagataagagactattgtcccagactcttttctttgta

SEQ ID NO: 7725 - DNA, 228 bp, Streptococcus pneumoniae
  misc_feature (1)..(228): tiling:Spneumo1:WAN024CN8; WAN023I1K 87254_3750||||2131924 ..2132151|-|228 bp|EGAD orf prediction|S.pneumoniae|TIGR4| WAN01UC25|ORF|010
ttgtttggtaagaacagttttctatacgcttctacgaagtcaaagactgaatcttctccttttaccgatgcaagtttattcgcatataaacctacagtatttgaagctctcaggttatctagtccactatttcctaatgcgacaatagtatccaacgttgaagtctcattatttccgttaaagtcaaacttgtacgtagataaatcttttgtattcattttaccataa

SEQ ID NO: 7726 - DNA, 81 bp, Streptococcus pneumoniae
  misc_feature (1)..(81): tiling:Spneumo1:WAN024BZG; WAN023SBU NC_003028.1_1426||||1 069146..1069226|-|81 bp|Glimmer 2.02 orf prediction|S.pneu moniae|TIGR4|NC_003028.1|ORF
ttgttttcagtcatgcttttctcctttatttcattttattataatctgaatacccctagtctatttatttcactaggtttt

SEQ ID NO: 7727 - DNA, 249 bp, Streptococcus pneumoniae
  misc_feature (1)..(249): tiling:Spneumo1:WAN024DLM; WAN023K68 82593_261||||136617.. 136865|+|249 bp|EGAD orf prediction|S.pneumoniae|TIGR4|WAN 01UC25|ORF|010
ttgttttcgtttttgattcctgtatttggaagttcagcttgtttatctggggttgcaggtatattttccttgctagagttttctaccgattcgtttcgaaccgcttcttttacagatgatgcttgtgcttcttgtgctggttgttcagcttgtgaatcagctgtagcttggctaggtttattttccgcatcagctactttggcatctggtttagtagaatcaggtctagcttctggagctgggtcttga

SEQ ID NO: 7728 - DNA, 150 bp, Streptococcus pneumoniae
  misc_feature (1)..(150): tiling:Spneumo1:WAN024CMZ; WAN023TKJ AX571767.1_30||||3391 9..34068|-|150 bp|Glimmer 2.02 orf prediction|S.pneumoniae ||AX571767.1|ORF|000
ttgttttgtatttattttactagactagcaaagttatttctcaaatcaacattttctgtgggattgaaatccaccttgtcaccattggtcgttgatgagttgaagatgattcctgcaatctgcattcaatcaaatctctacatcgatcca

SEQ ID NO: 7729 - DNA, 879 bp, Streptococcus pneumoniae
  misc_feature (1)..(879): tiling:Spneumo1:WAN024AYA; WAN0240FB |cps19aH||AAC78670.1| ||879 bp|putative rhamnosyl transferase Cps19aH|S.pneumoni ae||AF094575|ORF|000
ttgttttgttatattattttgcattacaaagtcttagaggaaactatttcttgtgttaaatcaataaaagaaggcaattccaatacaaagcagatcgttattattgataatttttctaataacggtacgggtgaaaaactacaagagctgtatgagtcagattcagagattgatgtcttgattaaccatgaaaatgctggtttcgctcgaggtaataatgtagcatatcagtttgctaaggaaaagtacaaacctgattttatggttatcatgaataatgatattgagatagaaacagaagagtttgaaaaaatcgtgacagatatctatcggaaggaaaaattccatttgttaggaccagatatcttttcgacgacgtatcagcttcaccaaaacccaaaacggttgacgcattatacttatgaagaggttaaggctctcaatgaaaaatttaagaaagggagccaagttagtctagcattaaaaattaaatgttggttgaagtctagtaaagttcttcggacagcaatctatcaaaataggcgtaaaaagaaatcagtagactatagaaaacaggtagaaaacccaattcttcatggttcgtttattgtatattctagagatttaattgagaaagaggagtatgcttttaatcccaataccttcttctattatgaaacagagatattagattatgaagctgagttaaaaggatataagagaatttatacaccgaagattaaggtcttgcaccatcaaaatgttgcaaccaatcaagtctatacaaacttagtagaaaaaaccttgttttcaaacaaatgcaactttgaatccactagttattttttgaagttgatgaaagaaaacgagggtgtgtaa

SEQ ID NO: 7730 - DNA, 174 bp, Streptococcus pneumoniae
  misc_feature (1)..(174): tiling:Spneumo1:WAN0249D6; WAN024E0T-rc TIGR4.IG_237||||21 4919..215092|-|174 bp|Between SP0244 (- strand) and SP0245 (- strand)|S.pneumoniae|TIGR4|NC_003028.1|IG-rc|010
tttatttccttgaaatgctctagctatttgcagataacaagcatctataatacatacttaacttttcaaaaggtttagctaaaaaattttagccaaaccttttctattttaccttgctctagaatttttaaactgctatacttatcacaaaaaaaccttccaaggaggtagcgg

SEQ ID NO: 7731 - DNA, 74 bp, Streptococcus pneumoniae
  misc_feature (1)..(74): tiling:Spneumo1:WAN0249D7; WAN024ER3-rc R6.IG_246||||21753 7..217610|-|74 bp|Between spr0225 (- strand) and spr0226 ( pflE) (- strand)|S.pneumoniae|R6|NC_003098.1|IG-rc|100
tttatttccttgaaatgctctagctatttgcagataacaagcatctatataaggttatcaaagaagacttcccc

SEQ ID NO: 7732 - DNA, 256 bp, Streptococcus pneumoniae
  misc_feature (1)..(256): tiling:Spneumo1:WAN0249P2; WAN024ENB R6.IG_530.1.1||||5049 96..505251|+|256 bp|Between spr0506 (bglH) (+ strand) and spr0507 (pheS) (+ strand)|S.pneumoniae|R6|NC_003098.1|IG|1 00
tttgtttattgatgattagatattatcacggttaaggcagcatctcattaaatatgaaataaagaggtttggaagacatcaaattctaaacctctttattttatagggggattaattaatttaattttgttacagagagccgattataaatagttaacttaggatagattggttatatatagtagactgaatctaaaatagtacgaaacaattgctaaaacatttatagaaattaattttactttcccaatcgatt

SEQ ID NO: 7733 - DNA, 149 bp, Streptococcus pneumoniae
  misc_feature (1)..(149): tiling:Spneumo1:WAN024AMP; WAN024D0Y TIGR4.IG_509||||51494 2..515090|+|149 bp|Between SP0538 (+ strand) and SP0539 (+ strand)|S.pneumoniae|TIGR4|NC_003028.1|IG|010
ttttgcaggaagtctaatgtaatttttgcaattcaagacgtttcgatgactattcaaaatctggatgaaaaattttaaaaaacgatgatatactaaacttgtcaaagttacaacaagacaaaaattaaaaataaaaaagagtatttgtc

SEQ ID NO: 7734 - DNA, 291 bp, Streptococcus pneumoniae
  misc_feature (1)..(291): tiling:Spneumo1:WAN0249LD; WAN024E7A R6.IG_1860.1.1||||171 7358..1717648|+|291 bp|Between spr1745 (+ strand) and spr1 746 (- strand)|S.pneumoniae|R6|NC_003098.1|IG|100
ttttgcaggaagtctattatatatatgcacagacatatgaaatctttttgatacagccttctttttacatagagagacagcagttatgatatatttatccattcacaacatcttctgtaccaatactacaataattggtacattttgattacacaatcgtttcaaaaaatatgatggaagactgagtattttatagtaattcccttcctatcaactagatcaaccagttgagtgttgaatgttgaaacaccctagcctcagcaaaggactatgatcagcatttcctagcca

SEQ ID NO: 7735 - DNA, 261 bp, Streptococcus pneumoniae
  misc_feature (1)..(261): tiling:Spneumo1:WAN0249LC; WAN02490A TIGR4.IG_1840.1.1|||| 1835729..1835989|+|261 bp|Between SP1928 (+ strand) and SP 1929 (- strand)|S.pneumoniae|TIGR4|NC_003028.1|IG|010
ttttgcaggaagtctattatatatgcacagacatatgaaatctttttgagatagcagttatgatatatttatccattcacaacatcttctgtaccaatactacaatattggtacattttgattacacaatcgtttcaaaaaatatgatggaagcctgagtattttatagtaactcccttcctatcaactagatcaaccagttgagtgttgaatgttgaaacaccctagcctcagcaaaggactatgagcagcatttcctag

SEQ ID NO: 7736 - DNA, 336 bp, Streptococcus pneumoniae
  misc_feature (1)..(336): tiling:Spneumo1:WAN024AF9; WAN024EJR R6.IG_807.2||||773271 ..773606|+|336 bp|Between spr0777 (+ strand) and () (+ str and)|S.pneumoniae|R6|NC_003098.1|IG|100
ttttggtgcaataagtgaaaagtagtccgaataatataaggattgattttatagtttttaaactcaaatgaattaaaataaagagagtacgaaaattctcatctgaaagtattttagaataattctcttcgtgaatttcttcaaaacagatagcttcatcttaggtatgtgttaattggatttcgtaagctctatttacaatcgtaaagttatgcactgaaaaagttgtagttagtcttccagtttgctaaatttctcgaatagtatcttttttaggtatgtgatttctttttgcatttttgagttagataaggtataatggttttattgtctttt

SEQ ID NO: 7737 - DNA, 225 bp, Streptococcus pneumoniae
  misc_feature (1)..(225): tiling:Spneumo1:WAN024AFA; WAN024C0W TIGR4.IG_816.1.2||||8 21703..821927|+|225 bp|Between SP0873 (+ strand) and SP087 4 (- strand)|S.pneumoniae|TIGR4|NC_003028.1|IG|010
ttttggtgcaataagtgaaaagtagtccgaataatataaggattgattttatagtttttaaactcaaatgaattgaaataaagagagtacgaaaattctcatctgaaagtattttagaataattctcttcgtgaatttcttcaaaacagatagcttcatcttaggtatgtgatttctttttgcatttttgagttagataaggtataatgattttattgtcttttg

SEQ ID NO: 7738 - DNA, 108 bp, Streptococcus pneumoniae
  misc_feature (1)..(108): tiling:Spneumo1:WAN02472B; WAN0246LT CQ788912.1_33  |||||| 108 bp|Glimmer 2.02 orf prediction|S.pneumoniae||CQ788912. 1
atgagaaagttatctgtatcaaatgctgccttgataaggcttactcctttttgtgccatgtttgctcctccatcatttttctttgtaaactgttttcttttttgtcag

SEQ ID NO: 7739 - DNA, 78 bp, Streptococcus pneumoniae
  misc_feature (1)..(78): tiling:Spneumo1:WAN02472C; WAN0246LU CQ788915.1_22  |||||| 78 bp|Glimmer 2.02 orf prediction|S.pneumoniae||CQ788915.1
atgaactgggatttgtgtatttttatcttttctattttaccaaaaaatggagattatttcagctatttttcatacttt

SEQ ID NO: 7740 - DNA, 195 bp, Streptococcus pneumoniae
  misc_feature (1)..(195): tiling:Spneumo1:WAN02472D; WAN0246LV CQ788916.1_33  |||||| 195 bp|Glimmer 2.02 orf prediction|S.pneumoniae||CQ788916. 1
ttgcaaaagccattatttcaaatcctccaaaaattggtaaagattagtcaaacctttacccatgacagcaatttcttcctcgctcatgccatcaataattttttctaccatggccttgtggaagcgtttatgcagtctatgaatcaagcgacccttctttgtcaaatgcagatgcaccacacgacgatcctgttc

SEQ ID NO: 7741 - DNA, 111 bp, Streptococcus pneumoniae
  misc_feature (1)..(111): tiling:Spneumo1:WAN02472E; WAN0246LW CQ788916.1_5  ||||||1 11 bp|Glimmer 2.02 orf prediction|S.pneumoniae||CQ788916.1
ctgagaatgatttttacattggattttaccattcctttcaacactccattatatcggattttagcatttttttcaatttctatttcttttcacttccccctcccttattta

SEQ ID NO: 7742 - DNA, 75 bp, Streptococcus pneumoniae
  misc_feature (1)..(75): tiling:Spneumo1:WAN02472F; WAN0246LX CQ788919.1_7||||||75 bp|Glimmer 2.02 orf prediction|S.pneumoniae||CQ788919.1
atgaaaaccaaggaacttgatgttgaaggccaattaaatttgtttgattcgtgcttccttgagcatgaatcaggc

SEQ ID NO: 7743 - DNA, 123 bp, Streptococcus pneumoniae
  misc_feature (1)..(123): tiling:Spneumo1:WAN02472G; WAN0246LY CQ788924.1_7  ||||||1 23 bp|Glimmer 2.02 orf prediction|S.pneumoniae||CQ788924.1
ttgttgcaacaactagtggtgttcgaaaataaggttccgattctccatgtagcaaagctatcccgcaagaaaaatcctgttgcaggcgcttgtacagctccaaacaaacatctatgcgaggac

SEQ ID NO: 7744 - DNA, 78 bp, Streptococcus pneumoniae
  misc_feature (1)..(78): tiling:Spneumo1:WAN02472H; WAN0246LZ CQ788977.1_11  |||||| 78 bp|Glimmer 2.02 orf prediction|S.pneumoniae||CQ788977.1
ttgtttttcttaataaacgcaatacaaaaagagcctgttaccaagctctttgtactcaatgaaaatcaaagagcaaat

SEQ ID NO: 7745 - DNA, 117 bp, Streptococcus pneumoniae
  misc_feature (1)..(117): tiling:Spneumo1:WAN02472I; WAN0246M2 CQ788982.1_16  |||||| 117 bp|Glimmer 2.02 orf prediction|S.pneumoniae||CQ788982. 1
gtgactgcagaagatacgattatttcagctgacgagagtaaaggatttttgctcaatttctggacttgctgccgtcccatctcagacaagggtgccaaatctatcccaaatcctata

SEQ ID NO: 7746 - DNA, 114 bp, Streptococcus pneumoniae
  misc_feature (1)..(114): tiling:Spneumo1:WAN02472J; WAN0246M3 CQ788982.1_6  ||||||1 14 bp|Glimmer 2.02 orf prediction|S.pneumoniae||CQ788982.1
atggttggagtttttcggcaacaagccctttacccagcaaccgcaacgagccattacccaagcaaatcaactgctggactacaagagctggtccgaggaggacaggaaaatgtt

SEQ ID NO: 7747 - DNA, 87 bp, Streptococcus pneumoniae
  misc_feature (1)..(87): tiling:Spneumo1:WAN02472K; WAN0246M4 CQ788983.1_16  |||||| 87 bp|Glimmer 2.02 orf prediction|S.pneumoniae||CQ788983.1
ctgataatttccagaacccaaaacctagatatttcaactctcttggtcatgtttactttcaaacctagccgtttctcaataaacgac

SEQ ID NO: 7748 - DNA, 75 bp, Streptococcus pneumoniae
  misc_feature (1)..(75): tiling:Spneumo1:WAN02472L; WAN0246M5 CQ788994.1_5  ||||||7 5 bp|Glimmer 2.02 orf prediction|S.pneumoniae||CQ788994.1
atgtcacttcaaactcacatggagagtaattttgactttgaacagcctaaaagtgccatcaaatttgaattggaa

SEQ ID NO: 7749 - DNA, 78 bp, Streptococcus pneumoniae
  misc_feature (1)..(78): tiling:Spneumo1:WAN02472M; WAN0246M6 CQ789007.1_11  |||||| 78 bp|Glimmer 2.02 orf prediction|S.pneumoniae||CQ789007.1
ttgctacaagagtttttgaaaagagatgcgcagaagaaaagagcttccaaagaagtcccccagagaagacttcctaac

SEQ ID NO: 7750 - DNA, 114 bp, Streptococcus pneumoniae
  misc_feature (1)..(114): tiling:Spneumo1:WAN02472N; WAN0246M7 CQ789066.1_4  ||||||1 14 bp|Glimmer 2.02 orf prediction|S.pneumoniae||CQ789066.1
ttgatagataaaatatataacttccctgtttcaaagtatgataaactagtaggtagacaaagtctgtatctgaccgtagcaaataatttcattgacggcagaagcatggtagca

SEQ ID NO: 7751 - DNA, 75 bp, Streptococcus pneumoniae
  misc_feature (1)..(75): tiling:Spneumo1:WAN02472O; WAN0246M8 CQ789068.1_2  ||||||7 5 bp|Glimmer 2.02 orf prediction|S.pneumoniae||CQ789068.1
gtggcgatactcttgctagcagttggtttatcaatgggcttggtcttgttgtttgaaagcttccaaggaatccct

SEQ ID NO: 7752 - DNA, 81 bp, Streptococcus pneumoniae
  misc_feature (1)..(81): tiling:Spneumo1:WAN02472P; WAN0246M9 CQ789122.1_4  ||||||8 1 bp|Glimmer 2.02 orf prediction|S.pneumoniae||CQ789122.1
ttgaaaattcacaaaatcctttgtttactaaacaagggatttttctggctctttgtcaactgtagtgggttgaagaaaagc

SEQ ID NO: 7753 - DNA, 453 bp, Streptococcus pneumoniae
  misc_feature (1)..(453): tiling:Spneumo1:WAN02Q9FZ; WAN02Q9FZ ||||||453 bp|Glimmer 2.13 orf prediction|S.pneumoniae|TIGR670|
atgtttcgtcacgaaatgattagaaaacataaaattcaatttcaggaagttgctgcttctaatgatgcattctttgctgcgtgcgctggggtctttgcagaaaaggttaaattttgccctgatgcggtttattgttgtactgtgaggcgaggctcaatatgcacaagactaaccttggatattgttgaggcacgcatttttgtagtagaaacggttaacagattcttgaaagaaaacggtattagtacaaagtattggatgaatcgtttagggccactgtttaacctgaaaggactttctaagaggaagttcattgcggcttttgttatgtatttctggcaaacacccctatctcgagttttctttgattataaagaatcaggaagaaggttcctaggccgcttgaaaggaaatgttaatgacggggatataaaaaaaatgcaagttgagtta

SEQ ID NO: 7754 - DNA, 489 bp, Streptococcus pneumoniae
  misc_feature (1)..(489): tiling:Spneumo1:WAN02Q9J2; WAN02Q9J2 ||||||489 bp|Glimmer 2.13 orf prediction|S.pneumoniae|TIGR670|
ttgaccggcaattcttcaagcaataaacaggaataccaattattaaaagataacttagtcagatcgtacaataaagctttgaagaaaaatgcgccttattcaatctttgctataaaaaatggcccaaaatctcacattggaagacatttgatgacctcatttctttcaatgaagggcctaacggagttgactaatgttgtgggaaattggagcgataagcgtgcttctgccgtggccaggacaacgtatactcatcagataacagcaatacctgatcactacttcgcactagtttctcggtactatgcatatgatccaatatcaaaggaaatgatagcattgaaggatgagactaatccaattgaggagtggcagcatatagaacagctaaagggtagtgctgaaggaagcatacgataccccgcatggaatgggataatatcacaggaggtactagactacctttcatcctacataaatagacgcata

SEQ ID NO: 7755 - DNA, 657 bp, Streptococcus pneumoniae
  misc_feature (1)..(657): tiling:Spneumo1:WAN02QB8Q; WAN02QB8Q ||||||657 bp|Glimmer 2.13 orf prediction|S.pneumoniae|Sanger23F|
atggagaaaaaaatcactggatataccaccgttgatatatcccaatggcatcgtaaagaacattttgaggcatttcagtcagttgctcaatgtacctataaccagaccgttcagctggatattacggcctttttaaagaccgtaaagaaaaataagcacaagttttatccggcctttattcacattcttgcccgcctgatgaatgctcatccggaatttcgtatggcaatgaaagacggtgagctggtgatatgggatagtgttcacccttgttacaccgttttccatgagcaaactgaaacgttttcatcgctctggagtgaataccacgacgatttccggcagtttctacacatatattcgcaagatgtggcgtgttacggtgaaaacctggcctatttccctaaagggtttattgagaatatgtttttcgtctcagccaatccctgggtgagtttcaccagttttgatttaaacgtggccaatatggacaacttcttcgcccccgttttcaccatgggcaaatattatacgcaaggcgacaaggtgctgatgccgctggcgattcaggttcatcatgccgtttgtgatggcttccatgtcggcagaatgcttaatgaattacaacagtactgcgatgagtggcagggcggggcg

SEQ ID NO: 7756 - DNA, 399 bp, Streptococcus pneumoniae
  misc_feature (1)..(399): tiling:Spneumo1:WAN02QB81; WAN02QB81 ||||||399 bp|Glimmer 2.13 orf prediction|S.pneumoniae|Sanger23F|
atgaaatttgagttttctttgcctcggaatactaagctaaaatctctaaacatggttatcaatagtaatgacagacaacatcaaacagataaggctaaagttactaagcgcattagagcttttgcttattggcatacatcaatgaacaaggataaagggagggctgcttttagcccctctaacccttgtgaggttacagttacaatttacagccctactaagtctaaattagatccacctaacttgtatccgacagtcaaggctatcattgatggcatgactgatgcaggtatttggacagatgataatcataaggttatcaaaaagttatcctttgtttatggtggattaagcgaggaaaaagggcattatagattagagtttgatatagaggaggtt

SEQ ID NO: 7757 - DNA, 477 bp, Streptococcus pneumoniae
  misc_feature (1)..(477): tiling:Spneumo1:WAN02QBN8; WAN02QBN8 ||||||477 bp|Glimmer 2.13 orf prediction|S.pneumoniae|Sanger23F|
atgatttttgttactgtagggacacatgaacaacaatttgatcgtttgataaaagaagttgatcgtttgaaagaagagaatctaattcaagaggaagtatttattcaaacaggatattctaattatgtcccaaaatattgtaaatgggaaaaaataatatcttatgaaaaaatgaatcagtttattgaggaatctgatacaattgttacccatggtggtccagctacttttatggcaattattgctaaaggaaaaactccaatagttgttccgaggcaaaagaaatttggggagcatgtgaatgatcatcagatgaatttttgttctaaaatatcctctgaagggtatgaattatctctgattaacgatataagcgaattacagtatagtttaaagcaagaaaagaaaactaaattttactctaataatgcaaattttcttaagcagttatcaaaaataattgaagatttaatagta

SEQ ID NO: 7758 - DNA, 334 bp, Streptococcus pneumoniae
  misc_feature (1)..(334): tiling:Spneumo1:BIOB3; E.coli biotin synthetase (bioB), co mplete cds.
tgatgtcgatgcctttgattttattcgcaccattgcggtcgcgcggatcatgatgccaacctcttacgtgcgcctttctgccggacgcgagcagatgaacgaacagactcaggcgatgtgctttatggcaggcgcaaactcgattttctacggttgcaaactgctgaccacgccgaatccggaagaagataaagacctgcaactgttccgcaaactggggctaaatccgcagcaaactgccgtgctggcaggggataacgaacaacagcaacgtcttgaacaggcgctgatgaccccggacaccgacgaatattacaacgcggcagcattatga

SEQ ID NO: 7759 - DNA, 334 bp, Streptococcus pneumoniae
  misc_feature (1)..(334): tiling:Spneumo1:BIOB5; E.coli biotin synthetase (bioB), co mplete cds.
atggctcaccgcccacgctggacattgtcgcaagtcacagaattatttgaaaaaccgttgctggatctgctgtttgaagcgcagcaggtgcatcgccagcatttcgatcctcgtcaggtgcaggtcagcacgttgctgtcgattaagaccggagcttgtccggaagattgcaaatactgcccgcaaagctcgcgctacaaaaccgggctggaagccgagcggttgatggaagttgaacaggtgctggagtcggcgcgcaaagcgaaagcggcaggatcgacgcgcttctgtatgggcgcggcgtggaagaatccccacgaacgcgatatgccgt

SEQ ID NO: 7760 - DNA, 333 bp, Streptococcus pneumoniae
  misc_feature (1)..(333): tiling:Spneumo1:BIOBM; E.coli biotin synthetase (bioB), co mplete cds.
ggggtaaaagcgatggggctggaggcgtgtatgacgctgggcacgttgagtgaatctcaggcgcagcgcctcgcgaacgccgggctggattactacaaccacaacctggacacctcgccggagttttacggcaatatcatcaccacacgcacttatcaggaacgcctcgatacgctggaaaaagtgcgcgatgccgggatcaaagtctgttctggcggcattgtgggcttaggcgaaacggtaaaagatcgcgccggattattgctgcaactggcaaacctgccgacgccgccggaaagcgtgccaatcaacatgctggtgaaggtgaaaggc

SEQ ID NO: 7761 - DNA, 337 bp, Streptococcus pneumoniae
  misc_feature (1)..(337): tiling:Spneumo1:BIOC3; E.coli bioC protein, complete cds.
accacgctggtgcagggatcgttacccgaactgcatcaggcgtggcaggcggtggacgagcgtccgcatgctaatcgctttttaccgccagatgaaatcgaacagtcgctgaacggcgtgcattatcaacatcatattcagcccatcacgctgtggtttgatgatgcgctcagtgccatgcgttcgctgaaaggcatcggtgccacgcatcttcatgaagggcgcgacccgcgaatattaacgcgttcgcagttgcagcgattgcaactggcctggccgcaacagcaggggcgatatcctctgacgtatcatctttttttgggagtgattgctcgtg

SEQ ID NO: 7762 - DNA, 415 bp, Streptococcus pneumoniae
  misc_feature (1)..(415): tiling:Spneumo1:BIOC5; E.coli bioC protein, complete cds.
atggcaacggttaataaacaagccattgcagcggcatttggtcgggcagccgcacactatgagcaacatgcagatctacagcgccagagtgctgacgccttactggcaatgcttccacagcgtaaatacacccacgtactggacgcgggttgtggacctggctggatgagccgccactggcgggaacgtcacgcgcaggtgacggccttagatctctcgccgccaatgcttgttcaggcacgccagaaggatgccgcagaccattatctggcgggagatatcgaatccctgccgttagcgactgcgacgttcgatcttgcatggagcaatctcgcagtgcagtggtgcggtaatttatccacggcactccgcgagctgtatcgggtggtgcgccccaaaggcgtggtcgcgttta

SEQ ID NO: 7763 - DNA, 339 bp, Streptococcus pneumoniae
  misc_feature (1)..(339): tiling:Spneumo1:BIOD3; E.coli dethiobiotin synthetase (bio D), complete cds.
acaacaggctgactgggtgttagtggaaggtgctggcggctggtttacgccgctttctgacactttcacttttgcagattgggtaacacaggaacaactgccggtgatactggtagttggtgtgaaactcggctgtattaatcacgcgatgttgactgcacaggtaatacaacacgccggactgactctggcgggttgggtggcgaacgatgttacgcctccgggaaaacgtcacgctgaatatatgaccacgctcacccgcatgattcccgcgccgctgctgggagagatcccctggcttgcagaaaatccagaaaatgcggcaaccggaaagtacat

SEQ ID NO: 7764 - DNA, 285 bp, Streptococcus pneumoniae
  misc_feature (1)..(285): tiling:Spneumo1:BIOD5; E.coli dethiobiotin synthetase (bio D), complete cds.
ttattttgtcaccggaacggataccgaagtggggaaaactgtcgccagttgtgcacttttacaagccgcaaaggcagcaggctaccggacggcaggttataaaccggtcgcctctggcagcgaaaagaccccggaaggtttacgcaatagcgacgcgctggcgttacagcgcaacagcagcctgcagctggattacgcaacagtaaatccttacaccttcgcagaacccacttcgccgcacatcatcagcgcgcaagagggcagaccgatagaatcattggtaat

SEQ ID NO: 7765 - DNA, 468 bp, Streptococcus pneumoniae
  misc_feature (1)..(468): tiling:Spneumo1:CRE3; Bacteriophage P1 cre gene for recomb inase protein.
gacggtgggagaatgttaatccatattggcagaacgaaaacgctggttagcaccgcaggtgtagagaaggcacttagcctgggggtaactaaactggtcgagcgatggatttccgtctctggtgtagctgatgatccgaataactacctgttttgccgggtcagaaaaaatggtgttgccgcgccatctgccaccagccagctatcaactcgcgccctggaagggatttttgaagcaactcatcgattgatttacggcgctaaggatgactctggtcagagatacctggcctggtctggacacagtgcccgtgtcggagccgcgcgagatatggcccgcgctggagtttcaataccggagatcatgcaagctggtggctggaccaatgtaaatattgtcatgaactatatccgtaacctggatagtgaaacaggggcaatggtgcgcctgctggaagatgccgattag

SEQ ID NO: 7766 - DNA, 528 bp, Streptococcus pneumoniae
  misc_feature (1)..(528): tiling:Spneumo1:CRE5; Bacteriophage P1 cre gene for recomb inase protein.
atgtccaatttactgaccgtacaccaaaatttgcctgcattaccggtcgatgcaacgagtgatgaggttcgcaagaacctgatggacatgttcagggatcgccaggcgttttctgagcatacctggaaaatgcttctgtccgtttgccggtcgtgggcggcatggtgcaagttgaataaccggaaatggtttcccgcagaacctgaagatgttcgcgattatcttctatatcttcaggcgcgcggtctggcagtaaaaactatccagcaacatttgggccagctaaacatgcttcatcgtcggtccgggctgccacgaccaagtgacagcaatgctgtttcactggttatgcggcggatccgaaaagaaaacgttgatgccggtgaacgtgcaaaacaggctctagcgttcgaacgcactgatttcgaccaggttcgttcactcatggaaaatagcgatcgctgccaggatatacgtaatctggcatttctggggattgcttataacaccctgttacgtatagccgaa

SEQ ID NO: 7767 - DNA, 594 bp, Streptococcus pneumoniae
  misc_feature (1)..(594): tiling:Spneumo1:DAP3; Bacillus subtilis dihydropicolinate reductase (dapB), jojF, jojG, complete cds's.
gtcaaacaggaaaaaaaagtaatgatatgcgatttgacagaagcggaactctcttctaacggtacggtcagtttgcgtaaagaagaagcagctgaagcagcccgcatattaggcgcagataaaagaattcagctaacgcttccagaccgcggcctaataatgagtgatcaggcaattcggtcaattgtcactgtcatcagaatctgtcggccaaaagcggtttttatgccgtataaaaaggatcgccatccggatcacggcaatgcggctgcactggtggaagaagcgatcttttccgccggaatccataaatataaagacgaaaaaagccttccggcgcataaagtcagcaaggtttactattatatgataaatggttttcatcagccggattttgttattgatatctcggatacaatagaggcaaagaaacaaagcctcaacgcctacaaaagccagtttatcccgtcaaaggattccgtttctactcctctgacgaatgggtatattgaaatcgttgaagcgagagaaaagctttacggtaaagaagcgggcgtggagtatgccgaagtttcttttccaaacggatgctga

SEQ ID NO: 7768 - DNA, 612 bp, Streptococcus pneumoniae
  misc_feature (1)..(612): tiling:Spneumo1:DAP5; Bacillus subtilis dihydropicolinate reductase (dapB), jojF, jojG, complete cds's.
atgtcaaacgaaacaattaaattagtcattgcgggaccgcgtggaagaatggggcaggaagctgttaaattggcagaacgaacaccacattttgaccttgtaggggccatagaccatacatacgatcagcaaaaattatctgatgtgatgcctgttgagtcagatgctttcatttacacagatatccatgcctgttttacagaaacacaaccggatgtcttgattgatttaacaacgcccgaaatcggaaaagtacatacaaaaattgcattagagcacggagtccgtccagttgtcggaacaaccggtttctcagaagctgatttaaaagagctcacatctttaacagaagaaaaagggatcggagccatcatcgcgccaaattttgcgctcggtgcgatactgatgatgaaattttcaaaaatggctgccaactattttgaggatgttgagattattgagcttcatcatgaccagaagcttgacgcaccaagcggaactgcgcttaaaacagcggaaatgatttcagaagtccgtaaagaaaagcagcaaggacatccggatgaaaaagaaattctcccaggagcaagaggagcggagcaaaacggtatt

SEQ ID NO: 7769 - DNA, 594 bp, Streptococcus pneumoniae
  misc_feature (1)..(594): tiling:Spneumo1:DAPM; Bacillus subtilis dihydropicolinate reductase (dapB), jojF, jojG, complete cds's.
acgccatgattcttataaccgtgcttctttcatgtcaggcgttaaactgtcagtcgaacaagtcatgaagattgatcagcttgtgtatggtttagaaaatatcattgattagacggggggataaacaatgaaaattgctttgatcgcgcatgacaagaaaaaacaggatatggttcaatttacgactgcctatcgggatattttaaagaatcatgatctatacgcaaccggaaccacagggttgaaaattcatgaggcgacaggtcttcaaattgaacgttttcaatccggccctttagggggagaccagcaaatcggtgcactgatcgctgccaatgcactcgatcttgtcatttttttgcgcgacccgctgaccgcgcagccgcatgaaccggatgtctcggcattaatccgtttatgtgatgtgtattccattccgctcgccacaaatatgggtactgcggaaattcttgtgcgcacacttgatgaaggtgttttcgaattccgtgaccttcttcggggagaagagccgaatgtataatgctgacgttcttgcttttggcgcccacagtgatgatgtcgagatcggaatgg

SEQ ID NO: 7770 - DNA, 328 bp, Streptococcus pneumoniae
  misc_feature (1)..(328): tiling:Spneumo1:LYS3; Bacillus subtilis lys gene for diami nopimelate decarboxylase (EC 4.1.1.20).
ttttgtgttagcagcggaaaaaatcttcaaaaaactagacgaatggagagattcatattcatttgtatccaaggtgctgaatcttggaggaggtttcggcattcgttatacggaagatgatgaaccgcttcatgccactgaatacgttgaaaaaattatcgaagctgtgaaagaaaatgcttcccgttacggttttgacattccggaaatttggatcgaaccgggccgttctctcgtgggagacgcaggcacaactctttatacggttggctctcaaaaagaagtggataagctgtacaatcgtttcatcattcggcgtgcgaattaa

SEQ ID NO: 7771 - DNA, 328 bp, Streptococcus pneumoniae
  misc_feature (1)..(328): tiling:Spneumo1:LYS5; Bacillus subtilis lys gene for diami nopimelate decarboxylase (EC 4.1.1.20).
atgacattgttcttacacggcacaagcagacaaaatcaacatggtcatttagaaatcggaggtgtggatgctctctatttagcggagaaatatggtacacctctttacgtatatgatgtggctttaatacgtgagcgtgctaaaagctttaagcaggcgtttatttctgcagggctgaaagcacaggtggcatatgcgagcaaagcattctcatcagtcgcaatgattcagctcgctgaggaagagggactttctttagatgtcgtatccggagagagctatatacggctgttgcagcaggctttccggcagaacgcatccactttca

SEQ ID NO: 7772 - DNA, 328 bp, Streptococcus pneumoniae
  misc_feature (1)..(328): tiling:Spneumo1:LYSM; Bacillus subtilis lys gene for diami nopimelate decarboxylase (EC 4.1.1.20).
tggaaacaataagagcagggaagaactgcggatggcgcttgagcaccgcatcggctgcattgtggtggataatttctatgaaatcgtcgcttcttgaagacctatgtaaagaaacgggtcactccatcgatgttcttcttcggatcacgcccggagtagaagcgcatacgcatgactacattacaacgggccaggaagattcaaagtttggtttcgatcttcataacggacaaactgaacgggccattgaacaagtattacaatcggaacacattcagctgctgggtgtccattgccatatcggctcgcaaatctttgatacggccgg

SEQ ID NO: 7773 - DNA, 449 bp, Streptococcus pneumoniae
  misc_feature (1)..(449): tiling:Spneumo1:PHE3; Bacillus subtillis phenylalanine bio synthesis associated protein (pheB), and monofunctional pr ephenate dehydratase (pheA) genes, complete cds.
agtttgtcagtgaccatcccgagctgaatatcggggtcattgccaatgatatggcagcttctacatacgaattaaaaatcgtgaaacgggatatacaggattatagggacaatcatacaagatttgttatcctgtctcccgatgaaaacatatcttttgaagtgaattcaaaattgagctctaggcccaaaacgaccttaatggtcatgctgccgcaggatgatcagtccggggcgctgcatagagtgctgtctgcattttcttggagaaatttaaacctgtcaaaaattgagtcacgtccgactaaaaccggattaggccattatttctttattattgatattgagaaagcgtttgatgatgtattgattccaggggccatgcaggagcttgaagcactcggctgcaaagtgaggcttctgggtgcataccagtcttaccaattataa

SEQ ID NO: 7774 - DNA, 396 bp, Streptococcus pneumoniae
  misc_feature (1)..(396): tiling:Spneumo1:PHE5; Bacillus subtillis phenylalanine bio synthesis associated protein (pheB), and monofunctional pr ephenate dehydratase (pheA) genes, complete cds.
atgaaagaggagacattttatcttgtccgtgaagatgtattgcccgatgcaatgagaaaaacattagaagtcaaaaagctgcttgatcgaaaaaaagcagattcagtagcagatgccgttcaaaaggtcgatttaagtagaagtgcgttttataaatacagggatgctgtttttccattctacaccatggtaaaagaacaaattatcacacttttctttcatttggaggataggtcaggtgcgttatctcagcttcttcaggcggtagctgattctggaagcaacgttctttccattcaccagaccattccgcttcaaggcagagcaaatgtgacactgtctatcagtacgtcggcaatggaagaagacattcatacattaatgaataagctcagg

SEQ ID NO: 7775 - DNA, 426 bp, Streptococcus pneumoniae
  misc_feature (1)..(426): tiling:Spneumo1:PHEM; Bacillus subtillis phenylalanine bio synthesis associated protein (pheB), and monofunctional pr ephenate dehydratase (pheA) genes, complete cds.
ggttgaaatattaggttcaggtgcataagggagagaaaatcgtcatgaaagtcggttatttaggtccagcagctacatttacacatctagcagtcagttcttgttttcaaaacggcgccgaacatgttgcttaccgcaccattccggagtgtatagatgcagccgttgcaggcgaagttgattttgcttttgttcctttggaaaatgctttagaaggatctgttaatctaacaatagactatttaatacatgaacagcctttgccaatcgtgggtgaaatgacgttgccgattcaccagcacttgctcgtccatccctcaagagagaatgcatggaaagagctcgacaaaatttactcacattcacacgcgattgcgcaatgccataaatttcttcatcgacattttccttccgttccatatgaat

SEQ ID NO: 7776 - DNA, 604 bp, Streptococcus pneumoniae
  misc_feature (1)..(604): tiling:Spneumo1:THR3; B. subtilis thrB and thrC genes for homoserine kinase and threonine synthase (EC 2.7.1.39 and EC 4.2.99.2, respectively).
ggctgatgaattatgcggcttaaagctgtctgaagcggacaagctgcatttagcgagtctagaagaaggacacccggacaatgctggcgcttctctcgtcggcggacttgtgatcggcctgcatgaggatgacgagacccaaatgatccgcgtcccgaatgctgacattgacgtagtcgttgtcattcctttttatgaagtgctgacaagagacgcgagagacgtgcttccgaaggagtttccatatgccgatgccgtaaaagcaagtgctgtcagcaatatcctcattgctgcgatcatgtccaaggattggccgcttgtcgggaaaatcatgaagaaggatatgttccatcagccgtaccgggcgatgcttgtgcctgagctgtcaaaagtagagcacgtcgccgagatgaagggcgcatatggaacggctctcagcggagcaggcccaacgattctcgtcatgaccgaaaaaggaaagggagaagagctaaaagaacagctcgcgcttcatttccctcattgtgaagtagacgctttgaccgttccgaaagagggaagtataatagagcgaaatcctttatatcaagtaaaaagtgtatag

SEQ ID NO: 7777 - DNA, 718 bp, Streptococcus pneumoniae
  misc_feature (1)..(718): tiling:Spneumo1:THR5; B. subtilis thrB and thrC genes for homoserine kinase and threonine synthase (EC 2.7.1.39 and EC 4.2.99.2, respectively).
atgtggaaaggacttatccatcaatataaagaatttttacctgtaacagatcaaacaccggcgctaactttacatgaaggaaacacacctcttattcacctgccgaagctgtctgagcagctcggaattgagcttcatgtcaaaacggaaggcgtcaatcctacgggatcatttaaagatcgcggaatggttatggctgtggcaaaggcaaaagaagaaggcaatgacacgattatgtgcgcgtcaacaggtaacacttccgctgctgcggcagcatatgcagcccgtgctaacatgaaatgcattgtcatcatcccgaacggaaaaattgcatttggaaaactcgctcaagctgtcatgtacggagccgagattatcgcaattgacggaaactttgacgatgcgcttaaaattgtccgttccatctgtgagaaatcaccgattgcccttgtcaactcagtcaacccttaccgcattgaaggccaaaaaactgctgccttcgaagtgtgcgaacagctgggggaagcgcctgatgttttagcgatcccggtcggaaatgctggaaacatcactgcgtactggaagggcttcaaggaatatcatgagaaaaacggcacaggccttccgaaaatgcgcggctttgaagctgagggtgcggcggcaatcgtgcgcaatgaagtgattgaaaatccggaaacaatagcgacagccattcgta

SEQ ID NO: 7778 - DNA, 604 bp, Streptococcus pneumoniae
  misc_feature (1)..(604): tiling:Spneumo1:THRM; B. subtilis thrB and thrC genes for homoserine kinase and threonine synthase (EC 2.7.1.39 and EC 4.2.99.2, respectively).
ctgtaaaggcagccgaggaatccaatgggaaaattgacgaagtcactgatgatgaaatccttcacgcatatcagctgatcgcccgtgtagaaggcgtgtttgcagaaccaggttcttgcgcgtctatcgcaggagtgctgaaacaggtgaaatccggagaaattccgaaaggcagcaaggtcgtagctgtgttaacaggaaacggactgaaagatccgaacacagcggtcgacatttcagaaatcaagcctgtcacattgccgactgatgaagacagcatccttgaatatgtaaaaggagcggcccgtgtatgaacgaagccgacatgctgttctctgtcactgttcccggaagcacagctaacctaggccccggctttgattcagtcggaatggcgctcagcagatatttgaagctgaccgtctttgaaagcgacaaatggtcttttgaggctgaaacagaaacagtcgccggaattcgcggtacagataacctgatctaccaagtggctaaacggaccgcagatttgtacggaaaagaaatgcctcctgtccatgtgaaggtgtggagcgacatcccgcttgcacgcggccttggcagcagc

SEQ ID NO: 7779 - DNA, 600 bp, Streptococcus pneumoniae
  misc_feature (1)..(600): tiling:Spneumo1:TRP3; B.subtilis tryptophan (trp) operon, complete cds.
ttaacatttgtcaatgaacatggggcgcgagctgtacttatcggtgaatcattgatgagacaaacttctcagcgtaaagcaatccatgctttgtttagggagtgaggttgtgaagaaaccggcattaaaatattgcggtattcggtcactaaaggatttgcagcttgcggcggaatcacaggctgattacctaggatttatttttgctaaaagcaaacgaaaagtatctccggaagatgtgaaaaaatggctgaaccaagttcgtgtcgaaaaacaggttgcaggtgtttttgttaatgaatcaatagagacgatgtcacgtattgccaagagcttgaagctcgacgtcattcagcttcacggtgatgaaaaaccggcggatgctgctgctcttcgcaagctgacaggctgtgaaatatggaaggcgcttcaccatcaagataacacaactcaagaaatagcccgctttaaagataatgttgacggctttgtgattgattcatctgtaaaagggtctagaggcggaactggtgttgcattttcttgggaatgtgtgccggaatatcagcaggcggctattggtaaacgctgttttatcgc

SEQ ID NO: 7780 - DNA, 600 bp, Streptococcus pneumoniae
  misc_feature (1)..(600): tiling:Spneumo1:TRP5; B.subtilis tryptophan (trp) operon, complete cds.
caccgagagagacatacggcgggtgtattgcctacattgggtttgacgggaatatcgactcttgtattacgattcgcacgatgagtgtaaagaacggtgttgcatcgatacaggcaggtgctggcattgttgctgattctgttccggaagccgaatacgaagaaagctgtaataaagccggtgcgctgctgaaaacgattcatattgcagaagacatgtttcatagcaaggaggataaagctgatgaacagatttctacaattgtgcgttgacggaaaaacccttactgccggtgaggctgaaacgctgatgaatatgatgatggcagcggaaatgactccttctgaaatgggggggatattgtcaattcttgctcatcggggggagacgccagaagagcttgcgggttttgtgaaggcaatgcgggcacacgctcttacagtcgatggacttcctgatattgttgatacatgcggaacagggggagacggtatttccacttttaatatctcaacggcctcggcaattgttgcctcggcagctggtgcgaaaatcgctaagcatggcaatcgctctgtctcttctaaaagcggaagcgct

SEQ ID NO: 7781 - DNA, 593 bp, Streptococcus pneumoniae
  misc_feature (1)..(593): tiling:Spneumo1:TRPM; B.subtilis tryptophan (trp) operon, complete cds.
aaaggacggagagcgccgggaatataccgtttcacccgaagatttcggtttcacaaatggcagacttgaagatttacaggtgcagtcaccgaaagagagcgcctatctcattcagaatatttttgaaaataaaagcagcagttccgctttatctattacggcttttaatgcgggagctgcgatttacacggcgggaattaccgcctcactgaaggaaggaacggagctggcgttagagacgattacaagcggaggcgctgccgcgcagcttgaacgactaaagcagaaagaggaagagatctatgcttgaaaaaatcatcaaacaaaagaaagaagaagtgaaaacactggttttgccggtagagcagcctttcgagaaacgttcatttaaggaggcgctggcaagcccgaatcggtttatcgggttgattgccgaagtgaagaaagcatcgccgtcaaaagggcttattaaagaggattttgtgcctgtgcagattgcaatagactatgaggctgcgaaggcagatgcgatttccgttttaacagacaccccgttttttcaaggggaaaacagttatttatcagacgtaaag

SEQ ID NO: 7782 - DNA, 75 bp, Streptococcus pneumoniae
  misc_feature (1)..(75): tiling:Spneumo1:WAN024B9J; Cluster includes WAN023OR5 pne7 6_18||||15988..16062|+|75 bp|Type 35B1 capsule operon, Gli mmer 2.02 orf prediction|S.pneumoniae||WAN01UCDM|ORF|000
atgaaaattaaagagcaaactaggaagctagccacaggttgctcaaaacactgttttgaggttgcagatggacgc

SEQ ID NO: 7783 - DNA, 96 bp, Streptococcus pneumoniae
  misc_feature (1)..(96): tiling:Spneumo1:WAN024B75; Cluster includes WAN023SI1 NC_0 03098.1_2212||||1717798..1717893|-|96 bp|Glimmer 2.02 orf prediction|S.pneumoniae|R6|NC_003098.1|ORF|110
atgaaacgagaacaggacaaattgatcaggacagtcaaatcgatttctaacaatgttttagaagcagaagtgtactattctagtttcaatctacta

SEQ ID NO: 7784 - DNA, 96 bp, Streptococcus pneumoniae
  misc_feature (1)..(96): tiling:Spneumo1:WAN024B3R; Cluster includes WAN0242NR SP08 09||15900701|NP_345305.1|764777..764872|+|96 bp|hypothetic al protein|S.pneumoniae|TIGR4|NC_003028.1|ORF|020
atgaaatcaactaaagaagaaatccaaaccatcaaaacacttttaaaagactctcgtacagctaaatatcataaacgccttcaaatcgttctatag

SEQ ID NO: 7785 - DNA, 96 bp, Streptococcus pneumoniae
  misc_feature (1)..(96): tiling:Spneumo1:WAN024B3Y; Cluster includes WAN023SN7 NC_0 03098.1_106||||86836..86973|-|138 bp|Glimmer 2.02 orf pred iction|S.pneumoniae|R6|NC_003098.1|ORF|121
atgaaatcaactaaagaagaaatccaaaccatcaaaacacttttaaaagactctcgtacagctaaatatcataaacgccttcaaatcgttctattt

SEQ ID NO: 7786 - DNA, 96 bp, Streptococcus pneumoniae
  misc_feature (1)..(96): tiling:Spneumo1:WAN024B3W; Cluster includes WAN023SJ7 NC_0 03098.1_1704||||1326443..1326580|-|138 bp|Glimmer 2.02 orf prediction|S.pneumoniae|R6|NC_003098.1|ORF|110
atgaaatcaattaaagaagaaatccaaaccatcaaaacacttttaaaagactctcgtacagctaaatatcataaacgccttcaaatcgttctattt

SEQ ID NO: 7787 - DNA, 93 bp, Streptococcus pneumoniae
  misc_feature (1)..(93): tiling:Spneumo1:WAN024AYO; Cluster includes WAN023SK0 NC_0 03098.1_1376||||1086485..1086577|-|93 bp|Glimmer 2.02 orf prediction|S.pneumoniae|R6|NC_003098.1|ORF|100
atgaagcaatttaaaattctttcagataaatatttagagtccattacaggttctggtgggaacttaggcccaggatttggtgtgataattcca

SEQ ID NO: 7788 - DNA, 93 bp, Streptococcus pneumoniae
  misc_feature (1)..(93): tiling:Spneumo1:WAN024BBQ; Cluster includes WAN023SLR NC_0 03098.1_714||||569213..569305|+|93 bp|Glimmer 2.02 orf pre diction|S.pneumoniae|R6|NC_003098.1|ORF|101
ctgacttcgtcagtcttatctacaacctcaaaactgtgttttgagcaacctgcggctagcttcctagtttactctttgattttcattgagtat

SEQ ID NO: 7789 - DNA, 96 bp, Streptococcus pneumoniae
  misc_feature (1)..(96): tiling:Spneumo1:WAN024B25; Cluster includes WAN023SAA NC_0 03028.1_1850||||1397857..1397976|-|120 bp|Glimmer 2.02 orf prediction|S.pneumoniae|TIGR4|NC_003028.1|ORF|010
tacctgagagcggagaatgccatcctaaaaaagttaagagaactccgattgaaggaggaaaaagagaaagaagaaagacagaaattattcaagaat

SEQ ID NO: 7790 - DNA, 53 bp, Streptococcus pneumoniae
  misc_feature (1)..(53): tiling:Spneumo1:WAN0249V3; Cluster includes WAN024E9L R6.I G_1598.1||||1533597..1533649|+|53 bp|Between spr1551 (- st rand) and spr1552 (- strand)|S.pneumoniae|R6|NC_003098.1|I G|110
aaacctcctcttttaaattrttttctttagtttcgttctattaaatgttatta

SEQ ID NO: 7791 - DNA, 79 bp, Streptococcus pneumoniae
  misc_feature (1)..(79): tiling:Spneumo1:WAN024AR8; Cluster includes WAN024EQA-rc R 6.IG_302||||279617..279695|-|79 bp|Between spr0281 (+ stra nd) and spr0282 (+ strand)|S.pneumoniae|R6|NC_003098.1|IG- rc|110
aaatagacctccttaataaaacataataatttttactttytraagactagtttcaaatacaaatkatactagatcagga

SEQ ID NO: 7792 - DNA, 97 bp, Streptococcus pneumoniae
  misc_feature (1)..(97): tiling:Spneumo1:WAN024AN5; Cluster includes WAN0247Q1 R6.I G_78.2||||64684..64780|+|97 bp|Between spr0057 (strH) (- s trand) and spr0058 (- strand)|S.pneumoniae|R6|NC_003098.1| IG|110
aaattatagaatyttccaaaaataggtaagcgctacctttttggtgtrgtataataagcatagaaaaagcccragcgattaggctcaggytttcttc

SEQ ID NO: 7793 - DNA, 73 bp, Streptococcus pneumoniae
  misc_feature (1)..(73): tiling:Spneumo1:WAN024A6N; Cluster includes WAN024EFE R6.I G_1153||||1115367..1115439|+|73 bp|Between spr1115 (- stra nd) and spr1116 (- strand)|S.pneumoniae|R6|NC_003098.1|IG| 110
aaatttactcgctttctaatttattaaattttcagacttrstaccagagatattakcttttacttttkwraaa

SEQ ID NO: 7794 - DNA, 78 bp, Streptococcus pneumoniae
  misc_feature (1)..(78): tiling:Spneumo1:WAN0249YT; Cluster includes WAN024EBX R6.I G_1410||||1348297..1348370|+|74 bp|Between spr1366 (atpE) (- strand) and spr1367 (IS1239) (- strand)|S.pneumoniae|R6 |NC_003098.1|IG|110
aacaaattctcctttaaaataaaatttacttacttagtgtagtcctaaaatttaaatttgtcaacttttaaccgctat

SEQ ID NO: 7795 - DNA, 89 bp, Streptococcus pneumoniae
  misc_feature (1)..(89): tiling:Spneumo1:WAN024A8L; Cluster includes WAN024EGH-rc R 6.IG_1067.1.1||||1009804..1009892|-|89 bp|Between spr1028 (gapN) (+ strand) and spr1029 (glgB) (+ strand)|S.pneumoni ae|R6|NC_003098.1|IG-rc|110
aataccaaaaagttcgtattttttctataattattattattttatagcaaaaaaataaaaccaggaaaacaatttcctgrttttacacg

SEQ ID NO: 7796 - DNA, 50 bp, Streptococcus pneumoniae
  misc_feature (1)..(50): tiling:Spneumo1:WAN0249WG; Cluster includes WAN024EAE-rc R 6.IG_1546||||1479143..1479192|-|50 bp|Between spr1499 (gpm A) (- strand) and spr1500 (- strand)|S.pneumoniae|R6|NC_00 3098.1|IG-rc|110
aatagataaacgaggggaaacctcggaaaatttaaaggagaatccatcta

SEQ ID NO: 7797 - DNA, 77 bp, Streptococcus pneumoniae
  misc_feature (1)..(77): tiling:Spneumo1:WAN0249GJ; Cluster includes WAN024E4N R6.I G_2138||||1912961..1913037|+|77 bp|Between spr1931 (hisS) (- strand) and spr1932 (- strand)|S.pneumoniae|R6|NC_00309 8.1|IG|110
agggaatcctctttaaacttaatagtcttattttaccayaaataragggattaaaacagtaagaaaaaaattaggat

SEQ ID NO: 7798 - DNA, 93 bp, Streptococcus pneumoniae
  misc_feature (1)..(93): tiling:Spneumo1:WAN024AJF; Cluster includes WAN024EM3-rc R 6.IG_624||||612533..612602|-|70 bp|Between spr0600 (+ stra nd) and spr0601 (+ strand)|S.pneumoniae|R6|NC_003098.1|IG- rc|110
agtagactccttgtaaacaaaattccccctgtaatttcttacaaggggaaykatytaarwmaaykaamkattagtcataatcacagtaaaatg

SEQ ID NO: 7799 - DNA, 51 bp, Streptococcus pneumoniae
  misc_feature (1)..(51): tiling:Spneumo1:WAN024AKB; Cluster includes WAN024EMH R6.I G_584.2.2||||562367..562417|+|51 bp|Between spr0560 (+ str and) and spr0561 (prtA) (+ strand)|S.pneumoniae|R6|NC_0030 98.1|IG|110
agttaaagtttattatctattggaagttawataaatatgtaaggaattaaa

SEQ ID NO: 7800 - DNA, 50 bp, Streptococcus pneumoniae
  misc_feature (1)..(50): tiling:Spneumo1:WAN0249WC; Cluster includes WAN024EAC-rc R 6.IG_1549.2||||1483351..1483400|-|50 bp|Between spr1502 (i leS) (- strand) and spr1503 (- strand)|S.pneumoniae|R6|NC_ 003098.1|IG-rc|110
akctagtaagatttgacgttycccacgttacgggataagagggagaaaga

SEQ ID NO: 7801 - DNA, 78 bp, Streptococcus pneumoniae
  misc_feature (1)..(78): tiling:Spneumo1:WAN0249YS; Cluster includes WAN024EBX-rc R 6.IG_1410||||1348297..1348370|-|74 bp|Between spr1366 (atp E) (- strand) and spr1367 (IS1239) (- strand)|S.pneumoniae |R6|NC_003098.1|IG-rc|110
atagcggttaaaagttgacaaatttaaattttaggactacactaagtaagtaaattttattttaaaggagaatttgtt

SEQ ID NO: 7802 - DNA, 72 bp, Streptococcus pneumoniae
  misc_feature (1)..(72): tiling:Spneumo1:WAN024A8A; Cluster includes WAN024EG9-rc R 6.IG_1085||||1041149..1041220|-|72 bp|Between spr1046 (xer C) (+ strand) and spr1047 (lplA) (- strand)|S.pneumoniae|R 6|NC_003098.1|IG-rc|110
atcaaaaagaagttggccaactaaccaacttctttttttgatatttatttacataatttaaaatacgyaaaa

SEQ ID NO: 7803 - DNA, 77 bp, Streptococcus pneumoniae
  misc_feature (1)..(77): tiling:Spneumo1:WAN0249GI; Cluster includes WAN024E4N-rc R 6.IG_2138||||1912961..1913037|-|77 bp|Between spr1931 (his S) (- strand) and spr1932 (- strand)|S.pneumoniae|R6|NC_00 3098.1|IG-rc|110
atcctaatttttttcttactgttttaatccctytatttrtggtaaaataagactattaagtttaaagaggattccct

SEQ ID NO: 7804 - DNA, 56 bp, Streptococcus pneumoniae
  misc_feature (1)..(56): tiling:Spneumo1:WAN024A42; Cluster includes WAN024EDL-rc R 6.IG_1306.1.2||||1259892..1259947|-|56 bp|Between spr1262 (- strand) and spr1263 (- strand)|S.pneumoniae|R6|NC_00309 8.1|IG-rc|110
atcgttcgcaaamagcctatttttcttgaaaaaataggctttttttctaaaaatcc

SEQ ID NO: 7805 - DNA, 1128 bp, Streptococcus pneumoniae
  misc_feature (1)..(1128): tiling:Spneumo1:WAN024DE6; Cluster includes WAN0242LU SP08 87||15900770|NP_345374.1|836579..837700|+|1122 bp|type I r estriction-modification system, S subunit, putative|S.pneu moniae|TIGR4|NC_003028.1|ORF|011
atgaaaaaagtgaagttgggggaartcttatctctaaaaaaaggmaagaaagccactgtacttgctgaacaaacaactctaagccaacgttatattcaaatagatgatttaagaaataataataatttaaaattcactgaaagtttaaatatgactgaagcactcccagatgatattctgatagcatgggatggagctaatgcaggaacagttggttatggattatcgggagctgttggtagtacaattacggtcttaaaaaagaatgagcgatacaaagaaaaaattatatcagattacttgggagtctttttggaaagtaaatcgcagtatttacgagawcattcaacaggtgcaacaattcctcatttaaacaagaatatattacttgatttacaattagaattgctaggtatcgaagaacaagagaacattatctgtattcttaatacgattaaaaggcttattactaaaagaaaattkcagttagatgaactaaacttgctcgtcaaatcccgatwtwmcgagrwgktkgkkgmaaataaaatatttgaaagcattgataacttatttgatattatagatggtgataggggcaaaaattatcctaaatcagatgagttgtttagtgaggagtactgtttatttttaaatacaaagaatgttactaaaaacggattttcattcgatacaaagcaatttatcactaaaacaaaggataaattacttcgaaaaggcaaacttgagcgttatgatatagtcttgacaacaagaggtactgttggaaatgtagcgtactacgatgaattaataaaatataaacatttacgtataaattcaggtatggtaatattacgtcccaagacaccaaatctaaatcagaaatttattatccatgttttaaggaataataattatagtcgagtgatatcaggaagtgctcagcctcagttaccaattacaaaattaaaaaaaatacttctccccctccccccactagccctccaaaatgagttcgcagactttgtagtccaggtcgacaaatcacaattggcaatccaaaaatctctggaagaacttgaaactttgaagaaatctctgatgcaggagtattttggcykaactaat

SEQ ID NO: 7806 - DNA, 96 bp, Streptococcus pneumoniae
  misc_feature (1)..(96): tiling:Spneumo1:WAN024DOX; Cluster includes WAN023SK4 NC_0 03098.1_1343||||1065613..1065708|-|96 bp|Glimmer 2.02 orf prediction|S.pneumoniae|R6|NC_003098.1|ORF|101
atgaaacaaaaacaaaaatatcgaagtttgttttcaaaactttcgatatttttgttgggttatwaytttgwtgtttctagtttactttttgatgrt

SEQ ID NO: 7807 - DNA, 174 bp, Streptococcus pneumoniae
  misc_feature (1)..(174): tiling:Spneumo1:WAN024B84; Cluster includes WAN0244KR spr0 311||15902355|NP_357905.1|312433..312606|+|174 bp|Hypothet ical protein|S.pneumoniae|R6|NC_003098.1|ORF|101
  misc_feature (168)..(168): n is a, c, g, or t
atgaacataaagaagcgwgtccttagtgcaggyctgacttttrcatctghyttgcttttagytrcttgcgrccaatcaggytcagatayaaaaacttactcakcaacctttrgtggaaatccaactacrtttaaytayctrttagrctattacrctgataayayadtnawttga

SEQ ID NO: 7808 - DNA, 108 bp, Streptococcus pneumoniae
  misc_feature (1)..(108): tiling:Spneumo1:WAN024AXA; Cluster includes WAN024204 SP17 18||15901552|NP_346156.1|1622200..1622301|-|102 bp|hypothe tical protein|S.pneumoniae|TIGR4|NC_003028.1|ORF|010
atgaacttgtttcttataaaaatgttgtctgaaactattagcctttttccagaagttttagaggaagaaaactttacgaggaaaaaggagttactcaaactaactaat

SEQ ID NO: 7809 - DNA, 2253 bp, Streptococcus pneumoniae
  misc_feature (1)..(2253): tiling:Spneumo1:WAN024ATM; Cluster includes WAN0241F9 |PBP 2X||BAD00916.1|||2253 bp|penicillin-binding protein 2X|S.p neumoniae||AB119928|ORF|000
atgaagtggacaaaaagagtaatccgttatgcgaccaaaaatcggaaatcgccggctgaaaacagacgcagagttggaaaaagtctgagtttattatctgtctttgtttttgccatttttttagtcaattttgcggtcattattgggacaggcactcgctttggaacagatttagcgaaggaagctaagaaggttcatcaaaccacccgtacagttcctgccaaacgtgggactatttatgaccgaaatggagtcccrattgctgaggatgcaacctcctataatgtctatgcggtyattgatgagaactataagtcagcaacgggtaagattctttacgtagaaaaaacacaatttaacaargttgcagaggtctttcataagtatctggacatggaagaatcctatgtaagagagcaactctcgcaacctaatctcaagcaagtttcctttggwkcraagggmaatggrattacctatgccaatatgatgtctatcaaaaaagarttggaarctgcagaggtcaaggggattgattttacaaccagtccyaatcgtagttacccaaacggacaatttgcttctagttttatyggsytagcycaactccatgaaaatgaagatggmagcaagagcttgctgggaacytctggaatggagagttccttgaacagtattcttgcagggacagacggcattattacctatgaaaaggatcgtctgggtaatattgtacccggaacagaacaagtttcccaacraacgrtrgayggyaaggatgtttayacaaccatttccagccccctccagtcctttatggaaacccagatggatgcytttcwasaraargtaaaaggwaagtayatgacmgcgacyttggtcagtgcwaaracmggkgaaatyctkgcwacmacscaacgaccwaccttyratgcwgatactaargaaggrmtyackraggactttgtttggcgtgatattctttatcaaagtaactatgaaccaggatcarccwtgaaggtyatgacgttagcttcttctattgataataataccttcccaagtggagaatacttcaatagcagtgaattmaaaatagcggatgtgacgaytcgagattgggatgttaatgatggtttgackactggtrggatgatgactttcttacaaggtttcgctcwctccagtaatgttggaatgagtctwcttgaacaaaaaatgggagatrctacttggttggattatctaaaccgctttaaatttggggtcccaactcgctttggcttgacagatgaatacgctggtcaacttccagctgataatattgtcaatattgctcaaagctcatttggtcaaggaatttcagtaacacaaacacaaatgcttcgtgccyttacagctattgctaatgatggagttatgctggagccaaaatttataagtgctatttatgatactaacaatcagtctgtacgaaagtctcaaaaagagattgtaggaaaacctgtatctgaagatgcagcaagcttgactcgtactaacatgatattagttgggacggaccctatatatggaactatgtataatcattacacaggaaagccaattataacagttcctggacaaaatgtagcagttaaatccggtacggctcaaatcgctgatgagaaaaatggaggatacttggttggttctaccaattatattttctcagttgtgactatgaatcctgctgaaaatcctgattttatcytstatgtracggttcaacagcctgagcattattcaggtatycagttgggrgaatttgccamyccaatcttggagcgggcttcagctatgaaagaatctctcaatcttcaawcwmcagctaagrmtttrgakcaagtraskamasaawstycktatscwatgcctagyrtcaaggatatttcacctggtgatttagcagaagaattgcgtcgmaatcttgtacaacccatcgttgtgggaacaggaacgaagattaaaaacagttctgctgaagaagggaagaatcttgccccgaaycagcaagtccttatcttatctgataaagyagaggargttccagatatgtatggttggacaaaggagactgctgagacccttgctaagtggctcaatatagaacttgaatttcaaggytcgggctctactgtgcagaagcaagatgttcgtgctaacacagctatcaaggacattaaaaaaattacattaactttaggagactaa

SEQ ID NO: 7810 - DNA, 2258 bp, Streptococcus pneumoniae
  misc_feature (1)..(2258): tiling:Spneumo1:WAN024C5O; Cluster includes WAN0244KY spr0 304|pbpX|15902348|NP_357898.1|302261..304513|+|2253 bp|Pen icillin-binding protein 2X|S.pneumoniae|R6|NC_003098.1|ORF |110
  misc_feature (957)..(957): n is a, c, g, or t
atgaagtggacaaaaagagtaatccgttatgcgacsaaaaatcggaaatcgccggctgaaaacagacgcagagttggaaaaagtctgagtttattatctgtctttgtttttgccrtttttttagtcaattttgcrgtcattattgggacrggcactcgctttggaacagatttagcgaaggaagctaagaaggttcatcaaaccacccgtacagttcctgccaaacgtgggactatttatgaccgaaatggagtcccgattgctgaggatgcracmtcytataatgtctatgcggtcattgatgagaaytataagtcagcaacrggtaagatwctytacgtagaaaaaacacaatttaacaaggtkgcagaggtctttcataagtatctggacatggaagaatcctatgtaakagagcaactctcgcaacctaatctcaagcaagtttcctttggwkcraagggmaatgggattacctatgccaatatgatgtctatcaaaaaagarttggaarctgcagaggtcaaggggattgattttacaaccagtcchaatcgtagttayccaaacggacaatttgcttctagttttatcgghytagctcarctccatgaaaatgaagatggmagcaagagyttrytgggaacytctggaatggagagttcyttraayagwattcttgcagggacagacggyattattacmtatgaaaargaycgtctggghaatattgtmccmggwacwgarcaartttcccaacraacsrtrgayggyaaggatgtttayacmaccatttccagyccyctycagtcctttatggaaacccagatggaygcttttcaagaraargtaaaasshaagtayatgacvgckacyttggtyagtgcwaaracdggkgaratyytkgcwacvacvcarmgrccraccttyratgchgatacwaargarggvhtbacnraggactttgtytggcgtgatathctytaycaaagtaactatgarccrggktchvcyatgaargtbatgaygytvgctgctkctattgayaayaayacytwyccargdggagaakdhytyratagyagtgarttaaaartwgcrgatgybackayycgagattgggaygtyaatgawggwttracbrsygghrgdaygatgachythtywcaaggdttygydcwctcmagtaaygttggrrtgasbcthcttgarmaaaaratgggagatgctachtggytkgattatytwaaycgytttaartttggdgtyccracycgyttyggyttgacrgatgartaygcwgsbcarytkccdgcdgayaatatygthaayattgskcaragykcatttggdcarggratttcwgyracvcaracvcaratgmtwcgtgcyttyacvgcyattgcyaaygayggdgtyatgytrgarccwaaatttatyagtgcchtktatgayccraatraycarwctgytcgkaartcwcaaaargaartwgtsggraatccygtdtcbaaagawgcrgckagyywrackcgrackmayatgrtywtrgthggdacvgayccdrywtatggaacyatgyataaycayarbacaggbaarscaactgtmamtgtkccdggkcaraatgtrgcyctyaartchggkrcdgcbsarathgcbgaygagaaaaatggwgghtayytdrtydgkdhdachrayhayattttytcrgywgtrkcbatgmryccdgckgaaratcctgaytttatyytstatgtracrgtycaacarcctgarcattwttcaggkatycarytkgrrgartttrmhaayccwatyttggarmgrgchkyrgctatgaaagamtcwctcaatcttcaawcwmcagcyaardmtttrgakmaagtamgwmarcaawstycttatscwatgccyagyrtcaaggatatttcacctggtgatttagcagaaraattgcgtcgmaatcttgtacaaccyatygttgtgggaacaggracgaagattaaaaacagttctgctgaagaagggaagaatcttgccccgaaycagcargtcctkatcttatctgayaaagyagaggargtkccagayatgtatggttggacaaargmgactgctgagaccyttgctaagtggctcaatatagaacttgaatttsaaggytcgggywctactgtgcagaagcaagatgttcgtgctaayacagcyatcaaggacattaaaaaaattamattaactttaggagactaactaat

SEQ ID NO: 7811 - DNA, 2253 bp, Streptococcus pneumoniae
  misc_feature (1)..(2253): tiling:Spneumo1:WAN024ATQ; Cluster includes WAN0241GV |pbp 2x||CAD90771.1|||2109 bp|penicillin-binding protein 2x|S.p neumoniae||AJ560762|ORF|001
  misc_feature (957)..(957): n is a, c, g, or t
  misc_feature (2034)..(2034): n is a, c, g, or t
  misc_feature (2154)..(2154): n is a, c, g, or t
atgaagtggacaaaaaragtaatccgttatgcgacvaaaaatcggaaatcgccggctgaaaacagacgcagagttggaaaaagtctgagtttattatctgtctttgtttttgccrtttttttrgtcaattttgckgtyattatygggasdggyastmrmtttggaacagatytagysaargargctaagaargttcaycaaaymacccgtayagtycctgccaaacgtgggactatttatgaccgaaatggrgtyccrattgctgaggaygcrachtcytataatgtctatgckgtyattgatraraamtayaartcagcaacrggtaarattctttaygtagaarawrcmcartttaayaargtdgcagaggtyttycataagtatctggayatggamgarkcytatgtwaragarcaaytstckcaacctaayctsamscaagtttcctttggwkcvaarggmaatggrattacctatgccaatatgatgdckatyaaaaaagadttgraarmtgcagwgkksaaggggattgattttacaaccagtccyaatcgtagttayccaaayggacaattygcttctagytttatygghytagcycarctycatgaaaatgargatgghagcaagagyttrytrggracytctggdwtggagagttcyttraayashattcttgcwgggamagayggyattattacytatgaaaargaycgtstrgghaatatygtmcchggwacdgarcwrgtwtcscaacrvackrtrgayggyaaggatgtttayacrayattgtcyagymcscthcartcyttyatggaracycaratgratgcyttycwasaraargtmaarggwaartayatgacmgcracyttggthagtgcwaarayvggdgarathctbgcwacvacvcaacgrccdaccttyratgchgatacwaargaaggvmtbacnraggactttgtttggcgtgatatyctytatcaaagtaactatgarccaggrtcarccwtkaaggtyatgaygytmgctkctkctattgataataataccttcccaagtggagaatacttcaatagcagtgaatthaaaatrgcggatgygacgahtcgagattgggaygtyaatgvdggwttgactaytggtrggatgatgactttctyacaaggtttcgytcwctccagtaatgttggaaygagtctwcttgaacaaaaaatgggagatrctacytggytggattatctaarhcgstttaaatttggkgtyccractcgytttggcttgacrgatgaataygcwggtcaacttccrgctgayaatattgtyartattgctcaaagctcatttggkcaaggaatttcagtracmcaaacmcaaatgytwcgtgcyyttacagckattgctaatgatggagttatgctggagccaaaatttataagtgctatttatgatactaacaatcagtctgkacgwaagtcwcaaaaagaratwgtaggaaawcctgtwtcyraagakgcagcaagcwyractcgwamtmacatgatmttagttgggacggaccctmtatatggaactatgtataatcaytacacaggaaagccaattataacagttcctggacaaaatgtagcagttaaatccggtrcggctcaaatcgctgatgagaaaaatggaggatacttggttggttctaccaattatattttctcagbtgtgamtatgaatcctgctgaaaatcctgattttatcytstatgtracggttcaacarccwgarcattwttcaggkatymasthgggrgartttkcyamyccdatyttggarmgrgcwkyrgcyatgaaagahtcyctyaayctycaawcwmcmgcyaarrmkttrgakmargtdavswmwvaawsybcktatschatgcctagyrtcaaggayatwtcwccyggwgakktrgcrgaagmhytrcgycgmaatmttgtrcaaccmatygttgtdggwrcwggwacraagattaaaravwswtctgywgaagaaggravnaatcttgchccdaaycarcaagtyctymtyttatcbgataargyagargaarttccagayatgtatrgytggamaaargmracygchgarrcyyttkctaartggytvratatwgarhtngwatttsaaggttcrggytcyryygtbcmdaascwrrmyrwtcgkrcyaayacagcwatcaarracattaaaaaaattamattaactttaggagactaa

SEQ ID NO: 7812 - DNA, 1569 bp, Streptococcus pneumoniae
  misc_feature (1)..(1569): tiling:Spneumo1:WAN024GKM; Cluster includes WAN0244GY spr0 448|hsdS|15902492|NP_358042.1|453335..454903|-|1569 bp|Typ e I site-specific deoxyribonuclease chain S|S.pneumoniae|R 6|NC_003098.1|ORF|100
atgacaccagaacaacttaaagcaagtattctccaaagagcgatggaagggaaattagtgccgcaaaatcccaatgacgaacctgcaagtgaattattaaagagaattaaagctgaaaaagaaaaacttatcagtgaaggaaaaatcaaacgagataaaaaggaaactgagatatttcgtggtgatgatgggaaacattatgggaagtttgctgatggaagyactcaagaaattgatgttccttatgatattcctgatacttgggagtgggtgaggttttctacattggttgaaattgtcagaggtggctctccacgaccaatcaaagattatcttacttctgaagtagatggaataaattggataaaaataggtgatactgaaaagggtgaaaagtatataaataatgttaaagaaaaaatcaaaaaatcagggcttaacaaaactagatttgtaaaaaaaggtacatttttgttaactaattctatgagttttggtagaccttatattttgaatgttgatggtgcaatacacgatggatggttggctatttcgaactatgaaaactcattaaataaagattacctattctatattctttcatcaaatgtagtttattctcaatttctatctctaattagtggagctgttgtgaaaaacttgaatagtgataaagttgcttctattcttatccctctccccccactatccgaacaacaacgmatartagaagcaatcgaatcagctttagaaaaagtagatgaatatgctgaaagttataatagactagaacagctagataaagaatttccagataaactaaaaaaatctattcttcaatatgctatgcaaggaaaattagttgaacaagacccaaatgatgaatcagtcgaagttttacttgaaaaaatacgagcagaaaaacaaaaactmtttgaagaaggcaagattaaaaagaaagatttggacatttctattgtttcccaaggagatgataactcttattatgaggaagtaccttgtgaaataccagaaagttgggaatggrtgaggttaaacgatataacctcctacattcaaagagggaagtctccaaaatattcaaatattcctatataccctgtgattgctcagaaatgtaatcaatggtctggcttttctattgacttagcaagatttattgatcccgaaacagttcatagttaccagaaagaaagattactaagrgatggtgatttaatgtggaattcaacaggtctaggtacgttaggacgattagctatttaccatramaataaaaatccttatgcctgggctgttgcagatagccatgttacagttataagagtcttatcgggggttattaattgccatttcatctataattttctttcctctcctattgttcagtcagttattgaagaaaaagcgtcgggtagtacaaaacaaaaagaattattaacgaaaactataaaagaatatttaatccccctcccaccccttcctgaacaatccagaatcgttgataaaatcgaacaatttttcgcccatattgacgcactaatttag

SEQ ID NO: 7813 - DNA, 839 bp, Streptococcus pneumoniae
  misc_feature (1)..(839): tiling:Spneumo1:WAN024B2Q; Cluster includes WAN0244FN spr0 495|IS861-truncation|15902539|NP_358089.1|496379..496486|- |108 bp|Degenerate transposase (orf2)|S.pneumoniae|R6|NC_0 03098.1|ORF|212
atgactgagttttygttaghtmttcttctaaaakccattaaactagctcgttsgacctactactatcacttgaaacagctagayaaamcagatraggaccaagagcttaaagctgaaattcaatccatytttatckaacacaarggaaattatrcttatcgycggrttyatttagaactaagaaatcgtgsttatctggtaaatcataaaagagttcaaggcttgatraaagtactcaatttacaagctaaaatgcgacagaaacgaaaatattcttctcataaaggagacgttggyaagaargcagagaatctcattcaaggccaatttgaaggctctaaaacaatggaamagtgctacayagatgtgacwgaatttrccattccagyaagtactcaaaagctttacttaycaccagttttagatggytttaayagygaaattatygcytwtaatctttcwwsttcrccyaayttagaacaagtacaaacaatgttggaacagkcattcamagagaagyactacgagaatacgattctcyatagtgaccaaggctggcaataycracacgattcttatcatcrgttyctwgagrgtaagggaattcaagcatcyatktcacgyaarggwaacagccmagacaayrgtatgatggagtcyttctttggsattytgaaatcggaratgttttayggytatgagaarwcrtyymartcryttaakcratksgaacaagcyattrtagactatattgattaytacaacaayaarmgaattaaggtaaaactaaaaggacttakycytgtgcartacagaactaaatcyttyggataactaat

SEQ ID NO: 7814 - DNA, 164 bp, Streptococcus pneumoniae
  misc_feature (1)..(164): tiling:Spneumo1:WAN024BGX; Cluster includes WAN0244KC spr0 326||15902370|NP_357920.1|324751..324909|+|159 bp|Hypothet ical protein|S.pneumoniae|R6|NC_003098.1|ORF|111
atgagyttrttggaarcagctaaacgtcatcaaytaaatagygagaaatatctatyctatcttcyagaatgtcttycaaacgaggaaactctcgtaaacaaagaggttttagaggyytatttaycrtggactaaagttgtacaagaaaartgyaaataactaat

SEQ ID NO: 7815 - DNA, 348 bp, Streptococcus pneumoniae
  misc_feature (1)..(348): tiling:Spneumo1:WAN024AVO; Cluster includes WAN02449F spr0 719|transposase E|15902763|NP_358313.1|721347..721526|-|18 0 bp|Transposase|S.pneumoniae|R6|NC_003098.1|ORF|211
atgatrattcwactaagtgatttaggtcaagttcacmttgtttgtrgcaagayagatatgaggcagggaatagactcattagcctatgtagttaaaacccactttgaattggatyctttctccggtcaagtctttctcttttgtggtgracgtaaakaccgctttaaagycctytactgggatggtcaaggattttggctactatataaacgctttgagaacggmaractgacttggcymagtacagaaaargatgtcaaagctctcrcayctgaacaagtagahtrrctwatgaagggcttttctatcactccmmaaataaawmmakcagaaagtcgtgatttctat

SEQ ID NO: 7816 - DNA, 737 bp, Streptococcus pneumoniae
  misc_feature (1)..(737): tiling:Spneumo1:WAN024BIK; Cluster includes WAN0242ZK SP03 47||15900276|NP_344880.1|321523..322254|+|732 bp|capsular polysaccharide biosynthesis protein Cps4B|S.pneumoniae|TIG R4|NC_003028.1|ORF|011
atgatwgayrtycattcrcayatcgtytttgatgtaratgayggyccmaartcaagrgaggaaagcaagrctctyttgryaraakcctayagrcargggrtrmgaayyattgtytctacctctcaccgtcgyaargghatgtttgaractccggaagagaagatakmmraaarctttcttcagrttcgggaaatwgcwaargaagtrssragtgayttrrtcatyscttayggvgcwgaratwtaytayacwyyrgatgytytrgawaarctrgraaaaaadsdrattcckaccctyaatratagtcgttatgcyttratwgarttyagyatgmayacyyyytatcgygakatycatavygccttgaryaarathttgatgtyrggarttactccagtyatygcccayatygarcgctatgmtgcwcttgraaataaygaaaaacghgttcgdgarytratyratakgggctgttacacgcaagtaaatagttyacatgtcctcaaaycmaaactttttggmgaacstkwtaaattcatgaaaaaaagagykcagtatttyttrgagmrdrmyytggtyyatrysattgcaagtgayatgcayaatbtrgacrgyagacctccyyayatgkymgaagcwtatrrchtwgttdccmaaaartacggrgaagmgaagkckcaggaaytytttrwagahaatccymgamraattrtaatgratcaaytaatttarctaat

SEQ ID NO: 7817 - DNA, 204 bp, Streptococcus pneumoniae
  misc_feature (1)..(204): tiling:Spneumo1:WAN024AZP; Cluster includes WAN0243M0 spr1 563|IS1239-truncation|15903606|NP_359156.1|1543913..154411 6|+|204 bp|Degenerate transposase|S.pneumoniae|R6|NC_00309 8.1|ORF|100
atgcacatcactataggatctaatgaaaatcacaacagrctcattcatagatrgttacctcaggraactaagaaaaygactacaaaggaagtcgcattyatcgaaaagtggattaacaactatcctaaaaaatgcttgaactacaagtcccccagagaagacttctggatgactaacttgaacttgaaatttagcaataattaa

SEQ ID NO: 7818 - DNA, 519 bp, Streptococcus pneumoniae
  misc_feature (1)..(519): tiling:Spneumo1:WAN024B5G; Cluster includes WAN023IJ0 8621 7_2971||||1683368..1683886|+|519 bp|EGAD orf prediction|S. pneumoniae|TIGR4|WAN01UC25|ORF|012
atggaacaattacattttatcacaaaactgctcgatattaaagacccaaacatcaagattctagayatcatcaatatggatacccacaaagaaattatcgctaagctggattatgaggctccatcttgccctgattgtggaagtctaatgaagaaatatgactttcaaaaaccgtctaagatccctyacctcgaaacaactggtatgcctwctagaattctccttagaaarcgycgtttcaagtgctatcaytgttcwaaaatgatggtygctgamacttctatcgtcaagaagaatcatcaaattcctcgtattatcaaccaaaaaattgcgcaaaagttgattgagaagatttctatgaccgatattkctcatcagctggccatttcaacttcaactgtcattcgmwarctcaatgattctcactttgagcatgatttttcgcgtcttcctgagattatgtcctgggacgttgaaacagtccggggagtgactgtttcaatcgggagatggagatga

SEQ ID NO: 7819 - DNA, 519 bp, Streptococcus pneumoniae
  misc_feature (1)..(519): tiling:Spneumo1:WAN024B5I; Cluster includes WAN0244S8 spr0 042|IS1167|15902086|NP_357636.1|40982..41500|-|519 bp|Tran sposase (orf1)|S.pneumoniae|R6|NC_003098.1|ORF|203
atggaacaattacattttatcacaaaattactagacattaaagacmctaatatccagattttagacatcatcaataaggatacacacaaggaaatcatcgccaaactggactaygamgcyccatcttgycctgagtgcggaarycaawtgaagaaatatgactttcaaaaaccttctaaaattccttatcttgaaacgaytggtatgcctwctagaattctccttagaaarcgycgwttcaagtgctatcactgttcaaaaatgatggtygctgaractycymtvgtmaagaaraatcaccaaatccctcgtatcatcaaccaaaarattgctcaaaagttaattgaaaagawttctatgacygatattgcccatcagctkkycatytcaacttcaactgtyattcghaagctcaatgattytcactttrarcatgatttttckygtcttcctgagattatgtcytgggasgttraaacagtccgggkagtgactgtttcaatcgggagatggagatga

SEQ ID NO: 7820 - DNA, 783 bp, Streptococcus pneumoniae
  misc_feature (1)..(783): tiling:Spneumo1:WAN024B5L; Cluster includes WAN0243I7 spr1 701|IS1167-truncation|15903743|NP_359293.1|1671111..167189 3|+|783 bp|Degenerate transposase (orf1)|S.pneumoniae|R6|N C_003098.1|ORF|414
atggaacaattacattttatcacaaaaytrctmgayatyaaagacmcwaayatcmaratthtagayrtcrtcaatadggatwcmcacaargaaatyatcgcyaarctggaytaygasgcyccatcttgccctgagtgcggaaaccaattraagaaatatgactttcaaaaaccktctaarattccttaycttgaracractggtatgcctactagaattctccttagaaagcgtcgwttcaagtgctatcactgttcaaaaatgatggtygctgaractycymtsgtmaagaaraatcaccaaatccctcgtatcatcaaccaaaagattgctcaaaagttrattgaaaagatttctatgactgatattgcccatcagctttccatytcaacttcaactgttattcgtaagctcaatgattttcactttaaacatgatttttckygtcttcctgagattatgtcttgggatgagtatgcttttacaaakggaaagatgagcttyattgcgcaagattttracaakctcaatatcatcactgttcttgarggwagaamacaagctrtcatycgaratcactttcttmrmtaygatagagyygtccgatgtcgcgtcaaaatyattackatggatatgtttagyccttactatgryttrgctaaacagcttcgctttcaaattyctaggctcaggctgaaacagtctcccagactgtttcactcccgaatgctaaaatcgttcttgatcgctttcayattgtrcaacatcttagccgtgcyatga

SEQ ID NO: 7821 - DNA, 174 bp, Streptococcus pneumoniae
  misc_feature (1)..(174): tiling:Spneumo1:WAN024B2E; Cluster includes WAN02448I spr0 752|IS861-truncation|15902796|NP_358346.1|748068..748235|+ |168 bp|Degenerate transposase (orf1)|S.pneumoniae|R6|NC_0 03098.1|ORF|102
atgrgacgtaakccmaaaamgakacctgaagagagracagaattagaacrtcttcaagcagaaaatgagtacctgagagcggagaakgcyatcctaaaaaagttaagagaactccgatkgaaggaggaaaaagagaaagaagaaagacagaaattrttyaagaatctaactaat

SEQ ID NO: 7822 - DNA, 952 bp, Streptococcus pneumoniae
  misc_feature (1)..(952): tiling:Spneumo1:WAN024AWL; Cluster includes WAN0240OV |sul A||CAB37950.1|||951 bp|sulfonamide resistance protein|S.pn eumoniae||AJ132957|ORF|000
atgtcaagtaaagccaatcatgcaaagacagttatttgcggaattatcaatgtaaccccagactccttttcggayggtggtcaattttttgctcttgagcaggcactycagcaggctcgtaaattgatagcagaaggrgctagtatgctmgatatcggcggagaatcgactcgsccgcggcmgtrgmagyagctatgttgagatagaagaggaaatccagcgtgttgttccagtgatyaaagcgattcgcaaggaaagtgatgtcctcatytctattgatacttggaaragtcargtagcagargctgctttggctgctggtgccaatctagtcaatgatatcactggtytcatgggtgatgaaaaaatggcccatgtggtwgcaaakgytggagcgaaagtagtcattatgtttaatccagtcatggcgcgacctcagcaycctagctcgctcatattycctcattttggttttggwcaagcttttacagaggaagarttagctgactttgaaamattgccaatcgamgamttgatggaggctttytttgaacgagcactagcgagagcagcagaagctggkattgcaccagaaaatatcctgytggatcyaggaattggmtttggtctgaccaagaaagaaaatctgcttcttttacgggacctggataaactacatcagaagggctatccaatctttctyggagtgtcgcgcaagcggtttgtcatcaatatccttgaagaaartggttttgaagtcaatcctgagacrgarcttggtttccgcaatcgagatacggcttcggctcatgtaacyagtatcgctgcragacarggtgtrgaagtggtgcgcgtgcatgatgtagctagtcacaggatggcagttgaaattgcctctgccattcgtctggctgatgaagcggaaaatttagatttaaaacaatataaataa

SEQ ID NO: 7823 - DNA, 500 bp, Streptococcus pneumoniae
  misc_feature (1)..(500): tiling:Spneumo1:WAN024DSK; Cluster includes WAN0240I2-con |pspC||AAD00184.1|||2790 bp|surface protein C|S.pneumoniae ||U72655|ORF|000
atgtttgcatcaaaaagcgaaagaaaagtacattattcaattcgtaaatttagtrttggagtagctagtgtagywgttgccagcttgttcttaggaggagtagtccatgcagaaggggttagaagtgggaataacyycacggttacatctagtgggcaagatatatcgaagaagtatgctgatgaagtcgagtcgcatctasaaagtatattgaaggatgtcaawaaaaatttgaaaaaagttcaacatacccaaaatgycgrcttmawyamaaagttgagcraaattaaammgaagtatttgtatgamttaaawgttaawgwkwwrtcggaagctgagttgacgtcaaaaacmaaagaaacaaaagaaragttaaccgcarcttttgagcagtttaaaaaagatacattaycaacagaaccagaaaaaaaggtagcagaagctmagaagaaggttgaagaagctaagaaaaaagccgaggatcaaaaagaaaaagatcg

SEQ ID NO: 7824 - DNA, 600 bp, Streptococcus pneumoniae
  misc_feature (1)..(600): tiling:Spneumo1:WAN024DSS; Cluster includes WAN0240VD-con |cbpA||AAK72975.1|||321 bp|choline-binding protein A CbpA| S.pneumoniae||AF395593|ORF|000
atgtttgcatcaaaaarcgaaagaaaagtacattattcaattcgtaaatttagtattggagtagctagtgtagywgttgccagtcttkttatgggaagtgtggttcatgcgacagagaasraggkaastacccaagyasccacttcttytaatadggcaaatraaagtcagrcagrayatakgaragctgctraacaaktcgatgaatatataamaamaawgmtccaattagatagaagaraacatayccaaaatktcgscttamwcayaaagttgrgcrkaattaaaacggagtatttgcrtrrattaartgtttyaraaragaagtcgraagctgagttgccgtcagaaryaaaarmaragwtagacgcagcttttgagcwgtttaaaaaagatacattaccaacagaaccargaaaaamggtagcagaagctgagaagaaggttgaagaagctaagaaaaaagccraggmtcaaaaagaaraagatcdycgtaactacccaaccawtacttacaaaacgcttgaacttgaaattgctgagtccgatgtggaagttaaaaaagcggagcttgaactagtaaaagaggaagctaaggga

SEQ ID NO: 7825 - DNA, 500 bp, Streptococcus pneumoniae
  misc_feature (1)..(500): tiling:Spneumo1:WAN024DSE; Cluster includes WAN0240ZL-con |pspC||AAF73799.1|||1974 bp|surface protein PspC|S.pneumon iae||AF154030|ORF|000
atgtttgcatcaaaaarcgaaagaaaagtacattattcaattcgtaaatttagtrttggagtagctagtgtagctgttgcyagyttgttcttaggaggagtagcccatgcagaaggggttagaattgggaataactccayggttwcatctaktggggatgaagtcgagtcgcatctacaaagtatattgaaggatgtcaataaaaatttgmaaaaagttcaacatacccaaaatgtcggcttactcwcaaagttgagcgaaattaaacggaagtatttgtatgaattaaaagttaatggtttagaagagaagtcgaaagctgagttgacgtcaaaaacaaaaaaagagttaaccgcagcttttgagcagtttaaaaaagatacattatcaacagaactagaaaaaaaggtagcagaagctcagaagaaggttgcagaagctgagaaaaaggccaaggctcaaaaagaagaagatcaccgtaactacccaaccaatactta

SEQ ID NO: 7826 - DNA, 53 bp, Streptococcus pneumoniae
  misc_feature (1)..(53): tiling:Spneumo1:WAN024ADX; Cluster includes WAN024EJ3-rc R 6.IG_861||||827769..827821|-|53 bp|Between spr0825 (+ stra nd) and spr0826 (+ strand)|S.pneumoniae|R6|NC_003098.1|IG- rc|110
attaaatyctctgytttctccccttgtttcttcatattmctaataaattttac

SEQ ID NO: 7827 - DNA, 93 bp, Streptococcus pneumoniae
  misc_feature (1)..(93): tiling:Spneumo1:WAN024AJG; Cluster includes WAN024EM3 R6.I G_624||||612533..612602|+|70 bp|Between spr0600 (+ strand) and spr0601 (+ strand)|S.pneumoniae|R6|NC_003098.1|IG|110
cattttactgtgattatgactaatmkttmrttkwyttaratmrttccccttgtaagaaattacagggggaattttgtttacaaggagtctact

SEQ ID NO: 7828 - DNA, 73 bp, Streptococcus pneumoniae
  misc_feature (1)..(73): tiling:Spneumo1:WAN024AOI; Cluster includes WAN024EOQ-rc R 6.IG_436.2.1.1||||409411..409483|-|73 bp|Between F (transp osase) (- strand) and spr0413 (bacA) (+ strand)|S.pneumoni ae|R6|NC_003098.1|IG-rc|220
cgtctaaggtaacaaggcaaaaarttcgtggataaccmagtagacttgaaatactayatctggagrtactccc

SEQ ID NO: 7829 - DNA, 89 bp, Streptococcus pneumoniae
  misc_feature (1)..(89): tiling:Spneumo1:WAN024A8M; Cluster includes WAN024EGH R6.I G_1067.1.1||||1009804..1009892|+|89 bp|Between spr1028 (ga pN) (+ strand) and spr1029 (glgB) (+ strand)|S.pneumoniae| R6|NC_003098.1|IG|110
cgtgtaaaaycaggaaattgttttcctggttttatttttttgctataaaataataataattatagaaaaaatacgaactttttggtatt

SEQ ID NO: 7830 - DNA, 99 bp, Streptococcus pneumoniae
  misc_feature (1)..(99): tiling:Spneumo1:WAN024AKC; Cluster includes WAN024EMI-rc R 6.IG_584.2.1||||562187..562285|-|99 bp|Between spr0560 (+ strand) and spr0561 (prtA) (+ strand)|S.pneumoniae|R6|NC_0 03098.1|IG-rc|110
ctataaaaacagtatatcatttaaaaaaatttaagtcaaaaaaattaacatkmrttaatttattttttagcacacrttaaaaaataagattagtactca

SEQ ID NO: 7831 - DNA, 51 bp, Streptococcus pneumoniae
  misc_feature (1)..(51): tiling:Spneumo1:WAN024ADV; Cluster includes WAN024EJ2-rc R 6.IG_862||||828494..828544|-|51 bp|Between spr0826 (+ stra nd) and spr0827 (- strand)|S.pneumoniae|R6|NC_003098.1|IG- rc|110
ctatttgtgaaaaaagaaaatgccggaaarttccgacattwttttagtaag

SEQ ID NO: 7832 - DNA, 51 bp, Streptococcus pneumoniae
  misc_feature (1)..(51): tiling:Spneumo1:WAN024ADW; Cluster includes WAN024EJ2 R6.I G_862||||828494..828544|+|51 bp|Between spr0826 (+ strand) and spr0827 (- strand)|S.pneumoniae|R6|NC_003098.1|IG|110
cttactaaaawaatgtcggaaytttccggcattttcttttttcacaaatag

SEQ ID NO: 7833 - DNA, 79 bp, Streptococcus pneumoniae
  misc_feature (1)..(79): tiling:Spneumo1:WAN0249UY; Cluster includes WAN024E9K-rc R 6.IG_1604||||1538792..1538870|-|79 bp|Between spr1557 (- s trand) and spr1558 (+ strand)|S.pneumoniae|R6|NC_003098.1| IG-rc|110
cttrgtctcctttctyttaccytkttgtcttaattaaataatacaacaaaacaaaaaacttgtcaagcaaaaagaagaa

SEQ ID NO: 7834 - DNA, 97 bp, Streptococcus pneumoniae
  misc_feature (1)..(97): tiling:Spneumo1:WAN024AN4; Cluster includes WAN0247Q1-rc R 6.IG_78.2||||64684..64780|-|97 bp|Between spr0057 (strH) ( - strand) and spr0058 (- strand)|S.pneumoniae|R6|NC_003098 .1|IG-rc|110
gaagaaarcctgagcctaatcgctygggctttttctatgcttattatacyacaccaaaaaggtagcgcttacctatttttggaarattctataattt

SEQ ID NO: 7835 - DNA, 65 bp, Streptococcus pneumoniae
  misc_feature (1)..(65): tiling:Spneumo1:WAN0249LO; Cluster includes WAN024E7H-rc R 6.IG_1836.2||||1702338..1702402|-|65 bp|Between spr1721 (+ strand) and spr1722 (groEL) (- strand)|S.pneumoniae|R6|NC _003098.1|IG-rc|110
gctttctatagaaaacaacttataaaaaacacaaaaggagggaatgactaacccttctttttata

SEQ ID NO: 7836 - DNA, 56 bp, Streptococcus pneumoniae
  misc_feature (1)..(56): tiling:Spneumo1:WAN024A43; Cluster includes WAN024EDL R6.I G_1306.1.2||||1259892..1259947|+|56 bp|Between spr1262 (- strand) and spr1263 (- strand)|S.pneumoniae|R6|NC_003098.1 |IG|110
ggatttttagaaaaaaagcctattttttcaagaaaaataggctktttgcgaacgat

SEQ ID NO: 7837 - DNA, 73 bp, Streptococcus pneumoniae
  misc_feature (1)..(73): tiling:Spneumo1:WAN024AOJ; Cluster includes WAN024EOQ R6.I G_436.2.1.1||||409411..409483|+|73 bp|Between F (transposa se) (- strand) and spr0413 (bacA) (+ strand)|S.pneumoniae| R6|NC_003098.1|IG|220
gggagtayctccagatrtagtatttcaagtctactkggttatccacgaaytttttgccttgttaccttagacg

SEQ ID NO: 7838 - DNA, 72 bp, Streptococcus pneumoniae
  misc_feature (1)..(72): tiling:Spneumo1:WAN024FAF; Cluster includes WAN023I0I tRNA -Glu|tRNA-Glu|||14827..14898|+|72 bp|tRNA-Glu|S.pneumoniae |R6|NC_003098.1|RNA|550
ggtccgttggtcaaggggttaagacaccgccttttcacggcggtaacacgggttcgaatcccgtacggacta

SEQ ID NO: 7839 - DNA, 53 bp, Streptococcus pneumoniae
  misc_feature (1)..(53): tiling:Spneumo1:WAN0249YF; Cluster includes WAN024EBP R6.I G_1435||||1372461..1372513|+|53 bp|Between spr1391 (- stra nd) and spr1392 (- strand)|S.pneumoniae|R6|NC_003098.1|IG| 110
ggtcctattatagcaaattyatattaacattacaaaaaatataaaactctaaa

SEQ ID NO: 7840 - DNA, 486 bp, Streptococcus pneumoniae
  misc_feature (1)..(486): tiling:Spneumo1:WAN024AU2; Cluster includes WAN024135 |xpt ||CAD19632.1|||486 bp|xanthine phosphoribosyltransferase|S .pneumoniae||AJ422284|ORF|000
ggtgacaacattctcaaggtagattcctttttaacccaccaagttgactttagcttgatgcgagagattggtaaggtttttgcggaaaaatttgcttctgctggcattaccaaggtcgtraccattgaagcrtcrggyattgccccagccctttttacagctgaagccttaaacgttcccatgattttcgctaaaaaagctaaaaacatcactatgaacgaaggwatcttaacygcygaagtttactcctttaccaagcargtraccagcaccgtttctatcgctggaaaattcctctcaccagaggacaaggtmttgattatcgacgayttccttgctaacggccaagctgcyaaaggcttgattcaaatcatcgaacargctggwgcmacagtygaagctatcggtatcgtgattgaaaaatcyttccaagatggccgtgatttgcttgaaaaagcaggytayccygtcctrtcacttgctcgt

SEQ ID NO: 7841 - DNA, 51 bp, Streptococcus pneumoniae
  misc_feature (1)..(51): tiling:Spneumo1:WAN024AE8; Cluster includes WAN024EJA R6.I G_846.1||||812648..812698|+|51 bp|Between spr0810 (+ stran d) and spr0811 (- strand)|S.pneumoniae|R6|NC_003098.1|IG|1 10
ggttytacaraagatttggaatamgcaaaaagctttaaatcaatagtctaa

SEQ ID NO: 7842 - DNA, 209 bp, Streptococcus pneumoniae
  misc_feature (1)..(209): tiling:Spneumo1:WAN0249RJ; Cluster includes WAN024ELJ-rc R 6.IG_661||||644843..645050|-|208 bp|Between spr0637 (thiE) (+ strand) and spr0638 (thiD) (- strand)|S.pneumoniae|R6| NC_003098.1|IG-rc|110
graaaaaaactctctagttcccactttaagggaattagagagtttttatactcttcgaaaatctcttcaaactacgtcagcttccatctgcagcctcaaaacactgttttgagctgacttcgtcagtcttatctaaaacctcaaggcagtactttgagcaacctgcgactagctttctagtttactctttgattttcattgagtattaa

SEQ ID NO: 7843 - DNA, 53 bp, Streptococcus pneumoniae
  misc_feature (1)..(53): tiling:Spneumo1:WAN024ADY; Cluster includes WAN024EJ3 R6.I G_861||||827769..827821|+|53 bp|Between spr0825 (+ strand) and spr0826 (+ strand)|S.pneumoniae|R6|NC_003098.1|IG|110
gtaaaatttattagkaatatgaagaaacaaggggagaaarcagagratttaat

SEQ ID NO: 7844 - DNA, 63 bp, Streptococcus pneumoniae
  misc_feature (1)..(63): tiling:Spneumo1:WAN024ANQ; Cluster includes WAN0247R0 R6.I G_77||||60474..60527|+|54 bp|Between spr0056 (purB) (+ str and) and spr0057 (strH) (- strand)|S.pneumoniae|R6|NC_0030 98.1|IG|220
gtcttttcgwtaaaaaataaacagcgagmttsaakctcgctgtttattttttawcgaaaagac

SEQ ID NO: 7845 - DNA, 366 bp, Streptococcus pneumoniae
  misc_feature (1)..(366): tiling:Spneumo1:WAN024B58; Cluster includes WAN023LJ5 3156 01_1807b||||971788..972153|+|366 bp|EGAD orf prediction|S. pneumoniae|R6|NC_003098.1|ORF|110
gtgaaacagtctgggagactgtttcagcctgagcctagaaatttgaaagcgaagctgtttagccaagtcatagtaagggctaaacatatccatcgtaatgattttcacttgacaacgaacggctctatcgtagcgaagaaagtgatytcggatgacagcttgtgttctrccytcaagaacagtgatratatyragmttktyaaaatcttgcgcaatraagctcatctccatctcccgattgaaacagtcactccccggactgtttcaacgtcccaagacataatctyaggcagatttctaaaattacactcaaagtggaagtcattgagctttcgaatgacagttgaagttgaaatggccagctga

SEQ ID NO: 7846 - DNA, 206 bp, Streptococcus pneumoniae
  misc_feature (1)..(206): tiling:Spneumo1:WAN024ANZ; Cluster includes WAN024EOE R6.I G_449||||425352..425478|+|127 bp|Between spr0425 (+ strand ) and spr0426 (trkH) (- strand)|S.pneumoniae|R6|NC_003098. 1|IG|220
taagtttttccatcttttatttgagtaargaytttgyttacagayaggcttggatttaaaaacgttccccctttttttaatayaagaatccctctttytacaattgtraaaagagggattcttrtattaaaaaaagggggaacgtttttaaatccaagcctrtctgtaarcaaartcyttactcaaataaaagatggaaaaactta

SEQ ID NO: 7847 - DNA, 53 bp, Streptococcus pneumoniae
  misc_feature (1)..(53): tiling:Spneumo1:WAN0249V2; Cluster includes WAN024E9L-rc R 6.IG_1598.1||||1533597..1533649|-|53 bp|Between spr1551 (- strand) and spr1552 (- strand)|S.pneumoniae|R6|NC_003098. 1|IG-rc|110
taataacatttaatagaacgaaactaaagaaaayaatttaaaagaggaggttt

SEQ ID NO: 7848 - DNA, 50 bp, Streptococcus pneumoniae
  misc_feature (1)..(50): tiling:Spneumo1:WAN0249WH; Cluster includes WAN024EAE R6.I G_1546||||1479143..1479192|+|50 bp|Between spr1499 (gpmA) (- strand) and spr1500 (- strand)|S.pneumoniae|R6|NC_00309 8.1|IG|110
tagatggattctcctttaaattttccgaggtttcccctcgtttatctatt

SEQ ID NO: 7849 - DNA, 65 bp, Streptococcus pneumoniae
  misc_feature (1)..(65): tiling:Spneumo1:WAN0249LP; Cluster includes WAN024E7H R6.I G_1836.2||||1702338..1702402|+|65 bp|Between spr1721 (+ st rand) and spr1722 (groEL) (- strand)|S.pneumoniae|R6|NC_00 3098.1|IG|110
tataaaaagaagggttagtcattccctccttttgtgttttttataagttgttttctatagaaagc

SEQ ID NO: 7850 - DNA, 79 bp, Streptococcus pneumoniae
  misc_feature (1)..(79): tiling:Spneumo1:WAN024AR9; Cluster includes WAN024EQA R6.I G_302||||279617..279695|+|79 bp|Between spr0281 (+ strand) and spr0282 (+ strand)|S.pneumoniae|R6|NC_003098.1|IG|110
tcctgatctagtatmatttgtatttgaaactagtcttyaraaagtaaaaattattatgttttattaaggaggtctattt

SEQ ID NO: 7851 - DNA, 50 bp, Streptococcus pneumoniae
  misc_feature (1)..(50): tiling:Spneumo1:WAN0249WD; Cluster includes WAN024EAC R6.I G_1549.2||||1483351..1483400|+|50 bp|Between spr1502 (ileS ) (- strand) and spr1503 (- strand)|S.pneumoniae|R6|NC_003 098.1|IG|110
tctttctccctcttatcccgtaacgtgggraacgtcaaatcttactagmt

SEQ ID NO: 7852 - DNA, 99 bp, Streptococcus pneumoniae
  misc_feature (1)..(99): tiling:Spneumo1:WAN024AKD; Cluster includes WAN024EMI R6.I G_584.2.1||||562187..562285|+|99 bp|Between spr0560 (+ str and) and spr0561 (prtA) (+ strand)|S.pneumoniae|R6|NC_0030 98.1|IG|110
tgagtactaatcttattttttaaygtgtgctaaaaaataaattaaykmatgttaatttttttgacttaaatttttttaaatgatatactgtttttatag

SEQ ID NO: 7853 - DNA, 82 bp, Streptococcus pneumoniae
  misc_feature (1)..(82): tiling:Spneumo1:WAN0249G5; Cluster includes WAN024E4H R6.I G_2157||||1932656..1932726|+|71 bp|Between spr1950 (- stra nd) and spr1951 (- strand)|S.pneumoniae|R6|NC_003098.1|IG| 110
tgtttttaccawaaaaggggcgaatcagcagttagtycttactttttcgcccctcctttcttttgatgtttactttttgaaa

SEQ ID NO: 7854 - DNA, 51 bp, Streptococcus pneumoniae
  misc_feature (1)..(51): tiling:Spneumo1:WAN024AE7; Cluster includes WAN024EJA-rc R 6.IG_846.1||||812648..812698|-|51 bp|Between spr0810 (+ st rand) and spr0811 (- strand)|S.pneumoniae|R6|NC_003098.1|I G-rc|110
ttagactattgatttaaagctttttgcktattccaaatcttytgtaraacc

SEQ ID NO: 7855 - DNA, 86 bp, Streptococcus pneumoniae
  misc_feature (1)..(86): tiling:Spneumo1:WAN024AQP; Cluster includes WAN024EPX R6.I G_327.2||||305971..306051|+|81 bp|Between spr0306 (+ stran d) and spr0307 (clpL) (+ strand)|S.pneumoniae|R6|NC_003098 .1|IG|110
ttagctagtctaaattttttaaarmaawggtcaaagatagtcaatatcagtaatmataactaagtaaacaaaaagaggtaaagaat

SEQ ID NO: 7856 - DNA, 79 bp, Streptococcus pneumoniae
  misc_feature (1)..(79): tiling:Spneumo1:WAN0249UZ; Cluster includes WAN024E9K R6.I G_1604||||1538792..1538870|+|79 bp|Between spr1557 (- stra nd) and spr1558 (+ strand)|S.pneumoniae|R6|NC_003098.1|IG| 110
ttcttctttttgcttgacaagttttttgttttgttgtattatttaattaagacaamarggtaaragaaaggagacyaag

SEQ ID NO: 7857 - DNA, 126 bp, Streptococcus pneumoniae
  misc_feature (1)..(126): tiling:Spneumo1:WAN024BGN; Cluster includes WAN023PS3 pne1 5_20||||16108..16224|-|117 bp|Type 9N capsule operon, Glim mer 2.02 orf prediction|S.pneumoniae||WAN01UCJT|ORF|000
ttgatttttacttccgtcgcatcaatcattaccgtgtcytcagaactgagaggagttcttgaaatcgtaacaccacctttgaacaagagttacttcaacccattrgctccgacggakctaactaat

SEQ ID NO: 7858 - DNA, 114 bp, Streptococcus pneumoniae
  misc_feature (1)..(114): tiling:Spneumo1:WAN024BDO; Cluster includes WAN023S5Y cont ig_454_1||||280..390|+|111 bp|Glimmer 2.02 orf prediction| S.pneumoniae|670|WAN01UD36|ORF|000
ttgccgtgcgtatggttactgacttcgtcagttctatccacaacctcaaaacagtgttttgagcaacctgmggctagtttcctagtttgctctttgrttttcattgagtayaac

SEQ ID NO: 7859 - DNA, 139 bp, Streptococcus pneumoniae
  misc_feature (1)..(139): tiling:Spneumo1:WAN024BEP; Cluster includes WAN023VKZ AX57 1760.1_51||||37935..38075|+|141 bp|Glimmer 2.02 orf predic tion|S.pneumoniae||AX571760.1|ORF|000
ttgccgtgcgtatggttactgacttcgtcagttctatccacaacctcaaaacagtgttttgagctgactwcrtcagttcyatctrcaacctcaaaacagtgttttgagcaacctgcggctagtttcctagtttgctctt

SEQ ID NO: 7860 - DNA, 234 bp, Streptococcus pneumoniae
  misc_feature (1)..(234): tiling:Spneumo1:WAN024AZY; Cluster includes WAN023JTP 8340 6_881||||504956..505183|+|228 bp|EGAD orf prediction|S.pne umoniae|TIGR4|WAN01UC25|ORF|010
ttgcgagagagactattgactcagcccttacttcatgcggatgaaacttcttatcgggttctagagagtcatagccatctgacctactattggacctttttgtctgggaaagttgagaatcaagcaatcacgctgtaccatcatgatcagagtcggagtggttcggtagtacaagaattcctaggagattattctggctatgttcattgtgatatgttgcggcagctaactaat

SEQ ID NO: 7861 - DNA, 111 bp, Streptococcus pneumoniae
  misc_feature (1)..(111): tiling:Spneumo1:WAN024BGO; Cluster includes WAN023PL1 pne2 9_23||||17871..17981|+|111 bp|Type 15A capsule operon, Gli mmer 2.02 orf prediction|S.pneumoniae||WAN01UCIP|ORF|001
ttggcaaagatgttctcaaccwtgcttctctccktrgatagygcatggttacaggctttatcttcarctgttagcggcttgagttygctggatttacgtggagtttgtgct

SEQ ID NO: 7862 - DNA, 102 bp, Streptococcus pneumoniae
  misc_feature (1)..(102): tiling:Spneumo1:WAN024DRA; Cluster includes WAN023SMD NC_0 03098.1_350||||272089..272190|-|102 bp|Glimmer 2.02 orf pr ediction|S.pneumoniae|R6|NC_003098.1|ORF|101
ttgggaatttacctattaacttcggtagatttttgggaatttttttccttctttttccytgtagttaaaatccttttcaaaaaatcaccttttcttgatttt

SEQ ID NO: 7863 - DNA, 78 bp, Streptococcus pneumoniae
  misc_feature (1)..(78): tiling:Spneumo1:WAN024FMB; Cluster includes WAN023P1P pne6 1_5||||1441..1518|+|78 bp|Type 33B capsule operon, Glimmer 2.02 orf prediction|S.pneumoniae||WAN01UCGA|ORF|000
ttggttcgcgggaagtctactaagatacttaaagatgcagatagtggaaataaaggtgtagacattaccgtaaaaaag

SEQ ID NO: 7864 - DNA, 364 bp, Streptococcus pneumoniae
  misc_feature (1)..(364): tiling:Spneumo1:WAN024B85; Cluster includes WAN0244SY spr0 016|transposase B|15902060|NP_357610.1|20733..21071|+|339 bp|Transposase|S.pneumoniae|R6|NC_003098.1|ORF|990
ttggttgcaggtctaayvaatggtgarttaatcgytccaatracttacgaagagaygrtgacgagcgacttttttgaagywtggtttcaraadtttytcttaccaacattaamcacaccatcggttrttattatgkahaatryaagattccatagaatgggkaagytagarctyttrtgyrarragtttrgkyrtraacttttacmtcttcytycctactcryctgagtacaatcytattgagaaaacatgggcyyatatcaaaaagmammtcrararggtattaccaarttgcmatacyttttayraggctbttttvtcytkytcttgtttcratydamtrtrtyatcagmktaatagtctaa

SEQ ID NO: 7865 - DNA, 51 bp, Streptococcus pneumoniae
  misc_feature (1)..(51): tiling:Spneumo1:WAN024AKA; Cluster includes WAN024EMH-rc R 6.IG_584.2.2||||562367..562417|-|51 bp|Between spr0560 (+ strand) and spr0561 (prtA) (+ strand)|S.pneumoniae|R6|NC_0 03098.1|IG-rc|110
tttaattccttacatatttatwtaacttccaatagataataaactttaact

SEQ ID NO: 7866 - DNA, 53 bp, Streptococcus pneumoniae
  misc_feature (1)..(53): tiling:Spneumo1:WAN0249YE; Cluster includes WAN024EBP-rc R 6.IG_1435||||1372461..1372513|-|53 bp|Between spr1391 (- s trand) and spr1392 (- strand)|S.pneumoniae|R6|NC_003098.1| IG-rc|110
tttagagttttatattttttgtaatgttaatatraatttgctataataggacc

SEQ ID NO: 7867 - DNA, 82 bp, Streptococcus pneumoniae
  misc_feature (1)..(82): tiling:Spneumo1:WAN0249G4; Cluster includes WAN024E4H-rc R 6.IG_2157||||1932656..1932726|-|71 bp|Between spr1950 (- s trand) and spr1951 (- strand)|S.pneumoniae|R6|NC_003098.1| IG-rc|110
tttcaaaaagtaaacatcaaaagaaaggaggggcgaaaaagtaagractaactgctgattcgccccttttwtggtaaaaaca

SEQ ID NO: 7868 - DNA, 72 bp, Streptococcus pneumoniae
  misc_feature (1)..(72): tiling:Spneumo1:WAN024A89; Cluster includes WAN024EG9 R6.I G_1085||||1041149..1041220|+|72 bp|Between spr1046 (xerC) (+ strand) and spr1047 (lplA) (- strand)|S.pneumoniae|R6|N C_003098.1|IG|110
ttttrcgtattttaaattatgtaaataaatatcaaaaaaagaagttggttagttggccaacttctttttgat

SEQ ID NO: 7869 - DNA, 73 bp, Streptococcus pneumoniae
  misc_feature (1)..(73): tiling:Spneumo1:WAN024A6M; Cluster includes WAN024EFE-rc R 6.IG_1153||||1115367..1115439|-|73 bp|Between spr1115 (- s trand) and spr1116 (- strand)|S.pneumoniae|R6|NC_003098.1| IG-rc|110
tttywmaaaagtaaaagmtaatatctctggtasyaagtctgaaaatttaataaattagaaagcgagtaaattt

SEQ ID NO: 7870 - DNA, 126 bp, Streptococcus pneumoniae
  misc_feature (1)..(126): tiling:Spneumo1:WAN024AX2; Cluster includes WAN023SID NC_0 03098.1_2027||||1577316..1577441|-|126 bp|Glimmer 2.02 orf prediction|S.pneumoniae|R6|NC_003098.1|ORF|100
ytgcgtcayaagatgattgcgcatgcaataattatactacttttcaagaatrctggcaagctctgttttttagtggttttmttttttactgtctatatttttggtaaaaatcaacttttacttgga

SEQ ID NO: 7871 - DNA, 63 bp, Streptococcus pneumoniae
  misc_feature (1)..(63): tiling:Spneumo1:WAN02496E; WAN024B0R-rc   TIGR4.IG_1107.2| |||1119688..1119750|-|63 bp|Between SP1180 (+ strand) and SP1181 (- strand)|S.pneumoniae|TIGR4|NC_003028.1|IG-rc
aacaaaaacaaaaatatcgaggtttattttcaaaactttcgatatttttattaagttattatt

SEQ ID NO: 7872 - DNA, 63 bp, Streptococcus pneumoniae
  misc_feature (1)..(63): tiling:Spneumo1:WAN02498S; WAN024B0R   TIGR4.IG_1107.2|||| 1119688..1119750|+|63 bp|Between SP1180 (+ strand) and SP1 181 (- strand)|S.pneumoniae|TIGR4|NC_003028.1|IG
aataataacttaataaaaatatcgaaagttttgaaaataaacctcgatatttttgtttttgtt

SEQ ID NO: 7873 - DNA, 51 bp, Streptococcus pneumoniae
  misc_feature (1)..(51): tiling:Spneumo1:WAN024968; WAN024A0M-rc   TIGR4.IG_1454.1. 2||||1455085..1455135|-|51 bp|Between SP1547 (- strand) an d SP1548 (- strand)|S.pneumoniae|TIGR4|NC_003028.1|IG-rc
ataaatagaaaaacctcggtcaaaccgaggtttttcaaatgaatttcttgg

SEQ ID NO: 7874 - DNA, 51 bp, Streptococcus pneumoniae
  misc_feature (1)..(51): tiling:Spneumo1:WAN02498K; WAN024A0M   TIGR4.IG_1454.1.2|| ||1455085..1455135|+|51 bp|Between SP1547 (- strand) and S P1548 (- strand)|S.pneumoniae|TIGR4|NC_003028.1|IG
ccaagaaattcatttgaaaaacctcggtttgaccgaggtttttctatttat

SEQ ID NO: 7875 - DNA, 78 bp, Streptococcus pneumoniae
  misc_feature (1)..(78): tiling:Spneumo1:WAN024BJB; WAN023WI0 AX569441.1_1||||100.. 177|+|78 bp|Glimmer 2.02 orf prediction|S.pneumoniae||AX56 9441.1|ORF
ttgccagctgatgaacgactacagaaacgtcaagaacatctccagcccttaatggaagacttctttgctctaactaat

SEQ ID NO: 7876 - DNA, 75 bp, Streptococcus pneumoniae
  misc_feature (1)..(75): tiling:Spneumo1:WAN024BIB; WAN0240DT |cpsB||AAD17983.1|||7 5 bp|capsular polysaccharide B|S.pneumoniae||AF106136|ORF| 000
aaatatggagcgaaaaaagcgaaagaattttttgtagataatcccagaaaaattataatggatcaattaatttag

SEQ ID NO: 7877 - DNA, 75 bp, Streptococcus pneumoniae
  misc_feature (1)..(75): tiling:Spneumo1:WAN024BIA; WAN0240DX |cpsB||AAD17987.1|||7 5 bp|capsular polysaccharide B|S.pneumoniae||AF106138|ORF| 000
aaatatggagcgaaaaaagcgaaagaattttttgtagataatcccaggaaaattataatggatcaattaatttag

SEQ ID NO: 7878 - DNA, 93 bp, Streptococcus pneumoniae
  misc_feature (1)..(93): tiling:Spneumo1:WAN024B9Q; WAN023SSB BD003879.1_8||||2699. .2797|+|99 bp|Glimmer 2.02 orf prediction|S.pneumoniae|ATC C55840|BD003879.1|ORF|000
actacttcgtcagtcttatctacaacctcaaaacagtgttttgagcaacctgcgactagcttcctagtttactctttgattttcattgaatat

SEQ ID NO: 7879 - DNA, 114 bp, Streptococcus pneumoniae
  misc_feature (1)..(114): tiling:Spneumo1:WAN024BB4; WAN023WEV AX569667.1_1||||1..11 4|+|114 bp|Glimmer 2.02 orf prediction|S.pneumoniae||AX569 667.1|ORF|000
atgaaaatcaaagagcaaactagaaaactagtcgcaggttgctcaaagtactgctttgaggttgtagatagaactgacgaagtcagtcacatatataatccaaggctaactaat

SEQ ID NO: 7880 - DNA, 93 bp, Streptococcus pneumoniae
  misc_feature (1)..(93): tiling:Spneumo1:WAN024BCV; WAN023YUD AL449927.1_139||||117 658..117750|-|93 bp|Glimmer 2.02 orf prediction|S.pneumoni ae||AL449927.1|ORF|000
atgaaaatcaaagagcaaactaggaagctagccatagatagctcaaaacactgctttgaagagattttcaaagagtacaagaagtttagttat

SEQ ID NO: 7881 - DNA, 102 bp, Streptococcus pneumoniae
  misc_feature (1)..(102): tiling:Spneumo1:WAN024BCY; WAN023WFB AX569635.1_1||||1..10 2|+|102 bp|Glimmer 2.02 orf prediction|S.pneumoniae||AX569 635.1|ORF|000
atgaaaatcaaagagcaaactaggaagctagccatagatagctcaaaacactggtttgaagagattttcaaagagtacaagaagtttagttatctaactaat

SEQ ID NO: 7882 - DNA, 99 bp, Streptococcus pneumoniae
  misc_feature (1)..(99): tiling:Spneumo1:WAN024BG7; WAN023WU0 AX568542.1_1||||1..99 |+|99 bp|Glimmer 2.02 orf prediction|S.pneumoniae||AX56854 2.1|ORF|000
atgaaacatttattggctatgtccaaagatacgatattgatgggaatggctatcaatcattaccgtgtcctcagaactgagaggagttctctaactaat

SEQ ID NO: 7883 - DNA, 105 bp, Streptococcus pneumoniae
  misc_feature (1)..(105): tiling:Spneumo1:WAN024B6S; WAN023VZ6 AX570803.1_1||||1..10 5|+|105 bp|Glimmer 2.02 orf prediction|S.pneumoniae||AX570 803.1|ORF|000
atgaaacgagaacaggacaaattgatcaggacagtcaaatcgatttctaacaatgttttagaagcagaagtgtactattctagtttcaatctactactaactaat

SEQ ID NO: 7884 - DNA, 96 bp, Streptococcus pneumoniae
  misc_feature (1)..(96): tiling:Spneumo1:WAN024B3Q; WAN0242AY SP1303||15901162|NP_3 45766.1|1232165..1232260|-|96 bp|hypothetical protein|S.pn eumoniae|TIGR4|NC_003028.1|ORF|010
atgaaatcaactaaagaagaaatccaaaccatcaaaacacttttaaaagactctcgtacagctaaatattataaacgccttcaaatcgttctatag

SEQ ID NO: 7885 - DNA, 93 bp, Streptococcus pneumoniae
  misc_feature (1)..(93): tiling:Spneumo1:WAN024AYL; WAN023N4N spn154h05_7||||4551.. 4643|+|93 bp|Glimmer 2.02 orf prediction|S.pneumoniae|23F- 1|WAN01UCUQ|ORF|001
atgaagcaacttaaaattctttcagataaatatttagagtccattacaggttctggtgggaacttaggcccaggatttggtgtgataattcca

SEQ ID NO: 7886 - DNA, 102 bp, Streptococcus pneumoniae
  misc_feature (1)..(102): tiling:Spneumo1:WAN024AYM; WAN023WKY AX569221.1_1||||1..10 2|+|102 bp|Glimmer 2.02 orf prediction|S.pneumoniae||AX569 221.1|ORF|000
atgaagcaatttaaaattctttcagataaatatttagagtccattacaggttctgatgggaacttaggcccaggatttggtgtgataattccactaactaat

SEQ ID NO: 7887 - DNA, 96 bp, Streptococcus pneumoniae
  misc_feature (1)..(96): tiling:Spneumo1:WAN024AYK; WAN0242DE SP1211||15901074|NP_3 45678.1|1141694..1141789|-|96 bp|hypothetical protein|S.pn eumoniae|TIGR4|NC_003028.1|ORF|010
atgaagcaatttaaaattctttcagataaatatttagagtccattacaggttctgatgggaacttaggcccaggatttggtgtgataattccatga

SEQ ID NO: 7888 - DNA, 96 bp, Streptococcus pneumoniae
  misc_feature (1)..(96): tiling:Spneumo1:WAN024BD8; WAN0241RY SP2025||15901846|NP_3 46450.1|1930256..1930351|+|96 bp|hypothetical protein|S.pn eumoniae|TIGR4|NC_003028.1|ORF|010
atgagggggctagtcttatctgcaatctcaaatcagtgttttgagctgaatggcactcgttttctagtttgctctttgattttaattgggccttag

SEQ ID NO: 7889 - DNA, 97 bp, Streptococcus pneumoniae
  misc_feature (1)..(97): tiling:Spneumo1:WAN024AWA; WAN0240FU |cps19CA||AAD19921.1| ||97 bp|Cps19CA|S.pneumoniae||AF105115|ORF|000
atgagtagacgttttaaaaaatcaggttcacagaaagtgaagcgaagtgttaatatcgttttgctgactatttatttattgttagtttgttttttat

SEQ ID NO: 7890 - DNA, 99 bp, Streptococcus pneumoniae
  misc_feature (1)..(99): tiling:Spneumo1:WAN024BCG; WAN023S42 contig_360_1||||1063. .1161|+|99 bp|Glimmer 2.02 orf prediction|S.pneumoniae|670 |WAN01UD92|ORF|000
atgatactgactctgtcagttctatccacaacctcaaaacagtgttttgagaaacctgcggctagcttcctagtttgctctttgattttcattgagtat

SEQ ID NO: 7891 - DNA, 90 bp, Streptococcus pneumoniae
  misc_feature (1)..(90): tiling:Spneumo1:WAN024B93; WAN023NDX spn134d07_24||||15444 ..15533|-|90 bp|Glimmer 2.02 orf prediction|S.pneumoniae|2 3F-1|WAN01UCVE|ORF|001
atgcctttgatggagaataatactcttcaaaaatttcttcaaaccacgtcagcgtcggcttgtcgtatctacaacctcaaaacagtgttt

SEQ ID NO: 7892 - DNA, 651 bp, Streptococcus pneumoniae
  misc_feature (1)..(651): tiling:Spneumo1:WAN024AYY; WAN023OQF pne78_2||||271..921|- |651 bp|Type 36(1) capsule operon, Glimmer 2.02 orf predic tion|S.pneumoniae||WAN01UCFT|ORF|000
atggaggacgacacccatacacaattcggatacgcctgtcaccaactggggattcttctggagacaacctctatccctcaagctaaagggagagtcgaaagactcaatcagacactacaatctcgcctgcctatcgaactggaacgaaacaagattcataccttggaagaagtcaataccttcctgctttcctacatccaaacctttaatgaacagtttgtaaacaagacaaaactctctgtttttgaggaggctcctaagccctctgaacgaaatctcattctggctagactggcggagagagtcgtcgatagtagacaccatatccgattccaaaatcgttactatatccctaccgaacaaggaaaagaagtctatttcatcagaaagacgaaagcattagttataaaagcatttgacggagacatctacctcaatatcgctgacaaaatctatcgcacaaaggagctactagatcatgaactctattcgaaaaactttgaacaagaaccagaacaaaaaaagaaagacacaagtatatccctccacaaacccatccgtggaaactcacatctaaaaataaaaaggattatgaagagtttactagtgaggagcttaattctcctcaactacaagtatagtaaaacgaaa

SEQ ID NO: 7893 - DNA, 81 bp, Streptococcus pneumoniae
  misc_feature (1)..(81): tiling:Spneumo1:WAN024BIU; WAN023RE2 contig_1549_3||||2850 ..2930|+|81 bp|Glimmer 2.02 orf prediction|S.pneumoniae|67 0|WAN01UDKK|ORF|000
atgtggtttcttggacacattgatcctggatcattctcatcaggattactctttactgctattttagaaactggggtggtt

SEQ ID NO: 7894 - DNA, 81 bp, Streptococcus pneumoniae
  misc_feature (1)..(81): tiling:Spneumo1:WAN024BIV; WAN0246QQ 203668-48-8_3||||1562 ..1642|-|81 bp|Glimmer 2.02 orf prediction from Patent Seq uences|S.pneumoniae||WAN02470F|ORF|000
atgtggtttcttggacatattgatcctggatcattctcatcaggattactctttactgctattttagaaactggagtggtt

SEQ ID NO: 7895 - DNA, 81 bp, Streptococcus pneumoniae
  misc_feature (1)..(81): tiling:Spneumo1:WAN024BIQ; WAN023N18 spn167f04_21||||18108 ..18188|+|81 bp|Glimmer 2.02 orf prediction|S.pneumoniae|2 3F-1|WAN01UCN6|ORF|001
atgtggttttttggacatatcgatcctggatcattctcatcaggattactatttactgctattttagaaactggggtggtt

SEQ ID NO: 7896 - DNA, 93 bp, Streptococcus pneumoniae
  misc_feature (1)..(93): tiling:Spneumo1:WAN024B9M; WAN0244UB ||||||93 bp|Incyte or f contig SPN2C0061 356-448|S.pneumoniae|23F|WAN0244UB|ORF| 000
ctgactttgtcagtcttatctacaacctcaaagcagtgctttgagcaacctgcggctagtttcctagtttgctctttgattttcattgagtat

SEQ ID NO: 7897 - DNA, 366 bp, Streptococcus pneumoniae
  misc_feature (1)..(366): tiling:Spneumo1:WAN024B4Y; WAN023LP4 315581_1444b||||76166 2..762027|+|366 bp|EGAD orf prediction|S.pneumoniae|R6|NC_ 003098.1|ORF|100
gtgaaacagtctgggagactgtttcagcctgagcctagaaatttgaaagcgaagctgtttagccaagtcatagtaaggactaaacatatccatagtaataattttgacgcgacatcggacaactctatcgtagcgaagaaagtgatttcgaatgatagcttgtgttcttccctcaagaacagtgatgatattgagattgttaaaatcttgcgcaataaagctcatctccatctcccgattgaaacagtcactccccggactgtttcaacgtcccaagacataatcttaggcagatttctaaaattacactcaaagtggaagtcattgagcttgcgaatgacagttgaagttgaaatggccagctga

SEQ ID NO: 7898 - DNA, 141 bp, Streptococcus pneumoniae
  misc_feature (1)..(141): tiling:Spneumo1:WAN024BCE; WAN023SNA NC_003098.1_92||||762 65..76405|-|141 bp|Glimmer 2.02 orf prediction|S.pneumonia e|R6|NC_003098.1|ORF|100
gtggatagaactgacgaagtcagctcaaaacactgttttgaggttgcagatagaactgacgaagtcagtacacatctatacggcaaggtgaagctgacctggtttgaagagattttcgaagagtatcatttcatctcactc

SEQ ID NO: 7899 - DNA, 66 bp, Streptococcus pneumoniae
  misc_feature (1)..(66): tiling:Spneumo1:WAN024BBG; WAN0244XQ ||||||66 bp|Incyte or f contig SPN2C0285 1914-1979|S.pneumoniae|23F|WAN0244XQ|OR F|000
tatatgatactgactctgtcagttctatccacaacctcaaaacagtgttttgagctacctgcggct

SEQ ID NO: 7900 - DNA, 99 bp, Streptococcus pneumoniae
  misc_feature (1)..(99): tiling:Spneumo1:WAN024BCS; WAN023UX8 AX571762.1_145||||112 402..112581|+|180 bp|Glimmer 2.02 orf prediction|S.pneumon iae||AX571762.1|ORF|000
tcatctacaacctcaaaacagtgttttgagcaacctgcggctagcttcctagtttgttctttgattttgagtattagatttactcaaaatcaaggattt

SEQ ID NO: 7901 - DNA, 108 bp, Streptococcus pneumoniae
  misc_feature (1)..(108): tiling:Spneumo1:WAN024BCR; WAN023WUW AX568472.1_1||||1..18 9|+|189 bp|Glimmer 2.02 orf prediction|S.pneumoniae||AX568 472.1|ORF|000
tcatctacaacctcaaaacagtgttttgagcaacctgcggctagcttcctagtttgttctttgattttgagtattagatttactcaaaatcaaggatttctaactaat

SEQ ID NO: 7902 - DNA, 81 bp, Streptococcus pneumoniae
  misc_feature (1)..(81): tiling:Spneumo1:WAN024DR9; WAN023SQ5 BD003947.1_8||||5526. .5606|+|81 bp|Glimmer 2.02 orf prediction|S.pneumoniae|ATC C55840|BD003947.1|ORF|000
ttgaaaaggattttagttacagggagaaatagggaaaaaattcctaaaaatctaccgaagttaataggtaaattcccaaat

SEQ ID NO: 7903 - DNA, 90 bp, Streptococcus pneumoniae
  misc_feature (1)..(90): tiling:Spneumo1:WAN024BBL; WAN023VSP AX571274.1_1||||1..10 2|+|102 bp|Glimmer 2.02 orf prediction|S.pneumoniae||AX571 274.1|ORF|000
ttgaaaccagataattcttctgtttcacgcgaaacaccctgcgccaagcaaggtgttcttgtttttatactcaatgaaaatcaaagagca

SEQ ID NO: 7904 - DNA, 96 bp, Streptococcus pneumoniae
  misc_feature (1)..(96): tiling:Spneumo1:WAN024B9Z; WAN023SJI NC_003098.1_1616||||1 268427..1268522|+|96 bp|Glimmer 2.02 orf prediction|S.pneu moniae|R6|NC_003098.1|ORF|100
ttgaccctgactctccttagtctcaaaatcaaagacttatactcttcaaaaatctcttcaaaccgcgtcaacgtcatcttggattatatatgtgac

SEQ ID NO: 7905 - DNA, 105 bp, Streptococcus pneumoniae
  misc_feature (1)..(105): tiling:Spneumo1:WAN024B97; WAN023WT2 AX568616.1_1||||1..10 5|+|105 bp|Glimmer 2.02 orf prediction|S.pneumoniae||AX568 616.1|ORF|000
ttgactgcctcttttatggtggctgaaatgagaagacacaaaaagattgtcacaaacccctatttttttgatagaatagaagtagtaaaaaagaaactaactaat

SEQ ID NO: 7906 - DNA, 99 bp, Streptococcus pneumoniae
  misc_feature (1)..(99): tiling:Spneumo1:WAN024BD3; WAN0242KM SP0934||15900814|NP_3 45418.1|887361..887459|+|99 bp|hypothetical protein|S.pneu moniae|TIGR4|NC_003028.1|ORF|010
ttgactgcctcttttatggtggctgaaatgagaagacacaaaaagattgtcacaaacccctatttttttgatagaatagaagtagtaaaaaagaaatga

SEQ ID NO: 7907 - DNA, 96 bp, Streptococcus pneumoniae
  misc_feature (1)..(96): tiling:Spneumo1:WAN024B99; WAN023SL0 NC_003098.1_1060||||8 36157..836252|+|96 bp|Glimmer 2.02 orf prediction|S.pneumo niae|R6|NC_003098.1|ORF|100
ttgactgcctcttttatggtggctgaaatgagaagacacaaaaagattgtcacaaactcctatttttttgatagaatagaagtagtaaaaaagaaa

SEQ ID NO: 7908 - DNA, 99 bp, Streptococcus pneumoniae
  misc_feature (1)..(99): tiling:Spneumo1:WAN024AT3; WAN023X59 AX567736.1_1||||1..99 |+|99 bp|Glimmer 2.02 orf prediction|S.pneumoniae||AX56773 6.1|ORF|000
ttgagcaagaacatttacactgctagtatagcacttattttgaccttggatcactcaaatcataaatggtcatcaaaacctcttgaattgctaactaat

SEQ ID NO: 7909 - DNA, 75 bp, Streptococcus pneumoniae
  misc_feature (1)..(75): tiling:Spneumo1:WAN024B8X; WAN023YAA AL449931.1_98||||7904 7..79121|+|75 bp|Glimmer 2.02 orf prediction|S.pneumoniae| |AL449931.1|ORF|000
ttgattttcattgagtatcaaaaagcaagccattttcggcttgcttttttcatctttaaaagtgattggcctgct

SEQ ID NO: 7910 - DNA, 102 bp, Streptococcus pneumoniae
  misc_feature (1)..(102): tiling:Spneumo1:WAN024AYG; WAN023WB7 AX569920.1_1||||1..10 2|+|102 bp|Glimmer 2.02 orf prediction|S.pneumoniae||AX569 920.1|ORF|000
ttgattttttggaaaaaacaattgactaaacaaaccaagagttgtataataaaacaaatatttaaagcaggaggttccggaaatgaaaaagtcctaactaat

SEQ ID NO: 7911 - DNA, 96 bp, Streptococcus pneumoniae
  misc_feature (1)..(96): tiling:Spneumo1:WAN024AYE; WAN024253 SP1528||15901373|NP_3 45977.1|1439476..1439571|-|96 bp|hypothetical protein|S.pn eumoniae|TIGR4|NC_003028.1|ORF|010
ttgattttttggaaaaaacaattgactaaacaaaccaagagttgtataataaaacaaatatttaaagcaggaggttccggaaatgaaaaagtctaa

SEQ ID NO: 7912 - DNA, 105 bp, Streptococcus pneumoniae
  misc_feature (1)..(105): tiling:Spneumo1:WAN024BCQ; WAN023WI8 AX569425.1_1||||1..10 5|+|105 bp|Glimmer 2.02 orf prediction|S.pneumoniae||AX569 425.1|ORF|000
ttgctttaccgtactcaagtacagcctgcggctcgcttcctagtttgctctttgattttcattgagtataaaaagggtcaagtaagtatagtaaatctaactaat

SEQ ID NO: 7913 - DNA, 84 bp, Streptococcus pneumoniae
  misc_feature (1)..(84): tiling:Spneumo1:WAN024B7B; WAN02449B spr0723|transposase B |15902767|NP_358317.1|723400..723483|+|84 bp|Degenerate tr ansposase|S.pneumoniae|R6|NC_003098.1|ORF|100
ttggttgcaggtctaaccaatggtgagttaatcgctccaatgacttacgaagagacgatgacgagcgacttttttgaagcttag

SEQ ID NO: 7914 - DNA, 96 bp, Streptococcus pneumoniae
  misc_feature (1)..(96): tiling:Spneumo1:WAN024B6Z; WAN024262 SP1490||15901338|NP_3 45942.1|1400734..1400829|-|96 bp|hypothetical protein|S.pn eumoniae|TIGR4|NC_003028.1|ORF|010
ttgttagaaatcgatttgactgtcctgaacgatttgccctattcttgtttcattttactatataaaccagagactgtttacattttcagcaagtga

SEQ ID NO: 7915 - DNA, 93 bp, Streptococcus pneumoniae
  misc_feature (1)..(93): tiling:Spneumo1:WAN024B73; WAN023NA0 spn145f10_2||||619..7 11|-|93 bp|Glimmer 2.02 orf prediction|S.pneumoniae|23F-1| WAN01UCTX|ORF|001
ttgttagaaatcgatttgactgtcctgatcgatttgctctattcttgtttcattttactatataaaccagagactgtttacattttcagcaag

SEQ ID NO: 7916 - DNA, 1049 bp, Streptococcus pneumoniae
  misc_feature (1)..(1049): control:Spneumo1:J04423; J04423 E coli bioB gene biotin sy nthetase  (-5, -M, -3 represent transcript regions 5 prime , Middle, and 3 prime respectively)
atggctcaccgcccacgctggacattgtcgcaagtcacagaattatttgaaaaaccgttgctggatctgctgtttgaagcgcagcaggtgcatcgccagcatttcgatcctcgtcaggtgcaggtcagcacgttgctgtcgattaagaccggagcttgtccggaagattgcaaatactgcccgcaaacgtcgcgctacaaaaccgggctggaagccgagcggttgatggaagttgaacaggtgctggagtcggcgcgcaaagcgaaagcggcaggatcgacgcgcttctgtatgggcgcggcgtggaagaatccccacgaacgcgatatgccgtacctggaacaaatggtgcagggggtaaaagcgatggggctggaggcgtgtatgacgctgggcacgttgagtgaatctcaggcgcagcgcctcgcgaacgccgggctggattactacaaccacaacctggacacctcgccggagttttacggcaatatcatcaccacacgcacttatcaggaacgcctcgatacgctggaaaaagtgcgcgatgccgggatcaaagtctgttctggcggcattgtgggcttaggcgaaacggtaaaagatcgcgccggattattgctgcaactggcaaacctgccgacgccgccggaaagcgtgccaatcaacatgctggtgaaggtgaaaggcacgccgcttgccgataacgatgatgtcgatgcctttgattttattcgcaccattgcggtcgcgcggatcatgatgccaacctcttacgtgcgcctttctgccggacgcgagcagatgaacgaacagactcaggcgatgtgctttatggcaggcgcaaactcgattttctacggttgcaaactgctgaccacgccgaatccggaagaagataaagacctgcaactgttccgcaaactggggctaaatccgcagcaaactgccgtgctggcaggggataacgaacaacagcaacgtcttgaacaggcgctgatgaccccggacaccgacgaatattacaacgcggcagcattatgagctggcag

SEQ ID NO: 7917 - DNA, 748 bp, Streptococcus pneumoniae
  misc_feature (1)..(748): control:Spneumo1:J04423; J04423 E coli bioC protein  (-5 a nd -3 represent transcript regions 5 prime and 3 prime res pectively)
atggcaacggttaataaacaagccattgcagcggcatttggtcgggcagccgcacactatgagcaacatgcagatctacagcgccagagtgctgacgccttactggcaatgcttccacagcgtaaatacacccacgtactggacgcgggttgtggacctggctggatgagccgccactggcgggaacgtcacgcgcaggtgacggccttagatctctcgccgccaatgcttgttcaggcacgccagaaggatgccgcagaccattatctggcgggagatatcgaatccctgccgttagcgactgcgacgttcgatcttgcatggagcaatctcgcagtgcagtggtgcggtaatttatccacggcactccgcgagctgtatcgggtggtgcgccccaaaggcgtggtcgcgtttaccacgctggtgcagggatcgttacccgaacgtcatcaggcgtggcaggcggtggacgagcgtccgcatgctaatcgctttttaccgccagatgaaatcgaacagtcgctgaacggcgtgcattatcaacatcatattcagcccatcacgctgtggtttgatgatgcgctcagtgccatgcgttcgctgaaaggcatcggtgccacgcatcttcatgaagggcgcgacccgcgaatattaacgcgttcgcagttgcagcgattgcaactggcctggccgcaacagcaggggcgatatcctctgacgtatcatctttttttgggagtgattgctc

SEQ ID NO: 7918 - DNA, 652 bp, Streptococcus pneumoniae
  misc_feature (1)..(652): control:Spneumo1:J04423; J04423 E coli bioD gene dethiobio tin synthetase  (-5 and -3 represent transcript regions 5 prime and 3 prime respectively)
aaacgttattttgtcaccggaacggataccgaagtggggaaaactgtcgccagttgtgcacttttacaagccgcaaaggcagcaggctaccggacggcaggttataaaccggtcgcctctggcagcgaaaagaccccggaaggtttacgcaatagcgacgcgctggcgttacagcgcaacagcagcctgcagctggattacgcaacagtaaatccttacaccttcgcagaacccacttcgccgcacatcatcagcgcgcaagagggcagaccgatagaatcattggtaatgagcgccggattacgcgcgcttgaacaacaggctgactgggtgttagtggaaggtgctggcggctggtttacgccgctttctgacactttcacttttgcagattgggtaacacaggaacaactgccggtgatactggtagttggtgtgaaactcggctgtattaatcacgcgatgttgactgcacaggtaatacaacacgccggactgactctggcgggttgggtggcgaacgatgttacgcctccgggaaaacgtcacgctgaatatatgaccacgctcacccgcatgattcccgcgccgctgctgggagagatcccctggcttgcagaaaatccagaaaatgcggcaaccggaaagtaca

SEQ ID NO: 7919 - DNA, 1032 bp, Streptococcus pneumoniae
  misc_feature (1)..(1032): control:Spneumo1:X03453; X03453 Bacteriophage P1 cre recom binase protein  (-5 and -3 represent transcript regions 5 prime and 3 prime respectively)
atgtccaatttactgaccgtacaccaaaatttgcctgcattaccggtcgatgcaacgagtgatgaggttcgcaagaacctgatggacatgttcagggatcgccaggcgttttctgagcatacctggaaaatgcttctgtccgtttgccggtcgtgggcggcatggtgcaagttgaataaccggaaatggtttcccgcagaacctgaagatgttcgcgattatcttctatatcttcaggcgcgcggtctggcagtaaaaactatccagcaacatttgggccagctaaacatgcttcatcgtcggtccgggctgccacgaccaagtgacagcaatgctgtttcactggttatgcggcggatccgaaaagaaaacgttgatgccggtgaacgtgcaaaacaggctctagcgttcgaacgcactgatttcgaccaggttcgttcactcatggaaaatagcgatcgctgccaggatatacgtaatctggcatttctggggattgcttataacaccctgttacgtatagccgaaattgccaggatcagggttaaagatatctcacgtactgacggtgggagaatgttaatccatattggcagaacgaaaacgctggttagcaccgcaggtgtagagaaggcacttagcctgggggtaactaaactggtcgagcgatggatttccgtctctggtgtagctgatgatccgaataactacctgttttgccgggtcagaaaaaatggtgttgccgcgccatctgccaccagccagctatcaactcgcgccctggaagggatttttgaagcaactcatcgattgatttacggcgctaaggatgactctggtcagagatacctggcctggtctggacacagtgcccgtgtcggagccgcgcgagatatggcccgcgctggagtttcaataccggagatcatgcaagctggtggctggaccaatgtaaatattgtcatgaactatatccgtaacctggatagtgaaacaggggcaatggtgcgcctgctggaagatggcgattag

SEQ ID NO: 7920 - DNA, 6540 bp, Streptococcus pneumoniae
  misc_feature (1)..(6540): control:Spneumo1:L38424; L38424 B subtilis dapB, jojF, joj G genes corresponding to nucleotides 1358-3197 of L38424 ( -5, -M, -3 represent transcript regions 5 prime, Middle, a nd 3 prime respectively)
gggactaccctaaataaggatgaggggcggcggtcagccgccttttttctattacatgtcagcgcggaagcggatttttattttcatcaagcgtaaatccttctccgagcacatcgtgaacatcgcttaccgctacaaaggcatggggatcaatggagttaatcacgcttttcagcatcaccaattcatttttcggcaccacacaataaagtacatctatatcctcttttgtgtaggaaccttgtcctttcaaaatggtgacgccccgttccatttcttcaagaatctttttctgaatcaggtcgtttttcgaagagatgatcgtagcgcctttagcagcgtatccgccttcctgaataaaatcgattaatcttgccgctacaaatacagctaccagcgtatacatcgcttctttataggagagataagtaagcaaagacaaaatgatgacgcaggcatcgaaagcaaacatcgttctgcccatcggaatcccaaaatacttattcactaaacgtgcgatgatatcaacaccgcctgtcgtaccgccgaacttaaaaataatacccagtccggctccgatgaatacgccggcaaataaagcggcgagcgctaagtcgtgctgaaggggcatatggatttcatatcgctgaaagatgctgaggaacaaagacaaggctacagtgccgacaagggtataaacaaacattgtcctgccgagcatgtggaaaagggcataaagcaaaagtgtaatacctgtaaaaccgccctcagccagattgttctgcatattgaaatgaaccaagccaaatgaaaaaattgccgctccgattaaaataaaaaatatgttttttaatctaatttctccaagcatcacacaaaaccccttttccttccattagatagcgtttatattatagtggatgaaaaagaaaacagcaaacgtgcttaaacatttgtcaaacgtatctgaattagctaacatgtaagaggatgataggaggtttcgttcagtgagtgataaaacaatgaaagacatacaggctgaagtagaccgttacataggccaatttaaagaaggatattttagcccgctggccatgatggcgaggctgactgaagaactgggcgagcttgccagagaagtgaatcaccgttatggagaaaaaccaaaaaaagcgactgaagatgataaaagcatggaagaggaaataggcgatgtgctatttgtattggtttgtttagccaactctcttgatatctctttagaggaagctcacgaccgagtcatgcataaatttaatacaagagataaagatcgctggaccagaaaagaagaaggaaagtagaggagatcaagatgtcaaacgaaacaattaaattagtcattgcgggaccgcgtggaagaatggggcaggaagctgttaaattggcagaacgaacaccacattttgaccttgtaggggccatagaccatacatacgatcagcaaaaattatctgatgtgatgcctgttgagtcagatgctttcatttacacagatatccatgcctgttttacagaaacacaaccggatgtcttgattgatttaacaacgcccgaaatcggaaaagtacatacaaaaattgcattagagcacggagtccgtccagttgtcggaacaaccggtttctcagaagctgatttaaaagagctcacatctttaacagaagaaaaagggatcggagccatcatcgcgccaaattttgcgctcggtgcgatactgatgatgaaattttcaaaaatggctgccaactattttgaggatgttgagattattgagcttcatcatgaccagaagcttgacgcaccaagcggaactgcgcttaaaacagcggaaatgatttcagaagtccgtaaagaaaagcagcaaggacatccggatgaaaaagaaattctcccaggagcaagaggagcggagcaaaacggtattcgcttgcacaggcttcagatacgccatgattcttataaccgtgcttctttcatgtcaggcgttaaactgtcagtcgaacaagtcatgaagattgatcagcttgtgtatggtttagaaaatatcattgattagacggggggataaacaatgaaaattgctttgatcgcgcatgacaagaaaaaacaggatatggttcaatttacgactgcctatcgggatattttaaagaatcatgatctatacgcaaccggaaccacagggttgaaaattcatgaggcgacaggtcttcaaattgaacgttttcaatccggccctttagggggagaccagcaaatcggtgcactgatcgctgccaatgcactcgatcttgtcatttttttgcgcgacccgctgaccgcgcagccgcatgaaccggatgtctcggcattaatccgtttatgtgatgtgtattccattccgctcgccacaaatatgggtactgcggaaattcttgtgcgcacacttgatgaaggtgttttcgaattccgtgaccttcttcggggagaagagccgaatgtataatgctgacgttcttgcttttggcgcccacagtgatgatgtcgagatcggaatgggcggcacaatagcgaagtttgtcaaacaggaaaaaaaagtaatgatatgcgatttgacagaagcggaactctcttctaacggtacggtcagtttgcgtaaagaagaagcagctgaagcagcccgcatattaggcgcagataaaagaattcagctaacgcttccagaccgcggcctaataatgagtgatcaggcaattcggtcaattgtcactgtcatcagaatctgtcggccaaaagcggtttttatgccgtataaaaaggatcgccatccggatcacggcaatgcggctgcactggtggaagaagcgatcttttccgccggaatccataaatataaagacgaaaaaagccttccggcgcataaagtcagcaaggtttactattatatgataaatggttttcatcagccggattttgttattgatatctcggatacaatagaggcaaagaaacaaagcctcaacgcctacaaaagccagtttatcccgtcaaaggattccgtttctactcctctgacgaatgggtatattgaaatcgttgaagcgagagaaaagctttacggtaaagaagcgggcgtggagtatgccgaagtttcttttccaaacggatgctgatgcttgatcatgatgtgcttgggggcgaacaatgagaaaactagggaagcagcttgctgaaaagggacatgaaatccatttcatcacatcaagcattccgtttagactgaatacatatcatcccaatattcattttcatgaagttgaggttaatcaatatgctgtttttaagtatcctccgtatgatttgacattggcaagcaaaatcgctgaggtggcggaacgggagaatttagacattatccatgctcactatgctctcccgcatgccgtttgcgcctatcttgcaaaacaaatgctgaaacgcaatatcggcattgttaccactttgcatggcacggatatcacggtgttaggttatgatccgtctctaaaagatctgatccgttttgctattgagtcatcagacagggtgacggccgtctcctcagcgcttgcggctgaaacatacgatttaattaaaccggagaaaaaaattgaaacgatttataactttatagacgagcgcgtgtatctgaagaaaaacacagcggcaattaaagagaaacatggaattttaccagatgaaaaagtcgtcatccatgtgtccaacttcagaaaagttaaacgcgtgcaggatgtcatccgtgtgttccgcaatatcgctggcaaaacgaaagcgaagctgcttttagtcggagacggtccggagaaatcgacagcctgcgagcttatcagaaaatatggcttggaagaccaagtcttaatgcttggaaatcaagaccgtgttgaagatctttattctattagcgatttgaagctgctgctatctgaaaaagaaagctttggccttgtcctgcttgaagcgatggcttgcggagtgccttgtattggaacaaacattggcggtatccctgaggttataaaaaacaatgtgagcggatttttggtggatgtcggtgatgttacggccgcaacagcccgcgcgatgagcattttagaagatgaacagctaagcaatcgttttacaaaggcggcaatagagatgcttgaaaatgaattttcttctaaaaaaattgtcagccagtatgaacagatttatgccgatttagcagaaccggagtgatcacatggaaaaagtttttatcaaagcacttcccgtgctccgcatcttaatcgaagcgggccatcaggcttattttgtcgggggcgcagttcgtgacagctatatgaaacgaacgatcggagatgtcgatatcgcgacagatgcggcacctgatcaagtagaacggctgtttcagcggactgttgatgtaggcaaagatgaatctgattatgttgatttcagaagaccgtcagaagtgcaatttatctcatcattagaagaggatctaaaacgcagagatttaacgatcaatgcgatggccatgacagcggacgggaaggtgcttgattattttggcggcaagaaagatattgatcagaaagtgattcgaaccgttggaaagcctgaggatagatttcaagaggatgcgcttcgtatgctgagagccgtacgctttatgagccagcttggctttacgctttcaccggaaacagaagaagccattgcgaaagaaaaatcactcctctcccatgtttcagtcgaacgaaaaactatagagtttgagaaattgctgcagggaagagcttctcgccaggcgcttcaaacactcattcaaacgagattgtatgaagagcttcctggtttttatcataaacgagaaaacctgatttcaacgagtgagtttccattcttctctttaacatcccgtgaggagctttgggctgctcttttaattaaccttggcatagttttgaaagacgcgccccttttcctgaaagcctggaagctcccgggaaaagtgatcaaggaagccattcacattgccgatacgtttggccagagccttgacgcaatgacaatgtacagagctgggaaaaaagcactgctctcagcggccaaaatatcgcagcttcggcaaaacgaaaaactggatgaaaagaaactgaaggacattcagtacgcttatcaaaacctgccgatcaaaagccttaaggatcttgatatcacgggtaaggacttgcttgcgcttcgaaaccggccggccggaaaatgggtgtcagaagaattacagtggatcgagcaggctgttgtgacagggaagctctccaatcaaaagaaacacatagaggagtggctgaagacatgcggtcaacattaagaaaagaccttattgaattattttctcaggccggcaatgaatttatttccggccaaaaaatcagtgatgctctcggctgttcaagaactgctgtgtggaagcatattgaagagcttcggaaagagggttatgaagtagaagccgttagaagaaaaggatatcggctcatcaaaaaacccggaaaactcagtgaaagcgaaattcgttttggattaaaaacggaagtgatgggccagcatcttatttaccatgacgttctttcaagcacgcaaaaaacggctcatgagctcgcgaataataacgcaccggaaggcacccttgaaggaaacggtgtttggatgagcctgattttgcggcctgacattccgctccaaaaaacaccgcagctgactctgcttgctgcagtagctgttgtgcagggaatagaagaggcagcaggcatccaaacggatattaaatggccaaatgatattttgattaacggaaaaaaaacagtcggtatcctaacggaaatgcaggctgaagaagaccgcgtacgttcagtgatcattgggatcggcattaacgttaaccagcagcctaatgattttccagatgaattgaaggacatcgcgacaagcctcagccaagctgctggggaaaaaattgatcgggccggcgtcatccagcatattttactatgctttgagaaacggtaccgggattatatgacgcacggatttacgccgattaagcttttatgggaaagctatgcgctcggtattggcactaatatgagagccagaacgttaaacggaaccttttacggtaaggcgttaggtatagatgatgaaggcgttctgcttttagaaacgaacgaaggcattaaaaaaatctattctgccgatatcgaattgggctaatgtgttggtacaagcccgttgattttggtatacttccattgggcagtatcgcctgcgaactgcacctattattaaaatagatagacattgcagcagtctgccttgatccaaaaaaggactgggacagagggatgaaactcgccgaactttagaaagtgaagaatccttctcgttgtaacggaaggttttttggcttgc

SEQ ID NO: 7921 - DNA, 1612 bp, Streptococcus pneumoniae
  misc_feature (1)..(1612): control:Spneumo1:X17013; X17013 B subtilis lys gene for di aminopimelate decarboxylase corresponding to nucleotides 3 50-1345 of X17013  (-5, -M, -3 represent transcript region s 5 prime, Middle, and 3 prime respectively)
aagcttggcaacaaatgagccgtcttgtcctcatgatactcgttgctttatttcatataaaagggctcgtcatcggatttacagtgctaattatgccatggcaagcatcaaatcccttcagacaccgtacttatggccgctgattccctttaacggaaaggcgctgtggcaggtgcttgtcccgacagcgaaacctggcgcaaaagtaagacccagcatcgttcaccccaaaaatcgcttaaggcagcctaccaattcataatcgcattgaaactgactgaagagtatgataatgtatgtcttaattatgaagggacagtccataaaactgtcctttcatccataagcggagaaagagggaatgacattgttcttacacggcacaagcagacaaaatcaacatggtcatttagaaatcggaggtgtggatgctctctatttagcggagaaatatggtacacctctttacgtatatgatgtggctttaatacgtgagcgtgctaaaagctttaagcaggcgtttatttctgcagggctgaaagcacaggtggcatatgcgagcaaagcattctcatcagtcgcaatgattcagctcgctgaggaagagggactttctttagatgtcgtatccggaggagagctatatacggctgttgcagcaggctttccggcagaacgcatccactttcatggaaacaataagagcagggaagaactgcggatggcgcttgagcaccgcatcggctgcattgtggtggataatttctatgaaatcgcgcttcttgaagacctatgtaaagaaacgggtcactccatcgatgttcttcttcggatcacgcccggagtagaagcgcatacgcatgactacattacaacgggccaggaagattcaaagtttggtttcgatcttcataacggacaaactgaacgggccattgaacaagtattacaatcggaacacattcagctgctgggtgtccattgccatatcggctcgcaaatctttgatacggccggttttgtgttagcagcggaaaaaatcttcaaaaaactagacgaatggagagattcatattcatttgtatccaaggtgctgaatcttggaggaggtttcggtattcgttatacggaagatgatgaaccgcttcatgccactgaatacgttgaaaaaattatcgaagctgtgaaagaaaatgcttcccgttacggttttgacattccggaaatttggatcgaaccgggccgttctctcgtgggagacgcaggcacaactctttatacggttggctctcaaaaagaagtggataagctgtacaatcgtttcatcattcggcgtgcgaattaagaaaggtctcattgcgcctgtaaagcttacgcgtatttctgctccttcaagcacctttagtgcatccagcatatattttggactaaaagagatatttaattcctcaccttcaatttgatccgcaacaattgcttccacaactttaccgatttctggcgaattggaagaaatttcaatggattcagccggttttgcggacagttttacaacgttgttgcgtccctctctagctaaaagagatgcacgatcaatggcctgaaggaattc

SEQ ID NO: 7922 - DNA, 3360 bp, Streptococcus pneumoniae
  misc_feature (1)..(3360): control:Spneumo1:M24537; M24537 B subtilis pheB, pheA gene s corresponding to nucleotides 2017-3334 of M24537 (-5, -M , -3 represent transcript regions 5 prime, Middle, and 3 p rime respectively)
  misc_feature (2982)..(2982): n is a, c, g, or t
ataatacacacttatacagactcctaaataagaaattaaatgattgggagtgcgaaaatgaaggatgtttcaaaaaatcaagaagaaaatataagcgacacggcattaacaaacgaactgattcatctgcttggccattcccggcatgattggatgaataagctgcagctgattaaaggaaacttaagcttacagaagtatgaccgtgtctttgaaatgattgaagaaatggttatagacgcaaagcacgaatcaaagctctcaaacctgaaaacaccgcatttggcgtttgattttcttacgtttaattggaaaacccattatatgacgcttgaatatgaagttctcggagaaattaaggatttgtcggcttatgatcaaaagctggcgaaactgatgagaaagctgtttcatctgtttgatcaagcagtcagcagagagagtgaaaatcatttaacggtttcgcttcaaacggatcatcctgacagacagctgattctgtaccttgattttcacggcgcctttgccgatccatctgcttttgatgatattcggcagaatggatatgaggacgttgatatcatgcgttttgaaatcacgagtcacgaatgtctgattgaaattgggttggactagcggagtttttaacggtttagaacggaggacattatgtttgtagatcaggtcaaagtatatgtaaaaggcggcgacggcggcaacggtatggttgcgtttcgccgtgaaaaatatgtgccgaaaggcggccctgccggcggtgacggaggaaagggaggagacgtcgtttttgaagtagatgaaggtctccgcaccctgatggattttagatacaaaaaacactttaaagcgattcgcggcgagcatggcatgtccaaaaaccagcacgggcgaaatgctgatgatatggtcattaaagttccgccgggcaccgttgtgacagacgatgatacaaaacaggtcatcgctgatttaacagagcacggacagcgggctgtcattgcaagaggcggaagaggcggaagaggaaatagccgctttgctacaccggctaatcccgcgcctcagctttcagaaaacggcgagccgggaaaagaacgctacattgttcttgaattaaaagtgcttgcagatgtcggacttgtcgggttcccgagtgtgggaaaatctactttgctgtctgttgtctcatctgcaaaaccgaaaattgcggactatcactttacaacgcttgtcccgaatctcggcatggttgaaacggatgacggacgcagctttgtcatggctgatttgccagggctgattgaaggcgcacaccaaggcgtcggactgggccaccagtttttgcgccatattgaacggacgagggttattgttcatgtcattgacatgtcaggcttagaaggccgtgatccatatgatgattatcttacgattaaccaggagctgagcgagtacaatctgcgtctcactgagcgtccgcaaattatcgttgcaaataaaatggacatgccggaggctgcggaaaatctcgaagcctttaaagaaaagctgacggatgattatccggtattcccgatcagtgcggtgacaagagaaggtctgcgtgagcttctgtttgaggttgccaatcagcttgagaacacaccggaattcccgctgtatgacgaggaagagcttacacaaaaccgtgtcatgtacacgatggaaaatgaagaagtgccatttaacattacacgcgatccagacggtgtatttgtgctttcaggagacagccttgagcggttattcaagatgactgatttctcacgtgatgaatcggttaaacggtttgcaagacagatgcgcggaatgggtgttgatgaagcactcagagaacgcggagccaaggatggagatataatcaggcttctggaatttgaatttgaatttattgattaatcaatgttggctgaaaagagagcctggtgccaggctctctattttaaaggggggatgcaaatgaaagaggagacattttatcttgtccgtgaagatgtattgcccgatgcaatgagaaaaacattagaagtcaaaaagctgcttgatcgacaaaaagcagattcagtagcagatgccgttcaaaaggtcgatttaagtagaagtgcgttttataaatacagggatgctgtttttccattctacaccatggtaaaagaacaaattatcacacttttctttcatttggaggataggtcaggtgcgttatctcagcttcttcaggcggtagctgattctggaagcaacgttctttccattcaccagaccattccgcttcaaggcagagcaaatgtgacactgtctatcagtacgtcggcaatggaagaagacattcatacattaatgaataagctcaggaagtttgattttgtagaaaaggttgaaatattaggttcaggtgcataagggagagaaaatcgtcatgaaagtcggttatttaggtccagcagctacatttacacatctagcagtcagttcttgttttcaaaacggcgccgaacatgttgcttaccgcaccattccggagtgtatagatgcagccgttgcaggcgaagttgattttgcttttgttcctttggaaaatgctttagaaggatctgttaatctaacaatagactatttaatacatgaacagcctttgccaatcgtgggtgaaatgacgttgccgattcaccagcacttgctcgtccatccctcaagagagaatgcatggaaagagctcgacaaaatttactcacattcacacgcgattgcgcaatgccataaatttcttcatcgacattttccttccgttccatatgaatacgccaattctaccggggcggcagcaaagtttgtcagtgaccatcccgagctgaatatcggggtcattgccaatgatatggcagcttctacatacgaattaaaaatcgtgaaacgggatatacnggattatagggacaatcatacaagatttattatcctgtctcccgatgaaaacatatcttttgaagtgaattcaaaattgagctctaggcccaaaacgaccttaatggtcatgctgccgcaggatgatcagtccggggcgctgcatagagtgctgtctgcattttcttggagaaatttaaacctgtcaaaaattgagtcacgtccgactaaaaccggattaggccattatttctttattattgatattgagaaagcgtttgatgatgtattgattccaggggccatgcaggagcttgaagcactcggctgcaaagtgaggcttctgggtgcataccagtcttaccaattataaaaaaagcccactagagggcttttttt

SEQ ID NO: 7923 - DNA, 2403 bp, Streptococcus pneumoniae
  misc_feature (1)..(2403): control:Spneumo1:X04603; X04603 B subtilis thrC, thrB gene s corresponding to nucleotides 248-2229 of X04603 (-5, -M, -3 represent transcript regions 5 prime, Middle, and 3 pr ime respectively)
gaattcatgtaaaagatgaggttggttcattctcgaaaattacatctgtgttctcagagcggggcgtgacgtttgaaaaaatccttcagctgccaattaaaggccatgatgagttagctgaaatcgtaattgtcacacatcatacatcagaagctgatttcagtgatatcctgcaaaacctaaatgatttggaagtcgttcaagaagtcaaaagcacatatcgtgtagaagggaacggttggagctaatgtggaaaggacttatccatcaatataaagaatttttacctgtaacagatcaaacaccggcgctaactttacatgaaggaaacacacctcttattcacctgccgaagctgtctgagcagctcggaattgagcttcatgtcaaaacggaaggcgtcaatcctacgggatcatttaaagatcgcggaatggttatggctgtggcaaaggcaaaagaagaaggcaatgacacgattatgtgcgcgtcaacaggtaacacttccgctgctgcggcagcatatgcagcccgtgctaacatgaaatgcattgtcatcatcccgaacggaaaaattgcatttggaaaactcgctcaagctgtcatgtacggagccgagattatcgcaattgacggaaactttgacgatgcgcttaaaattgtccgttccatctgtgagaaatcaccgattgcccttgtcaactcagtcaacccttaccgcattgaaggccaaaaaactgctgccttcgaagtgtgcgaacagctgggggaagcgcctgatgttttagcgatcccggtcggaaatgctggaaacatcactgcgtactggaagggcttcaaggaatatcatgagaaaaacggcacaggccttccgaaaatgcgcggctttgaagctgagggtgcggcggcaatcgtgcgcaatgaagtgattgaaaatccggaaacaatagcgacagccattcgtatcggaaacccggcaagctgggacaaagctgtaaaggcagccgaggaatccaatgggaaaattgacgaagtcactgatgatgaaatccttcacgcatatcagctgatcgcccgtgtagaaggcgtgtttgcagaaccaggttcttgcgcgtctatcgcaggagtgctgaaacaggtgaaatccggagaaattccgaaaggcagcaaggtcgtagctgtgttaacaggaaacggactgaaagatccgaacacagcggtcgacatttcagaaatcaagcctgtcacattgccgactgatgaagacagcatccttgaatatgtaaaaggagcggcccgtgtatgaacgaagccgacatgctgttctctgtcactgttcccggaagcacagctaacctaggccccggctttgattcagtcggaatggcgctcagcagatatttgaagctgaccgtctttgaaagcgacaaatggtcttttgaggctgaaacagaaacagtcgccggaattccgggcggtacagataacctgatctaccaagtggctaaacggaccgcagatttgtacggaaaagaaatgcctcctgtccatgtgaaggtgtggagcgacatcccgcttgcacgcggccttggcagcagcgccgcagcgattgtagcggccattgaactggctgatgaattatgcggcttaaagctgtctgaagcggacaagctgcatttagcgagtctagaagaaggacacccggacaatgctggcgcttctctcgtcggcggacttgtgatcggcctgcatgaggatgacgagacccaaatgatccgcgtcccgaatgctgacattgacgtagtcgttgtcattcctttttatgaagtgctgacaagagacgcgagagacgtgcttccgaaggagtttccatatgccgatgccgtaaaagcaagtgctgtcagcaatatcctcattgctgcgatcatgtccaaggattggccgcttgtcgggaaaatcatgaagaaggatatgttccatcagccgtaccgggcgatgcttgtgcctgagctgtcaaaagtagagcacgtcgccgagatgaagggcgcatatggaacggctctcagcggagcaggcccaacgattctcgtcatgaccgaaaaaggaaagggagaagagctaaaagaacagctcgcgcttcatttccctcattgtgaagtagacgctttgaccgttccgaaagagggaagtataatagagcgaaatcctttatatcaagtaaaaagtgtatagatcatgccaagcgttcctcagcgtcagcggagggcgcctttttttgctggagataaaggagttttattagaaacgaatacatgtaaaggaggagatgaatatgaaaagctgataaccgcagacgacatcacagcgattgtctctgtgaccagtcctcaatacgccccagac

SEQ ID NO: 7924 - DNA, 2525 bp, Streptococcus pneumoniae
  misc_feature (1)..(2525): control:Spneumo1:K01391; K01391 B subtilis TrpE protein, T rpD protein, TrpC protein corresponding to nucleotides 188 3-4400 of K01391 (-5, -M, -3 represent transcript regions 5 prime, Middle, and 3 prime respectively)
ctcgagccaacaccgagagagacatacggcgggtgtattgcctacattgggtttgacgggaatatcgactcttgtattacgattcgcacgatgagtgtaaagaacggtgttgcatcgatacaggcaggtgctggcattgttgctgattctgttccggaagccgaatacgaagaaagctgtaataaagccggtgcgctgctgaaaacgattcatattgcagaagacatgtttcatagcaaggaggataaagctgatgaacagatttctacaattgtgcgttgacggaaaaacccttactgccggtgaggctgaaacgctgatgaatatgatgatggcagcggaaatgactccttctgaaatgggggggatattgtcaattcttgctcatcggggggagacgccagaagagcttgcgggttttgtgaaggcaatgcgggcacacgctcttacagtcgatggacttcctgatattgttgatacatgcggaacagggggagacggtatttccacttttaatatctcaacggcctcggcaattgttgcctcggcagctggtgcgaaaatcgctaagcatggcaatcgctctgtctcttctaaaagcggaagcgctgatgttttagaggagctagaggtttctattcaaaccactcccgaaaaggtcaaaagcagcattgaaacaaacaacatgggatttctttttgcgccgctttaccattcgtctatgaaacatgtagcaggtactagaaaagagctaggtttcagaacggtatttaatctgcttgggccgctcagcaatcctttacaggcgaagcgtcaggtgattggggtctattctgttgaaaaagctggactgatggcaagcgcactggagacgtttcagccgaagcacgtcatgtttgtatcaagccgtgacggtttagatgagctttcaattacagcaccgaccgacgtgattgaattaaaggacggagagcgccgggaatataccgtttcacccgaagatttcggtttcacaaatggcagacttgaagatttacaggtgcagtcaccgaaagagagcgcctatctcattcagaatatttttgaaaataaaagcagcagttccgctttatctattacggcttttaatgcgggagctgcgatttacacggcgggaattaccgcctcactgaaggaaggaacggagctggcgttagagacgattacaagcggaggcgctgccgcgcagcttgaacgactaaagcagaaagaggaagagatctatgcttgaaaaaatcatcaaacaaaagaaagaagaagtgaaaacactggttttgccggtagagcagcctttcgagaaacgttcatttaaggaggcgctggcaagcccgaatcggtttatcgggttgattgccgaagtgaagaaagcatcgccgtcaaaagggcttattaaagaggattttgtgcctgtgcagattgcaatagactatgaggctgcgaaggcagatgcgatttccgttttaacagacaccccgttttttcaaggggaaaacagttatttatcagacgtaaagcgtgctgtttcgattcctgtacttagaaaagattttattcttgattctcttcaagtagaggaatcaagaagaatcggagcggatgccatattgttaatcggcgaggtgcttgatcccttacaccttcatgaattatatcttgaagcaggtgaaaaggggatggacgtgttagtggaggttcatgatgcatcaacgctagaacaaatattgaaagtgttcacacccgacattctcggcgtaaataatcgaaacctaaaaacgtttgaaacatctgtaaagcagacagaacaaatcgcatctctcgttccgaaagaatccttgcttgtcagcgaaagcggaatcggttctttagaacatttaacatttgtcaatgaacatggggcgcgagctgtacttatcggtgaatcattgatgagacaaacttctcagcgtaaagcaatccatgctttgtttagggagtgaggttgtgaagaaaccggcattaaaatattgcggtattcggtcactaaaggatttgcagcttgcggcggaatcacaggctgattacctaggatttatttttgctaaaagcaaacgaaaagtatctccggaagatgtgaaaaaatggctgaaccaagttcgtgtcgaaaaacaggttgcaggtgtttttgttaatgaatcaatagagacgatgtcacgtattgccaagagcttgaagctcgacgtcattcagcttcacggtgatgaaaaaccggcggatgctgctgctcttcgcaagctgacaggctgtgaaatatggaaggcgcttcaccatcaagataacacaactcaagaaatagcccgctttaaagataatgttgacggctttgtgattgattcatctgtaaaagggtctagaggcggaactggtgttgcattttcttgggaatgtgtgccggaatatcagcaggcggctattggtaaacgctgttttatcgcaggcggcgtggatcc

SEQ ID NO: 7925 - DNA, 25 bp, Artificial
  probe
  misc_feature (1)..(25): SEQ ID NO: 7916; AFFX-BioB-3_at; Start 925; Stop 949
gggctaaatccgcagcaaactgccg

SEQ ID NO: 7926 - DNA, 25 bp, Artificial
  probe
  misc_feature (1)..(25): SEQ ID NO: 7916; AFFX-BioB-3_at; Start 935; Stop 959
cgcagcaaactgccgtgctggcagg

SEQ ID NO: 7927 - DNA, 25 bp, Artificial
  probe
  misc_feature (1)..(25): SEQ ID NO: 7916; AFFX-BioB-3_at; Start 972; Stop 996
acagcaacgtcttgaacaggcgctg

SEQ ID NO: 7928 - DNA, 25 bp, Artificial
  probe
  misc_feature (1)..(25): SEQ ID NO: 7916; AFFX-BioB-3_at; Start 979; Stop 1003
cgtcttgaacaggcgctgatgaccc

SEQ ID NO: 7929 - DNA, 25 bp, Artificial
  probe
  misc_feature (1)..(25): SEQ ID NO: 7916; AFFX-BioB-3_at; Start 744; Stop 768
ggtcgcgcggatcatgatgccaacc

SEQ ID NO: 7930 - DNA, 25 bp, Artificial
  probe
  misc_feature (1)..(25): SEQ ID NO: 7916; AFFX-BioB-3_at; Start 987; Stop 1011
acaggcgctgatgaccccggacacc

SEQ ID NO: 7931 - DNA, 25 bp, Artificial
  probe
  misc_feature (1)..(25): SEQ ID NO: 7916; AFFX-BioB-3_at; Start 752; Stop 776
ggatcatgatgccaacctcttacgt

SEQ ID NO: 7932 - DNA, 25 bp, Artificial
  probe
  misc_feature (1)..(25): SEQ ID NO: 7916; AFFX-BioB-3_at; Start 1017; Stop 1041
atattacaacgcggcagcattatga

SEQ ID NO: 7933 - DNA, 25 bp, Artificial
  probe
  misc_feature (1)..(25): SEQ ID NO: 7916; AFFX-BioB-3_at; Start 761; Stop 785
tgccaacctcttacgtgcgcctttc

SEQ ID NO: 7934 - DNA, 25 bp, Artificial
  probe
  misc_feature (1)..(25): SEQ ID NO: 7916; AFFX-BioB-3_at; Start 777; Stop 801
gcgcctttctgccggacgcgagcag

SEQ ID NO: 7935 - DNA, 25 bp, Artificial
  probe
  misc_feature (1)..(25): SEQ ID NO: 7916; AFFX-BioB-3_at; Start 787; Stop 811
gccggacgcgagcagatgaacgaac

SEQ ID NO: 7936 - DNA, 25 bp, Artificial
  probe
  misc_feature (1)..(25): SEQ ID NO: 7916; AFFX-BioB-3_at; Start 795; Stop 819
cgagcagatgaacgaacagactcag

SEQ ID NO: 7937 - DNA, 25 bp, Artificial
  probe
  misc_feature (1)..(25): SEQ ID NO: 7916; AFFX-BioB-3_at; Start 801; Stop 825
gatgaacgaacagactcaggcgatg

SEQ ID NO: 7938 - DNA, 25 bp, Artificial
  probe
  misc_feature (1)..(25): SEQ ID NO: 7916; AFFX-BioB-3_at; Start 809; Stop 833
aacagactcaggcgatgtgctttat

SEQ ID NO: 7939 - DNA, 25 bp, Artificial
  probe
  misc_feature (1)..(25): SEQ ID NO: 7916; AFFX-BioB-3_at; Start 816; Stop 840
tcaggcgatgtgctttatggcaggc

SEQ ID NO: 7940 - DNA, 25 bp, Artificial
  probe
  misc_feature (1)..(25): SEQ ID NO: 7916; AFFX-BioB-3_at; Start 825; Stop 849
gtgctttatggcaggcgcaaactcg

SEQ ID NO: 7941 - DNA, 25 bp, Artificial
  probe
  misc_feature (1)..(25): SEQ ID NO: 7916; AFFX-BioB-3_at; Start 832; Stop 856
atggcaggcgcaaactcgattttct

SEQ ID NO: 7942 - DNA, 25 bp, Artificial
  probe
  misc_feature (1)..(25): SEQ ID NO: 7916; AFFX-BioB-3_at; Start 856; Stop 880
tacggttgcaaactgctgaccacgc

SEQ ID NO: 7943 - DNA, 25 bp, Artificial
  probe
  misc_feature (1)..(25): SEQ ID NO: 7916; AFFX-BioB-3_at; Start 864; Stop 888
caaactgctgaccacgccgaatccg

SEQ ID NO: 7944 - DNA, 25 bp, Artificial
  probe
  misc_feature (1)..(25): SEQ ID NO: 7916; AFFX-BioB-3_at; Start 901; Stop 925
gacctgcaactgttccgcaaactgg

SEQ ID NO: 7945 - DNA, 25 bp, Artificial
  probe
  misc_feature (1)..(25): SEQ ID NO: 7916; AFFX-BioB-5_at; Start 21; Stop 45
gacattgtcgcaagtcacagaatta

SEQ ID NO: 7946 - DNA, 25 bp, Artificial
  probe
  misc_feature (1)..(25): SEQ ID NO: 7916; AFFX-BioB-5_at; Start 258; Stop 282
caaagcgaaagcggcaggatcgacg

SEQ ID NO: 7947 - DNA, 25 bp, Artificial
  probe
  misc_feature (1)..(25): SEQ ID NO: 7916; AFFX-BioB-5_at; Start 24; Stop 48
attgtcgcaagtcacagaattattt

SEQ ID NO: 7948 - DNA, 25 bp, Artificial
  probe
  misc_feature (1)..(25): SEQ ID NO: 7916; AFFX-BioB-5_at; Start 270; Stop 294
ggcaggatcgacgcgcttctgtatg

SEQ ID NO: 7949 - DNA, 25 bp, Artificial
  probe
  misc_feature (1)..(25): SEQ ID NO: 7916; AFFX-BioB-5_at; Start 57; Stop 81
gttgctggatctgctgtttgaagcg

SEQ ID NO: 7950 - DNA, 25 bp, Artificial
  probe
  misc_feature (1)..(25): SEQ ID NO: 7916; AFFX-BioB-5_at; Start 63; Stop 87
ggatctgctgtttgaagcgcagcag

SEQ ID NO: 7951 - DNA, 25 bp, Artificial
  probe
  misc_feature (1)..(25): SEQ ID NO: 7916; AFFX-BioB-5_at; Start 79; Stop 103
gcgcagcaggtgcatcgccagcatt

SEQ ID NO: 7952 - DNA, 25 bp, Artificial
  probe
  misc_feature (1)..(25): SEQ ID NO: 7916; AFFX-BioB-5_at; Start 84; Stop 108
gcaggtgcatcgccagcatttcgat

SEQ ID NO: 7953 - DNA, 25 bp, Artificial
  probe
  misc_feature (1)..(25): SEQ ID NO: 7916; AFFX-BioB-5_at; Start 90; Stop 114
gcatcgccagcatttcgatcctcgt

SEQ ID NO: 7954 - DNA, 25 bp, Artificial
  probe
  misc_feature (1)..(25): SEQ ID NO: 7916; AFFX-BioB-5_at; Start 99; Stop 123
gcatttcgatcctcgtcaggtgcag

SEQ ID NO: 7955 - DNA, 25 bp, Artificial
  probe
  misc_feature (1)..(25): SEQ ID NO: 7916; AFFX-BioB-5_at; Start 105; Stop 129
cgatcctcgtcaggtgcaggtcagc

SEQ ID NO: 7956 - DNA, 25 bp, Artificial
  probe
  misc_feature (1)..(25): SEQ ID NO: 7916; AFFX-BioB-5_at; Start 111; Stop 135
tcgtcaggtgcaggtcagcacgttg

SEQ ID NO: 7957 - DNA, 25 bp, Artificial
  probe
  misc_feature (1)..(25): SEQ ID NO: 7916; AFFX-BioB-5_at; Start 120; Stop 144
gcaggtcagcacgttgctgtcgatt

SEQ ID NO: 7958 - DNA, 25 bp, Artificial
  probe
  misc_feature (1)..(25): SEQ ID NO: 7916; AFFX-BioB-5_at; Start 126; Stop 150
cagcacgttgctgtcgattaagacc

SEQ ID NO: 7959 - DNA, 25 bp, Artificial
  probe
  misc_feature (1)..(25): SEQ ID NO: 7916; AFFX-BioB-5_at; Start 135; Stop 159
gctgtcgattaagaccggagcttgt

SEQ ID NO: 7960 - DNA, 25 bp, Artificial
  probe
  misc_feature (1)..(25): SEQ ID NO: 7916; AFFX-BioB-5_at; Start 153; Stop 177
agcttgtccggaagattgcaaatac

SEQ ID NO: 7961 - DNA, 25 bp, Artificial
  probe
  misc_feature (1)..(25): SEQ ID NO: 7916; AFFX-BioB-5_at; Start 165; Stop 189
agattgcaaatactgcccgcaaacg

SEQ ID NO: 7962 - DNA, 25 bp, Artificial
  probe
  misc_feature (1)..(25): SEQ ID NO: 7916; AFFX-BioB-5_at; Start 171; Stop 195
caaatactgcccgcaaacgtcgcgc

SEQ ID NO: 7963 - DNA, 25 bp, Artificial
  probe
  misc_feature (1)..(25): SEQ ID NO: 7916; AFFX-BioB-5_at; Start 234; Stop 258
tgaacaggtgctggagtcggcgcgc

SEQ ID NO: 7964 - DNA, 25 bp, Artificial
  probe
  misc_feature (1)..(25): SEQ ID NO: 7916; AFFX-BioB-5_at; Start 246; Stop 270
ggagtcggcgcgcaaagcgaaagcg

SEQ ID NO: 7965 - DNA, 25 bp, Artificial
  probe
  misc_feature (1)..(25): SEQ ID NO: 7916; AFFX-BioB-M_at; Start 671; Stop 695
tggtgaaggtgaaaggcacgccgct

SEQ ID NO: 7966 - DNA, 25 bp, Artificial
  probe
  misc_feature (1)..(25): SEQ ID NO: 7916; AFFX-BioB-M_at; Start 688; Stop 712
acgccgcttgccgataacgatgatg

SEQ ID NO: 7967 - DNA, 25 bp, Artificial
  probe
  misc_feature (1)..(25): SEQ ID NO: 7916; AFFX-BioB-M_at; Start 471; Stop 495
gccggagttttacggcaatatcatc

SEQ ID NO: 7968 - DNA, 25 bp, Artificial
  probe
  misc_feature (1)..(25): SEQ ID NO: 7916; AFFX-BioB-M_at; Start 695; Stop 719
ttgccgataacgatgatgtcgatgc

SEQ ID NO: 7969 - DNA, 25 bp, Artificial
  probe
  misc_feature (1)..(25): SEQ ID NO: 7916; AFFX-BioB-M_at; Start 477; Stop 501
gttttacggcaatatcatcaccaca

SEQ ID NO: 7970 - DNA, 25 bp, Artificial
  probe
  misc_feature (1)..(25): SEQ ID NO: 7916; AFFX-BioB-M_at; Start 704; Stop 728
acgatgatgtcgatgcctttgattt

SEQ ID NO: 7971 - DNA, 25 bp, Artificial
  probe
  misc_feature (1)..(25): SEQ ID NO: 7916; AFFX-BioB-M_at; Start 485; Stop 509
gcaatatcatcaccacacgcactta

SEQ ID NO: 7972 - DNA, 25 bp, Artificial
  probe
  misc_feature (1)..(25): SEQ ID NO: 7916; AFFX-BioB-M_at; Start 493; Stop 517
atcaccacacgcacttatcaggaac

SEQ ID NO: 7973 - DNA, 25 bp, Artificial
  probe
  misc_feature (1)..(25): SEQ ID NO: 7916; AFFX-BioB-M_at; Start 501; Stop 525
acgcacttatcaggaacgcctcgat

SEQ ID NO: 7974 - DNA, 25 bp, Artificial
  probe
  misc_feature (1)..(25): SEQ ID NO: 7916; AFFX-BioB-M_at; Start 524; Stop 548
atacgctggaaaaagtgcgcgatgc

SEQ ID NO: 7975 - DNA, 25 bp, Artificial
  probe
  misc_feature (1)..(25): SEQ ID NO: 7916; AFFX-BioB-M_at; Start 531; Stop 555
ggaaaaagtgcgcgatgccgggatc

SEQ ID NO: 7976 - DNA, 25 bp, Artificial
  probe
  misc_feature (1)..(25): SEQ ID NO: 7916; AFFX-BioB-M_at; Start 537; Stop 561
agtgcgcgatgccgggatcaaagtc

SEQ ID NO: 7977 - DNA, 25 bp, Artificial
  probe
  misc_feature (1)..(25): SEQ ID NO: 7916; AFFX-BioB-M_at; Start 547; Stop 571
gccgggatcaaagtctgttctggcg

SEQ ID NO: 7978 - DNA, 25 bp, Artificial
  probe
  misc_feature (1)..(25): SEQ ID NO: 7916; AFFX-BioB-M_at; Start 557; Stop 581
aagtctgttctggcggcattgtggg

SEQ ID NO: 7979 - DNA, 25 bp, Artificial
  probe
  misc_feature (1)..(25): SEQ ID NO: 7916; AFFX-BioB-M_at; Start 599; Stop 623
aagatcgcgccggattattgctgca

SEQ ID NO: 7980 - DNA, 25 bp, Artificial
  probe
  misc_feature (1)..(25): SEQ ID NO: 7916; AFFX-BioB-M_at; Start 607; Stop 631
gccggattattgctgcaactggcaa

SEQ ID NO: 7981 - DNA, 25 bp, Artificial
  probe
  misc_feature (1)..(25): SEQ ID NO: 7916; AFFX-BioB-M_at; Start 615; Stop 639
attgctgcaactggcaaacctgccg

SEQ ID NO: 7982 - DNA, 25 bp, Artificial
  probe
  misc_feature (1)..(25): SEQ ID NO: 7916; AFFX-BioB-M_at; Start 644; Stop 668
cgccggaaagcgtgccaatcaacat

SEQ ID NO: 7983 - DNA, 25 bp, Artificial
  probe
  misc_feature (1)..(25): SEQ ID NO: 7916; AFFX-BioB-M_at; Start 651; Stop 675
aagcgtgccaatcaacatgctggtg

SEQ ID NO: 7984 - DNA, 25 bp, Artificial
  probe
  misc_feature (1)..(25): SEQ ID NO: 7916; AFFX-BioB-M_at; Start 659; Stop 683
caatcaacatgctggtgaaggtgaa

SEQ ID NO: 7985 - DNA, 25 bp, Artificial
  probe
  misc_feature (1)..(25): SEQ ID NO: 7917; AFFX-BioC-3_at; Start 575; Stop 599
atgatgcgctcagtgccatgcgttc

SEQ ID NO: 7986 - DNA, 25 bp, Artificial
  probe
  misc_feature (1)..(25): SEQ ID NO: 7917; AFFX-BioC-3_at; Start 583; Stop 607
ctcagtgccatgcgttcgctgaaag

SEQ ID NO: 7987 - DNA, 25 bp, Artificial
  probe
  misc_feature (1)..(25): SEQ ID NO: 7917; AFFX-BioC-3_at; Start 591; Stop 615
catgcgttcgctgaaaggcatcggt

SEQ ID NO: 7988 - DNA, 25 bp, Artificial
  probe
  misc_feature (1)..(25): SEQ ID NO: 7917; AFFX-BioC-3_at; Start 601; Stop 625
ctgaaaggcatcggtgccacgcatc

SEQ ID NO: 7989 - DNA, 25 bp, Artificial
  probe
  misc_feature (1)..(25): SEQ ID NO: 7917; AFFX-BioC-3_at; Start 607; Stop 631
ggcatcggtgccacgcatcttcatg

SEQ ID NO: 7990 - DNA, 25 bp, Artificial
  probe
  misc_feature (1)..(25): SEQ ID NO: 7917; AFFX-BioC-3_at; Start 615; Stop 639
tgccacgcatcttcatgaagggcgc

SEQ ID NO: 7991 - DNA, 25 bp, Artificial
  probe
  misc_feature (1)..(25): SEQ ID NO: 7917; AFFX-BioC-3_at; Start 623; Stop 647
atcttcatgaagggcgcgacccgcg

SEQ ID NO: 7992 - DNA, 25 bp, Artificial
  probe
  misc_feature (1)..(25): SEQ ID NO: 7917; AFFX-BioC-3_at; Start 651; Stop 675
attaacgcgttcgcagttgcagcga

SEQ ID NO: 7993 - DNA, 25 bp, Artificial
  probe
  misc_feature (1)..(25): SEQ ID NO: 7917; AFFX-BioC-3_at; Start 437; Stop 461
tacccgaacgtcatcaggcgtggca

SEQ ID NO: 7994 - DNA, 25 bp, Artificial
  probe
  misc_feature (1)..(25): SEQ ID NO: 7917; AFFX-BioC-3_at; Start 657; Stop 681
gcgttcgcagttgcagcgattgcaa

SEQ ID NO: 7995 - DNA, 25 bp, Artificial
  probe
  misc_feature (1)..(25): SEQ ID NO: 7917; AFFX-BioC-3_at; Start 465; Stop 489
ggtggacgagcgtccgcatgctaat

SEQ ID NO: 7996 - DNA, 25 bp, Artificial
  probe
  misc_feature (1)..(25): SEQ ID NO: 7917; AFFX-BioC-3_at; Start 665; Stop 689
agttgcagcgattgcaactggcctg

SEQ ID NO: 7997 - DNA, 25 bp, Artificial
  probe
  misc_feature (1)..(25): SEQ ID NO: 7917; AFFX-BioC-3_at; Start 475; Stop 499
cgtccgcatgctaatcgctttttac

SEQ ID NO: 7998 - DNA, 25 bp, Artificial
  probe
  misc_feature (1)..(25): SEQ ID NO: 7917; AFFX-BioC-3_at; Start 495; Stop 519
tttaccgccagatgaaatcgaacag

SEQ ID NO: 7999 - DNA, 25 bp, Artificial
  probe
  misc_feature (1)..(25): SEQ ID NO: 7917; AFFX-BioC-3_at; Start 505; Stop 529
gatgaaatcgaacagtcgctgaacg

SEQ ID NO: 8000 - DNA, 25 bp, Artificial
  probe
  misc_feature (1)..(25): SEQ ID NO: 7917; AFFX-BioC-3_at; Start 515; Stop 539
aacagtcgctgaacggcgtgcatta

SEQ ID NO: 8001 - DNA, 25 bp, Artificial
  probe
  misc_feature (1)..(25): SEQ ID NO: 7917; AFFX-BioC-3_at; Start 543; Stop 567
acatcatattcagcccatcacgctg

SEQ ID NO: 8002 - DNA, 25 bp, Artificial
  probe
  misc_feature (1)..(25): SEQ ID NO: 7917; AFFX-BioC-3_at; Start 551; Stop 575
ttcagcccatcacgctgtggtttga

SEQ ID NO: 8003 - DNA, 25 bp, Artificial
  probe
  misc_feature (1)..(25): SEQ ID NO: 7917; AFFX-BioC-3_at; Start 559; Stop 583
atcacgctgtggtttgatgatgcgc

SEQ ID NO: 8004 - DNA, 25 bp, Artificial
  probe
  misc_feature (1)..(25): SEQ ID NO: 7917; AFFX-BioC-3_at; Start 569; Stop 593
ggtttgatgatgcgctcagtgccat

SEQ ID NO: 8005 - DNA, 25 bp, Artificial
  probe
  misc_feature (1)..(25): SEQ ID NO: 7917; AFFX-BioC-5_at; Start 231; Stop 255
tgttcaggcacgccagaaggatgcc

SEQ ID NO: 8006 - DNA, 25 bp, Artificial
  probe
  misc_feature (1)..(25): SEQ ID NO: 7917; AFFX-BioC-5_at; Start 245; Stop 269
agaaggatgccgcagaccattatct

SEQ ID NO: 8007 - DNA, 25 bp, Artificial
  probe
  misc_feature (1)..(25): SEQ ID NO: 7917; AFFX-BioC-5_at; Start 253; Stop 277
gccgcagaccattatctggcgggag

SEQ ID NO: 8008 - DNA, 25 bp, Artificial
  probe
  misc_feature (1)..(25): SEQ ID NO: 7917; AFFX-BioC-5_at; Start 293; Stop 317
cgttagcgactgcgacgttcgatct

SEQ ID NO: 8009 - DNA, 25 bp, Artificial
  probe
  misc_feature (1)..(25): SEQ ID NO: 7917; AFFX-BioC-5_at; Start 305; Stop 329
cgacgttcgatcttgcatggagcaa

SEQ ID NO: 8010 - DNA, 25 bp, Artificial
  probe
  misc_feature (1)..(25): SEQ ID NO: 7917; AFFX-BioC-5_at; Start 313; Stop 337
gatcttgcatggagcaatctcgcag

SEQ ID NO: 8011 - DNA, 25 bp, Artificial
  probe
  misc_feature (1)..(25): SEQ ID NO: 7917; AFFX-BioC-5_at; Start 29; Stop 53
cagcggcatttggtcgggcagccgc

SEQ ID NO: 8012 - DNA, 25 bp, Artificial
  probe
  misc_feature (1)..(25): SEQ ID NO: 7917; AFFX-BioC-5_at; Start 327; Stop 351
caatctcgcagtgcagtggtgcggt

SEQ ID NO: 8013 - DNA, 25 bp, Artificial
  probe
  misc_feature (1)..(25): SEQ ID NO: 7917; AFFX-BioC-5_at; Start 41; Stop 65
gtcgggcagccgcacactatgagca

SEQ ID NO: 8014 - DNA, 25 bp, Artificial
  probe
  misc_feature (1)..(25): SEQ ID NO: 7917; AFFX-BioC-5_at; Start 353; Stop 377
atttatccacggcactccgcgagct

SEQ ID NO: 8015 - DNA, 25 bp, Artificial
  probe
  misc_feature (1)..(25): SEQ ID NO: 7917; AFFX-BioC-5_at; Start 51; Stop 75
cgcacactatgagcaacatgcagat

SEQ ID NO: 8016 - DNA, 25 bp, Artificial
  probe
  misc_feature (1)..(25): SEQ ID NO: 7917; AFFX-BioC-5_at; Start 65; Stop 89
aacatgcagatctacagcgccagag

SEQ ID NO: 8017 - DNA, 25 bp, Artificial
  probe
  misc_feature (1)..(25): SEQ ID NO: 7917; AFFX-BioC-5_at; Start 77; Stop 101
tacagcgccagagtgctgacgcctt

SEQ ID NO: 8018 - DNA, 25 bp, Artificial
  probe
  misc_feature (1)..(25): SEQ ID NO: 7917; AFFX-BioC-5_at; Start 87; Stop 111
gagtgctgacgccttactggcaatg

SEQ ID NO: 8019 - DNA, 25 bp, Artificial
  probe
  misc_feature (1)..(25): SEQ ID NO: 7917; AFFX-BioC-5_at; Start 101; Stop 125
tactggcaatgcttccacagcgtaa

SEQ ID NO: 8020 - DNA, 25 bp, Artificial
  probe
  misc_feature (1)..(25): SEQ ID NO: 7917; AFFX-BioC-5_at; Start 147; Stop 171
gggttgtggacctggctggatgagc

SEQ ID NO: 8021 - DNA, 25 bp, Artificial
  probe
  misc_feature (1)..(25): SEQ ID NO: 7917; AFFX-BioC-5_at; Start 167; Stop 191
tgagccgccactggcgggaacgtca

SEQ ID NO: 8022 - DNA, 25 bp, Artificial
  probe
  misc_feature (1)..(25): SEQ ID NO: 7917; AFFX-BioC-5_at; Start 193; Stop 217
gcgcaggtgacggccttagatctct

SEQ ID NO: 8023 - DNA, 25 bp, Artificial
  probe
  misc_feature (1)..(25): SEQ ID NO: 7917; AFFX-BioC-5_at; Start 205; Stop 229
gccttagatctctcgccgccaatgc

SEQ ID NO: 8024 - DNA, 25 bp, Artificial
  probe
  misc_feature (1)..(25): SEQ ID NO: 7917; AFFX-BioC-5_at; Start 219; Stop 243
gccgccaatgcttgttcaggcacgc

SEQ ID NO: 8025 - DNA, 25 bp, Artificial
  probe
  misc_feature (1)..(25): SEQ ID NO: 7918; AFFX-BioDn-3_at; Start 544; Stop 568
cgtcacgctgaatatatgaccacgc

SEQ ID NO: 8026 - DNA, 25 bp, Artificial
  probe
  misc_feature (1)..(25): SEQ ID NO: 7918; AFFX-BioDn-3_at; Start 548; Stop 572
acgctgaatatatgaccacgctcac

SEQ ID NO: 8027 - DNA, 25 bp, Artificial
  probe
  misc_feature (1)..(25): SEQ ID NO: 7918; AFFX-BioDn-3_at; Start 551; Stop 575
ctgaatatatgaccacgctcacccg

SEQ ID NO: 8028 - DNA, 25 bp, Artificial
  probe
  misc_feature (1)..(25): SEQ ID NO: 7918; AFFX-BioDn-3_at; Start 553; Stop 577
gaatatatgaccacgctcacccgca

SEQ ID NO: 8029 - DNA, 25 bp, Artificial
  probe
  misc_feature (1)..(25): SEQ ID NO: 7918; AFFX-BioDn-3_at; Start 572; Stop 596
cccgcatgattcccgcgccgctgct

SEQ ID NO: 8030 - DNA, 25 bp, Artificial
  probe
  misc_feature (1)..(25): SEQ ID NO: 7918; AFFX-BioDn-3_at; Start 576; Stop 600
catgattcccgcgccgctgctggga

SEQ ID NO: 8031 - DNA, 25 bp, Artificial
  probe
  misc_feature (1)..(25): SEQ ID NO: 7918; AFFX-BioDn-3_at; Start 579; Stop 603
gattcccgcgccgctgctgggagag

SEQ ID NO: 8032 - DNA, 25 bp, Artificial
  probe
  misc_feature (1)..(25): SEQ ID NO: 7918; AFFX-BioDn-3_at; Start 585; Stop 609
cgcgccgctgctgggagagatcccc

SEQ ID NO: 8033 - DNA, 25 bp, Artificial
  probe
  misc_feature (1)..(25): SEQ ID NO: 7918; AFFX-BioDn-3_at; Start 589; Stop 613
ccgctgctgggagagatcccctggc

SEQ ID NO: 8034 - DNA, 25 bp, Artificial
  probe
  misc_feature (1)..(25): SEQ ID NO: 7918; AFFX-BioDn-3_at; Start 592; Stop 616
ctgctgggagagatcccctggcttg

SEQ ID NO: 8035 - DNA, 25 bp, Artificial
  probe
  misc_feature (1)..(25): SEQ ID NO: 7918; AFFX-BioDn-3_at; Start 594; Stop 618
gctgggagagatcccctggcttgca

SEQ ID NO: 8036 - DNA, 25 bp, Artificial
  probe
  misc_feature (1)..(25): SEQ ID NO: 7918; AFFX-BioDn-3_at; Start 598; Stop 622
ggagagatcccctggcttgcagaaa

SEQ ID NO: 8037 - DNA, 25 bp, Artificial
  probe
  misc_feature (1)..(25): SEQ ID NO: 7918; AFFX-BioDn-3_at; Start 343; Stop 367
ggtgctggcggctggtttacgccgc

SEQ ID NO: 8038 - DNA, 25 bp, Artificial
  probe
  misc_feature (1)..(25): SEQ ID NO: 7918; AFFX-BioDn-3_at; Start 601; Stop 625
gagatcccctggcttgcagaaaatc

SEQ ID NO: 8039 - DNA, 25 bp, Artificial
  probe
  misc_feature (1)..(25): SEQ ID NO: 7918; AFFX-BioDn-3_at; Start 367; Stop 391
ctttctgacactttcacttttgcag

SEQ ID NO: 8040 - DNA, 25 bp, Artificial
  probe
  misc_feature (1)..(25): SEQ ID NO: 7918; AFFX-BioDn-3_at; Start 604; Stop 628
atcccctggcttgcagaaaatccag

SEQ ID NO: 8041 - DNA, 25 bp, Artificial
  probe
  misc_feature (1)..(25): SEQ ID NO: 7918; AFFX-BioDn-3_at; Start 372; Stop 396
tgacactttcacttttgcagattgg

SEQ ID NO: 8042 - DNA, 25 bp, Artificial
  probe
  misc_feature (1)..(25): SEQ ID NO: 7918; AFFX-BioDn-3_at; Start 385; Stop 409
tttgcagattgggtaacacaggaac

SEQ ID NO: 8043 - DNA, 25 bp, Artificial
  probe
  misc_feature (1)..(25): SEQ ID NO: 7918; AFFX-BioDn-3_at; Start 539; Stop 563
gaaaacgtcacgctgaatatatgac

SEQ ID NO: 8044 - DNA, 25 bp, Artificial
  probe
  misc_feature (1)..(25): SEQ ID NO: 7918; AFFX-BioDn-3_at; Start 541; Stop 565
aaacgtcacgctgaatatatgacca

SEQ ID NO: 8045 - DNA, 25 bp, Artificial
  probe
  misc_feature (1)..(25): SEQ ID NO: 7918; AFFX-BioDn-5_at; Start 160; Stop 184
gcgctggcgttacagcgcaacagca

SEQ ID NO: 8046 - DNA, 25 bp, Artificial
  probe
  misc_feature (1)..(25): SEQ ID NO: 7918; AFFX-BioDn-5_at; Start 167; Stop 191
cgttacagcgcaacagcagcctgca

SEQ ID NO: 8047 - DNA, 25 bp, Artificial
  probe
  misc_feature (1)..(25): SEQ ID NO: 7918; AFFX-BioDn-5_at; Start 173; Stop 197
agcgcaacagcagcctgcagctgga

SEQ ID NO: 8048 - DNA, 25 bp, Artificial
  probe
  misc_feature (1)..(25): SEQ ID NO: 7918; AFFX-BioDn-5_at; Start 180; Stop 204
cagcagcctgcagctggattacgca

SEQ ID NO: 8049 - DNA, 25 bp, Artificial
  probe
  misc_feature (1)..(25): SEQ ID NO: 7918; AFFX-BioDn-5_at; Start 187; Stop 211
ctgcagctggattacgcaacagtaa

SEQ ID NO: 8050 - DNA, 25 bp, Artificial
  probe
  misc_feature (1)..(25): SEQ ID NO: 7918; AFFX-BioDn-5_at; Start 249; Stop 273
catcagcgcgcaagagggcagaccg

SEQ ID NO: 8051 - DNA, 25 bp, Artificial
  probe
  misc_feature (1)..(25): SEQ ID NO: 7918; AFFX-BioDn-5_at; Start 257; Stop 281
cgcaagagggcagaccgatagaatc

SEQ ID NO: 8052 - DNA, 25 bp, Artificial
  probe
  misc_feature (1)..(25): SEQ ID NO: 7918; AFFX-BioDn-5_at; Start 264; Stop 288
gggcagaccgatagaatcattggta

SEQ ID NO: 8053 - DNA, 25 bp, Artificial
  probe
  misc_feature (1)..(25): SEQ ID NO: 7918; AFFX-BioDn-5_at; Start 269; Stop 293
gaccgatagaatcattggtaatgag

SEQ ID NO: 8054 - DNA, 25 bp, Artificial
  probe
  misc_feature (1)..(25): SEQ ID NO: 7918; AFFX-BioDn-5_at; Start 276; Stop 300
agaatcattggtaatgagcgccgga

SEQ ID NO: 8055 - DNA, 25 bp, Artificial
  probe
  misc_feature (1)..(25): SEQ ID NO: 7918; AFFX-BioDn-5_at; Start 37; Stop 61
gggaaaactgtcgccagttgtgcac

SEQ ID NO: 8056 - DNA, 25 bp, Artificial
  probe
  misc_feature (1)..(25): SEQ ID NO: 7918; AFFX-BioDn-5_at; Start 283; Stop 307
ttggtaatgagcgccggattacgcg

SEQ ID NO: 8057 - DNA, 25 bp, Artificial
  probe
  misc_feature (1)..(25): SEQ ID NO: 7918; AFFX-BioDn-5_at; Start 48; Stop 72
cgccagttgtgcacttttacaagcc

SEQ ID NO: 8058 - DNA, 25 bp, Artificial
  probe
  misc_feature (1)..(25): SEQ ID NO: 7918; AFFX-BioDn-5_at; Start 289; Stop 313
atgagcgccggattacgcgcgcttg

SEQ ID NO: 8059 - DNA, 25 bp, Artificial
  probe
  misc_feature (1)..(25): SEQ ID NO: 7918; AFFX-BioDn-5_at; Start 59; Stop 83
cacttttacaagccgcaaaggcagc

SEQ ID NO: 8060 - DNA, 25 bp, Artificial
  probe
  misc_feature (1)..(25): SEQ ID NO: 7918; AFFX-BioDn-5_at; Start 67; Stop 91
caagccgcaaaggcagcaggctacc

SEQ ID NO: 8061 - DNA, 25 bp, Artificial
  probe
  misc_feature (1)..(25): SEQ ID NO: 7918; AFFX-BioDn-5_at; Start 73; Stop 97
gcaaaggcagcaggctaccggacgg

SEQ ID NO: 8062 - DNA, 25 bp, Artificial
  probe
  misc_feature (1)..(25): SEQ ID NO: 7918; AFFX-BioDn-5_at; Start 141; Stop 165
aggtttacgcaatagcgacgcgctg

SEQ ID NO: 8063 - DNA, 25 bp, Artificial
  probe
  misc_feature (1)..(25): SEQ ID NO: 7918; AFFX-BioDn-5_at; Start 148; Stop 172
cgcaatagcgacgcgctggcgttac

SEQ ID NO: 8064 - DNA, 25 bp, Artificial
  probe
  misc_feature (1)..(25): SEQ ID NO: 7918; AFFX-BioDn-5_at; Start 155; Stop 179
gcgacgcgctggcgttacagcgcaa

SEQ ID NO: 8065 - DNA, 25 bp, Artificial
  probe
  misc_feature (1)..(25): SEQ ID NO: 7919; AFFX-CreX-3_at; Start 659; Stop 683
tggtcgagcgatggatttccgtctc

SEQ ID NO: 8066 - DNA, 25 bp, Artificial
  probe
  misc_feature (1)..(25): SEQ ID NO: 7919; AFFX-CreX-3_at; Start 669; Stop 693
atggatttccgtctctggtgtagct

SEQ ID NO: 8067 - DNA, 25 bp, Artificial
  probe
  misc_feature (1)..(25): SEQ ID NO: 7919; AFFX-CreX-3_at; Start 679; Stop 703
gtctctggtgtagctgatgatccga

SEQ ID NO: 8068 - DNA, 25 bp, Artificial
  probe
  misc_feature (1)..(25): SEQ ID NO: 7919; AFFX-CreX-3_at; Start 687; Stop 711
tgtagctgatgatccgaataactac

SEQ ID NO: 8069 - DNA, 25 bp, Artificial
  probe
  misc_feature (1)..(25): SEQ ID NO: 7919; AFFX-CreX-3_at; Start 757; Stop 781
accagccagctatcaactcgcgccc

SEQ ID NO: 8070 - DNA, 25 bp, Artificial
  probe
  misc_feature (1)..(25): SEQ ID NO: 7919; AFFX-CreX-3_at; Start 799; Stop 823
gcaactcatcgattgatttacggcg

SEQ ID NO: 8071 - DNA, 25 bp, Artificial
  probe
  misc_feature (1)..(25): SEQ ID NO: 7919; AFFX-CreX-3_at; Start 809; Stop 833
gattgatttacggcgctaaggatga

SEQ ID NO: 8072 - DNA, 25 bp, Artificial
  probe
  misc_feature (1)..(25): SEQ ID NO: 7919; AFFX-CreX-3_at; Start 825; Stop 849
taaggatgactctggtcagagatac

SEQ ID NO: 8073 - DNA, 25 bp, Artificial
  probe
  misc_feature (1)..(25): SEQ ID NO: 7919; AFFX-CreX-3_at; Start 837; Stop 861
tggtcagagatacctggcctggtct

SEQ ID NO: 8074 - DNA, 25 bp, Artificial
  probe
  misc_feature (1)..(25): SEQ ID NO: 7919; AFFX-CreX-3_at; Start 855; Stop 879
ctggtctggacacagtgcccgtgtc

SEQ ID NO: 8075 - DNA, 25 bp, Artificial
  probe
  misc_feature (1)..(25): SEQ ID NO: 7919; AFFX-CreX-3_at; Start 869; Stop 893
gtgcccgtgtcggagccgcgcgaga

SEQ ID NO: 8076 - DNA, 25 bp, Artificial
  probe
  misc_feature (1)..(25): SEQ ID NO: 7919; AFFX-CreX-3_at; Start 889; Stop 913
cgagatatggcccgcgctggagttt

SEQ ID NO: 8077 - DNA, 25 bp, Artificial
  probe
  misc_feature (1)..(25): SEQ ID NO: 7919; AFFX-CreX-3_at; Start 907; Stop 931
ggagtttcaataccggagatcatgc

SEQ ID NO: 8078 - DNA, 25 bp, Artificial
  probe
  misc_feature (1)..(25): SEQ ID NO: 7919; AFFX-CreX-3_at; Start 921; Stop 945
ggagatcatgcaagctggtggctgg

SEQ ID NO: 8079 - DNA, 25 bp, Artificial
  probe
  misc_feature (1)..(25): SEQ ID NO: 7919; AFFX-CreX-3_at; Start 935; Stop 959
ctggtggctggaccaatgtaaatat

SEQ ID NO: 8080 - DNA, 25 bp, Artificial
  probe
  misc_feature (1)..(25): SEQ ID NO: 7919; AFFX-CreX-3_at; Start 947; Stop 971
ccaatgtaaatattgtcatgaacta

SEQ ID NO: 8081 - DNA, 25 bp, Artificial
  probe
  misc_feature (1)..(25): SEQ ID NO: 7919; AFFX-CreX-3_at; Start 605; Stop 629
cgctggttagcaccgcaggtgtaga

SEQ ID NO: 8082 - DNA, 25 bp, Artificial
  probe
  misc_feature (1)..(25): SEQ ID NO: 7919; AFFX-CreX-3_at; Start 959; Stop 983
ttgtcatgaactatatccgtaacct

SEQ ID NO: 8083 - DNA, 25 bp, Artificial
  probe
  misc_feature (1)..(25): SEQ ID NO: 7919; AFFX-CreX-3_at; Start 615; Stop 639
caccgcaggtgtagagaaggcactt

SEQ ID NO: 8084 - DNA, 25 bp, Artificial
  probe
  misc_feature (1)..(25): SEQ ID NO: 7919; AFFX-CreX-3_at; Start 987; Stop 1011
tagtgaaacaggggcaatggtgcgc

SEQ ID NO: 8085 - DNA, 25 bp, Artificial
  probe
  misc_feature (1)..(25): SEQ ID NO: 7919; AFFX-CreX-5_at; Start 85; Stop 109
gacatgttcagggatcgccaggcgt

SEQ ID NO: 8086 - DNA, 25 bp, Artificial
  probe
  misc_feature (1)..(25): SEQ ID NO: 7919; AFFX-CreX-5_at; Start 101; Stop 125
gccaggcgttttctgagcatacctg

SEQ ID NO: 8087 - DNA, 25 bp, Artificial
  probe
  misc_feature (1)..(25): SEQ ID NO: 7919; AFFX-CreX-5_at; Start 157; Stop 181
gcggcatggtgcaagttgaataacc

SEQ ID NO: 8088 - DNA, 25 bp, Artificial
  probe
  misc_feature (1)..(25): SEQ ID NO: 7919; AFFX-CreX-5_at; Start 205; Stop 229
gaagatgttcgcgattatcttctat

SEQ ID NO: 8089 - DNA, 25 bp, Artificial
  probe
  misc_feature (1)..(25): SEQ ID NO: 7919; AFFX-CreX-5_at; Start 225; Stop 249
tctatatcttcaggcgcgcggtctg

SEQ ID NO: 8090 - DNA, 25 bp, Artificial
  probe
  misc_feature (1)..(25): SEQ ID NO: 7919; AFFX-CreX-5_at; Start 267; Stop 291
gcaacatttgggccagctaaacatg

SEQ ID NO: 8091 - DNA, 25 bp, Artificial
  probe
  misc_feature (1)..(25): SEQ ID NO: 7919; AFFX-CreX-5_at; Start 279; Stop 303
ccagctaaacatgcttcatcgtcgg

SEQ ID NO: 8092 - DNA, 25 bp, Artificial
  probe
  misc_feature (1)..(25): SEQ ID NO: 7919; AFFX-CreX-5_at; Start 305; Stop 329
ccgggctgccacgaccaagtgacag

SEQ ID NO: 8093 - DNA, 25 bp, Artificial
  probe
  misc_feature (1)..(25): SEQ ID NO: 7919; AFFX-CreX-5_at; Start 317; Stop 341
gaccaagtgacagcaatgctgtttc

SEQ ID NO: 8094 - DNA, 25 bp, Artificial
  probe
  misc_feature (1)..(25): SEQ ID NO: 7919; AFFX-CreX-5_at; Start 331; Stop 355
aatgctgtttcactggttatgcggc

SEQ ID NO: 8095 - DNA, 25 bp, Artificial
  probe
  misc_feature (1)..(25): SEQ ID NO: 7919; AFFX-CreX-5_at; Start 377; Stop 401
atgccggtgaacgtgcaaaacaggc

SEQ ID NO: 8096 - DNA, 25 bp, Artificial
  probe
  misc_feature (1)..(25): SEQ ID NO: 7919; AFFX-CreX-5_at; Start 387; Stop 411
acgtgcaaaacaggctctagcgttc

SEQ ID NO: 8097 - DNA, 25 bp, Artificial
  probe
  misc_feature (1)..(25): SEQ ID NO: 7919; AFFX-CreX-5_at; Start 401; Stop 425
ctctagcgttcgaacgcactgattt

SEQ ID NO: 8098 - DNA, 25 bp, Artificial
  probe
  misc_feature (1)..(25): SEQ ID NO: 7919; AFFX-CreX-5_at; Start 435; Stop 459
tcgttcactcatggaaaatagcgat

SEQ ID NO: 8099 - DNA, 25 bp, Artificial
  probe
  misc_feature (1)..(25): SEQ ID NO: 7919; AFFX-CreX-5_at; Start 29; Stop 53
atttgcctgcattaccggtcgatgc

SEQ ID NO: 8100 - DNA, 25 bp, Artificial
  probe
  misc_feature (1)..(25): SEQ ID NO: 7919; AFFX-CreX-5_at; Start 445; Stop 469
atggaaaatagcgatcgctgccagg

SEQ ID NO: 8101 - DNA, 25 bp, Artificial
  probe
  misc_feature (1)..(25): SEQ ID NO: 7919; AFFX-CreX-5_at; Start 41; Stop 65
taccggtcgatgcaacgagtgatga

SEQ ID NO: 8102 - DNA, 25 bp, Artificial
  probe
  misc_feature (1)..(25): SEQ ID NO: 7919; AFFX-CreX-5_at; Start 539; Stop 563
tcagggttaaagatatctcacgtac

SEQ ID NO: 8103 - DNA, 25 bp, Artificial
  probe
  misc_feature (1)..(25): SEQ ID NO: 7919; AFFX-CreX-5_at; Start 57; Stop 81
gagtgatgaggttcgcaagaacctg

SEQ ID NO: 8104 - DNA, 25 bp, Artificial
  probe
  misc_feature (1)..(25): SEQ ID NO: 7919; AFFX-CreX-5_at; Start 71; Stop 95
gcaagaacctgatggacatgttcag

SEQ ID NO: 8105 - DNA, 25 bp, Artificial
  probe
  misc_feature (1)..(25): SEQ ID NO: 7920; AFFX-DapX-3_at; Start 2768; Stop 2792
tgatcaggcaattcggtcaattgtc

SEQ ID NO: 8106 - DNA, 25 bp, Artificial
  probe
  misc_feature (1)..(25): SEQ ID NO: 7920; AFFX-DapX-3_at; Start 2842; Stop 2866
aggatcgccatccggatcacggcaa

SEQ ID NO: 8107 - DNA, 25 bp, Artificial
  probe
  misc_feature (1)..(25): SEQ ID NO: 7920; AFFX-DapX-3_at; Start 2862; Stop 2886
ggcaatgcggctgcactggtggaag

SEQ ID NO: 8108 - DNA, 25 bp, Artificial
  probe
  misc_feature (1)..(25): SEQ ID NO: 7920; AFFX-DapX-3_at; Start 2694; Stop 2718
gctgaagcagcccgcatattaggcg

SEQ ID NO: 8109 - DNA, 25 bp, Artificial
  probe
  misc_feature (1)..(25): SEQ ID NO: 7920; AFFX-DapX-3_at; Start 2852; Stop 2876
tccggatcacggcaatgcggctgca

SEQ ID NO: 8110 - DNA, 25 bp, Artificial
  probe
  misc_feature (1)..(25): SEQ ID NO: 7920; AFFX-DapX-3_at; Start 2778; Stop 2802
attcggtcaattgtcactgtcatca

SEQ ID NO: 8111 - DNA, 25 bp, Artificial
  probe
  misc_feature (1)..(25): SEQ ID NO: 7920; AFFX-DapX-3_at; Start 2790; Stop 2814
gtcactgtcatcagaatctgtcggc

SEQ ID NO: 8112 - DNA, 25 bp, Artificial
  probe
  misc_feature (1)..(25): SEQ ID NO: 7920; AFFX-DapX-3_at; Start 2688; Stop 2712
gaagcagctgaagcagcccgcatat

SEQ ID NO: 8113 - DNA, 25 bp, Artificial
  probe
  misc_feature (1)..(25): SEQ ID NO: 7920; AFFX-DapX-3_at; Start 3088; Stop 3112
ctactcctctgacgaatgggtatat

SEQ ID NO: 8114 - DNA, 25 bp, Artificial
  probe
  misc_feature (1)..(25): SEQ ID NO: 7920; AFFX-DapX-3_at; Start 2784; Stop 2808
tcaattgtcactgtcatcagaatct

SEQ ID NO: 8115 - DNA, 25 bp, Artificial
  probe
  misc_feature (1)..(25): SEQ ID NO: 7920; AFFX-DapX-3_at; Start 3004; Stop 3028
ttgatatctcggatacaatagaggc

SEQ ID NO: 8116 - DNA, 25 bp, Artificial
  probe
  misc_feature (1)..(25): SEQ ID NO: 7920; AFFX-DapX-3_at; Start 2726; Stop 2750
aagaattcagctaacgcttccagac

SEQ ID NO: 8117 - DNA, 25 bp, Artificial
  probe
  misc_feature (1)..(25): SEQ ID NO: 7920; AFFX-DapX-3_at; Start 2700; Stop 2724
gcagcccgcatattaggcgcagata

SEQ ID NO: 8118 - DNA, 25 bp, Artificial
  probe
  misc_feature (1)..(25): SEQ ID NO: 7920; AFFX-DapX-3_at; Start 2684; Stop 2708
agaagaagcagctgaagcagcccgc

SEQ ID NO: 8119 - DNA, 25 bp, Artificial
  probe
  misc_feature (1)..(25): SEQ ID NO: 7920; AFFX-DapX-3_at; Start 2762; Stop 2786
aatgagtgatcaggcaattcggtca

SEQ ID NO: 8120 - DNA, 25 bp, Artificial
  probe
  misc_feature (1)..(25): SEQ ID NO: 7920; AFFX-DapX-3_at; Start 2932; Stop 2956
gccttccggcgcataaagtcagcaa

SEQ ID NO: 8121 - DNA, 25 bp, Artificial
  probe
  misc_feature (1)..(25): SEQ ID NO: 7920; AFFX-DapX-3_at; Start 2972; Stop 2996
gataaatggttttcatcagccggat

SEQ ID NO: 8122 - DNA, 25 bp, Artificial
  probe
  misc_feature (1)..(25): SEQ ID NO: 7920; AFFX-DapX-3_at; Start 3106; Stop 3130
ggtatattgaaatcgttgaagcgag

SEQ ID NO: 8123 - DNA, 25 bp, Artificial
  probe
  misc_feature (1)..(25): SEQ ID NO: 7920; AFFX-DapX-3_at; Start 2798; Stop 2822
catcagaatctgtcggccaaaagcg

SEQ ID NO: 8124 - DNA, 25 bp, Artificial
  probe
  misc_feature (1)..(25): SEQ ID NO: 7920; AFFX-DapX-3_at; Start 2996; Stop 3020
ttttgttattgatatctcggataca

SEQ ID NO: 8125 - DNA, 25 bp, Artificial
  probe
  misc_feature (1)..(25): SEQ ID NO: 7920; AFFX-DapX-5_at; Start 1786; Stop 1810
tgccaactattttgaggatgttgag

SEQ ID NO: 8126 - DNA, 25 bp, Artificial
  probe
  misc_feature (1)..(25): SEQ ID NO: 7920; AFFX-DapX-5_at; Start 1494; Stop 1518
tatctgatgtgatgcctgttgagtc

SEQ ID NO: 8127 - DNA, 25 bp, Artificial
  probe
  misc_feature (1)..(25): SEQ ID NO: 7920; AFFX-DapX-5_at; Start 1512; Stop 1536
ttgagtcagatgctttcatttacac

SEQ ID NO: 8128 - DNA, 25 bp, Artificial
  probe
  misc_feature (1)..(25): SEQ ID NO: 7920; AFFX-DapX-5_at; Start 1818; Stop 1842
agcttcatcatgaccagaagcttga

SEQ ID NO: 8129 - DNA, 25 bp, Artificial
  probe
  misc_feature (1)..(25): SEQ ID NO: 7920; AFFX-DapX-5_at; Start 1826; Stop 1850
catgaccagaagcttgacgcaccaa

SEQ ID NO: 8130 - DNA, 25 bp, Artificial
  probe
  misc_feature (1)..(25): SEQ ID NO: 7920; AFFX-DapX-5_at; Start 1728; Stop 1752
tcatcgcgccaaattttgcgctcgg

SEQ ID NO: 8131 - DNA, 25 bp, Artificial
  probe
  misc_feature (1)..(25): SEQ ID NO: 7920; AFFX-DapX-5_at; Start 1902; Stop 1926
agcagcaaggacatccggatgaaaa

SEQ ID NO: 8132 - DNA, 25 bp, Artificial
  probe
  misc_feature (1)..(25): SEQ ID NO: 7920; AFFX-DapX-5_at; Start 1618; Stop 1642
aaaaattgcattagagcacggagtc

SEQ ID NO: 8133 - DNA, 25 bp, Artificial
  probe
  misc_feature (1)..(25): SEQ ID NO: 7920; AFFX-DapX-5_at; Start 1848; Stop 1872
caagcggaactgcgcttaaaacagc

SEQ ID NO: 8134 - DNA, 25 bp, Artificial
  probe
  misc_feature (1)..(25): SEQ ID NO: 7920; AFFX-DapX-5_at; Start 1808; Stop 1832
gagattattgagcttcatcatgacc

SEQ ID NO: 8135 - DNA, 25 bp, Artificial
  probe
  misc_feature (1)..(25): SEQ ID NO: 7920; AFFX-DapX-5_at; Start 1502; Stop 1526
gtgatgcctgttgagtcagatgctt

SEQ ID NO: 8136 - DNA, 25 bp, Artificial
  probe
  misc_feature (1)..(25): SEQ ID NO: 7920; AFFX-DapX-5_at; Start 1834; Stop 1858
gaagcttgacgcaccaagcggaact

SEQ ID NO: 8137 - DNA, 25 bp, Artificial
  probe
  misc_feature (1)..(25): SEQ ID NO: 7920; AFFX-DapX-5_at; Start 1714; Stop 1738
agggatcggagccatcatcgcgcca

SEQ ID NO: 8138 - DNA, 25 bp, Artificial
  probe
  misc_feature (1)..(25): SEQ ID NO: 7920; AFFX-DapX-5_at; Start 1428; Stop 1452
tggcagaacgaacaccacattttga

SEQ ID NO: 8139 - DNA, 25 bp, Artificial
  probe
  misc_feature (1)..(25): SEQ ID NO: 7920; AFFX-DapX-5_at; Start 1746; Stop 1770
cgctcggtgcgatactgatgatgaa

SEQ ID NO: 8140 - DNA, 25 bp, Artificial
  probe
  misc_feature (1)..(25): SEQ ID NO: 7920; AFFX-DapX-5_at; Start 1722; Stop 1746
gagccatcatcgcgccaaattttgc

SEQ ID NO: 8141 - DNA, 25 bp, Artificial
  probe
  misc_feature (1)..(25): SEQ ID NO: 7920; AFFX-DapX-5_at; Start 1522; Stop 1546
tgctttcatttacacagatatccat

SEQ ID NO: 8142 - DNA, 25 bp, Artificial
  probe
  misc_feature (1)..(25): SEQ ID NO: 7920; AFFX-DapX-5_at; Start 1538; Stop 1562
gatatccatgcctgttttacagaaa

SEQ ID NO: 8143 - DNA, 25 bp, Artificial
  probe
  misc_feature (1)..(25): SEQ ID NO: 7920; AFFX-DapX-5_at; Start 1532; Stop 1556
tacacagatatccatgcctgtttta

SEQ ID NO: 8144 - DNA, 25 bp, Artificial
  probe
  misc_feature (1)..(25): SEQ ID NO: 7920; AFFX-DapX-5_at; Start 1738; Stop 1762
aaattttgcgctcggtgcgatactg

SEQ ID NO: 8145 - DNA, 25 bp, Artificial
  probe
  misc_feature (1)..(25): SEQ ID NO: 7920; AFFX-DapX-M_at; Start 2118; Stop 2142
tgaaaattgctttgatcgcgcatga

SEQ ID NO: 8146 - DNA, 25 bp, Artificial
  probe
  misc_feature (1)..(25): SEQ ID NO: 7920; AFFX-DapX-M_at; Start 2544; Stop 2568
gcttttggcgcccacagtgatgatg

SEQ ID NO: 8147 - DNA, 25 bp, Artificial
  probe
  misc_feature (1)..(25): SEQ ID NO: 7920; AFFX-DapX-M_at; Start 2154; Stop 2178
aggatatggttcaatttacgactgc

SEQ ID NO: 8148 - DNA, 25 bp, Artificial
  probe
  misc_feature (1)..(25): SEQ ID NO: 7920; AFFX-DapX-M_at; Start 2356; Stop 2380
cccgctgaccgcgcagccgcatgaa

SEQ ID NO: 8149 - DNA, 25 bp, Artificial
  probe
  misc_feature (1)..(25): SEQ ID NO: 7920; AFFX-DapX-M_at; Start 2164; Stop 2188
tcaatttacgactgcctatcgggat

SEQ ID NO: 8150 - DNA, 25 bp, Artificial
  probe
  misc_feature (1)..(25): SEQ ID NO: 7920; AFFX-DapX-M_at; Start 2410; Stop 2434
tgatgtgtattccattccgctcgcc

SEQ ID NO: 8151 - DNA, 25 bp, Artificial
  probe
  misc_feature (1)..(25): SEQ ID NO: 7920; AFFX-DapX-M_at; Start 2298; Stop 2322
agcaaatcggtgcactgatcgctgc

SEQ ID NO: 8152 - DNA, 25 bp, Artificial
  probe
  misc_feature (1)..(25): SEQ ID NO: 7920; AFFX-DapX-M_at; Start 2318; Stop 2342
gctgccaatgcactcgatcttgtca

SEQ ID NO: 8153 - DNA, 25 bp, Artificial
  probe
  misc_feature (1)..(25): SEQ ID NO: 7920; AFFX-DapX-M_at; Start 2556; Stop 2580
cacagtgatgatgtcgagatcggaa

SEQ ID NO: 8154 - DNA, 25 bp, Artificial
  probe
  misc_feature (1)..(25): SEQ ID NO: 7920; AFFX-DapX-M_at; Start 2464; Stop 2488
gcgcacacttgatgaaggtgttttc

SEQ ID NO: 8155 - DNA, 25 bp, Artificial
  probe
  misc_feature (1)..(25): SEQ ID NO: 7920; AFFX-DapX-M_at; Start 2530; Stop 2554
atgctgacgttcttgcttttggcgc

SEQ ID NO: 8156 - DNA, 25 bp, Artificial
  probe
  misc_feature (1)..(25): SEQ ID NO: 7920; AFFX-DapX-M_at; Start 2454; Stop 2478
aaattcttgtgcgcacacttgatga

SEQ ID NO: 8157 - DNA, 25 bp, Artificial
  probe
  misc_feature (1)..(25): SEQ ID NO: 7920; AFFX-DapX-M_at; Start 2428; Stop 2452
gctcgccacaaatatgggtactgcg

SEQ ID NO: 8158 - DNA, 25 bp, Artificial
  probe
  misc_feature (1)..(25): SEQ ID NO: 7920; AFFX-DapX-M_at; Start 2054; Stop 2078
atgaagattgatcagcttgtgtatg

SEQ ID NO: 8159 - DNA, 25 bp, Artificial
  probe
  misc_feature (1)..(25): SEQ ID NO: 7920; AFFX-DapX-M_at; Start 2020; Stop 2044
catgtcaggcgttaaactgtcagtc

SEQ ID NO: 8160 - DNA, 25 bp, Artificial
  probe
  misc_feature (1)..(25): SEQ ID NO: 7920; AFFX-DapX-M_at; Start 2200; Stop 2224
tcatgatctatacgcaaccggaacc

SEQ ID NO: 8161 - DNA, 25 bp, Artificial
  probe
  misc_feature (1)..(25): SEQ ID NO: 7920; AFFX-DapX-M_at; Start 2308; Stop 2332
tgcactgatcgctgccaatgcactc

SEQ ID NO: 8162 - DNA, 25 bp, Artificial
  probe
  misc_feature (1)..(25): SEQ ID NO: 7920; AFFX-DapX-M_at; Start 2384; Stop 2408
gatgtctcggcattaatccgtttat

SEQ ID NO: 8163 - DNA, 25 bp, Artificial
  probe
  misc_feature (1)..(25): SEQ ID NO: 7920; AFFX-DapX-M_at; Start 2238; Stop 2262
ttcatgaggcgacaggtcttcaaat

SEQ ID NO: 8164 - DNA, 25 bp, Artificial
  probe
  misc_feature (1)..(25): SEQ ID NO: 7920; AFFX-DapX-M_at; Start 2394; Stop 2418
cattaatccgtttatgtgatgtgta

SEQ ID NO: 8165 - DNA, 25 bp, Artificial
  probe
  misc_feature (1)..(25): SEQ ID NO: 7921; AFFX-LysX-3_at; Start 1071; Stop 1095
catattcatttgtatccaaggtgct

SEQ ID NO: 8166 - DNA, 25 bp, Artificial
  probe
  misc_feature (1)..(25): SEQ ID NO: 7921; AFFX-LysX-3_at; Start 1319; Stop 1343
cgtttcatcattcggcgtgcgaatt

SEQ ID NO: 8167 - DNA, 25 bp, Artificial
  probe
  misc_feature (1)..(25): SEQ ID NO: 7921; AFFX-LysX-3_at; Start 1134; Stop 1158
atgatgaaccgcttcatgccactga

SEQ ID NO: 8168 - DNA, 25 bp, Artificial
  probe
  misc_feature (1)..(25): SEQ ID NO: 7921; AFFX-LysX-3_at; Start 1305; Stop 1329
ataagctgtacaatcgtttcatcat

SEQ ID NO: 8169 - DNA, 25 bp, Artificial
  probe
  misc_feature (1)..(25): SEQ ID NO: 7921; AFFX-LysX-3_at; Start 1138; Stop 1162
tgaaccgcttcatgccactgaatac

SEQ ID NO: 8170 - DNA, 25 bp, Artificial
  probe
  misc_feature (1)..(25): SEQ ID NO: 7921; AFFX-LysX-3_at; Start 1117; Stop 1141
tattcgttatacggaagatgatgaa

SEQ ID NO: 8171 - DNA, 25 bp, Artificial
  probe
  misc_feature (1)..(25): SEQ ID NO: 7921; AFFX-LysX-3_at; Start 1313; Stop 1337
tacaatcgtttcatcattcggcgtg

SEQ ID NO: 8172 - DNA, 25 bp, Artificial
  probe
  misc_feature (1)..(25): SEQ ID NO: 7921; AFFX-LysX-3_at; Start 1077; Stop 1101
catttgtatccaaggtgctgaatct

SEQ ID NO: 8173 - DNA, 25 bp, Artificial
  probe
  misc_feature (1)..(25): SEQ ID NO: 7921; AFFX-LysX-3_at; Start 1131; Stop 1155
aagatgatgaaccgcttcatgccac

SEQ ID NO: 8174 - DNA, 25 bp, Artificial
  probe
  misc_feature (1)..(25): SEQ ID NO: 7921; AFFX-LysX-3_at; Start 1257; Stop 1281
gagacgcaggcacaactctttatac

SEQ ID NO: 8175 - DNA, 25 bp, Artificial
  probe
  misc_feature (1)..(25): SEQ ID NO: 7921; AFFX-LysX-3_at; Start 1316; Stop 1340
aatcgtttcatcattcggcgtgcga

SEQ ID NO: 8176 - DNA, 25 bp, Artificial
  probe
  misc_feature (1)..(25): SEQ ID NO: 7921; AFFX-LysX-3_at; Start 1254; Stop 1278
tgggagacgcaggcacaactcttta

SEQ ID NO: 8177 - DNA, 25 bp, Artificial
  probe
  misc_feature (1)..(25): SEQ ID NO: 7921; AFFX-LysX-3_at; Start 1061; Stop 1085
tggagagattcatattcatttgtat

SEQ ID NO: 8178 - DNA, 25 bp, Artificial
  probe
  misc_feature (1)..(25): SEQ ID NO: 7921; AFFX-LysX-3_at; Start 1068; Stop 1092
attcatattcatttgtatccaaggt

SEQ ID NO: 8179 - DNA, 25 bp, Artificial
  probe
  misc_feature (1)..(25): SEQ ID NO: 7921; AFFX-LysX-3_at; Start 1310; Stop 1334
ctgtacaatcgtttcatcattcggc

SEQ ID NO: 8180 - DNA, 25 bp, Artificial
  probe
  misc_feature (1)..(25): SEQ ID NO: 7921; AFFX-LysX-3_at; Start 1141; Stop 1165
accgcttcatgccactgaatacgtt

SEQ ID NO: 8181 - DNA, 25 bp, Artificial
  probe
  misc_feature (1)..(25): SEQ ID NO: 7921; AFFX-LysX-3_at; Start 1083; Stop 1107
tatccaaggtgctgaatcttggagg

SEQ ID NO: 8182 - DNA, 25 bp, Artificial
  probe
  misc_feature (1)..(25): SEQ ID NO: 7921; AFFX-LysX-3_at; Start 1266; Stop 1290
gcacaactctttatacggttggctc

SEQ ID NO: 8183 - DNA, 25 bp, Artificial
  probe
  misc_feature (1)..(25): SEQ ID NO: 7921; AFFX-LysX-3_at; Start 1079; Stop 1103
tttgtatccaaggtgctgaatcttg

SEQ ID NO: 8184 - DNA, 25 bp, Artificial
  probe
  misc_feature (1)..(25): SEQ ID NO: 7921; AFFX-LysX-3_at; Start 1308; Stop 1332
agctgtacaatcgtttcatcattcg

SEQ ID NO: 8185 - DNA, 25 bp, Artificial
  probe
  misc_feature (1)..(25): SEQ ID NO: 7921; AFFX-LysX-5_at; Start 514; Stop 538
gcaggcgtttatttctgcagggctg

SEQ ID NO: 8186 - DNA, 25 bp, Artificial
  probe
  misc_feature (1)..(25): SEQ ID NO: 7921; AFFX-LysX-5_at; Start 567; Stop 591
cattctcatcagtcgcaatgattca

SEQ ID NO: 8187 - DNA, 25 bp, Artificial
  probe
  misc_feature (1)..(25): SEQ ID NO: 7921; AFFX-LysX-5_at; Start 459; Stop 483
cacctctttacgtatatgatgtggc

SEQ ID NO: 8188 - DNA, 25 bp, Artificial
  probe
  misc_feature (1)..(25): SEQ ID NO: 7921; AFFX-LysX-5_at; Start 533; Stop 557
gggctgaaagcacaggtggcatatg

SEQ ID NO: 8189 - DNA, 25 bp, Artificial
  probe
  misc_feature (1)..(25): SEQ ID NO: 7921; AFFX-LysX-5_at; Start 621; Stop 645
atgtcgtatccggaggagagctata

SEQ ID NO: 8190 - DNA, 25 bp, Artificial
  probe
  misc_feature (1)..(25): SEQ ID NO: 7921; AFFX-LysX-5_at; Start 550; Stop 574
ggcatatgcgagcaaagcattctca

SEQ ID NO: 8191 - DNA, 25 bp, Artificial
  probe
  misc_feature (1)..(25): SEQ ID NO: 7921; AFFX-LysX-5_at; Start 509; Stop 533
tttaagcaggcgtttatttctgcag

SEQ ID NO: 8192 - DNA, 25 bp, Artificial
  probe
  misc_feature (1)..(25): SEQ ID NO: 7921; AFFX-LysX-5_at; Start 521; Stop 545
tttatttctgcagggctgaaagcac

SEQ ID NO: 8193 - DNA, 25 bp, Artificial
  probe
  misc_feature (1)..(25): SEQ ID NO: 7921; AFFX-LysX-5_at; Start 421; Stop 445
aggtgtggatgctctctatttagcg

SEQ ID NO: 8194 - DNA, 25 bp, Artificial
  probe
  misc_feature (1)..(25): SEQ ID NO: 7921; AFFX-LysX-5_at; Start 555; Stop 579
atgcgagcaaagcattctcatcagt

SEQ ID NO: 8195 - DNA, 25 bp, Artificial
  probe
  misc_feature (1)..(25): SEQ ID NO: 7921; AFFX-LysX-5_at; Start 411; Stop 435
tagaaatcggaggtgtggatgctct

SEQ ID NO: 8196 - DNA, 25 bp, Artificial
  probe
  misc_feature (1)..(25): SEQ ID NO: 7921; AFFX-LysX-5_at; Start 561; Stop 585
gcaaagcattctcatcagtcgcaat

SEQ ID NO: 8197 - DNA, 25 bp, Artificial
  probe
  misc_feature (1)..(25): SEQ ID NO: 7921; AFFX-LysX-5_at; Start 614; Stop 638
tctttagatgtcgtatccggaggag

SEQ ID NO: 8198 - DNA, 25 bp, Artificial
  probe
  misc_feature (1)..(25): SEQ ID NO: 7921; AFFX-LysX-5_at; Start 426; Stop 450
tggatgctctctatttagcggagaa

SEQ ID NO: 8199 - DNA, 25 bp, Artificial
  probe
  misc_feature (1)..(25): SEQ ID NO: 7921; AFFX-LysX-5_at; Start 579; Stop 603
tcgcaatgattcagctcgctgagga

SEQ ID NO: 8200 - DNA, 25 bp, Artificial
  probe
  misc_feature (1)..(25): SEQ ID NO: 7921; AFFX-LysX-5_at; Start 573; Stop 597
catcagtcgcaatgattcagctcgc

SEQ ID NO: 8201 - DNA, 25 bp, Artificial
  probe
  misc_feature (1)..(25): SEQ ID NO: 7921; AFFX-LysX-5_at; Start 470; Stop 494
gtatatgatgtggctttaatacgtg

SEQ ID NO: 8202 - DNA, 25 bp, Artificial
  probe
  misc_feature (1)..(25): SEQ ID NO: 7921; AFFX-LysX-5_at; Start 387; Stop 411
gcagacaaaatcaacatggtcattt

SEQ ID NO: 8203 - DNA, 25 bp, Artificial
  probe
  misc_feature (1)..(25): SEQ ID NO: 7921; AFFX-LysX-5_at; Start 635; Stop 659
ggagagctatatacggctgttgcag

SEQ ID NO: 8204 - DNA, 25 bp, Artificial
  probe
  misc_feature (1)..(25): SEQ ID NO: 7921; AFFX-LysX-5_at; Start 454; Stop 478
tggtacacctctttacgtatatgat

SEQ ID NO: 8205 - DNA, 25 bp, Artificial
  probe
  misc_feature (1)..(25): SEQ ID NO: 7921; AFFX-LysX-M_at; Start 903; Stop 927
tcgatcttcataacggacaaactga

SEQ ID NO: 8206 - DNA, 25 bp, Artificial
  probe
  misc_feature (1)..(25): SEQ ID NO: 7921; AFFX-LysX-M_at; Start 766; Stop 790
ctatgaaatcgcgcttcttgaagac

SEQ ID NO: 8207 - DNA, 25 bp, Artificial
  probe
  misc_feature (1)..(25): SEQ ID NO: 7921; AFFX-LysX-M_at; Start 738; Stop 762
gcatcggctgcattgtggtggataa

SEQ ID NO: 8208 - DNA, 25 bp, Artificial
  probe
  misc_feature (1)..(25): SEQ ID NO: 7921; AFFX-LysX-M_at; Start 850; Stop 874
agcgcatacgcatgactacattaca

SEQ ID NO: 8209 - DNA, 25 bp, Artificial
  probe
  misc_feature (1)..(25): SEQ ID NO: 7921; AFFX-LysX-M_at; Start 721; Stop 745
gatggcgcttgagcaccgcatcggc

SEQ ID NO: 8210 - DNA, 25 bp, Artificial
  probe
  misc_feature (1)..(25): SEQ ID NO: 7921; AFFX-LysX-M_at; Start 846; Stop 870
tagaagcgcatacgcatgactacat

SEQ ID NO: 8211 - DNA, 25 bp, Artificial
  probe
  misc_feature (1)..(25): SEQ ID NO: 7921; AFFX-LysX-M_at; Start 951; Stop 975
aatcggaacacattcagctgctggg

SEQ ID NO: 8212 - DNA, 25 bp, Artificial
  probe
  misc_feature (1)..(25): SEQ ID NO: 7921; AFFX-LysX-M_at; Start 946; Stop 970
attacaatcggaacacattcagctg

SEQ ID NO: 8213 - DNA, 25 bp, Artificial
  probe
  misc_feature (1)..(25): SEQ ID NO: 7921; AFFX-LysX-M_at; Start 855; Stop 879
atacgcatgactacattacaacggg

SEQ ID NO: 8214 - DNA, 25 bp, Artificial
  probe
  misc_feature (1)..(25): SEQ ID NO: 7921; AFFX-LysX-M_at; Start 957; Stop 981
aacacattcagctgctgggtgtcca

SEQ ID NO: 8215 - DNA, 25 bp, Artificial
  probe
  misc_feature (1)..(25): SEQ ID NO: 7921; AFFX-LysX-M_at; Start 726; Stop 750
cgcttgagcaccgcatcggctgcat

SEQ ID NO: 8216 - DNA, 25 bp, Artificial
  probe
  misc_feature (1)..(25): SEQ ID NO: 7921; AFFX-LysX-M_at; Start 828; Stop 852
ttcggatcacgcccggagtagaagc

SEQ ID NO: 8217 - DNA, 25 bp, Artificial
  probe
  misc_feature (1)..(25): SEQ ID NO: 7921; AFFX-LysX-M_at; Start 772; Stop 796
aatcgcgcttcttgaagacctatgt

SEQ ID NO: 8218 - DNA, 25 bp, Artificial
  probe
  misc_feature (1)..(25): SEQ ID NO: 7921; AFFX-LysX-M_at; Start 762; Stop 786
atttctatgaaatcgcgcttcttga

SEQ ID NO: 8219 - DNA, 25 bp, Artificial
  probe
  misc_feature (1)..(25): SEQ ID NO: 7921; AFFX-LysX-M_at; Start 961; Stop 985
cattcagctgctgggtgtccattgc

SEQ ID NO: 8220 - DNA, 25 bp, Artificial
  probe
  misc_feature (1)..(25): SEQ ID NO: 7921; AFFX-LysX-M_at; Start 733; Stop 757
gcaccgcatcggctgcattgtggtg

SEQ ID NO: 8221 - DNA, 25 bp, Artificial
  probe
  misc_feature (1)..(25): SEQ ID NO: 7921; AFFX-LysX-M_at; Start 807; Stop 831
gtcactccatcgatgttcttcttcg

SEQ ID NO: 8222 - DNA, 25 bp, Artificial
  probe
  misc_feature (1)..(25): SEQ ID NO: 7921; AFFX-LysX-M_at; Start 966; Stop 990
agctgctgggtgtccattgccatat

SEQ ID NO: 8223 - DNA, 25 bp, Artificial
  probe
  misc_feature (1)..(25): SEQ ID NO: 7921; AFFX-LysX-M_at; Start 832; Stop 856
gatcacgcccggagtagaagcgcat

SEQ ID NO: 8224 - DNA, 25 bp, Artificial
  probe
  misc_feature (1)..(25): SEQ ID NO: 7921; AFFX-LysX-M_at; Start 757; Stop 781
ggataatttctatgaaatcgcgctt

SEQ ID NO: 8225 - DNA, 25 bp, Artificial
  probe
  misc_feature (1)..(25): SEQ ID NO: 7922; AFFX-PheX-3_at; Start 3122; Stop 3146
ctgcatagagtgctgtctgcatttt

SEQ ID NO: 8226 - DNA, 25 bp, Artificial
  probe
  misc_feature (1)..(25): SEQ ID NO: 7922; AFFX-PheX-3_at; Start 2936; Stop 2960
atggcagcttctacatacgaattaa

SEQ ID NO: 8227 - DNA, 25 bp, Artificial
  probe
  misc_feature (1)..(25): SEQ ID NO: 7922; AFFX-PheX-3_at; Start 3295; Stop 3319
agtgaggcttctgggtgcataccag

SEQ ID NO: 8228 - DNA, 25 bp, Artificial
  probe
  misc_feature (1)..(25): SEQ ID NO: 7922; AFFX-PheX-3_at; Start 2906; Stop 2930
gagctgaatatcggggtcattgcca

SEQ ID NO: 8229 - DNA, 25 bp, Artificial
  probe
  misc_feature (1)..(25): SEQ ID NO: 7922; AFFX-PheX-3_at; Start 2885; Stop 2909
aagtttgtcagtgaccatcccgagc

SEQ ID NO: 8230 - DNA, 25 bp, Artificial
  probe
  misc_feature (1)..(25): SEQ ID NO: 7922; AFFX-PheX-3_at; Start 2914; Stop 2938
tatcggggtcattgccaatgatatg

SEQ ID NO: 8231 - DNA, 25 bp, Artificial
  probe
  misc_feature (1)..(25): SEQ ID NO: 7922; AFFX-PheX-3_at; Start 3115; Stop 3139
cggggcgctgcatagagtgctgtct

SEQ ID NO: 8232 - DNA, 25 bp, Artificial
  probe
  misc_feature (1)..(25): SEQ ID NO: 7922; AFFX-PheX-3_at; Start 2899; Stop 2923
ccatcccgagctgaatatcggggtc

SEQ ID NO: 8233 - DNA, 25 bp, Artificial
  probe
  misc_feature (1)..(25): SEQ ID NO: 7922; AFFX-PheX-3_at; Start 3131; Stop 3155
gtgctgtctgcattttcttggagaa

SEQ ID NO: 8234 - DNA, 25 bp, Artificial
  probe
  misc_feature (1)..(25): SEQ ID NO: 7922; AFFX-PheX-3_at; Start 3259; Stop 3283
aggggccatgcaggagcttgaagca

SEQ ID NO: 8235 - DNA, 25 bp, Artificial
  probe
  misc_feature (1)..(25): SEQ ID NO: 7922; AFFX-PheX-3_at; Start 3241; Stop 3265
tgatgatgtattgattccaggggcc

SEQ ID NO: 8236 - DNA, 25 bp, Artificial
  probe
  misc_feature (1)..(25): SEQ ID NO: 7922; AFFX-PheX-3_at; Start 3083; Stop 3107
ttaatggtcatgctgccgcaggatg

SEQ ID NO: 8237 - DNA, 25 bp, Artificial
  probe
  misc_feature (1)..(25): SEQ ID NO: 7922; AFFX-PheX-3_at; Start 3302; Stop 3326
cttctgggtgcataccagtcttacc

SEQ ID NO: 8238 - DNA, 25 bp, Artificial
  probe
  misc_feature (1)..(25): SEQ ID NO: 7922; AFFX-PheX-3_at; Start 2927; Stop 2951
gccaatgatatggcagcttctacat

SEQ ID NO: 8239 - DNA, 25 bp, Artificial
  probe
  misc_feature (1)..(25): SEQ ID NO: 7922; AFFX-PheX-3_at; Start 3248; Stop 3272
gtattgattccaggggccatgcagg

SEQ ID NO: 8240 - DNA, 25 bp, Artificial
  probe
  misc_feature (1)..(25): SEQ ID NO: 7922; AFFX-PheX-3_at; Start 3091; Stop 3115
catgctgccgcaggatgatcagtcc

SEQ ID NO: 8241 - DNA, 25 bp, Artificial
  probe
  misc_feature (1)..(25): SEQ ID NO: 7922; AFFX-PheX-3_at; Start 3049; Stop 3073
gaattcaaaattgagctctaggccc

SEQ ID NO: 8242 - DNA, 25 bp, Artificial
  probe
  misc_feature (1)..(25): SEQ ID NO: 7922; AFFX-PheX-3_at; Start 3103; Stop 3127
ggatgatcagtccggggcgctgcat

SEQ ID NO: 8243 - DNA, 25 bp, Artificial
  probe
  misc_feature (1)..(25): SEQ ID NO: 7922; AFFX-PheX-3_at; Start 3017; Stop 3041
ctgtctcccgatgaaaacatatctt

SEQ ID NO: 8244 - DNA, 25 bp, Artificial
  probe
  misc_feature (1)..(25): SEQ ID NO: 7922; AFFX-PheX-3_at; Start 2891; Stop 2915
gtcagtgaccatcccgagctgaata

SEQ ID NO: 8245 - DNA, 25 bp, Artificial
  probe
  misc_feature (1)..(25): SEQ ID NO: 7922; AFFX-PheX-5_at; Start 2173; Stop 2197
tacagggatgctgtttttccattct

SEQ ID NO: 8246 - DNA, 25 bp, Artificial
  probe
  misc_feature (1)..(25): SEQ ID NO: 7922; AFFX-PheX-5_at; Start 2285; Stop 2309
ctgattctggaagcaacgttctttc

SEQ ID NO: 8247 - DNA, 25 bp, Artificial
  probe
  misc_feature (1)..(25): SEQ ID NO: 7922; AFFX-PheX-5_at; Start 2241; Stop 2265
ggaggataggtcaggtgcgttatct

SEQ ID NO: 8248 - DNA, 25 bp, Artificial
  probe
  misc_feature (1)..(25): SEQ ID NO: 7922; AFFX-PheX-5_at; Start 2327; Stop 2351
cgcttcaaggcagagcaaatgtgac

SEQ ID NO: 8249 - DNA, 25 bp, Artificial
  probe
  misc_feature (1)..(25): SEQ ID NO: 7922; AFFX-PheX-5_at; Start 2315; Stop 2339
accagaccattccgcttcaaggcag

SEQ ID NO: 8250 - DNA, 25 bp, Artificial
  probe
  misc_feature (1)..(25): SEQ ID NO: 7922; AFFX-PheX-5_at; Start 2277; Stop 2301
ggcggtagctgattctggaagcaac

SEQ ID NO: 8251 - DNA, 25 bp, Artificial
  probe
  misc_feature (1)..(25): SEQ ID NO: 7922; AFFX-PheX-5_at; Start 2257; Stop 2281
gcgttatctcagcttcttcaggcgg

SEQ ID NO: 8252 - DNA, 25 bp, Artificial
  probe
  misc_feature (1)..(25): SEQ ID NO: 7922; AFFX-PheX-5_at; Start 2351; Stop 2375
cactgtctatcagtacgtcggcaat

SEQ ID NO: 8253 - DNA, 25 bp, Artificial
  probe
  misc_feature (1)..(25): SEQ ID NO: 7922; AFFX-PheX-5_at; Start 2321; Stop 2345
ccattccgcttcaaggcagagcaaa

SEQ ID NO: 8254 - DNA, 25 bp, Artificial
  probe
  misc_feature (1)..(25): SEQ ID NO: 7922; AFFX-PheX-5_at; Start 2048; Stop 2072
aagatgtattgcccgatgcaatgag

SEQ ID NO: 8255 - DNA, 25 bp, Artificial
  probe
  misc_feature (1)..(25): SEQ ID NO: 7922; AFFX-PheX-5_at; Start 2271; Stop 2295
tcttcaggcggtagctgattctgga

SEQ ID NO: 8256 - DNA, 25 bp, Artificial
  probe
  misc_feature (1)..(25): SEQ ID NO: 7922; AFFX-PheX-5_at; Start 2247; Stop 2271
taggtcaggtgcgttatctcagctt

SEQ ID NO: 8257 - DNA, 25 bp, Artificial
  probe
  misc_feature (1)..(25): SEQ ID NO: 7922; AFFX-PheX-5_at; Start 2036; Stop 2060
atcttgtccgtgaagatgtattgcc

SEQ ID NO: 8258 - DNA, 25 bp, Artificial
  probe
  misc_feature (1)..(25): SEQ ID NO: 7922; AFFX-PheX-5_at; Start 2341; Stop 2365
gcaaatgtgacactgtctatcagta

SEQ ID NO: 8259 - DNA, 25 bp, Artificial
  probe
  misc_feature (1)..(25): SEQ ID NO: 7922; AFFX-PheX-5_at; Start 2028; Stop 2052
gacattttatcttgtccgtgaagat

SEQ ID NO: 8260 - DNA, 25 bp, Artificial
  probe
  misc_feature (1)..(25): SEQ ID NO: 7922; AFFX-PheX-5_at; Start 2264; Stop 2288
ctcagcttcttcaggcggtagctga

SEQ ID NO: 8261 - DNA, 25 bp, Artificial
  probe
  misc_feature (1)..(25): SEQ ID NO: 7922; AFFX-PheX-5_at; Start 2112; Stop 2136
agcagattcagtagcagatgccgtt

SEQ ID NO: 8262 - DNA, 25 bp, Artificial
  probe
  misc_feature (1)..(25): SEQ ID NO: 7922; AFFX-PheX-5_at; Start 2120; Stop 2144
cagtagcagatgccgttcaaaaggt

SEQ ID NO: 8263 - DNA, 25 bp, Artificial
  probe
  misc_feature (1)..(25): SEQ ID NO: 7922; AFFX-PheX-5_at; Start 2304; Stop 2328
tctttccattcaccagaccattccg

SEQ ID NO: 8264 - DNA, 25 bp, Artificial
  probe
  misc_feature (1)..(25): SEQ ID NO: 7922; AFFX-PheX-5_at; Start 2053; Stop 2077
gtattgcccgatgcaatgagaaaaa

SEQ ID NO: 8265 - DNA, 25 bp, Artificial
  probe
  misc_feature (1)..(25): SEQ ID NO: 7922; AFFX-PheX-M_at; Start 2789; Stop 2813
tcacattcacacgcgattgcgcaat

SEQ ID NO: 8266 - DNA, 25 bp, Artificial
  probe
  misc_feature (1)..(25): SEQ ID NO: 7922; AFFX-PheX-M_at; Start 2437; Stop 2461
gaaatattaggttcaggtgcataag

SEQ ID NO: 8267 - DNA, 25 bp, Artificial
  probe
  misc_feature (1)..(25): SEQ ID NO: 7922; AFFX-PheX-M_at; Start 2581; Stop 2605
gtgtatagatgcagccgttgcaggc

SEQ ID NO: 8268 - DNA, 25 bp, Artificial
  probe
  misc_feature (1)..(25): SEQ ID NO: 7922; AFFX-PheX-M_at; Start 2551; Stop 2575
cgaacatgttgcttaccgcaccatt

SEQ ID NO: 8269 - DNA, 25 bp, Artificial
  probe
  misc_feature (1)..(25): SEQ ID NO: 7922; AFFX-PheX-M_at; Start 2804; Stop 2828
attgcgcaatgccataaatttcttc

SEQ ID NO: 8270 - DNA, 25 bp, Artificial
  probe
  misc_feature (1)..(25): SEQ ID NO: 7922; AFFX-PheX-M_at; Start 2671; Stop 2695
ctatttaatacatgaacagcctttg

SEQ ID NO: 8271 - DNA, 25 bp, Artificial
  probe
  misc_feature (1)..(25): SEQ ID NO: 7922; AFFX-PheX-M_at; Start 2771; Stop 2795
gagctcgacaaaatttactcacatt

SEQ ID NO: 8272 - DNA, 25 bp, Artificial
  probe
  misc_feature (1)..(25): SEQ ID NO: 7922; AFFX-PheX-M_at; Start 2588; Stop 2612
gatgcagccgttgcaggcgaagttg

SEQ ID NO: 8273 - DNA, 25 bp, Artificial
  probe
  misc_feature (1)..(25): SEQ ID NO: 7922; AFFX-PheX-M_at; Start 2488; Stop 2512
ttatttaggtccagcagctacattt

SEQ ID NO: 8274 - DNA, 25 bp, Artificial
  probe
  misc_feature (1)..(25): SEQ ID NO: 7922; AFFX-PheX-M_at; Start 2713; Stop 2737
gacgttgccgattcaccagcacttg

SEQ ID NO: 8275 - DNA, 25 bp, Artificial
  probe
  misc_feature (1)..(25): SEQ ID NO: 7922; AFFX-PheX-M_at; Start 2797; Stop 2821
acacgcgattgcgcaatgccataaa

SEQ ID NO: 8276 - DNA, 25 bp, Artificial
  probe
  misc_feature (1)..(25): SEQ ID NO: 7922; AFFX-PheX-M_at; Start 2732; Stop 2756
cacttgctcgtccatccctcaagag

SEQ ID NO: 8277 - DNA, 25 bp, Artificial
  probe
  misc_feature (1)..(25): SEQ ID NO: 7922; AFFX-PheX-M_at; Start 2782; Stop 2806
aatttactcacattcacacgcgatt

SEQ ID NO: 8278 - DNA, 25 bp, Artificial
  probe
  misc_feature (1)..(25): SEQ ID NO: 7922; AFFX-PheX-M_at; Start 2504; Stop 2528
gctacatttacacatctagcagtca

SEQ ID NO: 8279 - DNA, 25 bp, Artificial
  probe
  misc_feature (1)..(25): SEQ ID NO: 7922; AFFX-PheX-M_at; Start 2704; Stop 2728
gggtgaaatgacgttgccgattcac

SEQ ID NO: 8280 - DNA, 25 bp, Artificial
  probe
  misc_feature (1)..(25): SEQ ID NO: 7922; AFFX-PheX-M_at; Start 2539; Stop 2563
tcaaaacggcgccgaacatgttgct

SEQ ID NO: 8281 - DNA, 25 bp, Artificial
  probe
  misc_feature (1)..(25): SEQ ID NO: 7922; AFFX-PheX-M_at; Start 2512; Stop 2536
tacacatctagcagtcagttcttgt

SEQ ID NO: 8282 - DNA, 25 bp, Artificial
  probe
  misc_feature (1)..(25): SEQ ID NO: 7922; AFFX-PheX-M_at; Start 2681; Stop 2705
catgaacagcctttgccaatcgtgg

SEQ ID NO: 8283 - DNA, 25 bp, Artificial
  probe
  misc_feature (1)..(25): SEQ ID NO: 7922; AFFX-PheX-M_at; Start 2566; Stop 2590
ccgcaccattccggagtgtatagat

SEQ ID NO: 8284 - DNA, 25 bp, Artificial
  probe
  misc_feature (1)..(25): SEQ ID NO: 7922; AFFX-PheX-M_at; Start 2494; Stop 2518
aggtccagcagctacatttacacat

SEQ ID NO: 8285 - DNA, 25 bp, Artificial
  probe
  misc_feature (1)..(25): SEQ ID NO: 7923; AFFX-ThrX-3_at; Start 1782; Stop 1806
cccgaatgctgacattgacgtagtc

SEQ ID NO: 8286 - DNA, 25 bp, Artificial
  probe
  misc_feature (1)..(25): SEQ ID NO: 7923; AFFX-ThrX-3_at; Start 1911; Stop 1935
cctcattgctgcgatcatgtccaag

SEQ ID NO: 8287 - DNA, 25 bp, Artificial
  probe
  misc_feature (1)..(25): SEQ ID NO: 7923; AFFX-ThrX-3_at; Start 1896; Stop 1920
tgctgtcagcaatatcctcattgct

SEQ ID NO: 8288 - DNA, 25 bp, Artificial
  probe
  misc_feature (1)..(25): SEQ ID NO: 7923; AFFX-ThrX-3_at; Start 2049; Stop 2073
atatggaacggctctcagcggagca

SEQ ID NO: 8289 - DNA, 25 bp, Artificial
  probe
  misc_feature (1)..(25): SEQ ID NO: 7923; AFFX-ThrX-3_at; Start 1986; Stop 2010
gtaccgggcgatgcttgtgcctgag

SEQ ID NO: 8290 - DNA, 25 bp, Artificial
  probe
  misc_feature (1)..(25): SEQ ID NO: 7923; AFFX-ThrX-3_at; Start 1860; Stop 1884
gaaggagtttccatatgccgatgcc

SEQ ID NO: 8291 - DNA, 25 bp, Artificial
  probe
  misc_feature (1)..(25): SEQ ID NO: 7923; AFFX-ThrX-3_at; Start 1974; Stop 1998
gttccatcagccgtaccgggcgatg

SEQ ID NO: 8292 - DNA, 25 bp, Artificial
  probe
  misc_feature (1)..(25): SEQ ID NO: 7923; AFFX-ThrX-3_at; Start 1875; Stop 1899
tgccgatgccgtaaaagcaagtgct

SEQ ID NO: 8293 - DNA, 25 bp, Artificial
  probe
  misc_feature (1)..(25): SEQ ID NO: 7923; AFFX-ThrX-3_at; Start 2019; Stop 2043
agtagagcacgtcgccgagatgaag

SEQ ID NO: 8294 - DNA, 25 bp, Artificial
  probe
  misc_feature (1)..(25): SEQ ID NO: 7923; AFFX-ThrX-3_at; Start 1767; Stop 1791
ccaaatgatccgcgtcccgaatgct

SEQ ID NO: 8295 - DNA, 25 bp, Artificial
  probe
  misc_feature (1)..(25): SEQ ID NO: 7923; AFFX-ThrX-3_at; Start 1692; Stop 1716
agaaggacacccggacaatgctggc

SEQ ID NO: 8296 - DNA, 25 bp, Artificial
  probe
  misc_feature (1)..(25): SEQ ID NO: 7923; AFFX-ThrX-3_at; Start 1728; Stop 1752
cggcggacttgtgatcggcctgcat

SEQ ID NO: 8297 - DNA, 25 bp, Artificial
  probe
  misc_feature (1)..(25): SEQ ID NO: 7923; AFFX-ThrX-3_at; Start 1716; Stop 1740
cgcttctctcgtcggcggacttgtg

SEQ ID NO: 8298 - DNA, 25 bp, Artificial
  probe
  misc_feature (1)..(25): SEQ ID NO: 7923; AFFX-ThrX-3_at; Start 1809; Stop 1833
tgtcattcctttttatgaagtgctg

SEQ ID NO: 8299 - DNA, 25 bp, Artificial
  probe
  misc_feature (1)..(25): SEQ ID NO: 7923; AFFX-ThrX-3_at; Start 1743; Stop 1767
cggcctgcatgaggatgacgagacc

SEQ ID NO: 8300 - DNA, 25 bp, Artificial
  probe
  misc_feature (1)..(25): SEQ ID NO: 7923; AFFX-ThrX-3_at; Start 2130; Stop 2154
gctcgcgcttcatttccctcattgt

SEQ ID NO: 8301 - DNA, 25 bp, Artificial
  probe
  misc_feature (1)..(25): SEQ ID NO: 7923; AFFX-ThrX-3_at; Start 1839; Stop 1863
agacgcgagagacgtgcttccgaag

SEQ ID NO: 8302 - DNA, 25 bp, Artificial
  probe
  misc_feature (1)..(25): SEQ ID NO: 7923; AFFX-ThrX-3_at; Start 1926; Stop 1950
catgtccaaggattggccgcttgtc

SEQ ID NO: 8303 - DNA, 25 bp, Artificial
  probe
  misc_feature (1)..(25): SEQ ID NO: 7923; AFFX-ThrX-3_at; Start 1824; Stop 1848
tgaagtgctgacaagagacgcgaga

SEQ ID NO: 8304 - DNA, 25 bp, Artificial
  probe
  misc_feature (1)..(25): SEQ ID NO: 7923; AFFX-ThrX-3_at; Start 2067; Stop 2091
cggagcaggcccaacgattctcgtc

SEQ ID NO: 8305 - DNA, 25 bp, Artificial
  probe
  misc_feature (1)..(25): SEQ ID NO: 7923; AFFX-ThrX-5_at; Start 548; Stop 572
tgcattgtcatcatcccgaacggaa

SEQ ID NO: 8306 - DNA, 25 bp, Artificial
  probe
  misc_feature (1)..(25): SEQ ID NO: 7923; AFFX-ThrX-5_at; Start 848; Stop 872
catgagaaaaacggcacaggccttc

SEQ ID NO: 8307 - DNA, 25 bp, Artificial
  probe
  misc_feature (1)..(25): SEQ ID NO: 7923; AFFX-ThrX-5_at; Start 474; Stop 498
acacgattatgtgcgcgtcaacagg

SEQ ID NO: 8308 - DNA, 25 bp, Artificial
  probe
  misc_feature (1)..(25): SEQ ID NO: 7923; AFFX-ThrX-5_at; Start 806; Stop 830
gctggaaacatcactgcgtactgga

SEQ ID NO: 8309 - DNA, 25 bp, Artificial
  probe
  misc_feature (1)..(25): SEQ ID NO: 7923; AFFX-ThrX-5_at; Start 738; Stop 762
ctgctgccttcgaagtgtgcgaaca

SEQ ID NO: 8310 - DNA, 25 bp, Artificial
  probe
  misc_feature (1)..(25): SEQ ID NO: 7923; AFFX-ThrX-5_at; Start 412; Stop 436
gggatcatttaaagatcgcggaatg

SEQ ID NO: 8311 - DNA, 25 bp, Artificial
  probe
  misc_feature (1)..(25): SEQ ID NO: 7923; AFFX-ThrX-5_at; Start 584; Stop 608
ggaaaactcgctcaagctgtcatgt

SEQ ID NO: 8312 - DNA, 25 bp, Artificial
  probe
  misc_feature (1)..(25): SEQ ID NO: 7923; AFFX-ThrX-5_at; Start 502; Stop 526
cacttccgctgctgcggcagcatat

SEQ ID NO: 8313 - DNA, 25 bp, Artificial
  probe
  misc_feature (1)..(25): SEQ ID NO: 7923; AFFX-ThrX-5_at; Start 516; Stop 540
cggcagcatatgcagcccgtgctaa

SEQ ID NO: 8314 - DNA, 25 bp, Artificial
  probe
  misc_feature (1)..(25): SEQ ID NO: 7923; AFFX-ThrX-5_at; Start 488; Stop 512
gcgtcaacaggtaacacttccgctg

SEQ ID NO: 8315 - DNA, 25 bp, Artificial
  probe
  misc_feature (1)..(25): SEQ ID NO: 7923; AFFX-ThrX-5_at; Start 674; Stop 698
tgtgagaaatcaccgattgcccttg

SEQ ID NO: 8316 - DNA, 25 bp, Artificial
  probe
  misc_feature (1)..(25): SEQ ID NO: 7923; AFFX-ThrX-5_at; Start 372; Stop 396
gaattgagcttcatgtcaaaacgga

SEQ ID NO: 8317 - DNA, 25 bp, Artificial
  probe
  misc_feature (1)..(25): SEQ ID NO: 7923; AFFX-ThrX-5_at; Start 332; Stop 356
acacctcttattcacctgccgaagc

SEQ ID NO: 8318 - DNA, 25 bp, Artificial
  probe
  misc_feature (1)..(25): SEQ ID NO: 7923; AFFX-ThrX-5_at; Start 704; Stop 728
tcagtcaacccttaccgcattgaag

SEQ ID NO: 8319 - DNA, 25 bp, Artificial
  probe
  misc_feature (1)..(25): SEQ ID NO: 7923; AFFX-ThrX-5_at; Start 528; Stop 552
cagcccgtgctaacatgaaatgcat

SEQ ID NO: 8320 - DNA, 25 bp, Artificial
  probe
  misc_feature (1)..(25): SEQ ID NO: 7923; AFFX-ThrX-5_at; Start 902; Stop 926
gcggcggcaatcgtgcgcaatgaag

SEQ ID NO: 8321 - DNA, 25 bp, Artificial
  probe
  misc_feature (1)..(25): SEQ ID NO: 7923; AFFX-ThrX-5_at; Start 662; Stop 686
gtccgttccatctgtgagaaatcac

SEQ ID NO: 8322 - DNA, 25 bp, Artificial
  probe
  misc_feature (1)..(25): SEQ ID NO: 7923; AFFX-ThrX-5_at; Start 288; Stop 312
ctgtaacagatcaaacaccggcgct

SEQ ID NO: 8323 - DNA, 25 bp, Artificial
  probe
  misc_feature (1)..(25): SEQ ID NO: 7923; AFFX-ThrX-5_at; Start 464; Stop 488
gaaggcaatgacacgattatgtgcg

SEQ ID NO: 8324 - DNA, 25 bp, Artificial
  probe
  misc_feature (1)..(25): SEQ ID NO: 7923; AFFX-ThrX-5_at; Start 908; Stop 932
gcaatcgtgcgcaatgaagtgattg

SEQ ID NO: 8325 - DNA, 25 bp, Artificial
  probe
  misc_feature (1)..(25): SEQ ID NO: 7923; AFFX-ThrX-M_at; Start 1541; Stop 1565
ctcctgtccatgtgaaggtgtggag

SEQ ID NO: 8326 - DNA, 25 bp, Artificial
  probe
  misc_feature (1)..(25): SEQ ID NO: 7923; AFFX-ThrX-M_at; Start 1395; Stop 1419
cagatatttgaagctgaccgtcttt

SEQ ID NO: 8327 - DNA, 25 bp, Artificial
  probe
  misc_feature (1)..(25): SEQ ID NO: 7923; AFFX-ThrX-M_at; Start 1161; Stop 1185
aaggcagcaaggtcgtagctgtgtt

SEQ ID NO: 8328 - DNA, 25 bp, Artificial
  probe
  misc_feature (1)..(25): SEQ ID NO: 7923; AFFX-ThrX-M_at; Start 1481; Stop 1505
cagataacctgatctaccaagtggc

SEQ ID NO: 8329 - DNA, 25 bp, Artificial
  probe
  misc_feature (1)..(25): SEQ ID NO: 7923; AFFX-ThrX-M_at; Start 1379; Stop 1403
tcggaatggcgctcagcagatattt

SEQ ID NO: 8330 - DNA, 25 bp, Artificial
  probe
  misc_feature (1)..(25): SEQ ID NO: 7923; AFFX-ThrX-M_at; Start 1229; Stop 1253
tcagaaatcaagcctgtcacattgc

SEQ ID NO: 8331 - DNA, 25 bp, Artificial
  probe
  misc_feature (1)..(25): SEQ ID NO: 7923; AFFX-ThrX-M_at; Start 1109; Stop 1133
tgcgcgtctatcgcaggagtgctga

SEQ ID NO: 8332 - DNA, 25 bp, Artificial
  probe
  misc_feature (1)..(25): SEQ ID NO: 7923; AFFX-ThrX-M_at; Start 1203; Stop 1227
aagatccgaacacagcggtcgacat

SEQ ID NO: 8333 - DNA, 25 bp, Artificial
  probe
  misc_feature (1)..(25): SEQ ID NO: 7923; AFFX-ThrX-M_at; Start 1037; Stop 1061
actgatgatgaaatccttcacgcat

SEQ ID NO: 8334 - DNA, 25 bp, Artificial
  probe
  misc_feature (1)..(25): SEQ ID NO: 7923; AFFX-ThrX-M_at; Start 1319; Stop 1343
tgctgttctctgtcactgttcccgg

SEQ ID NO: 8335 - DNA, 25 bp, Artificial
  probe
  misc_feature (1)..(25): SEQ ID NO: 7923; AFFX-ThrX-M_at; Start 1241; Stop 1265
cctgtcacattgccgactgatgaag

SEQ ID NO: 8336 - DNA, 25 bp, Artificial
  probe
  misc_feature (1)..(25): SEQ ID NO: 7923; AFFX-ThrX-M_at; Start 1217; Stop 1241
gcggtcgacatttcagaaatcaagc

SEQ ID NO: 8337 - DNA, 25 bp, Artificial
  probe
  misc_feature (1)..(25): SEQ ID NO: 7923; AFFX-ThrX-M_at; Start 1307; Stop 1331
acgaagccgacatgctgttctctgt

SEQ ID NO: 8338 - DNA, 25 bp, Artificial
  probe
  misc_feature (1)..(25): SEQ ID NO: 7923; AFFX-ThrX-M_at; Start 1095; Stop 1119
cagaaccaggttcttgcgcgtctat

SEQ ID NO: 8339 - DNA, 25 bp, Artificial
  probe
  misc_feature (1)..(25): SEQ ID NO: 7923; AFFX-ThrX-M_at; Start 995; Stop 1019
gtaaaggcagccgaggaatccaatg

SEQ ID NO: 8340 - DNA, 25 bp, Artificial
  probe
  misc_feature (1)..(25): SEQ ID NO: 7923; AFFX-ThrX-M_at; Start 1367; Stop 1391
gctttgattcagtcggaatggcgct

SEQ ID NO: 8341 - DNA, 25 bp, Artificial
  probe
  misc_feature (1)..(25): SEQ ID NO: 7923; AFFX-ThrX-M_at; Start 1265; Stop 1289
gacagcatccttgaatatgtaaaag

SEQ ID NO: 8342 - DNA, 25 bp, Artificial
  probe
  misc_feature (1)..(25): SEQ ID NO: 7923; AFFX-ThrX-M_at; Start 1409; Stop 1433
tgaccgtctttgaaagcgacaaatg

SEQ ID NO: 8343 - DNA, 25 bp, Artificial
  probe
  misc_feature (1)..(25): SEQ ID NO: 7923; AFFX-ThrX-M_at; Start 1049; Stop 1073
atccttcacgcatatcagctgatcg

SEQ ID NO: 8344 - DNA, 25 bp, Artificial
  probe
  misc_feature (1)..(25): SEQ ID NO: 7923; AFFX-ThrX-M_at; Start 1061; Stop 1085
tatcagctgatcgcccgtgtagaag

SEQ ID NO: 8345 - DNA, 25 bp, Artificial
  probe
  misc_feature (1)..(25): SEQ ID NO: 7924; AFFX-TrpnX-3_at; Start 1937; Stop 1961
gcgagctgtacttatcggtgaatca

SEQ ID NO: 8346 - DNA, 25 bp, Artificial
  probe
  misc_feature (1)..(25): SEQ ID NO: 7924; AFFX-TrpnX-3_at; Start 1965; Stop 1989
atgagacaaacttctcagcgtaaag

SEQ ID NO: 8347 - DNA, 25 bp, Artificial
  probe
  misc_feature (1)..(25): SEQ ID NO: 7924; AFFX-TrpnX-3_at; Start 2055; Stop 2079
gtcactaaaggatttgcagcttgcg

SEQ ID NO: 8348 - DNA, 25 bp, Artificial
  probe
  misc_feature (1)..(25): SEQ ID NO: 7924; AFFX-TrpnX-3_at; Start 2309; Stop 2333
agctgacaggctgtgaaatatggaa

SEQ ID NO: 8349 - DNA, 25 bp, Artificial
  probe
  misc_feature (1)..(25): SEQ ID NO: 7924; AFFX-TrpnX-3_at; Start 2251; Stop 2275
ctcgacgtcattcagcttcacggtg

SEQ ID NO: 8350 - DNA, 25 bp, Artificial
  probe
  misc_feature (1)..(25): SEQ ID NO: 7924; AFFX-TrpnX-3_at; Start 2289; Stop 2313
ggatgctgctgctcttcgcaagctg

SEQ ID NO: 8351 - DNA, 25 bp, Artificial
  probe
  misc_feature (1)..(25): SEQ ID NO: 7924; AFFX-TrpnX-3_at; Start 2405; Stop 2429
ttgattcatctgtaaaagggtctag

SEQ ID NO: 8352 - DNA, 25 bp, Artificial
  probe
  misc_feature (1)..(25): SEQ ID NO: 7924; AFFX-TrpnX-3_at; Start 2335; Stop 2359
gcgcttcaccatcaagataacacaa

SEQ ID NO: 8353 - DNA, 25 bp, Artificial
  probe
  misc_feature (1)..(25): SEQ ID NO: 7924; AFFX-TrpnX-3_at; Start 2211; Stop 2235
atcaatagagacgatgtcacgtatt

SEQ ID NO: 8354 - DNA, 25 bp, Artificial
  probe
  misc_feature (1)..(25): SEQ ID NO: 7924; AFFX-TrpnX-3_at; Start 2387; Stop 2411
atgttgacggctttgtgattgattc

SEQ ID NO: 8355 - DNA, 25 bp, Artificial
  probe
  misc_feature (1)..(25): SEQ ID NO: 7924; AFFX-TrpnX-3_at; Start 2261; Stop 2285
ttcagcttcacggtgatgaaaaacc

SEQ ID NO: 8356 - DNA, 25 bp, Artificial
  probe
  misc_feature (1)..(25): SEQ ID NO: 7924; AFFX-TrpnX-3_at; Start 1977; Stop 2001
tctcagcgtaaagcaatccatgctt

SEQ ID NO: 8357 - DNA, 25 bp, Artificial
  probe
  misc_feature (1)..(25): SEQ ID NO: 7924; AFFX-TrpnX-3_at; Start 2465; Stop 2489
tgccggaatatcagcaggcggctat

SEQ ID NO: 8358 - DNA, 25 bp, Artificial
  probe
  misc_feature (1)..(25): SEQ ID NO: 7924; AFFX-TrpnX-3_at; Start 2077; Stop 2101
gcggcggaatcacaggctgattacc

SEQ ID NO: 8359 - DNA, 25 bp, Artificial
  probe
  misc_feature (1)..(25): SEQ ID NO: 7924; AFFX-TrpnX-3_at; Start 1911; Stop 1935
ttaacatttgtcaatgaacatgggg

SEQ ID NO: 8360 - DNA, 25 bp, Artificial
  probe
  misc_feature (1)..(25): SEQ ID NO: 7924; AFFX-TrpnX-3_at; Start 2067; Stop 2091
tttgcagcttgcggcggaatcacag

SEQ ID NO: 8361 - DNA, 25 bp, Artificial
  probe
  misc_feature (1)..(25): SEQ ID NO: 7924; AFFX-TrpnX-3_at; Start 2221; Stop 2245
acgatgtcacgtattgccaagagct

SEQ ID NO: 8362 - DNA, 25 bp, Artificial
  probe
  misc_feature (1)..(25): SEQ ID NO: 7924; AFFX-TrpnX-3_at; Start 2455; Stop 2479
tgggaatgtgtgccggaatatcagc

SEQ ID NO: 8363 - DNA, 25 bp, Artificial
  probe
  misc_feature (1)..(25): SEQ ID NO: 7924; AFFX-TrpnX-3_at; Start 2231; Stop 2255
gtattgccaagagcttgaagctcga

SEQ ID NO: 8364 - DNA, 25 bp, Artificial
  probe
  misc_feature (1)..(25): SEQ ID NO: 7924; AFFX-TrpnX-3_at; Start 2241; Stop 2265
gagcttgaagctcgacgtcattcag

SEQ ID NO: 8365 - DNA, 25 bp, Artificial
  probe
  misc_feature (1)..(25): SEQ ID NO: 7924; AFFX-TrpnX-5_at; Start 367; Stop 391
gatattgtcaattcttgctcatcgg

SEQ ID NO: 8366 - DNA, 25 bp, Artificial
  probe
  misc_feature (1)..(25): SEQ ID NO: 7924; AFFX-TrpnX-5_at; Start 295; Stop 319
tactgccggtgaggctgaaacgctg

SEQ ID NO: 8367 - DNA, 25 bp, Artificial
  probe
  misc_feature (1)..(25): SEQ ID NO: 7924; AFFX-TrpnX-5_at; Start 185; Stop 209
aagccggtgcgctgctgaaaacgat

SEQ ID NO: 8368 - DNA, 25 bp, Artificial
  probe
  misc_feature (1)..(25): SEQ ID NO: 7924; AFFX-TrpnX-5_at; Start 135; Stop 159
cattgttgctgattctgttccggaa

SEQ ID NO: 8369 - DNA, 25 bp, Artificial
  probe
  misc_feature (1)..(25): SEQ ID NO: 7924; AFFX-TrpnX-5_at; Start 71; Stop 95
cttgtattacgattcgcacgatgag

SEQ ID NO: 8370 - DNA, 25 bp, Artificial
  probe
  misc_feature (1)..(25): SEQ ID NO: 7924; AFFX-TrpnX-5_at; Start 565; Stop 589
cgctaagcatggcaatcgctctgtc

SEQ ID NO: 8371 - DNA, 25 bp, Artificial
  probe
  misc_feature (1)..(25): SEQ ID NO: 7924; AFFX-TrpnX-5_at; Start 517; Stop 541
tatctcaacggcctcggcaattgtt

SEQ ID NO: 8372 - DNA, 25 bp, Artificial
  probe
  misc_feature (1)..(25): SEQ ID NO: 7924; AFFX-TrpnX-5_at; Start 429; Stop 453
caatgcgggcacacgctcttacagt

SEQ ID NO: 8373 - DNA, 25 bp, Artificial
  probe
  misc_feature (1)..(25): SEQ ID NO: 7924; AFFX-TrpnX-5_at; Start 457; Stop 481
tggacttcctgatattgttgataca

SEQ ID NO: 8374 - DNA, 25 bp, Artificial
  probe
  misc_feature (1)..(25): SEQ ID NO: 7924; AFFX-TrpnX-5_at; Start 417; Stop 441
gttttgtgaaggcaatgcgggcaca

SEQ ID NO: 8375 - DNA, 25 bp, Artificial
  probe
  misc_feature (1)..(25): SEQ ID NO: 7924; AFFX-TrpnX-5_at; Start 251; Stop 275
ctgatgaacagatttctacaattgt

SEQ ID NO: 8376 - DNA, 25 bp, Artificial
  probe
  misc_feature (1)..(25): SEQ ID NO: 7924; AFFX-TrpnX-5_at; Start 577; Stop 601
caatcgctctgtctcttctaaaagc

SEQ ID NO: 8377 - DNA, 25 bp, Artificial
  probe
  misc_feature (1)..(25): SEQ ID NO: 7924; AFFX-TrpnX-5_at; Start 119; Stop 143
tacaggcaggtgctggcattgttgc

SEQ ID NO: 8378 - DNA, 25 bp, Artificial
  probe
  misc_feature (1)..(25): SEQ ID NO: 7924; AFFX-TrpnX-5_at; Start 105; Stop 129
cggtgttgcatcgatacaggcaggt

SEQ ID NO: 8379 - DNA, 25 bp, Artificial
  probe
  misc_feature (1)..(25): SEQ ID NO: 7924; AFFX-TrpnX-5_at; Start 325; Stop 349
tatgatgatggcagcggaaatgact

SEQ ID NO: 8380 - DNA, 25 bp, Artificial
  probe
  misc_feature (1)..(25): SEQ ID NO: 7924; AFFX-TrpnX-5_at; Start 201; Stop 225
gaaaacgattcatattgcagaagac

SEQ ID NO: 8381 - DNA, 25 bp, Artificial
  probe
  misc_feature (1)..(25): SEQ ID NO: 7924; AFFX-TrpnX-5_at; Start 439; Stop 463
acacgctcttacagtcgatggactt

SEQ ID NO: 8382 - DNA, 25 bp, Artificial
  probe
  misc_feature (1)..(25): SEQ ID NO: 7924; AFFX-TrpnX-5_at; Start 81; Stop 105
gattcgcacgatgagtgtaaagaac

SEQ ID NO: 8383 - DNA, 25 bp, Artificial
  probe
  misc_feature (1)..(25): SEQ ID NO: 7924; AFFX-TrpnX-5_at; Start 529; Stop 553
ctcggcaattgttgcctcggcagct

SEQ ID NO: 8384 - DNA, 25 bp, Artificial
  probe
  misc_feature (1)..(25): SEQ ID NO: 7924; AFFX-TrpnX-5_at; Start 539; Stop 563
gttgcctcggcagctggtgcgaaaa

SEQ ID NO: 8385 - DNA, 25 bp, Artificial
  probe
  misc_feature (1)..(25): SEQ ID NO: 7924; AFFX-TrpnX-M_at; Start 1053; Stop 1077
aagagagcgcctatctcattcagaa

SEQ ID NO: 8386 - DNA, 25 bp, Artificial
  probe
  misc_feature (1)..(25): SEQ ID NO: 7924; AFFX-TrpnX-M_at; Start 1461; Stop 1485
atagactatgaggctgcgaaggcag

SEQ ID NO: 8387 - DNA, 25 bp, Artificial
  probe
  misc_feature (1)..(25): SEQ ID NO: 7924; AFFX-TrpnX-M_at; Start 1057; Stop 1081
gagcgcctatctcattcagaatatt

SEQ ID NO: 8388 - DNA, 25 bp, Artificial
  probe
  misc_feature (1)..(25): SEQ ID NO: 7924; AFFX-TrpnX-M_at; Start 1121; Stop 1145
gcttttaatgcgggagctgcgattt

SEQ ID NO: 8389 - DNA, 25 bp, Artificial
  probe
  misc_feature (1)..(25): SEQ ID NO: 7924; AFFX-TrpnX-M_at; Start 1009; Stop 1033
tttcacaaatggcagacttgaagat

SEQ ID NO: 8390 - DNA, 25 bp, Artificial
  probe
  misc_feature (1)..(25): SEQ ID NO: 7924; AFFX-TrpnX-M_at; Start 1465; Stop 1489
actatgaggctgcgaaggcagatgc

SEQ ID NO: 8391 - DNA, 25 bp, Artificial
  probe
  misc_feature (1)..(25): SEQ ID NO: 7924; AFFX-TrpnX-M_at; Start 1193; Stop 1217
ttagagacgattacaagcggaggcg

SEQ ID NO: 8392 - DNA, 25 bp, Artificial
  probe
  misc_feature (1)..(25): SEQ ID NO: 7924; AFFX-TrpnX-M_at; Start 1221; Stop 1245
ccgcgcagcttgaacgactaaagca

SEQ ID NO: 8393 - DNA, 25 bp, Artificial
  probe
  misc_feature (1)..(25): SEQ ID NO: 7924; AFFX-TrpnX-M_at; Start 1429; Stop 1453
ttaaagaggattttgtgcctgtgca

SEQ ID NO: 8394 - DNA, 25 bp, Artificial
  probe
  misc_feature (1)..(25): SEQ ID NO: 7924; AFFX-TrpnX-M_at; Start 1001; Stop 1025
gatttcggtttcacaaatggcagac

SEQ ID NO: 8395 - DNA, 25 bp, Artificial
  probe
  misc_feature (1)..(25): SEQ ID NO: 7924; AFFX-TrpnX-M_at; Start 1033; Stop 1057
tttacaggtgcagtcaccgaaagag

SEQ ID NO: 8396 - DNA, 25 bp, Artificial
  probe
  misc_feature (1)..(25): SEQ ID NO: 7924; AFFX-TrpnX-M_at; Start 1323; Stop 1347
gagcagcctttcgagaaacgttcat

SEQ ID NO: 8397 - DNA, 25 bp, Artificial
  probe
  misc_feature (1)..(25): SEQ ID NO: 7924; AFFX-TrpnX-M_at; Start 1197; Stop 1221
agacgattacaagcggaggcgctgc

SEQ ID NO: 8398 - DNA, 25 bp, Artificial
  probe
  misc_feature (1)..(25): SEQ ID NO: 7924; AFFX-TrpnX-M_at; Start 1095; Stop 1119
gcagcagttccgctttatctattac

SEQ ID NO: 8399 - DNA, 25 bp, Artificial
  probe
  misc_feature (1)..(25): SEQ ID NO: 7924; AFFX-TrpnX-M_at; Start 1439; Stop 1463
ttttgtgcctgtgcagattgcaata

SEQ ID NO: 8400 - DNA, 25 bp, Artificial
  probe
  misc_feature (1)..(25): SEQ ID NO: 7924; AFFX-TrpnX-M_at; Start 1353; Stop 1377
gaggcgctggcaagcccgaatcggt

SEQ ID NO: 8401 - DNA, 25 bp, Artificial
  probe
  misc_feature (1)..(25): SEQ ID NO: 7924; AFFX-TrpnX-M_at; Start 1225; Stop 1249
gcagcttgaacgactaaagcagaaa

SEQ ID NO: 8402 - DNA, 25 bp, Artificial
  probe
  misc_feature (1)..(25): SEQ ID NO: 7924; AFFX-TrpnX-M_at; Start 1201; Stop 1225
gattacaagcggaggcgctgccgcg

SEQ ID NO: 8403 - DNA, 25 bp, Artificial
  probe
  misc_feature (1)..(25): SEQ ID NO: 7924; AFFX-TrpnX-M_at; Start 1047; Stop 1071
caccgaaagagagcgcctatctcat

SEQ ID NO: 8404 - DNA, 25 bp, Artificial
  probe
  misc_feature (1)..(25): SEQ ID NO: 7924; AFFX-TrpnX-M_at; Start 1451; Stop 1475
gcagattgcaatagactatgaggct

SEQ ID NO: 8405 - DNA, 25 bp, Artificial
  probe
  misc_feature (1)..(25): SEQ ID NO: 7920; AFFX-r2-Bs-dap-3_at; Start 3065; Stop 3089
tatcccgtcaaaggattccgtttct

SEQ ID NO: 8406 - DNA, 25 bp, Artificial
  probe
  misc_feature (1)..(25): SEQ ID NO: 7920; AFFX-r2-Bs-dap-3_at; Start 2694; Stop 2718
gctgaagcagcccgcatattaggcg

SEQ ID NO: 8407 - DNA, 25 bp, Artificial
  probe
  misc_feature (1)..(25): SEQ ID NO: 7920; AFFX-r2-Bs-dap-3_at; Start 2935; Stop 2959
ttccggcgcataaagtcagcaaggt

SEQ ID NO: 8408 - DNA, 25 bp, Artificial
  probe
  misc_feature (1)..(25): SEQ ID NO: 7920; AFFX-r2-Bs-dap-3_at; Start 2886; Stop 2910
gaagcgatcttttccgccggaatcc

SEQ ID NO: 8409 - DNA, 25 bp, Artificial
  probe
  misc_feature (1)..(25): SEQ ID NO: 7920; AFFX-r2-Bs-dap-3_at; Start 3009; Stop 3033
atctcggatacaatagaggcaaaga

SEQ ID NO: 8410 - DNA, 25 bp, Artificial
  probe
  misc_feature (1)..(25): SEQ ID NO: 7920; AFFX-r2-Bs-dap-3_at; Start 2726; Stop 2750
aagaattcagctaacgcttccagac

SEQ ID NO: 8411 - DNA, 25 bp, Artificial
  probe
  misc_feature (1)..(25): SEQ ID NO: 7920; AFFX-r2-Bs-dap-3_at; Start 2634; Stop 2658
gatttgacagaagcggaactctctt

SEQ ID NO: 8412 - DNA, 25 bp, Artificial
  probe
  misc_feature (1)..(25): SEQ ID NO: 7920; AFFX-r2-Bs-dap-3_at; Start 2984; Stop 3008
tcatcagccggattttgttattgat

SEQ ID NO: 8413 - DNA, 25 bp, Artificial
  probe
  misc_feature (1)..(25): SEQ ID NO: 7920; AFFX-r2-Bs-dap-3_at; Start 2665; Stop 2689
gtacggtcagtttgcgtaaagaaga

SEQ ID NO: 8414 - DNA, 25 bp, Artificial
  probe
  misc_feature (1)..(25): SEQ ID NO: 7920; AFFX-r2-Bs-dap-3_at; Start 2983; Stop 3007
ttcatcagccggattttgttattga

SEQ ID NO: 8415 - DNA, 25 bp, Artificial
  probe
  misc_feature (1)..(25): SEQ ID NO: 7920; AFFX-r2-Bs-dap-3_at; Start 2776; Stop 2800
caattcggtcaattgtcactgtcat

SEQ ID NO: 8416 - DNA, 25 bp, Artificial
  probe
  misc_feature (1)..(25): SEQ ID NO: 7920; AFFX-r2-Bs-dap-5_at; Start 1822; Stop 1846
tcatcatgaccagaagcttgacgca

SEQ ID NO: 8417 - DNA, 25 bp, Artificial
  probe
  misc_feature (1)..(25): SEQ ID NO: 7920; AFFX-r2-Bs-dap-5_at; Start 1439; Stop 1463
acaccacattttgaccttgtagggg

SEQ ID NO: 8418 - DNA, 25 bp, Artificial
  probe
  misc_feature (1)..(25): SEQ ID NO: 7920; AFFX-r2-Bs-dap-5_at; Start 1575; Stop 1599
tcttgattgatttaacaacgcccga

SEQ ID NO: 8419 - DNA, 25 bp, Artificial
  probe
  misc_feature (1)..(25): SEQ ID NO: 7920; AFFX-r2-Bs-dap-5_at; Start 1628; Stop 1652
ttagagcacggagtccgtccagttg

SEQ ID NO: 8420 - DNA, 25 bp, Artificial
  probe
  misc_feature (1)..(25): SEQ ID NO: 7920; AFFX-r2-Bs-dap-5_at; Start 1709; Stop 1733
gaaaaagggatcggagccatcatcg

SEQ ID NO: 8421 - DNA, 25 bp, Artificial
  probe
  misc_feature (1)..(25): SEQ ID NO: 7920; AFFX-r2-Bs-dap-5_at; Start 1462; Stop 1486
ggccatagaccatacatacgatcag

SEQ ID NO: 8422 - DNA, 25 bp, Artificial
  probe
  misc_feature (1)..(25): SEQ ID NO: 7920; AFFX-r2-Bs-dap-5_at; Start 1492; Stop 1516
attatctgatgtgatgcctgttgag

SEQ ID NO: 8423 - DNA, 25 bp, Artificial
  probe
  misc_feature (1)..(25): SEQ ID NO: 7920; AFFX-r2-Bs-dap-5_at; Start 1564; Stop 1588
acaaccggatgtcttgattgattta

SEQ ID NO: 8424 - DNA, 25 bp, Artificial
  probe
  misc_feature (1)..(25): SEQ ID NO: 7920; AFFX-r2-Bs-dap-5_at; Start 1736; Stop 1760
ccaaattttgcgctcggtgcgatac

SEQ ID NO: 8425 - DNA, 25 bp, Artificial
  probe
  misc_feature (1)..(25): SEQ ID NO: 7920; AFFX-r2-Bs-dap-5_at; Start 1658; Stop 1682
acaaccggtttctcagaagctgatt

SEQ ID NO: 8426 - DNA, 25 bp, Artificial
  probe
  misc_feature (1)..(25): SEQ ID NO: 7920; AFFX-r2-Bs-dap-5_at; Start 1748; Stop 1772
ctcggtgcgatactgatgatgaaat

SEQ ID NO: 8427 - DNA, 25 bp, Artificial
  probe
  misc_feature (1)..(25): SEQ ID NO: 7920; AFFX-r2-Bs-dap-M_at; Start 2055; Stop 2079
tgaagattgatcagcttgtgtatgg

SEQ ID NO: 8428 - DNA, 25 bp, Artificial
  probe
  misc_feature (1)..(25): SEQ ID NO: 7920; AFFX-r2-Bs-dap-M_at; Start 2339; Stop 2363
gtcatttttttgcgcgacccgctga

SEQ ID NO: 8429 - DNA, 25 bp, Artificial
  probe
  misc_feature (1)..(25): SEQ ID NO: 7920; AFFX-r2-Bs-dap-M_at; Start 2377; Stop 2401
tgaaccggatgtctcggcattaatc

SEQ ID NO: 8430 - DNA, 25 bp, Artificial
  probe
  misc_feature (1)..(25): SEQ ID NO: 7920; AFFX-r2-Bs-dap-M_at; Start 2450; Stop 2474
gcggaaattcttgtgcgcacacttg

SEQ ID NO: 8431 - DNA, 25 bp, Artificial
  probe
  misc_feature (1)..(25): SEQ ID NO: 7920; AFFX-r2-Bs-dap-M_at; Start 2119; Stop 2143
gaaaattgctttgatcgcgcatgac

SEQ ID NO: 8432 - DNA, 25 bp, Artificial
  probe
  misc_feature (1)..(25): SEQ ID NO: 7920; AFFX-r2-Bs-dap-M_at; Start 2554; Stop 2578
cccacagtgatgatgtcgagatcgg

SEQ ID NO: 8433 - DNA, 25 bp, Artificial
  probe
  misc_feature (1)..(25): SEQ ID NO: 7920; AFFX-r2-Bs-dap-M_at; Start 2475; Stop 2499
atgaaggtgttttcgaattccgtga

SEQ ID NO: 8434 - DNA, 25 bp, Artificial
  probe
  misc_feature (1)..(25): SEQ ID NO: 7920; AFFX-r2-Bs-dap-M_at; Start 2448; Stop 2472
ctgcggaaattcttgtgcgcacact

SEQ ID NO: 8435 - DNA, 25 bp, Artificial
  probe
  misc_feature (1)..(25): SEQ ID NO: 7920; AFFX-r2-Bs-dap-M_at; Start 2519; Stop 2543
ccgaatgtataatgctgacgttctt

SEQ ID NO: 8436 - DNA, 25 bp, Artificial
  probe
  misc_feature (1)..(25): SEQ ID NO: 7920; AFFX-r2-Bs-dap-M_at; Start 2194; Stop 2218
aaagaatcatgatctatacgcaacc

SEQ ID NO: 8437 - DNA, 25 bp, Artificial
  probe
  misc_feature (1)..(25): SEQ ID NO: 7920; AFFX-r2-Bs-dap-M_at; Start 2401; Stop 2425
ccgtttatgtgatgtgtattccatt

SEQ ID NO: 8438 - DNA, 25 bp, Artificial
  probe
  misc_feature (1)..(25): SEQ ID NO: 7921; AFFX-r2-Bs-lys-3_at; Start 1012; Stop 1036
ggccggttttgtgttagcagcggaa

SEQ ID NO: 8439 - DNA, 25 bp, Artificial
  probe
  misc_feature (1)..(25): SEQ ID NO: 7921; AFFX-r2-Bs-lys-3_at; Start 1008; Stop 1032
atacggccggttttgtgttagcagc

SEQ ID NO: 8440 - DNA, 25 bp, Artificial
  probe
  misc_feature (1)..(25): SEQ ID NO: 7921; AFFX-r2-Bs-lys-3_at; Start 1073; Stop 1097
tattcatttgtatccaaggtgctga

SEQ ID NO: 8441 - DNA, 25 bp, Artificial
  probe
  misc_feature (1)..(25): SEQ ID NO: 7921; AFFX-r2-Bs-lys-3_at; Start 1235; Stop 1259
gaaccgggccgttctctcgtgggag

SEQ ID NO: 8442 - DNA, 25 bp, Artificial
  probe
  misc_feature (1)..(25): SEQ ID NO: 7921; AFFX-r2-Bs-lys-3_at; Start 1239; Stop 1263
cgggccgttctctcgtgggagacgc

SEQ ID NO: 8443 - DNA, 25 bp, Artificial
  probe
  misc_feature (1)..(25): SEQ ID NO: 7921; AFFX-r2-Bs-lys-3_at; Start 1075; Stop 1099
ttcatttgtatccaaggtgctgaat

SEQ ID NO: 8444 - DNA, 25 bp, Artificial
  probe
  misc_feature (1)..(25): SEQ ID NO: 7921; AFFX-r2-Bs-lys-3_at; Start 1091; Stop 1115
gtgctgaatcttggaggaggtttcg

SEQ ID NO: 8445 - DNA, 25 bp, Artificial
  probe
  misc_feature (1)..(25): SEQ ID NO: 7921; AFFX-r2-Bs-lys-3_at; Start 1080; Stop 1104
ttgtatccaaggtgctgaatcttgg

SEQ ID NO: 8446 - DNA, 25 bp, Artificial
  probe
  misc_feature (1)..(25): SEQ ID NO: 7921; AFFX-r2-Bs-lys-3_at; Start 1017; Stop 1041
gttttgtgttagcagcggaaaaaat

SEQ ID NO: 8447 - DNA, 25 bp, Artificial
  probe
  misc_feature (1)..(25): SEQ ID NO: 7921; AFFX-r2-Bs-lys-3_at; Start 1147; Stop 1171
tcatgccactgaatacgttgaaaaa

SEQ ID NO: 8448 - DNA, 25 bp, Artificial
  probe
  misc_feature (1)..(25): SEQ ID NO: 7921; AFFX-r2-Bs-lys-3_at; Start 1149; Stop 1173
atgccactgaatacgttgaaaaaat

SEQ ID NO: 8449 - DNA, 25 bp, Artificial
  probe
  misc_feature (1)..(25): SEQ ID NO: 7921; AFFX-r2-Bs-lys-5_at; Start 608; Stop 632
ggactttctttagatgtcgtatccg

SEQ ID NO: 8450 - DNA, 25 bp, Artificial
  probe
  misc_feature (1)..(25): SEQ ID NO: 7921; AFFX-r2-Bs-lys-5_at; Start 514; Stop 538
gcaggcgtttatttctgcagggctg

SEQ ID NO: 8451 - DNA, 25 bp, Artificial
  probe
  misc_feature (1)..(25): SEQ ID NO: 7921; AFFX-r2-Bs-lys-5_at; Start 457; Stop 481
tacacctctttacgtatatgatgtg

SEQ ID NO: 8452 - DNA, 25 bp, Artificial
  probe
  misc_feature (1)..(25): SEQ ID NO: 7921; AFFX-r2-Bs-lys-5_at; Start 459; Stop 483
cacctctttacgtatatgatgtggc

SEQ ID NO: 8453 - DNA, 25 bp, Artificial
  probe
  misc_feature (1)..(25): SEQ ID NO: 7921; AFFX-r2-Bs-lys-5_at; Start 442; Stop 466
agcggagaaatatggtacacctctt

SEQ ID NO: 8454 - DNA, 25 bp, Artificial
  probe
  misc_feature (1)..(25): SEQ ID NO: 7921; AFFX-r2-Bs-lys-5_at; Start 411; Stop 435
tagaaatcggaggtgtggatgctct

SEQ ID NO: 8455 - DNA, 25 bp, Artificial
  probe
  misc_feature (1)..(25): SEQ ID NO: 7921; AFFX-r2-Bs-lys-5_at; Start 445; Stop 469
ggagaaatatggtacacctctttac

SEQ ID NO: 8456 - DNA, 25 bp, Artificial
  probe
  misc_feature (1)..(25): SEQ ID NO: 7921; AFFX-r2-Bs-lys-5_at; Start 427; Stop 451
ggatgctctctatttagcggagaaa

SEQ ID NO: 8457 - DNA, 25 bp, Artificial
  probe
  misc_feature (1)..(25): SEQ ID NO: 7921; AFFX-r2-Bs-lys-5_at; Start 481; Stop 505
ggctttaatacgtgagcgtgctaaa

SEQ ID NO: 8458 - DNA, 25 bp, Artificial
  probe
  misc_feature (1)..(25): SEQ ID NO: 7921; AFFX-r2-Bs-lys-5_at; Start 574; Stop 598
atcagtcgcaatgattcagctcgct

SEQ ID NO: 8459 - DNA, 25 bp, Artificial
  probe
  misc_feature (1)..(25): SEQ ID NO: 7921; AFFX-r2-Bs-lys-5_at; Start 636; Stop 660
gagagctatatacggctgttgcagc

SEQ ID NO: 8460 - DNA, 25 bp, Artificial
  probe
  misc_feature (1)..(25): SEQ ID NO: 7921; AFFX-r2-Bs-lys-M_at; Start 863; Stop 887
gactacattacaacgggccaggaag

SEQ ID NO: 8461 - DNA, 25 bp, Artificial
  probe
  misc_feature (1)..(25): SEQ ID NO: 7921; AFFX-r2-Bs-lys-M_at; Start 827; Stop 851
cttcggatcacgcccggagtagaag

SEQ ID NO: 8462 - DNA, 25 bp, Artificial
  probe
  misc_feature (1)..(25): SEQ ID NO: 7921; AFFX-r2-Bs-lys-M_at; Start 894; Stop 918
agtttggtttcgatcttcataacgg

SEQ ID NO: 8463 - DNA, 25 bp, Artificial
  probe
  misc_feature (1)..(25): SEQ ID NO: 7921; AFFX-r2-Bs-lys-M_at; Start 856; Stop 880
tacgcatgactacattacaacgggc

SEQ ID NO: 8464 - DNA, 25 bp, Artificial
  probe
  misc_feature (1)..(25): SEQ ID NO: 7921; AFFX-r2-Bs-lys-M_at; Start 978; Stop 1002
tccattgccatatcggctcgcaaat

SEQ ID NO: 8465 - DNA, 25 bp, Artificial
  probe
  misc_feature (1)..(25): SEQ ID NO: 7921; AFFX-r2-Bs-lys-M_at; Start 862; Stop 886
tgactacattacaacgggccaggaa

SEQ ID NO: 8466 - DNA, 25 bp, Artificial
  probe
  misc_feature (1)..(25): SEQ ID NO: 7921; AFFX-r2-Bs-lys-M_at; Start 674; Stop 698
gaacgcatccactttcatggaaaca

SEQ ID NO: 8467 - DNA, 25 bp, Artificial
  probe
  misc_feature (1)..(25): SEQ ID NO: 7921; AFFX-r2-Bs-lys-M_at; Start 901; Stop 925
tttcgatcttcataacggacaaact

SEQ ID NO: 8468 - DNA, 25 bp, Artificial
  probe
  misc_feature (1)..(25): SEQ ID NO: 7921; AFFX-r2-Bs-lys-M_at; Start 778; Stop 802
gcttcttgaagacctatgtaaagaa

SEQ ID NO: 8469 - DNA, 25 bp, Artificial
  probe
  misc_feature (1)..(25): SEQ ID NO: 7921; AFFX-r2-Bs-lys-M_at; Start 924; Stop 948
ctgaacgggccattgaacaagtatt

SEQ ID NO: 8470 - DNA, 25 bp, Artificial
  probe
  misc_feature (1)..(25): SEQ ID NO: 7921; AFFX-r2-Bs-lys-M_at; Start 923; Stop 947
actgaacgggccattgaacaagtat

SEQ ID NO: 8471 - DNA, 25 bp, Artificial
  probe
  misc_feature (1)..(25): SEQ ID NO: 7922; AFFX-r2-Bs-phe-3_at; Start 2897; Stop 2921
gaccatcccgagctgaatatcgggg

SEQ ID NO: 8472 - DNA, 25 bp, Artificial
  probe
  misc_feature (1)..(25): SEQ ID NO: 7922; AFFX-r2-Bs-phe-3_at; Start 3113; Stop 3137
tccggggcgctgcatagagtgctgt

SEQ ID NO: 8473 - DNA, 25 bp, Artificial
  probe
  misc_feature (1)..(25): SEQ ID NO: 7922; AFFX-r2-Bs-phe-3_at; Start 3167; Stop 3191
tcaaaaattgagtcacgtccgacta

SEQ ID NO: 8474 - DNA, 25 bp, Artificial
  probe
  misc_feature (1)..(25): SEQ ID NO: 7922; AFFX-r2-Bs-phe-3_at; Start 3164; Stop 3188
ctgtcaaaaattgagtcacgtccga

SEQ ID NO: 8475 - DNA, 25 bp, Artificial
  probe
  misc_feature (1)..(25): SEQ ID NO: 7922; AFFX-r2-Bs-phe-3_at; Start 3086; Stop 3110
atggtcatgctgccgcaggatgatc

SEQ ID NO: 8476 - DNA, 25 bp, Artificial
  probe
  misc_feature (1)..(25): SEQ ID NO: 7922; AFFX-r2-Bs-phe-3_at; Start 2915; Stop 2939
atcggggtcattgccaatgatatgg

SEQ ID NO: 8477 - DNA, 25 bp, Artificial
  probe
  misc_feature (1)..(25): SEQ ID NO: 7922; AFFX-r2-Bs-phe-3_at; Start 3163; Stop 3187
cctgtcaaaaattgagtcacgtccg

SEQ ID NO: 8478 - DNA, 25 bp, Artificial
  probe
  misc_feature (1)..(25): SEQ ID NO: 7922; AFFX-r2-Bs-phe-3_at; Start 3061; Stop 3085
gagctctaggcccaaaacgacctta

SEQ ID NO: 8479 - DNA, 25 bp, Artificial
  probe
  misc_feature (1)..(25): SEQ ID NO: 7922; AFFX-r2-Bs-phe-3_at; Start 3176; Stop 3200
gagtcacgtccgactaaaaccggat

SEQ ID NO: 8480 - DNA, 25 bp, Artificial
  probe
  misc_feature (1)..(25): SEQ ID NO: 7922; AFFX-r2-Bs-phe-3_at; Start 3136; Stop 3160
gtctgcattttcttggagaaattta

SEQ ID NO: 8481 - DNA, 25 bp, Artificial
  probe
  misc_feature (1)..(25): SEQ ID NO: 7922; AFFX-r2-Bs-phe-3_at; Start 3017; Stop 3041
ctgtctcccgatgaaaacatatctt

SEQ ID NO: 8482 - DNA, 25 bp, Artificial
  probe
  misc_feature (1)..(25): SEQ ID NO: 7922; AFFX-r2-Bs-phe-5_at; Start 2348; Stop 2372
tgacactgtctatcagtacgtcggc

SEQ ID NO: 8483 - DNA, 25 bp, Artificial
  probe
  misc_feature (1)..(25): SEQ ID NO: 7922; AFFX-r2-Bs-phe-5_at; Start 2241; Stop 2265
ggaggataggtcaggtgcgttatct

SEQ ID NO: 8484 - DNA, 25 bp, Artificial
  probe
  misc_feature (1)..(25): SEQ ID NO: 7922; AFFX-r2-Bs-phe-5_at; Start 2281; Stop 2305
gtagctgattctggaagcaacgttc

SEQ ID NO: 8485 - DNA, 25 bp, Artificial
  probe
  misc_feature (1)..(25): SEQ ID NO: 7922; AFFX-r2-Bs-phe-5_at; Start 2291; Stop 2315
ctggaagcaacgttctttccattca

SEQ ID NO: 8486 - DNA, 25 bp, Artificial
  probe
  misc_feature (1)..(25): SEQ ID NO: 7922; AFFX-r2-Bs-phe-5_at; Start 2141; Stop 2165
aggtcgatttaagtagaagtgcgtt

SEQ ID NO: 8487 - DNA, 25 bp, Artificial
  probe
  misc_feature (1)..(25): SEQ ID NO: 7922; AFFX-r2-Bs-phe-5_at; Start 2347; Stop 2371
gtgacactgtctatcagtacgtcgg

SEQ ID NO: 8488 - DNA, 25 bp, Artificial
  probe
  misc_feature (1)..(25): SEQ ID NO: 7922; AFFX-r2-Bs-phe-5_at; Start 2238; Stop 2262
tttggaggataggtcaggtgcgtta

SEQ ID NO: 8489 - DNA, 25 bp, Artificial
  probe
  misc_feature (1)..(25): SEQ ID NO: 7922; AFFX-r2-Bs-phe-5_at; Start 2125; Stop 2149
gcagatgccgttcaaaaggtcgatt

SEQ ID NO: 8490 - DNA, 25 bp, Artificial
  probe
  misc_feature (1)..(25): SEQ ID NO: 7922; AFFX-r2-Bs-phe-5_at; Start 2187; Stop 2211
ttttccattctacaccatggtaaaa

SEQ ID NO: 8491 - DNA, 25 bp, Artificial
  probe
  misc_feature (1)..(25): SEQ ID NO: 7922; AFFX-r2-Bs-phe-5_at; Start 2116; Stop 2140
gattcagtagcagatgccgttcaaa

SEQ ID NO: 8492 - DNA, 25 bp, Artificial
  probe
  misc_feature (1)..(25): SEQ ID NO: 7922; AFFX-r2-Bs-phe-5_at; Start 2358; Stop 2382
tatcagtacgtcggcaatggaagaa

SEQ ID NO: 8493 - DNA, 25 bp, Artificial
  probe
  misc_feature (1)..(25): SEQ ID NO: 7922; AFFX-r2-Bs-phe-M_at; Start 2597; Stop 2621
gttgcaggcgaagttgattttgctt

SEQ ID NO: 8494 - DNA, 25 bp, Artificial
  probe
  misc_feature (1)..(25): SEQ ID NO: 7922; AFFX-r2-Bs-phe-M_at; Start 2484; Stop 2508
tcggttatttaggtccagcagctac

SEQ ID NO: 8495 - DNA, 25 bp, Artificial
  probe
  misc_feature (1)..(25): SEQ ID NO: 7922; AFFX-r2-Bs-phe-M_at; Start 2821; Stop 2845
atttcttcatcgacattttccttcc

SEQ ID NO: 8496 - DNA, 25 bp, Artificial
  probe
  misc_feature (1)..(25): SEQ ID NO: 7922; AFFX-r2-Bs-phe-M_at; Start 2698; Stop 2722
aatcgtgggtgaaatgacgttgccg

SEQ ID NO: 8497 - DNA, 25 bp, Artificial
  probe
  misc_feature (1)..(25): SEQ ID NO: 7922; AFFX-r2-Bs-phe-M_at; Start 2578; Stop 2602
ggagtgtatagatgcagccgttgca

SEQ ID NO: 8498 - DNA, 25 bp, Artificial
  probe
  misc_feature (1)..(25): SEQ ID NO: 7922; AFFX-r2-Bs-phe-M_at; Start 2505; Stop 2529
ctacatttacacatctagcagtcag

SEQ ID NO: 8499 - DNA, 25 bp, Artificial
  probe
  misc_feature (1)..(25): SEQ ID NO: 7922; AFFX-r2-Bs-phe-M_at; Start 2552; Stop 2576
gaacatgttgcttaccgcaccattc

SEQ ID NO: 8500 - DNA, 25 bp, Artificial
  probe
  misc_feature (1)..(25): SEQ ID NO: 7922; AFFX-r2-Bs-phe-M_at; Start 2506; Stop 2530
tacatttacacatctagcagtcagt

SEQ ID NO: 8501 - DNA, 25 bp, Artificial
  probe
  misc_feature (1)..(25): SEQ ID NO: 7922; AFFX-r2-Bs-phe-M_at; Start 2550; Stop 2574
ccgaacatgttgcttaccgcaccat

SEQ ID NO: 8502 - DNA, 25 bp, Artificial
  probe
  misc_feature (1)..(25): SEQ ID NO: 7922; AFFX-r2-Bs-phe-M_at; Start 2773; Stop 2797
gctcgacaaaatttactcacattca

SEQ ID NO: 8503 - DNA, 25 bp, Artificial
  probe
  misc_feature (1)..(25): SEQ ID NO: 7922; AFFX-r2-Bs-phe-M_at; Start 2851; Stop 2875
atatgaatacgccaattctaccggg

SEQ ID NO: 8504 - DNA, 25 bp, Artificial
  probe
  misc_feature (1)..(25): SEQ ID NO: 7923; AFFX-r2-Bs-thr-3_s_at; Start 1962; Stop 1986
gaaggatatgttccatcagccgtac

SEQ ID NO: 8505 - DNA, 25 bp, Artificial
  probe
  misc_feature (1)..(25): SEQ ID NO: 7923; AFFX-r2-Bs-thr-3_s_at; Start 1857; Stop 1881
gaaggagtttccatatgccgatgcc

SEQ ID NO: 8506 - DNA, 25 bp, Artificial
  probe
  misc_feature (1)..(25): SEQ ID NO: 7923; AFFX-r2-Bs-thr-3_s_at; Start 1932; Stop 1956
ggattggccgcttgtcgggaaaatc

SEQ ID NO: 8507 - DNA, 25 bp, Artificial
  probe
  misc_feature (1)..(25): SEQ ID NO: 7923; AFFX-r2-Bs-thr-3_s_at; Start 2037; Stop 2061
gaagggcgcatatggaacggctctc

SEQ ID NO: 8508 - DNA, 25 bp, Artificial
  probe
  misc_feature (1)..(25): SEQ ID NO: 7923; AFFX-r2-Bs-thr-3_s_at; Start 1735; Stop 1759
gtgatcggcctgcatgaggatgacg

SEQ ID NO: 8509 - DNA, 25 bp, Artificial
  probe
  misc_feature (1)..(25): SEQ ID NO: 7923; AFFX-r2-Bs-thr-3_s_at; Start 1838; Stop 1862
acgcgagagacgtgcttccgaagga

SEQ ID NO: 8510 - DNA, 25 bp, Artificial
  probe
  misc_feature (1)..(25): SEQ ID NO: 7923; AFFX-r2-Bs-thr-3_s_at; Start 1993; Stop 2017
atgcttgtgcctgagctgtcaaaag

SEQ ID NO: 8511 - DNA, 25 bp, Artificial
  probe
  misc_feature (1)..(25): SEQ ID NO: 7923; AFFX-r2-Bs-thr-3_s_at; Start 2119; Stop 2143
aaagaacagctcgcgcttcatttcc

SEQ ID NO: 8512 - DNA, 25 bp, Artificial
  probe
  misc_feature (1)..(25): SEQ ID NO: 7923; AFFX-r2-Bs-thr-3_s_at; Start 1907; Stop 1931
tcctcattgctgcgatcatgtccaa

SEQ ID NO: 8513 - DNA, 25 bp, Artificial
  probe
  misc_feature (1)..(25): SEQ ID NO: 7923; AFFX-r2-Bs-thr-3_s_at; Start 1795; Stop 1819
gacgtagtcgttgtcattccttttt

SEQ ID NO: 8514 - DNA, 25 bp, Artificial
  probe
  misc_feature (1)..(25): SEQ ID NO: 7923; AFFX-r2-Bs-thr-3_s_at; Start 1756; Stop 1780
gacgagacccaaatgatccgcgtcc

SEQ ID NO: 8515 - DNA, 25 bp, Artificial
  probe
  misc_feature (1)..(25): SEQ ID NO: 7923; AFFX-r2-Bs-thr-5_s_at; Start 544; Stop 568
gaaatgcattgtcatcatcccgaac

SEQ ID NO: 8516 - DNA, 25 bp, Artificial
  probe
  misc_feature (1)..(25): SEQ ID NO: 7923; AFFX-r2-Bs-thr-5_s_at; Start 864; Stop 888
caggccttccgaaaatgcgcggctt

SEQ ID NO: 8517 - DNA, 25 bp, Artificial
  probe
  misc_feature (1)..(25): SEQ ID NO: 7923; AFFX-r2-Bs-thr-5_s_at; Start 632; Stop 656
gacggaaactttgacgatgcgctta

SEQ ID NO: 8518 - DNA, 25 bp, Artificial
  probe
  misc_feature (1)..(25): SEQ ID NO: 7923; AFFX-r2-Bs-thr-5_s_at; Start 772; Stop 796
agcgcctgatgttttagcgatcccg

SEQ ID NO: 8519 - DNA, 25 bp, Artificial
  probe
  misc_feature (1)..(25): SEQ ID NO: 7923; AFFX-r2-Bs-thr-5_s_at; Start 735; Stop 759
aaactgctgccttcgaagtgtgcga

SEQ ID NO: 8520 - DNA, 25 bp, Artificial
  probe
  misc_feature (1)..(25): SEQ ID NO: 7923; AFFX-r2-Bs-thr-5_s_at; Start 588; Stop 612
aactcgctcaagctgtcatgtacgg

SEQ ID NO: 8521 - DNA, 25 bp, Artificial
  probe
  misc_feature (1)..(25): SEQ ID NO: 7923; AFFX-r2-Bs-thr-5_s_at; Start 521; Stop 545
gcatatgcagcccgtgctaacatga

SEQ ID NO: 8522 - DNA, 25 bp, Artificial
  probe
  misc_feature (1)..(25): SEQ ID NO: 7923; AFFX-r2-Bs-thr-5_s_at; Start 290; Stop 314
gtaacagatcaaacaccggcgctaa

SEQ ID NO: 8523 - DNA, 25 bp, Artificial
  probe
  misc_feature (1)..(25): SEQ ID NO: 7923; AFFX-r2-Bs-thr-5_s_at; Start 707; Stop 731
gtcaacccttaccgcattgaaggcc

SEQ ID NO: 8524 - DNA, 25 bp, Artificial
  probe
  misc_feature (1)..(25): SEQ ID NO: 7923; AFFX-r2-Bs-thr-5_s_at; Start 490; Stop 514
gtcaacaggtaacacttccgctgct

SEQ ID NO: 8525 - DNA, 25 bp, Artificial
  probe
  misc_feature (1)..(25): SEQ ID NO: 7923; AFFX-r2-Bs-thr-5_s_at; Start 647; Stop 671
gatgcgcttaaaattgtccgttcca

SEQ ID NO: 8526 - DNA, 25 bp, Artificial
  probe
  misc_feature (1)..(25): SEQ ID NO: 7923; AFFX-r2-Bs-thr-M_s_at; Start 1480; Stop 1504
gataacctgatctaccaagtggcta

SEQ ID NO: 8527 - DNA, 25 bp, Artificial
  probe
  misc_feature (1)..(25): SEQ ID NO: 7923; AFFX-r2-Bs-thr-M_s_at; Start 1104; Stop 1128
gttcttgcgcgtctatcgcaggagt

SEQ ID NO: 8528 - DNA, 25 bp, Artificial
  probe
  misc_feature (1)..(25): SEQ ID NO: 7923; AFFX-r2-Bs-thr-M_s_at; Start 1233; Stop 1257
aaatcaagcctgtcacattgccgac

SEQ ID NO: 8529 - DNA, 25 bp, Artificial
  probe
  misc_feature (1)..(25): SEQ ID NO: 7923; AFFX-r2-Bs-thr-M_s_at; Start 1305; Stop 1329
gaacgaagccgacatgctgttctct

SEQ ID NO: 8530 - DNA, 25 bp, Artificial
  probe
  misc_feature (1)..(25): SEQ ID NO: 7923; AFFX-r2-Bs-thr-M_s_at; Start 1532; Stop 1556
aaatgcctcctgtccatgtgaaggt

SEQ ID NO: 8531 - DNA, 25 bp, Artificial
  probe
  misc_feature (1)..(25): SEQ ID NO: 7923; AFFX-r2-Bs-thr-M_s_at; Start 1204; Stop 1228
agatccgaacacagcggtcgacatt

SEQ ID NO: 8532 - DNA, 25 bp, Artificial
  probe
  misc_feature (1)..(25): SEQ ID NO: 7923; AFFX-r2-Bs-thr-M_s_at; Start 1327; Stop 1351
tctgtcactgttcccggaagcacag

SEQ ID NO: 8533 - DNA, 25 bp, Artificial
  probe
  misc_feature (1)..(25): SEQ ID NO: 7923; AFFX-r2-Bs-thr-M_s_at; Start 1375; Stop 1399
tcagtcggaatggcgctcagcagat

SEQ ID NO: 8534 - DNA, 25 bp, Artificial
  probe
  misc_feature (1)..(25): SEQ ID NO: 7923; AFFX-r2-Bs-thr-M_s_at; Start 1045; Stop 1069
tgaaatccttcacgcatatcagctg

SEQ ID NO: 8535 - DNA, 25 bp, Artificial
  probe
  misc_feature (1)..(25): SEQ ID NO: 7923; AFFX-r2-Bs-thr-M_s_at; Start 1361; Stop 1385
gccccggctttgattcagtcggaat

SEQ ID NO: 8536 - DNA, 25 bp, Artificial
  probe
  misc_feature (1)..(25): SEQ ID NO: 7923; AFFX-r2-Bs-thr-M_s_at; Start 1061; Stop 1085
tatcagctgatcgcccgtgtagaag

SEQ ID NO: 8537 - DNA, 25 bp, Artificial
  probe
  misc_feature (1)..(25): SEQ ID NO: 7916; AFFX-r2-Ec-bioB-3_at; Start 852; Stop 876
tttctacggttgcaaactgctgacc

SEQ ID NO: 8538 - DNA, 25 bp, Artificial
  probe
  misc_feature (1)..(25): SEQ ID NO: 7916; AFFX-r2-Ec-bioB-3_at; Start 969; Stop 993
acaacagcaacgtcttgaacaggcg

SEQ ID NO: 8539 - DNA, 25 bp, Artificial
  probe
  misc_feature (1)..(25): SEQ ID NO: 7916; AFFX-r2-Ec-bioB-3_at; Start 808; Stop 832
gaacagactcaggcgatgtgcttta

SEQ ID NO: 8540 - DNA, 25 bp, Artificial
  probe
  misc_feature (1)..(25): SEQ ID NO: 7916; AFFX-r2-Ec-bioB-3_at; Start 831; Stop 855
tatggcaggcgcaaactcgattttc

SEQ ID NO: 8541 - DNA, 25 bp, Artificial
  probe
  misc_feature (1)..(25): SEQ ID NO: 7916; AFFX-r2-Ec-bioB-3_at; Start 959; Stop 983
gggataacgaacaacagcaacgtct

SEQ ID NO: 8542 - DNA, 25 bp, Artificial
  probe
  misc_feature (1)..(25): SEQ ID NO: 7916; AFFX-r2-Ec-bioB-3_at; Start 761; Stop 785
tgccaacctcttacgtgcgcctttc

SEQ ID NO: 8543 - DNA, 25 bp, Artificial
  probe
  misc_feature (1)..(25): SEQ ID NO: 7916; AFFX-r2-Ec-bioB-3_at; Start 764; Stop 788
caacctcttacgtgcgcctttctgc

SEQ ID NO: 8544 - DNA, 25 bp, Artificial
  probe
  misc_feature (1)..(25): SEQ ID NO: 7916; AFFX-r2-Ec-bioB-3_at; Start 917; Stop 941
gcaaactggggctaaatccgcagca

SEQ ID NO: 8545 - DNA, 25 bp, Artificial
  probe
  misc_feature (1)..(25): SEQ ID NO: 7916; AFFX-r2-Ec-bioB-3_at; Start 841; Stop 865
gcaaactcgattttctacggttgca

SEQ ID NO: 8546 - DNA, 25 bp, Artificial
  probe
  misc_feature (1)..(25): SEQ ID NO: 7916; AFFX-r2-Ec-bioB-3_at; Start 812; Stop 836
agactcaggcgatgtgctttatggc

SEQ ID NO: 8547 - DNA, 25 bp, Artificial
  probe
  misc_feature (1)..(25): SEQ ID NO: 7916; AFFX-r2-Ec-bioB-3_at; Start 921; Stop 945
actggggctaaatccgcagcaaact

SEQ ID NO: 8548 - DNA, 25 bp, Artificial
  probe
  misc_feature (1)..(25): SEQ ID NO: 7916; AFFX-r2-Ec-bioB-5_at; Start 191; Stop 215
cgcgctacaaaaccgggctggaagc

SEQ ID NO: 8549 - DNA, 25 bp, Artificial
  probe
  misc_feature (1)..(25): SEQ ID NO: 7916; AFFX-r2-Ec-bioB-5_at; Start 212; Stop 236
aagccgagcggttgatggaagttga

SEQ ID NO: 8550 - DNA, 25 bp, Artificial
  probe
  misc_feature (1)..(25): SEQ ID NO: 7916; AFFX-r2-Ec-bioB-5_at; Start 103; Stop 127
ttcgatcctcgtcaggtgcaggtca

SEQ ID NO: 8551 - DNA, 25 bp, Artificial
  probe
  misc_feature (1)..(25): SEQ ID NO: 7916; AFFX-r2-Ec-bioB-5_at; Start 60; Stop 84
gctggatctgctgtttgaagcgcag

SEQ ID NO: 8552 - DNA, 25 bp, Artificial
  probe
  misc_feature (1)..(25): SEQ ID NO: 7916; AFFX-r2-Ec-bioB-5_at; Start 269; Stop 293
cggcaggatcgacgcgcttctgtat

SEQ ID NO: 8553 - DNA, 25 bp, Artificial
  probe
  misc_feature (1)..(25): SEQ ID NO: 7916; AFFX-r2-Ec-bioB-5_at; Start 217; Stop 241
gagcggttgatggaagttgaacagg

SEQ ID NO: 8554 - DNA, 25 bp, Artificial
  probe
  misc_feature (1)..(25): SEQ ID NO: 7916; AFFX-r2-Ec-bioB-5_at; Start 61; Stop 85
ctggatctgctgtttgaagcgcagc

SEQ ID NO: 8555 - DNA, 25 bp, Artificial
  probe
  misc_feature (1)..(25): SEQ ID NO: 7916; AFFX-r2-Ec-bioB-5_at; Start 100; Stop 124
catttcgatcctcgtcaggtgcagg

SEQ ID NO: 8556 - DNA, 25 bp, Artificial
  probe
  misc_feature (1)..(25): SEQ ID NO: 7916; AFFX-r2-Ec-bioB-5_at; Start 190; Stop 214
tcgcgctacaaaaccgggctggaag

SEQ ID NO: 8557 - DNA, 25 bp, Artificial
  probe
  misc_feature (1)..(25): SEQ ID NO: 7916; AFFX-r2-Ec-bioB-5_at; Start 104; Stop 128
tcgatcctcgtcaggtgcaggtcag

SEQ ID NO: 8558 - DNA, 25 bp, Artificial
  probe
  misc_feature (1)..(25): SEQ ID NO: 7916; AFFX-r2-Ec-bioB-5_at; Start 102; Stop 126
tttcgatcctcgtcaggtgcaggtc

SEQ ID NO: 8559 - DNA, 25 bp, Artificial
  probe
  misc_feature (1)..(25): SEQ ID NO: 7916; AFFX-r2-Ec-bioB-M_at; Start 500; Stop 524
cacgcacttatcaggaacgcctcga

SEQ ID NO: 8560 - DNA, 25 bp, Artificial
  probe
  misc_feature (1)..(25): SEQ ID NO: 7916; AFFX-r2-Ec-bioB-M_at; Start 597; Stop 621
aaaagatcgcgccggattattgctg

SEQ ID NO: 8561 - DNA, 25 bp, Artificial
  probe
  misc_feature (1)..(25): SEQ ID NO: 7916; AFFX-r2-Ec-bioB-M_at; Start 608; Stop 632
ccggattattgctgcaactggcaaa

SEQ ID NO: 8562 - DNA, 25 bp, Artificial
  probe
  misc_feature (1)..(25): SEQ ID NO: 7916; AFFX-r2-Ec-bioB-M_at; Start 647; Stop 671
cggaaagcgtgccaatcaacatgct

SEQ ID NO: 8563 - DNA, 25 bp, Artificial
  probe
  misc_feature (1)..(25): SEQ ID NO: 7916; AFFX-r2-Ec-bioB-M_at; Start 600; Stop 624
agatcgcgccggattattgctgcaa

SEQ ID NO: 8564 - DNA, 25 bp, Artificial
  probe
  misc_feature (1)..(25): SEQ ID NO: 7916; AFFX-r2-Ec-bioB-M_at; Start 548; Stop 572
ccgggatcaaagtctgttctggcgg

SEQ ID NO: 8565 - DNA, 25 bp, Artificial
  probe
  misc_feature (1)..(25): SEQ ID NO: 7916; AFFX-r2-Ec-bioB-M_at; Start 390; Stop 414
gctgggcacgttgagtgaatctcag

SEQ ID NO: 8566 - DNA, 25 bp, Artificial
  probe
  misc_feature (1)..(25): SEQ ID NO: 7916; AFFX-r2-Ec-bioB-M_at; Start 572; Stop 596
gcattgtgggcttaggcgaaacggt

SEQ ID NO: 8567 - DNA, 25 bp, Artificial
  probe
  misc_feature (1)..(25): SEQ ID NO: 7916; AFFX-r2-Ec-bioB-M_at; Start 549; Stop 573
cgggatcaaagtctgttctggcggc

SEQ ID NO: 8568 - DNA, 25 bp, Artificial
  probe
  misc_feature (1)..(25): SEQ ID NO: 7916; AFFX-r2-Ec-bioB-M_at; Start 382; Stop 406
tgtatgacgctgggcacgttgagtg

SEQ ID NO: 8569 - DNA, 25 bp, Artificial
  probe
  misc_feature (1)..(25): SEQ ID NO: 7916; AFFX-r2-Ec-bioB-M_at; Start 546; Stop 570
tgccgggatcaaagtctgttctggc

SEQ ID NO: 8570 - DNA, 25 bp, Artificial
  probe
  misc_feature (1)..(25): SEQ ID NO: 7917; AFFX-r2-Ec-bioC-3_at; Start 612; Stop 636
cggtgccacgcatcttcatgaaggg

SEQ ID NO: 8571 - DNA, 25 bp, Artificial
  probe
  misc_feature (1)..(25): SEQ ID NO: 7917; AFFX-r2-Ec-bioC-3_at; Start 498; Stop 522
accgccagatgaaatcgaacagtcg

SEQ ID NO: 8572 - DNA, 25 bp, Artificial
  probe
  misc_feature (1)..(25): SEQ ID NO: 7917; AFFX-r2-Ec-bioC-3_at; Start 539; Stop 563
atcaacatcatattcagcccatcac

SEQ ID NO: 8573 - DNA, 25 bp, Artificial
  probe
  misc_feature (1)..(25): SEQ ID NO: 7917; AFFX-r2-Ec-bioC-3_at; Start 586; Stop 610
agtgccatgcgttcgctgaaaggca

SEQ ID NO: 8574 - DNA, 25 bp, Artificial
  probe
  misc_feature (1)..(25): SEQ ID NO: 7917; AFFX-r2-Ec-bioC-3_at; Start 466; Stop 490
gtggacgagcgtccgcatgctaatc

SEQ ID NO: 8575 - DNA, 25 bp, Artificial
  probe
  misc_feature (1)..(25): SEQ ID NO: 7917; AFFX-r2-Ec-bioC-3_at; Start 525; Stop 549
gaacggcgtgcattatcaacatcat

SEQ ID NO: 8576 - DNA, 25 bp, Artificial
  probe
  misc_feature (1)..(25): SEQ ID NO: 7917; AFFX-r2-Ec-bioC-3_at; Start 650; Stop 674
tattaacgcgttcgcagttgcagcg

SEQ ID NO: 8577 - DNA, 25 bp, Artificial
  probe
  misc_feature (1)..(25): SEQ ID NO: 7917; AFFX-r2-Ec-bioC-3_at; Start 670; Stop 694
cagcgattgcaactggcctggccgc

SEQ ID NO: 8578 - DNA, 25 bp, Artificial
  probe
  misc_feature (1)..(25): SEQ ID NO: 7917; AFFX-r2-Ec-bioC-3_at; Start 561; Stop 585
cacgctgtggtttgatgatgcgctc

SEQ ID NO: 8579 - DNA, 25 bp, Artificial
  probe
  misc_feature (1)..(25): SEQ ID NO: 7917; AFFX-r2-Ec-bioC-3_at; Start 546; Stop 570
tcatattcagcccatcacgctgtgg

SEQ ID NO: 8580 - DNA, 25 bp, Artificial
  probe
  misc_feature (1)..(25): SEQ ID NO: 7917; AFFX-r2-Ec-bioC-3_at; Start 419; Stop 443
cgctggtgcagggatcgttacccga

SEQ ID NO: 8581 - DNA, 25 bp, Artificial
  probe
  misc_feature (1)..(25): SEQ ID NO: 7917; AFFX-r2-Ec-bioC-5_at; Start 248; Stop 272
aggatgccgcagaccattatctggc

SEQ ID NO: 8582 - DNA, 25 bp, Artificial
  probe
  misc_feature (1)..(25): SEQ ID NO: 7917; AFFX-r2-Ec-bioC-5_at; Start 218; Stop 242
cgccgccaatgcttgttcaggcacg

SEQ ID NO: 8583 - DNA, 25 bp, Artificial
  probe
  misc_feature (1)..(25): SEQ ID NO: 7917; AFFX-r2-Ec-bioC-5_at; Start 68; Stop 92
atgcagatctacagcgccagagtgc

SEQ ID NO: 8584 - DNA, 25 bp, Artificial
  probe
  misc_feature (1)..(25): SEQ ID NO: 7917; AFFX-r2-Ec-bioC-5_at; Start 143; Stop 167
acgcgggttgtggacctggctggat

SEQ ID NO: 8585 - DNA, 25 bp, Artificial
  probe
  misc_feature (1)..(25): SEQ ID NO: 7917; AFFX-r2-Ec-bioC-5_at; Start 289; Stop 313
ctgccgttagcgactgcgacgttcg

SEQ ID NO: 8586 - DNA, 25 bp, Artificial
  probe
  misc_feature (1)..(25): SEQ ID NO: 7917; AFFX-r2-Ec-bioC-5_at; Start 307; Stop 331
acgttcgatcttgcatggagcaatc

SEQ ID NO: 8587 - DNA, 25 bp, Artificial
  probe
  misc_feature (1)..(25): SEQ ID NO: 7917; AFFX-r2-Ec-bioC-5_at; Start 360; Stop 384
cacggcactccgcgagctgtatcgg

SEQ ID NO: 8588 - DNA, 25 bp, Artificial
  probe
  misc_feature (1)..(25): SEQ ID NO: 7917; AFFX-r2-Ec-bioC-5_at; Start 122; Stop 146
gtaaatacacccacgtactggacgc

SEQ ID NO: 8589 - DNA, 25 bp, Artificial
  probe
  misc_feature (1)..(25): SEQ ID NO: 7917; AFFX-r2-Ec-bioC-5_at; Start 319; Stop 343
gcatggagcaatctcgcagtgcagt

SEQ ID NO: 8590 - DNA, 25 bp, Artificial
  probe
  misc_feature (1)..(25): SEQ ID NO: 7917; AFFX-r2-Ec-bioC-5_at; Start 243; Stop 267
ccagaaggatgccgcagaccattat

SEQ ID NO: 8591 - DNA, 25 bp, Artificial
  probe
  misc_feature (1)..(25): SEQ ID NO: 7917; AFFX-r2-Ec-bioC-5_at; Start 321; Stop 345
atggagcaatctcgcagtgcagtgg

SEQ ID NO: 8592 - DNA, 25 bp, Artificial
  probe
  misc_feature (1)..(25): SEQ ID NO: 7918; AFFX-r2-Ec-bioD-3_at; Start 483; Stop 507
acaacacgccggactgactctggcg

SEQ ID NO: 8593 - DNA, 25 bp, Artificial
  probe
  misc_feature (1)..(25): SEQ ID NO: 7918; AFFX-r2-Ec-bioD-3_at; Start 546; Stop 570
tcacgctgaatatatgaccacgctc

SEQ ID NO: 8594 - DNA, 25 bp, Artificial
  probe
  misc_feature (1)..(25): SEQ ID NO: 7918; AFFX-r2-Ec-bioD-3_at; Start 369; Stop 393
ttctgacactttcacttttgcagat

SEQ ID NO: 8595 - DNA, 25 bp, Artificial
  probe
  misc_feature (1)..(25): SEQ ID NO: 7918; AFFX-r2-Ec-bioD-3_at; Start 414; Stop 438
gccggtgatactggtagttggtgtg

SEQ ID NO: 8596 - DNA, 25 bp, Artificial
  probe
  misc_feature (1)..(25): SEQ ID NO: 7918; AFFX-r2-Ec-bioD-3_at; Start 382; Stop 406
acttttgcagattgggtaacacagg

SEQ ID NO: 8597 - DNA, 25 bp, Artificial
  probe
  misc_feature (1)..(25): SEQ ID NO: 7918; AFFX-r2-Ec-bioD-3_at; Start 545; Stop 569
gtcacgctgaatatatgaccacgct

SEQ ID NO: 8598 - DNA, 25 bp, Artificial
  probe
  misc_feature (1)..(25): SEQ ID NO: 7918; AFFX-r2-Ec-bioD-3_at; Start 593; Stop 617
tgctgggagagatcccctggcttgc

SEQ ID NO: 8599 - DNA, 25 bp, Artificial
  probe
  misc_feature (1)..(25): SEQ ID NO: 7918; AFFX-r2-Ec-bioD-3_at; Start 440; Stop 464
aactcggctgtattaatcacgcgat

SEQ ID NO: 8600 - DNA, 25 bp, Artificial
  probe
  misc_feature (1)..(25): SEQ ID NO: 7918; AFFX-r2-Ec-bioD-3_at; Start 407; Stop 431
aacaactgccggtgatactggtagt

SEQ ID NO: 8601 - DNA, 25 bp, Artificial
  probe
  misc_feature (1)..(25): SEQ ID NO: 7918; AFFX-r2-Ec-bioD-3_at; Start 473; Stop 497
cacaggtaatacaacacgccggact

SEQ ID NO: 8602 - DNA, 25 bp, Artificial
  probe
  misc_feature (1)..(25): SEQ ID NO: 7918; AFFX-r2-Ec-bioD-3_at; Start 372; Stop 396
tgacactttcacttttgcagattgg

SEQ ID NO: 8603 - DNA, 25 bp, Artificial
  probe
  misc_feature (1)..(25): SEQ ID NO: 7918; AFFX-r2-Ec-bioD-5_at; Start 79; Stop 103
gcagcaggctaccggacggcaggtt

SEQ ID NO: 8604 - DNA, 25 bp, Artificial
  probe
  misc_feature (1)..(25): SEQ ID NO: 7918; AFFX-r2-Ec-bioD-5_at; Start 186; Stop 210
cctgcagctggattacgcaacagta

SEQ ID NO: 8605 - DNA, 25 bp, Artificial
  probe
  misc_feature (1)..(25): SEQ ID NO: 7918; AFFX-r2-Ec-bioD-5_at; Start 200; Stop 224
acgcaacagtaaatccttacacctt

SEQ ID NO: 8606 - DNA, 25 bp, Artificial
  probe
  misc_feature (1)..(25): SEQ ID NO: 7918; AFFX-r2-Ec-bioD-5_at; Start 277; Stop 301
gaatcattggtaatgagcgccggat

SEQ ID NO: 8607 - DNA, 25 bp, Artificial
  probe
  misc_feature (1)..(25): SEQ ID NO: 7918; AFFX-r2-Ec-bioD-5_at; Start 184; Stop 208
agcctgcagctggattacgcaacag

SEQ ID NO: 8608 - DNA, 25 bp, Artificial
  probe
  misc_feature (1)..(25): SEQ ID NO: 7918; AFFX-r2-Ec-bioD-5_at; Start 201; Stop 225
cgcaacagtaaatccttacaccttc

SEQ ID NO: 8609 - DNA, 25 bp, Artificial
  probe
  misc_feature (1)..(25): SEQ ID NO: 7918; AFFX-r2-Ec-bioD-5_at; Start 208; Stop 232
gtaaatccttacaccttcgcagaac

SEQ ID NO: 8610 - DNA, 25 bp, Artificial
  probe
  misc_feature (1)..(25): SEQ ID NO: 7918; AFFX-r2-Ec-bioD-5_at; Start 116; Stop 140
cctctggcagcgaaaagaccccgga

SEQ ID NO: 8611 - DNA, 25 bp, Artificial
  probe
  misc_feature (1)..(25): SEQ ID NO: 7918; AFFX-r2-Ec-bioD-5_at; Start 264; Stop 288
gggcagaccgatagaatcattggta

SEQ ID NO: 8612 - DNA, 25 bp, Artificial
  probe
  misc_feature (1)..(25): SEQ ID NO: 7918; AFFX-r2-Ec-bioD-5_at; Start 119; Stop 143
ctggcagcgaaaagaccccggaagg

SEQ ID NO: 8613 - DNA, 25 bp, Artificial
  probe
  misc_feature (1)..(25): SEQ ID NO: 7918; AFFX-r2-Ec-bioD-5_at; Start 215; Stop 239
cttacaccttcgcagaacccacttc

SEQ ID NO: 8614 - DNA, 25 bp, Artificial
  probe
  misc_feature (1)..(25): SEQ ID NO: 7919; AFFX-r2-P1-cre-3_at; Start 729; Stop 753
aaaaaatggtgttgccgcgccatct

SEQ ID NO: 8615 - DNA, 25 bp, Artificial
  probe
  misc_feature (1)..(25): SEQ ID NO: 7919; AFFX-r2-P1-cre-3_at; Start 695; Stop 719
atgatccgaataactacctgttttg

SEQ ID NO: 8616 - DNA, 25 bp, Artificial
  probe
  misc_feature (1)..(25): SEQ ID NO: 7919; AFFX-r2-P1-cre-3_at; Start 712; Stop 736
ctgttttgccgggtcagaaaaaatg

SEQ ID NO: 8617 - DNA, 25 bp, Artificial
  probe
  misc_feature (1)..(25): SEQ ID NO: 7919; AFFX-r2-P1-cre-3_at; Start 660; Stop 684
ggtcgagcgatggatttccgtctct

SEQ ID NO: 8618 - DNA, 25 bp, Artificial
  probe
  misc_feature (1)..(25): SEQ ID NO: 7919; AFFX-r2-P1-cre-3_at; Start 689; Stop 713
tagctgatgatccgaataactacct

SEQ ID NO: 8619 - DNA, 25 bp, Artificial
  probe
  misc_feature (1)..(25): SEQ ID NO: 7919; AFFX-r2-P1-cre-3_at; Start 579; Stop 603
gttaatccatattggcagaacgaaa

SEQ ID NO: 8620 - DNA, 25 bp, Artificial
  probe
  misc_feature (1)..(25): SEQ ID NO: 7919; AFFX-r2-P1-cre-3_at; Start 605; Stop 629
cgctggttagcaccgcaggtgtaga

SEQ ID NO: 8621 - DNA, 25 bp, Artificial
  probe
  misc_feature (1)..(25): SEQ ID NO: 7919; AFFX-r2-P1-cre-3_at; Start 548; Stop 572
aagatatctcacgtactgacggtgg

SEQ ID NO: 8622 - DNA, 25 bp, Artificial
  probe
  misc_feature (1)..(25): SEQ ID NO: 7919; AFFX-r2-P1-cre-3_at; Start 597; Stop 621
aacgaaaacgctggttagcaccgca

SEQ ID NO: 8623 - DNA, 25 bp, Artificial
  probe
  misc_feature (1)..(25): SEQ ID NO: 7919; AFFX-r2-P1-cre-3_at; Start 704; Stop 728
ataactacctgttttgccgggtcag

SEQ ID NO: 8624 - DNA, 25 bp, Artificial
  probe
  misc_feature (1)..(25): SEQ ID NO: 7919; AFFX-r2-P1-cre-3_at; Start 762; Stop 786
ccagctatcaactcgcgccctggaa

SEQ ID NO: 8625 - DNA, 25 bp, Artificial
  probe
  misc_feature (1)..(25): SEQ ID NO: 7919; AFFX-r2-P1-cre-5_at; Start 416; Stop 440
gcactgatttcgaccaggttcgttc

SEQ ID NO: 8626 - DNA, 25 bp, Artificial
  probe
  misc_feature (1)..(25): SEQ ID NO: 7919; AFFX-r2-P1-cre-5_at; Start 493; Stop 517
gggattgcttataacaccctgttac

SEQ ID NO: 8627 - DNA, 25 bp, Artificial
  probe
  misc_feature (1)..(25): SEQ ID NO: 7919; AFFX-r2-P1-cre-5_at; Start 391; Stop 415
gcaaaacaggctctagcgttcgaac

SEQ ID NO: 8628 - DNA, 25 bp, Artificial
  probe
  misc_feature (1)..(25): SEQ ID NO: 7919; AFFX-r2-P1-cre-5_at; Start 334; Stop 358
gctgtttcactggttatgcggcgga

SEQ ID NO: 8629 - DNA, 25 bp, Artificial
  probe
  misc_feature (1)..(25): SEQ ID NO: 7919; AFFX-r2-P1-cre-5_at; Start 274; Stop 298
ttgggccagctaaacatgcttcatc

SEQ ID NO: 8630 - DNA, 25 bp, Artificial
  probe
  misc_feature (1)..(25): SEQ ID NO: 7919; AFFX-r2-P1-cre-5_at; Start 97; Stop 121
gatcgccaggcgttttctgagcata

SEQ ID NO: 8631 - DNA, 25 bp, Artificial
  probe
  misc_feature (1)..(25): SEQ ID NO: 7919; AFFX-r2-P1-cre-5_at; Start 458; Stop 482
atcgctgccaggatatacgtaatct

SEQ ID NO: 8632 - DNA, 25 bp, Artificial
  probe
  misc_feature (1)..(25): SEQ ID NO: 7919; AFFX-r2-P1-cre-5_at; Start 181; Stop 205
cggaaatggtttcccgcagaacctg

SEQ ID NO: 8633 - DNA, 25 bp, Artificial
  probe
  misc_feature (1)..(25): SEQ ID NO: 7919; AFFX-r2-P1-cre-5_at; Start 379; Stop 403
gccggtgaacgtgcaaaacaggctc

SEQ ID NO: 8634 - DNA, 25 bp, Artificial
  probe
  misc_feature (1)..(25): SEQ ID NO: 7919; AFFX-r2-P1-cre-5_at; Start 208; Stop 232
gatgttcgcgattatcttctatatc

SEQ ID NO: 8635 - DNA, 25 bp, Artificial
  probe
  misc_feature (1)..(25): SEQ ID NO: 7919; AFFX-r2-P1-cre-5_at; Start 135; Stop 159
tctgtccgtttgccggtcgtgggcg

SEQ ID NO: 8636 - DNA, 25 bp, Artificial
  probe
  misc_feature (1)..(25): SEQ ID NO: 7758; BIOB3_at; Start 98; Stop 122
aacgaacagactcaggcgatgtgct

SEQ ID NO: 8637 - DNA, 25 bp, Artificial
  probe
  misc_feature (1)..(25): SEQ ID NO: 7758; BIOB3_at; Start 17; Stop 41
gattttattcgcaccattgcggtcg

SEQ ID NO: 8638 - DNA, 25 bp, Artificial
  probe
  misc_feature (1)..(25): SEQ ID NO: 7758; BIOB3_at; Start 19; Stop 43
ttttattcgcaccattgcggtcgcg

SEQ ID NO: 8639 - DNA, 25 bp, Artificial
  probe
  misc_feature (1)..(25): SEQ ID NO: 7758; BIOB3_at; Start 268; Stop 292
gcaacgtcttgaacaggcgctgatg

SEQ ID NO: 8640 - DNA, 25 bp, Artificial
  probe
  misc_feature (1)..(25): SEQ ID NO: 7758; BIOB3_at; Start 44; Stop 68
cggatcatgatgccaacctcttacg

SEQ ID NO: 8641 - DNA, 25 bp, Artificial
  probe
  misc_feature (1)..(25): SEQ ID NO: 7758; BIOB3_at; Start 33; Stop 57
ttgcggtcgcgcggatcatgatgcc

SEQ ID NO: 8642 - DNA, 25 bp, Artificial
  probe
  misc_feature (1)..(25): SEQ ID NO: 7758; BIOB3_at; Start 2; Stop 26
gatgtcgatgcctttgattttattc

SEQ ID NO: 8643 - DNA, 25 bp, Artificial
  probe
  misc_feature (1)..(25): SEQ ID NO: 7758; BIOB3_at; Start 215; Stop 239
ctggggctaaatccgcagcaaactg

SEQ ID NO: 8644 - DNA, 25 bp, Artificial
  probe
  misc_feature (1)..(25): SEQ ID NO: 7758; BIOB3_at; Start 163; Stop 187
gctgaccacgccgaatccggaagaa

SEQ ID NO: 8645 - DNA, 25 bp, Artificial
  probe
  misc_feature (1)..(25): SEQ ID NO: 7758; BIOB3_at; Start 14; Stop 38
tttgattttattcgcaccattgcgg

SEQ ID NO: 8646 - DNA, 25 bp, Artificial
  probe
  misc_feature (1)..(25): SEQ ID NO: 7758; BIOB3_at; Start 217; Stop 241
ggggctaaatccgcagcaaactgcc

SEQ ID NO: 8647 - DNA, 25 bp, Artificial
  probe
  misc_feature (1)..(25): SEQ ID NO: 7758; BIOB3_at; Start 47; Stop 71
atcatgatgccaacctcttacgtgc

SEQ ID NO: 8648 - DNA, 25 bp, Artificial
  probe
  misc_feature (1)..(25): SEQ ID NO: 7758; BIOB3_at; Start 145; Stop 169
tttctacggttgcaaactgctgacc

SEQ ID NO: 8649 - DNA, 25 bp, Artificial
  probe
  misc_feature (1)..(25): SEQ ID NO: 7758; BIOB3_at; Start 269; Stop 293
caacgtcttgaacaggcgctgatga

SEQ ID NO: 8650 - DNA, 25 bp, Artificial
  probe
  misc_feature (1)..(25): SEQ ID NO: 7758; BIOB3_at; Start 265; Stop 289
acagcaacgtcttgaacaggcgctg

SEQ ID NO: 8651 - DNA, 25 bp, Artificial
  probe
  misc_feature (1)..(25): SEQ ID NO: 7758; BIOB3_at; Start 101; Stop 125
gaacagactcaggcgatgtgcttta

SEQ ID NO: 8652 - DNA, 25 bp, Artificial
  probe
  misc_feature (1)..(25): SEQ ID NO: 7758; BIOB3_at; Start 262; Stop 286
acaacagcaacgtcttgaacaggcg

SEQ ID NO: 8653 - DNA, 25 bp, Artificial
  probe
  misc_feature (1)..(25): SEQ ID NO: 7758; BIOB3_at; Start 39; Stop 63
tcgcgcggatcatgatgccaacctc

SEQ ID NO: 8654 - DNA, 25 bp, Artificial
  probe
  misc_feature (1)..(25): SEQ ID NO: 7758; BIOB3_at; Start 107; Stop 131
actcaggcgatgtgctttatggcag

SEQ ID NO: 8655 - DNA, 25 bp, Artificial
  probe
  misc_feature (1)..(25): SEQ ID NO: 7758; BIOB3_at; Start 285; Stop 309
cgctgatgaccccggacaccgacga

SEQ ID NO: 8656 - DNA, 25 bp, Artificial
  probe
  misc_feature (1)..(25): SEQ ID NO: 7758; BIOB3_at; Start 31; Stop 55
cattgcggtcgcgcggatcatgatg

SEQ ID NO: 8657 - DNA, 25 bp, Artificial
  probe
  misc_feature (1)..(25): SEQ ID NO: 7758; BIOB3_at; Start 284; Stop 308
gcgctgatgaccccggacaccgacg

SEQ ID NO: 8658 - DNA, 25 bp, Artificial
  probe
  misc_feature (1)..(25): SEQ ID NO: 7758; BIOB3_at; Start 267; Stop 291
agcaacgtcttgaacaggcgctgat

SEQ ID NO: 8659 - DNA, 25 bp, Artificial
  probe
  misc_feature (1)..(25): SEQ ID NO: 7758; BIOB3_at; Start 23; Stop 47
attcgcaccattgcggtcgcgcgga

SEQ ID NO: 8660 - DNA, 25 bp, Artificial
  probe
  misc_feature (1)..(25): SEQ ID NO: 7758; BIOB3_at; Start 161; Stop 185
ctgctgaccacgccgaatccggaag

SEQ ID NO: 8661 - DNA, 25 bp, Artificial
  probe
  misc_feature (1)..(25): SEQ ID NO: 7758; BIOB3_at; Start 15; Stop 39
ttgattttattcgcaccattgcggt

SEQ ID NO: 8662 - DNA, 25 bp, Artificial
  probe
  misc_feature (1)..(25): SEQ ID NO: 7758; BIOB3_at; Start 50; Stop 74
atgatgccaacctcttacgtgcgcc

SEQ ID NO: 8663 - DNA, 25 bp, Artificial
  probe
  misc_feature (1)..(25): SEQ ID NO: 7758; BIOB3_at; Start 303; Stop 327
ccgacgaatattacaacgcggcagc

SEQ ID NO: 8664 - DNA, 25 bp, Artificial
  probe
  misc_feature (1)..(25): SEQ ID NO: 7758; BIOB3_at; Start 93; Stop 117
agatgaacgaacagactcaggcgat

SEQ ID NO: 8665 - DNA, 25 bp, Artificial
  probe
  misc_feature (1)..(25): SEQ ID NO: 7758; BIOB3_at; Start 128; Stop 152
gcaggcgcaaactcgattttctacg

SEQ ID NO: 8666 - DNA, 25 bp, Artificial
  probe
  misc_feature (1)..(25): SEQ ID NO: 7758; BIOB3_at; Start 29; Stop 53
accattgcggtcgcgcggatcatga

SEQ ID NO: 8667 - DNA, 25 bp, Artificial
  probe
  misc_feature (1)..(25): SEQ ID NO: 7758; BIOB3_at; Start 153; Stop 177
gttgcaaactgctgaccacgccgaa

SEQ ID NO: 8668 - DNA, 25 bp, Artificial
  probe
  misc_feature (1)..(25): SEQ ID NO: 7758; BIOB3_at; Start 24; Stop 48
ttcgcaccattgcggtcgcgcggat

SEQ ID NO: 8669 - DNA, 25 bp, Artificial
  probe
  misc_feature (1)..(25): SEQ ID NO: 7758; BIOB3_at; Start 109; Stop 133
tcaggcgatgtgctttatggcaggc

SEQ ID NO: 8670 - DNA, 25 bp, Artificial
  probe
  misc_feature (1)..(25): SEQ ID NO: 7758; BIOB3_at; Start 116; Stop 140
atgtgctttatggcaggcgcaaact

SEQ ID NO: 8671 - DNA, 25 bp, Artificial
  probe
  misc_feature (1)..(25): SEQ ID NO: 7758; BIOB3_at; Start 111; Stop 135
aggcgatgtgctttatggcaggcgc

SEQ ID NO: 8672 - DNA, 25 bp, Artificial
  probe
  misc_feature (1)..(25): SEQ ID NO: 7758; BIOB3_at; Start 69; Stop 93
tgcgcctttctgccggacgcgagca

SEQ ID NO: 8673 - DNA, 25 bp, Artificial
  probe
  misc_feature (1)..(25): SEQ ID NO: 7758; BIOB3_at; Start 307; Stop 331
cgaatattacaacgcggcagcatta

SEQ ID NO: 8674 - DNA, 25 bp, Artificial
  probe
  misc_feature (1)..(25): SEQ ID NO: 7758; BIOB3_at; Start 27; Stop 51
gcaccattgcggtcgcgcggatcat

SEQ ID NO: 8675 - DNA, 25 bp, Artificial
  probe
  misc_feature (1)..(25): SEQ ID NO: 7758; BIOB3_at; Start 9; Stop 33
atgcctttgattttattcgcaccat

SEQ ID NO: 8676 - DNA, 25 bp, Artificial
  probe
  misc_feature (1)..(25): SEQ ID NO: 7758; BIOB3_at; Start 263; Stop 287
caacagcaacgtcttgaacaggcgc

SEQ ID NO: 8677 - DNA, 25 bp, Artificial
  probe
  misc_feature (1)..(25): SEQ ID NO: 7758; BIOB3_at; Start 83; Stop 107
ggacgcgagcagatgaacgaacaga

SEQ ID NO: 8678 - DNA, 25 bp, Artificial
  probe
  misc_feature (1)..(25): SEQ ID NO: 7758; BIOB3_at; Start 77; Stop 101
tctgccggacgcgagcagatgaacg

SEQ ID NO: 8679 - DNA, 25 bp, Artificial
  probe
  misc_feature (1)..(25): SEQ ID NO: 7758; BIOB3_at; Start 147; Stop 171
tctacggttgcaaactgctgaccac

SEQ ID NO: 8680 - DNA, 25 bp, Artificial
  probe
  misc_feature (1)..(25): SEQ ID NO: 7758; BIOB3_at; Start 165; Stop 189
tgaccacgccgaatccggaagaaga

SEQ ID NO: 8681 - DNA, 25 bp, Artificial
  probe
  misc_feature (1)..(25): SEQ ID NO: 7758; BIOB3_at; Start 301; Stop 325
caccgacgaatattacaacgcggca

SEQ ID NO: 8682 - DNA, 25 bp, Artificial
  probe
  misc_feature (1)..(25): SEQ ID NO: 7758; BIOB3_at; Start 160; Stop 184
actgctgaccacgccgaatccggaa

SEQ ID NO: 8683 - DNA, 25 bp, Artificial
  probe
  misc_feature (1)..(25): SEQ ID NO: 7758; BIOB3_at; Start 149; Stop 173
tacggttgcaaactgctgaccacgc

SEQ ID NO: 8684 - DNA, 25 bp, Artificial
  probe
  misc_feature (1)..(25): SEQ ID NO: 7758; BIOB3_at; Start 65; Stop 89
tacgtgcgcctttctgccggacgcg

SEQ ID NO: 8685 - DNA, 25 bp, Artificial
  probe
  misc_feature (1)..(25): SEQ ID NO: 7758; BIOB3_at; Start 67; Stop 91
cgtgcgcctttctgccggacgcgag

SEQ ID NO: 8686 - DNA, 25 bp, Artificial
  probe
  misc_feature (1)..(25): SEQ ID NO: 7758; BIOB3_at; Start 97; Stop 121
gaacgaacagactcaggcgatgtgc

SEQ ID NO: 8687 - DNA, 25 bp, Artificial
  probe
  misc_feature (1)..(25): SEQ ID NO: 7758; BIOB3_at; Start 62; Stop 86
tcttacgtgcgcctttctgccggac

SEQ ID NO: 8688 - DNA, 25 bp, Artificial
  probe
  misc_feature (1)..(25): SEQ ID NO: 7758; BIOB3_at; Start 73; Stop 97
cctttctgccggacgcgagcagatg

SEQ ID NO: 8689 - DNA, 25 bp, Artificial
  probe
  misc_feature (1)..(25): SEQ ID NO: 7758; BIOB3_at; Start 143; Stop 167
attttctacggttgcaaactgctga

SEQ ID NO: 8690 - DNA, 25 bp, Artificial
  probe
  misc_feature (1)..(25): SEQ ID NO: 7758; BIOB3_at; Start 159; Stop 183
aactgctgaccacgccgaatccgga

SEQ ID NO: 8691 - DNA, 25 bp, Artificial
  probe
  misc_feature (1)..(25): SEQ ID NO: 7758; BIOB3_at; Start 219; Stop 243
ggctaaatccgcagcaaactgccgt

SEQ ID NO: 8692 - DNA, 25 bp, Artificial
  probe
  misc_feature (1)..(25): SEQ ID NO: 7758; BIOB3_at; Start 95; Stop 119
atgaacgaacagactcaggcgatgt

SEQ ID NO: 8693 - DNA, 25 bp, Artificial
  probe
  misc_feature (1)..(25): SEQ ID NO: 7758; BIOB3_at; Start 8; Stop 32
gatgcctttgattttattcgcacca

SEQ ID NO: 8694 - DNA, 25 bp, Artificial
  probe
  misc_feature (1)..(25): SEQ ID NO: 7758; BIOB3_at; Start 310; Stop 334
atattacaacgcggcagcattatga

SEQ ID NO: 8695 - DNA, 25 bp, Artificial
  probe
  misc_feature (1)..(25): SEQ ID NO: 7758; BIOB3_at; Start 309; Stop 333
aatattacaacgcggcagcattatg

SEQ ID NO: 8696 - DNA, 25 bp, Artificial
  probe
  misc_feature (1)..(25): SEQ ID NO: 7758; BIOB3_at; Start 110; Stop 134
caggcgatgtgctttatggcaggcg

SEQ ID NO: 8697 - DNA, 25 bp, Artificial
  probe
  misc_feature (1)..(25): SEQ ID NO: 7758; BIOB3_at; Start 271; Stop 295
acgtcttgaacaggcgctgatgacc

SEQ ID NO: 8698 - DNA, 25 bp, Artificial
  probe
  misc_feature (1)..(25): SEQ ID NO: 7758; BIOB3_at; Start 80; Stop 104
gccggacgcgagcagatgaacgaac

SEQ ID NO: 8699 - DNA, 25 bp, Artificial
  probe
  misc_feature (1)..(25): SEQ ID NO: 7758; BIOB3_at; Start 5; Stop 29
gtcgatgcctttgattttattcgca

SEQ ID NO: 8700 - DNA, 25 bp, Artificial
  probe
  misc_feature (1)..(25): SEQ ID NO: 7758; BIOB3_at; Start 20; Stop 44
tttattcgcaccattgcggtcgcgc

SEQ ID NO: 8701 - DNA, 25 bp, Artificial
  probe
  misc_feature (1)..(25): SEQ ID NO: 7758; BIOB3_at; Start 197; Stop 221
ctgcaactgttccgcaaactggggc

SEQ ID NO: 8702 - DNA, 25 bp, Artificial
  probe
  misc_feature (1)..(25): SEQ ID NO: 7758; BIOB3_at; Start 35; Stop 59
gcggtcgcgcggatcatgatgccaa

SEQ ID NO: 8703 - DNA, 25 bp, Artificial
  probe
  misc_feature (1)..(25): SEQ ID NO: 7758; BIOB3_at; Start 193; Stop 217
agacctgcaactgttccgcaaactg

SEQ ID NO: 8704 - DNA, 25 bp, Artificial
  probe
  misc_feature (1)..(25): SEQ ID NO: 7758; BIOB3_at; Start 150; Stop 174
acggttgcaaactgctgaccacgcc

SEQ ID NO: 8705 - DNA, 25 bp, Artificial
  probe
  misc_feature (1)..(25): SEQ ID NO: 7758; BIOB3_at; Start 229; Stop 253
gcagcaaactgccgtgctggcaggg

SEQ ID NO: 8706 - DNA, 25 bp, Artificial
  probe
  misc_feature (1)..(25): SEQ ID NO: 7758; BIOB3_at; Start 223; Stop 247
aaatccgcagcaaactgccgtgctg

SEQ ID NO: 8707 - DNA, 25 bp, Artificial
  probe
  misc_feature (1)..(25): SEQ ID NO: 7758; BIOB3_at; Start 283; Stop 307
ggcgctgatgaccccggacaccgac

SEQ ID NO: 8708 - DNA, 25 bp, Artificial
  probe
  misc_feature (1)..(25): SEQ ID NO: 7758; BIOB3_at; Start 32; Stop 56
attgcggtcgcgcggatcatgatgc

SEQ ID NO: 8709 - DNA, 25 bp, Artificial
  probe
  misc_feature (1)..(25): SEQ ID NO: 7758; BIOB3_at; Start 155; Stop 179
tgcaaactgctgaccacgccgaatc

SEQ ID NO: 8710 - DNA, 25 bp, Artificial
  probe
  misc_feature (1)..(25): SEQ ID NO: 7758; BIOB3_at; Start 38; Stop 62
gtcgcgcggatcatgatgccaacct

SEQ ID NO: 8711 - DNA, 25 bp, Artificial
  probe
  misc_feature (1)..(25): SEQ ID NO: 7758; BIOB3_at; Start 127; Stop 151
ggcaggcgcaaactcgattttctac

SEQ ID NO: 8712 - DNA, 25 bp, Artificial
  probe
  misc_feature (1)..(25): SEQ ID NO: 7758; BIOB3_at; Start 13; Stop 37
ctttgattttattcgcaccattgcg

SEQ ID NO: 8713 - DNA, 25 bp, Artificial
  probe
  misc_feature (1)..(25): SEQ ID NO: 7758; BIOB3_at; Start 79; Stop 103
tgccggacgcgagcagatgaacgaa

SEQ ID NO: 8714 - DNA, 25 bp, Artificial
  probe
  misc_feature (1)..(25): SEQ ID NO: 7758; BIOB3_at; Start 281; Stop 305
caggcgctgatgaccccggacaccg

SEQ ID NO: 8715 - DNA, 25 bp, Artificial
  probe
  misc_feature (1)..(25): SEQ ID NO: 7758; BIOB3_at; Start 99; Stop 123
acgaacagactcaggcgatgtgctt

SEQ ID NO: 8716 - DNA, 25 bp, Artificial
  probe
  misc_feature (1)..(25): SEQ ID NO: 7758; BIOB3_at; Start 221; Stop 245
ctaaatccgcagcaaactgccgtgc

SEQ ID NO: 8717 - DNA, 25 bp, Artificial
  probe
  misc_feature (1)..(25): SEQ ID NO: 7758; BIOB3_at; Start 45; Stop 69
ggatcatgatgccaacctcttacgt

SEQ ID NO: 8718 - DNA, 25 bp, Artificial
  probe
  misc_feature (1)..(25): SEQ ID NO: 7758; BIOB3_at; Start 199; Stop 223
gcaactgttccgcaaactggggcta

SEQ ID NO: 8719 - DNA, 25 bp, Artificial
  probe
  misc_feature (1)..(25): SEQ ID NO: 7758; BIOB3_at; Start 57; Stop 81
caacctcttacgtgcgcctttctgc

SEQ ID NO: 8720 - DNA, 25 bp, Artificial
  probe
  misc_feature (1)..(25): SEQ ID NO: 7758; BIOB3_at; Start 144; Stop 168
ttttctacggttgcaaactgctgac

SEQ ID NO: 8721 - DNA, 25 bp, Artificial
  probe
  misc_feature (1)..(25): SEQ ID NO: 7758; BIOB3_at; Start 25; Stop 49
tcgcaccattgcggtcgcgcggatc

SEQ ID NO: 8722 - DNA, 25 bp, Artificial
  probe
  misc_feature (1)..(25): SEQ ID NO: 7758; BIOB3_at; Start 61; Stop 85
ctcttacgtgcgcctttctgccgga

SEQ ID NO: 8723 - DNA, 25 bp, Artificial
  probe
  misc_feature (1)..(25): SEQ ID NO: 7758; BIOB3_at; Start 70; Stop 94
gcgcctttctgccggacgcgagcag

SEQ ID NO: 8724 - DNA, 25 bp, Artificial
  probe
  misc_feature (1)..(25): SEQ ID NO: 7758; BIOB3_at; Start 113; Stop 137
gcgatgtgctttatggcaggcgcaa

SEQ ID NO: 8725 - DNA, 25 bp, Artificial
  probe
  misc_feature (1)..(25): SEQ ID NO: 7758; BIOB3_at; Start 188; Stop 212
gataaagacctgcaactgttccgca

SEQ ID NO: 8726 - DNA, 25 bp, Artificial
  probe
  misc_feature (1)..(25): SEQ ID NO: 7758; BIOB3_at; Start 256; Stop 280
taacgaacaacagcaacgtcttgaa

SEQ ID NO: 8727 - DNA, 25 bp, Artificial
  probe
  misc_feature (1)..(25): SEQ ID NO: 7758; BIOB3_at; Start 305; Stop 329
gacgaatattacaacgcggcagcat

SEQ ID NO: 8728 - DNA, 25 bp, Artificial
  probe
  misc_feature (1)..(25): SEQ ID NO: 7758; BIOB3_at; Start 227; Stop 251
ccgcagcaaactgccgtgctggcag

SEQ ID NO: 8729 - DNA, 25 bp, Artificial
  probe
  misc_feature (1)..(25): SEQ ID NO: 7758; BIOB3_at; Start 304; Stop 328
cgacgaatattacaacgcggcagca

SEQ ID NO: 8730 - DNA, 25 bp, Artificial
  probe
  misc_feature (1)..(25): SEQ ID NO: 7758; BIOB3_at; Start 157; Stop 181
caaactgctgaccacgccgaatccg

SEQ ID NO: 8731 - DNA, 25 bp, Artificial
  probe
  misc_feature (1)..(25): SEQ ID NO: 7758; BIOB3_at; Start 209; Stop 233
cgcaaactggggctaaatccgcagc

SEQ ID NO: 8732 - DNA, 25 bp, Artificial
  probe
  misc_feature (1)..(25): SEQ ID NO: 7758; BIOB3_at; Start 224; Stop 248
aatccgcagcaaactgccgtgctgg

SEQ ID NO: 8733 - DNA, 25 bp, Artificial
  probe
  misc_feature (1)..(25): SEQ ID NO: 7758; BIOB3_at; Start 51; Stop 75
tgatgccaacctcttacgtgcgcct

SEQ ID NO: 8734 - DNA, 25 bp, Artificial
  probe
  misc_feature (1)..(25): SEQ ID NO: 7758; BIOB3_at; Start 259; Stop 283
cgaacaacagcaacgtcttgaacag

SEQ ID NO: 8735 - DNA, 25 bp, Artificial
  probe
  misc_feature (1)..(25): SEQ ID NO: 7758; BIOB3_at; Start 151; Stop 175
cggttgcaaactgctgaccacgccg

SEQ ID NO: 8736 - DNA, 25 bp, Artificial
  probe
  misc_feature (1)..(25): SEQ ID NO: 7758; BIOB3_at; Start 119; Stop 143
tgctttatggcaggcgcaaactcga

SEQ ID NO: 8737 - DNA, 25 bp, Artificial
  probe
  misc_feature (1)..(25): SEQ ID NO: 7758; BIOB3_at; Start 105; Stop 129
agactcaggcgatgtgctttatggc

SEQ ID NO: 8738 - DNA, 25 bp, Artificial
  probe
  misc_feature (1)..(25): SEQ ID NO: 7758; BIOB3_at; Start 49; Stop 73
catgatgccaacctcttacgtgcgc

SEQ ID NO: 8739 - DNA, 25 bp, Artificial
  probe
  misc_feature (1)..(25): SEQ ID NO: 7758; BIOB3_at; Start 198; Stop 222
tgcaactgttccgcaaactggggct

SEQ ID NO: 8740 - DNA, 25 bp, Artificial
  probe
  misc_feature (1)..(25): SEQ ID NO: 7758; BIOB3_at; Start 103; Stop 127
acagactcaggcgatgtgctttatg

SEQ ID NO: 8741 - DNA, 25 bp, Artificial
  probe
  misc_feature (1)..(25): SEQ ID NO: 7758; BIOB3_at; Start 255; Stop 279
ataacgaacaacagcaacgtcttga

SEQ ID NO: 8742 - DNA, 25 bp, Artificial
  probe
  misc_feature (1)..(25): SEQ ID NO: 7758; BIOB3_at; Start 37; Stop 61
ggtcgcgcggatcatgatgccaacc

SEQ ID NO: 8743 - DNA, 25 bp, Artificial
  probe
  misc_feature (1)..(25): SEQ ID NO: 7758; BIOB3_at; Start 211; Stop 235
caaactggggctaaatccgcagcaa

SEQ ID NO: 8744 - DNA, 25 bp, Artificial
  probe
  misc_feature (1)..(25): SEQ ID NO: 7758; BIOB3_at; Start 41; Stop 65
gcgcggatcatgatgccaacctctt

SEQ ID NO: 8745 - DNA, 25 bp, Artificial
  probe
  misc_feature (1)..(25): SEQ ID NO: 7758; BIOB3_at; Start 207; Stop 231
tccgcaaactggggctaaatccgca

SEQ ID NO: 8746 - DNA, 25 bp, Artificial
  probe
  misc_feature (1)..(25): SEQ ID NO: 7759; BIOB5_at; Start 23; Stop 47
cattgtcgcaagtcacagaattatt

SEQ ID NO: 8747 - DNA, 25 bp, Artificial
  probe
  misc_feature (1)..(25): SEQ ID NO: 7759; BIOB5_at; Start 86; Stop 110
aggtgcatcgccagcatttcgatcc

SEQ ID NO: 8748 - DNA, 25 bp, Artificial
  probe
  misc_feature (1)..(25): SEQ ID NO: 7759; BIOB5_at; Start 137; Stop 161
tgtcgattaagaccggagcttgtcc

SEQ ID NO: 8749 - DNA, 25 bp, Artificial
  probe
  misc_feature (1)..(25): SEQ ID NO: 7759; BIOB5_at; Start 245; Stop 269
tggagtcggcgcgcaaagcgaaagc

SEQ ID NO: 8750 - DNA, 25 bp, Artificial
  probe
  misc_feature (1)..(25): SEQ ID NO: 7759; BIOB5_at; Start 82; Stop 106
cagcaggtgcatcgccagcatttcg

SEQ ID NO: 8751 - DNA, 25 bp, Artificial
  probe
  misc_feature (1)..(25): SEQ ID NO: 7759; BIOB5_at; Start 70; Stop 94
ctgtttgaagcgcagcaggtgcatc

SEQ ID NO: 8752 - DNA, 25 bp, Artificial
  probe
  misc_feature (1)..(25): SEQ ID NO: 7759; BIOB5_at; Start 275; Stop 299
gatcgacgcgcttctgtatgggcgc

SEQ ID NO: 8753 - DNA, 25 bp, Artificial
  probe
  misc_feature (1)..(25): SEQ ID NO: 7759; BIOB5_at; Start 230; Stop 254
aagttgaacaggtgctggagtcggc

SEQ ID NO: 8754 - DNA, 25 bp, Artificial
  probe
  misc_feature (1)..(25): SEQ ID NO: 7759; BIOB5_at; Start 121; Stop 145
caggtcagcacgttgctgtcgatta

SEQ ID NO: 8755 - DNA, 25 bp, Artificial
  probe
  misc_feature (1)..(25): SEQ ID NO: 7759; BIOB5_at; Start 12; Stop 36
cccacgctggacattgtcgcaagtc

SEQ ID NO: 8756 - DNA, 25 bp, Artificial
  probe
  misc_feature (1)..(25): SEQ ID NO: 7759; BIOB5_at; Start 10; Stop 34
cgcccacgctggacattgtcgcaag

SEQ ID NO: 8757 - DNA, 25 bp, Artificial
  probe
  misc_feature (1)..(25): SEQ ID NO: 7759; BIOB5_at; Start 212; Stop 236
aagccgagcggttgatggaagttga

SEQ ID NO: 8758 - DNA, 25 bp, Artificial
  probe
  misc_feature (1)..(25): SEQ ID NO: 7759; BIOB5_at; Start 119; Stop 143
tgcaggtcagcacgttgctgtcgat

SEQ ID NO: 8759 - DNA, 25 bp, Artificial
  probe
  misc_feature (1)..(25): SEQ ID NO: 7759; BIOB5_at; Start 149; Stop 173
ccggagcttgtccggaagattgcaa

SEQ ID NO: 8760 - DNA, 25 bp, Artificial
  probe
  misc_feature (1)..(25): SEQ ID NO: 7759; BIOB5_at; Start 99; Stop 123
gcatttcgatcctcgtcaggtgcag

SEQ ID NO: 8761 - DNA, 25 bp, Artificial
  probe
  misc_feature (1)..(25): SEQ ID NO: 7759; BIOB5_at; Start 260; Stop 284
aagcgaaagcggcaggatcgacgcg

SEQ ID NO: 8762 - DNA, 25 bp, Artificial
  probe
  misc_feature (1)..(25): SEQ ID NO: 7759; BIOB5_at; Start 27; Stop 51
gtcgcaagtcacagaattatttgaa

SEQ ID NO: 8763 - DNA, 25 bp, Artificial
  probe
  misc_feature (1)..(25): SEQ ID NO: 7759; BIOB5_at; Start 71; Stop 95
tgtttgaagcgcagcaggtgcatcg

SEQ ID NO: 8764 - DNA, 25 bp, Artificial
  probe
  misc_feature (1)..(25): SEQ ID NO: 7759; BIOB5_at; Start 107; Stop 131
atcctcgtcaggtgcaggtcagcac

SEQ ID NO: 8765 - DNA, 25 bp, Artificial
  probe
  misc_feature (1)..(25): SEQ ID NO: 7759; BIOB5_at; Start 110; Stop 134
ctcgtcaggtgcaggtcagcacgtt

SEQ ID NO: 8766 - DNA, 25 bp, Artificial
  probe
  misc_feature (1)..(25): SEQ ID NO: 7759; BIOB5_at; Start 11; Stop 35
gcccacgctggacattgtcgcaagt

SEQ ID NO: 8767 - DNA, 25 bp, Artificial
  probe
  misc_feature (1)..(25): SEQ ID NO: 7759; BIOB5_at; Start 271; Stop 295
gcaggatcgacgcgcttctgtatgg

SEQ ID NO: 8768 - DNA, 25 bp, Artificial
  probe
  misc_feature (1)..(25): SEQ ID NO: 7759; BIOB5_at; Start 120; Stop 144
gcaggtcagcacgttgctgtcgatt

SEQ ID NO: 8769 - DNA, 25 bp, Artificial
  probe
  misc_feature (1)..(25): SEQ ID NO: 7759; BIOB5_at; Start 126; Stop 150
cagcacgttgctgtcgattaagacc

SEQ ID NO: 8770 - DNA, 25 bp, Artificial
  probe
  misc_feature (1)..(25): SEQ ID NO: 7759; BIOB5_at; Start 257; Stop 281
gcaaagcgaaagcggcaggatcgac

SEQ ID NO: 8771 - DNA, 25 bp, Artificial
  probe
  misc_feature (1)..(25): SEQ ID NO: 7759; BIOB5_at; Start 266; Stop 290
aagcggcaggatcgacgcgcttctg

SEQ ID NO: 8772 - DNA, 25 bp, Artificial
  probe
  misc_feature (1)..(25): SEQ ID NO: 7759; BIOB5_at; Start 67; Stop 91
ctgctgtttgaagcgcagcaggtgc

SEQ ID NO: 8773 - DNA, 25 bp, Artificial
  probe
  misc_feature (1)..(25): SEQ ID NO: 7759; BIOB5_at; Start 21; Stop 45
gacattgtcgcaagtcacagaatta

SEQ ID NO: 8774 - DNA, 25 bp, Artificial
  probe
  misc_feature (1)..(25): SEQ ID NO: 7759; BIOB5_at; Start 72; Stop 96
gtttgaagcgcagcaggtgcatcgc

SEQ ID NO: 8775 - DNA, 25 bp, Artificial
  probe
  misc_feature (1)..(25): SEQ ID NO: 7759; BIOB5_at; Start 272; Stop 296
caggatcgacgcgcttctgtatggg

SEQ ID NO: 8776 - DNA, 25 bp, Artificial
  probe
  misc_feature (1)..(25): SEQ ID NO: 7759; BIOB5_at; Start 167; Stop 191
attgcaaatactgcccgcaaagctc

SEQ ID NO: 8777 - DNA, 25 bp, Artificial
  probe
  misc_feature (1)..(25): SEQ ID NO: 7759; BIOB5_at; Start 52; Stop 76
aaaccgttgctggatctgctgtttg

SEQ ID NO: 8778 - DNA, 25 bp, Artificial
  probe
  misc_feature (1)..(25): SEQ ID NO: 7759; BIOB5_at; Start 122; Stop 146
aggtcagcacgttgctgtcgattaa

SEQ ID NO: 8779 - DNA, 25 bp, Artificial
  probe
  misc_feature (1)..(25): SEQ ID NO: 7759; BIOB5_at; Start 111; Stop 135
tcgtcaggtgcaggtcagcacgttg

SEQ ID NO: 8780 - DNA, 25 bp, Artificial
  probe
  misc_feature (1)..(25): SEQ ID NO: 7759; BIOB5_at; Start 152; Stop 176
gagcttgtccggaagattgcaaata

SEQ ID NO: 8781 - DNA, 25 bp, Artificial
  probe
  misc_feature (1)..(25): SEQ ID NO: 7759; BIOB5_at; Start 175; Stop 199
tactgcccgcaaagctcgcgctaca

SEQ ID NO: 8782 - DNA, 25 bp, Artificial
  probe
  misc_feature (1)..(25): SEQ ID NO: 7759; BIOB5_at; Start 263; Stop 287
cgaaagcggcaggatcgacgcgctt

SEQ ID NO: 8783 - DNA, 25 bp, Artificial
  probe
  misc_feature (1)..(25): SEQ ID NO: 7759; BIOB5_at; Start 60; Stop 84
gctggatctgctgtttgaagcgcag

SEQ ID NO: 8784 - DNA, 25 bp, Artificial
  probe
  misc_feature (1)..(25): SEQ ID NO: 7759; BIOB5_at; Start 269; Stop 293
cggcaggatcgacgcgcttctgtat

SEQ ID NO: 8785 - DNA, 25 bp, Artificial
  probe
  misc_feature (1)..(25): SEQ ID NO: 7759; BIOB5_at; Start 309; Stop 333
gaatccccacgaacgcgatatgccg

SEQ ID NO: 8786 - DNA, 25 bp, Artificial
  probe
  misc_feature (1)..(25): SEQ ID NO: 7759; BIOB5_at; Start 116; Stop 140
aggtgcaggtcagcacgttgctgtc

SEQ ID NO: 8787 - DNA, 25 bp, Artificial
  probe
  misc_feature (1)..(25): SEQ ID NO: 7759; BIOB5_at; Start 66; Stop 90
tctgctgtttgaagcgcagcaggtg

SEQ ID NO: 8788 - DNA, 25 bp, Artificial
  probe
  misc_feature (1)..(25): SEQ ID NO: 7759; BIOB5_at; Start 46; Stop 70
tttgaaaaaccgttgctggatctgc

SEQ ID NO: 8789 - DNA, 25 bp, Artificial
  probe
  misc_feature (1)..(25): SEQ ID NO: 7759; BIOB5_at; Start 109; Stop 133
cctcgtcaggtgcaggtcagcacgt

SEQ ID NO: 8790 - DNA, 25 bp, Artificial
  probe
  misc_feature (1)..(25): SEQ ID NO: 7759; BIOB5_at; Start 276; Stop 300
atcgacgcgcttctgtatgggcgcg

SEQ ID NO: 8791 - DNA, 25 bp, Artificial
  probe
  misc_feature (1)..(25): SEQ ID NO: 7759; BIOB5_at; Start 117; Stop 141
ggtgcaggtcagcacgttgctgtcg

SEQ ID NO: 8792 - DNA, 25 bp, Artificial
  probe
  misc_feature (1)..(25): SEQ ID NO: 7759; BIOB5_at; Start 84; Stop 108
gcaggtgcatcgccagcatttcgat

SEQ ID NO: 8793 - DNA, 25 bp, Artificial
  probe
  misc_feature (1)..(25): SEQ ID NO: 7759; BIOB5_at; Start 131; Stop 155
cgttgctgtcgattaagaccggagc

SEQ ID NO: 8794 - DNA, 25 bp, Artificial
  probe
  misc_feature (1)..(25): SEQ ID NO: 7759; BIOB5_at; Start 90; Stop 114
gcatcgccagcatttcgatcctcgt

SEQ ID NO: 8795 - DNA, 25 bp, Artificial
  probe
  misc_feature (1)..(25): SEQ ID NO: 7759; BIOB5_at; Start 56; Stop 80
cgttgctggatctgctgtttgaagc

SEQ ID NO: 8796 - DNA, 25 bp, Artificial
  probe
  misc_feature (1)..(25): SEQ ID NO: 7759; BIOB5_at; Start 105; Stop 129
cgatcctcgtcaggtgcaggtcagc

SEQ ID NO: 8797 - DNA, 25 bp, Artificial
  probe
  misc_feature (1)..(25): SEQ ID NO: 7759; BIOB5_at; Start 59; Stop 83
tgctggatctgctgtttgaagcgca

SEQ ID NO: 8798 - DNA, 25 bp, Artificial
  probe
  misc_feature (1)..(25): SEQ ID NO: 7759; BIOB5_at; Start 155; Stop 179
cttgtccggaagattgcaaatactg

SEQ ID NO: 8799 - DNA, 25 bp, Artificial
  probe
  misc_feature (1)..(25): SEQ ID NO: 7759; BIOB5_at; Start 87; Stop 111
ggtgcatcgccagcatttcgatcct

SEQ ID NO: 8800 - DNA, 25 bp, Artificial
  probe
  misc_feature (1)..(25): SEQ ID NO: 7759; BIOB5_at; Start 261; Stop 285
agcgaaagcggcaggatcgacgcgc

SEQ ID NO: 8801 - DNA, 25 bp, Artificial
  probe
  misc_feature (1)..(25): SEQ ID NO: 7759; BIOB5_at; Start 150; Stop 174
cggagcttgtccggaagattgcaaa

SEQ ID NO: 8802 - DNA, 25 bp, Artificial
  probe
  misc_feature (1)..(25): SEQ ID NO: 7759; BIOB5_at; Start 132; Stop 156
gttgctgtcgattaagaccggagct

SEQ ID NO: 8803 - DNA, 25 bp, Artificial
  probe
  misc_feature (1)..(25): SEQ ID NO: 7759; BIOB5_at; Start 147; Stop 171
gaccggagcttgtccggaagattgc

SEQ ID NO: 8804 - DNA, 25 bp, Artificial
  probe
  misc_feature (1)..(25): SEQ ID NO: 7759; BIOB5_at; Start 125; Stop 149
tcagcacgttgctgtcgattaagac

SEQ ID NO: 8805 - DNA, 25 bp, Artificial
  probe
  misc_feature (1)..(25): SEQ ID NO: 7759; BIOB5_at; Start 80; Stop 104
cgcagcaggtgcatcgccagcattt

SEQ ID NO: 8806 - DNA, 25 bp, Artificial
  probe
  misc_feature (1)..(25): SEQ ID NO: 7759; BIOB5_at; Start 88; Stop 112
gtgcatcgccagcatttcgatcctc

SEQ ID NO: 8807 - DNA, 25 bp, Artificial
  probe
  misc_feature (1)..(25): SEQ ID NO: 7759; BIOB5_at; Start 54; Stop 78
accgttgctggatctgctgtttgaa

SEQ ID NO: 8808 - DNA, 25 bp, Artificial
  probe
  misc_feature (1)..(25): SEQ ID NO: 7759; BIOB5_at; Start 254; Stop 278
cgcgcaaagcgaaagcggcaggatc

SEQ ID NO: 8809 - DNA, 25 bp, Artificial
  probe
  misc_feature (1)..(25): SEQ ID NO: 7759; BIOB5_at; Start 165; Stop 189
agattgcaaatactgcccgcaaagc

SEQ ID NO: 8810 - DNA, 25 bp, Artificial
  probe
  misc_feature (1)..(25): SEQ ID NO: 7759; BIOB5_at; Start 20; Stop 44
ggacattgtcgcaagtcacagaatt

SEQ ID NO: 8811 - DNA, 25 bp, Artificial
  probe
  misc_feature (1)..(25): SEQ ID NO: 7759; BIOB5_at; Start 242; Stop 266
tgctggagtcggcgcgcaaagcgaa

SEQ ID NO: 8812 - DNA, 25 bp, Artificial
  probe
  misc_feature (1)..(25): SEQ ID NO: 7759; BIOB5_at; Start 114; Stop 138
tcaggtgcaggtcagcacgttgctg

SEQ ID NO: 8813 - DNA, 25 bp, Artificial
  probe
  misc_feature (1)..(25): SEQ ID NO: 7759; BIOB5_at; Start 267; Stop 291
agcggcaggatcgacgcgcttctgt

SEQ ID NO: 8814 - DNA, 25 bp, Artificial
  probe
  misc_feature (1)..(25): SEQ ID NO: 7759; BIOB5_at; Start 62; Stop 86
tggatctgctgtttgaagcgcagca

SEQ ID NO: 8815 - DNA, 25 bp, Artificial
  probe
  misc_feature (1)..(25): SEQ ID NO: 7759; BIOB5_at; Start 273; Stop 297
aggatcgacgcgcttctgtatgggc

SEQ ID NO: 8816 - DNA, 25 bp, Artificial
  probe
  misc_feature (1)..(25): SEQ ID NO: 7759; BIOB5_at; Start 135; Stop 159
gctgtcgattaagaccggagcttgt

SEQ ID NO: 8817 - DNA, 25 bp, Artificial
  probe
  misc_feature (1)..(25): SEQ ID NO: 7759; BIOB5_at; Start 127; Stop 151
agcacgttgctgtcgattaagaccg

SEQ ID NO: 8818 - DNA, 25 bp, Artificial
  probe
  misc_feature (1)..(25): SEQ ID NO: 7759; BIOB5_at; Start 63; Stop 87
ggatctgctgtttgaagcgcagcag

SEQ ID NO: 8819 - DNA, 25 bp, Artificial
  probe
  misc_feature (1)..(25): SEQ ID NO: 7759; BIOB5_at; Start 173; Stop 197
aatactgcccgcaaagctcgcgcta

SEQ ID NO: 8820 - DNA, 25 bp, Artificial
  probe
  misc_feature (1)..(25): SEQ ID NO: 7759; BIOB5_at; Start 89; Stop 113
tgcatcgccagcatttcgatcctcg

SEQ ID NO: 8821 - DNA, 25 bp, Artificial
  probe
  misc_feature (1)..(25): SEQ ID NO: 7759; BIOB5_at; Start 178; Stop 202
tgcccgcaaagctcgcgctacaaaa

SEQ ID NO: 8822 - DNA, 25 bp, Artificial
  probe
  misc_feature (1)..(25): SEQ ID NO: 7759; BIOB5_at; Start 26; Stop 50
tgtcgcaagtcacagaattatttga

SEQ ID NO: 8823 - DNA, 25 bp, Artificial
  probe
  misc_feature (1)..(25): SEQ ID NO: 7759; BIOB5_at; Start 134; Stop 158
tgctgtcgattaagaccggagcttg

SEQ ID NO: 8824 - DNA, 25 bp, Artificial
  probe
  misc_feature (1)..(25): SEQ ID NO: 7759; BIOB5_at; Start 93; Stop 117
tcgccagcatttcgatcctcgtcag

SEQ ID NO: 8825 - DNA, 25 bp, Artificial
  probe
  misc_feature (1)..(25): SEQ ID NO: 7759; BIOB5_at; Start 304; Stop 328
tggaagaatccccacgaacgcgata

SEQ ID NO: 8826 - DNA, 25 bp, Artificial
  probe
  misc_feature (1)..(25): SEQ ID NO: 7759; BIOB5_at; Start 256; Stop 280
cgcaaagcgaaagcggcaggatcga

SEQ ID NO: 8827 - DNA, 25 bp, Artificial
  probe
  misc_feature (1)..(25): SEQ ID NO: 7759; BIOB5_at; Start 55; Stop 79
ccgttgctggatctgctgtttgaag

SEQ ID NO: 8828 - DNA, 25 bp, Artificial
  probe
  misc_feature (1)..(25): SEQ ID NO: 7759; BIOB5_at; Start 164; Stop 188
aagattgcaaatactgcccgcaaag

SEQ ID NO: 8829 - DNA, 25 bp, Artificial
  probe
  misc_feature (1)..(25): SEQ ID NO: 7759; BIOB5_at; Start 258; Stop 282
caaagcgaaagcggcaggatcgacg

SEQ ID NO: 8830 - DNA, 25 bp, Artificial
  probe
  misc_feature (1)..(25): SEQ ID NO: 7759; BIOB5_at; Start 170; Stop 194
gcaaatactgcccgcaaagctcgcg

SEQ ID NO: 8831 - DNA, 25 bp, Artificial
  probe
  misc_feature (1)..(25): SEQ ID NO: 7759; BIOB5_at; Start 270; Stop 294
ggcaggatcgacgcgcttctgtatg

SEQ ID NO: 8832 - DNA, 25 bp, Artificial
  probe
  misc_feature (1)..(25): SEQ ID NO: 7759; BIOB5_at; Start 77; Stop 101
aagcgcagcaggtgcatcgccagca

SEQ ID NO: 8833 - DNA, 25 bp, Artificial
  probe
  misc_feature (1)..(25): SEQ ID NO: 7759; BIOB5_at; Start 179; Stop 203
gcccgcaaagctcgcgctacaaaac

SEQ ID NO: 8834 - DNA, 25 bp, Artificial
  probe
  misc_feature (1)..(25): SEQ ID NO: 7759; BIOB5_at; Start 216; Stop 240
cgagcggttgatggaagttgaacag

SEQ ID NO: 8835 - DNA, 25 bp, Artificial
  probe
  misc_feature (1)..(25): SEQ ID NO: 7759; BIOB5_at; Start 151; Stop 175
ggagcttgtccggaagattgcaaat

SEQ ID NO: 8836 - DNA, 25 bp, Artificial
  probe
  misc_feature (1)..(25): SEQ ID NO: 7759; BIOB5_at; Start 57; Stop 81
gttgctggatctgctgtttgaagcg

SEQ ID NO: 8837 - DNA, 25 bp, Artificial
  probe
  misc_feature (1)..(25): SEQ ID NO: 7759; BIOB5_at; Start 133; Stop 157
ttgctgtcgattaagaccggagctt

SEQ ID NO: 8838 - DNA, 25 bp, Artificial
  probe
  misc_feature (1)..(25): SEQ ID NO: 7759; BIOB5_at; Start 29; Stop 53
cgcaagtcacagaattatttgaaaa

SEQ ID NO: 8839 - DNA, 25 bp, Artificial
  probe
  misc_feature (1)..(25): SEQ ID NO: 7759; BIOB5_at; Start 24; Stop 48
attgtcgcaagtcacagaattattt

SEQ ID NO: 8840 - DNA, 25 bp, Artificial
  probe
  misc_feature (1)..(25): SEQ ID NO: 7759; BIOB5_at; Start 101; Stop 125
atttcgatcctcgtcaggtgcaggt

SEQ ID NO: 8841 - DNA, 25 bp, Artificial
  probe
  misc_feature (1)..(25): SEQ ID NO: 7759; BIOB5_at; Start 14; Stop 38
cacgctggacattgtcgcaagtcac

SEQ ID NO: 8842 - DNA, 25 bp, Artificial
  probe
  misc_feature (1)..(25): SEQ ID NO: 7759; BIOB5_at; Start 250; Stop 274
tcggcgcgcaaagcgaaagcggcag

SEQ ID NO: 8843 - DNA, 25 bp, Artificial
  probe
  misc_feature (1)..(25): SEQ ID NO: 7759; BIOB5_at; Start 106; Stop 130
gatcctcgtcaggtgcaggtcagca

SEQ ID NO: 8844 - DNA, 25 bp, Artificial
  probe
  misc_feature (1)..(25): SEQ ID NO: 7759; BIOB5_at; Start 104; Stop 128
tcgatcctcgtcaggtgcaggtcag

SEQ ID NO: 8845 - DNA, 25 bp, Artificial
  probe
  misc_feature (1)..(25): SEQ ID NO: 7759; BIOB5_at; Start 171; Stop 195
caaatactgcccgcaaagctcgcgc

SEQ ID NO: 8846 - DNA, 25 bp, Artificial
  probe
  misc_feature (1)..(25): SEQ ID NO: 7759; BIOB5_at; Start 244; Stop 268
ctggagtcggcgcgcaaagcgaaag

SEQ ID NO: 8847 - DNA, 25 bp, Artificial
  probe
  misc_feature (1)..(25): SEQ ID NO: 7759; BIOB5_at; Start 69; Stop 93
gctgtttgaagcgcagcaggtgcat

SEQ ID NO: 8848 - DNA, 25 bp, Artificial
  probe
  misc_feature (1)..(25): SEQ ID NO: 7759; BIOB5_at; Start 115; Stop 139
caggtgcaggtcagcacgttgctgt

SEQ ID NO: 8849 - DNA, 25 bp, Artificial
  probe
  misc_feature (1)..(25): SEQ ID NO: 7759; BIOB5_at; Start 102; Stop 126
tttcgatcctcgtcaggtgcaggtc

SEQ ID NO: 8850 - DNA, 25 bp, Artificial
  probe
  misc_feature (1)..(25): SEQ ID NO: 7759; BIOB5_at; Start 95; Stop 119
gccagcatttcgatcctcgtcaggt

SEQ ID NO: 8851 - DNA, 25 bp, Artificial
  probe
  misc_feature (1)..(25): SEQ ID NO: 7759; BIOB5_at; Start 96; Stop 120
ccagcatttcgatcctcgtcaggtg

SEQ ID NO: 8852 - DNA, 25 bp, Artificial
  probe
  misc_feature (1)..(25): SEQ ID NO: 7759; BIOB5_at; Start 92; Stop 116
atcgccagcatttcgatcctcgtca

SEQ ID NO: 8853 - DNA, 25 bp, Artificial
  probe
  misc_feature (1)..(25): SEQ ID NO: 7759; BIOB5_at; Start 129; Stop 153
cacgttgctgtcgattaagaccgga

SEQ ID NO: 8854 - DNA, 25 bp, Artificial
  probe
  misc_feature (1)..(25): SEQ ID NO: 7759; BIOB5_at; Start 98; Stop 122
agcatttcgatcctcgtcaggtgca

SEQ ID NO: 8855 - DNA, 25 bp, Artificial
  probe
  misc_feature (1)..(25): SEQ ID NO: 7759; BIOB5_at; Start 166; Stop 190
gattgcaaatactgcccgcaaagct

SEQ ID NO: 8856 - DNA, 25 bp, Artificial
  probe
  misc_feature (1)..(25): SEQ ID NO: 7760; BIOBM_at; Start 251; Stop 275
gcgccggattattgctgcaactggc

SEQ ID NO: 8857 - DNA, 25 bp, Artificial
  probe
  misc_feature (1)..(25): SEQ ID NO: 7760; BIOBM_at; Start 155; Stop 179
atcaggaacgcctcgatacgctgga

SEQ ID NO: 8858 - DNA, 25 bp, Artificial
  probe
  misc_feature (1)..(25): SEQ ID NO: 7760; BIOBM_at; Start 250; Stop 274
cgcgccggattattgctgcaactgg

SEQ ID NO: 8859 - DNA, 25 bp, Artificial
  probe
  misc_feature (1)..(25): SEQ ID NO: 7760; BIOBM_at; Start 152; Stop 176
cttatcaggaacgcctcgatacgct

SEQ ID NO: 8860 - DNA, 25 bp, Artificial
  probe
  misc_feature (1)..(25): SEQ ID NO: 7760; BIOBM_at; Start 163; Stop 187
cgcctcgatacgctggaaaaagtgc

SEQ ID NO: 8861 - DNA, 25 bp, Artificial
  probe
  misc_feature (1)..(25): SEQ ID NO: 7760; BIOBM_at; Start 166; Stop 190
ctcgatacgctggaaaaagtgcgcg

SEQ ID NO: 8862 - DNA, 25 bp, Artificial
  probe
  misc_feature (1)..(25): SEQ ID NO: 7760; BIOBM_at; Start 71; Stop 95
tcgcgaacgccgggctggattacta

SEQ ID NO: 8863 - DNA, 25 bp, Artificial
  probe
  misc_feature (1)..(25): SEQ ID NO: 7760; BIOBM_at; Start 305; Stop 329
caatcaacatgctggtgaaggtgaa

SEQ ID NO: 8864 - DNA, 25 bp, Artificial
  probe
  misc_feature (1)..(25): SEQ ID NO: 7760; BIOBM_at; Start 44; Stop 68
cgttgagtgaatctcaggcgcagcg

SEQ ID NO: 8865 - DNA, 25 bp, Artificial
  probe
  misc_feature (1)..(25): SEQ ID NO: 7760; BIOBM_at; Start 248; Stop 272
atcgcgccggattattgctgcaact

SEQ ID NO: 8866 - DNA, 25 bp, Artificial
  probe
  misc_feature (1)..(25): SEQ ID NO: 7760; BIOBM_at; Start 124; Stop 148
ttttacggcaatatcatcaccacac

SEQ ID NO: 8867 - DNA, 25 bp, Artificial
  probe
  misc_feature (1)..(25): SEQ ID NO: 7760; BIOBM_at; Start 185; Stop 209
tgcgcgatgccgggatcaaagtctg

SEQ ID NO: 8868 - DNA, 25 bp, Artificial
  probe
  misc_feature (1)..(25): SEQ ID NO: 7760; BIOBM_at; Start 201; Stop 225
caaagtctgttctggcggcattgtg

SEQ ID NO: 8869 - DNA, 25 bp, Artificial
  probe
  misc_feature (1)..(25): SEQ ID NO: 7760; BIOBM_at; Start 303; Stop 327
gccaatcaacatgctggtgaaggtg

SEQ ID NO: 8870 - DNA, 25 bp, Artificial
  probe
  misc_feature (1)..(25): SEQ ID NO: 7760; BIOBM_at; Start 309; Stop 333
caacatgctggtgaaggtgaaaggc

SEQ ID NO: 8871 - DNA, 25 bp, Artificial
  probe
  misc_feature (1)..(25): SEQ ID NO: 7760; BIOBM_at; Start 146; Stop 170
cacgcacttatcaggaacgcctcga

SEQ ID NO: 8872 - DNA, 25 bp, Artificial
  probe
  misc_feature (1)..(25): SEQ ID NO: 7760; BIOBM_at; Start 300; Stop 324
cgtgccaatcaacatgctggtgaag

SEQ ID NO: 8873 - DNA, 25 bp, Artificial
  probe
  misc_feature (1)..(25): SEQ ID NO: 7760; BIOBM_at; Start 49; Stop 73
agtgaatctcaggcgcagcgcctcg

SEQ ID NO: 8874 - DNA, 25 bp, Artificial
  probe
  misc_feature (1)..(25): SEQ ID NO: 7760; BIOBM_at; Start 208; Stop 232
tgttctggcggcattgtgggcttag

SEQ ID NO: 8875 - DNA, 25 bp, Artificial
  probe
  misc_feature (1)..(25): SEQ ID NO: 7760; BIOBM_at; Start 141; Stop 165
caccacacgcacttatcaggaacgc

SEQ ID NO: 8876 - DNA, 25 bp, Artificial
  probe
  misc_feature (1)..(25): SEQ ID NO: 7760; BIOBM_at; Start 245; Stop 269
aagatcgcgccggattattgctgca

SEQ ID NO: 8877 - DNA, 25 bp, Artificial
  probe
  misc_feature (1)..(25): SEQ ID NO: 7760; BIOBM_at; Start 144; Stop 168
cacacgcacttatcaggaacgcctc

SEQ ID NO: 8878 - DNA, 25 bp, Artificial
  probe
  misc_feature (1)..(25): SEQ ID NO: 7760; BIOBM_at; Start 197; Stop 221
ggatcaaagtctgttctggcggcat

SEQ ID NO: 8879 - DNA, 25 bp, Artificial
  probe
  misc_feature (1)..(25): SEQ ID NO: 7760; BIOBM_at; Start 285; Stop 309
gacgccgccggaaagcgtgccaatc

SEQ ID NO: 8880 - DNA, 25 bp, Artificial
  probe
  misc_feature (1)..(25): SEQ ID NO: 7760; BIOBM_at; Start 203; Stop 227
aagtctgttctggcggcattgtggg

SEQ ID NO: 8881 - DNA, 25 bp, Artificial
  probe
  misc_feature (1)..(25): SEQ ID NO: 7760; BIOBM_at; Start 204; Stop 228
agtctgttctggcggcattgtgggc

SEQ ID NO: 8882 - DNA, 25 bp, Artificial
  probe
  misc_feature (1)..(25): SEQ ID NO: 7760; BIOBM_at; Start 188; Stop 212
gcgatgccgggatcaaagtctgttc

SEQ ID NO: 8883 - DNA, 25 bp, Artificial
  probe
  misc_feature (1)..(25): SEQ ID NO: 7760; BIOBM_at; Start 186; Stop 210
gcgcgatgccgggatcaaagtctgt

SEQ ID NO: 8884 - DNA, 25 bp, Artificial
  probe
  misc_feature (1)..(25): SEQ ID NO: 7760; BIOBM_at; Start 252; Stop 276
cgccggattattgctgcaactggca

SEQ ID NO: 8885 - DNA, 25 bp, Artificial
  probe
  misc_feature (1)..(25): SEQ ID NO: 7760; BIOBM_at; Start 215; Stop 239
gcggcattgtgggcttaggcgaaac

SEQ ID NO: 8886 - DNA, 25 bp, Artificial
  probe
  misc_feature (1)..(25): SEQ ID NO: 7760; BIOBM_at; Start 281; Stop 305
tgccgacgccgccggaaagcgtgcc

SEQ ID NO: 8887 - DNA, 25 bp, Artificial
  probe
  misc_feature (1)..(25): SEQ ID NO: 7760; BIOBM_at; Start 151; Stop 175
acttatcaggaacgcctcgatacgc

SEQ ID NO: 8888 - DNA, 25 bp, Artificial
  probe
  misc_feature (1)..(25): SEQ ID NO: 7760; BIOBM_at; Start 51; Stop 75
tgaatctcaggcgcagcgcctcgcg

SEQ ID NO: 8889 - DNA, 25 bp, Artificial
  probe
  misc_feature (1)..(25): SEQ ID NO: 7760; BIOBM_at; Start 130; Stop 154
ggcaatatcatcaccacacgcactt

SEQ ID NO: 8890 - DNA, 25 bp, Artificial
  probe
  misc_feature (1)..(25): SEQ ID NO: 7760; BIOBM_at; Start 263; Stop 287
tgctgcaactggcaaacctgccgac

SEQ ID NO: 8891 - DNA, 25 bp, Artificial
  probe
  misc_feature (1)..(25): SEQ ID NO: 7760; BIOBM_at; Start 132; Stop 156
caatatcatcaccacacgcacttat

SEQ ID NO: 8892 - DNA, 25 bp, Artificial
  probe
  misc_feature (1)..(25): SEQ ID NO: 7760; BIOBM_at; Start 249; Stop 273
tcgcgccggattattgctgcaactg

SEQ ID NO: 8893 - DNA, 25 bp, Artificial
  probe
  misc_feature (1)..(25): SEQ ID NO: 7760; BIOBM_at; Start 153; Stop 177
ttatcaggaacgcctcgatacgctg

SEQ ID NO: 8894 - DNA, 25 bp, Artificial
  probe
  misc_feature (1)..(25): SEQ ID NO: 7760; BIOBM_at; Start 140; Stop 164
tcaccacacgcacttatcaggaacg

SEQ ID NO: 8895 - DNA, 25 bp, Artificial
  probe
  misc_feature (1)..(25): SEQ ID NO: 7760; BIOBM_at; Start 187; Stop 211
cgcgatgccgggatcaaagtctgtt

SEQ ID NO: 8896 - DNA, 25 bp, Artificial
  probe
  misc_feature (1)..(25): SEQ ID NO: 7760; BIOBM_at; Start 143; Stop 167
ccacacgcacttatcaggaacgcct

SEQ ID NO: 8897 - DNA, 25 bp, Artificial
  probe
  misc_feature (1)..(25): SEQ ID NO: 7760; BIOBM_at; Start 149; Stop 173
gcacttatcaggaacgcctcgatac

SEQ ID NO: 8898 - DNA, 25 bp, Artificial
  probe
  misc_feature (1)..(25): SEQ ID NO: 7760; BIOBM_at; Start 68; Stop 92
gcctcgcgaacgccgggctggatta

SEQ ID NO: 8899 - DNA, 25 bp, Artificial
  probe
  misc_feature (1)..(25): SEQ ID NO: 7760; BIOBM_at; Start 298; Stop 322
agcgtgccaatcaacatgctggtga

SEQ ID NO: 8900 - DNA, 25 bp, Artificial
  probe
  misc_feature (1)..(25): SEQ ID NO: 7760; BIOBM_at; Start 26; Stop 50
cgtgtatgacgctgggcacgttgag

SEQ ID NO: 8901 - DNA, 25 bp, Artificial
  probe
  misc_feature (1)..(25): SEQ ID NO: 7760; BIOBM_at; Start 183; Stop 207
agtgcgcgatgccgggatcaaagtc

SEQ ID NO: 8902 - DNA, 25 bp, Artificial
  probe
  misc_feature (1)..(25): SEQ ID NO: 7760; BIOBM_at; Start 147; Stop 171
acgcacttatcaggaacgcctcgat

SEQ ID NO: 8903 - DNA, 25 bp, Artificial
  probe
  misc_feature (1)..(25): SEQ ID NO: 7760; BIOBM_at; Start 306; Stop 330
aatcaacatgctggtgaaggtgaaa

SEQ ID NO: 8904 - DNA, 25 bp, Artificial
  probe
  misc_feature (1)..(25): SEQ ID NO: 7760; BIOBM_at; Start 254; Stop 278
ccggattattgctgcaactggcaaa

SEQ ID NO: 8905 - DNA, 25 bp, Artificial
  probe
  misc_feature (1)..(25): SEQ ID NO: 7760; BIOBM_at; Start 137; Stop 161
tcatcaccacacgcacttatcagga

SEQ ID NO: 8906 - DNA, 25 bp, Artificial
  probe
  misc_feature (1)..(25): SEQ ID NO: 7760; BIOBM_at; Start 308; Stop 332
tcaacatgctggtgaaggtgaaagg

SEQ ID NO: 8907 - DNA, 25 bp, Artificial
  probe
  misc_feature (1)..(25): SEQ ID NO: 7760; BIOBM_at; Start 293; Stop 317
cggaaagcgtgccaatcaacatgct

SEQ ID NO: 8908 - DNA, 25 bp, Artificial
  probe
  misc_feature (1)..(25): SEQ ID NO: 7760; BIOBM_at; Start 23; Stop 47
aggcgtgtatgacgctgggcacgtt

SEQ ID NO: 8909 - DNA, 25 bp, Artificial
  probe
  misc_feature (1)..(25): SEQ ID NO: 7760; BIOBM_at; Start 282; Stop 306
gccgacgccgccggaaagcgtgcca

SEQ ID NO: 8910 - DNA, 25 bp, Artificial
  probe
  misc_feature (1)..(25): SEQ ID NO: 7760; BIOBM_at; Start 181; Stop 205
aaagtgcgcgatgccgggatcaaag

SEQ ID NO: 8911 - DNA, 25 bp, Artificial
  probe
  misc_feature (1)..(25): SEQ ID NO: 7760; BIOBM_at; Start 260; Stop 284
tattgctgcaactggcaaacctgcc

SEQ ID NO: 8912 - DNA, 25 bp, Artificial
  probe
  misc_feature (1)..(25): SEQ ID NO: 7760; BIOBM_at; Start 34; Stop 58
acgctgggcacgttgagtgaatctc

SEQ ID NO: 8913 - DNA, 25 bp, Artificial
  probe
  misc_feature (1)..(25): SEQ ID NO: 7760; BIOBM_at; Start 302; Stop 326
tgccaatcaacatgctggtgaaggt

SEQ ID NO: 8914 - DNA, 25 bp, Artificial
  probe
  misc_feature (1)..(25): SEQ ID NO: 7760; BIOBM_at; Start 259; Stop 283
ttattgctgcaactggcaaacctgc

SEQ ID NO: 8915 - DNA, 25 bp, Artificial
  probe
  misc_feature (1)..(25): SEQ ID NO: 7760; BIOBM_at; Start 258; Stop 282
attattgctgcaactggcaaacctg

SEQ ID NO: 8916 - DNA, 25 bp, Artificial
  probe
  misc_feature (1)..(25): SEQ ID NO: 7760; BIOBM_at; Start 207; Stop 231
ctgttctggcggcattgtgggctta

SEQ ID NO: 8917 - DNA, 25 bp, Artificial
  probe
  misc_feature (1)..(25): SEQ ID NO: 7760; BIOBM_at; Start 53; Stop 77
aatctcaggcgcagcgcctcgcgaa

SEQ ID NO: 8918 - DNA, 25 bp, Artificial
  probe
  misc_feature (1)..(25): SEQ ID NO: 7760; BIOBM_at; Start 128; Stop 152
acggcaatatcatcaccacacgcac

SEQ ID NO: 8919 - DNA, 25 bp, Artificial
  probe
  misc_feature (1)..(25): SEQ ID NO: 7760; BIOBM_at; Start 191; Stop 215
atgccgggatcaaagtctgttctgg

SEQ ID NO: 8920 - DNA, 25 bp, Artificial
  probe
  misc_feature (1)..(25): SEQ ID NO: 7760; BIOBM_at; Start 66; Stop 90
gcgcctcgcgaacgccgggctggat

SEQ ID NO: 8921 - DNA, 25 bp, Artificial
  probe
  misc_feature (1)..(25): SEQ ID NO: 7760; BIOBM_at; Start 55; Stop 79
tctcaggcgcagcgcctcgcgaacg

SEQ ID NO: 8922 - DNA, 25 bp, Artificial
  probe
  misc_feature (1)..(25): SEQ ID NO: 7760; BIOBM_at; Start 246; Stop 270
agatcgcgccggattattgctgcaa

SEQ ID NO: 8923 - DNA, 25 bp, Artificial
  probe
  misc_feature (1)..(25): SEQ ID NO: 7760; BIOBM_at; Start 129; Stop 153
cggcaatatcatcaccacacgcact

SEQ ID NO: 8924 - DNA, 25 bp, Artificial
  probe
  misc_feature (1)..(25): SEQ ID NO: 7760; BIOBM_at; Start 255; Stop 279
cggattattgctgcaactggcaaac

SEQ ID NO: 8925 - DNA, 25 bp, Artificial
  probe
  misc_feature (1)..(25): SEQ ID NO: 7760; BIOBM_at; Start 264; Stop 288
gctgcaactggcaaacctgccgacg

SEQ ID NO: 8926 - DNA, 25 bp, Artificial
  probe
  misc_feature (1)..(25): SEQ ID NO: 7760; BIOBM_at; Start 198; Stop 222
gatcaaagtctgttctggcggcatt

SEQ ID NO: 8927 - DNA, 25 bp, Artificial
  probe
  misc_feature (1)..(25): SEQ ID NO: 7760; BIOBM_at; Start 294; Stop 318
ggaaagcgtgccaatcaacatgctg

SEQ ID NO: 8928 - DNA, 25 bp, Artificial
  probe
  misc_feature (1)..(25): SEQ ID NO: 7760; BIOBM_at; Start 266; Stop 290
tgcaactggcaaacctgccgacgcc

SEQ ID NO: 8929 - DNA, 25 bp, Artificial
  probe
  misc_feature (1)..(25): SEQ ID NO: 7760; BIOBM_at; Start 36; Stop 60
gctgggcacgttgagtgaatctcag

SEQ ID NO: 8930 - DNA, 25 bp, Artificial
  probe
  misc_feature (1)..(25): SEQ ID NO: 7760; BIOBM_at; Start 65; Stop 89
agcgcctcgcgaacgccgggctgga

SEQ ID NO: 8931 - DNA, 25 bp, Artificial
  probe
  misc_feature (1)..(25): SEQ ID NO: 7760; BIOBM_at; Start 199; Stop 223
atcaaagtctgttctggcggcattg

SEQ ID NO: 8932 - DNA, 25 bp, Artificial
  probe
  misc_feature (1)..(25): SEQ ID NO: 7760; BIOBM_at; Start 156; Stop 180
tcaggaacgcctcgatacgctggaa

SEQ ID NO: 8933 - DNA, 25 bp, Artificial
  probe
  misc_feature (1)..(25): SEQ ID NO: 7760; BIOBM_at; Start 289; Stop 313
ccgccggaaagcgtgccaatcaaca

SEQ ID NO: 8934 - DNA, 25 bp, Artificial
  probe
  misc_feature (1)..(25): SEQ ID NO: 7760; BIOBM_at; Start 280; Stop 304
ctgccgacgccgccggaaagcgtgc

SEQ ID NO: 8935 - DNA, 25 bp, Artificial
  probe
  misc_feature (1)..(25): SEQ ID NO: 7760; BIOBM_at; Start 290; Stop 314
cgccggaaagcgtgccaatcaacat

SEQ ID NO: 8936 - DNA, 25 bp, Artificial
  probe
  misc_feature (1)..(25): SEQ ID NO: 7760; BIOBM_at; Start 287; Stop 311
cgccgccggaaagcgtgccaatcaa

SEQ ID NO: 8937 - DNA, 25 bp, Artificial
  probe
  misc_feature (1)..(25): SEQ ID NO: 7760; BIOBM_at; Start 205; Stop 229
gtctgttctggcggcattgtgggct

SEQ ID NO: 8938 - DNA, 25 bp, Artificial
  probe
  misc_feature (1)..(25): SEQ ID NO: 7760; BIOBM_at; Start 84; Stop 108
gctggattactacaaccacaacctg

SEQ ID NO: 8939 - DNA, 25 bp, Artificial
  probe
  misc_feature (1)..(25): SEQ ID NO: 7760; BIOBM_at; Start 126; Stop 150
ttacggcaatatcatcaccacacgc

SEQ ID NO: 8940 - DNA, 25 bp, Artificial
  probe
  misc_feature (1)..(25): SEQ ID NO: 7760; BIOBM_at; Start 148; Stop 172
cgcacttatcaggaacgcctcgata

SEQ ID NO: 8941 - DNA, 25 bp, Artificial
  probe
  misc_feature (1)..(25): SEQ ID NO: 7760; BIOBM_at; Start 195; Stop 219
cgggatcaaagtctgttctggcggc

SEQ ID NO: 8942 - DNA, 25 bp, Artificial
  probe
  misc_feature (1)..(25): SEQ ID NO: 7760; BIOBM_at; Start 171; Stop 195
tacgctggaaaaagtgcgcgatgcc

SEQ ID NO: 8943 - DNA, 25 bp, Artificial
  probe
  misc_feature (1)..(25): SEQ ID NO: 7760; BIOBM_at; Start 47; Stop 71
tgagtgaatctcaggcgcagcgcct

SEQ ID NO: 8944 - DNA, 25 bp, Artificial
  probe
  misc_feature (1)..(25): SEQ ID NO: 7760; BIOBM_at; Start 265; Stop 289
ctgcaactggcaaacctgccgacgc

SEQ ID NO: 8945 - DNA, 25 bp, Artificial
  probe
  misc_feature (1)..(25): SEQ ID NO: 7760; BIOBM_at; Start 291; Stop 315
gccggaaagcgtgccaatcaacatg

SEQ ID NO: 8946 - DNA, 25 bp, Artificial
  probe
  misc_feature (1)..(25): SEQ ID NO: 7760; BIOBM_at; Start 200; Stop 224
tcaaagtctgttctggcggcattgt

SEQ ID NO: 8947 - DNA, 25 bp, Artificial
  probe
  misc_feature (1)..(25): SEQ ID NO: 7760; BIOBM_at; Start 261; Stop 285
attgctgcaactggcaaacctgccg

SEQ ID NO: 8948 - DNA, 25 bp, Artificial
  probe
  misc_feature (1)..(25): SEQ ID NO: 7760; BIOBM_at; Start 88; Stop 112
gattactacaaccacaacctggaca

SEQ ID NO: 8949 - DNA, 25 bp, Artificial
  probe
  misc_feature (1)..(25): SEQ ID NO: 7760; BIOBM_at; Start 123; Stop 147
gttttacggcaatatcatcaccaca

SEQ ID NO: 8950 - DNA, 25 bp, Artificial
  probe
  misc_feature (1)..(25): SEQ ID NO: 7760; BIOBM_at; Start 241; Stop 265
gtaaaagatcgcgccggattattgc

SEQ ID NO: 8951 - DNA, 25 bp, Artificial
  probe
  misc_feature (1)..(25): SEQ ID NO: 7760; BIOBM_at; Start 182; Stop 206
aagtgcgcgatgccgggatcaaagt

SEQ ID NO: 8952 - DNA, 25 bp, Artificial
  probe
  misc_feature (1)..(25): SEQ ID NO: 7760; BIOBM_at; Start 189; Stop 213
cgatgccgggatcaaagtctgttct

SEQ ID NO: 8953 - DNA, 25 bp, Artificial
  probe
  misc_feature (1)..(25): SEQ ID NO: 7760; BIOBM_at; Start 30; Stop 54
tatgacgctgggcacgttgagtgaa

SEQ ID NO: 8954 - DNA, 25 bp, Artificial
  probe
  misc_feature (1)..(25): SEQ ID NO: 7760; BIOBM_at; Start 288; Stop 312
gccgccggaaagcgtgccaatcaac

SEQ ID NO: 8955 - DNA, 25 bp, Artificial
  probe
  misc_feature (1)..(25): SEQ ID NO: 7760; BIOBM_at; Start 142; Stop 166
accacacgcacttatcaggaacgcc

SEQ ID NO: 8956 - DNA, 25 bp, Artificial
  probe
  misc_feature (1)..(25): SEQ ID NO: 7760; BIOBM_at; Start 125; Stop 149
tttacggcaatatcatcaccacacg

SEQ ID NO: 8957 - DNA, 25 bp, Artificial
  probe
  misc_feature (1)..(25): SEQ ID NO: 7760; BIOBM_at; Start 121; Stop 145
gagttttacggcaatatcatcacca

SEQ ID NO: 8958 - DNA, 25 bp, Artificial
  probe
  misc_feature (1)..(25): SEQ ID NO: 7760; BIOBM_at; Start 164; Stop 188
gcctcgatacgctggaaaaagtgcg

SEQ ID NO: 8959 - DNA, 25 bp, Artificial
  probe
  misc_feature (1)..(25): SEQ ID NO: 7760; BIOBM_at; Start 296; Stop 320
aaagcgtgccaatcaacatgctggt

SEQ ID NO: 8960 - DNA, 25 bp, Artificial
  probe
  misc_feature (1)..(25): SEQ ID NO: 7760; BIOBM_at; Start 28; Stop 52
tgtatgacgctgggcacgttgagtg

SEQ ID NO: 8961 - DNA, 25 bp, Artificial
  probe
  misc_feature (1)..(25): SEQ ID NO: 7760; BIOBM_at; Start 32; Stop 56
tgacgctgggcacgttgagtgaatc

SEQ ID NO: 8962 - DNA, 25 bp, Artificial
  probe
  misc_feature (1)..(25): SEQ ID NO: 7760; BIOBM_at; Start 299; Stop 323
gcgtgccaatcaacatgctggtgaa

SEQ ID NO: 8963 - DNA, 25 bp, Artificial
  probe
  misc_feature (1)..(25): SEQ ID NO: 7760; BIOBM_at; Start 192; Stop 216
tgccgggatcaaagtctgttctggc

SEQ ID NO: 8964 - DNA, 25 bp, Artificial
  probe
  misc_feature (1)..(25): SEQ ID NO: 7760; BIOBM_at; Start 86; Stop 110
tggattactacaaccacaacctgga

SEQ ID NO: 8965 - DNA, 25 bp, Artificial
  probe
  misc_feature (1)..(25): SEQ ID NO: 7760; BIOBM_at; Start 267; Stop 291
gcaactggcaaacctgccgacgccg

SEQ ID NO: 8966 - DNA, 25 bp, Artificial
  probe
  misc_feature (1)..(25): SEQ ID NO: 7761; BIOC3_at; Start 263; Stop 287
tgcaactggcctggccgcaacagca

SEQ ID NO: 8967 - DNA, 25 bp, Artificial
  probe
  misc_feature (1)..(25): SEQ ID NO: 7761; BIOC3_at; Start 180; Stop 204
gcgttcgctgaaaggcatcggtgcc

SEQ ID NO: 8968 - DNA, 25 bp, Artificial
  probe
  misc_feature (1)..(25): SEQ ID NO: 7761; BIOC3_at; Start 131; Stop 155
atcatattcagcccatcacgctgtg

SEQ ID NO: 8969 - DNA, 25 bp, Artificial
  probe
  misc_feature (1)..(25): SEQ ID NO: 7761; BIOC3_at; Start 169; Stop 193
ctcagtgccatgcgttcgctgaaag

SEQ ID NO: 8970 - DNA, 25 bp, Artificial
  probe
  misc_feature (1)..(25): SEQ ID NO: 7761; BIOC3_at; Start 284; Stop 308
agcaggggcgatatcctctgacgta

SEQ ID NO: 8971 - DNA, 25 bp, Artificial
  probe
  misc_feature (1)..(25): SEQ ID NO: 7761; BIOC3_at; Start 65; Stop 89
cgcatgctaatcgctttttaccgcc

SEQ ID NO: 8972 - DNA, 25 bp, Artificial
  probe
  misc_feature (1)..(25): SEQ ID NO: 7761; BIOC3_at; Start 81; Stop 105
tttaccgccagatgaaatcgaacag

SEQ ID NO: 8973 - DNA, 25 bp, Artificial
  probe
  misc_feature (1)..(25): SEQ ID NO: 7761; BIOC3_at; Start 12; Stop 36
gcagggatcgttacccgaactgcat

SEQ ID NO: 8974 - DNA, 25 bp, Artificial
  probe
  misc_feature (1)..(25): SEQ ID NO: 7761; BIOC3_at; Start 129; Stop 153
acatcatattcagcccatcacgctg

SEQ ID NO: 8975 - DNA, 25 bp, Artificial
  probe
  misc_feature (1)..(25): SEQ ID NO: 7761; BIOC3_at; Start 165; Stop 189
tgcgctcagtgccatgcgttcgctg

SEQ ID NO: 8976 - DNA, 25 bp, Artificial
  probe
  misc_feature (1)..(25): SEQ ID NO: 7761; BIOC3_at; Start 209; Stop 233
atcttcatgaagggcgcgacccgcg

SEQ ID NO: 8977 - DNA, 25 bp, Artificial
  probe
  misc_feature (1)..(25): SEQ ID NO: 7761; BIOC3_at; Start 24; Stop 48
acccgaactgcatcaggcgtggcag

SEQ ID NO: 8978 - DNA, 25 bp, Artificial
  probe
  misc_feature (1)..(25): SEQ ID NO: 7761; BIOC3_at; Start 144; Stop 168
catcacgctgtggtttgatgatgcg

SEQ ID NO: 8979 - DNA, 25 bp, Artificial
  probe
  misc_feature (1)..(25): SEQ ID NO: 7761; BIOC3_at; Start 173; Stop 197
gtgccatgcgttcgctgaaaggcat

SEQ ID NO: 8980 - DNA, 25 bp, Artificial
  probe
  misc_feature (1)..(25): SEQ ID NO: 7761; BIOC3_at; Start 179; Stop 203
tgcgttcgctgaaaggcatcggtgc

SEQ ID NO: 8981 - DNA, 25 bp, Artificial
  probe
  misc_feature (1)..(25): SEQ ID NO: 7761; BIOC3_at; Start 3; Stop 27
cacgctggtgcagggatcgttaccc

SEQ ID NO: 8982 - DNA, 25 bp, Artificial
  probe
  misc_feature (1)..(25): SEQ ID NO: 7761; BIOC3_at; Start 291; Stop 315
gcgatatcctctgacgtatcatctt

SEQ ID NO: 8983 - DNA, 25 bp, Artificial
  probe
  misc_feature (1)..(25): SEQ ID NO: 7761; BIOC3_at; Start 216; Stop 240
tgaagggcgcgacccgcgaatatta

SEQ ID NO: 8984 - DNA, 25 bp, Artificial
  probe
  misc_feature (1)..(25): SEQ ID NO: 7761; BIOC3_at; Start 233; Stop 257
gaatattaacgcgttcgcagttgca

SEQ ID NO: 8985 - DNA, 25 bp, Artificial
  probe
  misc_feature (1)..(25): SEQ ID NO: 7761; BIOC3_at; Start 252; Stop 276
gttgcagcgattgcaactggcctgg

SEQ ID NO: 8986 - DNA, 25 bp, Artificial
  probe
  misc_feature (1)..(25): SEQ ID NO: 7761; BIOC3_at; Start 261; Stop 285
attgcaactggcctggccgcaacag

SEQ ID NO: 8987 - DNA, 25 bp, Artificial
  probe
  misc_feature (1)..(25): SEQ ID NO: 7761; BIOC3_at; Start 251; Stop 275
agttgcagcgattgcaactggcctg

SEQ ID NO: 8988 - DNA, 25 bp, Artificial
  probe
  misc_feature (1)..(25): SEQ ID NO: 7761; BIOC3_at; Start 156; Stop 180
gtttgatgatgcgctcagtgccatg

SEQ ID NO: 8989 - DNA, 25 bp, Artificial
  probe
  misc_feature (1)..(25): SEQ ID NO: 7761; BIOC3_at; Start 59; Stop 83
agcgtccgcatgctaatcgcttttt

SEQ ID NO: 8990 - DNA, 25 bp, Artificial
  probe
  misc_feature (1)..(25): SEQ ID NO: 7761; BIOC3_at; Start 267; Stop 291
actggcctggccgcaacagcagggg

SEQ ID NO: 8991 - DNA, 25 bp, Artificial
  probe
  misc_feature (1)..(25): SEQ ID NO: 7761; BIOC3_at; Start 143; Stop 167
ccatcacgctgtggtttgatgatgc

SEQ ID NO: 8992 - DNA, 25 bp, Artificial
  probe
  misc_feature (1)..(25): SEQ ID NO: 7761; BIOC3_at; Start 245; Stop 269
gttcgcagttgcagcgattgcaact

SEQ ID NO: 8993 - DNA, 25 bp, Artificial
  probe
  misc_feature (1)..(25): SEQ ID NO: 7761; BIOC3_at; Start 53; Stop 77
tggacgagcgtccgcatgctaatcg

SEQ ID NO: 8994 - DNA, 25 bp, Artificial
  probe
  misc_feature (1)..(25): SEQ ID NO: 7761; BIOC3_at; Start 237; Stop 261
attaacgcgttcgcagttgcagcga

SEQ ID NO: 8995 - DNA, 25 bp, Artificial
  probe
  misc_feature (1)..(25): SEQ ID NO: 7761; BIOC3_at; Start 276; Stop 300
gccgcaacagcaggggcgatatcct

SEQ ID NO: 8996 - DNA, 25 bp, Artificial
  probe
  misc_feature (1)..(25): SEQ ID NO: 7761; BIOC3_at; Start 262; Stop 286
ttgcaactggcctggccgcaacagc

SEQ ID NO: 8997 - DNA, 25 bp, Artificial
  probe
  misc_feature (1)..(25): SEQ ID NO: 7761; BIOC3_at; Start 192; Stop 216
aggcatcggtgccacgcatcttcat

SEQ ID NO: 8998 - DNA, 25 bp, Artificial
  probe
  misc_feature (1)..(25): SEQ ID NO: 7761; BIOC3_at; Start 96; Stop 120
aatcgaacagtcgctgaacggcgtg

SEQ ID NO: 8999 - DNA, 25 bp, Artificial
  probe
  misc_feature (1)..(25): SEQ ID NO: 7761; BIOC3_at; Start 293; Stop 317
gatatcctctgacgtatcatctttt

SEQ ID NO: 9000 - DNA, 25 bp, Artificial
  probe
  misc_feature (1)..(25): SEQ ID NO: 7761; BIOC3_at; Start 27; Stop 51
cgaactgcatcaggcgtggcaggcg

SEQ ID NO: 9001 - DNA, 25 bp, Artificial
  probe
  misc_feature (1)..(25): SEQ ID NO: 7761; BIOC3_at; Start 17; Stop 41
gatcgttacccgaactgcatcaggc

SEQ ID NO: 9002 - DNA, 25 bp, Artificial
  probe
  misc_feature (1)..(25): SEQ ID NO: 7761; BIOC3_at; Start 113; Stop 137
acggcgtgcattatcaacatcatat

SEQ ID NO: 9003 - DNA, 25 bp, Artificial
  probe
  misc_feature (1)..(25): SEQ ID NO: 7761; BIOC3_at; Start 57; Stop 81
cgagcgtccgcatgctaatcgcttt

SEQ ID NO: 9004 - DNA, 25 bp, Artificial
  probe
  misc_feature (1)..(25): SEQ ID NO: 7761; BIOC3_at; Start 287; Stop 311
aggggcgatatcctctgacgtatca

SEQ ID NO: 9005 - DNA, 25 bp, Artificial
  probe
  misc_feature (1)..(25): SEQ ID NO: 7761; BIOC3_at; Start 255; Stop 279
gcagcgattgcaactggcctggccg

SEQ ID NO: 9006 - DNA, 25 bp, Artificial
  probe
  misc_feature (1)..(25): SEQ ID NO: 7761; BIOC3_at; Start 60; Stop 84
gcgtccgcatgctaatcgcttttta

SEQ ID NO: 9007 - DNA, 25 bp, Artificial
  probe
  misc_feature (1)..(25): SEQ ID NO: 7761; BIOC3_at; Start 128; Stop 152
aacatcatattcagcccatcacgct

SEQ ID NO: 9008 - DNA, 25 bp, Artificial
  probe
  misc_feature (1)..(25): SEQ ID NO: 7761; BIOC3_at; Start 93; Stop 117
tgaaatcgaacagtcgctgaacggc

SEQ ID NO: 9009 - DNA, 25 bp, Artificial
  probe
  misc_feature (1)..(25): SEQ ID NO: 7761; BIOC3_at; Start 123; Stop 147
ttatcaacatcatattcagcccatc

SEQ ID NO: 9010 - DNA, 25 bp, Artificial
  probe
  misc_feature (1)..(25): SEQ ID NO: 7761; BIOC3_at; Start 167; Stop 191
cgctcagtgccatgcgttcgctgaa

SEQ ID NO: 9011 - DNA, 25 bp, Artificial
  probe
  misc_feature (1)..(25): SEQ ID NO: 7761; BIOC3_at; Start 161; Stop 185
atgatgcgctcagtgccatgcgttc

SEQ ID NO: 9012 - DNA, 25 bp, Artificial
  probe
  misc_feature (1)..(25): SEQ ID NO: 7761; BIOC3_at; Start 23; Stop 47
tacccgaactgcatcaggcgtggca

SEQ ID NO: 9013 - DNA, 25 bp, Artificial
  probe
  misc_feature (1)..(25): SEQ ID NO: 7761; BIOC3_at; Start 145; Stop 169
atcacgctgtggtttgatgatgcgc

SEQ ID NO: 9014 - DNA, 25 bp, Artificial
  probe
  misc_feature (1)..(25): SEQ ID NO: 7761; BIOC3_at; Start 80; Stop 104
ttttaccgccagatgaaatcgaaca

SEQ ID NO: 9015 - DNA, 25 bp, Artificial
  probe
  misc_feature (1)..(25): SEQ ID NO: 7761; BIOC3_at; Start 279; Stop 303
gcaacagcaggggcgatatcctctg

SEQ ID NO: 9016 - DNA, 25 bp, Artificial
  probe
  misc_feature (1)..(25): SEQ ID NO: 7761; BIOC3_at; Start 201; Stop 225
tgccacgcatcttcatgaagggcgc

SEQ ID NO: 9017 - DNA, 25 bp, Artificial
  probe
  misc_feature (1)..(25): SEQ ID NO: 7761; BIOC3_at; Start 125; Stop 149
atcaacatcatattcagcccatcac

SEQ ID NO: 9018 - DNA, 25 bp, Artificial
  probe
  misc_feature (1)..(25): SEQ ID NO: 7761; BIOC3_at; Start 137; Stop 161
ttcagcccatcacgctgtggtttga

SEQ ID NO: 9019 - DNA, 25 bp, Artificial
  probe
  misc_feature (1)..(25): SEQ ID NO: 7761; BIOC3_at; Start 264; Stop 288
gcaactggcctggccgcaacagcag

SEQ ID NO: 9020 - DNA, 25 bp, Artificial
  probe
  misc_feature (1)..(25): SEQ ID NO: 7761; BIOC3_at; Start 200; Stop 224
gtgccacgcatcttcatgaagggcg

SEQ ID NO: 9021 - DNA, 25 bp, Artificial
  probe
  misc_feature (1)..(25): SEQ ID NO: 7761; BIOC3_at; Start 239; Stop 263
taacgcgttcgcagttgcagcgatt

SEQ ID NO: 9022 - DNA, 25 bp, Artificial
  probe
  misc_feature (1)..(25): SEQ ID NO: 7761; BIOC3_at; Start 292; Stop 316
cgatatcctctgacgtatcatcttt

SEQ ID NO: 9023 - DNA, 25 bp, Artificial
  probe
  misc_feature (1)..(25): SEQ ID NO: 7761; BIOC3_at; Start 104; Stop 128
agtcgctgaacggcgtgcattatca

SEQ ID NO: 9024 - DNA, 25 bp, Artificial
  probe
  misc_feature (1)..(25): SEQ ID NO: 7761; BIOC3_at; Start 20; Stop 44
cgttacccgaactgcatcaggcgtg

SEQ ID NO: 9025 - DNA, 25 bp, Artificial
  probe
  misc_feature (1)..(25): SEQ ID NO: 7761; BIOC3_at; Start 189; Stop 213
gaaaggcatcggtgccacgcatctt

SEQ ID NO: 9026 - DNA, 25 bp, Artificial
  probe
  misc_feature (1)..(25): SEQ ID NO: 7761; BIOC3_at; Start 204; Stop 228
cacgcatcttcatgaagggcgcgac

SEQ ID NO: 9027 - DNA, 25 bp, Artificial
  probe
  misc_feature (1)..(25): SEQ ID NO: 7761; BIOC3_at; Start 171; Stop 195
cagtgccatgcgttcgctgaaaggc

SEQ ID NO: 9028 - DNA, 25 bp, Artificial
  probe
  misc_feature (1)..(25): SEQ ID NO: 7761; BIOC3_at; Start 164; Stop 188
atgcgctcagtgccatgcgttcgct

SEQ ID NO: 9029 - DNA, 25 bp, Artificial
  probe
  misc_feature (1)..(25): SEQ ID NO: 7761; BIOC3_at; Start 51; Stop 75
ggtggacgagcgtccgcatgctaat

SEQ ID NO: 9030 - DNA, 25 bp, Artificial
  probe
  misc_feature (1)..(25): SEQ ID NO: 7761; BIOC3_at; Start 117; Stop 141
cgtgcattatcaacatcatattcag

SEQ ID NO: 9031 - DNA, 25 bp, Artificial
  probe
  misc_feature (1)..(25): SEQ ID NO: 7761; BIOC3_at; Start 107; Stop 131
cgctgaacggcgtgcattatcaaca

SEQ ID NO: 9032 - DNA, 25 bp, Artificial
  probe
  misc_feature (1)..(25): SEQ ID NO: 7761; BIOC3_at; Start 127; Stop 151
caacatcatattcagcccatcacgc

SEQ ID NO: 9033 - DNA, 25 bp, Artificial
  probe
  misc_feature (1)..(25): SEQ ID NO: 7761; BIOC3_at; Start 105; Stop 129
gtcgctgaacggcgtgcattatcaa

SEQ ID NO: 9034 - DNA, 25 bp, Artificial
  probe
  misc_feature (1)..(25): SEQ ID NO: 7761; BIOC3_at; Start 288; Stop 312
ggggcgatatcctctgacgtatcat

SEQ ID NO: 9035 - DNA, 25 bp, Artificial
  probe
  misc_feature (1)..(25): SEQ ID NO: 7761; BIOC3_at; Start 120; Stop 144
gcattatcaacatcatattcagccc

SEQ ID NO: 9036 - DNA, 25 bp, Artificial
  probe
  misc_feature (1)..(25): SEQ ID NO: 7761; BIOC3_at; Start 240; Stop 264
aacgcgttcgcagttgcagcgattg

SEQ ID NO: 9037 - DNA, 25 bp, Artificial
  probe
  misc_feature (1)..(25): SEQ ID NO: 7761; BIOC3_at; Start 281; Stop 305
aacagcaggggcgatatcctctgac

SEQ ID NO: 9038 - DNA, 25 bp, Artificial
  probe
  misc_feature (1)..(25): SEQ ID NO: 7761; BIOC3_at; Start 195; Stop 219
catcggtgccacgcatcttcatgaa

SEQ ID NO: 9039 - DNA, 25 bp, Artificial
  probe
  misc_feature (1)..(25): SEQ ID NO: 7761; BIOC3_at; Start 207; Stop 231
gcatcttcatgaagggcgcgacccg

SEQ ID NO: 9040 - DNA, 25 bp, Artificial
  probe
  misc_feature (1)..(25): SEQ ID NO: 7761; BIOC3_at; Start 185; Stop 209
cgctgaaaggcatcggtgccacgca

SEQ ID NO: 9041 - DNA, 25 bp, Artificial
  probe
  misc_feature (1)..(25): SEQ ID NO: 7761; BIOC3_at; Start 213; Stop 237
tcatgaagggcgcgacccgcgaata

SEQ ID NO: 9042 - DNA, 25 bp, Artificial
  probe
  misc_feature (1)..(25): SEQ ID NO: 7761; BIOC3_at; Start 111; Stop 135
gaacggcgtgcattatcaacatcat

SEQ ID NO: 9043 - DNA, 25 bp, Artificial
  probe
  misc_feature (1)..(25): SEQ ID NO: 7761; BIOC3_at; Start 197; Stop 221
tcggtgccacgcatcttcatgaagg

SEQ ID NO: 9044 - DNA, 25 bp, Artificial
  probe
  misc_feature (1)..(25): SEQ ID NO: 7761; BIOC3_at; Start 135; Stop 159
tattcagcccatcacgctgtggttt

SEQ ID NO: 9045 - DNA, 25 bp, Artificial
  probe
  misc_feature (1)..(25): SEQ ID NO: 7761; BIOC3_at; Start 168; Stop 192
gctcagtgccatgcgttcgctgaaa

SEQ ID NO: 9046 - DNA, 25 bp, Artificial
  probe
  misc_feature (1)..(25): SEQ ID NO: 7761; BIOC3_at; Start 1; Stop 25
accacgctggtgcagggatcgttac

SEQ ID NO: 9047 - DNA, 25 bp, Artificial
  probe
  misc_feature (1)..(25): SEQ ID NO: 7761; BIOC3_at; Start 99; Stop 123
cgaacagtcgctgaacggcgtgcat

SEQ ID NO: 9048 - DNA, 25 bp, Artificial
  probe
  misc_feature (1)..(25): SEQ ID NO: 7761; BIOC3_at; Start 140; Stop 164
agcccatcacgctgtggtttgatga

SEQ ID NO: 9049 - DNA, 25 bp, Artificial
  probe
  misc_feature (1)..(25): SEQ ID NO: 7761; BIOC3_at; Start 112; Stop 136
aacggcgtgcattatcaacatcata

SEQ ID NO: 9050 - DNA, 25 bp, Artificial
  probe
  misc_feature (1)..(25): SEQ ID NO: 7761; BIOC3_at; Start 29; Stop 53
aactgcatcaggcgtggcaggcggt

SEQ ID NO: 9051 - DNA, 25 bp, Artificial
  probe
  misc_feature (1)..(25): SEQ ID NO: 7761; BIOC3_at; Start 188; Stop 212
tgaaaggcatcggtgccacgcatct

SEQ ID NO: 9052 - DNA, 25 bp, Artificial
  probe
  misc_feature (1)..(25): SEQ ID NO: 7761; BIOC3_at; Start 275; Stop 299
ggccgcaacagcaggggcgatatcc

SEQ ID NO: 9053 - DNA, 25 bp, Artificial
  probe
  misc_feature (1)..(25): SEQ ID NO: 7761; BIOC3_at; Start 119; Stop 143
tgcattatcaacatcatattcagcc

SEQ ID NO: 9054 - DNA, 25 bp, Artificial
  probe
  misc_feature (1)..(25): SEQ ID NO: 7761; BIOC3_at; Start 64; Stop 88
ccgcatgctaatcgctttttaccgc

SEQ ID NO: 9055 - DNA, 25 bp, Artificial
  probe
  misc_feature (1)..(25): SEQ ID NO: 7761; BIOC3_at; Start 294; Stop 318
atatcctctgacgtatcatcttttt

SEQ ID NO: 9056 - DNA, 25 bp, Artificial
  probe
  misc_feature (1)..(25): SEQ ID NO: 7761; BIOC3_at; Start 56; Stop 80
acgagcgtccgcatgctaatcgctt

SEQ ID NO: 9057 - DNA, 25 bp, Artificial
  probe
  misc_feature (1)..(25): SEQ ID NO: 7761; BIOC3_at; Start 92; Stop 116
atgaaatcgaacagtcgctgaacgg

SEQ ID NO: 9058 - DNA, 25 bp, Artificial
  probe
  misc_feature (1)..(25): SEQ ID NO: 7761; BIOC3_at; Start 116; Stop 140
gcgtgcattatcaacatcatattca

SEQ ID NO: 9059 - DNA, 25 bp, Artificial
  probe
  misc_feature (1)..(25): SEQ ID NO: 7761; BIOC3_at; Start 183; Stop 207
ttcgctgaaaggcatcggtgccacg

SEQ ID NO: 9060 - DNA, 25 bp, Artificial
  probe
  misc_feature (1)..(25): SEQ ID NO: 7761; BIOC3_at; Start 63; Stop 87
tccgcatgctaatcgctttttaccg

SEQ ID NO: 9061 - DNA, 25 bp, Artificial
  probe
  misc_feature (1)..(25): SEQ ID NO: 7761; BIOC3_at; Start 243; Stop 267
gcgttcgcagttgcagcgattgcaa

SEQ ID NO: 9062 - DNA, 25 bp, Artificial
  probe
  misc_feature (1)..(25): SEQ ID NO: 7761; BIOC3_at; Start 257; Stop 281
agcgattgcaactggcctggccgca

SEQ ID NO: 9063 - DNA, 25 bp, Artificial
  probe
  misc_feature (1)..(25): SEQ ID NO: 7761; BIOC3_at; Start 177; Stop 201
catgcgttcgctgaaaggcatcggt

SEQ ID NO: 9064 - DNA, 25 bp, Artificial
  probe
  misc_feature (1)..(25): SEQ ID NO: 7761; BIOC3_at; Start 191; Stop 215
aaggcatcggtgccacgcatcttca

SEQ ID NO: 9065 - DNA, 25 bp, Artificial
  probe
  misc_feature (1)..(25): SEQ ID NO: 7761; BIOC3_at; Start 214; Stop 238
catgaagggcgcgacccgcgaatat

SEQ ID NO: 9066 - DNA, 25 bp, Artificial
  probe
  misc_feature (1)..(25): SEQ ID NO: 7761; BIOC3_at; Start 244; Stop 268
cgttcgcagttgcagcgattgcaac

SEQ ID NO: 9067 - DNA, 25 bp, Artificial
  probe
  misc_feature (1)..(25): SEQ ID NO: 7761; BIOC3_at; Start 277; Stop 301
ccgcaacagcaggggcgatatcctc

SEQ ID NO: 9068 - DNA, 25 bp, Artificial
  probe
  misc_feature (1)..(25): SEQ ID NO: 7761; BIOC3_at; Start 132; Stop 156
tcatattcagcccatcacgctgtgg

SEQ ID NO: 9069 - DNA, 25 bp, Artificial
  probe
  misc_feature (1)..(25): SEQ ID NO: 7761; BIOC3_at; Start 199; Stop 223
ggtgccacgcatcttcatgaagggc

SEQ ID NO: 9070 - DNA, 25 bp, Artificial
  probe
  misc_feature (1)..(25): SEQ ID NO: 7761; BIOC3_at; Start 108; Stop 132
gctgaacggcgtgcattatcaacat

SEQ ID NO: 9071 - DNA, 25 bp, Artificial
  probe
  misc_feature (1)..(25): SEQ ID NO: 7761; BIOC3_at; Start 75; Stop 99
tcgctttttaccgccagatgaaatc

SEQ ID NO: 9072 - DNA, 25 bp, Artificial
  probe
  misc_feature (1)..(25): SEQ ID NO: 7761; BIOC3_at; Start 212; Stop 236
ttcatgaagggcgcgacccgcgaat

SEQ ID NO: 9073 - DNA, 25 bp, Artificial
  probe
  misc_feature (1)..(25): SEQ ID NO: 7761; BIOC3_at; Start 11; Stop 35
tgcagggatcgttacccgaactgca

SEQ ID NO: 9074 - DNA, 25 bp, Artificial
  probe
  misc_feature (1)..(25): SEQ ID NO: 7761; BIOC3_at; Start 15; Stop 39
gggatcgttacccgaactgcatcag

SEQ ID NO: 9075 - DNA, 25 bp, Artificial
  probe
  misc_feature (1)..(25): SEQ ID NO: 7761; BIOC3_at; Start 260; Stop 284
gattgcaactggcctggccgcaaca

SEQ ID NO: 9076 - DNA, 25 bp, Artificial
  probe
  misc_feature (1)..(25): SEQ ID NO: 7762; BIOC5_at; Start 221; Stop 245
cgccaatgcttgttcaggcacgcca

SEQ ID NO: 9077 - DNA, 25 bp, Artificial
  probe
  misc_feature (1)..(25): SEQ ID NO: 7762; BIOC5_at; Start 91; Stop 115
gctgacgccttactggcaatgcttc

SEQ ID NO: 9078 - DNA, 25 bp, Artificial
  probe
  misc_feature (1)..(25): SEQ ID NO: 7762; BIOC5_at; Start 305; Stop 329
cgacgttcgatcttgcatggagcaa

SEQ ID NO: 9079 - DNA, 25 bp, Artificial
  probe
  misc_feature (1)..(25): SEQ ID NO: 7762; BIOC5_at; Start 322; Stop 346
tggagcaatctcgcagtgcagtggt

SEQ ID NO: 9080 - DNA, 25 bp, Artificial
  probe
  misc_feature (1)..(25): SEQ ID NO: 7762; BIOC5_at; Start 189; Stop 213
tcacgcgcaggtgacggccttagat

SEQ ID NO: 9081 - DNA, 25 bp, Artificial
  probe
  misc_feature (1)..(25): SEQ ID NO: 7762; BIOC5_at; Start 309; Stop 333
gttcgatcttgcatggagcaatctc

SEQ ID NO: 9082 - DNA, 25 bp, Artificial
  probe
  misc_feature (1)..(25): SEQ ID NO: 7762; BIOC5_at; Start 9; Stop 33
ggttaataaacaagccattgcagcg

SEQ ID NO: 9083 - DNA, 25 bp, Artificial
  probe
  misc_feature (1)..(25): SEQ ID NO: 7762; BIOC5_at; Start 229; Stop 253
cttgttcaggcacgccagaaggatg

SEQ ID NO: 9084 - DNA, 25 bp, Artificial
  probe
  misc_feature (1)..(25): SEQ ID NO: 7762; BIOC5_at; Start 61; Stop 85
gagcaacatgcagatctacagcgcc

SEQ ID NO: 9085 - DNA, 25 bp, Artificial
  probe
  misc_feature (1)..(25): SEQ ID NO: 7762; BIOC5_at; Start 69; Stop 93
tgcagatctacagcgccagagtgct

SEQ ID NO: 9086 - DNA, 25 bp, Artificial
  probe
  misc_feature (1)..(25): SEQ ID NO: 7762; BIOC5_at; Start 202; Stop 226
acggccttagatctctcgccgccaa

SEQ ID NO: 9087 - DNA, 25 bp, Artificial
  probe
  misc_feature (1)..(25): SEQ ID NO: 7762; BIOC5_at; Start 351; Stop 375
taatttatccacggcactccgcgag

SEQ ID NO: 9088 - DNA, 25 bp, Artificial
  probe
  misc_feature (1)..(25): SEQ ID NO: 7762; BIOC5_at; Start 219; Stop 243
gccgccaatgcttgttcaggcacgc

SEQ ID NO: 9089 - DNA, 25 bp, Artificial
  probe
  misc_feature (1)..(25): SEQ ID NO: 7762; BIOC5_at; Start 68; Stop 92
atgcagatctacagcgccagagtgc

SEQ ID NO: 9090 - DNA, 25 bp, Artificial
  probe
  misc_feature (1)..(25): SEQ ID NO: 7762; BIOC5_at; Start 215; Stop 239
tctcgccgccaatgcttgttcaggc

SEQ ID NO: 9091 - DNA, 25 bp, Artificial
  probe
  misc_feature (1)..(25): SEQ ID NO: 7762; BIOC5_at; Start 213; Stop 237
tctctcgccgccaatgcttgttcag

SEQ ID NO: 9092 - DNA, 25 bp, Artificial
  probe
  misc_feature (1)..(25): SEQ ID NO: 7762; BIOC5_at; Start 281; Stop 305
tcgaatccctgccgttagcgactgc

SEQ ID NO: 9093 - DNA, 25 bp, Artificial
  probe
  misc_feature (1)..(25): SEQ ID NO: 7762; BIOC5_at; Start 15; Stop 39
taaacaagccattgcagcggcattt

SEQ ID NO: 9094 - DNA, 25 bp, Artificial
  probe
  misc_feature (1)..(25): SEQ ID NO: 7762; BIOC5_at; Start 231; Stop 255
tgttcaggcacgccagaaggatgcc

SEQ ID NO: 9095 - DNA, 25 bp, Artificial
  probe
  misc_feature (1)..(25): SEQ ID NO: 7762; BIOC5_at; Start 361; Stop 385
acggcactccgcgagctgtatcggg

SEQ ID NO: 9096 - DNA, 25 bp, Artificial
  probe
  misc_feature (1)..(25): SEQ ID NO: 7762; BIOC5_at; Start 75; Stop 99
tctacagcgccagagtgctgacgcc

SEQ ID NO: 9097 - DNA, 25 bp, Artificial
  probe
  misc_feature (1)..(25): SEQ ID NO: 7762; BIOC5_at; Start 65; Stop 89
aacatgcagatctacagcgccagag

SEQ ID NO: 9098 - DNA, 25 bp, Artificial
  probe
  misc_feature (1)..(25): SEQ ID NO: 7762; BIOC5_at; Start 81; Stop 105
gcgccagagtgctgacgccttactg

SEQ ID NO: 9099 - DNA, 25 bp, Artificial
  probe
  misc_feature (1)..(25): SEQ ID NO: 7762; BIOC5_at; Start 29; Stop 53
cagcggcatttggtcgggcagccgc

SEQ ID NO: 9100 - DNA, 25 bp, Artificial
  probe
  misc_feature (1)..(25): SEQ ID NO: 7762; BIOC5_at; Start 289; Stop 313
ctgccgttagcgactgcgacgttcg

SEQ ID NO: 9101 - DNA, 25 bp, Artificial
  probe
  misc_feature (1)..(25): SEQ ID NO: 7762; BIOC5_at; Start 307; Stop 331
acgttcgatcttgcatggagcaatc

SEQ ID NO: 9102 - DNA, 25 bp, Artificial
  probe
  misc_feature (1)..(25): SEQ ID NO: 7762; BIOC5_at; Start 337; Stop 361
gtgcagtggtgcggtaatttatcca

SEQ ID NO: 9103 - DNA, 25 bp, Artificial
  probe
  misc_feature (1)..(25): SEQ ID NO: 7762; BIOC5_at; Start 191; Stop 215
acgcgcaggtgacggccttagatct

SEQ ID NO: 9104 - DNA, 25 bp, Artificial
  probe
  misc_feature (1)..(25): SEQ ID NO: 7762; BIOC5_at; Start 311; Stop 335
tcgatcttgcatggagcaatctcgc

SEQ ID NO: 9105 - DNA, 25 bp, Artificial
  probe
  misc_feature (1)..(25): SEQ ID NO: 7762; BIOC5_at; Start 330; Stop 354
tctcgcagtgcagtggtgcggtaat

SEQ ID NO: 9106 - DNA, 25 bp, Artificial
  probe
  misc_feature (1)..(25): SEQ ID NO: 7762; BIOC5_at; Start 71; Stop 95
cagatctacagcgccagagtgctga

SEQ ID NO: 9107 - DNA, 25 bp, Artificial
  probe
  misc_feature (1)..(25): SEQ ID NO: 7762; BIOC5_at; Start 168; Stop 192
gagccgccactggcgggaacgtcac

SEQ ID NO: 9108 - DNA, 25 bp, Artificial
  probe
  misc_feature (1)..(25): SEQ ID NO: 7762; BIOC5_at; Start 95; Stop 119
acgccttactggcaatgcttccaca

SEQ ID NO: 9109 - DNA, 25 bp, Artificial
  probe
  misc_feature (1)..(25): SEQ ID NO: 7762; BIOC5_at; Start 345; Stop 369
gtgcggtaatttatccacggcactc

SEQ ID NO: 9110 - DNA, 25 bp, Artificial
  probe
  misc_feature (1)..(25): SEQ ID NO: 7762; BIOC5_at; Start 105; Stop 129
ggcaatgcttccacagcgtaaatac

SEQ ID NO: 9111 - DNA, 25 bp, Artificial
  probe
  misc_feature (1)..(25): SEQ ID NO: 7762; BIOC5_at; Start 46; Stop 70
gcagccgcacactatgagcaacatg

SEQ ID NO: 9112 - DNA, 25 bp, Artificial
  probe
  misc_feature (1)..(25): SEQ ID NO: 7762; BIOC5_at; Start 41; Stop 65
gtcgggcagccgcacactatgagca

SEQ ID NO: 9113 - DNA, 25 bp, Artificial
  probe
  misc_feature (1)..(25): SEQ ID NO: 7762; BIOC5_at; Start 386; Stop 410
tggtgcgccccaaaggcgtggtcgc

SEQ ID NO: 9114 - DNA, 25 bp, Artificial
  probe
  misc_feature (1)..(25): SEQ ID NO: 7762; BIOC5_at; Start 225; Stop 249
aatgcttgttcaggcacgccagaag

SEQ ID NO: 9115 - DNA, 25 bp, Artificial
  probe
  misc_feature (1)..(25): SEQ ID NO: 7762; BIOC5_at; Start 49; Stop 73
gccgcacactatgagcaacatgcag

SEQ ID NO: 9116 - DNA, 25 bp, Artificial
  probe
  misc_feature (1)..(25): SEQ ID NO: 7762; BIOC5_at; Start 241; Stop 265
cgccagaaggatgccgcagaccatt

SEQ ID NO: 9117 - DNA, 25 bp, Artificial
  probe
  misc_feature (1)..(25): SEQ ID NO: 7762; BIOC5_at; Start 89; Stop 113
gtgctgacgccttactggcaatgct

SEQ ID NO: 9118 - DNA, 25 bp, Artificial
  probe
  misc_feature (1)..(25): SEQ ID NO: 7762; BIOC5_at; Start 79; Stop 103
cagcgccagagtgctgacgccttac

SEQ ID NO: 9119 - DNA, 25 bp, Artificial
  probe
  misc_feature (1)..(25): SEQ ID NO: 7762; BIOC5_at; Start 235; Stop 259
caggcacgccagaaggatgccgcag

SEQ ID NO: 9120 - DNA, 25 bp, Artificial
  probe
  misc_feature (1)..(25): SEQ ID NO: 7762; BIOC5_at; Start 87; Stop 111
gagtgctgacgccttactggcaatg

SEQ ID NO: 9121 - DNA, 25 bp, Artificial
  probe
  misc_feature (1)..(25): SEQ ID NO: 7762; BIOC5_at; Start 284; Stop 308
aatccctgccgttagcgactgcgac

SEQ ID NO: 9122 - DNA, 25 bp, Artificial
  probe
  misc_feature (1)..(25): SEQ ID NO: 7762; BIOC5_at; Start 295; Stop 319
ttagcgactgcgacgttcgatcttg

SEQ ID NO: 9123 - DNA, 25 bp, Artificial
  probe
  misc_feature (1)..(25): SEQ ID NO: 7762; BIOC5_at; Start 365; Stop 389
cactccgcgagctgtatcgggtggt

SEQ ID NO: 9124 - DNA, 25 bp, Artificial
  probe
  misc_feature (1)..(25): SEQ ID NO: 7762; BIOC5_at; Start 45; Stop 69
ggcagccgcacactatgagcaacat

SEQ ID NO: 9125 - DNA, 25 bp, Artificial
  probe
  misc_feature (1)..(25): SEQ ID NO: 7762; BIOC5_at; Start 99; Stop 123
cttactggcaatgcttccacagcgt

SEQ ID NO: 9126 - DNA, 25 bp, Artificial
  probe
  misc_feature (1)..(25): SEQ ID NO: 7762; BIOC5_at; Start 67; Stop 91
catgcagatctacagcgccagagtg

SEQ ID NO: 9127 - DNA, 25 bp, Artificial
  probe
  misc_feature (1)..(25): SEQ ID NO: 7762; BIOC5_at; Start 277; Stop 301
gatatcgaatccctgccgttagcga

SEQ ID NO: 9128 - DNA, 25 bp, Artificial
  probe
  misc_feature (1)..(25): SEQ ID NO: 7762; BIOC5_at; Start 85; Stop 109
cagagtgctgacgccttactggcaa

SEQ ID NO: 9129 - DNA, 25 bp, Artificial
  probe
  misc_feature (1)..(25): SEQ ID NO: 7762; BIOC5_at; Start 357; Stop 381
atccacggcactccgcgagctgtat

SEQ ID NO: 9130 - DNA, 25 bp, Artificial
  probe
  misc_feature (1)..(25): SEQ ID NO: 7762; BIOC5_at; Start 319; Stop 343
gcatggagcaatctcgcagtgcagt

SEQ ID NO: 9131 - DNA, 25 bp, Artificial
  probe
  misc_feature (1)..(25): SEQ ID NO: 7762; BIOC5_at; Start 201; Stop 225
gacggccttagatctctcgccgcca

SEQ ID NO: 9132 - DNA, 25 bp, Artificial
  probe
  misc_feature (1)..(25): SEQ ID NO: 7762; BIOC5_at; Start 301; Stop 325
actgcgacgttcgatcttgcatgga

SEQ ID NO: 9133 - DNA, 25 bp, Artificial
  probe
  misc_feature (1)..(25): SEQ ID NO: 7762; BIOC5_at; Start 165; Stop 189
gatgagccgccactggcgggaacgt

SEQ ID NO: 9134 - DNA, 25 bp, Artificial
  probe
  misc_feature (1)..(25): SEQ ID NO: 7762; BIOC5_at; Start 226; Stop 250
atgcttgttcaggcacgccagaagg

SEQ ID NO: 9135 - DNA, 25 bp, Artificial
  probe
  misc_feature (1)..(25): SEQ ID NO: 7762; BIOC5_at; Start 59; Stop 83
atgagcaacatgcagatctacagcg

SEQ ID NO: 9136 - DNA, 25 bp, Artificial
  probe
  misc_feature (1)..(25): SEQ ID NO: 7762; BIOC5_at; Start 285; Stop 309
atccctgccgttagcgactgcgacg

SEQ ID NO: 9137 - DNA, 25 bp, Artificial
  probe
  misc_feature (1)..(25): SEQ ID NO: 7762; BIOC5_at; Start 195; Stop 219
gcaggtgacggccttagatctctcg

SEQ ID NO: 9138 - DNA, 25 bp, Artificial
  probe
  misc_feature (1)..(25): SEQ ID NO: 7762; BIOC5_at; Start 227; Stop 251
tgcttgttcaggcacgccagaagga

SEQ ID NO: 9139 - DNA, 25 bp, Artificial
  probe
  misc_feature (1)..(25): SEQ ID NO: 7762; BIOC5_at; Start 237; Stop 261
ggcacgccagaaggatgccgcagac

SEQ ID NO: 9140 - DNA, 25 bp, Artificial
  probe
  misc_feature (1)..(25): SEQ ID NO: 7762; BIOC5_at; Start 109; Stop 133
atgcttccacagcgtaaatacaccc

SEQ ID NO: 9141 - DNA, 25 bp, Artificial
  probe
  misc_feature (1)..(25): SEQ ID NO: 7762; BIOC5_at; Start 275; Stop 299
gagatatcgaatccctgccgttagc

SEQ ID NO: 9142 - DNA, 25 bp, Artificial
  probe
  misc_feature (1)..(25): SEQ ID NO: 7762; BIOC5_at; Start 247; Stop 271
aaggatgccgcagaccattatctgg

SEQ ID NO: 9143 - DNA, 25 bp, Artificial
  probe
  misc_feature (1)..(25): SEQ ID NO: 7762; BIOC5_at; Start 19; Stop 43
caagccattgcagcggcatttggtc

SEQ ID NO: 9144 - DNA, 25 bp, Artificial
  probe
  misc_feature (1)..(25): SEQ ID NO: 7762; BIOC5_at; Start 359; Stop 383
ccacggcactccgcgagctgtatcg

SEQ ID NO: 9145 - DNA, 25 bp, Artificial
  probe
  misc_feature (1)..(25): SEQ ID NO: 7762; BIOC5_at; Start 315; Stop 339
tcttgcatggagcaatctcgcagtg

SEQ ID NO: 9146 - DNA, 25 bp, Artificial
  probe
  misc_feature (1)..(25): SEQ ID NO: 7762; BIOC5_at; Start 77; Stop 101
tacagcgccagagtgctgacgcctt

SEQ ID NO: 9147 - DNA, 25 bp, Artificial
  probe
  misc_feature (1)..(25): SEQ ID NO: 7762; BIOC5_at; Start 157; Stop 181
cctggctggatgagccgccactggc

SEQ ID NO: 9148 - DNA, 25 bp, Artificial
  probe
  misc_feature (1)..(25): SEQ ID NO: 7762; BIOC5_at; Start 245; Stop 269
agaaggatgccgcagaccattatct

SEQ ID NO: 9149 - DNA, 25 bp, Artificial
  probe
  misc_feature (1)..(25): SEQ ID NO: 7762; BIOC5_at; Start 197; Stop 221
aggtgacggccttagatctctcgcc

SEQ ID NO: 9150 - DNA, 25 bp, Artificial
  probe
  misc_feature (1)..(25): SEQ ID NO: 7762; BIOC5_at; Start 251; Stop 275
atgccgcagaccattatctggcggg

SEQ ID NO: 9151 - DNA, 25 bp, Artificial
  probe
  misc_feature (1)..(25): SEQ ID NO: 7762; BIOC5_at; Start 153; Stop 177
tggacctggctggatgagccgccac

SEQ ID NO: 9152 - DNA, 25 bp, Artificial
  probe
  misc_feature (1)..(25): SEQ ID NO: 7762; BIOC5_at; Start 217; Stop 241
tcgccgccaatgcttgttcaggcac

SEQ ID NO: 9153 - DNA, 25 bp, Artificial
  probe
  misc_feature (1)..(25): SEQ ID NO: 7762; BIOC5_at; Start 291; Stop 315
gccgttagcgactgcgacgttcgat

SEQ ID NO: 9154 - DNA, 25 bp, Artificial
  probe
  misc_feature (1)..(25): SEQ ID NO: 7762; BIOC5_at; Start 187; Stop 211
cgtcacgcgcaggtgacggccttag

SEQ ID NO: 9155 - DNA, 25 bp, Artificial
  probe
  misc_feature (1)..(25): SEQ ID NO: 7762; BIOC5_at; Start 37; Stop 61
tttggtcgggcagccgcacactatg

SEQ ID NO: 9156 - DNA, 25 bp, Artificial
  probe
  misc_feature (1)..(25): SEQ ID NO: 7762; BIOC5_at; Start 24; Stop 48
cattgcagcggcatttggtcgggca

SEQ ID NO: 9157 - DNA, 25 bp, Artificial
  probe
  misc_feature (1)..(25): SEQ ID NO: 7762; BIOC5_at; Start 355; Stop 379
ttatccacggcactccgcgagctgt

SEQ ID NO: 9158 - DNA, 25 bp, Artificial
  probe
  misc_feature (1)..(25): SEQ ID NO: 7762; BIOC5_at; Start 21; Stop 45
agccattgcagcggcatttggtcgg

SEQ ID NO: 9159 - DNA, 25 bp, Artificial
  probe
  misc_feature (1)..(25): SEQ ID NO: 7762; BIOC5_at; Start 80; Stop 104
agcgccagagtgctgacgccttact

SEQ ID NO: 9160 - DNA, 25 bp, Artificial
  probe
  misc_feature (1)..(25): SEQ ID NO: 7762; BIOC5_at; Start 56; Stop 80
actatgagcaacatgcagatctaca

SEQ ID NO: 9161 - DNA, 25 bp, Artificial
  probe
  misc_feature (1)..(25): SEQ ID NO: 7762; BIOC5_at; Start 190; Stop 214
cacgcgcaggtgacggccttagatc

SEQ ID NO: 9162 - DNA, 25 bp, Artificial
  probe
  misc_feature (1)..(25): SEQ ID NO: 7762; BIOC5_at; Start 35; Stop 59
catttggtcgggcagccgcacacta

SEQ ID NO: 9163 - DNA, 25 bp, Artificial
  probe
  misc_feature (1)..(25): SEQ ID NO: 7762; BIOC5_at; Start 298; Stop 322
gcgactgcgacgttcgatcttgcat

SEQ ID NO: 9164 - DNA, 25 bp, Artificial
  probe
  misc_feature (1)..(25): SEQ ID NO: 7762; BIOC5_at; Start 34; Stop 58
gcatttggtcgggcagccgcacact

SEQ ID NO: 9165 - DNA, 25 bp, Artificial
  probe
  misc_feature (1)..(25): SEQ ID NO: 7762; BIOC5_at; Start 321; Stop 345
atggagcaatctcgcagtgcagtgg

SEQ ID NO: 9166 - DNA, 25 bp, Artificial
  probe
  misc_feature (1)..(25): SEQ ID NO: 7762; BIOC5_at; Start 97; Stop 121
gccttactggcaatgcttccacagc

SEQ ID NO: 9167 - DNA, 25 bp, Artificial
  probe
  misc_feature (1)..(25): SEQ ID NO: 7762; BIOC5_at; Start 10; Stop 34
gttaataaacaagccattgcagcgg

SEQ ID NO: 9168 - DNA, 25 bp, Artificial
  probe
  misc_feature (1)..(25): SEQ ID NO: 7762; BIOC5_at; Start 39; Stop 63
tggtcgggcagccgcacactatgag

SEQ ID NO: 9169 - DNA, 25 bp, Artificial
  probe
  misc_feature (1)..(25): SEQ ID NO: 7762; BIOC5_at; Start 205; Stop 229
gccttagatctctcgccgccaatgc

SEQ ID NO: 9170 - DNA, 25 bp, Artificial
  probe
  misc_feature (1)..(25): SEQ ID NO: 7762; BIOC5_at; Start 106; Stop 130
gcaatgcttccacagcgtaaataca

SEQ ID NO: 9171 - DNA, 25 bp, Artificial
  probe
  misc_feature (1)..(25): SEQ ID NO: 7762; BIOC5_at; Start 101; Stop 125
tactggcaatgcttccacagcgtaa

SEQ ID NO: 9172 - DNA, 25 bp, Artificial
  probe
  misc_feature (1)..(25): SEQ ID NO: 7762; BIOC5_at; Start 94; Stop 118
gacgccttactggcaatgcttccac

SEQ ID NO: 9173 - DNA, 25 bp, Artificial
  probe
  misc_feature (1)..(25): SEQ ID NO: 7762; BIOC5_at; Start 31; Stop 55
gcggcatttggtcgggcagccgcac

SEQ ID NO: 9174 - DNA, 25 bp, Artificial
  probe
  misc_feature (1)..(25): SEQ ID NO: 7762; BIOC5_at; Start 107; Stop 131
caatgcttccacagcgtaaatacac

SEQ ID NO: 9175 - DNA, 25 bp, Artificial
  probe
  misc_feature (1)..(25): SEQ ID NO: 7762; BIOC5_at; Start 155; Stop 179
gacctggctggatgagccgccactg

SEQ ID NO: 9176 - DNA, 25 bp, Artificial
  probe
  misc_feature (1)..(25): SEQ ID NO: 7762; BIOC5_at; Start 199; Stop 223
gtgacggccttagatctctcgccgc

SEQ ID NO: 9177 - DNA, 25 bp, Artificial
  probe
  misc_feature (1)..(25): SEQ ID NO: 7762; BIOC5_at; Start 238; Stop 262
gcacgccagaaggatgccgcagacc

SEQ ID NO: 9178 - DNA, 25 bp, Artificial
  probe
  misc_feature (1)..(25): SEQ ID NO: 7762; BIOC5_at; Start 249; Stop 273
ggatgccgcagaccattatctggcg

SEQ ID NO: 9179 - DNA, 25 bp, Artificial
  probe
  misc_feature (1)..(25): SEQ ID NO: 7762; BIOC5_at; Start 47; Stop 71
cagccgcacactatgagcaacatgc

SEQ ID NO: 9180 - DNA, 25 bp, Artificial
  probe
  misc_feature (1)..(25): SEQ ID NO: 7762; BIOC5_at; Start 209; Stop 233
tagatctctcgccgccaatgcttgt

SEQ ID NO: 9181 - DNA, 25 bp, Artificial
  probe
  misc_feature (1)..(25): SEQ ID NO: 7762; BIOC5_at; Start 57; Stop 81
ctatgagcaacatgcagatctacag

SEQ ID NO: 9182 - DNA, 25 bp, Artificial
  probe
  misc_feature (1)..(25): SEQ ID NO: 7762; BIOC5_at; Start 279; Stop 303
tatcgaatccctgccgttagcgact

SEQ ID NO: 9183 - DNA, 25 bp, Artificial
  probe
  misc_feature (1)..(25): SEQ ID NO: 7762; BIOC5_at; Start 252; Stop 276
tgccgcagaccattatctggcggga

SEQ ID NO: 9184 - DNA, 25 bp, Artificial
  probe
  misc_feature (1)..(25): SEQ ID NO: 7762; BIOC5_at; Start 297; Stop 321
agcgactgcgacgttcgatcttgca

SEQ ID NO: 9185 - DNA, 25 bp, Artificial
  probe
  misc_feature (1)..(25): SEQ ID NO: 7762; BIOC5_at; Start 111; Stop 135
gcttccacagcgtaaatacacccac

SEQ ID NO: 9186 - DNA, 25 bp, Artificial
  probe
  misc_feature (1)..(25): SEQ ID NO: 7763; BIOD3_at; Start 84; Stop 108
taacacaggaacaactgccggtgat

SEQ ID NO: 9187 - DNA, 25 bp, Artificial
  probe
  misc_feature (1)..(25): SEQ ID NO: 7763; BIOD3_at; Start 273; Stop 297
cgccgctgctgggagagatcccctg

SEQ ID NO: 9188 - DNA, 25 bp, Artificial
  probe
  misc_feature (1)..(25): SEQ ID NO: 7763; BIOD3_at; Start 295; Stop 319
ctggcttgcagaaaatccagaaaat

SEQ ID NO: 9189 - DNA, 25 bp, Artificial
  probe
  misc_feature (1)..(25): SEQ ID NO: 7763; BIOD3_at; Start 127; Stop 151
actcggctgtattaatcacgcgatg

SEQ ID NO: 9190 - DNA, 25 bp, Artificial
  probe
  misc_feature (1)..(25): SEQ ID NO: 7763; BIOD3_at; Start 66; Stop 90
tcacttttgcagattgggtaacaca

SEQ ID NO: 9191 - DNA, 25 bp, Artificial
  probe
  misc_feature (1)..(25): SEQ ID NO: 7763; BIOD3_at; Start 39; Stop 63
gctggtttacgccgctttctgacac

SEQ ID NO: 9192 - DNA, 25 bp, Artificial
  probe
  misc_feature (1)..(25): SEQ ID NO: 7763; BIOD3_at; Start 134; Stop 158
tgtattaatcacgcgatgttgactg

SEQ ID NO: 9193 - DNA, 25 bp, Artificial
  probe
  misc_feature (1)..(25): SEQ ID NO: 7763; BIOD3_at; Start 138; Stop 162
ttaatcacgcgatgttgactgcaca

SEQ ID NO: 9194 - DNA, 25 bp, Artificial
  probe
  misc_feature (1)..(25): SEQ ID NO: 7763; BIOD3_at; Start 169; Stop 193
acaacacgccggactgactctggcg

SEQ ID NO: 9195 - DNA, 25 bp, Artificial
  probe
  misc_feature (1)..(25): SEQ ID NO: 7763; BIOD3_at; Start 146; Stop 170
gcgatgttgactgcacaggtaatac

SEQ ID NO: 9196 - DNA, 25 bp, Artificial
  probe
  misc_feature (1)..(25): SEQ ID NO: 7763; BIOD3_at; Start 99; Stop 123
tgccggtgatactggtagttggtgt

SEQ ID NO: 9197 - DNA, 25 bp, Artificial
  probe
  misc_feature (1)..(25): SEQ ID NO: 7763; BIOD3_at; Start 288; Stop 312
agatcccctggcttgcagaaaatcc

SEQ ID NO: 9198 - DNA, 25 bp, Artificial
  probe
  misc_feature (1)..(25): SEQ ID NO: 7763; BIOD3_at; Start 152; Stop 176
ttgactgcacaggtaatacaacacg

SEQ ID NO: 9199 - DNA, 25 bp, Artificial
  probe
  misc_feature (1)..(25): SEQ ID NO: 7763; BIOD3_at; Start 289; Stop 313
gatcccctggcttgcagaaaatcca

SEQ ID NO: 9200 - DNA, 25 bp, Artificial
  probe
  misc_feature (1)..(25): SEQ ID NO: 7763; BIOD3_at; Start 132; Stop 156
gctgtattaatcacgcgatgttgac

SEQ ID NO: 9201 - DNA, 25 bp, Artificial
  probe
  misc_feature (1)..(25): SEQ ID NO: 7763; BIOD3_at; Start 293; Stop 317
ccctggcttgcagaaaatccagaaa

SEQ ID NO: 9202 - DNA, 25 bp, Artificial
  probe
  misc_feature (1)..(25): SEQ ID NO: 7763; BIOD3_at; Start 151; Stop 175
gttgactgcacaggtaatacaacac

SEQ ID NO: 9203 - DNA, 25 bp, Artificial
  probe
  misc_feature (1)..(25): SEQ ID NO: 7763; BIOD3_at; Start 129; Stop 153
tcggctgtattaatcacgcgatgtt

SEQ ID NO: 9204 - DNA, 25 bp, Artificial
  probe
  misc_feature (1)..(25): SEQ ID NO: 7763; BIOD3_at; Start 136; Stop 160
tattaatcacgcgatgttgactgca

SEQ ID NO: 9205 - DNA, 25 bp, Artificial
  probe
  misc_feature (1)..(25): SEQ ID NO: 7763; BIOD3_at; Start 137; Stop 161
attaatcacgcgatgttgactgcac

SEQ ID NO: 9206 - DNA, 25 bp, Artificial
  probe
  misc_feature (1)..(25): SEQ ID NO: 7763; BIOD3_at; Start 121; Stop 145
tgtgaaactcggctgtattaatcac

SEQ ID NO: 9207 - DNA, 25 bp, Artificial
  probe
  misc_feature (1)..(25): SEQ ID NO: 7763; BIOD3_at; Start 3; Stop 27
aacaggctgactgggtgttagtgga

SEQ ID NO: 9208 - DNA, 25 bp, Artificial
  probe
  misc_feature (1)..(25): SEQ ID NO: 7763; BIOD3_at; Start 101; Stop 125
ccggtgatactggtagttggtgtga

SEQ ID NO: 9209 - DNA, 25 bp, Artificial
  probe
  misc_feature (1)..(25): SEQ ID NO: 7763; BIOD3_at; Start 55; Stop 79
ttctgacactttcacttttgcagat

SEQ ID NO: 9210 - DNA, 25 bp, Artificial
  probe
  misc_feature (1)..(25): SEQ ID NO: 7763; BIOD3_at; Start 67; Stop 91
cacttttgcagattgggtaacacag

SEQ ID NO: 9211 - DNA, 25 bp, Artificial
  probe
  misc_feature (1)..(25): SEQ ID NO: 7763; BIOD3_at; Start 83; Stop 107
gtaacacaggaacaactgccggtga

SEQ ID NO: 9212 - DNA, 25 bp, Artificial
  probe
  misc_feature (1)..(25): SEQ ID NO: 7763; BIOD3_at; Start 116; Stop 140
gttggtgtgaaactcggctgtatta

SEQ ID NO: 9213 - DNA, 25 bp, Artificial
  probe
  misc_feature (1)..(25): SEQ ID NO: 7763; BIOD3_at; Start 106; Stop 130
gatactggtagttggtgtgaaactc

SEQ ID NO: 9214 - DNA, 25 bp, Artificial
  probe
  misc_feature (1)..(25): SEQ ID NO: 7763; BIOD3_at; Start 54; Stop 78
tttctgacactttcacttttgcaga

SEQ ID NO: 9215 - DNA, 25 bp, Artificial
  probe
  misc_feature (1)..(25): SEQ ID NO: 7763; BIOD3_at; Start 139; Stop 163
taatcacgcgatgttgactgcacag

SEQ ID NO: 9216 - DNA, 25 bp, Artificial
  probe
  misc_feature (1)..(25): SEQ ID NO: 7763; BIOD3_at; Start 57; Stop 81
ctgacactttcacttttgcagattg

SEQ ID NO: 9217 - DNA, 25 bp, Artificial
  probe
  misc_feature (1)..(25): SEQ ID NO: 7763; BIOD3_at; Start 284; Stop 308
ggagagatcccctggcttgcagaaa

SEQ ID NO: 9218 - DNA, 25 bp, Artificial
  probe
  misc_feature (1)..(25): SEQ ID NO: 7763; BIOD3_at; Start 140; Stop 164
aatcacgcgatgttgactgcacagg

SEQ ID NO: 9219 - DNA, 25 bp, Artificial
  probe
  misc_feature (1)..(25): SEQ ID NO: 7763; BIOD3_at; Start 59; Stop 83
gacactttcacttttgcagattggg

SEQ ID NO: 9220 - DNA, 25 bp, Artificial
  probe
  misc_feature (1)..(25): SEQ ID NO: 7763; BIOD3_at; Start 291; Stop 315
tcccctggcttgcagaaaatccaga

SEQ ID NO: 9221 - DNA, 25 bp, Artificial
  probe
  misc_feature (1)..(25): SEQ ID NO: 7763; BIOD3_at; Start 161; Stop 185
caggtaatacaacacgccggactga

SEQ ID NO: 9222 - DNA, 25 bp, Artificial
  probe
  misc_feature (1)..(25): SEQ ID NO: 7763; BIOD3_at; Start 282; Stop 306
tgggagagatcccctggcttgcaga

SEQ ID NO: 9223 - DNA, 25 bp, Artificial
  probe
  misc_feature (1)..(25): SEQ ID NO: 7763; BIOD3_at; Start 71; Stop 95
tttgcagattgggtaacacaggaac

SEQ ID NO: 9224 - DNA, 25 bp, Artificial
  probe
  misc_feature (1)..(25): SEQ ID NO: 7763; BIOD3_at; Start 131; Stop 155
ggctgtattaatcacgcgatgttga

SEQ ID NO: 9225 - DNA, 25 bp, Artificial
  probe
  misc_feature (1)..(25): SEQ ID NO: 7763; BIOD3_at; Start 272; Stop 296
gcgccgctgctgggagagatcccct

SEQ ID NO: 9226 - DNA, 25 bp, Artificial
  probe
  misc_feature (1)..(25): SEQ ID NO: 7763; BIOD3_at; Start 274; Stop 298
gccgctgctgggagagatcccctgg

SEQ ID NO: 9227 - DNA, 25 bp, Artificial
  probe
  misc_feature (1)..(25): SEQ ID NO: 7763; BIOD3_at; Start 230; Stop 254
cgtcacgctgaatatatgaccacgc

SEQ ID NO: 9228 - DNA, 25 bp, Artificial
  probe
  misc_feature (1)..(25): SEQ ID NO: 7763; BIOD3_at; Start 123; Stop 147
tgaaactcggctgtattaatcacgc

SEQ ID NO: 9229 - DNA, 25 bp, Artificial
  probe
  misc_feature (1)..(25): SEQ ID NO: 7763; BIOD3_at; Start 276; Stop 300
cgctgctgggagagatcccctggct

SEQ ID NO: 9230 - DNA, 25 bp, Artificial
  probe
  misc_feature (1)..(25): SEQ ID NO: 7763; BIOD3_at; Start 86; Stop 110
acacaggaacaactgccggtgatac

SEQ ID NO: 9231 - DNA, 25 bp, Artificial
  probe
  misc_feature (1)..(25): SEQ ID NO: 7763; BIOD3_at; Start 294; Stop 318
cctggcttgcagaaaatccagaaaa

SEQ ID NO: 9232 - DNA, 25 bp, Artificial
  probe
  misc_feature (1)..(25): SEQ ID NO: 7763; BIOD3_at; Start 31; Stop 55
tgctggcggctggtttacgccgctt

SEQ ID NO: 9233 - DNA, 25 bp, Artificial
  probe
  misc_feature (1)..(25): SEQ ID NO: 7763; BIOD3_at; Start 119; Stop 143
ggtgtgaaactcggctgtattaatc

SEQ ID NO: 9234 - DNA, 25 bp, Artificial
  probe
  misc_feature (1)..(25): SEQ ID NO: 7763; BIOD3_at; Start 145; Stop 169
cgcgatgttgactgcacaggtaata

SEQ ID NO: 9235 - DNA, 25 bp, Artificial
  probe
  misc_feature (1)..(25): SEQ ID NO: 7763; BIOD3_at; Start 52; Stop 76
gctttctgacactttcacttttgca

SEQ ID NO: 9236 - DNA, 25 bp, Artificial
  probe
  misc_feature (1)..(25): SEQ ID NO: 7763; BIOD3_at; Start 128; Stop 152
ctcggctgtattaatcacgcgatgt

SEQ ID NO: 9237 - DNA, 25 bp, Artificial
  probe
  misc_feature (1)..(25): SEQ ID NO: 7763; BIOD3_at; Start 275; Stop 299
ccgctgctgggagagatcccctggc

SEQ ID NO: 9238 - DNA, 25 bp, Artificial
  probe
  misc_feature (1)..(25): SEQ ID NO: 7763; BIOD3_at; Start 1; Stop 25
acaacaggctgactgggtgttagtg

SEQ ID NO: 9239 - DNA, 25 bp, Artificial
  probe
  misc_feature (1)..(25): SEQ ID NO: 7763; BIOD3_at; Start 141; Stop 165
atcacgcgatgttgactgcacaggt

SEQ ID NO: 9240 - DNA, 25 bp, Artificial
  probe
  misc_feature (1)..(25): SEQ ID NO: 7763; BIOD3_at; Start 46; Stop 70
tacgccgctttctgacactttcact

SEQ ID NO: 9241 - DNA, 25 bp, Artificial
  probe
  misc_feature (1)..(25): SEQ ID NO: 7763; BIOD3_at; Start 223; Stop 247
gggaaaacgtcacgctgaatatatg

SEQ ID NO: 9242 - DNA, 25 bp, Artificial
  probe
  misc_feature (1)..(25): SEQ ID NO: 7763; BIOD3_at; Start 279; Stop 303
tgctgggagagatcccctggcttgc

SEQ ID NO: 9243 - DNA, 25 bp, Artificial
  probe
  misc_feature (1)..(25): SEQ ID NO: 7763; BIOD3_at; Start 126; Stop 150
aactcggctgtattaatcacgcgat

SEQ ID NO: 9244 - DNA, 25 bp, Artificial
  probe
  misc_feature (1)..(25): SEQ ID NO: 7763; BIOD3_at; Start 125; Stop 149
aaactcggctgtattaatcacgcga

SEQ ID NO: 9245 - DNA, 25 bp, Artificial
  probe
  misc_feature (1)..(25): SEQ ID NO: 7763; BIOD3_at; Start 164; Stop 188
gtaatacaacacgccggactgactc

SEQ ID NO: 9246 - DNA, 25 bp, Artificial
  probe
  misc_feature (1)..(25): SEQ ID NO: 7763; BIOD3_at; Start 122; Stop 146
gtgaaactcggctgtattaatcacg

SEQ ID NO: 9247 - DNA, 25 bp, Artificial
  probe
  misc_feature (1)..(25): SEQ ID NO: 7763; BIOD3_at; Start 64; Stop 88
tttcacttttgcagattgggtaaca

SEQ ID NO: 9248 - DNA, 25 bp, Artificial
  probe
  misc_feature (1)..(25): SEQ ID NO: 7763; BIOD3_at; Start 2; Stop 26
caacaggctgactgggtgttagtgg

SEQ ID NO: 9249 - DNA, 25 bp, Artificial
  probe
  misc_feature (1)..(25): SEQ ID NO: 7763; BIOD3_at; Start 236; Stop 260
gctgaatatatgaccacgctcaccc

SEQ ID NO: 9250 - DNA, 25 bp, Artificial
  probe
  misc_feature (1)..(25): SEQ ID NO: 7763; BIOD3_at; Start 149; Stop 173
atgttgactgcacaggtaatacaac

SEQ ID NO: 9251 - DNA, 25 bp, Artificial
  probe
  misc_feature (1)..(25): SEQ ID NO: 7763; BIOD3_at; Start 237; Stop 261
ctgaatatatgaccacgctcacccg

SEQ ID NO: 9252 - DNA, 25 bp, Artificial
  probe
  misc_feature (1)..(25): SEQ ID NO: 7763; BIOD3_at; Start 144; Stop 168
acgcgatgttgactgcacaggtaat

SEQ ID NO: 9253 - DNA, 25 bp, Artificial
  probe
  misc_feature (1)..(25): SEQ ID NO: 7763; BIOD3_at; Start 290; Stop 314
atcccctggcttgcagaaaatccag

SEQ ID NO: 9254 - DNA, 25 bp, Artificial
  probe
  misc_feature (1)..(25): SEQ ID NO: 7763; BIOD3_at; Start 130; Stop 154
cggctgtattaatcacgcgatgttg

SEQ ID NO: 9255 - DNA, 25 bp, Artificial
  probe
  misc_feature (1)..(25): SEQ ID NO: 7763; BIOD3_at; Start 58; Stop 82
tgacactttcacttttgcagattgg

SEQ ID NO: 9256 - DNA, 25 bp, Artificial
  probe
  misc_feature (1)..(25): SEQ ID NO: 7763; BIOD3_at; Start 118; Stop 142
tggtgtgaaactcggctgtattaat

SEQ ID NO: 9257 - DNA, 25 bp, Artificial
  probe
  misc_feature (1)..(25): SEQ ID NO: 7763; BIOD3_at; Start 224; Stop 248
ggaaaacgtcacgctgaatatatga

SEQ ID NO: 9258 - DNA, 25 bp, Artificial
  probe
  misc_feature (1)..(25): SEQ ID NO: 7763; BIOD3_at; Start 227; Stop 251
aaacgtcacgctgaatatatgacca

SEQ ID NO: 9259 - DNA, 25 bp, Artificial
  probe
  misc_feature (1)..(25): SEQ ID NO: 7763; BIOD3_at; Start 65; Stop 89
ttcacttttgcagattgggtaacac

SEQ ID NO: 9260 - DNA, 25 bp, Artificial
  probe
  misc_feature (1)..(25): SEQ ID NO: 7763; BIOD3_at; Start 239; Stop 263
gaatatatgaccacgctcacccgca

SEQ ID NO: 9261 - DNA, 25 bp, Artificial
  probe
  misc_feature (1)..(25): SEQ ID NO: 7763; BIOD3_at; Start 240; Stop 264
aatatatgaccacgctcacccgcat

SEQ ID NO: 9262 - DNA, 25 bp, Artificial
  probe
  misc_feature (1)..(25): SEQ ID NO: 7763; BIOD3_at; Start 87; Stop 111
cacaggaacaactgccggtgatact

SEQ ID NO: 9263 - DNA, 25 bp, Artificial
  probe
  misc_feature (1)..(25): SEQ ID NO: 7763; BIOD3_at; Start 241; Stop 265
atatatgaccacgctcacccgcatg

SEQ ID NO: 9264 - DNA, 25 bp, Artificial
  probe
  misc_feature (1)..(25): SEQ ID NO: 7763; BIOD3_at; Start 98; Stop 122
ctgccggtgatactggtagttggtg

SEQ ID NO: 9265 - DNA, 25 bp, Artificial
  probe
  misc_feature (1)..(25): SEQ ID NO: 7763; BIOD3_at; Start 287; Stop 311
gagatcccctggcttgcagaaaatc

SEQ ID NO: 9266 - DNA, 25 bp, Artificial
  probe
  misc_feature (1)..(25): SEQ ID NO: 7763; BIOD3_at; Start 270; Stop 294
ccgcgccgctgctgggagagatccc

SEQ ID NO: 9267 - DNA, 25 bp, Artificial
  probe
  misc_feature (1)..(25): SEQ ID NO: 7763; BIOD3_at; Start 53; Stop 77
ctttctgacactttcacttttgcag

SEQ ID NO: 9268 - DNA, 25 bp, Artificial
  probe
  misc_feature (1)..(25): SEQ ID NO: 7763; BIOD3_at; Start 105; Stop 129
tgatactggtagttggtgtgaaact

SEQ ID NO: 9269 - DNA, 25 bp, Artificial
  probe
  misc_feature (1)..(25): SEQ ID NO: 7763; BIOD3_at; Start 38; Stop 62
ggctggtttacgccgctttctgaca

SEQ ID NO: 9270 - DNA, 25 bp, Artificial
  probe
  misc_feature (1)..(25): SEQ ID NO: 7763; BIOD3_at; Start 56; Stop 80
tctgacactttcacttttgcagatt

SEQ ID NO: 9271 - DNA, 25 bp, Artificial
  probe
  misc_feature (1)..(25): SEQ ID NO: 7763; BIOD3_at; Start 170; Stop 194
caacacgccggactgactctggcgg

SEQ ID NO: 9272 - DNA, 25 bp, Artificial
  probe
  misc_feature (1)..(25): SEQ ID NO: 7763; BIOD3_at; Start 92; Stop 116
gaacaactgccggtgatactggtag

SEQ ID NO: 9273 - DNA, 25 bp, Artificial
  probe
  misc_feature (1)..(25): SEQ ID NO: 7763; BIOD3_at; Start 117; Stop 141
ttggtgtgaaactcggctgtattaa

SEQ ID NO: 9274 - DNA, 25 bp, Artificial
  probe
  misc_feature (1)..(25): SEQ ID NO: 7763; BIOD3_at; Start 242; Stop 266
tatatgaccacgctcacccgcatga

SEQ ID NO: 9275 - DNA, 25 bp, Artificial
  probe
  misc_feature (1)..(25): SEQ ID NO: 7763; BIOD3_at; Start 148; Stop 172
gatgttgactgcacaggtaatacaa

SEQ ID NO: 9276 - DNA, 25 bp, Artificial
  probe
  misc_feature (1)..(25): SEQ ID NO: 7763; BIOD3_at; Start 104; Stop 128
gtgatactggtagttggtgtgaaac

SEQ ID NO: 9277 - DNA, 25 bp, Artificial
  probe
  misc_feature (1)..(25): SEQ ID NO: 7763; BIOD3_at; Start 89; Stop 113
caggaacaactgccggtgatactgg

SEQ ID NO: 9278 - DNA, 25 bp, Artificial
  probe
  misc_feature (1)..(25): SEQ ID NO: 7763; BIOD3_at; Start 296; Stop 320
tggcttgcagaaaatccagaaaatg

SEQ ID NO: 9279 - DNA, 25 bp, Artificial
  probe
  misc_feature (1)..(25): SEQ ID NO: 7763; BIOD3_at; Start 167; Stop 191
atacaacacgccggactgactctgg

SEQ ID NO: 9280 - DNA, 25 bp, Artificial
  probe
  misc_feature (1)..(25): SEQ ID NO: 7763; BIOD3_at; Start 30; Stop 54
gtgctggcggctggtttacgccgct

SEQ ID NO: 9281 - DNA, 25 bp, Artificial
  probe
  misc_feature (1)..(25): SEQ ID NO: 7763; BIOD3_at; Start 91; Stop 115
ggaacaactgccggtgatactggta

SEQ ID NO: 9282 - DNA, 25 bp, Artificial
  probe
  misc_feature (1)..(25): SEQ ID NO: 7763; BIOD3_at; Start 135; Stop 159
gtattaatcacgcgatgttgactgc

SEQ ID NO: 9283 - DNA, 25 bp, Artificial
  probe
  misc_feature (1)..(25): SEQ ID NO: 7763; BIOD3_at; Start 285; Stop 309
gagagatcccctggcttgcagaaaa

SEQ ID NO: 9284 - DNA, 25 bp, Artificial
  probe
  misc_feature (1)..(25): SEQ ID NO: 7763; BIOD3_at; Start 44; Stop 68
tttacgccgctttctgacactttca

SEQ ID NO: 9285 - DNA, 25 bp, Artificial
  probe
  misc_feature (1)..(25): SEQ ID NO: 7763; BIOD3_at; Start 85; Stop 109
aacacaggaacaactgccggtgata

SEQ ID NO: 9286 - DNA, 25 bp, Artificial
  probe
  misc_feature (1)..(25): SEQ ID NO: 7763; BIOD3_at; Start 157; Stop 181
tgcacaggtaatacaacacgccgga

SEQ ID NO: 9287 - DNA, 25 bp, Artificial
  probe
  misc_feature (1)..(25): SEQ ID NO: 7763; BIOD3_at; Start 168; Stop 192
tacaacacgccggactgactctggc

SEQ ID NO: 9288 - DNA, 25 bp, Artificial
  probe
  misc_feature (1)..(25): SEQ ID NO: 7763; BIOD3_at; Start 143; Stop 167
cacgcgatgttgactgcacaggtaa

SEQ ID NO: 9289 - DNA, 25 bp, Artificial
  probe
  misc_feature (1)..(25): SEQ ID NO: 7763; BIOD3_at; Start 278; Stop 302
ctgctgggagagatcccctggcttg

SEQ ID NO: 9290 - DNA, 25 bp, Artificial
  probe
  misc_feature (1)..(25): SEQ ID NO: 7763; BIOD3_at; Start 229; Stop 253
acgtcacgctgaatatatgaccacg

SEQ ID NO: 9291 - DNA, 25 bp, Artificial
  probe
  misc_feature (1)..(25): SEQ ID NO: 7763; BIOD3_at; Start 286; Stop 310
agagatcccctggcttgcagaaaat

SEQ ID NO: 9292 - DNA, 25 bp, Artificial
  probe
  misc_feature (1)..(25): SEQ ID NO: 7763; BIOD3_at; Start 155; Stop 179
actgcacaggtaatacaacacgccg

SEQ ID NO: 9293 - DNA, 25 bp, Artificial
  probe
  misc_feature (1)..(25): SEQ ID NO: 7763; BIOD3_at; Start 120; Stop 144
gtgtgaaactcggctgtattaatca

SEQ ID NO: 9294 - DNA, 25 bp, Artificial
  probe
  misc_feature (1)..(25): SEQ ID NO: 7763; BIOD3_at; Start 45; Stop 69
ttacgccgctttctgacactttcac

SEQ ID NO: 9295 - DNA, 25 bp, Artificial
  probe
  misc_feature (1)..(25): SEQ ID NO: 7763; BIOD3_at; Start 165; Stop 189
taatacaacacgccggactgactct

SEQ ID NO: 9296 - DNA, 25 bp, Artificial
  probe
  misc_feature (1)..(25): SEQ ID NO: 7764; BIOD5_at; Start 100; Stop 124
taaaccggtcgcctctggcagcgaa

SEQ ID NO: 9297 - DNA, 25 bp, Artificial
  probe
  misc_feature (1)..(25): SEQ ID NO: 7764; BIOD5_at; Start 250; Stop 274
cgcgcaagagggcagaccgatagaa

SEQ ID NO: 9298 - DNA, 25 bp, Artificial
  probe
  misc_feature (1)..(25): SEQ ID NO: 7764; BIOD5_at; Start 144; Stop 168
gcaatagcgacgcgctggcgttaca

SEQ ID NO: 9299 - DNA, 25 bp, Artificial
  probe
  misc_feature (1)..(25): SEQ ID NO: 7764; BIOD5_at; Start 234; Stop 258
cgccgcacatcatcagcgcgcaaga

SEQ ID NO: 9300 - DNA, 25 bp, Artificial
  probe
  misc_feature (1)..(25): SEQ ID NO: 7764; BIOD5_at; Start 54; Stop 78
cacttttacaagccgcaaaggcagc

SEQ ID NO: 9301 - DNA, 25 bp, Artificial
  probe
  misc_feature (1)..(25): SEQ ID NO: 7764; BIOD5_at; Start 37; Stop 61
aactgtcgccagttgtgcactttta

SEQ ID NO: 9302 - DNA, 25 bp, Artificial
  probe
  misc_feature (1)..(25): SEQ ID NO: 7764; BIOD5_at; Start 63; Stop 87
aagccgcaaaggcagcaggctaccg

SEQ ID NO: 9303 - DNA, 25 bp, Artificial
  probe
  misc_feature (1)..(25): SEQ ID NO: 7764; BIOD5_at; Start 166; Stop 190
acagcgcaacagcagcctgcagctg

SEQ ID NO: 9304 - DNA, 25 bp, Artificial
  probe
  misc_feature (1)..(25): SEQ ID NO: 7764; BIOD5_at; Start 154; Stop 178
cgcgctggcgttacagcgcaacagc

SEQ ID NO: 9305 - DNA, 25 bp, Artificial
  probe
  misc_feature (1)..(25): SEQ ID NO: 7764; BIOD5_at; Start 175; Stop 199
cagcagcctgcagctggattacgca

SEQ ID NO: 9306 - DNA, 25 bp, Artificial
  probe
  misc_feature (1)..(25): SEQ ID NO: 7764; BIOD5_at; Start 74; Stop 98
gcagcaggctaccggacggcaggtt

SEQ ID NO: 9307 - DNA, 25 bp, Artificial
  probe
  misc_feature (1)..(25): SEQ ID NO: 7764; BIOD5_at; Start 150; Stop 174
gcgacgcgctggcgttacagcgcaa

SEQ ID NO: 9308 - DNA, 25 bp, Artificial
  probe
  misc_feature (1)..(25): SEQ ID NO: 7764; BIOD5_at; Start 107; Stop 131
gtcgcctctggcagcgaaaagaccc

SEQ ID NO: 9309 - DNA, 25 bp, Artificial
  probe
  misc_feature (1)..(25): SEQ ID NO: 7764; BIOD5_at; Start 40; Stop 64
tgtcgccagttgtgcacttttacaa

SEQ ID NO: 9310 - DNA, 25 bp, Artificial
  probe
  misc_feature (1)..(25): SEQ ID NO: 7764; BIOD5_at; Start 235; Stop 259
gccgcacatcatcagcgcgcaagag

SEQ ID NO: 9311 - DNA, 25 bp, Artificial
  probe
  misc_feature (1)..(25): SEQ ID NO: 7764; BIOD5_at; Start 181; Stop 205
cctgcagctggattacgcaacagta

SEQ ID NO: 9312 - DNA, 25 bp, Artificial
  probe
  misc_feature (1)..(25): SEQ ID NO: 7764; BIOD5_at; Start 236; Stop 260
ccgcacatcatcagcgcgcaagagg

SEQ ID NO: 9313 - DNA, 25 bp, Artificial
  probe
  misc_feature (1)..(25): SEQ ID NO: 7764; BIOD5_at; Start 164; Stop 188
ttacagcgcaacagcagcctgcagc

SEQ ID NO: 9314 - DNA, 25 bp, Artificial
  probe
  misc_feature (1)..(25): SEQ ID NO: 7764; BIOD5_at; Start 232; Stop 256
ttcgccgcacatcatcagcgcgcaa

SEQ ID NO: 9315 - DNA, 25 bp, Artificial
  probe
  misc_feature (1)..(25): SEQ ID NO: 7764; BIOD5_at; Start 53; Stop 77
gcacttttacaagccgcaaaggcag

SEQ ID NO: 9316 - DNA, 25 bp, Artificial
  probe
  misc_feature (1)..(25): SEQ ID NO: 7764; BIOD5_at; Start 244; Stop 268
catcagcgcgcaagagggcagaccg

SEQ ID NO: 9317 - DNA, 25 bp, Artificial
  probe
  misc_feature (1)..(25): SEQ ID NO: 7764; BIOD5_at; Start 138; Stop 162
gtttacgcaatagcgacgcgctggc

SEQ ID NO: 9318 - DNA, 25 bp, Artificial
  probe
  misc_feature (1)..(25): SEQ ID NO: 7764; BIOD5_at; Start 137; Stop 161
ggtttacgcaatagcgacgcgctgg

SEQ ID NO: 9319 - DNA, 25 bp, Artificial
  probe
  misc_feature (1)..(25): SEQ ID NO: 7764; BIOD5_at; Start 136; Stop 160
aggtttacgcaatagcgacgcgctg

SEQ ID NO: 9320 - DNA, 25 bp, Artificial
  probe
  misc_feature (1)..(25): SEQ ID NO: 7764; BIOD5_at; Start 108; Stop 132
tcgcctctggcagcgaaaagacccc

SEQ ID NO: 9321 - DNA, 25 bp, Artificial
  probe
  misc_feature (1)..(25): SEQ ID NO: 7764; BIOD5_at; Start 141; Stop 165
tacgcaatagcgacgcgctggcgtt

SEQ ID NO: 9322 - DNA, 25 bp, Artificial
  probe
  misc_feature (1)..(25): SEQ ID NO: 7764; BIOD5_at; Start 140; Stop 164
ttacgcaatagcgacgcgctggcgt

SEQ ID NO: 9323 - DNA, 25 bp, Artificial
  probe
  misc_feature (1)..(25): SEQ ID NO: 7764; BIOD5_at; Start 158; Stop 182
ctggcgttacagcgcaacagcagcc

SEQ ID NO: 9324 - DNA, 25 bp, Artificial
  probe
  misc_feature (1)..(25): SEQ ID NO: 7764; BIOD5_at; Start 151; Stop 175
cgacgcgctggcgttacagcgcaac

SEQ ID NO: 9325 - DNA, 25 bp, Artificial
  probe
  misc_feature (1)..(25): SEQ ID NO: 7764; BIOD5_at; Start 41; Stop 65
gtcgccagttgtgcacttttacaag

SEQ ID NO: 9326 - DNA, 25 bp, Artificial
  probe
  misc_feature (1)..(25): SEQ ID NO: 7764; BIOD5_at; Start 146; Stop 170
aatagcgacgcgctggcgttacagc

SEQ ID NO: 9327 - DNA, 25 bp, Artificial
  probe
  misc_feature (1)..(25): SEQ ID NO: 7764; BIOD5_at; Start 242; Stop 266
atcatcagcgcgcaagagggcagac

SEQ ID NO: 9328 - DNA, 25 bp, Artificial
  probe
  misc_feature (1)..(25): SEQ ID NO: 7764; BIOD5_at; Start 45; Stop 69
ccagttgtgcacttttacaagccgc

SEQ ID NO: 9329 - DNA, 25 bp, Artificial
  probe
  misc_feature (1)..(25): SEQ ID NO: 7764; BIOD5_at; Start 57; Stop 81
ttttacaagccgcaaaggcagcagg

SEQ ID NO: 9330 - DNA, 25 bp, Artificial
  probe
  misc_feature (1)..(25): SEQ ID NO: 7764; BIOD5_at; Start 155; Stop 179
gcgctggcgttacagcgcaacagca

SEQ ID NO: 9331 - DNA, 25 bp, Artificial
  probe
  misc_feature (1)..(25): SEQ ID NO: 7764; BIOD5_at; Start 46; Stop 70
cagttgtgcacttttacaagccgca

SEQ ID NO: 9332 - DNA, 25 bp, Artificial
  probe
  misc_feature (1)..(25): SEQ ID NO: 7764; BIOD5_at; Start 50; Stop 74
tgtgcacttttacaagccgcaaagg

SEQ ID NO: 9333 - DNA, 25 bp, Artificial
  probe
  misc_feature (1)..(25): SEQ ID NO: 7764; BIOD5_at; Start 65; Stop 89
gccgcaaaggcagcaggctaccgga

SEQ ID NO: 9334 - DNA, 25 bp, Artificial
  probe
  misc_feature (1)..(25): SEQ ID NO: 7764; BIOD5_at; Start 97; Stop 121
ttataaaccggtcgcctctggcagc

SEQ ID NO: 9335 - DNA, 25 bp, Artificial
  probe
  misc_feature (1)..(25): SEQ ID NO: 7764; BIOD5_at; Start 66; Stop 90
ccgcaaaggcagcaggctaccggac

SEQ ID NO: 9336 - DNA, 25 bp, Artificial
  probe
  misc_feature (1)..(25): SEQ ID NO: 7764; BIOD5_at; Start 38; Stop 62
actgtcgccagttgtgcacttttac

SEQ ID NO: 9337 - DNA, 25 bp, Artificial
  probe
  misc_feature (1)..(25): SEQ ID NO: 7764; BIOD5_at; Start 171; Stop 195
gcaacagcagcctgcagctggatta

SEQ ID NO: 9338 - DNA, 25 bp, Artificial
  probe
  misc_feature (1)..(25): SEQ ID NO: 7764; BIOD5_at; Start 172; Stop 196
caacagcagcctgcagctggattac

SEQ ID NO: 9339 - DNA, 25 bp, Artificial
  probe
  misc_feature (1)..(25): SEQ ID NO: 7764; BIOD5_at; Start 168; Stop 192
agcgcaacagcagcctgcagctgga

SEQ ID NO: 9340 - DNA, 25 bp, Artificial
  probe
  misc_feature (1)..(25): SEQ ID NO: 7764; BIOD5_at; Start 167; Stop 191
cagcgcaacagcagcctgcagctgg

SEQ ID NO: 9341 - DNA, 25 bp, Artificial
  probe
  misc_feature (1)..(25): SEQ ID NO: 7764; BIOD5_at; Start 105; Stop 129
cggtcgcctctggcagcgaaaagac

SEQ ID NO: 9342 - DNA, 25 bp, Artificial
  probe
  misc_feature (1)..(25): SEQ ID NO: 7764; BIOD5_at; Start 173; Stop 197
aacagcagcctgcagctggattacg

SEQ ID NO: 9343 - DNA, 25 bp, Artificial
  probe
  misc_feature (1)..(25): SEQ ID NO: 7764; BIOD5_at; Start 44; Stop 68
gccagttgtgcacttttacaagccg

SEQ ID NO: 9344 - DNA, 25 bp, Artificial
  probe
  misc_feature (1)..(25): SEQ ID NO: 7764; BIOD5_at; Start 49; Stop 73
ttgtgcacttttacaagccgcaaag

SEQ ID NO: 9345 - DNA, 25 bp, Artificial
  probe
  misc_feature (1)..(25): SEQ ID NO: 7764; BIOD5_at; Start 237; Stop 261
cgcacatcatcagcgcgcaagaggg

SEQ ID NO: 9346 - DNA, 25 bp, Artificial
  probe
  misc_feature (1)..(25): SEQ ID NO: 7764; BIOD5_at; Start 162; Stop 186
cgttacagcgcaacagcagcctgca

SEQ ID NO: 9347 - DNA, 25 bp, Artificial
  probe
  misc_feature (1)..(25): SEQ ID NO: 7764; BIOD5_at; Start 39; Stop 63
ctgtcgccagttgtgcacttttaca

SEQ ID NO: 9348 - DNA, 25 bp, Artificial
  probe
  misc_feature (1)..(25): SEQ ID NO: 7764; BIOD5_at; Start 169; Stop 193
gcgcaacagcagcctgcagctggat

SEQ ID NO: 9349 - DNA, 25 bp, Artificial
  probe
  misc_feature (1)..(25): SEQ ID NO: 7764; BIOD5_at; Start 161; Stop 185
gcgttacagcgcaacagcagcctgc

SEQ ID NO: 9350 - DNA, 25 bp, Artificial
  probe
  misc_feature (1)..(25): SEQ ID NO: 7764; BIOD5_at; Start 139; Stop 163
tttacgcaatagcgacgcgctggcg

SEQ ID NO: 9351 - DNA, 25 bp, Artificial
  probe
  misc_feature (1)..(25): SEQ ID NO: 7764; BIOD5_at; Start 148; Stop 172
tagcgacgcgctggcgttacagcgc

SEQ ID NO: 9352 - DNA, 25 bp, Artificial
  probe
  misc_feature (1)..(25): SEQ ID NO: 7764; BIOD5_at; Start 245; Stop 269
atcagcgcgcaagagggcagaccga

SEQ ID NO: 9353 - DNA, 25 bp, Artificial
  probe
  misc_feature (1)..(25): SEQ ID NO: 7764; BIOD5_at; Start 176; Stop 200
agcagcctgcagctggattacgcaa

SEQ ID NO: 9354 - DNA, 25 bp, Artificial
  probe
  misc_feature (1)..(25): SEQ ID NO: 7764; BIOD5_at; Start 185; Stop 209
cagctggattacgcaacagtaaatc

SEQ ID NO: 9355 - DNA, 25 bp, Artificial
  probe
  misc_feature (1)..(25): SEQ ID NO: 7764; BIOD5_at; Start 142; Stop 166
acgcaatagcgacgcgctggcgtta

SEQ ID NO: 9356 - DNA, 25 bp, Artificial
  probe
  misc_feature (1)..(25): SEQ ID NO: 7764; BIOD5_at; Start 179; Stop 203
agcctgcagctggattacgcaacag

SEQ ID NO: 9357 - DNA, 25 bp, Artificial
  probe
  misc_feature (1)..(25): SEQ ID NO: 7764; BIOD5_at; Start 75; Stop 99
cagcaggctaccggacggcaggtta

SEQ ID NO: 9358 - DNA, 25 bp, Artificial
  probe
  misc_feature (1)..(25): SEQ ID NO: 7764; BIOD5_at; Start 201; Stop 225
cagtaaatccttacaccttcgcaga

SEQ ID NO: 9359 - DNA, 25 bp, Artificial
  probe
  misc_feature (1)..(25): SEQ ID NO: 7764; BIOD5_at; Start 77; Stop 101
gcaggctaccggacggcaggttata

SEQ ID NO: 9360 - DNA, 25 bp, Artificial
  probe
  misc_feature (1)..(25): SEQ ID NO: 7764; BIOD5_at; Start 70; Stop 94
aaaggcagcaggctaccggacggca

SEQ ID NO: 9361 - DNA, 25 bp, Artificial
  probe
  misc_feature (1)..(25): SEQ ID NO: 7764; BIOD5_at; Start 187; Stop 211
gctggattacgcaacagtaaatcct

SEQ ID NO: 9362 - DNA, 25 bp, Artificial
  probe
  misc_feature (1)..(25): SEQ ID NO: 7764; BIOD5_at; Start 145; Stop 169
caatagcgacgcgctggcgttacag

SEQ ID NO: 9363 - DNA, 25 bp, Artificial
  probe
  misc_feature (1)..(25): SEQ ID NO: 7764; BIOD5_at; Start 61; Stop 85
acaagccgcaaaggcagcaggctac

SEQ ID NO: 9364 - DNA, 25 bp, Artificial
  probe
  misc_feature (1)..(25): SEQ ID NO: 7764; BIOD5_at; Start 240; Stop 264
acatcatcagcgcgcaagagggcag

SEQ ID NO: 9365 - DNA, 25 bp, Artificial
  probe
  misc_feature (1)..(25): SEQ ID NO: 7764; BIOD5_at; Start 51; Stop 75
gtgcacttttacaagccgcaaaggc

SEQ ID NO: 9366 - DNA, 25 bp, Artificial
  probe
  misc_feature (1)..(25): SEQ ID NO: 7764; BIOD5_at; Start 106; Stop 130
ggtcgcctctggcagcgaaaagacc

SEQ ID NO: 9367 - DNA, 25 bp, Artificial
  probe
  misc_feature (1)..(25): SEQ ID NO: 7764; BIOD5_at; Start 191; Stop 215
gattacgcaacagtaaatccttaca

SEQ ID NO: 9368 - DNA, 25 bp, Artificial
  probe
  misc_feature (1)..(25): SEQ ID NO: 7764; BIOD5_at; Start 52; Stop 76
tgcacttttacaagccgcaaaggca

SEQ ID NO: 9369 - DNA, 25 bp, Artificial
  probe
  misc_feature (1)..(25): SEQ ID NO: 7764; BIOD5_at; Start 33; Stop 57
ggaaaactgtcgccagttgtgcact

SEQ ID NO: 9370 - DNA, 25 bp, Artificial
  probe
  misc_feature (1)..(25): SEQ ID NO: 7764; BIOD5_at; Start 32; Stop 56
gggaaaactgtcgccagttgtgcac

SEQ ID NO: 9371 - DNA, 25 bp, Artificial
  probe
  misc_feature (1)..(25): SEQ ID NO: 7764; BIOD5_at; Start 98; Stop 122
tataaaccggtcgcctctggcagcg

SEQ ID NO: 9372 - DNA, 25 bp, Artificial
  probe
  misc_feature (1)..(25): SEQ ID NO: 7764; BIOD5_at; Start 152; Stop 176
gacgcgctggcgttacagcgcaaca

SEQ ID NO: 9373 - DNA, 25 bp, Artificial
  probe
  misc_feature (1)..(25): SEQ ID NO: 7764; BIOD5_at; Start 160; Stop 184
ggcgttacagcgcaacagcagcctg

SEQ ID NO: 9374 - DNA, 25 bp, Artificial
  probe
  misc_feature (1)..(25): SEQ ID NO: 7764; BIOD5_at; Start 159; Stop 183
tggcgttacagcgcaacagcagcct

SEQ ID NO: 9375 - DNA, 25 bp, Artificial
  probe
  misc_feature (1)..(25): SEQ ID NO: 7764; BIOD5_at; Start 170; Stop 194
cgcaacagcagcctgcagctggatt

SEQ ID NO: 9376 - DNA, 25 bp, Artificial
  probe
  misc_feature (1)..(25): SEQ ID NO: 7764; BIOD5_at; Start 153; Stop 177
acgcgctggcgttacagcgcaacag

SEQ ID NO: 9377 - DNA, 25 bp, Artificial
  probe
  misc_feature (1)..(25): SEQ ID NO: 7764; BIOD5_at; Start 180; Stop 204
gcctgcagctggattacgcaacagt

SEQ ID NO: 9378 - DNA, 25 bp, Artificial
  probe
  misc_feature (1)..(25): SEQ ID NO: 7764; BIOD5_at; Start 248; Stop 272
agcgcgcaagagggcagaccgatag

SEQ ID NO: 9379 - DNA, 25 bp, Artificial
  probe
  misc_feature (1)..(25): SEQ ID NO: 7764; BIOD5_at; Start 47; Stop 71
agttgtgcacttttacaagccgcaa

SEQ ID NO: 9380 - DNA, 25 bp, Artificial
  probe
  misc_feature (1)..(25): SEQ ID NO: 7764; BIOD5_at; Start 42; Stop 66
tcgccagttgtgcacttttacaagc

SEQ ID NO: 9381 - DNA, 25 bp, Artificial
  probe
  misc_feature (1)..(25): SEQ ID NO: 7764; BIOD5_at; Start 233; Stop 257
tcgccgcacatcatcagcgcgcaag

SEQ ID NO: 9382 - DNA, 25 bp, Artificial
  probe
  misc_feature (1)..(25): SEQ ID NO: 7764; BIOD5_at; Start 58; Stop 82
tttacaagccgcaaaggcagcaggc

SEQ ID NO: 9383 - DNA, 25 bp, Artificial
  probe
  misc_feature (1)..(25): SEQ ID NO: 7764; BIOD5_at; Start 174; Stop 198
acagcagcctgcagctggattacgc

SEQ ID NO: 9384 - DNA, 25 bp, Artificial
  probe
  misc_feature (1)..(25): SEQ ID NO: 7764; BIOD5_at; Start 238; Stop 262
gcacatcatcagcgcgcaagagggc

SEQ ID NO: 9385 - DNA, 25 bp, Artificial
  probe
  misc_feature (1)..(25): SEQ ID NO: 7764; BIOD5_at; Start 247; Stop 271
cagcgcgcaagagggcagaccgata

SEQ ID NO: 9386 - DNA, 25 bp, Artificial
  probe
  misc_feature (1)..(25): SEQ ID NO: 7764; BIOD5_at; Start 143; Stop 167
cgcaatagcgacgcgctggcgttac

SEQ ID NO: 9387 - DNA, 25 bp, Artificial
  probe
  misc_feature (1)..(25): SEQ ID NO: 7764; BIOD5_at; Start 48; Stop 72
gttgtgcacttttacaagccgcaaa

SEQ ID NO: 9388 - DNA, 25 bp, Artificial
  probe
  misc_feature (1)..(25): SEQ ID NO: 7764; BIOD5_at; Start 239; Stop 263
cacatcatcagcgcgcaagagggca

SEQ ID NO: 9389 - DNA, 25 bp, Artificial
  probe
  misc_feature (1)..(25): SEQ ID NO: 7764; BIOD5_at; Start 183; Stop 207
tgcagctggattacgcaacagtaaa

SEQ ID NO: 9390 - DNA, 25 bp, Artificial
  probe
  misc_feature (1)..(25): SEQ ID NO: 7764; BIOD5_at; Start 43; Stop 67
cgccagttgtgcacttttacaagcc

SEQ ID NO: 9391 - DNA, 25 bp, Artificial
  probe
  misc_feature (1)..(25): SEQ ID NO: 7764; BIOD5_at; Start 178; Stop 202
cagcctgcagctggattacgcaaca

SEQ ID NO: 9392 - DNA, 25 bp, Artificial
  probe
  misc_feature (1)..(25): SEQ ID NO: 7764; BIOD5_at; Start 104; Stop 128
ccggtcgcctctggcagcgaaaaga

SEQ ID NO: 9393 - DNA, 25 bp, Artificial
  probe
  misc_feature (1)..(25): SEQ ID NO: 7764; BIOD5_at; Start 186; Stop 210
agctggattacgcaacagtaaatcc

SEQ ID NO: 9394 - DNA, 25 bp, Artificial
  probe
  misc_feature (1)..(25): SEQ ID NO: 7764; BIOD5_at; Start 165; Stop 189
tacagcgcaacagcagcctgcagct

SEQ ID NO: 9395 - DNA, 25 bp, Artificial
  probe
  misc_feature (1)..(25): SEQ ID NO: 7764; BIOD5_at; Start 31; Stop 55
ggggaaaactgtcgccagttgtgca

SEQ ID NO: 9396 - DNA, 25 bp, Artificial
  probe
  misc_feature (1)..(25): SEQ ID NO: 7764; BIOD5_at; Start 55; Stop 79
acttttacaagccgcaaaggcagca

SEQ ID NO: 9397 - DNA, 25 bp, Artificial
  probe
  misc_feature (1)..(25): SEQ ID NO: 7764; BIOD5_at; Start 67; Stop 91
cgcaaaggcagcaggctaccggacg

SEQ ID NO: 9398 - DNA, 25 bp, Artificial
  probe
  misc_feature (1)..(25): SEQ ID NO: 7764; BIOD5_at; Start 69; Stop 93
caaaggcagcaggctaccggacggc

SEQ ID NO: 9399 - DNA, 25 bp, Artificial
  probe
  misc_feature (1)..(25): SEQ ID NO: 7764; BIOD5_at; Start 241; Stop 265
catcatcagcgcgcaagagggcaga

SEQ ID NO: 9400 - DNA, 25 bp, Artificial
  probe
  misc_feature (1)..(25): SEQ ID NO: 7764; BIOD5_at; Start 184; Stop 208
gcagctggattacgcaacagtaaat

SEQ ID NO: 9401 - DNA, 25 bp, Artificial
  probe
  misc_feature (1)..(25): SEQ ID NO: 7764; BIOD5_at; Start 64; Stop 88
agccgcaaaggcagcaggctaccgg

SEQ ID NO: 9402 - DNA, 25 bp, Artificial
  probe
  misc_feature (1)..(25): SEQ ID NO: 7764; BIOD5_at; Start 243; Stop 267
tcatcagcgcgcaagagggcagacc

SEQ ID NO: 9403 - DNA, 25 bp, Artificial
  probe
  misc_feature (1)..(25): SEQ ID NO: 7764; BIOD5_at; Start 147; Stop 171
atagcgacgcgctggcgttacagcg

SEQ ID NO: 9404 - DNA, 25 bp, Artificial
  probe
  misc_feature (1)..(25): SEQ ID NO: 7764; BIOD5_at; Start 163; Stop 187
gttacagcgcaacagcagcctgcag

SEQ ID NO: 9405 - DNA, 25 bp, Artificial
  probe
  misc_feature (1)..(25): SEQ ID NO: 7764; BIOD5_at; Start 177; Stop 201
gcagcctgcagctggattacgcaac

SEQ ID NO: 9406 - DNA, 25 bp, Artificial
  probe
  misc_feature (1)..(25): SEQ ID NO: 7764; BIOD5_at; Start 68; Stop 92
gcaaaggcagcaggctaccggacgg

SEQ ID NO: 9407 - DNA, 25 bp, Artificial
  probe
  misc_feature (1)..(25): SEQ ID NO: 7764; BIOD5_at; Start 246; Stop 270
tcagcgcgcaagagggcagaccgat

SEQ ID NO: 9408 - DNA, 25 bp, Artificial
  probe
  misc_feature (1)..(25): SEQ ID NO: 7764; BIOD5_at; Start 56; Stop 80
cttttacaagccgcaaaggcagcag

SEQ ID NO: 9409 - DNA, 25 bp, Artificial
  probe
  misc_feature (1)..(25): SEQ ID NO: 7764; BIOD5_at; Start 249; Stop 273
gcgcgcaagagggcagaccgataga

SEQ ID NO: 9410 - DNA, 25 bp, Artificial
  probe
  misc_feature (1)..(25): SEQ ID NO: 7764; BIOD5_at; Start 71; Stop 95
aaggcagcaggctaccggacggcag

SEQ ID NO: 9411 - DNA, 25 bp, Artificial
  probe
  misc_feature (1)..(25): SEQ ID NO: 7764; BIOD5_at; Start 62; Stop 86
caagccgcaaaggcagcaggctacc

SEQ ID NO: 9412 - DNA, 25 bp, Artificial
  probe
  misc_feature (1)..(25): SEQ ID NO: 7764; BIOD5_at; Start 182; Stop 206
ctgcagctggattacgcaacagtaa

SEQ ID NO: 9413 - DNA, 25 bp, Artificial
  probe
  misc_feature (1)..(25): SEQ ID NO: 7764; BIOD5_at; Start 59; Stop 83
ttacaagccgcaaaggcagcaggct

SEQ ID NO: 9414 - DNA, 25 bp, Artificial
  probe
  misc_feature (1)..(25): SEQ ID NO: 7764; BIOD5_at; Start 60; Stop 84
tacaagccgcaaaggcagcaggcta

SEQ ID NO: 9415 - DNA, 25 bp, Artificial
  probe
  misc_feature (1)..(25): SEQ ID NO: 7764; BIOD5_at; Start 149; Stop 173
agcgacgcgctggcgttacagcgca

SEQ ID NO: 9416 - DNA, 25 bp, Artificial
  probe
  misc_feature (1)..(25): SEQ ID NO: 7765; CRE3_at; Start 321; Stop 345
cgcgcgagatatggcccgcgctgga

SEQ ID NO: 9417 - DNA, 25 bp, Artificial
  probe
  misc_feature (1)..(25): SEQ ID NO: 7765; CRE3_at; Start 299; Stop 323
gacacagtgcccgtgtcggagccgc

SEQ ID NO: 9418 - DNA, 25 bp, Artificial
  probe
  misc_feature (1)..(25): SEQ ID NO: 7765; CRE3_at; Start 106; Stop 130
tggatttccgtctctggtgtagctg

SEQ ID NO: 9419 - DNA, 25 bp, Artificial
  probe
  misc_feature (1)..(25): SEQ ID NO: 7765; CRE3_at; Start 435; Stop 459
ggcaatggtgcgcctgctggaagat

SEQ ID NO: 9420 - DNA, 25 bp, Artificial
  probe
  misc_feature (1)..(25): SEQ ID NO: 7765; CRE3_at; Start 97; Stop 121
gtcgagcgatggatttccgtctctg

SEQ ID NO: 9421 - DNA, 25 bp, Artificial
  probe
  misc_feature (1)..(25): SEQ ID NO: 7765; CRE3_at; Start 234; Stop 258
agcaactcatcgattgatttacggc

SEQ ID NO: 9422 - DNA, 25 bp, Artificial
  probe
  misc_feature (1)..(25): SEQ ID NO: 7765; CRE3_at; Start 297; Stop 321
tggacacagtgcccgtgtcggagcc

SEQ ID NO: 9423 - DNA, 25 bp, Artificial
  probe
  misc_feature (1)..(25): SEQ ID NO: 7765; CRE3_at; Start 105; Stop 129
atggatttccgtctctggtgtagct

SEQ ID NO: 9424 - DNA, 25 bp, Artificial
  probe
  misc_feature (1)..(25): SEQ ID NO: 7765; CRE3_at; Start 269; Stop 293
actctggtcagagatacctggcctg

SEQ ID NO: 9425 - DNA, 25 bp, Artificial
  probe
  misc_feature (1)..(25): SEQ ID NO: 7765; CRE3_at; Start 251; Stop 275
tttacggcgctaaggatgactctgg

SEQ ID NO: 9426 - DNA, 25 bp, Artificial
  probe
  misc_feature (1)..(25): SEQ ID NO: 7765; CRE3_at; Start 369; Stop 393
agctggtggctggaccaatgtaaat

SEQ ID NO: 9427 - DNA, 25 bp, Artificial
  probe
  misc_feature (1)..(25): SEQ ID NO: 7765; CRE3_at; Start 245; Stop 269
gattgatttacggcgctaaggatga

SEQ ID NO: 9428 - DNA, 25 bp, Artificial
  probe
  misc_feature (1)..(25): SEQ ID NO: 7765; CRE3_at; Start 253; Stop 277
tacggcgctaaggatgactctggtc

SEQ ID NO: 9429 - DNA, 25 bp, Artificial
  probe
  misc_feature (1)..(25): SEQ ID NO: 7765; CRE3_at; Start 404; Stop 428
actatatccgtaacctggatagtga

SEQ ID NO: 9430 - DNA, 25 bp, Artificial
  probe
  misc_feature (1)..(25): SEQ ID NO: 7765; CRE3_at; Start 327; Stop 351
agatatggcccgcgctggagtttca

SEQ ID NO: 9431 - DNA, 25 bp, Artificial
  probe
  misc_feature (1)..(25): SEQ ID NO: 7765; CRE3_at; Start 399; Stop 423
catgaactatatccgtaacctggat

SEQ ID NO: 9432 - DNA, 25 bp, Artificial
  probe
  misc_feature (1)..(25): SEQ ID NO: 7765; CRE3_at; Start 261; Stop 285
taaggatgactctggtcagagatac

SEQ ID NO: 9433 - DNA, 25 bp, Artificial
  probe
  misc_feature (1)..(25): SEQ ID NO: 7765; CRE3_at; Start 111; Stop 135
ttccgtctctggtgtagctgatgat

SEQ ID NO: 9434 - DNA, 25 bp, Artificial
  probe
  misc_feature (1)..(25): SEQ ID NO: 7765; CRE3_at; Start 359; Stop 383
agatcatgcaagctggtggctggac

SEQ ID NO: 9435 - DNA, 25 bp, Artificial
  probe
  misc_feature (1)..(25): SEQ ID NO: 7765; CRE3_at; Start 44; Stop 68
tggttagcaccgcaggtgtagagaa

SEQ ID NO: 9436 - DNA, 25 bp, Artificial
  probe
  misc_feature (1)..(25): SEQ ID NO: 7765; CRE3_at; Start 239; Stop 263
ctcatcgattgatttacggcgctaa

SEQ ID NO: 9437 - DNA, 25 bp, Artificial
  probe
  misc_feature (1)..(25): SEQ ID NO: 7765; CRE3_at; Start 99; Stop 123
cgagcgatggatttccgtctctggt
